United States Patent Application Publication US 2005/0255487 A1 - sequence listing, part 92

SEQ ID NO: 2530355 - RNA, 19 nt, Homo sapiens
  misc_RNA (1)...(19): siRNA sense strand
gugaaaggcaacaugggca

SEQ ID NO: 2530356 - RNA, 19 nt, Homo sapiens
  misc_RNA (1)...(19): siRNA sense strand
guagcaagcuggaagaccu

SEQ ID NO: 2530357 - RNA, 19 nt, Homo sapiens
  misc_RNA (1)...(19): siRNA sense strand
agaagaaagagcacagaaa

SEQ ID NO: 2530358 - RNA, 19 nt, Homo sapiens
  misc_RNA (1)...(19): siRNA sense strand
cuacaaauucagagcaaaa

SEQ ID NO: 2530359 - RNA, 19 nt, Homo sapiens
  misc_RNA (1)...(19): siRNA sense strand
acgcaaaggaagugauuca

SEQ ID NO: 2530360 - RNA, 19 nt, Homo sapiens
  misc_RNA (1)...(19): siRNA sense strand
cggauaaagaguuguaaaa

SEQ ID NO: 2530361 - RNA, 19 nt, Homo sapiens
  misc_RNA (1)...(19): siRNA sense strand
uggagagauuaaugugaaa

SEQ ID NO: 2530362 - RNA, 19 nt, Homo sapiens
  misc_RNA (1)...(19): siRNA sense strand
cagagaagcucauagccaa

SEQ ID NO: 2530363 - RNA, 19 nt, Homo sapiens
  misc_RNA (1)...(19): siRNA sense strand
uugccaaaguaaaggaaca

SEQ ID NO: 2530364 - RNA, 19 nt, Homo sapiens
  misc_RNA (1)...(19): siRNA sense strand
gaucaaagggcaacagcga

SEQ ID NO: 2530365 - RNA, 19 nt, Homo sapiens
  misc_RNA (1)...(19): siRNA sense strand
uggaaugucuacuggaaca

SEQ ID NO: 2530366 - RNA, 19 nt, Homo sapiens
  misc_RNA (1)...(19): siRNA sense strand
agaacaguggagagauuaa

SEQ ID NO: 2530367 - RNA, 19 nt, Homo sapiens
  misc_RNA (1)...(19): siRNA sense strand
gguaaaguguugagagagg

SEQ ID NO: 2530368 - RNA, 19 nt, Homo sapiens
  misc_RNA (1)...(19): siRNA sense strand
agagaagcucauagccaaa

SEQ ID NO: 2530369 - RNA, 19 nt, Homo sapiens
  misc_RNA (1)...(19): siRNA sense strand
aagaaagagcacagaaaau

SEQ ID NO: 2530370 - RNA, 19 nt, Homo sapiens
  misc_RNA (1)...(19): siRNA sense strand
gcagaguggaagaugguga

SEQ ID NO: 2530371 - RNA, 19 nt, Homo sapiens
  misc_RNA (1)...(19): siRNA sense strand
gggaaguaauuauagacca

SEQ ID NO: 2530372 - RNA, 19 nt, Homo sapiens
  misc_RNA (1)...(19): siRNA sense strand
aggaacaguaagaaagaca

SEQ ID NO: 2530373 - RNA, 19 nt, Homo sapiens
  misc_RNA (1)...(19): siRNA sense strand
cuugaugauucgaguccaa

SEQ ID NO: 2530374 - RNA, 19 nt, Homo sapiens
  misc_RNA (1)...(19): siRNA sense strand
cagaagaauccucuagaca

SEQ ID NO: 2530375 - RNA, 19 nt, Homo sapiens
  misc_RNA (1)...(19): siRNA sense strand
ugaauuacuuagaagcaga

SEQ ID NO: 2530376 - RNA, 19 nt, Homo sapiens
  misc_RNA (1)...(19): siRNA sense strand
uuggaagauuacagccaua

SEQ ID NO: 2530377 - RNA, 19 nt, Homo sapiens
  misc_RNA (1)...(19): siRNA sense strand
ucuacagaguaaggagaaa

SEQ ID NO: 2530378 - RNA, 19 nt, Homo sapiens
  misc_RNA (1)...(19): siRNA sense strand
ucggauaaagaguuguaaa

SEQ ID NO: 2530379 - RNA, 19 nt, Homo sapiens
  misc_RNA (1)...(19): siRNA sense strand
ggaacaguaagaaagacaa

SEQ ID NO: 2530380 - RNA, 19 nt, Homo sapiens
  misc_RNA (1)...(19): siRNA sense strand
uccaaaagauguugccaaa

SEQ ID NO: 2530381 - RNA, 19 nt, Homo sapiens
  misc_RNA (1)...(19): siRNA sense strand
ccuuguggccauuggaaga

SEQ ID NO: 2530382 - RNA, 19 nt, Homo sapiens
  misc_RNA (1)...(19): siRNA sense strand
uccuacaaauucagagcaa

SEQ ID NO: 2530383 - RNA, 19 nt, Homo sapiens
  misc_RNA (1)...(19): siRNA sense strand
caaugaucccucagugcaa

SEQ ID NO: 2530384 - RNA, 19 nt, Homo sapiens
  misc_RNA (1)...(19): siRNA sense strand
uggaugugaaagaggaaaa

SEQ ID NO: 2530385 - RNA, 19 nt, Homo sapiens
  misc_RNA (1)...(19): siRNA sense strand
gagaggagaaccagugcau

SEQ ID NO: 2530386 - RNA, 19 nt, Homo sapiens
  misc_RNA (1)...(19): siRNA sense strand
aggaagugauucagaccca

SEQ ID NO: 2530387 - RNA, 19 nt, Homo sapiens
  misc_RNA (1)...(19): siRNA sense strand
acauagugagccuggagaa

SEQ ID NO: 2530388 - RNA, 19 nt, Homo sapiens
  misc_RNA (1)...(19): siRNA sense strand
ccacgaaaacgcaaaggaa

SEQ ID NO: 2530389 - RNA, 19 nt, Homo sapiens
  misc_RNA (1)...(19): siRNA sense strand
ccuacaaauucagagcaaa

SEQ ID NO: 2530390 - RNA, 19 nt, Homo sapiens
  misc_RNA (1)...(19): siRNA sense strand
aaagcggaggagagauaaa

SEQ ID NO: 2530391 - RNA, 19 nt, Homo sapiens
  misc_RNA (1)...(19): siRNA sense strand
aguaagaaagacaacagua

SEQ ID NO: 2530392 - RNA, 19 nt, Homo sapiens
  misc_RNA (1)...(19): siRNA sense strand
acucaaagaagaaagagca

SEQ ID NO: 2530393 - RNA, 19 nt, Homo sapiens
  misc_RNA (1)...(19): siRNA sense strand
uguuggaauggaagaagaa

SEQ ID NO: 2530394 - RNA, 19 nt, Homo sapiens
  misc_RNA (1)...(19): siRNA sense strand
agccaaugguuuaguuuca

SEQ ID NO: 2530395 - RNA, 19 nt, Homo sapiens
  misc_RNA (1)...(19): siRNA sense strand
cuauguagaucaaagggca

SEQ ID NO: 2530396 - RNA, 19 nt, Homo sapiens
  misc_RNA (1)...(19): siRNA sense strand
ggauaaugagcucagacau

SEQ ID NO: 2530397 - RNA, 19 nt, Homo sapiens
  misc_RNA (1)...(19): siRNA sense strand
ugauauuucaccaagagaa

SEQ ID NO: 2530398 - RNA, 19 nt, Homo sapiens
  misc_RNA (1)...(19): siRNA sense strand
acacuuuaguuuugggaca

SEQ ID NO: 2530399 - RNA, 19 nt, Homo sapiens
  misc_RNA (1)...(19): siRNA sense strand
ccaacucaaagaagaaaga

SEQ ID NO: 2530400 - RNA, 19 nt, Homo sapiens
  misc_RNA (1)...(19): siRNA sense strand
acgaaaacgcaaaggaagu

SEQ ID NO: 2530401 - RNA, 19 nt, Homo sapiens
  misc_RNA (1)...(19): siRNA sense strand
cagaguggaagauggugaa

SEQ ID NO: 2530402 - RNA, 19 nt, Homo sapiens
  misc_RNA (1)...(19): siRNA sense strand
aaguguugagagaggagaa

SEQ ID NO: 2530403 - RNA, 19 nt, Homo sapiens
  misc_RNA (1)...(19): siRNA sense strand
gguuggaugugaaagagga

SEQ ID NO: 2530404 - RNA, 19 nt, Homo sapiens
  misc_RNA (1)...(19): siRNA sense strand
ugaaaauguuggaggaaaa

SEQ ID NO: 2530405 - RNA, 19 nt, Homo sapiens
  misc_RNA (1)...(19): siRNA sense strand
aaacagaagcaaaggaaca

SEQ ID NO: 2530406 - RNA, 19 nt, Homo sapiens
  misc_RNA (1)...(19): siRNA sense strand
ggaugaaacaagugaagau

SEQ ID NO: 2530407 - RNA, 19 nt, Homo sapiens
  misc_RNA (1)...(19): siRNA sense strand
cuuaacgguugcaggguaa

SEQ ID NO: 2530408 - RNA, 19 nt, Homo sapiens
  misc_RNA (1)...(19): siRNA sense strand
aguugaaauuacaggaaga

SEQ ID NO: 2530409 - RNA, 19 nt, Homo sapiens
  misc_RNA (1)...(19): siRNA sense strand
gagaaaucagugaaagcaa

SEQ ID NO: 2530410 - RNA, 19 nt, Homo sapiens
  misc_RNA (1)...(19): siRNA sense strand
cugcguacuuacacagaaa

SEQ ID NO: 2530411 - RNA, 19 nt, Homo sapiens
  misc_RNA (1)...(19): siRNA sense strand
gcaagauguuugaggugga

SEQ ID NO: 2530412 - RNA, 19 nt, Homo sapiens
  misc_RNA (1)...(19): siRNA sense strand
agauacaguuuauaggcaa

SEQ ID NO: 2530413 - RNA, 19 nt, Homo sapiens
  misc_RNA (1)...(19): siRNA sense strand
acagaaacuaauugagaca

SEQ ID NO: 2530414 - RNA, 19 nt, Homo sapiens
  misc_RNA (1)...(19): siRNA sense strand
aaagaguggauacgagaaa

SEQ ID NO: 2530415 - RNA, 19 nt, Homo sapiens
  misc_RNA (1)...(19): siRNA sense strand
caggaaaugcagcaacaaa

SEQ ID NO: 2530416 - RNA, 19 nt, Homo sapiens
  misc_RNA (1)...(19): siRNA sense strand
acaacuugauacagagaca

SEQ ID NO: 2530417 - RNA, 19 nt, Homo sapiens
  misc_RNA (1)...(19): siRNA sense strand
uuggaagcuuggagaagaa

SEQ ID NO: 2530418 - RNA, 19 nt, Homo sapiens
  misc_RNA (1)...(19): siRNA sense strand
accuagaucuucaggaaau

SEQ ID NO: 2530419 - RNA, 19 nt, Homo sapiens
  misc_RNA (1)...(19): siRNA sense strand
aaacaagugaagaugcuaa

SEQ ID NO: 2530420 - RNA, 19 nt, Homo sapiens
  misc_RNA (1)...(19): siRNA sense strand
gauacagagacaaguacaa

SEQ ID NO: 2530421 - RNA, 19 nt, Homo sapiens
  misc_RNA (1)...(19): siRNA sense strand
uugaagaggaagaggaacu

SEQ ID NO: 2530422 - RNA, 19 nt, Homo sapiens
  misc_RNA (1)...(19): siRNA sense strand
gcuuuauccaaaugcaaua

SEQ ID NO: 2530423 - RNA, 19 nt, Homo sapiens
  misc_RNA (1)...(19): siRNA sense strand
aguacaacucaaucagaaa

SEQ ID NO: 2530424 - RNA, 19 nt, Homo sapiens
  misc_RNA (1)...(19): siRNA sense strand
aguuuauaggcaagcaaua

SEQ ID NO: 2530425 - RNA, 19 nt, Homo sapiens
  misc_RNA (1)...(19): siRNA sense strand
ccaaaacagaagaggauga

SEQ ID NO: 2530426 - RNA, 19 nt, Homo sapiens
  misc_RNA (1)...(19): siRNA sense strand
auacgagaaaucagugaaa

SEQ ID NO: 2530427 - RNA, 19 nt, Homo sapiens
  misc_RNA (1)...(19): siRNA sense strand
uguuugagguggauaugaa

SEQ ID NO: 2530428 - RNA, 19 nt, Homo sapiens
  misc_RNA (1)...(19): siRNA sense strand
uggucaugguugaggaguu

SEQ ID NO: 2530429 - RNA, 19 nt, Homo sapiens
  misc_RNA (1)...(19): siRNA sense strand
cuucaacacgucugguaaa

SEQ ID NO: 2530430 - RNA, 19 nt, Homo sapiens
  misc_RNA (1)...(19): siRNA sense strand
auucagucuuucacagaua

SEQ ID NO: 2530431 - RNA, 19 nt, Homo sapiens
  misc_RNA (1)...(19): siRNA sense strand
ugaaauuacaggaagaagu

SEQ ID NO: 2530432 - RNA, 19 nt, Homo sapiens
  misc_RNA (1)...(19): siRNA sense strand
ugggauagagauugauauu

SEQ ID NO: 2530433 - RNA, 19 nt, Homo sapiens
  misc_RNA (1)...(19): siRNA sense strand
ucuaaaugggaauggccaa

SEQ ID NO: 2530434 - RNA, 19 nt, Homo sapiens
  misc_RNA (1)...(19): siRNA sense strand
cagcagcaucugugaccaa

SEQ ID NO: 2530435 - RNA, 19 nt, Homo sapiens
  misc_RNA (1)...(19): siRNA sense strand
aggaaaugcagcaacaaaa

SEQ ID NO: 2530436 - RNA, 19 nt, Homo sapiens
  misc_RNA (1)...(19): siRNA sense strand
aaacagaagaggaugaaac

SEQ ID NO: 2530437 - RNA, 19 nt, Homo sapiens
  misc_RNA (1)...(19): siRNA sense strand
ggugguguuuccugggcua

SEQ ID NO: 2530438 - RNA, 19 nt, Homo sapiens
  misc_RNA (1)...(19): siRNA sense strand
ggcaagcaauaaacagcaa

SEQ ID NO: 2530439 - RNA, 19 nt, Homo sapiens
  misc_RNA (1)...(19): siRNA sense strand
caagaaaaccaaaacagaa

SEQ ID NO: 2530440 - RNA, 19 nt, Homo sapiens
  misc_RNA (1)...(19): siRNA sense strand
cagaagaggaugaaacaag

SEQ ID NO: 2530441 - RNA, 19 nt, Homo sapiens
  misc_RNA (1)...(19): siRNA sense strand
cuaucaaacuaugggccaa

SEQ ID NO: 2530442 - RNA, 19 nt, Homo sapiens
  misc_RNA (1)...(19): siRNA sense strand
gaugugggugauuggguua

SEQ ID NO: 2530443 - RNA, 19 nt, Homo sapiens
  misc_RNA (1)...(19): siRNA sense strand
gagugaaagcauuccucaa

SEQ ID NO: 2530444 - RNA, 19 nt, Homo sapiens
  misc_RNA (1)...(19): siRNA sense strand
gggccaaacgccacaacau

SEQ ID NO: 2530445 - RNA, 19 nt, Homo sapiens
  misc_RNA (1)...(19): siRNA sense strand
gguugaggaguuuaaacaa

SEQ ID NO: 2530446 - RNA, 19 nt, Homo sapiens
  misc_RNA (1)...(19): siRNA sense strand
cuaaaugggaauggccaaa

SEQ ID NO: 2530447 - RNA, 19 nt, Homo sapiens
  misc_RNA (1)...(19): siRNA sense strand
ccaccaaagccuacggucu

SEQ ID NO: 2530448 - RNA, 19 nt, Homo sapiens
  misc_RNA (1)...(19): siRNA sense strand
aagcaaaggaacaacuuga

SEQ ID NO: 2530449 - RNA, 19 nt, Homo sapiens
  misc_RNA (1)...(19): siRNA sense strand
agauuuaagagcuguugaa

SEQ ID NO: 2530450 - RNA, 19 nt, Homo sapiens
  misc_RNA (1)...(19): siRNA sense strand
auuuaagagcuguugaaga

SEQ ID NO: 2530451 - RNA, 19 nt, Homo sapiens
  misc_RNA (1)...(19): siRNA sense strand
agauguuugagguggauau

SEQ ID NO: 2530452 - RNA, 19 nt, Homo sapiens
  misc_RNA (1)...(19): siRNA sense strand
uuugaguggacaugauaaa

SEQ ID NO: 2530453 - RNA, 19 nt, Homo sapiens
  misc_RNA (1)...(19): siRNA sense strand
gagcuguugaagaggcauu

SEQ ID NO: 2530454 - RNA, 19 nt, Homo sapiens
  misc_RNA (1)...(19): siRNA sense strand
gcaggguaaccgaugaaau

SEQ ID NO: 2530455 - RNA, 19 nt, Homo sapiens
  misc_RNA (1)...(19): siRNA sense strand
agagacaaguacaacucaa

SEQ ID NO: 2530456 - RNA, 19 nt, Homo sapiens
  misc_RNA (1)...(19): siRNA sense strand
uugaaaauguuggaggaaa

SEQ ID NO: 2530457 - RNA, 19 nt, Homo sapiens
  misc_RNA (1)...(19): siRNA sense strand
ucuuaacgguugcagggua

SEQ ID NO: 2530458 - RNA, 19 nt, Homo sapiens
  misc_RNA (1)...(19): siRNA sense strand
auccagugcuauugaaaca

SEQ ID NO: 2530459 - RNA, 19 nt, Homo sapiens
  misc_RNA (1)...(19): siRNA sense strand
ccuacuagugcuacgaaga

SEQ ID NO: 2530460 - RNA, 19 nt, Homo sapiens
  misc_RNA (1)...(19): siRNA sense strand
uuacagauuaggagugcau

SEQ ID NO: 2530461 - RNA, 19 nt, Homo sapiens
  misc_RNA (1)...(19): siRNA sense strand
uugaugggauagagauuga

SEQ ID NO: 2530462 - RNA, 19 nt, Homo sapiens
  misc_RNA (1)...(19): siRNA sense strand
acugggagacugagcggaa

SEQ ID NO: 2530463 - RNA, 19 nt, Homo sapiens
  misc_RNA (1)...(19): siRNA sense strand
ucauggagacagcggaaga

SEQ ID NO: 2530464 - RNA, 19 nt, Homo sapiens
  misc_RNA (1)...(19): siRNA sense strand
ccacugaaauugcuggcau

SEQ ID NO: 2530465 - RNA, 19 nt, Homo sapiens
  misc_RNA (1)...(19): siRNA sense strand
acugggagacugagcggaa

SEQ ID NO: 2530466 - RNA, 19 nt, Homo sapiens
  misc_RNA (1)...(19): siRNA sense strand
cuuaccuuccugagaaaua

SEQ ID NO: 2530467 - RNA, 19 nt, Homo sapiens
  misc_RNA (1)...(19): siRNA sense strand
ucauggagacagcggaaga

SEQ ID NO: 2530468 - RNA, 19 nt, Homo sapiens
  misc_RNA (1)...(19): siRNA sense strand
cagccaagcuucaugguuc

SEQ ID NO: 2530469 - RNA, 19 nt, Homo sapiens
  misc_RNA (1)...(19): siRNA sense strand
cccuuaccuuccugagaaa

SEQ ID NO: 2530470 - RNA, 19 nt, Homo sapiens
  misc_RNA (1)...(19): siRNA sense strand
gcaccaugcucaaggaccu

SEQ ID NO: 2530471 - RNA, 19 nt, Homo sapiens
  misc_RNA (1)...(19): siRNA sense strand
gaaaugugguccaggagca

SEQ ID NO: 2530472 - RNA, 19 nt, Homo sapiens
  misc_RNA (1)...(19): siRNA sense strand
ggacauggaagaacaggga

SEQ ID NO: 2530473 - RNA, 19 nt, Homo sapiens
  misc_RNA (1)...(19): siRNA sense strand
cgggaaaagaccucagaga

SEQ ID NO: 2530474 - RNA, 19 nt, Homo sapiens
  misc_RNA (1)...(19): siRNA sense strand
ugugcuggacacugggaaa

SEQ ID NO: 2530475 - RNA, 19 nt, Homo sapiens
  misc_RNA (1)...(19): siRNA sense strand
cuucuuaacuugcacccua

SEQ ID NO: 2530476 - RNA, 19 nt, Homo sapiens
  misc_RNA (1)...(19): siRNA sense strand
ggcucagacaggacaacaa

SEQ ID NO: 2530477 - RNA, 19 nt, Homo sapiens
  misc_RNA (1)...(19): siRNA sense strand
gggcagagcuuuagccuga

SEQ ID NO: 2530478 - RNA, 19 nt, Homo sapiens
  misc_RNA (1)...(19): siRNA sense strand
ccuggagagaggagagaaa

SEQ ID NO: 2530479 - RNA, 19 nt, Homo sapiens
  misc_RNA (1)...(19): siRNA sense strand
ccuuaugugugcagggaau

SEQ ID NO: 2530480 - RNA, 19 nt, Homo sapiens
  misc_RNA (1)...(19): siRNA sense strand
gugcaaggauuguggacga

SEQ ID NO: 2530481 - RNA, 19 nt, Homo sapiens
  misc_RNA (1)...(19): siRNA sense strand
ccuuauguuugcagggaau

SEQ ID NO: 2530482 - RNA, 19 nt, Homo sapiens
  misc_RNA (1)...(19): siRNA sense strand
gggcagugcuuuagccuga

SEQ ID NO: 2530483 - RNA, 19 nt, Homo sapiens
  misc_RNA (1)...(19): siRNA sense strand
gugcagggagugugggcaa

SEQ ID NO: 2530484 - RNA, 19 nt, Homo sapiens
  misc_RNA (1)...(19): siRNA sense strand
gugcagggagugugggcaa

SEQ ID NO: 2530485 - RNA, 19 nt, Homo sapiens
  misc_RNA (1)...(19): siRNA sense strand
ccuuauauuugcagaaagu

SEQ ID NO: 2530486 - RNA, 19 nt, Homo sapiens
  misc_RNA (1)...(19): siRNA sense strand
cagcacaguccaaggaaga

SEQ ID NO: 2530487 - RNA, 19 nt, Homo sapiens
  misc_RNA (1)...(19): siRNA sense strand
ggauuguggacgaggcuuu

SEQ ID NO: 2530488 - RNA, 19 nt, Homo sapiens
  misc_RNA (1)...(19): siRNA sense strand
ccagaaucgaagccagaaa

SEQ ID NO: 2530489 - RNA, 19 nt, Homo sapiens
  misc_RNA (1)...(19): siRNA sense strand
caucagacacuuaaggaca

SEQ ID NO: 2530490 - RNA, 19 nt, Homo sapiens
  misc_RNA (1)...(19): siRNA sense strand
ccucaugugugcagggagu

SEQ ID NO: 2530491 - RNA, 19 nt, Homo sapiens
  misc_RNA (1)...(19): siRNA sense strand
ggcagaagguuucggcaga

SEQ ID NO: 2530492 - RNA, 19 nt, Homo sapiens
  misc_RNA (1)...(19): siRNA sense strand
ccuuauguaugcacagaau

SEQ ID NO: 2530493 - RNA, 19 nt, Homo sapiens
  misc_RNA (1)...(19): siRNA sense strand
ggaguguggcagaagguuu

SEQ ID NO: 2530494 - RNA, 19 nt, Homo sapiens
  misc_RNA (1)...(19): siRNA sense strand
ucuagaggaaacagacaaa

SEQ ID NO: 2530495 - RNA, 19 nt, Homo sapiens
  misc_RNA (1)...(19): siRNA sense strand
uuuagaagucucaggauuu

SEQ ID NO: 2530496 - RNA, 19 nt, Homo sapiens
  misc_RNA (1)...(19): siRNA sense strand
gcuuuaucaaggagucaaa

SEQ ID NO: 2530497 - RNA, 19 nt, Homo sapiens
  misc_RNA (1)...(19): siRNA sense strand
ggcuuuacguggaagucaa

SEQ ID NO: 2530498 - RNA, 19 nt, Homo sapiens
  misc_RNA (1)...(19): siRNA sense strand
agacacaagaggacacauu

SEQ ID NO: 2530499 - RNA, 19 nt, Homo sapiens
  misc_RNA (1)...(19): siRNA sense strand
gugcagggaaugugggcga

SEQ ID NO: 2530500 - RNA, 19 nt, Homo sapiens
  misc_RNA (1)...(19): siRNA sense strand
caggaggaguggagguugu

SEQ ID NO: 2530501 - RNA, 19 nt, Homo sapiens
  misc_RNA (1)...(19): siRNA sense strand
gggauguggcuguguacuu

SEQ ID NO: 2530502 - RNA, 19 nt, Homo sapiens
  misc_RNA (1)...(19): siRNA sense strand
aguccaaccuuaucagaca

SEQ ID NO: 2530503 - RNA, 19 nt, Homo sapiens
  misc_RNA (1)...(19): siRNA sense strand
gugcagggaguguggcaga

SEQ ID NO: 2530504 - RNA, 19 nt, Homo sapiens
  misc_RNA (1)...(19): siRNA sense strand
aggaaacagacaaaguauu

SEQ ID NO: 2530505 - RNA, 19 nt, Homo sapiens
  misc_RNA (1)...(19): siRNA sense strand
auucaggagagaagccuua

SEQ ID NO: 2530506 - RNA, 19 nt, Homo sapiens
  misc_RNA (1)...(19): siRNA sense strand
auucaggagagaagccuua

SEQ ID NO: 2530507 - RNA, 19 nt, Homo sapiens
  misc_RNA (1)...(19): siRNA sense strand
auccagaagaucagaaaca

SEQ ID NO: 2530508 - RNA, 19 nt, Homo sapiens
  misc_RNA (1)...(19): siRNA sense strand
ccuuacauuugcagggagu

SEQ ID NO: 2530509 - RNA, 19 nt, Homo sapiens
  misc_RNA (1)...(19): siRNA sense strand
aaguuuaugggcaggaaau

SEQ ID NO: 2530510 - RNA, 19 nt, Homo sapiens
  misc_RNA (1)...(19): siRNA sense strand
gggaaaacacuauccagaa

SEQ ID NO: 2530511 - RNA, 19 nt, Homo sapiens
  misc_RNA (1)...(19): siRNA sense strand
gggcgaggcuuuacgugga

SEQ ID NO: 2530512 - RNA, 19 nt, Homo sapiens
  misc_RNA (1)...(19): siRNA sense strand
aggaaugugggcagagcuu

SEQ ID NO: 2530513 - RNA, 19 nt, Homo sapiens
  misc_RNA (1)...(19): siRNA sense strand
augcaugguucacagacaa

SEQ ID NO: 2530514 - RNA, 19 nt, Homo sapiens
  misc_RNA (1)...(19): siRNA sense strand
ggcuuuacccggaaaucaa

SEQ ID NO: 2530515 - RNA, 19 nt, Homo sapiens
  misc_RNA (1)...(19): siRNA sense strand
gaggacacauucaggggaa

SEQ ID NO: 2530516 - RNA, 19 nt, Homo sapiens
  misc_RNA (1)...(19): siRNA sense strand
ggacacauucaggggaaaa

SEQ ID NO: 2530517 - RNA, 19 nt, Homo sapiens
  misc_RNA (1)...(19): siRNA sense strand
ggagaaaccuuaugugugc

SEQ ID NO: 2530518 - RNA, 19 nt, Homo sapiens
  misc_RNA (1)...(19): siRNA sense strand
agucaaaccucauuaccca

SEQ ID NO: 2530519 - RNA, 19 nt, Homo sapiens
  misc_RNA (1)...(19): siRNA sense strand
uggagagaggagagaaaau

SEQ ID NO: 2530520 - RNA, 19 nt, Homo sapiens
  misc_RNA (1)...(19): siRNA sense strand
gaucuagaggaaacagaca

SEQ ID NO: 2530521 - RNA, 19 nt, Homo sapiens
  misc_RNA (1)...(19): siRNA sense strand
auucacaccuggucagaca

SEQ ID NO: 2530522 - RNA, 19 nt, Homo sapiens
  misc_RNA (1)...(19): siRNA sense strand
cggcagaagccuaaccugu

SEQ ID NO: 2530523 - RNA, 19 nt, Homo sapiens
  misc_RNA (1)...(19): siRNA sense strand
aaucaaaccucaaaacaca

SEQ ID NO: 2530524 - RNA, 19 nt, Homo sapiens
  misc_RNA (1)...(19): siRNA sense strand
cauuagaagcagccagaau

SEQ ID NO: 2530525 - RNA, 19 nt, Homo sapiens
  misc_RNA (1)...(19): siRNA sense strand
gcugcagaauacagaggaa

SEQ ID NO: 2530526 - RNA, 19 nt, Homo sapiens
  misc_RNA (1)...(19): siRNA sense strand
caucaguguaaguggccaa

SEQ ID NO: 2530527 - RNA, 19 nt, Homo sapiens
  misc_RNA (1)...(19): siRNA sense strand
gcuuugacacagagacaga

SEQ ID NO: 2530528 - RNA, 19 nt, Homo sapiens
  misc_RNA (1)...(19): siRNA sense strand
cuaccaugggacugugaaa

SEQ ID NO: 2530529 - RNA, 19 nt, Homo sapiens
  misc_RNA (1)...(19): siRNA sense strand
acauuuaccugauugggaa

SEQ ID NO: 2530530 - RNA, 19 nt, Homo sapiens
  misc_RNA (1)...(19): siRNA sense strand
ccugauugggaaagaguca

SEQ ID NO: 2530531 - RNA, 19 nt, Homo sapiens
  misc_RNA (1)...(19): siRNA sense strand
gugcuuugacacagagaca

SEQ ID NO: 2530532 - RNA, 19 nt, Homo sapiens
  misc_RNA (1)...(19): siRNA sense strand
gcacagugauccugagcuc

SEQ ID NO: 2530533 - RNA, 19 nt, Homo sapiens
  misc_RNA (1)...(19): siRNA sense strand
ugcagaauacagaggaauu

SEQ ID NO: 2530534 - RNA, 19 nt, Homo sapiens
  misc_RNA (1)...(19): siRNA sense strand
gugccaaccucaacgggau

SEQ ID NO: 2530535 - RNA, 19 nt, Homo sapiens
  misc_RNA (1)...(19): siRNA sense strand
aggaggagcucuuugcuga

SEQ ID NO: 2530536 - RNA, 19 nt, Homo sapiens
  misc_RNA (1)...(19): siRNA sense strand
ggaaacugccuucagguga

SEQ ID NO: 2530537 - RNA, 19 nt, Homo sapiens
  misc_RNA (1)...(19): siRNA sense strand
aggagaaugaucuggacuu

SEQ ID NO: 2530538 - RNA, 19 nt, Homo sapiens
  misc_RNA (1)...(19): siRNA sense strand
ggcucaaggcaucaugaaa

SEQ ID NO: 2530539 - RNA, 19 nt, Homo sapiens
  misc_RNA (1)...(19): siRNA sense strand
gagcugaggaguugcagga

SEQ ID NO: 2530540 - RNA, 19 nt, Homo sapiens
  misc_RNA (1)...(19): siRNA sense strand
cauuuaccugauugggaaa

SEQ ID NO: 2530541 - RNA, 19 nt, Homo sapiens
  misc_RNA (1)...(19): siRNA sense strand
gugcagaagaugacuccau

SEQ ID NO: 2530542 - RNA, 19 nt, Homo sapiens
  misc_RNA (1)...(19): siRNA sense strand
gcaggaaauuuaugaggug

SEQ ID NO: 2530543 - RNA, 19 nt, Homo sapiens
  misc_RNA (1)...(19): siRNA sense strand
cuuccgggaccgauauaaa

SEQ ID NO: 2530544 - RNA, 19 nt, Homo sapiens
  misc_RNA (1)...(19): siRNA sense strand
gcugcagaauacagaggaa

SEQ ID NO: 2530545 - RNA, 19 nt, Homo sapiens
  misc_RNA (1)...(19): siRNA sense strand
caucaguguaaguggccaa

SEQ ID NO: 2530546 - RNA, 19 nt, Homo sapiens
  misc_RNA (1)...(19): siRNA sense strand
gcuuugacacagagacaga

SEQ ID NO: 2530547 - RNA, 19 nt, Homo sapiens
  misc_RNA (1)...(19): siRNA sense strand
cuaccaugggacugugaaa

SEQ ID NO: 2530548 - RNA, 19 nt, Homo sapiens
  misc_RNA (1)...(19): siRNA sense strand
acauuuaccugauugggaa

SEQ ID NO: 2530549 - RNA, 19 nt, Homo sapiens
  misc_RNA (1)...(19): siRNA sense strand
ccugauugggaaagaguca

SEQ ID NO: 2530550 - RNA, 19 nt, Homo sapiens
  misc_RNA (1)...(19): siRNA sense strand
gugcuuugacacagagaca

SEQ ID NO: 2530551 - RNA, 19 nt, Homo sapiens
  misc_RNA (1)...(19): siRNA sense strand
gcacagugauccugagcuc

SEQ ID NO: 2530552 - RNA, 19 nt, Homo sapiens
  misc_RNA (1)...(19): siRNA sense strand
ugcagaauacagaggaauu

SEQ ID NO: 2530553 - RNA, 19 nt, Homo sapiens
  misc_RNA (1)...(19): siRNA sense strand
gugccaaccucaacgggau

SEQ ID NO: 2530554 - RNA, 19 nt, Homo sapiens
  misc_RNA (1)...(19): siRNA sense strand
aggaggagcucuuugcuga

SEQ ID NO: 2530555 - RNA, 19 nt, Homo sapiens
  misc_RNA (1)...(19): siRNA sense strand
ggaaacugccuucagguga

SEQ ID NO: 2530556 - RNA, 19 nt, Homo sapiens
  misc_RNA (1)...(19): siRNA sense strand
aggagaaugaucuggacuu

SEQ ID NO: 2530557 - RNA, 19 nt, Homo sapiens
  misc_RNA (1)...(19): siRNA sense strand
ggcucaaggcaucaugaaa

SEQ ID NO: 2530558 - RNA, 19 nt, Homo sapiens
  misc_RNA (1)...(19): siRNA sense strand
gagcugaggaguugcagga

SEQ ID NO: 2530559 - RNA, 19 nt, Homo sapiens
  misc_RNA (1)...(19): siRNA sense strand
cauuuaccugauugggaaa

SEQ ID NO: 2530560 - RNA, 19 nt, Homo sapiens
  misc_RNA (1)...(19): siRNA sense strand
gugcagaagaugacuccau

SEQ ID NO: 2530561 - RNA, 19 nt, Homo sapiens
  misc_RNA (1)...(19): siRNA sense strand
gcaggaaauuuaugaggug

SEQ ID NO: 2530562 - RNA, 19 nt, Homo sapiens
  misc_RNA (1)...(19): siRNA sense strand
cuuccgggaccgauauaaa

SEQ ID NO: 2530563 - RNA, 19 nt, Homo sapiens
  misc_RNA (1)...(19): siRNA sense strand
aggacaaaguuaaaggaaa

SEQ ID NO: 2530564 - RNA, 19 nt, Homo sapiens
  misc_RNA (1)...(19): siRNA sense strand
guuaaaggaaagagagaau

SEQ ID NO: 2530565 - RNA, 19 nt, Homo sapiens
  misc_RNA (1)...(19): siRNA sense strand
aggcacugauuuagagaaa

SEQ ID NO: 2530566 - RNA, 19 nt, Homo sapiens
  misc_RNA (1)...(19): siRNA sense strand
cgaaaagggcgaaggcaaa

SEQ ID NO: 2530567 - RNA, 19 nt, Homo sapiens
  misc_RNA (1)...(19): siRNA sense strand
aaauaggaauggaggucaa

SEQ ID NO: 2530568 - RNA, 19 nt, Homo sapiens
  misc_RNA (1)...(19): siRNA sense strand
ucagaauagccgagaagaa

SEQ ID NO: 2530569 - RNA, 19 nt, Homo sapiens
  misc_RNA (1)...(19): siRNA sense strand
aggaaaggacaaaguuaaa

SEQ ID NO: 2530570 - RNA, 19 nt, Homo sapiens
  misc_RNA (1)...(19): siRNA sense strand
aggaaaaggcacugauuua

SEQ ID NO: 2530571 - RNA, 19 nt, Homo sapiens
  misc_RNA (1)...(19): siRNA sense strand
agagagaugcagagaaaga

SEQ ID NO: 2530572 - RNA, 19 nt, Homo sapiens
  misc_RNA (1)...(19): siRNA sense strand
aagaaaagaaggagaguuu

SEQ ID NO: 2530573 - RNA, 19 nt, Homo sapiens
  misc_RNA (1)...(19): siRNA sense strand
gugacaaaggaaaggacaa

SEQ ID NO: 2530574 - RNA, 19 nt, Homo sapiens
  misc_RNA (1)...(19): siRNA sense strand
ggaugaagaacuugcaaaa

SEQ ID NO: 2530575 - RNA, 19 nt, Homo sapiens
  misc_RNA (1)...(19): siRNA sense strand
ugacaaaggaaaggacaaa

SEQ ID NO: 2530576 - RNA, 19 nt, Homo sapiens
  misc_RNA (1)...(19): siRNA sense strand
aggucaagguagacaguga

SEQ ID NO: 2530577 - RNA, 19 nt, Homo sapiens
  misc_RNA (1)...(19): siRNA sense strand
agccagaaagagaaggaaa

SEQ ID NO: 2530578 - RNA, 19 nt, Homo sapiens
  misc_RNA (1)...(19): siRNA sense strand
agagagaaucagaaaucaa

SEQ ID NO: 2530579 - RNA, 19 nt, Homo sapiens
  misc_RNA (1)...(19): siRNA sense strand
aguaaagaagagugaguca

SEQ ID NO: 2530580 - RNA, 19 nt, Homo sapiens
  misc_RNA (1)...(19): siRNA sense strand
aguaaagaagagugaguca

SEQ ID NO: 2530581 - RNA, 19 nt, Homo sapiens
  misc_RNA (1)...(19): siRNA sense strand
aaucagaaaucaaugguga

SEQ ID NO: 2530582 - RNA, 19 nt, Homo sapiens
  misc_RNA (1)...(19): siRNA sense strand
aagcaaagugaaaugcaua

SEQ ID NO: 2530583 - RNA, 19 nt, Homo sapiens
  misc_RNA (1)...(19): siRNA sense strand
gccagaaagagaaggaaaa

SEQ ID NO: 2530584 - RNA, 19 nt, Homo sapiens
  misc_RNA (1)...(19): siRNA sense strand
auaaagaaaaggagagaga

SEQ ID NO: 2530585 - RNA, 19 nt, Homo sapiens
  misc_RNA (1)...(19): siRNA sense strand
uagagaagacugaggcaga

SEQ ID NO: 2530586 - RNA, 19 nt, Homo sapiens
  misc_RNA (1)...(19): siRNA sense strand
aggagaguuuugaggauaa

SEQ ID NO: 2530587 - RNA, 19 nt, Homo sapiens
  misc_RNA (1)...(19): siRNA sense strand
aaguuaaaggaaagagaga

SEQ ID NO: 2530588 - RNA, 19 nt, Homo sapiens
  misc_RNA (1)...(19): siRNA sense strand
ucgaaaagggcgaaggcaa

SEQ ID NO: 2530589 - RNA, 19 nt, Homo sapiens
  misc_RNA (1)...(19): siRNA sense strand
cagguaaagaagagggagu

SEQ ID NO: 2530590 - RNA, 19 nt, Homo sapiens
  misc_RNA (1)...(19): siRNA sense strand
ggugaguguaccagaaaca

SEQ ID NO: 2530591 - RNA, 19 nt, Homo sapiens
  misc_RNA (1)...(19): siRNA sense strand
caaaggaacaagaggucca

SEQ ID NO: 2530592 - RNA, 19 nt, Homo sapiens
  misc_RNA (1)...(19): siRNA sense strand
aacaagagguccaagaaaa

SEQ ID NO: 2530593 - RNA, 19 nt, Homo sapiens
  misc_RNA (1)...(19): siRNA sense strand
caaaguuaaaggaaagaga

SEQ ID NO: 2530594 - RNA, 19 nt, Homo sapiens
  misc_RNA (1)...(19): siRNA sense strand
caggaaggaaguacaacaa

SEQ ID NO: 2530595 - RNA, 19 nt, Homo sapiens
  misc_RNA (1)...(19): siRNA sense strand
gcgaaggcaaauacaggaa

SEQ ID NO: 2530596 - RNA, 19 nt, Homo sapiens
  misc_RNA (1)...(19): siRNA sense strand
cagaugugccaaaggaaca

SEQ ID NO: 2530597 - RNA, 19 nt, Homo sapiens
  misc_RNA (1)...(19): siRNA sense strand
caaguaaagaagagugagu

SEQ ID NO: 2530598 - RNA, 19 nt, Homo sapiens
  misc_RNA (1)...(19): siRNA sense strand
caaguaaagaagagugagu

SEQ ID NO: 2530599 - RNA, 19 nt, Homo sapiens
  misc_RNA (1)...(19): siRNA sense strand
augcagagaaagauccaaa

SEQ ID NO: 2530600 - RNA, 19 nt, Homo sapiens
  misc_RNA (1)...(19): siRNA sense strand
caaaaggugacaaaggaaa

SEQ ID NO: 2530601 - RNA, 19 nt, Homo sapiens
  misc_RNA (1)...(19): siRNA sense strand
acaaggaagcacuaaagaa

SEQ ID NO: 2530602 - RNA, 19 nt, Homo sapiens
  misc_RNA (1)...(19): siRNA sense strand
gagaaagacaaaauaggaa

SEQ ID NO: 2530603 - RNA, 19 nt, Homo sapiens
  misc_RNA (1)...(19): siRNA sense strand
aggaaagagagaaucagaa

SEQ ID NO: 2530604 - RNA, 19 nt, Homo sapiens
  misc_RNA (1)...(19): siRNA sense strand
aaacacaaaaggugacaaa

SEQ ID NO: 2530605 - RNA, 19 nt, Homo sapiens
  misc_RNA (1)...(19): siRNA sense strand
ggacuaugaggaugguaga

SEQ ID NO: 2530606 - RNA, 19 nt, Homo sapiens
  misc_RNA (1)...(19): siRNA sense strand
gguaaagaagagggaguca

SEQ ID NO: 2530607 - RNA, 19 nt, Homo sapiens
  misc_RNA (1)...(19): siRNA sense strand
augugauaaccgagagaga

SEQ ID NO: 2530608 - RNA, 19 nt, Homo sapiens
  misc_RNA (1)...(19): siRNA sense strand
gugauaaccgagagagauc

SEQ ID NO: 2530609 - RNA, 19 nt, Homo sapiens
  misc_RNA (1)...(19): siRNA sense strand
cacauaaaggagccagaaa

SEQ ID NO: 2530610 - RNA, 19 nt, Homo sapiens
  misc_RNA (1)...(19): siRNA sense strand
cuguagaauccuugaaauc

SEQ ID NO: 2530611 - RNA, 19 nt, Homo sapiens
  misc_RNA (1)...(19): siRNA sense strand
guuuugaggauaaaggaaa

SEQ ID NO: 2530612 - RNA, 19 nt, Homo sapiens
  misc_RNA (1)...(19): siRNA sense strand
cagguagagaagagugaga

SEQ ID NO: 2530613 - RNA, 19 nt, Homo sapiens
  misc_RNA (1)...(19): siRNA sense strand
gacaggaaucccaaguaaa

SEQ ID NO: 2530614 - RNA, 19 nt, Homo sapiens
  misc_RNA (1)...(19): siRNA sense strand
guaaagaacacugagguga

SEQ ID NO: 2530615 - RNA, 19 nt, Homo sapiens
  misc_RNA (1)...(19): siRNA sense strand
uagagaagagugaguugaa

SEQ ID NO: 2530616 - RNA, 19 nt, Homo sapiens
  misc_RNA (1)...(19): siRNA sense strand
ucagaaaucaauggugaaa

SEQ ID NO: 2530617 - RNA, 19 nt, Homo sapiens
  misc_RNA (1)...(19): siRNA sense strand
caugcauauucaacacaaa

SEQ ID NO: 2530618 - RNA, 19 nt, Homo sapiens
  misc_RNA (1)...(19): siRNA sense strand
uggaugaagaacuugcaaa

SEQ ID NO: 2530619 - RNA, 19 nt, Homo sapiens
  misc_RNA (1)...(19): siRNA sense strand
cugaaagaucgaaggaaga

SEQ ID NO: 2530620 - RNA, 19 nt, Homo sapiens
  misc_RNA (1)...(19): siRNA sense strand
ccugaaagaucgaaggaag

SEQ ID NO: 2530621 - RNA, 19 nt, Homo sapiens
  misc_RNA (1)...(19): siRNA sense strand
gaagagaaauguacccaga

SEQ ID NO: 2530622 - RNA, 19 nt, Homo sapiens
  misc_RNA (1)...(19): siRNA sense strand
cugcaggagccgacagcuu

SEQ ID NO: 2530623 - RNA, 19 nt, Homo sapiens
  misc_RNA (1)...(19): siRNA sense strand
gcuggagguuggagccuga

SEQ ID NO: 2530624 - RNA, 19 nt, Homo sapiens
  misc_RNA (1)...(19): siRNA sense strand
ugaagaagguggaaggcuu

SEQ ID NO: 2530625 - RNA, 19 nt, Homo sapiens
  misc_RNA (1)...(19): siRNA sense strand
gcuuggaggaucugagcaa

SEQ ID NO: 2530626 - RNA, 19 nt, Homo sapiens
  misc_RNA (1)...(19): siRNA sense strand
cugagaaagaagaggacga

SEQ ID NO: 2530627 - RNA, 19 nt, Homo sapiens
  misc_RNA (1)...(19): siRNA sense strand
gaucaaagacgcuggccuu

SEQ ID NO: 2530628 - RNA, 19 nt, Homo sapiens
  misc_RNA (1)...(19): siRNA sense strand
uggaaagcacccugggaau

SEQ ID NO: 2530629 - RNA, 19 nt, Homo sapiens
  misc_RNA (1)...(19): siRNA sense strand
ggcucaaggcugauggcaa

SEQ ID NO: 2530630 - RNA, 19 nt, Homo sapiens
  misc_RNA (1)...(19): siRNA sense strand
gaagaggacgagaaggaga

SEQ ID NO: 2530631 - RNA, 19 nt, Homo sapiens
  misc_RNA (1)...(19): siRNA sense strand
aggacgagaaggagacaga

SEQ ID NO: 2530632 - RNA, 19 nt, Homo sapiens
  misc_RNA (1)...(19): siRNA sense strand
uggaaggcuuggaggaucu

SEQ ID NO: 2530633 - RNA, 19 nt, Homo sapiens
  misc_RNA (1)...(19): siRNA sense strand
caucacaaccugaggccca

SEQ ID NO: 2530634 - RNA, 19 nt, Homo sapiens
  misc_RNA (1)...(19): siRNA sense strand
cugagaaccaccugacaga

SEQ ID NO: 2530635 - RNA, 19 nt, Homo sapiens
  misc_RNA (1)...(19): siRNA sense strand
cuggaaagcacccugggaa

SEQ ID NO: 2530636 - RNA, 19 nt, Homo sapiens
  misc_RNA (1)...(19): siRNA sense strand
ucuagaagacucugagcca

SEQ ID NO: 2530637 - RNA, 19 nt, Homo sapiens
  misc_RNA (1)...(19): siRNA sense strand
ggaaccagcuggaaagcac

SEQ ID NO: 2530638 - RNA, 19 nt, Homo sapiens
  misc_RNA (1)...(19): siRNA sense strand
caugaugaaggaagggcuu

SEQ ID NO: 2530639 - RNA, 19 nt, Homo sapiens
  misc_RNA (1)...(19): siRNA sense strand
ugaagaagguggaaggcuu

SEQ ID NO: 2530640 - RNA, 19 nt, Homo sapiens
  misc_RNA (1)...(19): siRNA sense strand
gcuuggaggaucugagcaa

SEQ ID NO: 2530641 - RNA, 19 nt, Homo sapiens
  misc_RNA (1)...(19): siRNA sense strand
cugagaaagaagaggacga

SEQ ID NO: 2530642 - RNA, 19 nt, Homo sapiens
  misc_RNA (1)...(19): siRNA sense strand
uggaaagcacccugggaau

SEQ ID NO: 2530643 - RNA, 19 nt, Homo sapiens
  misc_RNA (1)...(19): siRNA sense strand
ggcucaaggcugauggcaa

SEQ ID NO: 2530644 - RNA, 19 nt, Homo sapiens
  misc_RNA (1)...(19): siRNA sense strand
gaagaggacgagaaggaga

SEQ ID NO: 2530645 - RNA, 19 nt, Homo sapiens
  misc_RNA (1)...(19): siRNA sense strand
aggacgagaaggagacaga

SEQ ID NO: 2530646 - RNA, 19 nt, Homo sapiens
  misc_RNA (1)...(19): siRNA sense strand
uggaaggcuuggaggaucu

SEQ ID NO: 2530647 - RNA, 19 nt, Homo sapiens
  misc_RNA (1)...(19): siRNA sense strand
cugagaaccaccugacaga

SEQ ID NO: 2530648 - RNA, 19 nt, Homo sapiens
  misc_RNA (1)...(19): siRNA sense strand
cuggaaagcacccugggaa

SEQ ID NO: 2530649 - RNA, 19 nt, Homo sapiens
  misc_RNA (1)...(19): siRNA sense strand
ucuagaagacucugagcca

SEQ ID NO: 2530650 - RNA, 19 nt, Homo sapiens
  misc_RNA (1)...(19): siRNA sense strand
ggaaccagcuggaaagcac

SEQ ID NO: 2530651 - RNA, 19 nt, Homo sapiens
  misc_RNA (1)...(19): siRNA sense strand
caugaugaaggaagggcuu

SEQ ID NO: 2530652 - RNA, 19 nt, Homo sapiens
  misc_RNA (1)...(19): siRNA sense strand
aguaggaggagcaggaaau

SEQ ID NO: 2530653 - RNA, 19 nt, Homo sapiens
  misc_RNA (1)...(19): siRNA sense strand
gaguaggaggagcaggaaa

SEQ ID NO: 2530654 - RNA, 19 nt, Homo sapiens
  misc_RNA (1)...(19): siRNA sense strand
cugaaggagaccuggguau

SEQ ID NO: 2530655 - RNA, 19 nt, Homo sapiens
  misc_RNA (1)...(19): siRNA sense strand
guggagaagaccugugcaa

SEQ ID NO: 2530656 - RNA, 19 nt, Homo sapiens
  misc_RNA (1)...(19): siRNA sense strand
gcgaguaggaggagcagga

SEQ ID NO: 2530657 - RNA, 19 nt, Homo sapiens
  misc_RNA (1)...(19): siRNA sense strand
cagucagugggaagaaaua

SEQ ID NO: 2530658 - RNA, 19 nt, Homo sapiens
  misc_RNA (1)...(19): siRNA sense strand
acucacaauuauaggggaa

SEQ ID NO: 2530659 - RNA, 19 nt, Homo sapiens
  misc_RNA (1)...(19): siRNA sense strand
aggaauauaccgaaggucu

SEQ ID NO: 2530660 - RNA, 19 nt, Homo sapiens
  misc_RNA (1)...(19): siRNA sense strand
aggaaaagccauagcagga

SEQ ID NO: 2530661 - RNA, 19 nt, Homo sapiens
  misc_RNA (1)...(19): siRNA sense strand
ggaaguggaucaagagcug

SEQ ID NO: 2530662 - RNA, 19 nt, Homo sapiens
  misc_RNA (1)...(19): siRNA sense strand
cuggggaguuuuagguuua

SEQ ID NO: 2530663 - RNA, 19 nt, Homo sapiens
  misc_RNA (1)...(19): siRNA sense strand
gaagacagucagugggaag

SEQ ID NO: 2530664 - RNA, 19 nt, Homo sapiens
  misc_RNA (1)...(19): siRNA sense strand
cagugcuauuaaagaagaa

SEQ ID NO: 2530665 - RNA, 19 nt, Homo sapiens
  misc_RNA (1)...(19): siRNA sense strand
guguuauugcugaaggaga

SEQ ID NO: 2530666 - RNA, 19 nt, Homo sapiens
  misc_RNA (1)...(19): siRNA sense strand
ccaucgcaguacagugcua

SEQ ID NO: 2530667 - RNA, 19 nt, Homo sapiens
  misc_RNA (1)...(19): siRNA sense strand
cagacguguuauugcugaa

SEQ ID NO: 2530668 - RNA, 19 nt, Homo sapiens
  misc_RNA (1)...(19): siRNA sense strand
cuggauggaaccaaggaau

SEQ ID NO: 2530669 - RNA, 19 nt, Homo sapiens
  misc_RNA (1)...(19): siRNA sense strand
gaaccaaggaauauaccga

SEQ ID NO: 2530670 - RNA, 19 nt, Homo sapiens
  misc_RNA (1)...(19): siRNA sense strand
gaagaaauacugaagcaac

SEQ ID NO: 2530671 - RNA, 19 nt, Homo sapiens
  misc_RNA (1)...(19): siRNA sense strand
ccacuuuggaagagcgaaa

SEQ ID NO: 2530672 - RNA, 19 nt, Homo sapiens
  misc_RNA (1)...(19): siRNA sense strand
ggaugagggacuugcggaa

SEQ ID NO: 2530673 - RNA, 19 nt, Homo sapiens
  misc_RNA (1)...(19): siRNA sense strand
gccaaauguaggagugaau

SEQ ID NO: 2530674 - RNA, 19 nt, Homo sapiens
  misc_RNA (1)...(19): siRNA sense strand
gggagcuggcugagcagaa

SEQ ID NO: 2530675 - RNA, 19 nt, Homo sapiens
  misc_RNA (1)...(19): siRNA sense strand
cguuggaagaagagcgguu

SEQ ID NO: 2530676 - RNA, 19 nt, Homo sapiens
  misc_RNA (1)...(19): siRNA sense strand
agucuggguccuuggagaa

SEQ ID NO: 2530677 - RNA, 19 nt, Homo sapiens
  misc_RNA (1)...(19): siRNA sense strand
gucuaaaacgaaacagaua

SEQ ID NO: 2530678 - RNA, 19 nt, Homo sapiens
  misc_RNA (1)...(19): siRNA sense strand
uccagaaacucuugggcca

SEQ ID NO: 2530679 - RNA, 19 nt, Homo sapiens
  misc_RNA (1)...(19): siRNA sense strand
aagaagagcgguuuggcuu

SEQ ID NO: 2530680 - RNA, 19 nt, Homo sapiens
  misc_RNA (1)...(19): siRNA sense strand
agaaggaacuggcugcuga

SEQ ID NO: 2530681 - RNA, 19 nt, Homo sapiens
  misc_RNA (1)...(19): siRNA sense strand
aaggaaaagucuugcacga

SEQ ID NO: 2530682 - RNA, 19 nt, Homo sapiens
  misc_RNA (1)...(19): siRNA sense strand
aacucuugauggaggaauu

SEQ ID NO: 2530683 - RNA, 19 nt, Homo sapiens
  misc_RNA (1)...(19): siRNA sense strand
agcgaaaggaagaucagua

SEQ ID NO: 2530684 - RNA, 19 nt, Homo sapiens
  misc_RNA (1)...(19): siRNA sense strand
cugcaguaccugaagcaaa

SEQ ID NO: 2530685 - RNA, 19 nt, Homo sapiens
  misc_RNA (1)...(19): siRNA sense strand
cauuaaggcgucaggcaau

SEQ ID NO: 2530686 - RNA, 19 nt, Homo sapiens
  misc_RNA (1)...(19): siRNA sense strand
uggaggaggaggagagcca

SEQ ID NO: 2530687 - RNA, 19 nt, Homo sapiens
  misc_RNA (1)...(19): siRNA sense strand
uggaagaaucucagccaga

SEQ ID NO: 2530688 - RNA, 19 nt, Homo sapiens
  misc_RNA (1)...(19): siRNA sense strand
aggagcagcguguggaaau

SEQ ID NO: 2530689 - RNA, 19 nt, Homo sapiens
  misc_RNA (1)...(19): siRNA sense strand
ucauuaaggcgucaggcaa

SEQ ID NO: 2530690 - RNA, 19 nt, Homo sapiens
  misc_RNA (1)...(19): siRNA sense strand
ggaaacucuauaugggaca

SEQ ID NO: 2530691 - RNA, 19 nt, Homo sapiens
  misc_RNA (1)...(19): siRNA sense strand
gauccagacuuauggccuu

SEQ ID NO: 2530692 - RNA, 19 nt, Homo sapiens
  misc_RNA (1)...(19): siRNA sense strand
cccuaauggugcaggagca

SEQ ID NO: 2530693 - RNA, 19 nt, Homo sapiens
  misc_RNA (1)...(19): siRNA sense strand
caucaauucggaaggcaga

SEQ ID NO: 2530694 - RNA, 19 nt, Homo sapiens
  misc_RNA (1)...(19): siRNA sense strand
uggagaaggaggauaacca

SEQ ID NO: 2530695 - RNA, 19 nt, Homo sapiens
  misc_RNA (1)...(19): siRNA sense strand
cugccgaguucaugagucu

SEQ ID NO: 2530696 - RNA, 19 nt, Homo sapiens
  misc_RNA (1)...(19): siRNA sense strand
aucgagagauuguggacau

SEQ ID NO: 2530697 - RNA, 19 nt, Homo sapiens
  misc_RNA (1)...(19): siRNA sense strand
guuggaaggaagagaagaa

SEQ ID NO: 2530698 - RNA, 19 nt, Homo sapiens
  misc_RNA (1)...(19): siRNA sense strand
ugacacagcaggaagggaa

SEQ ID NO: 2530699 - RNA, 19 nt, Homo sapiens
  misc_RNA (1)...(19): siRNA sense strand
caaacaaguuggaaggaag

SEQ ID NO: 2530700 - RNA, 19 nt, Homo sapiens
  misc_RNA (1)...(19): siRNA sense strand
acuugaagauagacaaaca

SEQ ID NO: 2530701 - RNA, 19 nt, Homo sapiens
  misc_RNA (1)...(19): siRNA sense strand
aggagaucccuuugaacua

SEQ ID NO: 2530702 - RNA, 19 nt, Homo sapiens
  misc_RNA (1)...(19): siRNA sense strand
gugcaagcucaauggaaca

SEQ ID NO: 2530703 - RNA, 19 nt, Homo sapiens
  misc_RNA (1)...(19): siRNA sense strand
uggaacaacauguguaaaa

SEQ ID NO: 2530704 - RNA, 19 nt, Homo sapiens
  misc_RNA (1)...(19): siRNA sense strand
caugcuuggaacugggaaa

SEQ ID NO: 2530705 - RNA, 19 nt, Homo sapiens
  misc_RNA (1)...(19): siRNA sense strand
cagucuaaucucauugaaa

SEQ ID NO: 2530706 - RNA, 19 nt, Homo sapiens
  misc_RNA (1)...(19): siRNA sense strand
ggacgaaguggcaagcaga

SEQ ID NO: 2530707 - RNA, 19 nt, Homo sapiens
  misc_RNA (1)...(19): siRNA sense strand
cugagaaggcaccaaggaa

SEQ ID NO: 2530708 - RNA, 19 nt, Homo sapiens
  misc_RNA (1)...(19): siRNA sense strand
ggugcaagcucaauggaac

SEQ ID NO: 2530709 - RNA, 19 nt, Homo sapiens
  misc_RNA (1)...(19): siRNA sense strand
uggaaggaagagaagaaca

SEQ ID NO: 2530710 - RNA, 19 nt, Homo sapiens
  misc_RNA (1)...(19): siRNA sense strand
gacacagcaggaagggaaa

SEQ ID NO: 2530711 - RNA, 19 nt, Homo sapiens
  misc_RNA (1)...(19): siRNA sense strand
aaggaagagaagaacauuu

SEQ ID NO: 2530712 - RNA, 19 nt, Homo sapiens
  misc_RNA (1)...(19): siRNA sense strand
cauccaugggaaagaauca

SEQ ID NO: 2530713 - RNA, 19 nt, Homo sapiens
  misc_RNA (1)...(19): siRNA sense strand
ugauaaugacccugaccuu

SEQ ID NO: 2530714 - RNA, 19 nt, Homo sapiens
  misc_RNA (1)...(19): siRNA sense strand
ggaacauccaugggaaaga

SEQ ID NO: 2530715 - RNA, 19 nt, Homo sapiens
  misc_RNA (1)...(19): siRNA sense strand
cugaaagaucgaaggaaga

SEQ ID NO: 2530716 - RNA, 19 nt, Homo sapiens
  misc_RNA (1)...(19): siRNA sense strand
ccugaaagaucgaaggaag

SEQ ID NO: 2530717 - RNA, 19 nt, Homo sapiens
  misc_RNA (1)...(19): siRNA sense strand
gaagagaaauguacccaga

SEQ ID NO: 2530718 - RNA, 19 nt, Homo sapiens
  misc_RNA (1)...(19): siRNA sense strand
gcuggagguuggagccuga

SEQ ID NO: 2530719 - RNA, 19 nt, Homo sapiens
  misc_RNA (1)...(19): siRNA sense strand
agacagagugaaagggcaa

SEQ ID NO: 2530720 - RNA, 19 nt, Homo sapiens
  misc_RNA (1)...(19): siRNA sense strand
cgucagacacucaggaaga

SEQ ID NO: 2530721 - RNA, 19 nt, Homo sapiens
  misc_RNA (1)...(19): siRNA sense strand
cggugauggcugaugauaa

SEQ ID NO: 2530722 - RNA, 19 nt, Homo sapiens
  misc_RNA (1)...(19): siRNA sense strand
agaaggagggagagggaca

SEQ ID NO: 2530723 - RNA, 19 nt, Homo sapiens
  misc_RNA (1)...(19): siRNA sense strand
ccuuagaagauaacaggaa

SEQ ID NO: 2530724 - RNA, 19 nt, Homo sapiens
  misc_RNA (1)...(19): siRNA sense strand
agauaaguggagugaagaa

SEQ ID NO: 2530725 - RNA, 19 nt, Homo sapiens
  misc_RNA (1)...(19): siRNA sense strand
aguucaagccuaaacaaua

SEQ ID NO: 2530726 - RNA, 19 nt, Homo sapiens
  misc_RNA (1)...(19): siRNA sense strand
aagaaaagcaggaguguga

SEQ ID NO: 2530727 - RNA, 19 nt, Homo sapiens
  misc_RNA (1)...(19): siRNA sense strand
cugaaggaccugagaagga

SEQ ID NO: 2530728 - RNA, 19 nt, Homo sapiens
  misc_RNA (1)...(19): siRNA sense strand
ccaaaggcgaugucgagaa

SEQ ID NO: 2530729 - RNA, 19 nt, Homo sapiens
  misc_RNA (1)...(19): siRNA sense strand
gauaaguggagugaagaaa

SEQ ID NO: 2530730 - RNA, 19 nt, Homo sapiens
  misc_RNA (1)...(19): siRNA sense strand
gaugaaucuguguuggaaa

SEQ ID NO: 2530731 - RNA, 19 nt, Homo sapiens
  misc_RNA (1)...(19): siRNA sense strand
ggaacugguaucagagcau

SEQ ID NO: 2530732 - RNA, 19 nt, Homo sapiens
  misc_RNA (1)...(19): siRNA sense strand
acacucaggaagaugguua

SEQ ID NO: 2530733 - RNA, 19 nt, Homo sapiens
  misc_RNA (1)...(19): siRNA sense strand
ugguagaaacgaagaaagu

SEQ ID NO: 2530734 - RNA, 19 nt, Homo sapiens
  misc_RNA (1)...(19): siRNA sense strand
gaccugagaaggagggaga

SEQ ID NO: 2530735 - RNA, 19 nt, Homo sapiens
  misc_RNA (1)...(19): siRNA sense strand
uggccaaggagcuggaaga

SEQ ID NO: 2530736 - RNA, 19 nt, Homo sapiens
  misc_RNA (1)...(19): siRNA sense strand
ggaauggaaauuagcccaa

SEQ ID NO: 2530737 - RNA, 19 nt, Homo sapiens
  misc_RNA (1)...(19): siRNA sense strand
uugaauguagcuugaguaa

SEQ ID NO: 2530738 - RNA, 19 nt, Homo sapiens
  misc_RNA (1)...(19): siRNA sense strand
cuggaagaccugaacaaau

SEQ ID NO: 2530739 - RNA, 19 nt, Homo sapiens
  misc_RNA (1)...(19): siRNA sense strand
ugacaaaccuucaugguac

SEQ ID NO: 2530740 - RNA, 19 nt, Homo sapiens
  misc_RNA (1)...(19): siRNA sense strand
agucaacccacaagaagaa

SEQ ID NO: 2530741 - RNA, 19 nt, Homo sapiens
  misc_RNA (1)...(19): siRNA sense strand
gguuauugacaugguguua

SEQ ID NO: 2530742 - RNA, 19 nt, Homo sapiens
  misc_RNA (1)...(19): siRNA sense strand
ggagacaaagagcgggaga

SEQ ID NO: 2530743 - RNA, 19 nt, Homo sapiens
  misc_RNA (1)...(19): siRNA sense strand
cgggagaggggaauggaaa

SEQ ID NO: 2530744 - RNA, 19 nt, Homo sapiens
  misc_RNA (1)...(19): siRNA sense strand
cagccagcgcagagaguca

SEQ ID NO: 2530745 - RNA, 19 nt, Homo sapiens
  misc_RNA (1)...(19): siRNA sense strand
ccaaggagcuggaagaccu

SEQ ID NO: 2530746 - RNA, 19 nt, Homo sapiens
  misc_RNA (1)...(19): siRNA sense strand
gcuugcgaagugugagaaa

SEQ ID NO: 2530747 - RNA, 19 nt, Homo sapiens
  misc_RNA (1)...(19): siRNA sense strand
uugcgaagugugagaaaca

SEQ ID NO: 2530748 - RNA, 19 nt, Homo sapiens
  misc_RNA (1)...(19): siRNA sense strand
ggcugaugauaauguuaaa

SEQ ID NO: 2530749 - RNA, 19 nt, Homo sapiens
  misc_RNA (1)...(19): siRNA sense strand
caagaagaacacugugaca

SEQ ID NO: 2530750 - RNA, 19 nt, Homo sapiens
  misc_RNA (1)...(19): siRNA sense strand
ucgauaccuuagaagauaa

SEQ ID NO: 2530751 - RNA, 19 nt, Homo sapiens
  misc_RNA (1)...(19): siRNA sense strand
gagucaacccacaagaaga

SEQ ID NO: 2530752 - RNA, 19 nt, Homo sapiens
  misc_RNA (1)...(19): siRNA sense strand
cuuuaauguggcuggauau

SEQ ID NO: 2530753 - RNA, 19 nt, Homo sapiens
  misc_RNA (1)...(19): siRNA sense strand
agggagagggacacagcua

SEQ ID NO: 2530754 - RNA, 19 nt, Homo sapiens
  misc_RNA (1)...(19): siRNA sense strand
cugaagacaaugguagaaa

SEQ ID NO: 2530755 - RNA, 19 nt, Homo sapiens
  misc_RNA (1)...(19): siRNA sense strand
ggaagauucugaaggaccu

SEQ ID NO: 2530756 - RNA, 19 nt, Homo sapiens
  misc_RNA (1)...(19): siRNA sense strand
ccuccugucuccagaguca

SEQ ID NO: 2530757 - RNA, 19 nt, Homo sapiens
  misc_RNA (1)...(19): siRNA sense strand
ucuuagacaagcagaauga

SEQ ID NO: 2530758 - RNA, 19 nt, Homo sapiens
  misc_RNA (1)...(19): siRNA sense strand
augaagaucaccuggccaa

SEQ ID NO: 2530759 - RNA, 19 nt, Homo sapiens
  misc_RNA (1)...(19): siRNA sense strand
gcauucagguccuucgcaa

SEQ ID NO: 2530760 - RNA, 19 nt, Homo sapiens
  misc_RNA (1)...(19): siRNA sense strand
aguaaauccuacaguucuu

SEQ ID NO: 2530761 - RNA, 19 nt, Homo sapiens
  misc_RNA (1)...(19): siRNA sense strand
augaaucuguguuggaaaa

SEQ ID NO: 2530762 - RNA, 19 nt, Homo sapiens
  misc_RNA (1)...(19): siRNA sense strand
aguuacaaguucaggcguu

SEQ ID NO: 2530763 - RNA, 19 nt, Homo sapiens
  misc_RNA (1)...(19): siRNA sense strand
cagauuugguacagccuga

SEQ ID NO: 2530764 - RNA, 19 nt, Homo sapiens
  misc_RNA (1)...(19): siRNA sense strand
ugagaaggagggagaggga

SEQ ID NO: 2530765 - RNA, 19 nt, Homo sapiens
  misc_RNA (1)...(19): siRNA sense strand
ggagagacugacauagaca

SEQ ID NO: 2530766 - RNA, 19 nt, Homo sapiens
  misc_RNA (1)...(19): siRNA sense strand
agaagguguugcucaggaa

SEQ ID NO: 2530767 - RNA, 19 nt, Homo sapiens
  misc_RNA (1)...(19): siRNA sense strand
ugggagagacugacauaga

SEQ ID NO: 2530768 - RNA, 19 nt, Homo sapiens
  misc_RNA (1)...(19): siRNA sense strand
gggagaagguguugcucag

SEQ ID NO: 2530769 - RNA, 19 nt, Homo sapiens
  misc_RNA (1)...(19): siRNA sense strand
ucaccaagaagcagcguca

SEQ ID NO: 2530770 - RNA, 19 nt, Homo sapiens
  misc_RNA (1)...(19): siRNA sense strand
gggagaggggaauggaaau

SEQ ID NO: 2530771 - RNA, 19 nt, Homo sapiens
  misc_RNA (1)...(19): siRNA sense strand
ccugggagagacugacaua

SEQ ID NO: 2530772 - RNA, 19 nt, Homo sapiens
  misc_RNA (1)...(19): siRNA sense strand
ucacagauuuggagauccu

SEQ ID NO: 2530773 - RNA, 19 nt, Homo sapiens
  misc_RNA (1)...(19): siRNA sense strand
caaacugcugcaagaagaa

SEQ ID NO: 2530774 - RNA, 19 nt, Homo sapiens
  misc_RNA (1)...(19): siRNA sense strand
acccagaaagacagggaga

SEQ ID NO: 2530775 - RNA, 19 nt, Homo sapiens
  misc_RNA (1)...(19): siRNA sense strand
cagaaagacagggagaaaa

SEQ ID NO: 2530776 - RNA, 19 nt, Homo sapiens
  misc_RNA (1)...(19): siRNA sense strand
acgaagaaaguuacaaguu

SEQ ID NO: 2530777 - RNA, 19 nt, Homo sapiens
  misc_RNA (1)...(19): siRNA sense strand
gcuucuaacaaguucaaaa

SEQ ID NO: 2530778 - RNA, 19 nt, Homo sapiens
  misc_RNA (1)...(19): siRNA sense strand
cuggcagaccugaagacaa

SEQ ID NO: 2530779 - RNA, 19 nt, Homo sapiens
  misc_RNA (1)...(19): siRNA sense strand
ucucgauaccuuagaagau

SEQ ID NO: 2530780 - RNA, 19 nt, Homo sapiens
  misc_RNA (1)...(19): siRNA sense strand
gugagauggcuucuaacaa

SEQ ID NO: 2530781 - RNA, 19 nt, Homo sapiens
  misc_RNA (1)...(19): siRNA sense strand
gcccaaugugugauaaaca

SEQ ID NO: 2530782 - RNA, 19 nt, Homo sapiens
  misc_RNA (1)...(19): siRNA sense strand
augaaauggaggagauauu

SEQ ID NO: 2530783 - RNA, 19 nt, Homo sapiens
  misc_RNA (1)...(19): siRNA sense strand
agggcaaugauuugggaaa

SEQ ID NO: 2530784 - RNA, 19 nt, Homo sapiens
  misc_RNA (1)...(19): siRNA sense strand
gggagauggagaaggcgaa

SEQ ID NO: 2530785 - RNA, 19 nt, Homo sapiens
  misc_RNA (1)...(19): siRNA sense strand
acucaagagacccaggaaa

SEQ ID NO: 2530786 - RNA, 19 nt, Homo sapiens
  misc_RNA (1)...(19): siRNA sense strand
cagcaguggauuaagaaaa

SEQ ID NO: 2530787 - RNA, 19 nt, Homo sapiens
  misc_RNA (1)...(19): siRNA sense strand
acacccagaaugaaggaaa

SEQ ID NO: 2530788 - RNA, 19 nt, Homo sapiens
  misc_RNA (1)...(19): siRNA sense strand
cuuccuaauucaugcaaaa

SEQ ID NO: 2530789 - RNA, 19 nt, Homo sapiens
  misc_RNA (1)...(19): siRNA sense strand
uaguaacguuggaagaaaa

SEQ ID NO: 2530790 - RNA, 19 nt, Homo sapiens
  misc_RNA (1)...(19): siRNA sense strand
aucaaauacuccagacuau

SEQ ID NO: 2530791 - RNA, 19 nt, Homo sapiens
  misc_RNA (1)...(19): siRNA sense strand
ucuaaagagguuaacacua

SEQ ID NO: 2530792 - RNA, 19 nt, Homo sapiens
  misc_RNA (1)...(19): siRNA sense strand
cauggaaaugauaaggaau

SEQ ID NO: 2530793 - RNA, 19 nt, Homo sapiens
  misc_RNA (1)...(19): siRNA sense strand
aggcugagggagauggaga

SEQ ID NO: 2530794 - RNA, 19 nt, Homo sapiens
  misc_RNA (1)...(19): siRNA sense strand
ggacaacaugauuuggaca

SEQ ID NO: 2530795 - RNA, 19 nt, Homo sapiens
  misc_RNA (1)...(19): siRNA sense strand
aaaugaaauggaggagaua

SEQ ID NO: 2530796 - RNA, 19 nt, Homo sapiens
  misc_RNA (1)...(19): siRNA sense strand
uauuugaugagaagggcaa

SEQ ID NO: 2530797 - RNA, 19 nt, Homo sapiens
  misc_RNA (1)...(19): siRNA sense strand
aggcauauaaagaaacuca

SEQ ID NO: 2530798 - RNA, 19 nt, Homo sapiens
  misc_RNA (1)...(19): siRNA sense strand
uaaagaaacucaagagacc

SEQ ID NO: 2530799 - RNA, 19 nt, Homo sapiens
  misc_RNA (1)...(19): siRNA sense strand
cacccagaaugaaggaaaa

SEQ ID NO: 2530800 - RNA, 19 nt, Homo sapiens
  misc_RNA (1)...(19): siRNA sense strand
ggcugagggagauggagaa

SEQ ID NO: 2530801 - RNA, 19 nt, Homo sapiens
  misc_RNA (1)...(19): siRNA sense strand
ugagaaaggaacugauuuu

SEQ ID NO: 2530802 - RNA, 19 nt, Homo sapiens
  misc_RNA (1)...(19): siRNA sense strand
gacuuauggaugagcgaga

SEQ ID NO: 2530803 - RNA, 19 nt, Homo sapiens
  misc_RNA (1)...(19): siRNA sense strand
cugcagaguaucagcucau

SEQ ID NO: 2530804 - RNA, 19 nt, Homo sapiens
  misc_RNA (1)...(19): siRNA sense strand
aauguagacgugucagaaa

SEQ ID NO: 2530805 - RNA, 19 nt, Homo sapiens
  misc_RNA (1)...(19): siRNA sense strand
auguagacgugucagaaaa

SEQ ID NO: 2530806 - RNA, 19 nt, Homo sapiens
  misc_RNA (1)...(19): siRNA sense strand
gucuucaaauauuggacaa

SEQ ID NO: 2530807 - RNA, 19 nt, Homo sapiens
  misc_RNA (1)...(19): siRNA sense strand
augagaagggcaaugauuu

SEQ ID NO: 2530808 - RNA, 19 nt, Homo sapiens
  misc_RNA (1)...(19): siRNA sense strand
cagaaaaugaaauggagga

SEQ ID NO: 2530809 - RNA, 19 nt, Homo sapiens
  misc_RNA (1)...(19): siRNA sense strand
ccgaaggaaagaagaggaa

SEQ ID NO: 2530810 - RNA, 19 nt, Homo sapiens
  misc_RNA (1)...(19): siRNA sense strand
gaaagaagaggaacggcua

SEQ ID NO: 2530811 - RNA, 19 nt, Homo sapiens
  misc_RNA (1)...(19): siRNA sense strand
agacagaugaggauggaga

SEQ ID NO: 2530812 - RNA, 19 nt, Homo sapiens
  misc_RNA (1)...(19): siRNA sense strand
ggacaaaucaguugggccu

SEQ ID NO: 2530813 - RNA, 19 nt, Homo sapiens
  misc_RNA (1)...(19): siRNA sense strand
gcucgcugacacagagaaa

SEQ ID NO: 2530814 - RNA, 19 nt, Homo sapiens
  misc_RNA (1)...(19): siRNA sense strand
uggccagagucgugaagau

SEQ ID NO: 2530815 - RNA, 19 nt, Homo sapiens
  misc_RNA (1)...(19): siRNA sense strand
aagucaagguaaagaugau

SEQ ID NO: 2530816 - RNA, 19 nt, Homo sapiens
  misc_RNA (1)...(19): siRNA sense strand
ggaaagaagaggaacggcu

SEQ ID NO: 2530817 - RNA, 19 nt, Homo sapiens
  misc_RNA (1)...(19): siRNA sense strand
cgaccagacagaugaggau

SEQ ID NO: 2530818 - RNA, 19 nt, Homo sapiens
  misc_RNA (1)...(19): siRNA sense strand
aggaaagcuccaagaggga

SEQ ID NO: 2530819 - RNA, 19 nt, Homo sapiens
  misc_RNA (1)...(19): siRNA sense strand
aggcagagcccaacaggga

SEQ ID NO: 2530820 - RNA, 19 nt, Homo sapiens
  misc_RNA (1)...(19): siRNA sense strand
ggauggagaaccuggcuca

SEQ ID NO: 2530821 - RNA, 19 nt, Homo sapiens
  misc_RNA (1)...(19): siRNA sense strand
agaucuuugagcugaauaa

SEQ ID NO: 2530822 - RNA, 19 nt, Homo sapiens
  misc_RNA (1)...(19): siRNA sense strand
cagaaguccagcaggcaga

SEQ ID NO: 2530823 - RNA, 19 nt, Homo sapiens
  misc_RNA (1)...(19): siRNA sense strand
agaugaggauggagaaccu

SEQ ID NO: 2530824 - RNA, 19 nt, Homo sapiens
  misc_RNA (1)...(19): siRNA sense strand
uagaggcguugaagggcaa

SEQ ID NO: 2530825 - RNA, 19 nt, Homo sapiens
  misc_RNA (1)...(19): siRNA sense strand
agagagaaguggagacagc

SEQ ID NO: 2530826 - RNA, 19 nt, Homo sapiens
  misc_RNA (1)...(19): siRNA sense strand
aaaccaacagacaggaaaa

SEQ ID NO: 2530827 - RNA, 19 nt, Homo sapiens
  misc_RNA (1)...(19): siRNA sense strand
gagacagcgaccagacaga

SEQ ID NO: 2530828 - RNA, 19 nt, Homo sapiens
  misc_RNA (1)...(19): siRNA sense strand
aggcagagagcgagguuuc

SEQ ID NO: 2530829 - RNA, 19 nt, Homo sapiens
  misc_RNA (1)...(19): siRNA sense strand
cccucgaguggcugggaaa

SEQ ID NO: 2530830 - RNA, 19 nt, Homo sapiens
  misc_RNA (1)...(19): siRNA sense strand
ggccaagggucuaggugcu

SEQ ID NO: 2530831 - RNA, 19 nt, Homo sapiens
  misc_RNA (1)...(19): siRNA sense strand
gcagagcccaacagggaca

SEQ ID NO: 2530832 - RNA, 19 nt, Homo sapiens
  misc_RNA (1)...(19): siRNA sense strand
gugaauagcaaaaggcagu

SEQ ID NO: 2530833 - RNA, 19 nt, Homo sapiens
  misc_RNA (1)...(19): siRNA sense strand
gggcgucuucugagaguca

SEQ ID NO: 2530834 - RNA, 19 nt, Homo sapiens
  misc_RNA (1)...(19): siRNA sense strand
ccacucagccucaagguca

SEQ ID NO: 2530835 - RNA, 19 nt, Homo sapiens
  misc_RNA (1)...(19): siRNA sense strand
gagagagagaggagagaua

SEQ ID NO: 2530836 - RNA, 19 nt, Homo sapiens
  misc_RNA (1)...(19): siRNA sense strand
gagaaagagaagagagaga

SEQ ID NO: 2530837 - RNA, 19 nt, Homo sapiens
  misc_RNA (1)...(19): siRNA sense strand
cgagaugaccgcagagaaa

SEQ ID NO: 2530838 - RNA, 19 nt, Homo sapiens
  misc_RNA (1)...(19): siRNA sense strand
cgggagagagaaagagaaa

SEQ ID NO: 2530839 - RNA, 19 nt, Homo sapiens
  misc_RNA (1)...(19): siRNA sense strand
agagagagaacgagacaaa

SEQ ID NO: 2530840 - RNA, 19 nt, Homo sapiens
  misc_RNA (1)...(19): siRNA sense strand
gggaaaaggaagacauaaa

SEQ ID NO: 2530841 - RNA, 19 nt, Homo sapiens
  misc_RNA (1)...(19): siRNA sense strand
cagaagauacagagggaau

SEQ ID NO: 2530842 - RNA, 19 nt, Homo sapiens
  misc_RNA (1)...(19): siRNA sense strand
gagaagacauggagagcga

SEQ ID NO: 2530843 - RNA, 19 nt, Homo sapiens
  misc_RNA (1)...(19): siRNA sense strand
gauacgaggcagagagaau

SEQ ID NO: 2530844 - RNA, 19 nt, Homo sapiens
  misc_RNA (1)...(19): siRNA sense strand
cagacaggguagauggaaa

SEQ ID NO: 2530845 - RNA, 19 nt, Homo sapiens
  misc_RNA (1)...(19): siRNA sense strand
ggauagggaaagagagaga

SEQ ID NO: 2530846 - RNA, 19 nt, Homo sapiens
  misc_RNA (1)...(19): siRNA sense strand
caacagagagagagaucaa

SEQ ID NO: 2530847 - RNA, 19 nt, Homo sapiens
  misc_RNA (1)...(19): siRNA sense strand
ugaugaaagaagagaggaa

SEQ ID NO: 2530848 - RNA, 19 nt, Homo sapiens
  misc_RNA (1)...(19): siRNA sense strand
gaagagagagagagggaga

SEQ ID NO: 2530849 - RNA, 19 nt, Homo sapiens
  misc_RNA (1)...(19): siRNA sense strand
cagcaaaguaagaagaaaa

SEQ ID NO: 2530850 - RNA, 19 nt, Homo sapiens
  misc_RNA (1)...(19): siRNA sense strand
agggaaagagagagacuaa

SEQ ID NO: 2530851 - RNA, 19 nt, Homo sapiens
  misc_RNA (1)...(19): siRNA sense strand
agagggagacauagggaaa

SEQ ID NO: 2530852 - RNA, 19 nt, Homo sapiens
  misc_RNA (1)...(19): siRNA sense strand
ggacagaggacgagauuuu

SEQ ID NO: 2530853 - RNA, 19 nt, Homo sapiens
  misc_RNA (1)...(19): siRNA sense strand
agagauuauagcagagaua

SEQ ID NO: 2530854 - RNA, 19 nt, Homo sapiens
  misc_RNA (1)...(19): siRNA sense strand
agccauaguucaagaagaa

SEQ ID NO: 2530855 - RNA, 19 nt, Homo sapiens
  misc_RNA (1)...(19): siRNA sense strand
aagagaagaacgagaauau

SEQ ID NO: 2530856 - RNA, 19 nt, Homo sapiens
  misc_RNA (1)...(19): siRNA sense strand
agacaaagacaaaggacga

SEQ ID NO: 2530857 - RNA, 19 nt, Homo sapiens
  misc_RNA (1)...(19): siRNA sense strand
ucguaaaccagaaaggaaa

SEQ ID NO: 2530858 - RNA, 19 nt, Homo sapiens
  misc_RNA (1)...(19): siRNA sense strand
cgacagagagcgcgagaga

SEQ ID NO: 2530859 - RNA, 19 nt, Homo sapiens
  misc_RNA (1)...(19): siRNA sense strand
gagaauaugaacaggauca

SEQ ID NO: 2530860 - RNA, 19 nt, Homo sapiens
  misc_RNA (1)...(19): siRNA sense strand
cggagagaugccagagaua

SEQ ID NO: 2530861 - RNA, 19 nt, Homo sapiens
  misc_RNA (1)...(19): siRNA sense strand
cuaagagacuccagagaca

SEQ ID NO: 2530862 - RNA, 19 nt, Homo sapiens
  misc_RNA (1)...(19): siRNA sense strand
ggaacgagaaagagcgaga

SEQ ID NO: 2530863 - RNA, 19 nt, Homo sapiens
  misc_RNA (1)...(19): siRNA sense strand
cuauagaaaugaagggagu

SEQ ID NO: 2530864 - RNA, 19 nt, Homo sapiens
  misc_RNA (1)...(19): siRNA sense strand
agagagagaacuagaaaga

SEQ ID NO: 2530865 - RNA, 19 nt, Homo sapiens
  misc_RNA (1)...(19): siRNA sense strand
cagagagaacagacagaaa

SEQ ID NO: 2530866 - RNA, 19 nt, Homo sapiens
  misc_RNA (1)...(19): siRNA sense strand
acagagagcgcgagagaga

SEQ ID NO: 2530867 - RNA, 19 nt, Homo sapiens
  misc_RNA (1)...(19): siRNA sense strand
gagaagagagagagaggga

SEQ ID NO: 2530868 - RNA, 19 nt, Homo sapiens
  misc_RNA (1)...(19): siRNA sense strand
uaucaugacagcugggaaa

SEQ ID NO: 2530869 - RNA, 19 nt, Homo sapiens
  misc_RNA (1)...(19): siRNA sense strand
ggaacgaagaguagacaga

SEQ ID NO: 2530870 - RNA, 19 nt, Homo sapiens
  misc_RNA (1)...(19): siRNA sense strand
agggaacgggagagagaaa

SEQ ID NO: 2530871 - RNA, 19 nt, Homo sapiens
  misc_RNA (1)...(19): siRNA sense strand
gaaagagaagagagagaga

SEQ ID NO: 2530872 - RNA, 19 nt, Homo sapiens
  misc_RNA (1)...(19): siRNA sense strand
ggagagagagcgagagcga

SEQ ID NO: 2530873 - RNA, 19 nt, Homo sapiens
  misc_RNA (1)...(19): siRNA sense strand
ggcucaagagauagagaaa

SEQ ID NO: 2530874 - RNA, 19 nt, Homo sapiens
  misc_RNA (1)...(19): siRNA sense strand
agaacgagaacgagagaga

SEQ ID NO: 2530875 - RNA, 19 nt, Homo sapiens
  misc_RNA (1)...(19): siRNA sense strand
caaauaaauccgagagaac

SEQ ID NO: 2530876 - RNA, 19 nt, Homo sapiens
  misc_RNA (1)...(19): siRNA sense strand
gguaaagguuauagcagca

SEQ ID NO: 2530877 - RNA, 19 nt, Homo sapiens
  misc_RNA (1)...(19): siRNA sense strand
acgagaaagagaagagaga

SEQ ID NO: 2530878 - RNA, 19 nt, Homo sapiens
  misc_RNA (1)...(19): siRNA sense strand
agagaaagaaugaagaaca

SEQ ID NO: 2530879 - RNA, 19 nt, Homo sapiens
  misc_RNA (1)...(19): siRNA sense strand
cuaaagaggaauugguuga

SEQ ID NO: 2530880 - RNA, 19 nt, Homo sapiens
  misc_RNA (1)...(19): siRNA sense strand
ccgugaaggucgagauacu

SEQ ID NO: 2530881 - RNA, 19 nt, Homo sapiens
  misc_RNA (1)...(19): siRNA sense strand
cgagaacgccaaagggauu

SEQ ID NO: 2530882 - RNA, 19 nt, Homo sapiens
  misc_RNA (1)...(19): siRNA sense strand
ggaaacuaauagagaugau

SEQ ID NO: 2530883 - RNA, 19 nt, Homo sapiens
  misc_RNA (1)...(19): siRNA sense strand
agaaagggauaaagaacga

SEQ ID NO: 2530884 - RNA, 19 nt, Homo sapiens
  misc_RNA (1)...(19): siRNA sense strand
cagaagaaucccggaguua

SEQ ID NO: 2530885 - RNA, 19 nt, Homo sapiens
  misc_RNA (1)...(19): siRNA sense strand
ggaugauaggagagaugaa

SEQ ID NO: 2530886 - RNA, 19 nt, Homo sapiens
  misc_RNA (1)...(19): siRNA sense strand
cgggaucgggaaagagaaa

SEQ ID NO: 2530887 - RNA, 19 nt, Homo sapiens
  misc_RNA (1)...(19): siRNA sense strand
guagauaaacagagagaac

SEQ ID NO: 2530888 - RNA, 19 nt, Homo sapiens
  misc_RNA (1)...(19): siRNA sense strand
guugaaagggacagggaca

SEQ ID NO: 2530889 - RNA, 19 nt, Homo sapiens
  misc_RNA (1)...(19): siRNA sense strand
aagcaaaacuggaagguga

SEQ ID NO: 2530890 - RNA, 19 nt, Homo sapiens
  misc_RNA (1)...(19): siRNA sense strand
ggauaaagagagaauggau

SEQ ID NO: 2530891 - RNA, 19 nt, Homo sapiens
  misc_RNA (1)...(19): siRNA sense strand
ggcaaacgagacagagaaa

SEQ ID NO: 2530892 - RNA, 19 nt, Homo sapiens
  misc_RNA (1)...(19): siRNA sense strand
gggaaggaaugacgagcuu

SEQ ID NO: 2530893 - RNA, 19 nt, Homo sapiens
  misc_RNA (1)...(19): siRNA sense strand
agagagagcgagagcgaga

SEQ ID NO: 2530894 - RNA, 19 nt, Homo sapiens
  misc_RNA (1)...(19): siRNA sense strand
caugaaagggaucuagaaa

SEQ ID NO: 2530895 - RNA, 19 nt, Homo sapiens
  misc_RNA (1)...(19): siRNA sense strand
cagcaauuauagaagguca

SEQ ID NO: 2530896 - RNA, 19 nt, Homo sapiens
  misc_RNA (1)...(19): siRNA sense strand
ucagcuagcaagaaagaua

SEQ ID NO: 2530897 - RNA, 19 nt, Homo sapiens
  misc_RNA (1)...(19): siRNA sense strand
ggggaggguuccugaguua

SEQ ID NO: 2530898 - RNA, 19 nt, Homo sapiens
  misc_RNA (1)...(19): siRNA sense strand
cuacaacaguggagaugau

SEQ ID NO: 2530899 - RNA, 19 nt, Homo sapiens
  misc_RNA (1)...(19): siRNA sense strand
uccagaaagugaagaagaa

SEQ ID NO: 2530900 - RNA, 19 nt, Homo sapiens
  misc_RNA (1)...(19): siRNA sense strand
gggcaaacgagacagagaa

SEQ ID NO: 2530901 - RNA, 19 nt, Homo sapiens
  misc_RNA (1)...(19): siRNA sense strand
cagcagagucguauggcaa

SEQ ID NO: 2530902 - RNA, 19 nt, Homo sapiens
  misc_RNA (1)...(19): siRNA sense strand
aaagagaaguggaggccau

SEQ ID NO: 2530903 - RNA, 19 nt, Homo sapiens
  misc_RNA (1)...(19): siRNA sense strand
gcuugggccaugagagcaa

SEQ ID NO: 2530904 - RNA, 19 nt, Homo sapiens
  misc_RNA (1)...(19): siRNA sense strand
agcugauaguggagaagaa

SEQ ID NO: 2530905 - RNA, 19 nt, Homo sapiens
  misc_RNA (1)...(19): siRNA sense strand
gcuugaaguuuaaugggau

SEQ ID NO: 2530906 - RNA, 19 nt, Homo sapiens
  misc_RNA (1)...(19): siRNA sense strand
cuugaaguuuaaugggauu

SEQ ID NO: 2530907 - RNA, 19 nt, Homo sapiens
  misc_RNA (1)...(19): siRNA sense strand
ucaccaaaguagaugacca

SEQ ID NO: 2530908 - RNA, 19 nt, Homo sapiens
  misc_RNA (1)...(19): siRNA sense strand
cugacaaagaaaucaacaa

SEQ ID NO: 2530909 - RNA, 19 nt, Homo sapiens
  misc_RNA (1)...(19): siRNA sense strand
auaucaguguucaggacaa

SEQ ID NO: 2530910 - RNA, 19 nt, Homo sapiens
  misc_RNA (1)...(19): siRNA sense strand
ggauacaauucuuugccau

SEQ ID NO: 2530911 - RNA, 19 nt, Homo sapiens
  misc_RNA (1)...(19): siRNA sense strand
ccauugaaauugcucggaa

SEQ ID NO: 2530912 - RNA, 19 nt, Homo sapiens
  misc_RNA (1)...(19): siRNA sense strand
agucagaaucagccaaaga

SEQ ID NO: 2530913 - RNA, 19 nt, Homo sapiens
  misc_RNA (1)...(19): siRNA sense strand
gaaaggagcugauagugga

SEQ ID NO: 2530914 - RNA, 19 nt, Homo sapiens
  misc_RNA (1)...(19): siRNA sense strand
aggagcugauaguggagaa

SEQ ID NO: 2530915 - RNA, 19 nt, Homo sapiens
  misc_RNA (1)...(19): siRNA sense strand
guuuaaugggauuguugaa

SEQ ID NO: 2530916 - RNA, 19 nt, Homo sapiens
  misc_RNA (1)...(19): siRNA sense strand
agggcuacacugaggaaaa

SEQ ID NO: 2530917 - RNA, 19 nt, Homo sapiens
  misc_RNA (1)...(19): siRNA sense strand
agcugacaguggagaagaa

SEQ ID NO: 2530918 - RNA, 19 nt, Homo sapiens
  misc_RNA (1)...(19): siRNA sense strand
guggagaagaagagaacac

SEQ ID NO: 2530919 - RNA, 19 nt, Homo sapiens
  misc_RNA (1)...(19): siRNA sense strand
acaaagaaggagagaaagg

SEQ ID NO: 2530920 - RNA, 19 nt, Homo sapiens
  misc_RNA (1)...(19): siRNA sense strand
caguggagaagaagagaac

SEQ ID NO: 2530921 - RNA, 19 nt, Homo sapiens
  misc_RNA (1)...(19): siRNA sense strand
ggaaaauggcacugaccaa

SEQ ID NO: 2530922 - RNA, 19 nt, Homo sapiens
  misc_RNA (1)...(19): siRNA sense strand
cgcaagaaacggagccaga

SEQ ID NO: 2530923 - RNA, 19 nt, Homo sapiens
  misc_RNA (1)...(19): siRNA sense strand
uggcaaauggugucugcaa

SEQ ID NO: 2530924 - RNA, 19 nt, Homo sapiens
  misc_RNA (1)...(19): siRNA sense strand
aaggagaagcugagugcca

SEQ ID NO: 2530925 - RNA, 19 nt, Homo sapiens
  misc_RNA (1)...(19): siRNA sense strand
aaacggagccagaggccca

SEQ ID NO: 2530926 - RNA, 19 nt, Homo sapiens
  misc_RNA (1)...(19): siRNA sense strand
cuguguggaccguggauga

SEQ ID NO: 2530927 - RNA, 19 nt, Homo sapiens
  misc_RNA (1)...(19): siRNA sense strand
cuuccagggccgagaucuu

SEQ ID NO: 2530928 - RNA, 19 nt, Homo sapiens
  misc_RNA (1)...(19): siRNA sense strand
aggcaaaagcaaaggcaaa

SEQ ID NO: 2530929 - RNA, 19 nt, Homo sapiens
  misc_RNA (1)...(19): siRNA sense strand
cgucaguguguuagugaaa

SEQ ID NO: 2530930 - RNA, 19 nt, Homo sapiens
  misc_RNA (1)...(19): siRNA sense strand
ccagaaacgcagucggaau

SEQ ID NO: 2530931 - RNA, 19 nt, Homo sapiens
  misc_RNA (1)...(19): siRNA sense strand
ucgcaaggaauaaggcaaa

SEQ ID NO: 2530932 - RNA, 19 nt, Homo sapiens
  misc_RNA (1)...(19): siRNA sense strand
ggcauaaacuugagggaag

SEQ ID NO: 2530933 - RNA, 19 nt, Homo sapiens
  misc_RNA (1)...(19): siRNA sense strand
agccaaugacaaagauaaa

SEQ ID NO: 2530934 - RNA, 19 nt, Homo sapiens
  misc_RNA (1)...(19): siRNA sense strand
augaaaagggagugguuaa

SEQ ID NO: 2530935 - RNA, 19 nt, Homo sapiens
  misc_RNA (1)...(19): siRNA sense strand
gaucagagccuauggcagu

SEQ ID NO: 2530936 - RNA, 19 nt, Homo sapiens
  misc_RNA (1)...(19): siRNA sense strand
cguucaaggaagaccagaa

SEQ ID NO: 2530937 - RNA, 19 nt, Homo sapiens
  misc_RNA (1)...(19): siRNA sense strand
caucaacagacuuggcaau

SEQ ID NO: 2530938 - RNA, 19 nt, Homo sapiens
  misc_RNA (1)...(19): siRNA sense strand
aggaauaaggcaaaagcaa

SEQ ID NO: 2530939 - RNA, 19 nt, Homo sapiens
  misc_RNA (1)...(19): siRNA sense strand
agucggaauuggagccaga

SEQ ID NO: 2530940 - RNA, 19 nt, Homo sapiens
  misc_RNA (1)...(19): siRNA sense strand
gggaagagacaucgugcca

SEQ ID NO: 2530941 - RNA, 19 nt, Homo sapiens
  misc_RNA (1)...(19): siRNA sense strand
ccuuaagugaagaugaaaa

SEQ ID NO: 2530942 - RNA, 19 nt, Homo sapiens
  misc_RNA (1)...(19): siRNA sense strand
gaagagacaucgugccagu

SEQ ID NO: 2530943 - RNA, 19 nt, Homo sapiens
  misc_RNA (1)...(19): siRNA sense strand
ggguuguaguugagcccuu

SEQ ID NO: 2530944 - RNA, 19 nt, Homo sapiens
  misc_RNA (1)...(19): siRNA sense strand
ggaauuggagccagagcca

SEQ ID NO: 2530945 - RNA, 19 nt, Homo sapiens
  misc_RNA (1)...(19): siRNA sense strand
acaucgugccagugaaaga

SEQ ID NO: 2530946 - RNA, 19 nt, Homo sapiens
  misc_RNA (1)...(19): siRNA sense strand
aaccagacuaugagccaaa

SEQ ID NO: 2530947 - RNA, 19 nt, Homo sapiens
  misc_RNA (1)...(19): siRNA sense strand
agccagagccagagccaga

SEQ ID NO: 2530948 - RNA, 19 nt, Homo sapiens
  misc_RNA (1)...(19): siRNA sense strand
agccagagccagagccaga

SEQ ID NO: 2530949 - RNA, 19 nt, Homo sapiens
  misc_RNA (1)...(19): siRNA sense strand
aaacuugagggaagagaca

SEQ ID NO: 2530950 - RNA, 19 nt, Homo sapiens
  misc_RNA (1)...(19): siRNA sense strand
gaacaagguuauuaccagu

SEQ ID NO: 2530951 - RNA, 19 nt, Homo sapiens
  misc_RNA (1)...(19): siRNA sense strand
agccagagccagagucaga

SEQ ID NO: 2530952 - RNA, 19 nt, Homo sapiens
  misc_RNA (1)...(19): siRNA sense strand
ucaaggaagaccagaaacu

SEQ ID NO: 2530953 - RNA, 19 nt, Homo sapiens
  misc_RNA (1)...(19): siRNA sense strand
gccagcagacaguggaauu

SEQ ID NO: 2530954 - RNA, 19 nt, Homo sapiens
  misc_RNA (1)...(19): siRNA sense strand
ggcaaaagcaaaggcaaaa

SEQ ID NO: 2530955 - RNA, 19 nt, Homo sapiens
  misc_RNA (1)...(19): siRNA sense strand
uuguagcguucaaggaaga

SEQ ID NO: 2530956 - RNA, 19 nt, Homo sapiens
  misc_RNA (1)...(19): siRNA sense strand
aaagaaaacuucaacccaa

SEQ ID NO: 2530957 - RNA, 19 nt, Homo sapiens
  misc_RNA (1)...(19): siRNA sense strand
ucauuggaaaucugacaaa

SEQ ID NO: 2530958 - RNA, 19 nt, Homo sapiens
  misc_RNA (1)...(19): siRNA sense strand
aacuugagccaaugacaaa

SEQ ID NO: 2530959 - RNA, 19 nt, Homo sapiens
  misc_RNA (1)...(19): siRNA sense strand
uggacaagcuguagccauc

SEQ ID NO: 2530960 - RNA, 19 nt, Homo sapiens
  misc_RNA (1)...(19): siRNA sense strand
uggcauaaacuugagggaa

SEQ ID NO: 2530961 - RNA, 19 nt, Homo sapiens
  misc_RNA (1)...(19): siRNA sense strand
aauuggagccagagccaga

SEQ ID NO: 2530962 - RNA, 19 nt, Homo sapiens
  misc_RNA (1)...(19): siRNA sense strand
cgggcaauuuaaagaucga

SEQ ID NO: 2530963 - RNA, 19 nt, Homo sapiens
  misc_RNA (1)...(19): siRNA sense strand
uggcaauaguuccugcgaa

SEQ ID NO: 2530964 - RNA, 19 nt, Homo sapiens
  misc_RNA (1)...(19): siRNA sense strand
aaagcaaaggcaaaagaaa

SEQ ID NO: 2530965 - RNA, 19 nt, Homo sapiens
  misc_RNA (1)...(19): siRNA sense strand
cgaagcaaugccaagagaa

SEQ ID NO: 2530966 - RNA, 19 nt, Homo sapiens
  misc_RNA (1)...(19): siRNA sense strand
agaggaaacaggaggagga

SEQ ID NO: 2530967 - RNA, 19 nt, Homo sapiens
  misc_RNA (1)...(19): siRNA sense strand
augugaaccagcaggacaa

SEQ ID NO: 2530968 - RNA, 19 nt, Homo sapiens
  misc_RNA (1)...(19): siRNA sense strand
gaagcaaguccgugccaga

SEQ ID NO: 2530969 - RNA, 19 nt, Homo sapiens
  misc_RNA (1)...(19): siRNA sense strand
ucaggauagagaagaggaa

SEQ ID NO: 2530970 - RNA, 19 nt, Homo sapiens
  misc_RNA (1)...(19): siRNA sense strand
aggauagagaagaggaaac

SEQ ID NO: 2530971 - RNA, 19 nt, Homo sapiens
  misc_RNA (1)...(19): siRNA sense strand
aggaggaggaggccagaau

SEQ ID NO: 2530972 - RNA, 19 nt, Homo sapiens
  misc_RNA (1)...(19): siRNA sense strand
aagaggaagagcuggcauu

SEQ ID NO: 2530973 - RNA, 19 nt, Homo sapiens
  misc_RNA (1)...(19): siRNA sense strand
caggauagagaagaggaaa

SEQ ID NO: 2530974 - RNA, 19 nt, Homo sapiens
  misc_RNA (1)...(19): siRNA sense strand
ggacagcaaugggaggaca

SEQ ID NO: 2530975 - RNA, 19 nt, Homo sapiens
  misc_RNA (1)...(19): siRNA sense strand
agaagaggaaacaggagga

SEQ ID NO: 2530976 - RNA, 19 nt, Homo sapiens
  misc_RNA (1)...(19): siRNA sense strand
agauaaaggaggaggagga

SEQ ID NO: 2530977 - RNA, 19 nt, Homo sapiens
  misc_RNA (1)...(19): siRNA sense strand
cgguggagguugaggagga

SEQ ID NO: 2530978 - RNA, 19 nt, Homo sapiens
  misc_RNA (1)...(19): siRNA sense strand
ugauaaaauccgcagaaaa

SEQ ID NO: 2530979 - RNA, 19 nt, Homo sapiens
  misc_RNA (1)...(19): siRNA sense strand
agucauuaccucagaagau

SEQ ID NO: 2530980 - RNA, 19 nt, Homo sapiens
  misc_RNA (1)...(19): siRNA sense strand
caauggaagggcagcacaa

SEQ ID NO: 2530981 - RNA, 19 nt, Homo sapiens
  misc_RNA (1)...(19): siRNA sense strand
auucaguauucuuggauga

SEQ ID NO: 2530982 - RNA, 19 nt, Homo sapiens
  misc_RNA (1)...(19): siRNA sense strand
cucuaaagauaaaggagga

SEQ ID NO: 2530983 - RNA, 19 nt, Homo sapiens
  misc_RNA (1)...(19): siRNA sense strand
aaaugaaagccaagcccua

SEQ ID NO: 2530984 - RNA, 19 nt, Homo sapiens
  misc_RNA (1)...(19): siRNA sense strand
gcuuaaugguguuuggucu

SEQ ID NO: 2530985 - RNA, 19 nt, Homo sapiens
  misc_RNA (1)...(19): siRNA sense strand
ugaaguuauugcugcacaa

SEQ ID NO: 2530986 - RNA, 19 nt, Homo sapiens
  misc_RNA (1)...(19): siRNA sense strand
cuuaaugguguuuggucua

SEQ ID NO: 2530987 - RNA, 19 nt, Homo sapiens
  misc_RNA (1)...(19): siRNA sense strand
ggucaagcuacauuagaga

SEQ ID NO: 2530988 - RNA, 19 nt, Homo sapiens
  misc_RNA (1)...(19): siRNA sense strand
ugcuggaagacgaaaguua

SEQ ID NO: 2530989 - RNA, 19 nt, Homo sapiens
  misc_RNA (1)...(19): siRNA sense strand
ggaagggcuacgaagucaa

SEQ ID NO: 2530990 - RNA, 19 nt, Homo sapiens
  misc_RNA (1)...(19): siRNA sense strand
ggcaauugguuugaggcaa

SEQ ID NO: 2530991 - RNA, 19 nt, Homo sapiens
  misc_RNA (1)...(19): siRNA sense strand
acgaaaagacgcaggacca

SEQ ID NO: 2530992 - RNA, 19 nt, Homo sapiens
  misc_RNA (1)...(19): siRNA sense strand
augaacagcggaugaaaga

SEQ ID NO: 2530993 - RNA, 19 nt, Homo sapiens
  misc_RNA (1)...(19): siRNA sense strand
cuugcaugaucuugucaaa

SEQ ID NO: 2530994 - RNA, 19 nt, Homo sapiens
  misc_RNA (1)...(19): siRNA sense strand
ucaucaaggcaauugguuu

SEQ ID NO: 2530995 - RNA, 19 nt, Homo sapiens
  misc_RNA (1)...(19): siRNA sense strand
gguccuuggaggucgaaaa

SEQ ID NO: 2530996 - RNA, 19 nt, Homo sapiens
  misc_RNA (1)...(19): siRNA sense strand
uaaagauaaaggaggagga

SEQ ID NO: 2530997 - RNA, 19 nt, Homo sapiens
  misc_RNA (1)...(19): siRNA sense strand
uggaugagcuuaauggugu

SEQ ID NO: 2530998 - RNA, 19 nt, Homo sapiens
  misc_RNA (1)...(19): siRNA sense strand
gugcaagguuggagacagc

SEQ ID NO: 2530999 - RNA, 19 nt, Homo sapiens
  misc_RNA (1)...(19): siRNA sense strand
uauucuuggaugagcuuaa

SEQ ID NO: 2531000 - RNA, 19 nt, Homo sapiens
  misc_RNA (1)...(19): siRNA sense strand
agguugaggaggaggauag

SEQ ID NO: 2531001 - RNA, 19 nt, Homo sapiens
  misc_RNA (1)...(19): siRNA sense strand
aguccauacaggagagaaa

SEQ ID NO: 2531002 - RNA, 19 nt, Homo sapiens
  misc_RNA (1)...(19): siRNA sense strand
agaacacacauuagagaaa

SEQ ID NO: 2531003 - RNA, 19 nt, Homo sapiens
  misc_RNA (1)...(19): siRNA sense strand
acgugauguuggagaacua

SEQ ID NO: 2531004 - RNA, 19 nt, Homo sapiens
  misc_RNA (1)...(19): siRNA sense strand
ggauuaucaccaaaggaaa

SEQ ID NO: 2531005 - RNA, 19 nt, Homo sapiens
  misc_RNA (1)...(19): siRNA sense strand
aacucauacuggagagaaa

SEQ ID NO: 2531006 - RNA, 19 nt, Homo sapiens
  misc_RNA (1)...(19): siRNA sense strand
ucuuuaaagcagaguguuu

SEQ ID NO: 2531007 - RNA, 19 nt, Homo sapiens
  misc_RNA (1)...(19): siRNA sense strand
gauuaagcuuacaggcaca

SEQ ID NO: 2531008 - RNA, 19 nt, Homo sapiens
  misc_RNA (1)...(19): siRNA sense strand
auguaaugaguguggcaaa

SEQ ID NO: 2531009 - RNA, 19 nt, Homo sapiens
  misc_RNA (1)...(19): siRNA sense strand
gauuaucaccaaaggaaaa

SEQ ID NO: 2531010 - RNA, 19 nt, Homo sapiens
  misc_RNA (1)...(19): siRNA sense strand
uggcaaggucuguagucaa

SEQ ID NO: 2531011 - RNA, 19 nt, Homo sapiens
  misc_RNA (1)...(19): siRNA sense strand
ugguaaugcuuuauuccaa

SEQ ID NO: 2531012 - RNA, 19 nt, Homo sapiens
  misc_RNA (1)...(19): siRNA sense strand
guguaaugacuguggaaag

SEQ ID NO: 2531013 - RNA, 19 nt, Homo sapiens
  misc_RNA (1)...(19): siRNA sense strand
uuguggaacaucagagaau

SEQ ID NO: 2531014 - RNA, 19 nt, Homo sapiens
  misc_RNA (1)...(19): siRNA sense strand
cucaaggaagucugggaaa

SEQ ID NO: 2531015 - RNA, 19 nt, Homo sapiens
  misc_RNA (1)...(19): siRNA sense strand
cauucaaggauguggccau

SEQ ID NO: 2531016 - RNA, 19 nt, Homo sapiens
  misc_RNA (1)...(19): siRNA sense strand
ucaaggaagucugggaaaa

SEQ ID NO: 2531017 - RNA, 19 nt, Homo sapiens
  misc_RNA (1)...(19): siRNA sense strand
aagguaugccggaaacaaa

SEQ ID NO: 2531018 - RNA, 19 nt, Homo sapiens
  misc_RNA (1)...(19): siRNA sense strand
ccggaaacaaauacgugaa

SEQ ID NO: 2531019 - RNA, 19 nt, Homo sapiens
  misc_RNA (1)...(19): siRNA sense strand
uggcaaagcuuuuacccaa

SEQ ID NO: 2531020 - RNA, 19 nt, Homo sapiens
  misc_RNA (1)...(19): siRNA sense strand
gaauauacauccuggagag

SEQ ID NO: 2531021 - RNA, 19 nt, Homo sapiens
  misc_RNA (1)...(19): siRNA sense strand
auguaacgaguguggcaaa

SEQ ID NO: 2531022 - RNA, 19 nt, Homo sapiens
  misc_RNA (1)...(19): siRNA sense strand
ccucaaggaagucugggaa

SEQ ID NO: 2531023 - RNA, 19 nt, Homo sapiens
  misc_RNA (1)...(19): siRNA sense strand
ggaaaauaugccuaaguuu

SEQ ID NO: 2531024 - RNA, 19 nt, Homo sapiens
  misc_RNA (1)...(19): siRNA sense strand
ucucaagaggagugggagu

SEQ ID NO: 2531025 - RNA, 19 nt, Homo sapiens
  misc_RNA (1)...(19): siRNA sense strand
cagcauaagaaaauccaua

SEQ ID NO: 2531026 - RNA, 19 nt, Homo sapiens
  misc_RNA (1)...(19): siRNA sense strand
uagaaagaaaggaaagcca

SEQ ID NO: 2531027 - RNA, 19 nt, Homo sapiens
  misc_RNA (1)...(19): siRNA sense strand
agaaagaaaggaaagccau

SEQ ID NO: 2531028 - RNA, 19 nt, Homo sapiens
  misc_RNA (1)...(19): siRNA sense strand
auacaggagagaaaccaua

SEQ ID NO: 2531029 - RNA, 19 nt, Homo sapiens
  misc_RNA (1)...(19): siRNA sense strand
ggauuuacaagcaagggau

SEQ ID NO: 2531030 - RNA, 19 nt, Homo sapiens
  misc_RNA (1)...(19): siRNA sense strand
gauuuacaagcaagggauu

SEQ ID NO: 2531031 - RNA, 19 nt, Homo sapiens
  misc_RNA (1)...(19): siRNA sense strand
gaaaggaaagccauggcau

SEQ ID NO: 2531032 - RNA, 19 nt, Homo sapiens
  misc_RNA (1)...(19): siRNA sense strand
ggggagaaaauguaugaau

SEQ ID NO: 2531033 - RNA, 19 nt, Homo sapiens
  misc_RNA (1)...(19): siRNA sense strand
ccucacuaaucaucagaga

SEQ ID NO: 2531034 - RNA, 19 nt, Homo sapiens
  misc_RNA (1)...(19): siRNA sense strand
uggagagaaaccacacaaa

SEQ ID NO: 2531035 - RNA, 19 nt, Homo sapiens
  misc_RNA (1)...(19): siRNA sense strand
auguacugaauguggcaaa

SEQ ID NO: 2531036 - RNA, 19 nt, Homo sapiens
  misc_RNA (1)...(19): siRNA sense strand
auguacugaauguggcaaa

SEQ ID NO: 2531037 - RNA, 19 nt, Homo sapiens
  misc_RNA (1)...(19): siRNA sense strand
uauaagagauagugcacac

SEQ ID NO: 2531038 - RNA, 19 nt, Homo sapiens
  misc_RNA (1)...(19): siRNA sense strand
ggagaaaauguaugaaugu

SEQ ID NO: 2531039 - RNA, 19 nt, Homo sapiens
  misc_RNA (1)...(19): siRNA sense strand
uuacccaacauaagagaau

SEQ ID NO: 2531040 - RNA, 19 nt, Homo sapiens
  misc_RNA (1)...(19): siRNA sense strand
uguuggagaacuacaggaa

SEQ ID NO: 2531041 - RNA, 19 nt, Homo sapiens
  misc_RNA (1)...(19): siRNA sense strand
ccucacuagacaccagaaa

SEQ ID NO: 2531042 - RNA, 19 nt, Homo sapiens
  misc_RNA (1)...(19): siRNA sense strand
auucaaggauguggccaua

SEQ ID NO: 2531043 - RNA, 19 nt, Homo sapiens
  misc_RNA (1)...(19): siRNA sense strand
ucacuaggcaucagagagu

SEQ ID NO: 2531044 - RNA, 19 nt, Homo sapiens
  misc_RNA (1)...(19): siRNA sense strand
uaaugaaugugguaaggca

SEQ ID NO: 2531045 - RNA, 19 nt, Homo sapiens
  misc_RNA (1)...(19): siRNA sense strand
caucuggugauauuagaaa

SEQ ID NO: 2531046 - RNA, 19 nt, Homo sapiens
  misc_RNA (1)...(19): siRNA sense strand
ggauuaagcuuacaggcac

SEQ ID NO: 2531047 - RNA, 19 nt, Homo sapiens
  misc_RNA (1)...(19): siRNA sense strand
ccaaacacaaauauggcaa

SEQ ID NO: 2531048 - RNA, 19 nt, Homo sapiens
  misc_RNA (1)...(19): siRNA sense strand
cgagguaguaugagaaacu

SEQ ID NO: 2531049 - RNA, 19 nt, Homo sapiens
  misc_RNA (1)...(19): siRNA sense strand
ggccugggacgaugggaaa

SEQ ID NO: 2531050 - RNA, 19 nt, Homo sapiens
  misc_RNA (1)...(19): siRNA sense strand
ggacagagauguauugccu

SEQ ID NO: 2531051 - RNA, 19 nt, Homo sapiens
  misc_RNA (1)...(19): siRNA sense strand
ccaacagggcagcagacaa

SEQ ID NO: 2531052 - RNA, 19 nt, Homo sapiens
  misc_RNA (1)...(19): siRNA sense strand
ccauaaaggcaguggccag

SEQ ID NO: 2531053 - RNA, 19 nt, Homo sapiens
  misc_RNA (1)...(19): siRNA sense strand
ggcaguggccagaaggaau

SEQ ID NO: 2531054 - RNA, 19 nt, Homo sapiens
  misc_RNA (1)...(19): siRNA sense strand
ugcaauugauggagaaacu

SEQ ID NO: 2531055 - RNA, 19 nt, Homo sapiens
  misc_RNA (1)...(19): siRNA sense strand
ccagcaaaggagaauggaa

SEQ ID NO: 2531056 - RNA, 19 nt, Homo sapiens
  misc_RNA (1)...(19): siRNA sense strand
cacuaugggauuaaagcua

SEQ ID NO: 2531057 - RNA, 19 nt, Homo sapiens
  misc_RNA (1)...(19): siRNA sense strand
ccucagaaaccuucaggga

SEQ ID NO: 2531058 - RNA, 19 nt, Homo sapiens
  misc_RNA (1)...(19): siRNA sense strand
gcaucauacugccaggaca

SEQ ID NO: 2531059 - RNA, 19 nt, Homo sapiens
  misc_RNA (1)...(19): siRNA sense strand
aggaauugagcgagguagu

SEQ ID NO: 2531060 - RNA, 19 nt, Homo sapiens
  misc_RNA (1)...(19): siRNA sense strand
uccuauaagacaagcauuu

SEQ ID NO: 2531061 - RNA, 19 nt, Homo sapiens
  misc_RNA (1)...(19): siRNA sense strand
caaaagucaagcagaagaa

SEQ ID NO: 2531062 - RNA, 19 nt, Homo sapiens
  misc_RNA (1)...(19): siRNA sense strand
aagcaaaggccugggacga

SEQ ID NO: 2531063 - RNA, 19 nt, Homo sapiens
  misc_RNA (1)...(19): siRNA sense strand
ugaucaaccagcagauaca

SEQ ID NO: 2531064 - RNA, 19 nt, Homo sapiens
  misc_RNA (1)...(19): siRNA sense strand
aggccugggacgaugggaa

SEQ ID NO: 2531065 - RNA, 19 nt, Homo sapiens
  misc_RNA (1)...(19): siRNA sense strand
ccaggacagaaauggaaau

SEQ ID NO: 2531066 - RNA, 19 nt, Homo sapiens
  misc_RNA (1)...(19): siRNA sense strand
gaagauauucagaagugga

SEQ ID NO: 2531067 - RNA, 19 nt, Homo sapiens
  misc_RNA (1)...(19): siRNA sense strand
uuccaaaagucaagcagaa

SEQ ID NO: 2531068 - RNA, 19 nt, Homo sapiens
  misc_RNA (1)...(19): siRNA sense strand
agucaagugaaacgaauga

SEQ ID NO: 2531069 - RNA, 19 nt, Homo sapiens
  misc_RNA (1)...(19): siRNA sense strand
ggguaauauugcuguggaa

SEQ ID NO: 2531070 - RNA, 19 nt, Homo sapiens
  misc_RNA (1)...(19): siRNA sense strand
aagaugaggaagagaacaa

SEQ ID NO: 2531071 - RNA, 19 nt, Homo sapiens
  misc_RNA (1)...(19): siRNA sense strand
agggagaagaugaggaaga

SEQ ID NO: 2531072 - RNA, 19 nt, Homo sapiens
  misc_RNA (1)...(19): siRNA sense strand
agguaaagggagaagauga

SEQ ID NO: 2531073 - RNA, 19 nt, Homo sapiens
  misc_RNA (1)...(19): siRNA sense strand
gcgugcagguaaagggaga

SEQ ID NO: 2531074 - RNA, 19 nt, Homo sapiens
  misc_RNA (1)...(19): siRNA sense strand
caacaagagaauaggccuu

SEQ ID NO: 2531075 - RNA, 19 nt, Homo sapiens
  misc_RNA (1)...(19): siRNA sense strand
cugaaggagccaagaacau

SEQ ID NO: 2531076 - RNA, 19 nt, Homo sapiens
  misc_RNA (1)...(19): siRNA sense strand
guuugaugaacaagugaua

SEQ ID NO: 2531077 - RNA, 19 nt, Homo sapiens
  misc_RNA (1)...(19): siRNA sense strand
gcuaugauuaccagagaca

SEQ ID NO: 2531078 - RNA, 19 nt, Homo sapiens
  misc_RNA (1)...(19): siRNA sense strand
cgaaauguggagagcuaca

SEQ ID NO: 2531079 - RNA, 19 nt, Homo sapiens
  misc_RNA (1)...(19): siRNA sense strand
ggaccauguguuugaugaa

SEQ ID NO: 2531080 - RNA, 19 nt, Homo sapiens
  misc_RNA (1)...(19): siRNA sense strand
agccaagaacauugaaauu

SEQ ID NO: 2531081 - RNA, 19 nt, Homo sapiens
  misc_RNA (1)...(19): siRNA sense strand
agaugagguuuguggacca

SEQ ID NO: 2531082 - RNA, 19 nt, Homo sapiens
  misc_RNA (1)...(19): siRNA sense strand
cgucaauagguacaagcaa

SEQ ID NO: 2531083 - RNA, 19 nt, Homo sapiens
  misc_RNA (1)...(19): siRNA sense strand
gaauaggccuuuaccguca

SEQ ID NO: 2531084 - RNA, 19 nt, Homo sapiens
  misc_RNA (1)...(19): siRNA sense strand
ccgcagaagccaggaugaa

SEQ ID NO: 2531085 - RNA, 19 nt, Homo sapiens
  misc_RNA (1)...(19): siRNA sense strand
gcgaaaugcagaagcugga

SEQ ID NO: 2531086 - RNA, 19 nt, Homo sapiens
  misc_RNA (1)...(19): siRNA sense strand
gguaaaagugggagauucu

SEQ ID NO: 2531087 - RNA, 19 nt, Homo sapiens
  misc_RNA (1)...(19): siRNA sense strand
uggaaguacgugaaaccaa

SEQ ID NO: 2531088 - RNA, 19 nt, Homo sapiens
  misc_RNA (1)...(19): siRNA sense strand
uauccaacgaagacacaaa

SEQ ID NO: 2531089 - RNA, 19 nt, Homo sapiens
  misc_RNA (1)...(19): siRNA sense strand
guacauuaugagaacaaca

SEQ ID NO: 2531090 - RNA, 19 nt, Homo sapiens
  misc_RNA (1)...(19): siRNA sense strand
cccauuacaucguuggcua

SEQ ID NO: 2531091 - RNA, 19 nt, Homo sapiens
  misc_RNA (1)...(19): siRNA sense strand
uugaugaacaagugauaga

SEQ ID NO: 2531092 - RNA, 19 nt, Homo sapiens
  misc_RNA (1)...(19): siRNA sense strand
agacugaacacaaggccuu

SEQ ID NO: 2531093 - RNA, 19 nt, Homo sapiens
  misc_RNA (1)...(19): siRNA sense strand
agacacguacauugagaau

SEQ ID NO: 2531094 - RNA, 19 nt, Homo sapiens
  misc_RNA (1)...(19): siRNA sense strand
uggaagaaaauguggacuu

SEQ ID NO: 2531095 - RNA, 19 nt, Homo sapiens
  misc_RNA (1)...(19): siRNA sense strand
ucacccagucagagaaaca

SEQ ID NO: 2531096 - RNA, 19 nt, Homo sapiens
  misc_RNA (1)...(19): siRNA sense strand
gaagagaacaauuuggaag

SEQ ID NO: 2531097 - RNA, 19 nt, Homo sapiens
  misc_RNA (1)...(19): siRNA sense strand
ggagccaagaacauugaaa

SEQ ID NO: 2531098 - RNA, 19 nt, Homo sapiens
  misc_RNA (1)...(19): siRNA sense strand
gguaaagggagaagaugag

SEQ ID NO: 2531099 - RNA, 19 nt, Homo sapiens
  misc_RNA (1)...(19): siRNA sense strand
gauuucagucauuguggaa

SEQ ID NO: 2531100 - RNA, 19 nt, Homo sapiens
  misc_RNA (1)...(19): siRNA sense strand
gagaauaggccuuuaccgu

SEQ ID NO: 2531101 - RNA, 19 nt, Homo sapiens
  misc_RNA (1)...(19): siRNA sense strand
gagugagcgaaaugcagaa

SEQ ID NO: 2531102 - RNA, 19 nt, Homo sapiens
  misc_RNA (1)...(19): siRNA sense strand
caaaugaaauuaauggcga

SEQ ID NO: 2531103 - RNA, 19 nt, Homo sapiens
  misc_RNA (1)...(19): siRNA sense strand
acauaugcaucauuggcua

SEQ ID NO: 2531104 - RNA, 19 nt, Homo sapiens
  misc_RNA (1)...(19): siRNA sense strand
agguuaaacaugaugcuuu

SEQ ID NO: 2531105 - RNA, 19 nt, Homo sapiens
  misc_RNA (1)...(19): siRNA sense strand
ccaccaaaaggaaggguuu

SEQ ID NO: 2531106 - RNA, 19 nt, Homo sapiens
  misc_RNA (1)...(19): siRNA sense strand
guguauucauuaugggcaa

SEQ ID NO: 2531107 - RNA, 19 nt, Homo sapiens
  misc_RNA (1)...(19): siRNA sense strand
aaaacaggguugagaggaa

SEQ ID NO: 2531108 - RNA, 19 nt, Homo sapiens
  misc_RNA (1)...(19): siRNA sense strand
ggguaguggugacugggua

SEQ ID NO: 2531109 - RNA, 19 nt, Homo sapiens
  misc_RNA (1)...(19): siRNA sense strand
gugucaauaaagagcacaa

SEQ ID NO: 2531110 - RNA, 19 nt, Homo sapiens
  misc_RNA (1)...(19): siRNA sense strand
uaaagaaguccaugcguga

SEQ ID NO: 2531111 - RNA, 19 nt, Homo sapiens
  misc_RNA (1)...(19): siRNA sense strand
ugagaggaagaaagggcaa

SEQ ID NO: 2531112 - RNA, 19 nt, Homo sapiens
  misc_RNA (1)...(19): siRNA sense strand
aggaggaaggcgaaaugaa

SEQ ID NO: 2531113 - RNA, 19 nt, Homo sapiens
  misc_RNA (1)...(19): siRNA sense strand
uuugccaaguggagugaaa

SEQ ID NO: 2531114 - RNA, 19 nt, Homo sapiens
  misc_RNA (1)...(19): siRNA sense strand
gaggaaggcgaaaugaaaa

SEQ ID NO: 2531115 - RNA, 19 nt, Homo sapiens
  misc_RNA (1)...(19): siRNA sense strand
auacauuccgauugaugaa

SEQ ID NO: 2531116 - RNA, 19 nt, Homo sapiens
  misc_RNA (1)...(19): siRNA sense strand
agaaagggcaauuuagcca

SEQ ID NO: 2531117 - RNA, 19 nt, Homo sapiens
  misc_RNA (1)...(19): siRNA sense strand
cguuacaguuggagaggau

SEQ ID NO: 2531118 - RNA, 19 nt, Homo sapiens
  misc_RNA (1)...(19): siRNA sense strand
gcuacaggaucuugggaca

SEQ ID NO: 2531119 - RNA, 19 nt, Homo sapiens
  misc_RNA (1)...(19): siRNA sense strand
cuguaagaaccauagacaa

SEQ ID NO: 2531120 - RNA, 19 nt, Homo sapiens
  misc_RNA (1)...(19): siRNA sense strand
ggaggaaauuuaugcgaag

SEQ ID NO: 2531121 - RNA, 19 nt, Homo sapiens
  misc_RNA (1)...(19): siRNA sense strand
auggaggguuugaaggaga

SEQ ID NO: 2531122 - RNA, 19 nt, Homo sapiens
  misc_RNA (1)...(19): siRNA sense strand
ggaaagaauugucgcugcu

SEQ ID NO: 2531123 - RNA, 19 nt, Homo sapiens
  misc_RNA (1)...(19): siRNA sense strand
cagcacugauccugcaaaa

SEQ ID NO: 2531124 - RNA, 19 nt, Homo sapiens
  misc_RNA (1)...(19): siRNA sense strand
guauuugggauguuagaca

SEQ ID NO: 2531125 - RNA, 19 nt, Homo sapiens
  misc_RNA (1)...(19): siRNA sense strand
cuacaggaucuugggacaa

SEQ ID NO: 2531126 - RNA, 19 nt, Homo sapiens
  misc_RNA (1)...(19): siRNA sense strand
ccaaggaggaagaagcagu

SEQ ID NO: 2531127 - RNA, 19 nt, Homo sapiens
  misc_RNA (1)...(19): siRNA sense strand
gucauuagcuccuggcuca

SEQ ID NO: 2531128 - RNA, 19 nt, Homo sapiens
  misc_RNA (1)...(19): siRNA sense strand
acaaggaagcuguaagaac

SEQ ID NO: 2531129 - RNA, 19 nt, Homo sapiens
  misc_RNA (1)...(19): siRNA sense strand
ggaagcuguaagaaccaua

SEQ ID NO: 2531130 - RNA, 19 nt, Homo sapiens
  misc_RNA (1)...(19): siRNA sense strand
ggauguuagacaagguacu

SEQ ID NO: 2531131 - RNA, 19 nt, Homo sapiens
  misc_RNA (1)...(19): siRNA sense strand
ucauagcauuaguaaccaa

SEQ ID NO: 2531132 - RNA, 19 nt, Homo sapiens
  misc_RNA (1)...(19): siRNA sense strand
gguuugaaggagaccauca

SEQ ID NO: 2531133 - RNA, 19 nt, Homo sapiens
  misc_RNA (1)...(19): siRNA sense strand
aggaaauuuaugcgaaguu

SEQ ID NO: 2531134 - RNA, 19 nt, Homo sapiens
  misc_RNA (1)...(19): siRNA sense strand
uguagcuacugguggccaa

SEQ ID NO: 2531135 - RNA, 19 nt, Homo sapiens
  misc_RNA (1)...(19): siRNA sense strand
cguuacaguuggagaggau

SEQ ID NO: 2531136 - RNA, 19 nt, Homo sapiens
  misc_RNA (1)...(19): siRNA sense strand
gcuacaggaucuugggaca

SEQ ID NO: 2531137 - RNA, 19 nt, Homo sapiens
  misc_RNA (1)...(19): siRNA sense strand
cuguaagaaccauagacaa

SEQ ID NO: 2531138 - RNA, 19 nt, Homo sapiens
  misc_RNA (1)...(19): siRNA sense strand
ggaggaaauuuaugcgaag

SEQ ID NO: 2531139 - RNA, 19 nt, Homo sapiens
  misc_RNA (1)...(19): siRNA sense strand
auggaggguuugaaggaga

SEQ ID NO: 2531140 - RNA, 19 nt, Homo sapiens
  misc_RNA (1)...(19): siRNA sense strand
ggaaagaauugucgcugcu

SEQ ID NO: 2531141 - RNA, 19 nt, Homo sapiens
  misc_RNA (1)...(19): siRNA sense strand
cagcacugauccugcaaaa

SEQ ID NO: 2531142 - RNA, 19 nt, Homo sapiens
  misc_RNA (1)...(19): siRNA sense strand
guauuugggauguuagaca

SEQ ID NO: 2531143 - RNA, 19 nt, Homo sapiens
  misc_RNA (1)...(19): siRNA sense strand
cuacaggaucuugggacaa

SEQ ID NO: 2531144 - RNA, 19 nt, Homo sapiens
  misc_RNA (1)...(19): siRNA sense strand
ccaaggaggaagaagcagu

SEQ ID NO: 2531145 - RNA, 19 nt, Homo sapiens
  misc_RNA (1)...(19): siRNA sense strand
gucauuagcuccuggcuca

SEQ ID NO: 2531146 - RNA, 19 nt, Homo sapiens
  misc_RNA (1)...(19): siRNA sense strand
acaaggaagcuguaagaac

SEQ ID NO: 2531147 - RNA, 19 nt, Homo sapiens
  misc_RNA (1)...(19): siRNA sense strand
ggaagcuguaagaaccaua

SEQ ID NO: 2531148 - RNA, 19 nt, Homo sapiens
  misc_RNA (1)...(19): siRNA sense strand
ggauguuagacaagguacu

SEQ ID NO: 2531149 - RNA, 19 nt, Homo sapiens
  misc_RNA (1)...(19): siRNA sense strand
ucauagcauuaguaaccaa

SEQ ID NO: 2531150 - RNA, 19 nt, Homo sapiens
  misc_RNA (1)...(19): siRNA sense strand
gguuugaaggagaccauca

SEQ ID NO: 2531151 - RNA, 19 nt, Homo sapiens
  misc_RNA (1)...(19): siRNA sense strand
aggaaauuuaugcgaaguu

SEQ ID NO: 2531152 - RNA, 19 nt, Homo sapiens
  misc_RNA (1)...(19): siRNA sense strand
uguagcuacugguggccaa

SEQ ID NO: 2531153 - RNA, 19 nt, Homo sapiens
  misc_RNA (1)...(19): siRNA sense strand
gagucaaugccuuggccaa

SEQ ID NO: 2531154 - RNA, 19 nt, Homo sapiens
  misc_RNA (1)...(19): siRNA sense strand
agauaugggccacggugaa

SEQ ID NO: 2531155 - RNA, 19 nt, Homo sapiens
  misc_RNA (1)...(19): siRNA sense strand
ccagcucagaggaggcaaa

SEQ ID NO: 2531156 - RNA, 19 nt, Homo sapiens
  misc_RNA (1)...(19): siRNA sense strand
uggaggagcagguggcuga

SEQ ID NO: 2531157 - RNA, 19 nt, Homo sapiens
  misc_RNA (1)...(19): siRNA sense strand
cugagaagaagguggccga

SEQ ID NO: 2531158 - RNA, 19 nt, Homo sapiens
  misc_RNA (1)...(19): siRNA sense strand
agagaggcccugaggagga

SEQ ID NO: 2531159 - RNA, 19 nt, Homo sapiens
  misc_RNA (1)...(19): siRNA sense strand
uguuaucagccgagucaau

SEQ ID NO: 2531160 - RNA, 19 nt, Homo sapiens
  misc_RNA (1)...(19): siRNA sense strand
gaaaagaccagcagagcca

SEQ ID NO: 2531161 - RNA, 19 nt, Homo sapiens
  misc_RNA (1)...(19): siRNA sense strand
agaagagaaccugaggaaa

SEQ ID NO: 2531162 - RNA, 19 nt, Homo sapiens
  misc_RNA (1)...(19): siRNA sense strand
gaggaaagcaacugacaau

SEQ ID NO: 2531163 - RNA, 19 nt, Homo sapiens
  misc_RNA (1)...(19): siRNA sense strand
ggaugaugcuucugcgaga

SEQ ID NO: 2531164 - RNA, 19 nt, Homo sapiens
  misc_RNA (1)...(19): siRNA sense strand
gacaagaugcagaaggcua

SEQ ID NO: 2531165 - RNA, 19 nt, Homo sapiens
  misc_RNA (1)...(19): siRNA sense strand
ggugaaccgaggaaagcaa

SEQ ID NO: 2531166 - RNA, 19 nt, Homo sapiens
  misc_RNA (1)...(19): siRNA sense strand
cgaggaaagcaacugacaa

SEQ ID NO: 2531167 - RNA, 19 nt, Homo sapiens
  misc_RNA (1)...(19): siRNA sense strand
ccuggaaauuugugcugau

SEQ ID NO: 2531168 - RNA, 19 nt, Homo sapiens
  misc_RNA (1)...(19): siRNA sense strand
ggaaagcaacugacaaugu

SEQ ID NO: 2531169 - RNA, 19 nt, Homo sapiens
  misc_RNA (1)...(19): siRNA sense strand
gaaagcaacugacaaugua

SEQ ID NO: 2531170 - RNA, 19 nt, Homo sapiens
  misc_RNA (1)...(19): siRNA sense strand
aaauuagugaccuggaaau

SEQ ID NO: 2531171 - RNA, 19 nt, Homo sapiens
  misc_RNA (1)...(19): siRNA sense strand
gagaggugauggaaccaga

SEQ ID NO: 2531172 - RNA, 19 nt, Homo sapiens
  misc_RNA (1)...(19): siRNA sense strand
agaguuacccagugcccaa

SEQ ID NO: 2531173 - RNA, 19 nt, Homo sapiens
  misc_RNA (1)...(19): siRNA sense strand
ucugaaaccuggcgggaug

SEQ ID NO: 2531174 - RNA, 19 nt, Homo sapiens
  misc_RNA (1)...(19): siRNA sense strand
cgugagaggugauggaacc

SEQ ID NO: 2531175 - RNA, 19 nt, Homo sapiens
  misc_RNA (1)...(19): siRNA sense strand
cuguaaauacuuugagcaa

SEQ ID NO: 2531176 - RNA, 19 nt, Homo sapiens
  misc_RNA (1)...(19): siRNA sense strand
aguacuaccagaagggcua

SEQ ID NO: 2531177 - RNA, 19 nt, Homo sapiens
  misc_RNA (1)...(19): siRNA sense strand
cggaaagcgugaaaagaga

SEQ ID NO: 2531178 - RNA, 19 nt, Homo sapiens
  misc_RNA (1)...(19): siRNA sense strand
gcaaaugucuuuaucgcca

SEQ ID NO: 2531179 - RNA, 19 nt, Homo sapiens
  misc_RNA (1)...(19): siRNA sense strand
uguaauuccaaguguguau

SEQ ID NO: 2531180 - RNA, 19 nt, Homo sapiens
  misc_RNA (1)...(19): siRNA sense strand
ucucacaugacuuggcaaa

SEQ ID NO: 2531181 - RNA, 19 nt, Homo sapiens
  misc_RNA (1)...(19): siRNA sense strand
guaaauacuuugagcaagg

SEQ ID NO: 2531182 - RNA, 19 nt, Homo sapiens
  misc_RNA (1)...(19): siRNA sense strand
ccgugugauaucagaguuu

SEQ ID NO: 2531183 - RNA, 19 nt, Homo sapiens
  misc_RNA (1)...(19): siRNA sense strand
gcucaguucucaaggcacu

SEQ ID NO: 2531184 - RNA, 19 nt, Homo sapiens
  misc_RNA (1)...(19): siRNA sense strand
cguucgaacacgagaugga

SEQ ID NO: 2531185 - RNA, 19 nt, Homo sapiens
  misc_RNA (1)...(19): siRNA sense strand
guggaagaucagaauaaaa

SEQ ID NO: 2531186 - RNA, 19 nt, Homo sapiens
  misc_RNA (1)...(19): siRNA sense strand
guguguauuggguggaaga

SEQ ID NO: 2531187 - RNA, 19 nt, Homo sapiens
  misc_RNA (1)...(19): siRNA sense strand
uggcauggcugaaaggaag

SEQ ID NO: 2531188 - RNA, 19 nt, Homo sapiens
  misc_RNA (1)...(19): siRNA sense strand
aggacaaagugugcaguau

SEQ ID NO: 2531189 - RNA, 19 nt, Homo sapiens
  misc_RNA (1)...(19): siRNA sense strand
ggaaggaagucagugccua

SEQ ID NO: 2531190 - RNA, 19 nt, Homo sapiens
  misc_RNA (1)...(19): siRNA sense strand
ucgaacacgagauggaaaa

SEQ ID NO: 2531191 - RNA, 19 nt, Homo sapiens
  misc_RNA (1)...(19): siRNA sense strand
cuggcauggcugaaaggaa

SEQ ID NO: 2531192 - RNA, 19 nt, Homo sapiens
  misc_RNA (1)...(19): siRNA sense strand
aaacaggggauggggaaaa

SEQ ID NO: 2531193 - RNA, 19 nt, Homo sapiens
  misc_RNA (1)...(19): siRNA sense strand
cagaagaagaagaagaaaa

SEQ ID NO: 2531194 - RNA, 19 nt, Homo sapiens
  misc_RNA (1)...(19): siRNA sense strand
cguuagaguaauuaggcaa

SEQ ID NO: 2531195 - RNA, 19 nt, Homo sapiens
  misc_RNA (1)...(19): siRNA sense strand
cgaugauccucguggccaa

SEQ ID NO: 2531196 - RNA, 19 nt, Homo sapiens
  misc_RNA (1)...(19): siRNA sense strand
cgucaaagacagggaguca

SEQ ID NO: 2531197 - RNA, 19 nt, Homo sapiens
  misc_RNA (1)...(19): siRNA sense strand
ucaccagggagcaaggaaa

SEQ ID NO: 2531198 - RNA, 19 nt, Homo sapiens
  misc_RNA (1)...(19): siRNA sense strand
aguaauuaggcaacagauu

SEQ ID NO: 2531199 - RNA, 19 nt, Homo sapiens
  misc_RNA (1)...(19): siRNA sense strand
agccagaagaagaagaaga

SEQ ID NO: 2531200 - RNA, 19 nt, Homo sapiens
  misc_RNA (1)...(19): siRNA sense strand
cauacaagcuggugguggu

SEQ ID NO: 2531201 - RNA, 19 nt, Homo sapiens
  misc_RNA (1)...(19): siRNA sense strand
auuugaugcacuugaggaa

SEQ ID NO: 2531202 - RNA, 19 nt, Homo sapiens
  misc_RNA (1)...(19): siRNA sense strand
agaagaucuuugugccuga

SEQ ID NO: 2531203 - RNA, 19 nt, Homo sapiens
  misc_RNA (1)...(19): siRNA sense strand
caggaggaauucagcgcca

SEQ ID NO: 2531204 - RNA, 19 nt, Homo sapiens
  misc_RNA (1)...(19): siRNA sense strand
ccagaagaagaagaagaaa

SEQ ID NO: 2531205 - RNA, 19 nt, Homo sapiens
  misc_RNA (1)...(19): siRNA sense strand
ccaucaaaguagaaagcau

SEQ ID NO: 2531206 - RNA, 19 nt, Homo sapiens
  misc_RNA (1)...(19): siRNA sense strand
aguagaaagcauagaggau

SEQ ID NO: 2531207 - RNA, 19 nt, Homo sapiens
  misc_RNA (1)...(19): siRNA sense strand
ggugauugcuagcacggua

SEQ ID NO: 2531208 - RNA, 19 nt, Homo sapiens
  misc_RNA (1)...(19): siRNA sense strand
gguaguuggagaagaaaau

SEQ ID NO: 2531209 - RNA, 19 nt, Homo sapiens
  misc_RNA (1)...(19): siRNA sense strand
auggaaaggcccagaugau

SEQ ID NO: 2531210 - RNA, 19 nt, Homo sapiens
  misc_RNA (1)...(19): siRNA sense strand
ugauaaguggacagaccaa

SEQ ID NO: 2531211 - RNA, 19 nt, Homo sapiens
  misc_RNA (1)...(19): siRNA sense strand
ugacacagaugaugcgagu

SEQ ID NO: 2531212 - RNA, 19 nt, Homo sapiens
  misc_RNA (1)...(19): siRNA sense strand
gugauugcuagcacgguaa

SEQ ID NO: 2531213 - RNA, 19 nt, Homo sapiens
  misc_RNA (1)...(19): siRNA sense strand
ccggaaacgaguagcuaua

SEQ ID NO: 2531214 - RNA, 19 nt, Homo sapiens
  misc_RNA (1)...(19): siRNA sense strand
aguuuauggucaagguuua

SEQ ID NO: 2531215 - RNA, 19 nt, Homo sapiens
  misc_RNA (1)...(19): siRNA sense strand
cgaagaugauggaggugga

SEQ ID NO: 2531216 - RNA, 19 nt, Homo sapiens
  misc_RNA (1)...(19): siRNA sense strand
cuuaaggaguacagcucua

SEQ ID NO: 2531217 - RNA, 19 nt, Homo sapiens
  misc_RNA (1)...(19): siRNA sense strand
ccuaaaggacauucgagaa

SEQ ID NO: 2531218 - RNA, 19 nt, Homo sapiens
  misc_RNA (1)...(19): siRNA sense strand
gugacaagaaguacaggaa

SEQ ID NO: 2531219 - RNA, 19 nt, Homo sapiens
  misc_RNA (1)...(19): siRNA sense strand
cgggcaaugagaagagcua

SEQ ID NO: 2531220 - RNA, 19 nt, Homo sapiens
  misc_RNA (1)...(19): siRNA sense strand
ggagaaagcaggauaccca

SEQ ID NO: 2531221 - RNA, 19 nt, Homo sapiens
  misc_RNA (1)...(19): siRNA sense strand
ggaugaagauugugcgggu

SEQ ID NO: 2531222 - RNA, 19 nt, Homo sapiens
  misc_RNA (1)...(19): siRNA sense strand
gcaagauagaggcagaaau

SEQ ID NO: 2531223 - RNA, 19 nt, Homo sapiens
  misc_RNA (1)...(19): siRNA sense strand
cugcaaagcauaucgggau

SEQ ID NO: 2531224 - RNA, 19 nt, Homo sapiens
  misc_RNA (1)...(19): siRNA sense strand
ggucguaagauucaagaca

SEQ ID NO: 2531225 - RNA, 19 nt, Homo sapiens
  misc_RNA (1)...(19): siRNA sense strand
agauagaggcagaaauugu

SEQ ID NO: 2531226 - RNA, 19 nt, Homo sapiens
  misc_RNA (1)...(19): siRNA sense strand
gaagaauccuaaagcgaag

SEQ ID NO: 2531227 - RNA, 19 nt, Homo sapiens
  misc_RNA (1)...(19): siRNA sense strand
acaaguugaacaagaccaa

SEQ ID NO: 2531228 - RNA, 19 nt, Homo sapiens
  misc_RNA (1)...(19): siRNA sense strand
gugaaggcuuauggagauu

SEQ ID NO: 2531229 - RNA, 19 nt, Homo sapiens
  misc_RNA (1)...(19): siRNA sense strand
ccauuugauuuccggguga

SEQ ID NO: 2531230 - RNA, 19 nt, Homo sapiens
  misc_RNA (1)...(19): siRNA sense strand
augaagaauccuaaagcga

SEQ ID NO: 2531231 - RNA, 19 nt, Homo sapiens
  misc_RNA (1)...(19): siRNA sense strand
uggacaaagaguaugugaa

SEQ ID NO: 2531232 - RNA, 19 nt, Homo sapiens
  misc_RNA (1)...(19): siRNA sense strand
uguauagugacaagaagua

SEQ ID NO: 2531233 - RNA, 19 nt, Homo sapiens
  misc_RNA (1)...(19): siRNA sense strand
caggaauaugguugcagaa

SEQ ID NO: 2531234 - RNA, 19 nt, Homo sapiens
  misc_RNA (1)...(19): siRNA sense strand
cuaccaaacagaucaucaa

SEQ ID NO: 2531235 - RNA, 19 nt, Homo sapiens
  misc_RNA (1)...(19): siRNA sense strand
agauaucuucccaggacua

SEQ ID NO: 2531236 - RNA, 19 nt, Homo sapiens
  misc_RNA (1)...(19): siRNA sense strand
acaagaaguacaggaacua

SEQ ID NO: 2531237 - RNA, 19 nt, Homo sapiens
  misc_RNA (1)...(19): siRNA sense strand
ugaagaauccuaaagcgaa

SEQ ID NO: 2531238 - RNA, 19 nt, Homo sapiens
  misc_RNA (1)...(19): siRNA sense strand
gccagagaguuuaugguca

SEQ ID NO: 2531239 - RNA, 19 nt, Homo sapiens
  misc_RNA (1)...(19): siRNA sense strand
uggaaaauaucaaaggcau

SEQ ID NO: 2531240 - RNA, 19 nt, Homo sapiens
  misc_RNA (1)...(19): siRNA sense strand
ggguggaacuugaaccagu

SEQ ID NO: 2531241 - RNA, 19 nt, Homo sapiens
  misc_RNA (1)...(19): siRNA sense strand
acucaaaucaugaagaauc

SEQ ID NO: 2531242 - RNA, 19 nt, Homo sapiens
  misc_RNA (1)...(19): siRNA sense strand
ugacgaagaugauggaggu

SEQ ID NO: 2531243 - RNA, 19 nt, Homo sapiens
  misc_RNA (1)...(19): siRNA sense strand
ggaucuggccuuugagaag

SEQ ID NO: 2531244 - RNA, 19 nt, Homo sapiens
  misc_RNA (1)...(19): siRNA sense strand
uuauggagaaagcaggaua

SEQ ID NO: 2531245 - RNA, 19 nt, Homo sapiens
  misc_RNA (1)...(19): siRNA sense strand
ucuuccagccagagaguuu

SEQ ID NO: 2531246 - RNA, 19 nt, Homo sapiens
  misc_RNA (1)...(19): siRNA sense strand
acaaagaguaugugaaagc

SEQ ID NO: 2531247 - RNA, 19 nt, Homo sapiens
  misc_RNA (1)...(19): siRNA sense strand
uugugaaggcuuauggaga

SEQ ID NO: 2531248 - RNA, 19 nt, Homo sapiens
  misc_RNA (1)...(19): siRNA sense strand
gcagcuaauugcauggagu

SEQ ID NO: 2531249 - RNA, 19 nt, Homo sapiens
  misc_RNA (1)...(19): siRNA sense strand
aaggaugauauuagcaaga

SEQ ID NO: 2531250 - RNA, 19 nt, Homo sapiens
  misc_RNA (1)...(19): siRNA sense strand
ggaugauauuagcaagaac

SEQ ID NO: 2531251 - RNA, 19 nt, Homo sapiens
  misc_RNA (1)...(19): siRNA sense strand
agaugauggagguggaugu

SEQ ID NO: 2531252 - RNA, 19 nt, Homo sapiens
  misc_RNA (1)...(19): siRNA sense strand
caggauacccacuggagca

SEQ ID NO: 2531253 - RNA, 19 nt, Homo sapiens
  misc_RNA (1)...(19): siRNA sense strand
ccucaagucagaacuggaa

SEQ ID NO: 2531254 - RNA, 19 nt, Homo sapiens
  misc_RNA (1)...(19): siRNA sense strand
aagcgaagaccacaggaau

SEQ ID NO: 2531255 - RNA, 19 nt, Homo sapiens
  misc_RNA (1)...(19): siRNA sense strand
cauugguguuguauaguga

SEQ ID NO: 2531256 - RNA, 19 nt, Homo sapiens
  misc_RNA (1)...(19): siRNA sense strand
cgagagaagcugaagguga

SEQ ID NO: 2531257 - RNA, 19 nt, Homo sapiens
  misc_RNA (1)...(19): siRNA sense strand
gagugaaggcagaggagga

SEQ ID NO: 2531258 - RNA, 19 nt, Homo sapiens
  misc_RNA (1)...(19): siRNA sense strand
acgugaagaacgagaucaa

SEQ ID NO: 2531259 - RNA, 19 nt, Homo sapiens
  misc_RNA (1)...(19): siRNA sense strand
cggaggaggccaaggacuu

SEQ ID NO: 2531260 - RNA, 19 nt, Homo sapiens
  misc_RNA (1)...(19): siRNA sense strand
gcucaaagaaaauggaaga

SEQ ID NO: 2531261 - RNA, 19 nt, Homo sapiens
  misc_RNA (1)...(19): siRNA sense strand
gaggaaggcacgaggcuga

SEQ ID NO: 2531262 - RNA, 19 nt, Homo sapiens
  misc_RNA (1)...(19): siRNA sense strand
uggaagaagagggaggaaa

SEQ ID NO: 2531263 - RNA, 19 nt, Homo sapiens
  misc_RNA (1)...(19): siRNA sense strand
gagaacauauugugcguca

SEQ ID NO: 2531264 - RNA, 19 nt, Homo sapiens
  misc_RNA (1)...(19): siRNA sense strand
gugacagcccugaggagaa

SEQ ID NO: 2531265 - RNA, 19 nt, Homo sapiens
  misc_RNA (1)...(19): siRNA sense strand
cgggaaacccugagccuga

SEQ ID NO: 2531266 - RNA, 19 nt, Homo sapiens
  misc_RNA (1)...(19): siRNA sense strand
aggcagaggaggagcaaag

SEQ ID NO: 2531267 - RNA, 19 nt, Homo sapiens
  misc_RNA (1)...(19): siRNA sense strand
ggaaacagaugcagagacc

SEQ ID NO: 2531268 - RNA, 19 nt, Homo sapiens
  misc_RNA (1)...(19): siRNA sense strand
guaaacuguagcugggauu

SEQ ID NO: 2531269 - RNA, 19 nt, Homo sapiens
  misc_RNA (1)...(19): siRNA sense strand
agguacaagccucgagaga

SEQ ID NO: 2531270 - RNA, 19 nt, Homo sapiens
  misc_RNA (1)...(19): siRNA sense strand
ccuccaucucugcggguua

SEQ ID NO: 2531271 - RNA, 19 nt, Homo sapiens
  misc_RNA (1)...(19): siRNA sense strand
ccugagacacccagcgaga

SEQ ID NO: 2531272 - RNA, 19 nt, Homo sapiens
  misc_RNA (1)...(19): siRNA sense strand
agaucaacaucaugaacca

SEQ ID NO: 2531273 - RNA, 19 nt, Homo sapiens
  misc_RNA (1)...(19): siRNA sense strand
cgucaaucagacaggacau

SEQ ID NO: 2531274 - RNA, 19 nt, Homo sapiens
  misc_RNA (1)...(19): siRNA sense strand
caaucagacaggacaucaa

SEQ ID NO: 2531275 - RNA, 19 nt, Homo sapiens
  misc_RNA (1)...(19): siRNA sense strand
gagaaguugcagagcaugu

SEQ ID NO: 2531276 - RNA, 19 nt, Homo sapiens
  misc_RNA (1)...(19): siRNA sense strand
ugaggagaauaaagagcga

SEQ ID NO: 2531277 - RNA, 19 nt, Homo sapiens
  misc_RNA (1)...(19): siRNA sense strand
gcgaguggaagaagaggga

SEQ ID NO: 2531278 - RNA, 19 nt, Homo sapiens
  misc_RNA (1)...(19): siRNA sense strand
ugaacgagaagguggacca

SEQ ID NO: 2531279 - RNA, 19 nt, Homo sapiens
  misc_RNA (1)...(19): siRNA sense strand
gguugcuggucaaagagaa

SEQ ID NO: 2531280 - RNA, 19 nt, Homo sapiens
  misc_RNA (1)...(19): siRNA sense strand
cugcagaaugagugccaca

SEQ ID NO: 2531281 - RNA, 19 nt, Homo sapiens
  misc_RNA (1)...(19): siRNA sense strand
acagagaaguugcagagca

SEQ ID NO: 2531282 - RNA, 19 nt, Homo sapiens
  misc_RNA (1)...(19): siRNA sense strand
aggagaauaaagagcgagu

SEQ ID NO: 2531283 - RNA, 19 nt, Homo sapiens
  misc_RNA (1)...(19): siRNA sense strand
ccacaggugcacagagaag

SEQ ID NO: 2531284 - RNA, 19 nt, Homo sapiens
  misc_RNA (1)...(19): siRNA sense strand
accucaagccggagaacau

SEQ ID NO: 2531285 - RNA, 19 nt, Homo sapiens
  misc_RNA (1)...(19): siRNA sense strand
cugaauaauuugccugcca

SEQ ID NO: 2531286 - RNA, 19 nt, Homo sapiens
  misc_RNA (1)...(19): siRNA sense strand
gccaaagcuucaagaucca

SEQ ID NO: 2531287 - RNA, 19 nt, Homo sapiens
  misc_RNA (1)...(19): siRNA sense strand
cugaacaugcugaacgaga

SEQ ID NO: 2531288 - RNA, 19 nt, Homo sapiens
  misc_RNA (1)...(19): siRNA sense strand
ugccaacagguuaaggaaa

SEQ ID NO: 2531289 - RNA, 19 nt, Homo sapiens
  misc_RNA (1)...(19): siRNA sense strand
agaaacaccuccaaggauc

SEQ ID NO: 2531290 - RNA, 19 nt, Homo sapiens
  misc_RNA (1)...(19): siRNA sense strand
cggagaacauauugugcgu

SEQ ID NO: 2531291 - RNA, 19 nt, Homo sapiens
  misc_RNA (1)...(19): siRNA sense strand
cugaaacacgaguggcuga

SEQ ID NO: 2531292 - RNA, 19 nt, Homo sapiens
  misc_RNA (1)...(19): siRNA sense strand
guagugagcgucaaggaga

SEQ ID NO: 2531293 - RNA, 19 nt, Homo sapiens
  misc_RNA (1)...(19): siRNA sense strand
caguaacccaggaggcaaa

SEQ ID NO: 2531294 - RNA, 19 nt, Homo sapiens
  misc_RNA (1)...(19): siRNA sense strand
aggcaaaggcccagcucga

SEQ ID NO: 2531295 - RNA, 19 nt, Homo sapiens
  misc_RNA (1)...(19): siRNA sense strand
gcaaaggcccagcucgaga

SEQ ID NO: 2531296 - RNA, 19 nt, Homo sapiens
  misc_RNA (1)...(19): siRNA sense strand
ucuccuacugcguggguaa

SEQ ID NO: 2531297 - RNA, 19 nt, Homo sapiens
  misc_RNA (1)...(19): siRNA sense strand
uggccuucguguugggcua

SEQ ID NO: 2531298 - RNA, 19 nt, Homo sapiens
  misc_RNA (1)...(19): siRNA sense strand
gcaaguacacgcugggcca

SEQ ID NO: 2531299 - RNA, 19 nt, Homo sapiens
  misc_RNA (1)...(19): siRNA sense strand
auaccaacuaugugcggaa

SEQ ID NO: 2531300 - RNA, 19 nt, Homo sapiens
  misc_RNA (1)...(19): siRNA sense strand
acucagaggcuguggagca

SEQ ID NO: 2531301 - RNA, 19 nt, Homo sapiens
  misc_RNA (1)...(19): siRNA sense strand
cagauuugggaaugaggaa

SEQ ID NO: 2531302 - RNA, 19 nt, Homo sapiens
  misc_RNA (1)...(19): siRNA sense strand
uggaagagucagagagcuc

SEQ ID NO: 2531303 - RNA, 19 nt, Homo sapiens
  misc_RNA (1)...(19): siRNA sense strand
agcagaaaauugaggaaga

SEQ ID NO: 2531304 - RNA, 19 nt, Homo sapiens
  misc_RNA (1)...(19): siRNA sense strand
uccacuaagacuagaggaa

SEQ ID NO: 2531305 - RNA, 19 nt, Homo sapiens
  misc_RNA (1)...(19): siRNA sense strand
gaaagaauugcuuggagga

SEQ ID NO: 2531306 - RNA, 19 nt, Homo sapiens
  misc_RNA (1)...(19): siRNA sense strand
ggaaagaauugcuuggagg

SEQ ID NO: 2531307 - RNA, 19 nt, Homo sapiens
  misc_RNA (1)...(19): siRNA sense strand
caucaaugccagcagacga

SEQ ID NO: 2531308 - RNA, 19 nt, Homo sapiens
  misc_RNA (1)...(19): siRNA sense strand
cagagagcucguagacaca

SEQ ID NO: 2531309 - RNA, 19 nt, Homo sapiens
  misc_RNA (1)...(19): siRNA sense strand
ggagcaacagauuugggaa

SEQ ID NO: 2531310 - RNA, 19 nt, Homo sapiens
  misc_RNA (1)...(19): siRNA sense strand
ugaugaaaccugugagaaa

SEQ ID NO: 2531311 - RNA, 19 nt, Homo sapiens
  misc_RNA (1)...(19): siRNA sense strand
ccaugaaguauaaggguua

SEQ ID NO: 2531312 - RNA, 19 nt, Homo sapiens
  misc_RNA (1)...(19): siRNA sense strand
ggaaugaaguagaugguca

SEQ ID NO: 2531313 - RNA, 19 nt, Homo sapiens
  misc_RNA (1)...(19): siRNA sense strand
aagacaauguagugagaau

SEQ ID NO: 2531314 - RNA, 19 nt, Homo sapiens
  misc_RNA (1)...(19): siRNA sense strand
caacaauaugcgaaugaaa

SEQ ID NO: 2531315 - RNA, 19 nt, Homo sapiens
  misc_RNA (1)...(19): siRNA sense strand
agaucaaaguggugcaaga

SEQ ID NO: 2531316 - RNA, 19 nt, Homo sapiens
  misc_RNA (1)...(19): siRNA sense strand
agaacagaucugagcaaua

SEQ ID NO: 2531317 - RNA, 19 nt, Homo sapiens
  misc_RNA (1)...(19): siRNA sense strand
ccuggauacuggagaagaa

SEQ ID NO: 2531318 - RNA, 19 nt, Homo sapiens
  misc_RNA (1)...(19): siRNA sense strand
cugcauacaaaguuggaaa

SEQ ID NO: 2531319 - RNA, 19 nt, Homo sapiens
  misc_RNA (1)...(19): siRNA sense strand
augaagacccugaugauaa

SEQ ID NO: 2531320 - RNA, 19 nt, Homo sapiens
  misc_RNA (1)...(19): siRNA sense strand
gcaagaucuuaguggugaa

SEQ ID NO: 2531321 - RNA, 19 nt, Homo sapiens
  misc_RNA (1)...(19): siRNA sense strand
cguuagugguucagaagau

SEQ ID NO: 2531322 - RNA, 19 nt, Homo sapiens
  misc_RNA (1)...(19): siRNA sense strand
ugagaaaccaguagaugaa

SEQ ID NO: 2531323 - RNA, 19 nt, Homo sapiens
  misc_RNA (1)...(19): siRNA sense strand
agucaaaggagguggugau

SEQ ID NO: 2531324 - RNA, 19 nt, Homo sapiens
  misc_RNA (1)...(19): siRNA sense strand
ggauacagauacaggggua

SEQ ID NO: 2531325 - RNA, 19 nt, Homo sapiens
  misc_RNA (1)...(19): siRNA sense strand
ucugaaaacuccugauaua

SEQ ID NO: 2531326 - RNA, 19 nt, Homo sapiens
  misc_RNA (1)...(19): siRNA sense strand
gugagaaaccaguagauga

SEQ ID NO: 2531327 - RNA, 19 nt, Homo sapiens
  misc_RNA (1)...(19): siRNA sense strand
agucagaugaugaagagaa

SEQ ID NO: 2531328 - RNA, 19 nt, Homo sapiens
  misc_RNA (1)...(19): siRNA sense strand
agaaaguacuacagcuuga

SEQ ID NO: 2531329 - RNA, 19 nt, Homo sapiens
  misc_RNA (1)...(19): siRNA sense strand
aaguagauggucagacaaa

SEQ ID NO: 2531330 - RNA, 19 nt, Homo sapiens
  misc_RNA (1)...(19): siRNA sense strand
cccaaaaggcagagaguca

SEQ ID NO: 2531331 - RNA, 19 nt, Homo sapiens
  misc_RNA (1)...(19): siRNA sense strand
aggaagcaguggaagucaa

SEQ ID NO: 2531332 - RNA, 19 nt, Homo sapiens
  misc_RNA (1)...(19): siRNA sense strand
ccucagagaccuagaucca

SEQ ID NO: 2531333 - RNA, 19 nt, Homo sapiens
  misc_RNA (1)...(19): siRNA sense strand
ugaagacccugaugauaaa

SEQ ID NO: 2531334 - RNA, 19 nt, Homo sapiens
  misc_RNA (1)...(19): siRNA sense strand
gacuauaugauuugagaga

SEQ ID NO: 2531335 - RNA, 19 nt, Homo sapiens
  misc_RNA (1)...(19): siRNA sense strand
agaucuuaguggugaacau

SEQ ID NO: 2531336 - RNA, 19 nt, Homo sapiens
  misc_RNA (1)...(19): siRNA sense strand
ccucaaaugacuccagaau

SEQ ID NO: 2531337 - RNA, 19 nt, Homo sapiens
  misc_RNA (1)...(19): siRNA sense strand
gagaaggacaaaagaauau

SEQ ID NO: 2531338 - RNA, 19 nt, Homo sapiens
  misc_RNA (1)...(19): siRNA sense strand
auacacaagaccaguuaaa

SEQ ID NO: 2531339 - RNA, 19 nt, Homo sapiens
  misc_RNA (1)...(19): siRNA sense strand
cuucagaaaguacgguuaa

SEQ ID NO: 2531340 - RNA, 19 nt, Homo sapiens
  misc_RNA (1)...(19): siRNA sense strand
agagcuuacugaugaggaa

SEQ ID NO: 2531341 - RNA, 19 nt, Homo sapiens
  misc_RNA (1)...(19): siRNA sense strand
gcagagagucagaauacau

SEQ ID NO: 2531342 - RNA, 19 nt, Homo sapiens
  misc_RNA (1)...(19): siRNA sense strand
acaaggaagcaguggaagu

SEQ ID NO: 2531343 - RNA, 19 nt, Homo sapiens
  misc_RNA (1)...(19): siRNA sense strand
gcuucagaaaguacgguua

SEQ ID NO: 2531344 - RNA, 19 nt, Homo sapiens
  misc_RNA (1)...(19): siRNA sense strand
cuguacaagaauugaaaca

SEQ ID NO: 2531345 - RNA, 19 nt, Homo sapiens
  misc_RNA (1)...(19): siRNA sense strand
guauuauugaggagaguca

SEQ ID NO: 2531346 - RNA, 19 nt, Homo sapiens
  misc_RNA (1)...(19): siRNA sense strand
acuguuagccauagaucaa

SEQ ID NO: 2531347 - RNA, 19 nt, Homo sapiens
  misc_RNA (1)...(19): siRNA sense strand
aagaaauaccuuugagucu

SEQ ID NO: 2531348 - RNA, 19 nt, Homo sapiens
  misc_RNA (1)...(19): siRNA sense strand
cggcacagucagaugauga

SEQ ID NO: 2531349 - RNA, 19 nt, Homo sapiens
  misc_RNA (1)...(19): siRNA sense strand
gaaaagaacucucugauca

SEQ ID NO: 2531350 - RNA, 19 nt, Homo sapiens
  misc_RNA (1)...(19): siRNA sense strand
cuagaacagaucugagcaa

SEQ ID NO: 2531351 - RNA, 19 nt, Homo sapiens
  misc_RNA (1)...(19): siRNA sense strand
cagaugaugaagagaaguu

SEQ ID NO: 2531352 - RNA, 19 nt, Homo sapiens
  misc_RNA (1)...(19): siRNA sense strand
aagugaagaugcugaaguu

SEQ ID NO: 2531353 - RNA, 19 nt, Homo sapiens
  misc_RNA (1)...(19): siRNA sense strand
agauguucccaaagagaau

SEQ ID NO: 2531354 - RNA, 19 nt, Homo sapiens
  misc_RNA (1)...(19): siRNA sense strand
caagugaugaugaaggaau

SEQ ID NO: 2531355 - RNA, 19 nt, Homo sapiens
  misc_RNA (1)...(19): siRNA sense strand
auacaauacugaaggacgu

SEQ ID NO: 2531356 - RNA, 19 nt, Homo sapiens
  misc_RNA (1)...(19): siRNA sense strand
aaucagaagggaacgagaa

SEQ ID NO: 2531357 - RNA, 19 nt, Homo sapiens
  misc_RNA (1)...(19): siRNA sense strand
agacaauguagugagaaua

SEQ ID NO: 2531358 - RNA, 19 nt, Homo sapiens
  misc_RNA (1)...(19): siRNA sense strand
aguauaaggguuacgucaa

SEQ ID NO: 2531359 - RNA, 19 nt, Homo sapiens
  misc_RNA (1)...(19): siRNA sense strand
aaaucaguaaagagagcaa

SEQ ID NO: 2531360 - RNA, 19 nt, Homo sapiens
  misc_RNA (1)...(19): siRNA sense strand
acaagacaauguagugaga

SEQ ID NO: 2531361 - RNA, 19 nt, Homo sapiens
  misc_RNA (1)...(19): siRNA sense strand
caggaaagucuaaguucau

SEQ ID NO: 2531362 - RNA, 19 nt, Homo sapiens
  misc_RNA (1)...(19): siRNA sense strand
ccaagagaugacagguauu

SEQ ID NO: 2531363 - RNA, 19 nt, Homo sapiens
  misc_RNA (1)...(19): siRNA sense strand
gccuuuaccuggagaaaau

SEQ ID NO: 2531364 - RNA, 19 nt, Homo sapiens
  misc_RNA (1)...(19): siRNA sense strand
ucacuauccaugaaguaua

SEQ ID NO: 2531365 - RNA, 19 nt, Homo sapiens
  misc_RNA (1)...(19): siRNA sense strand
guucagaagauaaguaugu

SEQ ID NO: 2531366 - RNA, 19 nt, Homo sapiens
  misc_RNA (1)...(19): siRNA sense strand
ucagaaaguacuacagcuu

SEQ ID NO: 2531367 - RNA, 19 nt, Homo sapiens
  misc_RNA (1)...(19): siRNA sense strand
gcuuaaugugcuugaaacu

SEQ ID NO: 2531368 - RNA, 19 nt, Homo sapiens
  misc_RNA (1)...(19): siRNA sense strand
ugaaacugaaacagaagua

SEQ ID NO: 2531369 - RNA, 19 nt, Homo sapiens
  misc_RNA (1)...(19): siRNA sense strand
ggaauuugagacucugaaa

SEQ ID NO: 2531370 - RNA, 19 nt, Homo sapiens
  misc_RNA (1)...(19): siRNA sense strand
uacugaugguggaagguua

SEQ ID NO: 2531371 - RNA, 19 nt, Homo sapiens
  misc_RNA (1)...(19): siRNA sense strand
gacaauguagugagaauau

SEQ ID NO: 2531372 - RNA, 19 nt, Homo sapiens
  misc_RNA (1)...(19): siRNA sense strand
gauauaguggcuaguacaa

SEQ ID NO: 2531373 - RNA, 19 nt, Homo sapiens
  misc_RNA (1)...(19): siRNA sense strand
agauauugguaaccucaaa

SEQ ID NO: 2531374 - RNA, 19 nt, Homo sapiens
  misc_RNA (1)...(19): siRNA sense strand
guuuauaucuggaguaccu

SEQ ID NO: 2531375 - RNA, 19 nt, Homo sapiens
  misc_RNA (1)...(19): siRNA sense strand
acugaugguggaagguuaa

SEQ ID NO: 2531376 - RNA, 19 nt, Homo sapiens
  misc_RNA (1)...(19): siRNA sense strand
acgaauacuacgagcggua

SEQ ID NO: 2531377 - RNA, 19 nt, Homo sapiens
  misc_RNA (1)...(19): siRNA sense strand
gauuaagaccagaggcguu

SEQ ID NO: 2531378 - RNA, 19 nt, Homo sapiens
  misc_RNA (1)...(19): siRNA sense strand
ucgagaacucagugaagaa

SEQ ID NO: 2531379 - RNA, 19 nt, Homo sapiens
  misc_RNA (1)...(19): siRNA sense strand
ccagauaucacaaggcaga

SEQ ID NO: 2531380 - RNA, 19 nt, Homo sapiens
  misc_RNA (1)...(19): siRNA sense strand
ugaaaggguuaauggacga

SEQ ID NO: 2531381 - RNA, 19 nt, Homo sapiens
  misc_RNA (1)...(19): siRNA sense strand
gaacaauuggcuuaggaga

SEQ ID NO: 2531382 - RNA, 19 nt, Homo sapiens
  misc_RNA (1)...(19): siRNA sense strand
gaaaagaaauggaagcguu

SEQ ID NO: 2531383 - RNA, 19 nt, Homo sapiens
  misc_RNA (1)...(19): siRNA sense strand
gcaaaauaaggaagaugaa

SEQ ID NO: 2531384 - RNA, 19 nt, Homo sapiens
  misc_RNA (1)...(19): siRNA sense strand
aguuggaggugcaagaaga

SEQ ID NO: 2531385 - RNA, 19 nt, Homo sapiens
  misc_RNA (1)...(19): siRNA sense strand
cguuaggcgaccugaauuu

SEQ ID NO: 2531386 - RNA, 19 nt, Homo sapiens
  misc_RNA (1)...(19): siRNA sense strand
ggcuuagcuugcagagaau

SEQ ID NO: 2531387 - RNA, 19 nt, Homo sapiens
  misc_RNA (1)...(19): siRNA sense strand
gaagcaagauggaagucga

SEQ ID NO: 2531388 - RNA, 19 nt, Homo sapiens
  misc_RNA (1)...(19): siRNA sense strand
gcuucuugguggacauuau

SEQ ID NO: 2531389 - RNA, 19 nt, Homo sapiens
  misc_RNA (1)...(19): siRNA sense strand
cuuucgaaguuaagcugaa

SEQ ID NO: 2531390 - RNA, 19 nt, Homo sapiens
  misc_RNA (1)...(19): siRNA sense strand
uggagguguugcugagaga

SEQ ID NO: 2531391 - RNA, 19 nt, Homo sapiens
  misc_RNA (1)...(19): siRNA sense strand
cauaaauaccauauccgaa

SEQ ID NO: 2531392 - RNA, 19 nt, Homo sapiens
  misc_RNA (1)...(19): siRNA sense strand
ugugagagaaagaaaugaa

SEQ ID NO: 2531393 - RNA, 19 nt, Homo sapiens
  misc_RNA (1)...(19): siRNA sense strand
gaaucagagcauggugaaa

SEQ ID NO: 2531394 - RNA, 19 nt, Homo sapiens
  misc_RNA (1)...(19): siRNA sense strand
gccauuaacagaugagcau

SEQ ID NO: 2531395 - RNA, 19 nt, Homo sapiens
  misc_RNA (1)...(19): siRNA sense strand
ugguggacauuauggaaca

SEQ ID NO: 2531396 - RNA, 19 nt, Homo sapiens
  misc_RNA (1)...(19): siRNA sense strand
ggucuuuauccgcggugua

SEQ ID NO: 2531397 - RNA, 19 nt, Homo sapiens
  misc_RNA (1)...(19): siRNA sense strand
ugaccuugugagagaaaga

SEQ ID NO: 2531398 - RNA, 19 nt, Homo sapiens
  misc_RNA (1)...(19): siRNA sense strand
gcaagauggaagucgacga

SEQ ID NO: 2531399 - RNA, 19 nt, Homo sapiens
  misc_RNA (1)...(19): siRNA sense strand
cugaguuggaggugcaaga

SEQ ID NO: 2531400 - RNA, 19 nt, Homo sapiens
  misc_RNA (1)...(19): siRNA sense strand
uuggcuuaggagagggaaa

SEQ ID NO: 2531401 - RNA, 19 nt, Homo sapiens
  misc_RNA (1)...(19): siRNA sense strand
gguguugcugagagaggua

SEQ ID NO: 2531402 - RNA, 19 nt, Homo sapiens
  misc_RNA (1)...(19): siRNA sense strand
ccauaaucaaccugacuca

SEQ ID NO: 2531403 - RNA, 19 nt, Homo sapiens
  misc_RNA (1)...(19): siRNA sense strand
ccuugugagagaaagaaau

SEQ ID NO: 2531404 - RNA, 19 nt, Homo sapiens
  misc_RNA (1)...(19): siRNA sense strand
acuacgaggcugagcacga

SEQ ID NO: 2531405 - RNA, 19 nt, Homo sapiens
  misc_RNA (1)...(19): siRNA sense strand
gaccagaggcguuaggcga

SEQ ID NO: 2531406 - RNA, 19 nt, Homo sapiens
  misc_RNA (1)...(19): siRNA sense strand
ugagagagguacugcccga

SEQ ID NO: 2531407 - RNA, 19 nt, Homo sapiens
  misc_RNA (1)...(19): siRNA sense strand
ccagggacuuuaaagccua

SEQ ID NO: 2531408 - RNA, 19 nt, Homo sapiens
  misc_RNA (1)...(19): siRNA sense strand
cgguguaggcccugaguug

SEQ ID NO: 2531409 - RNA, 19 nt, Homo sapiens
  misc_RNA (1)...(19): siRNA sense strand
gcccugaguuggaggugca

SEQ ID NO: 2531410 - RNA, 19 nt, Homo sapiens
  misc_RNA (1)...(19): siRNA sense strand
cagugaagaauuacgaguu

SEQ ID NO: 2531411 - RNA, 19 nt, Homo sapiens
  misc_RNA (1)...(19): siRNA sense strand
cagugaggguggagcuaac

SEQ ID NO: 2531412 - RNA, 19 nt, Homo sapiens
  misc_RNA (1)...(19): siRNA sense strand
gaugaccuugugagagaaa

SEQ ID NO: 2531413 - RNA, 19 nt, Homo sapiens
  misc_RNA (1)...(19): siRNA sense strand
gugagagaaagaaaugaau

SEQ ID NO: 2531414 - RNA, 19 nt, Homo sapiens
  misc_RNA (1)...(19): siRNA sense strand
acgugauguuagagaacua

SEQ ID NO: 2531415 - RNA, 19 nt, Homo sapiens
  misc_RNA (1)...(19): siRNA sense strand
uguuagagaacuacaggaa

SEQ ID NO: 2531416 - RNA, 19 nt, Homo sapiens
  misc_RNA (1)...(19): siRNA sense strand
ucucaggaggaguggaaau

SEQ ID NO: 2531417 - RNA, 19 nt, Homo sapiens
  misc_RNA (1)...(19): siRNA sense strand
ggacgugauguuagagaac

SEQ ID NO: 2531418 - RNA, 19 nt, Homo sapiens
  misc_RNA (1)...(19): siRNA sense strand
gcaaaacgcgcgaggcuca

SEQ ID NO: 2531419 - RNA, 19 nt, Homo sapiens
  misc_RNA (1)...(19): siRNA sense strand
gcagaaagcuuuauacagg

SEQ ID NO: 2531420 - RNA, 19 nt, Homo sapiens
  misc_RNA (1)...(19): siRNA sense strand
gagcugaacuccuuggaca

SEQ ID NO: 2531421 - RNA, 19 nt, Homo sapiens
  misc_RNA (1)...(19): siRNA sense strand
ccauaaagaaugccggcuu

SEQ ID NO: 2531422 - RNA, 19 nt, Homo sapiens
  misc_RNA (1)...(19): siRNA sense strand
cuacaugaaguuuggguca

SEQ ID NO: 2531423 - RNA, 19 nt, Homo sapiens
  misc_RNA (1)...(19): siRNA sense strand
uacaacagaugguggaaga

SEQ ID NO: 2531424 - RNA, 19 nt, Homo sapiens
  misc_RNA (1)...(19): siRNA sense strand
guuucuacaugcugauaau

SEQ ID NO: 2531425 - RNA, 19 nt, Homo sapiens
  misc_RNA (1)...(19): siRNA sense strand
gcucaacaccucagccaga

SEQ ID NO: 2531426 - RNA, 19 nt, Homo sapiens
  misc_RNA (1)...(19): siRNA sense strand
cauuugaaggcgucgguau

SEQ ID NO: 2531427 - RNA, 19 nt, Homo sapiens
  misc_RNA (1)...(19): siRNA sense strand
caacauuggcacagggcuc

SEQ ID NO: 2531428 - RNA, 19 nt, Homo sapiens
  misc_RNA (1)...(19): siRNA sense strand
uguuuauggcagacaauuu

SEQ ID NO: 2531429 - RNA, 19 nt, Homo sapiens
  misc_RNA (1)...(19): siRNA sense strand
uggcaaacuggaagaccuu

SEQ ID NO: 2531430 - RNA, 19 nt, Homo sapiens
  misc_RNA (1)...(19): siRNA sense strand
acgaguaccucaugggcaa

SEQ ID NO: 2531431 - RNA, 19 nt, Homo sapiens
  misc_RNA (1)...(19): siRNA sense strand
ugacgcuggcggagaucaa

SEQ ID NO: 2531432 - RNA, 19 nt, Homo sapiens
  misc_RNA (1)...(19): siRNA sense strand
gcaaauacaccugggucaa

SEQ ID NO: 2531433 - RNA, 19 nt, Homo sapiens
  misc_RNA (1)...(19): siRNA sense strand
gguacaucuaugagaaaca

SEQ ID NO: 2531434 - RNA, 19 nt, Homo sapiens
  misc_RNA (1)...(19): siRNA sense strand
uggcaauguucaggagaca

SEQ ID NO: 2531435 - RNA, 19 nt, Homo sapiens
  misc_RNA (1)...(19): siRNA sense strand
acaacauguucuccagcaa

SEQ ID NO: 2531436 - RNA, 19 nt, Homo sapiens
  misc_RNA (1)...(19): siRNA sense strand
agcaaauacaccuggguca

SEQ ID NO: 2531437 - RNA, 19 nt, Homo sapiens
  misc_RNA (1)...(19): siRNA sense strand
caacauguucuccagcaaa

SEQ ID NO: 2531438 - RNA, 19 nt, Homo sapiens
  misc_RNA (1)...(19): siRNA sense strand
ugaucaaagacguggauug

SEQ ID NO: 2531439 - RNA, 19 nt, Homo sapiens
  misc_RNA (1)...(19): siRNA sense strand
uggaugugacugagagcaa

SEQ ID NO: 2531440 - RNA, 19 nt, Homo sapiens
  misc_RNA (1)...(19): siRNA sense strand
ccucuguggcagccggaaa

SEQ ID NO: 2531441 - RNA, 19 nt, Homo sapiens
  misc_RNA (1)...(19): siRNA sense strand
ccuggguguucgacagcua

SEQ ID NO: 2531442 - RNA, 19 nt, Homo sapiens
  misc_RNA (1)...(19): siRNA sense strand
gugcaagacuuccgccuca

SEQ ID NO: 2531443 - RNA, 19 nt, Homo sapiens
  misc_RNA (1)...(19): siRNA sense strand
gcaaauaaauacaagguca

SEQ ID NO: 2531444 - RNA, 19 nt, Homo sapiens
  misc_RNA (1)...(19): siRNA sense strand
aggaagaagcacaggaaau

SEQ ID NO: 2531445 - RNA, 19 nt, Homo sapiens
  misc_RNA (1)...(19): siRNA sense strand
gaugaagaugauaggcaaa

SEQ ID NO: 2531446 - RNA, 19 nt, Homo sapiens
  misc_RNA (1)...(19): siRNA sense strand
ugaugaagaugauaggcaa

SEQ ID NO: 2531447 - RNA, 19 nt, Homo sapiens
  misc_RNA (1)...(19): siRNA sense strand
guuuggaaaggcaggaaua

SEQ ID NO: 2531448 - RNA, 19 nt, Homo sapiens
  misc_RNA (1)...(19): siRNA sense strand
aauuaagugucuagcagaa

SEQ ID NO: 2531449 - RNA, 19 nt, Homo sapiens
  misc_RNA (1)...(19): siRNA sense strand
uggaaaggcaggaauacaa

SEQ ID NO: 2531450 - RNA, 19 nt, Homo sapiens
  misc_RNA (1)...(19): siRNA sense strand
cagaaacggcagaaaauaa

SEQ ID NO: 2531451 - RNA, 19 nt, Homo sapiens
  misc_RNA (1)...(19): siRNA sense strand
cuguguaugucuaaaggaa

SEQ ID NO: 2531452 - RNA, 19 nt, Homo sapiens
  misc_RNA (1)...(19): siRNA sense strand
aaacagaaacggcagaaaa

SEQ ID NO: 2531453 - RNA, 19 nt, Homo sapiens
  misc_RNA (1)...(19): siRNA sense strand
ggccugagccagaugggaa

SEQ ID NO: 2531454 - RNA, 19 nt, Homo sapiens
  misc_RNA (1)...(19): siRNA sense strand
ugucaacaccagauaagaa

SEQ ID NO: 2531455 - RNA, 19 nt, Homo sapiens
  misc_RNA (1)...(19): siRNA sense strand
ccucaugagacaaugccaa

SEQ ID NO: 2531456 - RNA, 19 nt, Homo sapiens
  misc_RNA (1)...(19): siRNA sense strand
guguaugucuaaaggaauc

SEQ ID NO: 2531457 - RNA, 19 nt, Homo sapiens
  misc_RNA (1)...(19): siRNA sense strand
guggauacucuuaaugcua

SEQ ID NO: 2531458 - RNA, 19 nt, Homo sapiens
  misc_RNA (1)...(19): siRNA sense strand
gccugagccagaugggaaa

SEQ ID NO: 2531459 - RNA, 19 nt, Homo sapiens
  misc_RNA (1)...(19): siRNA sense strand
ucugguuauuggaacgaaa

SEQ ID NO: 2531460 - RNA, 19 nt, Homo sapiens
  misc_RNA (1)...(19): siRNA sense strand
aaauagaugcuguggauac

SEQ ID NO: 2531461 - RNA, 19 nt, Homo sapiens
  misc_RNA (1)...(19): siRNA sense strand
caaugguuccacagaaauu

SEQ ID NO: 2531462 - RNA, 19 nt, Homo sapiens
  misc_RNA (1)...(19): siRNA sense strand
acgauuacgugguguucau

SEQ ID NO: 2531463 - RNA, 19 nt, Homo sapiens
  misc_RNA (1)...(19): siRNA sense strand
cagucgccguggagaagua

SEQ ID NO: 2531464 - RNA, 19 nt, Homo sapiens
  misc_RNA (1)...(19): siRNA sense strand
gagacgcaggugugaggaa

SEQ ID NO: 2531465 - RNA, 19 nt, Homo sapiens
  misc_RNA (1)...(19): siRNA sense strand
acaggaaauuguucggcau

SEQ ID NO: 2531466 - RNA, 19 nt, Homo sapiens
  misc_RNA (1)...(19): siRNA sense strand
ugaggaagaagcacaggaa

SEQ ID NO: 2531467 - RNA, 19 nt, Homo sapiens
  misc_RNA (1)...(19): siRNA sense strand
gugucuagcagaaggagga

SEQ ID NO: 2531468 - RNA, 19 nt, Homo sapiens
  misc_RNA (1)...(19): siRNA sense strand
gaggaagagagaucagcau

SEQ ID NO: 2531469 - RNA, 19 nt, Homo sapiens
  misc_RNA (1)...(19): siRNA sense strand
acaaaggaaaguugcagau

SEQ ID NO: 2531470 - RNA, 19 nt, Homo sapiens
  misc_RNA (1)...(19): siRNA sense strand
cgaaaguuacagcacgauu

SEQ ID NO: 2531471 - RNA, 19 nt, Homo sapiens
  misc_RNA (1)...(19): siRNA sense strand
agacuuaauuuccaggcuu

SEQ ID NO: 2531472 - RNA, 19 nt, Homo sapiens
  misc_RNA (1)...(19): siRNA sense strand
cagaaggaggagaccugaa

SEQ ID NO: 2531473 - RNA, 19 nt, Homo sapiens
  misc_RNA (1)...(19): siRNA sense strand
cggagauguucuucugcau

SEQ ID NO: 2531474 - RNA, 19 nt, Homo sapiens
  misc_RNA (1)...(19): siRNA sense strand
cggccuacaugguggacau

SEQ ID NO: 2531475 - RNA, 19 nt, Homo sapiens
  misc_RNA (1)...(19): siRNA sense strand
gcaacguucuggugcggaa

SEQ ID NO: 2531476 - RNA, 19 nt, Homo sapiens
  misc_RNA (1)...(19): siRNA sense strand
cugugaaggugcaguacau

SEQ ID NO: 2531477 - RNA, 19 nt, Homo sapiens
  misc_RNA (1)...(19): siRNA sense strand
gcacgggagaagaggagga

SEQ ID NO: 2531478 - RNA, 19 nt, Homo sapiens
  misc_RNA (1)...(19): siRNA sense strand
ucaacgauguggaggccau

SEQ ID NO: 2531479 - RNA, 19 nt, Homo sapiens
  misc_RNA (1)...(19): siRNA sense strand
ggagcuggacuucgagaau

SEQ ID NO: 2531480 - RNA, 19 nt, Homo sapiens
  misc_RNA (1)...(19): siRNA sense strand
uggcagaggcacgggagaa

SEQ ID NO: 2531481 - RNA, 19 nt, Homo sapiens
  misc_RNA (1)...(19): siRNA sense strand
agcuggacuucgagaauga

SEQ ID NO: 2531482 - RNA, 19 nt, Homo sapiens
  misc_RNA (1)...(19): siRNA sense strand
caggcuacuuggaggugau

SEQ ID NO: 2531483 - RNA, 19 nt, Homo sapiens
  misc_RNA (1)...(19): siRNA sense strand
cugaggaagcaguggaaau

SEQ ID NO: 2531484 - RNA, 19 nt, Homo sapiens
  misc_RNA (1)...(19): siRNA sense strand
caaugaaguuguagggaag

SEQ ID NO: 2531485 - RNA, 19 nt, Homo sapiens
  misc_RNA (1)...(19): siRNA sense strand
uggaaauguuaaagaccuu

SEQ ID NO: 2531486 - RNA, 19 nt, Homo sapiens
  misc_RNA (1)...(19): siRNA sense strand
aagcaguggaaauguuaaa

SEQ ID NO: 2531487 - RNA, 19 nt, Homo sapiens
  misc_RNA (1)...(19): siRNA sense strand
uguauauggcugucagaau

SEQ ID NO: 2531488 - RNA, 19 nt, Homo sapiens
  misc_RNA (1)...(19): siRNA sense strand
ccaaacacugggagaccau

SEQ ID NO: 2531489 - RNA, 19 nt, Homo sapiens
  misc_RNA (1)...(19): siRNA sense strand
acuguggagccgugcauua

SEQ ID NO: 2531490 - RNA, 19 nt, Homo sapiens
  misc_RNA (1)...(19): siRNA sense strand
ccuaccaaacacugggaga

SEQ ID NO: 2531491 - RNA, 19 nt, Homo sapiens
  misc_RNA (1)...(19): siRNA sense strand
uggaauagcuugcaggaga

SEQ ID NO: 2531492 - RNA, 19 nt, Homo sapiens
  misc_RNA (1)...(19): siRNA sense strand
cuugagagaauuagagaca

SEQ ID NO: 2531493 - RNA, 19 nt, Homo sapiens
  misc_RNA (1)...(19): siRNA sense strand
aaauggagacagagcucaa

SEQ ID NO: 2531494 - RNA, 19 nt, Homo sapiens
  misc_RNA (1)...(19): siRNA sense strand
gcuucagacuucagcacau

SEQ ID NO: 2531495 - RNA, 19 nt, Homo sapiens
  misc_RNA (1)...(19): siRNA sense strand
auuaaggaguggguggaaa

SEQ ID NO: 2531496 - RNA, 19 nt, Homo sapiens
  misc_RNA (1)...(19): siRNA sense strand
guuacuaagacacgguauu

SEQ ID NO: 2531497 - RNA, 19 nt, Homo sapiens
  misc_RNA (1)...(19): siRNA sense strand
uuaaggaguggguggaaaa

SEQ ID NO: 2531498 - RNA, 19 nt, Homo sapiens
  misc_RNA (1)...(19): siRNA sense strand
uguuagaguuggaaaggcu

SEQ ID NO: 2531499 - RNA, 19 nt, Homo sapiens
  misc_RNA (1)...(19): siRNA sense strand
gcucaucaguucugcagca

SEQ ID NO: 2531500 - RNA, 19 nt, Homo sapiens
  misc_RNA (1)...(19): siRNA sense strand
agacagagcucaagggguc

SEQ ID NO: 2531501 - RNA, 19 nt, Homo sapiens
  misc_RNA (1)...(19): siRNA sense strand
ggaauaugagcaaggcaga

SEQ ID NO: 2531502 - RNA, 19 nt, Homo sapiens
  misc_RNA (1)...(19): siRNA sense strand
cgugcaggaauaugagcaa

SEQ ID NO: 2531503 - RNA, 19 nt, Homo sapiens
  misc_RNA (1)...(19): siRNA sense strand
gcaaaggcaaggaacccua

SEQ ID NO: 2531504 - RNA, 19 nt, Homo sapiens
  misc_RNA (1)...(19): siRNA sense strand
cgucuguguaugucauuaa

SEQ ID NO: 2531505 - RNA, 19 nt, Homo sapiens
  misc_RNA (1)...(19): siRNA sense strand
aggagguguuugagaccga

SEQ ID NO: 2531506 - RNA, 19 nt, Homo sapiens
  misc_RNA (1)...(19): siRNA sense strand
cuccaaggaacuuaagcaa

SEQ ID NO: 2531507 - RNA, 19 nt, Homo sapiens
  misc_RNA (1)...(19): siRNA sense strand
cagaauggauugaggccaa

SEQ ID NO: 2531508 - RNA, 19 nt, Homo sapiens
  misc_RNA (1)...(19): siRNA sense strand
gguuaagauuggagagcga

SEQ ID NO: 2531509 - RNA, 19 nt, Homo sapiens
  misc_RNA (1)...(19): siRNA sense strand
aaacagaaaugcuggcaga

SEQ ID NO: 2531510 - RNA, 19 nt, Homo sapiens
  misc_RNA (1)...(19): siRNA sense strand
ucaaauuguuagaaggcau

SEQ ID NO: 2531511 - RNA, 19 nt, Homo sapiens
  misc_RNA (1)...(19): siRNA sense strand
cuccagagucccagggcaa

SEQ ID NO: 2531512 - RNA, 19 nt, Homo sapiens
  misc_RNA (1)...(19): siRNA sense strand
ugauaaaguguauugggaa

SEQ ID NO: 2531513 - RNA, 19 nt, Homo sapiens
  misc_RNA (1)...(19): siRNA sense strand
gcaggaagcggcaagggaa

SEQ ID NO: 2531514 - RNA, 19 nt, Homo sapiens
  misc_RNA (1)...(19): siRNA sense strand
aagucaaggagguagacaa

SEQ ID NO: 2531515 - RNA, 19 nt, Homo sapiens
  misc_RNA (1)...(19): siRNA sense strand
aggagguagacaaggaauu

SEQ ID NO: 2531516 - RNA, 19 nt, Homo sapiens
  misc_RNA (1)...(19): siRNA sense strand
guaauagaacacagagcca

SEQ ID NO: 2531517 - RNA, 19 nt, Homo sapiens
  misc_RNA (1)...(19): siRNA sense strand
cacacauuauccagcgaaa

SEQ ID NO: 2531518 - RNA, 19 nt, Homo sapiens
  misc_RNA (1)...(19): siRNA sense strand
auuaggaucuacagcgaga

SEQ ID NO: 2531519 - RNA, 19 nt, Homo sapiens
  misc_RNA (1)...(19): siRNA sense strand
uguuagaaggcaucaaaga

SEQ ID NO: 2531520 - RNA, 19 nt, Homo sapiens
  misc_RNA (1)...(19): siRNA sense strand
ugggaaagucaaggaggua

SEQ ID NO: 2531521 - RNA, 19 nt, Homo sapiens
  misc_RNA (1)...(19): siRNA sense strand
cgauguaauagaacacaga

SEQ ID NO: 2531522 - RNA, 19 nt, Homo sapiens
  misc_RNA (1)...(19): siRNA sense strand
uugacaggagugaagauaa

SEQ ID NO: 2531523 - RNA, 19 nt, Homo sapiens
  misc_RNA (1)...(19): siRNA sense strand
acauuaggaucuacagcga

SEQ ID NO: 2531524 - RNA, 19 nt, Homo sapiens
  misc_RNA (1)...(19): siRNA sense strand
agguagacaaggaauugaa

SEQ ID NO: 2531525 - RNA, 19 nt, Homo sapiens
  misc_RNA (1)...(19): siRNA sense strand
acauugaagaagaggaaga

SEQ ID NO: 2531526 - RNA, 19 nt, Homo sapiens
  misc_RNA (1)...(19): siRNA sense strand
aagaagaggaagaggagca

SEQ ID NO: 2531527 - RNA, 19 nt, Homo sapiens
  misc_RNA (1)...(19): siRNA sense strand
agguaaagguuguggccag

SEQ ID NO: 2531528 - RNA, 19 nt, Homo sapiens
  misc_RNA (1)...(19): siRNA sense strand
gcacagaugaggaagcagu

SEQ ID NO: 2531529 - RNA, 19 nt, Homo sapiens
  misc_RNA (1)...(19): siRNA sense strand
aggaggucuucaaggagua

SEQ ID NO: 2531530 - RNA, 19 nt, Homo sapiens
  misc_RNA (1)...(19): siRNA sense strand
gaaugaagaagguucccaa

SEQ ID NO: 2531531 - RNA, 19 nt, Homo sapiens
  misc_RNA (1)...(19): siRNA sense strand
gguaaagguuguggccaga

SEQ ID NO: 2531532 - RNA, 19 nt, Homo sapiens
  misc_RNA (1)...(19): siRNA sense strand
aagaggaagaggagcacuu

SEQ ID NO: 2531533 - RNA, 19 nt, Homo sapiens
  misc_RNA (1)...(19): siRNA sense strand
aggcagaaugauuuggaca

SEQ ID NO: 2531534 - RNA, 19 nt, Homo sapiens
  misc_RNA (1)...(19): siRNA sense strand
ggcagaaugauuuggacau

SEQ ID NO: 2531535 - RNA, 19 nt, Homo sapiens
  misc_RNA (1)...(19): siRNA sense strand
uugaagaagaggaagagga

SEQ ID NO: 2531536 - RNA, 19 nt, Homo sapiens
  misc_RNA (1)...(19): siRNA sense strand
ggagagacuguauggacca

SEQ ID NO: 2531537 - RNA, 19 nt, Homo sapiens
  misc_RNA (1)...(19): siRNA sense strand
augaugagguaaagguugu

SEQ ID NO: 2531538 - RNA, 19 nt, Homo sapiens
  misc_RNA (1)...(19): siRNA sense strand
auuuggacauugaagaaga

SEQ ID NO: 2531539 - RNA, 19 nt, Homo sapiens
  misc_RNA (1)...(19): siRNA sense strand
caagcauaucuuaggcaga

SEQ ID NO: 2531540 - RNA, 19 nt, Homo sapiens
  misc_RNA (1)...(19): siRNA sense strand
gguuagaggucguggcaga

SEQ ID NO: 2531541 - RNA, 19 nt, Homo sapiens
  misc_RNA (1)...(19): siRNA sense strand
ggucuugggaugagggcuu

SEQ ID NO: 2531542 - RNA, 19 nt, Homo sapiens
  misc_RNA (1)...(19): siRNA sense strand
acacugugcaggagggaga

SEQ ID NO: 2531543 - RNA, 19 nt, Homo sapiens
  misc_RNA (1)...(19): siRNA sense strand
guacuggauaucagggaau

SEQ ID NO: 2531544 - RNA, 19 nt, Homo sapiens
  misc_RNA (1)...(19): siRNA sense strand
caaaagaaccugaugcgaa

SEQ ID NO: 2531545 - RNA, 19 nt, Homo sapiens
  misc_RNA (1)...(19): siRNA sense strand
ucauaugaaugucaggcua

SEQ ID NO: 2531546 - RNA, 19 nt, Homo sapiens
  misc_RNA (1)...(19): siRNA sense strand
gguuccugguggagacauu

SEQ ID NO: 2531547 - RNA, 19 nt, Homo sapiens
  misc_RNA (1)...(19): siRNA sense strand
gguacuggauaucagggaa

SEQ ID NO: 2531548 - RNA, 19 nt, Homo sapiens
  misc_RNA (1)...(19): siRNA sense strand
gcccacaggaagagacaca

SEQ ID NO: 2531549 - RNA, 19 nt, Homo sapiens
  misc_RNA (1)...(19): siRNA sense strand
gggccugaucucugugcua

SEQ ID NO: 2531550 - RNA, 19 nt, Homo sapiens
  misc_RNA (1)...(19): siRNA sense strand
ggccaagguuagaggucgu

SEQ ID NO: 2531551 - RNA, 19 nt, Homo sapiens
  misc_RNA (1)...(19): siRNA sense strand
gaagaagaggagacaggca

SEQ ID NO: 2531552 - RNA, 19 nt, Homo sapiens
  misc_RNA (1)...(19): siRNA sense strand
gggccgauucugcaggcaa

SEQ ID NO: 2531553 - RNA, 19 nt, Homo sapiens
  misc_RNA (1)...(19): siRNA sense strand
cuacaagguccgaggaguc

SEQ ID NO: 2531554 - RNA, 19 nt, Homo sapiens
  misc_RNA (1)...(19): siRNA sense strand
ccucuuucuccgagcaaaa

SEQ ID NO: 2531555 - RNA, 19 nt, Homo sapiens
  misc_RNA (1)...(19): siRNA sense strand
gguuagaggucguggcaga

SEQ ID NO: 2531556 - RNA, 19 nt, Homo sapiens
  misc_RNA (1)...(19): siRNA sense strand
ggucuugggaugagggcuu

SEQ ID NO: 2531557 - RNA, 19 nt, Homo sapiens
  misc_RNA (1)...(19): siRNA sense strand
acacugugcaggagggaga

SEQ ID NO: 2531558 - RNA, 19 nt, Homo sapiens
  misc_RNA (1)...(19): siRNA sense strand
guacuggauaucagggaau

SEQ ID NO: 2531559 - RNA, 19 nt, Homo sapiens
  misc_RNA (1)...(19): siRNA sense strand
caaaagaaccugaugcgaa

SEQ ID NO: 2531560 - RNA, 19 nt, Homo sapiens
  misc_RNA (1)...(19): siRNA sense strand
ucauaugaaugucaggcua

SEQ ID NO: 2531561 - RNA, 19 nt, Homo sapiens
  misc_RNA (1)...(19): siRNA sense strand
gguuccugguggagacauu

SEQ ID NO: 2531562 - RNA, 19 nt, Homo sapiens
  misc_RNA (1)...(19): siRNA sense strand
gguacuggauaucagggaa

SEQ ID NO: 2531563 - RNA, 19 nt, Homo sapiens
  misc_RNA (1)...(19): siRNA sense strand
gcccacaggaagagacaca

SEQ ID NO: 2531564 - RNA, 19 nt, Homo sapiens
  misc_RNA (1)...(19): siRNA sense strand
gggccugaucucugugcua

SEQ ID NO: 2531565 - RNA, 19 nt, Homo sapiens
  misc_RNA (1)...(19): siRNA sense strand
ggccaagguuagaggucgu

SEQ ID NO: 2531566 - RNA, 19 nt, Homo sapiens
  misc_RNA (1)...(19): siRNA sense strand
gaagaagaggagacaggca

SEQ ID NO: 2531567 - RNA, 19 nt, Homo sapiens
  misc_RNA (1)...(19): siRNA sense strand
gggccgauucugcaggcaa

SEQ ID NO: 2531568 - RNA, 19 nt, Homo sapiens
  misc_RNA (1)...(19): siRNA sense strand
cuacaagguccgaggaguc

SEQ ID NO: 2531569 - RNA, 19 nt, Homo sapiens
  misc_RNA (1)...(19): siRNA sense strand
ccucuuucuccgagcaaaa

SEQ ID NO: 2531570 - RNA, 19 nt, Homo sapiens
  misc_RNA (1)...(19): siRNA sense strand
gguuagaggucguggcaga

SEQ ID NO: 2531571 - RNA, 19 nt, Homo sapiens
  misc_RNA (1)...(19): siRNA sense strand
ggucuugggaugagggcuu

SEQ ID NO: 2531572 - RNA, 19 nt, Homo sapiens
  misc_RNA (1)...(19): siRNA sense strand
acacugugcaggagggaga

SEQ ID NO: 2531573 - RNA, 19 nt, Homo sapiens
  misc_RNA (1)...(19): siRNA sense strand
guacuggauaucagggaau

SEQ ID NO: 2531574 - RNA, 19 nt, Homo sapiens
  misc_RNA (1)...(19): siRNA sense strand
caaaagaaccugaugcgaa

SEQ ID NO: 2531575 - RNA, 19 nt, Homo sapiens
  misc_RNA (1)...(19): siRNA sense strand
ucauaugaaugucaggcua

SEQ ID NO: 2531576 - RNA, 19 nt, Homo sapiens
  misc_RNA (1)...(19): siRNA sense strand
gguuccugguggagacauu

SEQ ID NO: 2531577 - RNA, 19 nt, Homo sapiens
  misc_RNA (1)...(19): siRNA sense strand
gguacuggauaucagggaa

SEQ ID NO: 2531578 - RNA, 19 nt, Homo sapiens
  misc_RNA (1)...(19): siRNA sense strand
gcccacaggaagagacaca

SEQ ID NO: 2531579 - RNA, 19 nt, Homo sapiens
  misc_RNA (1)...(19): siRNA sense strand
gggccugaucucugugcua

SEQ ID NO: 2531580 - RNA, 19 nt, Homo sapiens
  misc_RNA (1)...(19): siRNA sense strand
ggccaagguuagaggucgu

SEQ ID NO: 2531581 - RNA, 19 nt, Homo sapiens
  misc_RNA (1)...(19): siRNA sense strand
gaagaagaggagacaggca

SEQ ID NO: 2531582 - RNA, 19 nt, Homo sapiens
  misc_RNA (1)...(19): siRNA sense strand
gggccgauucugcaggcaa

SEQ ID NO: 2531583 - RNA, 19 nt, Homo sapiens
  misc_RNA (1)...(19): siRNA sense strand
cuacaagguccgaggaguc

SEQ ID NO: 2531584 - RNA, 19 nt, Homo sapiens
  misc_RNA (1)...(19): siRNA sense strand
ccucuuucuccgagcaaaa

SEQ ID NO: 2531585 - RNA, 19 nt, Homo sapiens
  misc_RNA (1)...(19): siRNA sense strand
caggcaaaggagugugaaa

SEQ ID NO: 2531586 - RNA, 19 nt, Homo sapiens
  misc_RNA (1)...(19): siRNA sense strand
cagcagagaaguuugggaa

SEQ ID NO: 2531587 - RNA, 19 nt, Homo sapiens
  misc_RNA (1)...(19): siRNA sense strand
agguggagaagcacggaaa

SEQ ID NO: 2531588 - RNA, 19 nt, Homo sapiens
  misc_RNA (1)...(19): siRNA sense strand
aagcgauggaggagcaaca

SEQ ID NO: 2531589 - RNA, 19 nt, Homo sapiens
  misc_RNA (1)...(19): siRNA sense strand
aaacgaagucucuggcuca

SEQ ID NO: 2531590 - RNA, 19 nt, Homo sapiens
  misc_RNA (1)...(19): siRNA sense strand
aggcaaggugggaggugga

SEQ ID NO: 2531591 - RNA, 19 nt, Homo sapiens
  misc_RNA (1)...(19): siRNA sense strand
ccucaucagcaguggaaac

SEQ ID NO: 2531592 - RNA, 19 nt, Homo sapiens
  misc_RNA (1)...(19): siRNA sense strand
aggcaaaggagugugaaaa

SEQ ID NO: 2531593 - RNA, 19 nt, Homo sapiens
  misc_RNA (1)...(19): siRNA sense strand
guggagaauagaaggcaaa

SEQ ID NO: 2531594 - RNA, 19 nt, Homo sapiens
  misc_RNA (1)...(19): siRNA sense strand
gguggagaauagaaggcaa

SEQ ID NO: 2531595 - RNA, 19 nt, Homo sapiens
  misc_RNA (1)...(19): siRNA sense strand
gggcuuucgaggaggaaga

SEQ ID NO: 2531596 - RNA, 19 nt, Homo sapiens
  misc_RNA (1)...(19): siRNA sense strand
cagcugaaggugagaagca

SEQ ID NO: 2531597 - RNA, 19 nt, Homo sapiens
  misc_RNA (1)...(19): siRNA sense strand
cuuucgaggaggaagaaga

SEQ ID NO: 2531598 - RNA, 19 nt, Homo sapiens
  misc_RNA (1)...(19): siRNA sense strand
gcagaagggcuuucgagga

SEQ ID NO: 2531599 - RNA, 19 nt, Homo sapiens
  misc_RNA (1)...(19): siRNA sense strand
cugaaggugagaagcaaca

SEQ ID NO: 2531600 - RNA, 19 nt, Homo sapiens
  misc_RNA (1)...(19): siRNA sense strand
guagugaccuggagggugu

SEQ ID NO: 2531601 - RNA, 19 nt, Homo sapiens
  misc_RNA (1)...(19): siRNA sense strand
cuacagggacccaggcuga

SEQ ID NO: 2531602 - RNA, 19 nt, Homo sapiens
  misc_RNA (1)...(19): siRNA sense strand
auugguggguggagacuau

SEQ ID NO: 2531603 - RNA, 19 nt, Homo sapiens
  misc_RNA (1)...(19): siRNA sense strand
ccucagaagaccaggcaga

SEQ ID NO: 2531604 - RNA, 19 nt, Homo sapiens
  misc_RNA (1)...(19): siRNA sense strand
aggaagagcccucagguga

SEQ ID NO: 2531605 - RNA, 19 nt, Homo sapiens
  misc_RNA (1)...(19): siRNA sense strand
guggcaaacacguggccua

SEQ ID NO: 2531606 - RNA, 19 nt, Homo sapiens
  misc_RNA (1)...(19): siRNA sense strand
cuuccaaggcucaaagaga

SEQ ID NO: 2531607 - RNA, 19 nt, Homo sapiens
  misc_RNA (1)...(19): siRNA sense strand
ggacagugcugacagacga

SEQ ID NO: 2531608 - RNA, 19 nt, Homo sapiens
  misc_RNA (1)...(19): siRNA sense strand
gggcgacaguggaagcuga

SEQ ID NO: 2531609 - RNA, 19 nt, Homo sapiens
  misc_RNA (1)...(19): siRNA sense strand
cacucaaacuggaugccaa

SEQ ID NO: 2531610 - RNA, 19 nt, Homo sapiens
  misc_RNA (1)...(19): siRNA sense strand
cuguccagacuguggcaaa

SEQ ID NO: 2531611 - RNA, 19 nt, Homo sapiens
  misc_RNA (1)...(19): siRNA sense strand
ggacaaauugccuucccaa

SEQ ID NO: 2531612 - RNA, 19 nt, Homo sapiens
  misc_RNA (1)...(19): siRNA sense strand
ugaaguggcucuacggguu

SEQ ID NO: 2531613 - RNA, 19 nt, Homo sapiens
  misc_RNA (1)...(19): siRNA sense strand
uggaaaugugacagcugaa

SEQ ID NO: 2531614 - RNA, 19 nt, Homo sapiens
  misc_RNA (1)...(19): siRNA sense strand
aggacaucaugaagcaaaa

SEQ ID NO: 2531615 - RNA, 19 nt, Homo sapiens
  misc_RNA (1)...(19): siRNA sense strand
gcuuguucaaugagcagaa

SEQ ID NO: 2531616 - RNA, 19 nt, Homo sapiens
  misc_RNA (1)...(19): siRNA sense strand
ccuccaugagaaugaguau

SEQ ID NO: 2531617 - RNA, 19 nt, Homo sapiens
  misc_RNA (1)...(19): siRNA sense strand
auccagaggaccagaguca

SEQ ID NO: 2531618 - RNA, 19 nt, Homo sapiens
  misc_RNA (1)...(19): siRNA sense strand
ggguuucugccauggacaa

SEQ ID NO: 2531619 - RNA, 19 nt, Homo sapiens
  misc_RNA (1)...(19): siRNA sense strand
acucaggaccacagaagca

SEQ ID NO: 2531620 - RNA, 19 nt, Homo sapiens
  misc_RNA (1)...(19): siRNA sense strand
gcgaagaagugccggaagg

SEQ ID NO: 2531621 - RNA, 19 nt, Homo sapiens
  misc_RNA (1)...(19): siRNA sense strand
aagaagugccggaaggugu

SEQ ID NO: 2531622 - RNA, 19 nt, Homo sapiens
  misc_RNA (1)...(19): siRNA sense strand
gccggaagguguauggcau

SEQ ID NO: 2531623 - RNA, 19 nt, Homo sapiens
  misc_RNA (1)...(19): siRNA sense strand
gggaaggcaaagaggaaau

SEQ ID NO: 2531624 - RNA, 19 nt, Homo sapiens
  misc_RNA (1)...(19): siRNA sense strand
cguggaacgaggaaggaaa

SEQ ID NO: 2531625 - RNA, 19 nt, Homo sapiens
  misc_RNA (1)...(19): siRNA sense strand
aagggaaggcaaagaggaa

SEQ ID NO: 2531626 - RNA, 19 nt, Homo sapiens
  misc_RNA (1)...(19): siRNA sense strand
ccaugaagccgguggaaac

SEQ ID NO: 2531627 - RNA, 19 nt, Homo sapiens
  misc_RNA (1)...(19): siRNA sense strand
cacugaaagcccagagcua

SEQ ID NO: 2531628 - RNA, 19 nt, Homo sapiens
  misc_RNA (1)...(19): siRNA sense strand
ggaacgaugagaacggcaa

SEQ ID NO: 2531629 - RNA, 19 nt, Homo sapiens
  misc_RNA (1)...(19): siRNA sense strand
cguauacgcucaacggcaa

SEQ ID NO: 2531630 - RNA, 19 nt, Homo sapiens
  misc_RNA (1)...(19): siRNA sense strand
gaagaaaggagaucggguu

SEQ ID NO: 2531631 - RNA, 19 nt, Homo sapiens
  misc_RNA (1)...(19): siRNA sense strand
gcaggugguuaaaggccua

SEQ ID NO: 2531632 - RNA, 19 nt, Homo sapiens
  misc_RNA (1)...(19): siRNA sense strand
gaggaaauugugaagguga

SEQ ID NO: 2531633 - RNA, 19 nt, Homo sapiens
  misc_RNA (1)...(19): siRNA sense strand
cugacuugguuaagaggau

SEQ ID NO: 2531634 - RNA, 19 nt, Homo sapiens
  misc_RNA (1)...(19): siRNA sense strand
aguaagaagaacacgcaga

SEQ ID NO: 2531635 - RNA, 19 nt, Homo sapiens
  misc_RNA (1)...(19): siRNA sense strand
gcagcagcaaugaggaaaa

SEQ ID NO: 2531636 - RNA, 19 nt, Homo sapiens
  misc_RNA (1)...(19): siRNA sense strand
uggaaaagccguggagcaa

SEQ ID NO: 2531637 - RNA, 19 nt, Homo sapiens
  misc_RNA (1)...(19): siRNA sense strand
cggccauggucuuguacga

SEQ ID NO: 2531638 - RNA, 19 nt, Homo sapiens
  misc_RNA (1)...(19): siRNA sense strand
gaguaugucuacaggugca

SEQ ID NO: 2531639 - RNA, 19 nt, Homo sapiens
  misc_RNA (1)...(19): siRNA sense strand
agaucggguuguugguuau

SEQ ID NO: 2531640 - RNA, 19 nt, Homo sapiens
  misc_RNA (1)...(19): siRNA sense strand
cagaaaaccuccugcggca

SEQ ID NO: 2531641 - RNA, 19 nt, Homo sapiens
  misc_RNA (1)...(19): siRNA sense strand
cggcacaaagagaaugaca

SEQ ID NO: 2531642 - RNA, 19 nt, Homo sapiens
  misc_RNA (1)...(19): siRNA sense strand
cuauaauggcaaagagcac

SEQ ID NO: 2531643 - RNA, 19 nt, Homo sapiens
  misc_RNA (1)...(19): siRNA sense strand
cagagagaacauagaccuu

SEQ ID NO: 2531644 - RNA, 19 nt, Homo sapiens
  misc_RNA (1)...(19): siRNA sense strand
ccugacaguaagaagaaca

SEQ ID NO: 2531645 - RNA, 19 nt, Homo sapiens
  misc_RNA (1)...(19): siRNA sense strand
ccuucgaggagguggagga

SEQ ID NO: 2531646 - RNA, 19 nt, Homo sapiens
  misc_RNA (1)...(19): siRNA sense strand
guucaaaggcagucggcuc

SEQ ID NO: 2531647 - RNA, 19 nt, Homo sapiens
  misc_RNA (1)...(19): siRNA sense strand
ucgaggagguggaggacag

SEQ ID NO: 2531648 - RNA, 19 nt, Homo sapiens
  misc_RNA (1)...(19): siRNA sense strand
ccauugguccguugaguca

SEQ ID NO: 2531649 - RNA, 19 nt, Homo sapiens
  misc_RNA (1)...(19): siRNA sense strand
cuguggaggcuguugucua

SEQ ID NO: 2531650 - RNA, 19 nt, Homo sapiens
  misc_RNA (1)...(19): siRNA sense strand
acaaguacaggaaggcgua

SEQ ID NO: 2531651 - RNA, 19 nt, Homo sapiens
  misc_RNA (1)...(19): siRNA sense strand
agaagaacacgcagaugga

SEQ ID NO: 2531652 - RNA, 19 nt, Homo sapiens
  misc_RNA (1)...(19): siRNA sense strand
aaguggaaguugccgucaa

SEQ ID NO: 2531653 - RNA, 19 nt, Homo sapiens
  misc_RNA (1)...(19): siRNA sense strand
gagaaauaugccagggaca

SEQ ID NO: 2531654 - RNA, 19 nt, Homo sapiens
  misc_RNA (1)...(19): siRNA sense strand
cugaaaagaagguggcuga

SEQ ID NO: 2531655 - RNA, 19 nt, Homo sapiens
  misc_RNA (1)...(19): siRNA sense strand
acacagucaagaaggucaa

SEQ ID NO: 2531656 - RNA, 19 nt, Homo sapiens
  misc_RNA (1)...(19): siRNA sense strand
augccagggacaugagaau

SEQ ID NO: 2531657 - RNA, 19 nt, Homo sapiens
  misc_RNA (1)...(19): siRNA sense strand
aaggaaggagcuggagaaa

SEQ ID NO: 2531658 - RNA, 19 nt, Homo sapiens
  misc_RNA (1)...(19): siRNA sense strand
agaaauaugccagggacau

SEQ ID NO: 2531659 - RNA, 19 nt, Homo sapiens
  misc_RNA (1)...(19): siRNA sense strand
ucaaagaugcugagggcug

SEQ ID NO: 2531660 - RNA, 19 nt, Homo sapiens
  misc_RNA (1)...(19): siRNA sense strand
gggacaugagaaugaagau

SEQ ID NO: 2531661 - RNA, 19 nt, Homo sapiens
  misc_RNA (1)...(19): siRNA sense strand
cucugaaugaagugggcua

SEQ ID NO: 2531662 - RNA, 19 nt, Homo sapiens
  misc_RNA (1)...(19): siRNA sense strand
agucaagaaggucaagauu

SEQ ID NO: 2531663 - RNA, 19 nt, Homo sapiens
  misc_RNA (1)...(19): siRNA sense strand
ccucauagcuuccagccca

SEQ ID NO: 2531664 - RNA, 19 nt, Homo sapiens
  misc_RNA (1)...(19): siRNA sense strand
acauaaggaaggagcugga

SEQ ID NO: 2531665 - RNA, 19 nt, Homo sapiens
  misc_RNA (1)...(19): siRNA sense strand
ggggaacccuagugagaga

SEQ ID NO: 2531666 - RNA, 19 nt, Homo sapiens
  misc_RNA (1)...(19): siRNA sense strand
cggacauggcuguggucga

SEQ ID NO: 2531667 - RNA, 19 nt, Homo sapiens
  misc_RNA (1)...(19): siRNA sense strand
gggaauuaccaguuacgga

SEQ ID NO: 2531668 - RNA, 19 nt, Homo sapiens
  misc_RNA (1)...(19): siRNA sense strand
caugcaaaggauuguggaa

SEQ ID NO: 2531669 - RNA, 19 nt, Homo sapiens
  misc_RNA (1)...(19): siRNA sense strand
aaagaagaagguaacgcua

SEQ ID NO: 2531670 - RNA, 19 nt, Homo sapiens
  misc_RNA (1)...(19): siRNA sense strand
uggacgaauuggagaaaga

SEQ ID NO: 2531671 - RNA, 19 nt, Homo sapiens
  misc_RNA (1)...(19): siRNA sense strand
cagcauaccaugaacggaa

SEQ ID NO: 2531672 - RNA, 19 nt, Homo sapiens
  misc_RNA (1)...(19): siRNA sense strand
ugacagaauuaauggaacu

SEQ ID NO: 2531673 - RNA, 19 nt, Homo sapiens
  misc_RNA (1)...(19): siRNA sense strand
uuauagaaggcuugaagua

SEQ ID NO: 2531674 - RNA, 19 nt, Homo sapiens
  misc_RNA (1)...(19): siRNA sense strand
guguguacucugacaauaa

SEQ ID NO: 2531675 - RNA, 19 nt, Homo sapiens
  misc_RNA (1)...(19): siRNA sense strand
aaauaaggaaucugccaaa

SEQ ID NO: 2531676 - RNA, 19 nt, Homo sapiens
  misc_RNA (1)...(19): siRNA sense strand
cagaauuaauggaacuaca

SEQ ID NO: 2531677 - RNA, 19 nt, Homo sapiens
  misc_RNA (1)...(19): siRNA sense strand
gguagauacaacaagaauu

SEQ ID NO: 2531678 - RNA, 19 nt, Homo sapiens
  misc_RNA (1)...(19): siRNA sense strand
cugaaugugaagaaaggaa

SEQ ID NO: 2531679 - RNA, 19 nt, Homo sapiens
  misc_RNA (1)...(19): siRNA sense strand
cugccaaagaagagaaaau

SEQ ID NO: 2531680 - RNA, 19 nt, Homo sapiens
  misc_RNA (1)...(19): siRNA sense strand
uuaccuaauuguagaggau

SEQ ID NO: 2531681 - RNA, 19 nt, Homo sapiens
  misc_RNA (1)...(19): siRNA sense strand
cagcuuauggaaagaguuu

SEQ ID NO: 2531682 - RNA, 19 nt, Homo sapiens
  misc_RNA (1)...(19): siRNA sense strand
agagaaaaucagugacauu

SEQ ID NO: 2531683 - RNA, 19 nt, Homo sapiens
  misc_RNA (1)...(19): siRNA sense strand
cuuucuauguugcaaguua

SEQ ID NO: 2531684 - RNA, 19 nt, Homo sapiens
  misc_RNA (1)...(19): siRNA sense strand
agauggacgaauuggagaa

SEQ ID NO: 2531685 - RNA, 19 nt, Homo sapiens
  misc_RNA (1)...(19): siRNA sense strand
ggguagauacaacaagaau

SEQ ID NO: 2531686 - RNA, 19 nt, Homo sapiens
  misc_RNA (1)...(19): siRNA sense strand
ccuguuucuucaagcaaua

SEQ ID NO: 2531687 - RNA, 19 nt, Homo sapiens
  misc_RNA (1)...(19): siRNA sense strand
gauuauugagccaguguau

SEQ ID NO: 2531688 - RNA, 19 nt, Homo sapiens
  misc_RNA (1)...(19): siRNA sense strand
gccaaagucuucagaaaau

SEQ ID NO: 2531689 - RNA, 19 nt, Homo sapiens
  misc_RNA (1)...(19): siRNA sense strand
agcaaagugacaagguuua

SEQ ID NO: 2531690 - RNA, 19 nt, Homo sapiens
  misc_RNA (1)...(19): siRNA sense strand
ccaacaggcaggagcuuga

SEQ ID NO: 2531691 - RNA, 19 nt, Homo sapiens
  misc_RNA (1)...(19): siRNA sense strand
caugagaggcuguaggguu

SEQ ID NO: 2531692 - RNA, 19 nt, Homo sapiens
  misc_RNA (1)...(19): siRNA sense strand
aggaaguuuuguagcuaaa

SEQ ID NO: 2531693 - RNA, 19 nt, Homo sapiens
  misc_RNA (1)...(19): siRNA sense strand
auuaauggaacuacaggaa

SEQ ID NO: 2531694 - RNA, 19 nt, Homo sapiens
  misc_RNA (1)...(19): siRNA sense strand
gggauauuuacuacaguuu

SEQ ID NO: 2531695 - RNA, 19 nt, Homo sapiens
  misc_RNA (1)...(19): siRNA sense strand
ggcuguaggguuaaagauu

SEQ ID NO: 2531696 - RNA, 19 nt, Homo sapiens
  misc_RNA (1)...(19): siRNA sense strand
gcaggagcuugaacgggaa

SEQ ID NO: 2531697 - RNA, 19 nt, Homo sapiens
  misc_RNA (1)...(19): siRNA sense strand
aaguuuaguagcagccuua

SEQ ID NO: 2531698 - RNA, 19 nt, Homo sapiens
  misc_RNA (1)...(19): siRNA sense strand
cauuccaauuccugaaaga

SEQ ID NO: 2531699 - RNA, 19 nt, Homo sapiens
  misc_RNA (1)...(19): siRNA sense strand
ugacccagauacaguggaa

SEQ ID NO: 2531700 - RNA, 19 nt, Homo sapiens
  misc_RNA (1)...(19): siRNA sense strand
acaguuaaugggugcgauu

SEQ ID NO: 2531701 - RNA, 19 nt, Homo sapiens
  misc_RNA (1)...(19): siRNA sense strand
acgaacugacacacaauaa

SEQ ID NO: 2531702 - RNA, 19 nt, Homo sapiens
  misc_RNA (1)...(19): siRNA sense strand
cuccauuccuuuaagagaa

SEQ ID NO: 2531703 - RNA, 19 nt, Homo sapiens
  misc_RNA (1)...(19): siRNA sense strand
cugaaauuccuugaaguaa

SEQ ID NO: 2531704 - RNA, 19 nt, Homo sapiens
  misc_RNA (1)...(19): siRNA sense strand
cugacaucuuacaaagcua

SEQ ID NO: 2531705 - RNA, 19 nt, Homo sapiens
  misc_RNA (1)...(19): siRNA sense strand
cuguaucucugaagacuau

SEQ ID NO: 2531706 - RNA, 19 nt, Homo sapiens
  misc_RNA (1)...(19): siRNA sense strand
ggagagagguuuugcuacu

SEQ ID NO: 2531707 - RNA, 19 nt, Homo sapiens
  misc_RNA (1)...(19): siRNA sense strand
gaagagaaaaucagugaca

SEQ ID NO: 2531708 - RNA, 19 nt, Homo sapiens
  misc_RNA (1)...(19): siRNA sense strand
auuaagaacuguacaccca

SEQ ID NO: 2531709 - RNA, 19 nt, Homo sapiens
  misc_RNA (1)...(19): siRNA sense strand
gugcauguuagcagcauuu

SEQ ID NO: 2531710 - RNA, 19 nt, Homo sapiens
  misc_RNA (1)...(19): siRNA sense strand
ccuguagagcugcgccaaa

SEQ ID NO: 2531711 - RNA, 19 nt, Homo sapiens
  misc_RNA (1)...(19): siRNA sense strand
ggcaggagcuugaacggga

SEQ ID NO: 2531712 - RNA, 19 nt, Homo sapiens
  misc_RNA (1)...(19): siRNA sense strand
cuuaaauacuuauggagag

SEQ ID NO: 2531713 - RNA, 19 nt, Homo sapiens
  misc_RNA (1)...(19): siRNA sense strand
guuagcagcauuuggugua

SEQ ID NO: 2531714 - RNA, 19 nt, Homo sapiens
  misc_RNA (1)...(19): siRNA sense strand
ggaacuuaugaccuggaua

SEQ ID NO: 2531715 - RNA, 19 nt, Homo sapiens
  misc_RNA (1)...(19): siRNA sense strand
acuagaguauacuggaaca

SEQ ID NO: 2531716 - RNA, 19 nt, Homo sapiens
  misc_RNA (1)...(19): siRNA sense strand
cagccuuaaugcuugcuaa

SEQ ID NO: 2531717 - RNA, 19 nt, Homo sapiens
  misc_RNA (1)...(19): siRNA sense strand
uugcgugguucguuauuaa

SEQ ID NO: 2531718 - RNA, 19 nt, Homo sapiens
  misc_RNA (1)...(19): siRNA sense strand
auacuuauggagagagguu

SEQ ID NO: 2531719 - RNA, 19 nt, Homo sapiens
  misc_RNA (1)...(19): siRNA sense strand
aggucucagcuuauggaaa

SEQ ID NO: 2531720 - RNA, 19 nt, Homo sapiens
  misc_RNA (1)...(19): siRNA sense strand
ccaaaucuauucaaagcga

SEQ ID NO: 2531721 - RNA, 19 nt, Homo sapiens
  misc_RNA (1)...(19): siRNA sense strand
aggaaauagagaagcucaa

SEQ ID NO: 2531722 - RNA, 19 nt, Homo sapiens
  misc_RNA (1)...(19): siRNA sense strand
agaagaaagucacagccaa

SEQ ID NO: 2531723 - RNA, 19 nt, Homo sapiens
  misc_RNA (1)...(19): siRNA sense strand
ggguugguacagaggauau

SEQ ID NO: 2531724 - RNA, 19 nt, Homo sapiens
  misc_RNA (1)...(19): siRNA sense strand
acgggaugcccaaggaaau

SEQ ID NO: 2531725 - RNA, 19 nt, Homo sapiens
  misc_RNA (1)...(19): siRNA sense strand
cagaugacguacagccuga

SEQ ID NO: 2531726 - RNA, 19 nt, Homo sapiens
  misc_RNA (1)...(19): siRNA sense strand
caaaauugaucaugggaac

SEQ ID NO: 2531727 - RNA, 19 nt, Homo sapiens
  misc_RNA (1)...(19): siRNA sense strand
gcucaagaagaaagucaca

SEQ ID NO: 2531728 - RNA, 19 nt, Homo sapiens
  misc_RNA (1)...(19): siRNA sense strand
ccaaggaugaacuggcaga

SEQ ID NO: 2531729 - RNA, 19 nt, Homo sapiens
  misc_RNA (1)...(19): siRNA sense strand
ggaacauccuagacccuga

SEQ ID NO: 2531730 - RNA, 19 nt, Homo sapiens
  misc_RNA (1)...(19): siRNA sense strand
ggaacagaaugcugggguu

SEQ ID NO: 2531731 - RNA, 19 nt, Homo sapiens
  misc_RNA (1)...(19): siRNA sense strand
agucaauccugcagaaccu

SEQ ID NO: 2531732 - RNA, 19 nt, Homo sapiens
  misc_RNA (1)...(19): siRNA sense strand
cugauaucauacaugggaa

SEQ ID NO: 2531733 - RNA, 19 nt, Homo sapiens
  misc_RNA (1)...(19): siRNA sense strand
gcgagaugacaaugggaac

SEQ ID NO: 2531734 - RNA, 19 nt, Homo sapiens
  misc_RNA (1)...(19): siRNA sense strand
cuccaaaaggauugaggaa

SEQ ID NO: 2531735 - RNA, 19 nt, Homo sapiens
  misc_RNA (1)...(19): siRNA sense strand
gcccaaggaaauagagaag

SEQ ID NO: 2531736 - RNA, 19 nt, Homo sapiens
  misc_RNA (1)...(19): siRNA sense strand
cgagaugacaaugggaaca

SEQ ID NO: 2531737 - RNA, 19 nt, Homo sapiens
  misc_RNA (1)...(19): siRNA sense strand
agguggaugaugaagaaaa

SEQ ID NO: 2531738 - RNA, 19 nt, Homo sapiens
  misc_RNA (1)...(19): siRNA sense strand
ccaaaauugaucaugggaa

SEQ ID NO: 2531739 - RNA, 19 nt, Homo sapiens
  misc_RNA (1)...(19): siRNA sense strand
gcaguaacgggaugcccaa

SEQ ID NO: 2531740 - RNA, 19 nt, Homo sapiens
  misc_RNA (1)...(19): siRNA sense strand
gcgucagccuugugugcca

SEQ ID NO: 2531741 - RNA, 19 nt, Homo sapiens
  misc_RNA (1)...(19): siRNA sense strand
aggaaauagagaagcucaa

SEQ ID NO: 2531742 - RNA, 19 nt, Homo sapiens
  misc_RNA (1)...(19): siRNA sense strand
agaagaaagucacagccaa

SEQ ID NO: 2531743 - RNA, 19 nt, Homo sapiens
  misc_RNA (1)...(19): siRNA sense strand
ggguugguacagaggauau

SEQ ID NO: 2531744 - RNA, 19 nt, Homo sapiens
  misc_RNA (1)...(19): siRNA sense strand
acgggaugcccaaggaaau

SEQ ID NO: 2531745 - RNA, 19 nt, Homo sapiens
  misc_RNA (1)...(19): siRNA sense strand
cagaugacguacagccuga

SEQ ID NO: 2531746 - RNA, 19 nt, Homo sapiens
  misc_RNA (1)...(19): siRNA sense strand
caaaauugaucaugggaac

SEQ ID NO: 2531747 - RNA, 19 nt, Homo sapiens
  misc_RNA (1)...(19): siRNA sense strand
gcucaagaagaaagucaca

SEQ ID NO: 2531748 - RNA, 19 nt, Homo sapiens
  misc_RNA (1)...(19): siRNA sense strand
ccaaggaugaacuggcaga

SEQ ID NO: 2531749 - RNA, 19 nt, Homo sapiens
  misc_RNA (1)...(19): siRNA sense strand
ggaacauccuagacccuga

SEQ ID NO: 2531750 - RNA, 19 nt, Homo sapiens
  misc_RNA (1)...(19): siRNA sense strand
ggaacagaaugcugggguu

SEQ ID NO: 2531751 - RNA, 19 nt, Homo sapiens
  misc_RNA (1)...(19): siRNA sense strand
agucaauccugcagaaccu

SEQ ID NO: 2531752 - RNA, 19 nt, Homo sapiens
  misc_RNA (1)...(19): siRNA sense strand
cugauaucauacaugggaa

SEQ ID NO: 2531753 - RNA, 19 nt, Homo sapiens
  misc_RNA (1)...(19): siRNA sense strand
gcgagaugacaaugggaac

SEQ ID NO: 2531754 - RNA, 19 nt, Homo sapiens
  misc_RNA (1)...(19): siRNA sense strand
cuccaaaaggauugaggaa

SEQ ID NO: 2531755 - RNA, 19 nt, Homo sapiens
  misc_RNA (1)...(19): siRNA sense strand
gcccaaggaaauagagaag

SEQ ID NO: 2531756 - RNA, 19 nt, Homo sapiens
  misc_RNA (1)...(19): siRNA sense strand
cgagaugacaaugggaaca

SEQ ID NO: 2531757 - RNA, 19 nt, Homo sapiens
  misc_RNA (1)...(19): siRNA sense strand
agguggaugaugaagaaaa

SEQ ID NO: 2531758 - RNA, 19 nt, Homo sapiens
  misc_RNA (1)...(19): siRNA sense strand
ccaaaauugaucaugggaa

SEQ ID NO: 2531759 - RNA, 19 nt, Homo sapiens
  misc_RNA (1)...(19): siRNA sense strand
gcaguaacgggaugcccaa

SEQ ID NO: 2531760 - RNA, 19 nt, Homo sapiens
  misc_RNA (1)...(19): siRNA sense strand
gcgucagccuugugugcca

SEQ ID NO: 2531761 - RNA, 19 nt, Homo sapiens
  misc_RNA (1)...(19): siRNA sense strand
cuuuacaagaugaggaaga

SEQ ID NO: 2531762 - RNA, 19 nt, Homo sapiens
  misc_RNA (1)...(19): siRNA sense strand
gcugagaaauguaacccaa

SEQ ID NO: 2531763 - RNA, 19 nt, Homo sapiens
  misc_RNA (1)...(19): siRNA sense strand
agagagagccagagccaga

SEQ ID NO: 2531764 - RNA, 19 nt, Homo sapiens
  misc_RNA (1)...(19): siRNA sense strand
gaagagagagccagagcca

SEQ ID NO: 2531765 - RNA, 19 nt, Homo sapiens
  misc_RNA (1)...(19): siRNA sense strand
ugauagaugcucuggacau

SEQ ID NO: 2531766 - RNA, 19 nt, Homo sapiens
  misc_RNA (1)...(19): siRNA sense strand
ccgaaggagucaacgacca

SEQ ID NO: 2531767 - RNA, 19 nt, Homo sapiens
  misc_RNA (1)...(19): siRNA sense strand
ccuguagaugagaaaguaa

SEQ ID NO: 2531768 - RNA, 19 nt, Homo sapiens
  misc_RNA (1)...(19): siRNA sense strand
acaagaugaggaagagaga

SEQ ID NO: 2531769 - RNA, 19 nt, Homo sapiens
  misc_RNA (1)...(19): siRNA sense strand
ugucaacaaacuagaucua

SEQ ID NO: 2531770 - RNA, 19 nt, Homo sapiens
  misc_RNA (1)...(19): siRNA sense strand
ccaaauggaagaaaggcca

SEQ ID NO: 2531771 - RNA, 19 nt, Homo sapiens
  misc_RNA (1)...(19): siRNA sense strand
gagccagaguugcagccaa

SEQ ID NO: 2531772 - RNA, 19 nt, Homo sapiens
  misc_RNA (1)...(19): siRNA sense strand
cucgaggucaggagaguaa

SEQ ID NO: 2531773 - RNA, 19 nt, Homo sapiens
  misc_RNA (1)...(19): siRNA sense strand
ggguauuaucuucacaaau

SEQ ID NO: 2531774 - RNA, 19 nt, Homo sapiens
  misc_RNA (1)...(19): siRNA sense strand
ggccaagguaaaugauaca

SEQ ID NO: 2531775 - RNA, 19 nt, Homo sapiens
  misc_RNA (1)...(19): siRNA sense strand
uuuuagaagaggaggaaga

SEQ ID NO: 2531776 - RNA, 19 nt, Homo sapiens
  misc_RNA (1)...(19): siRNA sense strand
cuguagaugagaaaguaau

SEQ ID NO: 2531777 - RNA, 19 nt, Homo sapiens
  misc_RNA (1)...(19): siRNA sense strand
cccaaauguccaagagcca

SEQ ID NO: 2531778 - RNA, 19 nt, Homo sapiens
  misc_RNA (1)...(19): siRNA sense strand
gugcacguuccaagguuaa

SEQ ID NO: 2531779 - RNA, 19 nt, Homo sapiens
  misc_RNA (1)...(19): siRNA sense strand
caaauggaagaaaggccaa

SEQ ID NO: 2531780 - RNA, 19 nt, Homo sapiens
  misc_RNA (1)...(19): siRNA sense strand
augaaagagcccauuacaa

SEQ ID NO: 2531781 - RNA, 19 nt, Homo sapiens
  misc_RNA (1)...(19): siRNA sense strand
aagaaaauuaccuggagua

SEQ ID NO: 2531782 - RNA, 19 nt, Homo sapiens
  misc_RNA (1)...(19): siRNA sense strand
gauacagcucccagugaau

SEQ ID NO: 2531783 - RNA, 19 nt, Homo sapiens
  misc_RNA (1)...(19): siRNA sense strand
ggcuuuacaagaugaggaa

SEQ ID NO: 2531784 - RNA, 19 nt, Homo sapiens
  misc_RNA (1)...(19): siRNA sense strand
gaugaggaagagagagcca

SEQ ID NO: 2531785 - RNA, 19 nt, Homo sapiens
  misc_RNA (1)...(19): siRNA sense strand
cugagaaauguaacccaaa

SEQ ID NO: 2531786 - RNA, 19 nt, Homo sapiens
  misc_RNA (1)...(19): siRNA sense strand
agaucuaggcugugaugca

SEQ ID NO: 2531787 - RNA, 19 nt, Homo sapiens
  misc_RNA (1)...(19): siRNA sense strand
ggcuggaagauuugauaga

SEQ ID NO: 2531788 - RNA, 19 nt, Homo sapiens
  misc_RNA (1)...(19): siRNA sense strand
cugaggaggaagucuggaa

SEQ ID NO: 2531789 - RNA, 19 nt, Homo sapiens
  misc_RNA (1)...(19): siRNA sense strand
caguaacagaugaggaaga

SEQ ID NO: 2531790 - RNA, 19 nt, Homo sapiens
  misc_RNA (1)...(19): siRNA sense strand
aggaugaaacagaagaaau

SEQ ID NO: 2531791 - RNA, 19 nt, Homo sapiens
  misc_RNA (1)...(19): siRNA sense strand
ccugaaugcaaguaaagaa

SEQ ID NO: 2531792 - RNA, 19 nt, Homo sapiens
  misc_RNA (1)...(19): siRNA sense strand
uuacaaauuuacaggagga

SEQ ID NO: 2531793 - RNA, 19 nt, Homo sapiens
  misc_RNA (1)...(19): siRNA sense strand
cugccugaaugcaaguaaa

SEQ ID NO: 2531794 - RNA, 19 nt, Homo sapiens
  misc_RNA (1)...(19): siRNA sense strand
gcucuuaaacccugcccua

SEQ ID NO: 2531795 - RNA, 19 nt, Homo sapiens
  misc_RNA (1)...(19): siRNA sense strand
ucaaagauuccuuggacca

SEQ ID NO: 2531796 - RNA, 19 nt, Homo sapiens
  misc_RNA (1)...(19): siRNA sense strand
gggccacacuucaggggua

SEQ ID NO: 2531797 - RNA, 19 nt, Homo sapiens
  misc_RNA (1)...(19): siRNA sense strand
ugaacuggcucuuggguac

SEQ ID NO: 2531798 - RNA, 19 nt, Homo sapiens
  misc_RNA (1)...(19): siRNA sense strand
cuggagggaaugaugggaa

SEQ ID NO: 2531799 - RNA, 19 nt, Homo sapiens
  misc_RNA (1)...(19): siRNA sense strand
augaggaagaacauggcaa

SEQ ID NO: 2531800 - RNA, 19 nt, Homo sapiens
  misc_RNA (1)...(19): siRNA sense strand
gggaagaggcagagggaag

SEQ ID NO: 2531801 - RNA, 19 nt, Homo sapiens
  misc_RNA (1)...(19): siRNA sense strand
gugcagaauuuguggagga

SEQ ID NO: 2531802 - RNA, 19 nt, Homo sapiens
  misc_RNA (1)...(19): siRNA sense strand
aagaagaagggcagcgcaa

SEQ ID NO: 2531803 - RNA, 19 nt, Homo sapiens
  misc_RNA (1)...(19): siRNA sense strand
cugaggacagggaggauaa

SEQ ID NO: 2531804 - RNA, 19 nt, Homo sapiens
  misc_RNA (1)...(19): siRNA sense strand
cugcugaggucuaaggaca

SEQ ID NO: 2531805 - RNA, 19 nt, Homo sapiens
  misc_RNA (1)...(19): siRNA sense strand
cagaggagauggagccuga

SEQ ID NO: 2531806 - RNA, 19 nt, Homo sapiens
  misc_RNA (1)...(19): siRNA sense strand
ggccugaaguugaggagga

SEQ ID NO: 2531807 - RNA, 19 nt, Homo sapiens
  misc_RNA (1)...(19): siRNA sense strand
cugaaguugaggaggaaaa

SEQ ID NO: 2531808 - RNA, 19 nt, Homo sapiens
  misc_RNA (1)...(19): siRNA sense strand
cagggagucuggagggaga

SEQ ID NO: 2531809 - RNA, 19 nt, Homo sapiens
  misc_RNA (1)...(19): siRNA sense strand
gaacgauucuauagaggca

SEQ ID NO: 2531810 - RNA, 19 nt, Homo sapiens
  misc_RNA (1)...(19): siRNA sense strand
cuggaaggguucagggagu

SEQ ID NO: 2531811 - RNA, 19 nt, Homo sapiens
  misc_RNA (1)...(19): siRNA sense strand
gggaaguuggggaggacaa

SEQ ID NO: 2531812 - RNA, 19 nt, Homo sapiens
  misc_RNA (1)...(19): siRNA sense strand
ggaagcaaguccagccuca

SEQ ID NO: 2531813 - RNA, 19 nt, Homo sapiens
  misc_RNA (1)...(19): siRNA sense strand
aauuggagucagagcggaa

SEQ ID NO: 2531814 - RNA, 19 nt, Homo sapiens
  misc_RNA (1)...(19): siRNA sense strand
cugagagcuuggagaacga

SEQ ID NO: 2531815 - RNA, 19 nt, Homo sapiens
  misc_RNA (1)...(19): siRNA sense strand
agucagagcggaagccaga

SEQ ID NO: 2531816 - RNA, 19 nt, Homo sapiens
  misc_RNA (1)...(19): siRNA sense strand
ugggaaaggugaaggacug

SEQ ID NO: 2531817 - RNA, 19 nt, Homo sapiens
  misc_RNA (1)...(19): siRNA sense strand
ggucaagauccuagaggug

SEQ ID NO: 2531818 - RNA, 19 nt, Homo sapiens
  misc_RNA (1)...(19): siRNA sense strand
ccauacuaucaucgagauu

SEQ ID NO: 2531819 - RNA, 19 nt, Homo sapiens
  misc_RNA (1)...(19): siRNA sense strand
ucgagauugcagagcacaa

SEQ ID NO: 2531820 - RNA, 19 nt, Homo sapiens
  misc_RNA (1)...(19): siRNA sense strand
acaucagggaagaggcaga

SEQ ID NO: 2531821 - RNA, 19 nt, Homo sapiens
  misc_RNA (1)...(19): siRNA sense strand
gggaggacaagcaggcuga

SEQ ID NO: 2531822 - RNA, 19 nt, Homo sapiens
  misc_RNA (1)...(19): siRNA sense strand
cagcagagggugaacagga

SEQ ID NO: 2531823 - RNA, 19 nt, Homo sapiens
  misc_RNA (1)...(19): siRNA sense strand
ggcagaagcagcaggagca

SEQ ID NO: 2531824 - RNA, 19 nt, Homo sapiens
  misc_RNA (1)...(19): siRNA sense strand
aauuggaaccugagcgcuu

SEQ ID NO: 2531825 - RNA, 19 nt, Homo sapiens
  misc_RNA (1)...(19): siRNA sense strand
aggaaaauggggaggaagu

SEQ ID NO: 2531826 - RNA, 19 nt, Homo sapiens
  misc_RNA (1)...(19): siRNA sense strand
gaaggcaggcucugggaca

SEQ ID NO: 2531827 - RNA, 19 nt, Homo sapiens
  misc_RNA (1)...(19): siRNA sense strand
ggccaugagacuaagcgua

SEQ ID NO: 2531828 - RNA, 19 nt, Homo sapiens
  misc_RNA (1)...(19): siRNA sense strand
gggccagugaugagccaga

SEQ ID NO: 2531829 - RNA, 19 nt, Homo sapiens
  misc_RNA (1)...(19): siRNA sense strand
gccugaaguugaggaggaa

SEQ ID NO: 2531830 - RNA, 19 nt, Homo sapiens
  misc_RNA (1)...(19): siRNA sense strand
uagcaagauucauguggca

SEQ ID NO: 2531831 - RNA, 19 nt, Homo sapiens
  misc_RNA (1)...(19): siRNA sense strand
ccguggagugcgagagcaa

SEQ ID NO: 2531832 - RNA, 19 nt, Homo sapiens
  misc_RNA (1)...(19): siRNA sense strand
gggucuacagggagaucaa

SEQ ID NO: 2531833 - RNA, 19 nt, Homo sapiens
  misc_RNA (1)...(19): siRNA sense strand
uugucaggcugcacagaaa

SEQ ID NO: 2531834 - RNA, 19 nt, Homo sapiens
  misc_RNA (1)...(19): siRNA sense strand
ccgaagagguuucccagga

SEQ ID NO: 2531835 - RNA, 19 nt, Homo sapiens
  misc_RNA (1)...(19): siRNA sense strand
gcucaaaguuaucagggaa

SEQ ID NO: 2531836 - RNA, 19 nt, Homo sapiens
  misc_RNA (1)...(19): siRNA sense strand
acauaaagcccgagaacca

SEQ ID NO: 2531837 - RNA, 19 nt, Homo sapiens
  misc_RNA (1)...(19): siRNA sense strand
cgaaguaagcagagcaaaa

SEQ ID NO: 2531838 - RNA, 19 nt, Homo sapiens
  misc_RNA (1)...(19): siRNA sense strand
ggguaguacuggugauaca

SEQ ID NO: 2531839 - RNA, 19 nt, Homo sapiens
  misc_RNA (1)...(19): siRNA sense strand
guucaaaacagaagagcaa

SEQ ID NO: 2531840 - RNA, 19 nt, Homo sapiens
  misc_RNA (1)...(19): siRNA sense strand
ccuuaagacaggugaugaa

SEQ ID NO: 2531841 - RNA, 19 nt, Homo sapiens
  misc_RNA (1)...(19): siRNA sense strand
agaagaaagcugugguuca

SEQ ID NO: 2531842 - RNA, 19 nt, Homo sapiens
  misc_RNA (1)...(19): siRNA sense strand
gcucagauauuuaugguga

SEQ ID NO: 2531843 - RNA, 19 nt, Homo sapiens
  misc_RNA (1)...(19): siRNA sense strand
cugauagaaaggagcauaa

SEQ ID NO: 2531844 - RNA, 19 nt, Homo sapiens
  misc_RNA (1)...(19): siRNA sense strand
aguauuaucccaaggacaa

SEQ ID NO: 2531845 - RNA, 19 nt, Homo sapiens
  misc_RNA (1)...(19): siRNA sense strand
ugacaggacaugagaggau

SEQ ID NO: 2531846 - RNA, 19 nt, Homo sapiens
  misc_RNA (1)...(19): siRNA sense strand
gcaugaaccugauggggaa

SEQ ID NO: 2531847 - RNA, 19 nt, Homo sapiens
  misc_RNA (1)...(19): siRNA sense strand
caacagaagcauugcacga

SEQ ID NO: 2531848 - RNA, 19 nt, Homo sapiens
  misc_RNA (1)...(19): siRNA sense strand
augcagaguuagagccaga

SEQ ID NO: 2531849 - RNA, 19 nt, Homo sapiens
  misc_RNA (1)...(19): siRNA sense strand
gagcaaaaccgaacgagaa

SEQ ID NO: 2531850 - RNA, 19 nt, Homo sapiens
  misc_RNA (1)...(19): siRNA sense strand
ugagaguguaggugguaua

SEQ ID NO: 2531851 - RNA, 19 nt, Homo sapiens
  misc_RNA (1)...(19): siRNA sense strand
gauuagagaaugugagaag

SEQ ID NO: 2531852 - RNA, 19 nt, Homo sapiens
  misc_RNA (1)...(19): siRNA sense strand
ggcucaaguuccaagcaaa

SEQ ID NO: 2531853 - RNA, 19 nt, Homo sapiens
  misc_RNA (1)...(19): siRNA sense strand
uuagagaaugugagaagaa

SEQ ID NO: 2531854 - RNA, 19 nt, Homo sapiens
  misc_RNA (1)...(19): siRNA sense strand
cugcaagaagccagagaga

SEQ ID NO: 2531855 - RNA, 19 nt, Homo sapiens
  misc_RNA (1)...(19): siRNA sense strand
gguuauaacuaaugcaccu

SEQ ID NO: 2531856 - RNA, 19 nt, Homo sapiens
  misc_RNA (1)...(19): siRNA sense strand
ugucaugaaaccugagaau

SEQ ID NO: 2531857 - RNA, 19 nt, Homo sapiens
  misc_RNA (1)...(19): siRNA sense strand
gauuuaagaauguagguga

SEQ ID NO: 2531858 - RNA, 19 nt, Homo sapiens
  misc_RNA (1)...(19): siRNA sense strand
agauauuuauggugagagu

SEQ ID NO: 2531859 - RNA, 19 nt, Homo sapiens
  misc_RNA (1)...(19): siRNA sense strand
uuacagagucaacaggaaa

SEQ ID NO: 2531860 - RNA, 19 nt, Homo sapiens
  misc_RNA (1)...(19): siRNA sense strand
aagaagccagagagagaaa

SEQ ID NO: 2531861 - RNA, 19 nt, Homo sapiens
  misc_RNA (1)...(19): siRNA sense strand
acacauagagauaguggau

SEQ ID NO: 2531862 - RNA, 19 nt, Homo sapiens
  misc_RNA (1)...(19): siRNA sense strand
agcccuagccagaagguua

SEQ ID NO: 2531863 - RNA, 19 nt, Homo sapiens
  misc_RNA (1)...(19): siRNA sense strand
gcaccuuugcagagacauu

SEQ ID NO: 2531864 - RNA, 19 nt, Homo sapiens
  misc_RNA (1)...(19): siRNA sense strand
cgaacuaagaacugccgaa

SEQ ID NO: 2531865 - RNA, 19 nt, Homo sapiens
  misc_RNA (1)...(19): siRNA sense strand
ccaaagaaguauuauccca

SEQ ID NO: 2531866 - RNA, 19 nt, Homo sapiens
  misc_RNA (1)...(19): siRNA sense strand
gcuagaagugggaaugaca

SEQ ID NO: 2531867 - RNA, 19 nt, Homo sapiens
  misc_RNA (1)...(19): siRNA sense strand
acacugaagauuucggcaa

SEQ ID NO: 2531868 - RNA, 19 nt, Homo sapiens
  misc_RNA (1)...(19): siRNA sense strand
agacaggugaugaagaaga

SEQ ID NO: 2531869 - RNA, 19 nt, Homo sapiens
  misc_RNA (1)...(19): siRNA sense strand
uggugaaagaaaagcaaaa

SEQ ID NO: 2531870 - RNA, 19 nt, Homo sapiens
  misc_RNA (1)...(19): siRNA sense strand
uguaguugcaguuagaaua

SEQ ID NO: 2531871 - RNA, 19 nt, Homo sapiens
  misc_RNA (1)...(19): siRNA sense strand
agagagaugcagaguuaga

SEQ ID NO: 2531872 - RNA, 19 nt, Homo sapiens
  misc_RNA (1)...(19): siRNA sense strand
ccgaagaguucaaaacaga

SEQ ID NO: 2531873 - RNA, 19 nt, Homo sapiens
  misc_RNA (1)...(19): siRNA sense strand
gcacauaaagcccgagaac

SEQ ID NO: 2531874 - RNA, 19 nt, Homo sapiens
  misc_RNA (1)...(19): siRNA sense strand
ccggaggcucgaagacuaa

SEQ ID NO: 2531875 - RNA, 19 nt, Homo sapiens
  misc_RNA (1)...(19): siRNA sense strand
gggaaugacacugaagauu

SEQ ID NO: 2531876 - RNA, 19 nt, Homo sapiens
  misc_RNA (1)...(19): siRNA sense strand
caaagaaguauuaucccaa

SEQ ID NO: 2531877 - RNA, 19 nt, Homo sapiens
  misc_RNA (1)...(19): siRNA sense strand
auauuaaauggguggauga

SEQ ID NO: 2531878 - RNA, 19 nt, Homo sapiens
  misc_RNA (1)...(19): siRNA sense strand
ggaugauacacaugcccua

SEQ ID NO: 2531879 - RNA, 19 nt, Homo sapiens
  misc_RNA (1)...(19): siRNA sense strand
uguccuugcucaugaaaca

SEQ ID NO: 2531880 - RNA, 19 nt, Homo sapiens
  misc_RNA (1)...(19): siRNA sense strand
ccaagagcagagagagcau

SEQ ID NO: 2531881 - RNA, 19 nt, Homo sapiens
  misc_RNA (1)...(19): siRNA sense strand
ugguauagccaauaguaca

SEQ ID NO: 2531882 - RNA, 19 nt, Homo sapiens
  misc_RNA (1)...(19): siRNA sense strand
cugcaguuaucaaaagaaa

SEQ ID NO: 2531883 - RNA, 19 nt, Homo sapiens
  misc_RNA (1)...(19): siRNA sense strand
gagagaaagcgguuggaag

SEQ ID NO: 2531884 - RNA, 19 nt, Homo sapiens
  misc_RNA (1)...(19): siRNA sense strand
agaaaggagcauaauugua

SEQ ID NO: 2531885 - RNA, 19 nt, Homo sapiens
  misc_RNA (1)...(19): siRNA sense strand
gggaauaccaagagcagag

SEQ ID NO: 2531886 - RNA, 19 nt, Homo sapiens
  misc_RNA (1)...(19): siRNA sense strand
guuuguucuaagagaggaa

SEQ ID NO: 2531887 - RNA, 19 nt, Homo sapiens
  misc_RNA (1)...(19): siRNA sense strand
uagaauagcugaugagacc

SEQ ID NO: 2531888 - RNA, 19 nt, Homo sapiens
  misc_RNA (1)...(19): siRNA sense strand
augcaaaggaagagggucu

SEQ ID NO: 2531889 - RNA, 19 nt, Homo sapiens
  misc_RNA (1)...(19): siRNA sense strand
cggaggaugcaaaggaaga

SEQ ID NO: 2531890 - RNA, 19 nt, Homo sapiens
  misc_RNA (1)...(19): siRNA sense strand
gugauuacuuuguggacca

SEQ ID NO: 2531891 - RNA, 19 nt, Homo sapiens
  misc_RNA (1)...(19): siRNA sense strand
uccugaaggccauggguua

SEQ ID NO: 2531892 - RNA, 19 nt, Homo sapiens
  misc_RNA (1)...(19): siRNA sense strand
acagaggaggcguggaaga

SEQ ID NO: 2531893 - RNA, 19 nt, Homo sapiens
  misc_RNA (1)...(19): siRNA sense strand
accaaggagcugugugauu

SEQ ID NO: 2531894 - RNA, 19 nt, Homo sapiens
  misc_RNA (1)...(19): siRNA sense strand
aucuaugaguucugggaga

SEQ ID NO: 2531895 - RNA, 19 nt, Homo sapiens
  misc_RNA (1)...(19): siRNA sense strand
ccaggcaaggagaggguaa

SEQ ID NO: 2531896 - RNA, 19 nt, Homo sapiens
  misc_RNA (1)...(19): siRNA sense strand
ccagaaagucagaagagga

SEQ ID NO: 2531897 - RNA, 19 nt, Homo sapiens
  misc_RNA (1)...(19): siRNA sense strand
agaacaagaugucuggaga

SEQ ID NO: 2531898 - RNA, 19 nt, Homo sapiens
  misc_RNA (1)...(19): siRNA sense strand
cagaagaggaaaagcaaga

SEQ ID NO: 2531899 - RNA, 19 nt, Homo sapiens
  misc_RNA (1)...(19): siRNA sense strand
aggaaaagcaagaaggcca

SEQ ID NO: 2531900 - RNA, 19 nt, Homo sapiens
  misc_RNA (1)...(19): siRNA sense strand
uggaauucaccaaggacau

SEQ ID NO: 2531901 - RNA, 19 nt, Homo sapiens
  misc_RNA (1)...(19): siRNA sense strand
cauacguugcaguggacua

SEQ ID NO: 2531902 - RNA, 19 nt, Homo sapiens
  misc_RNA (1)...(19): siRNA sense strand
gguaacaggaccccagaaa

SEQ ID NO: 2531903 - RNA, 19 nt, Homo sapiens
  misc_RNA (1)...(19): siRNA sense strand
gggagcagcugaugccuca

SEQ ID NO: 2531904 - RNA, 19 nt, Homo sapiens
  misc_RNA (1)...(19): siRNA sense strand
agguaucccucaugggcuu

SEQ ID NO: 2531905 - RNA, 19 nt, Homo sapiens
  misc_RNA (1)...(19): siRNA sense strand
ugacauacguugcagugga

SEQ ID NO: 2531906 - RNA, 19 nt, Homo sapiens
  misc_RNA (1)...(19): siRNA sense strand
ggacaagggaaggggccaa

SEQ ID NO: 2531907 - RNA, 19 nt, Homo sapiens
  misc_RNA (1)...(19): siRNA sense strand
guccaggcuccaagaacaa

SEQ ID NO: 2531908 - RNA, 19 nt, Homo sapiens
  misc_RNA (1)...(19): siRNA sense strand
ccaaguggaucgagggaug

SEQ ID NO: 2531909 - RNA, 19 nt, Homo sapiens
  misc_RNA (1)...(19): siRNA sense strand
ccucagagaaggagagcug

SEQ ID NO: 2531910 - RNA, 19 nt, Homo sapiens
  misc_RNA (1)...(19): siRNA sense strand
gagaaggagagcugcagga

SEQ ID NO: 2531911 - RNA, 19 nt, Homo sapiens
  misc_RNA (1)...(19): siRNA sense strand
gagacgacaccgagugcca

SEQ ID NO: 2531912 - RNA, 19 nt, Homo sapiens
  misc_RNA (1)...(19): siRNA sense strand
cagcugaggagcaggguga

SEQ ID NO: 2531913 - RNA, 19 nt, Homo sapiens
  misc_RNA (1)...(19): siRNA sense strand
gcaucguggaggaggugaa

SEQ ID NO: 2531914 - RNA, 19 nt, Homo sapiens
  misc_RNA (1)...(19): siRNA sense strand
ugaaacuggaggagaacau

SEQ ID NO: 2531915 - RNA, 19 nt, Homo sapiens
  misc_RNA (1)...(19): siRNA sense strand
aggugaaggcccaguauga

SEQ ID NO: 2531916 - RNA, 19 nt, Homo sapiens
  misc_RNA (1)...(19): siRNA sense strand
uggaggaggugaaggccca

SEQ ID NO: 2531917 - RNA, 19 nt, Homo sapiens
  misc_RNA (1)...(19): siRNA sense strand
uggagagcuucguggaguu

SEQ ID NO: 2531918 - RNA, 19 nt, Homo sapiens
  misc_RNA (1)...(19): siRNA sense strand
cgaaagaagaagggcagca

SEQ ID NO: 2531919 - RNA, 19 nt, Homo sapiens
  misc_RNA (1)...(19): siRNA sense strand
gcuucguggaguugaugaa

SEQ ID NO: 2531920 - RNA, 19 nt, Homo sapiens
  misc_RNA (1)...(19): siRNA sense strand
gugaaggaugugucgguga

SEQ ID NO: 2531921 - RNA, 19 nt, Homo sapiens
  misc_RNA (1)...(19): siRNA sense strand
gucggaggucucagaguaa

SEQ ID NO: 2531922 - RNA, 19 nt, Homo sapiens
  misc_RNA (1)...(19): siRNA sense strand
ggcaucucuaugaggaaua

SEQ ID NO: 2531923 - RNA, 19 nt, Homo sapiens
  misc_RNA (1)...(19): siRNA sense strand
gucaagagccauugccuga

SEQ ID NO: 2531924 - RNA, 19 nt, Homo sapiens
  misc_RNA (1)...(19): siRNA sense strand
uauucauacuggagagaaa

SEQ ID NO: 2531925 - RNA, 19 nt, Homo sapiens
  misc_RNA (1)...(19): siRNA sense strand
acaacuacccagagugaaa

SEQ ID NO: 2531926 - RNA, 19 nt, Homo sapiens
  misc_RNA (1)...(19): siRNA sense strand
aagugauguuagagaacua

SEQ ID NO: 2531927 - RNA, 19 nt, Homo sapiens
  misc_RNA (1)...(19): siRNA sense strand
augugaagaaugugguaaa

SEQ ID NO: 2531928 - RNA, 19 nt, Homo sapiens
  misc_RNA (1)...(19): siRNA sense strand
ccuacaacugugaagaaua

SEQ ID NO: 2531929 - RNA, 19 nt, Homo sapiens
  misc_RNA (1)...(19): siRNA sense strand
agauaagacauacuggaaa

SEQ ID NO: 2531930 - RNA, 19 nt, Homo sapiens
  misc_RNA (1)...(19): siRNA sense strand
augugaagaauguggcaaa

SEQ ID NO: 2531931 - RNA, 19 nt, Homo sapiens
  misc_RNA (1)...(19): siRNA sense strand
augugaagaauguggcaaa

SEQ ID NO: 2531932 - RNA, 19 nt, Homo sapiens
  misc_RNA (1)...(19): siRNA sense strand
augugaagaauguggcaaa

SEQ ID NO: 2531933 - RNA, 19 nt, Homo sapiens
  misc_RNA (1)...(19): siRNA sense strand
augugaagaauguggcaaa

SEQ ID NO: 2531934 - RNA, 19 nt, Homo sapiens
  misc_RNA (1)...(19): siRNA sense strand
augugaagaauguggcaaa

SEQ ID NO: 2531935 - RNA, 19 nt, Homo sapiens
  misc_RNA (1)...(19): siRNA sense strand
augugaagaauguggcaaa

SEQ ID NO: 2531936 - RNA, 19 nt, Homo sapiens
  misc_RNA (1)...(19): siRNA sense strand
cuuacuagacacagaagaa

SEQ ID NO: 2531937 - RNA, 19 nt, Homo sapiens
  misc_RNA (1)...(19): siRNA sense strand
acaccuuacuacacauaaa

SEQ ID NO: 2531938 - RNA, 19 nt, Homo sapiens
  misc_RNA (1)...(19): siRNA sense strand
gaagaauguggcagagcuu

SEQ ID NO: 2531939 - RNA, 19 nt, Homo sapiens
  misc_RNA (1)...(19): siRNA sense strand
augugaacaauguggcaaa

SEQ ID NO: 2531940 - RNA, 19 nt, Homo sapiens
  misc_RNA (1)...(19): siRNA sense strand
augugaacaauguggcaaa

SEQ ID NO: 2531941 - RNA, 19 nt, Homo sapiens
  misc_RNA (1)...(19): siRNA sense strand
cugugaagaauacggcaaa

SEQ ID NO: 2531942 - RNA, 19 nt, Homo sapiens
  misc_RNA (1)...(19): siRNA sense strand
agcaggauuuguauagaaa

SEQ ID NO: 2531943 - RNA, 19 nt, Homo sapiens
  misc_RNA (1)...(19): siRNA sense strand
ccauugacauuuagggaug

SEQ ID NO: 2531944 - RNA, 19 nt, Homo sapiens
  misc_RNA (1)...(19): siRNA sense strand
aagauaagacauacuggaa

SEQ ID NO: 2531945 - RNA, 19 nt, Homo sapiens
  misc_RNA (1)...(19): siRNA sense strand
ccucaaaccuuacugcaca

SEQ ID NO: 2531946 - RNA, 19 nt, Homo sapiens
  misc_RNA (1)...(19): siRNA sense strand
gagcagggcauaaaagauu

SEQ ID NO: 2531947 - RNA, 19 nt, Homo sapiens
  misc_RNA (1)...(19): siRNA sense strand
aaccaguguuugacaacua

SEQ ID NO: 2531948 - RNA, 19 nt, Homo sapiens
  misc_RNA (1)...(19): siRNA sense strand
gauaacucauauuggagau

SEQ ID NO: 2531949 - RNA, 19 nt, Homo sapiens
  misc_RNA (1)...(19): siRNA sense strand
cugucuagagcaaggaaaa

SEQ ID NO: 2531950 - RNA, 19 nt, Homo sapiens
  misc_RNA (1)...(19): siRNA sense strand
uggaauaugaagagacaug

SEQ ID NO: 2531951 - RNA, 19 nt, Homo sapiens
  misc_RNA (1)...(19): siRNA sense strand
ggccagagcagggcauaaa

SEQ ID NO: 2531952 - RNA, 19 nt, Homo sapiens
  misc_RNA (1)...(19): siRNA sense strand
augugaagaauguggcaga

SEQ ID NO: 2531953 - RNA, 19 nt, Homo sapiens
  misc_RNA (1)...(19): siRNA sense strand
gcuguagaaguguggauga

SEQ ID NO: 2531954 - RNA, 19 nt, Homo sapiens
  misc_RNA (1)...(19): siRNA sense strand
cagaagaauucauacugga

SEQ ID NO: 2531955 - RNA, 19 nt, Homo sapiens
  misc_RNA (1)...(19): siRNA sense strand
ugaagaaggucaagagguc

SEQ ID NO: 2531956 - RNA, 19 nt, Homo sapiens
  misc_RNA (1)...(19): siRNA sense strand
caggaagacaguaggcuca

SEQ ID NO: 2531957 - RNA, 19 nt, Homo sapiens
  misc_RNA (1)...(19): siRNA sense strand
acucaagagaacagaagga

SEQ ID NO: 2531958 - RNA, 19 nt, Homo sapiens
  misc_RNA (1)...(19): siRNA sense strand
aggccuuguuugaggagga

SEQ ID NO: 2531959 - RNA, 19 nt, Homo sapiens
  misc_RNA (1)...(19): siRNA sense strand
uguuugaggaggaggacca

SEQ ID NO: 2531960 - RNA, 19 nt, Homo sapiens
  misc_RNA (1)...(19): siRNA sense strand
aggaggaggaccacgucaa

SEQ ID NO: 2531961 - RNA, 19 nt, Homo sapiens
  misc_RNA (1)...(19): siRNA sense strand
gagcgagugaagaagguca

SEQ ID NO: 2531962 - RNA, 19 nt, Homo sapiens
  misc_RNA (1)...(19): siRNA sense strand
aguuuaagggcaugugcua

SEQ ID NO: 2531963 - RNA, 19 nt, Homo sapiens
  misc_RNA (1)...(19): siRNA sense strand
uggaacaacuauaaggacu

SEQ ID NO: 2531964 - RNA, 19 nt, Homo sapiens
  misc_RNA (1)...(19): siRNA sense strand
gcaucgaggacuggaacaa

SEQ ID NO: 2531965 - RNA, 19 nt, Homo sapiens
  misc_RNA (1)...(19): siRNA sense strand
auuucuugguccaguuuaa

SEQ ID NO: 2531966 - RNA, 19 nt, Homo sapiens
  misc_RNA (1)...(19): siRNA sense strand
ucacaaagcccacggccau

SEQ ID NO: 2531967 - RNA, 19 nt, Homo sapiens
  misc_RNA (1)...(19): siRNA sense strand
uggcagaggugcuuccaga

SEQ ID NO: 2531968 - RNA, 19 nt, Homo sapiens
  misc_RNA (1)...(19): siRNA sense strand
cagacugugucauuggcaa

SEQ ID NO: 2531969 - RNA, 19 nt, Homo sapiens
  misc_RNA (1)...(19): siRNA sense strand
aggaggacgagguguucua

SEQ ID NO: 2531970 - RNA, 19 nt, Homo sapiens
  misc_RNA (1)...(19): siRNA sense strand
aaggacaaacagauggauu

SEQ ID NO: 2531971 - RNA, 19 nt, Homo sapiens
  misc_RNA (1)...(19): siRNA sense strand
uaguauugugcaagcauaa

SEQ ID NO: 2531972 - RNA, 19 nt, Homo sapiens
  misc_RNA (1)...(19): siRNA sense strand
augccauaguauugugcaa

SEQ ID NO: 2531973 - RNA, 19 nt, Homo sapiens
  misc_RNA (1)...(19): siRNA sense strand
gugcaagcauaaaggcauc

SEQ ID NO: 2531974 - RNA, 19 nt, Homo sapiens
  misc_RNA (1)...(19): siRNA sense strand
ggagaguccuuguaugcca

SEQ ID NO: 2531975 - RNA, 19 nt, Homo sapiens
  misc_RNA (1)...(19): siRNA sense strand
ggagcuagggcuugggcua

SEQ ID NO: 2531976 - RNA, 19 nt, Homo sapiens
  misc_RNA (1)...(19): siRNA sense strand
cugugaagucccuggaauu

SEQ ID NO: 2531977 - RNA, 19 nt, Homo sapiens
  misc_RNA (1)...(19): siRNA sense strand
uggaacgggugcagcgaga

SEQ ID NO: 2531978 - RNA, 19 nt, Homo sapiens
  misc_RNA (1)...(19): siRNA sense strand
ggguauucuggauggugaa

SEQ ID NO: 2531979 - RNA, 19 nt, Homo sapiens
  misc_RNA (1)...(19): siRNA sense strand
ccuucaaccaccagaacuu

SEQ ID NO: 2531980 - RNA, 19 nt, Homo sapiens
  misc_RNA (1)...(19): siRNA sense strand
aggaggugaugauggacau

SEQ ID NO: 2531981 - RNA, 19 nt, Homo sapiens
  misc_RNA (1)...(19): siRNA sense strand
cuaugaugcaccaggacuu

SEQ ID NO: 2531982 - RNA, 19 nt, Homo sapiens
  misc_RNA (1)...(19): siRNA sense strand
gagcaguucagcauggaga

SEQ ID NO: 2531983 - RNA, 19 nt, Homo sapiens
  misc_RNA (1)...(19): siRNA sense strand
agaagauugcgcugcagaa

SEQ ID NO: 2531984 - RNA, 19 nt, Homo sapiens
  misc_RNA (1)...(19): siRNA sense strand
ccuucgaggaggugaugau

SEQ ID NO: 2531985 - RNA, 19 nt, Homo sapiens
  misc_RNA (1)...(19): siRNA sense strand
cugcuauugaggagaacuu

SEQ ID NO: 2531986 - RNA, 19 nt, Homo sapiens
  misc_RNA (1)...(19): siRNA sense strand
gaggaggugaugauggaca

SEQ ID NO: 2531987 - RNA, 19 nt, Homo sapiens
  misc_RNA (1)...(19): siRNA sense strand
gugagaagauugcgcugca

SEQ ID NO: 2531988 - RNA, 19 nt, Homo sapiens
  misc_RNA (1)...(19): siRNA sense strand
ggggaacagaccagggaau

SEQ ID NO: 2531989 - RNA, 19 nt, Homo sapiens
  misc_RNA (1)...(19): siRNA sense strand
gugccauugauaauaguaa

SEQ ID NO: 2531990 - RNA, 19 nt, Homo sapiens
  misc_RNA (1)...(19): siRNA sense strand
uuggagaagagccgggaau

SEQ ID NO: 2531991 - RNA, 19 nt, Homo sapiens
  misc_RNA (1)...(19): siRNA sense strand
ugucagugguggagaccga

SEQ ID NO: 2531992 - RNA, 19 nt, Homo sapiens
  misc_RNA (1)...(19): siRNA sense strand
ccaacuuccagcaggacaa

SEQ ID NO: 2531993 - RNA, 19 nt, Homo sapiens
  misc_RNA (1)...(19): siRNA sense strand
gauaagugcaugacggaac

SEQ ID NO: 2531994 - RNA, 19 nt, Homo sapiens
  misc_RNA (1)...(19): siRNA sense strand
agugcaugacggaacaaua

SEQ ID NO: 2531995 - RNA, 19 nt, Homo sapiens
  misc_RNA (1)...(19): siRNA sense strand
uguaauaagaacgggcaaa

SEQ ID NO: 2531996 - RNA, 19 nt, Homo sapiens
  misc_RNA (1)...(19): siRNA sense strand
ucucggaaguguagaaaau

SEQ ID NO: 2531997 - RNA, 19 nt, Homo sapiens
  misc_RNA (1)...(19): siRNA sense strand
cgggcaaacagcugaagau

SEQ ID NO: 2531998 - RNA, 19 nt, Homo sapiens
  misc_RNA (1)...(19): siRNA sense strand
gggcguuacuacaaggaga

SEQ ID NO: 2531999 - RNA, 19 nt, Homo sapiens
  misc_RNA (1)...(19): siRNA sense strand
aagugaaggcugaugggua

SEQ ID NO: 2532000 - RNA, 19 nt, Homo sapiens
  misc_RNA (1)...(19): siRNA sense strand
cgauaggaguggaagccca

SEQ ID NO: 2532001 - RNA, 19 nt, Homo sapiens
  misc_RNA (1)...(19): siRNA sense strand
aagccgaggugguggggaa

SEQ ID NO: 2532002 - RNA, 19 nt, Homo sapiens
  misc_RNA (1)...(19): siRNA sense strand
cugauggguacguggacaa

SEQ ID NO: 2532003 - RNA, 19 nt, Homo sapiens
  misc_RNA (1)...(19): siRNA sense strand
gcaucaaagccgagguggu

SEQ ID NO: 2532004 - RNA, 19 nt, Homo sapiens
  misc_RNA (1)...(19): siRNA sense strand
agugaaggcugauggguac

SEQ ID NO: 2532005 - RNA, 19 nt, Homo sapiens
  misc_RNA (1)...(19): siRNA sense strand
ucgcagaggcaguggaccu

SEQ ID NO: 2532006 - RNA, 19 nt, Homo sapiens
  misc_RNA (1)...(19): siRNA sense strand
cggcugaaggugagguucu

SEQ ID NO: 2532007 - RNA, 19 nt, Homo sapiens
  misc_RNA (1)...(19): siRNA sense strand
acccaaacugugugguaau

SEQ ID NO: 2532008 - RNA, 19 nt, Homo sapiens
  misc_RNA (1)...(19): siRNA sense strand
gguaauugcagacgcagga

SEQ ID NO: 2532009 - RNA, 19 nt, Homo sapiens
  misc_RNA (1)...(19): siRNA sense strand
ugacuguucugcugggcua

SEQ ID NO: 2532010 - RNA, 19 nt, Homo sapiens
  misc_RNA (1)...(19): siRNA sense strand
caucaaacacaauaagcca

SEQ ID NO: 2532011 - RNA, 19 nt, Homo sapiens
  misc_RNA (1)...(19): siRNA sense strand
ucccgaaagaagaaagaaa

SEQ ID NO: 2532012 - RNA, 19 nt, Homo sapiens
  misc_RNA (1)...(19): siRNA sense strand
cggaggaaauggaagcguu

SEQ ID NO: 2532013 - RNA, 19 nt, Homo sapiens
  misc_RNA (1)...(19): siRNA sense strand
ggaggaucaucaacggcua

SEQ ID NO: 2532014 - RNA, 19 nt, Homo sapiens
  misc_RNA (1)...(19): siRNA sense strand
gaagagauguuccuggaga

SEQ ID NO: 2532015 - RNA, 19 nt, Homo sapiens
  misc_RNA (1)...(19): siRNA sense strand
cugaaauggccgaggcauc

SEQ ID NO: 2532016 - RNA, 19 nt, Homo sapiens
  misc_RNA (1)...(19): siRNA sense strand
aaaucaaagaagaggaauc

SEQ ID NO: 2532017 - RNA, 19 nt, Homo sapiens
  misc_RNA (1)...(19): siRNA sense strand
gaucagcagagguuggcaa

SEQ ID NO: 2532018 - RNA, 19 nt, Homo sapiens
  misc_RNA (1)...(19): siRNA sense strand
aggacaggaggguggagaa

SEQ ID NO: 2532019 - RNA, 19 nt, Homo sapiens
  misc_RNA (1)...(19): siRNA sense strand
aggagauggcucaagagaa

SEQ ID NO: 2532020 - RNA, 19 nt, Homo sapiens
  misc_RNA (1)...(19): siRNA sense strand
ccugggaggugaaggagca

SEQ ID NO: 2532021 - RNA, 19 nt, Homo sapiens
  misc_RNA (1)...(19): siRNA sense strand
gggagcugacugaggccaa

SEQ ID NO: 2532022 - RNA, 19 nt, Homo sapiens
  misc_RNA (1)...(19): siRNA sense strand
gggaggugaaggagcagau

SEQ ID NO: 2532023 - RNA, 19 nt, Homo sapiens
  misc_RNA (1)...(19): siRNA sense strand
gcacagaguucauggcagg

SEQ ID NO: 2532024 - RNA, 19 nt, Homo sapiens
  misc_RNA (1)...(19): siRNA sense strand
cccgaaagaagaaagaaaa

SEQ ID NO: 2532025 - RNA, 19 nt, Homo sapiens
  misc_RNA (1)...(19): siRNA sense strand
ccaaguaccugauggagcu

SEQ ID NO: 2532026 - RNA, 19 nt, Homo sapiens
  misc_RNA (1)...(19): siRNA sense strand
aggcaucccgaaagaagaa

SEQ ID NO: 2532027 - RNA, 19 nt, Homo sapiens
  misc_RNA (1)...(19): siRNA sense strand
gugaaggagcagauguguu

SEQ ID NO: 2532028 - RNA, 19 nt, Homo sapiens
  misc_RNA (1)...(19): siRNA sense strand
gaugaagaagcgaguggga

SEQ ID NO: 2532029 - RNA, 19 nt, Homo sapiens
  misc_RNA (1)...(19): siRNA sense strand
ccaucgaucagcagagguu

SEQ ID NO: 2532030 - RNA, 19 nt, Homo sapiens
  misc_RNA (1)...(19): siRNA sense strand
cgucagauaccuggggaaa

SEQ ID NO: 2532031 - RNA, 19 nt, Homo sapiens
  misc_RNA (1)...(19): siRNA sense strand
ugacgaugcugacugggaa

SEQ ID NO: 2532032 - RNA, 19 nt, Homo sapiens
  misc_RNA (1)...(19): siRNA sense strand
ccuggagagacaaggccua

SEQ ID NO: 2532033 - RNA, 19 nt, Homo sapiens
  misc_RNA (1)...(19): siRNA sense strand
aggagguacaagaaaguca

SEQ ID NO: 2532034 - RNA, 19 nt, Homo sapiens
  misc_RNA (1)...(19): siRNA sense strand
cgaggagguacaagaaagu

SEQ ID NO: 2532035 - RNA, 19 nt, Homo sapiens
  misc_RNA (1)...(19): siRNA sense strand
aaucagaaugccagagaca

SEQ ID NO: 2532036 - RNA, 19 nt, Homo sapiens
  misc_RNA (1)...(19): siRNA sense strand
ggugaagggaaaugcccaa

SEQ ID NO: 2532037 - RNA, 19 nt, Homo sapiens
  misc_RNA (1)...(19): siRNA sense strand
acagaagagaaaucagaau

SEQ ID NO: 2532038 - RNA, 19 nt, Homo sapiens
  misc_RNA (1)...(19): siRNA sense strand
augccagagacaugaagaa

SEQ ID NO: 2532039 - RNA, 19 nt, Homo sapiens
  misc_RNA (1)...(19): siRNA sense strand
augaggaggccaagggcaa

SEQ ID NO: 2532040 - RNA, 19 nt, Homo sapiens
  misc_RNA (1)...(19): siRNA sense strand
caucgauagcagagagaag

SEQ ID NO: 2532041 - RNA, 19 nt, Homo sapiens
  misc_RNA (1)...(19): siRNA sense strand
caucauaauucgaagccuu

SEQ ID NO: 2532042 - RNA, 19 nt, Homo sapiens
  misc_RNA (1)...(19): siRNA sense strand
ccugauagacagugagaac

SEQ ID NO: 2532043 - RNA, 19 nt, Homo sapiens
  misc_RNA (1)...(19): siRNA sense strand
cugccaagcugcugagcca

SEQ ID NO: 2532044 - RNA, 19 nt, Homo sapiens
  misc_RNA (1)...(19): siRNA sense strand
acucaggcagcgagggaga

SEQ ID NO: 2532045 - RNA, 19 nt, Homo sapiens
  misc_RNA (1)...(19): siRNA sense strand
agcagaagguccugaacca

SEQ ID NO: 2532046 - RNA, 19 nt, Homo sapiens
  misc_RNA (1)...(19): siRNA sense strand
gcgaguaccucauuggcca

SEQ ID NO: 2532047 - RNA, 19 nt, Homo sapiens
  misc_RNA (1)...(19): siRNA sense strand
gcauguucuucgagcggca

SEQ ID NO: 2532048 - RNA, 19 nt, Homo sapiens
  misc_RNA (1)...(19): siRNA sense strand
gcaggauaccguaacgaca

SEQ ID NO: 2532049 - RNA, 19 nt, Homo sapiens
  misc_RNA (1)...(19): siRNA sense strand
ccggaucauugcugaggau

SEQ ID NO: 2532050 - RNA, 19 nt, Homo sapiens
  misc_RNA (1)...(19): siRNA sense strand
agagaaauacagagggcaa

SEQ ID NO: 2532051 - RNA, 19 nt, Homo sapiens
  misc_RNA (1)...(19): siRNA sense strand
caaaugaaacagauggcaa

SEQ ID NO: 2532052 - RNA, 19 nt, Homo sapiens
  misc_RNA (1)...(19): siRNA sense strand
agauaaggaaacaggaaaa

SEQ ID NO: 2532053 - RNA, 19 nt, Homo sapiens
  misc_RNA (1)...(19): siRNA sense strand
acgcaaaagaacugaagaa

SEQ ID NO: 2532054 - RNA, 19 nt, Homo sapiens
  misc_RNA (1)...(19): siRNA sense strand
gcaaagugggagaucaaaa

SEQ ID NO: 2532055 - RNA, 19 nt, Homo sapiens
  misc_RNA (1)...(19): siRNA sense strand
gugauuugaaugacagcaa

SEQ ID NO: 2532056 - RNA, 19 nt, Homo sapiens
  misc_RNA (1)...(19): siRNA sense strand
caaaauaauguuagaggca

SEQ ID NO: 2532057 - RNA, 19 nt, Homo sapiens
  misc_RNA (1)...(19): siRNA sense strand
gagaaauacagagggcaau

SEQ ID NO: 2532058 - RNA, 19 nt, Homo sapiens
  misc_RNA (1)...(19): siRNA sense strand
aguauaucuuggaacgaaa

SEQ ID NO: 2532059 - RNA, 19 nt, Homo sapiens
  misc_RNA (1)...(19): siRNA sense strand
gaauagacaauuauggaca

SEQ ID NO: 2532060 - RNA, 19 nt, Homo sapiens
  misc_RNA (1)...(19): siRNA sense strand
cuguguagauugugagcca

SEQ ID NO: 2532061 - RNA, 19 nt, Homo sapiens
  misc_RNA (1)...(19): siRNA sense strand
aaggcugguuggaaggaaa

SEQ ID NO: 2532062 - RNA, 19 nt, Homo sapiens
  misc_RNA (1)...(19): siRNA sense strand
agccaaugguaauagacaa

SEQ ID NO: 2532063 - RNA, 19 nt, Homo sapiens
  misc_RNA (1)...(19): siRNA sense strand
caucaaggcugguuggaag

SEQ ID NO: 2532064 - RNA, 19 nt, Homo sapiens
  misc_RNA (1)...(19): siRNA sense strand
guucacaagcuuaagccaa

SEQ ID NO: 2532065 - RNA, 19 nt, Homo sapiens
  misc_RNA (1)...(19): siRNA sense strand
uggaagugaacuaaccaaa

SEQ ID NO: 2532066 - RNA, 19 nt, Homo sapiens
  misc_RNA (1)...(19): siRNA sense strand
aaguacugcugguguucaa

SEQ ID NO: 2532067 - RNA, 19 nt, Homo sapiens
  misc_RNA (1)...(19): siRNA sense strand
cuaccgaaccagagcaacu

SEQ ID NO: 2532068 - RNA, 19 nt, Homo sapiens
  misc_RNA (1)...(19): siRNA sense strand
auggcauaguugucauaaa

SEQ ID NO: 2532069 - RNA, 19 nt, Homo sapiens
  misc_RNA (1)...(19): siRNA sense strand
ggacauugccaaaggcgcu

SEQ ID NO: 2532070 - RNA, 19 nt, Homo sapiens
  misc_RNA (1)...(19): siRNA sense strand
augcaacauucaugagcga

SEQ ID NO: 2532071 - RNA, 19 nt, Homo sapiens
  misc_RNA (1)...(19): siRNA sense strand
cguugggaucaaagguuau

SEQ ID NO: 2532072 - RNA, 19 nt, Homo sapiens
  misc_RNA (1)...(19): siRNA sense strand
aguucagagugguguaguu

SEQ ID NO: 2532073 - RNA, 19 nt, Homo sapiens
  misc_RNA (1)...(19): siRNA sense strand
gggcaguguaugcaccaaa

SEQ ID NO: 2532074 - RNA, 19 nt, Homo sapiens
  misc_RNA (1)...(19): siRNA sense strand
cggucacacuccacaacaa

SEQ ID NO: 2532075 - RNA, 19 nt, Homo sapiens
  misc_RNA (1)...(19): siRNA sense strand
ucuggagaucguagagaau

SEQ ID NO: 2532076 - RNA, 19 nt, Homo sapiens
  misc_RNA (1)...(19): siRNA sense strand
guggaauguggaagggaaa

SEQ ID NO: 2532077 - RNA, 19 nt, Homo sapiens
  misc_RNA (1)...(19): siRNA sense strand
ccgcggaaggagagagaga

SEQ ID NO: 2532078 - RNA, 19 nt, Homo sapiens
  misc_RNA (1)...(19): siRNA sense strand
gcggaaggagagagagaca

SEQ ID NO: 2532079 - RNA, 19 nt, Homo sapiens
  misc_RNA (1)...(19): siRNA sense strand
aguggaauguggaagggaa

SEQ ID NO: 2532080 - RNA, 19 nt, Homo sapiens
  misc_RNA (1)...(19): siRNA sense strand
ggaaggaccuaggacggaa

SEQ ID NO: 2532081 - RNA, 19 nt, Homo sapiens
  misc_RNA (1)...(19): siRNA sense strand
ggaauguggaagggaaaca

SEQ ID NO: 2532082 - RNA, 19 nt, Homo sapiens
  misc_RNA (1)...(19): siRNA sense strand
guggaauguggaagggaaa

SEQ ID NO: 2532083 - RNA, 19 nt, Homo sapiens
  misc_RNA (1)...(19): siRNA sense strand
ccgcggaaggagagagaga

SEQ ID NO: 2532084 - RNA, 19 nt, Homo sapiens
  misc_RNA (1)...(19): siRNA sense strand
gcggaaggagagagagaca

SEQ ID NO: 2532085 - RNA, 19 nt, Homo sapiens
  misc_RNA (1)...(19): siRNA sense strand
aguggaauguggaagggaa

SEQ ID NO: 2532086 - RNA, 19 nt, Homo sapiens
  misc_RNA (1)...(19): siRNA sense strand
ggaaggaccuaggacggaa

SEQ ID NO: 2532087 - RNA, 19 nt, Homo sapiens
  misc_RNA (1)...(19): siRNA sense strand
ggaauguggaagggaaaca

SEQ ID NO: 2532088 - RNA, 19 nt, Homo sapiens
  misc_RNA (1)...(19): siRNA sense strand
cugaaagcccagauggaaa

SEQ ID NO: 2532089 - RNA, 19 nt, Homo sapiens
  misc_RNA (1)...(19): siRNA sense strand
cagaaaagagugagggaga

SEQ ID NO: 2532090 - RNA, 19 nt, Homo sapiens
  misc_RNA (1)...(19): siRNA sense strand
ccuacaacauccagcgaca

SEQ ID NO: 2532091 - RNA, 19 nt, Homo sapiens
  misc_RNA (1)...(19): siRNA sense strand
augaagaucaagaagaaga

SEQ ID NO: 2532092 - RNA, 19 nt, Homo sapiens
  misc_RNA (1)...(19): siRNA sense strand
agaaaagagugagggagaa

SEQ ID NO: 2532093 - RNA, 19 nt, Homo sapiens
  misc_RNA (1)...(19): siRNA sense strand
gguuaacagaaaagaguga

SEQ ID NO: 2532094 - RNA, 19 nt, Homo sapiens
  misc_RNA (1)...(19): siRNA sense strand
agaucaagaagaagaaauc

SEQ ID NO: 2532095 - RNA, 19 nt, Homo sapiens
  misc_RNA (1)...(19): siRNA sense strand
aagaagaagaaauccaaca

SEQ ID NO: 2532096 - RNA, 19 nt, Homo sapiens
  misc_RNA (1)...(19): siRNA sense strand
aacaacaacucaagcccaa

SEQ ID NO: 2532097 - RNA, 19 nt, Homo sapiens
  misc_RNA (1)...(19): siRNA sense strand
agggagaacaacaacucaa

SEQ ID NO: 2532098 - RNA, 19 nt, Homo sapiens
  misc_RNA (1)...(19): siRNA sense strand
cacaaagagcagacacaca

SEQ ID NO: 2532099 - RNA, 19 nt, Homo sapiens
  misc_RNA (1)...(19): siRNA sense strand
gugcauaucuggaagcuga

SEQ ID NO: 2532100 - RNA, 19 nt, Homo sapiens
  misc_RNA (1)...(19): siRNA sense strand
gcuacauugagguggaaca

SEQ ID NO: 2532101 - RNA, 19 nt, Homo sapiens
  misc_RNA (1)...(19): siRNA sense strand
ccaacauuguacugagcga

SEQ ID NO: 2532102 - RNA, 19 nt, Homo sapiens
  misc_RNA (1)...(19): siRNA sense strand
gcagaaacccagagagugg

SEQ ID NO: 2532103 - RNA, 19 nt, Homo sapiens
  misc_RNA (1)...(19): siRNA sense strand
uguacgaguccaauggcua

SEQ ID NO: 2532104 - RNA, 19 nt, Homo sapiens
  misc_RNA (1)...(19): siRNA sense strand
cggcagaugacucaggcuu

SEQ ID NO: 2532105 - RNA, 19 nt, Homo sapiens
  misc_RNA (1)...(19): siRNA sense strand
gcaaacaguaugcuggcua

SEQ ID NO: 2532106 - RNA, 19 nt, Homo sapiens
  misc_RNA (1)...(19): siRNA sense strand
gggcagauuuaccagccaa

SEQ ID NO: 2532107 - RNA, 19 nt, Homo sapiens
  misc_RNA (1)...(19): siRNA sense strand
guauacgggaucagugcaa

SEQ ID NO: 2532108 - RNA, 19 nt, Homo sapiens
  misc_RNA (1)...(19): siRNA sense strand
uggaaacaacuuugaggau

SEQ ID NO: 2532109 - RNA, 19 nt, Homo sapiens
  misc_RNA (1)...(19): siRNA sense strand
cuaugauuauggaggaagu

SEQ ID NO: 2532110 - RNA, 19 nt, Homo sapiens
  misc_RNA (1)...(19): siRNA sense strand
gaaugaaacugauuuggca

SEQ ID NO: 2532111 - RNA, 19 nt, Homo sapiens
  misc_RNA (1)...(19): siRNA sense strand
acuuaaacacggauuucua

SEQ ID NO: 2532112 - RNA, 19 nt, Homo sapiens
  misc_RNA (1)...(19): siRNA sense strand
cagacaugaugcagccaca

SEQ ID NO: 2532113 - RNA, 19 nt, Homo sapiens
  misc_RNA (1)...(19): siRNA sense strand
cauuagccauggaaggaca

SEQ ID NO: 2532114 - RNA, 19 nt, Homo sapiens
  misc_RNA (1)...(19): siRNA sense strand
agccauggaaggacagcaa

SEQ ID NO: 2532115 - RNA, 19 nt, Homo sapiens
  misc_RNA (1)...(19): siRNA sense strand
gcgcuuuguuauauggagu

SEQ ID NO: 2532116 - RNA, 19 nt, Homo sapiens
  misc_RNA (1)...(19): siRNA sense strand
cagugcaauuggaugucua

SEQ ID NO: 2532117 - RNA, 19 nt, Homo sapiens
  misc_RNA (1)...(19): siRNA sense strand
gaugaaggcuuaugggaca

SEQ ID NO: 2532118 - RNA, 19 nt, Homo sapiens
  misc_RNA (1)...(19): siRNA sense strand
uagaagaaacuguggacau

SEQ ID NO: 2532119 - RNA, 19 nt, Homo sapiens
  misc_RNA (1)...(19): siRNA sense strand
gggacauguuugugaagga

SEQ ID NO: 2532120 - RNA, 19 nt, Homo sapiens
  misc_RNA (1)...(19): siRNA sense strand
aggaauggagugagaauca

SEQ ID NO: 2532121 - RNA, 19 nt, Homo sapiens
  misc_RNA (1)...(19): siRNA sense strand
ggaucgugguggagaagga

SEQ ID NO: 2532122 - RNA, 19 nt, Homo sapiens
  misc_RNA (1)...(19): siRNA sense strand
uggaggaguggauggaaua

SEQ ID NO: 2532123 - RNA, 19 nt, Homo sapiens
  misc_RNA (1)...(19): siRNA sense strand
gauacggaccagaggaaaa

SEQ ID NO: 2532124 - RNA, 19 nt, Homo sapiens
  misc_RNA (1)...(19): siRNA sense strand
ucuaugaagaggagaauga

SEQ ID NO: 2532125 - RNA, 19 nt, Homo sapiens
  misc_RNA (1)...(19): siRNA sense strand
cuggaggaguggauggaau

SEQ ID NO: 2532126 - RNA, 19 nt, Homo sapiens
  misc_RNA (1)...(19): siRNA sense strand
gagaguaccagcagcggaa

SEQ ID NO: 2532127 - RNA, 19 nt, Homo sapiens
  misc_RNA (1)...(19): siRNA sense strand
augggaaguuucauggaua

SEQ ID NO: 2532128 - RNA, 19 nt, Homo sapiens
  misc_RNA (1)...(19): siRNA sense strand
gggugguggcugugaauga

SEQ ID NO: 2532129 - RNA, 19 nt, Homo sapiens
  misc_RNA (1)...(19): siRNA sense strand
ccaucacauuggagaauca

SEQ ID NO: 2532130 - RNA, 19 nt, Homo sapiens
  misc_RNA (1)...(19): siRNA sense strand
agaggaauggagugagaau

SEQ ID NO: 2532131 - RNA, 19 nt, Homo sapiens
  misc_RNA (1)...(19): siRNA sense strand
cuaggaucgugguggagaa

SEQ ID NO: 2532132 - RNA, 19 nt, Homo sapiens
  misc_RNA (1)...(19): siRNA sense strand
gugaccggcuggagagaga

SEQ ID NO: 2532133 - RNA, 19 nt, Homo sapiens
  misc_RNA (1)...(19): siRNA sense strand
agaacgaaacggagaaaau

SEQ ID NO: 2532134 - RNA, 19 nt, Homo sapiens
  misc_RNA (1)...(19): siRNA sense strand
agcaagagauguuggcaca

SEQ ID NO: 2532135 - RNA, 19 nt, Homo sapiens
  misc_RNA (1)...(19): siRNA sense strand
cagcugaaguagaagaaac

SEQ ID NO: 2532136 - RNA, 19 nt, Homo sapiens
  misc_RNA (1)...(19): siRNA sense strand
ccgcagaacgugcagguga

SEQ ID NO: 2532137 - RNA, 19 nt, Homo sapiens
  misc_RNA (1)...(19): siRNA sense strand
cagaaguucaagucgcaua

SEQ ID NO: 2532138 - RNA, 19 nt, Homo sapiens
  misc_RNA (1)...(19): siRNA sense strand
guggaggaccugaguguga

SEQ ID NO: 2532139 - RNA, 19 nt, Homo sapiens
  misc_RNA (1)...(19): siRNA sense strand
gggugugcgcggugaauga

SEQ ID NO: 2532140 - RNA, 19 nt, Homo sapiens
  misc_RNA (1)...(19): siRNA sense strand
acauaacgaaccugaagaa

SEQ ID NO: 2532141 - RNA, 19 nt, Homo sapiens
  misc_RNA (1)...(19): siRNA sense strand
ccaaagaccuggaucccga

SEQ ID NO: 2532142 - RNA, 19 nt, Homo sapiens
  misc_RNA (1)...(19): siRNA sense strand
ucacagagaucuuggacac

SEQ ID NO: 2532143 - RNA, 19 nt, Homo sapiens
  misc_RNA (1)...(19): siRNA sense strand
gugacuugguuuagagaag

SEQ ID NO: 2532144 - RNA, 19 nt, Homo sapiens
  misc_RNA (1)...(19): siRNA sense strand
cgucuaggaucguggugga

SEQ ID NO: 2532145 - RNA, 19 nt, Homo sapiens
  misc_RNA (1)...(19): siRNA sense strand
gggaaugacuccaggaugg

SEQ ID NO: 2532146 - RNA, 19 nt, Homo sapiens
  misc_RNA (1)...(19): siRNA sense strand
uggaagaggaauggaguga

SEQ ID NO: 2532147 - RNA, 19 nt, Homo sapiens
  misc_RNA (1)...(19): siRNA sense strand
gauacaagcuucuggcaug

SEQ ID NO: 2532148 - RNA, 19 nt, Homo sapiens
  misc_RNA (1)...(19): siRNA sense strand
uaucagaucucuugggaag

SEQ ID NO: 2532149 - RNA, 19 nt, Homo sapiens
  misc_RNA (1)...(19): siRNA sense strand
uggauacggaccagaggaa

SEQ ID NO: 2532150 - RNA, 19 nt, Homo sapiens
  misc_RNA (1)...(19): siRNA sense strand
gggcacaagauuauuccaa

SEQ ID NO: 2532151 - RNA, 19 nt, Homo sapiens
  misc_RNA (1)...(19): siRNA sense strand
acguuuggaagaaggacaa

SEQ ID NO: 2532152 - RNA, 19 nt, Homo sapiens
  misc_RNA (1)...(19): siRNA sense strand
cuggacacaguaugagaua

SEQ ID NO: 2532153 - RNA, 19 nt, Homo sapiens
  misc_RNA (1)...(19): siRNA sense strand
gcauacaucuucaggcugu

SEQ ID NO: 2532154 - RNA, 19 nt, Homo sapiens
  misc_RNA (1)...(19): siRNA sense strand
cuucagggauacaggaucu

SEQ ID NO: 2532155 - RNA, 19 nt, Homo sapiens
  misc_RNA (1)...(19): siRNA sense strand
ugacuacagcugcgagauu

SEQ ID NO: 2532156 - RNA, 19 nt, Homo sapiens
  misc_RNA (1)...(19): siRNA sense strand
ugaagaaguuuaccgccua

SEQ ID NO: 2532157 - RNA, 19 nt, Homo sapiens
  misc_RNA (1)...(19): siRNA sense strand
acggcauccugcagggcua

SEQ ID NO: 2532158 - RNA, 19 nt, Homo sapiens
  misc_RNA (1)...(19): siRNA sense strand
ccucagaaccuccugguca

SEQ ID NO: 2532159 - RNA, 19 nt, Homo sapiens
  misc_RNA (1)...(19): siRNA sense strand
ccccagaaacagagcacaa

SEQ ID NO: 2532160 - RNA, 19 nt, Homo sapiens
  misc_RNA (1)...(19): siRNA sense strand
ggauacaagcuucuggcau

SEQ ID NO: 2532161 - RNA, 19 nt, Homo sapiens
  misc_RNA (1)...(19): siRNA sense strand
uggaauacgagcugcagau

SEQ ID NO: 2532162 - RNA, 19 nt, Homo sapiens
  misc_RNA (1)...(19): siRNA sense strand
agacagaggcggugaccac

SEQ ID NO: 2532163 - RNA, 19 nt, Homo sapiens
  misc_RNA (1)...(19): siRNA sense strand
acuacagggagcuggagua

SEQ ID NO: 2532164 - RNA, 19 nt, Homo sapiens
  misc_RNA (1)...(19): siRNA sense strand
cggagagccagaaugggaa

SEQ ID NO: 2532165 - RNA, 19 nt, Homo sapiens
  misc_RNA (1)...(19): siRNA sense strand
ccagaacgaaacggagaaa

SEQ ID NO: 2532166 - RNA, 19 nt, Homo sapiens
  misc_RNA (1)...(19): siRNA sense strand
gugcugaccgagagcguga

SEQ ID NO: 2532167 - RNA, 19 nt, Homo sapiens
  misc_RNA (1)...(19): siRNA sense strand
aaccaggagcugugggaca

SEQ ID NO: 2532168 - RNA, 19 nt, Homo sapiens
  misc_RNA (1)...(19): siRNA sense strand
ccuauaacaucaucggcga

SEQ ID NO: 2532169 - RNA, 19 nt, Homo sapiens
  misc_RNA (1)...(19): siRNA sense strand
cguggaagugagagggaac

SEQ ID NO: 2532170 - RNA, 19 nt, Homo sapiens
  misc_RNA (1)...(19): siRNA sense strand
ucauuugagcauagcaaga

SEQ ID NO: 2532171 - RNA, 19 nt, Homo sapiens
  misc_RNA (1)...(19): siRNA sense strand
uggcaucauuacuggcuau

SEQ ID NO: 2532172 - RNA, 19 nt, Homo sapiens
  misc_RNA (1)...(19): siRNA sense strand
ggauggaauacgagcugca

SEQ ID NO: 2532173 - RNA, 19 nt, Homo sapiens
  misc_RNA (1)...(19): siRNA sense strand
ccacaucgugcgagggaac

SEQ ID NO: 2532174 - RNA, 19 nt, Homo sapiens
  misc_RNA (1)...(19): siRNA sense strand
cuuuggaguucaaguggau

SEQ ID NO: 2532175 - RNA, 19 nt, Homo sapiens
  misc_RNA (1)...(19): siRNA sense strand
ccggagagccagaauggga

SEQ ID NO: 2532176 - RNA, 19 nt, Homo sapiens
  misc_RNA (1)...(19): siRNA sense strand
aggcagacagccagaacga

SEQ ID NO: 2532177 - RNA, 19 nt, Homo sapiens
  misc_RNA (1)...(19): siRNA sense strand
agucugugacccuggacaa

SEQ ID NO: 2532178 - RNA, 19 nt, Homo sapiens
  misc_RNA (1)...(19): siRNA sense strand
gguugaugcuaccugaaga

SEQ ID NO: 2532179 - RNA, 19 nt, Homo sapiens
  misc_RNA (1)...(19): siRNA sense strand
acgugcaggccgugaauga

SEQ ID NO: 2532180 - RNA, 19 nt, Homo sapiens
  misc_RNA (1)...(19): siRNA sense strand
ggucaggcgacaucgguga

SEQ ID NO: 2532181 - RNA, 19 nt, Homo sapiens
  misc_RNA (1)...(19): siRNA sense strand
guugaugcuaccugaagaa

SEQ ID NO: 2532182 - RNA, 19 nt, Homo sapiens
  misc_RNA (1)...(19): siRNA sense strand
acuacugccuggugacaga

SEQ ID NO: 2532183 - RNA, 19 nt, Homo sapiens
  misc_RNA (1)...(19): siRNA sense strand
cugaagaaguuuaccgccu

SEQ ID NO: 2532184 - RNA, 19 nt, Homo sapiens
  misc_RNA (1)...(19): siRNA sense strand
gggaaguguacggcaggaa

SEQ ID NO: 2532185 - RNA, 19 nt, Homo sapiens
  misc_RNA (1)...(19): siRNA sense strand
guucagagacagaggcggu

SEQ ID NO: 2532186 - RNA, 19 nt, Homo sapiens
  misc_RNA (1)...(19): siRNA sense strand
cuguacaaggggugagcaa

SEQ ID NO: 2532187 - RNA, 19 nt, Homo sapiens
  misc_RNA (1)...(19): siRNA sense strand
aggccaugaaagagcacaa

SEQ ID NO: 2532188 - RNA, 19 nt, Homo sapiens
  misc_RNA (1)...(19): siRNA sense strand
cuguaagagauguggcguu

SEQ ID NO: 2532189 - RNA, 19 nt, Homo sapiens
  misc_RNA (1)...(19): siRNA sense strand
gcgauugggagaaggccau

SEQ ID NO: 2532190 - RNA, 19 nt, Homo sapiens
  misc_RNA (1)...(19): siRNA sense strand
agagccaggcgguggagaa

SEQ ID NO: 2532191 - RNA, 19 nt, Homo sapiens
  misc_RNA (1)...(19): siRNA sense strand
ugaagggagcugagcacau

SEQ ID NO: 2532192 - RNA, 19 nt, Homo sapiens
  misc_RNA (1)...(19): siRNA sense strand
acgacuuacacguucaaua

SEQ ID NO: 2532193 - RNA, 19 nt, Homo sapiens
  misc_RNA (1)...(19): siRNA sense strand
cuauauuacucaacgggaa

SEQ ID NO: 2532194 - RNA, 19 nt, Homo sapiens
  misc_RNA (1)...(19): siRNA sense strand
ucuuguacuuagagauuca

SEQ ID NO: 2532195 - RNA, 19 nt, Homo sapiens
  misc_RNA (1)...(19): siRNA sense strand
ccaagagagccucagccaa

SEQ ID NO: 2532196 - RNA, 19 nt, Homo sapiens
  misc_RNA (1)...(19): siRNA sense strand
gauucaaccaagagagccu

SEQ ID NO: 2532197 - RNA, 19 nt, Homo sapiens
  misc_RNA (1)...(19): siRNA sense strand
cggugacggcagugaccaa

SEQ ID NO: 2532198 - RNA, 19 nt, Homo sapiens
  misc_RNA (1)...(19): siRNA sense strand
aggaaauuacagagacaau

SEQ ID NO: 2532199 - RNA, 19 nt, Homo sapiens
  misc_RNA (1)...(19): siRNA sense strand
ggaccagggcuaugggagu

SEQ ID NO: 2532200 - RNA, 19 nt, Homo sapiens
  misc_RNA (1)...(19): siRNA sense strand
ccgcuacucaggaggaaau

SEQ ID NO: 2532201 - RNA, 19 nt, Homo sapiens
  misc_RNA (1)...(19): siRNA sense strand
cugagguggucguugucaa

SEQ ID NO: 2532202 - RNA, 19 nt, Homo sapiens
  misc_RNA (1)...(19): siRNA sense strand
ggaaauuugaagaugggaa

SEQ ID NO: 2532203 - RNA, 19 nt, Homo sapiens
  misc_RNA (1)...(19): siRNA sense strand
agaagaugcgggaggagaa

SEQ ID NO: 2532204 - RNA, 19 nt, Homo sapiens
  misc_RNA (1)...(19): siRNA sense strand
agaagaagaugcaggagca

SEQ ID NO: 2532205 - RNA, 19 nt, Homo sapiens
  misc_RNA (1)...(19): siRNA sense strand
agauguggcaggaggagaa

SEQ ID NO: 2532206 - RNA, 19 nt, Homo sapiens
  misc_RNA (1)...(19): siRNA sense strand
gagaagaagaugcgggaag

SEQ ID NO: 2532207 - RNA, 19 nt, Homo sapiens
  misc_RNA (1)...(19): siRNA sense strand
aggagaagaugcaggagca

SEQ ID NO: 2532208 - RNA, 19 nt, Homo sapiens
  misc_RNA (1)...(19): siRNA sense strand
ugcagaagcaggaggagaa

SEQ ID NO: 2532209 - RNA, 19 nt, Homo sapiens
  misc_RNA (1)...(19): siRNA sense strand
aggaggagaugaugcgaga

SEQ ID NO: 2532210 - RNA, 19 nt, Homo sapiens
  misc_RNA (1)...(19): siRNA sense strand
gggagcaggaagagaagau

SEQ ID NO: 2532211 - RNA, 19 nt, Homo sapiens
  misc_RNA (1)...(19): siRNA sense strand
ggaucauacaauacgaauu

SEQ ID NO: 2532212 - RNA, 19 nt, Homo sapiens
  misc_RNA (1)...(19): siRNA sense strand
gggaccaagaggagaggau

SEQ ID NO: 2532213 - RNA, 19 nt, Homo sapiens
  misc_RNA (1)...(19): siRNA sense strand
ugcaagaggaggagaggau

SEQ ID NO: 2532214 - RNA, 19 nt, Homo sapiens
  misc_RNA (1)...(19): siRNA sense strand
gaaaauaaaucauggcacu

SEQ ID NO: 2532215 - RNA, 19 nt, Homo sapiens
  misc_RNA (1)...(19): siRNA sense strand
aggaagagaaggaguggca

SEQ ID NO: 2532216 - RNA, 19 nt, Homo sapiens
  misc_RNA (1)...(19): siRNA sense strand
aggagaagauguggagaca

SEQ ID NO: 2532217 - RNA, 19 nt, Homo sapiens
  misc_RNA (1)...(19): siRNA sense strand
aggagaagauguggagaca

SEQ ID NO: 2532218 - RNA, 19 nt, Homo sapiens
  misc_RNA (1)...(19): siRNA sense strand
ugugggagcaggaggagaa

SEQ ID NO: 2532219 - RNA, 19 nt, Homo sapiens
  misc_RNA (1)...(19): siRNA sense strand
gggaccaggaggagaagau

SEQ ID NO: 2532220 - RNA, 19 nt, Homo sapiens
  misc_RNA (1)...(19): siRNA sense strand
agaagaugcaagaggagga

SEQ ID NO: 2532221 - RNA, 19 nt, Homo sapiens
  misc_RNA (1)...(19): siRNA sense strand
gggagcaggaagagaagga

SEQ ID NO: 2532222 - RNA, 19 nt, Homo sapiens
  misc_RNA (1)...(19): siRNA sense strand
gagaaggaggagaggauac

SEQ ID NO: 2532223 - RNA, 19 nt, Homo sapiens
  misc_RNA (1)...(19): siRNA sense strand
gggcaggagaagaagaugu

SEQ ID NO: 2532224 - RNA, 19 nt, Homo sapiens
  misc_RNA (1)...(19): siRNA sense strand
ggagaugaugcgagagaag

SEQ ID NO: 2532225 - RNA, 19 nt, Homo sapiens
  misc_RNA (1)...(19): siRNA sense strand
accgaggagacaagagaaa

SEQ ID NO: 2532226 - RNA, 19 nt, Homo sapiens
  misc_RNA (1)...(19): siRNA sense strand
acaucgaggaguuaacaaa

SEQ ID NO: 2532227 - RNA, 19 nt, Homo sapiens
  misc_RNA (1)...(19): siRNA sense strand
ggaagaugcgggagcagga

SEQ ID NO: 2532228 - RNA, 19 nt, Homo sapiens
  misc_RNA (1)...(19): siRNA sense strand
gggagaagaagaugcggga

SEQ ID NO: 2532229 - RNA, 19 nt, Homo sapiens
  misc_RNA (1)...(19): siRNA sense strand
ugcaggagcaggaggagaa

SEQ ID NO: 2532230 - RNA, 19 nt, Homo sapiens
  misc_RNA (1)...(19): siRNA sense strand
ugcaggagcaggaggagaa

SEQ ID NO: 2532231 - RNA, 19 nt, Homo sapiens
  misc_RNA (1)...(19): siRNA sense strand
agaaagagaagaugcagga

SEQ ID NO: 2532232 - RNA, 19 nt, Homo sapiens
  misc_RNA (1)...(19): siRNA sense strand
ugugggagcagguggagaa

SEQ ID NO: 2532233 - RNA, 19 nt, Homo sapiens
  misc_RNA (1)...(19): siRNA sense strand
aggagaagaugcaagagga

SEQ ID NO: 2532234 - RNA, 19 nt, Homo sapiens
  misc_RNA (1)...(19): siRNA sense strand
agauaugggagcaggagga

SEQ ID NO: 2532235 - RNA, 19 nt, Homo sapiens
  misc_RNA (1)...(19): siRNA sense strand
ucaacgugaaggagcuaaa

SEQ ID NO: 2532236 - RNA, 19 nt, Homo sapiens
  misc_RNA (1)...(19): siRNA sense strand
aaggagaagcugugggaac

SEQ ID NO: 2532237 - RNA, 19 nt, Homo sapiens
  misc_RNA (1)...(19): siRNA sense strand
cugaaaagucugagaucca

SEQ ID NO: 2532238 - RNA, 19 nt, Homo sapiens
  misc_RNA (1)...(19): siRNA sense strand
acacuuugcaggaggagau

SEQ ID NO: 2532239 - RNA, 19 nt, Homo sapiens
  misc_RNA (1)...(19): siRNA sense strand
ggaugugggagcaggacga

SEQ ID NO: 2532240 - RNA, 19 nt, Homo sapiens
  misc_RNA (1)...(19): siRNA sense strand
aaagagaagaugcaggaga

SEQ ID NO: 2532241 - RNA, 19 nt, Homo sapiens
  misc_RNA (1)...(19): siRNA sense strand
cccuaaggcgggagauaga

SEQ ID NO: 2532242 - RNA, 19 nt, Homo sapiens
  misc_RNA (1)...(19): siRNA sense strand
caggagaguccaaggaucu

SEQ ID NO: 2532243 - RNA, 19 nt, Homo sapiens
  misc_RNA (1)...(19): siRNA sense strand
gggagcaggaggagcagau

SEQ ID NO: 2532244 - RNA, 19 nt, Homo sapiens
  misc_RNA (1)...(19): siRNA sense strand
gaagagaagauguggagac

SEQ ID NO: 2532245 - RNA, 19 nt, Homo sapiens
  misc_RNA (1)...(19): siRNA sense strand
agaugcaggagcaggagaa

SEQ ID NO: 2532246 - RNA, 19 nt, Homo sapiens
  misc_RNA (1)...(19): siRNA sense strand
aggaggagaagaugcagaa

SEQ ID NO: 2532247 - RNA, 19 nt, Homo sapiens
  misc_RNA (1)...(19): siRNA sense strand
gagaagauguggagacagg

SEQ ID NO: 2532248 - RNA, 19 nt, Homo sapiens
  misc_RNA (1)...(19): siRNA sense strand
gagaagauguggagacagg

SEQ ID NO: 2532249 - RNA, 19 nt, Homo sapiens
  misc_RNA (1)...(19): siRNA sense strand
gagaagauguggagacagg

SEQ ID NO: 2532250 - RNA, 19 nt, Homo sapiens
  misc_RNA (1)...(19): siRNA sense strand
aggagaagaggcugcgaga

SEQ ID NO: 2532251 - RNA, 19 nt, Homo sapiens
  misc_RNA (1)...(19): siRNA sense strand
gagaagaggcugcgagagc

SEQ ID NO: 2532252 - RNA, 19 nt, Homo sapiens
  misc_RNA (1)...(19): siRNA sense strand
ggagacaggaggagaggcu

SEQ ID NO: 2532253 - RNA, 19 nt, Homo sapiens
  misc_RNA (1)...(19): siRNA sense strand
ggaugcgggagcaggagaa

SEQ ID NO: 2532254 - RNA, 19 nt, Homo sapiens
  misc_RNA (1)...(19): siRNA sense strand
gagaagaugcgggaggaga

SEQ ID NO: 2532255 - RNA, 19 nt, Homo sapiens
  misc_RNA (1)...(19): siRNA sense strand
cuguacaggaacaccauaa

SEQ ID NO: 2532256 - RNA, 19 nt, Homo sapiens
  misc_RNA (1)...(19): siRNA sense strand
aggagcaggaggagaagau

SEQ ID NO: 2532257 - RNA, 19 nt, Homo sapiens
  misc_RNA (1)...(19): siRNA sense strand
aggagcaggaggagaagau

SEQ ID NO: 2532258 - RNA, 19 nt, Homo sapiens
  misc_RNA (1)...(19): siRNA sense strand
cggacaugcaugaucaaga

SEQ ID NO: 2532259 - RNA, 19 nt, Homo sapiens
  misc_RNA (1)...(19): siRNA sense strand
gcacugaggacaaggacac

SEQ ID NO: 2532260 - RNA, 19 nt, Homo sapiens
  misc_RNA (1)...(19): siRNA sense strand
caacauggaugcuggacug

SEQ ID NO: 2532261 - RNA, 19 nt, Homo sapiens
  misc_RNA (1)...(19): siRNA sense strand
cggacaugcaugaucaaga

SEQ ID NO: 2532262 - RNA, 19 nt, Homo sapiens
  misc_RNA (1)...(19): siRNA sense strand
gcacugaggacaaggacac

SEQ ID NO: 2532263 - RNA, 19 nt, Homo sapiens
  misc_RNA (1)...(19): siRNA sense strand
cacaguugcaggaggccaa

SEQ ID NO: 2532264 - RNA, 19 nt, Homo sapiens
  misc_RNA (1)...(19): siRNA sense strand
cggacaugcaugaucaaga

SEQ ID NO: 2532265 - RNA, 19 nt, Homo sapiens
  misc_RNA (1)...(19): siRNA sense strand
gcacugaggacaaggacac

SEQ ID NO: 2532266 - RNA, 19 nt, Homo sapiens
  misc_RNA (1)...(19): siRNA sense strand
caacauggaugcuggacug

SEQ ID NO: 2532267 - RNA, 19 nt, Homo sapiens
  misc_RNA (1)...(19): siRNA sense strand
cacaguugcaggaggccaa

SEQ ID NO: 2532268 - RNA, 19 nt, Homo sapiens
  misc_RNA (1)...(19): siRNA sense strand
ccaucaauaaugaagacaa

SEQ ID NO: 2532269 - RNA, 19 nt, Homo sapiens
  misc_RNA (1)...(19): siRNA sense strand
ggggaagaaaagaaauaaa

SEQ ID NO: 2532270 - RNA, 19 nt, Homo sapiens
  misc_RNA (1)...(19): siRNA sense strand
agaggcacacggagggaaa

SEQ ID NO: 2532271 - RNA, 19 nt, Homo sapiens
  misc_RNA (1)...(19): siRNA sense strand
ccuaaggccaagaggcaca

SEQ ID NO: 2532272 - RNA, 19 nt, Homo sapiens
  misc_RNA (1)...(19): siRNA sense strand
cggacaagaaggaaaagaa

SEQ ID NO: 2532273 - RNA, 19 nt, Homo sapiens
  misc_RNA (1)...(19): siRNA sense strand
gagaagaugggguggucua

SEQ ID NO: 2532274 - RNA, 19 nt, Homo sapiens
  misc_RNA (1)...(19): siRNA sense strand
caguagagauagcagagga

SEQ ID NO: 2532275 - RNA, 19 nt, Homo sapiens
  misc_RNA (1)...(19): siRNA sense strand
ccucggacaagaaggaaaa

SEQ ID NO: 2532276 - RNA, 19 nt, Homo sapiens
  misc_RNA (1)...(19): siRNA sense strand
cagguaaagauguggaaag

SEQ ID NO: 2532277 - RNA, 19 nt, Homo sapiens
  misc_RNA (1)...(19): siRNA sense strand
aagaggagagggaagaaaa

SEQ ID NO: 2532278 - RNA, 19 nt, Homo sapiens
  misc_RNA (1)...(19): siRNA sense strand
aaagaggagagggaagaaa

SEQ ID NO: 2532279 - RNA, 19 nt, Homo sapiens
  misc_RNA (1)...(19): siRNA sense strand
aggaaaggguuuaggggcu

SEQ ID NO: 2532280 - RNA, 19 nt, Homo sapiens
  misc_RNA (1)...(19): siRNA sense strand
agcgaguggccaagaagaa

SEQ ID NO: 2532281 - RNA, 19 nt, Homo sapiens
  misc_RNA (1)...(19): siRNA sense strand
gguacaaaccaacaggaga

SEQ ID NO: 2532282 - RNA, 19 nt, Homo sapiens
  misc_RNA (1)...(19): siRNA sense strand
ucucuaaacaggaggucau

SEQ ID NO: 2532283 - RNA, 19 nt, Homo sapiens
  misc_RNA (1)...(19): siRNA sense strand
acaucuacagugugggaau

SEQ ID NO: 2532284 - RNA, 19 nt, Homo sapiens
  misc_RNA (1)...(19): siRNA sense strand
uaacauucuugcagggcga

SEQ ID NO: 2532285 - RNA, 19 nt, Homo sapiens
  misc_RNA (1)...(19): siRNA sense strand
ggauuaaccuagaagcuug

SEQ ID NO: 2532286 - RNA, 19 nt, Homo sapiens
  misc_RNA (1)...(19): siRNA sense strand
guacaaaccaacaggagag

SEQ ID NO: 2532287 - RNA, 19 nt, Homo sapiens
  misc_RNA (1)...(19): siRNA sense strand
ggaccugaugacugugaau

SEQ ID NO: 2532288 - RNA, 19 nt, Homo sapiens
  misc_RNA (1)...(19): siRNA sense strand
augccaagucugacaucua

SEQ ID NO: 2532289 - RNA, 19 nt, Homo sapiens
  misc_RNA (1)...(19): siRNA sense strand
gcaugaaugagcuggcgau

SEQ ID NO: 2532290 - RNA, 19 nt, Homo sapiens
  misc_RNA (1)...(19): siRNA sense strand
ccgcugaggagcugaccau

SEQ ID NO: 2532291 - RNA, 19 nt, Homo sapiens
  misc_RNA (1)...(19): siRNA sense strand
ggaagaaauuagaacgaga

SEQ ID NO: 2532292 - RNA, 19 nt, Homo sapiens
  misc_RNA (1)...(19): siRNA sense strand
aggaagaagcucuggagaa

SEQ ID NO: 2532293 - RNA, 19 nt, Homo sapiens
  misc_RNA (1)...(19): siRNA sense strand
aggaagaggaucuggaaga

SEQ ID NO: 2532294 - RNA, 19 nt, Homo sapiens
  misc_RNA (1)...(19): siRNA sense strand
acacuaaaguacagcaaaa

SEQ ID NO: 2532295 - RNA, 19 nt, Homo sapiens
  misc_RNA (1)...(19): siRNA sense strand
ccagaggugcugagcgaaa

SEQ ID NO: 2532296 - RNA, 19 nt, Homo sapiens
  misc_RNA (1)...(19): siRNA sense strand
aggaagaguaucuggagaa

SEQ ID NO: 2532297 - RNA, 19 nt, Homo sapiens
  misc_RNA (1)...(19): siRNA sense strand
cugagaagccugagacaga

SEQ ID NO: 2532298 - RNA, 19 nt, Homo sapiens
  misc_RNA (1)...(19): siRNA sense strand
aggaaaaggcucuggagaa

SEQ ID NO: 2532299 - RNA, 19 nt, Homo sapiens
  misc_RNA (1)...(19): siRNA sense strand
aaucagaaacagagcaaga

SEQ ID NO: 2532300 - RNA, 19 nt, Homo sapiens
  misc_RNA (1)...(19): siRNA sense strand
agaguauauugaagaggaa

SEQ ID NO: 2532301 - RNA, 19 nt, Homo sapiens
  misc_RNA (1)...(19): siRNA sense strand
cugaaagaacccaaggcaa

SEQ ID NO: 2532302 - RNA, 19 nt, Homo sapiens
  misc_RNA (1)...(19): siRNA sense strand
acaacaaguaccugaagaa

SEQ ID NO: 2532303 - RNA, 19 nt, Homo sapiens
  misc_RNA (1)...(19): siRNA sense strand
aagaauacuugaaggagga

SEQ ID NO: 2532304 - RNA, 19 nt, Homo sapiens
  misc_RNA (1)...(19): siRNA sense strand
aagagaaucuggaggagga

SEQ ID NO: 2532305 - RNA, 19 nt, Homo sapiens
  misc_RNA (1)...(19): siRNA sense strand
ugguaauuaugcugaagaa

SEQ ID NO: 2532306 - RNA, 19 nt, Homo sapiens
  misc_RNA (1)...(19): siRNA sense strand
acgugaagcucaaaaguua

SEQ ID NO: 2532307 - RNA, 19 nt, Homo sapiens
  misc_RNA (1)...(19): siRNA sense strand
uggaggaggaagaguauau

SEQ ID NO: 2532308 - RNA, 19 nt, Homo sapiens
  misc_RNA (1)...(19): siRNA sense strand
auauugaggagguagauua

SEQ ID NO: 2532309 - RNA, 19 nt, Homo sapiens
  misc_RNA (1)...(19): siRNA sense strand
acaaugaacuggaagagga

SEQ ID NO: 2532310 - RNA, 19 nt, Homo sapiens
  misc_RNA (1)...(19): siRNA sense strand
cuaacuaagcuacuggaaa

SEQ ID NO: 2532311 - RNA, 19 nt, Homo sapiens
  misc_RNA (1)...(19): siRNA sense strand
aaguagaacuagaugagga

SEQ ID NO: 2532312 - RNA, 19 nt, Homo sapiens
  misc_RNA (1)...(19): siRNA sense strand
acuugaaggaggaagagua

SEQ ID NO: 2532313 - RNA, 19 nt, Homo sapiens
  misc_RNA (1)...(19): siRNA sense strand
aggaagagcaucuggggaa

SEQ ID NO: 2532314 - RNA, 19 nt, Homo sapiens
  misc_RNA (1)...(19): siRNA sense strand
aggaaggguaucuggagaa

SEQ ID NO: 2532315 - RNA, 19 nt, Homo sapiens
  misc_RNA (1)...(19): siRNA sense strand
aguagaacuagaugaggaa

SEQ ID NO: 2532316 - RNA, 19 nt, Homo sapiens
  misc_RNA (1)...(19): siRNA sense strand
aggaagagcaucuggagga

SEQ ID NO: 2532317 - RNA, 19 nt, Homo sapiens
  misc_RNA (1)...(19): siRNA sense strand
uggagaaggaagagaaucu

SEQ ID NO: 2532318 - RNA, 19 nt, Homo sapiens
  misc_RNA (1)...(19): siRNA sense strand
uggagaaggaagagaaucu

SEQ ID NO: 2532319 - RNA, 19 nt, Homo sapiens
  misc_RNA (1)...(19): siRNA sense strand
aagaguaucuggaggagga

SEQ ID NO: 2532320 - RNA, 19 nt, Homo sapiens
  misc_RNA (1)...(19): siRNA sense strand
gaggaagaguaucuggaga

SEQ ID NO: 2532321 - RNA, 19 nt, Homo sapiens
  misc_RNA (1)...(19): siRNA sense strand
ucagaaacagagcaagaaa

SEQ ID NO: 2532322 - RNA, 19 nt, Homo sapiens
  misc_RNA (1)...(19): siRNA sense strand
gauuaagaggagacgugaa

SEQ ID NO: 2532323 - RNA, 19 nt, Homo sapiens
  misc_RNA (1)...(19): siRNA sense strand
aagaagaauacuugaagga

SEQ ID NO: 2532324 - RNA, 19 nt, Homo sapiens
  misc_RNA (1)...(19): siRNA sense strand
acaaagaguaucuggagga

SEQ ID NO: 2532325 - RNA, 19 nt, Homo sapiens
  misc_RNA (1)...(19): siRNA sense strand
aggaagaguauauugaaga

SEQ ID NO: 2532326 - RNA, 19 nt, Homo sapiens
  misc_RNA (1)...(19): siRNA sense strand
gguaauuaugcugaagaaa

SEQ ID NO: 2532327 - RNA, 19 nt, Homo sapiens
  misc_RNA (1)...(19): siRNA sense strand
gggacaggccagauacauu

SEQ ID NO: 2532328 - RNA, 19 nt, Homo sapiens
  misc_RNA (1)...(19): siRNA sense strand
uggaagaggaagaguaucu

SEQ ID NO: 2532329 - RNA, 19 nt, Homo sapiens
  misc_RNA (1)...(19): siRNA sense strand
gguaucuggaggaggaaga

SEQ ID NO: 2532330 - RNA, 19 nt, Homo sapiens
  misc_RNA (1)...(19): siRNA sense strand
cagagaaagaggauacuga

SEQ ID NO: 2532331 - RNA, 19 nt, Homo sapiens
  misc_RNA (1)...(19): siRNA sense strand
aguauauugaagaggaaga

SEQ ID NO: 2532332 - RNA, 19 nt, Homo sapiens
  misc_RNA (1)...(19): siRNA sense strand
gguaucuggaggaggaaga

SEQ ID NO: 2532333 - RNA, 19 nt, Homo sapiens
  misc_RNA (1)...(19): siRNA sense strand
cuucagagaaagaggauac

SEQ ID NO: 2532334 - RNA, 19 nt, Homo sapiens
  misc_RNA (1)...(19): siRNA sense strand
gcucaucuuauaugcgaaa

SEQ ID NO: 2532335 - RNA, 19 nt, Homo sapiens
  misc_RNA (1)...(19): siRNA sense strand
aggaagaguaucuggggaa

SEQ ID NO: 2532336 - RNA, 19 nt, Homo sapiens
  misc_RNA (1)...(19): siRNA sense strand
aggaagaguaucuggggaa

SEQ ID NO: 2532337 - RNA, 19 nt, Homo sapiens
  misc_RNA (1)...(19): siRNA sense strand
aggaagaguaucuggggaa

SEQ ID NO: 2532338 - RNA, 19 nt, Homo sapiens
  misc_RNA (1)...(19): siRNA sense strand
aggaagaguaccuggggaa

SEQ ID NO: 2532339 - RNA, 19 nt, Homo sapiens
  misc_RNA (1)...(19): siRNA sense strand
aagcguaucuggaggagga

SEQ ID NO: 2532340 - RNA, 19 nt, Homo sapiens
  misc_RNA (1)...(19): siRNA sense strand
aggaagagaaucuggagga

SEQ ID NO: 2532341 - RNA, 19 nt, Homo sapiens
  misc_RNA (1)...(19): siRNA sense strand
aaaccauccuggaggcaga

SEQ ID NO: 2532342 - RNA, 19 nt, Homo sapiens
  misc_RNA (1)...(19): siRNA sense strand
cuugaaggaggaagaguau

SEQ ID NO: 2532343 - RNA, 19 nt, Homo sapiens
  misc_RNA (1)...(19): siRNA sense strand
ugaaagaacccaaggcaag

SEQ ID NO: 2532344 - RNA, 19 nt, Homo sapiens
  misc_RNA (1)...(19): siRNA sense strand
uauugaagaggaagaguau

SEQ ID NO: 2532345 - RNA, 19 nt, Homo sapiens
  misc_RNA (1)...(19): siRNA sense strand
uggagaaggaagauuauau

SEQ ID NO: 2532346 - RNA, 19 nt, Homo sapiens
  misc_RNA (1)...(19): siRNA sense strand
cagaugaguccauugacaa

SEQ ID NO: 2532347 - RNA, 19 nt, Homo sapiens
  misc_RNA (1)...(19): siRNA sense strand
aagugaaaacagauggaaa

SEQ ID NO: 2532348 - RNA, 19 nt, Homo sapiens
  misc_RNA (1)...(19): siRNA sense strand
agacagaagaaauccaaaa

SEQ ID NO: 2532349 - RNA, 19 nt, Homo sapiens
  misc_RNA (1)...(19): siRNA sense strand
agaagaagacaguggugca

SEQ ID NO: 2532350 - RNA, 19 nt, Homo sapiens
  misc_RNA (1)...(19): siRNA sense strand
auauugaagaggaagagua

SEQ ID NO: 2532351 - RNA, 19 nt, Homo sapiens
  misc_RNA (1)...(19): siRNA sense strand
guucaucauaggaagaaau

SEQ ID NO: 2532352 - RNA, 19 nt, Homo sapiens
  misc_RNA (1)...(19): siRNA sense strand
cgagauaaggaauggauac

SEQ ID NO: 2532353 - RNA, 19 nt, Homo sapiens
  misc_RNA (1)...(19): siRNA sense strand
cauacaucauucuggaaga

SEQ ID NO: 2532354 - RNA, 19 nt, Homo sapiens
  misc_RNA (1)...(19): siRNA sense strand
gaaagagacuggcggguga

SEQ ID NO: 2532355 - RNA, 19 nt, Homo sapiens
  misc_RNA (1)...(19): siRNA sense strand
gcgggaacguccuaggcaa

SEQ ID NO: 2532356 - RNA, 19 nt, Homo sapiens
  misc_RNA (1)...(19): siRNA sense strand
cgggaacguccuaggcaau

SEQ ID NO: 2532357 - RNA, 19 nt, Homo sapiens
  misc_RNA (1)...(19): siRNA sense strand
acaacacagcagcgaacaa

SEQ ID NO: 2532358 - RNA, 19 nt, Homo sapiens
  misc_RNA (1)...(19): siRNA sense strand
aggcaauacgcacguggua

SEQ ID NO: 2532359 - RNA, 19 nt, Homo sapiens
  misc_RNA (1)...(19): siRNA sense strand
agaugugucccgauggauu

SEQ ID NO: 2532360 - RNA, 19 nt, Homo sapiens
  misc_RNA (1)...(19): siRNA sense strand
caguuaaagaugacgcaaa

SEQ ID NO: 2532361 - RNA, 19 nt, Homo sapiens
  misc_RNA (1)...(19): siRNA sense strand
aggaauaagaagaugauga

SEQ ID NO: 2532362 - RNA, 19 nt, Homo sapiens
  misc_RNA (1)...(19): siRNA sense strand
cuggagaagccuaagaaau

SEQ ID NO: 2532363 - RNA, 19 nt, Homo sapiens
  misc_RNA (1)...(19): siRNA sense strand
acuucaaacaaaugagcaa

SEQ ID NO: 2532364 - RNA, 19 nt, Homo sapiens
  misc_RNA (1)...(19): siRNA sense strand
cagcgauguucgaggaaac

SEQ ID NO: 2532365 - RNA, 19 nt, Homo sapiens
  misc_RNA (1)...(19): siRNA sense strand
agagaaguuaugagaugaa

SEQ ID NO: 2532366 - RNA, 19 nt, Homo sapiens
  misc_RNA (1)...(19): siRNA sense strand
gggaaguagaugaugagga

SEQ ID NO: 2532367 - RNA, 19 nt, Homo sapiens
  misc_RNA (1)...(19): siRNA sense strand
ccgacugugcuaagaggaa

SEQ ID NO: 2532368 - RNA, 19 nt, Homo sapiens
  misc_RNA (1)...(19): siRNA sense strand
aguuaugagaugaaugaga

SEQ ID NO: 2532369 - RNA, 19 nt, Homo sapiens
  misc_RNA (1)...(19): siRNA sense strand
agagagcagaagagaccaa

SEQ ID NO: 2532370 - RNA, 19 nt, Homo sapiens
  misc_RNA (1)...(19): siRNA sense strand
cggcagacacaaaggguug

SEQ ID NO: 2532371 - RNA, 19 nt, Homo sapiens
  misc_RNA (1)...(19): siRNA sense strand
gacugugcuaagaggaaua

SEQ ID NO: 2532372 - RNA, 19 nt, Homo sapiens
  misc_RNA (1)...(19): siRNA sense strand
ugaugaggaaagugugauu

SEQ ID NO: 2532373 - RNA, 19 nt, Homo sapiens
  misc_RNA (1)...(19): siRNA sense strand
agacacaaaggguugggua

SEQ ID NO: 2532374 - RNA, 19 nt, Homo sapiens
  misc_RNA (1)...(19): siRNA sense strand
aagaggaauaagaagauga

SEQ ID NO: 2532375 - RNA, 19 nt, Homo sapiens
  misc_RNA (1)...(19): siRNA sense strand
aaguagaugaugaggaaag

SEQ ID NO: 2532376 - RNA, 19 nt, Homo sapiens
  misc_RNA (1)...(19): siRNA sense strand
gcaaauuuggauagcagca

SEQ ID NO: 2532377 - RNA, 19 nt, Homo sapiens
  misc_RNA (1)...(19): siRNA sense strand
agaaauacaauccagguca

SEQ ID NO: 2532378 - RNA, 19 nt, Homo sapiens
  misc_RNA (1)...(19): siRNA sense strand
auuaaugacaguagagaag

SEQ ID NO: 2532379 - RNA, 19 nt, Homo sapiens
  misc_RNA (1)...(19): siRNA sense strand
auacaauccaggucaucua

SEQ ID NO: 2532380 - RNA, 19 nt, Homo sapiens
  misc_RNA (1)...(19): siRNA sense strand
uggauagcagcaagaagaa

SEQ ID NO: 2532381 - RNA, 19 nt, Homo sapiens
  misc_RNA (1)...(19): siRNA sense strand
cgaggaaacgcaaggcagu

SEQ ID NO: 2532382 - RNA, 19 nt, Homo sapiens
  misc_RNA (1)...(19): siRNA sense strand
gcugauauguuauggccaa

SEQ ID NO: 2532383 - RNA, 19 nt, Homo sapiens
  misc_RNA (1)...(19): siRNA sense strand
agaggaaaauggagcaaau

SEQ ID NO: 2532384 - RNA, 19 nt, Homo sapiens
  misc_RNA (1)...(19): siRNA sense strand
gaauauacuccacggcaga

SEQ ID NO: 2532385 - RNA, 19 nt, Homo sapiens
  misc_RNA (1)...(19): siRNA sense strand
cauagcagggagaggaaaa

SEQ ID NO: 2532386 - RNA, 19 nt, Homo sapiens
  misc_RNA (1)...(19): siRNA sense strand
gccauagcagggagaggaa

SEQ ID NO: 2532387 - RNA, 19 nt, Homo sapiens
  misc_RNA (1)...(19): siRNA sense strand
uguuauggccaaaguacau

SEQ ID NO: 2532388 - RNA, 19 nt, Homo sapiens
  misc_RNA (1)...(19): siRNA sense strand
ccaaggagcugagagguga

SEQ ID NO: 2532389 - RNA, 19 nt, Homo sapiens
  misc_RNA (1)...(19): siRNA sense strand
acuugaguauggagggcua

SEQ ID NO: 2532390 - RNA, 19 nt, Homo sapiens
  misc_RNA (1)...(19): siRNA sense strand
agacuucuuuguagggcaa

SEQ ID NO: 2532391 - RNA, 19 nt, Homo sapiens
  misc_RNA (1)...(19): siRNA sense strand
ucuugaaguaucugaaaca

SEQ ID NO: 2532392 - RNA, 19 nt, Homo sapiens
  misc_RNA (1)...(19): siRNA sense strand
agggcuaggccgugaaguu

SEQ ID NO: 2532393 - RNA, 19 nt, Homo sapiens
  misc_RNA (1)...(19): siRNA sense strand
gugcaucggaagagagaag

SEQ ID NO: 2532394 - RNA, 19 nt, Homo sapiens
  misc_RNA (1)...(19): siRNA sense strand
aaguucaagucgagcacau

SEQ ID NO: 2532395 - RNA, 19 nt, Homo sapiens
  misc_RNA (1)...(19): siRNA sense strand
aguugaaagaacacugcaa

SEQ ID NO: 2532396 - RNA, 19 nt, Homo sapiens
  misc_RNA (1)...(19): siRNA sense strand
gcaucggaagagagaagau

SEQ ID NO: 2532397 - RNA, 19 nt, Homo sapiens
  misc_RNA (1)...(19): siRNA sense strand
ccugaguggcugaaaacaa

SEQ ID NO: 2532398 - RNA, 19 nt, Homo sapiens
  misc_RNA (1)...(19): siRNA sense strand
caucagaggaagagcaaga

SEQ ID NO: 2532399 - RNA, 19 nt, Homo sapiens
  misc_RNA (1)...(19): siRNA sense strand
ggaacagaugugaaggaua

SEQ ID NO: 2532400 - RNA, 19 nt, Homo sapiens
  misc_RNA (1)...(19): siRNA sense strand
cagaaaacaaagagagcaa

SEQ ID NO: 2532401 - RNA, 19 nt, Homo sapiens
  misc_RNA (1)...(19): siRNA sense strand
gcacagaaguaauagcaca

SEQ ID NO: 2532402 - RNA, 19 nt, Homo sapiens
  misc_RNA (1)...(19): siRNA sense strand
ggauugugauagagaggau

SEQ ID NO: 2532403 - RNA, 19 nt, Homo sapiens
  misc_RNA (1)...(19): siRNA sense strand
agacuuaaaggaugcgaaa

SEQ ID NO: 2532404 - RNA, 19 nt, Homo sapiens
  misc_RNA (1)...(19): siRNA sense strand
augaagaauuacagcaaga

SEQ ID NO: 2532405 - RNA, 19 nt, Homo sapiens
  misc_RNA (1)...(19): siRNA sense strand
aguuuaagaaugaggucaa

SEQ ID NO: 2532406 - RNA, 19 nt, Homo sapiens
  misc_RNA (1)...(19): siRNA sense strand
caaccaaagaacugggaca

SEQ ID NO: 2532407 - RNA, 19 nt, Homo sapiens
  misc_RNA (1)...(19): siRNA sense strand
augaagagcaugacaggua

SEQ ID NO: 2532408 - RNA, 19 nt, Homo sapiens
  misc_RNA (1)...(19): siRNA sense strand
caaacuaggcauuggacau

SEQ ID NO: 2532409 - RNA, 19 nt, Homo sapiens
  misc_RNA (1)...(19): siRNA sense strand
uugaagaagaaauggagaa

SEQ ID NO: 2532410 - RNA, 19 nt, Homo sapiens
  misc_RNA (1)...(19): siRNA sense strand
guggauugaacaaggcaaa

SEQ ID NO: 2532411 - RNA, 19 nt, Homo sapiens
  misc_RNA (1)...(19): siRNA sense strand
ugaaaugaaagaagaccaa

SEQ ID NO: 2532412 - RNA, 19 nt, Homo sapiens
  misc_RNA (1)...(19): siRNA sense strand
cgguugaaaugaaagaaga

SEQ ID NO: 2532413 - RNA, 19 nt, Homo sapiens
  misc_RNA (1)...(19): siRNA sense strand
gggauaggaagaagagcau

SEQ ID NO: 2532414 - RNA, 19 nt, Homo sapiens
  misc_RNA (1)...(19): siRNA sense strand
aggaagagcaagaaagacu

SEQ ID NO: 2532415 - RNA, 19 nt, Homo sapiens
  misc_RNA (1)...(19): siRNA sense strand
aaggcaaauuagaguggaa

SEQ ID NO: 2532416 - RNA, 19 nt, Homo sapiens
  misc_RNA (1)...(19): siRNA sense strand
acaugaagaauuacagcaa

SEQ ID NO: 2532417 - RNA, 19 nt, Homo sapiens
  misc_RNA (1)...(19): siRNA sense strand
ggagaagcacagaaguaau

SEQ ID NO: 2532418 - RNA, 19 nt, Homo sapiens
  misc_RNA (1)...(19): siRNA sense strand
auggagaagcacagaagua

SEQ ID NO: 2532419 - RNA, 19 nt, Homo sapiens
  misc_RNA (1)...(19): siRNA sense strand
cagugguauucgagacauu

SEQ ID NO: 2532420 - RNA, 19 nt, Homo sapiens
  misc_RNA (1)...(19): siRNA sense strand
cauaaugaugcaagcacua

SEQ ID NO: 2532421 - RNA, 19 nt, Homo sapiens
  misc_RNA (1)...(19): siRNA sense strand
gcacagaauuaucaggaac

SEQ ID NO: 2532422 - RNA, 19 nt, Homo sapiens
  misc_RNA (1)...(19): siRNA sense strand
ggcguggacaagagggaua

SEQ ID NO: 2532423 - RNA, 19 nt, Homo sapiens
  misc_RNA (1)...(19): siRNA sense strand
agaaguaauagcacagaau

SEQ ID NO: 2532424 - RNA, 19 nt, Homo sapiens
  misc_RNA (1)...(19): siRNA sense strand
acuuaaaggaugcgaaaau

SEQ ID NO: 2532425 - RNA, 19 nt, Homo sapiens
  misc_RNA (1)...(19): siRNA sense strand
cauaccugguugugaggaa

SEQ ID NO: 2532426 - RNA, 19 nt, Homo sapiens
  misc_RNA (1)...(19): siRNA sense strand
agaggaagagcaagaaaga

SEQ ID NO: 2532427 - RNA, 19 nt, Homo sapiens
  misc_RNA (1)...(19): siRNA sense strand
aaauaagcagccacagaaa

SEQ ID NO: 2532428 - RNA, 19 nt, Homo sapiens
  misc_RNA (1)...(19): siRNA sense strand
gaagaaauggagaagcaca

SEQ ID NO: 2532429 - RNA, 19 nt, Homo sapiens
  misc_RNA (1)...(19): siRNA sense strand
ugacaguggcaguacaaau

SEQ ID NO: 2532430 - RNA, 19 nt, Homo sapiens
  misc_RNA (1)...(19): siRNA sense strand
cagaaguaauagcacagaa

SEQ ID NO: 2532431 - RNA, 19 nt, Homo sapiens
  misc_RNA (1)...(19): siRNA sense strand
gcaagcacuaagaaagcaa

SEQ ID NO: 2532432 - RNA, 19 nt, Homo sapiens
  misc_RNA (1)...(19): siRNA sense strand
acagaacaucagaaguaua

SEQ ID NO: 2532433 - RNA, 19 nt, Homo sapiens
  misc_RNA (1)...(19): siRNA sense strand
aggaaaaugaagagcauga

SEQ ID NO: 2532434 - RNA, 19 nt, Homo sapiens
  misc_RNA (1)...(19): siRNA sense strand
uggacaagagggauaggaa

SEQ ID NO: 2532435 - RNA, 19 nt, Homo sapiens
  misc_RNA (1)...(19): siRNA sense strand
aagaagaccaagaguuuga

SEQ ID NO: 2532436 - RNA, 19 nt, Homo sapiens
  misc_RNA (1)...(19): siRNA sense strand
acacauuagaagaagaguu

SEQ ID NO: 2532437 - RNA, 19 nt, Homo sapiens
  misc_RNA (1)...(19): siRNA sense strand
aagaaagacuuaaaggaug

SEQ ID NO: 2532438 - RNA, 19 nt, Homo sapiens
  misc_RNA (1)...(19): siRNA sense strand
gaguuaaagcagagguuug

SEQ ID NO: 2532439 - RNA, 19 nt, Homo sapiens
  misc_RNA (1)...(19): siRNA sense strand
ugauaacaaacuaggcauu

SEQ ID NO: 2532440 - RNA, 19 nt, Homo sapiens
  misc_RNA (1)...(19): siRNA sense strand
ggcaaauuagaguggaaaa

SEQ ID NO: 2532441 - RNA, 19 nt, Homo sapiens
  misc_RNA (1)...(19): siRNA sense strand
agacauuuccugaacaaaa

SEQ ID NO: 2532442 - RNA, 19 nt, Homo sapiens
  misc_RNA (1)...(19): siRNA sense strand
ugaugcaagcacuaagaaa

SEQ ID NO: 2532443 - RNA, 19 nt, Homo sapiens
  misc_RNA (1)...(19): siRNA sense strand
aaaugaaagaagaccaaga

SEQ ID NO: 2532444 - RNA, 19 nt, Homo sapiens
  misc_RNA (1)...(19): siRNA sense strand
uggcaaugaugaugaugga

SEQ ID NO: 2532445 - RNA, 19 nt, Homo sapiens
  misc_RNA (1)...(19): siRNA sense strand
ugaugaugauggacuaaau

SEQ ID NO: 2532446 - RNA, 19 nt, Homo sapiens
  misc_RNA (1)...(19): siRNA sense strand
agagcaagaaagacuuaaa

SEQ ID NO: 2532447 - RNA, 19 nt, Homo sapiens
  misc_RNA (1)...(19): siRNA sense strand
ccuaagaagccgagaggca

SEQ ID NO: 2532448 - RNA, 19 nt, Homo sapiens
  misc_RNA (1)...(19): siRNA sense strand
cugcuaaagagaaaggaaa

SEQ ID NO: 2532449 - RNA, 19 nt, Homo sapiens
  misc_RNA (1)...(19): siRNA sense strand
aggaagaugaagaggauga

SEQ ID NO: 2532450 - RNA, 19 nt, Homo sapiens
  misc_RNA (1)...(19): siRNA sense strand
aggaggaagaugaggaaga

SEQ ID NO: 2532451 - RNA, 19 nt, Homo sapiens
  misc_RNA (1)...(19): siRNA sense strand
cugggagagauguggaaua

SEQ ID NO: 2532452 - RNA, 19 nt, Homo sapiens
  misc_RNA (1)...(19): siRNA sense strand
augaagaggaugaggagga

SEQ ID NO: 2532453 - RNA, 19 nt, Homo sapiens
  misc_RNA (1)...(19): siRNA sense strand
aggaagaugaagaagauga

SEQ ID NO: 2532454 - RNA, 19 nt, Homo sapiens
  misc_RNA (1)...(19): siRNA sense strand
augaggaggaggaggaaga

SEQ ID NO: 2532455 - RNA, 19 nt, Homo sapiens
  misc_RNA (1)...(19): siRNA sense strand
uaagaagccgagaggcaaa

SEQ ID NO: 2532456 - RNA, 19 nt, Homo sapiens
  misc_RNA (1)...(19): siRNA sense strand
aggaggaagaugaagaaga

SEQ ID NO: 2532457 - RNA, 19 nt, Homo sapiens
  misc_RNA (1)...(19): siRNA sense strand
ucagagagguggaagacca

SEQ ID NO: 2532458 - RNA, 19 nt, Homo sapiens
  misc_RNA (1)...(19): siRNA sense strand
augaagaagaagaugauga

SEQ ID NO: 2532459 - RNA, 19 nt, Homo sapiens
  misc_RNA (1)...(19): siRNA sense strand
aggaugaggaggaggagga

SEQ ID NO: 2532460 - RNA, 19 nt, Homo sapiens
  misc_RNA (1)...(19): siRNA sense strand
aggaggaggaagaugaaga

SEQ ID NO: 2532461 - RNA, 19 nt, Homo sapiens
  misc_RNA (1)...(19): siRNA sense strand
augaagaugaagaagaaga

SEQ ID NO: 2532462 - RNA, 19 nt, Homo sapiens
  misc_RNA (1)...(19): siRNA sense strand
cgggaggagcauaagaaga

SEQ ID NO: 2532463 - RNA, 19 nt, Homo sapiens
  misc_RNA (1)...(19): siRNA sense strand
gcccguuaugaaagagaaa

SEQ ID NO: 2532464 - RNA, 19 nt, Homo sapiens
  misc_RNA (1)...(19): siRNA sense strand
aagaugaagaagaugaaga

SEQ ID NO: 2532465 - RNA, 19 nt, Homo sapiens
  misc_RNA (1)...(19): siRNA sense strand
ugcuaaagagaaaggaaaa

SEQ ID NO: 2532466 - RNA, 19 nt, Homo sapiens
  misc_RNA (1)...(19): siRNA sense strand
gagcuaaaggaaagccuga

SEQ ID NO: 2532467 - RNA, 19 nt, Homo sapiens
  misc_RNA (1)...(19): siRNA sense strand
agaugaagaagaagaugau

SEQ ID NO: 2532468 - RNA, 19 nt, Homo sapiens
  misc_RNA (1)...(19): siRNA sense strand
aggaaagccugaugcagca

SEQ ID NO: 2532469 - RNA, 19 nt, Homo sapiens
  misc_RNA (1)...(19): siRNA sense strand
agaggaggaagaugaggaa

SEQ ID NO: 2532470 - RNA, 19 nt, Homo sapiens
  misc_RNA (1)...(19): siRNA sense strand
uugcgaagaaacugggaga

SEQ ID NO: 2532471 - RNA, 19 nt, Homo sapiens
  misc_RNA (1)...(19): siRNA sense strand
aaaagaaggaagaggagga

SEQ ID NO: 2532472 - RNA, 19 nt, Homo sapiens
  misc_RNA (1)...(19): siRNA sense strand
cuaagaagccgagaggcaa

SEQ ID NO: 2532473 - RNA, 19 nt, Homo sapiens
  misc_RNA (1)...(19): siRNA sense strand
agggaguugucaaggcuga

SEQ ID NO: 2532474 - RNA, 19 nt, Homo sapiens
  misc_RNA (1)...(19): siRNA sense strand
agguggagcuggaggucau

SEQ ID NO: 2532475 - RNA, 19 nt, Homo sapiens
  misc_RNA (1)...(19): siRNA sense strand
ugacggaggaggagagcca

SEQ ID NO: 2532476 - RNA, 19 nt, Homo sapiens
  misc_RNA (1)...(19): siRNA sense strand
gcaucuacaccgugcccaa

SEQ ID NO: 2532477 - RNA, 19 nt, Homo sapiens
  misc_RNA (1)...(19): siRNA sense strand
caugaaggacauagagaac

SEQ ID NO: 2532478 - RNA, 19 nt, Homo sapiens
  misc_RNA (1)...(19): siRNA sense strand
ugacgguggaugagcugaa

SEQ ID NO: 2532479 - RNA, 19 nt, Homo sapiens
  misc_RNA (1)...(19): siRNA sense strand
accaagagccugcgggaca

SEQ ID NO: 2532480 - RNA, 19 nt, Homo sapiens
  misc_RNA (1)...(19): siRNA sense strand
agucaggccuugaugggau

SEQ ID NO: 2532481 - RNA, 19 nt, Homo sapiens
  misc_RNA (1)...(19): siRNA sense strand
accaagagccugcgggaca

SEQ ID NO: 2532482 - RNA, 19 nt, Homo sapiens
  misc_RNA (1)...(19): siRNA sense strand
agucaggccuugaugggau

SEQ ID NO: 2532483 - RNA, 19 nt, Homo sapiens
  misc_RNA (1)...(19): siRNA sense strand
gcgaggaagaggaggacga

SEQ ID NO: 2532484 - RNA, 19 nt, Homo sapiens
  misc_RNA (1)...(19): siRNA sense strand
gaugagaagaagauggaga

SEQ ID NO: 2532485 - RNA, 19 nt, Homo sapiens
  misc_RNA (1)...(19): siRNA sense strand
aggaagaggaggacgacuu

SEQ ID NO: 2532486 - RNA, 19 nt, Homo sapiens
  misc_RNA (1)...(19): siRNA sense strand
uugaagagcuccagugcga

SEQ ID NO: 2532487 - RNA, 19 nt, Homo sapiens
  misc_RNA (1)...(19): siRNA sense strand
ugggcgacguguugagaga

SEQ ID NO: 2532488 - RNA, 19 nt, Homo sapiens
  misc_RNA (1)...(19): siRNA sense strand
gugugcaagcgcagggaga

SEQ ID NO: 2532489 - RNA, 19 nt, Homo sapiens
  misc_RNA (1)...(19): siRNA sense strand
agauggagagagugagcga

SEQ ID NO: 2532490 - RNA, 19 nt, Homo sapiens
  misc_RNA (1)...(19): siRNA sense strand
ggcgacguguugagagaca

SEQ ID NO: 2532491 - RNA, 19 nt, Homo sapiens
  misc_RNA (1)...(19): siRNA sense strand
cgcucagguuccaggguga

SEQ ID NO: 2532492 - RNA, 19 nt, Homo sapiens
  misc_RNA (1)...(19): siRNA sense strand
agaacaucgagaggagaaa

SEQ ID NO: 2532493 - RNA, 19 nt, Homo sapiens
  misc_RNA (1)...(19): siRNA sense strand
aggaguggaucgggagaca

SEQ ID NO: 2532494 - RNA, 19 nt, Homo sapiens
  misc_RNA (1)...(19): siRNA sense strand
gcacaagcaccgagccaag

SEQ ID NO: 2532495 - RNA, 19 nt, Homo sapiens
  misc_RNA (1)...(19): siRNA sense strand
cggugcagguguacggcua

SEQ ID NO: 2532496 - RNA, 19 nt, Homo sapiens
  misc_RNA (1)...(19): siRNA sense strand
guucuuugucauugaggaa

SEQ ID NO: 2532497 - RNA, 19 nt, Homo sapiens
  misc_RNA (1)...(19): siRNA sense strand
cccuagacuuugagagcca

SEQ ID NO: 2532498 - RNA, 19 nt, Homo sapiens
  misc_RNA (1)...(19): siRNA sense strand
gggaggaaaaggcgcaaua

SEQ ID NO: 2532499 - RNA, 19 nt, Homo sapiens
  misc_RNA (1)...(19): siRNA sense strand
gugcaagacaucaacgaca

SEQ ID NO: 2532500 - RNA, 19 nt, Homo sapiens
  misc_RNA (1)...(19): siRNA sense strand
guucaucaucaaagugcaa

SEQ ID NO: 2532501 - RNA, 19 nt, Homo sapiens
  misc_RNA (1)...(19): siRNA sense strand
ugaugguacuggaggagga

SEQ ID NO: 2532502 - RNA, 19 nt, Homo sapiens
  misc_RNA (1)...(19): siRNA sense strand
ugaugaggccacaggcaau

SEQ ID NO: 2532503 - RNA, 19 nt, Homo sapiens
  misc_RNA (1)...(19): siRNA sense strand
gcacagacuugcagggucg

SEQ ID NO: 2532504 - RNA, 19 nt, Homo sapiens
  misc_RNA (1)...(19): siRNA sense strand
ccgcaagccccuagacuuu

SEQ ID NO: 2532505 - RNA, 19 nt, Homo sapiens
  misc_RNA (1)...(19): siRNA sense strand
ugguggugauccaggccaa

SEQ ID NO: 2532506 - RNA, 19 nt, Homo sapiens
  misc_RNA (1)...(19): siRNA sense strand
aggaggaggacguccgaga

SEQ ID NO: 2532507 - RNA, 19 nt, Homo sapiens
  misc_RNA (1)...(19): siRNA sense strand
cugccagcccaaucagaua

SEQ ID NO: 2532508 - RNA, 19 nt, Homo sapiens
  misc_RNA (1)...(19): siRNA sense strand
cggugcagguguacggcua

SEQ ID NO: 2532509 - RNA, 19 nt, Homo sapiens
  misc_RNA (1)...(19): siRNA sense strand
guucuuugucauugaggaa

SEQ ID NO: 2532510 - RNA, 19 nt, Homo sapiens
  misc_RNA (1)...(19): siRNA sense strand
cccuagacuuugagagcca

SEQ ID NO: 2532511 - RNA, 19 nt, Homo sapiens
  misc_RNA (1)...(19): siRNA sense strand
gggaggaaaaggcgcaaua

SEQ ID NO: 2532512 - RNA, 19 nt, Homo sapiens
  misc_RNA (1)...(19): siRNA sense strand
gugcaagacaucaacgaca

SEQ ID NO: 2532513 - RNA, 19 nt, Homo sapiens
  misc_RNA (1)...(19): siRNA sense strand
guucaucaucaaagugcaa

SEQ ID NO: 2532514 - RNA, 19 nt, Homo sapiens
  misc_RNA (1)...(19): siRNA sense strand
ugaugguacuggaggagga

SEQ ID NO: 2532515 - RNA, 19 nt, Homo sapiens
  misc_RNA (1)...(19): siRNA sense strand
ugaugaggccacaggcaau

SEQ ID NO: 2532516 - RNA, 19 nt, Homo sapiens
  misc_RNA (1)...(19): siRNA sense strand
gcacagacuugcagggucg

SEQ ID NO: 2532517 - RNA, 19 nt, Homo sapiens
  misc_RNA (1)...(19): siRNA sense strand
ccgcaagccccuagacuuu

SEQ ID NO: 2532518 - RNA, 19 nt, Homo sapiens
  misc_RNA (1)...(19): siRNA sense strand
ugguggugauccaggccaa

SEQ ID NO: 2532519 - RNA, 19 nt, Homo sapiens
  misc_RNA (1)...(19): siRNA sense strand
aggaggaggacguccgaga

SEQ ID NO: 2532520 - RNA, 19 nt, Homo sapiens
  misc_RNA (1)...(19): siRNA sense strand
cugccagcccaaucagaua

SEQ ID NO: 2532521 - RNA, 19 nt, Homo sapiens
  misc_RNA (1)...(19): siRNA sense strand
uggaugaaccagaaggaaa

SEQ ID NO: 2532522 - RNA, 19 nt, Homo sapiens
  misc_RNA (1)...(19): siRNA sense strand
acaagaagacaaugagcaa

SEQ ID NO: 2532523 - RNA, 19 nt, Homo sapiens
  misc_RNA (1)...(19): siRNA sense strand
ggaugaaccagaaggaaaa

SEQ ID NO: 2532524 - RNA, 19 nt, Homo sapiens
  misc_RNA (1)...(19): siRNA sense strand
cugcaaaucuggagcucau

SEQ ID NO: 2532525 - RNA, 19 nt, Homo sapiens
  misc_RNA (1)...(19): siRNA sense strand
gcaaaaggucgaaggaaga

SEQ ID NO: 2532526 - RNA, 19 nt, Homo sapiens
  misc_RNA (1)...(19): siRNA sense strand
gguuugaauuccucagcaa

SEQ ID NO: 2532527 - RNA, 19 nt, Homo sapiens
  misc_RNA (1)...(19): siRNA sense strand
ugguauuggugauguggaa

SEQ ID NO: 2532528 - RNA, 19 nt, Homo sapiens
  misc_RNA (1)...(19): siRNA sense strand
aggagaaguuuuagcacaa

SEQ ID NO: 2532529 - RNA, 19 nt, Homo sapiens
  misc_RNA (1)...(19): siRNA sense strand
aagaagacaaugagcaaaa

SEQ ID NO: 2532530 - RNA, 19 nt, Homo sapiens
  misc_RNA (1)...(19): siRNA sense strand
gaguguuagugguaggaca

SEQ ID NO: 2532531 - RNA, 19 nt, Homo sapiens
  misc_RNA (1)...(19): siRNA sense strand
cccaagaaacagaaugcaa

SEQ ID NO: 2532532 - RNA, 19 nt, Homo sapiens
  misc_RNA (1)...(19): siRNA sense strand
aguaacaagaagacaauga

SEQ ID NO: 2532533 - RNA, 19 nt, Homo sapiens
  misc_RNA (1)...(19): siRNA sense strand
cuucaaauaaacagaacca

SEQ ID NO: 2532534 - RNA, 19 nt, Homo sapiens
  misc_RNA (1)...(19): siRNA sense strand
ugugaaugauagagaugga

SEQ ID NO: 2532535 - RNA, 19 nt, Homo sapiens
  misc_RNA (1)...(19): siRNA sense strand
gguuuuaggagaaguuuua

SEQ ID NO: 2532536 - RNA, 19 nt, Homo sapiens
  misc_RNA (1)...(19): siRNA sense strand
ccaacaaaacauugacauu

SEQ ID NO: 2532537 - RNA, 19 nt, Homo sapiens
  misc_RNA (1)...(19): siRNA sense strand
agcaguaacaagaagacaa

SEQ ID NO: 2532538 - RNA, 19 nt, Homo sapiens
  misc_RNA (1)...(19): siRNA sense strand
aaggagauuaacagaagaa

SEQ ID NO: 2532539 - RNA, 19 nt, Homo sapiens
  misc_RNA (1)...(19): siRNA sense strand
uccgaagcgccaagggaaa

SEQ ID NO: 2532540 - RNA, 19 nt, Homo sapiens
  misc_RNA (1)...(19): siRNA sense strand
gguugcaaugugaaugaua

SEQ ID NO: 2532541 - RNA, 19 nt, Homo sapiens
  misc_RNA (1)...(19): siRNA sense strand
aggaagaauauaacacaca

SEQ ID NO: 2532542 - RNA, 19 nt, Homo sapiens
  misc_RNA (1)...(19): siRNA sense strand
aggauauugguaugguaua

SEQ ID NO: 2532543 - RNA, 19 nt, Homo sapiens
  misc_RNA (1)...(19): siRNA sense strand
uggaacacagacagagcua

SEQ ID NO: 2532544 - RNA, 19 nt, Homo sapiens
  misc_RNA (1)...(19): siRNA sense strand
cauuagguucuuugggaca

SEQ ID NO: 2532545 - RNA, 19 nt, Homo sapiens
  misc_RNA (1)...(19): siRNA sense strand
gguugguacauuaagauuu

SEQ ID NO: 2532546 - RNA, 19 nt, Homo sapiens
  misc_RNA (1)...(19): siRNA sense strand
ggacagagacugggcacca

SEQ ID NO: 2532547 - RNA, 19 nt, Homo sapiens
  misc_RNA (1)...(19): siRNA sense strand
gcuaaggaaaucaagcaga

SEQ ID NO: 2532548 - RNA, 19 nt, Homo sapiens
  misc_RNA (1)...(19): siRNA sense strand
gggaauuaaugggucaaaa

SEQ ID NO: 2532549 - RNA, 19 nt, Homo sapiens
  misc_RNA (1)...(19): siRNA sense strand
auaauggaaguguuggaaa

SEQ ID NO: 2532550 - RNA, 19 nt, Homo sapiens
  misc_RNA (1)...(19): siRNA sense strand
agcaacaucuacagcaaau

SEQ ID NO: 2532551 - RNA, 19 nt, Homo sapiens
  misc_RNA (1)...(19): siRNA sense strand
guuagugguaggacagaga

SEQ ID NO: 2532552 - RNA, 19 nt, Homo sapiens
  misc_RNA (1)...(19): siRNA sense strand
caggauauugguaugguau

SEQ ID NO: 2532553 - RNA, 19 nt, Homo sapiens
  misc_RNA (1)...(19): siRNA sense strand
uugcggagucgcuggacaa

SEQ ID NO: 2532554 - RNA, 19 nt, Homo sapiens
  misc_RNA (1)...(19): siRNA sense strand
uggacaaacaugaaugcuu

SEQ ID NO: 2532555 - RNA, 19 nt, Homo sapiens
  misc_RNA (1)...(19): siRNA sense strand
ggaacaacugaauuugcaa

SEQ ID NO: 2532556 - RNA, 19 nt, Homo sapiens
  misc_RNA (1)...(19): siRNA sense strand
ugaaugauagagauggauu

SEQ ID NO: 2532557 - RNA, 19 nt, Homo sapiens
  misc_RNA (1)...(19): siRNA sense strand
ccauagaggaccuuccaga

SEQ ID NO: 2532558 - RNA, 19 nt, Homo sapiens
  misc_RNA (1)...(19): siRNA sense strand
caaacuucgcuccaggaua

SEQ ID NO: 2532559 - RNA, 19 nt, Homo sapiens
  misc_RNA (1)...(19): siRNA sense strand
uugguaugguauagagcuu

SEQ ID NO: 2532560 - RNA, 19 nt, Homo sapiens
  misc_RNA (1)...(19): siRNA sense strand
ucuuaagagagguugcaau

SEQ ID NO: 2532561 - RNA, 19 nt, Homo sapiens
  misc_RNA (1)...(19): siRNA sense strand
cagcaacaucuacagcaaa

SEQ ID NO: 2532562 - RNA, 19 nt, Homo sapiens
  misc_RNA (1)...(19): siRNA sense strand
cauccagggugcaaagagu

SEQ ID NO: 2532563 - RNA, 19 nt, Homo sapiens
  misc_RNA (1)...(19): siRNA sense strand
caaaaggagauuaacagaa

SEQ ID NO: 2532564 - RNA, 19 nt, Homo sapiens
  misc_RNA (1)...(19): siRNA sense strand
gagagguugcaaugugaau

SEQ ID NO: 2532565 - RNA, 19 nt, Homo sapiens
  misc_RNA (1)...(19): siRNA sense strand
ugaccugggagcagacauu

SEQ ID NO: 2532566 - RNA, 19 nt, Homo sapiens
  misc_RNA (1)...(19): siRNA sense strand
gcaccaaugccuucagacu

SEQ ID NO: 2532567 - RNA, 19 nt, Homo sapiens
  misc_RNA (1)...(19): siRNA sense strand
cuacaucuucuuuggaaca

SEQ ID NO: 2532568 - RNA, 19 nt, Homo sapiens
  misc_RNA (1)...(19): siRNA sense strand
caagaagacaaugagcaaa

SEQ ID NO: 2532569 - RNA, 19 nt, Homo sapiens
  misc_RNA (1)...(19): siRNA sense strand
cgucgcaguuggagcagca

SEQ ID NO: 2532570 - RNA, 19 nt, Homo sapiens
  misc_RNA (1)...(19): siRNA sense strand
gggagaaacuugaacgcaa

SEQ ID NO: 2532571 - RNA, 19 nt, Homo sapiens
  misc_RNA (1)...(19): siRNA sense strand
gguuuaaguuacugagcca

SEQ ID NO: 2532572 - RNA, 19 nt, Homo sapiens
  misc_RNA (1)...(19): siRNA sense strand
ccucguaagagaugcuaaa

SEQ ID NO: 2532573 - RNA, 19 nt, Homo sapiens
  misc_RNA (1)...(19): siRNA sense strand
cgguauauugauugggaga

SEQ ID NO: 2532574 - RNA, 19 nt, Homo sapiens
  misc_RNA (1)...(19): siRNA sense strand
gccaaaagcuugugggcga

SEQ ID NO: 2532575 - RNA, 19 nt, Homo sapiens
  misc_RNA (1)...(19): siRNA sense strand
gcaugaugaaugugcacaa

SEQ ID NO: 2532576 - RNA, 19 nt, Homo sapiens
  misc_RNA (1)...(19): siRNA sense strand
cagaaggaagugaggccaa

SEQ ID NO: 2532577 - RNA, 19 nt, Homo sapiens
  misc_RNA (1)...(19): siRNA sense strand
gagauuugggauugggauu

SEQ ID NO: 2532578 - RNA, 19 nt, Homo sapiens
  misc_RNA (1)...(19): siRNA sense strand
ggacaaagacagaagacug

SEQ ID NO: 2532579 - RNA, 19 nt, Homo sapiens
  misc_RNA (1)...(19): siRNA sense strand
ccaaggaagcuguggccau

SEQ ID NO: 2532580 - RNA, 19 nt, Homo sapiens
  misc_RNA (1)...(19): siRNA sense strand
cggaugaaacugaccgauu

SEQ ID NO: 2532581 - RNA, 19 nt, Homo sapiens
  misc_RNA (1)...(19): siRNA sense strand
agaacgugcaugaggucaa

SEQ ID NO: 2532582 - RNA, 19 nt, Homo sapiens
  misc_RNA (1)...(19): siRNA sense strand
agagcaaacagaagaccaa

SEQ ID NO: 2532583 - RNA, 19 nt, Homo sapiens
  misc_RNA (1)...(19): siRNA sense strand
ggauuugaccagcaggaau

SEQ ID NO: 2532584 - RNA, 19 nt, Homo sapiens
  misc_RNA (1)...(19): siRNA sense strand
aacccgaagucaagagcua

SEQ ID NO: 2532585 - RNA, 19 nt, Homo sapiens
  misc_RNA (1)...(19): siRNA sense strand
cugaaaacuucgaccgauu

SEQ ID NO: 2532586 - RNA, 19 nt, Homo sapiens
  misc_RNA (1)...(19): siRNA sense strand
cagaaauuugagagggcca

SEQ ID NO: 2532587 - RNA, 19 nt, Homo sapiens
  misc_RNA (1)...(19): siRNA sense strand
gaagaaaagacgaccaaca

SEQ ID NO: 2532588 - RNA, 19 nt, Homo sapiens
  misc_RNA (1)...(19): siRNA sense strand
aagugaggccaaugaagaa

SEQ ID NO: 2532589 - RNA, 19 nt, Homo sapiens
  misc_RNA (1)...(19): siRNA sense strand
gugcacaagcgcugcguga

SEQ ID NO: 2532590 - RNA, 19 nt, Homo sapiens
  misc_RNA (1)...(19): siRNA sense strand
ucaguagagauuugggauu

SEQ ID NO: 2532591 - RNA, 19 nt, Homo sapiens
  misc_RNA (1)...(19): siRNA sense strand
ccaggaagucaucaggaau

SEQ ID NO: 2532592 - RNA, 19 nt, Homo sapiens
  misc_RNA (1)...(19): siRNA sense strand
ccaaggucccggaagaaaa

SEQ ID NO: 2532593 - RNA, 19 nt, Homo sapiens
  misc_RNA (1)...(19): siRNA sense strand
aggucaagaaccacaaauu

SEQ ID NO: 2532594 - RNA, 19 nt, Homo sapiens
  misc_RNA (1)...(19): siRNA sense strand
ccucauuguccucguaaga

SEQ ID NO: 2532595 - RNA, 19 nt, Homo sapiens
  misc_RNA (1)...(19): siRNA sense strand
aggaggaaggcgaguacuu

SEQ ID NO: 2532596 - RNA, 19 nt, Homo sapiens
  misc_RNA (1)...(19): siRNA sense strand
ugaccaaacacccaggcaa

SEQ ID NO: 2532597 - RNA, 19 nt, Homo sapiens
  misc_RNA (1)...(19): siRNA sense strand
ggucacugcuguauggacu

SEQ ID NO: 2532598 - RNA, 19 nt, Homo sapiens
  misc_RNA (1)...(19): siRNA sense strand
gcaucuacauccaggccca

SEQ ID NO: 2532599 - RNA, 19 nt, Homo sapiens
  misc_RNA (1)...(19): siRNA sense strand
cggaagaaaagacgaccaa

SEQ ID NO: 2532600 - RNA, 19 nt, Homo sapiens
  misc_RNA (1)...(19): siRNA sense strand
gggugacaaccaagacauu

SEQ ID NO: 2532601 - RNA, 19 nt, Homo sapiens
  misc_RNA (1)...(19): siRNA sense strand
uuuuaaaacccgaagucaa

SEQ ID NO: 2532602 - RNA, 19 nt, Homo sapiens
  misc_RNA (1)...(19): siRNA sense strand
ugcaugaggucaagaacca

SEQ ID NO: 2532603 - RNA, 19 nt, Homo sapiens
  misc_RNA (1)...(19): siRNA sense strand
ccaaugaagaacugcggca

SEQ ID NO: 2532604 - RNA, 19 nt, Homo sapiens
  misc_RNA (1)...(19): siRNA sense strand
ugaagaaggacguugugau

SEQ ID NO: 2532605 - RNA, 19 nt, Homo sapiens
  misc_RNA (1)...(19): siRNA sense strand
cagaugagcucuaugcugu

SEQ ID NO: 2532606 - RNA, 19 nt, Homo sapiens
  misc_RNA (1)...(19): siRNA sense strand
agcugaaagaaucggacaa

SEQ ID NO: 2532607 - RNA, 19 nt, Homo sapiens
  misc_RNA (1)...(19): siRNA sense strand
acaacaauggcaacagaga

SEQ ID NO: 2532608 - RNA, 19 nt, Homo sapiens
  misc_RNA (1)...(19): siRNA sense strand
cuuaucagcccuaugggaa

SEQ ID NO: 2532609 - RNA, 19 nt, Homo sapiens
  misc_RNA (1)...(19): siRNA sense strand
ccaugaagaaggaagggau

SEQ ID NO: 2532610 - RNA, 19 nt, Homo sapiens
  misc_RNA (1)...(19): siRNA sense strand
gcacaauguuaacaggcca

SEQ ID NO: 2532611 - RNA, 19 nt, Homo sapiens
  misc_RNA (1)...(19): siRNA sense strand
ccaaagaagugucuccuga

SEQ ID NO: 2532612 - RNA, 19 nt, Homo sapiens
  misc_RNA (1)...(19): siRNA sense strand
gcgcacaacuacauggaac

SEQ ID NO: 2532613 - RNA, 19 nt, Homo sapiens
  misc_RNA (1)...(19): siRNA sense strand
guccaagaagagcaagaaa

SEQ ID NO: 2532614 - RNA, 19 nt, Homo sapiens
  misc_RNA (1)...(19): siRNA sense strand
ucaaagugcaugcaggaga

SEQ ID NO: 2532615 - RNA, 19 nt, Homo sapiens
  misc_RNA (1)...(19): siRNA sense strand
gaagauggaaaguggcagu

SEQ ID NO: 2532616 - RNA, 19 nt, Homo sapiens
  misc_RNA (1)...(19): siRNA sense strand
gcaugaagauggaaagugg

SEQ ID NO: 2532617 - RNA, 19 nt, Homo sapiens
  misc_RNA (1)...(19): siRNA sense strand
ugucaaagugcaugcagga

SEQ ID NO: 2532618 - RNA, 19 nt, Homo sapiens
  misc_RNA (1)...(19): siRNA sense strand
uggguaaugaagagagaaa

SEQ ID NO: 2532619 - RNA, 19 nt, Homo sapiens
  misc_RNA (1)...(19): siRNA sense strand
auucagagucagagaaaga

SEQ ID NO: 2532620 - RNA, 19 nt, Homo sapiens
  misc_RNA (1)...(19): siRNA sense strand
caguaaauuaucaggaaga

SEQ ID NO: 2532621 - RNA, 19 nt, Homo sapiens
  misc_RNA (1)...(19): siRNA sense strand
aggcagcagacuuggguaa

SEQ ID NO: 2532622 - RNA, 19 nt, Homo sapiens
  misc_RNA (1)...(19): siRNA sense strand
uguuaaauccagugguuca

SEQ ID NO: 2532623 - RNA, 19 nt, Homo sapiens
  misc_RNA (1)...(19): siRNA sense strand
acuuaugggugcaggaaag

SEQ ID NO: 2532624 - RNA, 19 nt, Homo sapiens
  misc_RNA (1)...(19): siRNA sense strand
ggggaagaagacaagaaaa

SEQ ID NO: 2532625 - RNA, 19 nt, Homo sapiens
  misc_RNA (1)...(19): siRNA sense strand
gugcaggaaagaaagaaca

SEQ ID NO: 2532626 - RNA, 19 nt, Homo sapiens
  misc_RNA (1)...(19): siRNA sense strand
agucagagaaagaagaauc

SEQ ID NO: 2532627 - RNA, 19 nt, Homo sapiens
  misc_RNA (1)...(19): siRNA sense strand
cuuggguaaugaagagaga

SEQ ID NO: 2532628 - RNA, 19 nt, Homo sapiens
  misc_RNA (1)...(19): siRNA sense strand
gaaagaacauacuggucgu

SEQ ID NO: 2532629 - RNA, 19 nt, Homo sapiens
  misc_RNA (1)...(19): siRNA sense strand
ucucaauaucagcaaagua

SEQ ID NO: 2532630 - RNA, 19 nt, Homo sapiens
  misc_RNA (1)...(19): siRNA sense strand
ucagugagguagaagacca

SEQ ID NO: 2532631 - RNA, 19 nt, Homo sapiens
  misc_RNA (1)...(19): siRNA sense strand
agaaagaagaaucugcuga

SEQ ID NO: 2532632 - RNA, 19 nt, Homo sapiens
  misc_RNA (1)...(19): siRNA sense strand
agaugaugaugaugacgau

SEQ ID NO: 2532633 - RNA, 19 nt, Homo sapiens
  misc_RNA (1)...(19): siRNA sense strand
gguaaugaagagagaaaac

SEQ ID NO: 2532634 - RNA, 19 nt, Homo sapiens
  misc_RNA (1)...(19): siRNA sense strand
gagaugaugaugaugacga

SEQ ID NO: 2532635 - RNA, 19 nt, Homo sapiens
  misc_RNA (1)...(19): siRNA sense strand
cuaaagaggaggagggaga

SEQ ID NO: 2532636 - RNA, 19 nt, Homo sapiens
  misc_RNA (1)...(19): siRNA sense strand
aaagaagaggaaagaguca

SEQ ID NO: 2532637 - RNA, 19 nt, Homo sapiens
  misc_RNA (1)...(19): siRNA sense strand
caacagcaguagaaggcca

SEQ ID NO: 2532638 - RNA, 19 nt, Homo sapiens
  misc_RNA (1)...(19): siRNA sense strand
acaauggggcacaggaaaa

SEQ ID NO: 2532639 - RNA, 19 nt, Homo sapiens
  misc_RNA (1)...(19): siRNA sense strand
guagaaaccuccacggucu

SEQ ID NO: 2532640 - RNA, 19 nt, Homo sapiens
  misc_RNA (1)...(19): siRNA sense strand
gagaaagagcugcaggaac

SEQ ID NO: 2532641 - RNA, 19 nt, Homo sapiens
  misc_RNA (1)...(19): siRNA sense strand
ugacagagaaagagcugca

SEQ ID NO: 2532642 - RNA, 19 nt, Homo sapiens
  misc_RNA (1)...(19): siRNA sense strand
gggacauggagaaaggcuu

SEQ ID NO: 2532643 - RNA, 19 nt, Homo sapiens
  misc_RNA (1)...(19): siRNA sense strand
caguagaaggccaggucca

SEQ ID NO: 2532644 - RNA, 19 nt, Homo sapiens
  misc_RNA (1)...(19): siRNA sense strand
cggagaaucagaaggugga

SEQ ID NO: 2532645 - RNA, 19 nt, Homo sapiens
  misc_RNA (1)...(19): siRNA sense strand
cagagaaagagcugcagga

SEQ ID NO: 2532646 - RNA, 19 nt, Homo sapiens
  misc_RNA (1)...(19): siRNA sense strand
ccacaauggggcacaggaa

SEQ ID NO: 2532647 - RNA, 19 nt, Homo sapiens
  misc_RNA (1)...(19): siRNA sense strand
agaaucagaagguggagau

SEQ ID NO: 2532648 - RNA, 19 nt, Homo sapiens
  misc_RNA (1)...(19): siRNA sense strand
caucacacgagggaagaaa

SEQ ID NO: 2532649 - RNA, 19 nt, Homo sapiens
  misc_RNA (1)...(19): siRNA sense strand
cuaaagagucaucaaggga

SEQ ID NO: 2532650 - RNA, 19 nt, Homo sapiens
  misc_RNA (1)...(19): siRNA sense strand
cgacaauaucucaagcacu

SEQ ID NO: 2532651 - RNA, 19 nt, Homo sapiens
  misc_RNA (1)...(19): siRNA sense strand
ucuccagcgcugaaggaaa

SEQ ID NO: 2532652 - RNA, 19 nt, Homo sapiens
  misc_RNA (1)...(19): siRNA sense strand
ggaucagcgugguccaaaa

SEQ ID NO: 2532653 - RNA, 19 nt, Homo sapiens
  misc_RNA (1)...(19): siRNA sense strand
ccgcaucaggucugccaaa

SEQ ID NO: 2532654 - RNA, 19 nt, Homo sapiens
  misc_RNA (1)...(19): siRNA sense strand
gacugaaauuugaugggaa

SEQ ID NO: 2532655 - RNA, 19 nt, Homo sapiens
  misc_RNA (1)...(19): siRNA sense strand
ugaaaugagaacugcugaa

SEQ ID NO: 2532656 - RNA, 19 nt, Homo sapiens
  misc_RNA (1)...(19): siRNA sense strand
ggaagaagugggcaggcuu

SEQ ID NO: 2532657 - RNA, 19 nt, Homo sapiens
  misc_RNA (1)...(19): siRNA sense strand
ucacaaaugaggcggagga

SEQ ID NO: 2532658 - RNA, 19 nt, Homo sapiens
  misc_RNA (1)...(19): siRNA sense strand
aagagaaaggaaaggaagu

SEQ ID NO: 2532659 - RNA, 19 nt, Homo sapiens
  misc_RNA (1)...(19): siRNA sense strand
caucaaaugacccaggaca

SEQ ID NO: 2532660 - RNA, 19 nt, Homo sapiens
  misc_RNA (1)...(19): siRNA sense strand
ugaaauuugaugggaagaa

SEQ ID NO: 2532661 - RNA, 19 nt, Homo sapiens
  misc_RNA (1)...(19): siRNA sense strand
acugaaauuugaugggaag

SEQ ID NO: 2532662 - RNA, 19 nt, Homo sapiens
  misc_RNA (1)...(19): siRNA sense strand
agcaaauacaacuggauca

SEQ ID NO: 2532663 - RNA, 19 nt, Homo sapiens
  misc_RNA (1)...(19): siRNA sense strand
cgucagagugugugaggag

SEQ ID NO: 2532664 - RNA, 19 nt, Homo sapiens
  misc_RNA (1)...(19): siRNA sense strand
ggguauuaaaugaagaaca

SEQ ID NO: 2532665 - RNA, 19 nt, Homo sapiens
  misc_RNA (1)...(19): siRNA sense strand
cagaguuggugaagcggua

SEQ ID NO: 2532666 - RNA, 19 nt, Homo sapiens
  misc_RNA (1)...(19): siRNA sense strand
cggaggugcuggagaaaau

SEQ ID NO: 2532667 - RNA, 19 nt, Homo sapiens
  misc_RNA (1)...(19): siRNA sense strand
ccuugcugcaccagagaaa

SEQ ID NO: 2532668 - RNA, 19 nt, Homo sapiens
  misc_RNA (1)...(19): siRNA sense strand
aaucggaacugauacgcua

SEQ ID NO: 2532669 - RNA, 19 nt, Homo sapiens
  misc_RNA (1)...(19): siRNA sense strand
ccuuucagcaugcgguuaa

SEQ ID NO: 2532670 - RNA, 19 nt, Homo sapiens
  misc_RNA (1)...(19): siRNA sense strand
ggaacugauacgcuagaau

SEQ ID NO: 2532671 - RNA, 19 nt, Homo sapiens
  misc_RNA (1)...(19): siRNA sense strand
gugcugauuaagaagguuu

SEQ ID NO: 2532672 - RNA, 19 nt, Homo sapiens
  misc_RNA (1)...(19): siRNA sense strand
gaaucuaaagagagcaacu

SEQ ID NO: 2532673 - RNA, 19 nt, Homo sapiens
  misc_RNA (1)...(19): siRNA sense strand
gaguuggugaagcgguaua

SEQ ID NO: 2532674 - RNA, 19 nt, Homo sapiens
  misc_RNA (1)...(19): siRNA sense strand
caaguguauauuuggguau

SEQ ID NO: 2532675 - RNA, 19 nt, Homo sapiens
  misc_RNA (1)...(19): siRNA sense strand
caagaauacaaaagagcuu

SEQ ID NO: 2532676 - RNA, 19 nt, Homo sapiens
  misc_RNA (1)...(19): siRNA sense strand
cuggagaaaauuuggagaa

SEQ ID NO: 2532677 - RNA, 19 nt, Homo sapiens
  misc_RNA (1)...(19): siRNA sense strand
augccagugugaaggaaaa

SEQ ID NO: 2532678 - RNA, 19 nt, Homo sapiens
  misc_RNA (1)...(19): siRNA sense strand
gcgguauaaucgagaacac

SEQ ID NO: 2532679 - RNA, 19 nt, Homo sapiens
  misc_RNA (1)...(19): siRNA sense strand
acaucgauaucaaagucaa

SEQ ID NO: 2532680 - RNA, 19 nt, Homo sapiens
  misc_RNA (1)...(19): siRNA sense strand
ccaaauaaaucuucuggga

SEQ ID NO: 2532681 - RNA, 19 nt, Homo sapiens
  misc_RNA (1)...(19): siRNA sense strand
caaauaaaucuucugggaa

SEQ ID NO: 2532682 - RNA, 19 nt, Homo sapiens
  misc_RNA (1)...(19): siRNA sense strand
ggggauaaugagaggacca

SEQ ID NO: 2532683 - RNA, 19 nt, Homo sapiens
  misc_RNA (1)...(19): siRNA sense strand
guggagacugugugaggau

SEQ ID NO: 2532684 - RNA, 19 nt, Homo sapiens
  misc_RNA (1)...(19): siRNA sense strand
ugacaucgcuguaucccaa

SEQ ID NO: 2532685 - RNA, 19 nt, Homo sapiens
  misc_RNA (1)...(19): siRNA sense strand
caguauacuccaacacaca

SEQ ID NO: 2532686 - RNA, 19 nt, Homo sapiens
  misc_RNA (1)...(19): siRNA sense strand
gagaccugucagagauauu

SEQ ID NO: 2532687 - RNA, 19 nt, Homo sapiens
  misc_RNA (1)...(19): siRNA sense strand
cagacugaguauagggaaa

SEQ ID NO: 2532688 - RNA, 19 nt, Homo sapiens
  misc_RNA (1)...(19): siRNA sense strand
aagacaagaaagagagaaa

SEQ ID NO: 2532689 - RNA, 19 nt, Homo sapiens
  misc_RNA (1)...(19): siRNA sense strand
gauucacauucuagggaaa

SEQ ID NO: 2532690 - RNA, 19 nt, Homo sapiens
  misc_RNA (1)...(19): siRNA sense strand
ggucaaauuaugaugguau

SEQ ID NO: 2532691 - RNA, 19 nt, Homo sapiens
  misc_RNA (1)...(19): siRNA sense strand
uagagaaauggaagagaaa

SEQ ID NO: 2532692 - RNA, 19 nt, Homo sapiens
  misc_RNA (1)...(19): siRNA sense strand
cuggagaguuaaugaguau

SEQ ID NO: 2532693 - RNA, 19 nt, Homo sapiens
  misc_RNA (1)...(19): siRNA sense strand
gaguuaaugaguauggaaa

SEQ ID NO: 2532694 - RNA, 19 nt, Homo sapiens
  misc_RNA (1)...(19): siRNA sense strand
gagaaauggaagagaaauc

SEQ ID NO: 2532695 - RNA, 19 nt, Homo sapiens
  misc_RNA (1)...(19): siRNA sense strand
cagaaaacacagugacuaa

SEQ ID NO: 2532696 - RNA, 19 nt, Homo sapiens
  misc_RNA (1)...(19): siRNA sense strand
ccguaaagcuaauaaggca

SEQ ID NO: 2532697 - RNA, 19 nt, Homo sapiens
  misc_RNA (1)...(19): siRNA sense strand
agacauuugcagaggucaa

SEQ ID NO: 2532698 - RNA, 19 nt, Homo sapiens
  misc_RNA (1)...(19): siRNA sense strand
cauuaugaccaucaagaaa

SEQ ID NO: 2532699 - RNA, 19 nt, Homo sapiens
  misc_RNA (1)...(19): siRNA sense strand
gcacaaagcuauaccugca

SEQ ID NO: 2532700 - RNA, 19 nt, Homo sapiens
  misc_RNA (1)...(19): siRNA sense strand
aagaagacaaggacugaaa

SEQ ID NO: 2532701 - RNA, 19 nt, Homo sapiens
  misc_RNA (1)...(19): siRNA sense strand
agagagagaagaugaaaga

SEQ ID NO: 2532702 - RNA, 19 nt, Homo sapiens
  misc_RNA (1)...(19): siRNA sense strand
agaaaggaagaaacaguaa

SEQ ID NO: 2532703 - RNA, 19 nt, Homo sapiens
  misc_RNA (1)...(19): siRNA sense strand
gauugagugaugagaacaa

SEQ ID NO: 2532704 - RNA, 19 nt, Homo sapiens
  misc_RNA (1)...(19): siRNA sense strand
ccuagagaguguuuggauu

SEQ ID NO: 2532705 - RNA, 19 nt, Homo sapiens
  misc_RNA (1)...(19): siRNA sense strand
cuguuuauauggaggccaa

SEQ ID NO: 2532706 - RNA, 19 nt, Homo sapiens
  misc_RNA (1)...(19): siRNA sense strand
gagaauaccuggaaagcuc

SEQ ID NO: 2532707 - RNA, 19 nt, Homo sapiens
  misc_RNA (1)...(19): siRNA sense strand
caucaagaaaucuggucua

SEQ ID NO: 2532708 - RNA, 19 nt, Homo sapiens
  misc_RNA (1)...(19): siRNA sense strand
cggauguauuucaaagauu

SEQ ID NO: 2532709 - RNA, 19 nt, Homo sapiens
  misc_RNA (1)...(19): siRNA sense strand
guucagagagagaagauga

SEQ ID NO: 2532710 - RNA, 19 nt, Homo sapiens
  misc_RNA (1)...(19): siRNA sense strand
ccugauaaguggugugaag

SEQ ID NO: 2532711 - RNA, 19 nt, Homo sapiens
  misc_RNA (1)...(19): siRNA sense strand
ugugaaaccuaaagccgaa

SEQ ID NO: 2532712 - RNA, 19 nt, Homo sapiens
  misc_RNA (1)...(19): siRNA sense strand
ggucguuaugcaagagcua

SEQ ID NO: 2532713 - RNA, 19 nt, Homo sapiens
  misc_RNA (1)...(19): siRNA sense strand
agacagaagaucaguuuca

SEQ ID NO: 2532714 - RNA, 19 nt, Homo sapiens
  misc_RNA (1)...(19): siRNA sense strand
ggacuguucaugaguggaa

SEQ ID NO: 2532715 - RNA, 19 nt, Homo sapiens
  misc_RNA (1)...(19): siRNA sense strand
caagaaaggaagaaacagu

SEQ ID NO: 2532716 - RNA, 19 nt, Homo sapiens
  misc_RNA (1)...(19): siRNA sense strand
aagcaggaagaaagagaau

SEQ ID NO: 2532717 - RNA, 19 nt, Homo sapiens
  misc_RNA (1)...(19): siRNA sense strand
gaguauagggaaaaguuaa

SEQ ID NO: 2532718 - RNA, 19 nt, Homo sapiens
  misc_RNA (1)...(19): siRNA sense strand
gcuugaccauggaguuaaa

SEQ ID NO: 2532719 - RNA, 19 nt, Homo sapiens
  misc_RNA (1)...(19): siRNA sense strand
gcaggaagaaagagaauac

SEQ ID NO: 2532720 - RNA, 19 nt, Homo sapiens
  misc_RNA (1)...(19): siRNA sense strand
cuuagaagaugauguacau

SEQ ID NO: 2532721 - RNA, 19 nt, Homo sapiens
  misc_RNA (1)...(19): siRNA sense strand
gcaaagaauccugugggaa

SEQ ID NO: 2532722 - RNA, 19 nt, Homo sapiens
  misc_RNA (1)...(19): siRNA sense strand
augcucaacuauaggauau

SEQ ID NO: 2532723 - RNA, 19 nt, Homo sapiens
  misc_RNA (1)...(19): siRNA sense strand
ggaaggaaaacuacuaaaa

SEQ ID NO: 2532724 - RNA, 19 nt, Homo sapiens
  misc_RNA (1)...(19): siRNA sense strand
agaugaaagaacucaagaa

SEQ ID NO: 2532725 - RNA, 19 nt, Homo sapiens
  misc_RNA (1)...(19): siRNA sense strand
cagucaaauucuugcuuca

SEQ ID NO: 2532726 - RNA, 19 nt, Homo sapiens
  misc_RNA (1)...(19): siRNA sense strand
uuacaugcuuucaguacaa

SEQ ID NO: 2532727 - RNA, 19 nt, Homo sapiens
  misc_RNA (1)...(19): siRNA sense strand
acucaaagaagcaucauau

SEQ ID NO: 2532728 - RNA, 19 nt, Homo sapiens
  misc_RNA (1)...(19): siRNA sense strand
agagagaagaugaaagaac

SEQ ID NO: 2532729 - RNA, 19 nt, Homo sapiens
  misc_RNA (1)...(19): siRNA sense strand
acuuagaagaugauguaca

SEQ ID NO: 2532730 - RNA, 19 nt, Homo sapiens
  misc_RNA (1)...(19): siRNA sense strand
ccuaaucaaguaugaggua

SEQ ID NO: 2532731 - RNA, 19 nt, Homo sapiens
  misc_RNA (1)...(19): siRNA sense strand
cugaaaagauugaguguag

SEQ ID NO: 2532732 - RNA, 19 nt, Homo sapiens
  misc_RNA (1)...(19): siRNA sense strand
aagacuaagcaggaagaaa

SEQ ID NO: 2532733 - RNA, 19 nt, Homo sapiens
  misc_RNA (1)...(19): siRNA sense strand
cuaagcaggaagaaagaga

SEQ ID NO: 2532734 - RNA, 19 nt, Homo sapiens
  misc_RNA (1)...(19): siRNA sense strand
gaaauggaagagaaaucaa

SEQ ID NO: 2532735 - RNA, 19 nt, Homo sapiens
  misc_RNA (1)...(19): siRNA sense strand
agacuaagcaggaagaaag

SEQ ID NO: 2532736 - RNA, 19 nt, Homo sapiens
  misc_RNA (1)...(19): siRNA sense strand
cucaagaaaggaagaaaca

SEQ ID NO: 2532737 - RNA, 19 nt, Homo sapiens
  misc_RNA (1)...(19): siRNA sense strand
ggaucuaggagacagaaga

SEQ ID NO: 2532738 - RNA, 19 nt, Homo sapiens
  misc_RNA (1)...(19): siRNA sense strand
gaaaagauugaguguagaa

SEQ ID NO: 2532739 - RNA, 19 nt, Homo sapiens
  misc_RNA (1)...(19): siRNA sense strand
agaaacaacacccuugaaa

SEQ ID NO: 2532740 - RNA, 19 nt, Homo sapiens
  misc_RNA (1)...(19): siRNA sense strand
gagcauuguaucugaucuu

SEQ ID NO: 2532741 - RNA, 19 nt, Homo sapiens
  misc_RNA (1)...(19): siRNA sense strand
aagaaaggaagaaacagua

SEQ ID NO: 2532742 - RNA, 19 nt, Homo sapiens
  misc_RNA (1)...(19): siRNA sense strand
gggcauaacagcaggagcu

SEQ ID NO: 2532743 - RNA, 19 nt, Homo sapiens
  misc_RNA (1)...(19): siRNA sense strand
cugcagaauggaggagaua

SEQ ID NO: 2532744 - RNA, 19 nt, Homo sapiens
  misc_RNA (1)...(19): siRNA sense strand
ggagauaaguuggagacga

SEQ ID NO: 2532745 - RNA, 19 nt, Homo sapiens
  misc_RNA (1)...(19): siRNA sense strand
ccugcagaauggaggagau

SEQ ID NO: 2532746 - RNA, 19 nt, Homo sapiens
  misc_RNA (1)...(19): siRNA sense strand
gagcugugggugagggcuu

SEQ ID NO: 2532747 - RNA, 19 nt, Homo sapiens
  misc_RNA (1)...(19): siRNA sense strand
gguugaauaugucuggaga

SEQ ID NO: 2532748 - RNA, 19 nt, Homo sapiens
  misc_RNA (1)...(19): siRNA sense strand
guugaauaugucuggagaa

SEQ ID NO: 2532749 - RNA, 19 nt, Homo sapiens
  misc_RNA (1)...(19): siRNA sense strand
accuagaagcugagaaacu

SEQ ID NO: 2532750 - RNA, 19 nt, Homo sapiens
  misc_RNA (1)...(19): siRNA sense strand
aaagaaccggagauggaaa

SEQ ID NO: 2532751 - RNA, 19 nt, Homo sapiens
  misc_RNA (1)...(19): siRNA sense strand
ggaggagauaaguuggaga

SEQ ID NO: 2532752 - RNA, 19 nt, Homo sapiens
  misc_RNA (1)...(19): siRNA sense strand
ugucugaccuagaagcuga

SEQ ID NO: 2532753 - RNA, 19 nt, Homo sapiens
  misc_RNA (1)...(19): siRNA sense strand
gauuaaaagaaccggagau

SEQ ID NO: 2532754 - RNA, 19 nt, Homo sapiens
  misc_RNA (1)...(19): siRNA sense strand
cugccaagaaugugggaaa

SEQ ID NO: 2532755 - RNA, 19 nt, Homo sapiens
  misc_RNA (1)...(19): siRNA sense strand
gggaaaagcuucagccaga

SEQ ID NO: 2532756 - RNA, 19 nt, Homo sapiens
  misc_RNA (1)...(19): siRNA sense strand
uagaagaagcggagccaca

SEQ ID NO: 2532757 - RNA, 19 nt, Homo sapiens
  misc_RNA (1)...(19): siRNA sense strand
uggaaagcagaguggagaa

SEQ ID NO: 2532758 - RNA, 19 nt, Homo sapiens
  misc_RNA (1)...(19): siRNA sense strand
aauccacacaggugagaaa

SEQ ID NO: 2532759 - RNA, 19 nt, Homo sapiens
  misc_RNA (1)...(19): siRNA sense strand
gagacuacauaaaggggaa

SEQ ID NO: 2532760 - RNA, 19 nt, Homo sapiens
  misc_RNA (1)...(19): siRNA sense strand
ggggaaaagccuuacaaau

SEQ ID NO: 2532761 - RNA, 19 nt, Homo sapiens
  misc_RNA (1)...(19): siRNA sense strand
gggagaagcccuauggaug

SEQ ID NO: 2532762 - RNA, 19 nt, Homo sapiens
  misc_RNA (1)...(19): siRNA sense strand
gugaggaacacgggaacaa

SEQ ID NO: 2532763 - RNA, 19 nt, Homo sapiens
  misc_RNA (1)...(19): siRNA sense strand
ucuuuagacaccagagaau

SEQ ID NO: 2532764 - RNA, 19 nt, Homo sapiens
  misc_RNA (1)...(19): siRNA sense strand
acaucagagacuacauaaa

SEQ ID NO: 2532765 - RNA, 19 nt, Homo sapiens
  misc_RNA (1)...(19): siRNA sense strand
aagaaugcgagaagagcuu

SEQ ID NO: 2532766 - RNA, 19 nt, Homo sapiens
  misc_RNA (1)...(19): siRNA sense strand
ucuuuaaacaccacagaau

SEQ ID NO: 2532767 - RNA, 19 nt, Homo sapiens
  misc_RNA (1)...(19): siRNA sense strand
acuuuaggcagcugcguua

SEQ ID NO: 2532768 - RNA, 19 nt, Homo sapiens
  misc_RNA (1)...(19): siRNA sense strand
acaccaaagaauucaucaa

SEQ ID NO: 2532769 - RNA, 19 nt, Homo sapiens
  misc_RNA (1)...(19): siRNA sense strand
ccaugaagaaagaccuuau

SEQ ID NO: 2532770 - RNA, 19 nt, Homo sapiens
  misc_RNA (1)...(19): siRNA sense strand
gaggaagacucacccggaa

SEQ ID NO: 2532771 - RNA, 19 nt, Homo sapiens
  misc_RNA (1)...(19): siRNA sense strand
cccuauaagugugaagaau

SEQ ID NO: 2532772 - RNA, 19 nt, Homo sapiens
  misc_RNA (1)...(19): siRNA sense strand
gagaauucacacuggggaa

SEQ ID NO: 2532773 - RNA, 19 nt, Homo sapiens
  misc_RNA (1)...(19): siRNA sense strand
guacacaccuuauccgaca

SEQ ID NO: 2532774 - RNA, 19 nt, Homo sapiens
  misc_RNA (1)...(19): siRNA sense strand
gugaagaaugcgagaagag

SEQ ID NO: 2532775 - RNA, 19 nt, Homo sapiens
  misc_RNA (1)...(19): siRNA sense strand
uacccacaguagagacaaa

SEQ ID NO: 2532776 - RNA, 19 nt, Homo sapiens
  misc_RNA (1)...(19): siRNA sense strand
agggacuucugcagagaga

SEQ ID NO: 2532777 - RNA, 19 nt, Homo sapiens
  misc_RNA (1)...(19): siRNA sense strand
ccgaaagcagagaggccca

SEQ ID NO: 2532778 - RNA, 19 nt, Homo sapiens
  misc_RNA (1)...(19): siRNA sense strand
ccaucgugcuggagggcaa

SEQ ID NO: 2532779 - RNA, 19 nt, Homo sapiens
  misc_RNA (1)...(19): siRNA sense strand
guuuaaugcagaauggcua

SEQ ID NO: 2532780 - RNA, 19 nt, Homo sapiens
  misc_RNA (1)...(19): siRNA sense strand
uggaaagggaagacaaagu

SEQ ID NO: 2532781 - RNA, 19 nt, Homo sapiens
  misc_RNA (1)...(19): siRNA sense strand
agacaaaccauccagguca

SEQ ID NO: 2532782 - RNA, 19 nt, Homo sapiens
  misc_RNA (1)...(19): siRNA sense strand
ucauggaaagggaagacaa

SEQ ID NO: 2532783 - RNA, 19 nt, Homo sapiens
  misc_RNA (1)...(19): siRNA sense strand
ucaaaguguauaacagaca

SEQ ID NO: 2532784 - RNA, 19 nt, Homo sapiens
  misc_RNA (1)...(19): siRNA sense strand
uauuuguagcaccgagaaa

SEQ ID NO: 2532785 - RNA, 19 nt, Homo sapiens
  misc_RNA (1)...(19): siRNA sense strand
gcuaauaaacccugcagca

SEQ ID NO: 2532786 - RNA, 19 nt, Homo sapiens
  misc_RNA (1)...(19): siRNA sense strand
aagagaaguacgaaggcca

SEQ ID NO: 2532787 - RNA, 19 nt, Homo sapiens
  misc_RNA (1)...(19): siRNA sense strand
gacuggaguugaaugggaa

SEQ ID NO: 2532788 - RNA, 19 nt, Homo sapiens
  misc_RNA (1)...(19): siRNA sense strand
aaccagaacaugaagacau

SEQ ID NO: 2532789 - RNA, 19 nt, Homo sapiens
  misc_RNA (1)...(19): siRNA sense strand
ugcuggugcuggagaaaca

SEQ ID NO: 2532790 - RNA, 19 nt, Homo sapiens
  misc_RNA (1)...(19): siRNA sense strand
aaacuagagcagagggaua

SEQ ID NO: 2532791 - RNA, 19 nt, Homo sapiens
  misc_RNA (1)...(19): siRNA sense strand
gagauaaagaagagcaaaa

SEQ ID NO: 2532792 - RNA, 19 nt, Homo sapiens
  misc_RNA (1)...(19): siRNA sense strand
uuguauugcuaaugggaaa

SEQ ID NO: 2532793 - RNA, 19 nt, Homo sapiens
  misc_RNA (1)...(19): siRNA sense strand
gaaaagaauuugaggcaga

SEQ ID NO: 2532794 - RNA, 19 nt, Homo sapiens
  misc_RNA (1)...(19): siRNA sense strand
agagagaagagaagaggaa

SEQ ID NO: 2532795 - RNA, 19 nt, Homo sapiens
  misc_RNA (1)...(19): siRNA sense strand
uugaagagcaggugaacaa

SEQ ID NO: 2532796 - RNA, 19 nt, Homo sapiens
  misc_RNA (1)...(19): siRNA sense strand
aaagagaagcagaggaaaa

SEQ ID NO: 2532797 - RNA, 19 nt, Homo sapiens
  misc_RNA (1)...(19): siRNA sense strand
agagaagagaagaggaaga

SEQ ID NO: 2532798 - RNA, 19 nt, Homo sapiens
  misc_RNA (1)...(19): siRNA sense strand
aaaugaagacugaggguga

SEQ ID NO: 2532799 - RNA, 19 nt, Homo sapiens
  misc_RNA (1)...(19): siRNA sense strand
gagaaagacucgaacgcca

SEQ ID NO: 2532800 - RNA, 19 nt, Homo sapiens
  misc_RNA (1)...(19): siRNA sense strand
aagaauuagcagagcgaga

SEQ ID NO: 2532801 - RNA, 19 nt, Homo sapiens
  misc_RNA (1)...(19): siRNA sense strand
agacauuugcauagaucaa

SEQ ID NO: 2532802 - RNA, 19 nt, Homo sapiens
  misc_RNA (1)...(19): siRNA sense strand
ggcaaagauuaaugagcuu

SEQ ID NO: 2532803 - RNA, 19 nt, Homo sapiens
  misc_RNA (1)...(19): siRNA sense strand
cggcagagucucaguccaa

SEQ ID NO: 2532804 - RNA, 19 nt, Homo sapiens
  misc_RNA (1)...(19): siRNA sense strand
ugaagauauuagagcugaa

SEQ ID NO: 2532805 - RNA, 19 nt, Homo sapiens
  misc_RNA (1)...(19): siRNA sense strand
cuguagaaacgcuggaaaa

SEQ ID NO: 2532806 - RNA, 19 nt, Homo sapiens
  misc_RNA (1)...(19): siRNA sense strand
cguuguggauugaaagaga

SEQ ID NO: 2532807 - RNA, 19 nt, Homo sapiens
  misc_RNA (1)...(19): siRNA sense strand
gaauuagcagagcgagaaa

SEQ ID NO: 2532808 - RNA, 19 nt, Homo sapiens
  misc_RNA (1)...(19): siRNA sense strand
agaaagcauccuugaagaa

SEQ ID NO: 2532809 - RNA, 19 nt, Homo sapiens
  misc_RNA (1)...(19): siRNA sense strand
guggauugaaagagauauu

SEQ ID NO: 2532810 - RNA, 19 nt, Homo sapiens
  misc_RNA (1)...(19): siRNA sense strand
uaguaaagucucuguagaa

SEQ ID NO: 2532811 - RNA, 19 nt, Homo sapiens
  misc_RNA (1)...(19): siRNA sense strand
ugaugagcauaaagaagaa

SEQ ID NO: 2532812 - RNA, 19 nt, Homo sapiens
  misc_RNA (1)...(19): siRNA sense strand
cagcaugagaagauugaau

SEQ ID NO: 2532813 - RNA, 19 nt, Homo sapiens
  misc_RNA (1)...(19): siRNA sense strand
aagagauaaagaagagcaa

SEQ ID NO: 2532814 - RNA, 19 nt, Homo sapiens
  misc_RNA (1)...(19): siRNA sense strand
cuugagaaggaauuggaaa

SEQ ID NO: 2532815 - RNA, 19 nt, Homo sapiens
  misc_RNA (1)...(19): siRNA sense strand
guaaacuaaaggacacaaa

SEQ ID NO: 2532816 - RNA, 19 nt, Homo sapiens
  misc_RNA (1)...(19): siRNA sense strand
gcuuuguaaacuugagaau

SEQ ID NO: 2532817 - RNA, 19 nt, Homo sapiens
  misc_RNA (1)...(19): siRNA sense strand
aagagaagaggaagauauu

SEQ ID NO: 2532818 - RNA, 19 nt, Homo sapiens
  misc_RNA (1)...(19): siRNA sense strand
cugccugcgaagagauaaa

SEQ ID NO: 2532819 - RNA, 19 nt, Homo sapiens
  misc_RNA (1)...(19): siRNA sense strand
agaaggugucuguggaaga

SEQ ID NO: 2532820 - RNA, 19 nt, Homo sapiens
  misc_RNA (1)...(19): siRNA sense strand
agauauuagagcugaacuu

SEQ ID NO: 2532821 - RNA, 19 nt, Homo sapiens
  misc_RNA (1)...(19): siRNA sense strand
cauaugaggaaaucagaau

SEQ ID NO: 2532822 - RNA, 19 nt, Homo sapiens
  misc_RNA (1)...(19): siRNA sense strand
uggcagagucuaugauuca

SEQ ID NO: 2532823 - RNA, 19 nt, Homo sapiens
  misc_RNA (1)...(19): siRNA sense strand
agucuaugauucagaacuu

SEQ ID NO: 2532824 - RNA, 19 nt, Homo sapiens
  misc_RNA (1)...(19): siRNA sense strand
aagaagagcaaaagcuuua

SEQ ID NO: 2532825 - RNA, 19 nt, Homo sapiens
  misc_RNA (1)...(19): siRNA sense strand
ugauauuggaaguagauga

SEQ ID NO: 2532826 - RNA, 19 nt, Homo sapiens
  misc_RNA (1)...(19): siRNA sense strand
ugucagaauagcuaaagaa

SEQ ID NO: 2532827 - RNA, 19 nt, Homo sapiens
  misc_RNA (1)...(19): siRNA sense strand
ugaugacagaugugguuaa

SEQ ID NO: 2532828 - RNA, 19 nt, Homo sapiens
  misc_RNA (1)...(19): siRNA sense strand
agaaagacucgaacgccaa

SEQ ID NO: 2532829 - RNA, 19 nt, Homo sapiens
  misc_RNA (1)...(19): siRNA sense strand
aauuugaggcagaugggaa

SEQ ID NO: 2532830 - RNA, 19 nt, Homo sapiens
  misc_RNA (1)...(19): siRNA sense strand
gacugagggugaugagaca

SEQ ID NO: 2532831 - RNA, 19 nt, Homo sapiens
  misc_RNA (1)...(19): siRNA sense strand
guuuguagacauuugcaua

SEQ ID NO: 2532832 - RNA, 19 nt, Homo sapiens
  misc_RNA (1)...(19): siRNA sense strand
ugucucaguucaagaguga

SEQ ID NO: 2532833 - RNA, 19 nt, Homo sapiens
  misc_RNA (1)...(19): siRNA sense strand
aguuugaagagcaggugaa

SEQ ID NO: 2532834 - RNA, 19 nt, Homo sapiens
  misc_RNA (1)...(19): siRNA sense strand
ugaugauauuggaaguaga

SEQ ID NO: 2532835 - RNA, 19 nt, Homo sapiens
  misc_RNA (1)...(19): siRNA sense strand
acgaaaacauggaaaaguu

SEQ ID NO: 2532836 - RNA, 19 nt, Homo sapiens
  misc_RNA (1)...(19): siRNA sense strand
cgaaaacauggaaaaguua

SEQ ID NO: 2532837 - RNA, 19 nt, Homo sapiens
  misc_RNA (1)...(19): siRNA sense strand
ucugaaaguuuguaaccau

SEQ ID NO: 2532838 - RNA, 19 nt, Homo sapiens
  misc_RNA (1)...(19): siRNA sense strand
agaaugauggccuggauau

SEQ ID NO: 2532839 - RNA, 19 nt, Homo sapiens
  misc_RNA (1)...(19): siRNA sense strand
cugaggacuugcaugacaa

SEQ ID NO: 2532840 - RNA, 19 nt, Homo sapiens
  misc_RNA (1)...(19): siRNA sense strand
aggcaaagauuaaugagcu

SEQ ID NO: 2532841 - RNA, 19 nt, Homo sapiens
  misc_RNA (1)...(19): siRNA sense strand
ccauaugaggaaaucagaa

SEQ ID NO: 2532842 - RNA, 19 nt, Homo sapiens
  misc_RNA (1)...(19): siRNA sense strand
ugagcaaugugaagagacu

SEQ ID NO: 2532843 - RNA, 19 nt, Homo sapiens
  misc_RNA (1)...(19): siRNA sense strand
guuuguaaccaugguaaua

SEQ ID NO: 2532844 - RNA, 19 nt, Homo sapiens
  misc_RNA (1)...(19): siRNA sense strand
gcugauucgaaaugauuau

SEQ ID NO: 2532845 - RNA, 19 nt, Homo sapiens
  misc_RNA (1)...(19): siRNA sense strand
gacaaaaguguuauggaaa

SEQ ID NO: 2532846 - RNA, 19 nt, Homo sapiens
  misc_RNA (1)...(19): siRNA sense strand
gaguaauggaaaugagauc

SEQ ID NO: 2532847 - RNA, 19 nt, Homo sapiens
  misc_RNA (1)...(19): siRNA sense strand
caguaugggaauaucuuaa

SEQ ID NO: 2532848 - RNA, 19 nt, Homo sapiens
  misc_RNA (1)...(19): siRNA sense strand
agcaaagaugggaggauuu

SEQ ID NO: 2532849 - RNA, 19 nt, Homo sapiens
  misc_RNA (1)...(19): siRNA sense strand
cucgaugacucuuggguga

SEQ ID NO: 2532850 - RNA, 19 nt, Homo sapiens
  misc_RNA (1)...(19): siRNA sense strand
ggugacuguauuuggguuu

SEQ ID NO: 2532851 - RNA, 19 nt, Homo sapiens
  misc_RNA (1)...(19): siRNA sense strand
cguuaggaucugaaccaau

SEQ ID NO: 2532852 - RNA, 19 nt, Homo sapiens
  misc_RNA (1)...(19): siRNA sense strand
uauggaaagcagugacaga

SEQ ID NO: 2532853 - RNA, 19 nt, Homo sapiens
  misc_RNA (1)...(19): siRNA sense strand
cagugacagaugugcuuua

SEQ ID NO: 2532854 - RNA, 19 nt, Homo sapiens
  misc_RNA (1)...(19): siRNA sense strand
gaugcauauucguuaucaa

SEQ ID NO: 2532855 - RNA, 19 nt, Homo sapiens
  misc_RNA (1)...(19): siRNA sense strand
ccaucaugauugguguaaa

SEQ ID NO: 2532856 - RNA, 19 nt, Homo sapiens
  misc_RNA (1)...(19): siRNA sense strand
agauaaaaguggcgcucca

SEQ ID NO: 2532857 - RNA, 19 nt, Homo sapiens
  misc_RNA (1)...(19): siRNA sense strand
aaaccaaagcaaaggcaau

SEQ ID NO: 2532858 - RNA, 19 nt, Homo sapiens
  misc_RNA (1)...(19): siRNA sense strand
aagcaaaggcaauugaaaa

SEQ ID NO: 2532859 - RNA, 19 nt, Homo sapiens
  misc_RNA (1)...(19): siRNA sense strand
aggaggacaacuaggacua

SEQ ID NO: 2532860 - RNA, 19 nt, Homo sapiens
  misc_RNA (1)...(19): siRNA sense strand
cagauaaugguguuggcua

SEQ ID NO: 2532861 - RNA, 19 nt, Homo sapiens
  misc_RNA (1)...(19): siRNA sense strand
ccuaaaauugacauggaaa

SEQ ID NO: 2532862 - RNA, 19 nt, Homo sapiens
  misc_RNA (1)...(19): siRNA sense strand
ugacgaaacucuuggagac

SEQ ID NO: 2532863 - RNA, 19 nt, Homo sapiens
  misc_RNA (1)...(19): siRNA sense strand
cuggaaagucaucaggaga

SEQ ID NO: 2532864 - RNA, 19 nt, Homo sapiens
  misc_RNA (1)...(19): siRNA sense strand
aggacaaaguaaauccaga

SEQ ID NO: 2532865 - RNA, 19 nt, Homo sapiens
  misc_RNA (1)...(19): siRNA sense strand
gaaaccaaagcaaaggcaa

SEQ ID NO: 2532866 - RNA, 19 nt, Homo sapiens
  misc_RNA (1)...(19): siRNA sense strand
guuugaagcuggaaaggac

SEQ ID NO: 2532867 - RNA, 19 nt, Homo sapiens
  misc_RNA (1)...(19): siRNA sense strand
caauguuugaagcuggaaa

SEQ ID NO: 2532868 - RNA, 19 nt, Homo sapiens
  misc_RNA (1)...(19): siRNA sense strand
gcagaugguaugugcccaa

SEQ ID NO: 2532869 - RNA, 19 nt, Homo sapiens
  misc_RNA (1)...(19): siRNA sense strand
ccugggaagaagaaagaga

SEQ ID NO: 2532870 - RNA, 19 nt, Homo sapiens
  misc_RNA (1)...(19): siRNA sense strand
cagacguggugguugguga

SEQ ID NO: 2532871 - RNA, 19 nt, Homo sapiens
  misc_RNA (1)...(19): siRNA sense strand
cugggaagaagaaagagaa

SEQ ID NO: 2532872 - RNA, 19 nt, Homo sapiens
  misc_RNA (1)...(19): siRNA sense strand
acgcagagcugaagaccca

SEQ ID NO: 2532873 - RNA, 19 nt, Homo sapiens
  misc_RNA (1)...(19): siRNA sense strand
ucaugaacgcagagcugaa

SEQ ID NO: 2532874 - RNA, 19 nt, Homo sapiens
  misc_RNA (1)...(19): siRNA sense strand
gugagcuagaugaggaaga

SEQ ID NO: 2532875 - RNA, 19 nt, Homo sapiens
  misc_RNA (1)...(19): siRNA sense strand
ugacuguggaggagcugaa

SEQ ID NO: 2532876 - RNA, 19 nt, Homo sapiens
  misc_RNA (1)...(19): siRNA sense strand
uggaggugaaacugggcaa

SEQ ID NO: 2532877 - RNA, 19 nt, Homo sapiens
  misc_RNA (1)...(19): siRNA sense strand
aggaagaggagcgaaggaa

SEQ ID NO: 2532878 - RNA, 19 nt, Homo sapiens
  misc_RNA (1)...(19): siRNA sense strand
aaagugagcuagaugagga

SEQ ID NO: 2532879 - RNA, 19 nt, Homo sapiens
  misc_RNA (1)...(19): siRNA sense strand
gaggaagaggagcgaagga

SEQ ID NO: 2532880 - RNA, 19 nt, Homo sapiens
  misc_RNA (1)...(19): siRNA sense strand
ugguaaaacucaagagaau

SEQ ID NO: 2532881 - RNA, 19 nt, Homo sapiens
  misc_RNA (1)...(19): siRNA sense strand
ucaaaagcgaagagaaaua

SEQ ID NO: 2532882 - RNA, 19 nt, Homo sapiens
  misc_RNA (1)...(19): siRNA sense strand
uggcaugcuacaagugaaa

SEQ ID NO: 2532883 - RNA, 19 nt, Homo sapiens
  misc_RNA (1)...(19): siRNA sense strand
ugauaagauugaaugccaa

SEQ ID NO: 2532884 - RNA, 19 nt, Homo sapiens
  misc_RNA (1)...(19): siRNA sense strand
acaagggaagagagagaau

SEQ ID NO: 2532885 - RNA, 19 nt, Homo sapiens
  misc_RNA (1)...(19): siRNA sense strand
guguagguuuugagaguau

SEQ ID NO: 2532886 - RNA, 19 nt, Homo sapiens
  misc_RNA (1)...(19): siRNA sense strand
cugauaagauugaaugcca

SEQ ID NO: 2532887 - RNA, 19 nt, Homo sapiens
  misc_RNA (1)...(19): siRNA sense strand
gcuuuauggaccacggcua

SEQ ID NO: 2532888 - RNA, 19 nt, Homo sapiens
  misc_RNA (1)...(19): siRNA sense strand
agaacaaaauacucagcaa

SEQ ID NO: 2532889 - RNA, 19 nt, Homo sapiens
  misc_RNA (1)...(19): siRNA sense strand
acucaagagaauagaaaug

SEQ ID NO: 2532890 - RNA, 19 nt, Homo sapiens
  misc_RNA (1)...(19): siRNA sense strand
agagaauagaaaugguuca

SEQ ID NO: 2532891 - RNA, 19 nt, Homo sapiens
  misc_RNA (1)...(19): siRNA sense strand
cuguacaguucauaaccaa

SEQ ID NO: 2532892 - RNA, 19 nt, Homo sapiens
  misc_RNA (1)...(19): siRNA sense strand
gguaaaacucaagagaaua

SEQ ID NO: 2532893 - RNA, 19 nt, Homo sapiens
  misc_RNA (1)...(19): siRNA sense strand
ucugaugagaauacagcaa

SEQ ID NO: 2532894 - RNA, 19 nt, Homo sapiens
  misc_RNA (1)...(19): siRNA sense strand
auuugaagacugugaacca

SEQ ID NO: 2532895 - RNA, 19 nt, Homo sapiens
  misc_RNA (1)...(19): siRNA sense strand
gggcaaaaccauugagaaa

SEQ ID NO: 2532896 - RNA, 19 nt, Homo sapiens
  misc_RNA (1)...(19): siRNA sense strand
acgaaaagguggaggagaa

SEQ ID NO: 2532897 - RNA, 19 nt, Homo sapiens
  misc_RNA (1)...(19): siRNA sense strand
agagagaggaugagagcaa

SEQ ID NO: 2532898 - RNA, 19 nt, Homo sapiens
  misc_RNA (1)...(19): siRNA sense strand
acauuaaagaagagagaga

SEQ ID NO: 2532899 - RNA, 19 nt, Homo sapiens
  misc_RNA (1)...(19): siRNA sense strand
ugaagaaguacgagggaga

SEQ ID NO: 2532900 - RNA, 19 nt, Homo sapiens
  misc_RNA (1)...(19): siRNA sense strand
gcgaugaagccaaggcgaa

SEQ ID NO: 2532901 - RNA, 19 nt, Homo sapiens
  misc_RNA (1)...(19): siRNA sense strand
caugaaaacagaagguaua

SEQ ID NO: 2532902 - RNA, 19 nt, Homo sapiens
  misc_RNA (1)...(19): siRNA sense strand
ggaagaaucuggaggagcu

SEQ ID NO: 2532903 - RNA, 19 nt, Homo sapiens
  misc_RNA (1)...(19): siRNA sense strand
ugagaaagcgagagcguga

SEQ ID NO: 2532904 - RNA, 19 nt, Homo sapiens
  misc_RNA (1)...(19): siRNA sense strand
caauaagaaaccugaaaca

SEQ ID NO: 2532905 - RNA, 19 nt, Homo sapiens
  misc_RNA (1)...(19): siRNA sense strand
ccaaggagagggugggaga

SEQ ID NO: 2532906 - RNA, 19 nt, Homo sapiens
  misc_RNA (1)...(19): siRNA sense strand
aguaugagcuggaagccaa

SEQ ID NO: 2532907 - RNA, 19 nt, Homo sapiens
  misc_RNA (1)...(19): siRNA sense strand
aauaagaagccuuggacuu

SEQ ID NO: 2532908 - RNA, 19 nt, Homo sapiens
  misc_RNA (1)...(19): siRNA sense strand
ggaacuggaagaagagaga

SEQ ID NO: 2532909 - RNA, 19 nt, Homo sapiens
  misc_RNA (1)...(19): siRNA sense strand
ucgcagaaaugcaaagaca

SEQ ID NO: 2532910 - RNA, 19 nt, Homo sapiens
  misc_RNA (1)...(19): siRNA sense strand
cagaagaaggcaucaacaa

SEQ ID NO: 2532911 - RNA, 19 nt, Homo sapiens
  misc_RNA (1)...(19): siRNA sense strand
aagaagagagagagaggau

SEQ ID NO: 2532912 - RNA, 19 nt, Homo sapiens
  misc_RNA (1)...(19): siRNA sense strand
caaagacaguugaaggaga

SEQ ID NO: 2532913 - RNA, 19 nt, Homo sapiens
  misc_RNA (1)...(19): siRNA sense strand
aacuggaagaagagagaaa

SEQ ID NO: 2532914 - RNA, 19 nt, Homo sapiens
  misc_RNA (1)...(19): siRNA sense strand
auuaaagaagagagagaga

SEQ ID NO: 2532915 - RNA, 19 nt, Homo sapiens
  misc_RNA (1)...(19): siRNA sense strand
ugaagaacgagauggagaa

SEQ ID NO: 2532916 - RNA, 19 nt, Homo sapiens
  misc_RNA (1)...(19): siRNA sense strand
agaaggaagcacugauaau

SEQ ID NO: 2532917 - RNA, 19 nt, Homo sapiens
  misc_RNA (1)...(19): siRNA sense strand
aggaagaguuacgggacua

SEQ ID NO: 2532918 - RNA, 19 nt, Homo sapiens
  misc_RNA (1)...(19): siRNA sense strand
gagcaaaccuagaagagcu

SEQ ID NO: 2532919 - RNA, 19 nt, Homo sapiens
  misc_RNA (1)...(19): siRNA sense strand
gggaagaagcgaagagcug

SEQ ID NO: 2532920 - RNA, 19 nt, Homo sapiens
  misc_RNA (1)...(19): siRNA sense strand
ggaugaguauaaggagaaa

SEQ ID NO: 2532921 - RNA, 19 nt, Homo sapiens
  misc_RNA (1)...(19): siRNA sense strand
uggacaagcugaaggagca

SEQ ID NO: 2532922 - RNA, 19 nt, Homo sapiens
  misc_RNA (1)...(19): siRNA sense strand
cuggaugaguauaaggaga

SEQ ID NO: 2532923 - RNA, 19 nt, Homo sapiens
  misc_RNA (1)...(19): siRNA sense strand
uggaugaguauaaggagaa

SEQ ID NO: 2532924 - RNA, 19 nt, Homo sapiens
  misc_RNA (1)...(19): siRNA sense strand
ucaggagcgccgugggaaa

SEQ ID NO: 2532925 - RNA, 19 nt, Homo sapiens
  misc_RNA (1)...(19): siRNA sense strand
ccaugaaaaugcaggauga

SEQ ID NO: 2532926 - RNA, 19 nt, Homo sapiens
  misc_RNA (1)...(19): siRNA sense strand
ggaaaguucuggaaaccga

SEQ ID NO: 2532927 - RNA, 19 nt, Homo sapiens
  misc_RNA (1)...(19): siRNA sense strand
gagaaaauccagaccuuaa

SEQ ID NO: 2532928 - RNA, 19 nt, Homo sapiens
  misc_RNA (1)...(19): siRNA sense strand
cagcaaugguucugugcca

SEQ ID NO: 2532929 - RNA, 19 nt, Homo sapiens
  misc_RNA (1)...(19): siRNA sense strand
gguugaagaacgagaugga

SEQ ID NO: 2532930 - RNA, 19 nt, Homo sapiens
  misc_RNA (1)...(19): siRNA sense strand
gagaaacugcagaaggaga

SEQ ID NO: 2532931 - RNA, 19 nt, Homo sapiens
  misc_RNA (1)...(19): siRNA sense strand
cugaagaagcugccgagua

SEQ ID NO: 2532932 - RNA, 19 nt, Homo sapiens
  misc_RNA (1)...(19): siRNA sense strand
ucugagaguaauuggcuaa

SEQ ID NO: 2532933 - RNA, 19 nt, Homo sapiens
  misc_RNA (1)...(19): siRNA sense strand
gcgugaagcuucugcagga

SEQ ID NO: 2532934 - RNA, 19 nt, Homo sapiens
  misc_RNA (1)...(19): siRNA sense strand
gcagaaaugcaaagacagu

SEQ ID NO: 2532935 - RNA, 19 nt, Homo sapiens
  misc_RNA (1)...(19): siRNA sense strand
agagggagcuggaggagca

SEQ ID NO: 2532936 - RNA, 19 nt, Homo sapiens
  misc_RNA (1)...(19): siRNA sense strand
ccauagaaguggcugaacu

SEQ ID NO: 2532937 - RNA, 19 nt, Homo sapiens
  misc_RNA (1)...(19): siRNA sense strand
gagaaauacgacaguuaga

SEQ ID NO: 2532938 - RNA, 19 nt, Homo sapiens
  misc_RNA (1)...(19): siRNA sense strand
agaaaacgcuggaggcaga

SEQ ID NO: 2532939 - RNA, 19 nt, Homo sapiens
  misc_RNA (1)...(19): siRNA sense strand
gaagccaaggcgaaggaaa

SEQ ID NO: 2532940 - RNA, 19 nt, Homo sapiens
  misc_RNA (1)...(19): siRNA sense strand
cagcuaagaagguugaaga

SEQ ID NO: 2532941 - RNA, 19 nt, Homo sapiens
  misc_RNA (1)...(19): siRNA sense strand
cugaaaagaaugaguugaa

SEQ ID NO: 2532942 - RNA, 19 nt, Homo sapiens
  misc_RNA (1)...(19): siRNA sense strand
aagaaguacgagggagaaa

SEQ ID NO: 2532943 - RNA, 19 nt, Homo sapiens
  misc_RNA (1)...(19): siRNA sense strand
ucugauggaggaagaguua

SEQ ID NO: 2532944 - RNA, 19 nt, Homo sapiens
  misc_RNA (1)...(19): siRNA sense strand
cuggaagaagagagaaaca

SEQ ID NO: 2532945 - RNA, 19 nt, Homo sapiens
  misc_RNA (1)...(19): siRNA sense strand
gcaaugguucugugccaaa

SEQ ID NO: 2532946 - RNA, 19 nt, Homo sapiens
  misc_RNA (1)...(19): siRNA sense strand
uugagaaacugcagaagga

SEQ ID NO: 2532947 - RNA, 19 nt, Homo sapiens
  misc_RNA (1)...(19): siRNA sense strand
guguaaacguucagagcug

SEQ ID NO: 2532948 - RNA, 19 nt, Homo sapiens
  misc_RNA (1)...(19): siRNA sense strand
cagaaaugcacgaugaacu

SEQ ID NO: 2532949 - RNA, 19 nt, Homo sapiens
  misc_RNA (1)...(19): siRNA sense strand
cagaagggcccuggagaau

SEQ ID NO: 2532950 - RNA, 19 nt, Homo sapiens
  misc_RNA (1)...(19): siRNA sense strand
ggacuuaaagagccggauu

SEQ ID NO: 2532951 - RNA, 19 nt, Homo sapiens
  misc_RNA (1)...(19): siRNA sense strand
gacuuaaagagccggauua

SEQ ID NO: 2532952 - RNA, 19 nt, Homo sapiens
  misc_RNA (1)...(19): siRNA sense strand
cuaagaugagcgugggaca

SEQ ID NO: 2532953 - RNA, 19 nt, Homo sapiens
  misc_RNA (1)...(19): siRNA sense strand
gcaagaagcuccuagacuc

SEQ ID NO: 2532954 - RNA, 19 nt, Homo sapiens
  misc_RNA (1)...(19): siRNA sense strand
gaugagacgaagaggcaga

SEQ ID NO: 2532955 - RNA, 19 nt, Homo sapiens
  misc_RNA (1)...(19): siRNA sense strand
gggcauaccuggauggguc

SEQ ID NO: 2532956 - RNA, 19 nt, Homo sapiens
  misc_RNA (1)...(19): siRNA sense strand
uacacaaggucaaggccaa

SEQ ID NO: 2532957 - RNA, 19 nt, Homo sapiens
  misc_RNA (1)...(19): siRNA sense strand
aagcugugaacguggacaa

SEQ ID NO: 2532958 - RNA, 19 nt, Homo sapiens
  misc_RNA (1)...(19): siRNA sense strand
uggacaaggucgucggaac

SEQ ID NO: 2532959 - RNA, 19 nt, Homo sapiens
  misc_RNA (1)...(19): siRNA sense strand
ggggagaugccaagacaga

SEQ ID NO: 2532960 - RNA, 19 nt, Homo sapiens
  misc_RNA (1)...(19): siRNA sense strand
gggcagaacaaaagcaaau

SEQ ID NO: 2532961 - RNA, 19 nt, Homo sapiens
  misc_RNA (1)...(19): siRNA sense strand
caaccaagagcgaggagca

SEQ ID NO: 2532962 - RNA, 19 nt, Homo sapiens
  misc_RNA (1)...(19): siRNA sense strand
ggcagcagggagagagcaa

SEQ ID NO: 2532963 - RNA, 19 nt, Homo sapiens
  misc_RNA (1)...(19): siRNA sense strand
gcaugugggcagaacaaaa

SEQ ID NO: 2532964 - RNA, 19 nt, Homo sapiens
  misc_RNA (1)...(19): siRNA sense strand
aagcaaauggaauuggaga

SEQ ID NO: 2532965 - RNA, 19 nt, Homo sapiens
  misc_RNA (1)...(19): siRNA sense strand
ugagcaggcagcagggaga

SEQ ID NO: 2532966 - RNA, 19 nt, Homo sapiens
  misc_RNA (1)...(19): siRNA sense strand
ugacagaggugaucgccua

SEQ ID NO: 2532967 - RNA, 19 nt, Homo sapiens
  misc_RNA (1)...(19): siRNA sense strand
ccuagugagaagcuggaaa

SEQ ID NO: 2532968 - RNA, 19 nt, Homo sapiens
  misc_RNA (1)...(19): siRNA sense strand
cugugggccucuugggcaa

SEQ ID NO: 2532969 - RNA, 19 nt, Homo sapiens
  misc_RNA (1)...(19): siRNA sense strand
gcuuguacagcgagaucuu

SEQ ID NO: 2532970 - RNA, 19 nt, Homo sapiens
  misc_RNA (1)...(19): siRNA sense strand
ugacagaggugaucgccua

SEQ ID NO: 2532971 - RNA, 19 nt, Homo sapiens
  misc_RNA (1)...(19): siRNA sense strand
ccuagugagaagcuggaaa

SEQ ID NO: 2532972 - RNA, 19 nt, Homo sapiens
  misc_RNA (1)...(19): siRNA sense strand
cugugggccucuugggcaa

SEQ ID NO: 2532973 - RNA, 19 nt, Homo sapiens
  misc_RNA (1)...(19): siRNA sense strand
gcuuguacagcgagaucuu

SEQ ID NO: 2532974 - RNA, 19 nt, Homo sapiens
  misc_RNA (1)...(19): siRNA sense strand
ccaagaagaccucggccaa

SEQ ID NO: 2532975 - RNA, 19 nt, Homo sapiens
  misc_RNA (1)...(19): siRNA sense strand
cuaagaaggugcagcagga

SEQ ID NO: 2532976 - RNA, 19 nt, Homo sapiens
  misc_RNA (1)...(19): siRNA sense strand
ggacuaagaaggugcagca

SEQ ID NO: 2532977 - RNA, 19 nt, Homo sapiens
  misc_RNA (1)...(19): siRNA sense strand
cugaaacagcugaaggaca

SEQ ID NO: 2532978 - RNA, 19 nt, Homo sapiens
  misc_RNA (1)...(19): siRNA sense strand
ccagcgugccauagagaau

SEQ ID NO: 2532979 - RNA, 19 nt, Homo sapiens
  misc_RNA (1)...(19): siRNA sense strand
ccauagagaaugagcuacu

SEQ ID NO: 2532980 - RNA, 19 nt, Homo sapiens
  misc_RNA (1)...(19): siRNA sense strand
aggauaaacagcagcuaga

SEQ ID NO: 2532981 - RNA, 19 nt, Homo sapiens
  misc_RNA (1)...(19): siRNA sense strand
agaccaaagaagcuggcaa

SEQ ID NO: 2532982 - RNA, 19 nt, Homo sapiens
  misc_RNA (1)...(19): siRNA sense strand
ugccauagagaaugagcua

SEQ ID NO: 2532983 - RNA, 19 nt, Homo sapiens
  misc_RNA (1)...(19): siRNA sense strand
uggagaagaucgaaccuga

SEQ ID NO: 2532984 - RNA, 19 nt, Homo sapiens
  misc_RNA (1)...(19): siRNA sense strand
gcucaagagaaggaaagaa

SEQ ID NO: 2532985 - RNA, 19 nt, Homo sapiens
  misc_RNA (1)...(19): siRNA sense strand
gaguaagaccaaagaagcu

SEQ ID NO: 2532986 - RNA, 19 nt, Homo sapiens
  misc_RNA (1)...(19): siRNA sense strand
aaccaaagccaucgagcau

SEQ ID NO: 2532987 - RNA, 19 nt, Homo sapiens
  misc_RNA (1)...(19): siRNA sense strand
aggaaaugguacaggcccu

SEQ ID NO: 2532988 - RNA, 19 nt, Homo sapiens
  misc_RNA (1)...(19): siRNA sense strand
ugaaacagcugaaggacag

SEQ ID NO: 2532989 - RNA, 19 nt, Homo sapiens
  misc_RNA (1)...(19): siRNA sense strand
ccaugugauccgacgaaca

SEQ ID NO: 2532990 - RNA, 19 nt, Homo sapiens
  misc_RNA (1)...(19): siRNA sense strand
ugcuaaagccccagagaga

SEQ ID NO: 2532991 - RNA, 19 nt, Homo sapiens
  misc_RNA (1)...(19): siRNA sense strand
gaaccaaagccaucgagca

SEQ ID NO: 2532992 - RNA, 19 nt, Homo sapiens
  misc_RNA (1)...(19): siRNA sense strand
ggaccaagaccgaaggcug

SEQ ID NO: 2532993 - RNA, 19 nt, Homo sapiens
  misc_RNA (1)...(19): siRNA sense strand
cggaagaaguucaggagga

SEQ ID NO: 2532994 - RNA, 19 nt, Homo sapiens
  misc_RNA (1)...(19): siRNA sense strand
cggaaugaggacagcaaua

SEQ ID NO: 2532995 - RNA, 19 nt, Homo sapiens
  misc_RNA (1)...(19): siRNA sense strand
cugcagaagucaaggcaca

SEQ ID NO: 2532996 - RNA, 19 nt, Homo sapiens
  misc_RNA (1)...(19): siRNA sense strand
cuuacaagaagcagaacaa

SEQ ID NO: 2532997 - RNA, 19 nt, Homo sapiens
  misc_RNA (1)...(19): siRNA sense strand
ugacaauuucaaagaggua

SEQ ID NO: 2532998 - RNA, 19 nt, Homo sapiens
  misc_RNA (1)...(19): siRNA sense strand
agguaaagcugcugcggca

SEQ ID NO: 2532999 - RNA, 19 nt, Homo sapiens
  misc_RNA (1)...(19): siRNA sense strand
gcaagaagcaggaggaggu

SEQ ID NO: 2533000 - RNA, 19 nt, Homo sapiens
  misc_RNA (1)...(19): siRNA sense strand
aguaugacaaugagaagaa

SEQ ID NO: 2533001 - RNA, 19 nt, Homo sapiens
  misc_RNA (1)...(19): siRNA sense strand
ucacagaagcugaagcaga

SEQ ID NO: 2533002 - RNA, 19 nt, Homo sapiens
  misc_RNA (1)...(19): siRNA sense strand
gaggagaucugcagggcca

SEQ ID NO: 2533003 - RNA, 19 nt, Homo sapiens
  misc_RNA (1)...(19): siRNA sense strand
cagcagugucccuggagaa

SEQ ID NO: 2533004 - RNA, 19 nt, Homo sapiens
  misc_RNA (1)...(19): siRNA sense strand
agaagcagaacaagagaau

SEQ ID NO: 2533005 - RNA, 19 nt, Homo sapiens
  misc_RNA (1)...(19): siRNA sense strand
aggugcagauucaggcaua

SEQ ID NO: 2533006 - RNA, 19 nt, Homo sapiens
  misc_RNA (1)...(19): siRNA sense strand
uggaggaguuggaggagca

SEQ ID NO: 2533007 - RNA, 19 nt, Homo sapiens
  misc_RNA (1)...(19): siRNA sense strand
cuagagagcaucaaggaga

SEQ ID NO: 2533008 - RNA, 19 nt, Homo sapiens
  misc_RNA (1)...(19): siRNA sense strand
gcaaggagcugcaccgcuu

SEQ ID NO: 2533009 - RNA, 19 nt, Homo sapiens
  misc_RNA (1)...(19): siRNA sense strand
caaccaaaguacuaaggga

SEQ ID NO: 2533010 - RNA, 19 nt, Homo sapiens
  misc_RNA (1)...(19): siRNA sense strand
uggaggaugcugagaccaa

SEQ ID NO: 2533011 - RNA, 19 nt, Homo sapiens
  misc_RNA (1)...(19): siRNA sense strand
ggacagcacugaaacccaa

SEQ ID NO: 2533012 - RNA, 19 nt, Homo sapiens
  misc_RNA (1)...(19): siRNA sense strand
agaauguagcccuggagaa

SEQ ID NO: 2533013 - RNA, 19 nt, Homo sapiens
  misc_RNA (1)...(19): siRNA sense strand
augagaagaucuuggagga

SEQ ID NO: 2533014 - RNA, 19 nt, Homo sapiens
  misc_RNA (1)...(19): siRNA sense strand
caguaccaaugaaggcaaa

SEQ ID NO: 2533015 - RNA, 19 nt, Homo sapiens
  misc_RNA (1)...(19): siRNA sense strand
cgguggaggacaugaacuu

SEQ ID NO: 2533016 - RNA, 19 nt, Homo sapiens
  misc_RNA (1)...(19): siRNA sense strand
aaaacaagacagcgcaaaa

SEQ ID NO: 2533017 - RNA, 19 nt, Homo sapiens
  misc_RNA (1)...(19): siRNA sense strand
ccacacuuacauucagaaa

SEQ ID NO: 2533018 - RNA, 19 nt, Homo sapiens
  misc_RNA (1)...(19): siRNA sense strand
ucauuaaagagaaggagga

SEQ ID NO: 2533019 - RNA, 19 nt, Homo sapiens
  misc_RNA (1)...(19): siRNA sense strand
uagacaagcuccagcggga

SEQ ID NO: 2533020 - RNA, 19 nt, Homo sapiens
  misc_RNA (1)...(19): siRNA sense strand
guacuaagggagcuggaga

SEQ ID NO: 2533021 - RNA, 19 nt, Homo sapiens
  misc_RNA (1)...(19): siRNA sense strand
agagcaucaaggagacaua

SEQ ID NO: 2533022 - RNA, 19 nt, Homo sapiens
  misc_RNA (1)...(19): siRNA sense strand
agacacuaccuguggacuu

SEQ ID NO: 2533023 - RNA, 19 nt, Homo sapiens
  misc_RNA (1)...(19): siRNA sense strand
gcaagaugccgaugccuga

SEQ ID NO: 2533024 - RNA, 19 nt, Homo sapiens
  misc_RNA (1)...(19): siRNA sense strand
agccauucgaauuaagaaa

SEQ ID NO: 2533025 - RNA, 19 nt, Homo sapiens
  misc_RNA (1)...(19): siRNA sense strand
acacagagagcgagaagcu

SEQ ID NO: 2533026 - RNA, 19 nt, Homo sapiens
  misc_RNA (1)...(19): siRNA sense strand
uucagaaacuccagagcuu

SEQ ID NO: 2533027 - RNA, 19 nt, Homo sapiens
  misc_RNA (1)...(19): siRNA sense strand
aagucaaggcacacagaga

SEQ ID NO: 2533028 - RNA, 19 nt, Homo sapiens
  misc_RNA (1)...(19): siRNA sense strand
gagacauaugagaacacaa

SEQ ID NO: 2533029 - RNA, 19 nt, Homo sapiens
  misc_RNA (1)...(19): siRNA sense strand
gcgaacuugaugaugagaa

SEQ ID NO: 2533030 - RNA, 19 nt, Homo sapiens
  misc_RNA (1)...(19): siRNA sense strand
ggaauuucugaaugaugaa

SEQ ID NO: 2533031 - RNA, 19 nt, Homo sapiens
  misc_RNA (1)...(19): siRNA sense strand
cucaauaacaagaauccaa

SEQ ID NO: 2533032 - RNA, 19 nt, Homo sapiens
  misc_RNA (1)...(19): siRNA sense strand
ggagaaggaacuagagagc

SEQ ID NO: 2533033 - RNA, 19 nt, Homo sapiens
  misc_RNA (1)...(19): siRNA sense strand
ucagcaagguggaacgguu

SEQ ID NO: 2533034 - RNA, 19 nt, Homo sapiens
  misc_RNA (1)...(19): siRNA sense strand
aggcacacagagagcgaga

SEQ ID NO: 2533035 - RNA, 19 nt, Homo sapiens
  misc_RNA (1)...(19): siRNA sense strand
uacaagaagcagaacaaga

SEQ ID NO: 2533036 - RNA, 19 nt, Homo sapiens
  misc_RNA (1)...(19): siRNA sense strand
cugucagccauucgaauua

SEQ ID NO: 2533037 - RNA, 19 nt, Homo sapiens
  misc_RNA (1)...(19): siRNA sense strand
gcacugaaacccaaccaga

SEQ ID NO: 2533038 - RNA, 19 nt, Homo sapiens
  misc_RNA (1)...(19): siRNA sense strand
cggcugaggaggccuacaa

SEQ ID NO: 2533039 - RNA, 19 nt, Homo sapiens
  misc_RNA (1)...(19): siRNA sense strand
cggaagaaguucaggagga

SEQ ID NO: 2533040 - RNA, 19 nt, Homo sapiens
  misc_RNA (1)...(19): siRNA sense strand
cggaaugaggacagcaaua

SEQ ID NO: 2533041 - RNA, 19 nt, Homo sapiens
  misc_RNA (1)...(19): siRNA sense strand
cugcagaagucaaggcaca

SEQ ID NO: 2533042 - RNA, 19 nt, Homo sapiens
  misc_RNA (1)...(19): siRNA sense strand
cuuacaagaagcagaacaa

SEQ ID NO: 2533043 - RNA, 19 nt, Homo sapiens
  misc_RNA (1)...(19): siRNA sense strand
ugacaauuucaaagaggua

SEQ ID NO: 2533044 - RNA, 19 nt, Homo sapiens
  misc_RNA (1)...(19): siRNA sense strand
agguaaagcugcugcggca

SEQ ID NO: 2533045 - RNA, 19 nt, Homo sapiens
  misc_RNA (1)...(19): siRNA sense strand
gcaagaagcaggaggaggu

SEQ ID NO: 2533046 - RNA, 19 nt, Homo sapiens
  misc_RNA (1)...(19): siRNA sense strand
aguaugacaaugagaagaa

SEQ ID NO: 2533047 - RNA, 19 nt, Homo sapiens
  misc_RNA (1)...(19): siRNA sense strand
ucacagaagcugaagcaga

SEQ ID NO: 2533048 - RNA, 19 nt, Homo sapiens
  misc_RNA (1)...(19): siRNA sense strand
gaggagaucugcagggcca

SEQ ID NO: 2533049 - RNA, 19 nt, Homo sapiens
  misc_RNA (1)...(19): siRNA sense strand
cagcagugucccuggagaa

SEQ ID NO: 2533050 - RNA, 19 nt, Homo sapiens
  misc_RNA (1)...(19): siRNA sense strand
agaagcagaacaagagaau

SEQ ID NO: 2533051 - RNA, 19 nt, Homo sapiens
  misc_RNA (1)...(19): siRNA sense strand
aggugcagauucaggcaua

SEQ ID NO: 2533052 - RNA, 19 nt, Homo sapiens
  misc_RNA (1)...(19): siRNA sense strand
uggaggaguuggaggagca

SEQ ID NO: 2533053 - RNA, 19 nt, Homo sapiens
  misc_RNA (1)...(19): siRNA sense strand
cuagagagcaucaaggaga

SEQ ID NO: 2533054 - RNA, 19 nt, Homo sapiens
  misc_RNA (1)...(19): siRNA sense strand
gcaaggagcugcaccgcuu

SEQ ID NO: 2533055 - RNA, 19 nt, Homo sapiens
  misc_RNA (1)...(19): siRNA sense strand
caaccaaaguacuaaggga

SEQ ID NO: 2533056 - RNA, 19 nt, Homo sapiens
  misc_RNA (1)...(19): siRNA sense strand
uggaggaugcugagaccaa

SEQ ID NO: 2533057 - RNA, 19 nt, Homo sapiens
  misc_RNA (1)...(19): siRNA sense strand
ggacagcacugaaacccaa

SEQ ID NO: 2533058 - RNA, 19 nt, Homo sapiens
  misc_RNA (1)...(19): siRNA sense strand
agaauguagcccuggagaa

SEQ ID NO: 2533059 - RNA, 19 nt, Homo sapiens
  misc_RNA (1)...(19): siRNA sense strand
augagaagaucuuggagga

SEQ ID NO: 2533060 - RNA, 19 nt, Homo sapiens
  misc_RNA (1)...(19): siRNA sense strand
caguaccaaugaaggcaaa

SEQ ID NO: 2533061 - RNA, 19 nt, Homo sapiens
  misc_RNA (1)...(19): siRNA sense strand
cgguggaggacaugaacuu

SEQ ID NO: 2533062 - RNA, 19 nt, Homo sapiens
  misc_RNA (1)...(19): siRNA sense strand
aaaacaagacagcgcaaaa

SEQ ID NO: 2533063 - RNA, 19 nt, Homo sapiens
  misc_RNA (1)...(19): siRNA sense strand
ccacacuuacauucagaaa

SEQ ID NO: 2533064 - RNA, 19 nt, Homo sapiens
  misc_RNA (1)...(19): siRNA sense strand
ucauuaaagagaaggagga

SEQ ID NO: 2533065 - RNA, 19 nt, Homo sapiens
  misc_RNA (1)...(19): siRNA sense strand
uagacaagcuccagcggga

SEQ ID NO: 2533066 - RNA, 19 nt, Homo sapiens
  misc_RNA (1)...(19): siRNA sense strand
guacuaagggagcuggaga

SEQ ID NO: 2533067 - RNA, 19 nt, Homo sapiens
  misc_RNA (1)...(19): siRNA sense strand
agagcaucaaggagacaua

SEQ ID NO: 2533068 - RNA, 19 nt, Homo sapiens
  misc_RNA (1)...(19): siRNA sense strand
agacacuaccuguggacuu

SEQ ID NO: 2533069 - RNA, 19 nt, Homo sapiens
  misc_RNA (1)...(19): siRNA sense strand
gcaagaugccgaugccuga

SEQ ID NO: 2533070 - RNA, 19 nt, Homo sapiens
  misc_RNA (1)...(19): siRNA sense strand
agccauucgaauuaagaaa

SEQ ID NO: 2533071 - RNA, 19 nt, Homo sapiens
  misc_RNA (1)...(19): siRNA sense strand
acacagagagcgagaagcu

SEQ ID NO: 2533072 - RNA, 19 nt, Homo sapiens
  misc_RNA (1)...(19): siRNA sense strand
uucagaaacuccagagcuu

SEQ ID NO: 2533073 - RNA, 19 nt, Homo sapiens
  misc_RNA (1)...(19): siRNA sense strand
aagucaaggcacacagaga

SEQ ID NO: 2533074 - RNA, 19 nt, Homo sapiens
  misc_RNA (1)...(19): siRNA sense strand
gagacauaugagaacacaa

SEQ ID NO: 2533075 - RNA, 19 nt, Homo sapiens
  misc_RNA (1)...(19): siRNA sense strand
gcgaacuugaugaugagaa

SEQ ID NO: 2533076 - RNA, 19 nt, Homo sapiens
  misc_RNA (1)...(19): siRNA sense strand
ggaauuucugaaugaugaa

SEQ ID NO: 2533077 - RNA, 19 nt, Homo sapiens
  misc_RNA (1)...(19): siRNA sense strand
cucaauaacaagaauccaa

SEQ ID NO: 2533078 - RNA, 19 nt, Homo sapiens
  misc_RNA (1)...(19): siRNA sense strand
ggagaaggaacuagagagc

SEQ ID NO: 2533079 - RNA, 19 nt, Homo sapiens
  misc_RNA (1)...(19): siRNA sense strand
ucagcaagguggaacgguu

SEQ ID NO: 2533080 - RNA, 19 nt, Homo sapiens
  misc_RNA (1)...(19): siRNA sense strand
aggcacacagagagcgaga

SEQ ID NO: 2533081 - RNA, 19 nt, Homo sapiens
  misc_RNA (1)...(19): siRNA sense strand
uacaagaagcagaacaaga

SEQ ID NO: 2533082 - RNA, 19 nt, Homo sapiens
  misc_RNA (1)...(19): siRNA sense strand
cugucagccauucgaauua

SEQ ID NO: 2533083 - RNA, 19 nt, Homo sapiens
  misc_RNA (1)...(19): siRNA sense strand
gcacugaaacccaaccaga

SEQ ID NO: 2533084 - RNA, 19 nt, Homo sapiens
  misc_RNA (1)...(19): siRNA sense strand
cggcugaggaggccuacaa

SEQ ID NO: 2533085 - RNA, 19 nt, Homo sapiens
  misc_RNA (1)...(19): siRNA sense strand
uggcagaguuauuggaaaa

SEQ ID NO: 2533086 - RNA, 19 nt, Homo sapiens
  misc_RNA (1)...(19): siRNA sense strand
ugguaaagaaggaagaaau

SEQ ID NO: 2533087 - RNA, 19 nt, Homo sapiens
  misc_RNA (1)...(19): siRNA sense strand
aaauagaacugcacgggaa

SEQ ID NO: 2533088 - RNA, 19 nt, Homo sapiens
  misc_RNA (1)...(19): siRNA sense strand
cuaaagaagaggugaaacu

SEQ ID NO: 2533089 - RNA, 19 nt, Homo sapiens
  misc_RNA (1)...(19): siRNA sense strand
gguggagagcugugagcaa

SEQ ID NO: 2533090 - RNA, 19 nt, Homo sapiens
  misc_RNA (1)...(19): siRNA sense strand
ccauagaaguugagcacuc

SEQ ID NO: 2533091 - RNA, 19 nt, Homo sapiens
  misc_RNA (1)...(19): siRNA sense strand
gugccaaagcugaggagga

SEQ ID NO: 2533092 - RNA, 19 nt, Homo sapiens
  misc_RNA (1)...(19): siRNA sense strand
gcuaaagugaggaugguga

SEQ ID NO: 2533093 - RNA, 19 nt, Homo sapiens
  misc_RNA (1)...(19): siRNA sense strand
ggugaaacuugaagcucau

SEQ ID NO: 2533094 - RNA, 19 nt, Homo sapiens
  misc_RNA (1)...(19): siRNA sense strand
aggugaaacuugaagcuca

SEQ ID NO: 2533095 - RNA, 19 nt, Homo sapiens
  misc_RNA (1)...(19): siRNA sense strand
guccuaaagaagaggugaa

SEQ ID NO: 2533096 - RNA, 19 nt, Homo sapiens
  misc_RNA (1)...(19): siRNA sense strand
caguuugagcaaucagaaa

SEQ ID NO: 2533097 - RNA, 19 nt, Homo sapiens
  misc_RNA (1)...(19): siRNA sense strand
aggcaaaggauucggaaac

SEQ ID NO: 2533098 - RNA, 19 nt, Homo sapiens
  misc_RNA (1)...(19): siRNA sense strand
aagugaggauggugauuau

SEQ ID NO: 2533099 - RNA, 19 nt, Homo sapiens
  misc_RNA (1)...(19): siRNA sense strand
caguaaggaccaagcuaga

SEQ ID NO: 2533100 - RNA, 19 nt, Homo sapiens
  misc_RNA (1)...(19): siRNA sense strand
agguaaagcagcaccaaca

SEQ ID NO: 2533101 - RNA, 19 nt, Homo sapiens
  misc_RNA (1)...(19): siRNA sense strand
cuauuacaguuaaaggcaa

SEQ ID NO: 2533102 - RNA, 19 nt, Homo sapiens
  misc_RNA (1)...(19): siRNA sense strand
cuggcagaguuauuggaaa

SEQ ID NO: 2533103 - RNA, 19 nt, Homo sapiens
  misc_RNA (1)...(19): siRNA sense strand
aauagaacugcacgggaaa

SEQ ID NO: 2533104 - RNA, 19 nt, Homo sapiens
  misc_RNA (1)...(19): siRNA sense strand
ccuauaucccugaugaaau

SEQ ID NO: 2533105 - RNA, 19 nt, Homo sapiens
  misc_RNA (1)...(19): siRNA sense strand
acgcacuauuacaguuaaa

SEQ ID NO: 2533106 - RNA, 19 nt, Homo sapiens
  misc_RNA (1)...(19): siRNA sense strand
uggacgucuuauugguaaa

SEQ ID NO: 2533107 - RNA, 19 nt, Homo sapiens
  misc_RNA (1)...(19): siRNA sense strand
gccagguugcccagagaaa

SEQ ID NO: 2533108 - RNA, 19 nt, Homo sapiens
  misc_RNA (1)...(19): siRNA sense strand
uguugagacaugugccaaa

SEQ ID NO: 2533109 - RNA, 19 nt, Homo sapiens
  misc_RNA (1)...(19): siRNA sense strand
aagcugaggaggagaucau

SEQ ID NO: 2533110 - RNA, 19 nt, Homo sapiens
  misc_RNA (1)...(19): siRNA sense strand
aaucagaaacggagacugu

SEQ ID NO: 2533111 - RNA, 19 nt, Homo sapiens
  misc_RNA (1)...(19): siRNA sense strand
ccaaagcugaggaggagau

SEQ ID NO: 2533112 - RNA, 19 nt, Homo sapiens
  misc_RNA (1)...(19): siRNA sense strand
acaaacuguauaucggaaa

SEQ ID NO: 2533113 - RNA, 19 nt, Homo sapiens
  misc_RNA (1)...(19): siRNA sense strand
aaggcaaaggauucggaaa

SEQ ID NO: 2533114 - RNA, 19 nt, Homo sapiens
  misc_RNA (1)...(19): siRNA sense strand
agcaagacacagacacuaa

SEQ ID NO: 2533115 - RNA, 19 nt, Homo sapiens
  misc_RNA (1)...(19): siRNA sense strand
gauucggaaacuucagaua

SEQ ID NO: 2533116 - RNA, 19 nt, Homo sapiens
  misc_RNA (1)...(19): siRNA sense strand
aggaagcucaagauauaaa

SEQ ID NO: 2533117 - RNA, 19 nt, Homo sapiens
  misc_RNA (1)...(19): siRNA sense strand
gcaccagaugcuaaaguga

SEQ ID NO: 2533118 - RNA, 19 nt, Homo sapiens
  misc_RNA (1)...(19): siRNA sense strand
gugaacacugacucggaaa

SEQ ID NO: 2533119 - RNA, 19 nt, Homo sapiens
  misc_RNA (1)...(19): siRNA sense strand
gcugcugagaagucgauua

SEQ ID NO: 2533120 - RNA, 19 nt, Homo sapiens
  misc_RNA (1)...(19): siRNA sense strand
gagcaaucagaaacggaga

SEQ ID NO: 2533121 - RNA, 19 nt, Homo sapiens
  misc_RNA (1)...(19): siRNA sense strand
aggagaucaugaagaaaau

SEQ ID NO: 2533122 - RNA, 19 nt, Homo sapiens
  misc_RNA (1)...(19): siRNA sense strand
cgaggcgcuuucagguaaa

SEQ ID NO: 2533123 - RNA, 19 nt, Homo sapiens
  misc_RNA (1)...(19): siRNA sense strand
uggauuucaguuagagaau

SEQ ID NO: 2533124 - RNA, 19 nt, Homo sapiens
  misc_RNA (1)...(19): siRNA sense strand
ggaggagaucaugaagaaa

SEQ ID NO: 2533125 - RNA, 19 nt, Homo sapiens
  misc_RNA (1)...(19): siRNA sense strand
ucgcuuugcuggagcuuca

SEQ ID NO: 2533126 - RNA, 19 nt, Homo sapiens
  misc_RNA (1)...(19): siRNA sense strand
gauccguauccaagcagaa

SEQ ID NO: 2533127 - RNA, 19 nt, Homo sapiens
  misc_RNA (1)...(19): siRNA sense strand
gaggcaaaacggugaauga

SEQ ID NO: 2533128 - RNA, 19 nt, Homo sapiens
  misc_RNA (1)...(19): siRNA sense strand
cggaaacuucagauacgaa

SEQ ID NO: 2533129 - RNA, 19 nt, Homo sapiens
  misc_RNA (1)...(19): siRNA sense strand
aaauugagcaagacacaga

SEQ ID NO: 2533130 - RNA, 19 nt, Homo sapiens
  misc_RNA (1)...(19): siRNA sense strand
agaaaaucagggagucuua

SEQ ID NO: 2533131 - RNA, 19 nt, Homo sapiens
  misc_RNA (1)...(19): siRNA sense strand
aguucaaggcucagggaag

SEQ ID NO: 2533132 - RNA, 19 nt, Homo sapiens
  misc_RNA (1)...(19): siRNA sense strand
ccaagcuagacaagcacua

SEQ ID NO: 2533133 - RNA, 19 nt, Homo sapiens
  misc_RNA (1)...(19): siRNA sense strand
caggaauugacgcuguaua

SEQ ID NO: 2533134 - RNA, 19 nt, Homo sapiens
  misc_RNA (1)...(19): siRNA sense strand
gcaagaagaagaagggcua

SEQ ID NO: 2533135 - RNA, 19 nt, Homo sapiens
  misc_RNA (1)...(19): siRNA sense strand
acgagaaagccaaggagaa

SEQ ID NO: 2533136 - RNA, 19 nt, Homo sapiens
  misc_RNA (1)...(19): siRNA sense strand
agggcaaggccgaggagaa

SEQ ID NO: 2533137 - RNA, 19 nt, Homo sapiens
  misc_RNA (1)...(19): siRNA sense strand
aagccaaggagaaagacaa

SEQ ID NO: 2533138 - RNA, 19 nt, Homo sapiens
  misc_RNA (1)...(19): siRNA sense strand
gcuacaaugugaacgacga

SEQ ID NO: 2533139 - RNA, 19 nt, Homo sapiens
  misc_RNA (1)...(19): siRNA sense strand
cagcaaggaggaaggggaa

SEQ ID NO: 2533140 - RNA, 19 nt, Homo sapiens
  misc_RNA (1)...(19): siRNA sense strand
agaaagacaagaaggccga

SEQ ID NO: 2533141 - RNA, 19 nt, Homo sapiens
  misc_RNA (1)...(19): siRNA sense strand
acaaugugaacgacgagaa

SEQ ID NO: 2533142 - RNA, 19 nt, Homo sapiens
  misc_RNA (1)...(19): siRNA sense strand
aggagaagcccgaccagga

SEQ ID NO: 2533143 - RNA, 19 nt, Homo sapiens
  misc_RNA (1)...(19): siRNA sense strand
gcuauaagaaguugcgcaa

SEQ ID NO: 2533144 - RNA, 19 nt, Homo sapiens
  misc_RNA (1)...(19): siRNA sense strand
uggaugaggaugaggacau

SEQ ID NO: 2533145 - RNA, 19 nt, Homo sapiens
  misc_RNA (1)...(19): siRNA sense strand
aggaugaggacaugaccaa

SEQ ID NO: 2533146 - RNA, 19 nt, Homo sapiens
  misc_RNA (1)...(19): siRNA sense strand
cuguguucgugaaggaaaa

SEQ ID NO: 2533147 - RNA, 19 nt, Homo sapiens
  misc_RNA (1)...(19): siRNA sense strand
agacggagcagauucgcaa

SEQ ID NO: 2533148 - RNA, 19 nt, Homo sapiens
  misc_RNA (1)...(19): siRNA sense strand
ccgacuuccugguggccau

SEQ ID NO: 2533149 - RNA, 19 nt, Homo sapiens
  misc_RNA (1)...(19): siRNA sense strand
ucuacguggucgagugcau

SEQ ID NO: 2533150 - RNA, 19 nt, Homo sapiens
  misc_RNA (1)...(19): siRNA sense strand
uugucaagagccaggagaa

SEQ ID NO: 2533151 - RNA, 19 nt, Homo sapiens
  misc_RNA (1)...(19): siRNA sense strand
aaagaaaagaccagagcua

SEQ ID NO: 2533152 - RNA, 19 nt, Homo sapiens
  misc_RNA (1)...(19): siRNA sense strand
ucgaagagugugauggaca

SEQ ID NO: 2533153 - RNA, 19 nt, Homo sapiens
  misc_RNA (1)...(19): siRNA sense strand
cgcagaaggaacuggaaca

SEQ ID NO: 2533154 - RNA, 19 nt, Homo sapiens
  misc_RNA (1)...(19): siRNA sense strand
gaggauacgcagaaggaac

SEQ ID NO: 2533155 - RNA, 19 nt, Homo sapiens
  misc_RNA (1)...(19): siRNA sense strand
cgucacaguuggaggagag

SEQ ID NO: 2533156 - RNA, 19 nt, Homo sapiens
  misc_RNA (1)...(19): siRNA sense strand
ucugaaucaagcaaggaaa

SEQ ID NO: 2533157 - RNA, 19 nt, Homo sapiens
  misc_RNA (1)...(19): siRNA sense strand
gcgggaaauugaagagaau

SEQ ID NO: 2533158 - RNA, 19 nt, Homo sapiens
  misc_RNA (1)...(19): siRNA sense strand
agacagaggccaagaucaa

SEQ ID NO: 2533159 - RNA, 19 nt, Homo sapiens
  misc_RNA (1)...(19): siRNA sense strand
uggacaagguggaggauga

SEQ ID NO: 2533160 - RNA, 19 nt, Homo sapiens
  misc_RNA (1)...(19): siRNA sense strand
ggauggaagaagagaguca

SEQ ID NO: 2533161 - RNA, 19 nt, Homo sapiens
  misc_RNA (1)...(19): siRNA sense strand
gggaaauugaagagaauca

SEQ ID NO: 2533162 - RNA, 19 nt, Homo sapiens
  misc_RNA (1)...(19): siRNA sense strand
agaagaaggagcugggcaa

SEQ ID NO: 2533163 - RNA, 19 nt, Homo sapiens
  misc_RNA (1)...(19): siRNA sense strand
aagcaaaagcugcgggaaa

SEQ ID NO: 2533164 - RNA, 19 nt, Homo sapiens
  misc_RNA (1)...(19): siRNA sense strand
augaaagacuugaaggaga

SEQ ID NO: 2533165 - RNA, 19 nt, Homo sapiens
  misc_RNA (1)...(19): siRNA sense strand
ccucaaagaacaaggagau

SEQ ID NO: 2533166 - RNA, 19 nt, Homo sapiens
  misc_RNA (1)...(19): siRNA sense strand
aggaaauggugaaggcuga

SEQ ID NO: 2533167 - RNA, 19 nt, Homo sapiens
  misc_RNA (1)...(19): siRNA sense strand
cuguguggcuccugggaaa

SEQ ID NO: 2533168 - RNA, 19 nt, Homo sapiens
  misc_RNA (1)...(19): siRNA sense strand
gugaaacggcagaaugaaa

SEQ ID NO: 2533169 - RNA, 19 nt, Homo sapiens
  misc_RNA (1)...(19): siRNA sense strand
agaucaagcaagagaugaa

SEQ ID NO: 2533170 - RNA, 19 nt, Homo sapiens
  misc_RNA (1)...(19): siRNA sense strand
gugaggaauuagagaaguu

SEQ ID NO: 2533171 - RNA, 19 nt, Homo sapiens
  misc_RNA (1)...(19): siRNA sense strand
guuuggaguuugagaauca

SEQ ID NO: 2533172 - RNA, 19 nt, Homo sapiens
  misc_RNA (1)...(19): siRNA sense strand
ggaugauauuagucaggaa

SEQ ID NO: 2533173 - RNA, 19 nt, Homo sapiens
  misc_RNA (1)...(19): siRNA sense strand
acaucaaagccaaggagaa

SEQ ID NO: 2533174 - RNA, 19 nt, Homo sapiens
  misc_RNA (1)...(19): siRNA sense strand
aaguagagacagaggccaa

SEQ ID NO: 2533175 - RNA, 19 nt, Homo sapiens
  misc_RNA (1)...(19): siRNA sense strand
ugacagaggagguggagau

SEQ ID NO: 2533176 - RNA, 19 nt, Homo sapiens
  misc_RNA (1)...(19): siRNA sense strand
acaagaagcguauggacaa

SEQ ID NO: 2533177 - RNA, 19 nt, Homo sapiens
  misc_RNA (1)...(19): siRNA sense strand
ccaagaagucggaagugaa

SEQ ID NO: 2533178 - RNA, 19 nt, Homo sapiens
  misc_RNA (1)...(19): siRNA sense strand
aggaguaugacaagcgaaa

SEQ ID NO: 2533179 - RNA, 19 nt, Homo sapiens
  misc_RNA (1)...(19): siRNA sense strand
cgaaagaaggaaaugguga

SEQ ID NO: 2533180 - RNA, 19 nt, Homo sapiens
  misc_RNA (1)...(19): siRNA sense strand
aguacaagaucaacaacaa

SEQ ID NO: 2533181 - RNA, 19 nt, Homo sapiens
  misc_RNA (1)...(19): siRNA sense strand
aggagaaucaggugaagaa

SEQ ID NO: 2533182 - RNA, 19 nt, Homo sapiens
  misc_RNA (1)...(19): siRNA sense strand
aggcugaggaagagaucaa

SEQ ID NO: 2533183 - RNA, 19 nt, Homo sapiens
  misc_RNA (1)...(19): siRNA sense strand
ugaaagaagaagccagcaa

SEQ ID NO: 2533184 - RNA, 19 nt, Homo sapiens
  misc_RNA (1)...(19): siRNA sense strand
cggaagugaaugacaagaa

SEQ ID NO: 2533185 - RNA, 19 nt, Homo sapiens
  misc_RNA (1)...(19): siRNA sense strand
gaguaugacaagcgaaaga

SEQ ID NO: 2533186 - RNA, 19 nt, Homo sapiens
  misc_RNA (1)...(19): siRNA sense strand
aggccaagaucaagcaaaa

SEQ ID NO: 2533187 - RNA, 19 nt, Homo sapiens
  misc_RNA (1)...(19): siRNA sense strand
aggagaaagaagaggcuga

SEQ ID NO: 2533188 - RNA, 19 nt, Homo sapiens
  misc_RNA (1)...(19): siRNA sense strand
ucagaagcggauugagaaa

SEQ ID NO: 2533189 - RNA, 19 nt, Homo sapiens
  misc_RNA (1)...(19): siRNA sense strand
aagaagaggcugaccggua

SEQ ID NO: 2533190 - RNA, 19 nt, Homo sapiens
  misc_RNA (1)...(19): siRNA sense strand
agcgaaaggcagagauaau

SEQ ID NO: 2533191 - RNA, 19 nt, Homo sapiens
  misc_RNA (1)...(19): siRNA sense strand
caguagacaaguugaaaga

SEQ ID NO: 2533192 - RNA, 19 nt, Homo sapiens
  misc_RNA (1)...(19): siRNA sense strand
ugaaccagguagaggauga

SEQ ID NO: 2533193 - RNA, 19 nt, Homo sapiens
  misc_RNA (1)...(19): siRNA sense strand
ccugaaacugauugagauu

SEQ ID NO: 2533194 - RNA, 19 nt, Homo sapiens
  misc_RNA (1)...(19): siRNA sense strand
acaaguugaaagagaagaa

SEQ ID NO: 2533195 - RNA, 19 nt, Homo sapiens
  misc_RNA (1)...(19): siRNA sense strand
gagagagggaaaugaaaga

SEQ ID NO: 2533196 - RNA, 19 nt, Homo sapiens
  misc_RNA (1)...(19): siRNA sense strand
gagaaggagaucaaggaga

SEQ ID NO: 2533197 - RNA, 19 nt, Homo sapiens
  misc_RNA (1)...(19): siRNA sense strand
cccuagaagagcagaagaa

SEQ ID NO: 2533198 - RNA, 19 nt, Homo sapiens
  misc_RNA (1)...(19): siRNA sense strand
aagagcagaugaaggcaaa

SEQ ID NO: 2533199 - RNA, 19 nt, Homo sapiens
  misc_RNA (1)...(19): siRNA sense strand
aagaagagagucagaguca

SEQ ID NO: 2533200 - RNA, 19 nt, Homo sapiens
  misc_RNA (1)...(19): siRNA sense strand
agaagaagccagcaagaga

SEQ ID NO: 2533201 - RNA, 19 nt, Homo sapiens
  misc_RNA (1)...(19): siRNA sense strand
agguagaggaugagguguu

SEQ ID NO: 2533202 - RNA, 19 nt, Homo sapiens
  misc_RNA (1)...(19): siRNA sense strand
agucggaagugaaugacaa

SEQ ID NO: 2533203 - RNA, 19 nt, Homo sapiens
  misc_RNA (1)...(19): siRNA sense strand
gagaaggacaagaagcgua

SEQ ID NO: 2533204 - RNA, 19 nt, Homo sapiens
  misc_RNA (1)...(19): siRNA sense strand
gagaaucaggugaagaaau

SEQ ID NO: 2533205 - RNA, 19 nt, Homo sapiens
  misc_RNA (1)...(19): siRNA sense strand
cagagauaauggaaagcau

SEQ ID NO: 2533206 - RNA, 19 nt, Homo sapiens
  misc_RNA (1)...(19): siRNA sense strand
gaggaugaacugaaggaga

SEQ ID NO: 2533207 - RNA, 19 nt, Homo sapiens
  misc_RNA (1)...(19): siRNA sense strand
ccagugaccugaaggccaa

SEQ ID NO: 2533208 - RNA, 19 nt, Homo sapiens
  misc_RNA (1)...(19): siRNA sense strand
augagaaagcaguagacaa

SEQ ID NO: 2533209 - RNA, 19 nt, Homo sapiens
  misc_RNA (1)...(19): siRNA sense strand
caaauuacaucaaggagca

SEQ ID NO: 2533210 - RNA, 19 nt, Homo sapiens
  misc_RNA (1)...(19): siRNA sense strand
aggcagagauaauggaaag

SEQ ID NO: 2533211 - RNA, 19 nt, Homo sapiens
  misc_RNA (1)...(19): siRNA sense strand
gggaaaugaaagacuugaa

SEQ ID NO: 2533212 - RNA, 19 nt, Homo sapiens
  misc_RNA (1)...(19): siRNA sense strand
ccaacauugaugagaucua

SEQ ID NO: 2533213 - RNA, 19 nt, Homo sapiens
  misc_RNA (1)...(19): siRNA sense strand
guacaagaucaacaacaaa

SEQ ID NO: 2533214 - RNA, 19 nt, Homo sapiens
  misc_RNA (1)...(19): siRNA sense strand
acucagaauugaaccagaa

SEQ ID NO: 2533215 - RNA, 19 nt, Homo sapiens
  misc_RNA (1)...(19): siRNA sense strand
gcucagaagcacuacaaga

SEQ ID NO: 2533216 - RNA, 19 nt, Homo sapiens
  misc_RNA (1)...(19): siRNA sense strand
uggaaaagcuggaaagugu

SEQ ID NO: 2533217 - RNA, 19 nt, Homo sapiens
  misc_RNA (1)...(19): siRNA sense strand
gacaagaagcguauggaca

SEQ ID NO: 2533218 - RNA, 19 nt, Homo sapiens
  misc_RNA (1)...(19): siRNA sense strand
uggaagaacggaagaaagu

SEQ ID NO: 2533219 - RNA, 19 nt, Homo sapiens
  misc_RNA (1)...(19): siRNA sense strand
acggaagaaaguagagaca

SEQ ID NO: 2533220 - RNA, 19 nt, Homo sapiens
  misc_RNA (1)...(19): siRNA sense strand
acuugaaggagaagaugaa

SEQ ID NO: 2533221 - RNA, 19 nt, Homo sapiens
  misc_RNA (1)...(19): siRNA sense strand
ccguauaagaagaggauga

SEQ ID NO: 2533222 - RNA, 19 nt, Homo sapiens
  misc_RNA (1)...(19): siRNA sense strand
cauugaaagggaagagaaa

SEQ ID NO: 2533223 - RNA, 19 nt, Homo sapiens
  misc_RNA (1)...(19): siRNA sense strand
cggaagaccuggaagccaa

SEQ ID NO: 2533224 - RNA, 19 nt, Homo sapiens
  misc_RNA (1)...(19): siRNA sense strand
ggucaaagagacagagcca

SEQ ID NO: 2533225 - RNA, 19 nt, Homo sapiens
  misc_RNA (1)...(19): siRNA sense strand
ucaaagagacagagccaga

SEQ ID NO: 2533226 - RNA, 19 nt, Homo sapiens
  misc_RNA (1)...(19): siRNA sense strand
ccaaugagaucgugagccu

SEQ ID NO: 2533227 - RNA, 19 nt, Homo sapiens
  misc_RNA (1)...(19): siRNA sense strand
ccgagaagaugguuaggga

SEQ ID NO: 2533228 - RNA, 19 nt, Homo sapiens
  misc_RNA (1)...(19): siRNA sense strand
ccugagauugugagggaga

SEQ ID NO: 2533229 - RNA, 19 nt, Homo sapiens
  misc_RNA (1)...(19): siRNA sense strand
agcaaggacuggaggcaga

SEQ ID NO: 2533230 - RNA, 19 nt, Homo sapiens
  misc_RNA (1)...(19): siRNA sense strand
cugaaugaauugaugacga

SEQ ID NO: 2533231 - RNA, 19 nt, Homo sapiens
  misc_RNA (1)...(19): siRNA sense strand
uugaaagggaagagaaaau

SEQ ID NO: 2533232 - RNA, 19 nt, Homo sapiens
  misc_RNA (1)...(19): siRNA sense strand
agacagagccagaagccga

SEQ ID NO: 2533233 - RNA, 19 nt, Homo sapiens
  misc_RNA (1)...(19): siRNA sense strand
gagcaguaccgcauggaca

SEQ ID NO: 2533234 - RNA, 19 nt, Homo sapiens
  misc_RNA (1)...(19): siRNA sense strand
ccgcauggacagugggaac

SEQ ID NO: 2533235 - RNA, 19 nt, Homo sapiens
  misc_RNA (1)...(19): siRNA sense strand
gcggaaagcgcuggagaca

SEQ ID NO: 2533236 - RNA, 19 nt, Homo sapiens
  misc_RNA (1)...(19): siRNA sense strand
cugcagaggucacugguca

SEQ ID NO: 2533237 - RNA, 19 nt, Homo sapiens
  misc_RNA (1)...(19): siRNA sense strand
acacaaguacugagaugau

SEQ ID NO: 2533238 - RNA, 19 nt, Homo sapiens
  misc_RNA (1)...(19): siRNA sense strand
agacugggucaaagagaca

SEQ ID NO: 2533239 - RNA, 19 nt, Homo sapiens
  misc_RNA (1)...(19): siRNA sense strand
agaauuggaaggagaaaau

SEQ ID NO: 2533240 - RNA, 19 nt, Homo sapiens
  misc_RNA (1)...(19): siRNA sense strand
cugaaugacgucaaagaca

SEQ ID NO: 2533241 - RNA, 19 nt, Homo sapiens
  misc_RNA (1)...(19): siRNA sense strand
caggaucauugaaagggaa

SEQ ID NO: 2533242 - RNA, 19 nt, Homo sapiens
  misc_RNA (1)...(19): siRNA sense strand
gacaagaaagacuggguca

SEQ ID NO: 2533243 - RNA, 19 nt, Homo sapiens
  misc_RNA (1)...(19): siRNA sense strand
ccaccagaauugagggcac

SEQ ID NO: 2533244 - RNA, 19 nt, Homo sapiens
  misc_RNA (1)...(19): siRNA sense strand
gauauaaagaugaagcgca

SEQ ID NO: 2533245 - RNA, 19 nt, Homo sapiens
  misc_RNA (1)...(19): siRNA sense strand
gcaggagagaagcgcggaa

SEQ ID NO: 2533246 - RNA, 19 nt, Homo sapiens
  misc_RNA (1)...(19): siRNA sense strand
augaaguggaagagggugu

SEQ ID NO: 2533247 - RNA, 19 nt, Homo sapiens
  misc_RNA (1)...(19): siRNA sense strand
caagaauuggaaggagaaa

SEQ ID NO: 2533248 - RNA, 19 nt, Homo sapiens
  misc_RNA (1)...(19): siRNA sense strand
acaagaaagacugggucaa

SEQ ID NO: 2533249 - RNA, 19 nt, Homo sapiens
  misc_RNA (1)...(19): siRNA sense strand
ucauugaaagggaagagaa

SEQ ID NO: 2533250 - RNA, 19 nt, Homo sapiens
  misc_RNA (1)...(19): siRNA sense strand
aagaugaagcgcagcugua

SEQ ID NO: 2533251 - RNA, 19 nt, Homo sapiens
  misc_RNA (1)...(19): siRNA sense strand
gagacagacaagaaagacu

SEQ ID NO: 2533252 - RNA, 19 nt, Homo sapiens
  misc_RNA (1)...(19): siRNA sense strand
auauaaagaugaagcgcag

SEQ ID NO: 2533253 - RNA, 19 nt, Homo sapiens
  misc_RNA (1)...(19): siRNA sense strand
ggcagauaccagagagucu

SEQ ID NO: 2533254 - RNA, 19 nt, Homo sapiens
  misc_RNA (1)...(19): siRNA sense strand
cuggaaauuauaaggaagu

SEQ ID NO: 2533255 - RNA, 19 nt, Homo sapiens
  misc_RNA (1)...(19): siRNA sense strand
uggagacagacaagaaaga

SEQ ID NO: 2533256 - RNA, 19 nt, Homo sapiens
  misc_RNA (1)...(19): siRNA sense strand
caguaucgcaggagagaag

SEQ ID NO: 2533257 - RNA, 19 nt, Homo sapiens
  misc_RNA (1)...(19): siRNA sense strand
augacgaagaaguggcuau

SEQ ID NO: 2533258 - RNA, 19 nt, Homo sapiens
  misc_RNA (1)...(19): siRNA sense strand
gacuggaggcagagcauca

SEQ ID NO: 2533259 - RNA, 19 nt, Homo sapiens
  misc_RNA (1)...(19): siRNA sense strand
gugucaccguggaagacua

SEQ ID NO: 2533260 - RNA, 19 nt, Homo sapiens
  misc_RNA (1)...(19): siRNA sense strand
gccucaaggacgucaaaga

SEQ ID NO: 2533261 - RNA, 19 nt, Homo sapiens
  misc_RNA (1)...(19): siRNA sense strand
ccuggaaauuauaaggaag

SEQ ID NO: 2533262 - RNA, 19 nt, Homo sapiens
  misc_RNA (1)...(19): siRNA sense strand
ccuggaagccaaugagauc

SEQ ID NO: 2533263 - RNA, 19 nt, Homo sapiens
  misc_RNA (1)...(19): siRNA sense strand
gaaugaaguggaagagggu

SEQ ID NO: 2533264 - RNA, 19 nt, Homo sapiens
  misc_RNA (1)...(19): siRNA sense strand
gaagaugguuagggaggca

SEQ ID NO: 2533265 - RNA, 19 nt, Homo sapiens
  misc_RNA (1)...(19): siRNA sense strand
ucucugaugagcuggcuaa

SEQ ID NO: 2533266 - RNA, 19 nt, Homo sapiens
  misc_RNA (1)...(19): siRNA sense strand
gcgguuugcuggaggaggu

SEQ ID NO: 2533267 - RNA, 19 nt, Homo sapiens
  misc_RNA (1)...(19): siRNA sense strand
ugaacuggacagaggguca

SEQ ID NO: 2533268 - RNA, 19 nt, Homo sapiens
  misc_RNA (1)...(19): siRNA sense strand
cuuccauucacaaggauua

SEQ ID NO: 2533269 - RNA, 19 nt, Homo sapiens
  misc_RNA (1)...(19): siRNA sense strand
agaggagccauaugagaau

SEQ ID NO: 2533270 - RNA, 19 nt, Homo sapiens
  misc_RNA (1)...(19): siRNA sense strand
ugaacuggacagaggguca

SEQ ID NO: 2533271 - RNA, 19 nt, Homo sapiens
  misc_RNA (1)...(19): siRNA sense strand
cuuccauucacaaggauua

SEQ ID NO: 2533272 - RNA, 19 nt, Homo sapiens
  misc_RNA (1)...(19): siRNA sense strand
agaggagccauaugagaau

SEQ ID NO: 2533273 - RNA, 19 nt, Homo sapiens
  misc_RNA (1)...(19): siRNA sense strand
ugaacuggacagaggguca

SEQ ID NO: 2533274 - RNA, 19 nt, Homo sapiens
  misc_RNA (1)...(19): siRNA sense strand
cuuccauucacaaggauua

SEQ ID NO: 2533275 - RNA, 19 nt, Homo sapiens
  misc_RNA (1)...(19): siRNA sense strand
agaggagccauaugagaau

SEQ ID NO: 2533276 - RNA, 19 nt, Homo sapiens
  misc_RNA (1)...(19): siRNA sense strand
aggaaauggacgcuggauu

SEQ ID NO: 2533277 - RNA, 19 nt, Homo sapiens
  misc_RNA (1)...(19): siRNA sense strand
cagcagaaguugcaggaag

SEQ ID NO: 2533278 - RNA, 19 nt, Homo sapiens
  misc_RNA (1)...(19): siRNA sense strand
agaaguugcaggaagaaca

SEQ ID NO: 2533279 - RNA, 19 nt, Homo sapiens
  misc_RNA (1)...(19): siRNA sense strand
aggaaauggacgcuggauu

SEQ ID NO: 2533280 - RNA, 19 nt, Homo sapiens
  misc_RNA (1)...(19): siRNA sense strand
cagcagaaguugcaggaag

SEQ ID NO: 2533281 - RNA, 19 nt, Homo sapiens
  misc_RNA (1)...(19): siRNA sense strand
agaaguugcaggaagaaca

SEQ ID NO: 2533282 - RNA, 19 nt, Homo sapiens
  misc_RNA (1)...(19): siRNA sense strand
aggaaauggacgcuggauu

SEQ ID NO: 2533283 - RNA, 19 nt, Homo sapiens
  misc_RNA (1)...(19): siRNA sense strand
cagcagaaguugcaggaag

SEQ ID NO: 2533284 - RNA, 19 nt, Homo sapiens
  misc_RNA (1)...(19): siRNA sense strand
agaaguugcaggaagaaca

SEQ ID NO: 2533285 - RNA, 19 nt, Homo sapiens
  misc_RNA (1)...(19): siRNA sense strand
aggaaauggacgcuggauu

SEQ ID NO: 2533286 - RNA, 19 nt, Homo sapiens
  misc_RNA (1)...(19): siRNA sense strand
cagcagaaguugcaggaag

SEQ ID NO: 2533287 - RNA, 19 nt, Homo sapiens
  misc_RNA (1)...(19): siRNA sense strand
agaaguugcaggaagaaca

SEQ ID NO: 2533288 - RNA, 19 nt, Homo sapiens
  misc_RNA (1)...(19): siRNA sense strand
aggaaauggacgcuggauu

SEQ ID NO: 2533289 - RNA, 19 nt, Homo sapiens
  misc_RNA (1)...(19): siRNA sense strand
cagcagaaguugcaggaag

SEQ ID NO: 2533290 - RNA, 19 nt, Homo sapiens
  misc_RNA (1)...(19): siRNA sense strand
agaaguugcaggaagaaca

SEQ ID NO: 2533291 - RNA, 19 nt, Homo sapiens
  misc_RNA (1)...(19): siRNA sense strand
aggaaauggacgcuggauu

SEQ ID NO: 2533292 - RNA, 19 nt, Homo sapiens
  misc_RNA (1)...(19): siRNA sense strand
cagcagaaguugcaggaag

SEQ ID NO: 2533293 - RNA, 19 nt, Homo sapiens
  misc_RNA (1)...(19): siRNA sense strand
agaaguugcaggaagaaca

SEQ ID NO: 2533294 - RNA, 19 nt, Homo sapiens
  misc_RNA (1)...(19): siRNA sense strand
augaagaauuggaggcaaa

SEQ ID NO: 2533295 - RNA, 19 nt, Homo sapiens
  misc_RNA (1)...(19): siRNA sense strand
aagaagaagugaaggcgaa

SEQ ID NO: 2533296 - RNA, 19 nt, Homo sapiens
  misc_RNA (1)...(19): siRNA sense strand
gaagaaagccuaaaggaga

SEQ ID NO: 2533297 - RNA, 19 nt, Homo sapiens
  misc_RNA (1)...(19): siRNA sense strand
cagaaauggaaaugaagaa

SEQ ID NO: 2533298 - RNA, 19 nt, Homo sapiens
  misc_RNA (1)...(19): siRNA sense strand
agaaggacacuuugggaaa

SEQ ID NO: 2533299 - RNA, 19 nt, Homo sapiens
  misc_RNA (1)...(19): siRNA sense strand
gugauuaguaacuggauaa

SEQ ID NO: 2533300 - RNA, 19 nt, Homo sapiens
  misc_RNA (1)...(19): siRNA sense strand
ccaaaguggccaaggugaa

SEQ ID NO: 2533301 - RNA, 19 nt, Homo sapiens
  misc_RNA (1)...(19): siRNA sense strand
agaaagagaacuugagcuu

SEQ ID NO: 2533302 - RNA, 19 nt, Homo sapiens
  misc_RNA (1)...(19): siRNA sense strand
acauagaauuggagcuaca

SEQ ID NO: 2533303 - RNA, 19 nt, Homo sapiens
  misc_RNA (1)...(19): siRNA sense strand
ggcuaaagaaagagaacuu

SEQ ID NO: 2533304 - RNA, 19 nt, Homo sapiens
  misc_RNA (1)...(19): siRNA sense strand
uugacuaaaugcagacaaa

SEQ ID NO: 2533305 - RNA, 19 nt, Homo sapiens
  misc_RNA (1)...(19): siRNA sense strand
aagauaucauugugagcaa

SEQ ID NO: 2533306 - RNA, 19 nt, Homo sapiens
  misc_RNA (1)...(19): siRNA sense strand
gagcaggaagaaacagaaa

SEQ ID NO: 2533307 - RNA, 19 nt, Homo sapiens
  misc_RNA (1)...(19): siRNA sense strand
ugaagaagaauuuggaaca

SEQ ID NO: 2533308 - RNA, 19 nt, Homo sapiens
  misc_RNA (1)...(19): siRNA sense strand
ugaaaggguacgagugauu

SEQ ID NO: 2533309 - RNA, 19 nt, Homo sapiens
  misc_RNA (1)...(19): siRNA sense strand
ucgcugaauuagagacaau

SEQ ID NO: 2533310 - RNA, 19 nt, Homo sapiens
  misc_RNA (1)...(19): siRNA sense strand
aagcugaagccgugagaga

SEQ ID NO: 2533311 - RNA, 19 nt, Homo sapiens
  misc_RNA (1)...(19): siRNA sense strand
ucacagaugaagaagaauu

SEQ ID NO: 2533312 - RNA, 19 nt, Homo sapiens
  misc_RNA (1)...(19): siRNA sense strand
aagaaagccuaaaggagau

SEQ ID NO: 2533313 - RNA, 19 nt, Homo sapiens
  misc_RNA (1)...(19): siRNA sense strand
agaaagaguuugaaagggu

SEQ ID NO: 2533314 - RNA, 19 nt, Homo sapiens
  misc_RNA (1)...(19): siRNA sense strand
agaaagaacacgaaaccuu

SEQ ID NO: 2533315 - RNA, 19 nt, Homo sapiens
  misc_RNA (1)...(19): siRNA sense strand
cgucacggcucaagcgaga

SEQ ID NO: 2533316 - RNA, 19 nt, Homo sapiens
  misc_RNA (1)...(19): siRNA sense strand
gaaagaguuugaaagggua

SEQ ID NO: 2533317 - RNA, 19 nt, Homo sapiens
  misc_RNA (1)...(19): siRNA sense strand
gacuaaaugcagacaaauu

SEQ ID NO: 2533318 - RNA, 19 nt, Homo sapiens
  misc_RNA (1)...(19): siRNA sense strand
acggaaaguguaugagaga

SEQ ID NO: 2533319 - RNA, 19 nt, Homo sapiens
  misc_RNA (1)...(19): siRNA sense strand
cggcaacaguggagaaccu

SEQ ID NO: 2533320 - RNA, 19 nt, Homo sapiens
  misc_RNA (1)...(19): siRNA sense strand
aggcaaauguccaaagaac

SEQ ID NO: 2533321 - RNA, 19 nt, Homo sapiens
  misc_RNA (1)...(19): siRNA sense strand
ccagaggugcuuuggaaau

SEQ ID NO: 2533322 - RNA, 19 nt, Homo sapiens
  misc_RNA (1)...(19): siRNA sense strand
aagaaaaggaagagagacu

SEQ ID NO: 2533323 - RNA, 19 nt, Homo sapiens
  misc_RNA (1)...(19): siRNA sense strand
uuaagagaggcuaaagaaa

SEQ ID NO: 2533324 - RNA, 19 nt, Homo sapiens
  misc_RNA (1)...(19): siRNA sense strand
cagaaggacacuuugggaa

SEQ ID NO: 2533325 - RNA, 19 nt, Homo sapiens
  misc_RNA (1)...(19): siRNA sense strand
uugaaauacgacagaagaa

SEQ ID NO: 2533326 - RNA, 19 nt, Homo sapiens
  misc_RNA (1)...(19): siRNA sense strand
aagaaggaaguuugacuaa

SEQ ID NO: 2533327 - RNA, 19 nt, Homo sapiens
  misc_RNA (1)...(19): siRNA sense strand
cuaacaaaaccaugcgaaa

SEQ ID NO: 2533328 - RNA, 19 nt, Homo sapiens
  misc_RNA (1)...(19): siRNA sense strand
gcgaaguuuugaagaagaa

SEQ ID NO: 2533329 - RNA, 19 nt, Homo sapiens
  misc_RNA (1)...(19): siRNA sense strand
augagagagcuguggaauu

SEQ ID NO: 2533330 - RNA, 19 nt, Homo sapiens
  misc_RNA (1)...(19): siRNA sense strand
aggaagaaacagaaagaac

SEQ ID NO: 2533331 - RNA, 19 nt, Homo sapiens
  misc_RNA (1)...(19): siRNA sense strand
ugggaaaugcuguugacaa

SEQ ID NO: 2533332 - RNA, 19 nt, Homo sapiens
  misc_RNA (1)...(19): siRNA sense strand
caaacucaugccagagaaa

SEQ ID NO: 2533333 - RNA, 19 nt, Homo sapiens
  misc_RNA (1)...(19): siRNA sense strand
ggcucaagcgagaggucaa

SEQ ID NO: 2533334 - RNA, 19 nt, Homo sapiens
  misc_RNA (1)...(19): siRNA sense strand
guuaaucaguucugguaca

SEQ ID NO: 2533335 - RNA, 19 nt, Homo sapiens
  misc_RNA (1)...(19): siRNA sense strand
uugccaaguuugaagaaaa

SEQ ID NO: 2533336 - RNA, 19 nt, Homo sapiens
  misc_RNA (1)...(19): siRNA sense strand
augcgaaacugugaagaaa

SEQ ID NO: 2533337 - RNA, 19 nt, Homo sapiens
  misc_RNA (1)...(19): siRNA sense strand
uaaggagagaguagacaaa

SEQ ID NO: 2533338 - RNA, 19 nt, Homo sapiens
  misc_RNA (1)...(19): siRNA sense strand
cggcugagguacagauaac

SEQ ID NO: 2533339 - RNA, 19 nt, Homo sapiens
  misc_RNA (1)...(19): siRNA sense strand
acagaagaucacagaugaa

SEQ ID NO: 2533340 - RNA, 19 nt, Homo sapiens
  misc_RNA (1)...(19): siRNA sense strand
cacagaugaagaagaauua

SEQ ID NO: 2533341 - RNA, 19 nt, Homo sapiens
  misc_RNA (1)...(19): siRNA sense strand
gcaccauuuaugagcgauu

SEQ ID NO: 2533342 - RNA, 19 nt, Homo sapiens
  misc_RNA (1)...(19): siRNA sense strand
caugcgaaacugugaagaa

SEQ ID NO: 2533343 - RNA, 19 nt, Homo sapiens
  misc_RNA (1)...(19): siRNA sense strand
ccagaagagcauugggaac

SEQ ID NO: 2533344 - RNA, 19 nt, Homo sapiens
  misc_RNA (1)...(19): siRNA sense strand
cuucagauaaggagagagu

SEQ ID NO: 2533345 - RNA, 19 nt, Homo sapiens
  misc_RNA (1)...(19): siRNA sense strand
uggccaaacuguggaagaa

SEQ ID NO: 2533346 - RNA, 19 nt, Homo sapiens
  misc_RNA (1)...(19): siRNA sense strand
ugugauuaguaacuggaua

SEQ ID NO: 2533347 - RNA, 19 nt, Homo sapiens
  misc_RNA (1)...(19): siRNA sense strand
ccagagaaagucaagaaga

SEQ ID NO: 2533348 - RNA, 19 nt, Homo sapiens
  misc_RNA (1)...(19): siRNA sense strand
cuuaagagaggcuaaagaa

SEQ ID NO: 2533349 - RNA, 19 nt, Homo sapiens
  misc_RNA (1)...(19): siRNA sense strand
ggaaaugaagaaucgccaa

SEQ ID NO: 2533350 - RNA, 19 nt, Homo sapiens
  misc_RNA (1)...(19): siRNA sense strand
ggagauuccaguacgaaga

SEQ ID NO: 2533351 - RNA, 19 nt, Homo sapiens
  misc_RNA (1)...(19): siRNA sense strand
ggcaaauguccaaagaaca

SEQ ID NO: 2533352 - RNA, 19 nt, Homo sapiens
  misc_RNA (1)...(19): siRNA sense strand
aaacagaaagaacacgaaa

SEQ ID NO: 2533353 - RNA, 19 nt, Homo sapiens
  misc_RNA (1)...(19): siRNA sense strand
cagaugaggacgucgauga

SEQ ID NO: 2533354 - RNA, 19 nt, Homo sapiens
  misc_RNA (1)...(19): siRNA sense strand
ggaaaguguaugagagagc

SEQ ID NO: 2533355 - RNA, 19 nt, Homo sapiens
  misc_RNA (1)...(19): siRNA sense strand
aaacuaaggaaaaggaaga

SEQ ID NO: 2533356 - RNA, 19 nt, Homo sapiens
  misc_RNA (1)...(19): siRNA sense strand
ugaaauacgcagaaaugga

SEQ ID NO: 2533357 - RNA, 19 nt, Homo sapiens
  misc_RNA (1)...(19): siRNA sense strand
uagacaaacucaugccaga

SEQ ID NO: 2533358 - RNA, 19 nt, Homo sapiens
  misc_RNA (1)...(19): siRNA sense strand
gauguuaagaacuggauca

SEQ ID NO: 2533359 - RNA, 19 nt, Homo sapiens
  misc_RNA (1)...(19): siRNA sense strand
gcaggaagaagcaggccaa

SEQ ID NO: 2533360 - RNA, 19 nt, Homo sapiens
  misc_RNA (1)...(19): siRNA sense strand
aggccaagcggcugugcaa

SEQ ID NO: 2533361 - RNA, 19 nt, Homo sapiens
  misc_RNA (1)...(19): siRNA sense strand
ccggagaagagaagcggca

SEQ ID NO: 2533362 - RNA, 19 nt, Homo sapiens
  misc_RNA (1)...(19): siRNA sense strand
gcuucgacgcccuggauca

SEQ ID NO: 2533363 - RNA, 19 nt, Homo sapiens
  misc_RNA (1)...(19): siRNA sense strand
ugaacuggacagaggguca

SEQ ID NO: 2533364 - RNA, 19 nt, Homo sapiens
  misc_RNA (1)...(19): siRNA sense strand
ggacagagggucaggagag

SEQ ID NO: 2533365 - RNA, 19 nt, Homo sapiens
  misc_RNA (1)...(19): siRNA sense strand
gugguggaggagaaggaaa

SEQ ID NO: 2533366 - RNA, 19 nt, Homo sapiens
  misc_RNA (1)...(19): siRNA sense strand
agcaaagggcacucagaau

SEQ ID NO: 2533367 - RNA, 19 nt, Homo sapiens
  misc_RNA (1)...(19): siRNA sense strand
ugaacuggacagaggguca

SEQ ID NO: 2533368 - RNA, 19 nt, Homo sapiens
  misc_RNA (1)...(19): siRNA sense strand
ggacagagggucaggagag

SEQ ID NO: 2533369 - RNA, 19 nt, Homo sapiens
  misc_RNA (1)...(19): siRNA sense strand
gugguggaggagaaggaaa

SEQ ID NO: 2533370 - RNA, 19 nt, Homo sapiens
  misc_RNA (1)...(19): siRNA sense strand
agcaaagggcacucagaau

SEQ ID NO: 2533371 - RNA, 19 nt, Homo sapiens
  misc_RNA (1)...(19): siRNA sense strand
ugaacuggacagaggguca

SEQ ID NO: 2533372 - RNA, 19 nt, Homo sapiens
  misc_RNA (1)...(19): siRNA sense strand
ggacagagggucaggagag

SEQ ID NO: 2533373 - RNA, 19 nt, Homo sapiens
  misc_RNA (1)...(19): siRNA sense strand
gugguggaggagaaggaaa

SEQ ID NO: 2533374 - RNA, 19 nt, Homo sapiens
  misc_RNA (1)...(19): siRNA sense strand
agcaaagggcacucagaau

SEQ ID NO: 2533375 - RNA, 19 nt, Homo sapiens
  misc_RNA (1)...(19): siRNA sense strand
uggaguggguggugggcaa

SEQ ID NO: 2533376 - RNA, 19 nt, Homo sapiens
  misc_RNA (1)...(19): siRNA sense strand
aggucaagcuggagggcca

SEQ ID NO: 2533377 - RNA, 19 nt, Homo sapiens
  misc_RNA (1)...(19): siRNA sense strand
ggguggugggcaaggacaa

SEQ ID NO: 2533378 - RNA, 19 nt, Homo sapiens
  misc_RNA (1)...(19): siRNA sense strand
aggagauggugaaguccaa

SEQ ID NO: 2533379 - RNA, 19 nt, Homo sapiens
  misc_RNA (1)...(19): siRNA sense strand
gcggaucagcagaggcuau

SEQ ID NO: 2533380 - RNA, 19 nt, Homo sapiens
  misc_RNA (1)...(19): siRNA sense strand
cggaagugaucaaggcucu

SEQ ID NO: 2533381 - RNA, 19 nt, Homo sapiens
  misc_RNA (1)...(19): siRNA sense strand
gccaagaaggagaugguga

SEQ ID NO: 2533382 - RNA, 19 nt, Homo sapiens
  misc_RNA (1)...(19): siRNA sense strand
ccaccuacgacgagaucuu

SEQ ID NO: 2533383 - RNA, 19 nt, Homo sapiens
  misc_RNA (1)...(19): siRNA sense strand
ucaagaaagagaugcccaa

SEQ ID NO: 2533384 - RNA, 19 nt, Homo sapiens
  misc_RNA (1)...(19): siRNA sense strand
uggccaagguucacgccua

SEQ ID NO: 2533385 - RNA, 19 nt, Homo sapiens
  misc_RNA (1)...(19): siRNA sense strand
uggaugacaugcuggccaa

SEQ ID NO: 2533386 - RNA, 19 nt, Homo sapiens
  misc_RNA (1)...(19): siRNA sense strand
accagaagauugagcgcga

SEQ ID NO: 2533387 - RNA, 19 nt, Homo sapiens
  misc_RNA (1)...(19): siRNA sense strand
ugaacaaggcagaccagau

SEQ ID NO: 2533388 - RNA, 19 nt, Homo sapiens
  misc_RNA (1)...(19): siRNA sense strand
ucauguggucccugggcaa

SEQ ID NO: 2533389 - RNA, 19 nt, Homo sapiens
  misc_RNA (1)...(19): siRNA sense strand
uggugaacaaccugggaga

SEQ ID NO: 2533390 - RNA, 19 nt, Homo sapiens
  misc_RNA (1)...(19): siRNA sense strand
ucuuugaggccgaggagca

SEQ ID NO: 2533391 - RNA, 19 nt, Homo sapiens
  misc_RNA (1)...(19): siRNA sense strand
ucaucaaggucaagcugga

SEQ ID NO: 2533392 - RNA, 19 nt, Homo sapiens
  misc_RNA (1)...(19): siRNA sense strand
ccgcaagcucaacgcguuu

SEQ ID NO: 2533393 - RNA, 19 nt, Homo sapiens
  misc_RNA (1)...(19): siRNA sense strand
aaaagaaagagcuggugaa

SEQ ID NO: 2533394 - RNA, 19 nt, Homo sapiens
  misc_RNA (1)...(19): siRNA sense strand
agauugagcgcgagcacca

SEQ ID NO: 2533395 - RNA, 19 nt, Homo sapiens
  misc_RNA (1)...(19): siRNA sense strand
ccaacaccgugcuagggaa

SEQ ID NO: 2533396 - RNA, 19 nt, Homo sapiens
  misc_RNA (1)...(19): siRNA sense strand
cugaagaaccaugaggaca

SEQ ID NO: 2533397 - RNA, 19 nt, Homo sapiens
  misc_RNA (1)...(19): siRNA sense strand
ccgacugcugugagaguga

SEQ ID NO: 2533398 - RNA, 19 nt, Homo sapiens
  misc_RNA (1)...(19): siRNA sense strand
caggggaaguggucagcaa

SEQ ID NO: 2533399 - RNA, 19 nt, Homo sapiens
  misc_RNA (1)...(19): siRNA sense strand
guuccaaguaccacggcua

SEQ ID NO: 2533400 - RNA, 19 nt, Homo sapiens
  misc_RNA (1)...(19): siRNA sense strand
ggagaaucuuuuagcugaa

SEQ ID NO: 2533401 - RNA, 19 nt, Homo sapiens
  misc_RNA (1)...(19): siRNA sense strand
cuuuauuugagaaggaaca

SEQ ID NO: 2533402 - RNA, 19 nt, Homo sapiens
  misc_RNA (1)...(19): siRNA sense strand
aggcucaguuuguggcaga

SEQ ID NO: 2533403 - RNA, 19 nt, Homo sapiens
  misc_RNA (1)...(19): siRNA sense strand
uggcagaaucacacauuau

SEQ ID NO: 2533404 - RNA, 19 nt, Homo sapiens
  misc_RNA (1)...(19): siRNA sense strand
gauaauuugccuaguggga

SEQ ID NO: 2533405 - RNA, 19 nt, Homo sapiens
  misc_RNA (1)...(19): siRNA sense strand
ccgaaaauuuauaaaggca

SEQ ID NO: 2533406 - RNA, 19 nt, Homo sapiens
  misc_RNA (1)...(19): siRNA sense strand
ucuucaguaugguggacua

SEQ ID NO: 2533407 - RNA, 19 nt, Homo sapiens
  misc_RNA (1)...(19): siRNA sense strand
guuccaaguaccacggcua

SEQ ID NO: 2533408 - RNA, 19 nt, Homo sapiens
  misc_RNA (1)...(19): siRNA sense strand
ggagaaucuuuuagcugaa

SEQ ID NO: 2533409 - RNA, 19 nt, Homo sapiens
  misc_RNA (1)...(19): siRNA sense strand
cuuuauuugagaaggaaca

SEQ ID NO: 2533410 - RNA, 19 nt, Homo sapiens
  misc_RNA (1)...(19): siRNA sense strand
aggcucaguuuguggcaga

SEQ ID NO: 2533411 - RNA, 19 nt, Homo sapiens
  misc_RNA (1)...(19): siRNA sense strand
uggcagaaucacacauuau

SEQ ID NO: 2533412 - RNA, 19 nt, Homo sapiens
  misc_RNA (1)...(19): siRNA sense strand
gauaauuugccuaguggga

SEQ ID NO: 2533413 - RNA, 19 nt, Homo sapiens
  misc_RNA (1)...(19): siRNA sense strand
ccgaaaauuuauaaaggca

SEQ ID NO: 2533414 - RNA, 19 nt, Homo sapiens
  misc_RNA (1)...(19): siRNA sense strand
ucuucaguaugguggacua

SEQ ID NO: 2533415 - RNA, 19 nt, Homo sapiens
  misc_RNA (1)...(19): siRNA sense strand
gaaaguggcugcugccuga

SEQ ID NO: 2533416 - RNA, 19 nt, Homo sapiens
  misc_RNA (1)...(19): siRNA sense strand
agauccaacuccugugaca

SEQ ID NO: 2533417 - RNA, 19 nt, Homo sapiens
  misc_RNA (1)...(19): siRNA sense strand
cagcagaaccagaagcagu

SEQ ID NO: 2533418 - RNA, 19 nt, Homo sapiens
  misc_RNA (1)...(19): siRNA sense strand
gagaaagaugccugggaga

SEQ ID NO: 2533419 - RNA, 19 nt, Homo sapiens
  misc_RNA (1)...(19): siRNA sense strand
ucacggaguucauggccaa

SEQ ID NO: 2533420 - RNA, 19 nt, Homo sapiens
  misc_RNA (1)...(19): siRNA sense strand
ggaacuacauccaccgaga

SEQ ID NO: 2533421 - RNA, 19 nt, Homo sapiens
  misc_RNA (1)...(19): siRNA sense strand
agggagauaccgugaaaca

SEQ ID NO: 2533422 - RNA, 19 nt, Homo sapiens
  misc_RNA (1)...(19): siRNA sense strand
cgaugaagccagggagcau

SEQ ID NO: 2533423 - RNA, 19 nt, Homo sapiens
  misc_RNA (1)...(19): siRNA sense strand
aggcaggcucugaggacau

SEQ ID NO: 2533424 - RNA, 19 nt, Homo sapiens
  misc_RNA (1)...(19): siRNA sense strand
gcaugucgguggaggccuu

SEQ ID NO: 2533425 - RNA, 19 nt, Homo sapiens
  misc_RNA (1)...(19): siRNA sense strand
ccgugaaacauuacaagau

SEQ ID NO: 2533426 - RNA, 19 nt, Homo sapiens
  misc_RNA (1)...(19): siRNA sense strand
ccuaauagccacaacagca

SEQ ID NO: 2533427 - RNA, 19 nt, Homo sapiens
  misc_RNA (1)...(19): siRNA sense strand
ccuucaucgagcagaggaa

SEQ ID NO: 2533428 - RNA, 19 nt, Homo sapiens
  misc_RNA (1)...(19): siRNA sense strand
ggucaaacuucaugcggug

SEQ ID NO: 2533429 - RNA, 19 nt, Homo sapiens
  misc_RNA (1)...(19): siRNA sense strand
gcgcucaagcugcgaggau

SEQ ID NO: 2533430 - RNA, 19 nt, Homo sapiens
  misc_RNA (1)...(19): siRNA sense strand
ggagaagaaacuuggagcu

SEQ ID NO: 2533431 - RNA, 19 nt, Homo sapiens
  misc_RNA (1)...(19): siRNA sense strand
ggguauuauugguggcaaa

SEQ ID NO: 2533432 - RNA, 19 nt, Homo sapiens
  misc_RNA (1)...(19): siRNA sense strand
uggaaagaagucugggaaa

SEQ ID NO: 2533433 - RNA, 19 nt, Homo sapiens
  misc_RNA (1)...(19): siRNA sense strand
uguuagacuugguggagaa

SEQ ID NO: 2533434 - RNA, 19 nt, Homo sapiens
  misc_RNA (1)...(19): siRNA sense strand
cuguauuauugcuuggaaa

SEQ ID NO: 2533435 - RNA, 19 nt, Homo sapiens
  misc_RNA (1)...(19): siRNA sense strand
aagaaaagcaguugaagaa

SEQ ID NO: 2533436 - RNA, 19 nt, Homo sapiens
  misc_RNA (1)...(19): siRNA sense strand
uggaauauuguguggguau

SEQ ID NO: 2533437 - RNA, 19 nt, Homo sapiens
  misc_RNA (1)...(19): siRNA sense strand
cugauaaugcagaugacaa

SEQ ID NO: 2533438 - RNA, 19 nt, Homo sapiens
  misc_RNA (1)...(19): siRNA sense strand
gggauguacaauagaggau

SEQ ID NO: 2533439 - RNA, 19 nt, Homo sapiens
  misc_RNA (1)...(19): siRNA sense strand
cagcuguacaauaggauuu

SEQ ID NO: 2533440 - RNA, 19 nt, Homo sapiens
  misc_RNA (1)...(19): siRNA sense strand
gcuuggaacaacaugaaau

SEQ ID NO: 2533441 - RNA, 19 nt, Homo sapiens
  misc_RNA (1)...(19): siRNA sense strand
augaaguugacaagcuaaa

SEQ ID NO: 2533442 - RNA, 19 nt, Homo sapiens
  misc_RNA (1)...(19): siRNA sense strand
ggggaaagagaauucaaaa

SEQ ID NO: 2533443 - RNA, 19 nt, Homo sapiens
  misc_RNA (1)...(19): siRNA sense strand
ggcuacaggaacagaugaa

SEQ ID NO: 2533444 - RNA, 19 nt, Homo sapiens
  misc_RNA (1)...(19): siRNA sense strand
ugaaggaaacaauugggaa

SEQ ID NO: 2533445 - RNA, 19 nt, Homo sapiens
  misc_RNA (1)...(19): siRNA sense strand
auugauaaacagagugcuu

SEQ ID NO: 2533446 - RNA, 19 nt, Homo sapiens
  misc_RNA (1)...(19): siRNA sense strand
cuacaaccaaugaagaaga

SEQ ID NO: 2533447 - RNA, 19 nt, Homo sapiens
  misc_RNA (1)...(19): siRNA sense strand
gcagagucgggauguacaa

SEQ ID NO: 2533448 - RNA, 19 nt, Homo sapiens
  misc_RNA (1)...(19): siRNA sense strand
gagaaagaaccaacaccga

SEQ ID NO: 2533449 - RNA, 19 nt, Homo sapiens
  misc_RNA (1)...(19): siRNA sense strand
cuagaauauggcugaccua

SEQ ID NO: 2533450 - RNA, 19 nt, Homo sapiens
  misc_RNA (1)...(19): siRNA sense strand
ugaccuacagggaagaauu

SEQ ID NO: 2533451 - RNA, 19 nt, Homo sapiens
  misc_RNA (1)...(19): siRNA sense strand
augaaauauaguugggugu

SEQ ID NO: 2533452 - RNA, 19 nt, Homo sapiens
  misc_RNA (1)...(19): siRNA sense strand
uaagaaaagcaguugaaga

SEQ ID NO: 2533453 - RNA, 19 nt, Homo sapiens
  misc_RNA (1)...(19): siRNA sense strand
gcauaaaggauuucccucu

SEQ ID NO: 2533454 - RNA, 19 nt, Homo sapiens
  misc_RNA (1)...(19): siRNA sense strand
cuacaggaacagaugaagu

SEQ ID NO: 2533455 - RNA, 19 nt, Homo sapiens
  misc_RNA (1)...(19): siRNA sense strand
ggguauuauugguggcaaa

SEQ ID NO: 2533456 - RNA, 19 nt, Homo sapiens
  misc_RNA (1)...(19): siRNA sense strand
uggaaagaagucugggaaa

SEQ ID NO: 2533457 - RNA, 19 nt, Homo sapiens
  misc_RNA (1)...(19): siRNA sense strand
uguuagacuugguggagaa

SEQ ID NO: 2533458 - RNA, 19 nt, Homo sapiens
  misc_RNA (1)...(19): siRNA sense strand
cuguauuauugcuuggaaa

SEQ ID NO: 2533459 - RNA, 19 nt, Homo sapiens
  misc_RNA (1)...(19): siRNA sense strand
aagaaaagcaguugaagaa

SEQ ID NO: 2533460 - RNA, 19 nt, Homo sapiens
  misc_RNA (1)...(19): siRNA sense strand
uggaauauuguguggguau

SEQ ID NO: 2533461 - RNA, 19 nt, Homo sapiens
  misc_RNA (1)...(19): siRNA sense strand
cugauaaugcagaugacaa

SEQ ID NO: 2533462 - RNA, 19 nt, Homo sapiens
  misc_RNA (1)...(19): siRNA sense strand
gggauguacaauagaggau

SEQ ID NO: 2533463 - RNA, 19 nt, Homo sapiens
  misc_RNA (1)...(19): siRNA sense strand
cagcuguacaauaggauuu

SEQ ID NO: 2533464 - RNA, 19 nt, Homo sapiens
  misc_RNA (1)...(19): siRNA sense strand
gcuuggaacaacaugaaau

SEQ ID NO: 2533465 - RNA, 19 nt, Homo sapiens
  misc_RNA (1)...(19): siRNA sense strand
augaaguugacaagcuaaa

SEQ ID NO: 2533466 - RNA, 19 nt, Homo sapiens
  misc_RNA (1)...(19): siRNA sense strand
ggggaaagagaauucaaaa

SEQ ID NO: 2533467 - RNA, 19 nt, Homo sapiens
  misc_RNA (1)...(19): siRNA sense strand
ggcuacaggaacagaugaa

SEQ ID NO: 2533468 - RNA, 19 nt, Homo sapiens
  misc_RNA (1)...(19): siRNA sense strand
ugaaggaaacaauugggaa

SEQ ID NO: 2533469 - RNA, 19 nt, Homo sapiens
  misc_RNA (1)...(19): siRNA sense strand
auugauaaacagagugcuu

SEQ ID NO: 2533470 - RNA, 19 nt, Homo sapiens
  misc_RNA (1)...(19): siRNA sense strand
cuacaaccaaugaagaaga

SEQ ID NO: 2533471 - RNA, 19 nt, Homo sapiens
  misc_RNA (1)...(19): siRNA sense strand
gcagagucgggauguacaa

SEQ ID NO: 2533472 - RNA, 19 nt, Homo sapiens
  misc_RNA (1)...(19): siRNA sense strand
gagaaagaaccaacaccga

SEQ ID NO: 2533473 - RNA, 19 nt, Homo sapiens
  misc_RNA (1)...(19): siRNA sense strand
cuagaauauggcugaccua

SEQ ID NO: 2533474 - RNA, 19 nt, Homo sapiens
  misc_RNA (1)...(19): siRNA sense strand
ugaccuacagggaagaauu

SEQ ID NO: 2533475 - RNA, 19 nt, Homo sapiens
  misc_RNA (1)...(19): siRNA sense strand
augaaauauaguugggugu

SEQ ID NO: 2533476 - RNA, 19 nt, Homo sapiens
  misc_RNA (1)...(19): siRNA sense strand
uaagaaaagcaguugaaga

SEQ ID NO: 2533477 - RNA, 19 nt, Homo sapiens
  misc_RNA (1)...(19): siRNA sense strand
gcauaaaggauuucccucu

SEQ ID NO: 2533478 - RNA, 19 nt, Homo sapiens
  misc_RNA (1)...(19): siRNA sense strand
cuacaggaacagaugaagu

SEQ ID NO: 2533479 - RNA, 19 nt, Homo sapiens
  misc_RNA (1)...(19): siRNA sense strand
cgcaggugcucaagggcua

SEQ ID NO: 2533480 - RNA, 19 nt, Homo sapiens
  misc_RNA (1)...(19): siRNA sense strand
agaacaucgacuucagcaa

SEQ ID NO: 2533481 - RNA, 19 nt, Homo sapiens
  misc_RNA (1)...(19): siRNA sense strand
uugcugagcgagagcgaga

SEQ ID NO: 2533482 - RNA, 19 nt, Homo sapiens
  misc_RNA (1)...(19): siRNA sense strand
gggaaggagggaugaggau

SEQ ID NO: 2533483 - RNA, 19 nt, Homo sapiens
  misc_RNA (1)...(19): siRNA sense strand
gcagcaagagcaaggccua

SEQ ID NO: 2533484 - RNA, 19 nt, Homo sapiens
  misc_RNA (1)...(19): siRNA sense strand
caguggaacagaugaccaa

SEQ ID NO: 2533485 - RNA, 19 nt, Homo sapiens
  misc_RNA (1)...(19): siRNA sense strand
uuaugaucgccauggaaua

SEQ ID NO: 2533486 - RNA, 19 nt, Homo sapiens
  misc_RNA (1)...(19): siRNA sense strand
ugaccaaggaagagcggca

SEQ ID NO: 2533487 - RNA, 19 nt, Homo sapiens
  misc_RNA (1)...(19): siRNA sense strand
cugaagaucaugaguggca

SEQ ID NO: 2533488 - RNA, 19 nt, Homo sapiens
  misc_RNA (1)...(19): siRNA sense strand
cgucaagaucggugauuuc

SEQ ID NO: 2533489 - RNA, 19 nt, Homo sapiens
  misc_RNA (1)...(19): siRNA sense strand
gaacagaugaccaaggaag

SEQ ID NO: 2533490 - RNA, 19 nt, Homo sapiens
  misc_RNA (1)...(19): siRNA sense strand
gcuaugaaauggugcaggu

SEQ ID NO: 2533491 - RNA, 19 nt, Homo sapiens
  misc_RNA (1)...(19): siRNA sense strand
gcgcgaggucgauugggaa

SEQ ID NO: 2533492 - RNA, 19 nt, Homo sapiens
  misc_RNA (1)...(19): siRNA sense strand
ugcgaaaggcugaccagaa

SEQ ID NO: 2533493 - RNA, 19 nt, Homo sapiens
  misc_RNA (1)...(19): siRNA sense strand
cggcauaugcagugaacac

SEQ ID NO: 2533494 - RNA, 19 nt, Homo sapiens
  misc_RNA (1)...(19): siRNA sense strand
cggcauaugcagugaacac

SEQ ID NO: 2533495 - RNA, 19 nt, Homo sapiens
  misc_RNA (1)...(19): siRNA sense strand
uggacaaagacaagaggaa

SEQ ID NO: 2533496 - RNA, 19 nt, Homo sapiens
  misc_RNA (1)...(19): siRNA sense strand
aggugagcuuggaggacua

SEQ ID NO: 2533497 - RNA, 19 nt, Homo sapiens
  misc_RNA (1)...(19): siRNA sense strand
gcuuggaggacuacaucaa

SEQ ID NO: 2533498 - RNA, 19 nt, Homo sapiens
  misc_RNA (1)...(19): siRNA sense strand
ucaucaagcucuucggcau

SEQ ID NO: 2533499 - RNA, 19 nt, Homo sapiens
  misc_RNA (1)...(19): siRNA sense strand
agguguugacgaugggcaa

SEQ ID NO: 2533500 - RNA, 19 nt, Homo sapiens
  misc_RNA (1)...(19): siRNA sense strand
cggaagaaccacauguacu

SEQ ID NO: 2533501 - RNA, 19 nt, Homo sapiens
  misc_RNA (1)...(19): siRNA sense strand
gcgugguggacaaagacaa

SEQ ID NO: 2533502 - RNA, 19 nt, Homo sapiens
  misc_RNA (1)...(19): siRNA sense strand
cccuggaauuugagaaugu

SEQ ID NO: 2533503 - RNA, 19 nt, Homo sapiens
  misc_RNA (1)...(19): siRNA sense strand
ggacaaagacaagaggaac

SEQ ID NO: 2533504 - RNA, 19 nt, Homo sapiens
  misc_RNA (1)...(19): siRNA sense strand
ggucaagcuaugaggacag

SEQ ID NO: 2533505 - RNA, 19 nt, Homo sapiens
  misc_RNA (1)...(19): siRNA sense strand
uggacaaagacaagaggaa

SEQ ID NO: 2533506 - RNA, 19 nt, Homo sapiens
  misc_RNA (1)...(19): siRNA sense strand
aggugagcuuggaggacua

SEQ ID NO: 2533507 - RNA, 19 nt, Homo sapiens
  misc_RNA (1)...(19): siRNA sense strand
gcuuggaggacuacaucaa

SEQ ID NO: 2533508 - RNA, 19 nt, Homo sapiens
  misc_RNA (1)...(19): siRNA sense strand
ucaucaagcucuucggcau

SEQ ID NO: 2533509 - RNA, 19 nt, Homo sapiens
  misc_RNA (1)...(19): siRNA sense strand
agguguugacgaugggcaa

SEQ ID NO: 2533510 - RNA, 19 nt, Homo sapiens
  misc_RNA (1)...(19): siRNA sense strand
cggaagaaccacauguacu

SEQ ID NO: 2533511 - RNA, 19 nt, Homo sapiens
  misc_RNA (1)...(19): siRNA sense strand
gcgugguggacaaagacaa

SEQ ID NO: 2533512 - RNA, 19 nt, Homo sapiens
  misc_RNA (1)...(19): siRNA sense strand
cccuggaauuugagaaugu

SEQ ID NO: 2533513 - RNA, 19 nt, Homo sapiens
  misc_RNA (1)...(19): siRNA sense strand
ggacaaagacaagaggaac

SEQ ID NO: 2533514 - RNA, 19 nt, Homo sapiens
  misc_RNA (1)...(19): siRNA sense strand
ggucaagcuaugaggacag

SEQ ID NO: 2533515 - RNA, 19 nt, Homo sapiens
  misc_RNA (1)...(19): siRNA sense strand
uggacaaagacaagaggaa

SEQ ID NO: 2533516 - RNA, 19 nt, Homo sapiens
  misc_RNA (1)...(19): siRNA sense strand
aggugagcuuggaggacua

SEQ ID NO: 2533517 - RNA, 19 nt, Homo sapiens
  misc_RNA (1)...(19): siRNA sense strand
gcuuggaggacuacaucaa

SEQ ID NO: 2533518 - RNA, 19 nt, Homo sapiens
  misc_RNA (1)...(19): siRNA sense strand
ucaucaagcucuucggcau

SEQ ID NO: 2533519 - RNA, 19 nt, Homo sapiens
  misc_RNA (1)...(19): siRNA sense strand
agguguugacgaugggcaa

SEQ ID NO: 2533520 - RNA, 19 nt, Homo sapiens
  misc_RNA (1)...(19): siRNA sense strand
cggaagaaccacauguacu

SEQ ID NO: 2533521 - RNA, 19 nt, Homo sapiens
  misc_RNA (1)...(19): siRNA sense strand
gcgugguggacaaagacaa

SEQ ID NO: 2533522 - RNA, 19 nt, Homo sapiens
  misc_RNA (1)...(19): siRNA sense strand
cccuggaauuugagaaugu

SEQ ID NO: 2533523 - RNA, 19 nt, Homo sapiens
  misc_RNA (1)...(19): siRNA sense strand
ggacaaagacaagaggaac

SEQ ID NO: 2533524 - RNA, 19 nt, Homo sapiens
  misc_RNA (1)...(19): siRNA sense strand
ggucaagcuaugaggacag

SEQ ID NO: 2533525 - RNA, 19 nt, Homo sapiens
  misc_RNA (1)...(19): siRNA sense strand
ccacauauccugaggcuga

SEQ ID NO: 2533526 - RNA, 19 nt, Homo sapiens
  misc_RNA (1)...(19): siRNA sense strand
guucgagagaagauagaaa

SEQ ID NO: 2533527 - RNA, 19 nt, Homo sapiens
  misc_RNA (1)...(19): siRNA sense strand
acaaaguucgagagaagau

SEQ ID NO: 2533528 - RNA, 19 nt, Homo sapiens
  misc_RNA (1)...(19): siRNA sense strand
gagaagauagaaacgguca

SEQ ID NO: 2533529 - RNA, 19 nt, Homo sapiens
  misc_RNA (1)...(19): siRNA sense strand
gagagaagauagaaacggu

SEQ ID NO: 2533530 - RNA, 19 nt, Homo sapiens
  misc_RNA (1)...(19): siRNA sense strand
agaagauagaaacggucaa

SEQ ID NO: 2533531 - RNA, 19 nt, Homo sapiens
  misc_RNA (1)...(19): siRNA sense strand
gcuggaaaucauugggaug

SEQ ID NO: 2533532 - RNA, 19 nt, Homo sapiens
  misc_RNA (1)...(19): siRNA sense strand
ccacauauccugaggcuga

SEQ ID NO: 2533533 - RNA, 19 nt, Homo sapiens
  misc_RNA (1)...(19): siRNA sense strand
guucgagagaagauagaaa

SEQ ID NO: 2533534 - RNA, 19 nt, Homo sapiens
  misc_RNA (1)...(19): siRNA sense strand
acaaaguucgagagaagau

SEQ ID NO: 2533535 - RNA, 19 nt, Homo sapiens
  misc_RNA (1)...(19): siRNA sense strand
gagaagauagaaacgguca

SEQ ID NO: 2533536 - RNA, 19 nt, Homo sapiens
  misc_RNA (1)...(19): siRNA sense strand
gagagaagauagaaacggu

SEQ ID NO: 2533537 - RNA, 19 nt, Homo sapiens
  misc_RNA (1)...(19): siRNA sense strand
agaagauagaaacggucaa

SEQ ID NO: 2533538 - RNA, 19 nt, Homo sapiens
  misc_RNA (1)...(19): siRNA sense strand
gcuggaaaucauugggaug

SEQ ID NO: 2533539 - RNA, 19 nt, Homo sapiens
  misc_RNA (1)...(19): siRNA sense strand
ccacauauccugaggcuga

SEQ ID NO: 2533540 - RNA, 19 nt, Homo sapiens
  misc_RNA (1)...(19): siRNA sense strand
guucgagagaagauagaaa

SEQ ID NO: 2533541 - RNA, 19 nt, Homo sapiens
  misc_RNA (1)...(19): siRNA sense strand
acaaaguucgagagaagau

SEQ ID NO: 2533542 - RNA, 19 nt, Homo sapiens
  misc_RNA (1)...(19): siRNA sense strand
gagaagauagaaacgguca

SEQ ID NO: 2533543 - RNA, 19 nt, Homo sapiens
  misc_RNA (1)...(19): siRNA sense strand
gagagaagauagaaacggu

SEQ ID NO: 2533544 - RNA, 19 nt, Homo sapiens
  misc_RNA (1)...(19): siRNA sense strand
agaagauagaaacggucaa

SEQ ID NO: 2533545 - RNA, 19 nt, Homo sapiens
  misc_RNA (1)...(19): siRNA sense strand
gcuggaaaucauugggaug

SEQ ID NO: 2533546 - RNA, 19 nt, Homo sapiens
  misc_RNA (1)...(19): siRNA sense strand
ccacauauccugaggcuga

SEQ ID NO: 2533547 - RNA, 19 nt, Homo sapiens
  misc_RNA (1)...(19): siRNA sense strand
guucgagagaagauagaaa

SEQ ID NO: 2533548 - RNA, 19 nt, Homo sapiens
  misc_RNA (1)...(19): siRNA sense strand
acaaaguucgagagaagau

SEQ ID NO: 2533549 - RNA, 19 nt, Homo sapiens
  misc_RNA (1)...(19): siRNA sense strand
gagaagauagaaacgguca

SEQ ID NO: 2533550 - RNA, 19 nt, Homo sapiens
  misc_RNA (1)...(19): siRNA sense strand
gagagaagauagaaacggu

SEQ ID NO: 2533551 - RNA, 19 nt, Homo sapiens
  misc_RNA (1)...(19): siRNA sense strand
agaagauagaaacggucaa

SEQ ID NO: 2533552 - RNA, 19 nt, Homo sapiens
  misc_RNA (1)...(19): siRNA sense strand
gcuggaaaucauugggaug

SEQ ID NO: 2533553 - RNA, 19 nt, Homo sapiens
  misc_RNA (1)...(19): siRNA sense strand
ccacauauccugaggcuga

SEQ ID NO: 2533554 - RNA, 19 nt, Homo sapiens
  misc_RNA (1)...(19): siRNA sense strand
guucgagagaagauagaaa

SEQ ID NO: 2533555 - RNA, 19 nt, Homo sapiens
  misc_RNA (1)...(19): siRNA sense strand
acaaaguucgagagaagau

SEQ ID NO: 2533556 - RNA, 19 nt, Homo sapiens
  misc_RNA (1)...(19): siRNA sense strand
gagaagauagaaacgguca

SEQ ID NO: 2533557 - RNA, 19 nt, Homo sapiens
  misc_RNA (1)...(19): siRNA sense strand
gagagaagauagaaacggu

SEQ ID NO: 2533558 - RNA, 19 nt, Homo sapiens
  misc_RNA (1)...(19): siRNA sense strand
agaagauagaaacggucaa

SEQ ID NO: 2533559 - RNA, 19 nt, Homo sapiens
  misc_RNA (1)...(19): siRNA sense strand
gcuggaaaucauugggaug

SEQ ID NO: 2533560 - RNA, 19 nt, Homo sapiens
  misc_RNA (1)...(19): siRNA sense strand
gcuccuucgcagagaacuu

SEQ ID NO: 2533561 - RNA, 19 nt, Homo sapiens
  misc_RNA (1)...(19): siRNA sense strand
gggcaaaggacgagcgcaa

SEQ ID NO: 2533562 - RNA, 19 nt, Homo sapiens
  misc_RNA (1)...(19): siRNA sense strand
ccuucauggugugggcaaa

SEQ ID NO: 2533563 - RNA, 19 nt, Homo sapiens
  misc_RNA (1)...(19): siRNA sense strand
cugaaguuguuuauggaaa

SEQ ID NO: 2533564 - RNA, 19 nt, Homo sapiens
  misc_RNA (1)...(19): siRNA sense strand
agggaagagauguggcaaa

SEQ ID NO: 2533565 - RNA, 19 nt, Homo sapiens
  misc_RNA (1)...(19): siRNA sense strand
gcuuauauccguaggcaga

SEQ ID NO: 2533566 - RNA, 19 nt, Homo sapiens
  misc_RNA (1)...(19): siRNA sense strand
ugguacaauuccuggagaa

SEQ ID NO: 2533567 - RNA, 19 nt, Homo sapiens
  misc_RNA (1)...(19): siRNA sense strand
cccuuaaagaagagcacaa

SEQ ID NO: 2533568 - RNA, 19 nt, Homo sapiens
  misc_RNA (1)...(19): siRNA sense strand
aggugauguucuugaauga

SEQ ID NO: 2533569 - RNA, 19 nt, Homo sapiens
  misc_RNA (1)...(19): siRNA sense strand
acgagaugguggaguacau

SEQ ID NO: 2533570 - RNA, 19 nt, Homo sapiens
  misc_RNA (1)...(19): siRNA sense strand
aguuugacccagaggaaga

SEQ ID NO: 2533571 - RNA, 19 nt, Homo sapiens
  misc_RNA (1)...(19): siRNA sense strand
ccgaaugaaggaaagggaa

SEQ ID NO: 2533572 - RNA, 19 nt, Homo sapiens
  misc_RNA (1)...(19): siRNA sense strand
aauacaaggcagagaagca

SEQ ID NO: 2533573 - RNA, 19 nt, Homo sapiens
  misc_RNA (1)...(19): siRNA sense strand
gggcugaguuugacccaga

SEQ ID NO: 2533574 - RNA, 19 nt, Homo sapiens
  misc_RNA (1)...(19): siRNA sense strand
acaucaagaaggagaaagu

SEQ ID NO: 2533575 - RNA, 19 nt, Homo sapiens
  misc_RNA (1)...(19): siRNA sense strand
cgaaugaaggaaagggaag

SEQ ID NO: 2533576 - RNA, 19 nt, Homo sapiens
  misc_RNA (1)...(19): siRNA sense strand
ccuauuugacagugaggau

SEQ ID NO: 2533577 - RNA, 19 nt, Homo sapiens
  misc_RNA (1)...(19): siRNA sense strand
uggcauacugugugguaca

SEQ ID NO: 2533578 - RNA, 19 nt, Homo sapiens
  misc_RNA (1)...(19): siRNA sense strand
gagccugauaagugacaau

SEQ ID NO: 2533579 - RNA, 19 nt, Homo sapiens
  misc_RNA (1)...(19): siRNA sense strand
ccuguguacucgauggaga

SEQ ID NO: 2533580 - RNA, 19 nt, Homo sapiens
  misc_RNA (1)...(19): siRNA sense strand
ccauuuacccugaggcugu

SEQ ID NO: 2533581 - RNA, 19 nt, Homo sapiens
  misc_RNA (1)...(19): siRNA sense strand
ucuacgagacggagcauca

SEQ ID NO: 2533582 - RNA, 19 nt, Homo sapiens
  misc_RNA (1)...(19): siRNA sense strand
gaaaugaaucagaagcugu

SEQ ID NO: 2533583 - RNA, 19 nt, Homo sapiens
  misc_RNA (1)...(19): siRNA sense strand
gaguacaucaugagccuga

SEQ ID NO: 2533584 - RNA, 19 nt, Homo sapiens
  misc_RNA (1)...(19): siRNA sense strand
ccaagaaguacaucgacca

SEQ ID NO: 2533585 - RNA, 19 nt, Homo sapiens
  misc_RNA (1)...(19): siRNA sense strand
agacaucaagaaggagaaa

SEQ ID NO: 2533586 - RNA, 19 nt, Homo sapiens
  misc_RNA (1)...(19): siRNA sense strand
cugaaguuguuuauggaaa

SEQ ID NO: 2533587 - RNA, 19 nt, Homo sapiens
  misc_RNA (1)...(19): siRNA sense strand
agggaagagauguggcaaa

SEQ ID NO: 2533588 - RNA, 19 nt, Homo sapiens
  misc_RNA (1)...(19): siRNA sense strand
gcuuauauccguaggcaga

SEQ ID NO: 2533589 - RNA, 19 nt, Homo sapiens
  misc_RNA (1)...(19): siRNA sense strand
ugguacaauuccuggagaa

SEQ ID NO: 2533590 - RNA, 19 nt, Homo sapiens
  misc_RNA (1)...(19): siRNA sense strand
cccuuaaagaagagcacaa

SEQ ID NO: 2533591 - RNA, 19 nt, Homo sapiens
  misc_RNA (1)...(19): siRNA sense strand
aggugauguucuugaauga

SEQ ID NO: 2533592 - RNA, 19 nt, Homo sapiens
  misc_RNA (1)...(19): siRNA sense strand
acgagaugguggaguacau

SEQ ID NO: 2533593 - RNA, 19 nt, Homo sapiens
  misc_RNA (1)...(19): siRNA sense strand
aguuugacccagaggaaga

SEQ ID NO: 2533594 - RNA, 19 nt, Homo sapiens
  misc_RNA (1)...(19): siRNA sense strand
ccgaaugaaggaaagggaa

SEQ ID NO: 2533595 - RNA, 19 nt, Homo sapiens
  misc_RNA (1)...(19): siRNA sense strand
aauacaaggcagagaagca

SEQ ID NO: 2533596 - RNA, 19 nt, Homo sapiens
  misc_RNA (1)...(19): siRNA sense strand
gggcugaguuugacccaga

SEQ ID NO: 2533597 - RNA, 19 nt, Homo sapiens
  misc_RNA (1)...(19): siRNA sense strand
acaucaagaaggagaaagu

SEQ ID NO: 2533598 - RNA, 19 nt, Homo sapiens
  misc_RNA (1)...(19): siRNA sense strand
cgaaugaaggaaagggaag

SEQ ID NO: 2533599 - RNA, 19 nt, Homo sapiens
  misc_RNA (1)...(19): siRNA sense strand
ccuauuugacagugaggau

SEQ ID NO: 2533600 - RNA, 19 nt, Homo sapiens
  misc_RNA (1)...(19): siRNA sense strand
uggcauacugugugguaca

SEQ ID NO: 2533601 - RNA, 19 nt, Homo sapiens
  misc_RNA (1)...(19): siRNA sense strand
gagccugauaagugacaau

SEQ ID NO: 2533602 - RNA, 19 nt, Homo sapiens
  misc_RNA (1)...(19): siRNA sense strand
ccuguguacucgauggaga

SEQ ID NO: 2533603 - RNA, 19 nt, Homo sapiens
  misc_RNA (1)...(19): siRNA sense strand
ccauuuacccugaggcugu

SEQ ID NO: 2533604 - RNA, 19 nt, Homo sapiens
  misc_RNA (1)...(19): siRNA sense strand
ucuacgagacggagcauca

SEQ ID NO: 2533605 - RNA, 19 nt, Homo sapiens
  misc_RNA (1)...(19): siRNA sense strand
gaaaugaaucagaagcugu

SEQ ID NO: 2533606 - RNA, 19 nt, Homo sapiens
  misc_RNA (1)...(19): siRNA sense strand
gaguacaucaugagccuga

SEQ ID NO: 2533607 - RNA, 19 nt, Homo sapiens
  misc_RNA (1)...(19): siRNA sense strand
ccaagaaguacaucgacca

SEQ ID NO: 2533608 - RNA, 19 nt, Homo sapiens
  misc_RNA (1)...(19): siRNA sense strand
agacaucaagaaggagaaa

SEQ ID NO: 2533609 - RNA, 19 nt, Homo sapiens
  misc_RNA (1)...(19): siRNA sense strand
cugaaguuguuuauggaaa

SEQ ID NO: 2533610 - RNA, 19 nt, Homo sapiens
  misc_RNA (1)...(19): siRNA sense strand
agggaagagauguggcaaa

SEQ ID NO: 2533611 - RNA, 19 nt, Homo sapiens
  misc_RNA (1)...(19): siRNA sense strand
gcuuauauccguaggcaga

SEQ ID NO: 2533612 - RNA, 19 nt, Homo sapiens
  misc_RNA (1)...(19): siRNA sense strand
ugguacaauuccuggagaa

SEQ ID NO: 2533613 - RNA, 19 nt, Homo sapiens
  misc_RNA (1)...(19): siRNA sense strand
cccuuaaagaagagcacaa

SEQ ID NO: 2533614 - RNA, 19 nt, Homo sapiens
  misc_RNA (1)...(19): siRNA sense strand
aggugauguucuugaauga

SEQ ID NO: 2533615 - RNA, 19 nt, Homo sapiens
  misc_RNA (1)...(19): siRNA sense strand
acgagaugguggaguacau

SEQ ID NO: 2533616 - RNA, 19 nt, Homo sapiens
  misc_RNA (1)...(19): siRNA sense strand
aguuugacccagaggaaga

SEQ ID NO: 2533617 - RNA, 19 nt, Homo sapiens
  misc_RNA (1)...(19): siRNA sense strand
ccgaaugaaggaaagggaa

SEQ ID NO: 2533618 - RNA, 19 nt, Homo sapiens
  misc_RNA (1)...(19): siRNA sense strand
aauacaaggcagagaagca

SEQ ID NO: 2533619 - RNA, 19 nt, Homo sapiens
  misc_RNA (1)...(19): siRNA sense strand
gggcugaguuugacccaga

SEQ ID NO: 2533620 - RNA, 19 nt, Homo sapiens
  misc_RNA (1)...(19): siRNA sense strand
acaucaagaaggagaaagu

SEQ ID NO: 2533621 - RNA, 19 nt, Homo sapiens
  misc_RNA (1)...(19): siRNA sense strand
cgaaugaaggaaagggaag

SEQ ID NO: 2533622 - RNA, 19 nt, Homo sapiens
  misc_RNA (1)...(19): siRNA sense strand
ccuauuugacagugaggau

SEQ ID NO: 2533623 - RNA, 19 nt, Homo sapiens
  misc_RNA (1)...(19): siRNA sense strand
uggcauacugugugguaca

SEQ ID NO: 2533624 - RNA, 19 nt, Homo sapiens
  misc_RNA (1)...(19): siRNA sense strand
gagccugauaagugacaau

SEQ ID NO: 2533625 - RNA, 19 nt, Homo sapiens
  misc_RNA (1)...(19): siRNA sense strand
ccuguguacucgauggaga

SEQ ID NO: 2533626 - RNA, 19 nt, Homo sapiens
  misc_RNA (1)...(19): siRNA sense strand
ccauuuacccugaggcugu

SEQ ID NO: 2533627 - RNA, 19 nt, Homo sapiens
  misc_RNA (1)...(19): siRNA sense strand
ucuacgagacggagcauca

SEQ ID NO: 2533628 - RNA, 19 nt, Homo sapiens
  misc_RNA (1)...(19): siRNA sense strand
gaaaugaaucagaagcugu

SEQ ID NO: 2533629 - RNA, 19 nt, Homo sapiens
  misc_RNA (1)...(19): siRNA sense strand
gaguacaucaugagccuga

SEQ ID NO: 2533630 - RNA, 19 nt, Homo sapiens
  misc_RNA (1)...(19): siRNA sense strand
ccaagaaguacaucgacca

SEQ ID NO: 2533631 - RNA, 19 nt, Homo sapiens
  misc_RNA (1)...(19): siRNA sense strand
agacaucaagaaggagaaa

SEQ ID NO: 2533632 - RNA, 19 nt, Homo sapiens
  misc_RNA (1)...(19): siRNA sense strand
ccaaagugccugagcggau

SEQ ID NO: 2533633 - RNA, 19 nt, Homo sapiens
  misc_RNA (1)...(19): siRNA sense strand
gugcacaaccagucggaca

SEQ ID NO: 2533634 - RNA, 19 nt, Homo sapiens
  misc_RNA (1)...(19): siRNA sense strand
gcuucaagaccaaggccuu

SEQ ID NO: 2533635 - RNA, 19 nt, Homo sapiens
  misc_RNA (1)...(19): siRNA sense strand
cacagugcgugcugggcua

SEQ ID NO: 2533636 - RNA, 19 nt, Homo sapiens
  misc_RNA (1)...(19): siRNA sense strand
cagaaaaggcgcugggauu

SEQ ID NO: 2533637 - RNA, 19 nt, Homo sapiens
  misc_RNA (1)...(19): siRNA sense strand
ugaacaaaugggaggaaca

SEQ ID NO: 2533638 - RNA, 19 nt, Homo sapiens
  misc_RNA (1)...(19): siRNA sense strand
uugccauaauugaguguaa

SEQ ID NO: 2533639 - RNA, 19 nt, Homo sapiens
  misc_RNA (1)...(19): siRNA sense strand
aagcagaucuccaggcuga

SEQ ID NO: 2533640 - RNA, 19 nt, Homo sapiens
  misc_RNA (1)...(19): siRNA sense strand
ucaucaguucacagagaaa

SEQ ID NO: 2533641 - RNA, 19 nt, Homo sapiens
  misc_RNA (1)...(19): siRNA sense strand
ccaugaugucugagagugu

SEQ ID NO: 2533642 - RNA, 19 nt, Homo sapiens
  misc_RNA (1)...(19): siRNA sense strand
acaaaugggaggaacacau

SEQ ID NO: 2533643 - RNA, 19 nt, Homo sapiens
  misc_RNA (1)...(19): siRNA sense strand
ggaggaacacauugcccaa

SEQ ID NO: 2533644 - RNA, 19 nt, Homo sapiens
  misc_RNA (1)...(19): siRNA sense strand
cuggguuggucgaggacuu

SEQ ID NO: 2533645 - RNA, 19 nt, Homo sapiens
  misc_RNA (1)...(19): siRNA sense strand
aaggagucucuuaaggaua

SEQ ID NO: 2533646 - RNA, 19 nt, Homo sapiens
  misc_RNA (1)...(19): siRNA sense strand
cgagaugaaaucagggaac

SEQ ID NO: 2533647 - RNA, 19 nt, Homo sapiens
  misc_RNA (1)...(19): siRNA sense strand
guguaaaguggcaguggca

SEQ ID NO: 2533648 - RNA, 19 nt, Homo sapiens
  misc_RNA (1)...(19): siRNA sense strand
ggcaaaguacccugagcau

SEQ ID NO: 2533649 - RNA, 19 nt, Homo sapiens
  misc_RNA (1)...(19): siRNA sense strand
cagagaaaguaauccagga

SEQ ID NO: 2533650 - RNA, 19 nt, Homo sapiens
  misc_RNA (1)...(19): siRNA sense strand
cguucauguuugcaggaca

SEQ ID NO: 2533651 - RNA, 19 nt, Homo sapiens
  misc_RNA (1)...(19): siRNA sense strand
guaaucagguuguaccaga

SEQ ID NO: 2533652 - RNA, 19 nt, Homo sapiens
  misc_RNA (1)...(19): siRNA sense strand
acucauaccugaaagcagu

SEQ ID NO: 2533653 - RNA, 19 nt, Homo sapiens
  misc_RNA (1)...(19): siRNA sense strand
guguucaaccuuagcaaaa

SEQ ID NO: 2533654 - RNA, 19 nt, Homo sapiens
  misc_RNA (1)...(19): siRNA sense strand
agagaugccgagaugaaau

SEQ ID NO: 2533655 - RNA, 19 nt, Homo sapiens
  misc_RNA (1)...(19): siRNA sense strand
caguucacagagaaaguaa

SEQ ID NO: 2533656 - RNA, 19 nt, Homo sapiens
  misc_RNA (1)...(19): siRNA sense strand
aaguaauccaggaccggaa

SEQ ID NO: 2533657 - RNA, 19 nt, Homo sapiens
  misc_RNA (1)...(19): siRNA sense strand
gugcaggaugccagagaga

SEQ ID NO: 2533658 - RNA, 19 nt, Homo sapiens
  misc_RNA (1)...(19): siRNA sense strand
augaagaugaugaugguau

SEQ ID NO: 2533659 - RNA, 19 nt, Homo sapiens
  misc_RNA (1)...(19): siRNA sense strand
cgggagaagaucagcuuga

SEQ ID NO: 2533660 - RNA, 19 nt, Homo sapiens
  misc_RNA (1)...(19): siRNA sense strand
gcuuaaugccagaccggga

SEQ ID NO: 2533661 - RNA, 19 nt, Homo sapiens
  misc_RNA (1)...(19): siRNA sense strand
auuuauaugaccuggauga

SEQ ID NO: 2533662 - RNA, 19 nt, Homo sapiens
  misc_RNA (1)...(19): siRNA sense strand
ccuacuaaacagaugaagu

SEQ ID NO: 2533663 - RNA, 19 nt, Homo sapiens
  misc_RNA (1)...(19): siRNA sense strand
ggguagcggaggugguguu

SEQ ID NO: 2533664 - RNA, 19 nt, Homo sapiens
  misc_RNA (1)...(19): siRNA sense strand
gugcaggaugccagagaga

SEQ ID NO: 2533665 - RNA, 19 nt, Homo sapiens
  misc_RNA (1)...(19): siRNA sense strand
augaagaugaugaugguau

SEQ ID NO: 2533666 - RNA, 19 nt, Homo sapiens
  misc_RNA (1)...(19): siRNA sense strand
cgggagaagaucagcuuga

SEQ ID NO: 2533667 - RNA, 19 nt, Homo sapiens
  misc_RNA (1)...(19): siRNA sense strand
gcuuaaugccagaccggga

SEQ ID NO: 2533668 - RNA, 19 nt, Homo sapiens
  misc_RNA (1)...(19): siRNA sense strand
auuuauaugaccuggauga

SEQ ID NO: 2533669 - RNA, 19 nt, Homo sapiens
  misc_RNA (1)...(19): siRNA sense strand
ccuacuaaacagaugaagu

SEQ ID NO: 2533670 - RNA, 19 nt, Homo sapiens
  misc_RNA (1)...(19): siRNA sense strand
ggguagcggaggugguguu

SEQ ID NO: 2533671 - RNA, 19 nt, Homo sapiens
  misc_RNA (1)...(19): siRNA sense strand
gggaaaaucaagagagaau

SEQ ID NO: 2533672 - RNA, 19 nt, Homo sapiens
  misc_RNA (1)...(19): siRNA sense strand
caagaaaggaagaugggua

SEQ ID NO: 2533673 - RNA, 19 nt, Homo sapiens
  misc_RNA (1)...(19): siRNA sense strand
aagaaaggaagauggguaa

SEQ ID NO: 2533674 - RNA, 19 nt, Homo sapiens
  misc_RNA (1)...(19): siRNA sense strand
gguuagagaagaagcaaau

SEQ ID NO: 2533675 - RNA, 19 nt, Homo sapiens
  misc_RNA (1)...(19): siRNA sense strand
acaugaaggaggagcuaaa

SEQ ID NO: 2533676 - RNA, 19 nt, Homo sapiens
  misc_RNA (1)...(19): siRNA sense strand
gcauaaacaaaguuggaau

SEQ ID NO: 2533677 - RNA, 19 nt, Homo sapiens
  misc_RNA (1)...(19): siRNA sense strand
ugguaaggaugaugaagaa

SEQ ID NO: 2533678 - RNA, 19 nt, Homo sapiens
  misc_RNA (1)...(19): siRNA sense strand
acaucaaccuucagaggaa

SEQ ID NO: 2533679 - RNA, 19 nt, Homo sapiens
  misc_RNA (1)...(19): siRNA sense strand
acgaggaguuugaaagcua

SEQ ID NO: 2533680 - RNA, 19 nt, Homo sapiens
  misc_RNA (1)...(19): siRNA sense strand
gaauuugauugcugggaau

SEQ ID NO: 2533681 - RNA, 19 nt, Homo sapiens
  misc_RNA (1)...(19): siRNA sense strand
gaagaauccucauggguca

SEQ ID NO: 2533682 - RNA, 19 nt, Homo sapiens
  misc_RNA (1)...(19): siRNA sense strand
ggguuagagaagaagcaaa

SEQ ID NO: 2533683 - RNA, 19 nt, Homo sapiens
  misc_RNA (1)...(19): siRNA sense strand
agagauaauacgaggaguu

SEQ ID NO: 2533684 - RNA, 19 nt, Homo sapiens
  misc_RNA (1)...(19): siRNA sense strand
agucagauuagcaaagaua

SEQ ID NO: 2533685 - RNA, 19 nt, Homo sapiens
  misc_RNA (1)...(19): siRNA sense strand
ggauaauagcccacagcau

SEQ ID NO: 2533686 - RNA, 19 nt, Homo sapiens
  misc_RNA (1)...(19): siRNA sense strand
gaaauguggcacuggaaau

SEQ ID NO: 2533687 - RNA, 19 nt, Homo sapiens
  misc_RNA (1)...(19): siRNA sense strand
ugggaagaggguagacaaa

SEQ ID NO: 2533688 - RNA, 19 nt, Homo sapiens
  misc_RNA (1)...(19): siRNA sense strand
guguagaugaaauggagaa

SEQ ID NO: 2533689 - RNA, 19 nt, Homo sapiens
  misc_RNA (1)...(19): siRNA sense strand
augaaauggagaaggaaga

SEQ ID NO: 2533690 - RNA, 19 nt, Homo sapiens
  misc_RNA (1)...(19): siRNA sense strand
ucagaaaguacuccagaaa

SEQ ID NO: 2533691 - RNA, 19 nt, Homo sapiens
  misc_RNA (1)...(19): siRNA sense strand
ggauuaauucugaagauca

SEQ ID NO: 2533692 - RNA, 19 nt, Homo sapiens
  misc_RNA (1)...(19): siRNA sense strand
caaacauaacagagcauau

SEQ ID NO: 2533693 - RNA, 19 nt, Homo sapiens
  misc_RNA (1)...(19): siRNA sense strand
caaauaaagcagagggguu

SEQ ID NO: 2533694 - RNA, 19 nt, Homo sapiens
  misc_RNA (1)...(19): siRNA sense strand
gggaagaagcuguguuaac

SEQ ID NO: 2533695 - RNA, 19 nt, Homo sapiens
  misc_RNA (1)...(19): siRNA sense strand
cuggaaauguuuugaggaa

SEQ ID NO: 2533696 - RNA, 19 nt, Homo sapiens
  misc_RNA (1)...(19): siRNA sense strand
gugaagacguguggggaaa

SEQ ID NO: 2533697 - RNA, 19 nt, Homo sapiens
  misc_RNA (1)...(19): siRNA sense strand
ggucauuacagaauaucaa

SEQ ID NO: 2533698 - RNA, 19 nt, Homo sapiens
  misc_RNA (1)...(19): siRNA sense strand
caacuaaugagcaggcaau

SEQ ID NO: 2533699 - RNA, 19 nt, Homo sapiens
  misc_RNA (1)...(19): siRNA sense strand
aggaagauuauuauggcaa

SEQ ID NO: 2533700 - RNA, 19 nt, Homo sapiens
  misc_RNA (1)...(19): siRNA sense strand
ggauguuuacgaagagauu

SEQ ID NO: 2533701 - RNA, 19 nt, Homo sapiens
  misc_RNA (1)...(19): siRNA sense strand
agggagaaaugaugauuca

SEQ ID NO: 2533702 - RNA, 19 nt, Homo sapiens
  misc_RNA (1)...(19): siRNA sense strand
agaagaguauaguguggaa

SEQ ID NO: 2533703 - RNA, 19 nt, Homo sapiens
  misc_RNA (1)...(19): siRNA sense strand
auuaguaagcucugggcaa

SEQ ID NO: 2533704 - RNA, 19 nt, Homo sapiens
  misc_RNA (1)...(19): siRNA sense strand
ccaucgagguaaaggaaac

SEQ ID NO: 2533705 - RNA, 19 nt, Homo sapiens
  misc_RNA (1)...(19): siRNA sense strand
gaagcaaauccauggugaa

SEQ ID NO: 2533706 - RNA, 19 nt, Homo sapiens
  misc_RNA (1)...(19): siRNA sense strand
agagagaauaagacaaaca

SEQ ID NO: 2533707 - RNA, 19 nt, Homo sapiens
  misc_RNA (1)...(19): siRNA sense strand
uggcaguaaaguugaguuu

SEQ ID NO: 2533708 - RNA, 19 nt, Homo sapiens
  misc_RNA (1)...(19): siRNA sense strand
agaaagaacaagagccgga

SEQ ID NO: 2533709 - RNA, 19 nt, Homo sapiens
  misc_RNA (1)...(19): siRNA sense strand
aagcaaauccauggugaaa

SEQ ID NO: 2533710 - RNA, 19 nt, Homo sapiens
  misc_RNA (1)...(19): siRNA sense strand
caaauaugggagaaaucaa

SEQ ID NO: 2533711 - RNA, 19 nt, Homo sapiens
  misc_RNA (1)...(19): siRNA sense strand
aggcaauugcuguagagaa

SEQ ID NO: 2533712 - RNA, 19 nt, Homo sapiens
  misc_RNA (1)...(19): siRNA sense strand
agagauuuccauucagaua

SEQ ID NO: 2533713 - RNA, 19 nt, Homo sapiens
  misc_RNA (1)...(19): siRNA sense strand
uggauuuacaguugggaau

SEQ ID NO: 2533714 - RNA, 19 nt, Homo sapiens
  misc_RNA (1)...(19): siRNA sense strand
cuccaaauacagaaagcaa

SEQ ID NO: 2533715 - RNA, 19 nt, Homo sapiens
  misc_RNA (1)...(19): siRNA sense strand
ggcaggaaaccuuaauaaa

SEQ ID NO: 2533716 - RNA, 19 nt, Homo sapiens
  misc_RNA (1)...(19): siRNA sense strand
cagggaaaaucaagagaga

SEQ ID NO: 2533717 - RNA, 19 nt, Homo sapiens
  misc_RNA (1)...(19): siRNA sense strand
aggaagaaaccaugucuau

SEQ ID NO: 2533718 - RNA, 19 nt, Homo sapiens
  misc_RNA (1)...(19): siRNA sense strand
uuuccaaacagaagaguau

SEQ ID NO: 2533719 - RNA, 19 nt, Homo sapiens
  misc_RNA (1)...(19): siRNA sense strand
cagcagaaagcuccguaaa

SEQ ID NO: 2533720 - RNA, 19 nt, Homo sapiens
  misc_RNA (1)...(19): siRNA sense strand
ucucaaagaaucaacagaa

SEQ ID NO: 2533721 - RNA, 19 nt, Homo sapiens
  misc_RNA (1)...(19): siRNA sense strand
guaaggaugaugaagaaca

SEQ ID NO: 2533722 - RNA, 19 nt, Homo sapiens
  misc_RNA (1)...(19): siRNA sense strand
cagagggguuagagaagaa

SEQ ID NO: 2533723 - RNA, 19 nt, Homo sapiens
  misc_RNA (1)...(19): siRNA sense strand
acuucaaauaugggagaaa

SEQ ID NO: 2533724 - RNA, 19 nt, Homo sapiens
  misc_RNA (1)...(19): siRNA sense strand
ucucauucaccaaggacaa

SEQ ID NO: 2533725 - RNA, 19 nt, Homo sapiens
  misc_RNA (1)...(19): siRNA sense strand
ucaagagagaauaagacaa

SEQ ID NO: 2533726 - RNA, 19 nt, Homo sapiens
  misc_RNA (1)...(19): siRNA sense strand
agaagaaucaucaguaaca

SEQ ID NO: 2533727 - RNA, 19 nt, Homo sapiens
  misc_RNA (1)...(19): siRNA sense strand
aauaaguguggcagggauu

SEQ ID NO: 2533728 - RNA, 19 nt, Homo sapiens
  misc_RNA (1)...(19): siRNA sense strand
cagacaggccagggaauau

SEQ ID NO: 2533729 - RNA, 19 nt, Homo sapiens
  misc_RNA (1)...(19): siRNA sense strand
acuccuacgccgugauuga

SEQ ID NO: 2533730 - RNA, 19 nt, Homo sapiens
  misc_RNA (1)...(19): siRNA sense strand
cugcaaagauccugggaga

SEQ ID NO: 2533731 - RNA, 19 nt, Homo sapiens
  misc_RNA (1)...(19): siRNA sense strand
ccuacucgccaguggacua

SEQ ID NO: 2533732 - RNA, 19 nt, Homo sapiens
  misc_RNA (1)...(19): siRNA sense strand
ccaucgucgucgucggaga

SEQ ID NO: 2533733 - RNA, 19 nt, Homo sapiens
  misc_RNA (1)...(19): siRNA sense strand
cagccuuguguuuggguau

SEQ ID NO: 2533734 - RNA, 19 nt, Homo sapiens
  misc_RNA (1)...(19): siRNA sense strand
caggaugggcucacgguca

SEQ ID NO: 2533735 - RNA, 19 nt, Homo sapiens
  misc_RNA (1)...(19): siRNA sense strand
cugcaaagauccugggaga

SEQ ID NO: 2533736 - RNA, 19 nt, Homo sapiens
  misc_RNA (1)...(19): siRNA sense strand
ccuacucgccaguggacua

SEQ ID NO: 2533737 - RNA, 19 nt, Homo sapiens
  misc_RNA (1)...(19): siRNA sense strand
ccaucgucgucgucggaga

SEQ ID NO: 2533738 - RNA, 19 nt, Homo sapiens
  misc_RNA (1)...(19): siRNA sense strand
cagccuuguguuuggguau

SEQ ID NO: 2533739 - RNA, 19 nt, Homo sapiens
  misc_RNA (1)...(19): siRNA sense strand
caggaugggcucacgguca

SEQ ID NO: 2533740 - RNA, 19 nt, Homo sapiens
  misc_RNA (1)...(19): siRNA sense strand
cugcaaagauccugggaga

SEQ ID NO: 2533741 - RNA, 19 nt, Homo sapiens
  misc_RNA (1)...(19): siRNA sense strand
ccuacucgccaguggacua

SEQ ID NO: 2533742 - RNA, 19 nt, Homo sapiens
  misc_RNA (1)...(19): siRNA sense strand
ccaucgucgucgucggaga

SEQ ID NO: 2533743 - RNA, 19 nt, Homo sapiens
  misc_RNA (1)...(19): siRNA sense strand
cagccuuguguuuggguau

SEQ ID NO: 2533744 - RNA, 19 nt, Homo sapiens
  misc_RNA (1)...(19): siRNA sense strand
caggaugggcucacgguca

SEQ ID NO: 2533745 - RNA, 19 nt, Homo sapiens
  misc_RNA (1)...(19): siRNA sense strand
ccguggagaucaugggcua

SEQ ID NO: 2533746 - RNA, 19 nt, Homo sapiens
  misc_RNA (1)...(19): siRNA sense strand
guacaaugaugaugagcca

SEQ ID NO: 2533747 - RNA, 19 nt, Homo sapiens
  misc_RNA (1)...(19): siRNA sense strand
gccuauggucggaacgaaa

SEQ ID NO: 2533748 - RNA, 19 nt, Homo sapiens
  misc_RNA (1)...(19): siRNA sense strand
uuugcauacugcugggaaa

SEQ ID NO: 2533749 - RNA, 19 nt, Homo sapiens
  misc_RNA (1)...(19): siRNA sense strand
cucuacuacuacugggaaa

SEQ ID NO: 2533750 - RNA, 19 nt, Homo sapiens
  misc_RNA (1)...(19): siRNA sense strand
acgaugaagaauuugcaua

SEQ ID NO: 2533751 - RNA, 19 nt, Homo sapiens
  misc_RNA (1)...(19): siRNA sense strand
agauuauggacgaugaaga

SEQ ID NO: 2533752 - RNA, 19 nt, Homo sapiens
  misc_RNA (1)...(19): siRNA sense strand
ucaccauggaaguuguaaa

SEQ ID NO: 2533753 - RNA, 19 nt, Homo sapiens
  misc_RNA (1)...(19): siRNA sense strand
gggaaagagauuaccgaag

SEQ ID NO: 2533754 - RNA, 19 nt, Homo sapiens
  misc_RNA (1)...(19): siRNA sense strand
gcuuacaaguguuuccaga

SEQ ID NO: 2533755 - RNA, 19 nt, Homo sapiens
  misc_RNA (1)...(19): siRNA sense strand
cggaauaccgucuggcugu

SEQ ID NO: 2533756 - RNA, 19 nt, Homo sapiens
  misc_RNA (1)...(19): siRNA sense strand
gcagaaaggugcuuccucu

SEQ ID NO: 2533757 - RNA, 19 nt, Homo sapiens
  misc_RNA (1)...(19): siRNA sense strand
uggaaguuguaaagcacca

SEQ ID NO: 2533758 - RNA, 19 nt, Homo sapiens
  misc_RNA (1)...(19): siRNA sense strand
acacaaacuacgaggucac

SEQ ID NO: 2533759 - RNA, 19 nt, Homo sapiens
  misc_RNA (1)...(19): siRNA sense strand
gggcaaaacaucuuggaaa

SEQ ID NO: 2533760 - RNA, 19 nt, Homo sapiens
  misc_RNA (1)...(19): siRNA sense strand
gcuaaaagcaagagacaca

SEQ ID NO: 2533761 - RNA, 19 nt, Homo sapiens
  misc_RNA (1)...(19): siRNA sense strand
cauuauuggagaacagaua

SEQ ID NO: 2533762 - RNA, 19 nt, Homo sapiens
  misc_RNA (1)...(19): siRNA sense strand
ccauugugcccuaaggaaa

SEQ ID NO: 2533763 - RNA, 19 nt, Homo sapiens
  misc_RNA (1)...(19): siRNA sense strand
aggaaaaggaaaagaguga

SEQ ID NO: 2533764 - RNA, 19 nt, Homo sapiens
  misc_RNA (1)...(19): siRNA sense strand
ggcaaaacaucuuggaaau

SEQ ID NO: 2533765 - RNA, 19 nt, Homo sapiens
  misc_RNA (1)...(19): siRNA sense strand
uugcacaaggaaagagaaa

SEQ ID NO: 2533766 - RNA, 19 nt, Homo sapiens
  misc_RNA (1)...(19): siRNA sense strand
aaguggugguggacaguaa

SEQ ID NO: 2533767 - RNA, 19 nt, Homo sapiens
  misc_RNA (1)...(19): siRNA sense strand
ugguaauaugguagaagaa

SEQ ID NO: 2533768 - RNA, 19 nt, Homo sapiens
  misc_RNA (1)...(19): siRNA sense strand
ucaacaagcaagaagaaaa

SEQ ID NO: 2533769 - RNA, 19 nt, Homo sapiens
  misc_RNA (1)...(19): siRNA sense strand
acaguaaggaaaaggaaaa

SEQ ID NO: 2533770 - RNA, 19 nt, Homo sapiens
  misc_RNA (1)...(19): siRNA sense strand
uugaaaugucagugaauga

SEQ ID NO: 2533771 - RNA, 19 nt, Homo sapiens
  misc_RNA (1)...(19): siRNA sense strand
gcuugcugaucuagagaau

SEQ ID NO: 2533772 - RNA, 19 nt, Homo sapiens
  misc_RNA (1)...(19): siRNA sense strand
agaauauggcggaggagga

SEQ ID NO: 2533773 - RNA, 19 nt, Homo sapiens
  misc_RNA (1)...(19): siRNA sense strand
ucuuggaaaugcagucaaa

SEQ ID NO: 2533774 - RNA, 19 nt, Homo sapiens
  misc_RNA (1)...(19): siRNA sense strand
cuggaaagucucaguugaa

SEQ ID NO: 2533775 - RNA, 19 nt, Homo sapiens
  misc_RNA (1)...(19): siRNA sense strand
gaacugauaugcuaggaca

SEQ ID NO: 2533776 - RNA, 19 nt, Homo sapiens
  misc_RNA (1)...(19): siRNA sense strand
caugaauaaaggagagacu

SEQ ID NO: 2533777 - RNA, 19 nt, Homo sapiens
  misc_RNA (1)...(19): siRNA sense strand
caacaagcaagaagaaaau

SEQ ID NO: 2533778 - RNA, 19 nt, Homo sapiens
  misc_RNA (1)...(19): siRNA sense strand
cagucaaaguuacaaucaa

SEQ ID NO: 2533779 - RNA, 19 nt, Homo sapiens
  misc_RNA (1)...(19): siRNA sense strand
aauugaaagugguggugga

SEQ ID NO: 2533780 - RNA, 19 nt, Homo sapiens
  misc_RNA (1)...(19): siRNA sense strand
aggaaaagagugaugauau

SEQ ID NO: 2533781 - RNA, 19 nt, Homo sapiens
  misc_RNA (1)...(19): siRNA sense strand
auucacagacacagcauua

SEQ ID NO: 2533782 - RNA, 19 nt, Homo sapiens
  misc_RNA (1)...(19): siRNA sense strand
agugaaugacaaagcagaa

SEQ ID NO: 2533783 - RNA, 19 nt, Homo sapiens
  misc_RNA (1)...(19): siRNA sense strand
gugguggacaguaaggaaa

SEQ ID NO: 2533784 - RNA, 19 nt, Homo sapiens
  misc_RNA (1)...(19): siRNA sense strand
guaauauuaaggugaccaa

SEQ ID NO: 2533785 - RNA, 19 nt, Homo sapiens
  misc_RNA (1)...(19): siRNA sense strand
gcaagaagaaaauggugua

SEQ ID NO: 2533786 - RNA, 19 nt, Homo sapiens
  misc_RNA (1)...(19): siRNA sense strand
aauuuaggcaagaagcaaa

SEQ ID NO: 2533787 - RNA, 19 nt, Homo sapiens
  misc_RNA (1)...(19): siRNA sense strand
uggagaaggaggaggugga

SEQ ID NO: 2533788 - RNA, 19 nt, Homo sapiens
  misc_RNA (1)...(19): siRNA sense strand
cagugaaaccaaacauuau

SEQ ID NO: 2533789 - RNA, 19 nt, Homo sapiens
  misc_RNA (1)...(19): siRNA sense strand
uuggaacaucagugaauua

SEQ ID NO: 2533790 - RNA, 19 nt, Homo sapiens
  misc_RNA (1)...(19): siRNA sense strand
cugaauauuacaaggaacu

SEQ ID NO: 2533791 - RNA, 19 nt, Homo sapiens
  misc_RNA (1)...(19): siRNA sense strand
cagaauuguuguagcugca

SEQ ID NO: 2533792 - RNA, 19 nt, Homo sapiens
  misc_RNA (1)...(19): siRNA sense strand
aaacauuauuggagaacag

SEQ ID NO: 2533793 - RNA, 19 nt, Homo sapiens
  misc_RNA (1)...(19): siRNA sense strand
gaacgaaaaccuuuggaau

SEQ ID NO: 2533794 - RNA, 19 nt, Homo sapiens
  misc_RNA (1)...(19): siRNA sense strand
uggaaagacagcaauagaa

SEQ ID NO: 2533795 - RNA, 19 nt, Homo sapiens
  misc_RNA (1)...(19): siRNA sense strand
gaucacaaauuuaggcaag

SEQ ID NO: 2533796 - RNA, 19 nt, Homo sapiens
  misc_RNA (1)...(19): siRNA sense strand
cuaaaccaccuaaggaaau

SEQ ID NO: 2533797 - RNA, 19 nt, Homo sapiens
  misc_RNA (1)...(19): siRNA sense strand
ugaaagaggcagacacgga

SEQ ID NO: 2533798 - RNA, 19 nt, Homo sapiens
  misc_RNA (1)...(19): siRNA sense strand
ugaaaguggugguggacag

SEQ ID NO: 2533799 - RNA, 19 nt, Homo sapiens
  misc_RNA (1)...(19): siRNA sense strand
ugucaacaagcaagaagaa

SEQ ID NO: 2533800 - RNA, 19 nt, Homo sapiens
  misc_RNA (1)...(19): siRNA sense strand
aaggaaugaauaugccaaa

SEQ ID NO: 2533801 - RNA, 19 nt, Homo sapiens
  misc_RNA (1)...(19): siRNA sense strand
aguugaaaugucagugaau

SEQ ID NO: 2533802 - RNA, 19 nt, Homo sapiens
  misc_RNA (1)...(19): siRNA sense strand
ccacaugaauaaaggagag

SEQ ID NO: 2533803 - RNA, 19 nt, Homo sapiens
  misc_RNA (1)...(19): siRNA sense strand
gcaacaaaggcauagaagu

SEQ ID NO: 2533804 - RNA, 19 nt, Homo sapiens
  misc_RNA (1)...(19): siRNA sense strand
cagaugaaacagccaagaa

SEQ ID NO: 2533805 - RNA, 19 nt, Homo sapiens
  misc_RNA (1)...(19): siRNA sense strand
aggcagacacggauguaca

SEQ ID NO: 2533806 - RNA, 19 nt, Homo sapiens
  misc_RNA (1)...(19): siRNA sense strand
ggugguggacaguaaggaa

SEQ ID NO: 2533807 - RNA, 19 nt, Homo sapiens
  misc_RNA (1)...(19): siRNA sense strand
augaaacagccaagaagau

SEQ ID NO: 2533808 - RNA, 19 nt, Homo sapiens
  misc_RNA (1)...(19): siRNA sense strand
aagaaaacccauauagaca

SEQ ID NO: 2533809 - RNA, 19 nt, Homo sapiens
  misc_RNA (1)...(19): siRNA sense strand
gccuggaaagacagcaaua

SEQ ID NO: 2533810 - RNA, 19 nt, Homo sapiens
  misc_RNA (1)...(19): siRNA sense strand
ggacaguaaggaaaaggaa

SEQ ID NO: 2533811 - RNA, 19 nt, Homo sapiens
  misc_RNA (1)...(19): siRNA sense strand
uaacauuguccgaacugaa

SEQ ID NO: 2533812 - RNA, 19 nt, Homo sapiens
  misc_RNA (1)...(19): siRNA sense strand
aggaagaggaggaggagau

SEQ ID NO: 2533813 - RNA, 19 nt, Homo sapiens
  misc_RNA (1)...(19): siRNA sense strand
gacaaaauggugugggaaa

SEQ ID NO: 2533814 - RNA, 19 nt, Homo sapiens
  misc_RNA (1)...(19): siRNA sense strand
cugaagcagagaaggacaa

SEQ ID NO: 2533815 - RNA, 19 nt, Homo sapiens
  misc_RNA (1)...(19): siRNA sense strand
uggacuuugugguggagaa

SEQ ID NO: 2533816 - RNA, 19 nt, Homo sapiens
  misc_RNA (1)...(19): siRNA sense strand
aggaggaggaagaggagga

SEQ ID NO: 2533817 - RNA, 19 nt, Homo sapiens
  misc_RNA (1)...(19): siRNA sense strand
aggaggaagaggaggagga

SEQ ID NO: 2533818 - RNA, 19 nt, Homo sapiens
  misc_RNA (1)...(19): siRNA sense strand
cggcacaacuucacagcca

SEQ ID NO: 2533819 - RNA, 19 nt, Homo sapiens
  misc_RNA (1)...(19): siRNA sense strand
ccaggaaggaggagaccga

SEQ ID NO: 2533820 - RNA, 19 nt, Homo sapiens
  misc_RNA (1)...(19): siRNA sense strand
aggcugaggagcuggugaa

SEQ ID NO: 2533821 - RNA, 19 nt, Homo sapiens
  misc_RNA (1)...(19): siRNA sense strand
acaaaauggugugggaaau

SEQ ID NO: 2533822 - RNA, 19 nt, Homo sapiens
  misc_RNA (1)...(19): siRNA sense strand
uggcaggcgaggaggacau

SEQ ID NO: 2533823 - RNA, 19 nt, Homo sapiens
  misc_RNA (1)...(19): siRNA sense strand
ggguggacuuuguggugga

SEQ ID NO: 2533824 - RNA, 19 nt, Homo sapiens
  misc_RNA (1)...(19): siRNA sense strand
aagcagagaaggacaaaau

SEQ ID NO: 2533825 - RNA, 19 nt, Homo sapiens
  misc_RNA (1)...(19): siRNA sense strand
aggaggaggaggaagagga

SEQ ID NO: 2533826 - RNA, 19 nt, Homo sapiens
  misc_RNA (1)...(19): siRNA sense strand
aggaagaggaggaggagau

SEQ ID NO: 2533827 - RNA, 19 nt, Homo sapiens
  misc_RNA (1)...(19): siRNA sense strand
gacaaaauggugugggaaa

SEQ ID NO: 2533828 - RNA, 19 nt, Homo sapiens
  misc_RNA (1)...(19): siRNA sense strand
cugaagcagagaaggacaa

SEQ ID NO: 2533829 - RNA, 19 nt, Homo sapiens
  misc_RNA (1)...(19): siRNA sense strand
uggacuuugugguggagaa

SEQ ID NO: 2533830 - RNA, 19 nt, Homo sapiens
  misc_RNA (1)...(19): siRNA sense strand
aggaggaggaagaggagga

SEQ ID NO: 2533831 - RNA, 19 nt, Homo sapiens
  misc_RNA (1)...(19): siRNA sense strand
aggaggaagaggaggagga

SEQ ID NO: 2533832 - RNA, 19 nt, Homo sapiens
  misc_RNA (1)...(19): siRNA sense strand
cggcacaacuucacagcca

SEQ ID NO: 2533833 - RNA, 19 nt, Homo sapiens
  misc_RNA (1)...(19): siRNA sense strand
ccaggaaggaggagaccga

SEQ ID NO: 2533834 - RNA, 19 nt, Homo sapiens
  misc_RNA (1)...(19): siRNA sense strand
aggcugaggagcuggugaa

SEQ ID NO: 2533835 - RNA, 19 nt, Homo sapiens
  misc_RNA (1)...(19): siRNA sense strand
acaaaauggugugggaaau

SEQ ID NO: 2533836 - RNA, 19 nt, Homo sapiens
  misc_RNA (1)...(19): siRNA sense strand
uggcaggcgaggaggacau

SEQ ID NO: 2533837 - RNA, 19 nt, Homo sapiens
  misc_RNA (1)...(19): siRNA sense strand
ggguggacuuuguggugga

SEQ ID NO: 2533838 - RNA, 19 nt, Homo sapiens
  misc_RNA (1)...(19): siRNA sense strand
aagcagagaaggacaaaau

SEQ ID NO: 2533839 - RNA, 19 nt, Homo sapiens
  misc_RNA (1)...(19): siRNA sense strand
aggaggaggaggaagagga

SEQ ID NO: 2533840 - RNA, 19 nt, Homo sapiens
  misc_RNA (1)...(19): siRNA sense strand
agaccaacugccagacaaa

SEQ ID NO: 2533841 - RNA, 19 nt, Homo sapiens
  misc_RNA (1)...(19): siRNA sense strand
aauccaggaaagaaagaaa

SEQ ID NO: 2533842 - RNA, 19 nt, Homo sapiens
  misc_RNA (1)...(19): siRNA sense strand
uggauaagugggagaagau

SEQ ID NO: 2533843 - RNA, 19 nt, Homo sapiens
  misc_RNA (1)...(19): siRNA sense strand
gugaaaaugaugcuggaua

SEQ ID NO: 2533844 - RNA, 19 nt, Homo sapiens
  misc_RNA (1)...(19): siRNA sense strand
uugccaugauugaguuaaa

SEQ ID NO: 2533845 - RNA, 19 nt, Homo sapiens
  misc_RNA (1)...(19): siRNA sense strand
ggguaaagcaggauaacac

SEQ ID NO: 2533846 - RNA, 19 nt, Homo sapiens
  misc_RNA (1)...(19): siRNA sense strand
gcacauugccugcagggau

SEQ ID NO: 2533847 - RNA, 19 nt, Homo sapiens
  misc_RNA (1)...(19): siRNA sense strand
ccaugauccuuaugcaaaa

SEQ ID NO: 2533848 - RNA, 19 nt, Homo sapiens
  misc_RNA (1)...(19): siRNA sense strand
gcguggaggucuaugagca

SEQ ID NO: 2533849 - RNA, 19 nt, Homo sapiens
  misc_RNA (1)...(19): siRNA sense strand
aggaugauaacauggagaa

SEQ ID NO: 2533850 - RNA, 19 nt, Homo sapiens
  misc_RNA (1)...(19): siRNA sense strand
ccauauuugaacucagcaa

SEQ ID NO: 2533851 - RNA, 19 nt, Homo sapiens
  misc_RNA (1)...(19): siRNA sense strand
uguauuugcaccugaagaa

SEQ ID NO: 2533852 - RNA, 19 nt, Homo sapiens
  misc_RNA (1)...(19): siRNA sense strand
cuggauaagugggagaaga

SEQ ID NO: 2533853 - RNA, 19 nt, Homo sapiens
  misc_RNA (1)...(19): siRNA sense strand
gaacagaucccaaguccca

SEQ ID NO: 2533854 - RNA, 19 nt, Homo sapiens
  misc_RNA (1)...(19): siRNA sense strand
acucgaugucucuggauau

SEQ ID NO: 2533855 - RNA, 19 nt, Homo sapiens
  misc_RNA (1)...(19): siRNA sense strand
cauggagaagcuugaggaa

SEQ ID NO: 2533856 - RNA, 19 nt, Homo sapiens
  misc_RNA (1)...(19): siRNA sense strand
gagaagauuugcagcacuc

SEQ ID NO: 2533857 - RNA, 19 nt, Homo sapiens
  misc_RNA (1)...(19): siRNA sense strand
auggagaagcuugaggaaa

SEQ ID NO: 2533858 - RNA, 19 nt, Homo sapiens
  misc_RNA (1)...(19): siRNA sense strand
ggagaagauuugcagcacu

SEQ ID NO: 2533859 - RNA, 19 nt, Homo sapiens
  misc_RNA (1)...(19): siRNA sense strand
cccugagcaucaagagaga

SEQ ID NO: 2533860 - RNA, 19 nt, Homo sapiens
  misc_RNA (1)...(19): siRNA sense strand
cuggcuaugaagaaagaaa

SEQ ID NO: 2533861 - RNA, 19 nt, Homo sapiens
  misc_RNA (1)...(19): siRNA sense strand
cuaugaagaaagaaagcau

SEQ ID NO: 2533862 - RNA, 19 nt, Homo sapiens
  misc_RNA (1)...(19): siRNA sense strand
aguucaaguucgagccuga

SEQ ID NO: 2533863 - RNA, 19 nt, Homo sapiens
  misc_RNA (1)...(19): siRNA sense strand
acacggaagcggaagccaa

SEQ ID NO: 2533864 - RNA, 19 nt, Homo sapiens
  misc_RNA (1)...(19): siRNA sense strand
aguucgagccugaggacuu

SEQ ID NO: 2533865 - RNA, 19 nt, Homo sapiens
  misc_RNA (1)...(19): siRNA sense strand
uggaggaguucccggguga

SEQ ID NO: 2533866 - RNA, 19 nt, Homo sapiens
  misc_RNA (1)...(19): siRNA sense strand
ccgacuucuuggaggaguu

SEQ ID NO: 2533867 - RNA, 19 nt, Homo sapiens
  misc_RNA (1)...(19): siRNA sense strand
ccucaggauccacaaggaa

SEQ ID NO: 2533868 - RNA, 19 nt, Homo sapiens
  misc_RNA (1)...(19): siRNA sense strand
uggaaagauaagagggauu

SEQ ID NO: 2533869 - RNA, 19 nt, Homo sapiens
  misc_RNA (1)...(19): siRNA sense strand
uggauauccugaaggcaaa

SEQ ID NO: 2533870 - RNA, 19 nt, Homo sapiens
  misc_RNA (1)...(19): siRNA sense strand
ggauuaagaaggaacucaa

SEQ ID NO: 2533871 - RNA, 19 nt, Homo sapiens
  misc_RNA (1)...(19): siRNA sense strand
uuaagauggacuagugaaa

SEQ ID NO: 2533872 - RNA, 19 nt, Homo sapiens
  misc_RNA (1)...(19): siRNA sense strand
augcacaagaagaggaaau

SEQ ID NO: 2533873 - RNA, 19 nt, Homo sapiens
  misc_RNA (1)...(19): siRNA sense strand
ccacauagccuuuggaccu

SEQ ID NO: 2533874 - RNA, 19 nt, Homo sapiens
  misc_RNA (1)...(19): siRNA sense strand
gcucauauauggaagguac

SEQ ID NO: 2533875 - RNA, 19 nt, Homo sapiens
  misc_RNA (1)...(19): siRNA sense strand
accaagaguuaaagaacau

SEQ ID NO: 2533876 - RNA, 19 nt, Homo sapiens
  misc_RNA (1)...(19): siRNA sense strand
ccucaagacacgaaauuca

SEQ ID NO: 2533877 - RNA, 19 nt, Homo sapiens
  misc_RNA (1)...(19): siRNA sense strand
caucauaugugcaagacca

SEQ ID NO: 2533878 - RNA, 19 nt, Homo sapiens
  misc_RNA (1)...(19): siRNA sense strand
gcaauagcucaaaguggaa

SEQ ID NO: 2533879 - RNA, 19 nt, Homo sapiens
  misc_RNA (1)...(19): siRNA sense strand
uugcaauguuucagauaca

SEQ ID NO: 2533880 - RNA, 19 nt, Homo sapiens
  misc_RNA (1)...(19): siRNA sense strand
caacacuauaccagggauu

SEQ ID NO: 2533881 - RNA, 19 nt, Homo sapiens
  misc_RNA (1)...(19): siRNA sense strand
auggauauccugaaggcaa

SEQ ID NO: 2533882 - RNA, 19 nt, Homo sapiens
  misc_RNA (1)...(19): siRNA sense strand
ugaucuaacccaugcacaa

SEQ ID NO: 2533883 - RNA, 19 nt, Homo sapiens
  misc_RNA (1)...(19): siRNA sense strand
gugcaagaccagagcgaag

SEQ ID NO: 2533884 - RNA, 19 nt, Homo sapiens
  misc_RNA (1)...(19): siRNA sense strand
cccauuauucugaagguaa

SEQ ID NO: 2533885 - RNA, 19 nt, Homo sapiens
  misc_RNA (1)...(19): siRNA sense strand
augacauacuggacaaauu

SEQ ID NO: 2533886 - RNA, 19 nt, Homo sapiens
  misc_RNA (1)...(19): siRNA sense strand
ggauaagaggagacaugau

SEQ ID NO: 2533887 - RNA, 19 nt, Homo sapiens
  misc_RNA (1)...(19): siRNA sense strand
cauucaacaaccaggguau

SEQ ID NO: 2533888 - RNA, 19 nt, Homo sapiens
  misc_RNA (1)...(19): siRNA sense strand
gcagauugccagaagucau

SEQ ID NO: 2533889 - RNA, 19 nt, Homo sapiens
  misc_RNA (1)...(19): siRNA sense strand
agauaagagggauuaagaa

SEQ ID NO: 2533890 - RNA, 19 nt, Homo sapiens
  misc_RNA (1)...(19): siRNA sense strand
cugcauaaucucaaugaca

SEQ ID NO: 2533891 - RNA, 19 nt, Homo sapiens
  misc_RNA (1)...(19): siRNA sense strand
gaagguaaccguuggagca

SEQ ID NO: 2533892 - RNA, 19 nt, Homo sapiens
  misc_RNA (1)...(19): siRNA sense strand
agagaaaccauuaaguuca

SEQ ID NO: 2533893 - RNA, 19 nt, Homo sapiens
  misc_RNA (1)...(19): siRNA sense strand
ucaacagagcugaguguca

SEQ ID NO: 2533894 - RNA, 19 nt, Homo sapiens
  misc_RNA (1)...(19): siRNA sense strand
gaggaugauauucgggaca

SEQ ID NO: 2533895 - RNA, 19 nt, Homo sapiens
  misc_RNA (1)...(19): siRNA sense strand
ccacaaaaguugguugcaa

SEQ ID NO: 2533896 - RNA, 19 nt, Homo sapiens
  misc_RNA (1)...(19): siRNA sense strand
aaccaagaguuaaagaaca

SEQ ID NO: 2533897 - RNA, 19 nt, Homo sapiens
  misc_RNA (1)...(19): siRNA sense strand
gguugcaauguuucagaua

SEQ ID NO: 2533898 - RNA, 19 nt, Homo sapiens
  misc_RNA (1)...(19): siRNA sense strand
gcaaaauaugcuagaaugu

SEQ ID NO: 2533899 - RNA, 19 nt, Homo sapiens
  misc_RNA (1)...(19): siRNA sense strand
uucagauacaguagaguua

SEQ ID NO: 2533900 - RNA, 19 nt, Homo sapiens
  misc_RNA (1)...(19): siRNA sense strand
guauauccaugguggcuca

SEQ ID NO: 2533901 - RNA, 19 nt, Homo sapiens
  misc_RNA (1)...(19): siRNA sense strand
caauucaaccaaaggacuu

SEQ ID NO: 2533902 - RNA, 19 nt, Homo sapiens
  misc_RNA (1)...(19): siRNA sense strand
cacaagaagaggaaaucau

SEQ ID NO: 2533903 - RNA, 19 nt, Homo sapiens
  misc_RNA (1)...(19): siRNA sense strand
guagcauggaccagauauu

SEQ ID NO: 2533904 - RNA, 19 nt, Homo sapiens
  misc_RNA (1)...(19): siRNA sense strand
ccaugcacaagaagaggaa

SEQ ID NO: 2533905 - RNA, 19 nt, Homo sapiens
  misc_RNA (1)...(19): siRNA sense strand
auacaagcuuuaagaugga

SEQ ID NO: 2533906 - RNA, 19 nt, Homo sapiens
  misc_RNA (1)...(19): siRNA sense strand
cacaaaaguugguugcaau

SEQ ID NO: 2533907 - RNA, 19 nt, Homo sapiens
  misc_RNA (1)...(19): siRNA sense strand
aaagaacauuacagagcca

SEQ ID NO: 2533908 - RNA, 19 nt, Homo sapiens
  misc_RNA (1)...(19): siRNA sense strand
caauacauuuacuggagga

SEQ ID NO: 2533909 - RNA, 19 nt, Homo sapiens
  misc_RNA (1)...(19): siRNA sense strand
agcaauagcucaaagugga

SEQ ID NO: 2533910 - RNA, 19 nt, Homo sapiens
  misc_RNA (1)...(19): siRNA sense strand
cugcaaaauaugcuagaau

SEQ ID NO: 2533911 - RNA, 19 nt, Homo sapiens
  misc_RNA (1)...(19): siRNA sense strand
ccuuuggaccugugauuga

SEQ ID NO: 2533912 - RNA, 19 nt, Homo sapiens
  misc_RNA (1)...(19): siRNA sense strand
gaguuauuuccuugcaauu

SEQ ID NO: 2533913 - RNA, 19 nt, Homo sapiens
  misc_RNA (1)...(19): siRNA sense strand
gguuggaguugguaccuca

SEQ ID NO: 2533914 - RNA, 19 nt, Homo sapiens
  misc_RNA (1)...(19): siRNA sense strand
ccagauuacacacuagcua

SEQ ID NO: 2533915 - RNA, 19 nt, Homo sapiens
  misc_RNA (1)...(19): siRNA sense strand
cccagaugcacguggccaa

SEQ ID NO: 2533916 - RNA, 19 nt, Homo sapiens
  misc_RNA (1)...(19): siRNA sense strand
acuggaggacagaacaaua

SEQ ID NO: 2533917 - RNA, 19 nt, Homo sapiens
  misc_RNA (1)...(19): siRNA sense strand
ccagauauugauggagcaa

SEQ ID NO: 2533918 - RNA, 19 nt, Homo sapiens
  misc_RNA (1)...(19): siRNA sense strand
aaggauaagaggagacaug

SEQ ID NO: 2533919 - RNA, 19 nt, Homo sapiens
  misc_RNA (1)...(19): siRNA sense strand
gccuacagaagaagccuua

SEQ ID NO: 2533920 - RNA, 19 nt, Homo sapiens
  misc_RNA (1)...(19): siRNA sense strand
acagaagaagccuuacaaa

SEQ ID NO: 2533921 - RNA, 19 nt, Homo sapiens
  misc_RNA (1)...(19): siRNA sense strand
agguuaugcuugugagaaa

SEQ ID NO: 2533922 - RNA, 19 nt, Homo sapiens
  misc_RNA (1)...(19): siRNA sense strand
uguaaauguuagugaggaa

SEQ ID NO: 2533923 - RNA, 19 nt, Homo sapiens
  misc_RNA (1)...(19): siRNA sense strand
gcaagaagaugguggggau

SEQ ID NO: 2533924 - RNA, 19 nt, Homo sapiens
  misc_RNA (1)...(19): siRNA sense strand
cuggaagugggaagagaaa

SEQ ID NO: 2533925 - RNA, 19 nt, Homo sapiens
  misc_RNA (1)...(19): siRNA sense strand
ugaaagagaauaauggaga

SEQ ID NO: 2533926 - RNA, 19 nt, Homo sapiens
  misc_RNA (1)...(19): siRNA sense strand
ggaaaauggaggacaaaca

SEQ ID NO: 2533927 - RNA, 19 nt, Homo sapiens
  misc_RNA (1)...(19): siRNA sense strand
cagaagggacuguggagau

SEQ ID NO: 2533928 - RNA, 19 nt, Homo sapiens
  misc_RNA (1)...(19): siRNA sense strand
ugggaagagaaauaggaua

SEQ ID NO: 2533929 - RNA, 19 nt, Homo sapiens
  misc_RNA (1)...(19): siRNA sense strand
gaggcaaaauaguuggaaa

SEQ ID NO: 2533930 - RNA, 19 nt, Homo sapiens
  misc_RNA (1)...(19): siRNA sense strand
cagaaagcagccagggaga

SEQ ID NO: 2533931 - RNA, 19 nt, Homo sapiens
  misc_RNA (1)...(19): siRNA sense strand
cugaugaggcagugaaagu

SEQ ID NO: 2533932 - RNA, 19 nt, Homo sapiens
  misc_RNA (1)...(19): siRNA sense strand
gagaaauaggauaagaagu

SEQ ID NO: 2533933 - RNA, 19 nt, Homo sapiens
  misc_RNA (1)...(19): siRNA sense strand
gcugcaucccugaggagaa

SEQ ID NO: 2533934 - RNA, 19 nt, Homo sapiens
  misc_RNA (1)...(19): siRNA sense strand
cgguugagggugaggagga

SEQ ID NO: 2533935 - RNA, 19 nt, Homo sapiens
  misc_RNA (1)...(19): siRNA sense strand
cagugaaaguuguguccga

SEQ ID NO: 2533936 - RNA, 19 nt, Homo sapiens
  misc_RNA (1)...(19): siRNA sense strand
caaaccagacagagaggau

SEQ ID NO: 2533937 - RNA, 19 nt, Homo sapiens
  misc_RNA (1)...(19): siRNA sense strand
augaguuaaugauggagaa

SEQ ID NO: 2533938 - RNA, 19 nt, Homo sapiens
  misc_RNA (1)...(19): siRNA sense strand
ucuucaaccuagaggacca

SEQ ID NO: 2533939 - RNA, 19 nt, Homo sapiens
  misc_RNA (1)...(19): siRNA sense strand
accuagaggaccaggaaga

SEQ ID NO: 2533940 - RNA, 19 nt, Homo sapiens
  misc_RNA (1)...(19): siRNA sense strand
augcugaacauaagccaua

SEQ ID NO: 2533941 - RNA, 19 nt, Homo sapiens
  misc_RNA (1)...(19): siRNA sense strand
ccuagaucucacacaaaua

SEQ ID NO: 2533942 - RNA, 19 nt, Homo sapiens
  misc_RNA (1)...(19): siRNA sense strand
cacacaaaccagacagaga

SEQ ID NO: 2533943 - RNA, 19 nt, Homo sapiens
  misc_RNA (1)...(19): siRNA sense strand
aagaaguggcacagauuca

SEQ ID NO: 2533944 - RNA, 19 nt, Homo sapiens
  misc_RNA (1)...(19): siRNA sense strand
caaaauaguuggaaagggu

SEQ ID NO: 2533945 - RNA, 19 nt, Homo sapiens
  misc_RNA (1)...(19): siRNA sense strand
cagacagagaggaugaaaa

SEQ ID NO: 2533946 - RNA, 19 nt, Homo sapiens
  misc_RNA (1)...(19): siRNA sense strand
cacaaauagaagcaagcaa

SEQ ID NO: 2533947 - RNA, 19 nt, Homo sapiens
  misc_RNA (1)...(19): siRNA sense strand
acuaaugaagccacacaaa

SEQ ID NO: 2533948 - RNA, 19 nt, Homo sapiens
  misc_RNA (1)...(19): siRNA sense strand
uuggagaugcugaacauaa

SEQ ID NO: 2533949 - RNA, 19 nt, Homo sapiens
  misc_RNA (1)...(19): siRNA sense strand
ggagaaucauggagagugc

SEQ ID NO: 2533950 - RNA, 19 nt, Homo sapiens
  misc_RNA (1)...(19): siRNA sense strand
gcagccagggagagcuuaa

SEQ ID NO: 2533951 - RNA, 19 nt, Homo sapiens
  misc_RNA (1)...(19): siRNA sense strand
gaugaaaagcagagaauug

SEQ ID NO: 2533952 - RNA, 19 nt, Homo sapiens
  misc_RNA (1)...(19): siRNA sense strand
gugguauuccugagggaca

SEQ ID NO: 2533953 - RNA, 19 nt, Homo sapiens
  misc_RNA (1)...(19): siRNA sense strand
aggaugaaaagcagagaau

SEQ ID NO: 2533954 - RNA, 19 nt, Homo sapiens
  misc_RNA (1)...(19): siRNA sense strand
uauacagaaugcagagcuu

SEQ ID NO: 2533955 - RNA, 19 nt, Homo sapiens
  misc_RNA (1)...(19): siRNA sense strand
uggaugggaccgaagacua

SEQ ID NO: 2533956 - RNA, 19 nt, Homo sapiens
  misc_RNA (1)...(19): siRNA sense strand
acauuauaucccaaaggaa

SEQ ID NO: 2533957 - RNA, 19 nt, Homo sapiens
  misc_RNA (1)...(19): siRNA sense strand
cugaacugguagaagcuga

SEQ ID NO: 2533958 - RNA, 19 nt, Homo sapiens
  misc_RNA (1)...(19): siRNA sense strand
agaaucauggagagugcaa

SEQ ID NO: 2533959 - RNA, 19 nt, Homo sapiens
  misc_RNA (1)...(19): siRNA sense strand
acugauagaacuagccuga

SEQ ID NO: 2533960 - RNA, 19 nt, Homo sapiens
  misc_RNA (1)...(19): siRNA sense strand
agggugaggaggaggagga

SEQ ID NO: 2533961 - RNA, 19 nt, Homo sapiens
  misc_RNA (1)...(19): siRNA sense strand
ugaguuaaugauggagaaa

SEQ ID NO: 2533962 - RNA, 19 nt, Homo sapiens
  misc_RNA (1)...(19): siRNA sense strand
ccagcuuuauuaugagaca

SEQ ID NO: 2533963 - RNA, 19 nt, Homo sapiens
  misc_RNA (1)...(19): siRNA sense strand
cugucgguuuccagagcua

SEQ ID NO: 2533964 - RNA, 19 nt, Homo sapiens
  misc_RNA (1)...(19): siRNA sense strand
gaaagagaauaauggagac

SEQ ID NO: 2533965 - RNA, 19 nt, Homo sapiens
  misc_RNA (1)...(19): siRNA sense strand
acaugaacaaagcuguaaa

SEQ ID NO: 2533966 - RNA, 19 nt, Homo sapiens
  misc_RNA (1)...(19): siRNA sense strand
acuggaagugggaagagaa

SEQ ID NO: 2533967 - RNA, 19 nt, Homo sapiens
  misc_RNA (1)...(19): siRNA sense strand
augagaaccacaaggacua

SEQ ID NO: 2533968 - RNA, 19 nt, Homo sapiens
  misc_RNA (1)...(19): siRNA sense strand
ccaaagugaaccagggucu

SEQ ID NO: 2533969 - RNA, 19 nt, Homo sapiens
  misc_RNA (1)...(19): siRNA sense strand
acgaaggugugaaggggaa

SEQ ID NO: 2533970 - RNA, 19 nt, Homo sapiens
  misc_RNA (1)...(19): siRNA sense strand
aggcauacgcugacuacau

SEQ ID NO: 2533971 - RNA, 19 nt, Homo sapiens
  misc_RNA (1)...(19): siRNA sense strand
gcgcauugacuacggcaca

SEQ ID NO: 2533972 - RNA, 19 nt, Homo sapiens
  misc_RNA (1)...(19): siRNA sense strand
uaaaggagucaguggggaa

SEQ ID NO: 2533973 - RNA, 19 nt, Homo sapiens
  misc_RNA (1)...(19): siRNA sense strand
ccuugagguuaugcggaaa

SEQ ID NO: 2533974 - RNA, 19 nt, Homo sapiens
  misc_RNA (1)...(19): siRNA sense strand
ccgugaaugagaaccacaa

SEQ ID NO: 2533975 - RNA, 19 nt, Homo sapiens
  misc_RNA (1)...(19): siRNA sense strand
augagaaccacaaggacua

SEQ ID NO: 2533976 - RNA, 19 nt, Homo sapiens
  misc_RNA (1)...(19): siRNA sense strand
ccaaagugaaccagggucu

SEQ ID NO: 2533977 - RNA, 19 nt, Homo sapiens
  misc_RNA (1)...(19): siRNA sense strand
acgaaggugugaaggggaa

SEQ ID NO: 2533978 - RNA, 19 nt, Homo sapiens
  misc_RNA (1)...(19): siRNA sense strand
aggcauacgcugacuacau

SEQ ID NO: 2533979 - RNA, 19 nt, Homo sapiens
  misc_RNA (1)...(19): siRNA sense strand
gcgcauugacuacggcaca

SEQ ID NO: 2533980 - RNA, 19 nt, Homo sapiens
  misc_RNA (1)...(19): siRNA sense strand
uaaaggagucaguggggaa

SEQ ID NO: 2533981 - RNA, 19 nt, Homo sapiens
  misc_RNA (1)...(19): siRNA sense strand
ccuugagguuaugcggaaa

SEQ ID NO: 2533982 - RNA, 19 nt, Homo sapiens
  misc_RNA (1)...(19): siRNA sense strand
ccgugaaugagaaccacaa

SEQ ID NO: 2533983 - RNA, 19 nt, Homo sapiens
  misc_RNA (1)...(19): siRNA sense strand
augagaaccacaaggacua

SEQ ID NO: 2533984 - RNA, 19 nt, Homo sapiens
  misc_RNA (1)...(19): siRNA sense strand
ccaaagugaaccagggucu

SEQ ID NO: 2533985 - RNA, 19 nt, Homo sapiens
  misc_RNA (1)...(19): siRNA sense strand
acgaaggugugaaggggaa

SEQ ID NO: 2533986 - RNA, 19 nt, Homo sapiens
  misc_RNA (1)...(19): siRNA sense strand
aggcauacgcugacuacau

SEQ ID NO: 2533987 - RNA, 19 nt, Homo sapiens
  misc_RNA (1)...(19): siRNA sense strand
gcgcauugacuacggcaca

SEQ ID NO: 2533988 - RNA, 19 nt, Homo sapiens
  misc_RNA (1)...(19): siRNA sense strand
uaaaggagucaguggggaa

SEQ ID NO: 2533989 - RNA, 19 nt, Homo sapiens
  misc_RNA (1)...(19): siRNA sense strand
ccuugagguuaugcggaaa

SEQ ID NO: 2533990 - RNA, 19 nt, Homo sapiens
  misc_RNA (1)...(19): siRNA sense strand
ccgugaaugagaaccacaa

SEQ ID NO: 2533991 - RNA, 19 nt, Homo sapiens
  misc_RNA (1)...(19): siRNA sense strand
augagaaccacaaggacua

SEQ ID NO: 2533992 - RNA, 19 nt, Homo sapiens
  misc_RNA (1)...(19): siRNA sense strand
ccaaagugaaccagggucu

SEQ ID NO: 2533993 - RNA, 19 nt, Homo sapiens
  misc_RNA (1)...(19): siRNA sense strand
ccgugaaugagaaccacaa

SEQ ID NO: 2533994 - RNA, 19 nt, Homo sapiens
  misc_RNA (1)...(19): siRNA sense strand
augagaaccacaaggacua

SEQ ID NO: 2533995 - RNA, 19 nt, Homo sapiens
  misc_RNA (1)...(19): siRNA sense strand
ccaaagugaaccagggucu

SEQ ID NO: 2533996 - RNA, 19 nt, Homo sapiens
  misc_RNA (1)...(19): siRNA sense strand
acgaaggugugaaggggaa

SEQ ID NO: 2533997 - RNA, 19 nt, Homo sapiens
  misc_RNA (1)...(19): siRNA sense strand
aggcauacgcugacuacau

SEQ ID NO: 2533998 - RNA, 19 nt, Homo sapiens
  misc_RNA (1)...(19): siRNA sense strand
gcgcauugacuacggcaca

SEQ ID NO: 2533999 - RNA, 19 nt, Homo sapiens
  misc_RNA (1)...(19): siRNA sense strand
uaaaggagucaguggggaa

SEQ ID NO: 2534000 - RNA, 19 nt, Homo sapiens
  misc_RNA (1)...(19): siRNA sense strand
ccuugagguuaugcggaaa

SEQ ID NO: 2534001 - RNA, 19 nt, Homo sapiens
  misc_RNA (1)...(19): siRNA sense strand
ccgugaaugagaaccacaa

SEQ ID NO: 2534002 - RNA, 19 nt, Homo sapiens
  misc_RNA (1)...(19): siRNA sense strand
ggaugaagaugucgaucaa

SEQ ID NO: 2534003 - RNA, 19 nt, Homo sapiens
  misc_RNA (1)...(19): siRNA sense strand
cugaggagcaugugggcaa

SEQ ID NO: 2534004 - RNA, 19 nt, Homo sapiens
  misc_RNA (1)...(19): siRNA sense strand
gaaagaagauugagccgga

SEQ ID NO: 2534005 - RNA, 19 nt, Homo sapiens
  misc_RNA (1)...(19): siRNA sense strand
ccaagaucaaggagcuaaa

SEQ ID NO: 2534006 - RNA, 19 nt, Homo sapiens
  misc_RNA (1)...(19): siRNA sense strand
acauggaggagaaggacua

SEQ ID NO: 2534007 - RNA, 19 nt, Homo sapiens
  misc_RNA (1)...(19): siRNA sense strand
gagcaauuugagagcacaa

SEQ ID NO: 2534008 - RNA, 19 nt, Homo sapiens
  misc_RNA (1)...(19): siRNA sense strand
ccaaggacucugagggcau

SEQ ID NO: 2534009 - RNA, 19 nt, Homo sapiens
  misc_RNA (1)...(19): siRNA sense strand
aggagaaggacuacaguga

SEQ ID NO: 2534010 - RNA, 19 nt, Homo sapiens
  misc_RNA (1)...(19): siRNA sense strand
gggaugaagaugucgauca

SEQ ID NO: 2534011 - RNA, 19 nt, Homo sapiens
  misc_RNA (1)...(19): siRNA sense strand
gcgaugaggaccaggacca

SEQ ID NO: 2534012 - RNA, 19 nt, Homo sapiens
  misc_RNA (1)...(19): siRNA sense strand
augaagaugucgaucaaga

SEQ ID NO: 2534013 - RNA, 19 nt, Homo sapiens
  misc_RNA (1)...(19): siRNA sense strand
cggaguagccccuggaauu

SEQ ID NO: 2534014 - RNA, 19 nt, Homo sapiens
  misc_RNA (1)...(19): siRNA sense strand
aagaaauacaagagugcca

SEQ ID NO: 2534015 - RNA, 19 nt, Homo sapiens
  misc_RNA (1)...(19): siRNA sense strand
ugucguauacagagaaaca

SEQ ID NO: 2534016 - RNA, 19 nt, Homo sapiens
  misc_RNA (1)...(19): siRNA sense strand
caaccaagaucaaggagcu

SEQ ID NO: 2534017 - RNA, 19 nt, Homo sapiens
  misc_RNA (1)...(19): siRNA sense strand
gagcuggaggagaggauca

SEQ ID NO: 2534018 - RNA, 19 nt, Homo sapiens
  misc_RNA (1)...(19): siRNA sense strand
ggagaaagucaaaccacca

SEQ ID NO: 2534019 - RNA, 19 nt, Homo sapiens
  misc_RNA (1)...(19): siRNA sense strand
cgggagaagcagaaaucca

SEQ ID NO: 2534020 - RNA, 19 nt, Homo sapiens
  misc_RNA (1)...(19): siRNA sense strand
acacaggcgaugaggacca

SEQ ID NO: 2534021 - RNA, 19 nt, Homo sapiens
  misc_RNA (1)...(19): siRNA sense strand
cagccaagagacuguggaa

SEQ ID NO: 2534022 - RNA, 19 nt, Homo sapiens
  misc_RNA (1)...(19): siRNA sense strand
gggagcuggaggagaggau

SEQ ID NO: 2534023 - RNA, 19 nt, Homo sapiens
  misc_RNA (1)...(19): siRNA sense strand
ugacaagcgggaugaggau

SEQ ID NO: 2534024 - RNA, 19 nt, Homo sapiens
  misc_RNA (1)...(19): siRNA sense strand
agacgguggccacggaaau

SEQ ID NO: 2534025 - RNA, 19 nt, Homo sapiens
  misc_RNA (1)...(19): siRNA sense strand
caaggaucgagaagcgaau

SEQ ID NO: 2534026 - RNA, 19 nt, Homo sapiens
  misc_RNA (1)...(19): siRNA sense strand
agucuggccauuagaaaga

SEQ ID NO: 2534027 - RNA, 19 nt, Homo sapiens
  misc_RNA (1)...(19): siRNA sense strand
auacagagaaacagaccca

SEQ ID NO: 2534028 - RNA, 19 nt, Homo sapiens
  misc_RNA (1)...(19): siRNA sense strand
ggaugaagaugucgaucaa

SEQ ID NO: 2534029 - RNA, 19 nt, Homo sapiens
  misc_RNA (1)...(19): siRNA sense strand
cugaggagcaugugggcaa

SEQ ID NO: 2534030 - RNA, 19 nt, Homo sapiens
  misc_RNA (1)...(19): siRNA sense strand
gaaagaagauugagccgga

SEQ ID NO: 2534031 - RNA, 19 nt, Homo sapiens
  misc_RNA (1)...(19): siRNA sense strand
ccaagaucaaggagcuaaa

SEQ ID NO: 2534032 - RNA, 19 nt, Homo sapiens
  misc_RNA (1)...(19): siRNA sense strand
gagcaauuugagagcacaa

SEQ ID NO: 2534033 - RNA, 19 nt, Homo sapiens
  misc_RNA (1)...(19): siRNA sense strand
ccaaggacucugagggcau

SEQ ID NO: 2534034 - RNA, 19 nt, Homo sapiens
  misc_RNA (1)...(19): siRNA sense strand
aggagaaggacuacaguga

SEQ ID NO: 2534035 - RNA, 19 nt, Homo sapiens
  misc_RNA (1)...(19): siRNA sense strand
gggaugaagaugucgauca

SEQ ID NO: 2534036 - RNA, 19 nt, Homo sapiens
  misc_RNA (1)...(19): siRNA sense strand
gcgaugaggaccaggacca

SEQ ID NO: 2534037 - RNA, 19 nt, Homo sapiens
  misc_RNA (1)...(19): siRNA sense strand
augaagaugucgaucaaga

SEQ ID NO: 2534038 - RNA, 19 nt, Homo sapiens
  misc_RNA (1)...(19): siRNA sense strand
cggaguagccccuggaauu

SEQ ID NO: 2534039 - RNA, 19 nt, Homo sapiens
  misc_RNA (1)...(19): siRNA sense strand
aagaaauacaagagugcca

SEQ ID NO: 2534040 - RNA, 19 nt, Homo sapiens
  misc_RNA (1)...(19): siRNA sense strand
ugucguauacagagaaaca

SEQ ID NO: 2534041 - RNA, 19 nt, Homo sapiens
  misc_RNA (1)...(19): siRNA sense strand
caaccaagaucaaggagcu

SEQ ID NO: 2534042 - RNA, 19 nt, Homo sapiens
  misc_RNA (1)...(19): siRNA sense strand
gagcuggaggagaggauca

SEQ ID NO: 2534043 - RNA, 19 nt, Homo sapiens
  misc_RNA (1)...(19): siRNA sense strand
ggagaaagucaaaccacca

SEQ ID NO: 2534044 - RNA, 19 nt, Homo sapiens
  misc_RNA (1)...(19): siRNA sense strand
cgggagaagcagaaaucca

SEQ ID NO: 2534045 - RNA, 19 nt, Homo sapiens
  misc_RNA (1)...(19): siRNA sense strand
acacaggcgaugaggacca

SEQ ID NO: 2534046 - RNA, 19 nt, Homo sapiens
  misc_RNA (1)...(19): siRNA sense strand
cagccaagagacuguggaa

SEQ ID NO: 2534047 - RNA, 19 nt, Homo sapiens
  misc_RNA (1)...(19): siRNA sense strand
gggagcuggaggagaggau

SEQ ID NO: 2534048 - RNA, 19 nt, Homo sapiens
  misc_RNA (1)...(19): siRNA sense strand
ugacaagcgggaugaggau

SEQ ID NO: 2534049 - RNA, 19 nt, Homo sapiens
  misc_RNA (1)...(19): siRNA sense strand
agacgguggccacggaaau

SEQ ID NO: 2534050 - RNA, 19 nt, Homo sapiens
  misc_RNA (1)...(19): siRNA sense strand
caaggaucgagaagcgaau

SEQ ID NO: 2534051 - RNA, 19 nt, Homo sapiens
  misc_RNA (1)...(19): siRNA sense strand
agucuggccauuagaaaga

SEQ ID NO: 2534052 - RNA, 19 nt, Homo sapiens
  misc_RNA (1)...(19): siRNA sense strand
auacagagaaacagaccca

SEQ ID NO: 2534053 - RNA, 19 nt, Homo sapiens
  misc_RNA (1)...(19): siRNA sense strand
ggacaagggucucguggac

SEQ ID NO: 2534054 - RNA, 19 nt, Homo sapiens
  misc_RNA (1)...(19): siRNA sense strand
gcagaagucauguucgaga

SEQ ID NO: 2534055 - RNA, 19 nt, Homo sapiens
  misc_RNA (1)...(19): siRNA sense strand
agaagauggcagaagucau

SEQ ID NO: 2534056 - RNA, 19 nt, Homo sapiens
  misc_RNA (1)...(19): siRNA sense strand
cagcuggccuccaaggaca

SEQ ID NO: 2534057 - RNA, 19 nt, Homo sapiens
  misc_RNA (1)...(19): siRNA sense strand
acucaaagauaauggguca

SEQ ID NO: 2534058 - RNA, 19 nt, Homo sapiens
  misc_RNA (1)...(19): siRNA sense strand
cgagauggagcuugggaaa

SEQ ID NO: 2534059 - RNA, 19 nt, Homo sapiens
  misc_RNA (1)...(19): siRNA sense strand
cggccaaagcccuagcaaa

SEQ ID NO: 2534060 - RNA, 19 nt, Homo sapiens
  misc_RNA (1)...(19): siRNA sense strand
aggcauucacuaagguuaa

SEQ ID NO: 2534061 - RNA, 19 nt, Homo sapiens
  misc_RNA (1)...(19): siRNA sense strand
auaaagaguuacugaggca

SEQ ID NO: 2534062 - RNA, 19 nt, Homo sapiens
  misc_RNA (1)...(19): siRNA sense strand
ggauuaugguguagcgucu

SEQ ID NO: 2534063 - RNA, 19 nt, Homo sapiens
  misc_RNA (1)...(19): siRNA sense strand
ucaccaugcagcuggauaa

SEQ ID NO: 2534064 - RNA, 19 nt, Homo sapiens
  misc_RNA (1)...(19): siRNA sense strand
uagaaaaggaggaacuaaa

SEQ ID NO: 2534065 - RNA, 19 nt, Homo sapiens
  misc_RNA (1)...(19): siRNA sense strand
gguagaaauguggcagaaa

SEQ ID NO: 2534066 - RNA, 19 nt, Homo sapiens
  misc_RNA (1)...(19): siRNA sense strand
uagaaauguggcagaaaga

SEQ ID NO: 2534067 - RNA, 19 nt, Homo sapiens
  misc_RNA (1)...(19): siRNA sense strand
gaauauguggcgagaggga

SEQ ID NO: 2534068 - RNA, 19 nt, Homo sapiens
  misc_RNA (1)...(19): siRNA sense strand
aggcacgacuucugaaaca

SEQ ID NO: 2534069 - RNA, 19 nt, Homo sapiens
  misc_RNA (1)...(19): siRNA sense strand
guguaaaacucaugguguu

SEQ ID NO: 2534070 - RNA, 19 nt, Homo sapiens
  misc_RNA (1)...(19): siRNA sense strand
agacaauucccguggaugu

SEQ ID NO: 2534071 - RNA, 19 nt, Homo sapiens
  misc_RNA (1)...(19): siRNA sense strand
gcuuaauucccgagaugga

SEQ ID NO: 2534072 - RNA, 19 nt, Homo sapiens
  misc_RNA (1)...(19): siRNA sense strand
augaaacccaggacaguaa

SEQ ID NO: 2534073 - RNA, 19 nt, Homo sapiens
  misc_RNA (1)...(19): siRNA sense strand
agguagaaauguggcagaa

SEQ ID NO: 2534074 - RNA, 19 nt, Homo sapiens
  misc_RNA (1)...(19): siRNA sense strand
ggagcuugggaaagaauau

SEQ ID NO: 2534075 - RNA, 19 nt, Homo sapiens
  misc_RNA (1)...(19): siRNA sense strand
ggaacaagaaaguggcuuc

SEQ ID NO: 2534076 - RNA, 19 nt, Homo sapiens
  misc_RNA (1)...(19): siRNA sense strand
cuagauauggugaagguga

SEQ ID NO: 2534077 - RNA, 19 nt, Homo sapiens
  misc_RNA (1)...(19): siRNA sense strand
gaaagaauauguggcgaga

SEQ ID NO: 2534078 - RNA, 19 nt, Homo sapiens
  misc_RNA (1)...(19): siRNA sense strand
auggaaggauuauggugua

SEQ ID NO: 2534079 - RNA, 19 nt, Homo sapiens
  misc_RNA (1)...(19): siRNA sense strand
caaaaguaggggagcguuu

SEQ ID NO: 2534080 - RNA, 19 nt, Homo sapiens
  misc_RNA (1)...(19): siRNA sense strand
gcaaauguccauaaggauc

SEQ ID NO: 2534081 - RNA, 19 nt, Homo sapiens
  misc_RNA (1)...(19): siRNA sense strand
ggaaagaauauguggcgag

SEQ ID NO: 2534082 - RNA, 19 nt, Homo sapiens
  misc_RNA (1)...(19): siRNA sense strand
ggguggagcaacugaagga

SEQ ID NO: 2534083 - RNA, 19 nt, Homo sapiens
  misc_RNA (1)...(19): siRNA sense strand
cagugaugaugaaggaugu

SEQ ID NO: 2534084 - RNA, 19 nt, Homo sapiens
  misc_RNA (1)...(19): siRNA sense strand
ugaauugagugcugaggca

SEQ ID NO: 2534085 - RNA, 19 nt, Homo sapiens
  misc_RNA (1)...(19): siRNA sense strand
gcguguggcgguagagcuu

SEQ ID NO: 2534086 - RNA, 19 nt, Homo sapiens
  misc_RNA (1)...(19): siRNA sense strand
agaacaggccagugaugau

SEQ ID NO: 2534087 - RNA, 19 nt, Homo sapiens
  misc_RNA (1)...(19): siRNA sense strand
gaacaugaaacccaggaca

SEQ ID NO: 2534088 - RNA, 19 nt, Homo sapiens
  misc_RNA (1)...(19): siRNA sense strand
uagauauggugaaggugau

SEQ ID NO: 2534089 - RNA, 19 nt, Homo sapiens
  misc_RNA (1)...(19): siRNA sense strand
uguaaucaccaaagaggau

SEQ ID NO: 2534090 - RNA, 19 nt, Homo sapiens
  misc_RNA (1)...(19): siRNA sense strand
gugggaacccucuggaaca

SEQ ID NO: 2534091 - RNA, 19 nt, Homo sapiens
  misc_RNA (1)...(19): siRNA sense strand
cauacaaaccagaggacag

SEQ ID NO: 2534092 - RNA, 19 nt, Homo sapiens
  misc_RNA (1)...(19): siRNA sense strand
agauaaugggucaccaauu

SEQ ID NO: 2534093 - RNA, 19 nt, Homo sapiens
  misc_RNA (1)...(19): siRNA sense strand
cugauaauauacuggccau

SEQ ID NO: 2534094 - RNA, 19 nt, Homo sapiens
  misc_RNA (1)...(19): siRNA sense strand
ccauugucaugcagggcuu

SEQ ID NO: 2534095 - RNA, 19 nt, Homo sapiens
  misc_RNA (1)...(19): siRNA sense strand
aaagauaaugggucaccaa

SEQ ID NO: 2534096 - RNA, 19 nt, Homo sapiens
  misc_RNA (1)...(19): siRNA sense strand
ccgagauggagcuugggaa

SEQ ID NO: 2534097 - RNA, 19 nt, Homo sapiens
  misc_RNA (1)...(19): siRNA sense strand
ugcugaggcaagaagaaua

SEQ ID NO: 2534098 - RNA, 19 nt, Homo sapiens
  misc_RNA (1)...(19): siRNA sense strand
agaaaaggaggaacuaaaa

SEQ ID NO: 2534099 - RNA, 19 nt, Homo sapiens
  misc_RNA (1)...(19): siRNA sense strand
agggacagcaccagacuau

SEQ ID NO: 2534100 - RNA, 19 nt, Homo sapiens
  misc_RNA (1)...(19): siRNA sense strand
aggcagaacagcaggacac

SEQ ID NO: 2534101 - RNA, 19 nt, Homo sapiens
  misc_RNA (1)...(19): siRNA sense strand
gggaaagaauauguggcga

SEQ ID NO: 2534102 - RNA, 19 nt, Homo sapiens
  misc_RNA (1)...(19): siRNA sense strand
cggcucagcuacagugacu

SEQ ID NO: 2534103 - RNA, 19 nt, Homo sapiens
  misc_RNA (1)...(19): siRNA sense strand
uuuacaacacccugaagaa

SEQ ID NO: 2534104 - RNA, 19 nt, Homo sapiens
  misc_RNA (1)...(19): siRNA sense strand
acucaaagauaauggguca

SEQ ID NO: 2534105 - RNA, 19 nt, Homo sapiens
  misc_RNA (1)...(19): siRNA sense strand
cgagauggagcuugggaaa

SEQ ID NO: 2534106 - RNA, 19 nt, Homo sapiens
  misc_RNA (1)...(19): siRNA sense strand
cggccaaagcccuagcaaa

SEQ ID NO: 2534107 - RNA, 19 nt, Homo sapiens
  misc_RNA (1)...(19): siRNA sense strand
aggcauucacuaagguuaa

SEQ ID NO: 2534108 - RNA, 19 nt, Homo sapiens
  misc_RNA (1)...(19): siRNA sense strand
auaaagaguuacugaggca

SEQ ID NO: 2534109 - RNA, 19 nt, Homo sapiens
  misc_RNA (1)...(19): siRNA sense strand
ggauuaugguguagcgucu

SEQ ID NO: 2534110 - RNA, 19 nt, Homo sapiens
  misc_RNA (1)...(19): siRNA sense strand
ucaccaugcagcuggauaa

SEQ ID NO: 2534111 - RNA, 19 nt, Homo sapiens
  misc_RNA (1)...(19): siRNA sense strand
uagaaaaggaggaacuaaa

SEQ ID NO: 2534112 - RNA, 19 nt, Homo sapiens
  misc_RNA (1)...(19): siRNA sense strand
gguagaaauguggcagaaa

SEQ ID NO: 2534113 - RNA, 19 nt, Homo sapiens
  misc_RNA (1)...(19): siRNA sense strand
uagaaauguggcagaaaga

SEQ ID NO: 2534114 - RNA, 19 nt, Homo sapiens
  misc_RNA (1)...(19): siRNA sense strand
gaauauguggcgagaggga

SEQ ID NO: 2534115 - RNA, 19 nt, Homo sapiens
  misc_RNA (1)...(19): siRNA sense strand
aggcacgacuucugaaaca

SEQ ID NO: 2534116 - RNA, 19 nt, Homo sapiens
  misc_RNA (1)...(19): siRNA sense strand
guguaaaacucaugguguu

SEQ ID NO: 2534117 - RNA, 19 nt, Homo sapiens
  misc_RNA (1)...(19): siRNA sense strand
agacaauucccguggaugu

SEQ ID NO: 2534118 - RNA, 19 nt, Homo sapiens
  misc_RNA (1)...(19): siRNA sense strand
gcuuaauucccgagaugga

SEQ ID NO: 2534119 - RNA, 19 nt, Homo sapiens
  misc_RNA (1)...(19): siRNA sense strand
augaaacccaggacaguaa

SEQ ID NO: 2534120 - RNA, 19 nt, Homo sapiens
  misc_RNA (1)...(19): siRNA sense strand
agguagaaauguggcagaa

SEQ ID NO: 2534121 - RNA, 19 nt, Homo sapiens
  misc_RNA (1)...(19): siRNA sense strand
ggagcuugggaaagaauau

SEQ ID NO: 2534122 - RNA, 19 nt, Homo sapiens
  misc_RNA (1)...(19): siRNA sense strand
ggaacaagaaaguggcuuc

SEQ ID NO: 2534123 - RNA, 19 nt, Homo sapiens
  misc_RNA (1)...(19): siRNA sense strand
cuagauauggugaagguga

SEQ ID NO: 2534124 - RNA, 19 nt, Homo sapiens
  misc_RNA (1)...(19): siRNA sense strand
gaaagaauauguggcgaga

SEQ ID NO: 2534125 - RNA, 19 nt, Homo sapiens
  misc_RNA (1)...(19): siRNA sense strand
auggaaggauuauggugua

SEQ ID NO: 2534126 - RNA, 19 nt, Homo sapiens
  misc_RNA (1)...(19): siRNA sense strand
caaaaguaggggagcguuu

SEQ ID NO: 2534127 - RNA, 19 nt, Homo sapiens
  misc_RNA (1)...(19): siRNA sense strand
gcaaauguccauaaggauc

SEQ ID NO: 2534128 - RNA, 19 nt, Homo sapiens
  misc_RNA (1)...(19): siRNA sense strand
ggaaagaauauguggcgag

SEQ ID NO: 2534129 - RNA, 19 nt, Homo sapiens
  misc_RNA (1)...(19): siRNA sense strand
ggguggagcaacugaagga

SEQ ID NO: 2534130 - RNA, 19 nt, Homo sapiens
  misc_RNA (1)...(19): siRNA sense strand
cagugaugaugaaggaugu

SEQ ID NO: 2534131 - RNA, 19 nt, Homo sapiens
  misc_RNA (1)...(19): siRNA sense strand
ugaauugagugcugaggca

SEQ ID NO: 2534132 - RNA, 19 nt, Homo sapiens
  misc_RNA (1)...(19): siRNA sense strand
gcguguggcgguagagcuu

SEQ ID NO: 2534133 - RNA, 19 nt, Homo sapiens
  misc_RNA (1)...(19): siRNA sense strand
agaacaggccagugaugau

SEQ ID NO: 2534134 - RNA, 19 nt, Homo sapiens
  misc_RNA (1)...(19): siRNA sense strand
gaacaugaaacccaggaca

SEQ ID NO: 2534135 - RNA, 19 nt, Homo sapiens
  misc_RNA (1)...(19): siRNA sense strand
uagauauggugaaggugau

SEQ ID NO: 2534136 - RNA, 19 nt, Homo sapiens
  misc_RNA (1)...(19): siRNA sense strand
uguaaucaccaaagaggau

SEQ ID NO: 2534137 - RNA, 19 nt, Homo sapiens
  misc_RNA (1)...(19): siRNA sense strand
gugggaacccucuggaaca

SEQ ID NO: 2534138 - RNA, 19 nt, Homo sapiens
  misc_RNA (1)...(19): siRNA sense strand
cauacaaaccagaggacag

SEQ ID NO: 2534139 - RNA, 19 nt, Homo sapiens
  misc_RNA (1)...(19): siRNA sense strand
agauaaugggucaccaauu

SEQ ID NO: 2534140 - RNA, 19 nt, Homo sapiens
  misc_RNA (1)...(19): siRNA sense strand
cugauaauauacuggccau

SEQ ID NO: 2534141 - RNA, 19 nt, Homo sapiens
  misc_RNA (1)...(19): siRNA sense strand
ccauugucaugcagggcuu

SEQ ID NO: 2534142 - RNA, 19 nt, Homo sapiens
  misc_RNA (1)...(19): siRNA sense strand
aaagauaaugggucaccaa

SEQ ID NO: 2534143 - RNA, 19 nt, Homo sapiens
  misc_RNA (1)...(19): siRNA sense strand
ccgagauggagcuugggaa

SEQ ID NO: 2534144 - RNA, 19 nt, Homo sapiens
  misc_RNA (1)...(19): siRNA sense strand
ugcugaggcaagaagaaua

SEQ ID NO: 2534145 - RNA, 19 nt, Homo sapiens
  misc_RNA (1)...(19): siRNA sense strand
agaaaaggaggaacuaaaa

SEQ ID NO: 2534146 - RNA, 19 nt, Homo sapiens
  misc_RNA (1)...(19): siRNA sense strand
agggacagcaccagacuau

SEQ ID NO: 2534147 - RNA, 19 nt, Homo sapiens
  misc_RNA (1)...(19): siRNA sense strand
aggcagaacagcaggacac

SEQ ID NO: 2534148 - RNA, 19 nt, Homo sapiens
  misc_RNA (1)...(19): siRNA sense strand
gggaaagaauauguggcga

SEQ ID NO: 2534149 - RNA, 19 nt, Homo sapiens
  misc_RNA (1)...(19): siRNA sense strand
cggcucagcuacagugacu

SEQ ID NO: 2534150 - RNA, 19 nt, Homo sapiens
  misc_RNA (1)...(19): siRNA sense strand
uuuacaacacccugaagaa

SEQ ID NO: 2534151 - RNA, 19 nt, Homo sapiens
  misc_RNA (1)...(19): siRNA sense strand
aggaaguggacgagaugua

SEQ ID NO: 2534152 - RNA, 19 nt, Homo sapiens
  misc_RNA (1)...(19): siRNA sense strand
cagaugaggaaguggacga

SEQ ID NO: 2534153 - RNA, 19 nt, Homo sapiens
  misc_RNA (1)...(19): siRNA sense strand
gcgccaaggauaaagacga

SEQ ID NO: 2534154 - RNA, 19 nt, Homo sapiens
  misc_RNA (1)...(19): siRNA sense strand
ccauugauaagaaaggcaa

SEQ ID NO: 2534155 - RNA, 19 nt, Homo sapiens
  misc_RNA (1)...(19): siRNA sense strand
augaggaaguggacgagau

SEQ ID NO: 2534156 - RNA, 19 nt, Homo sapiens
  misc_RNA (1)...(19): siRNA sense strand
ccgcuucacagaugaggaa

SEQ ID NO: 2534157 - RNA, 19 nt, Homo sapiens
  misc_RNA (1)...(19): siRNA sense strand
aggaaguggacgagaugua

SEQ ID NO: 2534158 - RNA, 19 nt, Homo sapiens
  misc_RNA (1)...(19): siRNA sense strand
cagaugaggaaguggacga

SEQ ID NO: 2534159 - RNA, 19 nt, Homo sapiens
  misc_RNA (1)...(19): siRNA sense strand
gcgccaaggauaaagacga

SEQ ID NO: 2534160 - RNA, 19 nt, Homo sapiens
  misc_RNA (1)...(19): siRNA sense strand
ccauugauaagaaaggcaa

SEQ ID NO: 2534161 - RNA, 19 nt, Homo sapiens
  misc_RNA (1)...(19): siRNA sense strand
augaggaaguggacgagau

SEQ ID NO: 2534162 - RNA, 19 nt, Homo sapiens
  misc_RNA (1)...(19): siRNA sense strand
ccgcuucacagaugaggaa

SEQ ID NO: 2534163 - RNA, 19 nt, Homo sapiens
  misc_RNA (1)...(19): siRNA sense strand
gcuuauugggagugagcau

SEQ ID NO: 2534164 - RNA, 19 nt, Homo sapiens
  misc_RNA (1)...(19): siRNA sense strand
gcccauuugaggaaggaaa

SEQ ID NO: 2534165 - RNA, 19 nt, Homo sapiens
  misc_RNA (1)...(19): siRNA sense strand
aaacauuggaacugcgaga

SEQ ID NO: 2534166 - RNA, 19 nt, Homo sapiens
  misc_RNA (1)...(19): siRNA sense strand
auuugaggaaggaaagaaa

SEQ ID NO: 2534167 - RNA, 19 nt, Homo sapiens
  misc_RNA (1)...(19): siRNA sense strand
aggauguggcauuggauau

SEQ ID NO: 2534168 - RNA, 19 nt, Homo sapiens
  misc_RNA (1)...(19): siRNA sense strand
uggcauuggauaugguuau

SEQ ID NO: 2534169 - RNA, 19 nt, Homo sapiens
  misc_RNA (1)...(19): siRNA sense strand
uauaauuggagcagauaca

SEQ ID NO: 2534170 - RNA, 19 nt, Homo sapiens
  misc_RNA (1)...(19): siRNA sense strand
ggacuuucuauuagcucaa

SEQ ID NO: 2534171 - RNA, 19 nt, Homo sapiens
  misc_RNA (1)...(19): siRNA sense strand
aagcaaaaccauugaaacu

SEQ ID NO: 2534172 - RNA, 19 nt, Homo sapiens
  misc_RNA (1)...(19): siRNA sense strand
ccucagucacaccaaguaa

SEQ ID NO: 2534173 - RNA, 19 nt, Homo sapiens
  misc_RNA (1)...(19): siRNA sense strand
ggauaugguuauuugcauc

SEQ ID NO: 2534174 - RNA, 19 nt, Homo sapiens
  misc_RNA (1)...(19): siRNA sense strand
ggcaugugcuggaggugga

SEQ ID NO: 2534175 - RNA, 19 nt, Homo sapiens
  misc_RNA (1)...(19): siRNA sense strand
aggacaaauggcugguaca

SEQ ID NO: 2534176 - RNA, 19 nt, Homo sapiens
  misc_RNA (1)...(19): siRNA sense strand
guaaagaaugguugggcaa

SEQ ID NO: 2534177 - RNA, 19 nt, Homo sapiens
  misc_RNA (1)...(19): siRNA sense strand
agguaauugguaugugaaa

SEQ ID NO: 2534178 - RNA, 19 nt, Homo sapiens
  misc_RNA (1)...(19): siRNA sense strand
uguaaagaaugguugggca

SEQ ID NO: 2534179 - RNA, 19 nt, Homo sapiens
  misc_RNA (1)...(19): siRNA sense strand
guaacagcaacaacagcaa

SEQ ID NO: 2534180 - RNA, 19 nt, Homo sapiens
  misc_RNA (1)...(19): siRNA sense strand
agugcaaaccugaagagau

SEQ ID NO: 2534181 - RNA, 19 nt, Homo sapiens
  misc_RNA (1)...(19): siRNA sense strand
gggaggagcucaaggguca

SEQ ID NO: 2534182 - RNA, 19 nt, Homo sapiens
  misc_RNA (1)...(19): siRNA sense strand
gggaggaguuguugggaca

SEQ ID NO: 2534183 - RNA, 19 nt, Homo sapiens
  misc_RNA (1)...(19): siRNA sense strand
cgacacaggaugagggaac

SEQ ID NO: 2534184 - RNA, 19 nt, Homo sapiens
  misc_RNA (1)...(19): siRNA sense strand
acuuagagcaggagguuga

SEQ ID NO: 2534185 - RNA, 19 nt, Homo sapiens
  misc_RNA (1)...(19): siRNA sense strand
uugaggaacuacagagaca

SEQ ID NO: 2534186 - RNA, 19 nt, Homo sapiens
  misc_RNA (1)...(19): siRNA sense strand
acaugaagcugaaggucca

SEQ ID NO: 2534187 - RNA, 19 nt, Homo sapiens
  misc_RNA (1)...(19): siRNA sense strand
acuaugaacagaagcgauu

SEQ ID NO: 2534188 - RNA, 19 nt, Homo sapiens
  misc_RNA (1)...(19): siRNA sense strand
gucaguagcaggugggaga

SEQ ID NO: 2534189 - RNA, 19 nt, Homo sapiens
  misc_RNA (1)...(19): siRNA sense strand
cgacuggagcagauggaga

SEQ ID NO: 2534190 - RNA, 19 nt, Homo sapiens
  misc_RNA (1)...(19): siRNA sense strand
uggaagaagcggaaggaug

SEQ ID NO: 2534191 - RNA, 19 nt, Homo sapiens
  misc_RNA (1)...(19): siRNA sense strand
agcugaagguccagggcau

SEQ ID NO: 2534192 - RNA, 19 nt, Homo sapiens
  misc_RNA (1)...(19): siRNA sense strand
ccauccugauccagagcaa

SEQ ID NO: 2534193 - RNA, 19 nt, Homo sapiens
  misc_RNA (1)...(19): siRNA sense strand
ccaagaagcugcuggagug

SEQ ID NO: 2534194 - RNA, 19 nt, Homo sapiens
  misc_RNA (1)...(19): siRNA sense strand
gugaaauaucggaaggaug

SEQ ID NO: 2534195 - RNA, 19 nt, Homo sapiens
  misc_RNA (1)...(19): siRNA sense strand
caaguggagcugcgggaau

SEQ ID NO: 2534196 - RNA, 19 nt, Homo sapiens
  misc_RNA (1)...(19): siRNA sense strand
uggagaagcggauggcaga

SEQ ID NO: 2534197 - RNA, 19 nt, Homo sapiens
  misc_RNA (1)...(19): siRNA sense strand
gcuuggacuuagagcagga

SEQ ID NO: 2534198 - RNA, 19 nt, Homo sapiens
  misc_RNA (1)...(19): siRNA sense strand
ggaugagggaacugaagca

SEQ ID NO: 2534199 - RNA, 19 nt, Homo sapiens
  misc_RNA (1)...(19): siRNA sense strand
acaucguccuugugcacua

SEQ ID NO: 2534200 - RNA, 19 nt, Homo sapiens
  misc_RNA (1)...(19): siRNA sense strand
cuggauugcacuuaaguuu

SEQ ID NO: 2534201 - RNA, 19 nt, Homo sapiens
  misc_RNA (1)...(19): siRNA sense strand
aucgcaagaaggugaaaua

SEQ ID NO: 2534202 - RNA, 19 nt, Homo sapiens
  misc_RNA (1)...(19): siRNA sense strand
cgaacugcccuuugagcga

SEQ ID NO: 2534203 - RNA, 19 nt, Homo sapiens
  misc_RNA (1)...(19): siRNA sense strand
uguccauacuagagcgacu

SEQ ID NO: 2534204 - RNA, 19 nt, Homo sapiens
  misc_RNA (1)...(19): siRNA sense strand
uggucuugguagaaagcau

SEQ ID NO: 2534205 - RNA, 19 nt, Homo sapiens
  misc_RNA (1)...(19): siRNA sense strand
gggaacugaagcagaacca

SEQ ID NO: 2534206 - RNA, 19 nt, Homo sapiens
  misc_RNA (1)...(19): siRNA sense strand
cggaaggaugggaagacca

SEQ ID NO: 2534207 - RNA, 19 nt, Homo sapiens
  misc_RNA (1)...(19): siRNA sense strand
cugcgggaauggaacagaa

SEQ ID NO: 2534208 - RNA, 19 nt, Homo sapiens
  misc_RNA (1)...(19): siRNA sense strand
accaguggcaagauggaaa

SEQ ID NO: 2534209 - RNA, 19 nt, Homo sapiens
  misc_RNA (1)...(19): siRNA sense strand
aagcacggguaguggucuu

SEQ ID NO: 2534210 - RNA, 19 nt, Homo sapiens
  misc_RNA (1)...(19): siRNA sense strand
agaugacuauggaggacau

SEQ ID NO: 2534211 - RNA, 19 nt, Homo sapiens
  misc_RNA (1)...(19): siRNA sense strand
ucaccaagaagcaggacca

SEQ ID NO: 2534212 - RNA, 19 nt, Homo sapiens
  misc_RNA (1)...(19): siRNA sense strand
ccuugaggaacuacagaga

SEQ ID NO: 2534213 - RNA, 19 nt, Homo sapiens
  misc_RNA (1)...(19): siRNA sense strand
auggaaaggaauuggauau

SEQ ID NO: 2534214 - RNA, 19 nt, Homo sapiens
  misc_RNA (1)...(19): siRNA sense strand
ugaugaagaacgagagcuu

SEQ ID NO: 2534215 - RNA, 19 nt, Homo sapiens
  misc_RNA (1)...(19): siRNA sense strand
cuggaauagaagagaauga

SEQ ID NO: 2534216 - RNA, 19 nt, Homo sapiens
  misc_RNA (1)...(19): siRNA sense strand
gcguuuaauuccaggcuca

SEQ ID NO: 2534217 - RNA, 19 nt, Homo sapiens
  misc_RNA (1)...(19): siRNA sense strand
gggaaagaacaaaucaaaa

SEQ ID NO: 2534218 - RNA, 19 nt, Homo sapiens
  misc_RNA (1)...(19): siRNA sense strand
agagaaugaccuagcaaaa

SEQ ID NO: 2534219 - RNA, 19 nt, Homo sapiens
  misc_RNA (1)...(19): siRNA sense strand
ugugaagagguuagaauau

SEQ ID NO: 2534220 - RNA, 19 nt, Homo sapiens
  misc_RNA (1)...(19): siRNA sense strand
augaagaacccucaagcaa

SEQ ID NO: 2534221 - RNA, 19 nt, Homo sapiens
  misc_RNA (1)...(19): siRNA sense strand
cgggaagagaugcgaggau

SEQ ID NO: 2534222 - RNA, 19 nt, Homo sapiens
  misc_RNA (1)...(19): siRNA sense strand
guaucagauggcagacaua

SEQ ID NO: 2534223 - RNA, 19 nt, Homo sapiens
  misc_RNA (1)...(19): siRNA sense strand
ucaaaugauggaaaggaau

SEQ ID NO: 2534224 - RNA, 19 nt, Homo sapiens
  misc_RNA (1)...(19): siRNA sense strand
gccuggaauagaagagaau

SEQ ID NO: 2534225 - RNA, 19 nt, Homo sapiens
  misc_RNA (1)...(19): siRNA sense strand
aggacuauaggaagaacaa

SEQ ID NO: 2534226 - RNA, 19 nt, Homo sapiens
  misc_RNA (1)...(19): siRNA sense strand
agagaugcgaggaugacaa

SEQ ID NO: 2534227 - RNA, 19 nt, Homo sapiens
  misc_RNA (1)...(19): siRNA sense strand
ggaauugagagcacagcau

SEQ ID NO: 2534228 - RNA, 19 nt, Homo sapiens
  misc_RNA (1)...(19): siRNA sense strand
caaaaguagcugagaaugu

SEQ ID NO: 2534229 - RNA, 19 nt, Homo sapiens
  misc_RNA (1)...(19): siRNA sense strand
cccagaauucaaacagaua

SEQ ID NO: 2534230 - RNA, 19 nt, Homo sapiens
  misc_RNA (1)...(19): siRNA sense strand
aagagaaugaccuagcaaa

SEQ ID NO: 2534231 - RNA, 19 nt, Homo sapiens
  misc_RNA (1)...(19): siRNA sense strand
uugugaagagguuagaaua

SEQ ID NO: 2534232 - RNA, 19 nt, Homo sapiens
  misc_RNA (1)...(19): siRNA sense strand
augaaggaauugagagcac

SEQ ID NO: 2534233 - RNA, 19 nt, Homo sapiens
  misc_RNA (1)...(19): siRNA sense strand
uagcaaaaguugaugaucu

SEQ ID NO: 2534234 - RNA, 19 nt, Homo sapiens
  misc_RNA (1)...(19): siRNA sense strand
agaauguugcagauaagaa

SEQ ID NO: 2534235 - RNA, 19 nt, Homo sapiens
  misc_RNA (1)...(19): siRNA sense strand
cuugugaagagguuagaau

SEQ ID NO: 2534236 - RNA, 19 nt, Homo sapiens
  misc_RNA (1)...(19): siRNA sense strand
gaauagaagagaaugaccu

SEQ ID NO: 2534237 - RNA, 19 nt, Homo sapiens
  misc_RNA (1)...(19): siRNA sense strand
gcuaccaaggacagaguca

SEQ ID NO: 2534238 - RNA, 19 nt, Homo sapiens
  misc_RNA (1)...(19): siRNA sense strand
augacaagguuaaacuaca

SEQ ID NO: 2534239 - RNA, 19 nt, Homo sapiens
  misc_RNA (1)...(19): siRNA sense strand
auggaaaggaauuggauau

SEQ ID NO: 2534240 - RNA, 19 nt, Homo sapiens
  misc_RNA (1)...(19): siRNA sense strand
ugaugaagaacgagagcuu

SEQ ID NO: 2534241 - RNA, 19 nt, Homo sapiens
  misc_RNA (1)...(19): siRNA sense strand
cuggaauagaagagaauga

SEQ ID NO: 2534242 - RNA, 19 nt, Homo sapiens
  misc_RNA (1)...(19): siRNA sense strand
gcguuuaauuccaggcuca

SEQ ID NO: 2534243 - RNA, 19 nt, Homo sapiens
  misc_RNA (1)...(19): siRNA sense strand
gggaaagaacaaaucaaaa

SEQ ID NO: 2534244 - RNA, 19 nt, Homo sapiens
  misc_RNA (1)...(19): siRNA sense strand
agagaaugaccuagcaaaa

SEQ ID NO: 2534245 - RNA, 19 nt, Homo sapiens
  misc_RNA (1)...(19): siRNA sense strand
ugugaagagguuagaauau

SEQ ID NO: 2534246 - RNA, 19 nt, Homo sapiens
  misc_RNA (1)...(19): siRNA sense strand
augaagaacccucaagcaa

SEQ ID NO: 2534247 - RNA, 19 nt, Homo sapiens
  misc_RNA (1)...(19): siRNA sense strand
cgggaagagaugcgaggau

SEQ ID NO: 2534248 - RNA, 19 nt, Homo sapiens
  misc_RNA (1)...(19): siRNA sense strand
guaucagauggcagacaua

SEQ ID NO: 2534249 - RNA, 19 nt, Homo sapiens
  misc_RNA (1)...(19): siRNA sense strand
ucaaaugauggaaaggaau

SEQ ID NO: 2534250 - RNA, 19 nt, Homo sapiens
  misc_RNA (1)...(19): siRNA sense strand
gccuggaauagaagagaau

SEQ ID NO: 2534251 - RNA, 19 nt, Homo sapiens
  misc_RNA (1)...(19): siRNA sense strand
aggacuauaggaagaacaa

SEQ ID NO: 2534252 - RNA, 19 nt, Homo sapiens
  misc_RNA (1)...(19): siRNA sense strand
agagaugcgaggaugacaa

SEQ ID NO: 2534253 - RNA, 19 nt, Homo sapiens
  misc_RNA (1)...(19): siRNA sense strand
ggaauugagagcacagcau

SEQ ID NO: 2534254 - RNA, 19 nt, Homo sapiens
  misc_RNA (1)...(19): siRNA sense strand
caaaaguagcugagaaugu

SEQ ID NO: 2534255 - RNA, 19 nt, Homo sapiens
  misc_RNA (1)...(19): siRNA sense strand
cccagaauucaaacagaua

SEQ ID NO: 2534256 - RNA, 19 nt, Homo sapiens
  misc_RNA (1)...(19): siRNA sense strand
aagagaaugaccuagcaaa

SEQ ID NO: 2534257 - RNA, 19 nt, Homo sapiens
  misc_RNA (1)...(19): siRNA sense strand
uugugaagagguuagaaua

SEQ ID NO: 2534258 - RNA, 19 nt, Homo sapiens
  misc_RNA (1)...(19): siRNA sense strand
augaaggaauugagagcac

SEQ ID NO: 2534259 - RNA, 19 nt, Homo sapiens
  misc_RNA (1)...(19): siRNA sense strand
uagcaaaaguugaugaucu

SEQ ID NO: 2534260 - RNA, 19 nt, Homo sapiens
  misc_RNA (1)...(19): siRNA sense strand
agaauguugcagauaagaa

SEQ ID NO: 2534261 - RNA, 19 nt, Homo sapiens
  misc_RNA (1)...(19): siRNA sense strand
cuugugaagagguuagaau

SEQ ID NO: 2534262 - RNA, 19 nt, Homo sapiens
  misc_RNA (1)...(19): siRNA sense strand
gaauagaagagaaugaccu

SEQ ID NO: 2534263 - RNA, 19 nt, Homo sapiens
  misc_RNA (1)...(19): siRNA sense strand
gcuaccaaggacagaguca

SEQ ID NO: 2534264 - RNA, 19 nt, Homo sapiens
  misc_RNA (1)...(19): siRNA sense strand
augacaagguuaaacuaca

SEQ ID NO: 2534265 - RNA, 19 nt, Homo sapiens
  misc_RNA (1)...(19): siRNA sense strand
guuaagaaauguacgggaa

SEQ ID NO: 2534266 - RNA, 19 nt, Homo sapiens
  misc_RNA (1)...(19): siRNA sense strand
uggaaugucugaaggccaa

SEQ ID NO: 2534267 - RNA, 19 nt, Homo sapiens
  misc_RNA (1)...(19): siRNA sense strand
auuacuuaguggugagaca

SEQ ID NO: 2534268 - RNA, 19 nt, Homo sapiens
  misc_RNA (1)...(19): siRNA sense strand
gguuacaacuagaggcuug

SEQ ID NO: 2534269 - RNA, 19 nt, Homo sapiens
  misc_RNA (1)...(19): siRNA sense strand
cugaagcauguuaaggaaa

SEQ ID NO: 2534270 - RNA, 19 nt, Homo sapiens
  misc_RNA (1)...(19): siRNA sense strand
acgggaacgauuagcuaaa

SEQ ID NO: 2534271 - RNA, 19 nt, Homo sapiens
  misc_RNA (1)...(19): siRNA sense strand
gagcaguaugauuuggcua

SEQ ID NO: 2534272 - RNA, 19 nt, Homo sapiens
  misc_RNA (1)...(19): siRNA sense strand
agcauugagaggaagguua

SEQ ID NO: 2534273 - RNA, 19 nt, Homo sapiens
  misc_RNA (1)...(19): siRNA sense strand
guucuugacaaauggguga

SEQ ID NO: 2534274 - RNA, 19 nt, Homo sapiens
  misc_RNA (1)...(19): siRNA sense strand
uugacaaaugggugaauga

SEQ ID NO: 2534275 - RNA, 19 nt, Homo sapiens
  misc_RNA (1)...(19): siRNA sense strand
ucaagaaaguacaggaagc

SEQ ID NO: 2534276 - RNA, 19 nt, Homo sapiens
  misc_RNA (1)...(19): siRNA sense strand
guggaaugucugaaggcca

SEQ ID NO: 2534277 - RNA, 19 nt, Homo sapiens
  misc_RNA (1)...(19): siRNA sense strand
uggugaaagacaagaagaa

SEQ ID NO: 2534278 - RNA, 19 nt, Homo sapiens
  misc_RNA (1)...(19): siRNA sense strand
aggaggaggaggaggagga

SEQ ID NO: 2534279 - RNA, 19 nt, Homo sapiens
  misc_RNA (1)...(19): siRNA sense strand
uggaggaggaggaggagga

SEQ ID NO: 2534280 - RNA, 19 nt, Homo sapiens
  misc_RNA (1)...(19): siRNA sense strand
aggaggaggaggaggaucu

SEQ ID NO: 2534281 - RNA, 19 nt, Homo sapiens
  misc_RNA (1)...(19): siRNA sense strand
ggccagagcugaagccagu

SEQ ID NO: 2534282 - RNA, 19 nt, Homo sapiens
  misc_RNA (1)...(19): siRNA sense strand
gguaauagcgccagggagg

SEQ ID NO: 2534283 - RNA, 19 nt, Homo sapiens
  misc_RNA (1)...(19): siRNA sense strand
agccaaggccagagcugaa

SEQ ID NO: 2534284 - RNA, 19 nt, Homo sapiens
  misc_RNA (1)...(19): siRNA sense strand
gacaagaagaagaguccca

SEQ ID NO: 2534285 - RNA, 19 nt, Homo sapiens
  misc_RNA (1)...(19): siRNA sense strand
gaacguagcucgauugcca

SEQ ID NO: 2534286 - RNA, 19 nt, Homo sapiens
  misc_RNA (1)...(19): siRNA sense strand
guccagaaucccagaguca

SEQ ID NO: 2534287 - RNA, 19 nt, Homo sapiens
  misc_RNA (1)...(19): siRNA sense strand
cgugauacuacgugguuca

SEQ ID NO: 2534288 - RNA, 19 nt, Homo sapiens
  misc_RNA (1)...(19): siRNA sense strand
ggauuuauuucaaugacga

SEQ ID NO: 2534289 - RNA, 19 nt, Homo sapiens
  misc_RNA (1)...(19): siRNA sense strand
cugguuaguauucaagaaa

SEQ ID NO: 2534290 - RNA, 19 nt, Homo sapiens
  misc_RNA (1)...(19): siRNA sense strand
cgggacagcucuaccgcuu

SEQ ID NO: 2534291 - RNA, 19 nt, Homo sapiens
  misc_RNA (1)...(19): siRNA sense strand
gguuaguauucaagaaagc

SEQ ID NO: 2534292 - RNA, 19 nt, Homo sapiens
  misc_RNA (1)...(19): siRNA sense strand
uugagagagaacagaguga

SEQ ID NO: 2534293 - RNA, 19 nt, Homo sapiens
  misc_RNA (1)...(19): siRNA sense strand
acuuagauguacauggcga

SEQ ID NO: 2534294 - RNA, 19 nt, Homo sapiens
  misc_RNA (1)...(19): siRNA sense strand
cuugcuacagagugugaaa

SEQ ID NO: 2534295 - RNA, 19 nt, Homo sapiens
  misc_RNA (1)...(19): siRNA sense strand
guccagaaucccagaguca

SEQ ID NO: 2534296 - RNA, 19 nt, Homo sapiens
  misc_RNA (1)...(19): siRNA sense strand
cgugauacuacgugguuca

SEQ ID NO: 2534297 - RNA, 19 nt, Homo sapiens
  misc_RNA (1)...(19): siRNA sense strand
cgggacagcucuaccgcuu

SEQ ID NO: 2534298 - RNA, 19 nt, Homo sapiens
  misc_RNA (1)...(19): siRNA sense strand
uugagagagaacagaguga

SEQ ID NO: 2534299 - RNA, 19 nt, Homo sapiens
  misc_RNA (1)...(19): siRNA sense strand
acuuagauguacauggcga

SEQ ID NO: 2534300 - RNA, 19 nt, Homo sapiens
  misc_RNA (1)...(19): siRNA sense strand
cuugcuacagagugugaaa

SEQ ID NO: 2534301 - RNA, 19 nt, Homo sapiens
  misc_RNA (1)...(19): siRNA sense strand
aggaagaagaggaugaaga

SEQ ID NO: 2534302 - RNA, 19 nt, Homo sapiens
  misc_RNA (1)...(19): siRNA sense strand
aagaggaagaagaggauga

SEQ ID NO: 2534303 - RNA, 19 nt, Homo sapiens
  misc_RNA (1)...(19): siRNA sense strand
uggaauucaaugagaucaa

SEQ ID NO: 2534304 - RNA, 19 nt, Homo sapiens
  misc_RNA (1)...(19): siRNA sense strand
aggaagaggaagaagagga

SEQ ID NO: 2534305 - RNA, 19 nt, Homo sapiens
  misc_RNA (1)...(19): siRNA sense strand
caauaucuauggugaggga

SEQ ID NO: 2534306 - RNA, 19 nt, Homo sapiens
  misc_RNA (1)...(19): siRNA sense strand
cucagauggacgagaagua

SEQ ID NO: 2534307 - RNA, 19 nt, Homo sapiens
  misc_RNA (1)...(19): siRNA sense strand
acucuaaagaccagaccau

SEQ ID NO: 2534308 - RNA, 19 nt, Homo sapiens
  misc_RNA (1)...(19): siRNA sense strand
auaucuauggugagggaga

SEQ ID NO: 2534309 - RNA, 19 nt, Homo sapiens
  misc_RNA (1)...(19): siRNA sense strand
gaacagcagcagugcagga

SEQ ID NO: 2534310 - RNA, 19 nt, Homo sapiens
  misc_RNA (1)...(19): siRNA sense strand
cuacagcaaagauggucaa

SEQ ID NO: 2534311 - RNA, 19 nt, Homo sapiens
  misc_RNA (1)...(19): siRNA sense strand
ucggagugaggaagaggaa

SEQ ID NO: 2534312 - RNA, 19 nt, Homo sapiens
  misc_RNA (1)...(19): siRNA sense strand
aggaagaagaggaugaaga

SEQ ID NO: 2534313 - RNA, 19 nt, Homo sapiens
  misc_RNA (1)...(19): siRNA sense strand
aagaggaagaagaggauga

SEQ ID NO: 2534314 - RNA, 19 nt, Homo sapiens
  misc_RNA (1)...(19): siRNA sense strand
uggaauucaaugagaucaa

SEQ ID NO: 2534315 - RNA, 19 nt, Homo sapiens
  misc_RNA (1)...(19): siRNA sense strand
aggaagaggaagaagagga

SEQ ID NO: 2534316 - RNA, 19 nt, Homo sapiens
  misc_RNA (1)...(19): siRNA sense strand
caauaucuauggugaggga

SEQ ID NO: 2534317 - RNA, 19 nt, Homo sapiens
  misc_RNA (1)...(19): siRNA sense strand
cucagauggacgagaagua

SEQ ID NO: 2534318 - RNA, 19 nt, Homo sapiens
  misc_RNA (1)...(19): siRNA sense strand
acucuaaagaccagaccau

SEQ ID NO: 2534319 - RNA, 19 nt, Homo sapiens
  misc_RNA (1)...(19): siRNA sense strand
auaucuauggugagggaga

SEQ ID NO: 2534320 - RNA, 19 nt, Homo sapiens
  misc_RNA (1)...(19): siRNA sense strand
gaacagcagcagugcagga

SEQ ID NO: 2534321 - RNA, 19 nt, Homo sapiens
  misc_RNA (1)...(19): siRNA sense strand
cuacagcaaagauggucaa

SEQ ID NO: 2534322 - RNA, 19 nt, Homo sapiens
  misc_RNA (1)...(19): siRNA sense strand
ucggagugaggaagaggaa

SEQ ID NO: 2534323 - RNA, 19 nt, Homo sapiens
  misc_RNA (1)...(19): siRNA sense strand
ugucaaacuggguggagau

SEQ ID NO: 2534324 - RNA, 19 nt, Homo sapiens
  misc_RNA (1)...(19): siRNA sense strand
cguuaugacuggacuggga

SEQ ID NO: 2534325 - RNA, 19 nt, Homo sapiens
  misc_RNA (1)...(19): siRNA sense strand
ggguggagaucuaggaacc

SEQ ID NO: 2534326 - RNA, 19 nt, Homo sapiens
  misc_RNA (1)...(19): siRNA sense strand
augaaagacuagcagagga

SEQ ID NO: 2534327 - RNA, 19 nt, Homo sapiens
  misc_RNA (1)...(19): siRNA sense strand
ugucaaacuggguggagau

SEQ ID NO: 2534328 - RNA, 19 nt, Homo sapiens
  misc_RNA (1)...(19): siRNA sense strand
cguuaugacuggacuggga

SEQ ID NO: 2534329 - RNA, 19 nt, Homo sapiens
  misc_RNA (1)...(19): siRNA sense strand
ggguggagaucuaggaacc

SEQ ID NO: 2534330 - RNA, 19 nt, Homo sapiens
  misc_RNA (1)...(19): siRNA sense strand
augaaagacuagcagagga

SEQ ID NO: 2534331 - RNA, 19 nt, Homo sapiens
  misc_RNA (1)...(19): siRNA sense strand
aggagaggaccgagcuauu

SEQ ID NO: 2534332 - RNA, 19 nt, Homo sapiens
  misc_RNA (1)...(19): siRNA sense strand
gagcuauucuccugggacu

SEQ ID NO: 2534333 - RNA, 19 nt, Homo sapiens
  misc_RNA (1)...(19): siRNA sense strand
cuauauaccuaaaugugga

SEQ ID NO: 2534334 - RNA, 19 nt, Homo sapiens
  misc_RNA (1)...(19): siRNA sense strand
cuaccacacagaagagaca

SEQ ID NO: 2534335 - RNA, 19 nt, Homo sapiens
  misc_RNA (1)...(19): siRNA sense strand
aggagaggaccgagcuauu

SEQ ID NO: 2534336 - RNA, 19 nt, Homo sapiens
  misc_RNA (1)...(19): siRNA sense strand
gagcuauucuccugggacu

SEQ ID NO: 2534337 - RNA, 19 nt, Homo sapiens
  misc_RNA (1)...(19): siRNA sense strand
cuauauaccuaaaugugga

SEQ ID NO: 2534338 - RNA, 19 nt, Homo sapiens
  misc_RNA (1)...(19): siRNA sense strand
cuaccacacagaagagaca

SEQ ID NO: 2534339 - RNA, 19 nt, Homo sapiens
  misc_RNA (1)...(19): siRNA sense strand
cagaaauacagaaggaaac

SEQ ID NO: 2534340 - RNA, 19 nt, Homo sapiens
  misc_RNA (1)...(19): siRNA sense strand
cucaagaagaaauggaauu

SEQ ID NO: 2534341 - RNA, 19 nt, Homo sapiens
  misc_RNA (1)...(19): siRNA sense strand
uuugagaucagcagggcua

SEQ ID NO: 2534342 - RNA, 19 nt, Homo sapiens
  misc_RNA (1)...(19): siRNA sense strand
gagacaauccuaaacccaa

SEQ ID NO: 2534343 - RNA, 19 nt, Homo sapiens
  misc_RNA (1)...(19): siRNA sense strand
ucucaagaagaaauggaau

SEQ ID NO: 2534344 - RNA, 19 nt, Homo sapiens
  misc_RNA (1)...(19): siRNA sense strand
ccaauguaucagaagcuuu

SEQ ID NO: 2534345 - RNA, 19 nt, Homo sapiens
  misc_RNA (1)...(19): siRNA sense strand
caacaaggccagugaggcu

SEQ ID NO: 2534346 - RNA, 19 nt, Homo sapiens
  misc_RNA (1)...(19): siRNA sense strand
ggaugagagaaguggcagu

SEQ ID NO: 2534347 - RNA, 19 nt, Homo sapiens
  misc_RNA (1)...(19): siRNA sense strand
ucugggaggugcugcgcaa

SEQ ID NO: 2534348 - RNA, 19 nt, Homo sapiens
  misc_RNA (1)...(19): siRNA sense strand
acgaguuugugaagcagaa

SEQ ID NO: 2534349 - RNA, 19 nt, Homo sapiens
  misc_RNA (1)...(19): siRNA sense strand
agcagaaguaccuggagua

SEQ ID NO: 2534350 - RNA, 19 nt, Homo sapiens
  misc_RNA (1)...(19): siRNA sense strand
aggcaguggagauggaagu

SEQ ID NO: 2534351 - RNA, 19 nt, Homo sapiens
  misc_RNA (1)...(19): siRNA sense strand
ggauaggagaaaugacuac

SEQ ID NO: 2534352 - RNA, 19 nt, Homo sapiens
  misc_RNA (1)...(19): siRNA sense strand
cccagaaaucauugaacga

SEQ ID NO: 2534353 - RNA, 19 nt, Homo sapiens
  misc_RNA (1)...(19): siRNA sense strand
gccaaucagcugagggugu

SEQ ID NO: 2534354 - RNA, 19 nt, Homo sapiens
  misc_RNA (1)...(19): siRNA sense strand
ggcaguaauuacaggcgga

SEQ ID NO: 2534355 - RNA, 19 nt, Homo sapiens
  misc_RNA (1)...(19): siRNA sense strand
acacagcagucaaggcagu

SEQ ID NO: 2534356 - RNA, 19 nt, Homo sapiens
  misc_RNA (1)...(19): siRNA sense strand
caacaaggccagugaggcu

SEQ ID NO: 2534357 - RNA, 19 nt, Homo sapiens
  misc_RNA (1)...(19): siRNA sense strand
ggaugagagaaguggcagu

SEQ ID NO: 2534358 - RNA, 19 nt, Homo sapiens
  misc_RNA (1)...(19): siRNA sense strand
ucugggaggugcugcgcaa

SEQ ID NO: 2534359 - RNA, 19 nt, Homo sapiens
  misc_RNA (1)...(19): siRNA sense strand
acgaguuugugaagcagaa

SEQ ID NO: 2534360 - RNA, 19 nt, Homo sapiens
  misc_RNA (1)...(19): siRNA sense strand
agcagaaguaccuggagua

SEQ ID NO: 2534361 - RNA, 19 nt, Homo sapiens
  misc_RNA (1)...(19): siRNA sense strand
aggcaguggagauggaagu

SEQ ID NO: 2534362 - RNA, 19 nt, Homo sapiens
  misc_RNA (1)...(19): siRNA sense strand
ggauaggagaaaugacuac

SEQ ID NO: 2534363 - RNA, 19 nt, Homo sapiens
  misc_RNA (1)...(19): siRNA sense strand
cccagaaaucauugaacga

SEQ ID NO: 2534364 - RNA, 19 nt, Homo sapiens
  misc_RNA (1)...(19): siRNA sense strand
ggcaguaauuacaggcgga

SEQ ID NO: 2534365 - RNA, 19 nt, Homo sapiens
  misc_RNA (1)...(19): siRNA sense strand
caacaaggccagugaggcu

SEQ ID NO: 2534366 - RNA, 19 nt, Homo sapiens
  misc_RNA (1)...(19): siRNA sense strand
ggaugagagaaguggcagu

SEQ ID NO: 2534367 - RNA, 19 nt, Homo sapiens
  misc_RNA (1)...(19): siRNA sense strand
ucugggaggugcugcgcaa

SEQ ID NO: 2534368 - RNA, 19 nt, Homo sapiens
  misc_RNA (1)...(19): siRNA sense strand
acgaguuugugaagcagaa

SEQ ID NO: 2534369 - RNA, 19 nt, Homo sapiens
  misc_RNA (1)...(19): siRNA sense strand
agcagaaguaccuggagua

SEQ ID NO: 2534370 - RNA, 19 nt, Homo sapiens
  misc_RNA (1)...(19): siRNA sense strand
aggcaguggagauggaagu

SEQ ID NO: 2534371 - RNA, 19 nt, Homo sapiens
  misc_RNA (1)...(19): siRNA sense strand
ggauaggagaaaugacuac

SEQ ID NO: 2534372 - RNA, 19 nt, Homo sapiens
  misc_RNA (1)...(19): siRNA sense strand
cccagaaaucauugaacga

SEQ ID NO: 2534373 - RNA, 19 nt, Homo sapiens
  misc_RNA (1)...(19): siRNA sense strand
gccaaucagcugagggugu

SEQ ID NO: 2534374 - RNA, 19 nt, Homo sapiens
  misc_RNA (1)...(19): siRNA sense strand
ggcaguaauuacaggcgga

SEQ ID NO: 2534375 - RNA, 19 nt, Homo sapiens
  misc_RNA (1)...(19): siRNA sense strand
acacagcagucaaggcagu

SEQ ID NO: 2534376 - RNA, 19 nt, Homo sapiens
  misc_RNA (1)...(19): siRNA sense strand
caacaaggccagugaggcu

SEQ ID NO: 2534377 - RNA, 19 nt, Homo sapiens
  misc_RNA (1)...(19): siRNA sense strand
ggaugagagaaguggcagu

SEQ ID NO: 2534378 - RNA, 19 nt, Homo sapiens
  misc_RNA (1)...(19): siRNA sense strand
ucugggaggugcugcgcaa

SEQ ID NO: 2534379 - RNA, 19 nt, Homo sapiens
  misc_RNA (1)...(19): siRNA sense strand
acgaguuugugaagcagaa

SEQ ID NO: 2534380 - RNA, 19 nt, Homo sapiens
  misc_RNA (1)...(19): siRNA sense strand
agcagaaguaccuggagua

SEQ ID NO: 2534381 - RNA, 19 nt, Homo sapiens
  misc_RNA (1)...(19): siRNA sense strand
aggcaguggagauggaagu

SEQ ID NO: 2534382 - RNA, 19 nt, Homo sapiens
  misc_RNA (1)...(19): siRNA sense strand
ggauaggagaaaugacuac

SEQ ID NO: 2534383 - RNA, 19 nt, Homo sapiens
  misc_RNA (1)...(19): siRNA sense strand
cccagaaaucauugaacga

SEQ ID NO: 2534384 - RNA, 19 nt, Homo sapiens
  misc_RNA (1)...(19): siRNA sense strand
gccaaucagcugagggugu

SEQ ID NO: 2534385 - RNA, 19 nt, Homo sapiens
  misc_RNA (1)...(19): siRNA sense strand
ggcaguaauuacaggcgga

SEQ ID NO: 2534386 - RNA, 19 nt, Homo sapiens
  misc_RNA (1)...(19): siRNA sense strand
acacagcagucaaggcagu

SEQ ID NO: 2534387 - RNA, 19 nt, Homo sapiens
  misc_RNA (1)...(19): siRNA sense strand
caacaaggccagugaggcu

SEQ ID NO: 2534388 - RNA, 19 nt, Homo sapiens
  misc_RNA (1)...(19): siRNA sense strand
ggaugagagaaguggcagu

SEQ ID NO: 2534389 - RNA, 19 nt, Homo sapiens
  misc_RNA (1)...(19): siRNA sense strand
ucugggaggugcugcgcaa

SEQ ID NO: 2534390 - RNA, 19 nt, Homo sapiens
  misc_RNA (1)...(19): siRNA sense strand
acgaguuugugaagcagaa

SEQ ID NO: 2534391 - RNA, 19 nt, Homo sapiens
  misc_RNA (1)...(19): siRNA sense strand
agcagaaguaccuggagua

SEQ ID NO: 2534392 - RNA, 19 nt, Homo sapiens
  misc_RNA (1)...(19): siRNA sense strand
aggcaguggagauggaagu

SEQ ID NO: 2534393 - RNA, 19 nt, Homo sapiens
  misc_RNA (1)...(19): siRNA sense strand
ggauaggagaaaugacuac

SEQ ID NO: 2534394 - RNA, 19 nt, Homo sapiens
  misc_RNA (1)...(19): siRNA sense strand
cccagaaaucauugaacga

SEQ ID NO: 2534395 - RNA, 19 nt, Homo sapiens
  misc_RNA (1)...(19): siRNA sense strand
ggcaguaauuacaggcgga

SEQ ID NO: 2534396 - RNA, 19 nt, Homo sapiens
  misc_RNA (1)...(19): siRNA sense strand
aggaagaaccauagagaag

SEQ ID NO: 2534397 - RNA, 19 nt, Homo sapiens
  misc_RNA (1)...(19): siRNA sense strand
gaacaaacugguuggcuga

SEQ ID NO: 2534398 - RNA, 19 nt, Homo sapiens
  misc_RNA (1)...(19): siRNA sense strand
cguuagaacccgaagaacu

SEQ ID NO: 2534399 - RNA, 19 nt, Homo sapiens
  misc_RNA (1)...(19): siRNA sense strand
agcugaagacuuugauaaa

SEQ ID NO: 2534400 - RNA, 19 nt, Homo sapiens
  misc_RNA (1)...(19): siRNA sense strand
aaaccaaagucaugggaag

SEQ ID NO: 2534401 - RNA, 19 nt, Homo sapiens
  misc_RNA (1)...(19): siRNA sense strand
ucuuaugguuugaaggcau

SEQ ID NO: 2534402 - RNA, 19 nt, Homo sapiens
  misc_RNA (1)...(19): siRNA sense strand
ggaacaaacugguuggcug

SEQ ID NO: 2534403 - RNA, 19 nt, Homo sapiens
  misc_RNA (1)...(19): siRNA sense strand
cuggguagagagugagauu

SEQ ID NO: 2534404 - RNA, 19 nt, Homo sapiens
  misc_RNA (1)...(19): siRNA sense strand
guuccaaggccaaggugau

SEQ ID NO: 2534405 - RNA, 19 nt, Homo sapiens
  misc_RNA (1)...(19): siRNA sense strand
agagagugagauuggguau

SEQ ID NO: 2534406 - RNA, 19 nt, Homo sapiens
  misc_RNA (1)...(19): siRNA sense strand
gcccaugagagaggagaaa

SEQ ID NO: 2534407 - RNA, 19 nt, Homo sapiens
  misc_RNA (1)...(19): siRNA sense strand
uguaguggacaaagcacaa

SEQ ID NO: 2534408 - RNA, 19 nt, Homo sapiens
  misc_RNA (1)...(19): siRNA sense strand
cugaaacaggacacaggaa

SEQ ID NO: 2534409 - RNA, 19 nt, Homo sapiens
  misc_RNA (1)...(19): siRNA sense strand
ggaaggaguacgagcagga

SEQ ID NO: 2534410 - RNA, 19 nt, Homo sapiens
  misc_RNA (1)...(19): siRNA sense strand
acuugcauguggagcgcua

SEQ ID NO: 2534411 - RNA, 19 nt, Homo sapiens
  misc_RNA (1)...(19): siRNA sense strand
ccgccaggcuuaugcacga

SEQ ID NO: 2534412 - RNA, 19 nt, Homo sapiens
  misc_RNA (1)...(19): siRNA sense strand
cgaggaaggaguacgagca

SEQ ID NO: 2534413 - RNA, 19 nt, Homo sapiens
  misc_RNA (1)...(19): siRNA sense strand
ggaaggaguacgagcagga

SEQ ID NO: 2534414 - RNA, 19 nt, Homo sapiens
  misc_RNA (1)...(19): siRNA sense strand
acuugcauguggagcgcua

SEQ ID NO: 2534415 - RNA, 19 nt, Homo sapiens
  misc_RNA (1)...(19): siRNA sense strand
ccgccaggcuuaugcacga

SEQ ID NO: 2534416 - RNA, 19 nt, Homo sapiens
  misc_RNA (1)...(19): siRNA sense strand
cgaggaaggaguacgagca

SEQ ID NO: 2534417 - RNA, 19 nt, Homo sapiens
  misc_RNA (1)...(19): siRNA sense strand
ggaaggaguacgagcagga

SEQ ID NO: 2534418 - RNA, 19 nt, Homo sapiens
  misc_RNA (1)...(19): siRNA sense strand
acuugcauguggagcgcua

SEQ ID NO: 2534419 - RNA, 19 nt, Homo sapiens
  misc_RNA (1)...(19): siRNA sense strand
ccgccaggcuuaugcacga

SEQ ID NO: 2534420 - RNA, 19 nt, Homo sapiens
  misc_RNA (1)...(19): siRNA sense strand
cgaggaaggaguacgagca

SEQ ID NO: 2534421 - RNA, 19 nt, Homo sapiens
  misc_RNA (1)...(19): siRNA sense strand
ggaaggaguacgagcagga

SEQ ID NO: 2534422 - RNA, 19 nt, Homo sapiens
  misc_RNA (1)...(19): siRNA sense strand
acuugcauguggagcgcua

SEQ ID NO: 2534423 - RNA, 19 nt, Homo sapiens
  misc_RNA (1)...(19): siRNA sense strand
ccgccaggcuuaugcacga

SEQ ID NO: 2534424 - RNA, 19 nt, Homo sapiens
  misc_RNA (1)...(19): siRNA sense strand
cgaggaaggaguacgagca

SEQ ID NO: 2534425 - RNA, 19 nt, Homo sapiens
  misc_RNA (1)...(19): siRNA sense strand
ggaaggaguacgagcagga

SEQ ID NO: 2534426 - RNA, 19 nt, Homo sapiens
  misc_RNA (1)...(19): siRNA sense strand
acuugcauguggagcgcua

SEQ ID NO: 2534427 - RNA, 19 nt, Homo sapiens
  misc_RNA (1)...(19): siRNA sense strand
cgaggaaggaguacgagca

SEQ ID NO: 2534428 - RNA, 19 nt, Homo sapiens
  misc_RNA (1)...(19): siRNA sense strand
ggaaggaguacgagcagga

SEQ ID NO: 2534429 - RNA, 19 nt, Homo sapiens
  misc_RNA (1)...(19): siRNA sense strand
acuugcauguggagcgcua

SEQ ID NO: 2534430 - RNA, 19 nt, Homo sapiens
  misc_RNA (1)...(19): siRNA sense strand
ccgccaggcuuaugcacga

SEQ ID NO: 2534431 - RNA, 19 nt, Homo sapiens
  misc_RNA (1)...(19): siRNA sense strand
cgaggaaggaguacgagca

SEQ ID NO: 2534432 - RNA, 19 nt, Homo sapiens
  misc_RNA (1)...(19): siRNA sense strand
ggaaggaguacgagcagga

SEQ ID NO: 2534433 - RNA, 19 nt, Homo sapiens
  misc_RNA (1)...(19): siRNA sense strand
acuugcauguggagcgcua

SEQ ID NO: 2534434 - RNA, 19 nt, Homo sapiens
  misc_RNA (1)...(19): siRNA sense strand
ccgccaggcuuaugcacga

SEQ ID NO: 2534435 - RNA, 19 nt, Homo sapiens
  misc_RNA (1)...(19): siRNA sense strand
cgaggaaggaguacgagca

SEQ ID NO: 2534436 - RNA, 19 nt, Homo sapiens
  misc_RNA (1)...(19): siRNA sense strand
ggaaggaguacgagcagga

SEQ ID NO: 2534437 - RNA, 19 nt, Homo sapiens
  misc_RNA (1)...(19): siRNA sense strand
acuugcauguggagcgcua

SEQ ID NO: 2534438 - RNA, 19 nt, Homo sapiens
  misc_RNA (1)...(19): siRNA sense strand
ccgccaggcuuaugcacga

SEQ ID NO: 2534439 - RNA, 19 nt, Homo sapiens
  misc_RNA (1)...(19): siRNA sense strand
cgaggaaggaguacgagca

SEQ ID NO: 2534440 - RNA, 19 nt, Homo sapiens
  misc_RNA (1)...(19): siRNA sense strand
ucagaaaagaggugauaaa

SEQ ID NO: 2534441 - RNA, 19 nt, Homo sapiens
  misc_RNA (1)...(19): siRNA sense strand
agaaauucaugcaaggaca

SEQ ID NO: 2534442 - RNA, 19 nt, Homo sapiens
  misc_RNA (1)...(19): siRNA sense strand
gguuagugaaauuguguau

SEQ ID NO: 2534443 - RNA, 19 nt, Homo sapiens
  misc_RNA (1)...(19): siRNA sense strand
uugaagaaguccaugggau

SEQ ID NO: 2534444 - RNA, 19 nt, Homo sapiens
  misc_RNA (1)...(19): siRNA sense strand
acgaagaccugaaagagga

SEQ ID NO: 2534445 - RNA, 19 nt, Homo sapiens
  misc_RNA (1)...(19): siRNA sense strand
ugaucuauaaagaggguga

SEQ ID NO: 2534446 - RNA, 19 nt, Homo sapiens
  misc_RNA (1)...(19): siRNA sense strand
augcaaaggauguggcugu

SEQ ID NO: 2534447 - RNA, 19 nt, Homo sapiens
  misc_RNA (1)...(19): siRNA sense strand
cuggaaugcagaaaagaaa

SEQ ID NO: 2534448 - RNA, 19 nt, Homo sapiens
  misc_RNA (1)...(19): siRNA sense strand
cagaggagcuuguggacag

SEQ ID NO: 2534449 - RNA, 19 nt, Homo sapiens
  misc_RNA (1)...(19): siRNA sense strand
ucuacgaagaccugaaaga

SEQ ID NO: 2534450 - RNA, 19 nt, Homo sapiens
  misc_RNA (1)...(19): siRNA sense strand
gaaagggaauuacaggaga

SEQ ID NO: 2534451 - RNA, 19 nt, Homo sapiens
  misc_RNA (1)...(19): siRNA sense strand
cguuccaagagaugaagaa

SEQ ID NO: 2534452 - RNA, 19 nt, Homo sapiens
  misc_RNA (1)...(19): siRNA sense strand
aaacauuaugagcagcaaa

SEQ ID NO: 2534453 - RNA, 19 nt, Homo sapiens
  misc_RNA (1)...(19): siRNA sense strand
gagaaagggaauuacagga

SEQ ID NO: 2534454 - RNA, 19 nt, Homo sapiens
  misc_RNA (1)...(19): siRNA sense strand
uggaaaagugcaaagaaga

SEQ ID NO: 2534455 - RNA, 19 nt, Homo sapiens
  misc_RNA (1)...(19): siRNA sense strand
aauuacaggagacuggaaa

SEQ ID NO: 2534456 - RNA, 19 nt, Homo sapiens
  misc_RNA (1)...(19): siRNA sense strand
agugcaaagaagauguaau

SEQ ID NO: 2534457 - RNA, 19 nt, Homo sapiens
  misc_RNA (1)...(19): siRNA sense strand
caugaauggaguaaaacaa

SEQ ID NO: 2534458 - RNA, 19 nt, Homo sapiens
  misc_RNA (1)...(19): siRNA sense strand
cuucguuccaagagaugaa

SEQ ID NO: 2534459 - RNA, 19 nt, Homo sapiens
  misc_RNA (1)...(19): siRNA sense strand
gcuauuuaugagacagaaa

SEQ ID NO: 2534460 - RNA, 19 nt, Homo sapiens
  misc_RNA (1)...(19): siRNA sense strand
gguauagaacaauuggaga

SEQ ID NO: 2534461 - RNA, 19 nt, Homo sapiens
  misc_RNA (1)...(19): siRNA sense strand
cuucaauuccgcacagaga

SEQ ID NO: 2534462 - RNA, 19 nt, Homo sapiens
  misc_RNA (1)...(19): siRNA sense strand
aagagaauccaaaggagga

SEQ ID NO: 2534463 - RNA, 19 nt, Homo sapiens
  misc_RNA (1)...(19): siRNA sense strand
accagaugacauugugaua

SEQ ID NO: 2534464 - RNA, 19 nt, Homo sapiens
  misc_RNA (1)...(19): siRNA sense strand
ugggaaaacaauugcaaga

SEQ ID NO: 2534465 - RNA, 19 nt, Homo sapiens
  misc_RNA (1)...(19): siRNA sense strand
ggaaaugacucucccugga

SEQ ID NO: 2534466 - RNA, 19 nt, Homo sapiens
  misc_RNA (1)...(19): siRNA sense strand
caguuuagcucgagcgcca

SEQ ID NO: 2534467 - RNA, 19 nt, Homo sapiens
  misc_RNA (1)...(19): siRNA sense strand
cgcaagauggcccaggaaa

SEQ ID NO: 2534468 - RNA, 19 nt, Homo sapiens
  misc_RNA (1)...(19): siRNA sense strand
gcgcaagauggcccaggaa

SEQ ID NO: 2534469 - RNA, 19 nt, Homo sapiens
  misc_RNA (1)...(19): siRNA sense strand
ggagaucagcaaacgccua

SEQ ID NO: 2534470 - RNA, 19 nt, Homo sapiens
  misc_RNA (1)...(19): siRNA sense strand
cggaaaaggcuuaggcaaa

SEQ ID NO: 2534471 - RNA, 19 nt, Homo sapiens
  misc_RNA (1)...(19): siRNA sense strand
gagacaacauucagggcau

SEQ ID NO: 2534472 - RNA, 19 nt, Homo sapiens
  misc_RNA (1)...(19): siRNA sense strand
gcggaaaaggcuuaggcaa

SEQ ID NO: 2534473 - RNA, 19 nt, Homo sapiens
  misc_RNA (1)...(19): siRNA sense strand
cagccauggauguggugua

SEQ ID NO: 2534474 - RNA, 19 nt, Homo sapiens
  misc_RNA (1)...(19): siRNA sense strand
cagaggaaagggcggaaaa

SEQ ID NO: 2534475 - RNA, 19 nt, Homo sapiens
  misc_RNA (1)...(19): siRNA sense strand
agguguuccuggagaaugu

SEQ ID NO: 2534476 - RNA, 19 nt, Homo sapiens
  misc_RNA (1)...(19): siRNA sense strand
cagauucagaagaggaaau

SEQ ID NO: 2534477 - RNA, 19 nt, Homo sapiens
  misc_RNA (1)...(19): siRNA sense strand
aguuaauccaggaagauau

SEQ ID NO: 2534478 - RNA, 19 nt, Homo sapiens
  misc_RNA (1)...(19): siRNA sense strand
ugauacuggaaaugacaaa

SEQ ID NO: 2534479 - RNA, 19 nt, Homo sapiens
  misc_RNA (1)...(19): siRNA sense strand
gcucagauucagaagagga

SEQ ID NO: 2534480 - RNA, 19 nt, Homo sapiens
  misc_RNA (1)...(19): siRNA sense strand
ggcagcuguaugagaauaa

SEQ ID NO: 2534481 - RNA, 19 nt, Homo sapiens
  misc_RNA (1)...(19): siRNA sense strand
ugaaagcauuagaagcaga

SEQ ID NO: 2534482 - RNA, 19 nt, Homo sapiens
  misc_RNA (1)...(19): siRNA sense strand
auggaaaggaagaagucau

SEQ ID NO: 2534483 - RNA, 19 nt, Homo sapiens
  misc_RNA (1)...(19): siRNA sense strand
gagaaguucaugaagagga

SEQ ID NO: 2534484 - RNA, 19 nt, Homo sapiens
  misc_RNA (1)...(19): siRNA sense strand
aagcauuagaagcagauuu

SEQ ID NO: 2534485 - RNA, 19 nt, Homo sapiens
  misc_RNA (1)...(19): siRNA sense strand
ccuacauacucaaaagaga

SEQ ID NO: 2534486 - RNA, 19 nt, Homo sapiens
  misc_RNA (1)...(19): siRNA sense strand
ggacaaaggcacagaggug

SEQ ID NO: 2534487 - RNA, 19 nt, Homo sapiens
  misc_RNA (1)...(19): siRNA sense strand
ccuucaugcugguggacau

SEQ ID NO: 2534488 - RNA, 19 nt, Homo sapiens
  misc_RNA (1)...(19): siRNA sense strand
cggcaggaagugaaggaga

SEQ ID NO: 2534489 - RNA, 19 nt, Homo sapiens
  misc_RNA (1)...(19): siRNA sense strand
agauggcagcagagauuaa

SEQ ID NO: 2534490 - RNA, 19 nt, Homo sapiens
  misc_RNA (1)...(19): siRNA sense strand
cggugacuuucaaggacaa

SEQ ID NO: 2534491 - RNA, 19 nt, Homo sapiens
  misc_RNA (1)...(19): siRNA sense strand
acaucaaagugcagacgga

SEQ ID NO: 2534492 - RNA, 19 nt, Homo sapiens
  misc_RNA (1)...(19): siRNA sense strand
gaguggagauggcagcaga

SEQ ID NO: 2534493 - RNA, 19 nt, Homo sapiens
  misc_RNA (1)...(19): siRNA sense strand
augaaagcaaucugagaga

SEQ ID NO: 2534494 - RNA, 19 nt, Homo sapiens
  misc_RNA (1)...(19): siRNA sense strand
auguauggaugaaagcaau

SEQ ID NO: 2534495 - RNA, 19 nt, Homo sapiens
  misc_RNA (1)...(19): siRNA sense strand
uauguauggaugaaagcaa

SEQ ID NO: 2534496 - RNA, 19 nt, Homo sapiens
  misc_RNA (1)...(19): siRNA sense strand
gaaacuuguaaccgaucaa

SEQ ID NO: 2534497 - RNA, 19 nt, Homo sapiens
  misc_RNA (1)...(19): siRNA sense strand
augaaagcaaucugagaga

SEQ ID NO: 2534498 - RNA, 19 nt, Homo sapiens
  misc_RNA (1)...(19): siRNA sense strand
auguauggaugaaagcaau

SEQ ID NO: 2534499 - RNA, 19 nt, Homo sapiens
  misc_RNA (1)...(19): siRNA sense strand
uauguauggaugaaagcaa

SEQ ID NO: 2534500 - RNA, 19 nt, Homo sapiens
  misc_RNA (1)...(19): siRNA sense strand
gaaacuuguaaccgaucaa

SEQ ID NO: 2534501 - RNA, 19 nt, Homo sapiens
  misc_RNA (1)...(19): siRNA sense strand
gaaacuuguaaccgaucaa

SEQ ID NO: 2534502 - RNA, 19 nt, Homo sapiens
  misc_RNA (1)...(19): siRNA sense strand
cuguggaggcugugcugaa

SEQ ID NO: 2534503 - RNA, 19 nt, Homo sapiens
  misc_RNA (1)...(19): siRNA sense strand
ggucaaugauccaggggaa

SEQ ID NO: 2534504 - RNA, 19 nt, Homo sapiens
  misc_RNA (1)...(19): siRNA sense strand
cggacuaugcggagaagau

SEQ ID NO: 2534505 - RNA, 19 nt, Homo sapiens
  misc_RNA (1)...(19): siRNA sense strand
ccaaaagggagauucaaaa

SEQ ID NO: 2534506 - RNA, 19 nt, Homo sapiens
  misc_RNA (1)...(19): siRNA sense strand
gagaugaagaagaacccua

SEQ ID NO: 2534507 - RNA, 19 nt, Homo sapiens
  misc_RNA (1)...(19): siRNA sense strand
cagaggagaccauggacuu

SEQ ID NO: 2534508 - RNA, 19 nt, Homo sapiens
  misc_RNA (1)...(19): siRNA sense strand
aagaagaacccuaugacca

SEQ ID NO: 2534509 - RNA, 19 nt, Homo sapiens
  misc_RNA (1)...(19): siRNA sense strand
uaugaagacaugaaggaga

SEQ ID NO: 2534510 - RNA, 19 nt, Homo sapiens
  misc_RNA (1)...(19): siRNA sense strand
cuggagacucugaaagaca

SEQ ID NO: 2534511 - RNA, 19 nt, Homo sapiens
  misc_RNA (1)...(19): siRNA sense strand
gcgaccuagagaaguguaa

SEQ ID NO: 2534512 - RNA, 19 nt, Homo sapiens
  misc_RNA (1)...(19): siRNA sense strand
uggucuauguugcccgaaa

SEQ ID NO: 2534513 - RNA, 19 nt, Homo sapiens
  misc_RNA (1)...(19): siRNA sense strand
cccaggagcucauggacca

SEQ ID NO: 2534514 - RNA, 19 nt, Homo sapiens
  misc_RNA (1)...(19): siRNA sense strand
ggucaaugauccaggggaa

SEQ ID NO: 2534515 - RNA, 19 nt, Homo sapiens
  misc_RNA (1)...(19): siRNA sense strand
cggacuaugcggagaagau

SEQ ID NO: 2534516 - RNA, 19 nt, Homo sapiens
  misc_RNA (1)...(19): siRNA sense strand
ccaaaagggagauucaaaa

SEQ ID NO: 2534517 - RNA, 19 nt, Homo sapiens
  misc_RNA (1)...(19): siRNA sense strand
gagaugaagaagaacccua

SEQ ID NO: 2534518 - RNA, 19 nt, Homo sapiens
  misc_RNA (1)...(19): siRNA sense strand
cagaggagaccauggacuu

SEQ ID NO: 2534519 - RNA, 19 nt, Homo sapiens
  misc_RNA (1)...(19): siRNA sense strand
aagaagaacccuaugacca

SEQ ID NO: 2534520 - RNA, 19 nt, Homo sapiens
  misc_RNA (1)...(19): siRNA sense strand
uaugaagacaugaaggaga

SEQ ID NO: 2534521 - RNA, 19 nt, Homo sapiens
  misc_RNA (1)...(19): siRNA sense strand
cuggagacucugaaagaca

SEQ ID NO: 2534522 - RNA, 19 nt, Homo sapiens
  misc_RNA (1)...(19): siRNA sense strand
gcgaccuagagaaguguaa

SEQ ID NO: 2534523 - RNA, 19 nt, Homo sapiens
  misc_RNA (1)...(19): siRNA sense strand
uggucuauguugcccgaaa

SEQ ID NO: 2534524 - RNA, 19 nt, Homo sapiens
  misc_RNA (1)...(19): siRNA sense strand
cccaggagcucauggacca

SEQ ID NO: 2534525 - RNA, 19 nt, Homo sapiens
  misc_RNA (1)...(19): siRNA sense strand
gguaaggagccaucggaca

SEQ ID NO: 2534526 - RNA, 19 nt, Homo sapiens
  misc_RNA (1)...(19): siRNA sense strand
gggaauuaaaagacagcaa

SEQ ID NO: 2534527 - RNA, 19 nt, Homo sapiens
  misc_RNA (1)...(19): siRNA sense strand
ccgaggaagacaagaagga

SEQ ID NO: 2534528 - RNA, 19 nt, Homo sapiens
  misc_RNA (1)...(19): siRNA sense strand
cauaaggagccaucggaca

SEQ ID NO: 2534529 - RNA, 19 nt, Homo sapiens
  misc_RNA (1)...(19): siRNA sense strand
ccugauugcuugugcguuc

SEQ ID NO: 2534530 - RNA, 19 nt, Homo sapiens
  misc_RNA (1)...(19): siRNA sense strand
aggcggugcaggaccauaa

SEQ ID NO: 2534531 - RNA, 19 nt, Homo sapiens
  misc_RNA (1)...(19): siRNA sense strand
gugagaagucggcgaucca

SEQ ID NO: 2534532 - RNA, 19 nt, Homo sapiens
  misc_RNA (1)...(19): siRNA sense strand
cagaagauaucauuggcaa

SEQ ID NO: 2534533 - RNA, 19 nt, Homo sapiens
  misc_RNA (1)...(19): siRNA sense strand
ugaaugaaauugucgggaa

SEQ ID NO: 2534534 - RNA, 19 nt, Homo sapiens
  misc_RNA (1)...(19): siRNA sense strand
gggaaggaaaugugcccaa

SEQ ID NO: 2534535 - RNA, 19 nt, Homo sapiens
  misc_RNA (1)...(19): siRNA sense strand
uugaggagaaccauggaaa

SEQ ID NO: 2534536 - RNA, 19 nt, Homo sapiens
  misc_RNA (1)...(19): siRNA sense strand
cuucauuaacagugagaac

SEQ ID NO: 2534537 - RNA, 19 nt, Homo sapiens
  misc_RNA (1)...(19): siRNA sense strand
uggcagaauaccugaaacu

SEQ ID NO: 2534538 - RNA, 19 nt, Homo sapiens
  misc_RNA (1)...(19): siRNA sense strand
cagaauaccugaaacugga

SEQ ID NO: 2534539 - RNA, 19 nt, Homo sapiens
  misc_RNA (1)...(19): siRNA sense strand
ggauacacucacaugaaaa

SEQ ID NO: 2534540 - RNA, 19 nt, Homo sapiens
  misc_RNA (1)...(19): siRNA sense strand
augaaauugucgggaauga

SEQ ID NO: 2534541 - RNA, 19 nt, Homo sapiens
  misc_RNA (1)...(19): siRNA sense strand
gggaaugaagacaccguga

SEQ ID NO: 2534542 - RNA, 19 nt, Homo sapiens
  misc_RNA (1)...(19): siRNA sense strand
ccaacauugacgaagccua

SEQ ID NO: 2534543 - RNA, 19 nt, Homo sapiens
  misc_RNA (1)...(19): siRNA sense strand
acuuguggcaucugggcua

SEQ ID NO: 2534544 - RNA, 19 nt, Homo sapiens
  misc_RNA (1)...(19): siRNA sense strand
cuggaguuuaucaaggaaa

SEQ ID NO: 2534545 - RNA, 19 nt, Homo sapiens
  misc_RNA (1)...(19): siRNA sense strand
ugaaaauagcggaaggagu

SEQ ID NO: 2534546 - RNA, 19 nt, Homo sapiens
  misc_RNA (1)...(19): siRNA sense strand
cagaagauaucauuggcaa

SEQ ID NO: 2534547 - RNA, 19 nt, Homo sapiens
  misc_RNA (1)...(19): siRNA sense strand
ugaaugaaauugucgggaa

SEQ ID NO: 2534548 - RNA, 19 nt, Homo sapiens
  misc_RNA (1)...(19): siRNA sense strand
gggaaggaaaugugcccaa

SEQ ID NO: 2534549 - RNA, 19 nt, Homo sapiens
  misc_RNA (1)...(19): siRNA sense strand
uugaggagaaccauggaaa

SEQ ID NO: 2534550 - RNA, 19 nt, Homo sapiens
  misc_RNA (1)...(19): siRNA sense strand
cuucauuaacagugagaac

SEQ ID NO: 2534551 - RNA, 19 nt, Homo sapiens
  misc_RNA (1)...(19): siRNA sense strand
uggcagaauaccugaaacu

SEQ ID NO: 2534552 - RNA, 19 nt, Homo sapiens
  misc_RNA (1)...(19): siRNA sense strand
cagaauaccugaaacugga

SEQ ID NO: 2534553 - RNA, 19 nt, Homo sapiens
  misc_RNA (1)...(19): siRNA sense strand
ggauacacucacaugaaaa

SEQ ID NO: 2534554 - RNA, 19 nt, Homo sapiens
  misc_RNA (1)...(19): siRNA sense strand
augaaauugucgggaauga

SEQ ID NO: 2534555 - RNA, 19 nt, Homo sapiens
  misc_RNA (1)...(19): siRNA sense strand
gggaaugaagacaccguga

SEQ ID NO: 2534556 - RNA, 19 nt, Homo sapiens
  misc_RNA (1)...(19): siRNA sense strand
ccaacauugacgaagccua

SEQ ID NO: 2534557 - RNA, 19 nt, Homo sapiens
  misc_RNA (1)...(19): siRNA sense strand
acuuguggcaucugggcua

SEQ ID NO: 2534558 - RNA, 19 nt, Homo sapiens
  misc_RNA (1)...(19): siRNA sense strand
cuggaguuuaucaaggaaa

SEQ ID NO: 2534559 - RNA, 19 nt, Homo sapiens
  misc_RNA (1)...(19): siRNA sense strand
ugaaaauagcggaaggagu

SEQ ID NO: 2534560 - RNA, 19 nt, Homo sapiens
  misc_RNA (1)...(19): siRNA sense strand
ccauuugcgacuugauaau

SEQ ID NO: 2534561 - RNA, 19 nt, Homo sapiens
  misc_RNA (1)...(19): siRNA sense strand
ugcugaaaguggcgcaaau

SEQ ID NO: 2534562 - RNA, 19 nt, Homo sapiens
  misc_RNA (1)...(19): siRNA sense strand
ccauuugcgacuugauaau

SEQ ID NO: 2534563 - RNA, 19 nt, Homo sapiens
  misc_RNA (1)...(19): siRNA sense strand
ugcugaaaguggcgcaaau

SEQ ID NO: 2534564 - RNA, 19 nt, Homo sapiens
  misc_RNA (1)...(19): siRNA sense strand
ggguugaauuugaaagaaa

SEQ ID NO: 2534565 - RNA, 19 nt, Homo sapiens
  misc_RNA (1)...(19): siRNA sense strand
ccuaaagauaugagugaaa

SEQ ID NO: 2534566 - RNA, 19 nt, Homo sapiens
  misc_RNA (1)...(19): siRNA sense strand
gagaaggaaaugaaggaaa

SEQ ID NO: 2534567 - RNA, 19 nt, Homo sapiens
  misc_RNA (1)...(19): siRNA sense strand
gcuugaaagucaugcuaaa

SEQ ID NO: 2534568 - RNA, 19 nt, Homo sapiens
  misc_RNA (1)...(19): siRNA sense strand
caacaaaaguauggagaaa

SEQ ID NO: 2534569 - RNA, 19 nt, Homo sapiens
  misc_RNA (1)...(19): siRNA sense strand
cugaagaauuuaagcagaa

SEQ ID NO: 2534570 - RNA, 19 nt, Homo sapiens
  misc_RNA (1)...(19): siRNA sense strand
cauagagaucuuugagaaa

SEQ ID NO: 2534571 - RNA, 19 nt, Homo sapiens
  misc_RNA (1)...(19): siRNA sense strand
acagaaugcuuuugagaaa

SEQ ID NO: 2534572 - RNA, 19 nt, Homo sapiens
  misc_RNA (1)...(19): siRNA sense strand
acaugaaaguguagaggau

SEQ ID NO: 2534573 - RNA, 19 nt, Homo sapiens
  misc_RNA (1)...(19): siRNA sense strand
aguacuugcuguagugaaa

SEQ ID NO: 2534574 - RNA, 19 nt, Homo sapiens
  misc_RNA (1)...(19): siRNA sense strand
ccuagaaauuggaacaaau

SEQ ID NO: 2534575 - RNA, 19 nt, Homo sapiens
  misc_RNA (1)...(19): siRNA sense strand
cggugaaaauuuagagaau

SEQ ID NO: 2534576 - RNA, 19 nt, Homo sapiens
  misc_RNA (1)...(19): siRNA sense strand
ggauacagaguuugagaau

SEQ ID NO: 2534577 - RNA, 19 nt, Homo sapiens
  misc_RNA (1)...(19): siRNA sense strand
cauuagaagcccugaaaga

SEQ ID NO: 2534578 - RNA, 19 nt, Homo sapiens
  misc_RNA (1)...(19): siRNA sense strand
gagaaauaaagauggaaca

SEQ ID NO: 2534579 - RNA, 19 nt, Homo sapiens
  misc_RNA (1)...(19): siRNA sense strand
gcuacuacuccuaaagaua

SEQ ID NO: 2534580 - RNA, 19 nt, Homo sapiens
  misc_RNA (1)...(19): siRNA sense strand
agaaauugccuuacaggaa

SEQ ID NO: 2534581 - RNA, 19 nt, Homo sapiens
  misc_RNA (1)...(19): siRNA sense strand
aagaagcauuugagaagaa

SEQ ID NO: 2534582 - RNA, 19 nt, Homo sapiens
  misc_RNA (1)...(19): siRNA sense strand
caggaagauuagauggauu

SEQ ID NO: 2534583 - RNA, 19 nt, Homo sapiens
  misc_RNA (1)...(19): siRNA sense strand
gcuugauaauccugaacaa

SEQ ID NO: 2534584 - RNA, 19 nt, Homo sapiens
  misc_RNA (1)...(19): siRNA sense strand
gauagaagcacuagcccaa

SEQ ID NO: 2534585 - RNA, 19 nt, Homo sapiens
  misc_RNA (1)...(19): siRNA sense strand
acucagagcaggcggaaau

SEQ ID NO: 2534586 - RNA, 19 nt, Homo sapiens
  misc_RNA (1)...(19): siRNA sense strand
gaaccagaaucgugcaaaa

SEQ ID NO: 2534587 - RNA, 19 nt, Homo sapiens
  misc_RNA (1)...(19): siRNA sense strand
uagaaaugguggcuguaaa

SEQ ID NO: 2534588 - RNA, 19 nt, Homo sapiens
  misc_RNA (1)...(19): siRNA sense strand
uuauaugagaggugcaaua

SEQ ID NO: 2534589 - RNA, 19 nt, Homo sapiens
  misc_RNA (1)...(19): siRNA sense strand
agacugaaccacaggauuu

SEQ ID NO: 2534590 - RNA, 19 nt, Homo sapiens
  misc_RNA (1)...(19): siRNA sense strand
gauaugagugaaacagaaa

SEQ ID NO: 2534591 - RNA, 19 nt, Homo sapiens
  misc_RNA (1)...(19): siRNA sense strand
gcacaugaauggaaccaga

SEQ ID NO: 2534592 - RNA, 19 nt, Homo sapiens
  misc_RNA (1)...(19): siRNA sense strand
ugaaaugaccugugagagu

SEQ ID NO: 2534593 - RNA, 19 nt, Homo sapiens
  misc_RNA (1)...(19): siRNA sense strand
aguuguagcccaagaguuu

SEQ ID NO: 2534594 - RNA, 19 nt, Homo sapiens
  misc_RNA (1)...(19): siRNA sense strand
auuauuagccaaagaggaa

SEQ ID NO: 2534595 - RNA, 19 nt, Homo sapiens
  misc_RNA (1)...(19): siRNA sense strand
agauaugagugaaacagaa

SEQ ID NO: 2534596 - RNA, 19 nt, Homo sapiens
  misc_RNA (1)...(19): siRNA sense strand
uguaaaguacuuaggagaa

SEQ ID NO: 2534597 - RNA, 19 nt, Homo sapiens
  misc_RNA (1)...(19): siRNA sense strand
ugauguaaccaaagaaaca

SEQ ID NO: 2534598 - RNA, 19 nt, Homo sapiens
  misc_RNA (1)...(19): siRNA sense strand
gugaaauaguggaagaaag

SEQ ID NO: 2534599 - RNA, 19 nt, Homo sapiens
  misc_RNA (1)...(19): siRNA sense strand
augaagaugagaaggaaau

SEQ ID NO: 2534600 - RNA, 19 nt, Homo sapiens
  misc_RNA (1)...(19): siRNA sense strand
caacagaagaggauggagu

SEQ ID NO: 2534601 - RNA, 19 nt, Homo sapiens
  misc_RNA (1)...(19): siRNA sense strand
aguaucacucagagaaaua

SEQ ID NO: 2534602 - RNA, 19 nt, Homo sapiens
  misc_RNA (1)...(19): siRNA sense strand
caaccuagaaauuggaaca

SEQ ID NO: 2534603 - RNA, 19 nt, Homo sapiens
  misc_RNA (1)...(19): siRNA sense strand
gagcagaagaugaaagaag

SEQ ID NO: 2534604 - RNA, 19 nt, Homo sapiens
  misc_RNA (1)...(19): siRNA sense strand
cugcaaacccuaaggaagu

SEQ ID NO: 2534605 - RNA, 19 nt, Homo sapiens
  misc_RNA (1)...(19): siRNA sense strand
ccaaagaagcuuaucggau

SEQ ID NO: 2534606 - RNA, 19 nt, Homo sapiens
  misc_RNA (1)...(19): siRNA sense strand
cuuuaaauguagcaaguga

SEQ ID NO: 2534607 - RNA, 19 nt, Homo sapiens
  misc_RNA (1)...(19): siRNA sense strand
cguauugaguugugugcau

SEQ ID NO: 2534608 - RNA, 19 nt, Homo sapiens
  misc_RNA (1)...(19): siRNA sense strand
cuggugaaauaguggaaga

SEQ ID NO: 2534609 - RNA, 19 nt, Homo sapiens
  misc_RNA (1)...(19): siRNA sense strand
guguagaggauggcagaaa

SEQ ID NO: 2534610 - RNA, 19 nt, Homo sapiens
  misc_RNA (1)...(19): siRNA sense strand
cugaaugucaagagcaaau

SEQ ID NO: 2534611 - RNA, 19 nt, Homo sapiens
  misc_RNA (1)...(19): siRNA sense strand
agcaaaugccuaagagaga

SEQ ID NO: 2534612 - RNA, 19 nt, Homo sapiens
  misc_RNA (1)...(19): siRNA sense strand
cugugggucuaaagaauaa

SEQ ID NO: 2534613 - RNA, 19 nt, Homo sapiens
  misc_RNA (1)...(19): siRNA sense strand
aaugaagaugagaaggaaa

SEQ ID NO: 2534614 - RNA, 19 nt, Homo sapiens
  misc_RNA (1)...(19): siRNA sense strand
gcauuugagaagaagauau

SEQ ID NO: 2534615 - RNA, 19 nt, Homo sapiens
  misc_RNA (1)...(19): siRNA sense strand
cuguaaaaggguauaguaa

SEQ ID NO: 2534616 - RNA, 19 nt, Homo sapiens
  misc_RNA (1)...(19): siRNA sense strand
acuauuggucagaggacaa

SEQ ID NO: 2534617 - RNA, 19 nt, Homo sapiens
  misc_RNA (1)...(19): siRNA sense strand
aggaagauuagauggauuu

SEQ ID NO: 2534618 - RNA, 19 nt, Homo sapiens
  misc_RNA (1)...(19): siRNA sense strand
cuuccaugggugagacaaa

SEQ ID NO: 2534619 - RNA, 19 nt, Homo sapiens
  misc_RNA (1)...(19): siRNA sense strand
gcaacagacaaaagugaaa

SEQ ID NO: 2534620 - RNA, 19 nt, Homo sapiens
  misc_RNA (1)...(19): siRNA sense strand
ugaaugaagaugagaagga

SEQ ID NO: 2534621 - RNA, 19 nt, Homo sapiens
  misc_RNA (1)...(19): siRNA sense strand
gaucauuggaauacucaaa

SEQ ID NO: 2534622 - RNA, 19 nt, Homo sapiens
  misc_RNA (1)...(19): siRNA sense strand
aggggaaggaugugaguua

SEQ ID NO: 2534623 - RNA, 19 nt, Homo sapiens
  misc_RNA (1)...(19): siRNA sense strand
gcauauucuugugaggaua

SEQ ID NO: 2534624 - RNA, 19 nt, Homo sapiens
  misc_RNA (1)...(19): siRNA sense strand
aaauagaaaugguggcugu

SEQ ID NO: 2534625 - RNA, 19 nt, Homo sapiens
  misc_RNA (1)...(19): siRNA sense strand
agacaugagcuaucaaauu

SEQ ID NO: 2534626 - RNA, 19 nt, Homo sapiens
  misc_RNA (1)...(19): siRNA sense strand
cauucaacauuauggguga

SEQ ID NO: 2534627 - RNA, 19 nt, Homo sapiens
  misc_RNA (1)...(19): siRNA sense strand
agcugaaugucaagagcaa

SEQ ID NO: 2534628 - RNA, 19 nt, Homo sapiens
  misc_RNA (1)...(19): siRNA sense strand
caaaguauuaacaggaaga

SEQ ID NO: 2534629 - RNA, 19 nt, Homo sapiens
  misc_RNA (1)...(19): siRNA sense strand
gagaagaagacugaagaau

SEQ ID NO: 2534630 - RNA, 19 nt, Homo sapiens
  misc_RNA (1)...(19): siRNA sense strand
acuacaggcaacagacaaa

SEQ ID NO: 2534631 - RNA, 19 nt, Homo sapiens
  misc_RNA (1)...(19): siRNA sense strand
agacugugaucuugcaaau

SEQ ID NO: 2534632 - RNA, 19 nt, Homo sapiens
  misc_RNA (1)...(19): siRNA sense strand
agggagaggacgaggaaga

SEQ ID NO: 2534633 - RNA, 19 nt, Homo sapiens
  misc_RNA (1)...(19): siRNA sense strand
aggaggaggaagagggaga

SEQ ID NO: 2534634 - RNA, 19 nt, Homo sapiens
  misc_RNA (1)...(19): siRNA sense strand
aggaagagggagaggacga

SEQ ID NO: 2534635 - RNA, 19 nt, Homo sapiens
  misc_RNA (1)...(19): siRNA sense strand
aggagaagaucgagcgaac

SEQ ID NO: 2534636 - RNA, 19 nt, Homo sapiens
  misc_RNA (1)...(19): siRNA sense strand
gggaggaggagcaaggaca

SEQ ID NO: 2534637 - RNA, 19 nt, Homo sapiens
  misc_RNA (1)...(19): siRNA sense strand
ggaagagcugagugggaca

SEQ ID NO: 2534638 - RNA, 19 nt, Homo sapiens
  misc_RNA (1)...(19): siRNA sense strand
gaggaagagcugaguggga

SEQ ID NO: 2534639 - RNA, 19 nt, Homo sapiens
  misc_RNA (1)...(19): siRNA sense strand
aggaagaugcugaguacca

SEQ ID NO: 2534640 - RNA, 19 nt, Homo sapiens
  misc_RNA (1)...(19): siRNA sense strand
augaaaagcugcaagguca

SEQ ID NO: 2534641 - RNA, 19 nt, Homo sapiens
  misc_RNA (1)...(19): siRNA sense strand
gaacggaagaggcggagga

SEQ ID NO: 2534642 - RNA, 19 nt, Homo sapiens
  misc_RNA (1)...(19): siRNA sense strand
ggucagaugcuguggacuc

SEQ ID NO: 2534643 - RNA, 19 nt, Homo sapiens
  misc_RNA (1)...(19): siRNA sense strand
acgccaugguggugggaac

SEQ ID NO: 2534644 - RNA, 19 nt, Homo sapiens
  misc_RNA (1)...(19): siRNA sense strand
guguggagacccugcagaa

SEQ ID NO: 2534645 - RNA, 19 nt, Homo sapiens
  misc_RNA (1)...(19): siRNA sense strand
ccgauguggacaacggcua

SEQ ID NO: 2534646 - RNA, 19 nt, Homo sapiens
  misc_RNA (1)...(19): siRNA sense strand
gugggcaggaggaggaaga

SEQ ID NO: 2534647 - RNA, 19 nt, Homo sapiens
  misc_RNA (1)...(19): siRNA sense strand
gguguugccucgagggaag

SEQ ID NO: 2534648 - RNA, 19 nt, Homo sapiens
  misc_RNA (1)...(19): siRNA sense strand
gagggaagucgcuggacca

SEQ ID NO: 2534649 - RNA, 19 nt, Homo sapiens
  misc_RNA (1)...(19): siRNA sense strand
ggaggaagagggagaggac

SEQ ID NO: 2534650 - RNA, 19 nt, Homo sapiens
  misc_RNA (1)...(19): siRNA sense strand
agggagaggacgaggaaga

SEQ ID NO: 2534651 - RNA, 19 nt, Homo sapiens
  misc_RNA (1)...(19): siRNA sense strand
aggaggaggaagagggaga

SEQ ID NO: 2534652 - RNA, 19 nt, Homo sapiens
  misc_RNA (1)...(19): siRNA sense strand
aggaagagggagaggacga

SEQ ID NO: 2534653 - RNA, 19 nt, Homo sapiens
  misc_RNA (1)...(19): siRNA sense strand
ggaagagcugagugggaca

SEQ ID NO: 2534654 - RNA, 19 nt, Homo sapiens
  misc_RNA (1)...(19): siRNA sense strand
gaggaagagcugaguggga

SEQ ID NO: 2534655 - RNA, 19 nt, Homo sapiens
  misc_RNA (1)...(19): siRNA sense strand
aggaagaugcugaguacca

SEQ ID NO: 2534656 - RNA, 19 nt, Homo sapiens
  misc_RNA (1)...(19): siRNA sense strand
gaacggaagaggcggagga

SEQ ID NO: 2534657 - RNA, 19 nt, Homo sapiens
  misc_RNA (1)...(19): siRNA sense strand
acgccaugguggugggaac

SEQ ID NO: 2534658 - RNA, 19 nt, Homo sapiens
  misc_RNA (1)...(19): siRNA sense strand
ccgauguggacaacggcua

SEQ ID NO: 2534659 - RNA, 19 nt, Homo sapiens
  misc_RNA (1)...(19): siRNA sense strand
gugggcaggaggaggaaga

SEQ ID NO: 2534660 - RNA, 19 nt, Homo sapiens
  misc_RNA (1)...(19): siRNA sense strand
ggaggaagagggagaggac

SEQ ID NO: 2534661 - RNA, 19 nt, Homo sapiens
  misc_RNA (1)...(19): siRNA sense strand
agggagaggacgaggaaga

SEQ ID NO: 2534662 - RNA, 19 nt, Homo sapiens
  misc_RNA (1)...(19): siRNA sense strand
aggaggaggaagagggaga

SEQ ID NO: 2534663 - RNA, 19 nt, Homo sapiens
  misc_RNA (1)...(19): siRNA sense strand
aggaagagggagaggacga

SEQ ID NO: 2534664 - RNA, 19 nt, Homo sapiens
  misc_RNA (1)...(19): siRNA sense strand
aggagaagaucgagcgaac

SEQ ID NO: 2534665 - RNA, 19 nt, Homo sapiens
  misc_RNA (1)...(19): siRNA sense strand
gggaggaggagcaaggaca

SEQ ID NO: 2534666 - RNA, 19 nt, Homo sapiens
  misc_RNA (1)...(19): siRNA sense strand
ggaagagcugagugggaca

SEQ ID NO: 2534667 - RNA, 19 nt, Homo sapiens
  misc_RNA (1)...(19): siRNA sense strand
gaggaagagcugaguggga

SEQ ID NO: 2534668 - RNA, 19 nt, Homo sapiens
  misc_RNA (1)...(19): siRNA sense strand
aggaagaugcugaguacca

SEQ ID NO: 2534669 - RNA, 19 nt, Homo sapiens
  misc_RNA (1)...(19): siRNA sense strand
augaaaagcugcaagguca

SEQ ID NO: 2534670 - RNA, 19 nt, Homo sapiens
  misc_RNA (1)...(19): siRNA sense strand
gaacggaagaggcggagga

SEQ ID NO: 2534671 - RNA, 19 nt, Homo sapiens
  misc_RNA (1)...(19): siRNA sense strand
ggucagaugcuguggacuc

SEQ ID NO: 2534672 - RNA, 19 nt, Homo sapiens
  misc_RNA (1)...(19): siRNA sense strand
acgccaugguggugggaac

SEQ ID NO: 2534673 - RNA, 19 nt, Homo sapiens
  misc_RNA (1)...(19): siRNA sense strand
guguggagacccugcagaa

SEQ ID NO: 2534674 - RNA, 19 nt, Homo sapiens
  misc_RNA (1)...(19): siRNA sense strand
ccgauguggacaacggcua

SEQ ID NO: 2534675 - RNA, 19 nt, Homo sapiens
  misc_RNA (1)...(19): siRNA sense strand
gugggcaggaggaggaaga

SEQ ID NO: 2534676 - RNA, 19 nt, Homo sapiens
  misc_RNA (1)...(19): siRNA sense strand
gguguugccucgagggaag

SEQ ID NO: 2534677 - RNA, 19 nt, Homo sapiens
  misc_RNA (1)...(19): siRNA sense strand
gagggaagucgcuggacca

SEQ ID NO: 2534678 - RNA, 19 nt, Homo sapiens
  misc_RNA (1)...(19): siRNA sense strand
ggaggaagagggagaggac

SEQ ID NO: 2534679 - RNA, 19 nt, Homo sapiens
  misc_RNA (1)...(19): siRNA sense strand
auggagaagaggagugcaa

SEQ ID NO: 2534680 - RNA, 19 nt, Homo sapiens
  misc_RNA (1)...(19): siRNA sense strand
acggaaacgcacaggaaca

SEQ ID NO: 2534681 - RNA, 19 nt, Homo sapiens
  misc_RNA (1)...(19): siRNA sense strand
gaguaugugcccuggguca

SEQ ID NO: 2534682 - RNA, 19 nt, Homo sapiens
  misc_RNA (1)...(19): siRNA sense strand
augggaaacccuuggaaga

SEQ ID NO: 2534683 - RNA, 19 nt, Homo sapiens
  misc_RNA (1)...(19): siRNA sense strand
gcaaauucaacaaggugga

SEQ ID NO: 2534684 - RNA, 19 nt, Homo sapiens
  misc_RNA (1)...(19): siRNA sense strand
ggugggaguucaagugcca

SEQ ID NO: 2534685 - RNA, 19 nt, Homo sapiens
  misc_RNA (1)...(19): siRNA sense strand
aggccugcguguuggauga

SEQ ID NO: 2534686 - RNA, 19 nt, Homo sapiens
  misc_RNA (1)...(19): siRNA sense strand
gccaguuguaccagggcaa

SEQ ID NO: 2534687 - RNA, 19 nt, Homo sapiens
  misc_RNA (1)...(19): siRNA sense strand
cgcuggugcccuacggaaa

SEQ ID NO: 2534688 - RNA, 19 nt, Homo sapiens
  misc_RNA (1)...(19): siRNA sense strand
gggucaccgucaaugggaa

SEQ ID NO: 2534689 - RNA, 19 nt, Homo sapiens
  misc_RNA (1)...(19): siRNA sense strand
ucaacaagguggaggccug

SEQ ID NO: 2534690 - RNA, 19 nt, Homo sapiens
  misc_RNA (1)...(19): siRNA sense strand
agauaaagucaaagcgcaa

SEQ ID NO: 2534691 - RNA, 19 nt, Homo sapiens
  misc_RNA (1)...(19): siRNA sense strand
agucaaagcgcaagagcca

SEQ ID NO: 2534692 - RNA, 19 nt, Homo sapiens
  misc_RNA (1)...(19): siRNA sense strand
ugucaaaggccguguucca

SEQ ID NO: 2534693 - RNA, 19 nt, Homo sapiens
  misc_RNA (1)...(19): siRNA sense strand
aguuucaguuaaaggucaa

SEQ ID NO: 2534694 - RNA, 19 nt, Homo sapiens
  misc_RNA (1)...(19): siRNA sense strand
ugugaaggcucuugcggga

SEQ ID NO: 2534695 - RNA, 19 nt, Homo sapiens
  misc_RNA (1)...(19): siRNA sense strand
aagauaaagucaaagcgca

SEQ ID NO: 2534696 - RNA, 19 nt, Homo sapiens
  misc_RNA (1)...(19): siRNA sense strand
aggaaaugugaaacgaaua

SEQ ID NO: 2534697 - RNA, 19 nt, Homo sapiens
  misc_RNA (1)...(19): siRNA sense strand
acgaaaucuaugaggaaga

SEQ ID NO: 2534698 - RNA, 19 nt, Homo sapiens
  misc_RNA (1)...(19): siRNA sense strand
cauuggagacugagcaaaa

SEQ ID NO: 2534699 - RNA, 19 nt, Homo sapiens
  misc_RNA (1)...(19): siRNA sense strand
agcaaaaggaaaugugaaa

SEQ ID NO: 2534700 - RNA, 19 nt, Homo sapiens
  misc_RNA (1)...(19): siRNA sense strand
aggaagaggaggacgagga

SEQ ID NO: 2534701 - RNA, 19 nt, Homo sapiens
  misc_RNA (1)...(19): siRNA sense strand
ccguauuuggacugagcaa

SEQ ID NO: 2534702 - RNA, 19 nt, Homo sapiens
  misc_RNA (1)...(19): siRNA sense strand
ccugaagaauuuaaagcca

SEQ ID NO: 2534703 - RNA, 19 nt, Homo sapiens
  misc_RNA (1)...(19): siRNA sense strand
uguuaauguacguuggcua

SEQ ID NO: 2534704 - RNA, 19 nt, Homo sapiens
  misc_RNA (1)...(19): siRNA sense strand
agacugagcaaaaggaaau

SEQ ID NO: 2534705 - RNA, 19 nt, Homo sapiens
  misc_RNA (1)...(19): siRNA sense strand
ugggaaaacaauagguuau

SEQ ID NO: 2534706 - RNA, 19 nt, Homo sapiens
  misc_RNA (1)...(19): siRNA sense strand
gagacugagcaaaaggaaa

SEQ ID NO: 2534707 - RNA, 19 nt, Homo sapiens
  misc_RNA (1)...(19): siRNA sense strand
caguaaaagaacacgaaga

SEQ ID NO: 2534708 - RNA, 19 nt, Homo sapiens
  misc_RNA (1)...(19): siRNA sense strand
ucuaugaggaagaggagga

SEQ ID NO: 2534709 - RNA, 19 nt, Homo sapiens
  misc_RNA (1)...(19): siRNA sense strand
gagcaaaaggaaaugugaa

SEQ ID NO: 2534710 - RNA, 19 nt, Homo sapiens
  misc_RNA (1)...(19): siRNA sense strand
augaggaagaggaggacga

SEQ ID NO: 2534711 - RNA, 19 nt, Homo sapiens
  misc_RNA (1)...(19): siRNA sense strand
gaaguuauuagaaugggaa

SEQ ID NO: 2534712 - RNA, 19 nt, Homo sapiens
  misc_RNA (1)...(19): siRNA sense strand
aguuauuugccucaguaaa

SEQ ID NO: 2534713 - RNA, 19 nt, Homo sapiens
  misc_RNA (1)...(19): siRNA sense strand
gagagugagcugugggaca

SEQ ID NO: 2534714 - RNA, 19 nt, Homo sapiens
  misc_RNA (1)...(19): siRNA sense strand
acucaaagauggaggugug

SEQ ID NO: 2534715 - RNA, 19 nt, Homo sapiens
  misc_RNA (1)...(19): siRNA sense strand
gaaucgaucuggucggcuu

SEQ ID NO: 2534716 - RNA, 19 nt, Homo sapiens
  misc_RNA (1)...(19): siRNA sense strand
cuuacaagggacugcguau

SEQ ID NO: 2534717 - RNA, 19 nt, Homo sapiens
  misc_RNA (1)...(19): siRNA sense strand
ggacaugugggcagggauc

SEQ ID NO: 2534718 - RNA, 19 nt, Homo sapiens
  misc_RNA (1)...(19): siRNA sense strand
aguacaucaaucagaggaa

SEQ ID NO: 2534719 - RNA, 19 nt, Homo sapiens
  misc_RNA (1)...(19): siRNA sense strand
cagagauaguugugcuuuu

SEQ ID NO: 2534720 - RNA, 19 nt, Homo sapiens
  misc_RNA (1)...(19): siRNA sense strand
gagagugagcugugggaca

SEQ ID NO: 2534721 - RNA, 19 nt, Homo sapiens
  misc_RNA (1)...(19): siRNA sense strand
acucaaagauggaggugug

SEQ ID NO: 2534722 - RNA, 19 nt, Homo sapiens
  misc_RNA (1)...(19): siRNA sense strand
gaaucgaucuggucggcuu

SEQ ID NO: 2534723 - RNA, 19 nt, Homo sapiens
  misc_RNA (1)...(19): siRNA sense strand
cuuacaagggacugcguau

SEQ ID NO: 2534724 - RNA, 19 nt, Homo sapiens
  misc_RNA (1)...(19): siRNA sense strand
ggacaugugggcagggauc

SEQ ID NO: 2534725 - RNA, 19 nt, Homo sapiens
  misc_RNA (1)...(19): siRNA sense strand
aguacaucaaucagaggaa

SEQ ID NO: 2534726 - RNA, 19 nt, Homo sapiens
  misc_RNA (1)...(19): siRNA sense strand
cagagauaguugugcuuuu

SEQ ID NO: 2534727 - RNA, 19 nt, Homo sapiens
  misc_RNA (1)...(19): siRNA sense strand
gagagugagcugugggaca

SEQ ID NO: 2534728 - RNA, 19 nt, Homo sapiens
  misc_RNA (1)...(19): siRNA sense strand
acucaaagauggaggugug

SEQ ID NO: 2534729 - RNA, 19 nt, Homo sapiens
  misc_RNA (1)...(19): siRNA sense strand
gaaucgaucuggucggcuu

SEQ ID NO: 2534730 - RNA, 19 nt, Homo sapiens
  misc_RNA (1)...(19): siRNA sense strand
cuuacaagggacugcguau

SEQ ID NO: 2534731 - RNA, 19 nt, Homo sapiens
  misc_RNA (1)...(19): siRNA sense strand
ggacaugugggcagggauc

SEQ ID NO: 2534732 - RNA, 19 nt, Homo sapiens
  misc_RNA (1)...(19): siRNA sense strand
aguacaucaaucagaggaa

SEQ ID NO: 2534733 - RNA, 19 nt, Homo sapiens
  misc_RNA (1)...(19): siRNA sense strand
cagagauaguugugcuuuu

SEQ ID NO: 2534734 - RNA, 19 nt, Homo sapiens
  misc_RNA (1)...(19): siRNA sense strand
caacagaauaucucgggaa

SEQ ID NO: 2534735 - RNA, 19 nt, Homo sapiens
  misc_RNA (1)...(19): siRNA sense strand
cagacagagauaaguacaa

SEQ ID NO: 2534736 - RNA, 19 nt, Homo sapiens
  misc_RNA (1)...(19): siRNA sense strand
ugauauguuucauuggcaa

SEQ ID NO: 2534737 - RNA, 19 nt, Homo sapiens
  misc_RNA (1)...(19): siRNA sense strand
ccgugacccuccagcacaa

SEQ ID NO: 2534738 - RNA, 19 nt, Homo sapiens
  misc_RNA (1)...(19): siRNA sense strand
ucucgauauucuaagauca

SEQ ID NO: 2534739 - RNA, 19 nt, Homo sapiens
  misc_RNA (1)...(19): siRNA sense strand
caacagaauaucucgggaa

SEQ ID NO: 2534740 - RNA, 19 nt, Homo sapiens
  misc_RNA (1)...(19): siRNA sense strand
cagacagagauaaguacaa

SEQ ID NO: 2534741 - RNA, 19 nt, Homo sapiens
  misc_RNA (1)...(19): siRNA sense strand
ugauauguuucauuggcaa

SEQ ID NO: 2534742 - RNA, 19 nt, Homo sapiens
  misc_RNA (1)...(19): siRNA sense strand
ccgugacccuccagcacaa

SEQ ID NO: 2534743 - RNA, 19 nt, Homo sapiens
  misc_RNA (1)...(19): siRNA sense strand
ucucgauauucuaagauca

SEQ ID NO: 2534744 - RNA, 19 nt, Homo sapiens
  misc_RNA (1)...(19): siRNA sense strand
caacagaauaucucgggaa

SEQ ID NO: 2534745 - RNA, 19 nt, Homo sapiens
  misc_RNA (1)...(19): siRNA sense strand
cagacagagauaaguacaa

SEQ ID NO: 2534746 - RNA, 19 nt, Homo sapiens
  misc_RNA (1)...(19): siRNA sense strand
ugauauguuucauuggcaa

SEQ ID NO: 2534747 - RNA, 19 nt, Homo sapiens
  misc_RNA (1)...(19): siRNA sense strand
ccgugacccuccagcacaa

SEQ ID NO: 2534748 - RNA, 19 nt, Homo sapiens
  misc_RNA (1)...(19): siRNA sense strand
ucucgauauucuaagauca

SEQ ID NO: 2534749 - RNA, 19 nt, Homo sapiens
  misc_RNA (1)...(19): siRNA sense strand
caacagaauaucucgggaa

SEQ ID NO: 2534750 - RNA, 19 nt, Homo sapiens
  misc_RNA (1)...(19): siRNA sense strand
cagacagagauaaguacaa

SEQ ID NO: 2534751 - RNA, 19 nt, Homo sapiens
  misc_RNA (1)...(19): siRNA sense strand
ugauauguuucauuggcaa

SEQ ID NO: 2534752 - RNA, 19 nt, Homo sapiens
  misc_RNA (1)...(19): siRNA sense strand
ccgugacccuccagcacaa

SEQ ID NO: 2534753 - RNA, 19 nt, Homo sapiens
  misc_RNA (1)...(19): siRNA sense strand
ucucgauauucuaagauca

SEQ ID NO: 2534754 - RNA, 19 nt, Homo sapiens
  misc_RNA (1)...(19): siRNA sense strand
caacagaauaucucgggaa

SEQ ID NO: 2534755 - RNA, 19 nt, Homo sapiens
  misc_RNA (1)...(19): siRNA sense strand
cagacagagauaaguacaa

SEQ ID NO: 2534756 - RNA, 19 nt, Homo sapiens
  misc_RNA (1)...(19): siRNA sense strand
ugauauguuucauuggcaa

SEQ ID NO: 2534757 - RNA, 19 nt, Homo sapiens
  misc_RNA (1)...(19): siRNA sense strand
ccgugacccuccagcacaa

SEQ ID NO: 2534758 - RNA, 19 nt, Homo sapiens
  misc_RNA (1)...(19): siRNA sense strand
ucucgauauucuaagauca

SEQ ID NO: 2534759 - RNA, 19 nt, Homo sapiens
  misc_RNA (1)...(19): siRNA sense strand
caacagaauaucucgggaa

SEQ ID NO: 2534760 - RNA, 19 nt, Homo sapiens
  misc_RNA (1)...(19): siRNA sense strand
cagacagagauaaguacaa

SEQ ID NO: 2534761 - RNA, 19 nt, Homo sapiens
  misc_RNA (1)...(19): siRNA sense strand
ugauauguuucauuggcaa

SEQ ID NO: 2534762 - RNA, 19 nt, Homo sapiens
  misc_RNA (1)...(19): siRNA sense strand
ccgugacccuccagcacaa

SEQ ID NO: 2534763 - RNA, 19 nt, Homo sapiens
  misc_RNA (1)...(19): siRNA sense strand
ucucgauauucuaagauca

SEQ ID NO: 2534764 - RNA, 19 nt, Homo sapiens
  misc_RNA (1)...(19): siRNA sense strand
caacagaauaucucgggaa

SEQ ID NO: 2534765 - RNA, 19 nt, Homo sapiens
  misc_RNA (1)...(19): siRNA sense strand
cagacagagauaaguacaa

SEQ ID NO: 2534766 - RNA, 19 nt, Homo sapiens
  misc_RNA (1)...(19): siRNA sense strand
ugauauguuucauuggcaa

SEQ ID NO: 2534767 - RNA, 19 nt, Homo sapiens
  misc_RNA (1)...(19): siRNA sense strand
ccgugacccuccagcacaa

SEQ ID NO: 2534768 - RNA, 19 nt, Homo sapiens
  misc_RNA (1)...(19): siRNA sense strand
ucucgauauucuaagauca

SEQ ID NO: 2534769 - RNA, 19 nt, Homo sapiens
  misc_RNA (1)...(19): siRNA sense strand
cagacagagauaaguacaa

SEQ ID NO: 2534770 - RNA, 19 nt, Homo sapiens
  misc_RNA (1)...(19): siRNA sense strand
ugauauguuucauuggcaa

SEQ ID NO: 2534771 - RNA, 19 nt, Homo sapiens
  misc_RNA (1)...(19): siRNA sense strand
ccgugacccuccagcacaa

SEQ ID NO: 2534772 - RNA, 19 nt, Homo sapiens
  misc_RNA (1)...(19): siRNA sense strand
ucucgauauucuaagauca

SEQ ID NO: 2534773 - RNA, 19 nt, Homo sapiens
  misc_RNA (1)...(19): siRNA sense strand
caacagaauaucucgggaa

SEQ ID NO: 2534774 - RNA, 19 nt, Homo sapiens
  misc_RNA (1)...(19): siRNA sense strand
cagacagagauaaguacaa

SEQ ID NO: 2534775 - RNA, 19 nt, Homo sapiens
  misc_RNA (1)...(19): siRNA sense strand
ugauauguuucauuggcaa

SEQ ID NO: 2534776 - RNA, 19 nt, Homo sapiens
  misc_RNA (1)...(19): siRNA sense strand
ccgugacccuccagcacaa

SEQ ID NO: 2534777 - RNA, 19 nt, Homo sapiens
  misc_RNA (1)...(19): siRNA sense strand
ucucgauauucuaagauca

SEQ ID NO: 2534778 - RNA, 19 nt, Homo sapiens
  misc_RNA (1)...(19): siRNA sense strand
ccaucgagcuggagcccaa

SEQ ID NO: 2534779 - RNA, 19 nt, Homo sapiens
  misc_RNA (1)...(19): siRNA sense strand
cacuaaagcugcuggggaa

SEQ ID NO: 2534780 - RNA, 19 nt, Homo sapiens
  misc_RNA (1)...(19): siRNA sense strand
aagucaaagccuuggauga

SEQ ID NO: 2534781 - RNA, 19 nt, Homo sapiens
  misc_RNA (1)...(19): siRNA sense strand
ccaagguggaggugaacau

SEQ ID NO: 2534782 - RNA, 19 nt, Homo sapiens
  misc_RNA (1)...(19): siRNA sense strand
gcgaugagcucuucaggca

SEQ ID NO: 2534783 - RNA, 19 nt, Homo sapiens
  misc_RNA (1)...(19): siRNA sense strand
gcccaggauuugugaggga

SEQ ID NO: 2534784 - RNA, 19 nt, Homo sapiens
  misc_RNA (1)...(19): siRNA sense strand
gugugguacuggagcgcau

SEQ ID NO: 2534785 - RNA, 19 nt, Homo sapiens
  misc_RNA (1)...(19): siRNA sense strand
acacauugcucaucagcga

SEQ ID NO: 2534786 - RNA, 19 nt, Homo sapiens
  misc_RNA (1)...(19): siRNA sense strand
ggacacaaguacucccuga

SEQ ID NO: 2534787 - RNA, 19 nt, Homo sapiens
  misc_RNA (1)...(19): siRNA sense strand
aagagaaugaguaugucaa

SEQ ID NO: 2534788 - RNA, 19 nt, Homo sapiens
  misc_RNA (1)...(19): siRNA sense strand
guggacagugugaaagaga

SEQ ID NO: 2534789 - RNA, 19 nt, Homo sapiens
  misc_RNA (1)...(19): siRNA sense strand
uuucugaccaagaggguga

SEQ ID NO: 2534790 - RNA, 19 nt, Homo sapiens
  misc_RNA (1)...(19): siRNA sense strand
ccaaagaaaugauggagca

SEQ ID NO: 2534791 - RNA, 19 nt, Homo sapiens
  misc_RNA (1)...(19): siRNA sense strand
cuggaauguugcagaguuu

SEQ ID NO: 2534792 - RNA, 19 nt, Homo sapiens
  misc_RNA (1)...(19): siRNA sense strand
ccuuguugaaauugagaaa

SEQ ID NO: 2534793 - RNA, 19 nt, Homo sapiens
  misc_RNA (1)...(19): siRNA sense strand
cuggagaagugaugaggau

SEQ ID NO: 2534794 - RNA, 19 nt, Homo sapiens
  misc_RNA (1)...(19): siRNA sense strand
ggaaaugauaggagccgau

SEQ ID NO: 2534795 - RNA, 19 nt, Homo sapiens
  misc_RNA (1)...(19): siRNA sense strand
aagaaaugauggagcagca

SEQ ID NO: 2534796 - RNA, 19 nt, Homo sapiens
  misc_RNA (1)...(19): siRNA sense strand
agacaagaacauugggcca

SEQ ID NO: 2534797 - RNA, 19 nt, Homo sapiens
  misc_RNA (1)...(19): siRNA sense strand
acauugggccauugguaaa

SEQ ID NO: 2534798 - RNA, 19 nt, Homo sapiens
  misc_RNA (1)...(19): siRNA sense strand
uaaggauaccuguaagaaa

SEQ ID NO: 2534799 - RNA, 19 nt, Homo sapiens
  misc_RNA (1)...(19): siRNA sense strand
aacaacaggcagaggaaau

SEQ ID NO: 2534800 - RNA, 19 nt, Homo sapiens
  misc_RNA (1)...(19): siRNA sense strand
aagugagauugcaggagua

SEQ ID NO: 2534801 - RNA, 19 nt, Homo sapiens
  misc_RNA (1)...(19): siRNA sense strand
gggaaacaagaaagacaga

SEQ ID NO: 2534802 - RNA, 19 nt, Homo sapiens
  misc_RNA (1)...(19): siRNA sense strand
gcaagagaagacuggaaaa

SEQ ID NO: 2534803 - RNA, 19 nt, Homo sapiens
  misc_RNA (1)...(19): siRNA sense strand
cagguuugcaagugagauu

SEQ ID NO: 2534804 - RNA, 19 nt, Homo sapiens
  misc_RNA (1)...(19): siRNA sense strand
uugcaggaguagaugauuu

SEQ ID NO: 2534805 - RNA, 19 nt, Homo sapiens
  misc_RNA (1)...(19): siRNA sense strand
gcagaguuuucaaggcaaa

SEQ ID NO: 2534806 - RNA, 19 nt, Homo sapiens
  misc_RNA (1)...(19): siRNA sense strand
gaguagaugauuugggaac

SEQ ID NO: 2534807 - RNA, 19 nt, Homo sapiens
  misc_RNA (1)...(19): siRNA sense strand
uguuacuggugauuggaaa

SEQ ID NO: 2534808 - RNA, 19 nt, Homo sapiens
  misc_RNA (1)...(19): siRNA sense strand
uggcaagagaagacuggaa

SEQ ID NO: 2534809 - RNA, 19 nt, Homo sapiens
  misc_RNA (1)...(19): siRNA sense strand
ccucacagacaauggccaa

SEQ ID NO: 2534810 - RNA, 19 nt, Homo sapiens
  misc_RNA (1)...(19): siRNA sense strand
cauaugaccaccugggaga

SEQ ID NO: 2534811 - RNA, 19 nt, Homo sapiens
  misc_RNA (1)...(19): siRNA sense strand
aguaaugaaggguuggaau

SEQ ID NO: 2534812 - RNA, 19 nt, Homo sapiens
  misc_RNA (1)...(19): siRNA sense strand
caaaagauucggaugacua

SEQ ID NO: 2534813 - RNA, 19 nt, Homo sapiens
  misc_RNA (1)...(19): siRNA sense strand
uagcacaagaacuggagaa

SEQ ID NO: 2534814 - RNA, 19 nt, Homo sapiens
  misc_RNA (1)...(19): siRNA sense strand
ucauaggauugcaagucaa

SEQ ID NO: 2534815 - RNA, 19 nt, Homo sapiens
  misc_RNA (1)...(19): siRNA sense strand
aaguauuuguugaugguca

SEQ ID NO: 2534816 - RNA, 19 nt, Homo sapiens
  misc_RNA (1)...(19): siRNA sense strand
uggaaguaauauugugguu

SEQ ID NO: 2534817 - RNA, 19 nt, Homo sapiens
  misc_RNA (1)...(19): siRNA sense strand
gccaauggucagaaaugaa

SEQ ID NO: 2534818 - RNA, 19 nt, Homo sapiens
  misc_RNA (1)...(19): siRNA sense strand
caaagauguggcagcaauu

SEQ ID NO: 2534819 - RNA, 19 nt, Homo sapiens
  misc_RNA (1)...(19): siRNA sense strand
cuguggaagacaagaacau

SEQ ID NO: 2534820 - RNA, 19 nt, Homo sapiens
  misc_RNA (1)...(19): siRNA sense strand
aguaaggaacagauuggaa

SEQ ID NO: 2534821 - RNA, 19 nt, Homo sapiens
  misc_RNA (1)...(19): siRNA sense strand
ggaugcgguuggaaguaau

SEQ ID NO: 2534822 - RNA, 19 nt, Homo sapiens
  misc_RNA (1)...(19): siRNA sense strand
cuaaaacgucaaagacuua

SEQ ID NO: 2534823 - RNA, 19 nt, Homo sapiens
  misc_RNA (1)...(19): siRNA sense strand
ucaaagacuuaccgagcca

SEQ ID NO: 2534824 - RNA, 19 nt, Homo sapiens
  misc_RNA (1)...(19): siRNA sense strand
ggaagcgugcuguggaaga

SEQ ID NO: 2534825 - RNA, 19 nt, Homo sapiens
  misc_RNA (1)...(19): siRNA sense strand
ggguggaagcaauucggaa

SEQ ID NO: 2534826 - RNA, 19 nt, Homo sapiens
  misc_RNA (1)...(19): siRNA sense strand
ugucugaacugucugggaa

SEQ ID NO: 2534827 - RNA, 19 nt, Homo sapiens
  misc_RNA (1)...(19): siRNA sense strand
guuaaggauaccuguaaga

SEQ ID NO: 2534828 - RNA, 19 nt, Homo sapiens
  misc_RNA (1)...(19): siRNA sense strand
aaaugauggagcagcaauu

SEQ ID NO: 2534829 - RNA, 19 nt, Homo sapiens
  misc_RNA (1)...(19): siRNA sense strand
gguugucuguugcuggaaa

SEQ ID NO: 2534830 - RNA, 19 nt, Homo sapiens
  misc_RNA (1)...(19): siRNA sense strand
ggggaagcgugcuguggaa

SEQ ID NO: 2534831 - RNA, 19 nt, Homo sapiens
  misc_RNA (1)...(19): siRNA sense strand
gugcuguggaagacaagaa

SEQ ID NO: 2534832 - RNA, 19 nt, Homo sapiens
  misc_RNA (1)...(19): siRNA sense strand
ucggaugacuagugguguu

SEQ ID NO: 2534833 - RNA, 19 nt, Homo sapiens
  misc_RNA (1)...(19): siRNA sense strand
ugagauugcaggaguagau

SEQ ID NO: 2534834 - RNA, 19 nt, Homo sapiens
  misc_RNA (1)...(19): siRNA sense strand
uggaguucuuauuagcaaa

SEQ ID NO: 2534835 - RNA, 19 nt, Homo sapiens
  misc_RNA (1)...(19): siRNA sense strand
ccgagccaauggucagaaa

SEQ ID NO: 2534836 - RNA, 19 nt, Homo sapiens
  misc_RNA (1)...(19): siRNA sense strand
uggaagaggcagauguugu

SEQ ID NO: 2534837 - RNA, 19 nt, Homo sapiens
  misc_RNA (1)...(19): siRNA sense strand
cuacaugacagauucaauu

SEQ ID NO: 2534838 - RNA, 19 nt, Homo sapiens
  misc_RNA (1)...(19): siRNA sense strand
gcaccacuguuuaaugcua

SEQ ID NO: 2534839 - RNA, 19 nt, Homo sapiens
  misc_RNA (1)...(19): siRNA sense strand
gugccaugccaguaaugaa

SEQ ID NO: 2534840 - RNA, 19 nt, Homo sapiens
  misc_RNA (1)...(19): siRNA sense strand
ccucuaagcccuaugccuu

SEQ ID NO: 2534841 - RNA, 19 nt, Homo sapiens
  misc_RNA (1)...(19): siRNA sense strand
ccaaaugugucaaagcugu

SEQ ID NO: 2534842 - RNA, 19 nt, Homo sapiens
  misc_RNA (1)...(19): siRNA sense strand
ccaugaaugaagagaacuu

SEQ ID NO: 2534843 - RNA, 19 nt, Homo sapiens
  misc_RNA (1)...(19): siRNA sense strand
gcgaugaccccaugggcua

SEQ ID NO: 2534844 - RNA, 19 nt, Homo sapiens
  misc_RNA (1)...(19): siRNA sense strand
uggcagagcccaaugacga

SEQ ID NO: 2534845 - RNA, 19 nt, Homo sapiens
  misc_RNA (1)...(19): siRNA sense strand
gcgaugaccccaugggcua

SEQ ID NO: 2534846 - RNA, 19 nt, Homo sapiens
  misc_RNA (1)...(19): siRNA sense strand
uggcagagcccaaugacga

SEQ ID NO: 2534847 - RNA, 19 nt, Homo sapiens
  misc_RNA (1)...(19): siRNA sense strand
agaaggacacagagaaacu

SEQ ID NO: 2534848 - RNA, 19 nt, Homo sapiens
  misc_RNA (1)...(19): siRNA sense strand
guucauuauauccgagaga

SEQ ID NO: 2534849 - RNA, 19 nt, Homo sapiens
  misc_RNA (1)...(19): siRNA sense strand
gcuccuauucagaggcuca

SEQ ID NO: 2534850 - RNA, 19 nt, Homo sapiens
  misc_RNA (1)...(19): siRNA sense strand
cuucacaaugggcguguua

SEQ ID NO: 2534851 - RNA, 19 nt, Homo sapiens
  misc_RNA (1)...(19): siRNA sense strand
auuauauccgagagaacua

SEQ ID NO: 2534852 - RNA, 19 nt, Homo sapiens
  misc_RNA (1)...(19): siRNA sense strand
uagucugggccuugaacaa

SEQ ID NO: 2534853 - RNA, 19 nt, Homo sapiens
  misc_RNA (1)...(19): siRNA sense strand
ugggagaaggacacagaga

SEQ ID NO: 2534854 - RNA, 19 nt, Homo sapiens
  misc_RNA (1)...(19): siRNA sense strand
ucauuauauccgagagaac

SEQ ID NO: 2534855 - RNA, 19 nt, Homo sapiens
  misc_RNA (1)...(19): siRNA sense strand
agaaggacacagagaaacu

SEQ ID NO: 2534856 - RNA, 19 nt, Homo sapiens
  misc_RNA (1)...(19): siRNA sense strand
guucauuauauccgagaga

SEQ ID NO: 2534857 - RNA, 19 nt, Homo sapiens
  misc_RNA (1)...(19): siRNA sense strand
gcuccuauucagaggcuca

SEQ ID NO: 2534858 - RNA, 19 nt, Homo sapiens
  misc_RNA (1)...(19): siRNA sense strand
cuucacaaugggcguguua

SEQ ID NO: 2534859 - RNA, 19 nt, Homo sapiens
  misc_RNA (1)...(19): siRNA sense strand
auuauauccgagagaacua

SEQ ID NO: 2534860 - RNA, 19 nt, Homo sapiens
  misc_RNA (1)...(19): siRNA sense strand
uagucugggccuugaacaa

SEQ ID NO: 2534861 - RNA, 19 nt, Homo sapiens
  misc_RNA (1)...(19): siRNA sense strand
ugggagaaggacacagaga

SEQ ID NO: 2534862 - RNA, 19 nt, Homo sapiens
  misc_RNA (1)...(19): siRNA sense strand
ucauuauauccgagagaac

SEQ ID NO: 2534863 - RNA, 19 nt, Homo sapiens
  misc_RNA (1)...(19): siRNA sense strand
agaacaugaauucgggcaa

SEQ ID NO: 2534864 - RNA, 19 nt, Homo sapiens
  misc_RNA (1)...(19): siRNA sense strand
agaccuggguugaugcaga

SEQ ID NO: 2534865 - RNA, 19 nt, Homo sapiens
  misc_RNA (1)...(19): siRNA sense strand
ggguugaugcagaucucua

SEQ ID NO: 2534866 - RNA, 19 nt, Homo sapiens
  misc_RNA (1)...(19): siRNA sense strand
cugauuaaggagaguggca

SEQ ID NO: 2534867 - RNA, 19 nt, Homo sapiens
  misc_RNA (1)...(19): siRNA sense strand
ccuacaaggucaagugcga

SEQ ID NO: 2534868 - RNA, 19 nt, Homo sapiens
  misc_RNA (1)...(19): siRNA sense strand
ucaaguucgacgugaagaa

SEQ ID NO: 2534869 - RNA, 19 nt, Homo sapiens
  misc_RNA (1)...(19): siRNA sense strand
gaucuguacuggauggcga

SEQ ID NO: 2534870 - RNA, 19 nt, Homo sapiens
  misc_RNA (1)...(19): siRNA sense strand
aggucaagugcgagaaacu

SEQ ID NO: 2534871 - RNA, 19 nt, Homo sapiens
  misc_RNA (1)...(19): siRNA sense strand
aguucgacgugaagaagga

SEQ ID NO: 2534872 - RNA, 19 nt, Homo sapiens
  misc_RNA (1)...(19): siRNA sense strand
cagaugaggaagaggagga

SEQ ID NO: 2534873 - RNA, 19 nt, Homo sapiens
  misc_RNA (1)...(19): siRNA sense strand
gcugaaugcaguaggggua

SEQ ID NO: 2534874 - RNA, 19 nt, Homo sapiens
  misc_RNA (1)...(19): siRNA sense strand
ccacagaugaggaagagga

SEQ ID NO: 2534875 - RNA, 19 nt, Homo sapiens
  misc_RNA (1)...(19): siRNA sense strand
aaguuugggugcagggaca

SEQ ID NO: 2534876 - RNA, 19 nt, Homo sapiens
  misc_RNA (1)...(19): siRNA sense strand
ugaucuucauaaagggcaa

SEQ ID NO: 2534877 - RNA, 19 nt, Homo sapiens
  misc_RNA (1)...(19): siRNA sense strand
uggccgaguuaguggaguu

SEQ ID NO: 2534878 - RNA, 19 nt, Homo sapiens
  misc_RNA (1)...(19): siRNA sense strand
gggaagugcugaaugcagu

SEQ ID NO: 2534879 - RNA, 19 nt, Homo sapiens
  misc_RNA (1)...(19): siRNA sense strand
guagugaugaugagggcau

SEQ ID NO: 2534880 - RNA, 19 nt, Homo sapiens
  misc_RNA (1)...(19): siRNA sense strand
ggguauaugcugggaggga

SEQ ID NO: 2534881 - RNA, 19 nt, Homo sapiens
  misc_RNA (1)...(19): siRNA sense strand
cacauauacacuagaugaa

SEQ ID NO: 2534882 - RNA, 19 nt, Homo sapiens
  misc_RNA (1)...(19): siRNA sense strand
ugaaagauguggaagagag

SEQ ID NO: 2534883 - RNA, 19 nt, Homo sapiens
  misc_RNA (1)...(19): siRNA sense strand
aagauguggaagagagagu

SEQ ID NO: 2534884 - RNA, 19 nt, Homo sapiens
  misc_RNA (1)...(19): siRNA sense strand
uagcaguagcuguuggaaa

SEQ ID NO: 2534885 - RNA, 19 nt, Homo sapiens
  misc_RNA (1)...(19): siRNA sense strand
agcaguagcuguuggaaaa

SEQ ID NO: 2534886 - RNA, 19 nt, Homo sapiens
  misc_RNA (1)...(19): siRNA sense strand
gaagaagucucaaagcaga

SEQ ID NO: 2534887 - RNA, 19 nt, Homo sapiens
  misc_RNA (1)...(19): siRNA sense strand
caaagauggaauaggggua

SEQ ID NO: 2534888 - RNA, 19 nt, Homo sapiens
  misc_RNA (1)...(19): siRNA sense strand
ugacaaugaccaugaacca

SEQ ID NO: 2534889 - RNA, 19 nt, Homo sapiens
  misc_RNA (1)...(19): siRNA sense strand
agacaaguauacaugccaa

SEQ ID NO: 2534890 - RNA, 19 nt, Homo sapiens
  misc_RNA (1)...(19): siRNA sense strand
uggcuaaagcuacagcaaa

SEQ ID NO: 2534891 - RNA, 19 nt, Homo sapiens
  misc_RNA (1)...(19): siRNA sense strand
auacaugccaagaugacaa

SEQ ID NO: 2534892 - RNA, 19 nt, Homo sapiens
  misc_RNA (1)...(19): siRNA sense strand
caauagucagaaugaagaa

SEQ ID NO: 2534893 - RNA, 19 nt, Homo sapiens
  misc_RNA (1)...(19): siRNA sense strand
accaaagagacaagguuau

SEQ ID NO: 2534894 - RNA, 19 nt, Homo sapiens
  misc_RNA (1)...(19): siRNA sense strand
ccaagaugacaaggagaau

SEQ ID NO: 2534895 - RNA, 19 nt, Homo sapiens
  misc_RNA (1)...(19): siRNA sense strand
cagucuguuuccaugguua

SEQ ID NO: 2534896 - RNA, 19 nt, Homo sapiens
  misc_RNA (1)...(19): siRNA sense strand
augaagaagucucaaagca

SEQ ID NO: 2534897 - RNA, 19 nt, Homo sapiens
  misc_RNA (1)...(19): siRNA sense strand
ugcuggagaaucuggguua

SEQ ID NO: 2534898 - RNA, 19 nt, Homo sapiens
  misc_RNA (1)...(19): siRNA sense strand
uggacaauagucagaauga

SEQ ID NO: 2534899 - RNA, 19 nt, Homo sapiens
  misc_RNA (1)...(19): siRNA sense strand
uggaaaugaacuagaccuu

SEQ ID NO: 2534900 - RNA, 19 nt, Homo sapiens
  misc_RNA (1)...(19): siRNA sense strand
gugaaugagaugaucguca

SEQ ID NO: 2534901 - RNA, 19 nt, Homo sapiens
  misc_RNA (1)...(19): siRNA sense strand
agagaauucgacuggagaa

SEQ ID NO: 2534902 - RNA, 19 nt, Homo sapiens
  misc_RNA (1)...(19): siRNA sense strand
ccuugcguguggagagaga

SEQ ID NO: 2534903 - RNA, 19 nt, Homo sapiens
  misc_RNA (1)...(19): siRNA sense strand
agaaggugaaugagaugau

SEQ ID NO: 2534904 - RNA, 19 nt, Homo sapiens
  misc_RNA (1)...(19): siRNA sense strand
cauuaugagauucaggaaa

SEQ ID NO: 2534905 - RNA, 19 nt, Homo sapiens
  misc_RNA (1)...(19): siRNA sense strand
uggaaaugaacuagaccuu

SEQ ID NO: 2534906 - RNA, 19 nt, Homo sapiens
  misc_RNA (1)...(19): siRNA sense strand
gugaaugagaugaucguca

SEQ ID NO: 2534907 - RNA, 19 nt, Homo sapiens
  misc_RNA (1)...(19): siRNA sense strand
aagacagaaucauggccaa

SEQ ID NO: 2534908 - RNA, 19 nt, Homo sapiens
  misc_RNA (1)...(19): siRNA sense strand
agauucaggaaaaggaaaa

SEQ ID NO: 2534909 - RNA, 19 nt, Homo sapiens
  misc_RNA (1)...(19): siRNA sense strand
agagaauucgacuggagaa

SEQ ID NO: 2534910 - RNA, 19 nt, Homo sapiens
  misc_RNA (1)...(19): siRNA sense strand
gaaaggaucuuguucgagu

SEQ ID NO: 2534911 - RNA, 19 nt, Homo sapiens
  misc_RNA (1)...(19): siRNA sense strand
ccuugcguguggagagaga

SEQ ID NO: 2534912 - RNA, 19 nt, Homo sapiens
  misc_RNA (1)...(19): siRNA sense strand
gaguagaagccacagucau

SEQ ID NO: 2534913 - RNA, 19 nt, Homo sapiens
  misc_RNA (1)...(19): siRNA sense strand
agaaggugaaugagaugau

SEQ ID NO: 2534914 - RNA, 19 nt, Homo sapiens
  misc_RNA (1)...(19): siRNA sense strand
cauuaugagauucaggaaa

SEQ ID NO: 2534915 - RNA, 19 nt, Homo sapiens
  misc_RNA (1)...(19): siRNA sense strand
uggaaaugaacuagaccuu

SEQ ID NO: 2534916 - RNA, 19 nt, Homo sapiens
  misc_RNA (1)...(19): siRNA sense strand
gugaaugagaugaucguca

SEQ ID NO: 2534917 - RNA, 19 nt, Homo sapiens
  misc_RNA (1)...(19): siRNA sense strand
aagacagaaucauggccaa

SEQ ID NO: 2534918 - RNA, 19 nt, Homo sapiens
  misc_RNA (1)...(19): siRNA sense strand
agauucaggaaaaggaaaa

SEQ ID NO: 2534919 - RNA, 19 nt, Homo sapiens
  misc_RNA (1)...(19): siRNA sense strand
agagaauucgacuggagaa

SEQ ID NO: 2534920 - RNA, 19 nt, Homo sapiens
  misc_RNA (1)...(19): siRNA sense strand
gaaaggaucuuguucgagu

SEQ ID NO: 2534921 - RNA, 19 nt, Homo sapiens
  misc_RNA (1)...(19): siRNA sense strand
ccuugcguguggagagaga

SEQ ID NO: 2534922 - RNA, 19 nt, Homo sapiens
  misc_RNA (1)...(19): siRNA sense strand
gaguagaagccacagucau

SEQ ID NO: 2534923 - RNA, 19 nt, Homo sapiens
  misc_RNA (1)...(19): siRNA sense strand
agaaggugaaugagaugau

SEQ ID NO: 2534924 - RNA, 19 nt, Homo sapiens
  misc_RNA (1)...(19): siRNA sense strand
cauuaugagauucaggaaa

SEQ ID NO: 2534925 - RNA, 19 nt, Homo sapiens
  misc_RNA (1)...(19): siRNA sense strand
uggaaaugaacuagaccuu

SEQ ID NO: 2534926 - RNA, 19 nt, Homo sapiens
  misc_RNA (1)...(19): siRNA sense strand
aagacagaaucauggccaa

SEQ ID NO: 2534927 - RNA, 19 nt, Homo sapiens
  misc_RNA (1)...(19): siRNA sense strand
agauucaggaaaaggaaaa

SEQ ID NO: 2534928 - RNA, 19 nt, Homo sapiens
  misc_RNA (1)...(19): siRNA sense strand
agagaauucgacuggagaa

SEQ ID NO: 2534929 - RNA, 19 nt, Homo sapiens
  misc_RNA (1)...(19): siRNA sense strand
gaaaggaucuuguucgagu

SEQ ID NO: 2534930 - RNA, 19 nt, Homo sapiens
  misc_RNA (1)...(19): siRNA sense strand
ccuugcguguggagagaga

SEQ ID NO: 2534931 - RNA, 19 nt, Homo sapiens
  misc_RNA (1)...(19): siRNA sense strand
gaguagaagccacagucau

SEQ ID NO: 2534932 - RNA, 19 nt, Homo sapiens
  misc_RNA (1)...(19): siRNA sense strand
ccauaaaggaggaggaaaa

SEQ ID NO: 2534933 - RNA, 19 nt, Homo sapiens
  misc_RNA (1)...(19): siRNA sense strand
gugccggagcagagggaua

SEQ ID NO: 2534934 - RNA, 19 nt, Homo sapiens
  misc_RNA (1)...(19): siRNA sense strand
cagaaguacuccauggaca

SEQ ID NO: 2534935 - RNA, 19 nt, Homo sapiens
  misc_RNA (1)...(19): siRNA sense strand
ggaccaaagaggaagacca

SEQ ID NO: 2534936 - RNA, 19 nt, Homo sapiens
  misc_RNA (1)...(19): siRNA sense strand
cgaaggaacaggagcccau

SEQ ID NO: 2534937 - RNA, 19 nt, Homo sapiens
  misc_RNA (1)...(19): siRNA sense strand
gaacaggagcccaucggua

SEQ ID NO: 2534938 - RNA, 19 nt, Homo sapiens
  misc_RNA (1)...(19): siRNA sense strand
guacagaucuggacgcagu

SEQ ID NO: 2534939 - RNA, 19 nt, Homo sapiens
  misc_RNA (1)...(19): siRNA sense strand
gguuaagaaguauggcaca

SEQ ID NO: 2534940 - RNA, 19 nt, Homo sapiens
  misc_RNA (1)...(19): siRNA sense strand
aggaauucccgaagcguga

SEQ ID NO: 2534941 - RNA, 19 nt, Homo sapiens
  misc_RNA (1)...(19): siRNA sense strand
gauagcaagugcaagguca

SEQ ID NO: 2534942 - RNA, 19 nt, Homo sapiens
  misc_RNA (1)...(19): siRNA sense strand
ccaucaagaaaguccggaa

SEQ ID NO: 2534943 - RNA, 19 nt, Homo sapiens
  misc_RNA (1)...(19): siRNA sense strand
uggugugaccugaguaaau

SEQ ID NO: 2534944 - RNA, 19 nt, Homo sapiens
  misc_RNA (1)...(19): siRNA sense strand
caccagagcccuuggagga

SEQ ID NO: 2534945 - RNA, 19 nt, Homo sapiens
  misc_RNA (1)...(19): siRNA sense strand
cggagcagagggauagcaa

SEQ ID NO: 2534946 - RNA, 19 nt, Homo sapiens
  misc_RNA (1)...(19): siRNA sense strand
ugacauuguggaugaggau

SEQ ID NO: 2534947 - RNA, 19 nt, Homo sapiens
  misc_RNA (1)...(19): siRNA sense strand
caggaggcuucuugagcga

SEQ ID NO: 2534948 - RNA, 19 nt, Homo sapiens
  misc_RNA (1)...(19): siRNA sense strand
uggaggaggacuugaagga

SEQ ID NO: 2534949 - RNA, 19 nt, Homo sapiens
  misc_RNA (1)...(19): siRNA sense strand
ccaccacaucgaaggaaca

SEQ ID NO: 2534950 - RNA, 19 nt, Homo sapiens
  misc_RNA (1)...(19): siRNA sense strand
acaucaggcccgagaagca

SEQ ID NO: 2534951 - RNA, 19 nt, Homo sapiens
  misc_RNA (1)...(19): siRNA sense strand
ggacccaugaggaggacga

SEQ ID NO: 2534952 - RNA, 19 nt, Homo sapiens
  misc_RNA (1)...(19): siRNA sense strand
cuaccauaaaggaggagga

SEQ ID NO: 2534953 - RNA, 19 nt, Homo sapiens
  misc_RNA (1)...(19): siRNA sense strand
cucaagcggcagaggaaga

SEQ ID NO: 2534954 - RNA, 19 nt, Homo sapiens
  misc_RNA (1)...(19): siRNA sense strand
aggaaaacagugaggagga

SEQ ID NO: 2534955 - RNA, 19 nt, Homo sapiens
  misc_RNA (1)...(19): siRNA sense strand
gggugguggaggcagcuaa

SEQ ID NO: 2534956 - RNA, 19 nt, Homo sapiens
  misc_RNA (1)...(19): siRNA sense strand
ugaaggaggugcugcguuc

SEQ ID NO: 2534957 - RNA, 19 nt, Homo sapiens
  misc_RNA (1)...(19): siRNA sense strand
aggagaugcuggaggacaa

SEQ ID NO: 2534958 - RNA, 19 nt, Homo sapiens
  misc_RNA (1)...(19): siRNA sense strand
cagaaguggaugaggaaga

SEQ ID NO: 2534959 - RNA, 19 nt, Homo sapiens
  misc_RNA (1)...(19): siRNA sense strand
ccaaauaccugcuggcuga

SEQ ID NO: 2534960 - RNA, 19 nt, Homo sapiens
  misc_RNA (1)...(19): siRNA sense strand
ucuuagaacagaaggagaa

SEQ ID NO: 2534961 - RNA, 19 nt, Homo sapiens
  misc_RNA (1)...(19): siRNA sense strand
agcuggaacuggaggacaa

SEQ ID NO: 2534962 - RNA, 19 nt, Homo sapiens
  misc_RNA (1)...(19): siRNA sense strand
uuuaagaagucaagggcca

SEQ ID NO: 2534963 - RNA, 19 nt, Homo sapiens
  misc_RNA (1)...(19): siRNA sense strand
aggcagaaguggaugagga

SEQ ID NO: 2534964 - RNA, 19 nt, Homo sapiens
  misc_RNA (1)...(19): siRNA sense strand
ccgaagaacaaguaaucau

SEQ ID NO: 2534965 - RNA, 19 nt, Homo sapiens
  misc_RNA (1)...(19): siRNA sense strand
agaaagacucgguggagga

SEQ ID NO: 2534966 - RNA, 19 nt, Homo sapiens
  misc_RNA (1)...(19): siRNA sense strand
aaucggagcuggaggagga

SEQ ID NO: 2534967 - RNA, 19 nt, Homo sapiens
  misc_RNA (1)...(19): siRNA sense strand
gcgaggagaugcuggagga

SEQ ID NO: 2534968 - RNA, 19 nt, Homo sapiens
  misc_RNA (1)...(19): siRNA sense strand
cagaaagcagaaaggguga

SEQ ID NO: 2534969 - RNA, 19 nt, Homo sapiens
  misc_RNA (1)...(19): siRNA sense strand
gagaagaucaguagccuca

SEQ ID NO: 2534970 - RNA, 19 nt, Homo sapiens
  misc_RNA (1)...(19): siRNA sense strand
cagcugaggaggaggagga

SEQ ID NO: 2534971 - RNA, 19 nt, Homo sapiens
  misc_RNA (1)...(19): siRNA sense strand
cgguggaggaaaugcggaa

SEQ ID NO: 2534972 - RNA, 19 nt, Homo sapiens
  misc_RNA (1)...(19): siRNA sense strand
ggcagaaguggaugaggaa

SEQ ID NO: 2534973 - RNA, 19 nt, Homo sapiens
  misc_RNA (1)...(19): siRNA sense strand
gaaucaaguucaugacgga

SEQ ID NO: 2534974 - RNA, 19 nt, Homo sapiens
  misc_RNA (1)...(19): siRNA sense strand
aggaggaggaggaggagga

SEQ ID NO: 2534975 - RNA, 19 nt, Homo sapiens
  misc_RNA (1)...(19): siRNA sense strand
aggaggaggaggaggagga

SEQ ID NO: 2534976 - RNA, 19 nt, Homo sapiens
  misc_RNA (1)...(19): siRNA sense strand
aggaggaggaggaggagga

SEQ ID NO: 2534977 - RNA, 19 nt, Homo sapiens
  misc_RNA (1)...(19): siRNA sense strand
acaccaaagagaaggcuga

SEQ ID NO: 2534978 - RNA, 19 nt, Homo sapiens
  misc_RNA (1)...(19): siRNA sense strand
cugaggaggaggaggagga

SEQ ID NO: 2534979 - RNA, 19 nt, Homo sapiens
  misc_RNA (1)...(19): siRNA sense strand
ccucugaccaagaaggaga

SEQ ID NO: 2534980 - RNA, 19 nt, Homo sapiens
  misc_RNA (1)...(19): siRNA sense strand
aagaaauccagaaggacuu

SEQ ID NO: 2534981 - RNA, 19 nt, Homo sapiens
  misc_RNA (1)...(19): siRNA sense strand
cggaaguuuaagaagucaa

SEQ ID NO: 2534982 - RNA, 19 nt, Homo sapiens
  misc_RNA (1)...(19): siRNA sense strand
gcaucaaguacguggugga

SEQ ID NO: 2534983 - RNA, 19 nt, Homo sapiens
  misc_RNA (1)...(19): siRNA sense strand
aagaaaaggacgacgauca

SEQ ID NO: 2534984 - RNA, 19 nt, Homo sapiens
  misc_RNA (1)...(19): siRNA sense strand
aggacgacgaucagaaaga

SEQ ID NO: 2534985 - RNA, 19 nt, Homo sapiens
  misc_RNA (1)...(19): siRNA sense strand
gcagaaagggugaagcaac

SEQ ID NO: 2534986 - RNA, 19 nt, Homo sapiens
  misc_RNA (1)...(19): siRNA sense strand
ccgccaucgagguggauuu

SEQ ID NO: 2534987 - RNA, 19 nt, Homo sapiens
  misc_RNA (1)...(19): siRNA sense strand
acagaggagaccagaauca

SEQ ID NO: 2534988 - RNA, 19 nt, Homo sapiens
  misc_RNA (1)...(19): siRNA sense strand
ccaaagagaaggcugacga

SEQ ID NO: 2534989 - RNA, 19 nt, Homo sapiens
  misc_RNA (1)...(19): siRNA sense strand
gaggaggaggagucggaau

SEQ ID NO: 2534990 - RNA, 19 nt, Homo sapiens
  misc_RNA (1)...(19): siRNA sense strand
aaagaaauccagaaggacu

SEQ ID NO: 2534991 - RNA, 19 nt, Homo sapiens
  misc_RNA (1)...(19): siRNA sense strand
gggaggcagaaguggauga

SEQ ID NO: 2534992 - RNA, 19 nt, Homo sapiens
  misc_RNA (1)...(19): siRNA sense strand
aagcagaaagggugaagca

SEQ ID NO: 2534993 - RNA, 19 nt, Homo sapiens
  misc_RNA (1)...(19): siRNA sense strand
gagaagaagccucugacca

SEQ ID NO: 2534994 - RNA, 19 nt, Homo sapiens
  misc_RNA (1)...(19): siRNA sense strand
guaugaaggaaacgugaca

SEQ ID NO: 2534995 - RNA, 19 nt, Homo sapiens
  misc_RNA (1)...(19): siRNA sense strand
agucggagcuggacgagga

SEQ ID NO: 2534996 - RNA, 19 nt, Homo sapiens
  misc_RNA (1)...(19): siRNA sense strand
cggaaaugcaggaggaacg

SEQ ID NO: 2534997 - RNA, 19 nt, Homo sapiens
  misc_RNA (1)...(19): siRNA sense strand
gggugaagcaacugcagga

SEQ ID NO: 2534998 - RNA, 19 nt, Homo sapiens
  misc_RNA (1)...(19): siRNA sense strand
augaaggaaacgugacaga

SEQ ID NO: 2534999 - RNA, 19 nt, Homo sapiens
  misc_RNA (1)...(19): siRNA sense strand
cagagaaggcugacugcca

SEQ ID NO: 2535000 - RNA, 19 nt, Homo sapiens
  misc_RNA (1)...(19): siRNA sense strand
gagaagaaagugcugcaga

SEQ ID NO: 2535001 - RNA, 19 nt, Homo sapiens
  misc_RNA (1)...(19): siRNA sense strand
aaguaaucauggaggcugu

SEQ ID NO: 2535002 - RNA, 19 nt, Homo sapiens
  misc_RNA (1)...(19): siRNA sense strand
gcaagauggaggugagcag

SEQ ID NO: 2535003 - RNA, 19 nt, Homo sapiens
  misc_RNA (1)...(19): siRNA sense strand
cagagaugcuacagaagcu

SEQ ID NO: 2535004 - RNA, 19 nt, Homo sapiens
  misc_RNA (1)...(19): siRNA sense strand
cggaaucggagcuggagga

SEQ ID NO: 2535005 - RNA, 19 nt, Homo sapiens
  misc_RNA (1)...(19): siRNA sense strand
agauccgguaugaaggaaa

SEQ ID NO: 2535006 - RNA, 19 nt, Homo sapiens
  misc_RNA (1)...(19): siRNA sense strand
acgcuaagaugcuggcacu

SEQ ID NO: 2535007 - RNA, 19 nt, Homo sapiens
  misc_RNA (1)...(19): siRNA sense strand
aagaaagugcugcagaaaa

SEQ ID NO: 2535008 - RNA, 19 nt, Homo sapiens
  misc_RNA (1)...(19): siRNA sense strand
cuuagaacagaaggagaaa

SEQ ID NO: 2535009 - RNA, 19 nt, Homo sapiens
  misc_RNA (1)...(19): siRNA sense strand
gguguuaccggcaggcgaa

SEQ ID NO: 2535010 - RNA, 19 nt, Homo sapiens
  misc_RNA (1)...(19): siRNA sense strand
ggccaggagaagaucagua

SEQ ID NO: 2535011 - RNA, 19 nt, Homo sapiens
  misc_RNA (1)...(19): siRNA sense strand
augcggaaguuuaagaagu

SEQ ID NO: 2535012 - RNA, 19 nt, Homo sapiens
  misc_RNA (1)...(19): siRNA sense strand
cauuauuggcagagaagau

SEQ ID NO: 2535013 - RNA, 19 nt, Homo sapiens
  misc_RNA (1)...(19): siRNA sense strand
gcuuagcagcccagagcaa

SEQ ID NO: 2535014 - RNA, 19 nt, Homo sapiens
  misc_RNA (1)...(19): siRNA sense strand
cagaaauggugaaucgcuu

SEQ ID NO: 2535015 - RNA, 19 nt, Homo sapiens
  misc_RNA (1)...(19): siRNA sense strand
gaauuuaagucaaacgagu

SEQ ID NO: 2535016 - RNA, 19 nt, Homo sapiens
  misc_RNA (1)...(19): siRNA sense strand
ccgacguccagcugagaaa

SEQ ID NO: 2535017 - RNA, 19 nt, Homo sapiens
  misc_RNA (1)...(19): siRNA sense strand
auuaaaaggaacuggagaa

SEQ ID NO: 2535018 - RNA, 19 nt, Homo sapiens
  misc_RNA (1)...(19): siRNA sense strand
gagcaaauucagaagcagu

SEQ ID NO: 2535019 - RNA, 19 nt, Homo sapiens
  misc_RNA (1)...(19): siRNA sense strand
uguugaaggaaaucagaau

SEQ ID NO: 2535020 - RNA, 19 nt, Homo sapiens
  misc_RNA (1)...(19): siRNA sense strand
ccugacuugcugacagaaa

SEQ ID NO: 2535021 - RNA, 19 nt, Homo sapiens
  misc_RNA (1)...(19): siRNA sense strand
aagccaacauagugcacuu

SEQ ID NO: 2535022 - RNA, 19 nt, Homo sapiens
  misc_RNA (1)...(19): siRNA sense strand
gcaccagccugaaugcaga

SEQ ID NO: 2535023 - RNA, 19 nt, Homo sapiens
  misc_RNA (1)...(19): siRNA sense strand
uuguugaagaugaaccaaa

SEQ ID NO: 2535024 - RNA, 19 nt, Homo sapiens
  misc_RNA (1)...(19): siRNA sense strand
cauuauuggcagagaagau

SEQ ID NO: 2535025 - RNA, 19 nt, Homo sapiens
  misc_RNA (1)...(19): siRNA sense strand
gcuuagcagcccagagcaa

SEQ ID NO: 2535026 - RNA, 19 nt, Homo sapiens
  misc_RNA (1)...(19): siRNA sense strand
cagaaauggugaaucgcuu

SEQ ID NO: 2535027 - RNA, 19 nt, Homo sapiens
  misc_RNA (1)...(19): siRNA sense strand
gaauuuaagucaaacgagu

SEQ ID NO: 2535028 - RNA, 19 nt, Homo sapiens
  misc_RNA (1)...(19): siRNA sense strand
ccgacguccagcugagaaa

SEQ ID NO: 2535029 - RNA, 19 nt, Homo sapiens
  misc_RNA (1)...(19): siRNA sense strand
auuaaaaggaacuggagaa

SEQ ID NO: 2535030 - RNA, 19 nt, Homo sapiens
  misc_RNA (1)...(19): siRNA sense strand
gagcaaauucagaagcagu

SEQ ID NO: 2535031 - RNA, 19 nt, Homo sapiens
  misc_RNA (1)...(19): siRNA sense strand
uguugaaggaaaucagaau

SEQ ID NO: 2535032 - RNA, 19 nt, Homo sapiens
  misc_RNA (1)...(19): siRNA sense strand
ccugacuugcugacagaaa

SEQ ID NO: 2535033 - RNA, 19 nt, Homo sapiens
  misc_RNA (1)...(19): siRNA sense strand
aagccaacauagugcacuu

SEQ ID NO: 2535034 - RNA, 19 nt, Homo sapiens
  misc_RNA (1)...(19): siRNA sense strand
uuguugaagaugaaccaaa

SEQ ID NO: 2535035 - RNA, 19 nt, Homo sapiens
  misc_RNA (1)...(19): siRNA sense strand
guggagacguugaaggaga

SEQ ID NO: 2535036 - RNA, 19 nt, Homo sapiens
  misc_RNA (1)...(19): siRNA sense strand
acguugaaggagaugauua

SEQ ID NO: 2535037 - RNA, 19 nt, Homo sapiens
  misc_RNA (1)...(19): siRNA sense strand
cagagguggagcugaagaa

SEQ ID NO: 2535038 - RNA, 19 nt, Homo sapiens
  misc_RNA (1)...(19): siRNA sense strand
uggaaaagugugacgagaa

SEQ ID NO: 2535039 - RNA, 19 nt, Homo sapiens
  misc_RNA (1)...(19): siRNA sense strand
cuacguggaugaugggcuu

SEQ ID NO: 2535040 - RNA, 19 nt, Homo sapiens
  misc_RNA (1)...(19): siRNA sense strand
ucugcaaggugguggaagu

SEQ ID NO: 2535041 - RNA, 19 nt, Homo sapiens
  misc_RNA (1)...(19): siRNA sense strand
cacuaaaggaccugagauc

SEQ ID NO: 2535042 - RNA, 19 nt, Homo sapiens
  misc_RNA (1)...(19): siRNA sense strand
gcagcaagaucuacgugga

SEQ ID NO: 2535043 - RNA, 19 nt, Homo sapiens
  misc_RNA (1)...(19): siRNA sense strand
ucguggugaucuaggcauu

SEQ ID NO: 2535044 - RNA, 19 nt, Homo sapiens
  misc_RNA (1)...(19): siRNA sense strand
agggaaagaacaucaagau

SEQ ID NO: 2535045 - RNA, 19 nt, Homo sapiens
  misc_RNA (1)...(19): siRNA sense strand
agaagggagauguggucau

SEQ ID NO: 2535046 - RNA, 19 nt, Homo sapiens
  misc_RNA (1)...(19): siRNA sense strand
agacguugaaggagaugau

SEQ ID NO: 2535047 - RNA, 19 nt, Homo sapiens
  misc_RNA (1)...(19): siRNA sense strand
caucaagggcagcggcacu

SEQ ID NO: 2535048 - RNA, 19 nt, Homo sapiens
  misc_RNA (1)...(19): siRNA sense strand
gguucggagguuugaugaa

SEQ ID NO: 2535049 - RNA, 19 nt, Homo sapiens
  misc_RNA (1)...(19): siRNA sense strand
guggagacguugaaggaga

SEQ ID NO: 2535050 - RNA, 19 nt, Homo sapiens
  misc_RNA (1)...(19): siRNA sense strand
acguugaaggagaugauua

SEQ ID NO: 2535051 - RNA, 19 nt, Homo sapiens
  misc_RNA (1)...(19): siRNA sense strand
cagagguggagcugaagaa

SEQ ID NO: 2535052 - RNA, 19 nt, Homo sapiens
  misc_RNA (1)...(19): siRNA sense strand
uggaaaagugugacgagaa

SEQ ID NO: 2535053 - RNA, 19 nt, Homo sapiens
  misc_RNA (1)...(19): siRNA sense strand
cuacguggaugaugggcuu

SEQ ID NO: 2535054 - RNA, 19 nt, Homo sapiens
  misc_RNA (1)...(19): siRNA sense strand
ucugcaaggugguggaagu

SEQ ID NO: 2535055 - RNA, 19 nt, Homo sapiens
  misc_RNA (1)...(19): siRNA sense strand
cacuaaaggaccugagauc

SEQ ID NO: 2535056 - RNA, 19 nt, Homo sapiens
  misc_RNA (1)...(19): siRNA sense strand
gcagcaagaucuacgugga

SEQ ID NO: 2535057 - RNA, 19 nt, Homo sapiens
  misc_RNA (1)...(19): siRNA sense strand
ucguggugaucuaggcauu

SEQ ID NO: 2535058 - RNA, 19 nt, Homo sapiens
  misc_RNA (1)...(19): siRNA sense strand
agggaaagaacaucaagau

SEQ ID NO: 2535059 - RNA, 19 nt, Homo sapiens
  misc_RNA (1)...(19): siRNA sense strand
agaagggagauguggucau

SEQ ID NO: 2535060 - RNA, 19 nt, Homo sapiens
  misc_RNA (1)...(19): siRNA sense strand
agacguugaaggagaugau

SEQ ID NO: 2535061 - RNA, 19 nt, Homo sapiens
  misc_RNA (1)...(19): siRNA sense strand
caucaagggcagcggcacu

SEQ ID NO: 2535062 - RNA, 19 nt, Homo sapiens
  misc_RNA (1)...(19): siRNA sense strand
gguucggagguuugaugaa

SEQ ID NO: 2535063 - RNA, 19 nt, Homo sapiens
  misc_RNA (1)...(19): siRNA sense strand
guggagacguugaaggaga

SEQ ID NO: 2535064 - RNA, 19 nt, Homo sapiens
  misc_RNA (1)...(19): siRNA sense strand
acguugaaggagaugauua

SEQ ID NO: 2535065 - RNA, 19 nt, Homo sapiens
  misc_RNA (1)...(19): siRNA sense strand
cagagguggagcugaagaa

SEQ ID NO: 2535066 - RNA, 19 nt, Homo sapiens
  misc_RNA (1)...(19): siRNA sense strand
uggaaaagugugacgagaa

SEQ ID NO: 2535067 - RNA, 19 nt, Homo sapiens
  misc_RNA (1)...(19): siRNA sense strand
cuacguggaugaugggcuu

SEQ ID NO: 2535068 - RNA, 19 nt, Homo sapiens
  misc_RNA (1)...(19): siRNA sense strand
ucugcaaggugguggaagu

SEQ ID NO: 2535069 - RNA, 19 nt, Homo sapiens
  misc_RNA (1)...(19): siRNA sense strand
cacuaaaggaccugagauc

SEQ ID NO: 2535070 - RNA, 19 nt, Homo sapiens
  misc_RNA (1)...(19): siRNA sense strand
gcagcaagaucuacgugga

SEQ ID NO: 2535071 - RNA, 19 nt, Homo sapiens
  misc_RNA (1)...(19): siRNA sense strand
ucguggugaucuaggcauu

SEQ ID NO: 2535072 - RNA, 19 nt, Homo sapiens
  misc_RNA (1)...(19): siRNA sense strand
agggaaagaacaucaagau

SEQ ID NO: 2535073 - RNA, 19 nt, Homo sapiens
  misc_RNA (1)...(19): siRNA sense strand
agaagggagauguggucau

SEQ ID NO: 2535074 - RNA, 19 nt, Homo sapiens
  misc_RNA (1)...(19): siRNA sense strand
agacguugaaggagaugau

SEQ ID NO: 2535075 - RNA, 19 nt, Homo sapiens
  misc_RNA (1)...(19): siRNA sense strand
caucaagggcagcggcacu

SEQ ID NO: 2535076 - RNA, 19 nt, Homo sapiens
  misc_RNA (1)...(19): siRNA sense strand
gguucggagguuugaugaa

SEQ ID NO: 2535077 - RNA, 19 nt, Homo sapiens
  misc_RNA (1)...(19): siRNA sense strand
gcgucuaugugcagggcga

SEQ ID NO: 2535078 - RNA, 19 nt, Homo sapiens
  misc_RNA (1)...(19): siRNA sense strand
ggugcgaagccaagaacau

SEQ ID NO: 2535079 - RNA, 19 nt, Homo sapiens
  misc_RNA (1)...(19): siRNA sense strand
gcgucuaugugcagggcga

SEQ ID NO: 2535080 - RNA, 19 nt, Homo sapiens
  misc_RNA (1)...(19): siRNA sense strand
ggugcgaagccaagaacau

SEQ ID NO: 2535081 - RNA, 19 nt, Homo sapiens
  misc_RNA (1)...(19): siRNA sense strand
cugcguuggccgugcuuaa

SEQ ID NO: 2535082 - RNA, 19 nt, Homo sapiens
  misc_RNA (1)...(19): siRNA sense strand
uggcuguagagaagggcua

SEQ ID NO: 2535083 - RNA, 19 nt, Homo sapiens
  misc_RNA (1)...(19): siRNA sense strand
uggccgugcuuaagggcuu

SEQ ID NO: 2535084 - RNA, 19 nt, Homo sapiens
  misc_RNA (1)...(19): siRNA sense strand
cugcguuggccgugcuuaa

SEQ ID NO: 2535085 - RNA, 19 nt, Homo sapiens
  misc_RNA (1)...(19): siRNA sense strand
uggccgugcuuaagggcuu

SEQ ID NO: 2535086 - RNA, 19 nt, Homo sapiens
  misc_RNA (1)...(19): siRNA sense strand
augcagaagaaguggagaa

SEQ ID NO: 2535087 - RNA, 19 nt, Homo sapiens
  misc_RNA (1)...(19): siRNA sense strand
ggacgaaguaguagaccca

SEQ ID NO: 2535088 - RNA, 19 nt, Homo sapiens
  misc_RNA (1)...(19): siRNA sense strand
gcuccagcgaauugguaaa

SEQ ID NO: 2535089 - RNA, 19 nt, Homo sapiens
  misc_RNA (1)...(19): siRNA sense strand
guaaaggagaucugcgaca

SEQ ID NO: 2535090 - RNA, 19 nt, Homo sapiens
  misc_RNA (1)...(19): siRNA sense strand
gauccugcauagauggcaa

SEQ ID NO: 2535091 - RNA, 19 nt, Homo sapiens
  misc_RNA (1)...(19): siRNA sense strand
accagaaaguaaaggagau

SEQ ID NO: 2535092 - RNA, 19 nt, Homo sapiens
  misc_RNA (1)...(19): siRNA sense strand
ccagaagaauucaaccaga

SEQ ID NO: 2535093 - RNA, 19 nt, Homo sapiens
  misc_RNA (1)...(19): siRNA sense strand
gacuccaaguggugagaca

SEQ ID NO: 2535094 - RNA, 19 nt, Homo sapiens
  misc_RNA (1)...(19): siRNA sense strand
agagaggucaggauggcua

SEQ ID NO: 2535095 - RNA, 19 nt, Homo sapiens
  misc_RNA (1)...(19): siRNA sense strand
gcuuucaagaauaugacua

SEQ ID NO: 2535096 - RNA, 19 nt, Homo sapiens
  misc_RNA (1)...(19): siRNA sense strand
gaucagagccuugggagca

SEQ ID NO: 2535097 - RNA, 19 nt, Homo sapiens
  misc_RNA (1)...(19): siRNA sense strand
ggaaauaaaauauggacac

SEQ ID NO: 2535098 - RNA, 19 nt, Homo sapiens
  misc_RNA (1)...(19): siRNA sense strand
cgucuauaucacaccuuaa

SEQ ID NO: 2535099 - RNA, 19 nt, Homo sapiens
  misc_RNA (1)...(19): siRNA sense strand
aggccgagaaacuggauaa

SEQ ID NO: 2535100 - RNA, 19 nt, Homo sapiens
  misc_RNA (1)...(19): siRNA sense strand
cagggaagcaagagaggga

SEQ ID NO: 2535101 - RNA, 19 nt, Homo sapiens
  misc_RNA (1)...(19): siRNA sense strand
cuguaaauucaucgagaca

SEQ ID NO: 2535102 - RNA, 19 nt, Homo sapiens
  misc_RNA (1)...(19): siRNA sense strand
cugugguguucgacuguaa

SEQ ID NO: 2535103 - RNA, 19 nt, Homo sapiens
  misc_RNA (1)...(19): siRNA sense strand
ccugggaggccgagaaacu

SEQ ID NO: 2535104 - RNA, 19 nt, Homo sapiens
  misc_RNA (1)...(19): siRNA sense strand
gggaagaccagcuuggcca

SEQ ID NO: 2535105 - RNA, 19 nt, Homo sapiens
  misc_RNA (1)...(19): siRNA sense strand
gagaagauguauaugagag

SEQ ID NO: 2535106 - RNA, 19 nt, Homo sapiens
  misc_RNA (1)...(19): siRNA sense strand
ccgugaaggaagaugcaaa

SEQ ID NO: 2535107 - RNA, 19 nt, Homo sapiens
  misc_RNA (1)...(19): siRNA sense strand
cacaagaccaauuggaaaa

SEQ ID NO: 2535108 - RNA, 19 nt, Homo sapiens
  misc_RNA (1)...(19): siRNA sense strand
cgugaaggaagaugcaaaa

SEQ ID NO: 2535109 - RNA, 19 nt, Homo sapiens
  misc_RNA (1)...(19): siRNA sense strand
aggaagaugcaaaagagaa

SEQ ID NO: 2535110 - RNA, 19 nt, Homo sapiens
  misc_RNA (1)...(19): siRNA sense strand
ccgugaaggaagaugcaaa

SEQ ID NO: 2535111 - RNA, 19 nt, Homo sapiens
  misc_RNA (1)...(19): siRNA sense strand
cacaagaccaauuggaaaa

SEQ ID NO: 2535112 - RNA, 19 nt, Homo sapiens
  misc_RNA (1)...(19): siRNA sense strand
cgugaaggaagaugcaaaa

SEQ ID NO: 2535113 - RNA, 19 nt, Homo sapiens
  misc_RNA (1)...(19): siRNA sense strand
aggaagaugcaaaagagaa

SEQ ID NO: 2535114 - RNA, 19 nt, Homo sapiens
  misc_RNA (1)...(19): siRNA sense strand
ccgugaaggaagaugcaaa

SEQ ID NO: 2535115 - RNA, 19 nt, Homo sapiens
  misc_RNA (1)...(19): siRNA sense strand
cacaagaccaauuggaaaa

SEQ ID NO: 2535116 - RNA, 19 nt, Homo sapiens
  misc_RNA (1)...(19): siRNA sense strand
cgugaaggaagaugcaaaa

SEQ ID NO: 2535117 - RNA, 19 nt, Homo sapiens
  misc_RNA (1)...(19): siRNA sense strand
aggaagaugcaaaagagaa

SEQ ID NO: 2535118 - RNA, 19 nt, Homo sapiens
  misc_RNA (1)...(19): siRNA sense strand
ucauggaauugcagagaaa

SEQ ID NO: 2535119 - RNA, 19 nt, Homo sapiens
  misc_RNA (1)...(19): siRNA sense strand
gagcgaaagaagagaucaa

SEQ ID NO: 2535120 - RNA, 19 nt, Homo sapiens
  misc_RNA (1)...(19): siRNA sense strand
ccuaaaagggagugauaua

SEQ ID NO: 2535121 - RNA, 19 nt, Homo sapiens
  misc_RNA (1)...(19): siRNA sense strand
ucucagaaggcuuggguua

SEQ ID NO: 2535122 - RNA, 19 nt, Homo sapiens
  misc_RNA (1)...(19): siRNA sense strand
ggauaauggaguaaaguca

SEQ ID NO: 2535123 - RNA, 19 nt, Homo sapiens
  misc_RNA (1)...(19): siRNA sense strand
gaguaaagucauuguguga

SEQ ID NO: 2535124 - RNA, 19 nt, Homo sapiens
  misc_RNA (1)...(19): siRNA sense strand
gaagauaagaggugggcca

SEQ ID NO: 2535125 - RNA, 19 nt, Homo sapiens
  misc_RNA (1)...(19): siRNA sense strand
uugcagagaaagauagaaa

SEQ ID NO: 2535126 - RNA, 19 nt, Homo sapiens
  misc_RNA (1)...(19): siRNA sense strand
aaugaacacuugagagaau

SEQ ID NO: 2535127 - RNA, 19 nt, Homo sapiens
  misc_RNA (1)...(19): siRNA sense strand
acagaauaccuuaggauau

SEQ ID NO: 2535128 - RNA, 19 nt, Homo sapiens
  misc_RNA (1)...(19): siRNA sense strand
ugccaaggcuggagagaca

SEQ ID NO: 2535129 - RNA, 19 nt, Homo sapiens
  misc_RNA (1)...(19): siRNA sense strand
guugaaaggcaguugggaa

SEQ ID NO: 2535130 - RNA, 19 nt, Homo sapiens
  misc_RNA (1)...(19): siRNA sense strand
auauuauccaggagagaaa

SEQ ID NO: 2535131 - RNA, 19 nt, Homo sapiens
  misc_RNA (1)...(19): siRNA sense strand
ccauagcaaccuugauaaa

SEQ ID NO: 2535132 - RNA, 19 nt, Homo sapiens
  misc_RNA (1)...(19): siRNA sense strand
agagagaagcuuugcucaa

SEQ ID NO: 2535133 - RNA, 19 nt, Homo sapiens
  misc_RNA (1)...(19): siRNA sense strand
cugugguauuugagaagaa

SEQ ID NO: 2535134 - RNA, 19 nt, Homo sapiens
  misc_RNA (1)...(19): siRNA sense strand
gccaaaggaauauggacua

SEQ ID NO: 2535135 - RNA, 19 nt, Homo sapiens
  misc_RNA (1)...(19): siRNA sense strand
agcuaaacaaagaggaauu

SEQ ID NO: 2535136 - RNA, 19 nt, Homo sapiens
  misc_RNA (1)...(19): siRNA sense strand
augcaagagaggaguauau

SEQ ID NO: 2535137 - RNA, 19 nt, Homo sapiens
  misc_RNA (1)...(19): siRNA sense strand
ucagaaggacgcagaguau

SEQ ID NO: 2535138 - RNA, 19 nt, Homo sapiens
  misc_RNA (1)...(19): siRNA sense strand
uggccaauuugaugaagaa

SEQ ID NO: 2535139 - RNA, 19 nt, Homo sapiens
  misc_RNA (1)...(19): siRNA sense strand
ucaccauuauguagagcua

SEQ ID NO: 2535140 - RNA, 19 nt, Homo sapiens
  misc_RNA (1)...(19): siRNA sense strand
ccaaaguguuaucuagaga

SEQ ID NO: 2535141 - RNA, 19 nt, Homo sapiens
  misc_RNA (1)...(19): siRNA sense strand
gcaacaaaagacugauaaa

SEQ ID NO: 2535142 - RNA, 19 nt, Homo sapiens
  misc_RNA (1)...(19): siRNA sense strand
ccuggaaugaagugaagaa

SEQ ID NO: 2535143 - RNA, 19 nt, Homo sapiens
  misc_RNA (1)...(19): siRNA sense strand
gugccaagucgcugccaaa

SEQ ID NO: 2535144 - RNA, 19 nt, Homo sapiens
  misc_RNA (1)...(19): siRNA sense strand
gcaaugagauguuucccaa

SEQ ID NO: 2535145 - RNA, 19 nt, Homo sapiens
  misc_RNA (1)...(19): siRNA sense strand
ugugugaugcuuugagaua

SEQ ID NO: 2535146 - RNA, 19 nt, Homo sapiens
  misc_RNA (1)...(19): siRNA sense strand
augaaggaauugugaaguu

SEQ ID NO: 2535147 - RNA, 19 nt, Homo sapiens
  misc_RNA (1)...(19): siRNA sense strand
ugagaaaggcaauguuaga

SEQ ID NO: 2535148 - RNA, 19 nt, Homo sapiens
  misc_RNA (1)...(19): siRNA sense strand
gacuaaagcaguuguugaa

SEQ ID NO: 2535149 - RNA, 19 nt, Homo sapiens
  misc_RNA (1)...(19): siRNA sense strand
cugaaggaucugugugaga

SEQ ID NO: 2535150 - RNA, 19 nt, Homo sapiens
  misc_RNA (1)...(19): siRNA sense strand
cuuugaagaaccugaguuu

SEQ ID NO: 2535151 - RNA, 19 nt, Homo sapiens
  misc_RNA (1)...(19): siRNA sense strand
ggaauauggacuaugacuu

SEQ ID NO: 2535152 - RNA, 19 nt, Homo sapiens
  misc_RNA (1)...(19): siRNA sense strand
agaaggacgcagaguauga

SEQ ID NO: 2535153 - RNA, 19 nt, Homo sapiens
  misc_RNA (1)...(19): siRNA sense strand
gacucaagauaaagcguuu

SEQ ID NO: 2535154 - RNA, 19 nt, Homo sapiens
  misc_RNA (1)...(19): siRNA sense strand
acaacgauuugcaggauga

SEQ ID NO: 2535155 - RNA, 19 nt, Homo sapiens
  misc_RNA (1)...(19): siRNA sense strand
gagaaauuaaccagcugaa

SEQ ID NO: 2535156 - RNA, 19 nt, Homo sapiens
  misc_RNA (1)...(19): siRNA sense strand
aaauuaaccagcugaaaga

SEQ ID NO: 2535157 - RNA, 19 nt, Homo sapiens
  misc_RNA (1)...(19): siRNA sense strand
gggugaugguggaguaaag

SEQ ID NO: 2535158 - RNA, 19 nt, Homo sapiens
  misc_RNA (1)...(19): siRNA sense strand
gcacaauguacucugaaga

SEQ ID NO: 2535159 - RNA, 19 nt, Homo sapiens
  misc_RNA (1)...(19): siRNA sense strand
uugaaugaagaucgaguaa

SEQ ID NO: 2535160 - RNA, 19 nt, Homo sapiens
  misc_RNA (1)...(19): siRNA sense strand
agacuaaagcaguuguuga

SEQ ID NO: 2535161 - RNA, 19 nt, Homo sapiens
  misc_RNA (1)...(19): siRNA sense strand
agaaaggcaauguuagauu

SEQ ID NO: 2535162 - RNA, 19 nt, Homo sapiens
  misc_RNA (1)...(19): siRNA sense strand
acaacuucuaagagacuaa

SEQ ID NO: 2535163 - RNA, 19 nt, Homo sapiens
  misc_RNA (1)...(19): siRNA sense strand
ccaaaggaauauggacuau

SEQ ID NO: 2535164 - RNA, 19 nt, Homo sapiens
  misc_RNA (1)...(19): siRNA sense strand
ggaacaacgauuugcagga

SEQ ID NO: 2535165 - RNA, 19 nt, Homo sapiens
  misc_RNA (1)...(19): siRNA sense strand
acuacaaguucuaggguug

SEQ ID NO: 2535166 - RNA, 19 nt, Homo sapiens
  misc_RNA (1)...(19): siRNA sense strand
auggaauugcagagaaaga

SEQ ID NO: 2535167 - RNA, 19 nt, Homo sapiens
  misc_RNA (1)...(19): siRNA sense strand
cacagaauaccuuaggaua

SEQ ID NO: 2535168 - RNA, 19 nt, Homo sapiens
  misc_RNA (1)...(19): siRNA sense strand
gugagagagcgaaagaaga

SEQ ID NO: 2535169 - RNA, 19 nt, Homo sapiens
  misc_RNA (1)...(19): siRNA sense strand
aguguuaucuagagagacu

SEQ ID NO: 2535170 - RNA, 19 nt, Homo sapiens
  misc_RNA (1)...(19): siRNA sense strand
agucgcugccaaaggaaua

SEQ ID NO: 2535171 - RNA, 19 nt, Homo sapiens
  misc_RNA (1)...(19): siRNA sense strand
cuacacaacaagagccuga

SEQ ID NO: 2535172 - RNA, 19 nt, Homo sapiens
  misc_RNA (1)...(19): siRNA sense strand
gacuauaggaccagaugau

SEQ ID NO: 2535173 - RNA, 19 nt, Homo sapiens
  misc_RNA (1)...(19): siRNA sense strand
gcugagaaaaccugaaaau

SEQ ID NO: 2535174 - RNA, 19 nt, Homo sapiens
  misc_RNA (1)...(19): siRNA sense strand
cgacaggagucccagcuga

SEQ ID NO: 2535175 - RNA, 19 nt, Homo sapiens
  misc_RNA (1)...(19): siRNA sense strand
aggagucccagcugagaaa

SEQ ID NO: 2535176 - RNA, 19 nt, Homo sapiens
  misc_RNA (1)...(19): siRNA sense strand
cugugaagaaguuguauca

SEQ ID NO: 2535177 - RNA, 19 nt, Homo sapiens
  misc_RNA (1)...(19): siRNA sense strand
ggguaagggaccaggagga

SEQ ID NO: 2535178 - RNA, 19 nt, Homo sapiens
  misc_RNA (1)...(19): siRNA sense strand
cauacauggcugaggagau

SEQ ID NO: 2535179 - RNA, 19 nt, Homo sapiens
  misc_RNA (1)...(19): siRNA sense strand
gaaaagaagcuucagggua

SEQ ID NO: 2535180 - RNA, 19 nt, Homo sapiens
  misc_RNA (1)...(19): siRNA sense strand
caaacaaagucgaugaccu

SEQ ID NO: 2535181 - RNA, 19 nt, Homo sapiens
  misc_RNA (1)...(19): siRNA sense strand
augcacuggucaaggaaaa

SEQ ID NO: 2535182 - RNA, 19 nt, Homo sapiens
  misc_RNA (1)...(19): siRNA sense strand
caacauacauggcugagga

SEQ ID NO: 2535183 - RNA, 19 nt, Homo sapiens
  misc_RNA (1)...(19): siRNA sense strand
agucagugagugucaacaa

SEQ ID NO: 2535184 - RNA, 19 nt, Homo sapiens
  misc_RNA (1)...(19): siRNA sense strand
gcaaacaugugucguggga

SEQ ID NO: 2535185 - RNA, 19 nt, Homo sapiens
  misc_RNA (1)...(19): siRNA sense strand
uacuauggauuguggacau

SEQ ID NO: 2535186 - RNA, 19 nt, Homo sapiens
  misc_RNA (1)...(19): siRNA sense strand
aagucgaugaccugagcaa

SEQ ID NO: 2535187 - RNA, 19 nt, Homo sapiens
  misc_RNA (1)...(19): siRNA sense strand
cagcagucagugaguguca

SEQ ID NO: 2535188 - RNA, 19 nt, Homo sapiens
  misc_RNA (1)...(19): siRNA sense strand
cuguuuaagcgaugacaaa

SEQ ID NO: 2535189 - RNA, 19 nt, Homo sapiens
  misc_RNA (1)...(19): siRNA sense strand
gagagaaauugggaggcaa

SEQ ID NO: 2535190 - RNA, 19 nt, Homo sapiens
  misc_RNA (1)...(19): siRNA sense strand
ggagagaaauugggaggca

SEQ ID NO: 2535191 - RNA, 19 nt, Homo sapiens
  misc_RNA (1)...(19): siRNA sense strand
guauuaaacaugaguggca

SEQ ID NO: 2535192 - RNA, 19 nt, Homo sapiens
  misc_RNA (1)...(19): siRNA sense strand
acacaagaggagaucaaaa

SEQ ID NO: 2535193 - RNA, 19 nt, Homo sapiens
  misc_RNA (1)...(19): siRNA sense strand
uucgacacuuggagagaaa

SEQ ID NO: 2535194 - RNA, 19 nt, Homo sapiens
  misc_RNA (1)...(19): siRNA sense strand
uaauuguagaggaagcaaa

SEQ ID NO: 2535195 - RNA, 19 nt, Homo sapiens
  misc_RNA (1)...(19): siRNA sense strand
aggcaauguaguaguuuca

SEQ ID NO: 2535196 - RNA, 19 nt, Homo sapiens
  misc_RNA (1)...(19): siRNA sense strand
aaauaauuguagaggaagc

SEQ ID NO: 2535197 - RNA, 19 nt, Homo sapiens
  misc_RNA (1)...(19): siRNA sense strand
cuguuuaagcgaugacaaa

SEQ ID NO: 2535198 - RNA, 19 nt, Homo sapiens
  misc_RNA (1)...(19): siRNA sense strand
gagagaaauugggaggcaa

SEQ ID NO: 2535199 - RNA, 19 nt, Homo sapiens
  misc_RNA (1)...(19): siRNA sense strand
ggagagaaauugggaggca

SEQ ID NO: 2535200 - RNA, 19 nt, Homo sapiens
  misc_RNA (1)...(19): siRNA sense strand
guauuaaacaugaguggca

SEQ ID NO: 2535201 - RNA, 19 nt, Homo sapiens
  misc_RNA (1)...(19): siRNA sense strand
acacaagaggagaucaaaa

SEQ ID NO: 2535202 - RNA, 19 nt, Homo sapiens
  misc_RNA (1)...(19): siRNA sense strand
uucgacacuuggagagaaa

SEQ ID NO: 2535203 - RNA, 19 nt, Homo sapiens
  misc_RNA (1)...(19): siRNA sense strand
uaauuguagaggaagcaaa

SEQ ID NO: 2535204 - RNA, 19 nt, Homo sapiens
  misc_RNA (1)...(19): siRNA sense strand
aggcaauguaguaguuuca

SEQ ID NO: 2535205 - RNA, 19 nt, Homo sapiens
  misc_RNA (1)...(19): siRNA sense strand
aaauaauuguagaggaagc

SEQ ID NO: 2535206 - RNA, 19 nt, Homo sapiens
  misc_RNA (1)...(19): siRNA sense strand
agacugaagacgaggguau

SEQ ID NO: 2535207 - RNA, 19 nt, Homo sapiens
  misc_RNA (1)...(19): siRNA sense strand
gaaugaagaaagugggcuu

SEQ ID NO: 2535208 - RNA, 19 nt, Homo sapiens
  misc_RNA (1)...(19): siRNA sense strand
cgucagugcccuucagcaa

SEQ ID NO: 2535209 - RNA, 19 nt, Homo sapiens
  misc_RNA (1)...(19): siRNA sense strand
aggaaggacaaaugccaaa

SEQ ID NO: 2535210 - RNA, 19 nt, Homo sapiens
  misc_RNA (1)...(19): siRNA sense strand
uuucagggcaauagacaaa

SEQ ID NO: 2535211 - RNA, 19 nt, Homo sapiens
  misc_RNA (1)...(19): siRNA sense strand
guguaaagucugacgcuga

SEQ ID NO: 2535212 - RNA, 19 nt, Homo sapiens
  misc_RNA (1)...(19): siRNA sense strand
ccagagagacugaagacga

SEQ ID NO: 2535213 - RNA, 19 nt, Homo sapiens
  misc_RNA (1)...(19): siRNA sense strand
aggguggcuuaguggauaa

SEQ ID NO: 2535214 - RNA, 19 nt, Homo sapiens
  misc_RNA (1)...(19): siRNA sense strand
ucaucaaugguaaaggaaa

SEQ ID NO: 2535215 - RNA, 19 nt, Homo sapiens
  misc_RNA (1)...(19): siRNA sense strand
caauggaagugaaaggacu

SEQ ID NO: 2535216 - RNA, 19 nt, Homo sapiens
  misc_RNA (1)...(19): siRNA sense strand
cgcaggacccagucggaaa

SEQ ID NO: 2535217 - RNA, 19 nt, Homo sapiens
  misc_RNA (1)...(19): siRNA sense strand
ugguaaaggaaaggaaaga

SEQ ID NO: 2535218 - RNA, 19 nt, Homo sapiens
  misc_RNA (1)...(19): siRNA sense strand
uggccaagccuguggagga

SEQ ID NO: 2535219 - RNA, 19 nt, Homo sapiens
  misc_RNA (1)...(19): siRNA sense strand
caguguggacagugggaca

SEQ ID NO: 2535220 - RNA, 19 nt, Homo sapiens
  misc_RNA (1)...(19): siRNA sense strand
caaugguaaaggaaaggaa

SEQ ID NO: 2535221 - RNA, 19 nt, Homo sapiens
  misc_RNA (1)...(19): siRNA sense strand
agugaaaggacuccagaga

SEQ ID NO: 2535222 - RNA, 19 nt, Homo sapiens
  misc_RNA (1)...(19): siRNA sense strand
auacaggcuccgagucuaa

SEQ ID NO: 2535223 - RNA, 19 nt, Homo sapiens
  misc_RNA (1)...(19): siRNA sense strand
agucaguaauaccuguaaa

SEQ ID NO: 2535224 - RNA, 19 nt, Homo sapiens
  misc_RNA (1)...(19): siRNA sense strand
ggacacaguucuaagcaag

SEQ ID NO: 2535225 - RNA, 19 nt, Homo sapiens
  misc_RNA (1)...(19): siRNA sense strand
aaugguaaaggaaaggaaa

SEQ ID NO: 2535226 - RNA, 19 nt, Homo sapiens
  misc_RNA (1)...(19): siRNA sense strand
ggaaaugccaucaaggauc

SEQ ID NO: 2535227 - RNA, 19 nt, Homo sapiens
  misc_RNA (1)...(19): siRNA sense strand
gccugaaacaucuguacaa

SEQ ID NO: 2535228 - RNA, 19 nt, Homo sapiens
  misc_RNA (1)...(19): siRNA sense strand
cuccaaaugccgagcagau

SEQ ID NO: 2535229 - RNA, 19 nt, Homo sapiens
  misc_RNA (1)...(19): siRNA sense strand
aguaauaccuguaaaacca

SEQ ID NO: 2535230 - RNA, 19 nt, Homo sapiens
  misc_RNA (1)...(19): siRNA sense strand
gugacaccaucguggccaa

SEQ ID NO: 2535231 - RNA, 19 nt, Homo sapiens
  misc_RNA (1)...(19): siRNA sense strand
guuaucacgaugagcagua

SEQ ID NO: 2535232 - RNA, 19 nt, Homo sapiens
  misc_RNA (1)...(19): siRNA sense strand
ucacgggaacccugggaau

SEQ ID NO: 2535233 - RNA, 19 nt, Homo sapiens
  misc_RNA (1)...(19): siRNA sense strand
uggacacaguucuaagcaa

SEQ ID NO: 2535234 - RNA, 19 nt, Homo sapiens
  misc_RNA (1)...(19): siRNA sense strand
cuccauaagggaacgggua

SEQ ID NO: 2535235 - RNA, 19 nt, Homo sapiens
  misc_RNA (1)...(19): siRNA sense strand
ugacagauuuggaaagcuc

SEQ ID NO: 2535236 - RNA, 19 nt, Homo sapiens
  misc_RNA (1)...(19): siRNA sense strand
agacugaagacgaggguau

SEQ ID NO: 2535237 - RNA, 19 nt, Homo sapiens
  misc_RNA (1)...(19): siRNA sense strand
gaaugaagaaagugggcuu

SEQ ID NO: 2535238 - RNA, 19 nt, Homo sapiens
  misc_RNA (1)...(19): siRNA sense strand
cgucagugcccuucagcaa

SEQ ID NO: 2535239 - RNA, 19 nt, Homo sapiens
  misc_RNA (1)...(19): siRNA sense strand
aggaaggacaaaugccaaa

SEQ ID NO: 2535240 - RNA, 19 nt, Homo sapiens
  misc_RNA (1)...(19): siRNA sense strand
uuucagggcaauagacaaa

SEQ ID NO: 2535241 - RNA, 19 nt, Homo sapiens
  misc_RNA (1)...(19): siRNA sense strand
guguaaagucugacgcuga

SEQ ID NO: 2535242 - RNA, 19 nt, Homo sapiens
  misc_RNA (1)...(19): siRNA sense strand
ccagagagacugaagacga

SEQ ID NO: 2535243 - RNA, 19 nt, Homo sapiens
  misc_RNA (1)...(19): siRNA sense strand
aggguggcuuaguggauaa

SEQ ID NO: 2535244 - RNA, 19 nt, Homo sapiens
  misc_RNA (1)...(19): siRNA sense strand
ucaucaaugguaaaggaaa

SEQ ID NO: 2535245 - RNA, 19 nt, Homo sapiens
  misc_RNA (1)...(19): siRNA sense strand
caauggaagugaaaggacu

SEQ ID NO: 2535246 - RNA, 19 nt, Homo sapiens
  misc_RNA (1)...(19): siRNA sense strand
cgcaggacccagucggaaa

SEQ ID NO: 2535247 - RNA, 19 nt, Homo sapiens
  misc_RNA (1)...(19): siRNA sense strand
ugguaaaggaaaggaaaga

SEQ ID NO: 2535248 - RNA, 19 nt, Homo sapiens
  misc_RNA (1)...(19): siRNA sense strand
uggccaagccuguggagga

SEQ ID NO: 2535249 - RNA, 19 nt, Homo sapiens
  misc_RNA (1)...(19): siRNA sense strand
caguguggacagugggaca

SEQ ID NO: 2535250 - RNA, 19 nt, Homo sapiens
  misc_RNA (1)...(19): siRNA sense strand
caaugguaaaggaaaggaa

SEQ ID NO: 2535251 - RNA, 19 nt, Homo sapiens
  misc_RNA (1)...(19): siRNA sense strand
agugaaaggacuccagaga

SEQ ID NO: 2535252 - RNA, 19 nt, Homo sapiens
  misc_RNA (1)...(19): siRNA sense strand
auacaggcuccgagucuaa

SEQ ID NO: 2535253 - RNA, 19 nt, Homo sapiens
  misc_RNA (1)...(19): siRNA sense strand
agucaguaauaccuguaaa

SEQ ID NO: 2535254 - RNA, 19 nt, Homo sapiens
  misc_RNA (1)...(19): siRNA sense strand
ggacacaguucuaagcaag

SEQ ID NO: 2535255 - RNA, 19 nt, Homo sapiens
  misc_RNA (1)...(19): siRNA sense strand
aaugguaaaggaaaggaaa

SEQ ID NO: 2535256 - RNA, 19 nt, Homo sapiens
  misc_RNA (1)...(19): siRNA sense strand
ggaaaugccaucaaggauc

SEQ ID NO: 2535257 - RNA, 19 nt, Homo sapiens
  misc_RNA (1)...(19): siRNA sense strand
gccugaaacaucuguacaa

SEQ ID NO: 2535258 - RNA, 19 nt, Homo sapiens
  misc_RNA (1)...(19): siRNA sense strand
cuccaaaugccgagcagau

SEQ ID NO: 2535259 - RNA, 19 nt, Homo sapiens
  misc_RNA (1)...(19): siRNA sense strand
aguaauaccuguaaaacca

SEQ ID NO: 2535260 - RNA, 19 nt, Homo sapiens
  misc_RNA (1)...(19): siRNA sense strand
gugacaccaucguggccaa

SEQ ID NO: 2535261 - RNA, 19 nt, Homo sapiens
  misc_RNA (1)...(19): siRNA sense strand
guuaucacgaugagcagua

SEQ ID NO: 2535262 - RNA, 19 nt, Homo sapiens
  misc_RNA (1)...(19): siRNA sense strand
ucacgggaacccugggaau

SEQ ID NO: 2535263 - RNA, 19 nt, Homo sapiens
  misc_RNA (1)...(19): siRNA sense strand
uggacacaguucuaagcaa

SEQ ID NO: 2535264 - RNA, 19 nt, Homo sapiens
  misc_RNA (1)...(19): siRNA sense strand
cuccauaagggaacgggua

SEQ ID NO: 2535265 - RNA, 19 nt, Homo sapiens
  misc_RNA (1)...(19): siRNA sense strand
ugacagauuuggaaagcuc

SEQ ID NO: 2535266 - RNA, 19 nt, Homo sapiens
  misc_RNA (1)...(19): siRNA sense strand
cuucaucaguggcuggaga

SEQ ID NO: 2535267 - RNA, 19 nt, Homo sapiens
  misc_RNA (1)...(19): siRNA sense strand
uggcuaaacaagugagcaa

SEQ ID NO: 2535268 - RNA, 19 nt, Homo sapiens
  misc_RNA (1)...(19): siRNA sense strand
aggacaaagaugagaucaa

SEQ ID NO: 2535269 - RNA, 19 nt, Homo sapiens
  misc_RNA (1)...(19): siRNA sense strand
cagcuguugcagagggaaa

SEQ ID NO: 2535270 - RNA, 19 nt, Homo sapiens
  misc_RNA (1)...(19): siRNA sense strand
cugaagaagcagaggagca

SEQ ID NO: 2535271 - RNA, 19 nt, Homo sapiens
  misc_RNA (1)...(19): siRNA sense strand
ggaagaaggugcagacccu

SEQ ID NO: 2535272 - RNA, 19 nt, Homo sapiens
  misc_RNA (1)...(19): siRNA sense strand
aggccaaccuggugaggga

SEQ ID NO: 2535273 - RNA, 19 nt, Homo sapiens
  misc_RNA (1)...(19): siRNA sense strand
uggaaauaaagcugcggaa

SEQ ID NO: 2535274 - RNA, 19 nt, Homo sapiens
  misc_RNA (1)...(19): siRNA sense strand
agaucaagccccagggauu

SEQ ID NO: 2535275 - RNA, 19 nt, Homo sapiens
  misc_RNA (1)...(19): siRNA sense strand
aggcauacucaaaugucaa

SEQ ID NO: 2535276 - RNA, 19 nt, Homo sapiens
  misc_RNA (1)...(19): siRNA sense strand
uagaagaagaacuggacca

SEQ ID NO: 2535277 - RNA, 19 nt, Homo sapiens
  misc_RNA (1)...(19): siRNA sense strand
gaguacgagaggaguguga

SEQ ID NO: 2535278 - RNA, 19 nt, Homo sapiens
  misc_RNA (1)...(19): siRNA sense strand
gaggaggucaccagggaca

SEQ ID NO: 2535279 - RNA, 19 nt, Homo sapiens
  misc_RNA (1)...(19): siRNA sense strand
ggacugaguacgagaggag

SEQ ID NO: 2535280 - RNA, 19 nt, Homo sapiens
  misc_RNA (1)...(19): siRNA sense strand
gguuagaagaagaacugga

SEQ ID NO: 2535281 - RNA, 19 nt, Homo sapiens
  misc_RNA (1)...(19): siRNA sense strand
aauacaucaugcuggaaau

SEQ ID NO: 2535282 - RNA, 19 nt, Homo sapiens
  misc_RNA (1)...(19): siRNA sense strand
cuacaagggacacagguga

SEQ ID NO: 2535283 - RNA, 19 nt, Homo sapiens
  misc_RNA (1)...(19): siRNA sense strand
ccaaagaucaggcaggcca

SEQ ID NO: 2535284 - RNA, 19 nt, Homo sapiens
  misc_RNA (1)...(19): siRNA sense strand
ugugaaaagaaucgaagaa

SEQ ID NO: 2535285 - RNA, 19 nt, Homo sapiens
  misc_RNA (1)...(19): siRNA sense strand
aggacugggugcaggccau

SEQ ID NO: 2535286 - RNA, 19 nt, Homo sapiens
  misc_RNA (1)...(19): siRNA sense strand
aagaagcagaggagcauca

SEQ ID NO: 2535287 - RNA, 19 nt, Homo sapiens
  misc_RNA (1)...(19): siRNA sense strand
gaggaugcggagaggagga

SEQ ID NO: 2535288 - RNA, 19 nt, Homo sapiens
  misc_RNA (1)...(19): siRNA sense strand
gagaauggaagcagccaca

SEQ ID NO: 2535289 - RNA, 19 nt, Homo sapiens
  misc_RNA (1)...(19): siRNA sense strand
agguggagcugcuacacaa

SEQ ID NO: 2535290 - RNA, 19 nt, Homo sapiens
  misc_RNA (1)...(19): siRNA sense strand
ggguucagacugugcaaca

SEQ ID NO: 2535291 - RNA, 19 nt, Homo sapiens
  misc_RNA (1)...(19): siRNA sense strand
gaagcauggacgggagaau

SEQ ID NO: 2535292 - RNA, 19 nt, Homo sapiens
  misc_RNA (1)...(19): siRNA sense strand
gcaucaagccagaggccag

SEQ ID NO: 2535293 - RNA, 19 nt, Homo sapiens
  misc_RNA (1)...(19): siRNA sense strand
caagaaacuucaaagggaa

SEQ ID NO: 2535294 - RNA, 19 nt, Homo sapiens
  misc_RNA (1)...(19): siRNA sense strand
cugacaacccagagagauu

SEQ ID NO: 2535295 - RNA, 19 nt, Homo sapiens
  misc_RNA (1)...(19): siRNA sense strand
aagaaacuucaaagggaaa

SEQ ID NO: 2535296 - RNA, 19 nt, Homo sapiens
  misc_RNA (1)...(19): siRNA sense strand
gggagguggagguggaaaa

SEQ ID NO: 2535297 - RNA, 19 nt, Homo sapiens
  misc_RNA (1)...(19): siRNA sense strand
gggaaaagaaaguugaaca

SEQ ID NO: 2535298 - RNA, 19 nt, Homo sapiens
  misc_RNA (1)...(19): siRNA sense strand
aaguugaacaagaggaaaa

SEQ ID NO: 2535299 - RNA, 19 nt, Homo sapiens
  misc_RNA (1)...(19): siRNA sense strand
ucaagaaacuucaaaggga

SEQ ID NO: 2535300 - RNA, 19 nt, Homo sapiens
  misc_RNA (1)...(19): siRNA sense strand
cugaagagggccugaaacu

SEQ ID NO: 2535301 - RNA, 19 nt, Homo sapiens
  misc_RNA (1)...(19): siRNA sense strand
gugcauaucuggagggugg

SEQ ID NO: 2535302 - RNA, 19 nt, Homo sapiens
  misc_RNA (1)...(19): siRNA sense strand
agaagaauugcgauggaga

SEQ ID NO: 2535303 - RNA, 19 nt, Homo sapiens
  misc_RNA (1)...(19): siRNA sense strand
acugggagguggaggugga

SEQ ID NO: 2535304 - RNA, 19 nt, Homo sapiens
  misc_RNA (1)...(19): siRNA sense strand
gggucauggugccugaaga

SEQ ID NO: 2535305 - RNA, 19 nt, Homo sapiens
  misc_RNA (1)...(19): siRNA sense strand
caagaaacuucaaagggaa

SEQ ID NO: 2535306 - RNA, 19 nt, Homo sapiens
  misc_RNA (1)...(19): siRNA sense strand
cugacaacccagagagauu

SEQ ID NO: 2535307 - RNA, 19 nt, Homo sapiens
  misc_RNA (1)...(19): siRNA sense strand
aagaaacuucaaagggaaa

SEQ ID NO: 2535308 - RNA, 19 nt, Homo sapiens
  misc_RNA (1)...(19): siRNA sense strand
gggagguggagguggaaaa

SEQ ID NO: 2535309 - RNA, 19 nt, Homo sapiens
  misc_RNA (1)...(19): siRNA sense strand
gggaaaagaaaguugaaca

SEQ ID NO: 2535310 - RNA, 19 nt, Homo sapiens
  misc_RNA (1)...(19): siRNA sense strand
aaguugaacaagaggaaaa

SEQ ID NO: 2535311 - RNA, 19 nt, Homo sapiens
  misc_RNA (1)...(19): siRNA sense strand
ucaagaaacuucaaaggga

SEQ ID NO: 2535312 - RNA, 19 nt, Homo sapiens
  misc_RNA (1)...(19): siRNA sense strand
cugaagagggccugaaacu

SEQ ID NO: 2535313 - RNA, 19 nt, Homo sapiens
  misc_RNA (1)...(19): siRNA sense strand
gugcauaucuggagggugg

SEQ ID NO: 2535314 - RNA, 19 nt, Homo sapiens
  misc_RNA (1)...(19): siRNA sense strand
agaagaauugcgauggaga

SEQ ID NO: 2535315 - RNA, 19 nt, Homo sapiens
  misc_RNA (1)...(19): siRNA sense strand
acugggagguggaggugga

SEQ ID NO: 2535316 - RNA, 19 nt, Homo sapiens
  misc_RNA (1)...(19): siRNA sense strand
gggucauggugccugaaga

SEQ ID NO: 2535317 - RNA, 19 nt, Homo sapiens
  misc_RNA (1)...(19): siRNA sense strand
ugcaauagcaagagacaaa

SEQ ID NO: 2535318 - RNA, 19 nt, Homo sapiens
  misc_RNA (1)...(19): siRNA sense strand
caaugguaguugaggaauu

SEQ ID NO: 2535319 - RNA, 19 nt, Homo sapiens
  misc_RNA (1)...(19): siRNA sense strand
guuaagaggaaguggcauu

SEQ ID NO: 2535320 - RNA, 19 nt, Homo sapiens
  misc_RNA (1)...(19): siRNA sense strand
ccauggaguucuugggaca

SEQ ID NO: 2535321 - RNA, 19 nt, Homo sapiens
  misc_RNA (1)...(19): siRNA sense strand
aaggauaagguguggcaaa

SEQ ID NO: 2535322 - RNA, 19 nt, Homo sapiens
  misc_RNA (1)...(19): siRNA sense strand
ccaagagagaugagcaaau

SEQ ID NO: 2535323 - RNA, 19 nt, Homo sapiens
  misc_RNA (1)...(19): siRNA sense strand
aagcauuggaaguguguua

SEQ ID NO: 2535324 - RNA, 19 nt, Homo sapiens
  misc_RNA (1)...(19): siRNA sense strand
ggaauugagcaaagaccaa

SEQ ID NO: 2535325 - RNA, 19 nt, Homo sapiens
  misc_RNA (1)...(19): siRNA sense strand
gcagauaugcagaagguga

SEQ ID NO: 2535326 - RNA, 19 nt, Homo sapiens
  misc_RNA (1)...(19): siRNA sense strand
gaaacaacuucaagcccaa

SEQ ID NO: 2535327 - RNA, 19 nt, Homo sapiens
  misc_RNA (1)...(19): siRNA sense strand
caacaaacaaagaggaucu

SEQ ID NO: 2535328 - RNA, 19 nt, Homo sapiens
  misc_RNA (1)...(19): siRNA sense strand
gcccaaaggaagaagguca

SEQ ID NO: 2535329 - RNA, 19 nt, Homo sapiens
  misc_RNA (1)...(19): siRNA sense strand
acgaaaggcugacaagcaa

SEQ ID NO: 2535330 - RNA, 19 nt, Homo sapiens
  misc_RNA (1)...(19): siRNA sense strand
ccacaaugguaguugagga

SEQ ID NO: 2535331 - RNA, 19 nt, Homo sapiens
  misc_RNA (1)...(19): siRNA sense strand
uaccaagaccuaugagaaa

SEQ ID NO: 2535332 - RNA, 19 nt, Homo sapiens
  misc_RNA (1)...(19): siRNA sense strand
ccagaaacuaacagccuua

SEQ ID NO: 2535333 - RNA, 19 nt, Homo sapiens
  misc_RNA (1)...(19): siRNA sense strand
ccaacuaagcacccagaaa

SEQ ID NO: 2535334 - RNA, 19 nt, Homo sapiens
  misc_RNA (1)...(19): siRNA sense strand
agaucaugcucuggagaaa

SEQ ID NO: 2535335 - RNA, 19 nt, Homo sapiens
  misc_RNA (1)...(19): siRNA sense strand
acaaagagaaugaacaaca

SEQ ID NO: 2535336 - RNA, 19 nt, Homo sapiens
  misc_RNA (1)...(19): siRNA sense strand
agaaaguggacgaagguca

SEQ ID NO: 2535337 - RNA, 19 nt, Homo sapiens
  misc_RNA (1)...(19): siRNA sense strand
aagaaagucgcuuaagaaa

SEQ ID NO: 2535338 - RNA, 19 nt, Homo sapiens
  misc_RNA (1)...(19): siRNA sense strand
gcgaugaccaggacagauu

SEQ ID NO: 2535339 - RNA, 19 nt, Homo sapiens
  misc_RNA (1)...(19): siRNA sense strand
gggcuugacaugaagagua

SEQ ID NO: 2535340 - RNA, 19 nt, Homo sapiens
  misc_RNA (1)...(19): siRNA sense strand
aggauuuggacaacagaaa

SEQ ID NO: 2535341 - RNA, 19 nt, Homo sapiens
  misc_RNA (1)...(19): siRNA sense strand
cagcagacguugcagccaa

SEQ ID NO: 2535342 - RNA, 19 nt, Homo sapiens
  misc_RNA (1)...(19): siRNA sense strand
uauucuaggaagugagcua

SEQ ID NO: 2535343 - RNA, 19 nt, Homo sapiens
  misc_RNA (1)...(19): siRNA sense strand
uaucagugcuucagaacau

SEQ ID NO: 2535344 - RNA, 19 nt, Homo sapiens
  misc_RNA (1)...(19): siRNA sense strand
caguaaagguggucuucuu

SEQ ID NO: 2535345 - RNA, 19 nt, Homo sapiens
  misc_RNA (1)...(19): siRNA sense strand
cgacucaccuugugggcuu

SEQ ID NO: 2535346 - RNA, 19 nt, Homo sapiens
  misc_RNA (1)...(19): siRNA sense strand
ugaugguacuugugguaau

SEQ ID NO: 2535347 - RNA, 19 nt, Homo sapiens
  misc_RNA (1)...(19): siRNA sense strand
ucucauggccuuuggaaaa

SEQ ID NO: 2535348 - RNA, 19 nt, Homo sapiens
  misc_RNA (1)...(19): siRNA sense strand
cagauaugcagaaggugaa

SEQ ID NO: 2535349 - RNA, 19 nt, Homo sapiens
  misc_RNA (1)...(19): siRNA sense strand
ccagaaagaaccuugaaaa

SEQ ID NO: 2535350 - RNA, 19 nt, Homo sapiens
  misc_RNA (1)...(19): siRNA sense strand
agaaauguuagcuuggaaa

SEQ ID NO: 2535351 - RNA, 19 nt, Homo sapiens
  misc_RNA (1)...(19): siRNA sense strand
ccucggagacugugagcuu

SEQ ID NO: 2535352 - RNA, 19 nt, Homo sapiens
  misc_RNA (1)...(19): siRNA sense strand
guagaagacauccuggaaa

SEQ ID NO: 2535353 - RNA, 19 nt, Homo sapiens
  misc_RNA (1)...(19): siRNA sense strand
ggcuugacaugaagaguau

SEQ ID NO: 2535354 - RNA, 19 nt, Homo sapiens
  misc_RNA (1)...(19): siRNA sense strand
gagaaugaacaacaaacaa

SEQ ID NO: 2535355 - RNA, 19 nt, Homo sapiens
  misc_RNA (1)...(19): siRNA sense strand
agaaagaagcugcacuaau

SEQ ID NO: 2535356 - RNA, 19 nt, Homo sapiens
  misc_RNA (1)...(19): siRNA sense strand
ugguuauacaucagaacaa

SEQ ID NO: 2535357 - RNA, 19 nt, Homo sapiens
  misc_RNA (1)...(19): siRNA sense strand
uugaggaagcacagcauua

SEQ ID NO: 2535358 - RNA, 19 nt, Homo sapiens
  misc_RNA (1)...(19): siRNA sense strand
cacaaugguaguugaggaa

SEQ ID NO: 2535359 - RNA, 19 nt, Homo sapiens
  misc_RNA (1)...(19): siRNA sense strand
guaaauugcuccaagucca

SEQ ID NO: 2535360 - RNA, 19 nt, Homo sapiens
  misc_RNA (1)...(19): siRNA sense strand
aaucaaacuucuucaggau

SEQ ID NO: 2535361 - RNA, 19 nt, Homo sapiens
  misc_RNA (1)...(19): siRNA sense strand
agagacacaagaagacaaa

SEQ ID NO: 2535362 - RNA, 19 nt, Homo sapiens
  misc_RNA (1)...(19): siRNA sense strand
aggaguuaauguccaaaua

SEQ ID NO: 2535363 - RNA, 19 nt, Homo sapiens
  misc_RNA (1)...(19): siRNA sense strand
aagaaagaaagucgcuuaa

SEQ ID NO: 2535364 - RNA, 19 nt, Homo sapiens
  misc_RNA (1)...(19): siRNA sense strand
augauuuaauggaggacau

SEQ ID NO: 2535365 - RNA, 19 nt, Homo sapiens
  misc_RNA (1)...(19): siRNA sense strand
uggaggacauugagaucau

SEQ ID NO: 2535366 - RNA, 19 nt, Homo sapiens
  misc_RNA (1)...(19): siRNA sense strand
uggcauuuccugugcaauu

SEQ ID NO: 2535367 - RNA, 19 nt, Homo sapiens
  misc_RNA (1)...(19): siRNA sense strand
ugccaagagagaugagcaa

SEQ ID NO: 2535368 - RNA, 19 nt, Homo sapiens
  misc_RNA (1)...(19): siRNA sense strand
ggcuuaacaaagagaauga

SEQ ID NO: 2535369 - RNA, 19 nt, Homo sapiens
  misc_RNA (1)...(19): siRNA sense strand
ccuaugagaaaguggacga

SEQ ID NO: 2535370 - RNA, 19 nt, Homo sapiens
  misc_RNA (1)...(19): siRNA sense strand
cugacaagcaagaaugaga

SEQ ID NO: 2535371 - RNA, 19 nt, Homo sapiens
  misc_RNA (1)...(19): siRNA sense strand
acuaagcgcuaaucguaaa

SEQ ID NO: 2535372 - RNA, 19 nt, Homo sapiens
  misc_RNA (1)...(19): siRNA sense strand
ugucaugugcagagaggau

SEQ ID NO: 2535373 - RNA, 19 nt, Homo sapiens
  misc_RNA (1)...(19): siRNA sense strand
augcagaaggugaagguca

SEQ ID NO: 2535374 - RNA, 19 nt, Homo sapiens
  misc_RNA (1)...(19): siRNA sense strand
acauggcaguuaagaggaa

SEQ ID NO: 2535375 - RNA, 19 nt, Homo sapiens
  misc_RNA (1)...(19): siRNA sense strand
gcucuuacacucuggguca

SEQ ID NO: 2535376 - RNA, 19 nt, Homo sapiens
  misc_RNA (1)...(19): siRNA sense strand
caucucacuuggaggguca

SEQ ID NO: 2535377 - RNA, 19 nt, Homo sapiens
  misc_RNA (1)...(19): siRNA sense strand
ugucaaagauggagggaga

SEQ ID NO: 2535378 - RNA, 19 nt, Homo sapiens
  misc_RNA (1)...(19): siRNA sense strand
uggccaagaagaagggaaa

SEQ ID NO: 2535379 - RNA, 19 nt, Homo sapiens
  misc_RNA (1)...(19): siRNA sense strand
aaguaaagauugaccggaa

SEQ ID NO: 2535380 - RNA, 19 nt, Homo sapiens
  misc_RNA (1)...(19): siRNA sense strand
aagcagaagcacaaguaaa

SEQ ID NO: 2535381 - RNA, 19 nt, Homo sapiens
  misc_RNA (1)...(19): siRNA sense strand
gggacauagagaugagcaa

SEQ ID NO: 2535382 - RNA, 19 nt, Homo sapiens
  misc_RNA (1)...(19): siRNA sense strand
aagacaagacagaaaggaa

SEQ ID NO: 2535383 - RNA, 19 nt, Homo sapiens
  misc_RNA (1)...(19): siRNA sense strand
cugaagagucccaggcaca

SEQ ID NO: 2535384 - RNA, 19 nt, Homo sapiens
  misc_RNA (1)...(19): siRNA sense strand
gguagaagaaaucuggcaa

SEQ ID NO: 2535385 - RNA, 19 nt, Homo sapiens
  misc_RNA (1)...(19): siRNA sense strand
acacaacagaaauggauau

SEQ ID NO: 2535386 - RNA, 19 nt, Homo sapiens
  misc_RNA (1)...(19): siRNA sense strand
cagccaaccaaucaggaaa

SEQ ID NO: 2535387 - RNA, 19 nt, Homo sapiens
  misc_RNA (1)...(19): siRNA sense strand
aggauuugcugcuggccaa

SEQ ID NO: 2535388 - RNA, 19 nt, Homo sapiens
  misc_RNA (1)...(19): siRNA sense strand
ggucaaaugcuuaccagga

SEQ ID NO: 2535389 - RNA, 19 nt, Homo sapiens
  misc_RNA (1)...(19): siRNA sense strand
gagcaaagagcccagccaa

SEQ ID NO: 2535390 - RNA, 19 nt, Homo sapiens
  misc_RNA (1)...(19): siRNA sense strand
guaagaggacaaugcaaaa

SEQ ID NO: 2535391 - RNA, 19 nt, Homo sapiens
  misc_RNA (1)...(19): siRNA sense strand
gacaagacagaaaggaaaa

SEQ ID NO: 2535392 - RNA, 19 nt, Homo sapiens
  misc_RNA (1)...(19): siRNA sense strand
guaaagauugaccggaaaa

SEQ ID NO: 2535393 - RNA, 19 nt, Homo sapiens
  misc_RNA (1)...(19): siRNA sense strand
ugagauaaccagucaaaau

SEQ ID NO: 2535394 - RNA, 19 nt, Homo sapiens
  misc_RNA (1)...(19): siRNA sense strand
cagccaacagcgaguaaaa

SEQ ID NO: 2535395 - RNA, 19 nt, Homo sapiens
  misc_RNA (1)...(19): siRNA sense strand
ccuucgaacugcugggaac

SEQ ID NO: 2535396 - RNA, 19 nt, Homo sapiens
  misc_RNA (1)...(19): siRNA sense strand
caaccaaucaggaaaacaa

SEQ ID NO: 2535397 - RNA, 19 nt, Homo sapiens
  misc_RNA (1)...(19): siRNA sense strand
caaaagaggacauccggaa

SEQ ID NO: 2535398 - RNA, 19 nt, Homo sapiens
  misc_RNA (1)...(19): siRNA sense strand
gagcacaucuacaagcuga

SEQ ID NO: 2535399 - RNA, 19 nt, Homo sapiens
  misc_RNA (1)...(19): siRNA sense strand
cuguaagaggacaaugcaa

SEQ ID NO: 2535400 - RNA, 19 nt, Homo sapiens
  misc_RNA (1)...(19): siRNA sense strand
uaugcaagcagaagcacaa

SEQ ID NO: 2535401 - RNA, 19 nt, Homo sapiens
  misc_RNA (1)...(19): siRNA sense strand
cugaaaguuuaauugccua

SEQ ID NO: 2535402 - RNA, 19 nt, Homo sapiens
  misc_RNA (1)...(19): siRNA sense strand
gauaacaccagcugagcca

SEQ ID NO: 2535403 - RNA, 19 nt, Homo sapiens
  misc_RNA (1)...(19): siRNA sense strand
cccuacaggauguggccaa

SEQ ID NO: 2535404 - RNA, 19 nt, Homo sapiens
  misc_RNA (1)...(19): siRNA sense strand
uggcagauuaugaagcaga

SEQ ID NO: 2535405 - RNA, 19 nt, Homo sapiens
  misc_RNA (1)...(19): siRNA sense strand
acaugaucguuuacugcaa

SEQ ID NO: 2535406 - RNA, 19 nt, Homo sapiens
  misc_RNA (1)...(19): siRNA sense strand
aagcugaugaagagugaca

SEQ ID NO: 2535407 - RNA, 19 nt, Homo sapiens
  misc_RNA (1)...(19): siRNA sense strand
cugcaaaauugaagacauc

SEQ ID NO: 2535408 - RNA, 19 nt, Homo sapiens
  misc_RNA (1)...(19): siRNA sense strand
uggccaagaggguagaaga

SEQ ID NO: 2535409 - RNA, 19 nt, Homo sapiens
  misc_RNA (1)...(19): siRNA sense strand
cagauuaugaagcagaaaa

SEQ ID NO: 2535410 - RNA, 19 nt, Homo sapiens
  misc_RNA (1)...(19): siRNA sense strand
uuugcgaggaagugggaau

SEQ ID NO: 2535411 - RNA, 19 nt, Homo sapiens
  misc_RNA (1)...(19): siRNA sense strand
augagauauugaaggacca

SEQ ID NO: 2535412 - RNA, 19 nt, Homo sapiens
  misc_RNA (1)...(19): siRNA sense strand
cuaaaagagcagaagauca

SEQ ID NO: 2535413 - RNA, 19 nt, Homo sapiens
  misc_RNA (1)...(19): siRNA sense strand
gcaagaaaucccaaggaca

SEQ ID NO: 2535414 - RNA, 19 nt, Homo sapiens
  misc_RNA (1)...(19): siRNA sense strand
gugaaaggauggugggaag

SEQ ID NO: 2535415 - RNA, 19 nt, Homo sapiens
  misc_RNA (1)...(19): siRNA sense strand
aaacagaauccaauggcaa

SEQ ID NO: 2535416 - RNA, 19 nt, Homo sapiens
  misc_RNA (1)...(19): siRNA sense strand
uggcagaauuuauugggaa

SEQ ID NO: 2535417 - RNA, 19 nt, Homo sapiens
  misc_RNA (1)...(19): siRNA sense strand
gaaaaggggcagugggaga

SEQ ID NO: 2535418 - RNA, 19 nt, Homo sapiens
  misc_RNA (1)...(19): siRNA sense strand
gggaauucuucaaccgaca

SEQ ID NO: 2535419 - RNA, 19 nt, Homo sapiens
  misc_RNA (1)...(19): siRNA sense strand
aggagauaguggaauuaau

SEQ ID NO: 2535420 - RNA, 19 nt, Homo sapiens
  misc_RNA (1)...(19): siRNA sense strand
ggagaaaaguaaacgggca

SEQ ID NO: 2535421 - RNA, 19 nt, Homo sapiens
  misc_RNA (1)...(19): siRNA sense strand
aggaacaugggaagaguau

SEQ ID NO: 2535422 - RNA, 19 nt, Homo sapiens
  misc_RNA (1)...(19): siRNA sense strand
augaaggugauguggagaa

SEQ ID NO: 2535423 - RNA, 19 nt, Homo sapiens
  misc_RNA (1)...(19): siRNA sense strand
cugcugaaaucauggacca

SEQ ID NO: 2535424 - RNA, 19 nt, Homo sapiens
  misc_RNA (1)...(19): siRNA sense strand
augagagauuugaugaaga

SEQ ID NO: 2535425 - RNA, 19 nt, Homo sapiens
  misc_RNA (1)...(19): siRNA sense strand
ugggauaagaucuggaacu

SEQ ID NO: 2535426 - RNA, 19 nt, Homo sapiens
  misc_RNA (1)...(19): siRNA sense strand
gaauaaagcucuuccugcu

SEQ ID NO: 2535427 - RNA, 19 nt, Homo sapiens
  misc_RNA (1)...(19): siRNA sense strand
aacagaauccaauggcaaa

SEQ ID NO: 2535428 - RNA, 19 nt, Homo sapiens
  misc_RNA (1)...(19): siRNA sense strand
gagaaaaggggcaguggga

SEQ ID NO: 2535429 - RNA, 19 nt, Homo sapiens
  misc_RNA (1)...(19): siRNA sense strand
gggaagccaaagacaaaca

SEQ ID NO: 2535430 - RNA, 19 nt, Homo sapiens
  misc_RNA (1)...(19): siRNA sense strand
ggcagaauuuauugggaag

SEQ ID NO: 2535431 - RNA, 19 nt, Homo sapiens
  misc_RNA (1)...(19): siRNA sense strand
ugggagacuggaagaaaca

SEQ ID NO: 2535432 - RNA, 19 nt, Homo sapiens
  misc_RNA (1)...(19): siRNA sense strand
uggaacaagcucaugcaau

SEQ ID NO: 2535433 - RNA, 19 nt, Homo sapiens
  misc_RNA (1)...(19): siRNA sense strand
gaaaaugacugauaccaga

SEQ ID NO: 2535434 - RNA, 19 nt, Homo sapiens
  misc_RNA (1)...(19): siRNA sense strand
cugaggaggagaagaggaa

SEQ ID NO: 2535435 - RNA, 19 nt, Homo sapiens
  misc_RNA (1)...(19): siRNA sense strand
caagauguacggagcgcaa

SEQ ID NO: 2535436 - RNA, 19 nt, Homo sapiens
  misc_RNA (1)...(19): siRNA sense strand
cuggaaauccuguggcuca

SEQ ID NO: 2535437 - RNA, 19 nt, Homo sapiens
  misc_RNA (1)...(19): siRNA sense strand
gaagauagguauugcggag

SEQ ID NO: 2535438 - RNA, 19 nt, Homo sapiens
  misc_RNA (1)...(19): siRNA sense strand
cugacuugcuggaagacau

SEQ ID NO: 2535439 - RNA, 19 nt, Homo sapiens
  misc_RNA (1)...(19): siRNA sense strand
ggaugaagggaggagagaa

SEQ ID NO: 2535440 - RNA, 19 nt, Homo sapiens
  misc_RNA (1)...(19): siRNA sense strand
aggagagaagauagguauu

SEQ ID NO: 2535441 - RNA, 19 nt, Homo sapiens
  misc_RNA (1)...(19): siRNA sense strand
caggauucucgcaggaaaa

SEQ ID NO: 2535442 - RNA, 19 nt, Homo sapiens
  misc_RNA (1)...(19): siRNA sense strand
ugaugaaggcagagagcag

SEQ ID NO: 2535443 - RNA, 19 nt, Homo sapiens
  misc_RNA (1)...(19): siRNA sense strand
aguagaagaaaucaagaga

SEQ ID NO: 2535444 - RNA, 19 nt, Homo sapiens
  misc_RNA (1)...(19): siRNA sense strand
ugaagggaggagagaagau

SEQ ID NO: 2535445 - RNA, 19 nt, Homo sapiens
  misc_RNA (1)...(19): siRNA sense strand
uagaagaaaucaagagacg

SEQ ID NO: 2535446 - RNA, 19 nt, Homo sapiens
  misc_RNA (1)...(19): siRNA sense strand
auuccgagccauugaccaa

SEQ ID NO: 2535447 - RNA, 19 nt, Homo sapiens
  misc_RNA (1)...(19): siRNA sense strand
accaagaggagaaggggaa

SEQ ID NO: 2535448 - RNA, 19 nt, Homo sapiens
  misc_RNA (1)...(19): siRNA sense strand
gcaggaaaacaguagaaga

SEQ ID NO: 2535449 - RNA, 19 nt, Homo sapiens
  misc_RNA (1)...(19): siRNA sense strand
gugccaacgcugagggaca

SEQ ID NO: 2535450 - RNA, 19 nt, Homo sapiens
  misc_RNA (1)...(19): siRNA sense strand
uggaggaagacgaggaaga

SEQ ID NO: 2535451 - RNA, 19 nt, Homo sapiens
  misc_RNA (1)...(19): siRNA sense strand
cgguggacgagguggacua

SEQ ID NO: 2535452 - RNA, 19 nt, Homo sapiens
  misc_RNA (1)...(19): siRNA sense strand
aagaaggggcucaggaaaa

SEQ ID NO: 2535453 - RNA, 19 nt, Homo sapiens
  misc_RNA (1)...(19): siRNA sense strand
cagagagauaagaaagcaa

SEQ ID NO: 2535454 - RNA, 19 nt, Homo sapiens
  misc_RNA (1)...(19): siRNA sense strand
cuaaagagcaggaagccau

SEQ ID NO: 2535455 - RNA, 19 nt, Homo sapiens
  misc_RNA (1)...(19): siRNA sense strand
agaaagcucugcagggaca

SEQ ID NO: 2535456 - RNA, 19 nt, Homo sapiens
  misc_RNA (1)...(19): siRNA sense strand
aggacgacacggagagaga

SEQ ID NO: 2535457 - RNA, 19 nt, Homo sapiens
  misc_RNA (1)...(19): siRNA sense strand
guuugaaguaggaaugcua

SEQ ID NO: 2535458 - RNA, 19 nt, Homo sapiens
  misc_RNA (1)...(19): siRNA sense strand
aggaagacgaggaagacga

SEQ ID NO: 2535459 - RNA, 19 nt, Homo sapiens
  misc_RNA (1)...(19): siRNA sense strand
ggugaaaagcacugaaguu

SEQ ID NO: 2535460 - RNA, 19 nt, Homo sapiens
  misc_RNA (1)...(19): siRNA sense strand
ugcuauacaucgaaggaca

SEQ ID NO: 2535461 - RNA, 19 nt, Homo sapiens
  misc_RNA (1)...(19): siRNA sense strand
aguacauugugaaggccaa

SEQ ID NO: 2535462 - RNA, 19 nt, Homo sapiens
  misc_RNA (1)...(19): siRNA sense strand
cggcugaggagaaguacau

SEQ ID NO: 2535463 - RNA, 19 nt, Homo sapiens
  misc_RNA (1)...(19): siRNA sense strand
caggcagagagauaagaaa

SEQ ID NO: 2535464 - RNA, 19 nt, Homo sapiens
  misc_RNA (1)...(19): siRNA sense strand
gggcucaggaaaagugaaa

SEQ ID NO: 2535465 - RNA, 19 nt, Homo sapiens
  misc_RNA (1)...(19): siRNA sense strand
agcgucaggcagagagaua

SEQ ID NO: 2535466 - RNA, 19 nt, Homo sapiens
  misc_RNA (1)...(19): siRNA sense strand
gagggaagcccauggagca

SEQ ID NO: 2535467 - RNA, 19 nt, Homo sapiens
  misc_RNA (1)...(19): siRNA sense strand
ucgauuuggagucaagaaa

SEQ ID NO: 2535468 - RNA, 19 nt, Homo sapiens
  misc_RNA (1)...(19): siRNA sense strand
gcaaguaagaggggaggaa

SEQ ID NO: 2535469 - RNA, 19 nt, Homo sapiens
  misc_RNA (1)...(19): siRNA sense strand
ugaaguaccugcagggcgu

SEQ ID NO: 2535470 - RNA, 19 nt, Homo sapiens
  misc_RNA (1)...(19): siRNA sense strand
uggaauauuacgcggcuga

SEQ ID NO: 2535471 - RNA, 19 nt, Homo sapiens
  misc_RNA (1)...(19): siRNA sense strand
cugaggagaaguacaucaa

SEQ ID NO: 2535472 - RNA, 19 nt, Homo sapiens
  misc_RNA (1)...(19): siRNA sense strand
gaaugagguuccugcggca

SEQ ID NO: 2535473 - RNA, 19 nt, Homo sapiens
  misc_RNA (1)...(19): siRNA sense strand
caagaaagcucugcaggga

SEQ ID NO: 2535474 - RNA, 19 nt, Homo sapiens
  misc_RNA (1)...(19): siRNA sense strand
aaaaggaccccgagugcaa

SEQ ID NO: 2535475 - RNA, 19 nt, Homo sapiens
  misc_RNA (1)...(19): siRNA sense strand
agaagcugguggaguacau

SEQ ID NO: 2535476 - RNA, 19 nt, Homo sapiens
  misc_RNA (1)...(19): siRNA sense strand
caagaaggggcucaggaaa

SEQ ID NO: 2535477 - RNA, 19 nt, Homo sapiens
  misc_RNA (1)...(19): siRNA sense strand
agcuggagguggugcccaa

SEQ ID NO: 2535478 - RNA, 19 nt, Homo sapiens
  misc_RNA (1)...(19): siRNA sense strand
ucuuuaacgacguggccaa

SEQ ID NO: 2535479 - RNA, 19 nt, Homo sapiens
  misc_RNA (1)...(19): siRNA sense strand
cccacaagacagaagaaga

SEQ ID NO: 2535480 - RNA, 19 nt, Homo sapiens
  misc_RNA (1)...(19): siRNA sense strand
acaagacagaagaagagaa

SEQ ID NO: 2535481 - RNA, 19 nt, Homo sapiens
  misc_RNA (1)...(19): siRNA sense strand
ucuuuaacgacguggccaa

SEQ ID NO: 2535482 - RNA, 19 nt, Homo sapiens
  misc_RNA (1)...(19): siRNA sense strand
cccacaagacagaagaaga

SEQ ID NO: 2535483 - RNA, 19 nt, Homo sapiens
  misc_RNA (1)...(19): siRNA sense strand
acaagacagaagaagagaa

SEQ ID NO: 2535484 - RNA, 19 nt, Homo sapiens
  misc_RNA (1)...(19): siRNA sense strand
ucuuuaacgacguggccaa

SEQ ID NO: 2535485 - RNA, 19 nt, Homo sapiens
  misc_RNA (1)...(19): siRNA sense strand
cccacaagacagaagaaga

SEQ ID NO: 2535486 - RNA, 19 nt, Homo sapiens
  misc_RNA (1)...(19): siRNA sense strand
acaagacagaagaagagaa

SEQ ID NO: 2535487 - RNA, 19 nt, Homo sapiens
  misc_RNA (1)...(19): siRNA sense strand
ucuuuaacgacguggccaa

SEQ ID NO: 2535488 - RNA, 19 nt, Homo sapiens
  misc_RNA (1)...(19): siRNA sense strand
cccacaagacagaagaaga

SEQ ID NO: 2535489 - RNA, 19 nt, Homo sapiens
  misc_RNA (1)...(19): siRNA sense strand
acaagacagaagaagagaa

SEQ ID NO: 2535490 - RNA, 19 nt, Homo sapiens
  misc_RNA (1)...(19): siRNA sense strand
ucauugaagcagaggacaa

SEQ ID NO: 2535491 - RNA, 19 nt, Homo sapiens
  misc_RNA (1)...(19): siRNA sense strand
uggaaugggacguggaaac

SEQ ID NO: 2535492 - RNA, 19 nt, Homo sapiens
  misc_RNA (1)...(19): siRNA sense strand
cgcaagaggaagaggacgu

SEQ ID NO: 2535493 - RNA, 19 nt, Homo sapiens
  misc_RNA (1)...(19): siRNA sense strand
cagagauggccgaguggca

SEQ ID NO: 2535494 - RNA, 19 nt, Homo sapiens
  misc_RNA (1)...(19): siRNA sense strand
uugcgaagaaccauggaaa

SEQ ID NO: 2535495 - RNA, 19 nt, Homo sapiens
  misc_RNA (1)...(19): siRNA sense strand
guguauucuacgugaacuu

SEQ ID NO: 2535496 - RNA, 19 nt, Homo sapiens
  misc_RNA (1)...(19): siRNA sense strand
aaacaaacucucaaaggga

SEQ ID NO: 2535497 - RNA, 19 nt, Homo sapiens
  misc_RNA (1)...(19): siRNA sense strand
acaaacucucaaagggauu

SEQ ID NO: 2535498 - RNA, 19 nt, Homo sapiens
  misc_RNA (1)...(19): siRNA sense strand
uuaugguguuggaguggaa

SEQ ID NO: 2535499 - RNA, 19 nt, Homo sapiens
  misc_RNA (1)...(19): siRNA sense strand
auugacagaaguugacaaa

SEQ ID NO: 2535500 - RNA, 19 nt, Homo sapiens
  misc_RNA (1)...(19): siRNA sense strand
uccuagugaugcuggaaau

SEQ ID NO: 2535501 - RNA, 19 nt, Homo sapiens
  misc_RNA (1)...(19): siRNA sense strand
uugcgaagaaccauggaaa

SEQ ID NO: 2535502 - RNA, 19 nt, Homo sapiens
  misc_RNA (1)...(19): siRNA sense strand
guguauucuacgugaacuu

SEQ ID NO: 2535503 - RNA, 19 nt, Homo sapiens
  misc_RNA (1)...(19): siRNA sense strand
aaacaaacucucaaaggga

SEQ ID NO: 2535504 - RNA, 19 nt, Homo sapiens
  misc_RNA (1)...(19): siRNA sense strand
acaaacucucaaagggauu

SEQ ID NO: 2535505 - RNA, 19 nt, Homo sapiens
  misc_RNA (1)...(19): siRNA sense strand
uuaugguguuggaguggaa

SEQ ID NO: 2535506 - RNA, 19 nt, Homo sapiens
  misc_RNA (1)...(19): siRNA sense strand
auugacagaaguugacaaa

SEQ ID NO: 2535507 - RNA, 19 nt, Homo sapiens
  misc_RNA (1)...(19): siRNA sense strand
uccuagugaugcuggaaau

SEQ ID NO: 2535508 - RNA, 19 nt, Homo sapiens
  misc_RNA (1)...(19): siRNA sense strand
acccaaagguugagcagaa

SEQ ID NO: 2535509 - RNA, 19 nt, Homo sapiens
  misc_RNA (1)...(19): siRNA sense strand
gggacaaaauccugagcua

SEQ ID NO: 2535510 - RNA, 19 nt, Homo sapiens
  misc_RNA (1)...(19): siRNA sense strand
caauauauggagugcagaa

SEQ ID NO: 2535511 - RNA, 19 nt, Homo sapiens
  misc_RNA (1)...(19): siRNA sense strand
aggaagaugcacugaauau

SEQ ID NO: 2535512 - RNA, 19 nt, Homo sapiens
  misc_RNA (1)...(19): siRNA sense strand
ugguaaguccagagaguuu

SEQ ID NO: 2535513 - RNA, 19 nt, Homo sapiens
  misc_RNA (1)...(19): siRNA sense strand
ccuagaggaaggugaacua

SEQ ID NO: 2535514 - RNA, 19 nt, Homo sapiens
  misc_RNA (1)...(19): siRNA sense strand
cagaggaagaauaaggcua

SEQ ID NO: 2535515 - RNA, 19 nt, Homo sapiens
  misc_RNA (1)...(19): siRNA sense strand
gggagaauuaaguagagaa

SEQ ID NO: 2535516 - RNA, 19 nt, Homo sapiens
  misc_RNA (1)...(19): siRNA sense strand
cuagaaaccaaacaggaaa

SEQ ID NO: 2535517 - RNA, 19 nt, Homo sapiens
  misc_RNA (1)...(19): siRNA sense strand
cggcaucacugcugggcau

SEQ ID NO: 2535518 - RNA, 19 nt, Homo sapiens
  misc_RNA (1)...(19): siRNA sense strand
gaauaaagcccuauccuca

SEQ ID NO: 2535519 - RNA, 19 nt, Homo sapiens
  misc_RNA (1)...(19): siRNA sense strand
gaaccagccaacagagaau

SEQ ID NO: 2535520 - RNA, 19 nt, Homo sapiens
  misc_RNA (1)...(19): siRNA sense strand
caagaacauagcaaagaaa

SEQ ID NO: 2535521 - RNA, 19 nt, Homo sapiens
  misc_RNA (1)...(19): siRNA sense strand
gccaagaggagauggauca

SEQ ID NO: 2535522 - RNA, 19 nt, Homo sapiens
  misc_RNA (1)...(19): siRNA sense strand
uagaagaagcugaagcaga

SEQ ID NO: 2535523 - RNA, 19 nt, Homo sapiens
  misc_RNA (1)...(19): siRNA sense strand
aucaauagcagcaguguua

SEQ ID NO: 2535524 - RNA, 19 nt, Homo sapiens
  misc_RNA (1)...(19): siRNA sense strand
acuagaaaccaaacaggaa

SEQ ID NO: 2535525 - RNA, 19 nt, Homo sapiens
  misc_RNA (1)...(19): siRNA sense strand
ugaagugauacgugaaauu

SEQ ID NO: 2535526 - RNA, 19 nt, Homo sapiens
  misc_RNA (1)...(19): siRNA sense strand
gcagcgaagaacaggaaga

SEQ ID NO: 2535527 - RNA, 19 nt, Homo sapiens
  misc_RNA (1)...(19): siRNA sense strand
ugaugaagaacauggaaaa

SEQ ID NO: 2535528 - RNA, 19 nt, Homo sapiens
  misc_RNA (1)...(19): siRNA sense strand
cugcaguacgguucagaaa

SEQ ID NO: 2535529 - RNA, 19 nt, Homo sapiens
  misc_RNA (1)...(19): siRNA sense strand
agacuggaauugaaagaca

SEQ ID NO: 2535530 - RNA, 19 nt, Homo sapiens
  misc_RNA (1)...(19): siRNA sense strand
uagagaaauuugucugcaa

SEQ ID NO: 2535531 - RNA, 19 nt, Homo sapiens
  misc_RNA (1)...(19): siRNA sense strand
acuaaaagcaggagcugaa

SEQ ID NO: 2535532 - RNA, 19 nt, Homo sapiens
  misc_RNA (1)...(19): siRNA sense strand
uuauccagaugaugagaaa

SEQ ID NO: 2535533 - RNA, 19 nt, Homo sapiens
  misc_RNA (1)...(19): siRNA sense strand
cgagagaaucuucagagaa

SEQ ID NO: 2535534 - RNA, 19 nt, Homo sapiens
  misc_RNA (1)...(19): siRNA sense strand
cauccaaguccaaggcuau

SEQ ID NO: 2535535 - RNA, 19 nt, Homo sapiens
  misc_RNA (1)...(19): siRNA sense strand
ccugggaagaugauguaaa

SEQ ID NO: 2535536 - RNA, 19 nt, Homo sapiens
  misc_RNA (1)...(19): siRNA sense strand
ccaaagaacucgugucccu

SEQ ID NO: 2535537 - RNA, 19 nt, Homo sapiens
  misc_RNA (1)...(19): siRNA sense strand
ugauaugacagaugacauu

SEQ ID NO: 2535538 - RNA, 19 nt, Homo sapiens
  misc_RNA (1)...(19): siRNA sense strand
agaagaugaccgagagacu

SEQ ID NO: 2535539 - RNA, 19 nt, Homo sapiens
  misc_RNA (1)...(19): siRNA sense strand
acagaaaaggugaccgaaa

SEQ ID NO: 2535540 - RNA, 19 nt, Homo sapiens
  misc_RNA (1)...(19): siRNA sense strand
cgcaagaaucccauaggaa

SEQ ID NO: 2535541 - RNA, 19 nt, Homo sapiens
  misc_RNA (1)...(19): siRNA sense strand
guuaaaacacguaugcaaa

SEQ ID NO: 2535542 - RNA, 19 nt, Homo sapiens
  misc_RNA (1)...(19): siRNA sense strand
uugaaagacaccagcagaa

SEQ ID NO: 2535543 - RNA, 19 nt, Homo sapiens
  misc_RNA (1)...(19): siRNA sense strand
auacaaaggccauccaaga

SEQ ID NO: 2535544 - RNA, 19 nt, Homo sapiens
  misc_RNA (1)...(19): siRNA sense strand
cugcuguguugaugaagaa

SEQ ID NO: 2535545 - RNA, 19 nt, Homo sapiens
  misc_RNA (1)...(19): siRNA sense strand
uugaugaagaacauggaaa

SEQ ID NO: 2535546 - RNA, 19 nt, Homo sapiens
  misc_RNA (1)...(19): siRNA sense strand
gugaacuagauauggagaa

SEQ ID NO: 2535547 - RNA, 19 nt, Homo sapiens
  misc_RNA (1)...(19): siRNA sense strand
cagaaagcagcgaagaaca

SEQ ID NO: 2535548 - RNA, 19 nt, Homo sapiens
  misc_RNA (1)...(19): siRNA sense strand
aaagagaagaugaccgaga

SEQ ID NO: 2535549 - RNA, 19 nt, Homo sapiens
  misc_RNA (1)...(19): siRNA sense strand
acaaaggccauccaagaaa

SEQ ID NO: 2535550 - RNA, 19 nt, Homo sapiens
  misc_RNA (1)...(19): siRNA sense strand
caaacaacuagaaaccaaa

SEQ ID NO: 2535551 - RNA, 19 nt, Homo sapiens
  misc_RNA (1)...(19): siRNA sense strand
agcagaaagcagcgaagaa

SEQ ID NO: 2535552 - RNA, 19 nt, Homo sapiens
  misc_RNA (1)...(19): siRNA sense strand
agaaacugcuggagcgaac

SEQ ID NO: 2535553 - RNA, 19 nt, Homo sapiens
  misc_RNA (1)...(19): siRNA sense strand
uggagagcguugucaagaa

SEQ ID NO: 2535554 - RNA, 19 nt, Homo sapiens
  misc_RNA (1)...(19): siRNA sense strand
gagaagagccaagaggaga

SEQ ID NO: 2535555 - RNA, 19 nt, Homo sapiens
  misc_RNA (1)...(19): siRNA sense strand
agaagagccaagaggagau

SEQ ID NO: 2535556 - RNA, 19 nt, Homo sapiens
  misc_RNA (1)...(19): siRNA sense strand
acaaagagaagaugaccga

SEQ ID NO: 2535557 - RNA, 19 nt, Homo sapiens
  misc_RNA (1)...(19): siRNA sense strand
cugcagauacuaaagaaga

SEQ ID NO: 2535558 - RNA, 19 nt, Homo sapiens
  misc_RNA (1)...(19): siRNA sense strand
aguuaaaacacguaugcaa

SEQ ID NO: 2535559 - RNA, 19 nt, Homo sapiens
  misc_RNA (1)...(19): siRNA sense strand
ugugguaaguccagagagu

SEQ ID NO: 2535560 - RNA, 19 nt, Homo sapiens
  misc_RNA (1)...(19): siRNA sense strand
acaaaacaguguacaagaa

SEQ ID NO: 2535561 - RNA, 19 nt, Homo sapiens
  misc_RNA (1)...(19): siRNA sense strand
gugaaaucuacuacaucua

SEQ ID NO: 2535562 - RNA, 19 nt, Homo sapiens
  misc_RNA (1)...(19): siRNA sense strand
agaacauagcaaagaaagu

SEQ ID NO: 2535563 - RNA, 19 nt, Homo sapiens
  misc_RNA (1)...(19): siRNA sense strand
caaagaaaguccagcucgu

SEQ ID NO: 2535564 - RNA, 19 nt, Homo sapiens
  misc_RNA (1)...(19): siRNA sense strand
cgauuugacaagggcaaua

SEQ ID NO: 2535565 - RNA, 19 nt, Homo sapiens
  misc_RNA (1)...(19): siRNA sense strand
ggugauuguucggaaggaa

SEQ ID NO: 2535566 - RNA, 19 nt, Homo sapiens
  misc_RNA (1)...(19): siRNA sense strand
gaauaaggcuaguccccaa

SEQ ID NO: 2535567 - RNA, 19 nt, Homo sapiens
  misc_RNA (1)...(19): siRNA sense strand
auacuaaagaagagcggga

SEQ ID NO: 2535568 - RNA, 19 nt, Homo sapiens
  misc_RNA (1)...(19): siRNA sense strand
gaggaaggugaacuagaua

SEQ ID NO: 2535569 - RNA, 19 nt, Homo sapiens
  misc_RNA (1)...(19): siRNA sense strand
cagagaauuuugugcaaga

SEQ ID NO: 2535570 - RNA, 19 nt, Homo sapiens
  misc_RNA (1)...(19): siRNA sense strand
cugaaugcgaaaugacgaa

SEQ ID NO: 2535571 - RNA, 19 nt, Homo sapiens
  misc_RNA (1)...(19): siRNA sense strand
agaugaguguggaugauga

SEQ ID NO: 2535572 - RNA, 19 nt, Homo sapiens
  misc_RNA (1)...(19): siRNA sense strand
ccuagaagaagcugaagca

SEQ ID NO: 2535573 - RNA, 19 nt, Homo sapiens
  misc_RNA (1)...(19): siRNA sense strand
gcaaagaaauggaggcauc

SEQ ID NO: 2535574 - RNA, 19 nt, Homo sapiens
  misc_RNA (1)...(19): siRNA sense strand
acauaaaggaaaagcgaaa

SEQ ID NO: 2535575 - RNA, 19 nt, Homo sapiens
  misc_RNA (1)...(19): siRNA sense strand
cagauuacuuuguggguca

SEQ ID NO: 2535576 - RNA, 19 nt, Homo sapiens
  misc_RNA (1)...(19): siRNA sense strand
gggacgacgaugaggaaaa

SEQ ID NO: 2535577 - RNA, 19 nt, Homo sapiens
  misc_RNA (1)...(19): siRNA sense strand
ccuuagagaugcugcguga

SEQ ID NO: 2535578 - RNA, 19 nt, Homo sapiens
  misc_RNA (1)...(19): siRNA sense strand
acaacagaucagagaacaa

SEQ ID NO: 2535579 - RNA, 19 nt, Homo sapiens
  misc_RNA (1)...(19): siRNA sense strand
gaaaagaacuucagcgcca

SEQ ID NO: 2535580 - RNA, 19 nt, Homo sapiens
  misc_RNA (1)...(19): siRNA sense strand
agaaacaagcagaugaaaa

SEQ ID NO: 2535581 - RNA, 19 nt, Homo sapiens
  misc_RNA (1)...(19): siRNA sense strand
agaugaagaaguagaggau

SEQ ID NO: 2535582 - RNA, 19 nt, Homo sapiens
  misc_RNA (1)...(19): siRNA sense strand
agguggaacagaagaagaa

SEQ ID NO: 2535583 - RNA, 19 nt, Homo sapiens
  misc_RNA (1)...(19): siRNA sense strand
ugagaaaggauuugccaga

SEQ ID NO: 2535584 - RNA, 19 nt, Homo sapiens
  misc_RNA (1)...(19): siRNA sense strand
agaagguggaacagaagaa

SEQ ID NO: 2535585 - RNA, 19 nt, Homo sapiens
  misc_RNA (1)...(19): siRNA sense strand
aggaaaagcgaaaggcuau

SEQ ID NO: 2535586 - RNA, 19 nt, Homo sapiens
  misc_RNA (1)...(19): siRNA sense strand
agaucauagacaagcgcaa

SEQ ID NO: 2535587 - RNA, 19 nt, Homo sapiens
  misc_RNA (1)...(19): siRNA sense strand
agaagaaaauagagaugga

SEQ ID NO: 2535588 - RNA, 19 nt, Homo sapiens
  misc_RNA (1)...(19): siRNA sense strand
cagaagaagaaaauagaga

SEQ ID NO: 2535589 - RNA, 19 nt, Homo sapiens
  misc_RNA (1)...(19): siRNA sense strand
gcgcaaagaaauggaggca

SEQ ID NO: 2535590 - RNA, 19 nt, Homo sapiens
  misc_RNA (1)...(19): siRNA sense strand
cagagaacaaaacgagaaa

SEQ ID NO: 2535591 - RNA, 19 nt, Homo sapiens
  misc_RNA (1)...(19): siRNA sense strand
aagaaguagaggauaugua

SEQ ID NO: 2535592 - RNA, 19 nt, Homo sapiens
  misc_RNA (1)...(19): siRNA sense strand
aaggaaaagcgaaaggcua

SEQ ID NO: 2535593 - RNA, 19 nt, Homo sapiens
  misc_RNA (1)...(19): siRNA sense strand
ucauuguccaggagaggaa

SEQ ID NO: 2535594 - RNA, 19 nt, Homo sapiens
  misc_RNA (1)...(19): siRNA sense strand
agcaaugggaggaagaaga

SEQ ID NO: 2535595 - RNA, 19 nt, Homo sapiens
  misc_RNA (1)...(19): siRNA sense strand
agacaacagaucagagaac

SEQ ID NO: 2535596 - RNA, 19 nt, Homo sapiens
  misc_RNA (1)...(19): siRNA sense strand
guggaacagaagaagaaaa

SEQ ID NO: 2535597 - RNA, 19 nt, Homo sapiens
  misc_RNA (1)...(19): siRNA sense strand
uggaacagaagaagaaaau

SEQ ID NO: 2535598 - RNA, 19 nt, Homo sapiens
  misc_RNA (1)...(19): siRNA sense strand
agaaaauagagauggagau

SEQ ID NO: 2535599 - RNA, 19 nt, Homo sapiens
  misc_RNA (1)...(19): siRNA sense strand
ucgaagaggcagucagauc

SEQ ID NO: 2535600 - RNA, 19 nt, Homo sapiens
  misc_RNA (1)...(19): siRNA sense strand
acgagaaaacauaaaggaa

SEQ ID NO: 2535601 - RNA, 19 nt, Homo sapiens
  misc_RNA (1)...(19): siRNA sense strand
caccaagccuggagugcca

SEQ ID NO: 2535602 - RNA, 19 nt, Homo sapiens
  misc_RNA (1)...(19): siRNA sense strand
aggagacuuuauagaugaa

SEQ ID NO: 2535603 - RNA, 19 nt, Homo sapiens
  misc_RNA (1)...(19): siRNA sense strand
uuaugaagacauucgggaa

SEQ ID NO: 2535604 - RNA, 19 nt, Homo sapiens
  misc_RNA (1)...(19): siRNA sense strand
aggagaggaaggacaccaa

SEQ ID NO: 2535605 - RNA, 19 nt, Homo sapiens
  misc_RNA (1)...(19): siRNA sense strand
acuacgagaaugaggagaa

SEQ ID NO: 2535606 - RNA, 19 nt, Homo sapiens
  misc_RNA (1)...(19): siRNA sense strand
ggaagaaaauuguagcaga

SEQ ID NO: 2535607 - RNA, 19 nt, Homo sapiens
  misc_RNA (1)...(19): siRNA sense strand
ggaucaacagacagaaaca

SEQ ID NO: 2535608 - RNA, 19 nt, Homo sapiens
  misc_RNA (1)...(19): siRNA sense strand
aggccuugguggaugggaa

SEQ ID NO: 2535609 - RNA, 19 nt, Homo sapiens
  misc_RNA (1)...(19): siRNA sense strand
cagaauuacaagacaagau

SEQ ID NO: 2535610 - RNA, 19 nt, Homo sapiens
  misc_RNA (1)...(19): siRNA sense strand
cuuugaacuacgagaauga

SEQ ID NO: 2535611 - RNA, 19 nt, Homo sapiens
  misc_RNA (1)...(19): siRNA sense strand
acgagaaugaggagaaagu

SEQ ID NO: 2535612 - RNA, 19 nt, Homo sapiens
  misc_RNA (1)...(19): siRNA sense strand
ucucuugcaauguggguaa

SEQ ID NO: 2535613 - RNA, 19 nt, Homo sapiens
  misc_RNA (1)...(19): siRNA sense strand
gaguuuaccuauaggcugu

SEQ ID NO: 2535614 - RNA, 19 nt, Homo sapiens
  misc_RNA (1)...(19): siRNA sense strand
aaacaauggaggaggcucu

SEQ ID NO: 2535615 - RNA, 19 nt, Homo sapiens
  misc_RNA (1)...(19): siRNA sense strand
uaggaucaacagacagaaa

SEQ ID NO: 2535616 - RNA, 19 nt, Homo sapiens
  misc_RNA (1)...(19): siRNA sense strand
ccggagagugugaaguaca

SEQ ID NO: 2535617 - RNA, 19 nt, Homo sapiens
  misc_RNA (1)...(19): siRNA sense strand
auacaggcagccaaggaaa

SEQ ID NO: 2535618 - RNA, 19 nt, Homo sapiens
  misc_RNA (1)...(19): siRNA sense strand
ggacaagacuucugcucag

SEQ ID NO: 2535619 - RNA, 19 nt, Homo sapiens
  misc_RNA (1)...(19): siRNA sense strand
ugucuuuacagauggagaa

SEQ ID NO: 2535620 - RNA, 19 nt, Homo sapiens
  misc_RNA (1)...(19): siRNA sense strand
gcuuugaggccuuggugga

SEQ ID NO: 2535621 - RNA, 19 nt, Homo sapiens
  misc_RNA (1)...(19): siRNA sense strand
aaguuaggaucaacagaca

SEQ ID NO: 2535622 - RNA, 19 nt, Homo sapiens
  misc_RNA (1)...(19): siRNA sense strand
cuauagucccuguggagga

SEQ ID NO: 2535623 - RNA, 19 nt, Homo sapiens
  misc_RNA (1)...(19): siRNA sense strand
acuacgagaaugaggagaa

SEQ ID NO: 2535624 - RNA, 19 nt, Homo sapiens
  misc_RNA (1)...(19): siRNA sense strand
ggaagaaaauuguagcaga

SEQ ID NO: 2535625 - RNA, 19 nt, Homo sapiens
  misc_RNA (1)...(19): siRNA sense strand
ggaucaacagacagaaaca

SEQ ID NO: 2535626 - RNA, 19 nt, Homo sapiens
  misc_RNA (1)...(19): siRNA sense strand
aggccuugguggaugggaa

SEQ ID NO: 2535627 - RNA, 19 nt, Homo sapiens
  misc_RNA (1)...(19): siRNA sense strand
cagaauuacaagacaagau

SEQ ID NO: 2535628 - RNA, 19 nt, Homo sapiens
  misc_RNA (1)...(19): siRNA sense strand
cuuugaacuacgagaauga

SEQ ID NO: 2535629 - RNA, 19 nt, Homo sapiens
  misc_RNA (1)...(19): siRNA sense strand
acgagaaugaggagaaagu

SEQ ID NO: 2535630 - RNA, 19 nt, Homo sapiens
  misc_RNA (1)...(19): siRNA sense strand
ucucuugcaauguggguaa

SEQ ID NO: 2535631 - RNA, 19 nt, Homo sapiens
  misc_RNA (1)...(19): siRNA sense strand
gaguuuaccuauaggcugu

SEQ ID NO: 2535632 - RNA, 19 nt, Homo sapiens
  misc_RNA (1)...(19): siRNA sense strand
aaacaauggaggaggcucu

SEQ ID NO: 2535633 - RNA, 19 nt, Homo sapiens
  misc_RNA (1)...(19): siRNA sense strand
uaggaucaacagacagaaa

SEQ ID NO: 2535634 - RNA, 19 nt, Homo sapiens
  misc_RNA (1)...(19): siRNA sense strand
ccggagagugugaaguaca

SEQ ID NO: 2535635 - RNA, 19 nt, Homo sapiens
  misc_RNA (1)...(19): siRNA sense strand
auacaggcagccaaggaaa

SEQ ID NO: 2535636 - RNA, 19 nt, Homo sapiens
  misc_RNA (1)...(19): siRNA sense strand
ggacaagacuucugcucag

SEQ ID NO: 2535637 - RNA, 19 nt, Homo sapiens
  misc_RNA (1)...(19): siRNA sense strand
ugucuuuacagauggagaa

SEQ ID NO: 2535638 - RNA, 19 nt, Homo sapiens
  misc_RNA (1)...(19): siRNA sense strand
gcuuugaggccuuggugga

SEQ ID NO: 2535639 - RNA, 19 nt, Homo sapiens
  misc_RNA (1)...(19): siRNA sense strand
aaguuaggaucaacagaca

SEQ ID NO: 2535640 - RNA, 19 nt, Homo sapiens
  misc_RNA (1)...(19): siRNA sense strand
cuauagucccuguggagga

SEQ ID NO: 2535641 - RNA, 19 nt, Homo sapiens
  misc_RNA (1)...(19): siRNA sense strand
gggaaagggaucugguaaa

SEQ ID NO: 2535642 - RNA, 19 nt, Homo sapiens
  misc_RNA (1)...(19): siRNA sense strand
aggaagagcgagagaagaa

SEQ ID NO: 2535643 - RNA, 19 nt, Homo sapiens
  misc_RNA (1)...(19): siRNA sense strand
cgugagagggacagagaua

SEQ ID NO: 2535644 - RNA, 19 nt, Homo sapiens
  misc_RNA (1)...(19): siRNA sense strand
augaagaagaagaggacaa

SEQ ID NO: 2535645 - RNA, 19 nt, Homo sapiens
  misc_RNA (1)...(19): siRNA sense strand
cagaagaaguugagccuga

SEQ ID NO: 2535646 - RNA, 19 nt, Homo sapiens
  misc_RNA (1)...(19): siRNA sense strand
aggagaaaguauacagaau

SEQ ID NO: 2535647 - RNA, 19 nt, Homo sapiens
  misc_RNA (1)...(19): siRNA sense strand
gcauuuacggagagcgaua

SEQ ID NO: 2535648 - RNA, 19 nt, Homo sapiens
  misc_RNA (1)...(19): siRNA sense strand
cagcaaacuuaaugaacau

SEQ ID NO: 2535649 - RNA, 19 nt, Homo sapiens
  misc_RNA (1)...(19): siRNA sense strand
agagauagaagcaggacua

SEQ ID NO: 2535650 - RNA, 19 nt, Homo sapiens
  misc_RNA (1)...(19): siRNA sense strand
agaugaugaugaagaagaa

SEQ ID NO: 2535651 - RNA, 19 nt, Homo sapiens
  misc_RNA (1)...(19): siRNA sense strand
cugugaauacaaagaguua

SEQ ID NO: 2535652 - RNA, 19 nt, Homo sapiens
  misc_RNA (1)...(19): siRNA sense strand
cggaagcaguauuaaacaa

SEQ ID NO: 2535653 - RNA, 19 nt, Homo sapiens
  misc_RNA (1)...(19): siRNA sense strand
auacgaagaagcaaagaaa

SEQ ID NO: 2535654 - RNA, 19 nt, Homo sapiens
  misc_RNA (1)...(19): siRNA sense strand
guguagagacuaugaugaa

SEQ ID NO: 2535655 - RNA, 19 nt, Homo sapiens
  misc_RNA (1)...(19): siRNA sense strand
cuaaggaggaagagcgaga

SEQ ID NO: 2535656 - RNA, 19 nt, Homo sapiens
  misc_RNA (1)...(19): siRNA sense strand
aguuauagcaggagucgaa

SEQ ID NO: 2535657 - RNA, 19 nt, Homo sapiens
  misc_RNA (1)...(19): siRNA sense strand
gaagaagcaaagaaagcaa

SEQ ID NO: 2535658 - RNA, 19 nt, Homo sapiens
  misc_RNA (1)...(19): siRNA sense strand
aggaauuacuugacacaga

SEQ ID NO: 2535659 - RNA, 19 nt, Homo sapiens
  misc_RNA (1)...(19): siRNA sense strand
acucagaugcagaaggaau

SEQ ID NO: 2535660 - RNA, 19 nt, Homo sapiens
  misc_RNA (1)...(19): siRNA sense strand
aagaagaagaggacaauga

SEQ ID NO: 2535661 - RNA, 19 nt, Homo sapiens
  misc_RNA (1)...(19): siRNA sense strand
aggaaaaggaaacaagaaa

SEQ ID NO: 2535662 - RNA, 19 nt, Homo sapiens
  misc_RNA (1)...(19): siRNA sense strand
uuucaaagggcaagaucua

SEQ ID NO: 2535663 - RNA, 19 nt, Homo sapiens
  misc_RNA (1)...(19): siRNA sense strand
acuagaagcagaagcagaa

SEQ ID NO: 2535664 - RNA, 19 nt, Homo sapiens
  misc_RNA (1)...(19): siRNA sense strand
agaacacgaagcagggaaa

SEQ ID NO: 2535665 - RNA, 19 nt, Homo sapiens
  misc_RNA (1)...(19): siRNA sense strand
ggauguaaggaaaaggaaa

SEQ ID NO: 2535666 - RNA, 19 nt, Homo sapiens
  misc_RNA (1)...(19): siRNA sense strand
auucaagacaagagcagaa

SEQ ID NO: 2535667 - RNA, 19 nt, Homo sapiens
  misc_RNA (1)...(19): siRNA sense strand
aagaaacgguguagagacu

SEQ ID NO: 2535668 - RNA, 19 nt, Homo sapiens
  misc_RNA (1)...(19): siRNA sense strand
guauagacacagagugcau

SEQ ID NO: 2535669 - RNA, 19 nt, Homo sapiens
  misc_RNA (1)...(19): siRNA sense strand
ucagcaggauguaaggaaa

SEQ ID NO: 2535670 - RNA, 19 nt, Homo sapiens
  misc_RNA (1)...(19): siRNA sense strand
cgaaguuggaguaaagaga

SEQ ID NO: 2535671 - RNA, 19 nt, Homo sapiens
  misc_RNA (1)...(19): siRNA sense strand
ggaaaaggaaacaagaaau

SEQ ID NO: 2535672 - RNA, 19 nt, Homo sapiens
  misc_RNA (1)...(19): siRNA sense strand
agacaagagcagaagcuga

SEQ ID NO: 2535673 - RNA, 19 nt, Homo sapiens
  misc_RNA (1)...(19): siRNA sense strand
agaacagauccauuagaaa

SEQ ID NO: 2535674 - RNA, 19 nt, Homo sapiens
  misc_RNA (1)...(19): siRNA sense strand
agggaaagggaucugguaa

SEQ ID NO: 2535675 - RNA, 19 nt, Homo sapiens
  misc_RNA (1)...(19): siRNA sense strand
aagcaggacuagaagcaga

SEQ ID NO: 2535676 - RNA, 19 nt, Homo sapiens
  misc_RNA (1)...(19): siRNA sense strand
ggaggaagagcgagagaag

SEQ ID NO: 2535677 - RNA, 19 nt, Homo sapiens
  misc_RNA (1)...(19): siRNA sense strand
cagcaggauguaaggaaaa

SEQ ID NO: 2535678 - RNA, 19 nt, Homo sapiens
  misc_RNA (1)...(19): siRNA sense strand
cagucaagcucccgauaca

SEQ ID NO: 2535679 - RNA, 19 nt, Homo sapiens
  misc_RNA (1)...(19): siRNA sense strand
gcauggaauaaaccaguaa

SEQ ID NO: 2535680 - RNA, 19 nt, Homo sapiens
  misc_RNA (1)...(19): siRNA sense strand
aguugagccugaugaagaa

SEQ ID NO: 2535681 - RNA, 19 nt, Homo sapiens
  misc_RNA (1)...(19): siRNA sense strand
cagaaagagacacagauau

SEQ ID NO: 2535682 - RNA, 19 nt, Homo sapiens
  misc_RNA (1)...(19): siRNA sense strand
ugagagggacagagauaga

SEQ ID NO: 2535683 - RNA, 19 nt, Homo sapiens
  misc_RNA (1)...(19): siRNA sense strand
ccuaaauaugaccuggaua

SEQ ID NO: 2535684 - RNA, 19 nt, Homo sapiens
  misc_RNA (1)...(19): siRNA sense strand
aagaccaaguggaccauaa

SEQ ID NO: 2535685 - RNA, 19 nt, Homo sapiens
  misc_RNA (1)...(19): siRNA sense strand
cauaugacacagauggcua

SEQ ID NO: 2535686 - RNA, 19 nt, Homo sapiens
  misc_RNA (1)...(19): siRNA sense strand
agaagcaaagaaagcaaua

SEQ ID NO: 2535687 - RNA, 19 nt, Homo sapiens
  misc_RNA (1)...(19): siRNA sense strand
gcacucaaguccuggcuca

SEQ ID NO: 2535688 - RNA, 19 nt, Homo sapiens
  misc_RNA (1)...(19): siRNA sense strand
agucgaaguuggaguaaag

SEQ ID NO: 2535689 - RNA, 19 nt, Homo sapiens
  misc_RNA (1)...(19): siRNA sense strand
guagagacuaugaugaaaa

SEQ ID NO: 2535690 - RNA, 19 nt, Homo sapiens
  misc_RNA (1)...(19): siRNA sense strand
gaagaagaggacaaugaau

SEQ ID NO: 2535691 - RNA, 19 nt, Homo sapiens
  misc_RNA (1)...(19): siRNA sense strand
gacuagaagcagaagcaga

SEQ ID NO: 2535692 - RNA, 19 nt, Homo sapiens
  misc_RNA (1)...(19): siRNA sense strand
ucaucuguuuugagggaua

SEQ ID NO: 2535693 - RNA, 19 nt, Homo sapiens
  misc_RNA (1)...(19): siRNA sense strand
auaaaggcgacgagagcca

SEQ ID NO: 2535694 - RNA, 19 nt, Homo sapiens
  misc_RNA (1)...(19): siRNA sense strand
augaaagagcccacuacaa

SEQ ID NO: 2535695 - RNA, 19 nt, Homo sapiens
  misc_RNA (1)...(19): siRNA sense strand
gagaugaagaagagagagc

SEQ ID NO: 2535696 - RNA, 19 nt, Homo sapiens
  misc_RNA (1)...(19): siRNA sense strand
augcacuggaucugauaaa

SEQ ID NO: 2535697 - RNA, 19 nt, Homo sapiens
  misc_RNA (1)...(19): siRNA sense strand
agagccaagaugaggaaaa

SEQ ID NO: 2535698 - RNA, 19 nt, Homo sapiens
  misc_RNA (1)...(19): siRNA sense strand
cuuugagagaugaagaaga

SEQ ID NO: 2535699 - RNA, 19 nt, Homo sapiens
  misc_RNA (1)...(19): siRNA sense strand
agacgaagauguuagugca

SEQ ID NO: 2535700 - RNA, 19 nt, Homo sapiens
  misc_RNA (1)...(19): siRNA sense strand
ccuacauccucgucagcau

SEQ ID NO: 2535701 - RNA, 19 nt, Homo sapiens
  misc_RNA (1)...(19): siRNA sense strand
gcaccuuaucuuuggggaa

SEQ ID NO: 2535702 - RNA, 19 nt, Homo sapiens
  misc_RNA (1)...(19): siRNA sense strand
ggcuuugagagaugaagaa

SEQ ID NO: 2535703 - RNA, 19 nt, Homo sapiens
  misc_RNA (1)...(19): siRNA sense strand
agggaagacauaugagcua

SEQ ID NO: 2535704 - RNA, 19 nt, Homo sapiens
  misc_RNA (1)...(19): siRNA sense strand
gaucggaggccguaggcuu

SEQ ID NO: 2535705 - RNA, 19 nt, Homo sapiens
  misc_RNA (1)...(19): siRNA sense strand
agacagucaagguagggaa

SEQ ID NO: 2535706 - RNA, 19 nt, Homo sapiens
  misc_RNA (1)...(19): siRNA sense strand
uggaguauacagagaagau

SEQ ID NO: 2535707 - RNA, 19 nt, Homo sapiens
  misc_RNA (1)...(19): siRNA sense strand
uguucugauugaagugaau

SEQ ID NO: 2535708 - RNA, 19 nt, Homo sapiens
  misc_RNA (1)...(19): siRNA sense strand
agauauugcaggaguagaa

SEQ ID NO: 2535709 - RNA, 19 nt, Homo sapiens
  misc_RNA (1)...(19): siRNA sense strand
gcagaauggaggaaugcaa

SEQ ID NO: 2535710 - RNA, 19 nt, Homo sapiens
  misc_RNA (1)...(19): siRNA sense strand
ccucagugaagaagaaauu

SEQ ID NO: 2535711 - RNA, 19 nt, Homo sapiens
  misc_RNA (1)...(19): siRNA sense strand
gugaaaauccacagaggaa

SEQ ID NO: 2535712 - RNA, 19 nt, Homo sapiens
  misc_RNA (1)...(19): siRNA sense strand
aggaguagaauuugcuaaa

SEQ ID NO: 2535713 - RNA, 19 nt, Homo sapiens
  misc_RNA (1)...(19): siRNA sense strand
caguaaauugggaagauau

SEQ ID NO: 2535714 - RNA, 19 nt, Homo sapiens
  misc_RNA (1)...(19): siRNA sense strand
agugaauggcagaagaauu

SEQ ID NO: 2535715 - RNA, 19 nt, Homo sapiens
  misc_RNA (1)...(19): siRNA sense strand
cgcaauuacaucuggcaua

SEQ ID NO: 2535716 - RNA, 19 nt, Homo sapiens
  misc_RNA (1)...(19): siRNA sense strand
gugaagaagaaauugaaca

SEQ ID NO: 2535717 - RNA, 19 nt, Homo sapiens
  misc_RNA (1)...(19): siRNA sense strand
gggaagauauugcaggagu

SEQ ID NO: 2535718 - RNA, 19 nt, Homo sapiens
  misc_RNA (1)...(19): siRNA sense strand
ccggagaagauuggugaaa

SEQ ID NO: 2535719 - RNA, 19 nt, Homo sapiens
  misc_RNA (1)...(19): siRNA sense strand
aagacuucccggagagcaa

SEQ ID NO: 2535720 - RNA, 19 nt, Homo sapiens
  misc_RNA (1)...(19): siRNA sense strand
gaugaugcaagcuggcaaa

SEQ ID NO: 2535721 - RNA, 19 nt, Homo sapiens
  misc_RNA (1)...(19): siRNA sense strand
cggagaagauuggugaaaa

SEQ ID NO: 2535722 - RNA, 19 nt, Homo sapiens
  misc_RNA (1)...(19): siRNA sense strand
ccauaaaggaaauaguugu

SEQ ID NO: 2535723 - RNA, 19 nt, Homo sapiens
  misc_RNA (1)...(19): siRNA sense strand
ggagaagauuggugaaaag

SEQ ID NO: 2535724 - RNA, 19 nt, Homo sapiens
  misc_RNA (1)...(19): siRNA sense strand
uccaaaagauuuagagcuu

SEQ ID NO: 2535725 - RNA, 19 nt, Homo sapiens
  misc_RNA (1)...(19): siRNA sense strand
acaagaaauugaugaggcu

SEQ ID NO: 2535726 - RNA, 19 nt, Homo sapiens
  misc_RNA (1)...(19): siRNA sense strand
guugaaucuggguugaaua

SEQ ID NO: 2535727 - RNA, 19 nt, Homo sapiens
  misc_RNA (1)...(19): siRNA sense strand
gauuauggaucauggaccu

SEQ ID NO: 2535728 - RNA, 19 nt, Homo sapiens
  misc_RNA (1)...(19): siRNA sense strand
cccgagggauacuuggaaa

SEQ ID NO: 2535729 - RNA, 19 nt, Homo sapiens
  misc_RNA (1)...(19): siRNA sense strand
gugcacagauauuacgcau

SEQ ID NO: 2535730 - RNA, 19 nt, Homo sapiens
  misc_RNA (1)...(19): siRNA sense strand
auggaggaaugcaauguaa

SEQ ID NO: 2535731 - RNA, 19 nt, Homo sapiens
  misc_RNA (1)...(19): siRNA sense strand
ggcaggaccuacagaacca

SEQ ID NO: 2535732 - RNA, 19 nt, Homo sapiens
  misc_RNA (1)...(19): siRNA sense strand
gccaaagaugauugaacuu

SEQ ID NO: 2535733 - RNA, 19 nt, Homo sapiens
  misc_RNA (1)...(19): siRNA sense strand
ugagugaauggcagaagaa

SEQ ID NO: 2535734 - RNA, 19 nt, Homo sapiens
  misc_RNA (1)...(19): siRNA sense strand
guacagaagaugaugcaag

SEQ ID NO: 2535735 - RNA, 19 nt, Homo sapiens
  misc_RNA (1)...(19): siRNA sense strand
caggaguagaauuugcuaa

SEQ ID NO: 2535736 - RNA, 19 nt, Homo sapiens
  misc_RNA (1)...(19): siRNA sense strand
cuucuaaauggguagguga

SEQ ID NO: 2535737 - RNA, 19 nt, Homo sapiens
  misc_RNA (1)...(19): siRNA sense strand
auucaguaugcaugggcaa

SEQ ID NO: 2535738 - RNA, 19 nt, Homo sapiens
  misc_RNA (1)...(19): siRNA sense strand
uugaugagcgucugaagaa

SEQ ID NO: 2535739 - RNA, 19 nt, Homo sapiens
  misc_RNA (1)...(19): siRNA sense strand
uugaaucuggguugaauaa

SEQ ID NO: 2535740 - RNA, 19 nt, Homo sapiens
  misc_RNA (1)...(19): siRNA sense strand
cagaauggaggaaugcaau

SEQ ID NO: 2535741 - RNA, 19 nt, Homo sapiens
  misc_RNA (1)...(19): siRNA sense strand
ccuaguggugggagcaaca

SEQ ID NO: 2535742 - RNA, 19 nt, Homo sapiens
  misc_RNA (1)...(19): siRNA sense strand
guaccggaccgaaggcaga

SEQ ID NO: 2535743 - RNA, 19 nt, Homo sapiens
  misc_RNA (1)...(19): siRNA sense strand
gggaaguagcggagagaac

SEQ ID NO: 2535744 - RNA, 19 nt, Homo sapiens
  misc_RNA (1)...(19): siRNA sense strand
ggagagaacaagaaagcca

SEQ ID NO: 2535745 - RNA, 19 nt, Homo sapiens
  misc_RNA (1)...(19): siRNA sense strand
gaauacaaguaguucgaga

SEQ ID NO: 2535746 - RNA, 19 nt, Homo sapiens
  misc_RNA (1)...(19): siRNA sense strand
aaaggagaucacagagaaa

SEQ ID NO: 2535747 - RNA, 19 nt, Homo sapiens
  misc_RNA (1)...(19): siRNA sense strand
aaauuagugaugagggaau

SEQ ID NO: 2535748 - RNA, 19 nt, Homo sapiens
  misc_RNA (1)...(19): siRNA sense strand
aggaagaagugguugcagu

SEQ ID NO: 2535749 - RNA, 19 nt, Homo sapiens
  misc_RNA (1)...(19): siRNA sense strand
caaaauuagugaugaggga

SEQ ID NO: 2535750 - RNA, 19 nt, Homo sapiens
  misc_RNA (1)...(19): siRNA sense strand
aguucgagagaaagugaaa

SEQ ID NO: 2535751 - RNA, 19 nt, Homo sapiens
  misc_RNA (1)...(19): siRNA sense strand
uuaaagugucagaaggaga

SEQ ID NO: 2535752 - RNA, 19 nt, Homo sapiens
  misc_RNA (1)...(19): siRNA sense strand
uguuaaagugucagaagga

SEQ ID NO: 2535753 - RNA, 19 nt, Homo sapiens
  misc_RNA (1)...(19): siRNA sense strand
gagagaacaagaaagccaa

SEQ ID NO: 2535754 - RNA, 19 nt, Homo sapiens
  misc_RNA (1)...(19): siRNA sense strand
ugaugugguuguagaaaau

SEQ ID NO: 2535755 - RNA, 19 nt, Homo sapiens
  misc_RNA (1)...(19): siRNA sense strand
gcccaaaauguguggauga

SEQ ID NO: 2535756 - RNA, 19 nt, Homo sapiens
  misc_RNA (1)...(19): siRNA sense strand
augaugugguuguagaaaa

SEQ ID NO: 2535757 - RNA, 19 nt, Homo sapiens
  misc_RNA (1)...(19): siRNA sense strand
agagaacaagaaagccaaa

SEQ ID NO: 2535758 - RNA, 19 nt, Homo sapiens
  misc_RNA (1)...(19): siRNA sense strand
ccaagaaggaaaaugucaa

SEQ ID NO: 2535759 - RNA, 19 nt, Homo sapiens
  misc_RNA (1)...(19): siRNA sense strand
ucgauuaacagguggaaag

SEQ ID NO: 2535760 - RNA, 19 nt, Homo sapiens
  misc_RNA (1)...(19): siRNA sense strand
ccaugaugugguuguagaa

SEQ ID NO: 2535761 - RNA, 19 nt, Homo sapiens
  misc_RNA (1)...(19): siRNA sense strand
ugaugagggaauagcuuau

SEQ ID NO: 2535762 - RNA, 19 nt, Homo sapiens
  misc_RNA (1)...(19): siRNA sense strand
cgaaguugacaaaugccua

SEQ ID NO: 2535763 - RNA, 19 nt, Homo sapiens
  misc_RNA (1)...(19): siRNA sense strand
aggagaucacagagaaagu

SEQ ID NO: 2535764 - RNA, 19 nt, Homo sapiens
  misc_RNA (1)...(19): siRNA sense strand
gggaaguagcggagagaac

SEQ ID NO: 2535765 - RNA, 19 nt, Homo sapiens
  misc_RNA (1)...(19): siRNA sense strand
gaauacaaguaguucgaga

SEQ ID NO: 2535766 - RNA, 19 nt, Homo sapiens
  misc_RNA (1)...(19): siRNA sense strand
aaaggagaucacagagaaa

SEQ ID NO: 2535767 - RNA, 19 nt, Homo sapiens
  misc_RNA (1)...(19): siRNA sense strand
ggucaaggauuuaauagau

SEQ ID NO: 2535768 - RNA, 19 nt, Homo sapiens
  misc_RNA (1)...(19): siRNA sense strand
auuuaauagaugaggguca

SEQ ID NO: 2535769 - RNA, 19 nt, Homo sapiens
  misc_RNA (1)...(19): siRNA sense strand
aaauuagugaugagggaau

SEQ ID NO: 2535770 - RNA, 19 nt, Homo sapiens
  misc_RNA (1)...(19): siRNA sense strand
aggaagaagugguugcagu

SEQ ID NO: 2535771 - RNA, 19 nt, Homo sapiens
  misc_RNA (1)...(19): siRNA sense strand
caaaauuagugaugaggga

SEQ ID NO: 2535772 - RNA, 19 nt, Homo sapiens
  misc_RNA (1)...(19): siRNA sense strand
aguucgagagaaagugaaa

SEQ ID NO: 2535773 - RNA, 19 nt, Homo sapiens
  misc_RNA (1)...(19): siRNA sense strand
uuaaagugucagaaggaga

SEQ ID NO: 2535774 - RNA, 19 nt, Homo sapiens
  misc_RNA (1)...(19): siRNA sense strand
uguuaaagugucagaagga

SEQ ID NO: 2535775 - RNA, 19 nt, Homo sapiens
  misc_RNA (1)...(19): siRNA sense strand
ugaugugguuguagaaaau

SEQ ID NO: 2535776 - RNA, 19 nt, Homo sapiens
  misc_RNA (1)...(19): siRNA sense strand
gcccaaaauguguggauga

SEQ ID NO: 2535777 - RNA, 19 nt, Homo sapiens
  misc_RNA (1)...(19): siRNA sense strand
augaugugguuguagaaaa

SEQ ID NO: 2535778 - RNA, 19 nt, Homo sapiens
  misc_RNA (1)...(19): siRNA sense strand
ccaagaaggaaaaugucaa

SEQ ID NO: 2535779 - RNA, 19 nt, Homo sapiens
  misc_RNA (1)...(19): siRNA sense strand
ggauuuaauagaugagggu

SEQ ID NO: 2535780 - RNA, 19 nt, Homo sapiens
  misc_RNA (1)...(19): siRNA sense strand
ucgauuaacagguggaaag

SEQ ID NO: 2535781 - RNA, 19 nt, Homo sapiens
  misc_RNA (1)...(19): siRNA sense strand
ccaugaugugguuguagaa

SEQ ID NO: 2535782 - RNA, 19 nt, Homo sapiens
  misc_RNA (1)...(19): siRNA sense strand
ugaugagggaauagcuuau

SEQ ID NO: 2535783 - RNA, 19 nt, Homo sapiens
  misc_RNA (1)...(19): siRNA sense strand
cgaaguugacaaaugccua

SEQ ID NO: 2535784 - RNA, 19 nt, Homo sapiens
  misc_RNA (1)...(19): siRNA sense strand
aggagaucacagagaaagu

SEQ ID NO: 2535785 - RNA, 19 nt, Homo sapiens
  misc_RNA (1)...(19): siRNA sense strand
uggcagaagaccugugcaa

SEQ ID NO: 2535786 - RNA, 19 nt, Homo sapiens
  misc_RNA (1)...(19): siRNA sense strand
auguuaaaguagagacuca

SEQ ID NO: 2535787 - RNA, 19 nt, Homo sapiens
  misc_RNA (1)...(19): siRNA sense strand
gggaagaaugugcggagga

SEQ ID NO: 2535788 - RNA, 19 nt, Homo sapiens
  misc_RNA (1)...(19): siRNA sense strand
acgagaaggagaacgaaau

SEQ ID NO: 2535789 - RNA, 19 nt, Homo sapiens
  misc_RNA (1)...(19): siRNA sense strand
ccagcuacgagaaggagaa

SEQ ID NO: 2535790 - RNA, 19 nt, Homo sapiens
  misc_RNA (1)...(19): siRNA sense strand
aggagaacgaaaugaugaa

SEQ ID NO: 2535791 - RNA, 19 nt, Homo sapiens
  misc_RNA (1)...(19): siRNA sense strand
aggacagcgccguggagaa

SEQ ID NO: 2535792 - RNA, 19 nt, Homo sapiens
  misc_RNA (1)...(19): siRNA sense strand
acggaaaacuaaaguguga

SEQ ID NO: 2535793 - RNA, 19 nt, Homo sapiens
  misc_RNA (1)...(19): siRNA sense strand
cauaaagagcgcugccaca

SEQ ID NO: 2535794 - RNA, 19 nt, Homo sapiens
  misc_RNA (1)...(19): siRNA sense strand
cagcaaagcuccaagagug

SEQ ID NO: 2535795 - RNA, 19 nt, Homo sapiens
  misc_RNA (1)...(19): siRNA sense strand
gugaaauggcagaagaccu

SEQ ID NO: 2535796 - RNA, 19 nt, Homo sapiens
  misc_RNA (1)...(19): siRNA sense strand
acgaaaugaugaaguccca

SEQ ID NO: 2535797 - RNA, 19 nt, Homo sapiens
  misc_RNA (1)...(19): siRNA sense strand
ugccaagacuccacggaca

SEQ ID NO: 2535798 - RNA, 19 nt, Homo sapiens
  misc_RNA (1)...(19): siRNA sense strand
agcaaagcuccaagaguga

SEQ ID NO: 2535799 - RNA, 19 nt, Homo sapiens
  misc_RNA (1)...(19): siRNA sense strand
cguaagagcucuaugccuc

SEQ ID NO: 2535800 - RNA, 19 nt, Homo sapiens
  misc_RNA (1)...(19): siRNA sense strand
gccaaacguaagagcucua

SEQ ID NO: 2535801 - RNA, 19 nt, Homo sapiens
  misc_RNA (1)...(19): siRNA sense strand
gcgaugagcccaugccgau

SEQ ID NO: 2535802 - RNA, 19 nt, Homo sapiens
  misc_RNA (1)...(19): siRNA sense strand
uacgagaaggagaacgaaa

SEQ ID NO: 2535803 - RNA, 19 nt, Homo sapiens
  misc_RNA (1)...(19): siRNA sense strand
gcacauaacgcgaggggag

SEQ ID NO: 2535804 - RNA, 19 nt, Homo sapiens
  misc_RNA (1)...(19): siRNA sense strand
ugaugaaauuugggagaaa

SEQ ID NO: 2535805 - RNA, 19 nt, Homo sapiens
  misc_RNA (1)...(19): siRNA sense strand
agguagagauuguuggcau

SEQ ID NO: 2535806 - RNA, 19 nt, Homo sapiens
  misc_RNA (1)...(19): siRNA sense strand
aagcaacagaugaggaaaa

SEQ ID NO: 2535807 - RNA, 19 nt, Homo sapiens
  misc_RNA (1)...(19): siRNA sense strand
ccacgaaaacacagggaau

SEQ ID NO: 2535808 - RNA, 19 nt, Homo sapiens
  misc_RNA (1)...(19): siRNA sense strand
cacuagaaaaugaggguua

SEQ ID NO: 2535809 - RNA, 19 nt, Homo sapiens
  misc_RNA (1)...(19): siRNA sense strand
ccuugaagaaauugcagaa

SEQ ID NO: 2535810 - RNA, 19 nt, Homo sapiens
  misc_RNA (1)...(19): siRNA sense strand
aaucugaagaggagcguuu

SEQ ID NO: 2535811 - RNA, 19 nt, Homo sapiens
  misc_RNA (1)...(19): siRNA sense strand
cgucauuggauguuuagaa

SEQ ID NO: 2535812 - RNA, 19 nt, Homo sapiens
  misc_RNA (1)...(19): siRNA sense strand
ggaugaaucugaagaggag

SEQ ID NO: 2535813 - RNA, 19 nt, Homo sapiens
  misc_RNA (1)...(19): siRNA sense strand
auuaagucgccuugaagaa

SEQ ID NO: 2535814 - RNA, 19 nt, Homo sapiens
  misc_RNA (1)...(19): siRNA sense strand
uggcacuuguauuggaauu

SEQ ID NO: 2535815 - RNA, 19 nt, Homo sapiens
  misc_RNA (1)...(19): siRNA sense strand
uugcagaacuuguggcauc

SEQ ID NO: 2535816 - RNA, 19 nt, Homo sapiens
  misc_RNA (1)...(19): siRNA sense strand
ugugaugaaauuugggaga

SEQ ID NO: 2535817 - RNA, 19 nt, Homo sapiens
  misc_RNA (1)...(19): siRNA sense strand
caaccucauuauagaacau

SEQ ID NO: 2535818 - RNA, 19 nt, Homo sapiens
  misc_RNA (1)...(19): siRNA sense strand
cugcauaccagaaacaaca

SEQ ID NO: 2535819 - RNA, 19 nt, Homo sapiens
  misc_RNA (1)...(19): siRNA sense strand
ggagaaaauaugucagguu

SEQ ID NO: 2535820 - RNA, 19 nt, Homo sapiens
  misc_RNA (1)...(19): siRNA sense strand
ugacagauuuguuugcaca

SEQ ID NO: 2535821 - RNA, 19 nt, Homo sapiens
  misc_RNA (1)...(19): siRNA sense strand
gaugaaauuugggagaaaa

SEQ ID NO: 2535822 - RNA, 19 nt, Homo sapiens
  misc_RNA (1)...(19): siRNA sense strand
ugugugaagauuuggaaaa

SEQ ID NO: 2535823 - RNA, 19 nt, Homo sapiens
  misc_RNA (1)...(19): siRNA sense strand
uggaaaauauugaaggacu

SEQ ID NO: 2535824 - RNA, 19 nt, Homo sapiens
  misc_RNA (1)...(19): siRNA sense strand
ggaaaauauugaaggacug

SEQ ID NO: 2535825 - RNA, 19 nt, Homo sapiens
  misc_RNA (1)...(19): siRNA sense strand
acaacuaacagaugaagca

SEQ ID NO: 2535826 - RNA, 19 nt, Homo sapiens
  misc_RNA (1)...(19): siRNA sense strand
auccaugguacgagaguuu

SEQ ID NO: 2535827 - RNA, 19 nt, Homo sapiens
  misc_RNA (1)...(19): siRNA sense strand
uaguugacccagagaacau

SEQ ID NO: 2535828 - RNA, 19 nt, Homo sapiens
  misc_RNA (1)...(19): siRNA sense strand
acaacagaaugaugaugau

SEQ ID NO: 2535829 - RNA, 19 nt, Homo sapiens
  misc_RNA (1)...(19): siRNA sense strand
gugugugaagauuuggaaa

SEQ ID NO: 2535830 - RNA, 19 nt, Homo sapiens
  misc_RNA (1)...(19): siRNA sense strand
cagggaauuucuaacaaaa

SEQ ID NO: 2535831 - RNA, 19 nt, Homo sapiens
  misc_RNA (1)...(19): siRNA sense strand
gguagagauuguuggcaug

SEQ ID NO: 2535832 - RNA, 19 nt, Homo sapiens
  misc_RNA (1)...(19): siRNA sense strand
aagugcugcuacugauaua

SEQ ID NO: 2535833 - RNA, 19 nt, Homo sapiens
  misc_RNA (1)...(19): siRNA sense strand
aggcacaacagaaugauga

SEQ ID NO: 2535834 - RNA, 19 nt, Homo sapiens
  misc_RNA (1)...(19): siRNA sense strand
agcuggaugugaugaaauu

SEQ ID NO: 2535835 - RNA, 19 nt, Homo sapiens
  misc_RNA (1)...(19): siRNA sense strand
ugaugaaauuugggagaaa

SEQ ID NO: 2535836 - RNA, 19 nt, Homo sapiens
  misc_RNA (1)...(19): siRNA sense strand
guuugaaccaguagugaaa

SEQ ID NO: 2535837 - RNA, 19 nt, Homo sapiens
  misc_RNA (1)...(19): siRNA sense strand
augaugaggaugaagauaa

SEQ ID NO: 2535838 - RNA, 19 nt, Homo sapiens
  misc_RNA (1)...(19): siRNA sense strand
acaacaaagagaaaggcaa

SEQ ID NO: 2535839 - RNA, 19 nt, Homo sapiens
  misc_RNA (1)...(19): siRNA sense strand
aggaugaagauaaggaaga

SEQ ID NO: 2535840 - RNA, 19 nt, Homo sapiens
  misc_RNA (1)...(19): siRNA sense strand
agguagagauuguuggcau

SEQ ID NO: 2535841 - RNA, 19 nt, Homo sapiens
  misc_RNA (1)...(19): siRNA sense strand
ugacauggaagauggagaa

SEQ ID NO: 2535842 - RNA, 19 nt, Homo sapiens
  misc_RNA (1)...(19): siRNA sense strand
aagcaacagaugaggaaaa

SEQ ID NO: 2535843 - RNA, 19 nt, Homo sapiens
  misc_RNA (1)...(19): siRNA sense strand
ccacgaaaacacagggaau

SEQ ID NO: 2535844 - RNA, 19 nt, Homo sapiens
  misc_RNA (1)...(19): siRNA sense strand
aagagaaaggcaagauaau

SEQ ID NO: 2535845 - RNA, 19 nt, Homo sapiens
  misc_RNA (1)...(19): siRNA sense strand
agauaaggaagauacguua

SEQ ID NO: 2535846 - RNA, 19 nt, Homo sapiens
  misc_RNA (1)...(19): siRNA sense strand
cacuagaaaaugaggguua

SEQ ID NO: 2535847 - RNA, 19 nt, Homo sapiens
  misc_RNA (1)...(19): siRNA sense strand
ccuugaagaaauugcagaa

SEQ ID NO: 2535848 - RNA, 19 nt, Homo sapiens
  misc_RNA (1)...(19): siRNA sense strand
gguuuaacacagaugaaga

SEQ ID NO: 2535849 - RNA, 19 nt, Homo sapiens
  misc_RNA (1)...(19): siRNA sense strand
aaucugaagaggagcguuu

SEQ ID NO: 2535850 - RNA, 19 nt, Homo sapiens
  misc_RNA (1)...(19): siRNA sense strand
ugaagaugaugaugaggau

SEQ ID NO: 2535851 - RNA, 19 nt, Homo sapiens
  misc_RNA (1)...(19): siRNA sense strand
cacuagaagaugaagaaga

SEQ ID NO: 2535852 - RNA, 19 nt, Homo sapiens
  misc_RNA (1)...(19): siRNA sense strand
augaagaugacauggaaga

SEQ ID NO: 2535853 - RNA, 19 nt, Homo sapiens
  misc_RNA (1)...(19): siRNA sense strand
aagaugaugaugaggauga

SEQ ID NO: 2535854 - RNA, 19 nt, Homo sapiens
  misc_RNA (1)...(19): siRNA sense strand
cgucauuggauguuuagaa

SEQ ID NO: 2535855 - RNA, 19 nt, Homo sapiens
  misc_RNA (1)...(19): siRNA sense strand
gaacacuagaagaugaaga

SEQ ID NO: 2535856 - RNA, 19 nt, Homo sapiens
  misc_RNA (1)...(19): siRNA sense strand
ccauaauagagauguuuga

SEQ ID NO: 2535857 - RNA, 19 nt, Homo sapiens
  misc_RNA (1)...(19): siRNA sense strand
caacaaagagaaaggcaag

SEQ ID NO: 2535858 - RNA, 19 nt, Homo sapiens
  misc_RNA (1)...(19): siRNA sense strand
ggaugaaucugaagaggag

SEQ ID NO: 2535859 - RNA, 19 nt, Homo sapiens
  misc_RNA (1)...(19): siRNA sense strand
cagaacacuagaagaugaa

SEQ ID NO: 2535860 - RNA, 19 nt, Homo sapiens
  misc_RNA (1)...(19): siRNA sense strand
auuaagucgccuugaagaa

SEQ ID NO: 2535861 - RNA, 19 nt, Homo sapiens
  misc_RNA (1)...(19): siRNA sense strand
acugagauuugaacaacaa

SEQ ID NO: 2535862 - RNA, 19 nt, Homo sapiens
  misc_RNA (1)...(19): siRNA sense strand
acacagaugaagaugacau

SEQ ID NO: 2535863 - RNA, 19 nt, Homo sapiens
  misc_RNA (1)...(19): siRNA sense strand
gaugaagauaaggaagaua

SEQ ID NO: 2535864 - RNA, 19 nt, Homo sapiens
  misc_RNA (1)...(19): siRNA sense strand
uggcacuuguauuggaauu

SEQ ID NO: 2535865 - RNA, 19 nt, Homo sapiens
  misc_RNA (1)...(19): siRNA sense strand
uugcagaacuuguggcauc

SEQ ID NO: 2535866 - RNA, 19 nt, Homo sapiens
  misc_RNA (1)...(19): siRNA sense strand
acuggaaagcacuggaaga

SEQ ID NO: 2535867 - RNA, 19 nt, Homo sapiens
  misc_RNA (1)...(19): siRNA sense strand
ugccagaacacuagaagau

SEQ ID NO: 2535868 - RNA, 19 nt, Homo sapiens
  misc_RNA (1)...(19): siRNA sense strand
ugugaugaaauuugggaga

SEQ ID NO: 2535869 - RNA, 19 nt, Homo sapiens
  misc_RNA (1)...(19): siRNA sense strand
caaccucauuauagaacau

SEQ ID NO: 2535870 - RNA, 19 nt, Homo sapiens
  misc_RNA (1)...(19): siRNA sense strand
cacuggaagauguagauua

SEQ ID NO: 2535871 - RNA, 19 nt, Homo sapiens
  misc_RNA (1)...(19): siRNA sense strand
cugccauaauagagauguu

SEQ ID NO: 2535872 - RNA, 19 nt, Homo sapiens
  misc_RNA (1)...(19): siRNA sense strand
aagagaugccagaacacua

SEQ ID NO: 2535873 - RNA, 19 nt, Homo sapiens
  misc_RNA (1)...(19): siRNA sense strand
cauggaagauggagaagcu

SEQ ID NO: 2535874 - RNA, 19 nt, Homo sapiens
  misc_RNA (1)...(19): siRNA sense strand
ggagaaaauaugucagguu

SEQ ID NO: 2535875 - RNA, 19 nt, Homo sapiens
  misc_RNA (1)...(19): siRNA sense strand
ugacagauuuguuugcaca

SEQ ID NO: 2535876 - RNA, 19 nt, Homo sapiens
  misc_RNA (1)...(19): siRNA sense strand
aucccaaacuugacaguau

SEQ ID NO: 2535877 - RNA, 19 nt, Homo sapiens
  misc_RNA (1)...(19): siRNA sense strand
uagaagaugaagaagagau

SEQ ID NO: 2535878 - RNA, 19 nt, Homo sapiens
  misc_RNA (1)...(19): siRNA sense strand
cugcauaccagaaacaaca

SEQ ID NO: 2535879 - RNA, 19 nt, Homo sapiens
  misc_RNA (1)...(19): siRNA sense strand
gaugaaauuugggagaaaa

SEQ ID NO: 2535880 - RNA, 19 nt, Homo sapiens
  misc_RNA (1)...(19): siRNA sense strand
ugugugaagauuuggaaaa

SEQ ID NO: 2535881 - RNA, 19 nt, Homo sapiens
  misc_RNA (1)...(19): siRNA sense strand
uggaaaauauugaaggacu

SEQ ID NO: 2535882 - RNA, 19 nt, Homo sapiens
  misc_RNA (1)...(19): siRNA sense strand
ggaaaauauugaaggacug

SEQ ID NO: 2535883 - RNA, 19 nt, Homo sapiens
  misc_RNA (1)...(19): siRNA sense strand
ggaacgaagacuaaccuca

SEQ ID NO: 2535884 - RNA, 19 nt, Homo sapiens
  misc_RNA (1)...(19): siRNA sense strand
ccaaagaucuggugcagga

SEQ ID NO: 2535885 - RNA, 19 nt, Homo sapiens
  misc_RNA (1)...(19): siRNA sense strand
ggucacugaagcagaggaa

SEQ ID NO: 2535886 - RNA, 19 nt, Homo sapiens
  misc_RNA (1)...(19): siRNA sense strand
agggagaaaugcugaaaau

SEQ ID NO: 2535887 - RNA, 19 nt, Homo sapiens
  misc_RNA (1)...(19): siRNA sense strand
ccucguggucagaagagua

SEQ ID NO: 2535888 - RNA, 19 nt, Homo sapiens
  misc_RNA (1)...(19): siRNA sense strand
cugaagcagaggaagaaga

SEQ ID NO: 2535889 - RNA, 19 nt, Homo sapiens
  misc_RNA (1)...(19): siRNA sense strand
gcacucagucuuuggggaa

SEQ ID NO: 2535890 - RNA, 19 nt, Homo sapiens
  misc_RNA (1)...(19): siRNA sense strand
aagaucuggugcaggaaaa

SEQ ID NO: 2535891 - RNA, 19 nt, Homo sapiens
  misc_RNA (1)...(19): siRNA sense strand
cguuacaaagggagaaaug

SEQ ID NO: 2535892 - RNA, 19 nt, Homo sapiens
  misc_RNA (1)...(19): siRNA sense strand
ugaaagaugaagagaaagc

SEQ ID NO: 2535893 - RNA, 19 nt, Homo sapiens
  misc_RNA (1)...(19): siRNA sense strand
gcaucugccuggaguguaa

SEQ ID NO: 2535894 - RNA, 19 nt, Homo sapiens
  misc_RNA (1)...(19): siRNA sense strand
gcgacgagcaggugagcau

SEQ ID NO: 2535895 - RNA, 19 nt, Homo sapiens
  misc_RNA (1)...(19): siRNA sense strand
aggagaagccggaggagga

SEQ ID NO: 2535896 - RNA, 19 nt, Homo sapiens
  misc_RNA (1)...(19): siRNA sense strand
augagaaagcagagggagu

SEQ ID NO: 2535897 - RNA, 19 nt, Homo sapiens
  misc_RNA (1)...(19): siRNA sense strand
gcggaaaugagaaagcaga

SEQ ID NO: 2535898 - RNA, 19 nt, Homo sapiens
  misc_RNA (1)...(19): siRNA sense strand
aagaucaagcugugggaca

SEQ ID NO: 2535899 - RNA, 19 nt, Homo sapiens
  misc_RNA (1)...(19): siRNA sense strand
agaucaagcugugggacau

SEQ ID NO: 2535900 - RNA, 19 nt, Homo sapiens
  misc_RNA (1)...(19): siRNA sense strand
gggcugaagcggaagugga

SEQ ID NO: 2535901 - RNA, 19 nt, Homo sapiens
  misc_RNA (1)...(19): siRNA sense strand
ccuuuaacgagcuggacau

SEQ ID NO: 2535902 - RNA, 19 nt, Homo sapiens
  misc_RNA (1)...(19): siRNA sense strand
aguaccuggaggagaacaa

SEQ ID NO: 2535903 - RNA, 19 nt, Homo sapiens
  misc_RNA (1)...(19): siRNA sense strand
gguaaagaagugaggguac

SEQ ID NO: 2535904 - RNA, 19 nt, Homo sapiens
  misc_RNA (1)...(19): siRNA sense strand
ucacagggaaaguggaaaa

SEQ ID NO: 2535905 - RNA, 19 nt, Homo sapiens
  misc_RNA (1)...(19): siRNA sense strand
gggaaguauuuggagaaaa

SEQ ID NO: 2535906 - RNA, 19 nt, Homo sapiens
  misc_RNA (1)...(19): siRNA sense strand
gagauggagcuguugggaa

SEQ ID NO: 2535907 - RNA, 19 nt, Homo sapiens
  misc_RNA (1)...(19): siRNA sense strand
gcggauugucucaggaagu

SEQ ID NO: 2535908 - RNA, 19 nt, Homo sapiens
  misc_RNA (1)...(19): siRNA sense strand
cacgggacacagugggaaa

SEQ ID NO: 2535909 - RNA, 19 nt, Homo sapiens
  misc_RNA (1)...(19): siRNA sense strand
cagucgaacaggaugauga

SEQ ID NO: 2535910 - RNA, 19 nt, Homo sapiens
  misc_RNA (1)...(19): siRNA sense strand
gcuaaaaguuauugaucuc

SEQ ID NO: 2535911 - RNA, 19 nt, Homo sapiens
  misc_RNA (1)...(19): siRNA sense strand
uugggaaguauuuggagaa

SEQ ID NO: 2535912 - RNA, 19 nt, Homo sapiens
  misc_RNA (1)...(19): siRNA sense strand
ucgaacaggaugaugacau

SEQ ID NO: 2535913 - RNA, 19 nt, Homo sapiens
  misc_RNA (1)...(19): siRNA sense strand
ucauccugguucugguaaa

SEQ ID NO: 2535914 - RNA, 19 nt, Homo sapiens
  misc_RNA (1)...(19): siRNA sense strand
gcauaguucgagagaugga

SEQ ID NO: 2535915 - RNA, 19 nt, Homo sapiens
  misc_RNA (1)...(19): siRNA sense strand
aguuauugaucuccgaaca

SEQ ID NO: 2535916 - RNA, 19 nt, Homo sapiens
  misc_RNA (1)...(19): siRNA sense strand
ucucaaacucugggaucua

SEQ ID NO: 2535917 - RNA, 19 nt, Homo sapiens
  misc_RNA (1)...(19): siRNA sense strand
gcuaaguuccugcuggaca

SEQ ID NO: 2535918 - RNA, 19 nt, Homo sapiens
  misc_RNA (1)...(19): siRNA sense strand
cagagagcauaguucgaga

SEQ ID NO: 2535919 - RNA, 19 nt, Homo sapiens
  misc_RNA (1)...(19): siRNA sense strand
gguaaagaagugaggguac

SEQ ID NO: 2535920 - RNA, 19 nt, Homo sapiens
  misc_RNA (1)...(19): siRNA sense strand
ucacagggaaaguggaaaa

SEQ ID NO: 2535921 - RNA, 19 nt, Homo sapiens
  misc_RNA (1)...(19): siRNA sense strand
gggaaguauuuggagaaaa

SEQ ID NO: 2535922 - RNA, 19 nt, Homo sapiens
  misc_RNA (1)...(19): siRNA sense strand
gagauggagcuguugggaa

SEQ ID NO: 2535923 - RNA, 19 nt, Homo sapiens
  misc_RNA (1)...(19): siRNA sense strand
gcggauugucucaggaagu

SEQ ID NO: 2535924 - RNA, 19 nt, Homo sapiens
  misc_RNA (1)...(19): siRNA sense strand
cacgggacacagugggaaa

SEQ ID NO: 2535925 - RNA, 19 nt, Homo sapiens
  misc_RNA (1)...(19): siRNA sense strand
cagucgaacaggaugauga

SEQ ID NO: 2535926 - RNA, 19 nt, Homo sapiens
  misc_RNA (1)...(19): siRNA sense strand
gcuaaaaguuauugaucuc

SEQ ID NO: 2535927 - RNA, 19 nt, Homo sapiens
  misc_RNA (1)...(19): siRNA sense strand
uugggaaguauuuggagaa

SEQ ID NO: 2535928 - RNA, 19 nt, Homo sapiens
  misc_RNA (1)...(19): siRNA sense strand
ucgaacaggaugaugacau

SEQ ID NO: 2535929 - RNA, 19 nt, Homo sapiens
  misc_RNA (1)...(19): siRNA sense strand
ucauccugguucugguaaa

SEQ ID NO: 2535930 - RNA, 19 nt, Homo sapiens
  misc_RNA (1)...(19): siRNA sense strand
gcauaguucgagagaugga

SEQ ID NO: 2535931 - RNA, 19 nt, Homo sapiens
  misc_RNA (1)...(19): siRNA sense strand
aguuauugaucuccgaaca

SEQ ID NO: 2535932 - RNA, 19 nt, Homo sapiens
  misc_RNA (1)...(19): siRNA sense strand
ucucaaacucugggaucua

SEQ ID NO: 2535933 - RNA, 19 nt, Homo sapiens
  misc_RNA (1)...(19): siRNA sense strand
gcuaaguuccugcuggaca

SEQ ID NO: 2535934 - RNA, 19 nt, Homo sapiens
  misc_RNA (1)...(19): siRNA sense strand
cagagagcauaguucgaga

SEQ ID NO: 2535935 - RNA, 19 nt, Homo sapiens
  misc_RNA (1)...(19): siRNA sense strand
ucacagggaaaguggaaaa

SEQ ID NO: 2535936 - RNA, 19 nt, Homo sapiens
  misc_RNA (1)...(19): siRNA sense strand
gggaaguauuuggagaaaa

SEQ ID NO: 2535937 - RNA, 19 nt, Homo sapiens
  misc_RNA (1)...(19): siRNA sense strand
gagauggagcuguugggaa

SEQ ID NO: 2535938 - RNA, 19 nt, Homo sapiens
  misc_RNA (1)...(19): siRNA sense strand
gcggauugucucaggaagu

SEQ ID NO: 2535939 - RNA, 19 nt, Homo sapiens
  misc_RNA (1)...(19): siRNA sense strand
cacgggacacagugggaaa

SEQ ID NO: 2535940 - RNA, 19 nt, Homo sapiens
  misc_RNA (1)...(19): siRNA sense strand
gcuaaaaguuauugaucuc

SEQ ID NO: 2535941 - RNA, 19 nt, Homo sapiens
  misc_RNA (1)...(19): siRNA sense strand
uugggaaguauuuggagaa

SEQ ID NO: 2535942 - RNA, 19 nt, Homo sapiens
  misc_RNA (1)...(19): siRNA sense strand
gcauaguucgagagaugga

SEQ ID NO: 2535943 - RNA, 19 nt, Homo sapiens
  misc_RNA (1)...(19): siRNA sense strand
aguuauugaucuccgaaca

SEQ ID NO: 2535944 - RNA, 19 nt, Homo sapiens
  misc_RNA (1)...(19): siRNA sense strand
ucucaaacucugggaucua

SEQ ID NO: 2535945 - RNA, 19 nt, Homo sapiens
  misc_RNA (1)...(19): siRNA sense strand
gcuaaguuccugcuggaca

SEQ ID NO: 2535946 - RNA, 19 nt, Homo sapiens
  misc_RNA (1)...(19): siRNA sense strand
cagagagcauaguucgaga

SEQ ID NO: 2535947 - RNA, 19 nt, Homo sapiens
  misc_RNA (1)...(19): siRNA sense strand
auuacaaggccaugaggaa

SEQ ID NO: 2535948 - RNA, 19 nt, Homo sapiens
  misc_RNA (1)...(19): siRNA sense strand
guucagagcuggugggcug

SEQ ID NO: 2535949 - RNA, 19 nt, Homo sapiens
  misc_RNA (1)...(19): siRNA sense strand
acacggaacugucggguca

SEQ ID NO: 2535950 - RNA, 19 nt, Homo sapiens
  misc_RNA (1)...(19): siRNA sense strand
aagcacaggacgaugggaa

SEQ ID NO: 2535951 - RNA, 19 nt, Homo sapiens
  misc_RNA (1)...(19): siRNA sense strand
gcgcaugggcauugcagga

SEQ ID NO: 2535952 - RNA, 19 nt, Homo sapiens
  misc_RNA (1)...(19): siRNA sense strand
uugcaggaguggugaggga

SEQ ID NO: 2535953 - RNA, 19 nt, Homo sapiens
  misc_RNA (1)...(19): siRNA sense strand
agucggaccugguggggaa

SEQ ID NO: 2535954 - RNA, 19 nt, Homo sapiens
  misc_RNA (1)...(19): siRNA sense strand
gcaggaguggugagggaca

SEQ ID NO: 2535955 - RNA, 19 nt, Homo sapiens
  misc_RNA (1)...(19): siRNA sense strand
ccaugaggaagcugaugaa

SEQ ID NO: 2535956 - RNA, 19 nt, Homo sapiens
  misc_RNA (1)...(19): siRNA sense strand
caggaguggugagggacaa

SEQ ID NO: 2535957 - RNA, 19 nt, Homo sapiens
  misc_RNA (1)...(19): siRNA sense strand
agcuguaugugauggaaau

SEQ ID NO: 2535958 - RNA, 19 nt, Homo sapiens
  misc_RNA (1)...(19): siRNA sense strand
auuaugaagaagcggaaga

SEQ ID NO: 2535959 - RNA, 19 nt, Homo sapiens
  misc_RNA (1)...(19): siRNA sense strand
caucacaauuacaaggcca

SEQ ID NO: 2535960 - RNA, 19 nt, Homo sapiens
  misc_RNA (1)...(19): siRNA sense strand
aagcuguaugugauggaaa

SEQ ID NO: 2535961 - RNA, 19 nt, Homo sapiens
  misc_RNA (1)...(19): siRNA sense strand
aggagugggagaacaacaa

SEQ ID NO: 2535962 - RNA, 19 nt, Homo sapiens
  misc_RNA (1)...(19): siRNA sense strand
ucaaguggaugaagcggau

SEQ ID NO: 2535963 - RNA, 19 nt, Homo sapiens
  misc_RNA (1)...(19): siRNA sense strand
gggaaauggaacagguuau

SEQ ID NO: 2535964 - RNA, 19 nt, Homo sapiens
  misc_RNA (1)...(19): siRNA sense strand
aaggagaggucuaaggcaa

SEQ ID NO: 2535965 - RNA, 19 nt, Homo sapiens
  misc_RNA (1)...(19): siRNA sense strand
aagaaagggcagaagccaa

SEQ ID NO: 2535966 - RNA, 19 nt, Homo sapiens
  misc_RNA (1)...(19): siRNA sense strand
ggaaaucauucauagcaga

SEQ ID NO: 2535967 - RNA, 19 nt, Homo sapiens
  misc_RNA (1)...(19): siRNA sense strand
uagcagauguggagcccau

SEQ ID NO: 2535968 - RNA, 19 nt, Homo sapiens
  misc_RNA (1)...(19): siRNA sense strand
caggaauuuaacuaggaaa

SEQ ID NO: 2535969 - RNA, 19 nt, Homo sapiens
  misc_RNA (1)...(19): siRNA sense strand
aggagaggucuaaggcaau

SEQ ID NO: 2535970 - RNA, 19 nt, Homo sapiens
  misc_RNA (1)...(19): siRNA sense strand
ggcuggaccuggagaaaau

SEQ ID NO: 2535971 - RNA, 19 nt, Homo sapiens
  misc_RNA (1)...(19): siRNA sense strand
agaaaauugcccuggagua

SEQ ID NO: 2535972 - RNA, 19 nt, Homo sapiens
  misc_RNA (1)...(19): siRNA sense strand
uggacaacuuccugggcga

SEQ ID NO: 2535973 - RNA, 19 nt, Homo sapiens
  misc_RNA (1)...(19): siRNA sense strand
caagcuacauggugggauc

SEQ ID NO: 2535974 - RNA, 19 nt, Homo sapiens
  misc_RNA (1)...(19): siRNA sense strand
gugcagcccucuuacgcaa

SEQ ID NO: 2535975 - RNA, 19 nt, Homo sapiens
  misc_RNA (1)...(19): siRNA sense strand
uggugaaacaaguaagaaa

SEQ ID NO: 2535976 - RNA, 19 nt, Homo sapiens
  misc_RNA (1)...(19): siRNA sense strand
cuuaaaggaagcagaaaau

SEQ ID NO: 2535977 - RNA, 19 nt, Homo sapiens
  misc_RNA (1)...(19): siRNA sense strand
cugaaaugcaucugggacu

SEQ ID NO: 2535978 - RNA, 19 nt, Homo sapiens
  misc_RNA (1)...(19): siRNA sense strand
cugucaagcacaucagcaa

SEQ ID NO: 2535979 - RNA, 19 nt, Homo sapiens
  misc_RNA (1)...(19): siRNA sense strand
gguuauggggcuugcuuaa

SEQ ID NO: 2535980 - RNA, 19 nt, Homo sapiens
  misc_RNA (1)...(19): siRNA sense strand
ccauggaagaacugcugaa

SEQ ID NO: 2535981 - RNA, 19 nt, Homo sapiens
  misc_RNA (1)...(19): siRNA sense strand
gguaaaagucugugcccca

SEQ ID NO: 2535982 - RNA, 19 nt, Homo sapiens
  misc_RNA (1)...(19): siRNA sense strand
agucuguccuuaugcgaau

SEQ ID NO: 2535983 - RNA, 19 nt, Homo sapiens
  misc_RNA (1)...(19): siRNA sense strand
cuguaauugcuaauggaga

SEQ ID NO: 2535984 - RNA, 19 nt, Homo sapiens
  misc_RNA (1)...(19): siRNA sense strand
cgauauucaaaguuggcuu

SEQ ID NO: 2535985 - RNA, 19 nt, Homo sapiens
  misc_RNA (1)...(19): siRNA sense strand
ucguauagucuguccuuau

SEQ ID NO: 2535986 - RNA, 19 nt, Homo sapiens
  misc_RNA (1)...(19): siRNA sense strand
ugaagaaagacaucagcca

SEQ ID NO: 2535987 - RNA, 19 nt, Homo sapiens
  misc_RNA (1)...(19): siRNA sense strand
ccauuaugcccaaggacau

SEQ ID NO: 2535988 - RNA, 19 nt, Homo sapiens
  misc_RNA (1)...(19): siRNA sense strand
ugaagaagccgcaccgcua

SEQ ID NO: 2535989 - RNA, 19 nt, Homo sapiens
  misc_RNA (1)...(19): siRNA sense strand
aggaauaacuacauagcca

SEQ ID NO: 2535990 - RNA, 19 nt, Homo sapiens
  misc_RNA (1)...(19): siRNA sense strand
aagccaggaugaagggaga

SEQ ID NO: 2535991 - RNA, 19 nt, Homo sapiens
  misc_RNA (1)...(19): siRNA sense strand
gcagaaagaguuaaggaag

SEQ ID NO: 2535992 - RNA, 19 nt, Homo sapiens
  misc_RNA (1)...(19): siRNA sense strand
cagaaagaguuaaggaagg

SEQ ID NO: 2535993 - RNA, 19 nt, Homo sapiens
  misc_RNA (1)...(19): siRNA sense strand
augaagggagacugggcaa

SEQ ID NO: 2535994 - RNA, 19 nt, Homo sapiens
  misc_RNA (1)...(19): siRNA sense strand
ugcagaaagaguuaaggaa

SEQ ID NO: 2535995 - RNA, 19 nt, Homo sapiens
  misc_RNA (1)...(19): siRNA sense strand
aggaauaacuacauagcca

SEQ ID NO: 2535996 - RNA, 19 nt, Homo sapiens
  misc_RNA (1)...(19): siRNA sense strand
aagccaggaugaagggaga

SEQ ID NO: 2535997 - RNA, 19 nt, Homo sapiens
  misc_RNA (1)...(19): siRNA sense strand
gcagaaagaguuaaggaag

SEQ ID NO: 2535998 - RNA, 19 nt, Homo sapiens
  misc_RNA (1)...(19): siRNA sense strand
cagaaagaguuaaggaagg

SEQ ID NO: 2535999 - RNA, 19 nt, Homo sapiens
  misc_RNA (1)...(19): siRNA sense strand
augaagggagacugggcaa

SEQ ID NO: 2536000 - RNA, 19 nt, Homo sapiens
  misc_RNA (1)...(19): siRNA sense strand
ugcagaaagaguuaaggaa

SEQ ID NO: 2536001 - RNA, 19 nt, Homo sapiens
  misc_RNA (1)...(19): siRNA sense strand
gggagaaauuguaacgaga

SEQ ID NO: 2536002 - RNA, 19 nt, Homo sapiens
  misc_RNA (1)...(19): siRNA sense strand
ccaacaaaugucaggaaaa

SEQ ID NO: 2536003 - RNA, 19 nt, Homo sapiens
  misc_RNA (1)...(19): siRNA sense strand
ccgcuauuacuaugagaaa

SEQ ID NO: 2536004 - RNA, 19 nt, Homo sapiens
  misc_RNA (1)...(19): siRNA sense strand
agacagacauggaacguca

SEQ ID NO: 2536005 - RNA, 19 nt, Homo sapiens
  misc_RNA (1)...(19): siRNA sense strand
cuuucaagaucuaagucaa

SEQ ID NO: 2536006 - RNA, 19 nt, Homo sapiens
  misc_RNA (1)...(19): siRNA sense strand
gagaaaagugccuguacaa

SEQ ID NO: 2536007 - RNA, 19 nt, Homo sapiens
  misc_RNA (1)...(19): siRNA sense strand
ggcucaugauucagaagaa

SEQ ID NO: 2536008 - RNA, 19 nt, Homo sapiens
  misc_RNA (1)...(19): siRNA sense strand
caauagucagcgugggaga

SEQ ID NO: 2536009 - RNA, 19 nt, Homo sapiens
  misc_RNA (1)...(19): siRNA sense strand
agucagcgugggagaaauu

SEQ ID NO: 2536010 - RNA, 19 nt, Homo sapiens
  misc_RNA (1)...(19): siRNA sense strand
auaccaacggcgaggauca

SEQ ID NO: 2536011 - RNA, 19 nt, Homo sapiens
  misc_RNA (1)...(19): siRNA sense strand
ucugaugauuaaacaggaa

SEQ ID NO: 2536012 - RNA, 19 nt, Homo sapiens
  misc_RNA (1)...(19): siRNA sense strand
cugacaaugaugagcaguu

SEQ ID NO: 2536013 - RNA, 19 nt, Homo sapiens
  misc_RNA (1)...(19): siRNA sense strand
ggagaaaagugccuguaca

SEQ ID NO: 2536014 - RNA, 19 nt, Homo sapiens
  misc_RNA (1)...(19): siRNA sense strand
agacaucaaacaagagcca

SEQ ID NO: 2536015 - RNA, 19 nt, Homo sapiens
  misc_RNA (1)...(19): siRNA sense strand
cacugaaaaucaagaaaga

SEQ ID NO: 2536016 - RNA, 19 nt, Homo sapiens
  misc_RNA (1)...(19): siRNA sense strand
aauuguaacgagaaaccaa

SEQ ID NO: 2536017 - RNA, 19 nt, Homo sapiens
  misc_RNA (1)...(19): siRNA sense strand
agucaagaacagcccuuua

SEQ ID NO: 2536018 - RNA, 19 nt, Homo sapiens
  misc_RNA (1)...(19): siRNA sense strand
agguggcuggagagagaua

SEQ ID NO: 2536019 - RNA, 19 nt, Homo sapiens
  misc_RNA (1)...(19): siRNA sense strand
acaaaugucaggaaaagaa

SEQ ID NO: 2536020 - RNA, 19 nt, Homo sapiens
  misc_RNA (1)...(19): siRNA sense strand
ucaaacaagagccaggaau

SEQ ID NO: 2536021 - RNA, 19 nt, Homo sapiens
  misc_RNA (1)...(19): siRNA sense strand
gaggaugcucugagggaga

SEQ ID NO: 2536022 - RNA, 19 nt, Homo sapiens
  misc_RNA (1)...(19): siRNA sense strand
cuuugagauugcugggauu

SEQ ID NO: 2536023 - RNA, 19 nt, Homo sapiens
  misc_RNA (1)...(19): siRNA sense strand
acuuugaaauugagcgcuu

SEQ ID NO: 2536024 - RNA, 19 nt, Homo sapiens
  misc_RNA (1)...(19): siRNA sense strand
gaucgagacuacaaggcca

SEQ ID NO: 2536025 - RNA, 19 nt, Homo sapiens
  misc_RNA (1)...(19): siRNA sense strand
aauugagcgcuuugagauu

SEQ ID NO: 2536026 - RNA, 19 nt, Homo sapiens
  misc_RNA (1)...(19): siRNA sense strand
caggagaaguucaagugca

SEQ ID NO: 2536027 - RNA, 19 nt, Homo sapiens
  misc_RNA (1)...(19): siRNA sense strand
ggcgagaacgugaaggcau

SEQ ID NO: 2536028 - RNA, 19 nt, Homo sapiens
  misc_RNA (1)...(19): siRNA sense strand
gcuuugagauugcugggau

SEQ ID NO: 2536029 - RNA, 19 nt, Homo sapiens
  misc_RNA (1)...(19): siRNA sense strand
caaaccaacaccagggcaa

SEQ ID NO: 2536030 - RNA, 19 nt, Homo sapiens
  misc_RNA (1)...(19): siRNA sense strand
agaucaaagauauggugaa

SEQ ID NO: 2536031 - RNA, 19 nt, Homo sapiens
  misc_RNA (1)...(19): siRNA sense strand
aagaagaagaagaccaaaa

SEQ ID NO: 2536032 - RNA, 19 nt, Homo sapiens
  misc_RNA (1)...(19): siRNA sense strand
ccgaagaggccgaacccau

SEQ ID NO: 2536033 - RNA, 19 nt, Homo sapiens
  misc_RNA (1)...(19): siRNA sense strand
cguuauuggacuggugaua

SEQ ID NO: 2536034 - RNA, 19 nt, Homo sapiens
  misc_RNA (1)...(19): siRNA sense strand
agaggauccaagaagaaua

SEQ ID NO: 2536035 - RNA, 19 nt, Homo sapiens
  misc_RNA (1)...(19): siRNA sense strand
ggugaaagcuggccuggga

SEQ ID NO: 2536036 - RNA, 19 nt, Homo sapiens
  misc_RNA (1)...(19): siRNA sense strand
gaagaagaccaaaagggaa

SEQ ID NO: 2536037 - RNA, 19 nt, Homo sapiens
  misc_RNA (1)...(19): siRNA sense strand
agaaugauggagagaacca

SEQ ID NO: 2536038 - RNA, 19 nt, Homo sapiens
  misc_RNA (1)...(19): siRNA sense strand
cggaguacuucaagaacac

SEQ ID NO: 2536039 - RNA, 19 nt, Homo sapiens
  misc_RNA (1)...(19): siRNA sense strand
guccauugucacugaguuu

SEQ ID NO: 2536040 - RNA, 19 nt, Homo sapiens
  misc_RNA (1)...(19): siRNA sense strand
cugagcaagaagaagaaga

SEQ ID NO: 2536041 - RNA, 19 nt, Homo sapiens
  misc_RNA (1)...(19): siRNA sense strand
augaagaguccaacgcaga

SEQ ID NO: 2536042 - RNA, 19 nt, Homo sapiens
  misc_RNA (1)...(19): siRNA sense strand
agcaagaagaagaagacca

SEQ ID NO: 2536043 - RNA, 19 nt, Homo sapiens
  misc_RNA (1)...(19): siRNA sense strand
augaggagcuugagggcau

SEQ ID NO: 2536044 - RNA, 19 nt, Homo sapiens
  misc_RNA (1)...(19): siRNA sense strand
agaaugguuacgugagaaa

SEQ ID NO: 2536045 - RNA, 19 nt, Homo sapiens
  misc_RNA (1)...(19): siRNA sense strand
guggaaaagcugagaaagu

SEQ ID NO: 2536046 - RNA, 19 nt, Homo sapiens
  misc_RNA (1)...(19): siRNA sense strand
augaagauugacaaggaua

SEQ ID NO: 2536047 - RNA, 19 nt, Homo sapiens
  misc_RNA (1)...(19): siRNA sense strand
aguccagacagcugaacua

SEQ ID NO: 2536048 - RNA, 19 nt, Homo sapiens
  misc_RNA (1)...(19): siRNA sense strand
augcuggaaguaagaauaa

SEQ ID NO: 2536049 - RNA, 19 nt, Homo sapiens
  misc_RNA (1)...(19): siRNA sense strand
acgugagaaacuuggauuu

SEQ ID NO: 2536050 - RNA, 19 nt, Homo sapiens
  misc_RNA (1)...(19): siRNA sense strand
cugaacuaaccaagguauu

SEQ ID NO: 2536051 - RNA, 19 nt, Homo sapiens
  misc_RNA (1)...(19): siRNA sense strand
uggaaguaagaauaagcua

SEQ ID NO: 2536052 - RNA, 19 nt, Homo sapiens
  misc_RNA (1)...(19): siRNA sense strand
cugaagaaugguuacguga

SEQ ID NO: 2536053 - RNA, 19 nt, Homo sapiens
  misc_RNA (1)...(19): siRNA sense strand
cgaagaccuaacugaagaa

SEQ ID NO: 2536054 - RNA, 19 nt, Homo sapiens
  misc_RNA (1)...(19): siRNA sense strand
gaaauaagaaauaccgaag

SEQ ID NO: 2536055 - RNA, 19 nt, Homo sapiens
  misc_RNA (1)...(19): siRNA sense strand
uaguggaaaagcugagaaa

SEQ ID NO: 2536056 - RNA, 19 nt, Homo sapiens
  misc_RNA (1)...(19): siRNA sense strand
ggaaguaagaauaagcuag

SEQ ID NO: 2536057 - RNA, 19 nt, Homo sapiens
  misc_RNA (1)...(19): siRNA sense strand
gaauaagcuaguccagaca

SEQ ID NO: 2536058 - RNA, 19 nt, Homo sapiens
  misc_RNA (1)...(19): siRNA sense strand
uguuaauagccuuggauaa

SEQ ID NO: 2536059 - RNA, 19 nt, Homo sapiens
  misc_RNA (1)...(19): siRNA sense strand
ucgcauauuguuagagaaa

SEQ ID NO: 2536060 - RNA, 19 nt, Homo sapiens
  misc_RNA (1)...(19): siRNA sense strand
aaacgaaacuucaaggcaa

SEQ ID NO: 2536061 - RNA, 19 nt, Homo sapiens
  misc_RNA (1)...(19): siRNA sense strand
gaaucaggucagacagaaa

SEQ ID NO: 2536062 - RNA, 19 nt, Homo sapiens
  misc_RNA (1)...(19): siRNA sense strand
ggguagauaaagugguaau

SEQ ID NO: 2536063 - RNA, 19 nt, Homo sapiens
  misc_RNA (1)...(19): siRNA sense strand
ggauaagugguuagaugaa

SEQ ID NO: 2536064 - RNA, 19 nt, Homo sapiens
  misc_RNA (1)...(19): siRNA sense strand
ccacagugcagcagauaau

SEQ ID NO: 2536065 - RNA, 19 nt, Homo sapiens
  misc_RNA (1)...(19): siRNA sense strand
cucaagaaacucagcaaua

SEQ ID NO: 2536066 - RNA, 19 nt, Homo sapiens
  misc_RNA (1)...(19): siRNA sense strand
aggcuggucucgugguaaa

SEQ ID NO: 2536067 - RNA, 19 nt, Homo sapiens
  misc_RNA (1)...(19): siRNA sense strand
aagugaaggugucaguaaa

SEQ ID NO: 2536068 - RNA, 19 nt, Homo sapiens
  misc_RNA (1)...(19): siRNA sense strand
gggaagaagcugcaaaauu

SEQ ID NO: 2536069 - RNA, 19 nt, Homo sapiens
  misc_RNA (1)...(19): siRNA sense strand
uaaugaagcuaaauggaca

SEQ ID NO: 2536070 - RNA, 19 nt, Homo sapiens
  misc_RNA (1)...(19): siRNA sense strand
ugaugaagccagauauaau

SEQ ID NO: 2536071 - RNA, 19 nt, Homo sapiens
  misc_RNA (1)...(19): siRNA sense strand
ucuaagaagagaugugaga

SEQ ID NO: 2536072 - RNA, 19 nt, Homo sapiens
  misc_RNA (1)...(19): siRNA sense strand
guuaaugcccacugaaaga

SEQ ID NO: 2536073 - RNA, 19 nt, Homo sapiens
  misc_RNA (1)...(19): siRNA sense strand
cugaaauaguacagauucu

SEQ ID NO: 2536074 - RNA, 19 nt, Homo sapiens
  misc_RNA (1)...(19): siRNA sense strand
caacagugaaauaacacaa

SEQ ID NO: 2536075 - RNA, 19 nt, Homo sapiens
  misc_RNA (1)...(19): siRNA sense strand
cagaagacaaggaacgaca

SEQ ID NO: 2536076 - RNA, 19 nt, Homo sapiens
  misc_RNA (1)...(19): siRNA sense strand
uagagaaaggaaagugcaa

SEQ ID NO: 2536077 - RNA, 19 nt, Homo sapiens
  misc_RNA (1)...(19): siRNA sense strand
acauauaacagaccaacaa

SEQ ID NO: 2536078 - RNA, 19 nt, Homo sapiens
  misc_RNA (1)...(19): siRNA sense strand
cugcaaaauuguugaagga

SEQ ID NO: 2536079 - RNA, 19 nt, Homo sapiens
  misc_RNA (1)...(19): siRNA sense strand
gcauauuguuagagaaagg

SEQ ID NO: 2536080 - RNA, 19 nt, Homo sapiens
  misc_RNA (1)...(19): siRNA sense strand
uugaauugaagcauggaaa

SEQ ID NO: 2536081 - RNA, 19 nt, Homo sapiens
  misc_RNA (1)...(19): siRNA sense strand
gugaaauaacacaaggcau

SEQ ID NO: 2536082 - RNA, 19 nt, Homo sapiens
  misc_RNA (1)...(19): siRNA sense strand
gggaaauccagaaaacaua

SEQ ID NO: 2536083 - RNA, 19 nt, Homo sapiens
  misc_RNA (1)...(19): siRNA sense strand
cuauggaaauuaugagagu

SEQ ID NO: 2536084 - RNA, 19 nt, Homo sapiens
  misc_RNA (1)...(19): siRNA sense strand
ugaaggaagcaauuaacaa

SEQ ID NO: 2536085 - RNA, 19 nt, Homo sapiens
  misc_RNA (1)...(19): siRNA sense strand
gagaaaggaaagugcaauc

SEQ ID NO: 2536086 - RNA, 19 nt, Homo sapiens
  misc_RNA (1)...(19): siRNA sense strand
aggaaaacgaguuguacua

SEQ ID NO: 2536087 - RNA, 19 nt, Homo sapiens
  misc_RNA (1)...(19): siRNA sense strand
ucucgggaauacagagcua

SEQ ID NO: 2536088 - RNA, 19 nt, Homo sapiens
  misc_RNA (1)...(19): siRNA sense strand
auacagaauggauggguca

SEQ ID NO: 2536089 - RNA, 19 nt, Homo sapiens
  misc_RNA (1)...(19): siRNA sense strand
gagaagaugggcagagaag

SEQ ID NO: 2536090 - RNA, 19 nt, Homo sapiens
  misc_RNA (1)...(19): siRNA sense strand
ucccauugaaggacagaaa

SEQ ID NO: 2536091 - RNA, 19 nt, Homo sapiens
  misc_RNA (1)...(19): siRNA sense strand
uguugaaggaagcaauuaa

SEQ ID NO: 2536092 - RNA, 19 nt, Homo sapiens
  misc_RNA (1)...(19): siRNA sense strand
agcagauaauggaaggaau

SEQ ID NO: 2536093 - RNA, 19 nt, Homo sapiens
  misc_RNA (1)...(19): siRNA sense strand
cuggauccucaaagggaaa

SEQ ID NO: 2536094 - RNA, 19 nt, Homo sapiens
  misc_RNA (1)...(19): siRNA sense strand
ccaggguaucagaggaaaa

SEQ ID NO: 2536095 - RNA, 19 nt, Homo sapiens
  misc_RNA (1)...(19): siRNA sense strand
gaguaaaauguuagcccua

SEQ ID NO: 2536096 - RNA, 19 nt, Homo sapiens
  misc_RNA (1)...(19): siRNA sense strand
uacaaaucggguagauaaa

SEQ ID NO: 2536097 - RNA, 19 nt, Homo sapiens
  misc_RNA (1)...(19): siRNA sense strand
aauacagagcuaagucaua

SEQ ID NO: 2536098 - RNA, 19 nt, Homo sapiens
  misc_RNA (1)...(19): siRNA sense strand
uaagaagagaugugagacu

SEQ ID NO: 2536099 - RNA, 19 nt, Homo sapiens
  misc_RNA (1)...(19): siRNA sense strand
ccgaagcgccugugaagga

SEQ ID NO: 2536100 - RNA, 19 nt, Homo sapiens
  misc_RNA (1)...(19): siRNA sense strand
ucgcauacuucaugaauac

SEQ ID NO: 2536101 - RNA, 19 nt, Homo sapiens
  misc_RNA (1)...(19): siRNA sense strand
aggcaacagugaaauaaca

SEQ ID NO: 2536102 - RNA, 19 nt, Homo sapiens
  misc_RNA (1)...(19): siRNA sense strand
acgaguuguacuaaugaaa

SEQ ID NO: 2536103 - RNA, 19 nt, Homo sapiens
  misc_RNA (1)...(19): siRNA sense strand
gcaaaauuguugaaggaag

SEQ ID NO: 2536104 - RNA, 19 nt, Homo sapiens
  misc_RNA (1)...(19): siRNA sense strand
ugaauugaagcauggaaau

SEQ ID NO: 2536105 - RNA, 19 nt, Homo sapiens
  misc_RNA (1)...(19): siRNA sense strand
acauggaaacuaaggcuuu

SEQ ID NO: 2536106 - RNA, 19 nt, Homo sapiens
  misc_RNA (1)...(19): siRNA sense strand
augcgagucuguagugaau

SEQ ID NO: 2536107 - RNA, 19 nt, Homo sapiens
  misc_RNA (1)...(19): siRNA sense strand
gguagauaaagugguaaua

SEQ ID NO: 2536108 - RNA, 19 nt, Homo sapiens
  misc_RNA (1)...(19): siRNA sense strand
uacaagaaucucaguacaa

SEQ ID NO: 2536109 - RNA, 19 nt, Homo sapiens
  misc_RNA (1)...(19): siRNA sense strand
acucacuacauaugggcua

SEQ ID NO: 2536110 - RNA, 19 nt, Homo sapiens
  misc_RNA (1)...(19): siRNA sense strand
uguuaauagccuuggauaa

SEQ ID NO: 2536111 - RNA, 19 nt, Homo sapiens
  misc_RNA (1)...(19): siRNA sense strand
ucgcauauuguuagagaaa

SEQ ID NO: 2536112 - RNA, 19 nt, Homo sapiens
  misc_RNA (1)...(19): siRNA sense strand
aaacgaaacuucaaggcaa

SEQ ID NO: 2536113 - RNA, 19 nt, Homo sapiens
  misc_RNA (1)...(19): siRNA sense strand
gaaucaggucagacagaaa

SEQ ID NO: 2536114 - RNA, 19 nt, Homo sapiens
  misc_RNA (1)...(19): siRNA sense strand
ggguagauaaagugguaau

SEQ ID NO: 2536115 - RNA, 19 nt, Homo sapiens
  misc_RNA (1)...(19): siRNA sense strand
ggauaagugguuagaugaa

SEQ ID NO: 2536116 - RNA, 19 nt, Homo sapiens
  misc_RNA (1)...(19): siRNA sense strand
ccacagugcagcagauaau

SEQ ID NO: 2536117 - RNA, 19 nt, Homo sapiens
  misc_RNA (1)...(19): siRNA sense strand
cucaagaaacucagcaaua

SEQ ID NO: 2536118 - RNA, 19 nt, Homo sapiens
  misc_RNA (1)...(19): siRNA sense strand
aggcuggucucgugguaaa

SEQ ID NO: 2536119 - RNA, 19 nt, Homo sapiens
  misc_RNA (1)...(19): siRNA sense strand
aagugaaggugucaguaaa

SEQ ID NO: 2536120 - RNA, 19 nt, Homo sapiens
  misc_RNA (1)...(19): siRNA sense strand
gggaagaagcugcaaaauu

SEQ ID NO: 2536121 - RNA, 19 nt, Homo sapiens
  misc_RNA (1)...(19): siRNA sense strand
uaaugaagcuaaauggaca

SEQ ID NO: 2536122 - RNA, 19 nt, Homo sapiens
  misc_RNA (1)...(19): siRNA sense strand
ugaugaagccagauauaau

SEQ ID NO: 2536123 - RNA, 19 nt, Homo sapiens
  misc_RNA (1)...(19): siRNA sense strand
ucuaagaagagaugugaga

SEQ ID NO: 2536124 - RNA, 19 nt, Homo sapiens
  misc_RNA (1)...(19): siRNA sense strand
guuaaugcccacugaaaga

SEQ ID NO: 2536125 - RNA, 19 nt, Homo sapiens
  misc_RNA (1)...(19): siRNA sense strand
cugaaauaguacagauucu

SEQ ID NO: 2536126 - RNA, 19 nt, Homo sapiens
  misc_RNA (1)...(19): siRNA sense strand
caacagugaaauaacacaa

SEQ ID NO: 2536127 - RNA, 19 nt, Homo sapiens
  misc_RNA (1)...(19): siRNA sense strand
cagaagacaaggaacgaca

SEQ ID NO: 2536128 - RNA, 19 nt, Homo sapiens
  misc_RNA (1)...(19): siRNA sense strand
uagagaaaggaaagugcaa

SEQ ID NO: 2536129 - RNA, 19 nt, Homo sapiens
  misc_RNA (1)...(19): siRNA sense strand
acauauaacagaccaacaa

SEQ ID NO: 2536130 - RNA, 19 nt, Homo sapiens
  misc_RNA (1)...(19): siRNA sense strand
cugcaaaauuguugaagga

SEQ ID NO: 2536131 - RNA, 19 nt, Homo sapiens
  misc_RNA (1)...(19): siRNA sense strand
gcauauuguuagagaaagg

SEQ ID NO: 2536132 - RNA, 19 nt, Homo sapiens
  misc_RNA (1)...(19): siRNA sense strand
uugaauugaagcauggaaa

SEQ ID NO: 2536133 - RNA, 19 nt, Homo sapiens
  misc_RNA (1)...(19): siRNA sense strand
gugaaauaacacaaggcau

SEQ ID NO: 2536134 - RNA, 19 nt, Homo sapiens
  misc_RNA (1)...(19): siRNA sense strand
gggaaauccagaaaacaua

SEQ ID NO: 2536135 - RNA, 19 nt, Homo sapiens
  misc_RNA (1)...(19): siRNA sense strand
cuauggaaauuaugagagu

SEQ ID NO: 2536136 - RNA, 19 nt, Homo sapiens
  misc_RNA (1)...(19): siRNA sense strand
ugaaggaagcaauuaacaa

SEQ ID NO: 2536137 - RNA, 19 nt, Homo sapiens
  misc_RNA (1)...(19): siRNA sense strand
gagaaaggaaagugcaauc

SEQ ID NO: 2536138 - RNA, 19 nt, Homo sapiens
  misc_RNA (1)...(19): siRNA sense strand
aggaaaacgaguuguacua

SEQ ID NO: 2536139 - RNA, 19 nt, Homo sapiens
  misc_RNA (1)...(19): siRNA sense strand
ucucgggaauacagagcua

SEQ ID NO: 2536140 - RNA, 19 nt, Homo sapiens
  misc_RNA (1)...(19): siRNA sense strand
auacagaauggauggguca

SEQ ID NO: 2536141 - RNA, 19 nt, Homo sapiens
  misc_RNA (1)...(19): siRNA sense strand
gagaagaugggcagagaag

SEQ ID NO: 2536142 - RNA, 19 nt, Homo sapiens
  misc_RNA (1)...(19): siRNA sense strand
ucccauugaaggacagaaa

SEQ ID NO: 2536143 - RNA, 19 nt, Homo sapiens
  misc_RNA (1)...(19): siRNA sense strand
uguugaaggaagcaauuaa

SEQ ID NO: 2536144 - RNA, 19 nt, Homo sapiens
  misc_RNA (1)...(19): siRNA sense strand
agcagauaauggaaggaau

SEQ ID NO: 2536145 - RNA, 19 nt, Homo sapiens
  misc_RNA (1)...(19): siRNA sense strand
cuggauccucaaagggaaa

SEQ ID NO: 2536146 - RNA, 19 nt, Homo sapiens
  misc_RNA (1)...(19): siRNA sense strand
ccaggguaucagaggaaaa

SEQ ID NO: 2536147 - RNA, 19 nt, Homo sapiens
  misc_RNA (1)...(19): siRNA sense strand
gaguaaaauguuagcccua

SEQ ID NO: 2536148 - RNA, 19 nt, Homo sapiens
  misc_RNA (1)...(19): siRNA sense strand
uacaaaucggguagauaaa

SEQ ID NO: 2536149 - RNA, 19 nt, Homo sapiens
  misc_RNA (1)...(19): siRNA sense strand
aauacagagcuaagucaua

SEQ ID NO: 2536150 - RNA, 19 nt, Homo sapiens
  misc_RNA (1)...(19): siRNA sense strand
uaagaagagaugugagacu

SEQ ID NO: 2536151 - RNA, 19 nt, Homo sapiens
  misc_RNA (1)...(19): siRNA sense strand
ccgaagcgccugugaagga

SEQ ID NO: 2536152 - RNA, 19 nt, Homo sapiens
  misc_RNA (1)...(19): siRNA sense strand
ucgcauacuucaugaauac

SEQ ID NO: 2536153 - RNA, 19 nt, Homo sapiens
  misc_RNA (1)...(19): siRNA sense strand
aggcaacagugaaauaaca

SEQ ID NO: 2536154 - RNA, 19 nt, Homo sapiens
  misc_RNA (1)...(19): siRNA sense strand
acgaguuguacuaaugaaa

SEQ ID NO: 2536155 - RNA, 19 nt, Homo sapiens
  misc_RNA (1)...(19): siRNA sense strand
gcaaaauuguugaaggaag

SEQ ID NO: 2536156 - RNA, 19 nt, Homo sapiens
  misc_RNA (1)...(19): siRNA sense strand
ugaauugaagcauggaaau

SEQ ID NO: 2536157 - RNA, 19 nt, Homo sapiens
  misc_RNA (1)...(19): siRNA sense strand
acauggaaacuaaggcuuu

SEQ ID NO: 2536158 - RNA, 19 nt, Homo sapiens
  misc_RNA (1)...(19): siRNA sense strand
augcgagucuguagugaau

SEQ ID NO: 2536159 - RNA, 19 nt, Homo sapiens
  misc_RNA (1)...(19): siRNA sense strand
gguagauaaagugguaaua

SEQ ID NO: 2536160 - RNA, 19 nt, Homo sapiens
  misc_RNA (1)...(19): siRNA sense strand
uacaagaaucucaguacaa

SEQ ID NO: 2536161 - RNA, 19 nt, Homo sapiens
  misc_RNA (1)...(19): siRNA sense strand
acucacuacauaugggcua

SEQ ID NO: 2536162 - RNA, 19 nt, Homo sapiens
  misc_RNA (1)...(19): siRNA sense strand
uguuaauagccuuggauaa

SEQ ID NO: 2536163 - RNA, 19 nt, Homo sapiens
  misc_RNA (1)...(19): siRNA sense strand
ucgcauauuguuagagaaa

SEQ ID NO: 2536164 - RNA, 19 nt, Homo sapiens
  misc_RNA (1)...(19): siRNA sense strand
aaacgaaacuucaaggcaa

SEQ ID NO: 2536165 - RNA, 19 nt, Homo sapiens
  misc_RNA (1)...(19): siRNA sense strand
gaaucaggucagacagaaa

SEQ ID NO: 2536166 - RNA, 19 nt, Homo sapiens
  misc_RNA (1)...(19): siRNA sense strand
ggguagauaaagugguaau

SEQ ID NO: 2536167 - RNA, 19 nt, Homo sapiens
  misc_RNA (1)...(19): siRNA sense strand
ggauaagugguuagaugaa

SEQ ID NO: 2536168 - RNA, 19 nt, Homo sapiens
  misc_RNA (1)...(19): siRNA sense strand
ccacagugcagcagauaau

SEQ ID NO: 2536169 - RNA, 19 nt, Homo sapiens
  misc_RNA (1)...(19): siRNA sense strand
cucaagaaacucagcaaua

SEQ ID NO: 2536170 - RNA, 19 nt, Homo sapiens
  misc_RNA (1)...(19): siRNA sense strand
aggcuggucucgugguaaa

SEQ ID NO: 2536171 - RNA, 19 nt, Homo sapiens
  misc_RNA (1)...(19): siRNA sense strand
aagugaaggugucaguaaa

SEQ ID NO: 2536172 - RNA, 19 nt, Homo sapiens
  misc_RNA (1)...(19): siRNA sense strand
gggaagaagcugcaaaauu

SEQ ID NO: 2536173 - RNA, 19 nt, Homo sapiens
  misc_RNA (1)...(19): siRNA sense strand
uaaugaagcuaaauggaca

SEQ ID NO: 2536174 - RNA, 19 nt, Homo sapiens
  misc_RNA (1)...(19): siRNA sense strand
ugaugaagccagauauaau

SEQ ID NO: 2536175 - RNA, 19 nt, Homo sapiens
  misc_RNA (1)...(19): siRNA sense strand
ucuaagaagagaugugaga

SEQ ID NO: 2536176 - RNA, 19 nt, Homo sapiens
  misc_RNA (1)...(19): siRNA sense strand
guuaaugcccacugaaaga

SEQ ID NO: 2536177 - RNA, 19 nt, Homo sapiens
  misc_RNA (1)...(19): siRNA sense strand
cugaaauaguacagauucu

SEQ ID NO: 2536178 - RNA, 19 nt, Homo sapiens
  misc_RNA (1)...(19): siRNA sense strand
caacagugaaauaacacaa

SEQ ID NO: 2536179 - RNA, 19 nt, Homo sapiens
  misc_RNA (1)...(19): siRNA sense strand
cagaagacaaggaacgaca

SEQ ID NO: 2536180 - RNA, 19 nt, Homo sapiens
  misc_RNA (1)...(19): siRNA sense strand
uagagaaaggaaagugcaa

SEQ ID NO: 2536181 - RNA, 19 nt, Homo sapiens
  misc_RNA (1)...(19): siRNA sense strand
acauauaacagaccaacaa

SEQ ID NO: 2536182 - RNA, 19 nt, Homo sapiens
  misc_RNA (1)...(19): siRNA sense strand
cugcaaaauuguugaagga

SEQ ID NO: 2536183 - RNA, 19 nt, Homo sapiens
  misc_RNA (1)...(19): siRNA sense strand
gcauauuguuagagaaagg

SEQ ID NO: 2536184 - RNA, 19 nt, Homo sapiens
  misc_RNA (1)...(19): siRNA sense strand
uugaauugaagcauggaaa

SEQ ID NO: 2536185 - RNA, 19 nt, Homo sapiens
  misc_RNA (1)...(19): siRNA sense strand
gugaaauaacacaaggcau

SEQ ID NO: 2536186 - RNA, 19 nt, Homo sapiens
  misc_RNA (1)...(19): siRNA sense strand
gggaaauccagaaaacaua

SEQ ID NO: 2536187 - RNA, 19 nt, Homo sapiens
  misc_RNA (1)...(19): siRNA sense strand
cuauggaaauuaugagagu

SEQ ID NO: 2536188 - RNA, 19 nt, Homo sapiens
  misc_RNA (1)...(19): siRNA sense strand
ugaaggaagcaauuaacaa

SEQ ID NO: 2536189 - RNA, 19 nt, Homo sapiens
  misc_RNA (1)...(19): siRNA sense strand
gagaaaggaaagugcaauc

SEQ ID NO: 2536190 - RNA, 19 nt, Homo sapiens
  misc_RNA (1)...(19): siRNA sense strand
aggaaaacgaguuguacua

SEQ ID NO: 2536191 - RNA, 19 nt, Homo sapiens
  misc_RNA (1)...(19): siRNA sense strand
ucucgggaauacagagcua

SEQ ID NO: 2536192 - RNA, 19 nt, Homo sapiens
  misc_RNA (1)...(19): siRNA sense strand
auacagaauggauggguca

SEQ ID NO: 2536193 - RNA, 19 nt, Homo sapiens
  misc_RNA (1)...(19): siRNA sense strand
gagaagaugggcagagaag

SEQ ID NO: 2536194 - RNA, 19 nt, Homo sapiens
  misc_RNA (1)...(19): siRNA sense strand
ucccauugaaggacagaaa

SEQ ID NO: 2536195 - RNA, 19 nt, Homo sapiens
  misc_RNA (1)...(19): siRNA sense strand
uguugaaggaagcaauuaa

SEQ ID NO: 2536196 - RNA, 19 nt, Homo sapiens
  misc_RNA (1)...(19): siRNA sense strand
agcagauaauggaaggaau

SEQ ID NO: 2536197 - RNA, 19 nt, Homo sapiens
  misc_RNA (1)...(19): siRNA sense strand
cuggauccucaaagggaaa

SEQ ID NO: 2536198 - RNA, 19 nt, Homo sapiens
  misc_RNA (1)...(19): siRNA sense strand
ccaggguaucagaggaaaa

SEQ ID NO: 2536199 - RNA, 19 nt, Homo sapiens
  misc_RNA (1)...(19): siRNA sense strand
gaguaaaauguuagcccua

SEQ ID NO: 2536200 - RNA, 19 nt, Homo sapiens
  misc_RNA (1)...(19): siRNA sense strand
uacaaaucggguagauaaa

SEQ ID NO: 2536201 - RNA, 19 nt, Homo sapiens
  misc_RNA (1)...(19): siRNA sense strand
aauacagagcuaagucaua

SEQ ID NO: 2536202 - RNA, 19 nt, Homo sapiens
  misc_RNA (1)...(19): siRNA sense strand
uaagaagagaugugagacu

SEQ ID NO: 2536203 - RNA, 19 nt, Homo sapiens
  misc_RNA (1)...(19): siRNA sense strand
ccgaagcgccugugaagga

SEQ ID NO: 2536204 - RNA, 19 nt, Homo sapiens
  misc_RNA (1)...(19): siRNA sense strand
ucgcauacuucaugaauac

SEQ ID NO: 2536205 - RNA, 19 nt, Homo sapiens
  misc_RNA (1)...(19): siRNA sense strand
aggcaacagugaaauaaca

SEQ ID NO: 2536206 - RNA, 19 nt, Homo sapiens
  misc_RNA (1)...(19): siRNA sense strand
acgaguuguacuaaugaaa

SEQ ID NO: 2536207 - RNA, 19 nt, Homo sapiens
  misc_RNA (1)...(19): siRNA sense strand
gcaaaauuguugaaggaag

SEQ ID NO: 2536208 - RNA, 19 nt, Homo sapiens
  misc_RNA (1)...(19): siRNA sense strand
ugaauugaagcauggaaau

SEQ ID NO: 2536209 - RNA, 19 nt, Homo sapiens
  misc_RNA (1)...(19): siRNA sense strand
acauggaaacuaaggcuuu

SEQ ID NO: 2536210 - RNA, 19 nt, Homo sapiens
  misc_RNA (1)...(19): siRNA sense strand
augcgagucuguagugaau

SEQ ID NO: 2536211 - RNA, 19 nt, Homo sapiens
  misc_RNA (1)...(19): siRNA sense strand
gguagauaaagugguaaua

SEQ ID NO: 2536212 - RNA, 19 nt, Homo sapiens
  misc_RNA (1)...(19): siRNA sense strand
uacaagaaucucaguacaa

SEQ ID NO: 2536213 - RNA, 19 nt, Homo sapiens
  misc_RNA (1)...(19): siRNA sense strand
acucacuacauaugggcua

SEQ ID NO: 2536214 - RNA, 19 nt, Homo sapiens
  misc_RNA (1)...(19): siRNA sense strand
uguuaauagccuuggauaa

SEQ ID NO: 2536215 - RNA, 19 nt, Homo sapiens
  misc_RNA (1)...(19): siRNA sense strand
ucgcauauuguuagagaaa

SEQ ID NO: 2536216 - RNA, 19 nt, Homo sapiens
  misc_RNA (1)...(19): siRNA sense strand
aaacgaaacuucaaggcaa

SEQ ID NO: 2536217 - RNA, 19 nt, Homo sapiens
  misc_RNA (1)...(19): siRNA sense strand
gaaucaggucagacagaaa

SEQ ID NO: 2536218 - RNA, 19 nt, Homo sapiens
  misc_RNA (1)...(19): siRNA sense strand
ggguagauaaagugguaau

SEQ ID NO: 2536219 - RNA, 19 nt, Homo sapiens
  misc_RNA (1)...(19): siRNA sense strand
ggauaagugguuagaugaa

SEQ ID NO: 2536220 - RNA, 19 nt, Homo sapiens
  misc_RNA (1)...(19): siRNA sense strand
ccacagugcagcagauaau

SEQ ID NO: 2536221 - RNA, 19 nt, Homo sapiens
  misc_RNA (1)...(19): siRNA sense strand
cucaagaaacucagcaaua

SEQ ID NO: 2536222 - RNA, 19 nt, Homo sapiens
  misc_RNA (1)...(19): siRNA sense strand
aggcuggucucgugguaaa

SEQ ID NO: 2536223 - RNA, 19 nt, Homo sapiens
  misc_RNA (1)...(19): siRNA sense strand
aagugaaggugucaguaaa

SEQ ID NO: 2536224 - RNA, 19 nt, Homo sapiens
  misc_RNA (1)...(19): siRNA sense strand
gggaagaagcugcaaaauu

SEQ ID NO: 2536225 - RNA, 19 nt, Homo sapiens
  misc_RNA (1)...(19): siRNA sense strand
uaaugaagcuaaauggaca

SEQ ID NO: 2536226 - RNA, 19 nt, Homo sapiens
  misc_RNA (1)...(19): siRNA sense strand
ugaugaagccagauauaau

SEQ ID NO: 2536227 - RNA, 19 nt, Homo sapiens
  misc_RNA (1)...(19): siRNA sense strand
ucuaagaagagaugugaga

SEQ ID NO: 2536228 - RNA, 19 nt, Homo sapiens
  misc_RNA (1)...(19): siRNA sense strand
guuaaugcccacugaaaga

SEQ ID NO: 2536229 - RNA, 19 nt, Homo sapiens
  misc_RNA (1)...(19): siRNA sense strand
cugaaauaguacagauucu

SEQ ID NO: 2536230 - RNA, 19 nt, Homo sapiens
  misc_RNA (1)...(19): siRNA sense strand
caacagugaaauaacacaa

SEQ ID NO: 2536231 - RNA, 19 nt, Homo sapiens
  misc_RNA (1)...(19): siRNA sense strand
cagaagacaaggaacgaca

SEQ ID NO: 2536232 - RNA, 19 nt, Homo sapiens
  misc_RNA (1)...(19): siRNA sense strand
uagagaaaggaaagugcaa

SEQ ID NO: 2536233 - RNA, 19 nt, Homo sapiens
  misc_RNA (1)...(19): siRNA sense strand
acauauaacagaccaacaa

SEQ ID NO: 2536234 - RNA, 19 nt, Homo sapiens
  misc_RNA (1)...(19): siRNA sense strand
cugcaaaauuguugaagga

SEQ ID NO: 2536235 - RNA, 19 nt, Homo sapiens
  misc_RNA (1)...(19): siRNA sense strand
gcauauuguuagagaaagg

SEQ ID NO: 2536236 - RNA, 19 nt, Homo sapiens
  misc_RNA (1)...(19): siRNA sense strand
uugaauugaagcauggaaa

SEQ ID NO: 2536237 - RNA, 19 nt, Homo sapiens
  misc_RNA (1)...(19): siRNA sense strand
gugaaauaacacaaggcau

SEQ ID NO: 2536238 - RNA, 19 nt, Homo sapiens
  misc_RNA (1)...(19): siRNA sense strand
gggaaauccagaaaacaua

SEQ ID NO: 2536239 - RNA, 19 nt, Homo sapiens
  misc_RNA (1)...(19): siRNA sense strand
cuauggaaauuaugagagu

SEQ ID NO: 2536240 - RNA, 19 nt, Homo sapiens
  misc_RNA (1)...(19): siRNA sense strand
ugaaggaagcaauuaacaa

SEQ ID NO: 2536241 - RNA, 19 nt, Homo sapiens
  misc_RNA (1)...(19): siRNA sense strand
gagaaaggaaagugcaauc

SEQ ID NO: 2536242 - RNA, 19 nt, Homo sapiens
  misc_RNA (1)...(19): siRNA sense strand
aggaaaacgaguuguacua

SEQ ID NO: 2536243 - RNA, 19 nt, Homo sapiens
  misc_RNA (1)...(19): siRNA sense strand
ucucgggaauacagagcua

SEQ ID NO: 2536244 - RNA, 19 nt, Homo sapiens
  misc_RNA (1)...(19): siRNA sense strand
auacagaauggauggguca

SEQ ID NO: 2536245 - RNA, 19 nt, Homo sapiens
  misc_RNA (1)...(19): siRNA sense strand
gagaagaugggcagagaag

SEQ ID NO: 2536246 - RNA, 19 nt, Homo sapiens
  misc_RNA (1)...(19): siRNA sense strand
ucccauugaaggacagaaa

SEQ ID NO: 2536247 - RNA, 19 nt, Homo sapiens
  misc_RNA (1)...(19): siRNA sense strand
uguugaaggaagcaauuaa

SEQ ID NO: 2536248 - RNA, 19 nt, Homo sapiens
  misc_RNA (1)...(19): siRNA sense strand
agcagauaauggaaggaau

SEQ ID NO: 2536249 - RNA, 19 nt, Homo sapiens
  misc_RNA (1)...(19): siRNA sense strand
cuggauccucaaagggaaa

SEQ ID NO: 2536250 - RNA, 19 nt, Homo sapiens
  misc_RNA (1)...(19): siRNA sense strand
ccaggguaucagaggaaaa

SEQ ID NO: 2536251 - RNA, 19 nt, Homo sapiens
  misc_RNA (1)...(19): siRNA sense strand
gaguaaaauguuagcccua

SEQ ID NO: 2536252 - RNA, 19 nt, Homo sapiens
  misc_RNA (1)...(19): siRNA sense strand
uacaaaucggguagauaaa

SEQ ID NO: 2536253 - RNA, 19 nt, Homo sapiens
  misc_RNA (1)...(19): siRNA sense strand
aauacagagcuaagucaua

SEQ ID NO: 2536254 - RNA, 19 nt, Homo sapiens
  misc_RNA (1)...(19): siRNA sense strand
uaagaagagaugugagacu

SEQ ID NO: 2536255 - RNA, 19 nt, Homo sapiens
  misc_RNA (1)...(19): siRNA sense strand
ccgaagcgccugugaagga

SEQ ID NO: 2536256 - RNA, 19 nt, Homo sapiens
  misc_RNA (1)...(19): siRNA sense strand
ucgcauacuucaugaauac

SEQ ID NO: 2536257 - RNA, 19 nt, Homo sapiens
  misc_RNA (1)...(19): siRNA sense strand
aggcaacagugaaauaaca

SEQ ID NO: 2536258 - RNA, 19 nt, Homo sapiens
  misc_RNA (1)...(19): siRNA sense strand
acgaguuguacuaaugaaa

SEQ ID NO: 2536259 - RNA, 19 nt, Homo sapiens
  misc_RNA (1)...(19): siRNA sense strand
gcaaaauuguugaaggaag

SEQ ID NO: 2536260 - RNA, 19 nt, Homo sapiens
  misc_RNA (1)...(19): siRNA sense strand
ugaauugaagcauggaaau

SEQ ID NO: 2536261 - RNA, 19 nt, Homo sapiens
  misc_RNA (1)...(19): siRNA sense strand
acauggaaacuaaggcuuu

SEQ ID NO: 2536262 - RNA, 19 nt, Homo sapiens
  misc_RNA (1)...(19): siRNA sense strand
augcgagucuguagugaau

SEQ ID NO: 2536263 - RNA, 19 nt, Homo sapiens
  misc_RNA (1)...(19): siRNA sense strand
gguagauaaagugguaaua

SEQ ID NO: 2536264 - RNA, 19 nt, Homo sapiens
  misc_RNA (1)...(19): siRNA sense strand
uacaagaaucucaguacaa

SEQ ID NO: 2536265 - RNA, 19 nt, Homo sapiens
  misc_RNA (1)...(19): siRNA sense strand
acucacuacauaugggcua

SEQ ID NO: 2536266 - RNA, 19 nt, Homo sapiens
  misc_RNA (1)...(19): siRNA sense strand
gcauuuggcucuuugguga

SEQ ID NO: 2536267 - RNA, 19 nt, Homo sapiens
  misc_RNA (1)...(19): siRNA sense strand
ugucauuguuuguuggcuu

SEQ ID NO: 2536268 - RNA, 19 nt, Homo sapiens
  misc_RNA (1)...(19): siRNA sense strand
acuuauguacccagaaaga

SEQ ID NO: 2536269 - RNA, 19 nt, Homo sapiens
  misc_RNA (1)...(19): siRNA sense strand
aguccuaagucuagagcua

SEQ ID NO: 2536270 - RNA, 19 nt, Homo sapiens
  misc_RNA (1)...(19): siRNA sense strand
ccagauaggacaaggccaa

SEQ ID NO: 2536271 - RNA, 19 nt, Homo sapiens
  misc_RNA (1)...(19): siRNA sense strand
ugucagaacaagaaaggaa

SEQ ID NO: 2536272 - RNA, 19 nt, Homo sapiens
  misc_RNA (1)...(19): siRNA sense strand
gcuugaaauaaguggaaaa

SEQ ID NO: 2536273 - RNA, 19 nt, Homo sapiens
  misc_RNA (1)...(19): siRNA sense strand
acuuuaaggaguugaggua

SEQ ID NO: 2536274 - RNA, 19 nt, Homo sapiens
  misc_RNA (1)...(19): siRNA sense strand
uguugauggcugugcaaua

SEQ ID NO: 2536275 - RNA, 19 nt, Homo sapiens
  misc_RNA (1)...(19): siRNA sense strand
gaguagaaacaaaucacaa

SEQ ID NO: 2536276 - RNA, 19 nt, Homo sapiens
  misc_RNA (1)...(19): siRNA sense strand
gguugaaacggaacaguau

SEQ ID NO: 2536277 - RNA, 19 nt, Homo sapiens
  misc_RNA (1)...(19): siRNA sense strand
aggaagcagcaaauggaaa

SEQ ID NO: 2536278 - RNA, 19 nt, Homo sapiens
  misc_RNA (1)...(19): siRNA sense strand
cugaauacucugaugugaa

SEQ ID NO: 2536279 - RNA, 19 nt, Homo sapiens
  misc_RNA (1)...(19): siRNA sense strand
agcagcaaauggaaagaaa

SEQ ID NO: 2536280 - RNA, 19 nt, Homo sapiens
  misc_RNA (1)...(19): siRNA sense strand
uugaaaugccgucuggaaa

SEQ ID NO: 2536281 - RNA, 19 nt, Homo sapiens
  misc_RNA (1)...(19): siRNA sense strand
acuggcugguugagaauaa

SEQ ID NO: 2536282 - RNA, 19 nt, Homo sapiens
  misc_RNA (1)...(19): siRNA sense strand
cagcaaauggaaagaaauc

SEQ ID NO: 2536283 - RNA, 19 nt, Homo sapiens
  misc_RNA (1)...(19): siRNA sense strand
gcagcaaauggaaagaaau

SEQ ID NO: 2536284 - RNA, 19 nt, Homo sapiens
  misc_RNA (1)...(19): siRNA sense strand
gaaacaaaucacaaagacu

SEQ ID NO: 2536285 - RNA, 19 nt, Homo sapiens
  misc_RNA (1)...(19): siRNA sense strand
ugucaugggaagaauggaa

SEQ ID NO: 2536286 - RNA, 19 nt, Homo sapiens
  misc_RNA (1)...(19): siRNA sense strand
ggccauuauucaagaaauc

SEQ ID NO: 2536287 - RNA, 19 nt, Homo sapiens
  misc_RNA (1)...(19): siRNA sense strand
gucagaacaagaaaggaaa

SEQ ID NO: 2536288 - RNA, 19 nt, Homo sapiens
  misc_RNA (1)...(19): siRNA sense strand
gagaauaacaucaguggcu

SEQ ID NO: 2536289 - RNA, 19 nt, Homo sapiens
  misc_RNA (1)...(19): siRNA sense strand
ggguauaauagacuacauu

SEQ ID NO: 2536290 - RNA, 19 nt, Homo sapiens
  misc_RNA (1)...(19): siRNA sense strand
caagaaccagauaggacaa

SEQ ID NO: 2536291 - RNA, 19 nt, Homo sapiens
  misc_RNA (1)...(19): siRNA sense strand
acaagaaccagauaggaca

SEQ ID NO: 2536292 - RNA, 19 nt, Homo sapiens
  misc_RNA (1)...(19): siRNA sense strand
ggaacaagacggcugcuga

SEQ ID NO: 2536293 - RNA, 19 nt, Homo sapiens
  misc_RNA (1)...(19): siRNA sense strand
gcuuugcauuugagugaca

SEQ ID NO: 2536294 - RNA, 19 nt, Homo sapiens
  misc_RNA (1)...(19): siRNA sense strand
cugaaagaacguggcuaua

SEQ ID NO: 2536295 - RNA, 19 nt, Homo sapiens
  misc_RNA (1)...(19): siRNA sense strand
auucuaaaccucagcugaa

SEQ ID NO: 2536296 - RNA, 19 nt, Homo sapiens
  misc_RNA (1)...(19): siRNA sense strand
agguugaaacggaacagua

SEQ ID NO: 2536297 - RNA, 19 nt, Homo sapiens
  misc_RNA (1)...(19): siRNA sense strand
cagaagugaagaacauuau

SEQ ID NO: 2536298 - RNA, 19 nt, Homo sapiens
  misc_RNA (1)...(19): siRNA sense strand
gaaacauguugauggcugu

SEQ ID NO: 2536299 - RNA, 19 nt, Homo sapiens
  misc_RNA (1)...(19): siRNA sense strand
cugaacuauuugcuugaua

SEQ ID NO: 2536300 - RNA, 19 nt, Homo sapiens
  misc_RNA (1)...(19): siRNA sense strand
ccacuggcugguugagaau

SEQ ID NO: 2536301 - RNA, 19 nt, Homo sapiens
  misc_RNA (1)...(19): siRNA sense strand
ggaaacauguugauggcug

SEQ ID NO: 2536302 - RNA, 19 nt, Homo sapiens
  misc_RNA (1)...(19): siRNA sense strand
uugcacaacuggagcucuu

SEQ ID NO: 2536303 - RNA, 19 nt, Homo sapiens
  misc_RNA (1)...(19): siRNA sense strand
gauuauguuacaagaacca

SEQ ID NO: 2536304 - RNA, 19 nt, Homo sapiens
  misc_RNA (1)...(19): siRNA sense strand
guagaauauuugagcacag

SEQ ID NO: 2536305 - RNA, 19 nt, Homo sapiens
  misc_RNA (1)...(19): siRNA sense strand
uaaacugggacuacaggaa

SEQ ID NO: 2536306 - RNA, 19 nt, Homo sapiens
  misc_RNA (1)...(19): siRNA sense strand
aggccauuauucaagaaau

SEQ ID NO: 2536307 - RNA, 19 nt, Homo sapiens
  misc_RNA (1)...(19): siRNA sense strand
cugaacagagucaugacaa

SEQ ID NO: 2536308 - RNA, 19 nt, Homo sapiens
  misc_RNA (1)...(19): siRNA sense strand
cugggcagagcuugaaaua

SEQ ID NO: 2536309 - RNA, 19 nt, Homo sapiens
  misc_RNA (1)...(19): siRNA sense strand
aacuuauucuuguggcuaa

SEQ ID NO: 2536310 - RNA, 19 nt, Homo sapiens
  misc_RNA (1)...(19): siRNA sense strand
gggaagaauggaaccacca

SEQ ID NO: 2536311 - RNA, 19 nt, Homo sapiens
  misc_RNA (1)...(19): siRNA sense strand
ucaggaaccagauggaaca

SEQ ID NO: 2536312 - RNA, 19 nt, Homo sapiens
  misc_RNA (1)...(19): siRNA sense strand
uguuaugugcagaucuuaa

SEQ ID NO: 2536313 - RNA, 19 nt, Homo sapiens
  misc_RNA (1)...(19): siRNA sense strand
agguauaaugaaagucuca

SEQ ID NO: 2536314 - RNA, 19 nt, Homo sapiens
  misc_RNA (1)...(19): siRNA sense strand
cacucaugguuucaaguua

SEQ ID NO: 2536315 - RNA, 19 nt, Homo sapiens
  misc_RNA (1)...(19): siRNA sense strand
acagagugccuaugagagu

SEQ ID NO: 2536316 - RNA, 19 nt, Homo sapiens
  misc_RNA (1)...(19): siRNA sense strand
gagcuaaagguuugggcau

SEQ ID NO: 2536317 - RNA, 19 nt, Homo sapiens
  misc_RNA (1)...(19): siRNA sense strand
agccaaggcccgaguggaa

SEQ ID NO: 2536318 - RNA, 19 nt, Homo sapiens
  misc_RNA (1)...(19): siRNA sense strand
uggagauccugaagcgcaa

SEQ ID NO: 2536319 - RNA, 19 nt, Homo sapiens
  misc_RNA (1)...(19): siRNA sense strand
ccuccaacauccugggcuu

SEQ ID NO: 2536320 - RNA, 19 nt, Homo sapiens
  misc_RNA (1)...(19): siRNA sense strand
cagaauucacgguaccaaa

SEQ ID NO: 2536321 - RNA, 19 nt, Homo sapiens
  misc_RNA (1)...(19): siRNA sense strand
gagaacaaccggcuggaga

SEQ ID NO: 2536322 - RNA, 19 nt, Homo sapiens
  misc_RNA (1)...(19): siRNA sense strand
agcaaagggcagagaacca

SEQ ID NO: 2536323 - RNA, 19 nt, Homo sapiens
  misc_RNA (1)...(19): siRNA sense strand
cagugaggauguuggacga

SEQ ID NO: 2536324 - RNA, 19 nt, Homo sapiens
  misc_RNA (1)...(19): siRNA sense strand
gcgagaugcgccucagcaa

SEQ ID NO: 2536325 - RNA, 19 nt, Homo sapiens
  misc_RNA (1)...(19): siRNA sense strand
gggagcagaucaacgggau

SEQ ID NO: 2536326 - RNA, 19 nt, Homo sapiens
  misc_RNA (1)...(19): siRNA sense strand
ccaucaucaucgacgccaa

SEQ ID NO: 2536327 - RNA, 19 nt, Homo sapiens
  misc_RNA (1)...(19): siRNA sense strand
cgggacagccaguacgaga

SEQ ID NO: 2536328 - RNA, 19 nt, Homo sapiens
  misc_RNA (1)...(19): siRNA sense strand
guuugggcauggagaacau

SEQ ID NO: 2536329 - RNA, 19 nt, Homo sapiens
  misc_RNA (1)...(19): siRNA sense strand
acaccaagggcuacggcau

SEQ ID NO: 2536330 - RNA, 19 nt, Homo sapiens
  misc_RNA (1)...(19): siRNA sense strand
cgucaagagcacagaagag

SEQ ID NO: 2536331 - RNA, 19 nt, Homo sapiens
  misc_RNA (1)...(19): siRNA sense strand
ccaacuacacccugcgcau

SEQ ID NO: 2536332 - RNA, 19 nt, Homo sapiens
  misc_RNA (1)...(19): siRNA sense strand
agaacaaccggcuggagau

SEQ ID NO: 2536333 - RNA, 19 nt, Homo sapiens
  misc_RNA (1)...(19): siRNA sense strand
gugcaaguggcaagcgaaa

SEQ ID NO: 2536334 - RNA, 19 nt, Homo sapiens
  misc_RNA (1)...(19): siRNA sense strand
agaugaugauguagcagaa

SEQ ID NO: 2536335 - RNA, 19 nt, Homo sapiens
  misc_RNA (1)...(19): siRNA sense strand
acuagcaacaggagauaaa

SEQ ID NO: 2536336 - RNA, 19 nt, Homo sapiens
  misc_RNA (1)...(19): siRNA sense strand
uaaaggaacuauucggcua

SEQ ID NO: 2536337 - RNA, 19 nt, Homo sapiens
  misc_RNA (1)...(19): siRNA sense strand
ggguauaacuugaaagagg

SEQ ID NO: 2536338 - RNA, 19 nt, Homo sapiens
  misc_RNA (1)...(19): siRNA sense strand
uaugaugacuagagacuau

SEQ ID NO: 2536339 - RNA, 19 nt, Homo sapiens
  misc_RNA (1)...(19): siRNA sense strand
ggugauuacagcagcagaa

SEQ ID NO: 2536340 - RNA, 19 nt, Homo sapiens
  misc_RNA (1)...(19): siRNA sense strand
acagaaacacaaagcgaga

SEQ ID NO: 2536341 - RNA, 19 nt, Homo sapiens
  misc_RNA (1)...(19): siRNA sense strand
ggucgauauaugaugacua

SEQ ID NO: 2536342 - RNA, 19 nt, Homo sapiens
  misc_RNA (1)...(19): siRNA sense strand
acaaaagaccagaagggua

SEQ ID NO: 2536343 - RNA, 19 nt, Homo sapiens
  misc_RNA (1)...(19): siRNA sense strand
acgaagaauauuugccaau

SEQ ID NO: 2536344 - RNA, 19 nt, Homo sapiens
  misc_RNA (1)...(19): siRNA sense strand
cagccauaguggucgauau

SEQ ID NO: 2536345 - RNA, 19 nt, Homo sapiens
  misc_RNA (1)...(19): siRNA sense strand
ucauagcagaggagaauau

SEQ ID NO: 2536346 - RNA, 19 nt, Homo sapiens
  misc_RNA (1)...(19): siRNA sense strand
ucgcaaagucugugcaagu

SEQ ID NO: 2536347 - RNA, 19 nt, Homo sapiens
  misc_RNA (1)...(19): siRNA sense strand
gguauaacuugaaagagga

SEQ ID NO: 2536348 - RNA, 19 nt, Homo sapiens
  misc_RNA (1)...(19): siRNA sense strand
aacaggagcaggagaacaa

SEQ ID NO: 2536349 - RNA, 19 nt, Homo sapiens
  misc_RNA (1)...(19): siRNA sense strand
gugccagucuuuaggccua

SEQ ID NO: 2536350 - RNA, 19 nt, Homo sapiens
  misc_RNA (1)...(19): siRNA sense strand
gggacuuaaauauggaaaa

SEQ ID NO: 2536351 - RNA, 19 nt, Homo sapiens
  misc_RNA (1)...(19): siRNA sense strand
ugaaagaggaggauggaag

SEQ ID NO: 2536352 - RNA, 19 nt, Homo sapiens
  misc_RNA (1)...(19): siRNA sense strand
guggcaagcgaaagaaaga

SEQ ID NO: 2536353 - RNA, 19 nt, Homo sapiens
  misc_RNA (1)...(19): siRNA sense strand
cuucagaauguuugacaga

SEQ ID NO: 2536354 - RNA, 19 nt, Homo sapiens
  misc_RNA (1)...(19): siRNA sense strand
gcggauuaaucuuuggcau

SEQ ID NO: 2536355 - RNA, 19 nt, Homo sapiens
  misc_RNA (1)...(19): siRNA sense strand
ugacagaaacacaaagcga

SEQ ID NO: 2536356 - RNA, 19 nt, Homo sapiens
  misc_RNA (1)...(19): siRNA sense strand
cagcagcaguaaaggaacu

SEQ ID NO: 2536357 - RNA, 19 nt, Homo sapiens
  misc_RNA (1)...(19): siRNA sense strand
ggaaaauaucauugccgua

SEQ ID NO: 2536358 - RNA, 19 nt, Homo sapiens
  misc_RNA (1)...(19): siRNA sense strand
agccauaguggucgauaua

SEQ ID NO: 2536359 - RNA, 19 nt, Homo sapiens
  misc_RNA (1)...(19): siRNA sense strand
ugaaauaaguguugacagc

SEQ ID NO: 2536360 - RNA, 19 nt, Homo sapiens
  misc_RNA (1)...(19): siRNA sense strand
agaaacacaaagcgagaca

SEQ ID NO: 2536361 - RNA, 19 nt, Homo sapiens
  misc_RNA (1)...(19): siRNA sense strand
gaaauuacagacaggaguu

SEQ ID NO: 2536362 - RNA, 19 nt, Homo sapiens
  misc_RNA (1)...(19): siRNA sense strand
cauccaaacagcuguaaca

SEQ ID NO: 2536363 - RNA, 19 nt, Homo sapiens
  misc_RNA (1)...(19): siRNA sense strand
agcgaaagaaagaugaaau

SEQ ID NO: 2536364 - RNA, 19 nt, Homo sapiens
  misc_RNA (1)...(19): siRNA sense strand
aggagauaaaggugguaga

SEQ ID NO: 2536365 - RNA, 19 nt, Homo sapiens
  misc_RNA (1)...(19): siRNA sense strand
aggagcuggaggagggaau

SEQ ID NO: 2536366 - RNA, 19 nt, Homo sapiens
  misc_RNA (1)...(19): siRNA sense strand
ccugaagaucccaguaaca

SEQ ID NO: 2536367 - RNA, 19 nt, Homo sapiens
  misc_RNA (1)...(19): siRNA sense strand
ccucuauuucggauguaaa

SEQ ID NO: 2536368 - RNA, 19 nt, Homo sapiens
  misc_RNA (1)...(19): siRNA sense strand
ggaaauuacagacaggagu

SEQ ID NO: 2536369 - RNA, 19 nt, Homo sapiens
  misc_RNA (1)...(19): siRNA sense strand
guuugaagaaccugaagau

SEQ ID NO: 2536370 - RNA, 19 nt, Homo sapiens
  misc_RNA (1)...(19): siRNA sense strand
gaguuugacuacuugaaaa

SEQ ID NO: 2536371 - RNA, 19 nt, Homo sapiens
  misc_RNA (1)...(19): siRNA sense strand
gauauaugaugacuagaga

SEQ ID NO: 2536372 - RNA, 19 nt, Homo sapiens
  misc_RNA (1)...(19): siRNA sense strand
acacaaagcgagacauaac

SEQ ID NO: 2536373 - RNA, 19 nt, Homo sapiens
  misc_RNA (1)...(19): siRNA sense strand
uggagaauuacuagcaaca

SEQ ID NO: 2536374 - RNA, 19 nt, Homo sapiens
  misc_RNA (1)...(19): siRNA sense strand
uggaggagggaaugauauu

SEQ ID NO: 2536375 - RNA, 19 nt, Homo sapiens
  misc_RNA (1)...(19): siRNA sense strand
ugccaauauggaagagcua

SEQ ID NO: 2536376 - RNA, 19 nt, Homo sapiens
  misc_RNA (1)...(19): siRNA sense strand
gagcaguagaugaugaugu

SEQ ID NO: 2536377 - RNA, 19 nt, Homo sapiens
  misc_RNA (1)...(19): siRNA sense strand
cugcagaugauuugcggau

SEQ ID NO: 2536378 - RNA, 19 nt, Homo sapiens
  misc_RNA (1)...(19): siRNA sense strand
cagcaguaaaggaacuauu

SEQ ID NO: 2536379 - RNA, 19 nt, Homo sapiens
  misc_RNA (1)...(19): siRNA sense strand
ugauguagcagaagcagau

SEQ ID NO: 2536380 - RNA, 19 nt, Homo sapiens
  misc_RNA (1)...(19): siRNA sense strand
agacaggaguuuuaacauu

SEQ ID NO: 2536381 - RNA, 19 nt, Homo sapiens
  misc_RNA (1)...(19): siRNA sense strand
ugaauaccucagaaguaaa

SEQ ID NO: 2536382 - RNA, 19 nt, Homo sapiens
  misc_RNA (1)...(19): siRNA sense strand
ggauggaagguauagagau

SEQ ID NO: 2536383 - RNA, 19 nt, Homo sapiens
  misc_RNA (1)...(19): siRNA sense strand
cggauuaaucuuuggcauc

SEQ ID NO: 2536384 - RNA, 19 nt, Homo sapiens
  misc_RNA (1)...(19): siRNA sense strand
caagcgaaagaaagaugaa

SEQ ID NO: 2536385 - RNA, 19 nt, Homo sapiens
  misc_RNA (1)...(19): siRNA sense strand
aaucagugaaagggacaaa

SEQ ID NO: 2536386 - RNA, 19 nt, Homo sapiens
  misc_RNA (1)...(19): siRNA sense strand
ccaauauggaagagcuaac

SEQ ID NO: 2536387 - RNA, 19 nt, Homo sapiens
  misc_RNA (1)...(19): siRNA sense strand
ggacauagggcgucggcua

SEQ ID NO: 2536388 - RNA, 19 nt, Homo sapiens
  misc_RNA (1)...(19): siRNA sense strand
gguuagggcucguggggaa

SEQ ID NO: 2536389 - RNA, 19 nt, Homo sapiens
  misc_RNA (1)...(19): siRNA sense strand
cuggcuaugcugaggacua

SEQ ID NO: 2536390 - RNA, 19 nt, Homo sapiens
  misc_RNA (1)...(19): siRNA sense strand
ucuucuaccugguggccua

SEQ ID NO: 2536391 - RNA, 19 nt, Homo sapiens
  misc_RNA (1)...(19): siRNA sense strand
ccacugguguugaucggaa

SEQ ID NO: 2536392 - RNA, 19 nt, Homo sapiens
  misc_RNA (1)...(19): siRNA sense strand
uggcaaccaucuugggcau

SEQ ID NO: 2536393 - RNA, 19 nt, Homo sapiens
  misc_RNA (1)...(19): siRNA sense strand
ggugggucaugcugggcua

SEQ ID NO: 2536394 - RNA, 19 nt, Homo sapiens
  misc_RNA (1)...(19): siRNA sense strand
gcaggaagacuauggguuc

SEQ ID NO: 2536395 - RNA, 19 nt, Homo sapiens
  misc_RNA (1)...(19): siRNA sense strand
ccucaagaugaacaagaau

SEQ ID NO: 2536396 - RNA, 19 nt, Homo sapiens
  misc_RNA (1)...(19): siRNA sense strand
gggaauaagcugaaagcca

SEQ ID NO: 2536397 - RNA, 19 nt, Homo sapiens
  misc_RNA (1)...(19): siRNA sense strand
gggccaaggagaaggagaa

SEQ ID NO: 2536398 - RNA, 19 nt, Homo sapiens
  misc_RNA (1)...(19): siRNA sense strand
ggaauaagcugaaagccau

SEQ ID NO: 2536399 - RNA, 19 nt, Homo sapiens
  misc_RNA (1)...(19): siRNA sense strand
cagugaacauggugaucaa

SEQ ID NO: 2536400 - RNA, 19 nt, Homo sapiens
  misc_RNA (1)...(19): siRNA sense strand
uggcgaaacuggaggaacu

SEQ ID NO: 2536401 - RNA, 19 nt, Homo sapiens
  misc_RNA (1)...(19): siRNA sense strand
cugcugaguuggagaacau

SEQ ID NO: 2536402 - RNA, 19 nt, Homo sapiens
  misc_RNA (1)...(19): siRNA sense strand
ggauauuggccauaaucaa

SEQ ID NO: 2536403 - RNA, 19 nt, Homo sapiens
  misc_RNA (1)...(19): siRNA sense strand
gguugaacguaauuaggaa

SEQ ID NO: 2536404 - RNA, 19 nt, Homo sapiens
  misc_RNA (1)...(19): siRNA sense strand
cugaaaggcuagaaagaac

SEQ ID NO: 2536405 - RNA, 19 nt, Homo sapiens
  misc_RNA (1)...(19): siRNA sense strand
aagaagaauacauggucaa

SEQ ID NO: 2536406 - RNA, 19 nt, Homo sapiens
  misc_RNA (1)...(19): siRNA sense strand
ccagugaaccgauggacaa

SEQ ID NO: 2536407 - RNA, 19 nt, Homo sapiens
  misc_RNA (1)...(19): siRNA sense strand
ggcuacaggcuuuaagaaa

SEQ ID NO: 2536408 - RNA, 19 nt, Homo sapiens
  misc_RNA (1)...(19): siRNA sense strand
uggaagaggaggucaaaga

SEQ ID NO: 2536409 - RNA, 19 nt, Homo sapiens
  misc_RNA (1)...(19): siRNA sense strand
cgaacaaacuggaaagccu

SEQ ID NO: 2536410 - RNA, 19 nt, Homo sapiens
  misc_RNA (1)...(19): siRNA sense strand
gaagaagaauacaugguca

SEQ ID NO: 2536411 - RNA, 19 nt, Homo sapiens
  misc_RNA (1)...(19): siRNA sense strand
ggaaacuacuggcaggaca

SEQ ID NO: 2536412 - RNA, 19 nt, Homo sapiens
  misc_RNA (1)...(19): siRNA sense strand
augugaaagccgaaagcua

SEQ ID NO: 2536413 - RNA, 19 nt, Homo sapiens
  misc_RNA (1)...(19): siRNA sense strand
cgguggaggucuuggaugu

SEQ ID NO: 2536414 - RNA, 19 nt, Homo sapiens
  misc_RNA (1)...(19): siRNA sense strand
aguaagggguugugggaca

SEQ ID NO: 2536415 - RNA, 19 nt, Homo sapiens
  misc_RNA (1)...(19): siRNA sense strand
gcaaaggaaacuuggaacu

SEQ ID NO: 2536416 - RNA, 19 nt, Homo sapiens
  misc_RNA (1)...(19): siRNA sense strand
acuaauugguggaaaagua

SEQ ID NO: 2536417 - RNA, 19 nt, Homo sapiens
  misc_RNA (1)...(19): siRNA sense strand
gaagaagagcugaagagga

SEQ ID NO: 2536418 - RNA, 19 nt, Homo sapiens
  misc_RNA (1)...(19): siRNA sense strand
ccugaguggguaugugaaa

SEQ ID NO: 2536419 - RNA, 19 nt, Homo sapiens
  misc_RNA (1)...(19): siRNA sense strand
ggaauguggaggugcccua

SEQ ID NO: 2536420 - RNA, 19 nt, Homo sapiens
  misc_RNA (1)...(19): siRNA sense strand
aagaaaucaugaagcauca

SEQ ID NO: 2536421 - RNA, 19 nt, Homo sapiens
  misc_RNA (1)...(19): siRNA sense strand
ucaccaaguugaagagucu

SEQ ID NO: 2536422 - RNA, 19 nt, Homo sapiens
  misc_RNA (1)...(19): siRNA sense strand
ccaacaacgaucaugaauu

SEQ ID NO: 2536423 - RNA, 19 nt, Homo sapiens
  misc_RNA (1)...(19): siRNA sense strand
ccguuggagugaugcacaa

SEQ ID NO: 2536424 - RNA, 19 nt, Homo sapiens
  misc_RNA (1)...(19): siRNA sense strand
aaagacagcuugaccggaa

SEQ ID NO: 2536425 - RNA, 19 nt, Homo sapiens
  misc_RNA (1)...(19): siRNA sense strand
ggacaagacgccaagucau

SEQ ID NO: 2536426 - RNA, 19 nt, Homo sapiens
  misc_RNA (1)...(19): siRNA sense strand
gcugugaagaagagcugaa

SEQ ID NO: 2536427 - RNA, 19 nt, Homo sapiens
  misc_RNA (1)...(19): siRNA sense strand
guggaaaaguagaagaagu

SEQ ID NO: 2536428 - RNA, 19 nt, Homo sapiens
  misc_RNA (1)...(19): siRNA sense strand
ccaaacugcaggagcuaga

SEQ ID NO: 2536429 - RNA, 19 nt, Homo sapiens
  misc_RNA (1)...(19): siRNA sense strand
gaaaaguagaagaagugaa

SEQ ID NO: 2536430 - RNA, 19 nt, Homo sapiens
  misc_RNA (1)...(19): siRNA sense strand
ccaacugcaucgaggucuu

SEQ ID NO: 2536431 - RNA, 19 nt, Homo sapiens
  misc_RNA (1)...(19): siRNA sense strand
cuguauggagucaugguua

SEQ ID NO: 2536432 - RNA, 19 nt, Homo sapiens
  misc_RNA (1)...(19): siRNA sense strand
agcuagaaguuuuggauau

SEQ ID NO: 2536433 - RNA, 19 nt, Homo sapiens
  misc_RNA (1)...(19): siRNA sense strand
cgacaacggccuugacagu

SEQ ID NO: 2536434 - RNA, 19 nt, Homo sapiens
  misc_RNA (1)...(19): siRNA sense strand
cgacaagucuccaagguug

SEQ ID NO: 2536435 - RNA, 19 nt, Homo sapiens
  misc_RNA (1)...(19): siRNA sense strand
cagcccugucggugaauaa

SEQ ID NO: 2536436 - RNA, 19 nt, Homo sapiens
  misc_RNA (1)...(19): siRNA sense strand
agcuagaccugacuggaaa

SEQ ID NO: 2536437 - RNA, 19 nt, Homo sapiens
  misc_RNA (1)...(19): siRNA sense strand
cguaaaggcaagaugcagu

SEQ ID NO: 2536438 - RNA, 19 nt, Homo sapiens
  misc_RNA (1)...(19): siRNA sense strand
ggccaaggagaaggagaaa

SEQ ID NO: 2536439 - RNA, 19 nt, Homo sapiens
  misc_RNA (1)...(19): siRNA sense strand
agacaauaagcuuggugau

SEQ ID NO: 2536440 - RNA, 19 nt, Homo sapiens
  misc_RNA (1)...(19): siRNA sense strand
gaacaaacuggaaagccuu

SEQ ID NO: 2536441 - RNA, 19 nt, Homo sapiens
  misc_RNA (1)...(19): siRNA sense strand
ucacaaaacccuggaacua

SEQ ID NO: 2536442 - RNA, 19 nt, Homo sapiens
  misc_RNA (1)...(19): siRNA sense strand
uaguaucaucugugaaaga

SEQ ID NO: 2536443 - RNA, 19 nt, Homo sapiens
  misc_RNA (1)...(19): siRNA sense strand
ccaaauuaucuguccuaca

SEQ ID NO: 2536444 - RNA, 19 nt, Homo sapiens
  misc_RNA (1)...(19): siRNA sense strand
gugaaagccgaaagcuaga

SEQ ID NO: 2536445 - RNA, 19 nt, Homo sapiens
  misc_RNA (1)...(19): siRNA sense strand
aauaacagccucacagaca

SEQ ID NO: 2536446 - RNA, 19 nt, Homo sapiens
  misc_RNA (1)...(19): siRNA sense strand
gggcuuaaugaacugcaaa

SEQ ID NO: 2536447 - RNA, 19 nt, Homo sapiens
  misc_RNA (1)...(19): siRNA sense strand
aauugacugcuguggauaa

SEQ ID NO: 2536448 - RNA, 19 nt, Homo sapiens
  misc_RNA (1)...(19): siRNA sense strand
ccugaaaggcuagaaagaa

SEQ ID NO: 2536449 - RNA, 19 nt, Homo sapiens
  misc_RNA (1)...(19): siRNA sense strand
ccggaaagaugcauguucu

SEQ ID NO: 2536450 - RNA, 19 nt, Homo sapiens
  misc_RNA (1)...(19): siRNA sense strand
uaacagccucacagacaaa

SEQ ID NO: 2536451 - RNA, 19 nt, Homo sapiens
  misc_RNA (1)...(19): siRNA sense strand
aauugaucucagugggaau

SEQ ID NO: 2536452 - RNA, 19 nt, Homo sapiens
  misc_RNA (1)...(19): siRNA sense strand
cgagauuagcagugagcuc

SEQ ID NO: 2536453 - RNA, 19 nt, Homo sapiens
  misc_RNA (1)...(19): siRNA sense strand
agcuggaagaggaggucaa

SEQ ID NO: 2536454 - RNA, 19 nt, Homo sapiens
  misc_RNA (1)...(19): siRNA sense strand
cagcuugaccuacgagaca

SEQ ID NO: 2536455 - RNA, 19 nt, Homo sapiens
  misc_RNA (1)...(19): siRNA sense strand
ggaaagaggagguugcaga

SEQ ID NO: 2536456 - RNA, 19 nt, Homo sapiens
  misc_RNA (1)...(19): siRNA sense strand
gugaagaagauuagcauca

SEQ ID NO: 2536457 - RNA, 19 nt, Homo sapiens
  misc_RNA (1)...(19): siRNA sense strand
gaucaaacacggaggagga

SEQ ID NO: 2536458 - RNA, 19 nt, Homo sapiens
  misc_RNA (1)...(19): siRNA sense strand
aggaggugguggagacaau

SEQ ID NO: 2536459 - RNA, 19 nt, Homo sapiens
  misc_RNA (1)...(19): siRNA sense strand
caguacaacuuaagagcca

SEQ ID NO: 2536460 - RNA, 19 nt, Homo sapiens
  misc_RNA (1)...(19): siRNA sense strand
ucacagagcgggagcugaa

SEQ ID NO: 2536461 - RNA, 19 nt, Homo sapiens
  misc_RNA (1)...(19): siRNA sense strand
uggaaaaguaccuggacaa

SEQ ID NO: 2536462 - RNA, 19 nt, Homo sapiens
  misc_RNA (1)...(19): siRNA sense strand
ucaaguacguggaugacau

SEQ ID NO: 2536463 - RNA, 19 nt, Homo sapiens
  misc_RNA (1)...(19): siRNA sense strand
gagaacgggacuugggcau

SEQ ID NO: 2536464 - RNA, 19 nt, Homo sapiens
  misc_RNA (1)...(19): siRNA sense strand
cauauggugaagaagauua

SEQ ID NO: 2536465 - RNA, 19 nt, Homo sapiens
  misc_RNA (1)...(19): siRNA sense strand
gggagaggguuccgagugu

SEQ ID NO: 2536466 - RNA, 19 nt, Homo sapiens
  misc_RNA (1)...(19): siRNA sense strand
ucugcaagguggacaaaca

SEQ ID NO: 2536467 - RNA, 19 nt, Homo sapiens
  misc_RNA (1)...(19): siRNA sense strand
gcaacacagcccugcacua

SEQ ID NO: 2536468 - RNA, 19 nt, Homo sapiens
  misc_RNA (1)...(19): siRNA sense strand
caaacacggaggaggagau

SEQ ID NO: 2536469 - RNA, 19 nt, Homo sapiens
  misc_RNA (1)...(19): siRNA sense strand
gaucuaucaugaaacggaa

SEQ ID NO: 2536470 - RNA, 19 nt, Homo sapiens
  misc_RNA (1)...(19): siRNA sense strand
gcaagguggacaaacagaa

SEQ ID NO: 2536471 - RNA, 19 nt, Homo sapiens
  misc_RNA (1)...(19): siRNA sense strand
ggauacaguccggguggua

SEQ ID NO: 2536472 - RNA, 19 nt, Homo sapiens
  misc_RNA (1)...(19): siRNA sense strand
ucaacaucgccgacagcaa

SEQ ID NO: 2536473 - RNA, 19 nt, Homo sapiens
  misc_RNA (1)...(19): siRNA sense strand
ccugugaggcagaugucaa

SEQ ID NO: 2536474 - RNA, 19 nt, Homo sapiens
  misc_RNA (1)...(19): siRNA sense strand
gagcacggccacaaggaga

SEQ ID NO: 2536475 - RNA, 19 nt, Homo sapiens
  misc_RNA (1)...(19): siRNA sense strand
ccacagugcugcaggagug

SEQ ID NO: 2536476 - RNA, 19 nt, Homo sapiens
  misc_RNA (1)...(19): siRNA sense strand
cccagaaguuccugccgaa

SEQ ID NO: 2536477 - RNA, 19 nt, Homo sapiens
  misc_RNA (1)...(19): siRNA sense strand
ugucagcugucucgagaau

SEQ ID NO: 2536478 - RNA, 19 nt, Homo sapiens
  misc_RNA (1)...(19): siRNA sense strand
uggacuacguggucaacau

SEQ ID NO: 2536479 - RNA, 19 nt, Homo sapiens
  misc_RNA (1)...(19): siRNA sense strand
gcggguggacguugucaaa

SEQ ID NO: 2536480 - RNA, 19 nt, Homo sapiens
  misc_RNA (1)...(19): siRNA sense strand
guccauauggugaagaaga

SEQ ID NO: 2536481 - RNA, 19 nt, Homo sapiens
  misc_RNA (1)...(19): siRNA sense strand
gcaacguccauauggugaa

SEQ ID NO: 2536482 - RNA, 19 nt, Homo sapiens
  misc_RNA (1)...(19): siRNA sense strand
cgugcgaucuaucaugaaa

SEQ ID NO: 2536483 - RNA, 19 nt, Homo sapiens
  misc_RNA (1)...(19): siRNA sense strand
cggaggaggagaucaggau

SEQ ID NO: 2536484 - RNA, 19 nt, Homo sapiens
  misc_RNA (1)...(19): siRNA sense strand
acguccauauggugaagaa

SEQ ID NO: 2536485 - RNA, 19 nt, Homo sapiens
  misc_RNA (1)...(19): siRNA sense strand
ucagaugacgagagcccua

SEQ ID NO: 2536486 - RNA, 19 nt, Homo sapiens
  misc_RNA (1)...(19): siRNA sense strand
ucaagaaggcgcugcagga

SEQ ID NO: 2536487 - RNA, 19 nt, Homo sapiens
  misc_RNA (1)...(19): siRNA sense strand
gaagaagauuagcaucaca

SEQ ID NO: 2536488 - RNA, 19 nt, Homo sapiens
  misc_RNA (1)...(19): siRNA sense strand
ccagcacagcagagaacau

SEQ ID NO: 2536489 - RNA, 19 nt, Homo sapiens
  misc_RNA (1)...(19): siRNA sense strand
aggacgacaucgagacugu

SEQ ID NO: 2536490 - RNA, 19 nt, Homo sapiens
  misc_RNA (1)...(19): siRNA sense strand
gagaauuggagcuggccau

SEQ ID NO: 2536491 - RNA, 19 nt, Homo sapiens
  misc_RNA (1)...(19): siRNA sense strand
ccaucgcacuggagcggua

SEQ ID NO: 2536492 - RNA, 19 nt, Homo sapiens
  misc_RNA (1)...(19): siRNA sense strand
aagcaggguccgaaaccaa

SEQ ID NO: 2536493 - RNA, 19 nt, Homo sapiens
  misc_RNA (1)...(19): siRNA sense strand
gugcgaauguugcugguga

SEQ ID NO: 2536494 - RNA, 19 nt, Homo sapiens
  misc_RNA (1)...(19): siRNA sense strand
cgcuaagccucguggccau

SEQ ID NO: 2536495 - RNA, 19 nt, Homo sapiens
  misc_RNA (1)...(19): siRNA sense strand
ugaugagcguuggaggaaa

SEQ ID NO: 2536496 - RNA, 19 nt, Homo sapiens
  misc_RNA (1)...(19): siRNA sense strand
ccugaugagcguuggagga

SEQ ID NO: 2536497 - RNA, 19 nt, Homo sapiens
  misc_RNA (1)...(19): siRNA sense strand
gccaaagcaggguccgaaa

SEQ ID NO: 2536498 - RNA, 19 nt, Homo sapiens
  misc_RNA (1)...(19): siRNA sense strand
agaagcgcguggugcgaau

SEQ ID NO: 2536499 - RNA, 19 nt, Homo sapiens
  misc_RNA (1)...(19): siRNA sense strand
agugacagcgacagccaaa

SEQ ID NO: 2536500 - RNA, 19 nt, Homo sapiens
  misc_RNA (1)...(19): siRNA sense strand
ccgcauuacuacaggagaa

SEQ ID NO: 2536501 - RNA, 19 nt, Homo sapiens
  misc_RNA (1)...(19): siRNA sense strand
caucaaacccugagagcuu

SEQ ID NO: 2536502 - RNA, 19 nt, Homo sapiens
  misc_RNA (1)...(19): siRNA sense strand
gggaagaccaggaggagau

SEQ ID NO: 2536503 - RNA, 19 nt, Homo sapiens
  misc_RNA (1)...(19): siRNA sense strand
gcucaagucaagagaaaga

SEQ ID NO: 2536504 - RNA, 19 nt, Homo sapiens
  misc_RNA (1)...(19): siRNA sense strand
uagcucaagucaagagaaa

SEQ ID NO: 2536505 - RNA, 19 nt, Homo sapiens
  misc_RNA (1)...(19): siRNA sense strand
ggauauagaccaaacccaa

SEQ ID NO: 2536506 - RNA, 19 nt, Homo sapiens
  misc_RNA (1)...(19): siRNA sense strand
ggaucagaaggcaggauua

SEQ ID NO: 2536507 - RNA, 19 nt, Homo sapiens
  misc_RNA (1)...(19): siRNA sense strand
ggaaauuuggccaggaaca

SEQ ID NO: 2536508 - RNA, 19 nt, Homo sapiens
  misc_RNA (1)...(19): siRNA sense strand
ccuaagaagaaggagaaua

SEQ ID NO: 2536509 - RNA, 19 nt, Homo sapiens
  misc_RNA (1)...(19): siRNA sense strand
ugcagaagccacugggaaa

SEQ ID NO: 2536510 - RNA, 19 nt, Homo sapiens
  misc_RNA (1)...(19): siRNA sense strand
aaguggaaggaguggauaa

SEQ ID NO: 2536511 - RNA, 19 nt, Homo sapiens
  misc_RNA (1)...(19): siRNA sense strand
aaugagacccaaagacaaa

SEQ ID NO: 2536512 - RNA, 19 nt, Homo sapiens
  misc_RNA (1)...(19): siRNA sense strand
agcaagaggaccugguuaa

SEQ ID NO: 2536513 - RNA, 19 nt, Homo sapiens
  misc_RNA (1)...(19): siRNA sense strand
cagcuaaguccuaagaaga

SEQ ID NO: 2536514 - RNA, 19 nt, Homo sapiens
  misc_RNA (1)...(19): siRNA sense strand
agauauaauccgaaggugu

SEQ ID NO: 2536515 - RNA, 19 nt, Homo sapiens
  misc_RNA (1)...(19): siRNA sense strand
augugauacuccaggacaa

SEQ ID NO: 2536516 - RNA, 19 nt, Homo sapiens
  misc_RNA (1)...(19): siRNA sense strand
gggcagaugaguggagcua

SEQ ID NO: 2536517 - RNA, 19 nt, Homo sapiens
  misc_RNA (1)...(19): siRNA sense strand
ucacacaauaccugcaaua

SEQ ID NO: 2536518 - RNA, 19 nt, Homo sapiens
  misc_RNA (1)...(19): siRNA sense strand
ugaagaagacagaaaggau

SEQ ID NO: 2536519 - RNA, 19 nt, Homo sapiens
  misc_RNA (1)...(19): siRNA sense strand
uagcauaccaggugcgaga

SEQ ID NO: 2536520 - RNA, 19 nt, Homo sapiens
  misc_RNA (1)...(19): siRNA sense strand
gaagaaauugacagagcuu

SEQ ID NO: 2536521 - RNA, 19 nt, Homo sapiens
  misc_RNA (1)...(19): siRNA sense strand
aggauuauauggacagaca

SEQ ID NO: 2536522 - RNA, 19 nt, Homo sapiens
  misc_RNA (1)...(19): siRNA sense strand
caggaaauuuggccaggaa

SEQ ID NO: 2536523 - RNA, 19 nt, Homo sapiens
  misc_RNA (1)...(19): siRNA sense strand
agacaugaucuuucaggaa

SEQ ID NO: 2536524 - RNA, 19 nt, Homo sapiens
  misc_RNA (1)...(19): siRNA sense strand
ccgaagguguauucagaga

SEQ ID NO: 2536525 - RNA, 19 nt, Homo sapiens
  misc_RNA (1)...(19): siRNA sense strand
gagagaacagaauggauau

SEQ ID NO: 2536526 - RNA, 19 nt, Homo sapiens
  misc_RNA (1)...(19): siRNA sense strand
uggugaaucgagacggaaa

SEQ ID NO: 2536527 - RNA, 19 nt, Homo sapiens
  misc_RNA (1)...(19): siRNA sense strand
aauucaaacuccaugggaa

SEQ ID NO: 2536528 - RNA, 19 nt, Homo sapiens
  misc_RNA (1)...(19): siRNA sense strand
aggcaggauuauauggaca

SEQ ID NO: 2536529 - RNA, 19 nt, Homo sapiens
  misc_RNA (1)...(19): siRNA sense strand
aagaagacagaaaggauuu

SEQ ID NO: 2536530 - RNA, 19 nt, Homo sapiens
  misc_RNA (1)...(19): siRNA sense strand
ucgugggaguccaaagaua

SEQ ID NO: 2536531 - RNA, 19 nt, Homo sapiens
  misc_RNA (1)...(19): siRNA sense strand
ggucacuguuacaagagaa

SEQ ID NO: 2536532 - RNA, 19 nt, Homo sapiens
  misc_RNA (1)...(19): siRNA sense strand
agagacaagugaagaggga

SEQ ID NO: 2536533 - RNA, 19 nt, Homo sapiens
  misc_RNA (1)...(19): siRNA sense strand
ggugggaauccaagaauga

SEQ ID NO: 2536534 - RNA, 19 nt, Homo sapiens
  misc_RNA (1)...(19): siRNA sense strand
gagugacgaaagagcauua

SEQ ID NO: 2536535 - RNA, 19 nt, Homo sapiens
  misc_RNA (1)...(19): siRNA sense strand
cauuacuacaggagaaaga

SEQ ID NO: 2536536 - RNA, 19 nt, Homo sapiens
  misc_RNA (1)...(19): siRNA sense strand
caaauuauggaaugggaca

SEQ ID NO: 2536537 - RNA, 19 nt, Homo sapiens
  misc_RNA (1)...(19): siRNA sense strand
uggauaaucuagaugcuau

SEQ ID NO: 2536538 - RNA, 19 nt, Homo sapiens
  misc_RNA (1)...(19): siRNA sense strand
ggauaaucuagaugcuauu

SEQ ID NO: 2536539 - RNA, 19 nt, Homo sapiens
  misc_RNA (1)...(19): siRNA sense strand
agaugaaccagcaaggcaa

SEQ ID NO: 2536540 - RNA, 19 nt, Homo sapiens
  misc_RNA (1)...(19): siRNA sense strand
ugauauucuggaagacaua

SEQ ID NO: 2536541 - RNA, 19 nt, Homo sapiens
  misc_RNA (1)...(19): siRNA sense strand
agacaagugaagagggauc

SEQ ID NO: 2536542 - RNA, 19 nt, Homo sapiens
  misc_RNA (1)...(19): siRNA sense strand
ccucagaaaugaagggcug

SEQ ID NO: 2536543 - RNA, 19 nt, Homo sapiens
  misc_RNA (1)...(19): siRNA sense strand
gggcuggccaucaggaaau

SEQ ID NO: 2536544 - RNA, 19 nt, Homo sapiens
  misc_RNA (1)...(19): siRNA sense strand
caaugaugaugauguucaa

SEQ ID NO: 2536545 - RNA, 19 nt, Homo sapiens
  misc_RNA (1)...(19): siRNA sense strand
agaacagaauggauauaga

SEQ ID NO: 2536546 - RNA, 19 nt, Homo sapiens
  misc_RNA (1)...(19): siRNA sense strand
ggaugaucuuguugggcca

SEQ ID NO: 2536547 - RNA, 19 nt, Homo sapiens
  misc_RNA (1)...(19): siRNA sense strand
ucuuaauggccaugcagaa

SEQ ID NO: 2536548 - RNA, 19 nt, Homo sapiens
  misc_RNA (1)...(19): siRNA sense strand
cgguaggcggcaugaguau

SEQ ID NO: 2536549 - RNA, 19 nt, Homo sapiens
  misc_RNA (1)...(19): siRNA sense strand
gacaaagaaaguaaggaga

SEQ ID NO: 2536550 - RNA, 19 nt, Homo sapiens
  misc_RNA (1)...(19): siRNA sense strand
aaugauggauagucaggaa

SEQ ID NO: 2536551 - RNA, 19 nt, Homo sapiens
  misc_RNA (1)...(19): siRNA sense strand
aagacagauacgucaaaua

SEQ ID NO: 2536552 - RNA, 19 nt, Homo sapiens
  misc_RNA (1)...(19): siRNA sense strand
ggaacuaauucucuggguu

SEQ ID NO: 2536553 - RNA, 19 nt, Homo sapiens
  misc_RNA (1)...(19): siRNA sense strand
aggccaagaagcagcagua

SEQ ID NO: 2536554 - RNA, 19 nt, Homo sapiens
  misc_RNA (1)...(19): siRNA sense strand
gcuuucaucuucagggaca

SEQ ID NO: 2536555 - RNA, 19 nt, Homo sapiens
  misc_RNA (1)...(19): siRNA sense strand
uacaugaagaagacagaaa

SEQ ID NO: 2536556 - RNA, 19 nt, Homo sapiens
  misc_RNA (1)...(19): siRNA sense strand
ggacaagggauuagaccac

SEQ ID NO: 2536557 - RNA, 19 nt, Homo sapiens
  misc_RNA (1)...(19): siRNA sense strand
ucaaaugaggccuggugaa

SEQ ID NO: 2536558 - RNA, 19 nt, Homo sapiens
  misc_RNA (1)...(19): siRNA sense strand
caaugucaaaccagauaaa

SEQ ID NO: 2536559 - RNA, 19 nt, Homo sapiens
  misc_RNA (1)...(19): siRNA sense strand
ugauggaacuauagugacu

SEQ ID NO: 2536560 - RNA, 19 nt, Homo sapiens
  misc_RNA (1)...(19): siRNA sense strand
ccucagugacaaagaaagu

SEQ ID NO: 2536561 - RNA, 19 nt, Homo sapiens
  misc_RNA (1)...(19): siRNA sense strand
ccgcauuacuacaggagaa

SEQ ID NO: 2536562 - RNA, 19 nt, Homo sapiens
  misc_RNA (1)...(19): siRNA sense strand
caucaaacccugagagcuu

SEQ ID NO: 2536563 - RNA, 19 nt, Homo sapiens
  misc_RNA (1)...(19): siRNA sense strand
gggaagaccaggaggagau

SEQ ID NO: 2536564 - RNA, 19 nt, Homo sapiens
  misc_RNA (1)...(19): siRNA sense strand
gcucaagucaagagaaaga

SEQ ID NO: 2536565 - RNA, 19 nt, Homo sapiens
  misc_RNA (1)...(19): siRNA sense strand
uagcucaagucaagagaaa

SEQ ID NO: 2536566 - RNA, 19 nt, Homo sapiens
  misc_RNA (1)...(19): siRNA sense strand
ggauauagaccaaacccaa

SEQ ID NO: 2536567 - RNA, 19 nt, Homo sapiens
  misc_RNA (1)...(19): siRNA sense strand
ggaucagaaggcaggauua

SEQ ID NO: 2536568 - RNA, 19 nt, Homo sapiens
  misc_RNA (1)...(19): siRNA sense strand
ggaaauuuggccaggaaca

SEQ ID NO: 2536569 - RNA, 19 nt, Homo sapiens
  misc_RNA (1)...(19): siRNA sense strand
ccuaagaagaaggagaaua

SEQ ID NO: 2536570 - RNA, 19 nt, Homo sapiens
  misc_RNA (1)...(19): siRNA sense strand
ugcagaagccacugggaaa

SEQ ID NO: 2536571 - RNA, 19 nt, Homo sapiens
  misc_RNA (1)...(19): siRNA sense strand
aaguggaaggaguggauaa

SEQ ID NO: 2536572 - RNA, 19 nt, Homo sapiens
  misc_RNA (1)...(19): siRNA sense strand
aaugagacccaaagacaaa

SEQ ID NO: 2536573 - RNA, 19 nt, Homo sapiens
  misc_RNA (1)...(19): siRNA sense strand
agcaagaggaccugguuaa

SEQ ID NO: 2536574 - RNA, 19 nt, Homo sapiens
  misc_RNA (1)...(19): siRNA sense strand
cagcuaaguccuaagaaga

SEQ ID NO: 2536575 - RNA, 19 nt, Homo sapiens
  misc_RNA (1)...(19): siRNA sense strand
agauauaauccgaaggugu

SEQ ID NO: 2536576 - RNA, 19 nt, Homo sapiens
  misc_RNA (1)...(19): siRNA sense strand
augugauacuccaggacaa

SEQ ID NO: 2536577 - RNA, 19 nt, Homo sapiens
  misc_RNA (1)...(19): siRNA sense strand
gggcagaugaguggagcua

SEQ ID NO: 2536578 - RNA, 19 nt, Homo sapiens
  misc_RNA (1)...(19): siRNA sense strand
ucacacaauaccugcaaua

SEQ ID NO: 2536579 - RNA, 19 nt, Homo sapiens
  misc_RNA (1)...(19): siRNA sense strand
ugaagaagacagaaaggau

SEQ ID NO: 2536580 - RNA, 19 nt, Homo sapiens
  misc_RNA (1)...(19): siRNA sense strand
uagcauaccaggugcgaga

SEQ ID NO: 2536581 - RNA, 19 nt, Homo sapiens
  misc_RNA (1)...(19): siRNA sense strand
gaagaaauugacagagcuu

SEQ ID NO: 2536582 - RNA, 19 nt, Homo sapiens
  misc_RNA (1)...(19): siRNA sense strand
aggauuauauggacagaca

SEQ ID NO: 2536583 - RNA, 19 nt, Homo sapiens
  misc_RNA (1)...(19): siRNA sense strand
caggaaauuuggccaggaa

SEQ ID NO: 2536584 - RNA, 19 nt, Homo sapiens
  misc_RNA (1)...(19): siRNA sense strand
agacaugaucuuucaggaa

SEQ ID NO: 2536585 - RNA, 19 nt, Homo sapiens
  misc_RNA (1)...(19): siRNA sense strand
ccgaagguguauucagaga

SEQ ID NO: 2536586 - RNA, 19 nt, Homo sapiens
  misc_RNA (1)...(19): siRNA sense strand
gagagaacagaauggauau

SEQ ID NO: 2536587 - RNA, 19 nt, Homo sapiens
  misc_RNA (1)...(19): siRNA sense strand
uggugaaucgagacggaaa

SEQ ID NO: 2536588 - RNA, 19 nt, Homo sapiens
  misc_RNA (1)...(19): siRNA sense strand
aauucaaacuccaugggaa

SEQ ID NO: 2536589 - RNA, 19 nt, Homo sapiens
  misc_RNA (1)...(19): siRNA sense strand
aggcaggauuauauggaca

SEQ ID NO: 2536590 - RNA, 19 nt, Homo sapiens
  misc_RNA (1)...(19): siRNA sense strand
aagaagacagaaaggauuu

SEQ ID NO: 2536591 - RNA, 19 nt, Homo sapiens
  misc_RNA (1)...(19): siRNA sense strand
ucgugggaguccaaagaua

SEQ ID NO: 2536592 - RNA, 19 nt, Homo sapiens
  misc_RNA (1)...(19): siRNA sense strand
ggucacuguuacaagagaa

SEQ ID NO: 2536593 - RNA, 19 nt, Homo sapiens
  misc_RNA (1)...(19): siRNA sense strand
agagacaagugaagaggga

SEQ ID NO: 2536594 - RNA, 19 nt, Homo sapiens
  misc_RNA (1)...(19): siRNA sense strand
ggugggaauccaagaauga

SEQ ID NO: 2536595 - RNA, 19 nt, Homo sapiens
  misc_RNA (1)...(19): siRNA sense strand
gagugacgaaagagcauua

SEQ ID NO: 2536596 - RNA, 19 nt, Homo sapiens
  misc_RNA (1)...(19): siRNA sense strand
cauuacuacaggagaaaga

SEQ ID NO: 2536597 - RNA, 19 nt, Homo sapiens
  misc_RNA (1)...(19): siRNA sense strand
caaauuauggaaugggaca

SEQ ID NO: 2536598 - RNA, 19 nt, Homo sapiens
  misc_RNA (1)...(19): siRNA sense strand
uggauaaucuagaugcuau

SEQ ID NO: 2536599 - RNA, 19 nt, Homo sapiens
  misc_RNA (1)...(19): siRNA sense strand
ggauaaucuagaugcuauu

SEQ ID NO: 2536600 - RNA, 19 nt, Homo sapiens
  misc_RNA (1)...(19): siRNA sense strand
agaugaaccagcaaggcaa

SEQ ID NO: 2536601 - RNA, 19 nt, Homo sapiens
  misc_RNA (1)...(19): siRNA sense strand
ugauauucuggaagacaua

SEQ ID NO: 2536602 - RNA, 19 nt, Homo sapiens
  misc_RNA (1)...(19): siRNA sense strand
agacaagugaagagggauc

SEQ ID NO: 2536603 - RNA, 19 nt, Homo sapiens
  misc_RNA (1)...(19): siRNA sense strand
ccucagaaaugaagggcug

SEQ ID NO: 2536604 - RNA, 19 nt, Homo sapiens
  misc_RNA (1)...(19): siRNA sense strand
gggcuggccaucaggaaau

SEQ ID NO: 2536605 - RNA, 19 nt, Homo sapiens
  misc_RNA (1)...(19): siRNA sense strand
caaugaugaugauguucaa

SEQ ID NO: 2536606 - RNA, 19 nt, Homo sapiens
  misc_RNA (1)...(19): siRNA sense strand
agaacagaauggauauaga

SEQ ID NO: 2536607 - RNA, 19 nt, Homo sapiens
  misc_RNA (1)...(19): siRNA sense strand
ggaugaucuuguugggcca

SEQ ID NO: 2536608 - RNA, 19 nt, Homo sapiens
  misc_RNA (1)...(19): siRNA sense strand
ucuuaauggccaugcagaa

SEQ ID NO: 2536609 - RNA, 19 nt, Homo sapiens
  misc_RNA (1)...(19): siRNA sense strand
cgguaggcggcaugaguau

SEQ ID NO: 2536610 - RNA, 19 nt, Homo sapiens
  misc_RNA (1)...(19): siRNA sense strand
gacaaagaaaguaaggaga

SEQ ID NO: 2536611 - RNA, 19 nt, Homo sapiens
  misc_RNA (1)...(19): siRNA sense strand
aaugauggauagucaggaa

SEQ ID NO: 2536612 - RNA, 19 nt, Homo sapiens
  misc_RNA (1)...(19): siRNA sense strand
aagacagauacgucaaaua

SEQ ID NO: 2536613 - RNA, 19 nt, Homo sapiens
  misc_RNA (1)...(19): siRNA sense strand
ggaacuaauucucuggguu

SEQ ID NO: 2536614 - RNA, 19 nt, Homo sapiens
  misc_RNA (1)...(19): siRNA sense strand
aggccaagaagcagcagua

SEQ ID NO: 2536615 - RNA, 19 nt, Homo sapiens
  misc_RNA (1)...(19): siRNA sense strand
gcuuucaucuucagggaca

SEQ ID NO: 2536616 - RNA, 19 nt, Homo sapiens
  misc_RNA (1)...(19): siRNA sense strand
uacaugaagaagacagaaa

SEQ ID NO: 2536617 - RNA, 19 nt, Homo sapiens
  misc_RNA (1)...(19): siRNA sense strand
ggacaagggauuagaccac

SEQ ID NO: 2536618 - RNA, 19 nt, Homo sapiens
  misc_RNA (1)...(19): siRNA sense strand
ucaaaugaggccuggugaa

SEQ ID NO: 2536619 - RNA, 19 nt, Homo sapiens
  misc_RNA (1)...(19): siRNA sense strand
caaugucaaaccagauaaa

SEQ ID NO: 2536620 - RNA, 19 nt, Homo sapiens
  misc_RNA (1)...(19): siRNA sense strand
ugauggaacuauagugacu

SEQ ID NO: 2536621 - RNA, 19 nt, Homo sapiens
  misc_RNA (1)...(19): siRNA sense strand
ccucagugacaaagaaagu

SEQ ID NO: 2536622 - RNA, 19 nt, Homo sapiens
  misc_RNA (1)...(19): siRNA sense strand
ggauuuacacagagagcaa

SEQ ID NO: 2536623 - RNA, 19 nt, Homo sapiens
  misc_RNA (1)...(19): siRNA sense strand
gggaagaaaauguuagaaa

SEQ ID NO: 2536624 - RNA, 19 nt, Homo sapiens
  misc_RNA (1)...(19): siRNA sense strand
aggaaaagagggaagaaaa

SEQ ID NO: 2536625 - RNA, 19 nt, Homo sapiens
  misc_RNA (1)...(19): siRNA sense strand
ggaaaagagggaagaaaau

SEQ ID NO: 2536626 - RNA, 19 nt, Homo sapiens
  misc_RNA (1)...(19): siRNA sense strand
cagcagagccagugaacca

SEQ ID NO: 2536627 - RNA, 19 nt, Homo sapiens
  misc_RNA (1)...(19): siRNA sense strand
cugcuauaguucagaauau

SEQ ID NO: 2536628 - RNA, 19 nt, Homo sapiens
  misc_RNA (1)...(19): siRNA sense strand
cguacagugugaaggagaa

SEQ ID NO: 2536629 - RNA, 19 nt, Homo sapiens
  misc_RNA (1)...(19): siRNA sense strand
uuacuuauuuggugggaau

SEQ ID NO: 2536630 - RNA, 19 nt, Homo sapiens
  misc_RNA (1)...(19): siRNA sense strand
augacaagcugguguugaa

SEQ ID NO: 2536631 - RNA, 19 nt, Homo sapiens
  misc_RNA (1)...(19): siRNA sense strand
gauuauuuacugaggcauu

SEQ ID NO: 2536632 - RNA, 19 nt, Homo sapiens
  misc_RNA (1)...(19): siRNA sense strand
aaggagaaccaguggacau

SEQ ID NO: 2536633 - RNA, 19 nt, Homo sapiens
  misc_RNA (1)...(19): siRNA sense strand
uuuaugacauugugaggaa

SEQ ID NO: 2536634 - RNA, 19 nt, Homo sapiens
  misc_RNA (1)...(19): siRNA sense strand
gcuuguauacgaugagcua

SEQ ID NO: 2536635 - RNA, 19 nt, Homo sapiens
  misc_RNA (1)...(19): siRNA sense strand
aggaaugagaggaggccau

SEQ ID NO: 2536636 - RNA, 19 nt, Homo sapiens
  misc_RNA (1)...(19): siRNA sense strand
uguugaacuuaguggcauu

SEQ ID NO: 2536637 - RNA, 19 nt, Homo sapiens
  misc_RNA (1)...(19): siRNA sense strand
gagaaugguccuagugcca

SEQ ID NO: 2536638 - RNA, 19 nt, Homo sapiens
  misc_RNA (1)...(19): siRNA sense strand
agucuuugguggaaugaau

SEQ ID NO: 2536639 - RNA, 19 nt, Homo sapiens
  misc_RNA (1)...(19): siRNA sense strand
guggaaugaaugaagaaaa

SEQ ID NO: 2536640 - RNA, 19 nt, Homo sapiens
  misc_RNA (1)...(19): siRNA sense strand
ugcgaagaguugauugaaa

SEQ ID NO: 2536641 - RNA, 19 nt, Homo sapiens
  misc_RNA (1)...(19): siRNA sense strand
gcguacagugugaaggaga

SEQ ID NO: 2536642 - RNA, 19 nt, Homo sapiens
  misc_RNA (1)...(19): siRNA sense strand
caagaaagacucugggaug

SEQ ID NO: 2536643 - RNA, 19 nt, Homo sapiens
  misc_RNA (1)...(19): siRNA sense strand
ucagcaaagauaaggaaaa

SEQ ID NO: 2536644 - RNA, 19 nt, Homo sapiens
  misc_RNA (1)...(19): siRNA sense strand
uaccaaaggugauggggaa

SEQ ID NO: 2536645 - RNA, 19 nt, Homo sapiens
  misc_RNA (1)...(19): siRNA sense strand
gagucaaaucauucccaaa

SEQ ID NO: 2536646 - RNA, 19 nt, Homo sapiens
  misc_RNA (1)...(19): siRNA sense strand
cugaaguuguguagaccuu

SEQ ID NO: 2536647 - RNA, 19 nt, Homo sapiens
  misc_RNA (1)...(19): siRNA sense strand
ccaagauugcacuggaaca

SEQ ID NO: 2536648 - RNA, 19 nt, Homo sapiens
  misc_RNA (1)...(19): siRNA sense strand
auccagaacugaaugaaau

SEQ ID NO: 2536649 - RNA, 19 nt, Homo sapiens
  misc_RNA (1)...(19): siRNA sense strand
aagccacgauggagucaaa

SEQ ID NO: 2536650 - RNA, 19 nt, Homo sapiens
  misc_RNA (1)...(19): siRNA sense strand
guagaugacagcagagcca

SEQ ID NO: 2536651 - RNA, 19 nt, Homo sapiens
  misc_RNA (1)...(19): siRNA sense strand
auaucagucaacaggaaua

SEQ ID NO: 2536652 - RNA, 19 nt, Homo sapiens
  misc_RNA (1)...(19): siRNA sense strand
guccaguggcuuaaagaau

SEQ ID NO: 2536653 - RNA, 19 nt, Homo sapiens
  misc_RNA (1)...(19): siRNA sense strand
gcauaaaauugaugaacag

SEQ ID NO: 2536654 - RNA, 19 nt, Homo sapiens
  misc_RNA (1)...(19): siRNA sense strand
uaugacauugugaggaaua

SEQ ID NO: 2536655 - RNA, 19 nt, Homo sapiens
  misc_RNA (1)...(19): siRNA sense strand
agaugagauuagaugacuu

SEQ ID NO: 2536656 - RNA, 19 nt, Homo sapiens
  misc_RNA (1)...(19): siRNA sense strand
cuucuaucguuaugacauu

SEQ ID NO: 2536657 - RNA, 19 nt, Homo sapiens
  misc_RNA (1)...(19): siRNA sense strand
uggugggaauccaggaaaa

SEQ ID NO: 2536658 - RNA, 19 nt, Homo sapiens
  misc_RNA (1)...(19): siRNA sense strand
agaacauuuuaguggacaa

SEQ ID NO: 2536659 - RNA, 19 nt, Homo sapiens
  misc_RNA (1)...(19): siRNA sense strand
uugaaaaggcuguaaauga

SEQ ID NO: 2536660 - RNA, 19 nt, Homo sapiens
  misc_RNA (1)...(19): siRNA sense strand
agaagagacaaaagaguuu

SEQ ID NO: 2536661 - RNA, 19 nt, Homo sapiens
  misc_RNA (1)...(19): siRNA sense strand
uggcugggauggaacacaa

SEQ ID NO: 2536662 - RNA, 19 nt, Homo sapiens
  misc_RNA (1)...(19): siRNA sense strand
gggcguacagugugaagga

SEQ ID NO: 2536663 - RNA, 19 nt, Homo sapiens
  misc_RNA (1)...(19): siRNA sense strand
ccuggaaacuucuucgaga

SEQ ID NO: 2536664 - RNA, 19 nt, Homo sapiens
  misc_RNA (1)...(19): siRNA sense strand
cagauggcaccaagaaaga

SEQ ID NO: 2536665 - RNA, 19 nt, Homo sapiens
  misc_RNA (1)...(19): siRNA sense strand
ccaagaaagacucugggau

SEQ ID NO: 2536666 - RNA, 19 nt, Homo sapiens
  misc_RNA (1)...(19): siRNA sense strand
ggaagaagaaccaugucca

SEQ ID NO: 2536667 - RNA, 19 nt, Homo sapiens
  misc_RNA (1)...(19): siRNA sense strand
gaaugguccuagugccaga

SEQ ID NO: 2536668 - RNA, 19 nt, Homo sapiens
  misc_RNA (1)...(19): siRNA sense strand
acaaagaaacauucaccuu

SEQ ID NO: 2536669 - RNA, 19 nt, Homo sapiens
  misc_RNA (1)...(19): siRNA sense strand
agaaugaucaagcugcaaa

SEQ ID NO: 2536670 - RNA, 19 nt, Homo sapiens
  misc_RNA (1)...(19): siRNA sense strand
cccuuagugcucugaaaua

SEQ ID NO: 2536671 - RNA, 19 nt, Homo sapiens
  misc_RNA (1)...(19): siRNA sense strand
ugguggaaugaaugaagaa

SEQ ID NO: 2536672 - RNA, 19 nt, Homo sapiens
  misc_RNA (1)...(19): siRNA sense strand
gguggaaugaaugaagaaa

SEQ ID NO: 2536673 - RNA, 19 nt, Homo sapiens
  misc_RNA (1)...(19): siRNA sense strand
ccuaaaacacuucagacaa

SEQ ID NO: 2536674 - RNA, 19 nt, Homo sapiens
  misc_RNA (1)...(19): siRNA sense strand
gauguuacuaagugaggau

SEQ ID NO: 2536675 - RNA, 19 nt, Homo sapiens
  misc_RNA (1)...(19): siRNA sense strand
agaaaaggcccaaguggau

SEQ ID NO: 2536676 - RNA, 19 nt, Homo sapiens
  misc_RNA (1)...(19): siRNA sense strand
gcaaaagaaaaccaagauu

SEQ ID NO: 2536677 - RNA, 19 nt, Homo sapiens
  misc_RNA (1)...(19): siRNA sense strand
gugaggaauaguuggucuu

SEQ ID NO: 2536678 - RNA, 19 nt, Homo sapiens
  misc_RNA (1)...(19): siRNA sense strand
aacuaaaagucuucaggaa

SEQ ID NO: 2536679 - RNA, 19 nt, Homo sapiens
  misc_RNA (1)...(19): siRNA sense strand
ccuuagugcucugaaauau

SEQ ID NO: 2536680 - RNA, 19 nt, Homo sapiens
  misc_RNA (1)...(19): siRNA sense strand
gggagaugcugaagcggaa

SEQ ID NO: 2536681 - RNA, 19 nt, Homo sapiens
  misc_RNA (1)...(19): siRNA sense strand
cuucaaguauacagggaau

SEQ ID NO: 2536682 - RNA, 19 nt, Homo sapiens
  misc_RNA (1)...(19): siRNA sense strand
ggaauauaauaaagggugu

SEQ ID NO: 2536683 - RNA, 19 nt, Homo sapiens
  misc_RNA (1)...(19): siRNA sense strand
ugguaaagaguguguacaa

SEQ ID NO: 2536684 - RNA, 19 nt, Homo sapiens
  misc_RNA (1)...(19): siRNA sense strand
aaucuguacaugaggauaa

SEQ ID NO: 2536685 - RNA, 19 nt, Homo sapiens
  misc_RNA (1)...(19): siRNA sense strand
gcuucaucaucuauggaaa

SEQ ID NO: 2536686 - RNA, 19 nt, Homo sapiens
  misc_RNA (1)...(19): siRNA sense strand
cagaaagagaagaacaaaa

SEQ ID NO: 2536687 - RNA, 19 nt, Homo sapiens
  misc_RNA (1)...(19): siRNA sense strand
aagaagaaauacaaggcau

SEQ ID NO: 2536688 - RNA, 19 nt, Homo sapiens
  misc_RNA (1)...(19): siRNA sense strand
gggaaguacggaacgggua

SEQ ID NO: 2536689 - RNA, 19 nt, Homo sapiens
  misc_RNA (1)...(19): siRNA sense strand
gagaagaacaaaaggacuu

SEQ ID NO: 2536690 - RNA, 19 nt, Homo sapiens
  misc_RNA (1)...(19): siRNA sense strand
uggacaucauggagagaca

SEQ ID NO: 2536691 - RNA, 19 nt, Homo sapiens
  misc_RNA (1)...(19): siRNA sense strand
cuuuaaaggagauagauga

SEQ ID NO: 2536692 - RNA, 19 nt, Homo sapiens
  misc_RNA (1)...(19): siRNA sense strand
agguauuggagaauugaaa

SEQ ID NO: 2536693 - RNA, 19 nt, Homo sapiens
  misc_RNA (1)...(19): siRNA sense strand
augaagaacuagaggagcu

SEQ ID NO: 2536694 - RNA, 19 nt, Homo sapiens
  misc_RNA (1)...(19): siRNA sense strand
gcugaaaacaccagguauu

SEQ ID NO: 2536695 - RNA, 19 nt, Homo sapiens
  misc_RNA (1)...(19): siRNA sense strand
aacagaaagagaagaacaa

SEQ ID NO: 2536696 - RNA, 19 nt, Homo sapiens
  misc_RNA (1)...(19): siRNA sense strand
uggaaggaauauauagcau

SEQ ID NO: 2536697 - RNA, 19 nt, Homo sapiens
  misc_RNA (1)...(19): siRNA sense strand
caacaauaugcaaagccua

SEQ ID NO: 2536698 - RNA, 19 nt, Homo sapiens
  misc_RNA (1)...(19): siRNA sense strand
gaggauauauuggaggcaa

SEQ ID NO: 2536699 - RNA, 19 nt, Homo sapiens
  misc_RNA (1)...(19): siRNA sense strand
ugcaacagaaagagaagaa

SEQ ID NO: 2536700 - RNA, 19 nt, Homo sapiens
  misc_RNA (1)...(19): siRNA sense strand
agcucauaccaaagaaaua

SEQ ID NO: 2536701 - RNA, 19 nt, Homo sapiens
  misc_RNA (1)...(19): siRNA sense strand
ccuagagaagcuauugaaa

SEQ ID NO: 2536702 - RNA, 19 nt, Homo sapiens
  misc_RNA (1)...(19): siRNA sense strand
ucaccaugcaacagaaaga

SEQ ID NO: 2536703 - RNA, 19 nt, Homo sapiens
  misc_RNA (1)...(19): siRNA sense strand
cagccuugguaaagagugu

SEQ ID NO: 2536704 - RNA, 19 nt, Homo sapiens
  misc_RNA (1)...(19): siRNA sense strand
cuucaucaucuauggaaau

SEQ ID NO: 2536705 - RNA, 19 nt, Homo sapiens
  misc_RNA (1)...(19): siRNA sense strand
gugcaguacucggcaggaa

SEQ ID NO: 2536706 - RNA, 19 nt, Homo sapiens
  misc_RNA (1)...(19): siRNA sense strand
uagcaagguucuuaggagu

SEQ ID NO: 2536707 - RNA, 19 nt, Homo sapiens
  misc_RNA (1)...(19): siRNA sense strand
gauacugcuuuaaaggaga

SEQ ID NO: 2536708 - RNA, 19 nt, Homo sapiens
  misc_RNA (1)...(19): siRNA sense strand
gcaugaagaacuagaggag

SEQ ID NO: 2536709 - RNA, 19 nt, Homo sapiens
  misc_RNA (1)...(19): siRNA sense strand
aggagacgccugaaagaga

SEQ ID NO: 2536710 - RNA, 19 nt, Homo sapiens
  misc_RNA (1)...(19): siRNA sense strand
cugcuuuaaaggagauaga

SEQ ID NO: 2536711 - RNA, 19 nt, Homo sapiens
  misc_RNA (1)...(19): siRNA sense strand
uggacaagcaugaagaacu

SEQ ID NO: 2536712 - RNA, 19 nt, Homo sapiens
  misc_RNA (1)...(19): siRNA sense strand
uggcguauggcaugggauu

SEQ ID NO: 2536713 - RNA, 19 nt, Homo sapiens
  misc_RNA (1)...(19): siRNA sense strand
ccaugcaacagaaagagaa

SEQ ID NO: 2536714 - RNA, 19 nt, Homo sapiens
  misc_RNA (1)...(19): siRNA sense strand
acgaaggcccuggaagaaa

SEQ ID NO: 2536715 - RNA, 19 nt, Homo sapiens
  misc_RNA (1)...(19): siRNA sense strand
uacacaaaauggaggacua

SEQ ID NO: 2536716 - RNA, 19 nt, Homo sapiens
  misc_RNA (1)...(19): siRNA sense strand
gccugaaagagaugggcuu

SEQ ID NO: 2536717 - RNA, 19 nt, Homo sapiens
  misc_RNA (1)...(19): siRNA sense strand
cguaugaagaaacagaaga

SEQ ID NO: 2536718 - RNA, 19 nt, Homo sapiens
  misc_RNA (1)...(19): siRNA sense strand
aggauauauuggaggcaag

SEQ ID NO: 2536719 - RNA, 19 nt, Homo sapiens
  misc_RNA (1)...(19): siRNA sense strand
aagaaggagcugauagacu

SEQ ID NO: 2536720 - RNA, 19 nt, Homo sapiens
  misc_RNA (1)...(19): siRNA sense strand
auuauugaguccagagcca

SEQ ID NO: 2536721 - RNA, 19 nt, Homo sapiens
  misc_RNA (1)...(19): siRNA sense strand
gcagcucauaccaaagaaa

SEQ ID NO: 2536722 - RNA, 19 nt, Homo sapiens
  misc_RNA (1)...(19): siRNA sense strand
aaauuggaaaccuggacaa

SEQ ID NO: 2536723 - RNA, 19 nt, Homo sapiens
  misc_RNA (1)...(19): siRNA sense strand
ccuacaacuaucuuggauu

SEQ ID NO: 2536724 - RNA, 19 nt, Homo sapiens
  misc_RNA (1)...(19): siRNA sense strand
cuguaguggagcagaucau

SEQ ID NO: 2536725 - RNA, 19 nt, Homo sapiens
  misc_RNA (1)...(19): siRNA sense strand
gcuacaagaaagugggcau

SEQ ID NO: 2536726 - RNA, 19 nt, Homo sapiens
  misc_RNA (1)...(19): siRNA sense strand
aaaugaagcgccaggccaa

SEQ ID NO: 2536727 - RNA, 19 nt, Homo sapiens
  misc_RNA (1)...(19): siRNA sense strand
caggacaccaugaggaaca

SEQ ID NO: 2536728 - RNA, 19 nt, Homo sapiens
  misc_RNA (1)...(19): siRNA sense strand
aggaaagcuacaagaaagu

SEQ ID NO: 2536729 - RNA, 19 nt, Homo sapiens
  misc_RNA (1)...(19): siRNA sense strand
gcaacggcaaccugggcaa

SEQ ID NO: 2536730 - RNA, 19 nt, Homo sapiens
  misc_RNA (1)...(19): siRNA sense strand
gcuacaaaaugaagcgcca

SEQ ID NO: 2536731 - RNA, 19 nt, Homo sapiens
  misc_RNA (1)...(19): siRNA sense strand
gggacgugagcaagaacau

SEQ ID NO: 2536732 - RNA, 19 nt, Homo sapiens
  misc_RNA (1)...(19): siRNA sense strand
ccuccuguucugagacuaa

SEQ ID NO: 2536733 - RNA, 19 nt, Homo sapiens
  misc_RNA (1)...(19): siRNA sense strand
auuaagaacacaagaugca

SEQ ID NO: 2536734 - RNA, 19 nt, Homo sapiens
  misc_RNA (1)...(19): siRNA sense strand
caguaaacaggcugaccuu

SEQ ID NO: 2536735 - RNA, 19 nt, Homo sapiens
  misc_RNA (1)...(19): siRNA sense strand
aaugaaaccucuucccgaa

SEQ ID NO: 2536736 - RNA, 19 nt, Homo sapiens
  misc_RNA (1)...(19): siRNA sense strand
cguuagagggaaaggauaa

SEQ ID NO: 2536737 - RNA, 19 nt, Homo sapiens
  misc_RNA (1)...(19): siRNA sense strand
uagaagcguuagagggaaa

SEQ ID NO: 2536738 - RNA, 19 nt, Homo sapiens
  misc_RNA (1)...(19): siRNA sense strand
gagggaaaggauaaagaaa

SEQ ID NO: 2536739 - RNA, 19 nt, Homo sapiens
  misc_RNA (1)...(19): siRNA sense strand
gggauauaucauucagaaa

SEQ ID NO: 2536740 - RNA, 19 nt, Homo sapiens
  misc_RNA (1)...(19): siRNA sense strand
gccaaggaaagaagggaaa

SEQ ID NO: 2536741 - RNA, 19 nt, Homo sapiens
  misc_RNA (1)...(19): siRNA sense strand
agauaauguucgaaaggau

SEQ ID NO: 2536742 - RNA, 19 nt, Homo sapiens
  misc_RNA (1)...(19): siRNA sense strand
caucagaacacaagcaaaa

SEQ ID NO: 2536743 - RNA, 19 nt, Homo sapiens
  misc_RNA (1)...(19): siRNA sense strand
gccaaugaaacgaggacaa

SEQ ID NO: 2536744 - RNA, 19 nt, Homo sapiens
  misc_RNA (1)...(19): siRNA sense strand
aggacgaaccugugaagaa

SEQ ID NO: 2536745 - RNA, 19 nt, Homo sapiens
  misc_RNA (1)...(19): siRNA sense strand
aagaaacauuccuggcaaa

SEQ ID NO: 2536746 - RNA, 19 nt, Homo sapiens
  misc_RNA (1)...(19): siRNA sense strand
aagcaagcauugaagaaau

SEQ ID NO: 2536747 - RNA, 19 nt, Homo sapiens
  misc_RNA (1)...(19): siRNA sense strand
cugacaacauuaagaaaga

SEQ ID NO: 2536748 - RNA, 19 nt, Homo sapiens
  misc_RNA (1)...(19): siRNA sense strand
gagauuagucagugcaaaa

SEQ ID NO: 2536749 - RNA, 19 nt, Homo sapiens
  misc_RNA (1)...(19): siRNA sense strand
cgagcagugaugaggauaa

SEQ ID NO: 2536750 - RNA, 19 nt, Homo sapiens
  misc_RNA (1)...(19): siRNA sense strand
ugaugaggauaaagaagaa

SEQ ID NO: 2536751 - RNA, 19 nt, Homo sapiens
  misc_RNA (1)...(19): siRNA sense strand
agaauaaacagcugcagaa

SEQ ID NO: 2536752 - RNA, 19 nt, Homo sapiens
  misc_RNA (1)...(19): siRNA sense strand
aauuauagguggacgagau

SEQ ID NO: 2536753 - RNA, 19 nt, Homo sapiens
  misc_RNA (1)...(19): siRNA sense strand
gcucugaagacgaaggaga

SEQ ID NO: 2536754 - RNA, 19 nt, Homo sapiens
  misc_RNA (1)...(19): siRNA sense strand
cagauaaaccaguugaaga

SEQ ID NO: 2536755 - RNA, 19 nt, Homo sapiens
  misc_RNA (1)...(19): siRNA sense strand
cuucaugauaagaggaaaa

SEQ ID NO: 2536756 - RNA, 19 nt, Homo sapiens
  misc_RNA (1)...(19): siRNA sense strand
uugcuaggaaugagaguaa

SEQ ID NO: 2536757 - RNA, 19 nt, Homo sapiens
  misc_RNA (1)...(19): siRNA sense strand
uagacaaacugaaaggaga

SEQ ID NO: 2536758 - RNA, 19 nt, Homo sapiens
  misc_RNA (1)...(19): siRNA sense strand
gcguuagagggaaaggaua

SEQ ID NO: 2536759 - RNA, 19 nt, Homo sapiens
  misc_RNA (1)...(19): siRNA sense strand
acaaagaccaggaugaaga

SEQ ID NO: 2536760 - RNA, 19 nt, Homo sapiens
  misc_RNA (1)...(19): siRNA sense strand
gaaagaagggaaaugaaaa

SEQ ID NO: 2536761 - RNA, 19 nt, Homo sapiens
  misc_RNA (1)...(19): siRNA sense strand
agggaaaggauaaagaaaa

SEQ ID NO: 2536762 - RNA, 19 nt, Homo sapiens
  misc_RNA (1)...(19): siRNA sense strand
uaucagaagaaauggaaca

SEQ ID NO: 2536763 - RNA, 19 nt, Homo sapiens
  misc_RNA (1)...(19): siRNA sense strand
aggagaauaugaagagguu

SEQ ID NO: 2536764 - RNA, 19 nt, Homo sapiens
  misc_RNA (1)...(19): siRNA sense strand
ggguaaugucaaaguggau

SEQ ID NO: 2536765 - RNA, 19 nt, Homo sapiens
  misc_RNA (1)...(19): siRNA sense strand
caagaaacauuccuggcaa

SEQ ID NO: 2536766 - RNA, 19 nt, Homo sapiens
  misc_RNA (1)...(19): siRNA sense strand
aggcagaugauguuaaauu

SEQ ID NO: 2536767 - RNA, 19 nt, Homo sapiens
  misc_RNA (1)...(19): siRNA sense strand
agauagaaggccagaaaau

SEQ ID NO: 2536768 - RNA, 19 nt, Homo sapiens
  misc_RNA (1)...(19): siRNA sense strand
agguugaccaagaggauau

SEQ ID NO: 2536769 - RNA, 19 nt, Homo sapiens
  misc_RNA (1)...(19): siRNA sense strand
ggaugaaggggaagagaca

SEQ ID NO: 2536770 - RNA, 19 nt, Homo sapiens
  misc_RNA (1)...(19): siRNA sense strand
aauacaaagaccaggauga

SEQ ID NO: 2536771 - RNA, 19 nt, Homo sapiens
  misc_RNA (1)...(19): siRNA sense strand
gaauauuugacaacaggaa

SEQ ID NO: 2536772 - RNA, 19 nt, Homo sapiens
  misc_RNA (1)...(19): siRNA sense strand
aagcagaagacuauaugaa

SEQ ID NO: 2536773 - RNA, 19 nt, Homo sapiens
  misc_RNA (1)...(19): siRNA sense strand
gcucagagaacuaucuaau

SEQ ID NO: 2536774 - RNA, 19 nt, Homo sapiens
  misc_RNA (1)...(19): siRNA sense strand
aggaaugagaguaaacaau

SEQ ID NO: 2536775 - RNA, 19 nt, Homo sapiens
  misc_RNA (1)...(19): siRNA sense strand
ucagaguggcagagaugaa

SEQ ID NO: 2536776 - RNA, 19 nt, Homo sapiens
  misc_RNA (1)...(19): siRNA sense strand
augacaaggaagagcaaga

SEQ ID NO: 2536777 - RNA, 19 nt, Homo sapiens
  misc_RNA (1)...(19): siRNA sense strand
augucaaaguggaugaaaa

SEQ ID NO: 2536778 - RNA, 19 nt, Homo sapiens
  misc_RNA (1)...(19): siRNA sense strand
uugacaaggcgguggauga

SEQ ID NO: 2536779 - RNA, 19 nt, Homo sapiens
  misc_RNA (1)...(19): siRNA sense strand
ccuacaaauaguugacaga

SEQ ID NO: 2536780 - RNA, 19 nt, Homo sapiens
  misc_RNA (1)...(19): siRNA sense strand
ggaugaagacauggagaca

SEQ ID NO: 2536781 - RNA, 19 nt, Homo sapiens
  misc_RNA (1)...(19): siRNA sense strand
aggauaaagaagaacauga

SEQ ID NO: 2536782 - RNA, 19 nt, Homo sapiens
  misc_RNA (1)...(19): siRNA sense strand
gagaauaugaagagguuag

SEQ ID NO: 2536783 - RNA, 19 nt, Homo sapiens
  misc_RNA (1)...(19): siRNA sense strand
aggaaagaagggaaaugaa

SEQ ID NO: 2536784 - RNA, 19 nt, Homo sapiens
  misc_RNA (1)...(19): siRNA sense strand
gguaguucgaagugcuuua

SEQ ID NO: 2536785 - RNA, 19 nt, Homo sapiens
  misc_RNA (1)...(19): siRNA sense strand
gaguacaggaugaagacau

SEQ ID NO: 2536786 - RNA, 19 nt, Homo sapiens
  misc_RNA (1)...(19): siRNA sense strand
gugaugaggauaaagaaga

SEQ ID NO: 2536787 - RNA, 19 nt, Homo sapiens
  misc_RNA (1)...(19): siRNA sense strand
agacuuugcuguagaugau

SEQ ID NO: 2536788 - RNA, 19 nt, Homo sapiens
  misc_RNA (1)...(19): siRNA sense strand
cagaggaggaagaugauga

SEQ ID NO: 2536789 - RNA, 19 nt, Homo sapiens
  misc_RNA (1)...(19): siRNA sense strand
gaaaauggauucucgggua

SEQ ID NO: 2536790 - RNA, 19 nt, Homo sapiens
  misc_RNA (1)...(19): siRNA sense strand
cagcagaaaagaaaacaaa

SEQ ID NO: 2536791 - RNA, 19 nt, Homo sapiens
  misc_RNA (1)...(19): siRNA sense strand
gagaugaacuaaaugagga

SEQ ID NO: 2536792 - RNA, 19 nt, Homo sapiens
  misc_RNA (1)...(19): siRNA sense strand
agacgaaggagaauaugaa

SEQ ID NO: 2536793 - RNA, 19 nt, Homo sapiens
  misc_RNA (1)...(19): siRNA sense strand
gguucaaacaaagaagaaa

SEQ ID NO: 2536794 - RNA, 19 nt, Homo sapiens
  misc_RNA (1)...(19): siRNA sense strand
ucaacagggaaaugaggaa

SEQ ID NO: 2536795 - RNA, 19 nt, Homo sapiens
  misc_RNA (1)...(19): siRNA sense strand
uggaaagguugacugaaau

SEQ ID NO: 2536796 - RNA, 19 nt, Homo sapiens
  misc_RNA (1)...(19): siRNA sense strand
augagaagaauuuggugaa

SEQ ID NO: 2536797 - RNA, 19 nt, Homo sapiens
  misc_RNA (1)...(19): siRNA sense strand
guuuguacaaugaaggaau

SEQ ID NO: 2536798 - RNA, 19 nt, Homo sapiens
  misc_RNA (1)...(19): siRNA sense strand
cuguauaccacucagauau

SEQ ID NO: 2536799 - RNA, 19 nt, Homo sapiens
  misc_RNA (1)...(19): siRNA sense strand
ccuugggagcuaugggaca

SEQ ID NO: 2536800 - RNA, 19 nt, Homo sapiens
  misc_RNA (1)...(19): siRNA sense strand
ccagaagagauucagccaa

SEQ ID NO: 2536801 - RNA, 19 nt, Homo sapiens
  misc_RNA (1)...(19): siRNA sense strand
ugugugaccagguggauau

SEQ ID NO: 2536802 - RNA, 19 nt, Homo sapiens
  misc_RNA (1)...(19): siRNA sense strand
augagaagaauuuggugaa

SEQ ID NO: 2536803 - RNA, 19 nt, Homo sapiens
  misc_RNA (1)...(19): siRNA sense strand
guuuguacaaugaaggaau

SEQ ID NO: 2536804 - RNA, 19 nt, Homo sapiens
  misc_RNA (1)...(19): siRNA sense strand
cuguauaccacucagauau

SEQ ID NO: 2536805 - RNA, 19 nt, Homo sapiens
  misc_RNA (1)...(19): siRNA sense strand
ccuugggagcuaugggaca

SEQ ID NO: 2536806 - RNA, 19 nt, Homo sapiens
  misc_RNA (1)...(19): siRNA sense strand
ccagaagagauucagccaa

SEQ ID NO: 2536807 - RNA, 19 nt, Homo sapiens
  misc_RNA (1)...(19): siRNA sense strand
ugugugaccagguggauau

SEQ ID NO: 2536808 - RNA, 19 nt, Homo sapiens
  misc_RNA (1)...(19): siRNA sense strand
augagaagaauuuggugaa

SEQ ID NO: 2536809 - RNA, 19 nt, Homo sapiens
  misc_RNA (1)...(19): siRNA sense strand
guuuguacaaugaaggaau

SEQ ID NO: 2536810 - RNA, 19 nt, Homo sapiens
  misc_RNA (1)...(19): siRNA sense strand
cuguauaccacucagauau

SEQ ID NO: 2536811 - RNA, 19 nt, Homo sapiens
  misc_RNA (1)...(19): siRNA sense strand
ccuugggagcuaugggaca

SEQ ID NO: 2536812 - RNA, 19 nt, Homo sapiens
  misc_RNA (1)...(19): siRNA sense strand
ccagaagagauucagccaa

SEQ ID NO: 2536813 - RNA, 19 nt, Homo sapiens
  misc_RNA (1)...(19): siRNA sense strand
ugugugaccagguggauau

SEQ ID NO: 2536814 - RNA, 19 nt, Homo sapiens
  misc_RNA (1)...(19): siRNA sense strand
cugaagacuuggagauacu

SEQ ID NO: 2536815 - RNA, 19 nt, Homo sapiens
  misc_RNA (1)...(19): siRNA sense strand
gcucugaagacuuggagau

SEQ ID NO: 2536816 - RNA, 19 nt, Homo sapiens
  misc_RNA (1)...(19): siRNA sense strand
ccucaugggauuagcacau

SEQ ID NO: 2536817 - RNA, 19 nt, Homo sapiens
  misc_RNA (1)...(19): siRNA sense strand
gagugguggcagaaggauu

SEQ ID NO: 2536818 - RNA, 19 nt, Homo sapiens
  misc_RNA (1)...(19): siRNA sense strand
ugacacagguuuaugcaga

SEQ ID NO: 2536819 - RNA, 19 nt, Homo sapiens
  misc_RNA (1)...(19): siRNA sense strand
acuuggagauacugccuaa

SEQ ID NO: 2536820 - RNA, 19 nt, Homo sapiens
  misc_RNA (1)...(19): siRNA sense strand
ccccaacaguccuggaaaa

SEQ ID NO: 2536821 - RNA, 19 nt, Homo sapiens
  misc_RNA (1)...(19): siRNA sense strand
agacauaaacuucugccua

SEQ ID NO: 2536822 - RNA, 19 nt, Homo sapiens
  misc_RNA (1)...(19): siRNA sense strand
auuuaacccucaugggauu

SEQ ID NO: 2536823 - RNA, 19 nt, Homo sapiens
  misc_RNA (1)...(19): siRNA sense strand
cuauaguccaagugaaguu

SEQ ID NO: 2536824 - RNA, 19 nt, Homo sapiens
  misc_RNA (1)...(19): siRNA sense strand
ugauauuguugcuguggga

SEQ ID NO: 2536825 - RNA, 19 nt, Homo sapiens
  misc_RNA (1)...(19): siRNA sense strand
aagcaaucaugguggcaua

SEQ ID NO: 2536826 - RNA, 19 nt, Homo sapiens
  misc_RNA (1)...(19): siRNA sense strand
guaggaaggaacagguaaa

SEQ ID NO: 2536827 - RNA, 19 nt, Homo sapiens
  misc_RNA (1)...(19): siRNA sense strand
ggaagcaauucaaggaaaa

SEQ ID NO: 2536828 - RNA, 19 nt, Homo sapiens
  misc_RNA (1)...(19): siRNA sense strand
ggguaaacaauaagcaaaa

SEQ ID NO: 2536829 - RNA, 19 nt, Homo sapiens
  misc_RNA (1)...(19): siRNA sense strand
gaaacagugccucgggaaa

SEQ ID NO: 2536830 - RNA, 19 nt, Homo sapiens
  misc_RNA (1)...(19): siRNA sense strand
cagugagcccaaagagaua

SEQ ID NO: 2536831 - RNA, 19 nt, Homo sapiens
  misc_RNA (1)...(19): siRNA sense strand
uggcauagcaucugaguca

SEQ ID NO: 2536832 - RNA, 19 nt, Homo sapiens
  misc_RNA (1)...(19): siRNA sense strand
gcuucgggauuuagggauu

SEQ ID NO: 2536833 - RNA, 19 nt, Homo sapiens
  misc_RNA (1)...(19): siRNA sense strand
cuaguaagggcaaaggaaa

SEQ ID NO: 2536834 - RNA, 19 nt, Homo sapiens
  misc_RNA (1)...(19): siRNA sense strand
gcaaaggaaaaguggacaa

SEQ ID NO: 2536835 - RNA, 19 nt, Homo sapiens
  misc_RNA (1)...(19): siRNA sense strand
ugacauaucugcaggccau

SEQ ID NO: 2536836 - RNA, 19 nt, Homo sapiens
  misc_RNA (1)...(19): siRNA sense strand
gguuaugguuucugaggga

SEQ ID NO: 2536837 - RNA, 19 nt, Homo sapiens
  misc_RNA (1)...(19): siRNA sense strand
gacugaaggccaagggcua

SEQ ID NO: 2536838 - RNA, 19 nt, Homo sapiens
  misc_RNA (1)...(19): siRNA sense strand
uagaagaugaugacacaaa

SEQ ID NO: 2536839 - RNA, 19 nt, Homo sapiens
  misc_RNA (1)...(19): siRNA sense strand
gaguuuacauccaggccua

SEQ ID NO: 2536840 - RNA, 19 nt, Homo sapiens
  misc_RNA (1)...(19): siRNA sense strand
ggaaaauggacaucguaaa

SEQ ID NO: 2536841 - RNA, 19 nt, Homo sapiens
  misc_RNA (1)...(19): siRNA sense strand
uggagagacugaaggccaa

SEQ ID NO: 2536842 - RNA, 19 nt, Homo sapiens
  misc_RNA (1)...(19): siRNA sense strand
uaguaagggcaaaggaaaa

SEQ ID NO: 2536843 - RNA, 19 nt, Homo sapiens
  misc_RNA (1)...(19): siRNA sense strand
aaggaaaaguggacaaaau

SEQ ID NO: 2536844 - RNA, 19 nt, Homo sapiens
  misc_RNA (1)...(19): siRNA sense strand
gugcaauccaagcgaagaa

SEQ ID NO: 2536845 - RNA, 19 nt, Homo sapiens
  misc_RNA (1)...(19): siRNA sense strand
acuagaagaugaugacaca

SEQ ID NO: 2536846 - RNA, 19 nt, Homo sapiens
  misc_RNA (1)...(19): siRNA sense strand
caauaaggaugucacgcua

SEQ ID NO: 2536847 - RNA, 19 nt, Homo sapiens
  misc_RNA (1)...(19): siRNA sense strand
auguggaguugccgagaaa

SEQ ID NO: 2536848 - RNA, 19 nt, Homo sapiens
  misc_RNA (1)...(19): siRNA sense strand
aggauaacaaggagagcuu

SEQ ID NO: 2536849 - RNA, 19 nt, Homo sapiens
  misc_RNA (1)...(19): siRNA sense strand
ccucacaagcccacacaaa

SEQ ID NO: 2536850 - RNA, 19 nt, Homo sapiens
  misc_RNA (1)...(19): siRNA sense strand
agcaagggccugugaacaa

SEQ ID NO: 2536851 - RNA, 19 nt, Homo sapiens
  misc_RNA (1)...(19): siRNA sense strand
ccaacaacuuugaaggcca

SEQ ID NO: 2536852 - RNA, 19 nt, Homo sapiens
  misc_RNA (1)...(19): siRNA sense strand
ccaacagaacccaaugaua

SEQ ID NO: 2536853 - RNA, 19 nt, Homo sapiens
  misc_RNA (1)...(19): siRNA sense strand
acagguaaacauugaacua

SEQ ID NO: 2536854 - RNA, 19 nt, Homo sapiens
  misc_RNA (1)...(19): siRNA sense strand
ugagaaaggggaagaacaa

SEQ ID NO: 2536855 - RNA, 19 nt, Homo sapiens
  misc_RNA (1)...(19): siRNA sense strand
gaagccaagaugugagaau

SEQ ID NO: 2536856 - RNA, 19 nt, Homo sapiens
  misc_RNA (1)...(19): siRNA sense strand
acaaaugaacccagcuaau

SEQ ID NO: 2536857 - RNA, 19 nt, Homo sapiens
  misc_RNA (1)...(19): siRNA sense strand
gugcagauggagagacuga

SEQ ID NO: 2536858 - RNA, 19 nt, Homo sapiens
  misc_RNA (1)...(19): siRNA sense strand
ccucugaaaguguggaaaa

SEQ ID NO: 2536859 - RNA, 19 nt, Homo sapiens
  misc_RNA (1)...(19): siRNA sense strand
gcgccaacccagacaucua

SEQ ID NO: 2536860 - RNA, 19 nt, Homo sapiens
  misc_RNA (1)...(19): siRNA sense strand
gggguguuguugaggauaa

SEQ ID NO: 2536861 - RNA, 19 nt, Homo sapiens
  misc_RNA (1)...(19): siRNA sense strand
agaaaggggaagaacaaua

SEQ ID NO: 2536862 - RNA, 19 nt, Homo sapiens
  misc_RNA (1)...(19): siRNA sense strand
agaacaauauggugcagau

SEQ ID NO: 2536863 - RNA, 19 nt, Homo sapiens
  misc_RNA (1)...(19): siRNA sense strand
ugccauagucucuggacaa

SEQ ID NO: 2536864 - RNA, 19 nt, Homo sapiens
  misc_RNA (1)...(19): siRNA sense strand
ggaaacagugccucgggaa

SEQ ID NO: 2536865 - RNA, 19 nt, Homo sapiens
  misc_RNA (1)...(19): siRNA sense strand
ugaaagaauugaauccaga

SEQ ID NO: 2536866 - RNA, 19 nt, Homo sapiens
  misc_RNA (1)...(19): siRNA sense strand
gcgaagaaaauccaaguaa

SEQ ID NO: 2536867 - RNA, 19 nt, Homo sapiens
  misc_RNA (1)...(19): siRNA sense strand
cuaugguucaacagggaaa

SEQ ID NO: 2536868 - RNA, 19 nt, Homo sapiens
  misc_RNA (1)...(19): siRNA sense strand
caaugauagagcagauuau

SEQ ID NO: 2536869 - RNA, 19 nt, Homo sapiens
  misc_RNA (1)...(19): siRNA sense strand
ucaacuuauugcagaguga

SEQ ID NO: 2536870 - RNA, 19 nt, Homo sapiens
  misc_RNA (1)...(19): siRNA sense strand
acgcaaauaaaccgaagaa

SEQ ID NO: 2536871 - RNA, 19 nt, Homo sapiens
  misc_RNA (1)...(19): siRNA sense strand
gcccaaagagauaguugaa

SEQ ID NO: 2536872 - RNA, 19 nt, Homo sapiens
  misc_RNA (1)...(19): siRNA sense strand
agacaaaugaacccagcua

SEQ ID NO: 2536873 - RNA, 19 nt, Homo sapiens
  misc_RNA (1)...(19): siRNA sense strand
caaaauaauaccaacgcaa

SEQ ID NO: 2536874 - RNA, 19 nt, Homo sapiens
  misc_RNA (1)...(19): siRNA sense strand
agagaaugcccaugcaaca

SEQ ID NO: 2536875 - RNA, 19 nt, Homo sapiens
  misc_RNA (1)...(19): siRNA sense strand
cagucuaauucuggagcaa

SEQ ID NO: 2536876 - RNA, 19 nt, Homo sapiens
  misc_RNA (1)...(19): siRNA sense strand
ggaucacagccaagcacaa

SEQ ID NO: 2536877 - RNA, 19 nt, Homo sapiens
  misc_RNA (1)...(19): siRNA sense strand
agcaacagccacagggaau

SEQ ID NO: 2536878 - RNA, 19 nt, Homo sapiens
  misc_RNA (1)...(19): siRNA sense strand
gggguaaacaauaagcaaa

SEQ ID NO: 2536879 - RNA, 19 nt, Homo sapiens
  misc_RNA (1)...(19): siRNA sense strand
ccuccuaggccaaauuuaa

SEQ ID NO: 2536880 - RNA, 19 nt, Homo sapiens
  misc_RNA (1)...(19): siRNA sense strand
aggaacagguaaacauuga

SEQ ID NO: 2536881 - RNA, 19 nt, Homo sapiens
  misc_RNA (1)...(19): siRNA sense strand
ccagugucgaagagaacaa

SEQ ID NO: 2536882 - RNA, 19 nt, Homo sapiens
  misc_RNA (1)...(19): siRNA sense strand
ccagcaugcagguggucaa

SEQ ID NO: 2536883 - RNA, 19 nt, Homo sapiens
  misc_RNA (1)...(19): siRNA sense strand
ccaaucaaaugcaggggaa

SEQ ID NO: 2536884 - RNA, 19 nt, Homo sapiens
  misc_RNA (1)...(19): siRNA sense strand
caucucagguuaugggcau

SEQ ID NO: 2536885 - RNA, 19 nt, Homo sapiens
  misc_RNA (1)...(19): siRNA sense strand
gucuaauucuggagcaaca

SEQ ID NO: 2536886 - RNA, 19 nt, Homo sapiens
  misc_RNA (1)...(19): siRNA sense strand
ccaggaauaauaaggauga

SEQ ID NO: 2536887 - RNA, 19 nt, Homo sapiens
  misc_RNA (1)...(19): siRNA sense strand
caacaauggaagacucaga

SEQ ID NO: 2536888 - RNA, 19 nt, Homo sapiens
  misc_RNA (1)...(19): siRNA sense strand
gcacaaugacugcaaacca

SEQ ID NO: 2536889 - RNA, 19 nt, Homo sapiens
  misc_RNA (1)...(19): siRNA sense strand
cgggcaaguccaagcaaca

SEQ ID NO: 2536890 - RNA, 19 nt, Homo sapiens
  misc_RNA (1)...(19): siRNA sense strand
ccucagaauucuacugugu

SEQ ID NO: 2536891 - RNA, 19 nt, Homo sapiens
  misc_RNA (1)...(19): siRNA sense strand
gccagaugguccagcaaca

SEQ ID NO: 2536892 - RNA, 19 nt, Homo sapiens
  misc_RNA (1)...(19): siRNA sense strand
auggaaaggaaguggaaga

SEQ ID NO: 2536893 - RNA, 19 nt, Homo sapiens
  misc_RNA (1)...(19): siRNA sense strand
ggcaacagcaggaggaaaa

SEQ ID NO: 2536894 - RNA, 19 nt, Homo sapiens
  misc_RNA (1)...(19): siRNA sense strand
acaacaagggagagaacau

SEQ ID NO: 2536895 - RNA, 19 nt, Homo sapiens
  misc_RNA (1)...(19): siRNA sense strand
aagcaagaacaaagcacaa

SEQ ID NO: 2536896 - RNA, 19 nt, Homo sapiens
  misc_RNA (1)...(19): siRNA sense strand
ggagcaacaacaagggaga

SEQ ID NO: 2536897 - RNA, 19 nt, Homo sapiens
  misc_RNA (1)...(19): siRNA sense strand
acguguaugcagauggaaa

SEQ ID NO: 2536898 - RNA, 19 nt, Homo sapiens
  misc_RNA (1)...(19): siRNA sense strand
uuacaaggauggagggauc

SEQ ID NO: 2536899 - RNA, 19 nt, Homo sapiens
  misc_RNA (1)...(19): siRNA sense strand
ggaggaacucagauggaga

SEQ ID NO: 2536900 - RNA, 19 nt, Homo sapiens
  misc_RNA (1)...(19): siRNA sense strand
gcacaagagugaagcuccu

SEQ ID NO: 2536901 - RNA, 19 nt, Homo sapiens
  misc_RNA (1)...(19): siRNA sense strand
gccuauaaugaauggaaaa

SEQ ID NO: 2536902 - RNA, 19 nt, Homo sapiens
  misc_RNA (1)...(19): siRNA sense strand
gaaaggaaguggaagacag

SEQ ID NO: 2536903 - RNA, 19 nt, Homo sapiens
  misc_RNA (1)...(19): siRNA sense strand
agccuauaaugaauggaaa

SEQ ID NO: 2536904 - RNA, 19 nt, Homo sapiens
  misc_RNA (1)...(19): siRNA sense strand
agauggaaaggaaguggaa

SEQ ID NO: 2536905 - RNA, 19 nt, Homo sapiens
  misc_RNA (1)...(19): siRNA sense strand
ccguaucgagggagaacuu

SEQ ID NO: 2536906 - RNA, 19 nt, Homo sapiens
  misc_RNA (1)...(19): siRNA sense strand
uggcaacagcaggaggaaa

SEQ ID NO: 2536907 - RNA, 19 nt, Homo sapiens
  misc_RNA (1)...(19): siRNA sense strand
ccaugagugcagagaccau

SEQ ID NO: 2536908 - RNA, 19 nt, Homo sapiens
  misc_RNA (1)...(19): siRNA sense strand
uggugaacguguaugcaga

SEQ ID NO: 2536909 - RNA, 19 nt, Homo sapiens
  misc_RNA (1)...(19): siRNA sense strand
cccaaauacaguggagcaa

SEQ ID NO: 2536910 - RNA, 19 nt, Homo sapiens
  misc_RNA (1)...(19): siRNA sense strand
gacucaguucagaaagaaa

SEQ ID NO: 2536911 - RNA, 19 nt, Homo sapiens
  misc_RNA (1)...(19): siRNA sense strand
ccauggagcugaagugggu

SEQ ID NO: 2536912 - RNA, 19 nt, Homo sapiens
  misc_RNA (1)...(19): siRNA sense strand
aggaaguggaagacaggca

SEQ ID NO: 2536913 - RNA, 19 nt, Homo sapiens
  misc_RNA (1)...(19): siRNA sense strand
uggcaucacugcagggaag

SEQ ID NO: 2536914 - RNA, 19 nt, Homo sapiens
  misc_RNA (1)...(19): siRNA sense strand
gugaaggguuacaaggaug

SEQ ID NO: 2536915 - RNA, 19 nt, Homo sapiens
  misc_RNA (1)...(19): siRNA sense strand
agagaaauggcauggagca

SEQ ID NO: 2536916 - RNA, 19 nt, Homo sapiens
  misc_RNA (1)...(19): siRNA sense strand
gugcagagaccauggagcu

SEQ ID NO: 2536917 - RNA, 19 nt, Homo sapiens
  misc_RNA (1)...(19): siRNA sense strand
gaagcaagaacaaagcaca

SEQ ID NO: 2536918 - RNA, 19 nt, Homo sapiens
  misc_RNA (1)...(19): siRNA sense strand
auggaaaggaaguggaaga

SEQ ID NO: 2536919 - RNA, 19 nt, Homo sapiens
  misc_RNA (1)...(19): siRNA sense strand
ggcaacagcaggaggaaaa

SEQ ID NO: 2536920 - RNA, 19 nt, Homo sapiens
  misc_RNA (1)...(19): siRNA sense strand
acaacaagggagagaacau

SEQ ID NO: 2536921 - RNA, 19 nt, Homo sapiens
  misc_RNA (1)...(19): siRNA sense strand
aagcaagaacaaagcacaa

SEQ ID NO: 2536922 - RNA, 19 nt, Homo sapiens
  misc_RNA (1)...(19): siRNA sense strand
ggagcaacaacaagggaga

SEQ ID NO: 2536923 - RNA, 19 nt, Homo sapiens
  misc_RNA (1)...(19): siRNA sense strand
acguguaugcagauggaaa

SEQ ID NO: 2536924 - RNA, 19 nt, Homo sapiens
  misc_RNA (1)...(19): siRNA sense strand
uuacaaggauggagggauc

SEQ ID NO: 2536925 - RNA, 19 nt, Homo sapiens
  misc_RNA (1)...(19): siRNA sense strand
ggaggaacucagauggaga

SEQ ID NO: 2536926 - RNA, 19 nt, Homo sapiens
  misc_RNA (1)...(19): siRNA sense strand
gcacaagagugaagcuccu

SEQ ID NO: 2536927 - RNA, 19 nt, Homo sapiens
  misc_RNA (1)...(19): siRNA sense strand
gccuauaaugaauggaaaa

SEQ ID NO: 2536928 - RNA, 19 nt, Homo sapiens
  misc_RNA (1)...(19): siRNA sense strand
gaaaggaaguggaagacag

SEQ ID NO: 2536929 - RNA, 19 nt, Homo sapiens
  misc_RNA (1)...(19): siRNA sense strand
agccuauaaugaauggaaa

SEQ ID NO: 2536930 - RNA, 19 nt, Homo sapiens
  misc_RNA (1)...(19): siRNA sense strand
agauggaaaggaaguggaa

SEQ ID NO: 2536931 - RNA, 19 nt, Homo sapiens
  misc_RNA (1)...(19): siRNA sense strand
ccguaucgagggagaacuu

SEQ ID NO: 2536932 - RNA, 19 nt, Homo sapiens
  misc_RNA (1)...(19): siRNA sense strand
uggcaacagcaggaggaaa

SEQ ID NO: 2536933 - RNA, 19 nt, Homo sapiens
  misc_RNA (1)...(19): siRNA sense strand
ccaugagugcagagaccau

SEQ ID NO: 2536934 - RNA, 19 nt, Homo sapiens
  misc_RNA (1)...(19): siRNA sense strand
uggugaacguguaugcaga

SEQ ID NO: 2536935 - RNA, 19 nt, Homo sapiens
  misc_RNA (1)...(19): siRNA sense strand
cccaaauacaguggagcaa

SEQ ID NO: 2536936 - RNA, 19 nt, Homo sapiens
  misc_RNA (1)...(19): siRNA sense strand
gacucaguucagaaagaaa

SEQ ID NO: 2536937 - RNA, 19 nt, Homo sapiens
  misc_RNA (1)...(19): siRNA sense strand
ccauggagcugaagugggu

SEQ ID NO: 2536938 - RNA, 19 nt, Homo sapiens
  misc_RNA (1)...(19): siRNA sense strand
aggaaguggaagacaggca

SEQ ID NO: 2536939 - RNA, 19 nt, Homo sapiens
  misc_RNA (1)...(19): siRNA sense strand
uggcaucacugcagggaag

SEQ ID NO: 2536940 - RNA, 19 nt, Homo sapiens
  misc_RNA (1)...(19): siRNA sense strand
gugaaggguuacaaggaug

SEQ ID NO: 2536941 - RNA, 19 nt, Homo sapiens
  misc_RNA (1)...(19): siRNA sense strand
agagaaauggcauggagca

SEQ ID NO: 2536942 - RNA, 19 nt, Homo sapiens
  misc_RNA (1)...(19): siRNA sense strand
gugcagagaccauggagcu

SEQ ID NO: 2536943 - RNA, 19 nt, Homo sapiens
  misc_RNA (1)...(19): siRNA sense strand
gaagcaagaacaaagcaca

SEQ ID NO: 2536944 - RNA, 19 nt, Homo sapiens
  misc_RNA (1)...(19): siRNA sense strand
ggguaaaguaagagaggaa

SEQ ID NO: 2536945 - RNA, 19 nt, Homo sapiens
  misc_RNA (1)...(19): siRNA sense strand
gcaaacuaccugugggcaa

SEQ ID NO: 2536946 - RNA, 19 nt, Homo sapiens
  misc_RNA (1)...(19): siRNA sense strand
ggagcacagaggagggaaa

SEQ ID NO: 2536947 - RNA, 19 nt, Homo sapiens
  misc_RNA (1)...(19): siRNA sense strand
cuguaaggccugcgacaaa

SEQ ID NO: 2536948 - RNA, 19 nt, Homo sapiens
  misc_RNA (1)...(19): siRNA sense strand
aaggaaacguggaagguga

SEQ ID NO: 2536949 - RNA, 19 nt, Homo sapiens
  misc_RNA (1)...(19): siRNA sense strand
ccauugagcacaagaaaca

SEQ ID NO: 2536950 - RNA, 19 nt, Homo sapiens
  misc_RNA (1)...(19): siRNA sense strand
acaaagaggaccugauaca

SEQ ID NO: 2536951 - RNA, 19 nt, Homo sapiens
  misc_RNA (1)...(19): siRNA sense strand
gggcgaaguuugcagccaa

SEQ ID NO: 2536952 - RNA, 19 nt, Homo sapiens
  misc_RNA (1)...(19): siRNA sense strand
caggacagcaagagaaaga

SEQ ID NO: 2536953 - RNA, 19 nt, Homo sapiens
  misc_RNA (1)...(19): siRNA sense strand
cugcugaggguuugguaaa

SEQ ID NO: 2536954 - RNA, 19 nt, Homo sapiens
  misc_RNA (1)...(19): siRNA sense strand
aacagaagauugagugcaa

SEQ ID NO: 2536955 - RNA, 19 nt, Homo sapiens
  misc_RNA (1)...(19): siRNA sense strand
acguggaaggugaguaaua

SEQ ID NO: 2536956 - RNA, 19 nt, Homo sapiens
  misc_RNA (1)...(19): siRNA sense strand
uguaaggagugcagugaga

SEQ ID NO: 2536957 - RNA, 19 nt, Homo sapiens
  misc_RNA (1)...(19): siRNA sense strand
gagcauucccucugagaca

SEQ ID NO: 2536958 - RNA, 19 nt, Homo sapiens
  misc_RNA (1)...(19): siRNA sense strand
gaaggagaugauagugaaa

SEQ ID NO: 2536959 - RNA, 19 nt, Homo sapiens
  misc_RNA (1)...(19): siRNA sense strand
cugugaaagcugagacuga

SEQ ID NO: 2536960 - RNA, 19 nt, Homo sapiens
  misc_RNA (1)...(19): siRNA sense strand
cagaaggagaugauaguga

SEQ ID NO: 2536961 - RNA, 19 nt, Homo sapiens
  misc_RNA (1)...(19): siRNA sense strand
ccaaggauucaaagaaaga

SEQ ID NO: 2536962 - RNA, 19 nt, Homo sapiens
  misc_RNA (1)...(19): siRNA sense strand
cccaagaagaagaagaaga

SEQ ID NO: 2536963 - RNA, 19 nt, Homo sapiens
  misc_RNA (1)...(19): siRNA sense strand
acagaaugacugaagagaa

SEQ ID NO: 2536964 - RNA, 19 nt, Homo sapiens
  misc_RNA (1)...(19): siRNA sense strand
cccaaggagacaauagaaa

SEQ ID NO: 2536965 - RNA, 19 nt, Homo sapiens
  misc_RNA (1)...(19): siRNA sense strand
cagcacuauuagacaggaa

SEQ ID NO: 2536966 - RNA, 19 nt, Homo sapiens
  misc_RNA (1)...(19): siRNA sense strand
caggagagccagaggaaug

SEQ ID NO: 2536967 - RNA, 19 nt, Homo sapiens
  misc_RNA (1)...(19): siRNA sense strand
ccaacaacaaagaagauga

SEQ ID NO: 2536968 - RNA, 19 nt, Homo sapiens
  misc_RNA (1)...(19): siRNA sense strand
gccaggacagcaagagaaa

SEQ ID NO: 2536969 - RNA, 19 nt, Homo sapiens
  misc_RNA (1)...(19): siRNA sense strand
ccaacaccauugagcacaa

SEQ ID NO: 2536970 - RNA, 19 nt, Homo sapiens
  misc_RNA (1)...(19): siRNA sense strand
aggaaagccuggauguuca

SEQ ID NO: 2536971 - RNA, 19 nt, Homo sapiens
  misc_RNA (1)...(19): siRNA sense strand
guggaaggugaguaauaaa

SEQ ID NO: 2536972 - RNA, 19 nt, Homo sapiens
  misc_RNA (1)...(19): siRNA sense strand
aggaagauggagagaagga

SEQ ID NO: 2536973 - RNA, 19 nt, Homo sapiens
  misc_RNA (1)...(19): siRNA sense strand
guaacacagcugagaccua

SEQ ID NO: 2536974 - RNA, 19 nt, Homo sapiens
  misc_RNA (1)...(19): siRNA sense strand
augaaugugaccaguguaa

SEQ ID NO: 2536975 - RNA, 19 nt, Homo sapiens
  misc_RNA (1)...(19): siRNA sense strand
cagaaaggaaccagagaag

SEQ ID NO: 2536976 - RNA, 19 nt, Homo sapiens
  misc_RNA (1)...(19): siRNA sense strand
ggaaacacuaccagcugaa

SEQ ID NO: 2536977 - RNA, 19 nt, Homo sapiens
  misc_RNA (1)...(19): siRNA sense strand
aauuaaagguccacagaag

SEQ ID NO: 2536978 - RNA, 19 nt, Homo sapiens
  misc_RNA (1)...(19): siRNA sense strand
uuacuaaggaagauggaga

SEQ ID NO: 2536979 - RNA, 19 nt, Homo sapiens
  misc_RNA (1)...(19): siRNA sense strand
ccaaggagacaauagaaaa

SEQ ID NO: 2536980 - RNA, 19 nt, Homo sapiens
  misc_RNA (1)...(19): siRNA sense strand
ccuugaagccaacaacaaa

SEQ ID NO: 2536981 - RNA, 19 nt, Homo sapiens
  misc_RNA (1)...(19): siRNA sense strand
cgacagagcaggugaucac

SEQ ID NO: 2536982 - RNA, 19 nt, Homo sapiens
  misc_RNA (1)...(19): siRNA sense strand
gcucagaaccaccgaucuu

SEQ ID NO: 2536983 - RNA, 19 nt, Homo sapiens
  misc_RNA (1)...(19): siRNA sense strand
accaggaugugaaaggaaa

SEQ ID NO: 2536984 - RNA, 19 nt, Homo sapiens
  misc_RNA (1)...(19): siRNA sense strand
ccuuaugacugcaagaagu

SEQ ID NO: 2536985 - RNA, 19 nt, Homo sapiens
  misc_RNA (1)...(19): siRNA sense strand
gaagacaagcacagaacca

SEQ ID NO: 2536986 - RNA, 19 nt, Homo sapiens
  misc_RNA (1)...(19): siRNA sense strand
agaccaaggauucaaagaa

SEQ ID NO: 2536987 - RNA, 19 nt, Homo sapiens
  misc_RNA (1)...(19): siRNA sense strand
caggaagccagaagaugua

SEQ ID NO: 2536988 - RNA, 19 nt, Homo sapiens
  misc_RNA (1)...(19): siRNA sense strand
ggacugagcuauugagacg

SEQ ID NO: 2536989 - RNA, 19 nt, Homo sapiens
  misc_RNA (1)...(19): siRNA sense strand
aaagaaagagcuggacaaa

SEQ ID NO: 2536990 - RNA, 19 nt, Homo sapiens
  misc_RNA (1)...(19): siRNA sense strand
gguaaaguaagagaggaaa

SEQ ID NO: 2536991 - RNA, 19 nt, Homo sapiens
  misc_RNA (1)...(19): siRNA sense strand
guaaaguaagagaggaaag

SEQ ID NO: 2536992 - RNA, 19 nt, Homo sapiens
  misc_RNA (1)...(19): siRNA sense strand
ugauuaugggacugagcua

SEQ ID NO: 2536993 - RNA, 19 nt, Homo sapiens
  misc_RNA (1)...(19): siRNA sense strand
gaaagagaggucauggaga

SEQ ID NO: 2536994 - RNA, 19 nt, Homo sapiens
  misc_RNA (1)...(19): siRNA sense strand
aggcauaaccaguugaucu

SEQ ID NO: 2536995 - RNA, 19 nt, Homo sapiens
  misc_RNA (1)...(19): siRNA sense strand
uggcaagggcuuccggcaa

SEQ ID NO: 2536996 - RNA, 19 nt, Homo sapiens
  misc_RNA (1)...(19): siRNA sense strand
aaacagccaaggaggaauu

SEQ ID NO: 2536997 - RNA, 19 nt, Homo sapiens
  misc_RNA (1)...(19): siRNA sense strand
acaagagaugagugugaau

SEQ ID NO: 2536998 - RNA, 19 nt, Homo sapiens
  misc_RNA (1)...(19): siRNA sense strand
aggagaugauagugaaaug

SEQ ID NO: 2536999 - RNA, 19 nt, Homo sapiens
  misc_RNA (1)...(19): siRNA sense strand
agaaacacaucaaagcaga

SEQ ID NO: 2537000 - RNA, 19 nt, Homo sapiens
  misc_RNA (1)...(19): siRNA sense strand
cagaacaugcagauaugaa

SEQ ID NO: 2537001 - RNA, 19 nt, Homo sapiens
  misc_RNA (1)...(19): siRNA sense strand
ucagaaaggaaccagagaa

SEQ ID NO: 2537002 - RNA, 19 nt, Homo sapiens
  misc_RNA (1)...(19): siRNA sense strand
cggccauggugaaggcaga

SEQ ID NO: 2537003 - RNA, 19 nt, Homo sapiens
  misc_RNA (1)...(19): siRNA sense strand
gggaugaggugcuggugca

SEQ ID NO: 2537004 - RNA, 19 nt, Homo sapiens
  misc_RNA (1)...(19): siRNA sense strand
ccguugagcugcugcccaa

SEQ ID NO: 2537005 - RNA, 19 nt, Homo sapiens
  misc_RNA (1)...(19): siRNA sense strand
cgucggaaaucaaggccuu

SEQ ID NO: 2537006 - RNA, 19 nt, Homo sapiens
  misc_RNA (1)...(19): siRNA sense strand
agaaggugcaggaggccua

SEQ ID NO: 2537007 - RNA, 19 nt, Homo sapiens
  misc_RNA (1)...(19): siRNA sense strand
ggucucuguucgagcggua

SEQ ID NO: 2537008 - RNA, 19 nt, Homo sapiens
  misc_RNA (1)...(19): siRNA sense strand
uuaauaggcucguggcuga

SEQ ID NO: 2537009 - RNA, 19 nt, Homo sapiens
  misc_RNA (1)...(19): siRNA sense strand
gacgagagccagaagguga

SEQ ID NO: 2537010 - RNA, 19 nt, Homo sapiens
  misc_RNA (1)...(19): siRNA sense strand
ccguagagccccaggacau

SEQ ID NO: 2537011 - RNA, 19 nt, Homo sapiens
  misc_RNA (1)...(19): siRNA sense strand
cugcaguacuguugccuga

SEQ ID NO: 2537012 - RNA, 19 nt, Homo sapiens
  misc_RNA (1)...(19): siRNA sense strand
cggacgaagggaaugagaa

SEQ ID NO: 2537013 - RNA, 19 nt, Homo sapiens
  misc_RNA (1)...(19): siRNA sense strand
ugggcgugcugaagaggaa

SEQ ID NO: 2537014 - RNA, 19 nt, Homo sapiens
  misc_RNA (1)...(19): siRNA sense strand
cggaggaggugaucaggca

SEQ ID NO: 2537015 - RNA, 19 nt, Homo sapiens
  misc_RNA (1)...(19): siRNA sense strand
ucuacguggccaagggcaa

SEQ ID NO: 2537016 - RNA, 19 nt, Homo sapiens
  misc_RNA (1)...(19): siRNA sense strand
gggaguauuuccacagcca

SEQ ID NO: 2537017 - RNA, 19 nt, Homo sapiens
  misc_RNA (1)...(19): siRNA sense strand
ggaagacgaucgugggccu

SEQ ID NO: 2537018 - RNA, 19 nt, Homo sapiens
  misc_RNA (1)...(19): siRNA sense strand
gcgagguggcugugcacau

SEQ ID NO: 2537019 - RNA, 19 nt, Homo sapiens
  misc_RNA (1)...(19): siRNA sense strand
aaugagaacuccaaggcca

SEQ ID NO: 2537020 - RNA, 19 nt, Homo sapiens
  misc_RNA (1)...(19): siRNA sense strand
ccaagaucuucguggccga

SEQ ID NO: 2537021 - RNA, 19 nt, Homo sapiens
  misc_RNA (1)...(19): siRNA sense strand
cugaggaugcagaggcuga

SEQ ID NO: 2537022 - RNA, 19 nt, Homo sapiens
  misc_RNA (1)...(19): siRNA sense strand
augagaacuccaaggccaa

SEQ ID NO: 2537023 - RNA, 19 nt, Homo sapiens
  misc_RNA (1)...(19): siRNA sense strand
uggucuuccacgagaacua

SEQ ID NO: 2537024 - RNA, 19 nt, Homo sapiens
  misc_RNA (1)...(19): siRNA sense strand
aacccuuacucgucggaaa

SEQ ID NO: 2537025 - RNA, 19 nt, Homo sapiens
  misc_RNA (1)...(19): siRNA sense strand
aggaagcugcucaggaaga

SEQ ID NO: 2537026 - RNA, 19 nt, Homo sapiens
  misc_RNA (1)...(19): siRNA sense strand
cagcaggagacgcagugaa

SEQ ID NO: 2537027 - RNA, 19 nt, Homo sapiens
  misc_RNA (1)...(19): siRNA sense strand
agccagaaggugaugguga

SEQ ID NO: 2537028 - RNA, 19 nt, Homo sapiens
  misc_RNA (1)...(19): siRNA sense strand
acgcacuugcccagagcua

SEQ ID NO: 2537029 - RNA, 19 nt, Homo sapiens
  misc_RNA (1)...(19): siRNA sense strand
uggcguucuacaagagcaa

SEQ ID NO: 2537030 - RNA, 19 nt, Homo sapiens
  misc_RNA (1)...(19): siRNA sense strand
cggcccacaucauggugaa

SEQ ID NO: 2537031 - RNA, 19 nt, Homo sapiens
  misc_RNA (1)...(19): siRNA sense strand
ccauagaaauacaggaaaa

SEQ ID NO: 2537032 - RNA, 19 nt, Homo sapiens
  misc_RNA (1)...(19): siRNA sense strand
uagaagagacagagggauu

SEQ ID NO: 2537033 - RNA, 19 nt, Homo sapiens
  misc_RNA (1)...(19): siRNA sense strand
gaucauaauacucgaacua

SEQ ID NO: 2537034 - RNA, 19 nt, Homo sapiens
  misc_RNA (1)...(19): siRNA sense strand
gggaaugccaacacagaaa

SEQ ID NO: 2537035 - RNA, 19 nt, Homo sapiens
  misc_RNA (1)...(19): siRNA sense strand
cgacauuauacaagaaaca

SEQ ID NO: 2537036 - RNA, 19 nt, Homo sapiens
  misc_RNA (1)...(19): siRNA sense strand
caagaauggcauagcacaa

SEQ ID NO: 2537037 - RNA, 19 nt, Homo sapiens
  misc_RNA (1)...(19): siRNA sense strand
gugccaaacuuaaaagaaa

SEQ ID NO: 2537038 - RNA, 19 nt, Homo sapiens
  misc_RNA (1)...(19): siRNA sense strand
agaagaaggacuugauuau

SEQ ID NO: 2537039 - RNA, 19 nt, Homo sapiens
  misc_RNA (1)...(19): siRNA sense strand
uggcagauuggcagagaaa

SEQ ID NO: 2537040 - RNA, 19 nt, Homo sapiens
  misc_RNA (1)...(19): siRNA sense strand
uggaaagagugaaagaaca

SEQ ID NO: 2537041 - RNA, 19 nt, Homo sapiens
  misc_RNA (1)...(19): siRNA sense strand
acauggagauuuugggaaa

SEQ ID NO: 2537042 - RNA, 19 nt, Homo sapiens
  misc_RNA (1)...(19): siRNA sense strand
acaagaaacagcaagcaaa

SEQ ID NO: 2537043 - RNA, 19 nt, Homo sapiens
  misc_RNA (1)...(19): siRNA sense strand
aggagaacaaagaugaaua

SEQ ID NO: 2537044 - RNA, 19 nt, Homo sapiens
  misc_RNA (1)...(19): siRNA sense strand
gggauuuggacaagaauga

SEQ ID NO: 2537045 - RNA, 19 nt, Homo sapiens
  misc_RNA (1)...(19): siRNA sense strand
cgaacuaccacaugggaga

SEQ ID NO: 2537046 - RNA, 19 nt, Homo sapiens
  misc_RNA (1)...(19): siRNA sense strand
ggauaagagauaacaacau

SEQ ID NO: 2537047 - RNA, 19 nt, Homo sapiens
  misc_RNA (1)...(19): siRNA sense strand
ccauggaaucuguccgaaa

SEQ ID NO: 2537048 - RNA, 19 nt, Homo sapiens
  misc_RNA (1)...(19): siRNA sense strand
caacgauagauuugaaaca

SEQ ID NO: 2537049 - RNA, 19 nt, Homo sapiens
  misc_RNA (1)...(19): siRNA sense strand
gaguacaagaacagaccaa

SEQ ID NO: 2537050 - RNA, 19 nt, Homo sapiens
  misc_RNA (1)...(19): siRNA sense strand
gggaaagaagaguugauga

SEQ ID NO: 2537051 - RNA, 19 nt, Homo sapiens
  misc_RNA (1)...(19): siRNA sense strand
cagacaaugaaguaagaau

SEQ ID NO: 2537052 - RNA, 19 nt, Homo sapiens
  misc_RNA (1)...(19): siRNA sense strand
ccacagacuacauuggaau

SEQ ID NO: 2537053 - RNA, 19 nt, Homo sapiens
  misc_RNA (1)...(19): siRNA sense strand
caguugugcuugauggauu

SEQ ID NO: 2537054 - RNA, 19 nt, Homo sapiens
  misc_RNA (1)...(19): siRNA sense strand
gauuggugauugagcaaga

SEQ ID NO: 2537055 - RNA, 19 nt, Homo sapiens
  misc_RNA (1)...(19): siRNA sense strand
ggaaaagcaacgauagauu

SEQ ID NO: 2537056 - RNA, 19 nt, Homo sapiens
  misc_RNA (1)...(19): siRNA sense strand
agacagagggauuuggaca

SEQ ID NO: 2537057 - RNA, 19 nt, Homo sapiens
  misc_RNA (1)...(19): siRNA sense strand
agauggagaaauuacgaaa

SEQ ID NO: 2537058 - RNA, 19 nt, Homo sapiens
  misc_RNA (1)...(19): siRNA sense strand
ugacacuguuaauggagaa

SEQ ID NO: 2537059 - RNA, 19 nt, Homo sapiens
  misc_RNA (1)...(19): siRNA sense strand
cguauguaguuaauggaga

SEQ ID NO: 2537060 - RNA, 19 nt, Homo sapiens
  misc_RNA (1)...(19): siRNA sense strand
caguagugucugaagaaaa

SEQ ID NO: 2537061 - RNA, 19 nt, Homo sapiens
  misc_RNA (1)...(19): siRNA sense strand
aucugaagcuagaaguaua

SEQ ID NO: 2537062 - RNA, 19 nt, Homo sapiens
  misc_RNA (1)...(19): siRNA sense strand
auucaaagauccucgcaau

SEQ ID NO: 2537063 - RNA, 19 nt, Homo sapiens
  misc_RNA (1)...(19): siRNA sense strand
uugcaauagaagagacaga

SEQ ID NO: 2537064 - RNA, 19 nt, Homo sapiens
  misc_RNA (1)...(19): siRNA sense strand
ugugaaagagacagacaau

SEQ ID NO: 2537065 - RNA, 19 nt, Homo sapiens
  misc_RNA (1)...(19): siRNA sense strand
gaguuuauuauguggauca

SEQ ID NO: 2537066 - RNA, 19 nt, Homo sapiens
  misc_RNA (1)...(19): siRNA sense strand
agagacagacaaugaagua

SEQ ID NO: 2537067 - RNA, 19 nt, Homo sapiens
  misc_RNA (1)...(19): siRNA sense strand
guugaaggcacgaauggaa

SEQ ID NO: 2537068 - RNA, 19 nt, Homo sapiens
  misc_RNA (1)...(19): siRNA sense strand
gaaguauauuagagccuga

SEQ ID NO: 2537069 - RNA, 19 nt, Homo sapiens
  misc_RNA (1)...(19): siRNA sense strand
ccaacagauuauggcauua

SEQ ID NO: 2537070 - RNA, 19 nt, Homo sapiens
  misc_RNA (1)...(19): siRNA sense strand
gacagagggauuuggacaa

SEQ ID NO: 2537071 - RNA, 19 nt, Homo sapiens
  misc_RNA (1)...(19): siRNA sense strand
ggaaaacaagaauggcaua

SEQ ID NO: 2537072 - RNA, 19 nt, Homo sapiens
  misc_RNA (1)...(19): siRNA sense strand
cagggugggaacaaagaaa

SEQ ID NO: 2537073 - RNA, 19 nt, Homo sapiens
  misc_RNA (1)...(19): siRNA sense strand
cggaacagcaauauauaca

SEQ ID NO: 2537074 - RNA, 19 nt, Homo sapiens
  misc_RNA (1)...(19): siRNA sense strand
aggucugauacuaguaaua

SEQ ID NO: 2537075 - RNA, 19 nt, Homo sapiens
  misc_RNA (1)...(19): siRNA sense strand
aaguaguuguagauggaga

SEQ ID NO: 2537076 - RNA, 19 nt, Homo sapiens
  misc_RNA (1)...(19): siRNA sense strand
aguugaugaucguagaaga

SEQ ID NO: 2537077 - RNA, 19 nt, Homo sapiens
  misc_RNA (1)...(19): siRNA sense strand
ggaagauccaagaacucaa

SEQ ID NO: 2537078 - RNA, 19 nt, Homo sapiens
  misc_RNA (1)...(19): siRNA sense strand
auaacaaacugcagcucau

SEQ ID NO: 2537079 - RNA, 19 nt, Homo sapiens
  misc_RNA (1)...(19): siRNA sense strand
gauucaacagacaggguuu

SEQ ID NO: 2537080 - RNA, 19 nt, Homo sapiens
  misc_RNA (1)...(19): siRNA sense strand
guggaagguugcaguuaca

SEQ ID NO: 2537081 - RNA, 19 nt, Homo sapiens
  misc_RNA (1)...(19): siRNA sense strand
cauaacaccagaacaacaa

SEQ ID NO: 2537082 - RNA, 19 nt, Homo sapiens
  misc_RNA (1)...(19): siRNA sense strand
cacgaauggaauagauaau

SEQ ID NO: 2537083 - RNA, 19 nt, Homo sapiens
  misc_RNA (1)...(19): siRNA sense strand
ccagauggguguauggauc

SEQ ID NO: 2537084 - RNA, 19 nt, Homo sapiens
  misc_RNA (1)...(19): siRNA sense strand
ggcugggaaauuagauaua

SEQ ID NO: 2537085 - RNA, 19 nt, Homo sapiens
  misc_RNA (1)...(19): siRNA sense strand
uggcagagaaauacuguuu

SEQ ID NO: 2537086 - RNA, 19 nt, Homo sapiens
  misc_RNA (1)...(19): siRNA sense strand
uggauuggugauugagcaa

SEQ ID NO: 2537087 - RNA, 19 nt, Homo sapiens
  misc_RNA (1)...(19): siRNA sense strand
ggcacgaauggaauagaua

SEQ ID NO: 2537088 - RNA, 19 nt, Homo sapiens
  misc_RNA (1)...(19): siRNA sense strand
gcuaauaaaucaugggaag

SEQ ID NO: 2537089 - RNA, 19 nt, Homo sapiens
  misc_RNA (1)...(19): siRNA sense strand
ucugagaauauuagagcaa

SEQ ID NO: 2537090 - RNA, 19 nt, Homo sapiens
  misc_RNA (1)...(19): siRNA sense strand
gcuagaacaucaaacgcua

SEQ ID NO: 2537091 - RNA, 19 nt, Homo sapiens
  misc_RNA (1)...(19): siRNA sense strand
gguaaaaggacuuaagcuu

SEQ ID NO: 2537092 - RNA, 19 nt, Homo sapiens
  misc_RNA (1)...(19): siRNA sense strand
uagaauggugugagaguga

SEQ ID NO: 2537093 - RNA, 19 nt, Homo sapiens
  misc_RNA (1)...(19): siRNA sense strand
aggaguaaaacgugauaaa

SEQ ID NO: 2537094 - RNA, 19 nt, Homo sapiens
  misc_RNA (1)...(19): siRNA sense strand
gugauauaauugaaagcca

SEQ ID NO: 2537095 - RNA, 19 nt, Homo sapiens
  misc_RNA (1)...(19): siRNA sense strand
agcaaagagagcuggcuaa

SEQ ID NO: 2537096 - RNA, 19 nt, Homo sapiens
  misc_RNA (1)...(19): siRNA sense strand
agcuauuaauugauggcaa

SEQ ID NO: 2537097 - RNA, 19 nt, Homo sapiens
  misc_RNA (1)...(19): siRNA sense strand
gggugaaagcaguuaaaau

SEQ ID NO: 2537098 - RNA, 19 nt, Homo sapiens
  misc_RNA (1)...(19): siRNA sense strand
agggaacaauucagcaaau

SEQ ID NO: 2537099 - RNA, 19 nt, Homo sapiens
  misc_RNA (1)...(19): siRNA sense strand
aagcaaagagagcuggcua

SEQ ID NO: 2537100 - RNA, 19 nt, Homo sapiens
  misc_RNA (1)...(19): siRNA sense strand
ccauaaacgaccacaaaau

SEQ ID NO: 2537101 - RNA, 19 nt, Homo sapiens
  misc_RNA (1)...(19): siRNA sense strand
acagaguggcuuaggcuau

SEQ ID NO: 2537102 - RNA, 19 nt, Homo sapiens
  misc_RNA (1)...(19): siRNA sense strand
uggaguaguaacaguggaa

SEQ ID NO: 2537103 - RNA, 19 nt, Homo sapiens
  misc_RNA (1)...(19): siRNA sense strand
ggcaagggaagaaggauca

SEQ ID NO: 2537104 - RNA, 19 nt, Homo sapiens
  misc_RNA (1)...(19): siRNA sense strand
gcuuucaagaagagcaaaa

SEQ ID NO: 2537105 - RNA, 19 nt, Homo sapiens
  misc_RNA (1)...(19): siRNA sense strand
auaagcaagccuaaugaaa

SEQ ID NO: 2537106 - RNA, 19 nt, Homo sapiens
  misc_RNA (1)...(19): siRNA sense strand
cuaauaaaucaugggaaga

SEQ ID NO: 2537107 - RNA, 19 nt, Homo sapiens
  misc_RNA (1)...(19): siRNA sense strand
gaguaguaacaguggaaag

SEQ ID NO: 2537108 - RNA, 19 nt, Homo sapiens
  misc_RNA (1)...(19): siRNA sense strand
gcacaagcaaagagagcug

SEQ ID NO: 2537109 - RNA, 19 nt, Homo sapiens
  misc_RNA (1)...(19): siRNA sense strand
cuugaagaugagacuguaa

SEQ ID NO: 2537110 - RNA, 19 nt, Homo sapiens
  misc_RNA (1)...(19): siRNA sense strand
ggcuaauaaaucaugggaa

SEQ ID NO: 2537111 - RNA, 19 nt, Homo sapiens
  misc_RNA (1)...(19): siRNA sense strand
ggaaagcacuccugcccga

SEQ ID NO: 2537112 - RNA, 19 nt, Homo sapiens
  misc_RNA (1)...(19): siRNA sense strand
aaauacaggccacgcacaa

SEQ ID NO: 2537113 - RNA, 19 nt, Homo sapiens
  misc_RNA (1)...(19): siRNA sense strand
uuucuagaauggugugaga

SEQ ID NO: 2537114 - RNA, 19 nt, Homo sapiens
  misc_RNA (1)...(19): siRNA sense strand
uggcaagggaagaaggauc

SEQ ID NO: 2537115 - RNA, 19 nt, Homo sapiens
  misc_RNA (1)...(19): siRNA sense strand
aaagggaacaauucagcaa

SEQ ID NO: 2537116 - RNA, 19 nt, Homo sapiens
  misc_RNA (1)...(19): siRNA sense strand
uguggagaaaggaggaaaa

SEQ ID NO: 2537117 - RNA, 19 nt, Homo sapiens
  misc_RNA (1)...(19): siRNA sense strand
accagucacuacagauaaa

SEQ ID NO: 2537118 - RNA, 19 nt, Homo sapiens
  misc_RNA (1)...(19): siRNA sense strand
guuuaagacuccugagagc

SEQ ID NO: 2537119 - RNA, 19 nt, Homo sapiens
  misc_RNA (1)...(19): siRNA sense strand
cggaacugaaggaguagau

SEQ ID NO: 2537120 - RNA, 19 nt, Homo sapiens
  misc_RNA (1)...(19): siRNA sense strand
ucaacguaauugugaucuu

SEQ ID NO: 2537121 - RNA, 19 nt, Homo sapiens
  misc_RNA (1)...(19): siRNA sense strand
acauucaaaggaaggaaau

SEQ ID NO: 2537122 - RNA, 19 nt, Homo sapiens
  misc_RNA (1)...(19): siRNA sense strand
ggaagaaggaucagacagc

SEQ ID NO: 2537123 - RNA, 19 nt, Homo sapiens
  misc_RNA (1)...(19): siRNA sense strand
agacaugcaaaaugaacaa

SEQ ID NO: 2537124 - RNA, 19 nt, Homo sapiens
  misc_RNA (1)...(19): siRNA sense strand
gcaggaagaagaagggaca

SEQ ID NO: 2537125 - RNA, 19 nt, Homo sapiens
  misc_RNA (1)...(19): siRNA sense strand
aaagcaagguaaaugggaa

SEQ ID NO: 2537126 - RNA, 19 nt, Homo sapiens
  misc_RNA (1)...(19): siRNA sense strand
cauaugaaaagcuggaaaa

SEQ ID NO: 2537127 - RNA, 19 nt, Homo sapiens
  misc_RNA (1)...(19): siRNA sense strand
cuacaguauacaaagggaa

SEQ ID NO: 2537128 - RNA, 19 nt, Homo sapiens
  misc_RNA (1)...(19): siRNA sense strand
ccuuagacaagcauggaau

SEQ ID NO: 2537129 - RNA, 19 nt, Homo sapiens
  misc_RNA (1)...(19): siRNA sense strand
acacggaacugccagggaa

SEQ ID NO: 2537130 - RNA, 19 nt, Homo sapiens
  misc_RNA (1)...(19): siRNA sense strand
uacaguauacaaagggaaa

SEQ ID NO: 2537131 - RNA, 19 nt, Homo sapiens
  misc_RNA (1)...(19): siRNA sense strand
cuuacauccaccagcguua

SEQ ID NO: 2537132 - RNA, 19 nt, Homo sapiens
  misc_RNA (1)...(19): siRNA sense strand
acaaagaugucuacacgga

SEQ ID NO: 2537133 - RNA, 19 nt, Homo sapiens
  misc_RNA (1)...(19): siRNA sense strand
cagaggacacagagcacuu

SEQ ID NO: 2537134 - RNA, 19 nt, Homo sapiens
  misc_RNA (1)...(19): siRNA sense strand
gggaguuaaagcuggcaga

SEQ ID NO: 2537135 - RNA, 19 nt, Homo sapiens
  misc_RNA (1)...(19): siRNA sense strand
uugaaaugauccaaggagu

SEQ ID NO: 2537136 - RNA, 19 nt, Homo sapiens
  misc_RNA (1)...(19): siRNA sense strand
ccuugagccacgaguauuu

SEQ ID NO: 2537137 - RNA, 19 nt, Homo sapiens
  misc_RNA (1)...(19): siRNA sense strand
ggaucuuaugcuacaguau

SEQ ID NO: 2537138 - RNA, 19 nt, Homo sapiens
  misc_RNA (1)...(19): siRNA sense strand
agucagaguucagaggaca

SEQ ID NO: 2537139 - RNA, 19 nt, Homo sapiens
  misc_RNA (1)...(19): siRNA sense strand
guaaaugggaaguugguag

SEQ ID NO: 2537140 - RNA, 19 nt, Homo sapiens
  misc_RNA (1)...(19): siRNA sense strand
uuucacagcuaucagggaa

SEQ ID NO: 2537141 - RNA, 19 nt, Homo sapiens
  misc_RNA (1)...(19): siRNA sense strand
gagaauaucaggcaggaga

SEQ ID NO: 2537142 - RNA, 19 nt, Homo sapiens
  misc_RNA (1)...(19): siRNA sense strand
guacaaggaaagagggcag

SEQ ID NO: 2537143 - RNA, 19 nt, Homo sapiens
  misc_RNA (1)...(19): siRNA sense strand
caauugagcauuaucgaca

SEQ ID NO: 2537144 - RNA, 19 nt, Homo sapiens
  misc_RNA (1)...(19): siRNA sense strand
gaagaaaguucguggcaaa

SEQ ID NO: 2537145 - RNA, 19 nt, Homo sapiens
  misc_RNA (1)...(19): siRNA sense strand
gcauguuauuugaaagcaa

SEQ ID NO: 2537146 - RNA, 19 nt, Homo sapiens
  misc_RNA (1)...(19): siRNA sense strand
aggcaauguggcugggaua

SEQ ID NO: 2537147 - RNA, 19 nt, Homo sapiens
  misc_RNA (1)...(19): siRNA sense strand
gagugaaggugauggcaga

SEQ ID NO: 2537148 - RNA, 19 nt, Homo sapiens
  misc_RNA (1)...(19): siRNA sense strand
ucaaacgagaacagggaaa

SEQ ID NO: 2537149 - RNA, 19 nt, Homo sapiens
  misc_RNA (1)...(19): siRNA sense strand
gggaaacauugaagaggca

SEQ ID NO: 2537150 - RNA, 19 nt, Homo sapiens
  misc_RNA (1)...(19): siRNA sense strand
cugauaaauuugagguguu

SEQ ID NO: 2537151 - RNA, 19 nt, Homo sapiens
  misc_RNA (1)...(19): siRNA sense strand
uagaauaccugaagaaagu

SEQ ID NO: 2537152 - RNA, 19 nt, Homo sapiens
  misc_RNA (1)...(19): siRNA sense strand
cugaccaguuagagaagaa

SEQ ID NO: 2537153 - RNA, 19 nt, Homo sapiens
  misc_RNA (1)...(19): siRNA sense strand
gagaauaucaggcaggaga

SEQ ID NO: 2537154 - RNA, 19 nt, Homo sapiens
  misc_RNA (1)...(19): siRNA sense strand
cagacuaugaugagcgaau

SEQ ID NO: 2537155 - RNA, 19 nt, Homo sapiens
  misc_RNA (1)...(19): siRNA sense strand
ggaaacacucuaaaggaga

SEQ ID NO: 2537156 - RNA, 19 nt, Homo sapiens
  misc_RNA (1)...(19): siRNA sense strand
cgaaugaagaaguugguca

SEQ ID NO: 2537157 - RNA, 19 nt, Homo sapiens
  misc_RNA (1)...(19): siRNA sense strand
gcacauagcaaucuggcuu

SEQ ID NO: 2537158 - RNA, 19 nt, Homo sapiens
  misc_RNA (1)...(19): siRNA sense strand
ccaaaagacuugaagcuca

SEQ ID NO: 2537159 - RNA, 19 nt, Homo sapiens
  misc_RNA (1)...(19): siRNA sense strand
ggauaguucugaauggcau

SEQ ID NO: 2537160 - RNA, 19 nt, Homo sapiens
  misc_RNA (1)...(19): siRNA sense strand
uggcaaagucuggaagcaa

SEQ ID NO: 2537161 - RNA, 19 nt, Homo sapiens
  misc_RNA (1)...(19): siRNA sense strand
gacaagaauaugaagacau

SEQ ID NO: 2537162 - RNA, 19 nt, Homo sapiens
  misc_RNA (1)...(19): siRNA sense strand
cuuguaucguaaagcauua

SEQ ID NO: 2537163 - RNA, 19 nt, Homo sapiens
  misc_RNA (1)...(19): siRNA sense strand
cauuuaugacaaucggaua

SEQ ID NO: 2537164 - RNA, 19 nt, Homo sapiens
  misc_RNA (1)...(19): siRNA sense strand
gauuaaccgaggacagauu

SEQ ID NO: 2537165 - RNA, 19 nt, Homo sapiens
  misc_RNA (1)...(19): siRNA sense strand
gagaagaauagguugccuu

SEQ ID NO: 2537166 - RNA, 19 nt, Homo sapiens
  misc_RNA (1)...(19): siRNA sense strand
ccgaggacagauucaaaua

SEQ ID NO: 2537167 - RNA, 19 nt, Homo sapiens
  misc_RNA (1)...(19): siRNA sense strand
acaccaaacaauacacaau

SEQ ID NO: 2537168 - RNA, 19 nt, Homo sapiens
  misc_RNA (1)...(19): siRNA sense strand
guacaaggaaagagggcag

SEQ ID NO: 2537169 - RNA, 19 nt, Homo sapiens
  misc_RNA (1)...(19): siRNA sense strand
uguugaagucacugaguca

SEQ ID NO: 2537170 - RNA, 19 nt, Homo sapiens
  misc_RNA (1)...(19): siRNA sense strand
cugaagcagaagauuguua

SEQ ID NO: 2537171 - RNA, 19 nt, Homo sapiens
  misc_RNA (1)...(19): siRNA sense strand
augaugagcgaaugaagaa

SEQ ID NO: 2537172 - RNA, 19 nt, Homo sapiens
  misc_RNA (1)...(19): siRNA sense strand
agcaguauuccgagaaauu

SEQ ID NO: 2537173 - RNA, 19 nt, Homo sapiens
  misc_RNA (1)...(19): siRNA sense strand
agacaagaauaugaagaca

SEQ ID NO: 2537174 - RNA, 19 nt, Homo sapiens
  misc_RNA (1)...(19): siRNA sense strand
auacuaagggcgcucgaaa

SEQ ID NO: 2537175 - RNA, 19 nt, Homo sapiens
  misc_RNA (1)...(19): siRNA sense strand
ugaagaaaguucguggcaa

SEQ ID NO: 2537176 - RNA, 19 nt, Homo sapiens
  misc_RNA (1)...(19): siRNA sense strand
caauggaacuagagcggcu

SEQ ID NO: 2537177 - RNA, 19 nt, Homo sapiens
  misc_RNA (1)...(19): siRNA sense strand
caugcacaauccugauaaa

SEQ ID NO: 2537178 - RNA, 19 nt, Homo sapiens
  misc_RNA (1)...(19): siRNA sense strand
uagucuaccagaugugaaa

SEQ ID NO: 2537179 - RNA, 19 nt, Homo sapiens
  misc_RNA (1)...(19): siRNA sense strand
gcaacuacucagaucaaca

SEQ ID NO: 2537180 - RNA, 19 nt, Homo sapiens
  misc_RNA (1)...(19): siRNA sense strand
aggagaaccuaauauucaa

SEQ ID NO: 2537181 - RNA, 19 nt, Homo sapiens
  misc_RNA (1)...(19): siRNA sense strand
caauugagcauuaucgaca

SEQ ID NO: 2537182 - RNA, 19 nt, Homo sapiens
  misc_RNA (1)...(19): siRNA sense strand
gucuggaagcaaagaauau

SEQ ID NO: 2537183 - RNA, 19 nt, Homo sapiens
  misc_RNA (1)...(19): siRNA sense strand
ugaaagcaauugagacgca

SEQ ID NO: 2537184 - RNA, 19 nt, Homo sapiens
  misc_RNA (1)...(19): siRNA sense strand
ucguaaagcauuagaaguc

SEQ ID NO: 2537185 - RNA, 19 nt, Homo sapiens
  misc_RNA (1)...(19): siRNA sense strand
gggaaacacucuaaaggag

SEQ ID NO: 2537186 - RNA, 19 nt, Homo sapiens
  misc_RNA (1)...(19): siRNA sense strand
gaccaguuagagaagaaua

SEQ ID NO: 2537187 - RNA, 19 nt, Homo sapiens
  misc_RNA (1)...(19): siRNA sense strand
uugcaguagcuuggaguaa

SEQ ID NO: 2537188 - RNA, 19 nt, Homo sapiens
  misc_RNA (1)...(19): siRNA sense strand
ccauucaaauuuagcaagu

SEQ ID NO: 2537189 - RNA, 19 nt, Homo sapiens
  misc_RNA (1)...(19): siRNA sense strand
caauaaggcugcaacugga

SEQ ID NO: 2537190 - RNA, 19 nt, Homo sapiens
  misc_RNA (1)...(19): siRNA sense strand
ucuugagcuuauugcuaaa

SEQ ID NO: 2537191 - RNA, 19 nt, Homo sapiens
  misc_RNA (1)...(19): siRNA sense strand
ugauuaagccuguugaagu

SEQ ID NO: 2537192 - RNA, 19 nt, Homo sapiens
  misc_RNA (1)...(19): siRNA sense strand
gcguguaggauaugugagu

SEQ ID NO: 2537193 - RNA, 19 nt, Homo sapiens
  misc_RNA (1)...(19): siRNA sense strand
auuccgagaaauuggcuua

SEQ ID NO: 2537194 - RNA, 19 nt, Homo sapiens
  misc_RNA (1)...(19): siRNA sense strand
agggagccuugcaguguua

SEQ ID NO: 2537195 - RNA, 19 nt, Homo sapiens
  misc_RNA (1)...(19): siRNA sense strand
aguuagagaagaauagguu

SEQ ID NO: 2537196 - RNA, 19 nt, Homo sapiens
  misc_RNA (1)...(19): siRNA sense strand
ccuacucuaauaugggaaa

SEQ ID NO: 2537197 - RNA, 19 nt, Homo sapiens
  misc_RNA (1)...(19): siRNA sense strand
gaagaaaguucguggcaaa

SEQ ID NO: 2537198 - RNA, 19 nt, Homo sapiens
  misc_RNA (1)...(19): siRNA sense strand
gcauguuauuugaaagcaa

SEQ ID NO: 2537199 - RNA, 19 nt, Homo sapiens
  misc_RNA (1)...(19): siRNA sense strand
aggcaauguggcugggaua

SEQ ID NO: 2537200 - RNA, 19 nt, Homo sapiens
  misc_RNA (1)...(19): siRNA sense strand
gagugaaggugauggcaga

SEQ ID NO: 2537201 - RNA, 19 nt, Homo sapiens
  misc_RNA (1)...(19): siRNA sense strand
ucaaacgagaacagggaaa

SEQ ID NO: 2537202 - RNA, 19 nt, Homo sapiens
  misc_RNA (1)...(19): siRNA sense strand
gggaaacauugaagaggca

SEQ ID NO: 2537203 - RNA, 19 nt, Homo sapiens
  misc_RNA (1)...(19): siRNA sense strand
cugauaaauuugagguguu

SEQ ID NO: 2537204 - RNA, 19 nt, Homo sapiens
  misc_RNA (1)...(19): siRNA sense strand
uagaauaccugaagaaagu

SEQ ID NO: 2537205 - RNA, 19 nt, Homo sapiens
  misc_RNA (1)...(19): siRNA sense strand
cugaccaguuagagaagaa

SEQ ID NO: 2537206 - RNA, 19 nt, Homo sapiens
  misc_RNA (1)...(19): siRNA sense strand
gagaauaucaggcaggaga

SEQ ID NO: 2537207 - RNA, 19 nt, Homo sapiens
  misc_RNA (1)...(19): siRNA sense strand
cagacuaugaugagcgaau

SEQ ID NO: 2537208 - RNA, 19 nt, Homo sapiens
  misc_RNA (1)...(19): siRNA sense strand
ggaaacacucuaaaggaga

SEQ ID NO: 2537209 - RNA, 19 nt, Homo sapiens
  misc_RNA (1)...(19): siRNA sense strand
cgaaugaagaaguugguca

SEQ ID NO: 2537210 - RNA, 19 nt, Homo sapiens
  misc_RNA (1)...(19): siRNA sense strand
gcacauagcaaucuggcuu

SEQ ID NO: 2537211 - RNA, 19 nt, Homo sapiens
  misc_RNA (1)...(19): siRNA sense strand
ccaaaagacuugaagcuca

SEQ ID NO: 2537212 - RNA, 19 nt, Homo sapiens
  misc_RNA (1)...(19): siRNA sense strand
ggauaguucugaauggcau

SEQ ID NO: 2537213 - RNA, 19 nt, Homo sapiens
  misc_RNA (1)...(19): siRNA sense strand
uggcaaagucuggaagcaa

SEQ ID NO: 2537214 - RNA, 19 nt, Homo sapiens
  misc_RNA (1)...(19): siRNA sense strand
gacaagaauaugaagacau

SEQ ID NO: 2537215 - RNA, 19 nt, Homo sapiens
  misc_RNA (1)...(19): siRNA sense strand
cuuguaucguaaagcauua

SEQ ID NO: 2537216 - RNA, 19 nt, Homo sapiens
  misc_RNA (1)...(19): siRNA sense strand
cauuuaugacaaucggaua

SEQ ID NO: 2537217 - RNA, 19 nt, Homo sapiens
  misc_RNA (1)...(19): siRNA sense strand
gauuaaccgaggacagauu

SEQ ID NO: 2537218 - RNA, 19 nt, Homo sapiens
  misc_RNA (1)...(19): siRNA sense strand
gagaagaauagguugccuu

SEQ ID NO: 2537219 - RNA, 19 nt, Homo sapiens
  misc_RNA (1)...(19): siRNA sense strand
ccgaggacagauucaaaua

SEQ ID NO: 2537220 - RNA, 19 nt, Homo sapiens
  misc_RNA (1)...(19): siRNA sense strand
acaccaaacaauacacaau

SEQ ID NO: 2537221 - RNA, 19 nt, Homo sapiens
  misc_RNA (1)...(19): siRNA sense strand
guacaaggaaagagggcag

SEQ ID NO: 2537222 - RNA, 19 nt, Homo sapiens
  misc_RNA (1)...(19): siRNA sense strand
uguugaagucacugaguca

SEQ ID NO: 2537223 - RNA, 19 nt, Homo sapiens
  misc_RNA (1)...(19): siRNA sense strand
cugaagcagaagauuguua

SEQ ID NO: 2537224 - RNA, 19 nt, Homo sapiens
  misc_RNA (1)...(19): siRNA sense strand
augaugagcgaaugaagaa

SEQ ID NO: 2537225 - RNA, 19 nt, Homo sapiens
  misc_RNA (1)...(19): siRNA sense strand
agcaguauuccgagaaauu

SEQ ID NO: 2537226 - RNA, 19 nt, Homo sapiens
  misc_RNA (1)...(19): siRNA sense strand
agacaagaauaugaagaca

SEQ ID NO: 2537227 - RNA, 19 nt, Homo sapiens
  misc_RNA (1)...(19): siRNA sense strand
auacuaagggcgcucgaaa

SEQ ID NO: 2537228 - RNA, 19 nt, Homo sapiens
  misc_RNA (1)...(19): siRNA sense strand
ugaagaaaguucguggcaa

SEQ ID NO: 2537229 - RNA, 19 nt, Homo sapiens
  misc_RNA (1)...(19): siRNA sense strand
caauggaacuagagcggcu

SEQ ID NO: 2537230 - RNA, 19 nt, Homo sapiens
  misc_RNA (1)...(19): siRNA sense strand
caugcacaauccugauaaa

SEQ ID NO: 2537231 - RNA, 19 nt, Homo sapiens
  misc_RNA (1)...(19): siRNA sense strand
uagucuaccagaugugaaa

SEQ ID NO: 2537232 - RNA, 19 nt, Homo sapiens
  misc_RNA (1)...(19): siRNA sense strand
gcaacuacucagaucaaca

SEQ ID NO: 2537233 - RNA, 19 nt, Homo sapiens
  misc_RNA (1)...(19): siRNA sense strand
aggagaaccuaauauucaa

SEQ ID NO: 2537234 - RNA, 19 nt, Homo sapiens
  misc_RNA (1)...(19): siRNA sense strand
caauugagcauuaucgaca

SEQ ID NO: 2537235 - RNA, 19 nt, Homo sapiens
  misc_RNA (1)...(19): siRNA sense strand
gucuggaagcaaagaauau

SEQ ID NO: 2537236 - RNA, 19 nt, Homo sapiens
  misc_RNA (1)...(19): siRNA sense strand
ugaaagcaauugagacgca

SEQ ID NO: 2537237 - RNA, 19 nt, Homo sapiens
  misc_RNA (1)...(19): siRNA sense strand
ucguaaagcauuagaaguc

SEQ ID NO: 2537238 - RNA, 19 nt, Homo sapiens
  misc_RNA (1)...(19): siRNA sense strand
gggaaacacucuaaaggag

SEQ ID NO: 2537239 - RNA, 19 nt, Homo sapiens
  misc_RNA (1)...(19): siRNA sense strand
gaccaguuagagaagaaua

SEQ ID NO: 2537240 - RNA, 19 nt, Homo sapiens
  misc_RNA (1)...(19): siRNA sense strand
uugcaguagcuuggaguaa

SEQ ID NO: 2537241 - RNA, 19 nt, Homo sapiens
  misc_RNA (1)...(19): siRNA sense strand
ccauucaaauuuagcaagu

SEQ ID NO: 2537242 - RNA, 19 nt, Homo sapiens
  misc_RNA (1)...(19): siRNA sense strand
caauaaggcugcaacugga

SEQ ID NO: 2537243 - RNA, 19 nt, Homo sapiens
  misc_RNA (1)...(19): siRNA sense strand
ucuugagcuuauugcuaaa

SEQ ID NO: 2537244 - RNA, 19 nt, Homo sapiens
  misc_RNA (1)...(19): siRNA sense strand
ugauuaagccuguugaagu

SEQ ID NO: 2537245 - RNA, 19 nt, Homo sapiens
  misc_RNA (1)...(19): siRNA sense strand
gcguguaggauaugugagu

SEQ ID NO: 2537246 - RNA, 19 nt, Homo sapiens
  misc_RNA (1)...(19): siRNA sense strand
auuccgagaaauuggcuua

SEQ ID NO: 2537247 - RNA, 19 nt, Homo sapiens
  misc_RNA (1)...(19): siRNA sense strand
agggagccuugcaguguua

SEQ ID NO: 2537248 - RNA, 19 nt, Homo sapiens
  misc_RNA (1)...(19): siRNA sense strand
aguuagagaagaauagguu

SEQ ID NO: 2537249 - RNA, 19 nt, Homo sapiens
  misc_RNA (1)...(19): siRNA sense strand
ccuacucuaauaugggaaa

SEQ ID NO: 2537250 - RNA, 19 nt, Homo sapiens
  misc_RNA (1)...(19): siRNA sense strand
agauaauaccagagaagaa

SEQ ID NO: 2537251 - RNA, 19 nt, Homo sapiens
  misc_RNA (1)...(19): siRNA sense strand
agucagaucaaguggaauu

SEQ ID NO: 2537252 - RNA, 19 nt, Homo sapiens
  misc_RNA (1)...(19): siRNA sense strand
ugucauaccuggaugccaa

SEQ ID NO: 2537253 - RNA, 19 nt, Homo sapiens
  misc_RNA (1)...(19): siRNA sense strand
acaaucaagaucugggaua

SEQ ID NO: 2537254 - RNA, 19 nt, Homo sapiens
  misc_RNA (1)...(19): siRNA sense strand
caguaugaugagagaguga

SEQ ID NO: 2537255 - RNA, 19 nt, Homo sapiens
  misc_RNA (1)...(19): siRNA sense strand
aaguggaauuuguggaaca

SEQ ID NO: 2537256 - RNA, 19 nt, Homo sapiens
  misc_RNA (1)...(19): siRNA sense strand
cugcuuaaaccaagaaaca

SEQ ID NO: 2537257 - RNA, 19 nt, Homo sapiens
  misc_RNA (1)...(19): siRNA sense strand
ccgaagugaaacaagcaaa

SEQ ID NO: 2537258 - RNA, 19 nt, Homo sapiens
  misc_RNA (1)...(19): siRNA sense strand
cagagagagaagacuguaa

SEQ ID NO: 2537259 - RNA, 19 nt, Homo sapiens
  misc_RNA (1)...(19): siRNA sense strand
ccuauguugcagagagauu

SEQ ID NO: 2537260 - RNA, 19 nt, Homo sapiens
  misc_RNA (1)...(19): siRNA sense strand
uggaagaagcuuaucgaga

SEQ ID NO: 2537261 - RNA, 19 nt, Homo sapiens
  misc_RNA (1)...(19): siRNA sense strand
uauacaagacauugagaca

SEQ ID NO: 2537262 - RNA, 19 nt, Homo sapiens
  misc_RNA (1)...(19): siRNA sense strand
ugaaacaagcaaaggaguu

SEQ ID NO: 2537263 - RNA, 19 nt, Homo sapiens
  misc_RNA (1)...(19): siRNA sense strand
acuauaaagguauggaaca

SEQ ID NO: 2537264 - RNA, 19 nt, Homo sapiens
  misc_RNA (1)...(19): siRNA sense strand
ccaguaugauugugcccaa

SEQ ID NO: 2537265 - RNA, 19 nt, Homo sapiens
  misc_RNA (1)...(19): siRNA sense strand
agaagcuuaucgagagaau

SEQ ID NO: 2537266 - RNA, 19 nt, Homo sapiens
  misc_RNA (1)...(19): siRNA sense strand
aagacauaguuuacagaga

SEQ ID NO: 2537267 - RNA, 19 nt, Homo sapiens
  misc_RNA (1)...(19): siRNA sense strand
aaucaagaucugggauaaa

SEQ ID NO: 2537268 - RNA, 19 nt, Homo sapiens
  misc_RNA (1)...(19): siRNA sense strand
aauaauggcaugaugguga

SEQ ID NO: 2537269 - RNA, 19 nt, Homo sapiens
  misc_RNA (1)...(19): siRNA sense strand
ggucagagucagaucaagu

SEQ ID NO: 2537270 - RNA, 19 nt, Homo sapiens
  misc_RNA (1)...(19): siRNA sense strand
gcuuaaaccaagaaacagu

SEQ ID NO: 2537271 - RNA, 19 nt, Homo sapiens
  misc_RNA (1)...(19): siRNA sense strand
ggaucauauugcugagaac

SEQ ID NO: 2537272 - RNA, 19 nt, Homo sapiens
  misc_RNA (1)...(19): siRNA sense strand
aaggaaugguaccgaguga

SEQ ID NO: 2537273 - RNA, 19 nt, Homo sapiens
  misc_RNA (1)...(19): siRNA sense strand
ucuaauuggagauguggaa

SEQ ID NO: 2537274 - RNA, 19 nt, Homo sapiens
  misc_RNA (1)...(19): siRNA sense strand
agacuguaauaauggcgaa

SEQ ID NO: 2537275 - RNA, 19 nt, Homo sapiens
  misc_RNA (1)...(19): siRNA sense strand
acuaucagauuaugggaca

SEQ ID NO: 2537276 - RNA, 19 nt, Homo sapiens
  misc_RNA (1)...(19): siRNA sense strand
aagaauucacuuagacaga

SEQ ID NO: 2537277 - RNA, 19 nt, Homo sapiens
  misc_RNA (1)...(19): siRNA sense strand
caagcuaugaaaaggaaaa

SEQ ID NO: 2537278 - RNA, 19 nt, Homo sapiens
  misc_RNA (1)...(19): siRNA sense strand
aggcggugcugcaagagaa

SEQ ID NO: 2537279 - RNA, 19 nt, Homo sapiens
  misc_RNA (1)...(19): siRNA sense strand
cugagaauuguguggccaa

SEQ ID NO: 2537280 - RNA, 19 nt, Homo sapiens
  misc_RNA (1)...(19): siRNA sense strand
aggaacugugugucaaaua

SEQ ID NO: 2537281 - RNA, 19 nt, Homo sapiens
  misc_RNA (1)...(19): siRNA sense strand
gcgaauucucacaggccau

SEQ ID NO: 2537282 - RNA, 19 nt, Homo sapiens
  misc_RNA (1)...(19): siRNA sense strand
ggaacaucuuauaucccaa

SEQ ID NO: 2537283 - RNA, 19 nt, Homo sapiens
  misc_RNA (1)...(19): siRNA sense strand
ggaagaagcuuaucgagag

SEQ ID NO: 2537284 - RNA, 19 nt, Homo sapiens
  misc_RNA (1)...(19): siRNA sense strand
uaauuggagauguggaaga

SEQ ID NO: 2537285 - RNA, 19 nt, Homo sapiens
  misc_RNA (1)...(19): siRNA sense strand
gaaaauaguaagcggccuu

SEQ ID NO: 2537286 - RNA, 19 nt, Homo sapiens
  misc_RNA (1)...(19): siRNA sense strand
auacaggugaaaugcuaaa

SEQ ID NO: 2537287 - RNA, 19 nt, Homo sapiens
  misc_RNA (1)...(19): siRNA sense strand
cugucaauguuguagacuu

SEQ ID NO: 2537288 - RNA, 19 nt, Homo sapiens
  misc_RNA (1)...(19): siRNA sense strand
ggaaacucucagcaagcua

SEQ ID NO: 2537289 - RNA, 19 nt, Homo sapiens
  misc_RNA (1)...(19): siRNA sense strand
acuaugugcugcugaacuu

SEQ ID NO: 2537290 - RNA, 19 nt, Homo sapiens
  misc_RNA (1)...(19): siRNA sense strand
cgagagaauggucaggaca

SEQ ID NO: 2537291 - RNA, 19 nt, Homo sapiens
  misc_RNA (1)...(19): siRNA sense strand
gauuugauaacaagaggau

SEQ ID NO: 2537292 - RNA, 19 nt, Homo sapiens
  misc_RNA (1)...(19): siRNA sense strand
uugcagagagauuucauaa

SEQ ID NO: 2537293 - RNA, 19 nt, Homo sapiens
  misc_RNA (1)...(19): siRNA sense strand
agaauggucaggacagauu

SEQ ID NO: 2537294 - RNA, 19 nt, Homo sapiens
  misc_RNA (1)...(19): siRNA sense strand
ucagagugugggauguaaa

SEQ ID NO: 2537295 - RNA, 19 nt, Homo sapiens
  misc_RNA (1)...(19): siRNA sense strand
cguuguauucgauuugaua

SEQ ID NO: 2537296 - RNA, 19 nt, Homo sapiens
  misc_RNA (1)...(19): siRNA sense strand
augaaaaggaaaaggaacu

SEQ ID NO: 2537297 - RNA, 19 nt, Homo sapiens
  misc_RNA (1)...(19): siRNA sense strand
aaccuauguugcagagaga

SEQ ID NO: 2537298 - RNA, 19 nt, Homo sapiens
  misc_RNA (1)...(19): siRNA sense strand
cuauaaagguauggaacac

SEQ ID NO: 2537299 - RNA, 19 nt, Homo sapiens
  misc_RNA (1)...(19): siRNA sense strand
aaaggaacugugugucaaa

SEQ ID NO: 2537300 - RNA, 19 nt, Homo sapiens
  misc_RNA (1)...(19): siRNA sense strand
agagaauggucaggacaga

SEQ ID NO: 2537301 - RNA, 19 nt, Homo sapiens
  misc_RNA (1)...(19): siRNA sense strand
gcaucuggggauagaacua

SEQ ID NO: 2537302 - RNA, 19 nt, Homo sapiens
  misc_RNA (1)...(19): siRNA sense strand
agauaauaccagagaagaa

SEQ ID NO: 2537303 - RNA, 19 nt, Homo sapiens
  misc_RNA (1)...(19): siRNA sense strand
agucagaucaaguggaauu

SEQ ID NO: 2537304 - RNA, 19 nt, Homo sapiens
  misc_RNA (1)...(19): siRNA sense strand
ugucauaccuggaugccaa

SEQ ID NO: 2537305 - RNA, 19 nt, Homo sapiens
  misc_RNA (1)...(19): siRNA sense strand
acaaucaagaucugggaua

SEQ ID NO: 2537306 - RNA, 19 nt, Homo sapiens
  misc_RNA (1)...(19): siRNA sense strand
caguaugaugagagaguga

SEQ ID NO: 2537307 - RNA, 19 nt, Homo sapiens
  misc_RNA (1)...(19): siRNA sense strand
aaguggaauuuguggaaca

SEQ ID NO: 2537308 - RNA, 19 nt, Homo sapiens
  misc_RNA (1)...(19): siRNA sense strand
cugcuuaaaccaagaaaca

SEQ ID NO: 2537309 - RNA, 19 nt, Homo sapiens
  misc_RNA (1)...(19): siRNA sense strand
ccgaagugaaacaagcaaa

SEQ ID NO: 2537310 - RNA, 19 nt, Homo sapiens
  misc_RNA (1)...(19): siRNA sense strand
cagagagagaagacuguaa

SEQ ID NO: 2537311 - RNA, 19 nt, Homo sapiens
  misc_RNA (1)...(19): siRNA sense strand
ccuauguugcagagagauu

SEQ ID NO: 2537312 - RNA, 19 nt, Homo sapiens
  misc_RNA (1)...(19): siRNA sense strand
uggaagaagcuuaucgaga

SEQ ID NO: 2537313 - RNA, 19 nt, Homo sapiens
  misc_RNA (1)...(19): siRNA sense strand
uauacaagacauugagaca

SEQ ID NO: 2537314 - RNA, 19 nt, Homo sapiens
  misc_RNA (1)...(19): siRNA sense strand
ugaaacaagcaaaggaguu

SEQ ID NO: 2537315 - RNA, 19 nt, Homo sapiens
  misc_RNA (1)...(19): siRNA sense strand
acuauaaagguauggaaca

SEQ ID NO: 2537316 - RNA, 19 nt, Homo sapiens
  misc_RNA (1)...(19): siRNA sense strand
ccaguaugauugugcccaa

SEQ ID NO: 2537317 - RNA, 19 nt, Homo sapiens
  misc_RNA (1)...(19): siRNA sense strand
agaagcuuaucgagagaau

SEQ ID NO: 2537318 - RNA, 19 nt, Homo sapiens
  misc_RNA (1)...(19): siRNA sense strand
aagacauaguuuacagaga

SEQ ID NO: 2537319 - RNA, 19 nt, Homo sapiens
  misc_RNA (1)...(19): siRNA sense strand
aaucaagaucugggauaaa

SEQ ID NO: 2537320 - RNA, 19 nt, Homo sapiens
  misc_RNA (1)...(19): siRNA sense strand
aauaauggcaugaugguga

SEQ ID NO: 2537321 - RNA, 19 nt, Homo sapiens
  misc_RNA (1)...(19): siRNA sense strand
ggucagagucagaucaagu

SEQ ID NO: 2537322 - RNA, 19 nt, Homo sapiens
  misc_RNA (1)...(19): siRNA sense strand
gcuuaaaccaagaaacagu

SEQ ID NO: 2537323 - RNA, 19 nt, Homo sapiens
  misc_RNA (1)...(19): siRNA sense strand
ggaucauauugcugagaac

SEQ ID NO: 2537324 - RNA, 19 nt, Homo sapiens
  misc_RNA (1)...(19): siRNA sense strand
aaggaaugguaccgaguga

SEQ ID NO: 2537325 - RNA, 19 nt, Homo sapiens
  misc_RNA (1)...(19): siRNA sense strand
ucuaauuggagauguggaa

SEQ ID NO: 2537326 - RNA, 19 nt, Homo sapiens
  misc_RNA (1)...(19): siRNA sense strand
agacuguaauaauggcgaa

SEQ ID NO: 2537327 - RNA, 19 nt, Homo sapiens
  misc_RNA (1)...(19): siRNA sense strand
acuaucagauuaugggaca

SEQ ID NO: 2537328 - RNA, 19 nt, Homo sapiens
  misc_RNA (1)...(19): siRNA sense strand
aagaauucacuuagacaga

SEQ ID NO: 2537329 - RNA, 19 nt, Homo sapiens
  misc_RNA (1)...(19): siRNA sense strand
caagcuaugaaaaggaaaa

SEQ ID NO: 2537330 - RNA, 19 nt, Homo sapiens
  misc_RNA (1)...(19): siRNA sense strand
aggcggugcugcaagagaa

SEQ ID NO: 2537331 - RNA, 19 nt, Homo sapiens
  misc_RNA (1)...(19): siRNA sense strand
cugagaauuguguggccaa

SEQ ID NO: 2537332 - RNA, 19 nt, Homo sapiens
  misc_RNA (1)...(19): siRNA sense strand
aggaacugugugucaaaua

SEQ ID NO: 2537333 - RNA, 19 nt, Homo sapiens
  misc_RNA (1)...(19): siRNA sense strand
gcgaauucucacaggccau

SEQ ID NO: 2537334 - RNA, 19 nt, Homo sapiens
  misc_RNA (1)...(19): siRNA sense strand
ggaacaucuuauaucccaa

SEQ ID NO: 2537335 - RNA, 19 nt, Homo sapiens
  misc_RNA (1)...(19): siRNA sense strand
ggaagaagcuuaucgagag

SEQ ID NO: 2537336 - RNA, 19 nt, Homo sapiens
  misc_RNA (1)...(19): siRNA sense strand
uaauuggagauguggaaga

SEQ ID NO: 2537337 - RNA, 19 nt, Homo sapiens
  misc_RNA (1)...(19): siRNA sense strand
gaaaauaguaagcggccuu

SEQ ID NO: 2537338 - RNA, 19 nt, Homo sapiens
  misc_RNA (1)...(19): siRNA sense strand
auacaggugaaaugcuaaa

SEQ ID NO: 2537339 - RNA, 19 nt, Homo sapiens
  misc_RNA (1)...(19): siRNA sense strand
cugucaauguuguagacuu

SEQ ID NO: 2537340 - RNA, 19 nt, Homo sapiens
  misc_RNA (1)...(19): siRNA sense strand
ggaaacucucagcaagcua

SEQ ID NO: 2537341 - RNA, 19 nt, Homo sapiens
  misc_RNA (1)...(19): siRNA sense strand
acuaugugcugcugaacuu

SEQ ID NO: 2537342 - RNA, 19 nt, Homo sapiens
  misc_RNA (1)...(19): siRNA sense strand
cgagagaauggucaggaca

SEQ ID NO: 2537343 - RNA, 19 nt, Homo sapiens
  misc_RNA (1)...(19): siRNA sense strand
gauuugauaacaagaggau

SEQ ID NO: 2537344 - RNA, 19 nt, Homo sapiens
  misc_RNA (1)...(19): siRNA sense strand
uugcagagagauuucauaa

SEQ ID NO: 2537345 - RNA, 19 nt, Homo sapiens
  misc_RNA (1)...(19): siRNA sense strand
agaauggucaggacagauu

SEQ ID NO: 2537346 - RNA, 19 nt, Homo sapiens
  misc_RNA (1)...(19): siRNA sense strand
ucagagugugggauguaaa

SEQ ID NO: 2537347 - RNA, 19 nt, Homo sapiens
  misc_RNA (1)...(19): siRNA sense strand
cguuguauucgauuugaua

SEQ ID NO: 2537348 - RNA, 19 nt, Homo sapiens
  misc_RNA (1)...(19): siRNA sense strand
augaaaaggaaaaggaacu

SEQ ID NO: 2537349 - RNA, 19 nt, Homo sapiens
  misc_RNA (1)...(19): siRNA sense strand
aaccuauguugcagagaga

SEQ ID NO: 2537350 - RNA, 19 nt, Homo sapiens
  misc_RNA (1)...(19): siRNA sense strand
cuauaaagguauggaacac

SEQ ID NO: 2537351 - RNA, 19 nt, Homo sapiens
  misc_RNA (1)...(19): siRNA sense strand
aaaggaacugugugucaaa

SEQ ID NO: 2537352 - RNA, 19 nt, Homo sapiens
  misc_RNA (1)...(19): siRNA sense strand
agagaauggucaggacaga

SEQ ID NO: 2537353 - RNA, 19 nt, Homo sapiens
  misc_RNA (1)...(19): siRNA sense strand
gcaucuggggauagaacua

SEQ ID NO: 2537354 - RNA, 19 nt, Homo sapiens
  misc_RNA (1)...(19): siRNA sense strand
agauggaguugcaggacua

SEQ ID NO: 2537355 - RNA, 19 nt, Homo sapiens
  misc_RNA (1)...(19): siRNA sense strand
ccagcagacaggacagaaa

SEQ ID NO: 2537356 - RNA, 19 nt, Homo sapiens
  misc_RNA (1)...(19): siRNA sense strand
uggcgaagcuggauauaga

SEQ ID NO: 2537357 - RNA, 19 nt, Homo sapiens
  misc_RNA (1)...(19): siRNA sense strand
cuucagaaauccagccaga

SEQ ID NO: 2537358 - RNA, 19 nt, Homo sapiens
  misc_RNA (1)...(19): siRNA sense strand
aaaaggagugugaggaaaa

SEQ ID NO: 2537359 - RNA, 19 nt, Homo sapiens
  misc_RNA (1)...(19): siRNA sense strand
uggagacagcagaguauaa

SEQ ID NO: 2537360 - RNA, 19 nt, Homo sapiens
  misc_RNA (1)...(19): siRNA sense strand
ccagucugcaagugagaua

SEQ ID NO: 2537361 - RNA, 19 nt, Homo sapiens
  misc_RNA (1)...(19): siRNA sense strand
agcacaagccagauugaaa

SEQ ID NO: 2537362 - RNA, 19 nt, Homo sapiens
  misc_RNA (1)...(19): siRNA sense strand
agauggagcaagacaaaca

SEQ ID NO: 2537363 - RNA, 19 nt, Homo sapiens
  misc_RNA (1)...(19): siRNA sense strand
aagauaaacuuucugguga

SEQ ID NO: 2537364 - RNA, 19 nt, Homo sapiens
  misc_RNA (1)...(19): siRNA sense strand
cagaaaauccagauaguca

SEQ ID NO: 2537365 - RNA, 19 nt, Homo sapiens
  misc_RNA (1)...(19): siRNA sense strand
ccagagacauccagcgcca

SEQ ID NO: 2537366 - RNA, 19 nt, Homo sapiens
  misc_RNA (1)...(19): siRNA sense strand
ucaaaaggagugugaggaa

SEQ ID NO: 2537367 - RNA, 19 nt, Homo sapiens
  misc_RNA (1)...(19): siRNA sense strand
ucaauaaacaucaccggaa

SEQ ID NO: 2537368 - RNA, 19 nt, Homo sapiens
  misc_RNA (1)...(19): siRNA sense strand
gcaggacuauguucagaaa

SEQ ID NO: 2537369 - RNA, 19 nt, Homo sapiens
  misc_RNA (1)...(19): siRNA sense strand
cgaugugcaacgggagaaa

SEQ ID NO: 2537370 - RNA, 19 nt, Homo sapiens
  misc_RNA (1)...(19): siRNA sense strand
gugcaacgggagaaaccaa

SEQ ID NO: 2537371 - RNA, 19 nt, Homo sapiens
  misc_RNA (1)...(19): siRNA sense strand
cuaacaaugcccaguccaa

SEQ ID NO: 2537372 - RNA, 19 nt, Homo sapiens
  misc_RNA (1)...(19): siRNA sense strand
cagcagaguauaauggcca

SEQ ID NO: 2537373 - RNA, 19 nt, Homo sapiens
  misc_RNA (1)...(19): siRNA sense strand
acaaagauggagcaagaca

SEQ ID NO: 2537374 - RNA, 19 nt, Homo sapiens
  misc_RNA (1)...(19): siRNA sense strand
acagcauccaggaagauaa

SEQ ID NO: 2537375 - RNA, 19 nt, Homo sapiens
  misc_RNA (1)...(19): siRNA sense strand
uggcaaauguagugaccuc

SEQ ID NO: 2537376 - RNA, 19 nt, Homo sapiens
  misc_RNA (1)...(19): siRNA sense strand
caauaaacaucaccggaac

SEQ ID NO: 2537377 - RNA, 19 nt, Homo sapiens
  misc_RNA (1)...(19): siRNA sense strand
gcauuugauaccuuagcua

SEQ ID NO: 2537378 - RNA, 19 nt, Homo sapiens
  misc_RNA (1)...(19): siRNA sense strand
ccacggauucuaaggcuga

SEQ ID NO: 2537379 - RNA, 19 nt, Homo sapiens
  misc_RNA (1)...(19): siRNA sense strand
aggcacagauggaguugca

SEQ ID NO: 2537380 - RNA, 19 nt, Homo sapiens
  misc_RNA (1)...(19): siRNA sense strand
aagaaaaggcacagaugga

SEQ ID NO: 2537381 - RNA, 19 nt, Homo sapiens
  misc_RNA (1)...(19): siRNA sense strand
ccaacauaacagaagaacu

SEQ ID NO: 2537382 - RNA, 19 nt, Homo sapiens
  misc_RNA (1)...(19): siRNA sense strand
gauagacaccaguggagga

SEQ ID NO: 2537383 - RNA, 19 nt, Homo sapiens
  misc_RNA (1)...(19): siRNA sense strand
gcgaaaagcuaauuggcua

SEQ ID NO: 2537384 - RNA, 19 nt, Homo sapiens
  misc_RNA (1)...(19): siRNA sense strand
cgauccugccagagcgaaa

SEQ ID NO: 2537385 - RNA, 19 nt, Homo sapiens
  misc_RNA (1)...(19): siRNA sense strand
cggcugcaaauuuggguaa

SEQ ID NO: 2537386 - RNA, 19 nt, Homo sapiens
  misc_RNA (1)...(19): siRNA sense strand
gcauuagcauggaccggua

SEQ ID NO: 2537387 - RNA, 19 nt, Homo sapiens
  misc_RNA (1)...(19): siRNA sense strand
acgucuaucucuugaacau

SEQ ID NO: 2537388 - RNA, 19 nt, Homo sapiens
  misc_RNA (1)...(19): siRNA sense strand
cauucugggcagugaguca

SEQ ID NO: 2537389 - RNA, 19 nt, Homo sapiens
  misc_RNA (1)...(19): siRNA sense strand
gggaauauucuggugguga

SEQ ID NO: 2537390 - RNA, 19 nt, Homo sapiens
  misc_RNA (1)...(19): siRNA sense strand
gugcaagcucagaauucua

SEQ ID NO: 2537391 - RNA, 19 nt, Homo sapiens
  misc_RNA (1)...(19): siRNA sense strand
cgaaaagcuaauuggcuau

SEQ ID NO: 2537392 - RNA, 19 nt, Homo sapiens
  misc_RNA (1)...(19): siRNA sense strand
gugagaaggaaguacaagu

SEQ ID NO: 2537393 - RNA, 19 nt, Homo sapiens
  misc_RNA (1)...(19): siRNA sense strand
gcgaaaagcuaauuggcua

SEQ ID NO: 2537394 - RNA, 19 nt, Homo sapiens
  misc_RNA (1)...(19): siRNA sense strand
cgauccugccagagcgaaa

SEQ ID NO: 2537395 - RNA, 19 nt, Homo sapiens
  misc_RNA (1)...(19): siRNA sense strand
cggcugcaaauuuggguaa

SEQ ID NO: 2537396 - RNA, 19 nt, Homo sapiens
  misc_RNA (1)...(19): siRNA sense strand
gcauuagcauggaccggua

SEQ ID NO: 2537397 - RNA, 19 nt, Homo sapiens
  misc_RNA (1)...(19): siRNA sense strand
acgucuaucucuugaacau

SEQ ID NO: 2537398 - RNA, 19 nt, Homo sapiens
  misc_RNA (1)...(19): siRNA sense strand
cauucugggcagugaguca

SEQ ID NO: 2537399 - RNA, 19 nt, Homo sapiens
  misc_RNA (1)...(19): siRNA sense strand
gggaauauucuggugguga

SEQ ID NO: 2537400 - RNA, 19 nt, Homo sapiens
  misc_RNA (1)...(19): siRNA sense strand
gugcaagcucagaauucua

SEQ ID NO: 2537401 - RNA, 19 nt, Homo sapiens
  misc_RNA (1)...(19): siRNA sense strand
cgaaaagcuaauuggcuau

SEQ ID NO: 2537402 - RNA, 19 nt, Homo sapiens
  misc_RNA (1)...(19): siRNA sense strand
gugagaaggaaguacaagu

SEQ ID NO: 2537403 - RNA, 19 nt, Homo sapiens
  misc_RNA (1)...(19): siRNA sense strand
ccgagaagccagaggagga

SEQ ID NO: 2537404 - RNA, 19 nt, Homo sapiens
  misc_RNA (1)...(19): siRNA sense strand
caggaggaacugagggaga

SEQ ID NO: 2537405 - RNA, 19 nt, Homo sapiens
  misc_RNA (1)...(19): siRNA sense strand
cagaggaggaggaggccau

SEQ ID NO: 2537406 - RNA, 19 nt, Homo sapiens
  misc_RNA (1)...(19): siRNA sense strand
ucgacaagauggagcagga

SEQ ID NO: 2537407 - RNA, 19 nt, Homo sapiens
  misc_RNA (1)...(19): siRNA sense strand
agacaguggccaagaguac

SEQ ID NO: 2537408 - RNA, 19 nt, Homo sapiens
  misc_RNA (1)...(19): siRNA sense strand
aauccgagacaguggccaa

SEQ ID NO: 2537409 - RNA, 19 nt, Homo sapiens
  misc_RNA (1)...(19): siRNA sense strand
aaguggaggaagcgggaga

SEQ ID NO: 2537410 - RNA, 19 nt, Homo sapiens
  misc_RNA (1)...(19): siRNA sense strand
acaagauggagcaggacga

SEQ ID NO: 2537411 - RNA, 19 nt, Homo sapiens
  misc_RNA (1)...(19): siRNA sense strand
uggagaaggcauucaacga

SEQ ID NO: 2537412 - RNA, 19 nt, Homo sapiens
  misc_RNA (1)...(19): siRNA sense strand
ucacggagcugcuggagga

SEQ ID NO: 2537413 - RNA, 19 nt, Homo sapiens
  misc_RNA (1)...(19): siRNA sense strand
cgguuagcauugggaggaa

SEQ ID NO: 2537414 - RNA, 19 nt, Homo sapiens
  misc_RNA (1)...(19): siRNA sense strand
acgccgaauaucuggagaa

SEQ ID NO: 2537415 - RNA, 19 nt, Homo sapiens
  misc_RNA (1)...(19): siRNA sense strand
acgaagaagcgggagucaa

SEQ ID NO: 2537416 - RNA, 19 nt, Homo sapiens
  misc_RNA (1)...(19): siRNA sense strand
ccgagagguguacgaagaa

SEQ ID NO: 2537417 - RNA, 19 nt, Homo sapiens
  misc_RNA (1)...(19): siRNA sense strand
gcauugggaggaagcgaga

SEQ ID NO: 2537418 - RNA, 19 nt, Homo sapiens
  misc_RNA (1)...(19): siRNA sense strand
gguucaaagucgaagaugc

SEQ ID NO: 2537419 - RNA, 19 nt, Homo sapiens
  misc_RNA (1)...(19): siRNA sense strand
cugauuuggaggagaaagu

SEQ ID NO: 2537420 - RNA, 19 nt, Homo sapiens
  misc_RNA (1)...(19): siRNA sense strand
cugacuugggugaaauuua

SEQ ID NO: 2537421 - RNA, 19 nt, Homo sapiens
  misc_RNA (1)...(19): siRNA sense strand
aguaggcauuucuggacaa

SEQ ID NO: 2537422 - RNA, 19 nt, Homo sapiens
  misc_RNA (1)...(19): siRNA sense strand
agaaaguccagcugggagu

SEQ ID NO: 2537423 - RNA, 19 nt, Homo sapiens
  misc_RNA (1)...(19): siRNA sense strand
aaguggaagaagacaguca

SEQ ID NO: 2537424 - RNA, 19 nt, Homo sapiens
  misc_RNA (1)...(19): siRNA sense strand
uguucugacuugggugaaa

SEQ ID NO: 2537425 - RNA, 19 nt, Homo sapiens
  misc_RNA (1)...(19): siRNA sense strand
gugaaaggauggugggaga

SEQ ID NO: 2537426 - RNA, 19 nt, Homo sapiens
  misc_RNA (1)...(19): siRNA sense strand
gaagaaagauggaaggaac

SEQ ID NO: 2537427 - RNA, 19 nt, Homo sapiens
  misc_RNA (1)...(19): siRNA sense strand
gggagaugaaagacagaca

SEQ ID NO: 2537428 - RNA, 19 nt, Homo sapiens
  misc_RNA (1)...(19): siRNA sense strand
caugaaauucggaagguga

SEQ ID NO: 2537429 - RNA, 19 nt, Homo sapiens
  misc_RNA (1)...(19): siRNA sense strand
gagaagugccagcgagcca

SEQ ID NO: 2537430 - RNA, 19 nt, Homo sapiens
  misc_RNA (1)...(19): siRNA sense strand
augagagguuugaugaaau

SEQ ID NO: 2537431 - RNA, 19 nt, Homo sapiens
  misc_RNA (1)...(19): siRNA sense strand
aggaaauuguggauaugau

SEQ ID NO: 2537432 - RNA, 19 nt, Homo sapiens
  misc_RNA (1)...(19): siRNA sense strand
agaagaaagauggaaggaa

SEQ ID NO: 2537433 - RNA, 19 nt, Homo sapiens
  misc_RNA (1)...(19): siRNA sense strand
ugaaagagguggaggggac

SEQ ID NO: 2537434 - RNA, 19 nt, Homo sapiens
  misc_RNA (1)...(19): siRNA sense strand
aaggauggugggagaugaa

SEQ ID NO: 2537435 - RNA, 19 nt, Homo sapiens
  misc_RNA (1)...(19): siRNA sense strand
gguggaugaaacagugcua

SEQ ID NO: 2537436 - RNA, 19 nt, Homo sapiens
  misc_RNA (1)...(19): siRNA sense strand
acaacguggauucaggaaa

SEQ ID NO: 2537437 - RNA, 19 nt, Homo sapiens
  misc_RNA (1)...(19): siRNA sense strand
uggaugaaacagugcuaga

SEQ ID NO: 2537438 - RNA, 19 nt, Homo sapiens
  misc_RNA (1)...(19): siRNA sense strand
ugggaagaguauuuugaaa

SEQ ID NO: 2537439 - RNA, 19 nt, Homo sapiens
  misc_RNA (1)...(19): siRNA sense strand
ggaaaagugguuugggguu

SEQ ID NO: 2537440 - RNA, 19 nt, Homo sapiens
  misc_RNA (1)...(19): siRNA sense strand
ucgaaaugccaaagacugu

SEQ ID NO: 2537441 - RNA, 19 nt, Homo sapiens
  misc_RNA (1)...(19): siRNA sense strand
agaauggggacguggagaa

SEQ ID NO: 2537442 - RNA, 19 nt, Homo sapiens
  misc_RNA (1)...(19): siRNA sense strand
aaagaaaaucccaugacaa

SEQ ID NO: 2537443 - RNA, 19 nt, Homo sapiens
  misc_RNA (1)...(19): siRNA sense strand
ggacauaaagagggaccca

SEQ ID NO: 2537444 - RNA, 19 nt, Homo sapiens
  misc_RNA (1)...(19): siRNA sense strand
gugaugcaguucaugggaa

SEQ ID NO: 2537445 - RNA, 19 nt, Homo sapiens
  misc_RNA (1)...(19): siRNA sense strand
ccucagaccuggggaaaca

SEQ ID NO: 2537446 - RNA, 19 nt, Homo sapiens
  misc_RNA (1)...(19): siRNA sense strand
gugaaaggauggugggaga

SEQ ID NO: 2537447 - RNA, 19 nt, Homo sapiens
  misc_RNA (1)...(19): siRNA sense strand
gaagaaagauggaaggaac

SEQ ID NO: 2537448 - RNA, 19 nt, Homo sapiens
  misc_RNA (1)...(19): siRNA sense strand
gggagaugaaagacagaca

SEQ ID NO: 2537449 - RNA, 19 nt, Homo sapiens
  misc_RNA (1)...(19): siRNA sense strand
caugaaauucggaagguga

SEQ ID NO: 2537450 - RNA, 19 nt, Homo sapiens
  misc_RNA (1)...(19): siRNA sense strand
gagaagugccagcgagcca

SEQ ID NO: 2537451 - RNA, 19 nt, Homo sapiens
  misc_RNA (1)...(19): siRNA sense strand
augagagguuugaugaaau

SEQ ID NO: 2537452 - RNA, 19 nt, Homo sapiens
  misc_RNA (1)...(19): siRNA sense strand
aggaaauuguggauaugau

SEQ ID NO: 2537453 - RNA, 19 nt, Homo sapiens
  misc_RNA (1)...(19): siRNA sense strand
agaagaaagauggaaggaa

SEQ ID NO: 2537454 - RNA, 19 nt, Homo sapiens
  misc_RNA (1)...(19): siRNA sense strand
ugaaagagguggaggggac

SEQ ID NO: 2537455 - RNA, 19 nt, Homo sapiens
  misc_RNA (1)...(19): siRNA sense strand
aaggauggugggagaugaa

SEQ ID NO: 2537456 - RNA, 19 nt, Homo sapiens
  misc_RNA (1)...(19): siRNA sense strand
gguggaugaaacagugcua

SEQ ID NO: 2537457 - RNA, 19 nt, Homo sapiens
  misc_RNA (1)...(19): siRNA sense strand
acaacguggauucaggaaa

SEQ ID NO: 2537458 - RNA, 19 nt, Homo sapiens
  misc_RNA (1)...(19): siRNA sense strand
uggaugaaacagugcuaga

SEQ ID NO: 2537459 - RNA, 19 nt, Homo sapiens
  misc_RNA (1)...(19): siRNA sense strand
ugggaagaguauuuugaaa

SEQ ID NO: 2537460 - RNA, 19 nt, Homo sapiens
  misc_RNA (1)...(19): siRNA sense strand
ggaaaagugguuugggguu

SEQ ID NO: 2537461 - RNA, 19 nt, Homo sapiens
  misc_RNA (1)...(19): siRNA sense strand
ucgaaaugccaaagacugu

SEQ ID NO: 2537462 - RNA, 19 nt, Homo sapiens
  misc_RNA (1)...(19): siRNA sense strand
agaauggggacguggagaa

SEQ ID NO: 2537463 - RNA, 19 nt, Homo sapiens
  misc_RNA (1)...(19): siRNA sense strand
aaagaaaaucccaugacaa

SEQ ID NO: 2537464 - RNA, 19 nt, Homo sapiens
  misc_RNA (1)...(19): siRNA sense strand
ggacauaaagagggaccca

SEQ ID NO: 2537465 - RNA, 19 nt, Homo sapiens
  misc_RNA (1)...(19): siRNA sense strand
gugaugcaguucaugggaa

SEQ ID NO: 2537466 - RNA, 19 nt, Homo sapiens
  misc_RNA (1)...(19): siRNA sense strand
ccucagaccuggggaaaca

SEQ ID NO: 2537467 - RNA, 19 nt, Homo sapiens
  misc_RNA (1)...(19): siRNA sense strand
aggcagagggacagaggaa

SEQ ID NO: 2537468 - RNA, 19 nt, Homo sapiens
  misc_RNA (1)...(19): siRNA sense strand
uggaaaaggcagagggaca

SEQ ID NO: 2537469 - RNA, 19 nt, Homo sapiens
  misc_RNA (1)...(19): siRNA sense strand
cuucuaauuaggagacaua

SEQ ID NO: 2537470 - RNA, 19 nt, Homo sapiens
  misc_RNA (1)...(19): siRNA sense strand
agauaauauagcaggaaca

SEQ ID NO: 2537471 - RNA, 19 nt, Homo sapiens
  misc_RNA (1)...(19): siRNA sense strand
gggcagauggagagaggca

SEQ ID NO: 2537472 - RNA, 19 nt, Homo sapiens
  misc_RNA (1)...(19): siRNA sense strand
agaaguauaccgagagcau

SEQ ID NO: 2537473 - RNA, 19 nt, Homo sapiens
  misc_RNA (1)...(19): siRNA sense strand
acagagaaguauaccgaga

SEQ ID NO: 2537474 - RNA, 19 nt, Homo sapiens
  misc_RNA (1)...(19): siRNA sense strand
uaaaggagcaggaagggaa

SEQ ID NO: 2537475 - RNA, 19 nt, Homo sapiens
  misc_RNA (1)...(19): siRNA sense strand
gaccuaaggaggagcaaaa

SEQ ID NO: 2537476 - RNA, 19 nt, Homo sapiens
  misc_RNA (1)...(19): siRNA sense strand
ucucgaacuuggagcucaa

SEQ ID NO: 2537477 - RNA, 19 nt, Homo sapiens
  misc_RNA (1)...(19): siRNA sense strand
gguuugagucccaaggaga

SEQ ID NO: 2537478 - RNA, 19 nt, Homo sapiens
  misc_RNA (1)...(19): siRNA sense strand
caaagauaauauagcagga

SEQ ID NO: 2537479 - RNA, 19 nt, Homo sapiens
  misc_RNA (1)...(19): siRNA sense strand
agaaaaggaggcugugaaa

SEQ ID NO: 2537480 - RNA, 19 nt, Homo sapiens
  misc_RNA (1)...(19): siRNA sense strand
cugugaaaguuguccucaa

SEQ ID NO: 2537481 - RNA, 19 nt, Homo sapiens
  misc_RNA (1)...(19): siRNA sense strand
uguuggaacuuguggacca

SEQ ID NO: 2537482 - RNA, 19 nt, Homo sapiens
  misc_RNA (1)...(19): siRNA sense strand
gcagagggacagaggaaac

SEQ ID NO: 2537483 - RNA, 19 nt, Homo sapiens
  misc_RNA (1)...(19): siRNA sense strand
gaggagagggcgagguacu

SEQ ID NO: 2537484 - RNA, 19 nt, Homo sapiens
  misc_RNA (1)...(19): siRNA sense strand
cugcaugauuacagagaag

SEQ ID NO: 2537485 - RNA, 19 nt, Homo sapiens
  misc_RNA (1)...(19): siRNA sense strand
ucuuagagacaccuagaaa

SEQ ID NO: 2537486 - RNA, 19 nt, Homo sapiens
  misc_RNA (1)...(19): siRNA sense strand
auggacagaaggagggcaa

SEQ ID NO: 2537487 - RNA, 19 nt, Homo sapiens
  misc_RNA (1)...(19): siRNA sense strand
gugucagguuccaggcauu

SEQ ID NO: 2537488 - RNA, 19 nt, Homo sapiens
  misc_RNA (1)...(19): siRNA sense strand
cugacaucuucauggcuua

SEQ ID NO: 2537489 - RNA, 19 nt, Homo sapiens
  misc_RNA (1)...(19): siRNA sense strand
gcagagaagugcaaaggcu

SEQ ID NO: 2537490 - RNA, 19 nt, Homo sapiens
  misc_RNA (1)...(19): siRNA sense strand
aggagaacgauuucaagaa

SEQ ID NO: 2537491 - RNA, 19 nt, Homo sapiens
  misc_RNA (1)...(19): siRNA sense strand
aggaggagagggcgaggua

SEQ ID NO: 2537492 - RNA, 19 nt, Homo sapiens
  misc_RNA (1)...(19): siRNA sense strand
gagaaaaggaggcugugaa

SEQ ID NO: 2537493 - RNA, 19 nt, Homo sapiens
  misc_RNA (1)...(19): siRNA sense strand
cauccuuaguugugcuaca

SEQ ID NO: 2537494 - RNA, 19 nt, Homo sapiens
  misc_RNA (1)...(19): siRNA sense strand
aagaaaucacagagccaga

SEQ ID NO: 2537495 - RNA, 19 nt, Homo sapiens
  misc_RNA (1)...(19): siRNA sense strand
ggaccuaaggaggagcaaa

SEQ ID NO: 2537496 - RNA, 19 nt, Homo sapiens
  misc_RNA (1)...(19): siRNA sense strand
ccuagaaacagcacugaca

SEQ ID NO: 2537497 - RNA, 19 nt, Homo sapiens
  misc_RNA (1)...(19): siRNA sense strand
gcaaagaagugguccugcu

SEQ ID NO: 2537498 - RNA, 19 nt, Homo sapiens
  misc_RNA (1)...(19): siRNA sense strand
ccuucgacauuguacagaa

SEQ ID NO: 2537499 - RNA, 19 nt, Homo sapiens
  misc_RNA (1)...(19): siRNA sense strand
aggaagggaaugaugagau

SEQ ID NO: 2537500 - RNA, 19 nt, Homo sapiens
  misc_RNA (1)...(19): siRNA sense strand
ugaggaaucuggagcccuu

SEQ ID NO: 2537501 - RNA, 19 nt, Homo sapiens
  misc_RNA (1)...(19): siRNA sense strand
gggacagaggaaacaccaa

SEQ ID NO: 2537502 - RNA, 19 nt, Homo sapiens
  misc_RNA (1)...(19): siRNA sense strand
ccuauuucacggaugagaa

SEQ ID NO: 2537503 - RNA, 19 nt, Homo sapiens
  misc_RNA (1)...(19): siRNA sense strand
cgggcaagcauuuggagaa

SEQ ID NO: 2537504 - RNA, 19 nt, Homo sapiens
  misc_RNA (1)...(19): siRNA sense strand
gugaaaaggcaucaagaau

SEQ ID NO: 2537505 - RNA, 19 nt, Homo sapiens
  misc_RNA (1)...(19): siRNA sense strand
aaggauuacaucacggaaa

SEQ ID NO: 2537506 - RNA, 19 nt, Homo sapiens
  misc_RNA (1)...(19): siRNA sense strand
agugccaagcaaagagaaa

SEQ ID NO: 2537507 - RNA, 19 nt, Homo sapiens
  misc_RNA (1)...(19): siRNA sense strand
cugggaccaucuagggaaa

SEQ ID NO: 2537508 - RNA, 19 nt, Homo sapiens
  misc_RNA (1)...(19): siRNA sense strand
gcaaaguaucugaaggaag

SEQ ID NO: 2537509 - RNA, 19 nt, Homo sapiens
  misc_RNA (1)...(19): siRNA sense strand
aggauuacaucacggaaaa

SEQ ID NO: 2537510 - RNA, 19 nt, Homo sapiens
  misc_RNA (1)...(19): siRNA sense strand
ugccaagcaaagagaaauu

SEQ ID NO: 2537511 - RNA, 19 nt, Homo sapiens
  misc_RNA (1)...(19): siRNA sense strand
uguuugaagugccaagcaa

SEQ ID NO: 2537512 - RNA, 19 nt, Homo sapiens
  misc_RNA (1)...(19): siRNA sense strand
cauucauucauguggaaga

SEQ ID NO: 2537513 - RNA, 19 nt, Homo sapiens
  misc_RNA (1)...(19): siRNA sense strand
aagcaaaagcauugaaauc

SEQ ID NO: 2537514 - RNA, 19 nt, Homo sapiens
  misc_RNA (1)...(19): siRNA sense strand
gcaaagagaaauuggugug

SEQ ID NO: 2537515 - RNA, 19 nt, Homo sapiens
  misc_RNA (1)...(19): siRNA sense strand
gcagaaacgccgaggguga

SEQ ID NO: 2537516 - RNA, 19 nt, Homo sapiens
  misc_RNA (1)...(19): siRNA sense strand
gggaauucaaaccaggaaa

SEQ ID NO: 2537517 - RNA, 19 nt, Homo sapiens
  misc_RNA (1)...(19): siRNA sense strand
ggugaugacuggugcggga

SEQ ID NO: 2537518 - RNA, 19 nt, Homo sapiens
  misc_RNA (1)...(19): siRNA sense strand
gugcaaugcuuguggacuc

SEQ ID NO: 2537519 - RNA, 19 nt, Homo sapiens
  misc_RNA (1)...(19): siRNA sense strand
ccgagaacagcgagcucaa

SEQ ID NO: 2537520 - RNA, 19 nt, Homo sapiens
  misc_RNA (1)...(19): siRNA sense strand
cgaaaaccuaagaacauaa

SEQ ID NO: 2537521 - RNA, 19 nt, Homo sapiens
  misc_RNA (1)...(19): siRNA sense strand
ugauaaugguccugggcaa

SEQ ID NO: 2537522 - RNA, 19 nt, Homo sapiens
  misc_RNA (1)...(19): siRNA sense strand
cuuacaaagaugagcggaa

SEQ ID NO: 2537523 - RNA, 19 nt, Homo sapiens
  misc_RNA (1)...(19): siRNA sense strand
aggcagaaggaaauugaaa

SEQ ID NO: 2537524 - RNA, 19 nt, Homo sapiens
  misc_RNA (1)...(19): siRNA sense strand
gggacauaaugcagcaaaa

SEQ ID NO: 2537525 - RNA, 19 nt, Homo sapiens
  misc_RNA (1)...(19): siRNA sense strand
aggaacaggacgagaagau

SEQ ID NO: 2537526 - RNA, 19 nt, Homo sapiens
  misc_RNA (1)...(19): siRNA sense strand
ccgaggaacaggacgagaa

SEQ ID NO: 2537527 - RNA, 19 nt, Homo sapiens
  misc_RNA (1)...(19): siRNA sense strand
aguucaaagcaguccgaua

SEQ ID NO: 2537528 - RNA, 19 nt, Homo sapiens
  misc_RNA (1)...(19): siRNA sense strand
guuuaaaguuagagccauc

SEQ ID NO: 2537529 - RNA, 19 nt, Homo sapiens
  misc_RNA (1)...(19): siRNA sense strand
aagcugacaaggaggcaaa

SEQ ID NO: 2537530 - RNA, 19 nt, Homo sapiens
  misc_RNA (1)...(19): siRNA sense strand
guguccaggcagaaggaaa

SEQ ID NO: 2537531 - RNA, 19 nt, Homo sapiens
  misc_RNA (1)...(19): siRNA sense strand
aggagaaagagaagaucau

SEQ ID NO: 2537532 - RNA, 19 nt, Homo sapiens
  misc_RNA (1)...(19): siRNA sense strand
cuagaaguguccaggcaga

SEQ ID NO: 2537533 - RNA, 19 nt, Homo sapiens
  misc_RNA (1)...(19): siRNA sense strand
caauaaacuacgugcccuu

SEQ ID NO: 2537534 - RNA, 19 nt, Homo sapiens
  misc_RNA (1)...(19): siRNA sense strand
acaccagcgccgaggaaca

SEQ ID NO: 2537535 - RNA, 19 nt, Homo sapiens
  misc_RNA (1)...(19): siRNA sense strand
uguccaggcagaaggaaau

SEQ ID NO: 2537536 - RNA, 19 nt, Homo sapiens
  misc_RNA (1)...(19): siRNA sense strand
caggagaaagagaagauca

SEQ ID NO: 2537537 - RNA, 19 nt, Homo sapiens
  misc_RNA (1)...(19): siRNA sense strand
cagcagaagacguggacuc

SEQ ID NO: 2537538 - RNA, 19 nt, Homo sapiens
  misc_RNA (1)...(19): siRNA sense strand
gcgaaaagagaucagaaau

SEQ ID NO: 2537539 - RNA, 19 nt, Homo sapiens
  misc_RNA (1)...(19): siRNA sense strand
ugaaagugaacgagaugga

SEQ ID NO: 2537540 - RNA, 19 nt, Homo sapiens
  misc_RNA (1)...(19): siRNA sense strand
cagccaagauccuggugga

SEQ ID NO: 2537541 - RNA, 19 nt, Homo sapiens
  misc_RNA (1)...(19): siRNA sense strand
cgcacugggagcagcgaua

SEQ ID NO: 2537542 - RNA, 19 nt, Homo sapiens
  misc_RNA (1)...(19): siRNA sense strand
cggauguggccaugcaaga

SEQ ID NO: 2537543 - RNA, 19 nt, Homo sapiens
  misc_RNA (1)...(19): siRNA sense strand
caaccaugaaagugaacga

SEQ ID NO: 2537544 - RNA, 19 nt, Homo sapiens
  misc_RNA (1)...(19): siRNA sense strand
aaggaagcccugaaggaga

SEQ ID NO: 2537545 - RNA, 19 nt, Homo sapiens
  misc_RNA (1)...(19): siRNA sense strand
ccauguuguccuucagcaa

SEQ ID NO: 2537546 - RNA, 19 nt, Homo sapiens
  misc_RNA (1)...(19): siRNA sense strand
guguuuaaaguuagagcca

SEQ ID NO: 2537547 - RNA, 19 nt, Homo sapiens
  misc_RNA (1)...(19): siRNA sense strand
cgaaaagagaucagaaaug

SEQ ID NO: 2537548 - RNA, 19 nt, Homo sapiens
  misc_RNA (1)...(19): siRNA sense strand
acacugacaagaaggccaa

SEQ ID NO: 2537549 - RNA, 19 nt, Homo sapiens
  misc_RNA (1)...(19): siRNA sense strand
agauggaauucuaugaagu

SEQ ID NO: 2537550 - RNA, 19 nt, Homo sapiens
  misc_RNA (1)...(19): siRNA sense strand
ggcagaaggaaauugaaaa

SEQ ID NO: 2537551 - RNA, 19 nt, Homo sapiens
  misc_RNA (1)...(19): siRNA sense strand
ugaacgagauggauggucu

SEQ ID NO: 2537552 - RNA, 19 nt, Homo sapiens
  misc_RNA (1)...(19): siRNA sense strand
gauaaugguccugggcaau

SEQ ID NO: 2537553 - RNA, 19 nt, Homo sapiens
  misc_RNA (1)...(19): siRNA sense strand
ucuggaggccugugggaga

SEQ ID NO: 2537554 - RNA, 19 nt, Homo sapiens
  misc_RNA (1)...(19): siRNA sense strand
cccagguggaugaaguaaa

SEQ ID NO: 2537555 - RNA, 19 nt, Homo sapiens
  misc_RNA (1)...(19): siRNA sense strand
ccgaggucaccgagaacuu

SEQ ID NO: 2537556 - RNA, 19 nt, Homo sapiens
  misc_RNA (1)...(19): siRNA sense strand
caugggaagaaccgagcua

SEQ ID NO: 2537557 - RNA, 19 nt, Homo sapiens
  misc_RNA (1)...(19): siRNA sense strand
gcgccaucgccaaguucaa

SEQ ID NO: 2537558 - RNA, 19 nt, Homo sapiens
  misc_RNA (1)...(19): siRNA sense strand
agaucaucauggagcagau

SEQ ID NO: 2537559 - RNA, 19 nt, Homo sapiens
  misc_RNA (1)...(19): siRNA sense strand
guacagaacagcagcagcu

SEQ ID NO: 2537560 - RNA, 19 nt, Homo sapiens
  misc_RNA (1)...(19): siRNA sense strand
agaagaucaucauggagca

SEQ ID NO: 2537561 - RNA, 19 nt, Homo sapiens
  misc_RNA (1)...(19): siRNA sense strand
gaaauaacuuugaagggaa

SEQ ID NO: 2537562 - RNA, 19 nt, Homo sapiens
  misc_RNA (1)...(19): siRNA sense strand
ggauagugcuuuugagcca

SEQ ID NO: 2537563 - RNA, 19 nt, Homo sapiens
  misc_RNA (1)...(19): siRNA sense strand
agaaauaacuuugaaggga

SEQ ID NO: 2537564 - RNA, 19 nt, Homo sapiens
  misc_RNA (1)...(19): siRNA sense strand
gugucagaagcaagcauaa

SEQ ID NO: 2537565 - RNA, 19 nt, Homo sapiens
  misc_RNA (1)...(19): siRNA sense strand
aaggaaacaaagagugcuu

SEQ ID NO: 2537566 - RNA, 19 nt, Homo sapiens
  misc_RNA (1)...(19): siRNA sense strand
uguagugacauuaggcaga

SEQ ID NO: 2537567 - RNA, 19 nt, Homo sapiens
  misc_RNA (1)...(19): siRNA sense strand
uggaaaggaaacaaagagu

SEQ ID NO: 2537568 - RNA, 19 nt, Homo sapiens
  misc_RNA (1)...(19): siRNA sense strand
cuguggaaggagauagaaa

SEQ ID NO: 2537569 - RNA, 19 nt, Homo sapiens
  misc_RNA (1)...(19): siRNA sense strand
guggaaggagauagaaacu

SEQ ID NO: 2537570 - RNA, 19 nt, Homo sapiens
  misc_RNA (1)...(19): siRNA sense strand
gaaauaacuuugaagggaa

SEQ ID NO: 2537571 - RNA, 19 nt, Homo sapiens
  misc_RNA (1)...(19): siRNA sense strand
ggauagugcuuuugagcca

SEQ ID NO: 2537572 - RNA, 19 nt, Homo sapiens
  misc_RNA (1)...(19): siRNA sense strand
agaaauaacuuugaaggga

SEQ ID NO: 2537573 - RNA, 19 nt, Homo sapiens
  misc_RNA (1)...(19): siRNA sense strand
gugucagaagcaagcauaa

SEQ ID NO: 2537574 - RNA, 19 nt, Homo sapiens
  misc_RNA (1)...(19): siRNA sense strand
aaggaaacaaagagugcuu

SEQ ID NO: 2537575 - RNA, 19 nt, Homo sapiens
  misc_RNA (1)...(19): siRNA sense strand
uguagugacauuaggcaga

SEQ ID NO: 2537576 - RNA, 19 nt, Homo sapiens
  misc_RNA (1)...(19): siRNA sense strand
uggaaaggaaacaaagagu

SEQ ID NO: 2537577 - RNA, 19 nt, Homo sapiens
  misc_RNA (1)...(19): siRNA sense strand
acucaaauuacgagacaaa

SEQ ID NO: 2537578 - RNA, 19 nt, Homo sapiens
  misc_RNA (1)...(19): siRNA sense strand
ugacauagcaagaagaaca

SEQ ID NO: 2537579 - RNA, 19 nt, Homo sapiens
  misc_RNA (1)...(19): siRNA sense strand
gggacucacagaagagaaa

SEQ ID NO: 2537580 - RNA, 19 nt, Homo sapiens
  misc_RNA (1)...(19): siRNA sense strand
aguccaaauuccaaagcaa

SEQ ID NO: 2537581 - RNA, 19 nt, Homo sapiens
  misc_RNA (1)...(19): siRNA sense strand
caaacugcuuagugagauu

SEQ ID NO: 2537582 - RNA, 19 nt, Homo sapiens
  misc_RNA (1)...(19): siRNA sense strand
cuuauaugauagugugcaa

SEQ ID NO: 2537583 - RNA, 19 nt, Homo sapiens
  misc_RNA (1)...(19): siRNA sense strand
caacauaugcaaaggugau

SEQ ID NO: 2537584 - RNA, 19 nt, Homo sapiens
  misc_RNA (1)...(19): siRNA sense strand
agagauuguagaugacaua

SEQ ID NO: 2537585 - RNA, 19 nt, Homo sapiens
  misc_RNA (1)...(19): siRNA sense strand
agaagaaguacaaagaaga

SEQ ID NO: 2537586 - RNA, 19 nt, Homo sapiens
  misc_RNA (1)...(19): siRNA sense strand
gcaagauacaugaaaggau

SEQ ID NO: 2537587 - RNA, 19 nt, Homo sapiens
  misc_RNA (1)...(19): siRNA sense strand
cuacugagcuuaaaggcau

SEQ ID NO: 2537588 - RNA, 19 nt, Homo sapiens
  misc_RNA (1)...(19): siRNA sense strand
ggugaaauaggaauggcaa

SEQ ID NO: 2537589 - RNA, 19 nt, Homo sapiens
  misc_RNA (1)...(19): siRNA sense strand
cuacaaacuuucuaaggga

SEQ ID NO: 2537590 - RNA, 19 nt, Homo sapiens
  misc_RNA (1)...(19): siRNA sense strand
aagaagaaguacaaagaag

SEQ ID NO: 2537591 - RNA, 19 nt, Homo sapiens
  misc_RNA (1)...(19): siRNA sense strand
acuacuauccaaaggaaau

SEQ ID NO: 2537592 - RNA, 19 nt, Homo sapiens
  misc_RNA (1)...(19): siRNA sense strand
uugcaaaaccaaaggagua

SEQ ID NO: 2537593 - RNA, 19 nt, Homo sapiens
  misc_RNA (1)...(19): siRNA sense strand
guucauacuuuggaaacaa

SEQ ID NO: 2537594 - RNA, 19 nt, Homo sapiens
  misc_RNA (1)...(19): siRNA sense strand
cggaagaagguauuggcau

SEQ ID NO: 2537595 - RNA, 19 nt, Homo sapiens
  misc_RNA (1)...(19): siRNA sense strand
aggacuugccagaggugaa

SEQ ID NO: 2537596 - RNA, 19 nt, Homo sapiens
  misc_RNA (1)...(19): siRNA sense strand
gauuagaguacauugaaca

SEQ ID NO: 2537597 - RNA, 19 nt, Homo sapiens
  misc_RNA (1)...(19): siRNA sense strand
gcugaaucaaagauaacaa

SEQ ID NO: 2537598 - RNA, 19 nt, Homo sapiens
  misc_RNA (1)...(19): siRNA sense strand
gaaaugaaagagauagcau

SEQ ID NO: 2537599 - RNA, 19 nt, Homo sapiens
  misc_RNA (1)...(19): siRNA sense strand
cuacauaaugcuaaugaca

SEQ ID NO: 2537600 - RNA, 19 nt, Homo sapiens
  misc_RNA (1)...(19): siRNA sense strand
gcuaugaagaacuguaaca

SEQ ID NO: 2537601 - RNA, 19 nt, Homo sapiens
  misc_RNA (1)...(19): siRNA sense strand
caaaaggauuagaguacau

SEQ ID NO: 2537602 - RNA, 19 nt, Homo sapiens
  misc_RNA (1)...(19): siRNA sense strand
aagaacauacacagagauu

SEQ ID NO: 2537603 - RNA, 19 nt, Homo sapiens
  misc_RNA (1)...(19): siRNA sense strand
ugacuauguucgaccagaa

SEQ ID NO: 2537604 - RNA, 19 nt, Homo sapiens
  misc_RNA (1)...(19): siRNA sense strand
cucaagaaauaaagaagca

SEQ ID NO: 2537605 - RNA, 19 nt, Homo sapiens
  misc_RNA (1)...(19): siRNA sense strand
cuuuacaucagcagauuua

SEQ ID NO: 2537606 - RNA, 19 nt, Homo sapiens
  misc_RNA (1)...(19): siRNA sense strand
gaucauauguuccagcaga

SEQ ID NO: 2537607 - RNA, 19 nt, Homo sapiens
  misc_RNA (1)...(19): siRNA sense strand
gguuauaagagcuggacac

SEQ ID NO: 2537608 - RNA, 19 nt, Homo sapiens
  misc_RNA (1)...(19): siRNA sense strand
cagugaggucuaacauaaa

SEQ ID NO: 2537609 - RNA, 19 nt, Homo sapiens
  misc_RNA (1)...(19): siRNA sense strand
ugaugaugauaucgaaaca

SEQ ID NO: 2537610 - RNA, 19 nt, Homo sapiens
  misc_RNA (1)...(19): siRNA sense strand
agacaagagguuuggaauc

SEQ ID NO: 2537611 - RNA, 19 nt, Homo sapiens
  misc_RNA (1)...(19): siRNA sense strand
ugagauggaaagacagaga

SEQ ID NO: 2537612 - RNA, 19 nt, Homo sapiens
  misc_RNA (1)...(19): siRNA sense strand
cagacagccaugauagauu

SEQ ID NO: 2537613 - RNA, 19 nt, Homo sapiens
  misc_RNA (1)...(19): siRNA sense strand
cagagauuguagaugacau

SEQ ID NO: 2537614 - RNA, 19 nt, Homo sapiens
  misc_RNA (1)...(19): siRNA sense strand
agcccuaccuagugaucaa

SEQ ID NO: 2537615 - RNA, 19 nt, Homo sapiens
  misc_RNA (1)...(19): siRNA sense strand
gguucauacuuuggaaaca

SEQ ID NO: 2537616 - RNA, 19 nt, Homo sapiens
  misc_RNA (1)...(19): siRNA sense strand
agggagaggacuugccaga

SEQ ID NO: 2537617 - RNA, 19 nt, Homo sapiens
  misc_RNA (1)...(19): siRNA sense strand
acaguuaugcauagcagaa

SEQ ID NO: 2537618 - RNA, 19 nt, Homo sapiens
  misc_RNA (1)...(19): siRNA sense strand
aguuaugcauagcagaauu

SEQ ID NO: 2537619 - RNA, 19 nt, Homo sapiens
  misc_RNA (1)...(19): siRNA sense strand
agguucaguccaaguauua

SEQ ID NO: 2537620 - RNA, 19 nt, Homo sapiens
  misc_RNA (1)...(19): siRNA sense strand
caagauacaugaaaggaug

SEQ ID NO: 2537621 - RNA, 19 nt, Homo sapiens
  misc_RNA (1)...(19): siRNA sense strand
caagaagaacauacacaga

SEQ ID NO: 2537622 - RNA, 19 nt, Homo sapiens
  misc_RNA (1)...(19): siRNA sense strand
gauaucacaacuuggagaa

SEQ ID NO: 2537623 - RNA, 19 nt, Homo sapiens
  misc_RNA (1)...(19): siRNA sense strand
cuggaaauccucagagauc

SEQ ID NO: 2537624 - RNA, 19 nt, Homo sapiens
  misc_RNA (1)...(19): siRNA sense strand
uggauaugcuacugucauu

SEQ ID NO: 2537625 - RNA, 19 nt, Homo sapiens
  misc_RNA (1)...(19): siRNA sense strand
cagagguacuaauacggaa

SEQ ID NO: 2537626 - RNA, 19 nt, Homo sapiens
  misc_RNA (1)...(19): siRNA sense strand
aaucaaacagggauggcau

SEQ ID NO: 2537627 - RNA, 19 nt, Homo sapiens
  misc_RNA (1)...(19): siRNA sense strand
cauugaacaguuaugcaua

SEQ ID NO: 2537628 - RNA, 19 nt, Homo sapiens
  misc_RNA (1)...(19): siRNA sense strand
ccaggguagugaacagaca

SEQ ID NO: 2537629 - RNA, 19 nt, Homo sapiens
  misc_RNA (1)...(19): siRNA sense strand
aagaacuacuucaagauga

SEQ ID NO: 2537630 - RNA, 19 nt, Homo sapiens
  misc_RNA (1)...(19): siRNA sense strand
acuucaagaugaggaacua

SEQ ID NO: 2537631 - RNA, 19 nt, Homo sapiens
  misc_RNA (1)...(19): siRNA sense strand
aagacaagagguuuggaau

SEQ ID NO: 2537632 - RNA, 19 nt, Homo sapiens
  misc_RNA (1)...(19): siRNA sense strand
uagaugacauagcaggaau

SEQ ID NO: 2537633 - RNA, 19 nt, Homo sapiens
  misc_RNA (1)...(19): siRNA sense strand
gaucaacuuccuucagaau

SEQ ID NO: 2537634 - RNA, 19 nt, Homo sapiens
  misc_RNA (1)...(19): siRNA sense strand
aaggaaaucacaacucaaa

SEQ ID NO: 2537635 - RNA, 19 nt, Homo sapiens
  misc_RNA (1)...(19): siRNA sense strand
ccugagauggaaagacaga

SEQ ID NO: 2537636 - RNA, 19 nt, Homo sapiens
  misc_RNA (1)...(19): siRNA sense strand
auacaugaaaggaugccua

SEQ ID NO: 2537637 - RNA, 19 nt, Homo sapiens
  misc_RNA (1)...(19): siRNA sense strand
ccauauugaugcccuguau

SEQ ID NO: 2537638 - RNA, 19 nt, Homo sapiens
  misc_RNA (1)...(19): siRNA sense strand
uuaccauaguggacaucaa

SEQ ID NO: 2537639 - RNA, 19 nt, Homo sapiens
  misc_RNA (1)...(19): siRNA sense strand
uggccaagaaggugaucau

SEQ ID NO: 2537640 - RNA, 19 nt, Homo sapiens
  misc_RNA (1)...(19): siRNA sense strand
gugaguuauugcaaggcau

SEQ ID NO: 2537641 - RNA, 19 nt, Homo sapiens
  misc_RNA (1)...(19): siRNA sense strand
ccauaguggacaucaacuu

SEQ ID NO: 2537642 - RNA, 19 nt, Homo sapiens
  misc_RNA (1)...(19): siRNA sense strand
cagccaucgcucagagaaa

SEQ ID NO: 2537643 - RNA, 19 nt, Homo sapiens
  misc_RNA (1)...(19): siRNA sense strand
uggauuaggaacuggagaa

SEQ ID NO: 2537644 - RNA, 19 nt, Homo sapiens
  misc_RNA (1)...(19): siRNA sense strand
cuggagaagaugaugacua

SEQ ID NO: 2537645 - RNA, 19 nt, Homo sapiens
  misc_RNA (1)...(19): siRNA sense strand
gggaaauacaguuuugaaa

SEQ ID NO: 2537646 - RNA, 19 nt, Homo sapiens
  misc_RNA (1)...(19): siRNA sense strand
uggugaagagauagaagaa

SEQ ID NO: 2537647 - RNA, 19 nt, Homo sapiens
  misc_RNA (1)...(19): siRNA sense strand
gcucagugauguugcggau

SEQ ID NO: 2537648 - RNA, 19 nt, Homo sapiens
  misc_RNA (1)...(19): siRNA sense strand
aagaugauauggaaggaga

SEQ ID NO: 2537649 - RNA, 19 nt, Homo sapiens
  misc_RNA (1)...(19): siRNA sense strand
uuuagauggcaaagacaaa

SEQ ID NO: 2537650 - RNA, 19 nt, Homo sapiens
  misc_RNA (1)...(19): siRNA sense strand
gaguaaaaggggaaauaca

SEQ ID NO: 2537651 - RNA, 19 nt, Homo sapiens
  misc_RNA (1)...(19): siRNA sense strand
gugauaagcuugaugaccu

SEQ ID NO: 2537652 - RNA, 19 nt, Homo sapiens
  misc_RNA (1)...(19): siRNA sense strand
cuguggaaauagaugacau

SEQ ID NO: 2537653 - RNA, 19 nt, Homo sapiens
  misc_RNA (1)...(19): siRNA sense strand
gagagaauuuagcccgaga

SEQ ID NO: 2537654 - RNA, 19 nt, Homo sapiens
  misc_RNA (1)...(19): siRNA sense strand
acagaacuuuagauggcaa

SEQ ID NO: 2537655 - RNA, 19 nt, Homo sapiens
  misc_RNA (1)...(19): siRNA sense strand
ggcuagucuuguugcagaa

SEQ ID NO: 2537656 - RNA, 19 nt, Homo sapiens
  misc_RNA (1)...(19): siRNA sense strand
cacuagaggagcaagaaaa

SEQ ID NO: 2537657 - RNA, 19 nt, Homo sapiens
  misc_RNA (1)...(19): siRNA sense strand
aguuaaugagagccugaaa

SEQ ID NO: 2537658 - RNA, 19 nt, Homo sapiens
  misc_RNA (1)...(19): siRNA sense strand
cagaacuuuagauggcaaa

SEQ ID NO: 2537659 - RNA, 19 nt, Homo sapiens
  misc_RNA (1)...(19): siRNA sense strand
guccagaugaagaugauau

SEQ ID NO: 2537660 - RNA, 19 nt, Homo sapiens
  misc_RNA (1)...(19): siRNA sense strand
ugauauggaaggagauucu

SEQ ID NO: 2537661 - RNA, 19 nt, Homo sapiens
  misc_RNA (1)...(19): siRNA sense strand
caacagaacuuuagauggc

SEQ ID NO: 2537662 - RNA, 19 nt, Homo sapiens
  misc_RNA (1)...(19): siRNA sense strand
guauuggugaagagauaga

SEQ ID NO: 2537663 - RNA, 19 nt, Homo sapiens
  misc_RNA (1)...(19): siRNA sense strand
uggccuuuguccagaugaa

SEQ ID NO: 2537664 - RNA, 19 nt, Homo sapiens
  misc_RNA (1)...(19): siRNA sense strand
cagccaucgcucagagaaa

SEQ ID NO: 2537665 - RNA, 19 nt, Homo sapiens
  misc_RNA (1)...(19): siRNA sense strand
uggauuaggaacuggagaa

SEQ ID NO: 2537666 - RNA, 19 nt, Homo sapiens
  misc_RNA (1)...(19): siRNA sense strand
cuggagaagaugaugacua

SEQ ID NO: 2537667 - RNA, 19 nt, Homo sapiens
  misc_RNA (1)...(19): siRNA sense strand
gggaaauacaguuuugaaa

SEQ ID NO: 2537668 - RNA, 19 nt, Homo sapiens
  misc_RNA (1)...(19): siRNA sense strand
uggugaagagauagaagaa

SEQ ID NO: 2537669 - RNA, 19 nt, Homo sapiens
  misc_RNA (1)...(19): siRNA sense strand
gcucagugauguugcggau

SEQ ID NO: 2537670 - RNA, 19 nt, Homo sapiens
  misc_RNA (1)...(19): siRNA sense strand
aagaugauauggaaggaga

SEQ ID NO: 2537671 - RNA, 19 nt, Homo sapiens
  misc_RNA (1)...(19): siRNA sense strand
uuuagauggcaaagacaaa

SEQ ID NO: 2537672 - RNA, 19 nt, Homo sapiens
  misc_RNA (1)...(19): siRNA sense strand
gaguaaaaggggaaauaca

SEQ ID NO: 2537673 - RNA, 19 nt, Homo sapiens
  misc_RNA (1)...(19): siRNA sense strand
gugauaagcuugaugaccu

SEQ ID NO: 2537674 - RNA, 19 nt, Homo sapiens
  misc_RNA (1)...(19): siRNA sense strand
cuguggaaauagaugacau

SEQ ID NO: 2537675 - RNA, 19 nt, Homo sapiens
  misc_RNA (1)...(19): siRNA sense strand
gagagaauuuagcccgaga

SEQ ID NO: 2537676 - RNA, 19 nt, Homo sapiens
  misc_RNA (1)...(19): siRNA sense strand
acagaacuuuagauggcaa

SEQ ID NO: 2537677 - RNA, 19 nt, Homo sapiens
  misc_RNA (1)...(19): siRNA sense strand
ggcuagucuuguugcagaa

SEQ ID NO: 2537678 - RNA, 19 nt, Homo sapiens
  misc_RNA (1)...(19): siRNA sense strand
cacuagaggagcaagaaaa

SEQ ID NO: 2537679 - RNA, 19 nt, Homo sapiens
  misc_RNA (1)...(19): siRNA sense strand
aguuaaugagagccugaaa

SEQ ID NO: 2537680 - RNA, 19 nt, Homo sapiens
  misc_RNA (1)...(19): siRNA sense strand
cagaacuuuagauggcaaa

SEQ ID NO: 2537681 - RNA, 19 nt, Homo sapiens
  misc_RNA (1)...(19): siRNA sense strand
guccagaugaagaugauau

SEQ ID NO: 2537682 - RNA, 19 nt, Homo sapiens
  misc_RNA (1)...(19): siRNA sense strand
ugauauggaaggagauucu

SEQ ID NO: 2537683 - RNA, 19 nt, Homo sapiens
  misc_RNA (1)...(19): siRNA sense strand
caacagaacuuuagauggc

SEQ ID NO: 2537684 - RNA, 19 nt, Homo sapiens
  misc_RNA (1)...(19): siRNA sense strand
guauuggugaagagauaga

SEQ ID NO: 2537685 - RNA, 19 nt, Homo sapiens
  misc_RNA (1)...(19): siRNA sense strand
uggccuuuguccagaugaa

SEQ ID NO: 2537686 - RNA, 19 nt, Homo sapiens
  misc_RNA (1)...(19): siRNA sense strand
acaacaucgccgugcgcaa

SEQ ID NO: 2537687 - RNA, 19 nt, Homo sapiens
  misc_RNA (1)...(19): siRNA sense strand
aguacauggcagagaacga

SEQ ID NO: 2537688 - RNA, 19 nt, Homo sapiens
  misc_RNA (1)...(19): siRNA sense strand
gggcaagaaggcagugaac

SEQ ID NO: 2537689 - RNA, 19 nt, Homo sapiens
  misc_RNA (1)...(19): siRNA sense strand
ccucuaaacuucagcgcau

SEQ ID NO: 2537690 - RNA, 19 nt, Homo sapiens
  misc_RNA (1)...(19): siRNA sense strand
cgaaggacgaaaaggaaua

SEQ ID NO: 2537691 - RNA, 19 nt, Homo sapiens
  misc_RNA (1)...(19): siRNA sense strand
ccaggauggccuaggagaa

SEQ ID NO: 2537692 - RNA, 19 nt, Homo sapiens
  misc_RNA (1)...(19): siRNA sense strand
aagaauauuuggagcgagu

SEQ ID NO: 2537693 - RNA, 19 nt, Homo sapiens
  misc_RNA (1)...(19): siRNA sense strand
gcaaagaucugaacgagca

SEQ ID NO: 2537694 - RNA, 19 nt, Homo sapiens
  misc_RNA (1)...(19): siRNA sense strand
agaugaauuagcaaggaaa

SEQ ID NO: 2537695 - RNA, 19 nt, Homo sapiens
  misc_RNA (1)...(19): siRNA sense strand
agucgaagcuauuggucuu

SEQ ID NO: 2537696 - RNA, 19 nt, Homo sapiens
  misc_RNA (1)...(19): siRNA sense strand
ccgaacagaagcaggaaca

SEQ ID NO: 2537697 - RNA, 19 nt, Homo sapiens
  misc_RNA (1)...(19): siRNA sense strand
uggcugacacagagagauu

SEQ ID NO: 2537698 - RNA, 19 nt, Homo sapiens
  misc_RNA (1)...(19): siRNA sense strand
caucaaugugccaaugaaa

SEQ ID NO: 2537699 - RNA, 19 nt, Homo sapiens
  misc_RNA (1)...(19): siRNA sense strand
cuacguuaacaguguauaa

SEQ ID NO: 2537700 - RNA, 19 nt, Homo sapiens
  misc_RNA (1)...(19): siRNA sense strand
ggagaagauuugauggaug

SEQ ID NO: 2537701 - RNA, 19 nt, Homo sapiens
  misc_RNA (1)...(19): siRNA sense strand
cgacauuccagauggcuau

SEQ ID NO: 2537702 - RNA, 19 nt, Homo sapiens
  misc_RNA (1)...(19): siRNA sense strand
ccacugaauaaacagguaa

SEQ ID NO: 2537703 - RNA, 19 nt, Homo sapiens
  misc_RNA (1)...(19): siRNA sense strand
gcaugaucuccaaguuaaa

SEQ ID NO: 2537704 - RNA, 19 nt, Homo sapiens
  misc_RNA (1)...(19): siRNA sense strand
aaggaaaggaauggugaaa

SEQ ID NO: 2537705 - RNA, 19 nt, Homo sapiens
  misc_RNA (1)...(19): siRNA sense strand
aagaugaauuagcaaggaa

SEQ ID NO: 2537706 - RNA, 19 nt, Homo sapiens
  misc_RNA (1)...(19): siRNA sense strand
cgucagaguuggaacguag

SEQ ID NO: 2537707 - RNA, 19 nt, Homo sapiens
  misc_RNA (1)...(19): siRNA sense strand
cgaaaauugacgugguuau

SEQ ID NO: 2537708 - RNA, 19 nt, Homo sapiens
  misc_RNA (1)...(19): siRNA sense strand
gaugaauuagcaaggaaau

SEQ ID NO: 2537709 - RNA, 19 nt, Homo sapiens
  misc_RNA (1)...(19): siRNA sense strand
agcaaggaaaugugaacaa

SEQ ID NO: 2537710 - RNA, 19 nt, Homo sapiens
  misc_RNA (1)...(19): siRNA sense strand
aggcagaacuagaagacac

SEQ ID NO: 2537711 - RNA, 19 nt, Homo sapiens
  misc_RNA (1)...(19): siRNA sense strand
ucuaaaggagaauugguaa

SEQ ID NO: 2537712 - RNA, 19 nt, Homo sapiens
  misc_RNA (1)...(19): siRNA sense strand
uggccuaggagaauugaaa

SEQ ID NO: 2537713 - RNA, 19 nt, Homo sapiens
  misc_RNA (1)...(19): siRNA sense strand
guacugaauucuugcagca

SEQ ID NO: 2537714 - RNA, 19 nt, Homo sapiens
  misc_RNA (1)...(19): siRNA sense strand
acacaagaugaauuagcaa

SEQ ID NO: 2537715 - RNA, 19 nt, Homo sapiens
  misc_RNA (1)...(19): siRNA sense strand
aagauugauuaguggaguu

SEQ ID NO: 2537716 - RNA, 19 nt, Homo sapiens
  misc_RNA (1)...(19): siRNA sense strand
auugauuaguggaguugua

SEQ ID NO: 2537717 - RNA, 19 nt, Homo sapiens
  misc_RNA (1)...(19): siRNA sense strand
guggaauugaagccagaua

SEQ ID NO: 2537718 - RNA, 19 nt, Homo sapiens
  misc_RNA (1)...(19): siRNA sense strand
augagaguguacugaaauu

SEQ ID NO: 2537719 - RNA, 19 nt, Homo sapiens
  misc_RNA (1)...(19): siRNA sense strand
cugaauaaacagguaacaa

SEQ ID NO: 2537720 - RNA, 19 nt, Homo sapiens
  misc_RNA (1)...(19): siRNA sense strand
guucaaaccucgagucccu

SEQ ID NO: 2537721 - RNA, 19 nt, Homo sapiens
  misc_RNA (1)...(19): siRNA sense strand
gaaagaauauuuggagcga

SEQ ID NO: 2537722 - RNA, 19 nt, Homo sapiens
  misc_RNA (1)...(19): siRNA sense strand
cagaggaggcagaacuaga

SEQ ID NO: 2537723 - RNA, 19 nt, Homo sapiens
  misc_RNA (1)...(19): siRNA sense strand
caaguacauagaagacaaa

SEQ ID NO: 2537724 - RNA, 19 nt, Homo sapiens
  misc_RNA (1)...(19): siRNA sense strand
acaacaacgcgguuaccaa

SEQ ID NO: 2537725 - RNA, 19 nt, Homo sapiens
  misc_RNA (1)...(19): siRNA sense strand
uagaagacaaagacguauu

SEQ ID NO: 2537726 - RNA, 19 nt, Homo sapiens
  misc_RNA (1)...(19): siRNA sense strand
ggaacguaguuaucagcga

SEQ ID NO: 2537727 - RNA, 19 nt, Homo sapiens
  misc_RNA (1)...(19): siRNA sense strand
agguggaauugaagccaga

SEQ ID NO: 2537728 - RNA, 19 nt, Homo sapiens
  misc_RNA (1)...(19): siRNA sense strand
gcagacaccuggaggagcu

SEQ ID NO: 2537729 - RNA, 19 nt, Homo sapiens
  misc_RNA (1)...(19): siRNA sense strand
ucaacaaugggaagauuau

SEQ ID NO: 2537730 - RNA, 19 nt, Homo sapiens
  misc_RNA (1)...(19): siRNA sense strand
agaauuuauuggaugcuga

SEQ ID NO: 2537731 - RNA, 19 nt, Homo sapiens
  misc_RNA (1)...(19): siRNA sense strand
aauacaaugcccugguaau

SEQ ID NO: 2537732 - RNA, 19 nt, Homo sapiens
  misc_RNA (1)...(19): siRNA sense strand
aguacauagaagacaaaga

SEQ ID NO: 2537733 - RNA, 19 nt, Homo sapiens
  misc_RNA (1)...(19): siRNA sense strand
aagacauuggcgugagcaa

SEQ ID NO: 2537734 - RNA, 19 nt, Homo sapiens
  misc_RNA (1)...(19): siRNA sense strand
cagaagcaggaacaagaaa

SEQ ID NO: 2537735 - RNA, 19 nt, Homo sapiens
  misc_RNA (1)...(19): siRNA sense strand
acaucgaggaagaccgcaa

SEQ ID NO: 2537736 - RNA, 19 nt, Homo sapiens
  misc_RNA (1)...(19): siRNA sense strand
ccuacaguuacuuggcuua

SEQ ID NO: 2537737 - RNA, 19 nt, Homo sapiens
  misc_RNA (1)...(19): siRNA sense strand
auggccaaguccagauaua

SEQ ID NO: 2537738 - RNA, 19 nt, Homo sapiens
  misc_RNA (1)...(19): siRNA sense strand
cauugaaaaguguggagaa

SEQ ID NO: 2537739 - RNA, 19 nt, Homo sapiens
  misc_RNA (1)...(19): siRNA sense strand
agccagauaccuuaauaaa

SEQ ID NO: 2537740 - RNA, 19 nt, Homo sapiens
  misc_RNA (1)...(19): siRNA sense strand
aaaggaaaggaauggugaa

SEQ ID NO: 2537741 - RNA, 19 nt, Homo sapiens
  misc_RNA (1)...(19): siRNA sense strand
ccaagaggcucguccacca

SEQ ID NO: 2537742 - RNA, 19 nt, Homo sapiens
  misc_RNA (1)...(19): siRNA sense strand
agacauuggcgugagcaaa

SEQ ID NO: 2537743 - RNA, 19 nt, Homo sapiens
  misc_RNA (1)...(19): siRNA sense strand
auguugaugagguggaauu

SEQ ID NO: 2537744 - RNA, 19 nt, Homo sapiens
  misc_RNA (1)...(19): siRNA sense strand
ggagcgaguggauggugaa

SEQ ID NO: 2537745 - RNA, 19 nt, Homo sapiens
  misc_RNA (1)...(19): siRNA sense strand
cucaacaaugggaagauua

SEQ ID NO: 2537746 - RNA, 19 nt, Homo sapiens
  misc_RNA (1)...(19): siRNA sense strand
ugcaaagggcccuacguua

SEQ ID NO: 2537747 - RNA, 19 nt, Homo sapiens
  misc_RNA (1)...(19): siRNA sense strand
caaaguaggcaaaggcaca

SEQ ID NO: 2537748 - RNA, 19 nt, Homo sapiens
  misc_RNA (1)...(19): siRNA sense strand
gaagacaggccgaggcaga

SEQ ID NO: 2537749 - RNA, 19 nt, Homo sapiens
  misc_RNA (1)...(19): siRNA sense strand
cuccaaaacugcaaagaau

SEQ ID NO: 2537750 - RNA, 19 nt, Homo sapiens
  misc_RNA (1)...(19): siRNA sense strand
cagcacucuccauggguua

SEQ ID NO: 2537751 - RNA, 19 nt, Homo sapiens
  misc_RNA (1)...(19): siRNA sense strand
ugaagaaaguggcucguca

SEQ ID NO: 2537752 - RNA, 19 nt, Homo sapiens
  misc_RNA (1)...(19): siRNA sense strand
uccauggguuagagagcaa

SEQ ID NO: 2537753 - RNA, 19 nt, Homo sapiens
  misc_RNA (1)...(19): siRNA sense strand
gcgccaaacuugccgagga

SEQ ID NO: 2537754 - RNA, 19 nt, Homo sapiens
  misc_RNA (1)...(19): siRNA sense strand
ccaaggaguugauucguca

SEQ ID NO: 2537755 - RNA, 19 nt, Homo sapiens
  misc_RNA (1)...(19): siRNA sense strand
aggcagugaccuagaagca

SEQ ID NO: 2537756 - RNA, 19 nt, Homo sapiens
  misc_RNA (1)...(19): siRNA sense strand
gcaaagaaugccuucccua

SEQ ID NO: 2537757 - RNA, 19 nt, Homo sapiens
  misc_RNA (1)...(19): siRNA sense strand
acauaggcgcuuucagaau

SEQ ID NO: 2537758 - RNA, 19 nt, Homo sapiens
  misc_RNA (1)...(19): siRNA sense strand
uagaacuagaccagcuaaa

SEQ ID NO: 2537759 - RNA, 19 nt, Homo sapiens
  misc_RNA (1)...(19): siRNA sense strand
aggaacaaguggagugcag

SEQ ID NO: 2537760 - RNA, 19 nt, Homo sapiens
  misc_RNA (1)...(19): siRNA sense strand
guggagugcagaagaaaau

SEQ ID NO: 2537761 - RNA, 19 nt, Homo sapiens
  misc_RNA (1)...(19): siRNA sense strand
uugcaaacggauuggccua

SEQ ID NO: 2537762 - RNA, 19 nt, Homo sapiens
  misc_RNA (1)...(19): siRNA sense strand
aggaaguaaugcugagccu

SEQ ID NO: 2537763 - RNA, 19 nt, Homo sapiens
  misc_RNA (1)...(19): siRNA sense strand
gcaaagugcugcugggcuu

SEQ ID NO: 2537764 - RNA, 19 nt, Homo sapiens
  misc_RNA (1)...(19): siRNA sense strand
ggacaaaagaagaggagga

SEQ ID NO: 2537765 - RNA, 19 nt, Homo sapiens
  misc_RNA (1)...(19): siRNA sense strand
augaagaaagucugggaua

SEQ ID NO: 2537766 - RNA, 19 nt, Homo sapiens
  misc_RNA (1)...(19): siRNA sense strand
gggaggagggugugaucaa

SEQ ID NO: 2537767 - RNA, 19 nt, Homo sapiens
  misc_RNA (1)...(19): siRNA sense strand
cugaggaagaauugacaaa

SEQ ID NO: 2537768 - RNA, 19 nt, Homo sapiens
  misc_RNA (1)...(19): siRNA sense strand
caugaaauaucgauggaca

SEQ ID NO: 2537769 - RNA, 19 nt, Homo sapiens
  misc_RNA (1)...(19): siRNA sense strand
acucagaggaagaggacga

SEQ ID NO: 2537770 - RNA, 19 nt, Homo sapiens
  misc_RNA (1)...(19): siRNA sense strand
gcucuugguuugaugggaa

SEQ ID NO: 2537771 - RNA, 19 nt, Homo sapiens
  misc_RNA (1)...(19): siRNA sense strand
augaaauaucgauggacaa

SEQ ID NO: 2537772 - RNA, 19 nt, Homo sapiens
  misc_RNA (1)...(19): siRNA sense strand
ccuaggaaugagagggaca

SEQ ID NO: 2537773 - RNA, 19 nt, Homo sapiens
  misc_RNA (1)...(19): siRNA sense strand
cccuacagcugccgggaaa

SEQ ID NO: 2537774 - RNA, 19 nt, Homo sapiens
  misc_RNA (1)...(19): siRNA sense strand
gaucaguggcauuuggcaa

SEQ ID NO: 2537775 - RNA, 19 nt, Homo sapiens
  misc_RNA (1)...(19): siRNA sense strand
uggugaaacauuuggaaaa

SEQ ID NO: 2537776 - RNA, 19 nt, Homo sapiens
  misc_RNA (1)...(19): siRNA sense strand
gagaggaagagcagcaaca

SEQ ID NO: 2537777 - RNA, 19 nt, Homo sapiens
  misc_RNA (1)...(19): siRNA sense strand
aggaagaggacgacgacga

SEQ ID NO: 2537778 - RNA, 19 nt, Homo sapiens
  misc_RNA (1)...(19): siRNA sense strand
caaaagaagaggaggaaac

SEQ ID NO: 2537779 - RNA, 19 nt, Homo sapiens
  misc_RNA (1)...(19): siRNA sense strand
acgugaggguuguguauau

SEQ ID NO: 2537780 - RNA, 19 nt, Homo sapiens
  misc_RNA (1)...(19): siRNA sense strand
ccgccagcgaggugacuaa

SEQ ID NO: 2537781 - RNA, 19 nt, Homo sapiens
  misc_RNA (1)...(19): siRNA sense strand
aaugagagggacaggagua

SEQ ID NO: 2537782 - RNA, 19 nt, Homo sapiens
  misc_RNA (1)...(19): siRNA sense strand
ccaggaaaacaaagauuua

SEQ ID NO: 2537783 - RNA, 19 nt, Homo sapiens
  misc_RNA (1)...(19): siRNA sense strand
uggcacagcuugcaggaga

SEQ ID NO: 2537784 - RNA, 19 nt, Homo sapiens
  misc_RNA (1)...(19): siRNA sense strand
ggaaaagauguuggaauaa

SEQ ID NO: 2537785 - RNA, 19 nt, Homo sapiens
  misc_RNA (1)...(19): siRNA sense strand
aggucaagcauuucauuua

SEQ ID NO: 2537786 - RNA, 19 nt, Homo sapiens
  misc_RNA (1)...(19): siRNA sense strand
ccguguuaacgcuaagaaa

SEQ ID NO: 2537787 - RNA, 19 nt, Homo sapiens
  misc_RNA (1)...(19): siRNA sense strand
ugauauggugguaaagauu

SEQ ID NO: 2537788 - RNA, 19 nt, Homo sapiens
  misc_RNA (1)...(19): siRNA sense strand
gggauagagcuguugacuu

SEQ ID NO: 2537789 - RNA, 19 nt, Homo sapiens
  misc_RNA (1)...(19): siRNA sense strand
auggcaaggucaagcauuu

SEQ ID NO: 2537790 - RNA, 19 nt, Homo sapiens
  misc_RNA (1)...(19): siRNA sense strand
ggcaacaagacgcggaaca

SEQ ID NO: 2537791 - RNA, 19 nt, Homo sapiens
  misc_RNA (1)...(19): siRNA sense strand
gcgaggugacuaacagcaa

SEQ ID NO: 2537792 - RNA, 19 nt, Homo sapiens
  misc_RNA (1)...(19): siRNA sense strand
ggacaggaguaucugagga

SEQ ID NO: 2537793 - RNA, 19 nt, Homo sapiens
  misc_RNA (1)...(19): siRNA sense strand
ggguuguguauauguuaaa

SEQ ID NO: 2537794 - RNA, 19 nt, Homo sapiens
  misc_RNA (1)...(19): siRNA sense strand
uccugaauaugaagguaua

SEQ ID NO: 2537795 - RNA, 19 nt, Homo sapiens
  misc_RNA (1)...(19): siRNA sense strand
uugcaguggaucuuagaaa

SEQ ID NO: 2537796 - RNA, 19 nt, Homo sapiens
  misc_RNA (1)...(19): siRNA sense strand
guguuaacgcuaagaaacu

SEQ ID NO: 2537797 - RNA, 19 nt, Homo sapiens
  misc_RNA (1)...(19): siRNA sense strand
acgaagaauagguggugca

SEQ ID NO: 2537798 - RNA, 19 nt, Homo sapiens
  misc_RNA (1)...(19): siRNA sense strand
ggggaggacucgcgaugaa

SEQ ID NO: 2537799 - RNA, 19 nt, Homo sapiens
  misc_RNA (1)...(19): siRNA sense strand
aggaacuucuccagcaauu

SEQ ID NO: 2537800 - RNA, 19 nt, Homo sapiens
  misc_RNA (1)...(19): siRNA sense strand
gaggaggaaacaaggcaga

SEQ ID NO: 2537801 - RNA, 19 nt, Homo sapiens
  misc_RNA (1)...(19): siRNA sense strand
uggcaauucaagaagcaau

SEQ ID NO: 2537802 - RNA, 19 nt, Homo sapiens
  misc_RNA (1)...(19): siRNA sense strand
ggaucuuagaaaauggaaa

SEQ ID NO: 2537803 - RNA, 19 nt, Homo sapiens
  misc_RNA (1)...(19): siRNA sense strand
agucuagacaggagccgaa

SEQ ID NO: 2537804 - RNA, 19 nt, Homo sapiens
  misc_RNA (1)...(19): siRNA sense strand
cagaggaagaggacgacga

SEQ ID NO: 2537805 - RNA, 19 nt, Homo sapiens
  misc_RNA (1)...(19): siRNA sense strand
aggaaacaaggcagaugua

SEQ ID NO: 2537806 - RNA, 19 nt, Homo sapiens
  misc_RNA (1)...(19): siRNA sense strand
agaggaacuucuccagcaa

SEQ ID NO: 2537807 - RNA, 19 nt, Homo sapiens
  misc_RNA (1)...(19): siRNA sense strand
aaauauaacugaugugcag

SEQ ID NO: 2537808 - RNA, 19 nt, Homo sapiens
  misc_RNA (1)...(19): siRNA sense strand
augauauggugguaaagau

SEQ ID NO: 2537809 - RNA, 19 nt, Homo sapiens
  misc_RNA (1)...(19): siRNA sense strand
agaauaugcuggaaaggcu

SEQ ID NO: 2537810 - RNA, 19 nt, Homo sapiens
  misc_RNA (1)...(19): siRNA sense strand
ccagcagacagguauuaaa

SEQ ID NO: 2537811 - RNA, 19 nt, Homo sapiens
  misc_RNA (1)...(19): siRNA sense strand
gucuagaguucgcacggaa

SEQ ID NO: 2537812 - RNA, 19 nt, Homo sapiens
  misc_RNA (1)...(19): siRNA sense strand
acacauacaacaaaccgaa

SEQ ID NO: 2537813 - RNA, 19 nt, Homo sapiens
  misc_RNA (1)...(19): siRNA sense strand
gaguaucugaggauggaga

SEQ ID NO: 2537814 - RNA, 19 nt, Homo sapiens
  misc_RNA (1)...(19): siRNA sense strand
acuuggaggacgugggcaa

SEQ ID NO: 2537815 - RNA, 19 nt, Homo sapiens
  misc_RNA (1)...(19): siRNA sense strand
cugcugagucugacgggaa

SEQ ID NO: 2537816 - RNA, 19 nt, Homo sapiens
  misc_RNA (1)...(19): siRNA sense strand
gcaucuacuuggaggacgu

SEQ ID NO: 2537817 - RNA, 19 nt, Homo sapiens
  misc_RNA (1)...(19): siRNA sense strand
aguucgaggcauuugacaa

SEQ ID NO: 2537818 - RNA, 19 nt, Homo sapiens
  misc_RNA (1)...(19): siRNA sense strand
gggacuacgacguggaccu

SEQ ID NO: 2537819 - RNA, 19 nt, Homo sapiens
  misc_RNA (1)...(19): siRNA sense strand
uagagaaggaggagcuaaa

SEQ ID NO: 2537820 - RNA, 19 nt, Homo sapiens
  misc_RNA (1)...(19): siRNA sense strand
cagaauuaaaggaagacaa

SEQ ID NO: 2537821 - RNA, 19 nt, Homo sapiens
  misc_RNA (1)...(19): siRNA sense strand
aaccagaauuaaaggaaga

SEQ ID NO: 2537822 - RNA, 19 nt, Homo sapiens
  misc_RNA (1)...(19): siRNA sense strand
ggaaauuaugggaagagau

SEQ ID NO: 2537823 - RNA, 19 nt, Homo sapiens
  misc_RNA (1)...(19): siRNA sense strand
cagaauaugauuuggagga

SEQ ID NO: 2537824 - RNA, 19 nt, Homo sapiens
  misc_RNA (1)...(19): siRNA sense strand
aagagauguucaagaauca

SEQ ID NO: 2537825 - RNA, 19 nt, Homo sapiens
  misc_RNA (1)...(19): siRNA sense strand
ugcuacaggugguggaaau

SEQ ID NO: 2537826 - RNA, 19 nt, Homo sapiens
  misc_RNA (1)...(19): siRNA sense strand
gagcuaaacuggaucagca

SEQ ID NO: 2537827 - RNA, 19 nt, Homo sapiens
  misc_RNA (1)...(19): siRNA sense strand
ugacagugaaagcgaauau

SEQ ID NO: 2537828 - RNA, 19 nt, Homo sapiens
  misc_RNA (1)...(19): siRNA sense strand
cuuccaacucagaggauga

SEQ ID NO: 2537829 - RNA, 19 nt, Homo sapiens
  misc_RNA (1)...(19): siRNA sense strand
auaagaacaaagaagggaa

SEQ ID NO: 2537830 - RNA, 19 nt, Homo sapiens
  misc_RNA (1)...(19): siRNA sense strand
gcuuauaagaacaaagaag

SEQ ID NO: 2537831 - RNA, 19 nt, Homo sapiens
  misc_RNA (1)...(19): siRNA sense strand
uaaaauaccagcuggacaa

SEQ ID NO: 2537832 - RNA, 19 nt, Homo sapiens
  misc_RNA (1)...(19): siRNA sense strand
agauagagaaggaggagcu

SEQ ID NO: 2537833 - RNA, 19 nt, Homo sapiens
  misc_RNA (1)...(19): siRNA sense strand
aggaagaagaggaggcuug

SEQ ID NO: 2537834 - RNA, 19 nt, Homo sapiens
  misc_RNA (1)...(19): siRNA sense strand
auuaauaguuccaaggucu

SEQ ID NO: 2537835 - RNA, 19 nt, Homo sapiens
  misc_RNA (1)...(19): siRNA sense strand
gcaauuacaccuuggguuc

SEQ ID NO: 2537836 - RNA, 19 nt, Homo sapiens
  misc_RNA (1)...(19): siRNA sense strand
agacuggauaguaaacaaa

SEQ ID NO: 2537837 - RNA, 19 nt, Homo sapiens
  misc_RNA (1)...(19): siRNA sense strand
cauaaauggaugcugcaau

SEQ ID NO: 2537838 - RNA, 19 nt, Homo sapiens
  misc_RNA (1)...(19): siRNA sense strand
agaagaaguccucgaucau

SEQ ID NO: 2537839 - RNA, 19 nt, Homo sapiens
  misc_RNA (1)...(19): siRNA sense strand
agguucacuuugugggaga

SEQ ID NO: 2537840 - RNA, 19 nt, Homo sapiens
  misc_RNA (1)...(19): siRNA sense strand
ggguucuaagagagauuua

SEQ ID NO: 2537841 - RNA, 19 nt, Homo sapiens
  misc_RNA (1)...(19): siRNA sense strand
aauuaugggaagagauguu

SEQ ID NO: 2537842 - RNA, 19 nt, Homo sapiens
  misc_RNA (1)...(19): siRNA sense strand
ucucauucugacagugaaa

SEQ ID NO: 2537843 - RNA, 19 nt, Homo sapiens
  misc_RNA (1)...(19): siRNA sense strand
gaacaaugacaaaagugaa

SEQ ID NO: 2537844 - RNA, 19 nt, Homo sapiens
  misc_RNA (1)...(19): siRNA sense strand
gcuacaggugguggaaaua

SEQ ID NO: 2537845 - RNA, 19 nt, Homo sapiens
  misc_RNA (1)...(19): siRNA sense strand
gagcgcagcuuuuggucaa

SEQ ID NO: 2537846 - RNA, 19 nt, Homo sapiens
  misc_RNA (1)...(19): siRNA sense strand
ugcguaacuuauugagcaa

SEQ ID NO: 2537847 - RNA, 19 nt, Homo sapiens
  misc_RNA (1)...(19): siRNA sense strand
ccauucacguugucaucaa

SEQ ID NO: 2537848 - RNA, 19 nt, Homo sapiens
  misc_RNA (1)...(19): siRNA sense strand
uggaaaaggaagaagagga

SEQ ID NO: 2537849 - RNA, 19 nt, Homo sapiens
  misc_RNA (1)...(19): siRNA sense strand
cugauagaacacugcagaa

SEQ ID NO: 2537850 - RNA, 19 nt, Homo sapiens
  misc_RNA (1)...(19): siRNA sense strand
ugguuuggguucuaagaga

SEQ ID NO: 2537851 - RNA, 19 nt, Homo sapiens
  misc_RNA (1)...(19): siRNA sense strand
agaucagaacuauguggaa

SEQ ID NO: 2537852 - RNA, 19 nt, Homo sapiens
  misc_RNA (1)...(19): siRNA sense strand
accgaagaacaaugacaaa

SEQ ID NO: 2537853 - RNA, 19 nt, Homo sapiens
  misc_RNA (1)...(19): siRNA sense strand
uccuggaaucagugugaaa

SEQ ID NO: 2537854 - RNA, 19 nt, Homo sapiens
  misc_RNA (1)...(19): siRNA sense strand
ggugguggaaauaaaguuu

SEQ ID NO: 2537855 - RNA, 19 nt, Homo sapiens
  misc_RNA (1)...(19): siRNA sense strand
ugagaggagagaagagcca

SEQ ID NO: 2537856 - RNA, 19 nt, Homo sapiens
  misc_RNA (1)...(19): siRNA sense strand
caaccgaagaacaaugaca

SEQ ID NO: 2537857 - RNA, 19 nt, Homo sapiens
  misc_RNA (1)...(19): siRNA sense strand
gcuccuguuggcaaagaaa

SEQ ID NO: 2537858 - RNA, 19 nt, Homo sapiens
  misc_RNA (1)...(19): siRNA sense strand
cuaagagaaugaaaagaga

SEQ ID NO: 2537859 - RNA, 19 nt, Homo sapiens
  misc_RNA (1)...(19): siRNA sense strand
cagaaagaucccagagaau

SEQ ID NO: 2537860 - RNA, 19 nt, Homo sapiens
  misc_RNA (1)...(19): siRNA sense strand
gcaaauacgccaugcgaga

SEQ ID NO: 2537861 - RNA, 19 nt, Homo sapiens
  misc_RNA (1)...(19): siRNA sense strand
ccacggagcuaaaggcgaa

SEQ ID NO: 2537862 - RNA, 19 nt, Homo sapiens
  misc_RNA (1)...(19): siRNA sense strand
cagucaaagaacaggaauu

SEQ ID NO: 2537863 - RNA, 19 nt, Homo sapiens
  misc_RNA (1)...(19): siRNA sense strand
ggcaagaagaagaagaaaa

SEQ ID NO: 2537864 - RNA, 19 nt, Homo sapiens
  misc_RNA (1)...(19): siRNA sense strand
cagagaauuuggauggaga

SEQ ID NO: 2537865 - RNA, 19 nt, Homo sapiens
  misc_RNA (1)...(19): siRNA sense strand
acuacaggaaucaggaaua

SEQ ID NO: 2537866 - RNA, 19 nt, Homo sapiens
  misc_RNA (1)...(19): siRNA sense strand
cauugauagcauucagaaa

SEQ ID NO: 2537867 - RNA, 19 nt, Homo sapiens
  misc_RNA (1)...(19): siRNA sense strand
cagaaacgucucagggaca

SEQ ID NO: 2537868 - RNA, 19 nt, Homo sapiens
  misc_RNA (1)...(19): siRNA sense strand
caucaauagucaaacccua

SEQ ID NO: 2537869 - RNA, 19 nt, Homo sapiens
  misc_RNA (1)...(19): siRNA sense strand
gcaacaacacugcaagcaa

SEQ ID NO: 2537870 - RNA, 19 nt, Homo sapiens
  misc_RNA (1)...(19): siRNA sense strand
cguccgagcaguacagcaa

SEQ ID NO: 2537871 - RNA, 19 nt, Homo sapiens
  misc_RNA (1)...(19): siRNA sense strand
auaaggagcucaucggcaa

SEQ ID NO: 2537872 - RNA, 19 nt, Homo sapiens
  misc_RNA (1)...(19): siRNA sense strand
caaaauuaaagccgagaua

SEQ ID NO: 2537873 - RNA, 19 nt, Homo sapiens
  misc_RNA (1)...(19): siRNA sense strand
ccuguggagcucugagaaa

SEQ ID NO: 2537874 - RNA, 19 nt, Homo sapiens
  misc_RNA (1)...(19): siRNA sense strand
caaaagcaaaggagauaaa

SEQ ID NO: 2537875 - RNA, 19 nt, Homo sapiens
  misc_RNA (1)...(19): siRNA sense strand
cgcagaaggaugagagagu

SEQ ID NO: 2537876 - RNA, 19 nt, Homo sapiens
  misc_RNA (1)...(19): siRNA sense strand
gagagagugugaugggcuu

SEQ ID NO: 2537877 - RNA, 19 nt, Homo sapiens
  misc_RNA (1)...(19): siRNA sense strand
aggccaacgaugauaacaa

SEQ ID NO: 2537878 - RNA, 19 nt, Homo sapiens
  misc_RNA (1)...(19): siRNA sense strand
ggagggaacaacagcaaca

SEQ ID NO: 2537879 - RNA, 19 nt, Homo sapiens
  misc_RNA (1)...(19): siRNA sense strand
cgagauaaggagacaagga

SEQ ID NO: 2537880 - RNA, 19 nt, Homo sapiens
  misc_RNA (1)...(19): siRNA sense strand
ucgagaaguuggucggcau

SEQ ID NO: 2537881 - RNA, 19 nt, Homo sapiens
  misc_RNA (1)...(19): siRNA sense strand
gggaacaacagcaacaaca

SEQ ID NO: 2537882 - RNA, 19 nt, Homo sapiens
  misc_RNA (1)...(19): siRNA sense strand
uggccuuggacgucagaaa

SEQ ID NO: 2537883 - RNA, 19 nt, Homo sapiens
  misc_RNA (1)...(19): siRNA sense strand
uuaccaagaacauggagaa

SEQ ID NO: 2537884 - RNA, 19 nt, Homo sapiens
  misc_RNA (1)...(19): siRNA sense strand
cagaaggaugagagagugu

SEQ ID NO: 2537885 - RNA, 19 nt, Homo sapiens
  misc_RNA (1)...(19): siRNA sense strand
ugguggaccuguuggauca

SEQ ID NO: 2537886 - RNA, 19 nt, Homo sapiens
  misc_RNA (1)...(19): siRNA sense strand
aaauuaaagccgagauaag

SEQ ID NO: 2537887 - RNA, 19 nt, Homo sapiens
  misc_RNA (1)...(19): siRNA sense strand
gaaaccugguguaugggaa

SEQ ID NO: 2537888 - RNA, 19 nt, Homo sapiens
  misc_RNA (1)...(19): siRNA sense strand
augaucagccucaaagaaa

SEQ ID NO: 2537889 - RNA, 19 nt, Homo sapiens
  misc_RNA (1)...(19): siRNA sense strand
caggaauuacaguuugaaa

SEQ ID NO: 2537890 - RNA, 19 nt, Homo sapiens
  misc_RNA (1)...(19): siRNA sense strand
ucuucaggaugaucggaaa

SEQ ID NO: 2537891 - RNA, 19 nt, Homo sapiens
  misc_RNA (1)...(19): siRNA sense strand
cuucaaccaucgagaggga

SEQ ID NO: 2537892 - RNA, 19 nt, Homo sapiens
  misc_RNA (1)...(19): siRNA sense strand
caggaauacuugacccaca

SEQ ID NO: 2537893 - RNA, 19 nt, Homo sapiens
  misc_RNA (1)...(19): siRNA sense strand
ggggcaagaagaagaagaa

SEQ ID NO: 2537894 - RNA, 19 nt, Homo sapiens
  misc_RNA (1)...(19): siRNA sense strand
gcaaggaugcugagagcuc

SEQ ID NO: 2537895 - RNA, 19 nt, Homo sapiens
  misc_RNA (1)...(19): siRNA sense strand
ggaacauggccuuggacgu

SEQ ID NO: 2537896 - RNA, 19 nt, Homo sapiens
  misc_RNA (1)...(19): siRNA sense strand
cgggaaaugaucagccuca

SEQ ID NO: 2537897 - RNA, 19 nt, Homo sapiens
  misc_RNA (1)...(19): siRNA sense strand
caggagggaacaacagcaa

SEQ ID NO: 2537898 - RNA, 19 nt, Homo sapiens
  misc_RNA (1)...(19): siRNA sense strand
ccgaauagacaaugaccgu

SEQ ID NO: 2537899 - RNA, 19 nt, Homo sapiens
  misc_RNA (1)...(19): siRNA sense strand
agauaaacacucuccaaaa

SEQ ID NO: 2537900 - RNA, 19 nt, Homo sapiens
  misc_RNA (1)...(19): siRNA sense strand
ccgcugaagacaucaaaca

SEQ ID NO: 2537901 - RNA, 19 nt, Homo sapiens
  misc_RNA (1)...(19): siRNA sense strand
ccagcuucaccucgggaaa

SEQ ID NO: 2537902 - RNA, 19 nt, Homo sapiens
  misc_RNA (1)...(19): siRNA sense strand
agugagaucgauagcaaga

SEQ ID NO: 2537903 - RNA, 19 nt, Homo sapiens
  misc_RNA (1)...(19): siRNA sense strand
agcuggaaguggucaguau

SEQ ID NO: 2537904 - RNA, 19 nt, Homo sapiens
  misc_RNA (1)...(19): siRNA sense strand
cagccucaaagaaaggaaa

SEQ ID NO: 2537905 - RNA, 19 nt, Homo sapiens
  misc_RNA (1)...(19): siRNA sense strand
ucagaauuccacaagaaau

SEQ ID NO: 2537906 - RNA, 19 nt, Homo sapiens
  misc_RNA (1)...(19): siRNA sense strand
gaauuuggauggagagacc

SEQ ID NO: 2537907 - RNA, 19 nt, Homo sapiens
  misc_RNA (1)...(19): siRNA sense strand
gaauagacaaugaccgugu

SEQ ID NO: 2537908 - RNA, 19 nt, Homo sapiens
  misc_RNA (1)...(19): siRNA sense strand
ucagaaauaaggagcucau

SEQ ID NO: 2537909 - RNA, 19 nt, Homo sapiens
  misc_RNA (1)...(19): siRNA sense strand
uggagaacgccaaggccuu

SEQ ID NO: 2537910 - RNA, 19 nt, Homo sapiens
  misc_RNA (1)...(19): siRNA sense strand
gcauguggcaguaccgaga

SEQ ID NO: 2537911 - RNA, 19 nt, Homo sapiens
  misc_RNA (1)...(19): siRNA sense strand
agauaucgaagaugagcuu

SEQ ID NO: 2537912 - RNA, 19 nt, Homo sapiens
  misc_RNA (1)...(19): siRNA sense strand
gcucaauuccaaaccugaa

SEQ ID NO: 2537913 - RNA, 19 nt, Homo sapiens
  misc_RNA (1)...(19): siRNA sense strand
gcuacgggccagagcuuca

SEQ ID NO: 2537914 - RNA, 19 nt, Homo sapiens
  misc_RNA (1)...(19): siRNA sense strand
cgccaaggccuuacgggau

SEQ ID NO: 2537915 - RNA, 19 nt, Homo sapiens
  misc_RNA (1)...(19): siRNA sense strand
aaagcaaaggagauaaaca

SEQ ID NO: 2537916 - RNA, 19 nt, Homo sapiens
  misc_RNA (1)...(19): siRNA sense strand
gauaaauggacucgaacaa

SEQ ID NO: 2537917 - RNA, 19 nt, Homo sapiens
  misc_RNA (1)...(19): siRNA sense strand
acagagaagccuugaacaa

SEQ ID NO: 2537918 - RNA, 19 nt, Homo sapiens
  misc_RNA (1)...(19): siRNA sense strand
aagaagagucaguggauga

SEQ ID NO: 2537919 - RNA, 19 nt, Homo sapiens
  misc_RNA (1)...(19): siRNA sense strand
gcagaaacagacuggcaaa

SEQ ID NO: 2537920 - RNA, 19 nt, Homo sapiens
  misc_RNA (1)...(19): siRNA sense strand
ggaagaggcaaguaggcua

SEQ ID NO: 2537921 - RNA, 19 nt, Homo sapiens
  misc_RNA (1)...(19): siRNA sense strand
gggaguaaaccaugcagaa

SEQ ID NO: 2537922 - RNA, 19 nt, Homo sapiens
  misc_RNA (1)...(19): siRNA sense strand
agaaacaccaucagagaau

SEQ ID NO: 2537923 - RNA, 19 nt, Homo sapiens
  misc_RNA (1)...(19): siRNA sense strand
gggaacaagugcuggaaac

SEQ ID NO: 2537924 - RNA, 19 nt, Homo sapiens
  misc_RNA (1)...(19): siRNA sense strand
ucacaauagcagagccauu

SEQ ID NO: 2537925 - RNA, 19 nt, Homo sapiens
  misc_RNA (1)...(19): siRNA sense strand
ucaaaagggaagagaauuu

SEQ ID NO: 2537926 - RNA, 19 nt, Homo sapiens
  misc_RNA (1)...(19): siRNA sense strand
ugucaagguauuuggauuu

SEQ ID NO: 2537927 - RNA, 19 nt, Homo sapiens
  misc_RNA (1)...(19): siRNA sense strand
cuuuaugacccuaaggaau

SEQ ID NO: 2537928 - RNA, 19 nt, Homo sapiens
  misc_RNA (1)...(19): siRNA sense strand
gugcaagaugggagacaga

SEQ ID NO: 2537929 - RNA, 19 nt, Homo sapiens
  misc_RNA (1)...(19): siRNA sense strand
gcaagaugggagacagaga

SEQ ID NO: 2537930 - RNA, 19 nt, Homo sapiens
  misc_RNA (1)...(19): siRNA sense strand
ggcuaaaacaacauagaaa

SEQ ID NO: 2537931 - RNA, 19 nt, Homo sapiens
  misc_RNA (1)...(19): siRNA sense strand
uggucgaggcggaggaaga

SEQ ID NO: 2537932 - RNA, 19 nt, Homo sapiens
  misc_RNA (1)...(19): siRNA sense strand
cucuaauccuaguggaaau

SEQ ID NO: 2537933 - RNA, 19 nt, Homo sapiens
  misc_RNA (1)...(19): siRNA sense strand
caagaacaucacacagaaa

SEQ ID NO: 2537934 - RNA, 19 nt, Homo sapiens
  misc_RNA (1)...(19): siRNA sense strand
guuaaauggacugaagaua

SEQ ID NO: 2537935 - RNA, 19 nt, Homo sapiens
  misc_RNA (1)...(19): siRNA sense strand
gauuagcaucagugaagaa

SEQ ID NO: 2537936 - RNA, 19 nt, Homo sapiens
  misc_RNA (1)...(19): siRNA sense strand
ugaaagaaguaauggacac

SEQ ID NO: 2537937 - RNA, 19 nt, Homo sapiens
  misc_RNA (1)...(19): siRNA sense strand
gcauguuugaagaugauaa

SEQ ID NO: 2537938 - RNA, 19 nt, Homo sapiens
  misc_RNA (1)...(19): siRNA sense strand
ccaacagaugccaggaaau

SEQ ID NO: 2537939 - RNA, 19 nt, Homo sapiens
  misc_RNA (1)...(19): siRNA sense strand
aguaaaccaugcagaaaca

SEQ ID NO: 2537940 - RNA, 19 nt, Homo sapiens
  misc_RNA (1)...(19): siRNA sense strand
agaccaugucacaaaguua

SEQ ID NO: 2537941 - RNA, 19 nt, Homo sapiens
  misc_RNA (1)...(19): siRNA sense strand
caaaauaaacccagaucau

SEQ ID NO: 2537942 - RNA, 19 nt, Homo sapiens
  misc_RNA (1)...(19): siRNA sense strand
gcaucagugaagaacguua

SEQ ID NO: 2537943 - RNA, 19 nt, Homo sapiens
  misc_RNA (1)...(19): siRNA sense strand
aaacgaaacauguggccau

SEQ ID NO: 2537944 - RNA, 19 nt, Homo sapiens
  misc_RNA (1)...(19): siRNA sense strand
ccaaauguuacuugaagau

SEQ ID NO: 2537945 - RNA, 19 nt, Homo sapiens
  misc_RNA (1)...(19): siRNA sense strand
uggcuaaaugggacuguaa

SEQ ID NO: 2537946 - RNA, 19 nt, Homo sapiens
  misc_RNA (1)...(19): siRNA sense strand
gguauuuggauuugcucaa

SEQ ID NO: 2537947 - RNA, 19 nt, Homo sapiens
  misc_RNA (1)...(19): siRNA sense strand
caauuuauguccagccaga

SEQ ID NO: 2537948 - RNA, 19 nt, Homo sapiens
  misc_RNA (1)...(19): siRNA sense strand
ccgaauaugcugcaaacau

SEQ ID NO: 2537949 - RNA, 19 nt, Homo sapiens
  misc_RNA (1)...(19): siRNA sense strand
cucaucacguacagagaaa

SEQ ID NO: 2537950 - RNA, 19 nt, Homo sapiens
  misc_RNA (1)...(19): siRNA sense strand
gugcaaguccggagguguu

SEQ ID NO: 2537951 - RNA, 19 nt, Homo sapiens
  misc_RNA (1)...(19): siRNA sense strand
aggaguacgugguggucga

SEQ ID NO: 2537952 - RNA, 19 nt, Homo sapiens
  misc_RNA (1)...(19): siRNA sense strand
cuggagaccaugucacaaa

SEQ ID NO: 2537953 - RNA, 19 nt, Homo sapiens
  misc_RNA (1)...(19): siRNA sense strand
uggaaaaccucuuacaauu

SEQ ID NO: 2537954 - RNA, 19 nt, Homo sapiens
  misc_RNA (1)...(19): siRNA sense strand
gcaucagugguuuggaaau

SEQ ID NO: 2537955 - RNA, 19 nt, Homo sapiens
  misc_RNA (1)...(19): siRNA sense strand
ggcaaaugcgugaccaaau

SEQ ID NO: 2537956 - RNA, 19 nt, Homo sapiens
  misc_RNA (1)...(19): siRNA sense strand
gugaaagaaguaauggaca

SEQ ID NO: 2537957 - RNA, 19 nt, Homo sapiens
  misc_RNA (1)...(19): siRNA sense strand
acuugggacucgauagcua

SEQ ID NO: 2537958 - RNA, 19 nt, Homo sapiens
  misc_RNA (1)...(19): siRNA sense strand
cuucauuagcucaagaaaa

SEQ ID NO: 2537959 - RNA, 19 nt, Homo sapiens
  misc_RNA (1)...(19): siRNA sense strand
caacuguggcagauggaga

SEQ ID NO: 2537960 - RNA, 19 nt, Homo sapiens
  misc_RNA (1)...(19): siRNA sense strand
uuauuugagcaguggcuaa

SEQ ID NO: 2537961 - RNA, 19 nt, Homo sapiens
  misc_RNA (1)...(19): siRNA sense strand
uugucaagguauuuggauu

SEQ ID NO: 2537962 - RNA, 19 nt, Homo sapiens
  misc_RNA (1)...(19): siRNA sense strand
ggauacaacucaacuggga

SEQ ID NO: 2537963 - RNA, 19 nt, Homo sapiens
  misc_RNA (1)...(19): siRNA sense strand
ggaacaagugcuggaaaca

SEQ ID NO: 2537964 - RNA, 19 nt, Homo sapiens
  misc_RNA (1)...(19): siRNA sense strand
caucaaaccaacagagggu

SEQ ID NO: 2537965 - RNA, 19 nt, Homo sapiens
  misc_RNA (1)...(19): siRNA sense strand
cuguaagccuucccguaaa

SEQ ID NO: 2537966 - RNA, 19 nt, Homo sapiens
  misc_RNA (1)...(19): siRNA sense strand
gagcaauaccagaaaacuu

SEQ ID NO: 2537967 - RNA, 19 nt, Homo sapiens
  misc_RNA (1)...(19): siRNA sense strand
auggaauaucccaguuaaa

SEQ ID NO: 2537968 - RNA, 19 nt, Homo sapiens
  misc_RNA (1)...(19): siRNA sense strand
aguuaaauggacugaagau

SEQ ID NO: 2537969 - RNA, 19 nt, Homo sapiens
  misc_RNA (1)...(19): siRNA sense strand
aacaauauagaguggcuaa

SEQ ID NO: 2537970 - RNA, 19 nt, Homo sapiens
  misc_RNA (1)...(19): siRNA sense strand
uaacagaaaccuuggccga

SEQ ID NO: 2537971 - RNA, 19 nt, Homo sapiens
  misc_RNA (1)...(19): siRNA sense strand
gcuuuaugacccuaaggaa

SEQ ID NO: 2537972 - RNA, 19 nt, Homo sapiens
  misc_RNA (1)...(19): siRNA sense strand
uaggauuaauagugggacu

SEQ ID NO: 2537973 - RNA, 19 nt, Homo sapiens
  misc_RNA (1)...(19): siRNA sense strand
uuggaaauauugugaccau

SEQ ID NO: 2537974 - RNA, 19 nt, Homo sapiens
  misc_RNA (1)...(19): siRNA sense strand
gcuaccagugaaagaagua

SEQ ID NO: 2537975 - RNA, 19 nt, Homo sapiens
  misc_RNA (1)...(19): siRNA sense strand
uggguuauccugugcuuaa

SEQ ID NO: 2537976 - RNA, 19 nt, Homo sapiens
  misc_RNA (1)...(19): siRNA sense strand
cuugguuauacauggaaua

SEQ ID NO: 2537977 - RNA, 19 nt, Homo sapiens
  misc_RNA (1)...(19): siRNA sense strand
cgaaagaagagucagugga

SEQ ID NO: 2537978 - RNA, 19 nt, Homo sapiens
  misc_RNA (1)...(19): siRNA sense strand
auggaauauccuauagcaa

SEQ ID NO: 2537979 - RNA, 19 nt, Homo sapiens
  misc_RNA (1)...(19): siRNA sense strand
ugaacggugucaagaacau

SEQ ID NO: 2537980 - RNA, 19 nt, Homo sapiens
  misc_RNA (1)...(19): siRNA sense strand
ugguaaagacugaagggaa

SEQ ID NO: 2537981 - RNA, 19 nt, Homo sapiens
  misc_RNA (1)...(19): siRNA sense strand
gcuauguggcugagcggaa

SEQ ID NO: 2537982 - RNA, 19 nt, Homo sapiens
  misc_RNA (1)...(19): siRNA sense strand
agggaaaggagcaaagaga

SEQ ID NO: 2537983 - RNA, 19 nt, Homo sapiens
  misc_RNA (1)...(19): siRNA sense strand
aaacaagcuuccagccaga

SEQ ID NO: 2537984 - RNA, 19 nt, Homo sapiens
  misc_RNA (1)...(19): siRNA sense strand
augaagagcggaugaggau

SEQ ID NO: 2537985 - RNA, 19 nt, Homo sapiens
  misc_RNA (1)...(19): siRNA sense strand
uggcugagcggaaggguga

SEQ ID NO: 2537986 - RNA, 19 nt, Homo sapiens
  misc_RNA (1)...(19): siRNA sense strand
ggaggaaacgucagggaug

SEQ ID NO: 2537987 - RNA, 19 nt, Homo sapiens
  misc_RNA (1)...(19): siRNA sense strand
cugugaugguggugcggau

SEQ ID NO: 2537988 - RNA, 19 nt, Homo sapiens
  misc_RNA (1)...(19): siRNA sense strand
caguaugaagagcggauga

SEQ ID NO: 2537989 - RNA, 19 nt, Homo sapiens
  misc_RNA (1)...(19): siRNA sense strand
auacagaaggcuggaggaa

SEQ ID NO: 2537990 - RNA, 19 nt, Homo sapiens
  misc_RNA (1)...(19): siRNA sense strand
ucuuuggucugaagggcua

SEQ ID NO: 2537991 - RNA, 19 nt, Homo sapiens
  misc_RNA (1)...(19): siRNA sense strand
gugagagggaggagaugca

SEQ ID NO: 2537992 - RNA, 19 nt, Homo sapiens
  misc_RNA (1)...(19): siRNA sense strand
ccucggagauagucgggca

SEQ ID NO: 2537993 - RNA, 19 nt, Homo sapiens
  misc_RNA (1)...(19): siRNA sense strand
gggaggagaugcaggaugc

SEQ ID NO: 2537994 - RNA, 19 nt, Homo sapiens
  misc_RNA (1)...(19): siRNA sense strand
agugaagagcuuguggaaa

SEQ ID NO: 2537995 - RNA, 19 nt, Homo sapiens
  misc_RNA (1)...(19): siRNA sense strand
acugauaacccgaggacaa

SEQ ID NO: 2537996 - RNA, 19 nt, Homo sapiens
  misc_RNA (1)...(19): siRNA sense strand
agacaaagacaggaggaaa

SEQ ID NO: 2537997 - RNA, 19 nt, Homo sapiens
  misc_RNA (1)...(19): siRNA sense strand
gggagaugaaucacagaaa

SEQ ID NO: 2537998 - RNA, 19 nt, Homo sapiens
  misc_RNA (1)...(19): siRNA sense strand
gggaaacggaggagccgaa

SEQ ID NO: 2537999 - RNA, 19 nt, Homo sapiens
  misc_RNA (1)...(19): siRNA sense strand
cauaauuccaaauggcuaa

SEQ ID NO: 2538000 - RNA, 19 nt, Homo sapiens
  misc_RNA (1)...(19): siRNA sense strand
cugcauugcuacagaaaau

SEQ ID NO: 2538001 - RNA, 19 nt, Homo sapiens
  misc_RNA (1)...(19): siRNA sense strand
acucagaaaugcagaugau

SEQ ID NO: 2538002 - RNA, 19 nt, Homo sapiens
  misc_RNA (1)...(19): siRNA sense strand
gggacuauggcaaguuaaa

SEQ ID NO: 2538003 - RNA, 19 nt, Homo sapiens
  misc_RNA (1)...(19): siRNA sense strand
aguuaaaggcccucaucaa

SEQ ID NO: 2538004 - RNA, 19 nt, Homo sapiens
  misc_RNA (1)...(19): siRNA sense strand
gauauaugugggaagcaaa

SEQ ID NO: 2538005 - RNA, 19 nt, Homo sapiens
  misc_RNA (1)...(19): siRNA sense strand
gacaauaacaggagcacga

SEQ ID NO: 2538006 - RNA, 19 nt, Homo sapiens
  misc_RNA (1)...(19): siRNA sense strand
agaccauagccaagaucaa

SEQ ID NO: 2538007 - RNA, 19 nt, Homo sapiens
  misc_RNA (1)...(19): siRNA sense strand
ccgaagacaagaugugaga

SEQ ID NO: 2538008 - RNA, 19 nt, Homo sapiens
  misc_RNA (1)...(19): siRNA sense strand
acaggaggaaagagguuaa

SEQ ID NO: 2538009 - RNA, 19 nt, Homo sapiens
  misc_RNA (1)...(19): siRNA sense strand
aguagaaacaggaggaauc

SEQ ID NO: 2538010 - RNA, 19 nt, Homo sapiens
  misc_RNA (1)...(19): siRNA sense strand
gaacgcugcugaugggaga

SEQ ID NO: 2538011 - RNA, 19 nt, Homo sapiens
  misc_RNA (1)...(19): siRNA sense strand
gagaugaaucacagaaaau

SEQ ID NO: 2538012 - RNA, 19 nt, Homo sapiens
  misc_RNA (1)...(19): siRNA sense strand
acggaggagccgaagacaa

SEQ ID NO: 2538013 - RNA, 19 nt, Homo sapiens
  misc_RNA (1)...(19): siRNA sense strand
agacaggaggaaagagguu

SEQ ID NO: 2538014 - RNA, 19 nt, Homo sapiens
  misc_RNA (1)...(19): siRNA sense strand
ggaggagaucagaggacca

SEQ ID NO: 2538015 - RNA, 19 nt, Homo sapiens
  misc_RNA (1)...(19): siRNA sense strand
acauaauuccaaauggcua

SEQ ID NO: 2538016 - RNA, 19 nt, Homo sapiens
  misc_RNA (1)...(19): siRNA sense strand
gacucaaugcagaggauuu

SEQ ID NO: 2538017 - RNA, 19 nt, Homo sapiens
  misc_RNA (1)...(19): siRNA sense strand
caauaacaggagcacgaaa

SEQ ID NO: 2538018 - RNA, 19 nt, Homo sapiens
  misc_RNA (1)...(19): siRNA sense strand
uuugaugaacuucgagaaa

SEQ ID NO: 2538019 - RNA, 19 nt, Homo sapiens
  misc_RNA (1)...(19): siRNA sense strand
gacaaagacaggaggaaag

SEQ ID NO: 2538020 - RNA, 19 nt, Homo sapiens
  misc_RNA (1)...(19): siRNA sense strand
uugaugaauuagaggaugu

SEQ ID NO: 2538021 - RNA, 19 nt, Homo sapiens
  misc_RNA (1)...(19): siRNA sense strand
acagaaaugcagcugaaau

SEQ ID NO: 2538022 - RNA, 19 nt, Homo sapiens
  misc_RNA (1)...(19): siRNA sense strand
auucagaaaugguggcugu

SEQ ID NO: 2538023 - RNA, 19 nt, Homo sapiens
  misc_RNA (1)...(19): siRNA sense strand
aagcugaaugaacgaauaa

SEQ ID NO: 2538024 - RNA, 19 nt, Homo sapiens
  misc_RNA (1)...(19): siRNA sense strand
ugaagacggcccagaaaca

SEQ ID NO: 2538025 - RNA, 19 nt, Homo sapiens
  misc_RNA (1)...(19): siRNA sense strand
augcaaaauggcuggcaaa

SEQ ID NO: 2538026 - RNA, 19 nt, Homo sapiens
  misc_RNA (1)...(19): siRNA sense strand
aggaaagagguuaagcuga

SEQ ID NO: 2538027 - RNA, 19 nt, Homo sapiens
  misc_RNA (1)...(19): siRNA sense strand
cugacuacaaguauacaaa

SEQ ID NO: 2538028 - RNA, 19 nt, Homo sapiens
  misc_RNA (1)...(19): siRNA sense strand
ccaagugugaaucuggaaa

SEQ ID NO: 2538029 - RNA, 19 nt, Homo sapiens
  misc_RNA (1)...(19): siRNA sense strand
ccaaaugaugcuaaggugu

SEQ ID NO: 2538030 - RNA, 19 nt, Homo sapiens
  misc_RNA (1)...(19): siRNA sense strand
acucaaugcagaggauuua

SEQ ID NO: 2538031 - RNA, 19 nt, Homo sapiens
  misc_RNA (1)...(19): siRNA sense strand
uuacagaaagacaaagaca

SEQ ID NO: 2538032 - RNA, 19 nt, Homo sapiens
  misc_RNA (1)...(19): siRNA sense strand
ggaggaaucaguugccaga

SEQ ID NO: 2538033 - RNA, 19 nt, Homo sapiens
  misc_RNA (1)...(19): siRNA sense strand
aggcuggugugcucgguaa

SEQ ID NO: 2538034 - RNA, 19 nt, Homo sapiens
  misc_RNA (1)...(19): siRNA sense strand
gggcagaauuccauauccu

SEQ ID NO: 2538035 - RNA, 19 nt, Homo sapiens
  misc_RNA (1)...(19): siRNA sense strand
aaucaugcuccuauaacaa

SEQ ID NO: 2538036 - RNA, 19 nt, Homo sapiens
  misc_RNA (1)...(19): siRNA sense strand
aaccaauauugcaaagaca

SEQ ID NO: 2538037 - RNA, 19 nt, Homo sapiens
  misc_RNA (1)...(19): siRNA sense strand
gaucagaggaccaaguuuu

SEQ ID NO: 2538038 - RNA, 19 nt, Homo sapiens
  misc_RNA (1)...(19): siRNA sense strand
gcucgguaacagaugaaga

SEQ ID NO: 2538039 - RNA, 19 nt, Homo sapiens
  misc_RNA (1)...(19): siRNA sense strand
uguuacagaaagacaaaga

SEQ ID NO: 2538040 - RNA, 19 nt, Homo sapiens
  misc_RNA (1)...(19): siRNA sense strand
gguuaagcugaaugaacga

SEQ ID NO: 2538041 - RNA, 19 nt, Homo sapiens
  misc_RNA (1)...(19): siRNA sense strand
cggaggagccgaagacaag

SEQ ID NO: 2538042 - RNA, 19 nt, Homo sapiens
  misc_RNA (1)...(19): siRNA sense strand
auacaaagauagcugugga

SEQ ID NO: 2538043 - RNA, 19 nt, Homo sapiens
  misc_RNA (1)...(19): siRNA sense strand
aagacaaagacaggaggaa

SEQ ID NO: 2538044 - RNA, 19 nt, Homo sapiens
  misc_RNA (1)...(19): siRNA sense strand
aguuuaaccaagaggaaug

SEQ ID NO: 2538045 - RNA, 19 nt, Homo sapiens
  misc_RNA (1)...(19): siRNA sense strand
cggacaacgaggaggagau

SEQ ID NO: 2538046 - RNA, 19 nt, Homo sapiens
  misc_RNA (1)...(19): siRNA sense strand
agaugaaggacacggacaa

SEQ ID NO: 2538047 - RNA, 19 nt, Homo sapiens
  misc_RNA (1)...(19): siRNA sense strand
gugacgaggagguggacga

SEQ ID NO: 2538048 - RNA, 19 nt, Homo sapiens
  misc_RNA (1)...(19): siRNA sense strand
gccaggaagaugaaggaca

SEQ ID NO: 2538049 - RNA, 19 nt, Homo sapiens
  misc_RNA (1)...(19): siRNA sense strand
cgggacaugaugagugaga

SEQ ID NO: 2538050 - RNA, 19 nt, Homo sapiens
  misc_RNA (1)...(19): siRNA sense strand
ccaggaagaugaaggacac

SEQ ID NO: 2538051 - RNA, 19 nt, Homo sapiens
  misc_RNA (1)...(19): siRNA sense strand
agaucgaccgggacggcaa

SEQ ID NO: 2538052 - RNA, 19 nt, Homo sapiens
  misc_RNA (1)...(19): siRNA sense strand
acggagacggacaggugaa

SEQ ID NO: 2538053 - RNA, 19 nt, Homo sapiens
  misc_RNA (1)...(19): siRNA sense strand
gggagaaagcuguuggaga

SEQ ID NO: 2538054 - RNA, 19 nt, Homo sapiens
  misc_RNA (1)...(19): siRNA sense strand
ggagaaagcuguuggagac

SEQ ID NO: 2538055 - RNA, 19 nt, Homo sapiens
  misc_RNA (1)...(19): siRNA sense strand
ggagaugucaggugggaga

SEQ ID NO: 2538056 - RNA, 19 nt, Homo sapiens
  misc_RNA (1)...(19): siRNA sense strand
cagcaaauggcgugauuga

SEQ ID NO: 2538057 - RNA, 19 nt, Homo sapiens
  misc_RNA (1)...(19): siRNA sense strand
gcccagaauacaugugcaa

SEQ ID NO: 2538058 - RNA, 19 nt, Homo sapiens
  misc_RNA (1)...(19): siRNA sense strand
uuguaaaugcagugauuga

SEQ ID NO: 2538059 - RNA, 19 nt, Homo sapiens
  misc_RNA (1)...(19): siRNA sense strand
augagauugacaugaguaa

SEQ ID NO: 2538060 - RNA, 19 nt, Homo sapiens
  misc_RNA (1)...(19): siRNA sense strand
cuauaggaggcaagguaga

SEQ ID NO: 2538061 - RNA, 19 nt, Homo sapiens
  misc_RNA (1)...(19): siRNA sense strand
aaaucaaggcagcgguaga

SEQ ID NO: 2538062 - RNA, 19 nt, Homo sapiens
  misc_RNA (1)...(19): siRNA sense strand
auguggaagcuaugaauuu

SEQ ID NO: 2538063 - RNA, 19 nt, Homo sapiens
  misc_RNA (1)...(19): siRNA sense strand
ugggagagaaggcccgaaa

SEQ ID NO: 2538064 - RNA, 19 nt, Homo sapiens
  misc_RNA (1)...(19): siRNA sense strand
cagaacaucgggagaaaau

SEQ ID NO: 2538065 - RNA, 19 nt, Homo sapiens
  misc_RNA (1)...(19): siRNA sense strand
cgacacaaccaaagaggug

SEQ ID NO: 2538066 - RNA, 19 nt, Homo sapiens
  misc_RNA (1)...(19): siRNA sense strand
gagaaguagagaaggcaaa

SEQ ID NO: 2538067 - RNA, 19 nt, Homo sapiens
  misc_RNA (1)...(19): siRNA sense strand
cuuggaacuuugaaggaua

SEQ ID NO: 2538068 - RNA, 19 nt, Homo sapiens
  misc_RNA (1)...(19): siRNA sense strand
agaugaugcacaagauaua

SEQ ID NO: 2538069 - RNA, 19 nt, Homo sapiens
  misc_RNA (1)...(19): siRNA sense strand
acugaaggacagagaagaa

SEQ ID NO: 2538070 - RNA, 19 nt, Homo sapiens
  misc_RNA (1)...(19): siRNA sense strand
ugcaagacaugaagauuua

SEQ ID NO: 2538071 - RNA, 19 nt, Homo sapiens
  misc_RNA (1)...(19): siRNA sense strand
guaagagacuccaaggaca

SEQ ID NO: 2538072 - RNA, 19 nt, Homo sapiens
  misc_RNA (1)...(19): siRNA sense strand
guucaaucagugagaagua

SEQ ID NO: 2538073 - RNA, 19 nt, Homo sapiens
  misc_RNA (1)...(19): siRNA sense strand
aacuauagcaagugaacua

SEQ ID NO: 2538074 - RNA, 19 nt, Homo sapiens
  misc_RNA (1)...(19): siRNA sense strand
ggcacaagcaacugggauu

SEQ ID NO: 2538075 - RNA, 19 nt, Homo sapiens
  misc_RNA (1)...(19): siRNA sense strand
uaagagacuccaaggacaa

SEQ ID NO: 2538076 - RNA, 19 nt, Homo sapiens
  misc_RNA (1)...(19): siRNA sense strand
ugaugaacuugaugguauu

SEQ ID NO: 2538077 - RNA, 19 nt, Homo sapiens
  misc_RNA (1)...(19): siRNA sense strand
cugcaggacggguguuaua

SEQ ID NO: 2538078 - RNA, 19 nt, Homo sapiens
  misc_RNA (1)...(19): siRNA sense strand
gaguaucugauuuaggaaa

SEQ ID NO: 2538079 - RNA, 19 nt, Homo sapiens
  misc_RNA (1)...(19): siRNA sense strand
cuggaauagaagugauaga

SEQ ID NO: 2538080 - RNA, 19 nt, Homo sapiens
  misc_RNA (1)...(19): siRNA sense strand
uugcaagacaugaagauuu

SEQ ID NO: 2538081 - RNA, 19 nt, Homo sapiens
  misc_RNA (1)...(19): siRNA sense strand
cagaugaugcagacgagaa

SEQ ID NO: 2538082 - RNA, 19 nt, Homo sapiens
  misc_RNA (1)...(19): siRNA sense strand
ucuuggugaaggugggaaa

SEQ ID NO: 2538083 - RNA, 19 nt, Homo sapiens
  misc_RNA (1)...(19): siRNA sense strand
ggagcuguugauaggauaa

SEQ ID NO: 2538084 - RNA, 19 nt, Homo sapiens
  misc_RNA (1)...(19): siRNA sense strand
agcuguaauugcugaacaa

SEQ ID NO: 2538085 - RNA, 19 nt, Homo sapiens
  misc_RNA (1)...(19): siRNA sense strand
ggagaaacuuauggaucau

SEQ ID NO: 2538086 - RNA, 19 nt, Homo sapiens
  misc_RNA (1)...(19): siRNA sense strand
auucaugcucuuauggaaa

SEQ ID NO: 2538087 - RNA, 19 nt, Homo sapiens
  misc_RNA (1)...(19): siRNA sense strand
ggaaucagucaguuggaca

SEQ ID NO: 2538088 - RNA, 19 nt, Homo sapiens
  misc_RNA (1)...(19): siRNA sense strand
aaguagagaaggcaaagaa

SEQ ID NO: 2538089 - RNA, 19 nt, Homo sapiens
  misc_RNA (1)...(19): siRNA sense strand
cuuacagguuguugcaaga

SEQ ID NO: 2538090 - RNA, 19 nt, Homo sapiens
  misc_RNA (1)...(19): siRNA sense strand
agaugaugcagacgagaau

SEQ ID NO: 2538091 - RNA, 19 nt, Homo sapiens
  misc_RNA (1)...(19): siRNA sense strand
ccagauuaugauccagaaa

SEQ ID NO: 2538092 - RNA, 19 nt, Homo sapiens
  misc_RNA (1)...(19): siRNA sense strand
gguuucauugccagaguua

SEQ ID NO: 2538093 - RNA, 19 nt, Homo sapiens
  misc_RNA (1)...(19): siRNA sense strand
guugauaggauaaaagcaa

SEQ ID NO: 2538094 - RNA, 19 nt, Homo sapiens
  misc_RNA (1)...(19): siRNA sense strand
augaagauuuacuggcaca

SEQ ID NO: 2538095 - RNA, 19 nt, Homo sapiens
  misc_RNA (1)...(19): siRNA sense strand
gaaaauaucaacagugcau

SEQ ID NO: 2538096 - RNA, 19 nt, Homo sapiens
  misc_RNA (1)...(19): siRNA sense strand
aaauguggcaguagugaau

SEQ ID NO: 2538097 - RNA, 19 nt, Homo sapiens
  misc_RNA (1)...(19): siRNA sense strand
cuauagaggccauaaucau

SEQ ID NO: 2538098 - RNA, 19 nt, Homo sapiens
  misc_RNA (1)...(19): siRNA sense strand
gggauugagucguuggaag

SEQ ID NO: 2538099 - RNA, 19 nt, Homo sapiens
  misc_RNA (1)...(19): siRNA sense strand
gguuguugcaagacaugaa

SEQ ID NO: 2538100 - RNA, 19 nt, Homo sapiens
  misc_RNA (1)...(19): siRNA sense strand
ugaaggacagagaagaaau

SEQ ID NO: 2538101 - RNA, 19 nt, Homo sapiens
  misc_RNA (1)...(19): siRNA sense strand
uugccagaguuaugaguga

SEQ ID NO: 2538102 - RNA, 19 nt, Homo sapiens
  misc_RNA (1)...(19): siRNA sense strand
accaauauggagaaacuua

SEQ ID NO: 2538103 - RNA, 19 nt, Homo sapiens
  misc_RNA (1)...(19): siRNA sense strand
agaaauaguuaaggaugga

SEQ ID NO: 2538104 - RNA, 19 nt, Homo sapiens
  misc_RNA (1)...(19): siRNA sense strand
ugagaaguagagaaggcaa

SEQ ID NO: 2538105 - RNA, 19 nt, Homo sapiens
  misc_RNA (1)...(19): siRNA sense strand
guaucuugaaucucaguaa

SEQ ID NO: 2538106 - RNA, 19 nt, Homo sapiens
  misc_RNA (1)...(19): siRNA sense strand
ggauggauauugugcuacu

SEQ ID NO: 2538107 - RNA, 19 nt, Homo sapiens
  misc_RNA (1)...(19): siRNA sense strand
ucucaauuucauauggcaa

SEQ ID NO: 2538108 - RNA, 19 nt, Homo sapiens
  misc_RNA (1)...(19): siRNA sense strand
ucagcauauccaagggaau

SEQ ID NO: 2538109 - RNA, 19 nt, Homo sapiens
  misc_RNA (1)...(19): siRNA sense strand
cugaaggacagagaagaaa

SEQ ID NO: 2538110 - RNA, 19 nt, Homo sapiens
  misc_RNA (1)...(19): siRNA sense strand
uuguauaaguugcaccaau

SEQ ID NO: 2538111 - RNA, 19 nt, Homo sapiens
  misc_RNA (1)...(19): siRNA sense strand
aggaauagaucuuucugga

SEQ ID NO: 2538112 - RNA, 19 nt, Homo sapiens
  misc_RNA (1)...(19): siRNA sense strand
cuuccaggcaagugaacau

SEQ ID NO: 2538113 - RNA, 19 nt, Homo sapiens
  misc_RNA (1)...(19): siRNA sense strand
aggaaauacugcagcuuug

SEQ ID NO: 2538114 - RNA, 19 nt, Homo sapiens
  misc_RNA (1)...(19): siRNA sense strand
acuaaauguugcugcuguu

SEQ ID NO: 2538115 - RNA, 19 nt, Homo sapiens
  misc_RNA (1)...(19): siRNA sense strand
acuuugaaugcuuggauuu

SEQ ID NO: 2538116 - RNA, 19 nt, Homo sapiens
  misc_RNA (1)...(19): siRNA sense strand
uugacaacacugaggcuau

SEQ ID NO: 2538117 - RNA, 19 nt, Homo sapiens
  misc_RNA (1)...(19): siRNA sense strand
acuccaaggacaacugcaa

SEQ ID NO: 2538118 - RNA, 19 nt, Homo sapiens
  misc_RNA (1)...(19): siRNA sense strand
ccaauauggagaaacuuau

SEQ ID NO: 2538119 - RNA, 19 nt, Homo sapiens
  misc_RNA (1)...(19): siRNA sense strand
agaauuugcaccaguuuau

SEQ ID NO: 2538120 - RNA, 19 nt, Homo sapiens
  misc_RNA (1)...(19): siRNA sense strand
gagaaguagagaaggcaaa

SEQ ID NO: 2538121 - RNA, 19 nt, Homo sapiens
  misc_RNA (1)...(19): siRNA sense strand
cuuggaacuuugaaggaua

SEQ ID NO: 2538122 - RNA, 19 nt, Homo sapiens
  misc_RNA (1)...(19): siRNA sense strand
agaugaugcacaagauaua

SEQ ID NO: 2538123 - RNA, 19 nt, Homo sapiens
  misc_RNA (1)...(19): siRNA sense strand
acugaaggacagagaagaa

SEQ ID NO: 2538124 - RNA, 19 nt, Homo sapiens
  misc_RNA (1)...(19): siRNA sense strand
ugcaagacaugaagauuua

SEQ ID NO: 2538125 - RNA, 19 nt, Homo sapiens
  misc_RNA (1)...(19): siRNA sense strand
guaagagacuccaaggaca

SEQ ID NO: 2538126 - RNA, 19 nt, Homo sapiens
  misc_RNA (1)...(19): siRNA sense strand
guucaaucagugagaagua

SEQ ID NO: 2538127 - RNA, 19 nt, Homo sapiens
  misc_RNA (1)...(19): siRNA sense strand
aacuauagcaagugaacua

SEQ ID NO: 2538128 - RNA, 19 nt, Homo sapiens
  misc_RNA (1)...(19): siRNA sense strand
ggcacaagcaacugggauu

SEQ ID NO: 2538129 - RNA, 19 nt, Homo sapiens
  misc_RNA (1)...(19): siRNA sense strand
uaagagacuccaaggacaa

SEQ ID NO: 2538130 - RNA, 19 nt, Homo sapiens
  misc_RNA (1)...(19): siRNA sense strand
ugaugaacuugaugguauu

SEQ ID NO: 2538131 - RNA, 19 nt, Homo sapiens
  misc_RNA (1)...(19): siRNA sense strand
cugcaggacggguguuaua

SEQ ID NO: 2538132 - RNA, 19 nt, Homo sapiens
  misc_RNA (1)...(19): siRNA sense strand
gaguaucugauuuaggaaa

SEQ ID NO: 2538133 - RNA, 19 nt, Homo sapiens
  misc_RNA (1)...(19): siRNA sense strand
cuggaauagaagugauaga

SEQ ID NO: 2538134 - RNA, 19 nt, Homo sapiens
  misc_RNA (1)...(19): siRNA sense strand
uugcaagacaugaagauuu

SEQ ID NO: 2538135 - RNA, 19 nt, Homo sapiens
  misc_RNA (1)...(19): siRNA sense strand
cagaugaugcagacgagaa

SEQ ID NO: 2538136 - RNA, 19 nt, Homo sapiens
  misc_RNA (1)...(19): siRNA sense strand
ucuuggugaaggugggaaa

SEQ ID NO: 2538137 - RNA, 19 nt, Homo sapiens
  misc_RNA (1)...(19): siRNA sense strand
ggagcuguugauaggauaa

SEQ ID NO: 2538138 - RNA, 19 nt, Homo sapiens
  misc_RNA (1)...(19): siRNA sense strand
agcuguaauugcugaacaa

SEQ ID NO: 2538139 - RNA, 19 nt, Homo sapiens
  misc_RNA (1)...(19): siRNA sense strand
ggagaaacuuauggaucau

SEQ ID NO: 2538140 - RNA, 19 nt, Homo sapiens
  misc_RNA (1)...(19): siRNA sense strand
auucaugcucuuauggaaa

SEQ ID NO: 2538141 - RNA, 19 nt, Homo sapiens
  misc_RNA (1)...(19): siRNA sense strand
ggaaucagucaguuggaca

SEQ ID NO: 2538142 - RNA, 19 nt, Homo sapiens
  misc_RNA (1)...(19): siRNA sense strand
aaguagagaaggcaaagaa

SEQ ID NO: 2538143 - RNA, 19 nt, Homo sapiens
  misc_RNA (1)...(19): siRNA sense strand
cuuacagguuguugcaaga

SEQ ID NO: 2538144 - RNA, 19 nt, Homo sapiens
  misc_RNA (1)...(19): siRNA sense strand
agaugaugcagacgagaau

SEQ ID NO: 2538145 - RNA, 19 nt, Homo sapiens
  misc_RNA (1)...(19): siRNA sense strand
ccagauuaugauccagaaa

SEQ ID NO: 2538146 - RNA, 19 nt, Homo sapiens
  misc_RNA (1)...(19): siRNA sense strand
gguuucauugccagaguua

SEQ ID NO: 2538147 - RNA, 19 nt, Homo sapiens
  misc_RNA (1)...(19): siRNA sense strand
guugauaggauaaaagcaa

SEQ ID NO: 2538148 - RNA, 19 nt, Homo sapiens
  misc_RNA (1)...(19): siRNA sense strand
augaagauuuacuggcaca

SEQ ID NO: 2538149 - RNA, 19 nt, Homo sapiens
  misc_RNA (1)...(19): siRNA sense strand
gaaaauaucaacagugcau

SEQ ID NO: 2538150 - RNA, 19 nt, Homo sapiens
  misc_RNA (1)...(19): siRNA sense strand
aaauguggcaguagugaau

SEQ ID NO: 2538151 - RNA, 19 nt, Homo sapiens
  misc_RNA (1)...(19): siRNA sense strand
cuauagaggccauaaucau

SEQ ID NO: 2538152 - RNA, 19 nt, Homo sapiens
  misc_RNA (1)...(19): siRNA sense strand
gggauugagucguuggaag

SEQ ID NO: 2538153 - RNA, 19 nt, Homo sapiens
  misc_RNA (1)...(19): siRNA sense strand
gguuguugcaagacaugaa

SEQ ID NO: 2538154 - RNA, 19 nt, Homo sapiens
  misc_RNA (1)...(19): siRNA sense strand
ugaaggacagagaagaaau

SEQ ID NO: 2538155 - RNA, 19 nt, Homo sapiens
  misc_RNA (1)...(19): siRNA sense strand
uugccagaguuaugaguga

SEQ ID NO: 2538156 - RNA, 19 nt, Homo sapiens
  misc_RNA (1)...(19): siRNA sense strand
accaauauggagaaacuua

SEQ ID NO: 2538157 - RNA, 19 nt, Homo sapiens
  misc_RNA (1)...(19): siRNA sense strand
agaaauaguuaaggaugga

SEQ ID NO: 2538158 - RNA, 19 nt, Homo sapiens
  misc_RNA (1)...(19): siRNA sense strand
ugagaaguagagaaggcaa

SEQ ID NO: 2538159 - RNA, 19 nt, Homo sapiens
  misc_RNA (1)...(19): siRNA sense strand
guaucuugaaucucaguaa

SEQ ID NO: 2538160 - RNA, 19 nt, Homo sapiens
  misc_RNA (1)...(19): siRNA sense strand
ggauggauauugugcuacu

SEQ ID NO: 2538161 - RNA, 19 nt, Homo sapiens
  misc_RNA (1)...(19): siRNA sense strand
ucucaauuucauauggcaa

SEQ ID NO: 2538162 - RNA, 19 nt, Homo sapiens
  misc_RNA (1)...(19): siRNA sense strand
ucagcauauccaagggaau

SEQ ID NO: 2538163 - RNA, 19 nt, Homo sapiens
  misc_RNA (1)...(19): siRNA sense strand
cugaaggacagagaagaaa

SEQ ID NO: 2538164 - RNA, 19 nt, Homo sapiens
  misc_RNA (1)...(19): siRNA sense strand
uuguauaaguugcaccaau

SEQ ID NO: 2538165 - RNA, 19 nt, Homo sapiens
  misc_RNA (1)...(19): siRNA sense strand
aggaauagaucuuucugga

SEQ ID NO: 2538166 - RNA, 19 nt, Homo sapiens
  misc_RNA (1)...(19): siRNA sense strand
cuuccaggcaagugaacau

SEQ ID NO: 2538167 - RNA, 19 nt, Homo sapiens
  misc_RNA (1)...(19): siRNA sense strand
aggaaauacugcagcuuug

SEQ ID NO: 2538168 - RNA, 19 nt, Homo sapiens
  misc_RNA (1)...(19): siRNA sense strand
acuaaauguugcugcuguu

SEQ ID NO: 2538169 - RNA, 19 nt, Homo sapiens
  misc_RNA (1)...(19): siRNA sense strand
acuuugaaugcuuggauuu

SEQ ID NO: 2538170 - RNA, 19 nt, Homo sapiens
  misc_RNA (1)...(19): siRNA sense strand
uugacaacacugaggcuau

SEQ ID NO: 2538171 - RNA, 19 nt, Homo sapiens
  misc_RNA (1)...(19): siRNA sense strand
acuccaaggacaacugcaa

SEQ ID NO: 2538172 - RNA, 19 nt, Homo sapiens
  misc_RNA (1)...(19): siRNA sense strand
ccaauauggagaaacuuau

SEQ ID NO: 2538173 - RNA, 19 nt, Homo sapiens
  misc_RNA (1)...(19): siRNA sense strand
agaauuugcaccaguuuau

SEQ ID NO: 2538174 - RNA, 19 nt, Homo sapiens
  misc_RNA (1)...(19): siRNA sense strand
gcgagaagaagaacggcaa

SEQ ID NO: 2538175 - RNA, 19 nt, Homo sapiens
  misc_RNA (1)...(19): siRNA sense strand
cuuacuaccgcgagaacaa

SEQ ID NO: 2538176 - RNA, 19 nt, Homo sapiens
  misc_RNA (1)...(19): siRNA sense strand
ggccggacgagaaggagaa

SEQ ID NO: 2538177 - RNA, 19 nt, Homo sapiens
  misc_RNA (1)...(19): siRNA sense strand
ggagauaggaaagagguga

SEQ ID NO: 2538178 - RNA, 19 nt, Homo sapiens
  misc_RNA (1)...(19): siRNA sense strand
acucagaacucgcugggca

SEQ ID NO: 2538179 - RNA, 19 nt, Homo sapiens
  misc_RNA (1)...(19): siRNA sense strand
aggagggcgagaagaagaa

SEQ ID NO: 2538180 - RNA, 19 nt, Homo sapiens
  misc_RNA (1)...(19): siRNA sense strand
auaggaaagaggugaaaau

SEQ ID NO: 2538181 - RNA, 19 nt, Homo sapiens
  misc_RNA (1)...(19): siRNA sense strand
agauaggaaagaggugaaa

SEQ ID NO: 2538182 - RNA, 19 nt, Homo sapiens
  misc_RNA (1)...(19): siRNA sense strand
aggaaagaggugaaaauga

SEQ ID NO: 2538183 - RNA, 19 nt, Homo sapiens
  misc_RNA (1)...(19): siRNA sense strand
uggacaugggagauaggaa

SEQ ID NO: 2538184 - RNA, 19 nt, Homo sapiens
  misc_RNA (1)...(19): siRNA sense strand
gagugaagcugguggugga

SEQ ID NO: 2538185 - RNA, 19 nt, Homo sapiens
  misc_RNA (1)...(19): siRNA sense strand
ccugagaagcugacgcuga

SEQ ID NO: 2538186 - RNA, 19 nt, Homo sapiens
  misc_RNA (1)...(19): siRNA sense strand
ugguggaagcugucggaga

SEQ ID NO: 2538187 - RNA, 19 nt, Homo sapiens
  misc_RNA (1)...(19): siRNA sense strand
ggacaaagagcaugacguc

SEQ ID NO: 2538188 - RNA, 19 nt, Homo sapiens
  misc_RNA (1)...(19): siRNA sense strand
aggacgugcugguggccau

SEQ ID NO: 2538189 - RNA, 19 nt, Homo sapiens
  misc_RNA (1)...(19): siRNA sense strand
gcggcaggacaaagagcau

SEQ ID NO: 2538190 - RNA, 19 nt, Homo sapiens
  misc_RNA (1)...(19): siRNA sense strand
agguaguggccuugcgaaa

SEQ ID NO: 2538191 - RNA, 19 nt, Homo sapiens
  misc_RNA (1)...(19): siRNA sense strand
cggugaaagugccagggaa

SEQ ID NO: 2538192 - RNA, 19 nt, Homo sapiens
  misc_RNA (1)...(19): siRNA sense strand
cugaacaaggaguggaaga

SEQ ID NO: 2538193 - RNA, 19 nt, Homo sapiens
  misc_RNA (1)...(19): siRNA sense strand
aagaagcaccggaggaaaa

SEQ ID NO: 2538194 - RNA, 19 nt, Homo sapiens
  misc_RNA (1)...(19): siRNA sense strand
agaaggagauuguggugga

SEQ ID NO: 2538195 - RNA, 19 nt, Homo sapiens
  misc_RNA (1)...(19): siRNA sense strand
cggaagaagcaccggagga

SEQ ID NO: 2538196 - RNA, 19 nt, Homo sapiens
  misc_RNA (1)...(19): siRNA sense strand
ggugaaagugccagggaag

SEQ ID NO: 2538197 - RNA, 19 nt, Homo sapiens
  misc_RNA (1)...(19): siRNA sense strand
ugguggauggccagaguua

SEQ ID NO: 2538198 - RNA, 19 nt, Homo sapiens
  misc_RNA (1)...(19): siRNA sense strand
agugcaagguggacagcau

SEQ ID NO: 2538199 - RNA, 19 nt, Homo sapiens
  misc_RNA (1)...(19): siRNA sense strand
uguucagccuggaggauga

SEQ ID NO: 2538200 - RNA, 19 nt, Homo sapiens
  misc_RNA (1)...(19): siRNA sense strand
cugcuaaagcggagcggca

SEQ ID NO: 2538201 - RNA, 19 nt, Homo sapiens
  misc_RNA (1)...(19): siRNA sense strand
cugaagaggcagaggaguc

SEQ ID NO: 2538202 - RNA, 19 nt, Homo sapiens
  misc_RNA (1)...(19): siRNA sense strand
gcugcugauccgagaugaa

SEQ ID NO: 2538203 - RNA, 19 nt, Homo sapiens
  misc_RNA (1)...(19): siRNA sense strand
aggauuuggcgcugcagaa

SEQ ID NO: 2538204 - RNA, 19 nt, Homo sapiens
  misc_RNA (1)...(19): siRNA sense strand
ggguggaugcagugguguu

SEQ ID NO: 2538205 - RNA, 19 nt, Homo sapiens
  misc_RNA (1)...(19): siRNA sense strand
gcucaggcauccaccgaca

SEQ ID NO: 2538206 - RNA, 19 nt, Homo sapiens
  misc_RNA (1)...(19): siRNA sense strand
ccacagaucugaagcggug

SEQ ID NO: 2538207 - RNA, 19 nt, Homo sapiens
  misc_RNA (1)...(19): siRNA sense strand
uggugaugcuccuggcaca

SEQ ID NO: 2538208 - RNA, 19 nt, Homo sapiens
  misc_RNA (1)...(19): siRNA sense strand
gcacauggcuccaaagagg

SEQ ID NO: 2538209 - RNA, 19 nt, Homo sapiens
  misc_RNA (1)...(19): siRNA sense strand
agaaauggaucgguggcaa

SEQ ID NO: 2538210 - RNA, 19 nt, Homo sapiens
  misc_RNA (1)...(19): siRNA sense strand
gaggaggcccagaagccaa

SEQ ID NO: 2538211 - RNA, 19 nt, Homo sapiens
  misc_RNA (1)...(19): siRNA sense strand
ccguggaccuucuggagga

SEQ ID NO: 2538212 - RNA, 19 nt, Homo sapiens
  misc_RNA (1)...(19): siRNA sense strand
ucugagaguaauaaagcaa

SEQ ID NO: 2538213 - RNA, 19 nt, Homo sapiens
  misc_RNA (1)...(19): siRNA sense strand
caagauuguucuacagcca

SEQ ID NO: 2538214 - RNA, 19 nt, Homo sapiens
  misc_RNA (1)...(19): siRNA sense strand
gguacuucuuggagccaca

SEQ ID NO: 2538215 - RNA, 19 nt, Homo sapiens
  misc_RNA (1)...(19): siRNA sense strand
ccggauauugucugucaaa

SEQ ID NO: 2538216 - RNA, 19 nt, Homo sapiens
  misc_RNA (1)...(19): siRNA sense strand
agccaaagucgauucuaaa

SEQ ID NO: 2538217 - RNA, 19 nt, Homo sapiens
  misc_RNA (1)...(19): siRNA sense strand
ccuuauucucucagcauuu

SEQ ID NO: 2538218 - RNA, 19 nt, Homo sapiens
  misc_RNA (1)...(19): siRNA sense strand
cuggacucuuacagcaaua

SEQ ID NO: 2538219 - RNA, 19 nt, Homo sapiens
  misc_RNA (1)...(19): siRNA sense strand
gaaguuauuaccuggccua

SEQ ID NO: 2538220 - RNA, 19 nt, Homo sapiens
  misc_RNA (1)...(19): siRNA sense strand
cccagcaguuucagaucaa

SEQ ID NO: 2538221 - RNA, 19 nt, Homo sapiens
  misc_RNA (1)...(19): siRNA sense strand
agugaugacaacccggaua

SEQ ID NO: 2538222 - RNA, 19 nt, Homo sapiens
  misc_RNA (1)...(19): siRNA sense strand
ucugagaguaauaaagcaa

SEQ ID NO: 2538223 - RNA, 19 nt, Homo sapiens
  misc_RNA (1)...(19): siRNA sense strand
caagauuguucuacagcca

SEQ ID NO: 2538224 - RNA, 19 nt, Homo sapiens
  misc_RNA (1)...(19): siRNA sense strand
gguacuucuuggagccaca

SEQ ID NO: 2538225 - RNA, 19 nt, Homo sapiens
  misc_RNA (1)...(19): siRNA sense strand
ccggauauugucugucaaa

SEQ ID NO: 2538226 - RNA, 19 nt, Homo sapiens
  misc_RNA (1)...(19): siRNA sense strand
agccaaagucgauucuaaa

SEQ ID NO: 2538227 - RNA, 19 nt, Homo sapiens
  misc_RNA (1)...(19): siRNA sense strand
ccuuauucucucagcauuu

SEQ ID NO: 2538228 - RNA, 19 nt, Homo sapiens
  misc_RNA (1)...(19): siRNA sense strand
cuggacucuuacagcaaua

SEQ ID NO: 2538229 - RNA, 19 nt, Homo sapiens
  misc_RNA (1)...(19): siRNA sense strand
gaaguuauuaccuggccua

SEQ ID NO: 2538230 - RNA, 19 nt, Homo sapiens
  misc_RNA (1)...(19): siRNA sense strand
cccagcaguuucagaucaa

SEQ ID NO: 2538231 - RNA, 19 nt, Homo sapiens
  misc_RNA (1)...(19): siRNA sense strand
agugaugacaacccggaua

SEQ ID NO: 2538232 - RNA, 19 nt, Homo sapiens
  misc_RNA (1)...(19): siRNA sense strand
ucugagaguaauaaagcaa

SEQ ID NO: 2538233 - RNA, 19 nt, Homo sapiens
  misc_RNA (1)...(19): siRNA sense strand
caagauuguucuacagcca

SEQ ID NO: 2538234 - RNA, 19 nt, Homo sapiens
  misc_RNA (1)...(19): siRNA sense strand
gguacuucuuggagccaca

SEQ ID NO: 2538235 - RNA, 19 nt, Homo sapiens
  misc_RNA (1)...(19): siRNA sense strand
ccggauauugucugucaaa

SEQ ID NO: 2538236 - RNA, 19 nt, Homo sapiens
  misc_RNA (1)...(19): siRNA sense strand
agccaaagucgauucuaaa

SEQ ID NO: 2538237 - RNA, 19 nt, Homo sapiens
  misc_RNA (1)...(19): siRNA sense strand
ccuuauucucucagcauuu

SEQ ID NO: 2538238 - RNA, 19 nt, Homo sapiens
  misc_RNA (1)...(19): siRNA sense strand
cuggacucuuacagcaaua

SEQ ID NO: 2538239 - RNA, 19 nt, Homo sapiens
  misc_RNA (1)...(19): siRNA sense strand
gaaguuauuaccuggccua

SEQ ID NO: 2538240 - RNA, 19 nt, Homo sapiens
  misc_RNA (1)...(19): siRNA sense strand
cccagcaguuucagaucaa

SEQ ID NO: 2538241 - RNA, 19 nt, Homo sapiens
  misc_RNA (1)...(19): siRNA sense strand
agugaugacaacccggaua

SEQ ID NO: 2538242 - RNA, 19 nt, Homo sapiens
  misc_RNA (1)...(19): siRNA sense strand
cagaagagcuagaaggucu

SEQ ID NO: 2538243 - RNA, 19 nt, Homo sapiens
  misc_RNA (1)...(19): siRNA sense strand
gcuuugaaauacuggaaaa

SEQ ID NO: 2538244 - RNA, 19 nt, Homo sapiens
  misc_RNA (1)...(19): siRNA sense strand
aggcaaugaacaugaggua

SEQ ID NO: 2538245 - RNA, 19 nt, Homo sapiens
  misc_RNA (1)...(19): siRNA sense strand
ugagaaggaaauagcuaaa

SEQ ID NO: 2538246 - RNA, 19 nt, Homo sapiens
  misc_RNA (1)...(19): siRNA sense strand
gcuaaaggccugcugggua

SEQ ID NO: 2538247 - RNA, 19 nt, Homo sapiens
  misc_RNA (1)...(19): siRNA sense strand
uggauaugcagcagagcaa

SEQ ID NO: 2538248 - RNA, 19 nt, Homo sapiens
  misc_RNA (1)...(19): siRNA sense strand
ggaucuaaagacagcagua

SEQ ID NO: 2538249 - RNA, 19 nt, Homo sapiens
  misc_RNA (1)...(19): siRNA sense strand
agguacagugauaggacua

SEQ ID NO: 2538250 - RNA, 19 nt, Homo sapiens
  misc_RNA (1)...(19): siRNA sense strand
guuaaaucauggagcaucu

SEQ ID NO: 2538251 - RNA, 19 nt, Homo sapiens
  misc_RNA (1)...(19): siRNA sense strand
uggaaguaugcuuuggaua

SEQ ID NO: 2538252 - RNA, 19 nt, Homo sapiens
  misc_RNA (1)...(19): siRNA sense strand
ccagcaagacagaacguau

SEQ ID NO: 2538253 - RNA, 19 nt, Homo sapiens
  misc_RNA (1)...(19): siRNA sense strand
gcuacaggauagggcuaaa

SEQ ID NO: 2538254 - RNA, 19 nt, Homo sapiens
  misc_RNA (1)...(19): siRNA sense strand
cuugaaauagagcgagcua

SEQ ID NO: 2538255 - RNA, 19 nt, Homo sapiens
  misc_RNA (1)...(19): siRNA sense strand
ucagagacucggaugacaa

SEQ ID NO: 2538256 - RNA, 19 nt, Homo sapiens
  misc_RNA (1)...(19): siRNA sense strand
augagaaggaaauagcuaa

SEQ ID NO: 2538257 - RNA, 19 nt, Homo sapiens
  misc_RNA (1)...(19): siRNA sense strand
uauuaaaucaggugcacau

SEQ ID NO: 2538258 - RNA, 19 nt, Homo sapiens
  misc_RNA (1)...(19): siRNA sense strand
cauccaaggggaaagaaua

SEQ ID NO: 2538259 - RNA, 19 nt, Homo sapiens
  misc_RNA (1)...(19): siRNA sense strand
guuacaaaggacauaaaga

SEQ ID NO: 2538260 - RNA, 19 nt, Homo sapiens
  misc_RNA (1)...(19): siRNA sense strand
acaaaggacauaaagagau

SEQ ID NO: 2538261 - RNA, 19 nt, Homo sapiens
  misc_RNA (1)...(19): siRNA sense strand
agauggaaaaggaugguua

SEQ ID NO: 2538262 - RNA, 19 nt, Homo sapiens
  misc_RNA (1)...(19): siRNA sense strand
cuaaaggccugcuggguac

SEQ ID NO: 2538263 - RNA, 19 nt, Homo sapiens
  misc_RNA (1)...(19): siRNA sense strand
gagcgagcuaucaaacaaa

SEQ ID NO: 2538264 - RNA, 19 nt, Homo sapiens
  misc_RNA (1)...(19): siRNA sense strand
aaacaaacugcuagugacu

SEQ ID NO: 2538265 - RNA, 19 nt, Homo sapiens
  misc_RNA (1)...(19): siRNA sense strand
uggaaauagugaaguaccu

SEQ ID NO: 2538266 - RNA, 19 nt, Homo sapiens
  misc_RNA (1)...(19): siRNA sense strand
guuuggacaucaugaagau

SEQ ID NO: 2538267 - RNA, 19 nt, Homo sapiens
  misc_RNA (1)...(19): siRNA sense strand
cagcagagcaauuuggauc

SEQ ID NO: 2538268 - RNA, 19 nt, Homo sapiens
  misc_RNA (1)...(19): siRNA sense strand
ggauagggcuaaaggccug

SEQ ID NO: 2538269 - RNA, 19 nt, Homo sapiens
  misc_RNA (1)...(19): siRNA sense strand
ccuauaaaucauaccacau

SEQ ID NO: 2538270 - RNA, 19 nt, Homo sapiens
  misc_RNA (1)...(19): siRNA sense strand
accuugacaugguggaauu

SEQ ID NO: 2538271 - RNA, 19 nt, Homo sapiens
  misc_RNA (1)...(19): siRNA sense strand
ggcagauguuaauagaaaa

SEQ ID NO: 2538272 - RNA, 19 nt, Homo sapiens
  misc_RNA (1)...(19): siRNA sense strand
agaacguauuaaugcucua

SEQ ID NO: 2538273 - RNA, 19 nt, Homo sapiens
  misc_RNA (1)...(19): siRNA sense strand
ccuuuaugcuacaggauag

SEQ ID NO: 2538274 - RNA, 19 nt, Homo sapiens
  misc_RNA (1)...(19): siRNA sense strand
uugaugaucuuaugggcau

SEQ ID NO: 2538275 - RNA, 19 nt, Homo sapiens
  misc_RNA (1)...(19): siRNA sense strand
agagaaaguuccuuguacu

SEQ ID NO: 2538276 - RNA, 19 nt, Homo sapiens
  misc_RNA (1)...(19): siRNA sense strand
ugucaaagguaauacugca

SEQ ID NO: 2538277 - RNA, 19 nt, Homo sapiens
  misc_RNA (1)...(19): siRNA sense strand
acuauuaaucagagaacgu

SEQ ID NO: 2538278 - RNA, 19 nt, Homo sapiens
  misc_RNA (1)...(19): siRNA sense strand
gggcuuugaaauacuggaa

SEQ ID NO: 2538279 - RNA, 19 nt, Homo sapiens
  misc_RNA (1)...(19): siRNA sense strand
cguccuugaaauagagcga

SEQ ID NO: 2538280 - RNA, 19 nt, Homo sapiens
  misc_RNA (1)...(19): siRNA sense strand
uauugugccaagauggaaa

SEQ ID NO: 2538281 - RNA, 19 nt, Homo sapiens
  misc_RNA (1)...(19): siRNA sense strand
ccucaguagcuguggauaa

SEQ ID NO: 2538282 - RNA, 19 nt, Homo sapiens
  misc_RNA (1)...(19): siRNA sense strand
caucgaaggcaguaggaaa

SEQ ID NO: 2538283 - RNA, 19 nt, Homo sapiens
  misc_RNA (1)...(19): siRNA sense strand
ccauguugauugagagaau

SEQ ID NO: 2538284 - RNA, 19 nt, Homo sapiens
  misc_RNA (1)...(19): siRNA sense strand
gaacuagaacagaggacaa

SEQ ID NO: 2538285 - RNA, 19 nt, Homo sapiens
  misc_RNA (1)...(19): siRNA sense strand
cacaaauauugguggaauu

SEQ ID NO: 2538286 - RNA, 19 nt, Homo sapiens
  misc_RNA (1)...(19): siRNA sense strand
gaguggaagcuaugacaaa

SEQ ID NO: 2538287 - RNA, 19 nt, Homo sapiens
  misc_RNA (1)...(19): siRNA sense strand
gguggaagaaauuaggaaa

SEQ ID NO: 2538288 - RNA, 19 nt, Homo sapiens
  misc_RNA (1)...(19): siRNA sense strand
gaauugaagcccaggaaaa

SEQ ID NO: 2538289 - RNA, 19 nt, Homo sapiens
  misc_RNA (1)...(19): siRNA sense strand
caagaaaugugaagaggca

SEQ ID NO: 2538290 - RNA, 19 nt, Homo sapiens
  misc_RNA (1)...(19): siRNA sense strand
gcucaagacguuacagcua

SEQ ID NO: 2538291 - RNA, 19 nt, Homo sapiens
  misc_RNA (1)...(19): siRNA sense strand
gaacagaaauagaacgucu

SEQ ID NO: 2538292 - RNA, 19 nt, Homo sapiens
  misc_RNA (1)...(19): siRNA sense strand
uuaagaacacugagaacaa

SEQ ID NO: 2538293 - RNA, 19 nt, Homo sapiens
  misc_RNA (1)...(19): siRNA sense strand
aagaagaaguggaaagucu

SEQ ID NO: 2538294 - RNA, 19 nt, Homo sapiens
  misc_RNA (1)...(19): siRNA sense strand
agugaaagucaguuacaaa

SEQ ID NO: 2538295 - RNA, 19 nt, Homo sapiens
  misc_RNA (1)...(19): siRNA sense strand
agauagaauuuauggagga

SEQ ID NO: 2538296 - RNA, 19 nt, Homo sapiens
  misc_RNA (1)...(19): siRNA sense strand
aagcaaaggaagaagcaga

SEQ ID NO: 2538297 - RNA, 19 nt, Homo sapiens
  misc_RNA (1)...(19): siRNA sense strand
gaugcaaagcuuagaguca

SEQ ID NO: 2538298 - RNA, 19 nt, Homo sapiens
  misc_RNA (1)...(19): siRNA sense strand
gauuaagaacagaagauga

SEQ ID NO: 2538299 - RNA, 19 nt, Homo sapiens
  misc_RNA (1)...(19): siRNA sense strand
caaagagguaagcaagaaa

SEQ ID NO: 2538300 - RNA, 19 nt, Homo sapiens
  misc_RNA (1)...(19): siRNA sense strand
aagaggaagaacugcgaaa

SEQ ID NO: 2538301 - RNA, 19 nt, Homo sapiens
  misc_RNA (1)...(19): siRNA sense strand
ugaaagaagaaguggaaag

SEQ ID NO: 2538302 - RNA, 19 nt, Homo sapiens
  misc_RNA (1)...(19): siRNA sense strand
gguugagaguggaagcuau

SEQ ID NO: 2538303 - RNA, 19 nt, Homo sapiens
  misc_RNA (1)...(19): siRNA sense strand
guggaagaaauuaggaaaa

SEQ ID NO: 2538304 - RNA, 19 nt, Homo sapiens
  misc_RNA (1)...(19): siRNA sense strand
uaacacaagcaaaggaaga

SEQ ID NO: 2538305 - RNA, 19 nt, Homo sapiens
  misc_RNA (1)...(19): siRNA sense strand
ugggaaaacaccugaauua

SEQ ID NO: 2538306 - RNA, 19 nt, Homo sapiens
  misc_RNA (1)...(19): siRNA sense strand
gguuguugaaagaggaaga

SEQ ID NO: 2538307 - RNA, 19 nt, Homo sapiens
  misc_RNA (1)...(19): siRNA sense strand
agaacagaggacaaagaaa

SEQ ID NO: 2538308 - RNA, 19 nt, Homo sapiens
  misc_RNA (1)...(19): siRNA sense strand
cuagaagaucugaagagaa

SEQ ID NO: 2538309 - RNA, 19 nt, Homo sapiens
  misc_RNA (1)...(19): siRNA sense strand
guagacaaacagaaguuaa

SEQ ID NO: 2538310 - RNA, 19 nt, Homo sapiens
  misc_RNA (1)...(19): siRNA sense strand
aaaagagacacuugagaaa

SEQ ID NO: 2538311 - RNA, 19 nt, Homo sapiens
  misc_RNA (1)...(19): siRNA sense strand
cuuuggaaaucaaccgaaa

SEQ ID NO: 2538312 - RNA, 19 nt, Homo sapiens
  misc_RNA (1)...(19): siRNA sense strand
aguccaaacuauugucauu

SEQ ID NO: 2538313 - RNA, 19 nt, Homo sapiens
  misc_RNA (1)...(19): siRNA sense strand
cagcaggaacauaucauaa

SEQ ID NO: 2538314 - RNA, 19 nt, Homo sapiens
  misc_RNA (1)...(19): siRNA sense strand
ggauggaacaggccaacaa

SEQ ID NO: 2538315 - RNA, 19 nt, Homo sapiens
  misc_RNA (1)...(19): siRNA sense strand
cuguagugaaagucaguua

SEQ ID NO: 2538316 - RNA, 19 nt, Homo sapiens
  misc_RNA (1)...(19): siRNA sense strand
ucuacaaacacuuggaaca

SEQ ID NO: 2538317 - RNA, 19 nt, Homo sapiens
  misc_RNA (1)...(19): siRNA sense strand
guaagaggugagaaggaau

SEQ ID NO: 2538318 - RNA, 19 nt, Homo sapiens
  misc_RNA (1)...(19): siRNA sense strand
aagcagaucagauacgaaa

SEQ ID NO: 2538319 - RNA, 19 nt, Homo sapiens
  misc_RNA (1)...(19): siRNA sense strand
gaggauuuguuggaagaaa

SEQ ID NO: 2538320 - RNA, 19 nt, Homo sapiens
  misc_RNA (1)...(19): siRNA sense strand
guuaaagcuuccagagauc

SEQ ID NO: 2538321 - RNA, 19 nt, Homo sapiens
  misc_RNA (1)...(19): siRNA sense strand
ggaggguauggaugaguua

SEQ ID NO: 2538322 - RNA, 19 nt, Homo sapiens
  misc_RNA (1)...(19): siRNA sense strand
acacaaauauugguggaau

SEQ ID NO: 2538323 - RNA, 19 nt, Homo sapiens
  misc_RNA (1)...(19): siRNA sense strand
aguuaaagcuuccagagau

SEQ ID NO: 2538324 - RNA, 19 nt, Homo sapiens
  misc_RNA (1)...(19): siRNA sense strand
caccugaauuaaaggaaga

SEQ ID NO: 2538325 - RNA, 19 nt, Homo sapiens
  misc_RNA (1)...(19): siRNA sense strand
ccagaaucagcuaaugaaa

SEQ ID NO: 2538326 - RNA, 19 nt, Homo sapiens
  misc_RNA (1)...(19): siRNA sense strand
aaauagaaucugagcucuu

SEQ ID NO: 2538327 - RNA, 19 nt, Homo sapiens
  misc_RNA (1)...(19): siRNA sense strand
ggcaaugaaagcagcaaau

SEQ ID NO: 2538328 - RNA, 19 nt, Homo sapiens
  misc_RNA (1)...(19): siRNA sense strand
gaaacuaaggaaggcgaaa

SEQ ID NO: 2538329 - RNA, 19 nt, Homo sapiens
  misc_RNA (1)...(19): siRNA sense strand
cacaaggaaaccaaagaua

SEQ ID NO: 2538330 - RNA, 19 nt, Homo sapiens
  misc_RNA (1)...(19): siRNA sense strand
uuacaaagccagugugaac

SEQ ID NO: 2538331 - RNA, 19 nt, Homo sapiens
  misc_RNA (1)...(19): siRNA sense strand
uagacucaucagagaaaua

SEQ ID NO: 2538332 - RNA, 19 nt, Homo sapiens
  misc_RNA (1)...(19): siRNA sense strand
aggaagaagcagaucagau

SEQ ID NO: 2538333 - RNA, 19 nt, Homo sapiens
  misc_RNA (1)...(19): siRNA sense strand
acgauuaagaacagaagau

SEQ ID NO: 2538334 - RNA, 19 nt, Homo sapiens
  misc_RNA (1)...(19): siRNA sense strand
ucaagacguuacagcuaaa

SEQ ID NO: 2538335 - RNA, 19 nt, Homo sapiens
  misc_RNA (1)...(19): siRNA sense strand
gugccauaacuguggauua

SEQ ID NO: 2538336 - RNA, 19 nt, Homo sapiens
  misc_RNA (1)...(19): siRNA sense strand
cagugaacccaguggaauu

SEQ ID NO: 2538337 - RNA, 19 nt, Homo sapiens
  misc_RNA (1)...(19): siRNA sense strand
ucaugaacgcugagggaga

SEQ ID NO: 2538338 - RNA, 19 nt, Homo sapiens
  misc_RNA (1)...(19): siRNA sense strand
guuuggaaucacuggguua

SEQ ID NO: 2538339 - RNA, 19 nt, Homo sapiens
  misc_RNA (1)...(19): siRNA sense strand
uggcaaugcuacuggcaga

SEQ ID NO: 2538340 - RNA, 19 nt, Homo sapiens
  misc_RNA (1)...(19): siRNA sense strand
aaacgaagauccuaggaga

SEQ ID NO: 2538341 - RNA, 19 nt, Homo sapiens
  misc_RNA (1)...(19): siRNA sense strand
gaacaagacuuauggacug

SEQ ID NO: 2538342 - RNA, 19 nt, Homo sapiens
  misc_RNA (1)...(19): siRNA sense strand
ggacauuacucucgagcuc

SEQ ID NO: 2538343 - RNA, 19 nt, Homo sapiens
  misc_RNA (1)...(19): siRNA sense strand
gaugcggacaggaaggaaa

SEQ ID NO: 2538344 - RNA, 19 nt, Homo sapiens
  misc_RNA (1)...(19): siRNA sense strand
uggacuacaccgugggaga

SEQ ID NO: 2538345 - RNA, 19 nt, Homo sapiens
  misc_RNA (1)...(19): siRNA sense strand
auaaagcggaauugggaau

SEQ ID NO: 2538346 - RNA, 19 nt, Homo sapiens
  misc_RNA (1)...(19): siRNA sense strand
cuucaaauuuacagcacca

SEQ ID NO: 2538347 - RNA, 19 nt, Homo sapiens
  misc_RNA (1)...(19): siRNA sense strand
ggagcagagaucaggccaa

SEQ ID NO: 2538348 - RNA, 19 nt, Homo sapiens
  misc_RNA (1)...(19): siRNA sense strand
gaauauauauguagccaug

SEQ ID NO: 2538349 - RNA, 19 nt, Homo sapiens
  misc_RNA (1)...(19): siRNA sense strand
cgucaugaacgcugaggga

SEQ ID NO: 2538350 - RNA, 19 nt, Homo sapiens
  misc_RNA (1)...(19): siRNA sense strand
gauaaagcggaauugggaa

SEQ ID NO: 2538351 - RNA, 19 nt, Homo sapiens
  misc_RNA (1)...(19): siRNA sense strand
gaauauaagaugcggacag

SEQ ID NO: 2538352 - RNA, 19 nt, Homo sapiens
  misc_RNA (1)...(19): siRNA sense strand
uagaaaagacagacaguga

SEQ ID NO: 2538353 - RNA, 19 nt, Homo sapiens
  misc_RNA (1)...(19): siRNA sense strand
cugcaaucugcguagcaaa

SEQ ID NO: 2538354 - RNA, 19 nt, Homo sapiens
  misc_RNA (1)...(19): siRNA sense strand
acagagacaauguuggauu

SEQ ID NO: 2538355 - RNA, 19 nt, Homo sapiens
  misc_RNA (1)...(19): siRNA sense strand
cggaauugggaauauauau

SEQ ID NO: 2538356 - RNA, 19 nt, Homo sapiens
  misc_RNA (1)...(19): siRNA sense strand
cgaagauccuaggagacaa

SEQ ID NO: 2538357 - RNA, 19 nt, Homo sapiens
  misc_RNA (1)...(19): siRNA sense strand
ggaagauguugcugggcac

SEQ ID NO: 2538358 - RNA, 19 nt, Homo sapiens
  misc_RNA (1)...(19): siRNA sense strand
ugacacaaacacagcugaa

SEQ ID NO: 2538359 - RNA, 19 nt, Homo sapiens
  misc_RNA (1)...(19): siRNA sense strand
caaaaguagaaaagacaga

SEQ ID NO: 2538360 - RNA, 19 nt, Homo sapiens
  misc_RNA (1)...(19): siRNA sense strand
gguccuagugacagcugaa

SEQ ID NO: 2538361 - RNA, 19 nt, Homo sapiens
  misc_RNA (1)...(19): siRNA sense strand
ggaauauauauguagccau

SEQ ID NO: 2538362 - RNA, 19 nt, Homo sapiens
  misc_RNA (1)...(19): siRNA sense strand
agaacaagacuuauggacu

SEQ ID NO: 2538363 - RNA, 19 nt, Homo sapiens
  misc_RNA (1)...(19): siRNA sense strand
cagugauguccuauaauau

SEQ ID NO: 2538364 - RNA, 19 nt, Homo sapiens
  misc_RNA (1)...(19): siRNA sense strand
caguguugcccaccagaaa

SEQ ID NO: 2538365 - RNA, 19 nt, Homo sapiens
  misc_RNA (1)...(19): siRNA sense strand
ggugugauaaagcggaauu

SEQ ID NO: 2538366 - RNA, 19 nt, Homo sapiens
  misc_RNA (1)...(19): siRNA sense strand
ucacuaaauuggagaccac

SEQ ID NO: 2538367 - RNA, 19 nt, Homo sapiens
  misc_RNA (1)...(19): siRNA sense strand
aaggaaaccugauggcugu

SEQ ID NO: 2538368 - RNA, 19 nt, Homo sapiens
  misc_RNA (1)...(19): siRNA sense strand
aggaagauguugcugggca

SEQ ID NO: 2538369 - RNA, 19 nt, Homo sapiens
  misc_RNA (1)...(19): siRNA sense strand
aauccaaggcgaggugaua

SEQ ID NO: 2538370 - RNA, 19 nt, Homo sapiens
  misc_RNA (1)...(19): siRNA sense strand
aagaaguucaagaagauca

SEQ ID NO: 2538371 - RNA, 19 nt, Homo sapiens
  misc_RNA (1)...(19): siRNA sense strand
agaagaucauuauggagca

SEQ ID NO: 2538372 - RNA, 19 nt, Homo sapiens
  misc_RNA (1)...(19): siRNA sense strand
gcugugugaggaagggcua

SEQ ID NO: 2538373 - RNA, 19 nt, Homo sapiens
  misc_RNA (1)...(19): siRNA sense strand
ggcuacagaaggagggaaa

SEQ ID NO: 2538374 - RNA, 19 nt, Homo sapiens
  misc_RNA (1)...(19): siRNA sense strand
aggacaagauggaguaaaa

SEQ ID NO: 2538375 - RNA, 19 nt, Homo sapiens
  misc_RNA (1)...(19): siRNA sense strand
ggugcaaauuguaggccaa

SEQ ID NO: 2538376 - RNA, 19 nt, Homo sapiens
  misc_RNA (1)...(19): siRNA sense strand
uauugaaggaugugguaaa

SEQ ID NO: 2538377 - RNA, 19 nt, Homo sapiens
  misc_RNA (1)...(19): siRNA sense strand
aggaagaggcaguaaugaa

SEQ ID NO: 2538378 - RNA, 19 nt, Homo sapiens
  misc_RNA (1)...(19): siRNA sense strand
agaagaaggaggaggagga

SEQ ID NO: 2538379 - RNA, 19 nt, Homo sapiens
  misc_RNA (1)...(19): siRNA sense strand
aguaauaacgggagugcau

SEQ ID NO: 2538380 - RNA, 19 nt, Homo sapiens
  misc_RNA (1)...(19): siRNA sense strand
caguaaugaaccaggaaaa

SEQ ID NO: 2538381 - RNA, 19 nt, Homo sapiens
  misc_RNA (1)...(19): siRNA sense strand
aguucagaaugcuggguua

SEQ ID NO: 2538382 - RNA, 19 nt, Homo sapiens
  misc_RNA (1)...(19): siRNA sense strand
guacaaaauccaaguggua

SEQ ID NO: 2538383 - RNA, 19 nt, Homo sapiens
  misc_RNA (1)...(19): siRNA sense strand
aaaucaagcaacuggacaa

SEQ ID NO: 2538384 - RNA, 19 nt, Homo sapiens
  misc_RNA (1)...(19): siRNA sense strand
cuccagagacauagaagaa

SEQ ID NO: 2538385 - RNA, 19 nt, Homo sapiens
  misc_RNA (1)...(19): siRNA sense strand
uagcuuugccagugauaaa

SEQ ID NO: 2538386 - RNA, 19 nt, Homo sapiens
  misc_RNA (1)...(19): siRNA sense strand
cuggcauacuggagaaaga

SEQ ID NO: 2538387 - RNA, 19 nt, Homo sapiens
  misc_RNA (1)...(19): siRNA sense strand
gagccagagaauaacaaua

SEQ ID NO: 2538388 - RNA, 19 nt, Homo sapiens
  misc_RNA (1)...(19): siRNA sense strand
uuuaacaccuucagggcaa

SEQ ID NO: 2538389 - RNA, 19 nt, Homo sapiens
  misc_RNA (1)...(19): siRNA sense strand
agaaggaggaggaggagga

SEQ ID NO: 2538390 - RNA, 19 nt, Homo sapiens
  misc_RNA (1)...(19): siRNA sense strand
caacagaucauucaggcua

SEQ ID NO: 2538391 - RNA, 19 nt, Homo sapiens
  misc_RNA (1)...(19): siRNA sense strand
uggucaauuucaagucaua

SEQ ID NO: 2538392 - RNA, 19 nt, Homo sapiens
  misc_RNA (1)...(19): siRNA sense strand
ugggaauauucuugcucaa

SEQ ID NO: 2538393 - RNA, 19 nt, Homo sapiens
  misc_RNA (1)...(19): siRNA sense strand
aggagaaggaagaggcagu

SEQ ID NO: 2538394 - RNA, 19 nt, Homo sapiens
  misc_RNA (1)...(19): siRNA sense strand
ccaaauuagaccugguguu

SEQ ID NO: 2538395 - RNA, 19 nt, Homo sapiens
  misc_RNA (1)...(19): siRNA sense strand
ccauacaggugaaaagaga

SEQ ID NO: 2538396 - RNA, 19 nt, Homo sapiens
  misc_RNA (1)...(19): siRNA sense strand
uguucaacuucaagcagua

SEQ ID NO: 2538397 - RNA, 19 nt, Homo sapiens
  misc_RNA (1)...(19): siRNA sense strand
uagggaaggagaaggaaga

SEQ ID NO: 2538398 - RNA, 19 nt, Homo sapiens
  misc_RNA (1)...(19): siRNA sense strand
guaccaaguaauuccacaa

SEQ ID NO: 2538399 - RNA, 19 nt, Homo sapiens
  misc_RNA (1)...(19): siRNA sense strand
cagcaggaucaaucaaauu

SEQ ID NO: 2538400 - RNA, 19 nt, Homo sapiens
  misc_RNA (1)...(19): siRNA sense strand
cagcaguaauaacgggagu

SEQ ID NO: 2538401 - RNA, 19 nt, Homo sapiens
  misc_RNA (1)...(19): siRNA sense strand
gcagcaaggacaagaugga

SEQ ID NO: 2538402 - RNA, 19 nt, Homo sapiens
  misc_RNA (1)...(19): siRNA sense strand
cagcaaggccagcagacuu

SEQ ID NO: 2538403 - RNA, 19 nt, Homo sapiens
  misc_RNA (1)...(19): siRNA sense strand
uggcaaaacaucucauuua

SEQ ID NO: 2538404 - RNA, 19 nt, Homo sapiens
  misc_RNA (1)...(19): siRNA sense strand
gcagguaauaaucaagcua

SEQ ID NO: 2538405 - RNA, 19 nt, Homo sapiens
  misc_RNA (1)...(19): siRNA sense strand
uaacauuggaggagugacu

SEQ ID NO: 2538406 - RNA, 19 nt, Homo sapiens
  misc_RNA (1)...(19): siRNA sense strand
aauagggacuccuggugaa

SEQ ID NO: 2538407 - RNA, 19 nt, Homo sapiens
  misc_RNA (1)...(19): siRNA sense strand
aaaucaaccacaacagcua

SEQ ID NO: 2538408 - RNA, 19 nt, Homo sapiens
  misc_RNA (1)...(19): siRNA sense strand
aggacagcuucugggaaua

SEQ ID NO: 2538409 - RNA, 19 nt, Homo sapiens
  misc_RNA (1)...(19): siRNA sense strand
agggcaaaucaguuggcaa

SEQ ID NO: 2538410 - RNA, 19 nt, Homo sapiens
  misc_RNA (1)...(19): siRNA sense strand
agaaggaagaggcaguaau

SEQ ID NO: 2538411 - RNA, 19 nt, Homo sapiens
  misc_RNA (1)...(19): siRNA sense strand
guguucaagugcagggagu

SEQ ID NO: 2538412 - RNA, 19 nt, Homo sapiens
  misc_RNA (1)...(19): siRNA sense strand
uggcaagaggcuucgaaga

SEQ ID NO: 2538413 - RNA, 19 nt, Homo sapiens
  misc_RNA (1)...(19): siRNA sense strand
gagaaggaagaggcaguaa

SEQ ID NO: 2538414 - RNA, 19 nt, Homo sapiens
  misc_RNA (1)...(19): siRNA sense strand
acagaauguucaacuucaa

SEQ ID NO: 2538415 - RNA, 19 nt, Homo sapiens
  misc_RNA (1)...(19): siRNA sense strand
cuucugaucaagagguaca

SEQ ID NO: 2538416 - RNA, 19 nt, Homo sapiens
  misc_RNA (1)...(19): siRNA sense strand
ggcaaacuguacagguuca

SEQ ID NO: 2538417 - RNA, 19 nt, Homo sapiens
  misc_RNA (1)...(19): siRNA sense strand
aguuggaggaauugcuaau

SEQ ID NO: 2538418 - RNA, 19 nt, Homo sapiens
  misc_RNA (1)...(19): siRNA sense strand
gcuccagagacauagaaga

SEQ ID NO: 2538419 - RNA, 19 nt, Homo sapiens
  misc_RNA (1)...(19): siRNA sense strand
agacaguuccgguccaaau

SEQ ID NO: 2538420 - RNA, 19 nt, Homo sapiens
  misc_RNA (1)...(19): siRNA sense strand
ggugaaaagagauuugaau

SEQ ID NO: 2538421 - RNA, 19 nt, Homo sapiens
  misc_RNA (1)...(19): siRNA sense strand
gggcagacgauucagacca

SEQ ID NO: 2538422 - RNA, 19 nt, Homo sapiens
  misc_RNA (1)...(19): siRNA sense strand
guaaaaguccagcaagcua

SEQ ID NO: 2538423 - RNA, 19 nt, Homo sapiens
  misc_RNA (1)...(19): siRNA sense strand
agacauuacuucaggacaa

SEQ ID NO: 2538424 - RNA, 19 nt, Homo sapiens
  misc_RNA (1)...(19): siRNA sense strand
aggaagagcugaaggcaau

SEQ ID NO: 2538425 - RNA, 19 nt, Homo sapiens
  misc_RNA (1)...(19): siRNA sense strand
aggaaaagguucagaauuu

SEQ ID NO: 2538426 - RNA, 19 nt, Homo sapiens
  misc_RNA (1)...(19): siRNA sense strand
gaacagaaauccugggaac

SEQ ID NO: 2538427 - RNA, 19 nt, Homo sapiens
  misc_RNA (1)...(19): siRNA sense strand
acacacagcucuuggaaaa

SEQ ID NO: 2538428 - RNA, 19 nt, Homo sapiens
  misc_RNA (1)...(19): siRNA sense strand
gggaacaagagaaguuuaa

SEQ ID NO: 2538429 - RNA, 19 nt, Homo sapiens
  misc_RNA (1)...(19): siRNA sense strand
caucagagugcgagcuuaa

SEQ ID NO: 2538430 - RNA, 19 nt, Homo sapiens
  misc_RNA (1)...(19): siRNA sense strand
gcuuaaagagagaguguga

SEQ ID NO: 2538431 - RNA, 19 nt, Homo sapiens
  misc_RNA (1)...(19): siRNA sense strand
caggagaacaugaagcaaa

SEQ ID NO: 2538432 - RNA, 19 nt, Homo sapiens
  misc_RNA (1)...(19): siRNA sense strand
gaggaagagcugaaggcaa

SEQ ID NO: 2538433 - RNA, 19 nt, Homo sapiens
  misc_RNA (1)...(19): siRNA sense strand
gagagaugcucgaggaagu

SEQ ID NO: 2538434 - RNA, 19 nt, Homo sapiens
  misc_RNA (1)...(19): siRNA sense strand
gaucagguggucagagaaa

SEQ ID NO: 2538435 - RNA, 19 nt, Homo sapiens
  misc_RNA (1)...(19): siRNA sense strand
ucuccagacuucagaguaa

SEQ ID NO: 2538436 - RNA, 19 nt, Homo sapiens
  misc_RNA (1)...(19): siRNA sense strand
aggaggagguggaaggaga

SEQ ID NO: 2538437 - RNA, 19 nt, Homo sapiens
  misc_RNA (1)...(19): siRNA sense strand
caggaagagcugagaauga

SEQ ID NO: 2538438 - RNA, 19 nt, Homo sapiens
  misc_RNA (1)...(19): siRNA sense strand
caggaagaaauguggcaaa

SEQ ID NO: 2538439 - RNA, 19 nt, Homo sapiens
  misc_RNA (1)...(19): siRNA sense strand
ggccaagaguacagaauca

SEQ ID NO: 2538440 - RNA, 19 nt, Homo sapiens
  misc_RNA (1)...(19): siRNA sense strand
aaauggaaacagaguguaa

SEQ ID NO: 2538441 - RNA, 19 nt, Homo sapiens
  misc_RNA (1)...(19): siRNA sense strand
gcauggucgucgagagaca

SEQ ID NO: 2538442 - RNA, 19 nt, Homo sapiens
  misc_RNA (1)...(19): siRNA sense strand
guuuagagaaccuggaaau

SEQ ID NO: 2538443 - RNA, 19 nt, Homo sapiens
  misc_RNA (1)...(19): siRNA sense strand
agacuggauagaagagaaa

SEQ ID NO: 2538444 - RNA, 19 nt, Homo sapiens
  misc_RNA (1)...(19): siRNA sense strand
aaaucgaaccugauggaaa

SEQ ID NO: 2538445 - RNA, 19 nt, Homo sapiens
  misc_RNA (1)...(19): siRNA sense strand
aaguuauacuggaggaaaa

SEQ ID NO: 2538446 - RNA, 19 nt, Homo sapiens
  misc_RNA (1)...(19): siRNA sense strand
acuaggaaguugaaggaga

SEQ ID NO: 2538447 - RNA, 19 nt, Homo sapiens
  misc_RNA (1)...(19): siRNA sense strand
cgaugaagcaggaacagaa

SEQ ID NO: 2538448 - RNA, 19 nt, Homo sapiens
  misc_RNA (1)...(19): siRNA sense strand
gagaaagaggaguuaagaa

SEQ ID NO: 2538449 - RNA, 19 nt, Homo sapiens
  misc_RNA (1)...(19): siRNA sense strand
gcugaagagcagucacaaa

SEQ ID NO: 2538450 - RNA, 19 nt, Homo sapiens
  misc_RNA (1)...(19): siRNA sense strand
caagaaaggccaagaguac

SEQ ID NO: 2538451 - RNA, 19 nt, Homo sapiens
  misc_RNA (1)...(19): siRNA sense strand
aagaugaacuggagaaaau

SEQ ID NO: 2538452 - RNA, 19 nt, Homo sapiens
  misc_RNA (1)...(19): siRNA sense strand
ggaaacuggaugaagagua

SEQ ID NO: 2538453 - RNA, 19 nt, Homo sapiens
  misc_RNA (1)...(19): siRNA sense strand
gaacaacaucacagggaca

SEQ ID NO: 2538454 - RNA, 19 nt, Homo sapiens
  misc_RNA (1)...(19): siRNA sense strand
aagugaagcuugaggagga

SEQ ID NO: 2538455 - RNA, 19 nt, Homo sapiens
  misc_RNA (1)...(19): siRNA sense strand
gaggaauguaagcaagaaa

SEQ ID NO: 2538456 - RNA, 19 nt, Homo sapiens
  misc_RNA (1)...(19): siRNA sense strand
caacaauuggauuuggaaa

SEQ ID NO: 2538457 - RNA, 19 nt, Homo sapiens
  misc_RNA (1)...(19): siRNA sense strand
ggaggaagucacugaaaca

SEQ ID NO: 2538458 - RNA, 19 nt, Homo sapiens
  misc_RNA (1)...(19): siRNA sense strand
gaugaauucccuugaacaa

SEQ ID NO: 2538459 - RNA, 19 nt, Homo sapiens
  misc_RNA (1)...(19): siRNA sense strand
cugcaaaugucccggauga

SEQ ID NO: 2538460 - RNA, 19 nt, Homo sapiens
  misc_RNA (1)...(19): siRNA sense strand
aggaugagcugaagaaaau

SEQ ID NO: 2538461 - RNA, 19 nt, Homo sapiens
  misc_RNA (1)...(19): siRNA sense strand
ucaaagaugaacuggagaa

SEQ ID NO: 2538462 - RNA, 19 nt, Homo sapiens
  misc_RNA (1)...(19): siRNA sense strand
augcuaugccagaaggaaa

SEQ ID NO: 2538463 - RNA, 19 nt, Homo sapiens
  misc_RNA (1)...(19): siRNA sense strand
gaauaugagcauugaggca

SEQ ID NO: 2538464 - RNA, 19 nt, Homo sapiens
  misc_RNA (1)...(19): siRNA sense strand
ggaaguugaaggagagagu

SEQ ID NO: 2538465 - RNA, 19 nt, Homo sapiens
  misc_RNA (1)...(19): siRNA sense strand
caugaaucccacagagcaa

SEQ ID NO: 2538466 - RNA, 19 nt, Homo sapiens
  misc_RNA (1)...(19): siRNA sense strand
augcaucuguggagagaau

SEQ ID NO: 2538467 - RNA, 19 nt, Homo sapiens
  misc_RNA (1)...(19): siRNA sense strand
gagugugugcccaggguua

SEQ ID NO: 2538468 - RNA, 19 nt, Homo sapiens
  misc_RNA (1)...(19): siRNA sense strand
aaacaaaguuacaggagcu

SEQ ID NO: 2538469 - RNA, 19 nt, Homo sapiens
  misc_RNA (1)...(19): siRNA sense strand
ggaagagggcauugagaac

SEQ ID NO: 2538470 - RNA, 19 nt, Homo sapiens
  misc_RNA (1)...(19): siRNA sense strand
gaaaaugagcuucuagaaa

SEQ ID NO: 2538471 - RNA, 19 nt, Homo sapiens
  misc_RNA (1)...(19): siRNA sense strand
uggaaauacugcggaacaa

SEQ ID NO: 2538472 - RNA, 19 nt, Homo sapiens
  misc_RNA (1)...(19): siRNA sense strand
cgaaccugauggaaauaua

SEQ ID NO: 2538473 - RNA, 19 nt, Homo sapiens
  misc_RNA (1)...(19): siRNA sense strand
guuuagaacuugaacagga

SEQ ID NO: 2538474 - RNA, 19 nt, Homo sapiens
  misc_RNA (1)...(19): siRNA sense strand
caaagaugaacuggagaaa

SEQ ID NO: 2538475 - RNA, 19 nt, Homo sapiens
  misc_RNA (1)...(19): siRNA sense strand
cgacgaugaagcaggaaca

SEQ ID NO: 2538476 - RNA, 19 nt, Homo sapiens
  misc_RNA (1)...(19): siRNA sense strand
gagcugagaaugauggaga

SEQ ID NO: 2538477 - RNA, 19 nt, Homo sapiens
  misc_RNA (1)...(19): siRNA sense strand
acaugaaauugccugguua

SEQ ID NO: 2538478 - RNA, 19 nt, Homo sapiens
  misc_RNA (1)...(19): siRNA sense strand
uagaagacaccgugcagaa

SEQ ID NO: 2538479 - RNA, 19 nt, Homo sapiens
  misc_RNA (1)...(19): siRNA sense strand
gggaauuugagaaggacga

SEQ ID NO: 2538480 - RNA, 19 nt, Homo sapiens
  misc_RNA (1)...(19): siRNA sense strand
cagcauggucgucgagaga

SEQ ID NO: 2538481 - RNA, 19 nt, Homo sapiens
  misc_RNA (1)...(19): siRNA sense strand
ggaaauacugcggaacaaa

SEQ ID NO: 2538482 - RNA, 19 nt, Homo sapiens
  misc_RNA (1)...(19): siRNA sense strand
acagaguguaauagaagaa

SEQ ID NO: 2538483 - RNA, 19 nt, Homo sapiens
  misc_RNA (1)...(19): siRNA sense strand
agacauuacuucaggacaa

SEQ ID NO: 2538484 - RNA, 19 nt, Homo sapiens
  misc_RNA (1)...(19): siRNA sense strand
aggaagagcugaaggcaau

SEQ ID NO: 2538485 - RNA, 19 nt, Homo sapiens
  misc_RNA (1)...(19): siRNA sense strand
aggaaaagguucagaauuu

SEQ ID NO: 2538486 - RNA, 19 nt, Homo sapiens
  misc_RNA (1)...(19): siRNA sense strand
gaacagaaauccugggaac

SEQ ID NO: 2538487 - RNA, 19 nt, Homo sapiens
  misc_RNA (1)...(19): siRNA sense strand
acacacagcucuuggaaaa

SEQ ID NO: 2538488 - RNA, 19 nt, Homo sapiens
  misc_RNA (1)...(19): siRNA sense strand
gggaacaagagaaguuuaa

SEQ ID NO: 2538489 - RNA, 19 nt, Homo sapiens
  misc_RNA (1)...(19): siRNA sense strand
caucagagugcgagcuuaa

SEQ ID NO: 2538490 - RNA, 19 nt, Homo sapiens
  misc_RNA (1)...(19): siRNA sense strand
gcuuaaagagagaguguga

SEQ ID NO: 2538491 - RNA, 19 nt, Homo sapiens
  misc_RNA (1)...(19): siRNA sense strand
caggagaacaugaagcaaa

SEQ ID NO: 2538492 - RNA, 19 nt, Homo sapiens
  misc_RNA (1)...(19): siRNA sense strand
gaggaagagcugaaggcaa

SEQ ID NO: 2538493 - RNA, 19 nt, Homo sapiens
  misc_RNA (1)...(19): siRNA sense strand
gagagaugcucgaggaagu

SEQ ID NO: 2538494 - RNA, 19 nt, Homo sapiens
  misc_RNA (1)...(19): siRNA sense strand
gaucagguggucagagaaa

SEQ ID NO: 2538495 - RNA, 19 nt, Homo sapiens
  misc_RNA (1)...(19): siRNA sense strand
ucuccagacuucagaguaa

SEQ ID NO: 2538496 - RNA, 19 nt, Homo sapiens
  misc_RNA (1)...(19): siRNA sense strand
aggaggagguggaaggaga

SEQ ID NO: 2538497 - RNA, 19 nt, Homo sapiens
  misc_RNA (1)...(19): siRNA sense strand
caggaagagcugagaauga

SEQ ID NO: 2538498 - RNA, 19 nt, Homo sapiens
  misc_RNA (1)...(19): siRNA sense strand
caggaagaaauguggcaaa

SEQ ID NO: 2538499 - RNA, 19 nt, Homo sapiens
  misc_RNA (1)...(19): siRNA sense strand
ggccaagaguacagaauca

SEQ ID NO: 2538500 - RNA, 19 nt, Homo sapiens
  misc_RNA (1)...(19): siRNA sense strand
aaauggaaacagaguguaa

SEQ ID NO: 2538501 - RNA, 19 nt, Homo sapiens
  misc_RNA (1)...(19): siRNA sense strand
gcauggucgucgagagaca

SEQ ID NO: 2538502 - RNA, 19 nt, Homo sapiens
  misc_RNA (1)...(19): siRNA sense strand
guuuagagaaccuggaaau

SEQ ID NO: 2538503 - RNA, 19 nt, Homo sapiens
  misc_RNA (1)...(19): siRNA sense strand
agacuggauagaagagaaa

SEQ ID NO: 2538504 - RNA, 19 nt, Homo sapiens
  misc_RNA (1)...(19): siRNA sense strand
aaaucgaaccugauggaaa

SEQ ID NO: 2538505 - RNA, 19 nt, Homo sapiens
  misc_RNA (1)...(19): siRNA sense strand
aaguuauacuggaggaaaa

SEQ ID NO: 2538506 - RNA, 19 nt, Homo sapiens
  misc_RNA (1)...(19): siRNA sense strand
acuaggaaguugaaggaga

SEQ ID NO: 2538507 - RNA, 19 nt, Homo sapiens
  misc_RNA (1)...(19): siRNA sense strand
cgaugaagcaggaacagaa

SEQ ID NO: 2538508 - RNA, 19 nt, Homo sapiens
  misc_RNA (1)...(19): siRNA sense strand
gagaaagaggaguuaagaa

SEQ ID NO: 2538509 - RNA, 19 nt, Homo sapiens
  misc_RNA (1)...(19): siRNA sense strand
gcugaagagcagucacaaa

SEQ ID NO: 2538510 - RNA, 19 nt, Homo sapiens
  misc_RNA (1)...(19): siRNA sense strand
caagaaaggccaagaguac

SEQ ID NO: 2538511 - RNA, 19 nt, Homo sapiens
  misc_RNA (1)...(19): siRNA sense strand
aagaugaacuggagaaaau

SEQ ID NO: 2538512 - RNA, 19 nt, Homo sapiens
  misc_RNA (1)...(19): siRNA sense strand
ggaaacuggaugaagagua

SEQ ID NO: 2538513 - RNA, 19 nt, Homo sapiens
  misc_RNA (1)...(19): siRNA sense strand
gaacaacaucacagggaca

SEQ ID NO: 2538514 - RNA, 19 nt, Homo sapiens
  misc_RNA (1)...(19): siRNA sense strand
aagugaagcuugaggagga

SEQ ID NO: 2538515 - RNA, 19 nt, Homo sapiens
  misc_RNA (1)...(19): siRNA sense strand
gaggaauguaagcaagaaa

SEQ ID NO: 2538516 - RNA, 19 nt, Homo sapiens
  misc_RNA (1)...(19): siRNA sense strand
caacaauuggauuuggaaa

SEQ ID NO: 2538517 - RNA, 19 nt, Homo sapiens
  misc_RNA (1)...(19): siRNA sense strand
ggaggaagucacugaaaca

SEQ ID NO: 2538518 - RNA, 19 nt, Homo sapiens
  misc_RNA (1)...(19): siRNA sense strand
gaugaauucccuugaacaa

SEQ ID NO: 2538519 - RNA, 19 nt, Homo sapiens
  misc_RNA (1)...(19): siRNA sense strand
cugcaaaugucccggauga

SEQ ID NO: 2538520 - RNA, 19 nt, Homo sapiens
  misc_RNA (1)...(19): siRNA sense strand
aggaugagcugaagaaaau

SEQ ID NO: 2538521 - RNA, 19 nt, Homo sapiens
  misc_RNA (1)...(19): siRNA sense strand
ucaaagaugaacuggagaa

SEQ ID NO: 2538522 - RNA, 19 nt, Homo sapiens
  misc_RNA (1)...(19): siRNA sense strand
augcuaugccagaaggaaa

SEQ ID NO: 2538523 - RNA, 19 nt, Homo sapiens
  misc_RNA (1)...(19): siRNA sense strand
gaauaugagcauugaggca

SEQ ID NO: 2538524 - RNA, 19 nt, Homo sapiens
  misc_RNA (1)...(19): siRNA sense strand
ggaaguugaaggagagagu

SEQ ID NO: 2538525 - RNA, 19 nt, Homo sapiens
  misc_RNA (1)...(19): siRNA sense strand
caugaaucccacagagcaa

SEQ ID NO: 2538526 - RNA, 19 nt, Homo sapiens
  misc_RNA (1)...(19): siRNA sense strand
augcaucuguggagagaau

SEQ ID NO: 2538527 - RNA, 19 nt, Homo sapiens
  misc_RNA (1)...(19): siRNA sense strand
gagugugugcccaggguua

SEQ ID NO: 2538528 - RNA, 19 nt, Homo sapiens
  misc_RNA (1)...(19): siRNA sense strand
aaacaaaguuacaggagcu

SEQ ID NO: 2538529 - RNA, 19 nt, Homo sapiens
  misc_RNA (1)...(19): siRNA sense strand
ggaagagggcauugagaac

SEQ ID NO: 2538530 - RNA, 19 nt, Homo sapiens
  misc_RNA (1)...(19): siRNA sense strand
gaaaaugagcuucuagaaa

SEQ ID NO: 2538531 - RNA, 19 nt, Homo sapiens
  misc_RNA (1)...(19): siRNA sense strand
uggaaauacugcggaacaa

SEQ ID NO: 2538532 - RNA, 19 nt, Homo sapiens
  misc_RNA (1)...(19): siRNA sense strand
cgaaccugauggaaauaua

SEQ ID NO: 2538533 - RNA, 19 nt, Homo sapiens
  misc_RNA (1)...(19): siRNA sense strand
guuuagaacuugaacagga

SEQ ID NO: 2538534 - RNA, 19 nt, Homo sapiens
  misc_RNA (1)...(19): siRNA sense strand
caaagaugaacuggagaaa

SEQ ID NO: 2538535 - RNA, 19 nt, Homo sapiens
  misc_RNA (1)...(19): siRNA sense strand
cgacgaugaagcaggaaca

SEQ ID NO: 2538536 - RNA, 19 nt, Homo sapiens
  misc_RNA (1)...(19): siRNA sense strand
gagcugagaaugauggaga

SEQ ID NO: 2538537 - RNA, 19 nt, Homo sapiens
  misc_RNA (1)...(19): siRNA sense strand
acaugaaauugccugguua

SEQ ID NO: 2538538 - RNA, 19 nt, Homo sapiens
  misc_RNA (1)...(19): siRNA sense strand
uagaagacaccgugcagaa

SEQ ID NO: 2538539 - RNA, 19 nt, Homo sapiens
  misc_RNA (1)...(19): siRNA sense strand
gggaauuugagaaggacga

SEQ ID NO: 2538540 - RNA, 19 nt, Homo sapiens
  misc_RNA (1)...(19): siRNA sense strand
cagcauggucgucgagaga

SEQ ID NO: 2538541 - RNA, 19 nt, Homo sapiens
  misc_RNA (1)...(19): siRNA sense strand
ggaaauacugcggaacaaa

SEQ ID NO: 2538542 - RNA, 19 nt, Homo sapiens
  misc_RNA (1)...(19): siRNA sense strand
acagaguguaauagaagaa

SEQ ID NO: 2538543 - RNA, 19 nt, Homo sapiens
  misc_RNA (1)...(19): siRNA sense strand
agacauuacuucaggacaa

SEQ ID NO: 2538544 - RNA, 19 nt, Homo sapiens
  misc_RNA (1)...(19): siRNA sense strand
aggaagagcugaaggcaau

SEQ ID NO: 2538545 - RNA, 19 nt, Homo sapiens
  misc_RNA (1)...(19): siRNA sense strand
aggaaaagguucagaauuu

SEQ ID NO: 2538546 - RNA, 19 nt, Homo sapiens
  misc_RNA (1)...(19): siRNA sense strand
gaacagaaauccugggaac

SEQ ID NO: 2538547 - RNA, 19 nt, Homo sapiens
  misc_RNA (1)...(19): siRNA sense strand
acacacagcucuuggaaaa

SEQ ID NO: 2538548 - RNA, 19 nt, Homo sapiens
  misc_RNA (1)...(19): siRNA sense strand
gggaacaagagaaguuuaa

SEQ ID NO: 2538549 - RNA, 19 nt, Homo sapiens
  misc_RNA (1)...(19): siRNA sense strand
caucagagugcgagcuuaa

SEQ ID NO: 2538550 - RNA, 19 nt, Homo sapiens
  misc_RNA (1)...(19): siRNA sense strand
gcuuaaagagagaguguga

SEQ ID NO: 2538551 - RNA, 19 nt, Homo sapiens
  misc_RNA (1)...(19): siRNA sense strand
caggagaacaugaagcaaa

SEQ ID NO: 2538552 - RNA, 19 nt, Homo sapiens
  misc_RNA (1)...(19): siRNA sense strand
gaggaagagcugaaggcaa

SEQ ID NO: 2538553 - RNA, 19 nt, Homo sapiens
  misc_RNA (1)...(19): siRNA sense strand
gagagaugcucgaggaagu

SEQ ID NO: 2538554 - RNA, 19 nt, Homo sapiens
  misc_RNA (1)...(19): siRNA sense strand
gaucagguggucagagaaa

SEQ ID NO: 2538555 - RNA, 19 nt, Homo sapiens
  misc_RNA (1)...(19): siRNA sense strand
ucuccagacuucagaguaa

SEQ ID NO: 2538556 - RNA, 19 nt, Homo sapiens
  misc_RNA (1)...(19): siRNA sense strand
aggaggagguggaaggaga

SEQ ID NO: 2538557 - RNA, 19 nt, Homo sapiens
  misc_RNA (1)...(19): siRNA sense strand
caggaagagcugagaauga

SEQ ID NO: 2538558 - RNA, 19 nt, Homo sapiens
  misc_RNA (1)...(19): siRNA sense strand
caggaagaaauguggcaaa

SEQ ID NO: 2538559 - RNA, 19 nt, Homo sapiens
  misc_RNA (1)...(19): siRNA sense strand
ggccaagaguacagaauca

SEQ ID NO: 2538560 - RNA, 19 nt, Homo sapiens
  misc_RNA (1)...(19): siRNA sense strand
aaauggaaacagaguguaa

SEQ ID NO: 2538561 - RNA, 19 nt, Homo sapiens
  misc_RNA (1)...(19): siRNA sense strand
gcauggucgucgagagaca

SEQ ID NO: 2538562 - RNA, 19 nt, Homo sapiens
  misc_RNA (1)...(19): siRNA sense strand
guuuagagaaccuggaaau

SEQ ID NO: 2538563 - RNA, 19 nt, Homo sapiens
  misc_RNA (1)...(19): siRNA sense strand
agacuggauagaagagaaa

SEQ ID NO: 2538564 - RNA, 19 nt, Homo sapiens
  misc_RNA (1)...(19): siRNA sense strand
aaaucgaaccugauggaaa

SEQ ID NO: 2538565 - RNA, 19 nt, Homo sapiens
  misc_RNA (1)...(19): siRNA sense strand
aaguuauacuggaggaaaa

SEQ ID NO: 2538566 - RNA, 19 nt, Homo sapiens
  misc_RNA (1)...(19): siRNA sense strand
acuaggaaguugaaggaga

SEQ ID NO: 2538567 - RNA, 19 nt, Homo sapiens
  misc_RNA (1)...(19): siRNA sense strand
cgaugaagcaggaacagaa

SEQ ID NO: 2538568 - RNA, 19 nt, Homo sapiens
  misc_RNA (1)...(19): siRNA sense strand
gagaaagaggaguuaagaa

SEQ ID NO: 2538569 - RNA, 19 nt, Homo sapiens
  misc_RNA (1)...(19): siRNA sense strand
gcugaagagcagucacaaa

SEQ ID NO: 2538570 - RNA, 19 nt, Homo sapiens
  misc_RNA (1)...(19): siRNA sense strand
caagaaaggccaagaguac

SEQ ID NO: 2538571 - RNA, 19 nt, Homo sapiens
  misc_RNA (1)...(19): siRNA sense strand
aagaugaacuggagaaaau

SEQ ID NO: 2538572 - RNA, 19 nt, Homo sapiens
  misc_RNA (1)...(19): siRNA sense strand
ggaaacuggaugaagagua

SEQ ID NO: 2538573 - RNA, 19 nt, Homo sapiens
  misc_RNA (1)...(19): siRNA sense strand
gaacaacaucacagggaca

SEQ ID NO: 2538574 - RNA, 19 nt, Homo sapiens
  misc_RNA (1)...(19): siRNA sense strand
aagugaagcuugaggagga

SEQ ID NO: 2538575 - RNA, 19 nt, Homo sapiens
  misc_RNA (1)...(19): siRNA sense strand
gaggaauguaagcaagaaa

SEQ ID NO: 2538576 - RNA, 19 nt, Homo sapiens
  misc_RNA (1)...(19): siRNA sense strand
caacaauuggauuuggaaa

SEQ ID NO: 2538577 - RNA, 19 nt, Homo sapiens
  misc_RNA (1)...(19): siRNA sense strand
ggaggaagucacugaaaca

SEQ ID NO: 2538578 - RNA, 19 nt, Homo sapiens
  misc_RNA (1)...(19): siRNA sense strand
gaugaauucccuugaacaa

SEQ ID NO: 2538579 - RNA, 19 nt, Homo sapiens
  misc_RNA (1)...(19): siRNA sense strand
cugcaaaugucccggauga

SEQ ID NO: 2538580 - RNA, 19 nt, Homo sapiens
  misc_RNA (1)...(19): siRNA sense strand
aggaugagcugaagaaaau

SEQ ID NO: 2538581 - RNA, 19 nt, Homo sapiens
  misc_RNA (1)...(19): siRNA sense strand
ucaaagaugaacuggagaa

SEQ ID NO: 2538582 - RNA, 19 nt, Homo sapiens
  misc_RNA (1)...(19): siRNA sense strand
augcuaugccagaaggaaa

SEQ ID NO: 2538583 - RNA, 19 nt, Homo sapiens
  misc_RNA (1)...(19): siRNA sense strand
gaauaugagcauugaggca

SEQ ID NO: 2538584 - RNA, 19 nt, Homo sapiens
  misc_RNA (1)...(19): siRNA sense strand
ggaaguugaaggagagagu

SEQ ID NO: 2538585 - RNA, 19 nt, Homo sapiens
  misc_RNA (1)...(19): siRNA sense strand
caugaaucccacagagcaa

SEQ ID NO: 2538586 - RNA, 19 nt, Homo sapiens
  misc_RNA (1)...(19): siRNA sense strand
augcaucuguggagagaau

SEQ ID NO: 2538587 - RNA, 19 nt, Homo sapiens
  misc_RNA (1)...(19): siRNA sense strand
gagugugugcccaggguua

SEQ ID NO: 2538588 - RNA, 19 nt, Homo sapiens
  misc_RNA (1)...(19): siRNA sense strand
aaacaaaguuacaggagcu

SEQ ID NO: 2538589 - RNA, 19 nt, Homo sapiens
  misc_RNA (1)...(19): siRNA sense strand
ggaagagggcauugagaac

SEQ ID NO: 2538590 - RNA, 19 nt, Homo sapiens
  misc_RNA (1)...(19): siRNA sense strand
gaaaaugagcuucuagaaa

SEQ ID NO: 2538591 - RNA, 19 nt, Homo sapiens
  misc_RNA (1)...(19): siRNA sense strand
uggaaauacugcggaacaa

SEQ ID NO: 2538592 - RNA, 19 nt, Homo sapiens
  misc_RNA (1)...(19): siRNA sense strand
cgaaccugauggaaauaua

SEQ ID NO: 2538593 - RNA, 19 nt, Homo sapiens
  misc_RNA (1)...(19): siRNA sense strand
guuuagaacuugaacagga

SEQ ID NO: 2538594 - RNA, 19 nt, Homo sapiens
  misc_RNA (1)...(19): siRNA sense strand
caaagaugaacuggagaaa

SEQ ID NO: 2538595 - RNA, 19 nt, Homo sapiens
  misc_RNA (1)...(19): siRNA sense strand
cgacgaugaagcaggaaca

SEQ ID NO: 2538596 - RNA, 19 nt, Homo sapiens
  misc_RNA (1)...(19): siRNA sense strand
gagcugagaaugauggaga

SEQ ID NO: 2538597 - RNA, 19 nt, Homo sapiens
  misc_RNA (1)...(19): siRNA sense strand
acaugaaauugccugguua

SEQ ID NO: 2538598 - RNA, 19 nt, Homo sapiens
  misc_RNA (1)...(19): siRNA sense strand
uagaagacaccgugcagaa

SEQ ID NO: 2538599 - RNA, 19 nt, Homo sapiens
  misc_RNA (1)...(19): siRNA sense strand
gggaauuugagaaggacga

SEQ ID NO: 2538600 - RNA, 19 nt, Homo sapiens
  misc_RNA (1)...(19): siRNA sense strand
cagcauggucgucgagaga

SEQ ID NO: 2538601 - RNA, 19 nt, Homo sapiens
  misc_RNA (1)...(19): siRNA sense strand
ggaaauacugcggaacaaa

SEQ ID NO: 2538602 - RNA, 19 nt, Homo sapiens
  misc_RNA (1)...(19): siRNA sense strand
acagaguguaauagaagaa

SEQ ID NO: 2538603 - RNA, 19 nt, Homo sapiens
  misc_RNA (1)...(19): siRNA sense strand
agacauuacuucaggacaa

SEQ ID NO: 2538604 - RNA, 19 nt, Homo sapiens
  misc_RNA (1)...(19): siRNA sense strand
aggaagagcugaaggcaau

SEQ ID NO: 2538605 - RNA, 19 nt, Homo sapiens
  misc_RNA (1)...(19): siRNA sense strand
aggaaaagguucagaauuu

SEQ ID NO: 2538606 - RNA, 19 nt, Homo sapiens
  misc_RNA (1)...(19): siRNA sense strand
gaacagaaauccugggaac

SEQ ID NO: 2538607 - RNA, 19 nt, Homo sapiens
  misc_RNA (1)...(19): siRNA sense strand
acacacagcucuuggaaaa

SEQ ID NO: 2538608 - RNA, 19 nt, Homo sapiens
  misc_RNA (1)...(19): siRNA sense strand
gggaacaagagaaguuuaa

SEQ ID NO: 2538609 - RNA, 19 nt, Homo sapiens
  misc_RNA (1)...(19): siRNA sense strand
caucagagugcgagcuuaa

SEQ ID NO: 2538610 - RNA, 19 nt, Homo sapiens
  misc_RNA (1)...(19): siRNA sense strand
gcuuaaagagagaguguga

SEQ ID NO: 2538611 - RNA, 19 nt, Homo sapiens
  misc_RNA (1)...(19): siRNA sense strand
caggagaacaugaagcaaa

SEQ ID NO: 2538612 - RNA, 19 nt, Homo sapiens
  misc_RNA (1)...(19): siRNA sense strand
gaggaagagcugaaggcaa

SEQ ID NO: 2538613 - RNA, 19 nt, Homo sapiens
  misc_RNA (1)...(19): siRNA sense strand
gagagaugcucgaggaagu

SEQ ID NO: 2538614 - RNA, 19 nt, Homo sapiens
  misc_RNA (1)...(19): siRNA sense strand
gaucagguggucagagaaa

SEQ ID NO: 2538615 - RNA, 19 nt, Homo sapiens
  misc_RNA (1)...(19): siRNA sense strand
ucuccagacuucagaguaa

SEQ ID NO: 2538616 - RNA, 19 nt, Homo sapiens
  misc_RNA (1)...(19): siRNA sense strand
aggaggagguggaaggaga

SEQ ID NO: 2538617 - RNA, 19 nt, Homo sapiens
  misc_RNA (1)...(19): siRNA sense strand
caggaagagcugagaauga

SEQ ID NO: 2538618 - RNA, 19 nt, Homo sapiens
  misc_RNA (1)...(19): siRNA sense strand
caggaagaaauguggcaaa

SEQ ID NO: 2538619 - RNA, 19 nt, Homo sapiens
  misc_RNA (1)...(19): siRNA sense strand
ggccaagaguacagaauca

SEQ ID NO: 2538620 - RNA, 19 nt, Homo sapiens
  misc_RNA (1)...(19): siRNA sense strand
aaauggaaacagaguguaa

SEQ ID NO: 2538621 - RNA, 19 nt, Homo sapiens
  misc_RNA (1)...(19): siRNA sense strand
gcauggucgucgagagaca

SEQ ID NO: 2538622 - RNA, 19 nt, Homo sapiens
  misc_RNA (1)...(19): siRNA sense strand
guuuagagaaccuggaaau

SEQ ID NO: 2538623 - RNA, 19 nt, Homo sapiens
  misc_RNA (1)...(19): siRNA sense strand
agacuggauagaagagaaa

SEQ ID NO: 2538624 - RNA, 19 nt, Homo sapiens
  misc_RNA (1)...(19): siRNA sense strand
aaaucgaaccugauggaaa

SEQ ID NO: 2538625 - RNA, 19 nt, Homo sapiens
  misc_RNA (1)...(19): siRNA sense strand
aaguuauacuggaggaaaa

SEQ ID NO: 2538626 - RNA, 19 nt, Homo sapiens
  misc_RNA (1)...(19): siRNA sense strand
acuaggaaguugaaggaga

SEQ ID NO: 2538627 - RNA, 19 nt, Homo sapiens
  misc_RNA (1)...(19): siRNA sense strand
cgaugaagcaggaacagaa

SEQ ID NO: 2538628 - RNA, 19 nt, Homo sapiens
  misc_RNA (1)...(19): siRNA sense strand
gagaaagaggaguuaagaa

SEQ ID NO: 2538629 - RNA, 19 nt, Homo sapiens
  misc_RNA (1)...(19): siRNA sense strand
gcugaagagcagucacaaa

SEQ ID NO: 2538630 - RNA, 19 nt, Homo sapiens
  misc_RNA (1)...(19): siRNA sense strand
caagaaaggccaagaguac

SEQ ID NO: 2538631 - RNA, 19 nt, Homo sapiens
  misc_RNA (1)...(19): siRNA sense strand
aagaugaacuggagaaaau

SEQ ID NO: 2538632 - RNA, 19 nt, Homo sapiens
  misc_RNA (1)...(19): siRNA sense strand
ggaaacuggaugaagagua

SEQ ID NO: 2538633 - RNA, 19 nt, Homo sapiens
  misc_RNA (1)...(19): siRNA sense strand
gaacaacaucacagggaca

SEQ ID NO: 2538634 - RNA, 19 nt, Homo sapiens
  misc_RNA (1)...(19): siRNA sense strand
aagugaagcuugaggagga

SEQ ID NO: 2538635 - RNA, 19 nt, Homo sapiens
  misc_RNA (1)...(19): siRNA sense strand
gaggaauguaagcaagaaa

SEQ ID NO: 2538636 - RNA, 19 nt, Homo sapiens
  misc_RNA (1)...(19): siRNA sense strand
caacaauuggauuuggaaa

SEQ ID NO: 2538637 - RNA, 19 nt, Homo sapiens
  misc_RNA (1)...(19): siRNA sense strand
ggaggaagucacugaaaca

SEQ ID NO: 2538638 - RNA, 19 nt, Homo sapiens
  misc_RNA (1)...(19): siRNA sense strand
gaugaauucccuugaacaa

SEQ ID NO: 2538639 - RNA, 19 nt, Homo sapiens
  misc_RNA (1)...(19): siRNA sense strand
cugcaaaugucccggauga

SEQ ID NO: 2538640 - RNA, 19 nt, Homo sapiens
  misc_RNA (1)...(19): siRNA sense strand
aggaugagcugaagaaaau

SEQ ID NO: 2538641 - RNA, 19 nt, Homo sapiens
  misc_RNA (1)...(19): siRNA sense strand
ucaaagaugaacuggagaa

SEQ ID NO: 2538642 - RNA, 19 nt, Homo sapiens
  misc_RNA (1)...(19): siRNA sense strand
augcuaugccagaaggaaa

SEQ ID NO: 2538643 - RNA, 19 nt, Homo sapiens
  misc_RNA (1)...(19): siRNA sense strand
gaauaugagcauugaggca

SEQ ID NO: 2538644 - RNA, 19 nt, Homo sapiens
  misc_RNA (1)...(19): siRNA sense strand
ggaaguugaaggagagagu

SEQ ID NO: 2538645 - RNA, 19 nt, Homo sapiens
  misc_RNA (1)...(19): siRNA sense strand
caugaaucccacagagcaa

SEQ ID NO: 2538646 - RNA, 19 nt, Homo sapiens
  misc_RNA (1)...(19): siRNA sense strand
augcaucuguggagagaau

SEQ ID NO: 2538647 - RNA, 19 nt, Homo sapiens
  misc_RNA (1)...(19): siRNA sense strand
gagugugugcccaggguua

SEQ ID NO: 2538648 - RNA, 19 nt, Homo sapiens
  misc_RNA (1)...(19): siRNA sense strand
aaacaaaguuacaggagcu

SEQ ID NO: 2538649 - RNA, 19 nt, Homo sapiens
  misc_RNA (1)...(19): siRNA sense strand
ggaagagggcauugagaac

SEQ ID NO: 2538650 - RNA, 19 nt, Homo sapiens
  misc_RNA (1)...(19): siRNA sense strand
gaaaaugagcuucuagaaa

SEQ ID NO: 2538651 - RNA, 19 nt, Homo sapiens
  misc_RNA (1)...(19): siRNA sense strand
uggaaauacugcggaacaa

SEQ ID NO: 2538652 - RNA, 19 nt, Homo sapiens
  misc_RNA (1)...(19): siRNA sense strand
cgaaccugauggaaauaua

SEQ ID NO: 2538653 - RNA, 19 nt, Homo sapiens
  misc_RNA (1)...(19): siRNA sense strand
guuuagaacuugaacagga

SEQ ID NO: 2538654 - RNA, 19 nt, Homo sapiens
  misc_RNA (1)...(19): siRNA sense strand
caaagaugaacuggagaaa

SEQ ID NO: 2538655 - RNA, 19 nt, Homo sapiens
  misc_RNA (1)...(19): siRNA sense strand
cgacgaugaagcaggaaca

SEQ ID NO: 2538656 - RNA, 19 nt, Homo sapiens
  misc_RNA (1)...(19): siRNA sense strand
gagcugagaaugauggaga

SEQ ID NO: 2538657 - RNA, 19 nt, Homo sapiens
  misc_RNA (1)...(19): siRNA sense strand
acaugaaauugccugguua

SEQ ID NO: 2538658 - RNA, 19 nt, Homo sapiens
  misc_RNA (1)...(19): siRNA sense strand
uagaagacaccgugcagaa

SEQ ID NO: 2538659 - RNA, 19 nt, Homo sapiens
  misc_RNA (1)...(19): siRNA sense strand
gggaauuugagaaggacga

SEQ ID NO: 2538660 - RNA, 19 nt, Homo sapiens
  misc_RNA (1)...(19): siRNA sense strand
cagcauggucgucgagaga

SEQ ID NO: 2538661 - RNA, 19 nt, Homo sapiens
  misc_RNA (1)...(19): siRNA sense strand
ggaaauacugcggaacaaa

SEQ ID NO: 2538662 - RNA, 19 nt, Homo sapiens
  misc_RNA (1)...(19): siRNA sense strand
acagaguguaauagaagaa

SEQ ID NO: 2538663 - RNA, 19 nt, Homo sapiens
  misc_RNA (1)...(19): siRNA sense strand
agacauuacuucaggacaa

SEQ ID NO: 2538664 - RNA, 19 nt, Homo sapiens
  misc_RNA (1)...(19): siRNA sense strand
aggaagagcugaaggcaau

SEQ ID NO: 2538665 - RNA, 19 nt, Homo sapiens
  misc_RNA (1)...(19): siRNA sense strand
aggaaaagguucagaauuu

SEQ ID NO: 2538666 - RNA, 19 nt, Homo sapiens
  misc_RNA (1)...(19): siRNA sense strand
gaacagaaauccugggaac

SEQ ID NO: 2538667 - RNA, 19 nt, Homo sapiens
  misc_RNA (1)...(19): siRNA sense strand
acacacagcucuuggaaaa

SEQ ID NO: 2538668 - RNA, 19 nt, Homo sapiens
  misc_RNA (1)...(19): siRNA sense strand
gggaacaagagaaguuuaa

SEQ ID NO: 2538669 - RNA, 19 nt, Homo sapiens
  misc_RNA (1)...(19): siRNA sense strand
caucagagugcgagcuuaa

SEQ ID NO: 2538670 - RNA, 19 nt, Homo sapiens
  misc_RNA (1)...(19): siRNA sense strand
gcuuaaagagagaguguga

SEQ ID NO: 2538671 - RNA, 19 nt, Homo sapiens
  misc_RNA (1)...(19): siRNA sense strand
caggagaacaugaagcaaa

SEQ ID NO: 2538672 - RNA, 19 nt, Homo sapiens
  misc_RNA (1)...(19): siRNA sense strand
gaggaagagcugaaggcaa

SEQ ID NO: 2538673 - RNA, 19 nt, Homo sapiens
  misc_RNA (1)...(19): siRNA sense strand
gagagaugcucgaggaagu

SEQ ID NO: 2538674 - RNA, 19 nt, Homo sapiens
  misc_RNA (1)...(19): siRNA sense strand
gaucagguggucagagaaa

SEQ ID NO: 2538675 - RNA, 19 nt, Homo sapiens
  misc_RNA (1)...(19): siRNA sense strand
ucuccagacuucagaguaa

SEQ ID NO: 2538676 - RNA, 19 nt, Homo sapiens
  misc_RNA (1)...(19): siRNA sense strand
aggaggagguggaaggaga

SEQ ID NO: 2538677 - RNA, 19 nt, Homo sapiens
  misc_RNA (1)...(19): siRNA sense strand
caggaagagcugagaauga

SEQ ID NO: 2538678 - RNA, 19 nt, Homo sapiens
  misc_RNA (1)...(19): siRNA sense strand
caggaagaaauguggcaaa

SEQ ID NO: 2538679 - RNA, 19 nt, Homo sapiens
  misc_RNA (1)...(19): siRNA sense strand
ggccaagaguacagaauca

SEQ ID NO: 2538680 - RNA, 19 nt, Homo sapiens
  misc_RNA (1)...(19): siRNA sense strand
aaauggaaacagaguguaa

SEQ ID NO: 2538681 - RNA, 19 nt, Homo sapiens
  misc_RNA (1)...(19): siRNA sense strand
gcauggucgucgagagaca

SEQ ID NO: 2538682 - RNA, 19 nt, Homo sapiens
  misc_RNA (1)...(19): siRNA sense strand
guuuagagaaccuggaaau

SEQ ID NO: 2538683 - RNA, 19 nt, Homo sapiens
  misc_RNA (1)...(19): siRNA sense strand
agacuggauagaagagaaa

SEQ ID NO: 2538684 - RNA, 19 nt, Homo sapiens
  misc_RNA (1)...(19): siRNA sense strand
aaaucgaaccugauggaaa

SEQ ID NO: 2538685 - RNA, 19 nt, Homo sapiens
  misc_RNA (1)...(19): siRNA sense strand
aaguuauacuggaggaaaa

SEQ ID NO: 2538686 - RNA, 19 nt, Homo sapiens
  misc_RNA (1)...(19): siRNA sense strand
acuaggaaguugaaggaga

SEQ ID NO: 2538687 - RNA, 19 nt, Homo sapiens
  misc_RNA (1)...(19): siRNA sense strand
cgaugaagcaggaacagaa

SEQ ID NO: 2538688 - RNA, 19 nt, Homo sapiens
  misc_RNA (1)...(19): siRNA sense strand
gagaaagaggaguuaagaa

SEQ ID NO: 2538689 - RNA, 19 nt, Homo sapiens
  misc_RNA (1)...(19): siRNA sense strand
gcugaagagcagucacaaa

SEQ ID NO: 2538690 - RNA, 19 nt, Homo sapiens
  misc_RNA (1)...(19): siRNA sense strand
caagaaaggccaagaguac

SEQ ID NO: 2538691 - RNA, 19 nt, Homo sapiens
  misc_RNA (1)...(19): siRNA sense strand
aagaugaacuggagaaaau

SEQ ID NO: 2538692 - RNA, 19 nt, Homo sapiens
  misc_RNA (1)...(19): siRNA sense strand
ggaaacuggaugaagagua

SEQ ID NO: 2538693 - RNA, 19 nt, Homo sapiens
  misc_RNA (1)...(19): siRNA sense strand
gaacaacaucacagggaca

SEQ ID NO: 2538694 - RNA, 19 nt, Homo sapiens
  misc_RNA (1)...(19): siRNA sense strand
aagugaagcuugaggagga

SEQ ID NO: 2538695 - RNA, 19 nt, Homo sapiens
  misc_RNA (1)...(19): siRNA sense strand
gaggaauguaagcaagaaa

SEQ ID NO: 2538696 - RNA, 19 nt, Homo sapiens
  misc_RNA (1)...(19): siRNA sense strand
caacaauuggauuuggaaa

SEQ ID NO: 2538697 - RNA, 19 nt, Homo sapiens
  misc_RNA (1)...(19): siRNA sense strand
ggaggaagucacugaaaca

SEQ ID NO: 2538698 - RNA, 19 nt, Homo sapiens
  misc_RNA (1)...(19): siRNA sense strand
gaugaauucccuugaacaa

SEQ ID NO: 2538699 - RNA, 19 nt, Homo sapiens
  misc_RNA (1)...(19): siRNA sense strand
cugcaaaugucccggauga

SEQ ID NO: 2538700 - RNA, 19 nt, Homo sapiens
  misc_RNA (1)...(19): siRNA sense strand
aggaugagcugaagaaaau

SEQ ID NO: 2538701 - RNA, 19 nt, Homo sapiens
  misc_RNA (1)...(19): siRNA sense strand
ucaaagaugaacuggagaa

SEQ ID NO: 2538702 - RNA, 19 nt, Homo sapiens
  misc_RNA (1)...(19): siRNA sense strand
augcuaugccagaaggaaa

SEQ ID NO: 2538703 - RNA, 19 nt, Homo sapiens
  misc_RNA (1)...(19): siRNA sense strand
gaauaugagcauugaggca

SEQ ID NO: 2538704 - RNA, 19 nt, Homo sapiens
  misc_RNA (1)...(19): siRNA sense strand
ggaaguugaaggagagagu

SEQ ID NO: 2538705 - RNA, 19 nt, Homo sapiens
  misc_RNA (1)...(19): siRNA sense strand
caugaaucccacagagcaa

SEQ ID NO: 2538706 - RNA, 19 nt, Homo sapiens
  misc_RNA (1)...(19): siRNA sense strand
augcaucuguggagagaau

SEQ ID NO: 2538707 - RNA, 19 nt, Homo sapiens
  misc_RNA (1)...(19): siRNA sense strand
gagugugugcccaggguua

SEQ ID NO: 2538708 - RNA, 19 nt, Homo sapiens
  misc_RNA (1)...(19): siRNA sense strand
aaacaaaguuacaggagcu

SEQ ID NO: 2538709 - RNA, 19 nt, Homo sapiens
  misc_RNA (1)...(19): siRNA sense strand
ggaagagggcauugagaac

SEQ ID NO: 2538710 - RNA, 19 nt, Homo sapiens
  misc_RNA (1)...(19): siRNA sense strand
gaaaaugagcuucuagaaa

SEQ ID NO: 2538711 - RNA, 19 nt, Homo sapiens
  misc_RNA (1)...(19): siRNA sense strand
uggaaauacugcggaacaa

SEQ ID NO: 2538712 - RNA, 19 nt, Homo sapiens
  misc_RNA (1)...(19): siRNA sense strand
cgaaccugauggaaauaua

SEQ ID NO: 2538713 - RNA, 19 nt, Homo sapiens
  misc_RNA (1)...(19): siRNA sense strand
guuuagaacuugaacagga

SEQ ID NO: 2538714 - RNA, 19 nt, Homo sapiens
  misc_RNA (1)...(19): siRNA sense strand
caaagaugaacuggagaaa

SEQ ID NO: 2538715 - RNA, 19 nt, Homo sapiens
  misc_RNA (1)...(19): siRNA sense strand
cgacgaugaagcaggaaca

SEQ ID NO: 2538716 - RNA, 19 nt, Homo sapiens
  misc_RNA (1)...(19): siRNA sense strand
gagcugagaaugauggaga

SEQ ID NO: 2538717 - RNA, 19 nt, Homo sapiens
  misc_RNA (1)...(19): siRNA sense strand
acaugaaauugccugguua

SEQ ID NO: 2538718 - RNA, 19 nt, Homo sapiens
  misc_RNA (1)...(19): siRNA sense strand
uagaagacaccgugcagaa

SEQ ID NO: 2538719 - RNA, 19 nt, Homo sapiens
  misc_RNA (1)...(19): siRNA sense strand
gggaauuugagaaggacga

SEQ ID NO: 2538720 - RNA, 19 nt, Homo sapiens
  misc_RNA (1)...(19): siRNA sense strand
cagcauggucgucgagaga

SEQ ID NO: 2538721 - RNA, 19 nt, Homo sapiens
  misc_RNA (1)...(19): siRNA sense strand
ggaaauacugcggaacaaa

SEQ ID NO: 2538722 - RNA, 19 nt, Homo sapiens
  misc_RNA (1)...(19): siRNA sense strand
acagaguguaauagaagaa

SEQ ID NO: 2538723 - RNA, 19 nt, Homo sapiens
  misc_RNA (1)...(19): siRNA sense strand
aacaagaaggugagcaaga

SEQ ID NO: 2538724 - RNA, 19 nt, Homo sapiens
  misc_RNA (1)...(19): siRNA sense strand
ccgugagguccguuaggaa

SEQ ID NO: 2538725 - RNA, 19 nt, Homo sapiens
  misc_RNA (1)...(19): siRNA sense strand
ccuucugaguuaaugucaa

SEQ ID NO: 2538726 - RNA, 19 nt, Homo sapiens
  misc_RNA (1)...(19): siRNA sense strand
agugaaauuguuugggaaa

SEQ ID NO: 2538727 - RNA, 19 nt, Homo sapiens
  misc_RNA (1)...(19): siRNA sense strand
cagugaaauuguuugggaa

SEQ ID NO: 2538728 - RNA, 19 nt, Homo sapiens
  misc_RNA (1)...(19): siRNA sense strand
ggagaaauauugaaccuca

SEQ ID NO: 2538729 - RNA, 19 nt, Homo sapiens
  misc_RNA (1)...(19): siRNA sense strand
ccucauuugaagaaagcua

SEQ ID NO: 2538730 - RNA, 19 nt, Homo sapiens
  misc_RNA (1)...(19): siRNA sense strand
gugaaauuguuugggaaaa

SEQ ID NO: 2538731 - RNA, 19 nt, Homo sapiens
  misc_RNA (1)...(19): siRNA sense strand
cuuaaagaucagacuguau

SEQ ID NO: 2538732 - RNA, 19 nt, Homo sapiens
  misc_RNA (1)...(19): siRNA sense strand
acuguuuaucucagggaaa

SEQ ID NO: 2538733 - RNA, 19 nt, Homo sapiens
  misc_RNA (1)...(19): siRNA sense strand
gauuacaagaauuggcuga

SEQ ID NO: 2538734 - RNA, 19 nt, Homo sapiens
  misc_RNA (1)...(19): siRNA sense strand
ucuagauaaagcagaguau

SEQ ID NO: 2538735 - RNA, 19 nt, Homo sapiens
  misc_RNA (1)...(19): siRNA sense strand
aggagaagcaagugaacgu

SEQ ID NO: 2538736 - RNA, 19 nt, Homo sapiens
  misc_RNA (1)...(19): siRNA sense strand
aguggaaagaccuauguaa

SEQ ID NO: 2538737 - RNA, 19 nt, Homo sapiens
  misc_RNA (1)...(19): siRNA sense strand
ucuuaguucuucagaggau

SEQ ID NO: 2538738 - RNA, 19 nt, Homo sapiens
  misc_RNA (1)...(19): siRNA sense strand
acucgcaaacuguggagaa

SEQ ID NO: 2538739 - RNA, 19 nt, Homo sapiens
  misc_RNA (1)...(19): siRNA sense strand
cucgcaaacuguggagaaa

SEQ ID NO: 2538740 - RNA, 19 nt, Homo sapiens
  misc_RNA (1)...(19): siRNA sense strand
gcuacagaaagaugacaca

SEQ ID NO: 2538741 - RNA, 19 nt, Homo sapiens
  misc_RNA (1)...(19): siRNA sense strand
ccuuguuuggagagagaca

SEQ ID NO: 2538742 - RNA, 19 nt, Homo sapiens
  misc_RNA (1)...(19): siRNA sense strand
acauacugcuaguggaaag

SEQ ID NO: 2538743 - RNA, 19 nt, Homo sapiens
  misc_RNA (1)...(19): siRNA sense strand
gugggaaaagcuacagaaa

SEQ ID NO: 2538744 - RNA, 19 nt, Homo sapiens
  misc_RNA (1)...(19): siRNA sense strand
agugaaauuguuugggaaa

SEQ ID NO: 2538745 - RNA, 19 nt, Homo sapiens
  misc_RNA (1)...(19): siRNA sense strand
cagugaaauuguuugggaa

SEQ ID NO: 2538746 - RNA, 19 nt, Homo sapiens
  misc_RNA (1)...(19): siRNA sense strand
ggagaaauauugaaccuca

SEQ ID NO: 2538747 - RNA, 19 nt, Homo sapiens
  misc_RNA (1)...(19): siRNA sense strand
ccucauuugaagaaagcua

SEQ ID NO: 2538748 - RNA, 19 nt, Homo sapiens
  misc_RNA (1)...(19): siRNA sense strand
gugaaauuguuugggaaaa

SEQ ID NO: 2538749 - RNA, 19 nt, Homo sapiens
  misc_RNA (1)...(19): siRNA sense strand
cuuaaagaucagacuguau

SEQ ID NO: 2538750 - RNA, 19 nt, Homo sapiens
  misc_RNA (1)...(19): siRNA sense strand
acuguuuaucucagggaaa

SEQ ID NO: 2538751 - RNA, 19 nt, Homo sapiens
  misc_RNA (1)...(19): siRNA sense strand
gauuacaagaauuggcuga

SEQ ID NO: 2538752 - RNA, 19 nt, Homo sapiens
  misc_RNA (1)...(19): siRNA sense strand
ucuagauaaagcagaguau

SEQ ID NO: 2538753 - RNA, 19 nt, Homo sapiens
  misc_RNA (1)...(19): siRNA sense strand
aggagaagcaagugaacgu

SEQ ID NO: 2538754 - RNA, 19 nt, Homo sapiens
  misc_RNA (1)...(19): siRNA sense strand
aguggaaagaccuauguaa

SEQ ID NO: 2538755 - RNA, 19 nt, Homo sapiens
  misc_RNA (1)...(19): siRNA sense strand
ucuuaguucuucagaggau

SEQ ID NO: 2538756 - RNA, 19 nt, Homo sapiens
  misc_RNA (1)...(19): siRNA sense strand
acucgcaaacuguggagaa

SEQ ID NO: 2538757 - RNA, 19 nt, Homo sapiens
  misc_RNA (1)...(19): siRNA sense strand
cucgcaaacuguggagaaa

SEQ ID NO: 2538758 - RNA, 19 nt, Homo sapiens
  misc_RNA (1)...(19): siRNA sense strand
gcuacagaaagaugacaca

SEQ ID NO: 2538759 - RNA, 19 nt, Homo sapiens
  misc_RNA (1)...(19): siRNA sense strand
ccuuguuuggagagagaca

SEQ ID NO: 2538760 - RNA, 19 nt, Homo sapiens
  misc_RNA (1)...(19): siRNA sense strand
acauacugcuaguggaaag

SEQ ID NO: 2538761 - RNA, 19 nt, Homo sapiens
  misc_RNA (1)...(19): siRNA sense strand
gugggaaaagcuacagaaa

SEQ ID NO: 2538762 - RNA, 19 nt, Homo sapiens
  misc_RNA (1)...(19): siRNA sense strand
augaagugcacgagagcaa

SEQ ID NO: 2538763 - RNA, 19 nt, Homo sapiens
  misc_RNA (1)...(19): siRNA sense strand
gagaaugggacgugggccu

SEQ ID NO: 2538764 - RNA, 19 nt, Homo sapiens
  misc_RNA (1)...(19): siRNA sense strand
cggccauugucaugaccua

SEQ ID NO: 2538765 - RNA, 19 nt, Homo sapiens
  misc_RNA (1)...(19): siRNA sense strand
uggaugacaagcagaggaa

SEQ ID NO: 2538766 - RNA, 19 nt, Homo sapiens
  misc_RNA (1)...(19): siRNA sense strand
gaacagugcugguuuggca

SEQ ID NO: 2538767 - RNA, 19 nt, Homo sapiens
  misc_RNA (1)...(19): siRNA sense strand
ccaccacauccgagacaau

SEQ ID NO: 2538768 - RNA, 19 nt, Homo sapiens
  misc_RNA (1)...(19): siRNA sense strand
ggaucagcuuccacagcau

SEQ ID NO: 2538769 - RNA, 19 nt, Homo sapiens
  misc_RNA (1)...(19): siRNA sense strand
ggagaggagcagagggaga

SEQ ID NO: 2538770 - RNA, 19 nt, Homo sapiens
  misc_RNA (1)...(19): siRNA sense strand
uggagaagucagagagccu

SEQ ID NO: 2538771 - RNA, 19 nt, Homo sapiens
  misc_RNA (1)...(19): siRNA sense strand
aggaacacauccaggccuu

SEQ ID NO: 2538772 - RNA, 19 nt, Homo sapiens
  misc_RNA (1)...(19): siRNA sense strand
ccagagaagaccacccgaa

SEQ ID NO: 2538773 - RNA, 19 nt, Homo sapiens
  misc_RNA (1)...(19): siRNA sense strand
ucagagagccugcugguga

SEQ ID NO: 2538774 - RNA, 19 nt, Homo sapiens
  misc_RNA (1)...(19): siRNA sense strand
ccugggaagaccauggcua

SEQ ID NO: 2538775 - RNA, 19 nt, Homo sapiens
  misc_RNA (1)...(19): siRNA sense strand
ccucugggcgaguagacaa

SEQ ID NO: 2538776 - RNA, 19 nt, Homo sapiens
  misc_RNA (1)...(19): siRNA sense strand
cugagagccucgagcagca

SEQ ID NO: 2538777 - RNA, 19 nt, Homo sapiens
  misc_RNA (1)...(19): siRNA sense strand
cugucgguauggagagaaa

SEQ ID NO: 2538778 - RNA, 19 nt, Homo sapiens
  misc_RNA (1)...(19): siRNA sense strand
caucgaaaggacaggccua

SEQ ID NO: 2538779 - RNA, 19 nt, Homo sapiens
  misc_RNA (1)...(19): siRNA sense strand
cccuaauacuucaagaaaa

SEQ ID NO: 2538780 - RNA, 19 nt, Homo sapiens
  misc_RNA (1)...(19): siRNA sense strand
agggaauggccaucagaau

SEQ ID NO: 2538781 - RNA, 19 nt, Homo sapiens
  misc_RNA (1)...(19): siRNA sense strand
gaaugaaauugcugccguu

SEQ ID NO: 2538782 - RNA, 19 nt, Homo sapiens
  misc_RNA (1)...(19): siRNA sense strand
ccugaaagccugugaaaac

SEQ ID NO: 2538783 - RNA, 19 nt, Homo sapiens
  misc_RNA (1)...(19): siRNA sense strand
ccaggaauguaucgaggga

SEQ ID NO: 2538784 - RNA, 19 nt, Homo sapiens
  misc_RNA (1)...(19): siRNA sense strand
ccgcaaguccuguguacca

SEQ ID NO: 2538785 - RNA, 19 nt, Homo sapiens
  misc_RNA (1)...(19): siRNA sense strand
agaacaaggaugagaucuc

SEQ ID NO: 2538786 - RNA, 19 nt, Homo sapiens
  misc_RNA (1)...(19): siRNA sense strand
ccaaaguccuaaaggggaa

SEQ ID NO: 2538787 - RNA, 19 nt, Homo sapiens
  misc_RNA (1)...(19): siRNA sense strand
gcuaccauuucgagggcuu

SEQ ID NO: 2538788 - RNA, 19 nt, Homo sapiens
  misc_RNA (1)...(19): siRNA sense strand
cguguaugaagguggucua

SEQ ID NO: 2538789 - RNA, 19 nt, Homo sapiens
  misc_RNA (1)...(19): siRNA sense strand
ccuccaucagaaaggaaua

SEQ ID NO: 2538790 - RNA, 19 nt, Homo sapiens
  misc_RNA (1)...(19): siRNA sense strand
caggaaagcucaugggagg

SEQ ID NO: 2538791 - RNA, 19 nt, Homo sapiens
  misc_RNA (1)...(19): siRNA sense strand
uggcugggaaaguggcuua

SEQ ID NO: 2538792 - RNA, 19 nt, Homo sapiens
  misc_RNA (1)...(19): siRNA sense strand
aaggaaagaaagugauugu

SEQ ID NO: 2538793 - RNA, 19 nt, Homo sapiens
  misc_RNA (1)...(19): siRNA sense strand
ugggauaguccauaugcaa

SEQ ID NO: 2538794 - RNA, 19 nt, Homo sapiens
  misc_RNA (1)...(19): siRNA sense strand
aggaaugugcccuggagau

SEQ ID NO: 2538795 - RNA, 19 nt, Homo sapiens
  misc_RNA (1)...(19): siRNA sense strand
ugaccuucgcagagcaauu

SEQ ID NO: 2538796 - RNA, 19 nt, Homo sapiens
  misc_RNA (1)...(19): siRNA sense strand
cuccaaggaaagaaaguga

SEQ ID NO: 2538797 - RNA, 19 nt, Homo sapiens
  misc_RNA (1)...(19): siRNA sense strand
ccuccaucagaaaggaaua

SEQ ID NO: 2538798 - RNA, 19 nt, Homo sapiens
  misc_RNA (1)...(19): siRNA sense strand
caggaaagcucaugggagg

SEQ ID NO: 2538799 - RNA, 19 nt, Homo sapiens
  misc_RNA (1)...(19): siRNA sense strand
uggcugggaaaguggcuua

SEQ ID NO: 2538800 - RNA, 19 nt, Homo sapiens
  misc_RNA (1)...(19): siRNA sense strand
aaggaaagaaagugauugu

SEQ ID NO: 2538801 - RNA, 19 nt, Homo sapiens
  misc_RNA (1)...(19): siRNA sense strand
ugggauaguccauaugcaa

SEQ ID NO: 2538802 - RNA, 19 nt, Homo sapiens
  misc_RNA (1)...(19): siRNA sense strand
aggaaugugcccuggagau

SEQ ID NO: 2538803 - RNA, 19 nt, Homo sapiens
  misc_RNA (1)...(19): siRNA sense strand
ugaccuucgcagagcaauu

SEQ ID NO: 2538804 - RNA, 19 nt, Homo sapiens
  misc_RNA (1)...(19): siRNA sense strand
cuccaaggaaagaaaguga

SEQ ID NO: 2538805 - RNA, 19 nt, Homo sapiens
  misc_RNA (1)...(19): siRNA sense strand
gauccaagagcuagggaaa

SEQ ID NO: 2538806 - RNA, 19 nt, Homo sapiens
  misc_RNA (1)...(19): siRNA sense strand
gcgaaaggucagaggagau

SEQ ID NO: 2538807 - RNA, 19 nt, Homo sapiens
  misc_RNA (1)...(19): siRNA sense strand
ccucauagaaccagagcau

SEQ ID NO: 2538808 - RNA, 19 nt, Homo sapiens
  misc_RNA (1)...(19): siRNA sense strand
ggauaaucgccuucacaaa

SEQ ID NO: 2538809 - RNA, 19 nt, Homo sapiens
  misc_RNA (1)...(19): siRNA sense strand
agagaagugcacugggaaa

SEQ ID NO: 2538810 - RNA, 19 nt, Homo sapiens
  misc_RNA (1)...(19): siRNA sense strand
uggagauguucaaggacaa

SEQ ID NO: 2538811 - RNA, 19 nt, Homo sapiens
  misc_RNA (1)...(19): siRNA sense strand
ggugaauuugggagugaaa

SEQ ID NO: 2538812 - RNA, 19 nt, Homo sapiens
  misc_RNA (1)...(19): siRNA sense strand
ugguugaggcccagcgaaa

SEQ ID NO: 2538813 - RNA, 19 nt, Homo sapiens
  misc_RNA (1)...(19): siRNA sense strand
guggaagaguggucagaga

SEQ ID NO: 2538814 - RNA, 19 nt, Homo sapiens
  misc_RNA (1)...(19): siRNA sense strand
ccgacaacuucuaaggaga

SEQ ID NO: 2538815 - RNA, 19 nt, Homo sapiens
  misc_RNA (1)...(19): siRNA sense strand
cagacuauggaaugaguaa

SEQ ID NO: 2538816 - RNA, 19 nt, Homo sapiens
  misc_RNA (1)...(19): siRNA sense strand
ggucagaggagaugggucu

SEQ ID NO: 2538817 - RNA, 19 nt, Homo sapiens
  misc_RNA (1)...(19): siRNA sense strand
gaguaguaacaaugagaga

SEQ ID NO: 2538818 - RNA, 19 nt, Homo sapiens
  misc_RNA (1)...(19): siRNA sense strand
aggaguuaaacaugaguaa

SEQ ID NO: 2538819 - RNA, 19 nt, Homo sapiens
  misc_RNA (1)...(19): siRNA sense strand
gggagaagauguauggucu

SEQ ID NO: 2538820 - RNA, 19 nt, Homo sapiens
  misc_RNA (1)...(19): siRNA sense strand
cauaaaacuugaagaggau

SEQ ID NO: 2538821 - RNA, 19 nt, Homo sapiens
  misc_RNA (1)...(19): siRNA sense strand
cagaaguuugcaagauaaa

SEQ ID NO: 2538822 - RNA, 19 nt, Homo sapiens
  misc_RNA (1)...(19): siRNA sense strand
ggaaaacagagaaguuaaa

SEQ ID NO: 2538823 - RNA, 19 nt, Homo sapiens
  misc_RNA (1)...(19): siRNA sense strand
aaguauagccagagaauuc

SEQ ID NO: 2538824 - RNA, 19 nt, Homo sapiens
  misc_RNA (1)...(19): siRNA sense strand
cugugaaacaagaagauau

SEQ ID NO: 2538825 - RNA, 19 nt, Homo sapiens
  misc_RNA (1)...(19): siRNA sense strand
cggaaaacagagaaguuaa

SEQ ID NO: 2538826 - RNA, 19 nt, Homo sapiens
  misc_RNA (1)...(19): siRNA sense strand
cuaaggaacuucaggagca

SEQ ID NO: 2538827 - RNA, 19 nt, Homo sapiens
  misc_RNA (1)...(19): siRNA sense strand
gagcuugaagagauggaua

SEQ ID NO: 2538828 - RNA, 19 nt, Homo sapiens
  misc_RNA (1)...(19): siRNA sense strand
ugguaaaggugaugggccu

SEQ ID NO: 2538829 - RNA, 19 nt, Homo sapiens
  misc_RNA (1)...(19): siRNA sense strand
ggaucaaaguacagagcag

SEQ ID NO: 2538830 - RNA, 19 nt, Homo sapiens
  misc_RNA (1)...(19): siRNA sense strand
cccuugggccugaggaaua

SEQ ID NO: 2538831 - RNA, 19 nt, Homo sapiens
  misc_RNA (1)...(19): siRNA sense strand
acauaaaacuugaagagga

SEQ ID NO: 2538832 - RNA, 19 nt, Homo sapiens
  misc_RNA (1)...(19): siRNA sense strand
ccacaggcaggaauggaaa

SEQ ID NO: 2538833 - RNA, 19 nt, Homo sapiens
  misc_RNA (1)...(19): siRNA sense strand
ggauggagacagaacuaau

SEQ ID NO: 2538834 - RNA, 19 nt, Homo sapiens
  misc_RNA (1)...(19): siRNA sense strand
gaguaaaacugaaagaacu

SEQ ID NO: 2538835 - RNA, 19 nt, Homo sapiens
  misc_RNA (1)...(19): siRNA sense strand
uagcaacauuaaugggaga

SEQ ID NO: 2538836 - RNA, 19 nt, Homo sapiens
  misc_RNA (1)...(19): siRNA sense strand
ucauagaaccagagcaugu

SEQ ID NO: 2538837 - RNA, 19 nt, Homo sapiens
  misc_RNA (1)...(19): siRNA sense strand
auguuaacacugugggcua

SEQ ID NO: 2538838 - RNA, 19 nt, Homo sapiens
  misc_RNA (1)...(19): siRNA sense strand
ugcacaaggaggaguuaaa

SEQ ID NO: 2538839 - RNA, 19 nt, Homo sapiens
  misc_RNA (1)...(19): siRNA sense strand
uguucaaggacaagaauca

SEQ ID NO: 2538840 - RNA, 19 nt, Homo sapiens
  misc_RNA (1)...(19): siRNA sense strand
ucaggaaaguauagccaga

SEQ ID NO: 2538841 - RNA, 19 nt, Homo sapiens
  misc_RNA (1)...(19): siRNA sense strand
cugaagauagacuggaauu

SEQ ID NO: 2538842 - RNA, 19 nt, Homo sapiens
  misc_RNA (1)...(19): siRNA sense strand
cggaacugguaaaggugau

SEQ ID NO: 2538843 - RNA, 19 nt, Homo sapiens
  misc_RNA (1)...(19): siRNA sense strand
gcaaauuguugucgcccau

SEQ ID NO: 2538844 - RNA, 19 nt, Homo sapiens
  misc_RNA (1)...(19): siRNA sense strand
aaguaaagcugaagguggu

SEQ ID NO: 2538845 - RNA, 19 nt, Homo sapiens
  misc_RNA (1)...(19): siRNA sense strand
auuaaugggagaagaugua

SEQ ID NO: 2538846 - RNA, 19 nt, Homo sapiens
  misc_RNA (1)...(19): siRNA sense strand
gagcaacuucauaacguaa

SEQ ID NO: 2538847 - RNA, 19 nt, Homo sapiens
  misc_RNA (1)...(19): siRNA sense strand
aagaguggucagagaaaca

SEQ ID NO: 2538848 - RNA, 19 nt, Homo sapiens
  misc_RNA (1)...(19): siRNA sense strand
ggaaaguauagccagagaa

SEQ ID NO: 2538849 - RNA, 19 nt, Homo sapiens
  misc_RNA (1)...(19): siRNA sense strand
ggucuuaugcaaagggacu

SEQ ID NO: 2538850 - RNA, 19 nt, Homo sapiens
  misc_RNA (1)...(19): siRNA sense strand
ggguauggcugauggcaag

SEQ ID NO: 2538851 - RNA, 19 nt, Homo sapiens
  misc_RNA (1)...(19): siRNA sense strand
gcugagaugacuaacacaa

SEQ ID NO: 2538852 - RNA, 19 nt, Homo sapiens
  misc_RNA (1)...(19): siRNA sense strand
uguuauuggaggugacaga

SEQ ID NO: 2538853 - RNA, 19 nt, Homo sapiens
  misc_RNA (1)...(19): siRNA sense strand
agaacacggaacugguaaa

SEQ ID NO: 2538854 - RNA, 19 nt, Homo sapiens
  misc_RNA (1)...(19): siRNA sense strand
gcagagaagugcacuggga

SEQ ID NO: 2538855 - RNA, 19 nt, Homo sapiens
  misc_RNA (1)...(19): siRNA sense strand
uuacgauguugcaaugaaa

SEQ ID NO: 2538856 - RNA, 19 nt, Homo sapiens
  misc_RNA (1)...(19): siRNA sense strand
caacagaauauuacggaac

SEQ ID NO: 2538857 - RNA, 19 nt, Homo sapiens
  misc_RNA (1)...(19): siRNA sense strand
aggaaaguauagccagaga

SEQ ID NO: 2538858 - RNA, 19 nt, Homo sapiens
  misc_RNA (1)...(19): siRNA sense strand
cuggagggaaauuguauaa

SEQ ID NO: 2538859 - RNA, 19 nt, Homo sapiens
  misc_RNA (1)...(19): siRNA sense strand
ugaagaaaaccauggguau

SEQ ID NO: 2538860 - RNA, 19 nt, Homo sapiens
  misc_RNA (1)...(19): siRNA sense strand
ggguugaggaggugaccga

SEQ ID NO: 2538861 - RNA, 19 nt, Homo sapiens
  misc_RNA (1)...(19): siRNA sense strand
agaaacaacugauggcugu

SEQ ID NO: 2538862 - RNA, 19 nt, Homo sapiens
  misc_RNA (1)...(19): siRNA sense strand
cuguaaugcagaaacggaa

SEQ ID NO: 2538863 - RNA, 19 nt, Homo sapiens
  misc_RNA (1)...(19): siRNA sense strand
uguaaugcagaaacggaaa

SEQ ID NO: 2538864 - RNA, 19 nt, Homo sapiens
  misc_RNA (1)...(19): siRNA sense strand
gggacaugaaccagggcga

SEQ ID NO: 2538865 - RNA, 19 nt, Homo sapiens
  misc_RNA (1)...(19): siRNA sense strand
uagugguggaguagugaaa

SEQ ID NO: 2538866 - RNA, 19 nt, Homo sapiens
  misc_RNA (1)...(19): siRNA sense strand
acagcuucuucuaguaaua

SEQ ID NO: 2538867 - RNA, 19 nt, Homo sapiens
  misc_RNA (1)...(19): siRNA sense strand
uggaauggacaaacagaca

SEQ ID NO: 2538868 - RNA, 19 nt, Homo sapiens
  misc_RNA (1)...(19): siRNA sense strand
ggacuggagugauaggagu

SEQ ID NO: 2538869 - RNA, 19 nt, Homo sapiens
  misc_RNA (1)...(19): siRNA sense strand
agaagaagguggagcagcu

SEQ ID NO: 2538870 - RNA, 19 nt, Homo sapiens
  misc_RNA (1)...(19): siRNA sense strand
acaacaucgccgugcgcaa

SEQ ID NO: 2538871 - RNA, 19 nt, Homo sapiens
  misc_RNA (1)...(19): siRNA sense strand
ccuuuaaauccauggaagu

SEQ ID NO: 2538872 - RNA, 19 nt, Homo sapiens
  misc_RNA (1)...(19): siRNA sense strand
aggucaagagcaaggccaa

SEQ ID NO: 2538873 - RNA, 19 nt, Homo sapiens
  misc_RNA (1)...(19): siRNA sense strand
aauccauggaaguggccaa

SEQ ID NO: 2538874 - RNA, 19 nt, Homo sapiens
  misc_RNA (1)...(19): siRNA sense strand
agaaggaagaagacagcaa

SEQ ID NO: 2538875 - RNA, 19 nt, Homo sapiens
  misc_RNA (1)...(19): siRNA sense strand
gcugacgagcagaggagaa

SEQ ID NO: 2538876 - RNA, 19 nt, Homo sapiens
  misc_RNA (1)...(19): siRNA sense strand
aagaaaagaaggaagaaga

SEQ ID NO: 2538877 - RNA, 19 nt, Homo sapiens
  misc_RNA (1)...(19): siRNA sense strand
ccaacaugaugcugcccaa

SEQ ID NO: 2538878 - RNA, 19 nt, Homo sapiens
  misc_RNA (1)...(19): siRNA sense strand
aggaauucacagacgagaa

SEQ ID NO: 2538879 - RNA, 19 nt, Homo sapiens
  misc_RNA (1)...(19): siRNA sense strand
ucguaaugaauguggacuu

SEQ ID NO: 2538880 - RNA, 19 nt, Homo sapiens
  misc_RNA (1)...(19): siRNA sense strand
gggaagaagacccguggga

SEQ ID NO: 2538881 - RNA, 19 nt, Homo sapiens
  misc_RNA (1)...(19): siRNA sense strand
aggauauugaagaggauca

SEQ ID NO: 2538882 - RNA, 19 nt, Homo sapiens
  misc_RNA (1)...(19): siRNA sense strand
auggagaguagcagaaaca

SEQ ID NO: 2538883 - RNA, 19 nt, Homo sapiens
  misc_RNA (1)...(19): siRNA sense strand
aaacaggucuugaagcuga

SEQ ID NO: 2538884 - RNA, 19 nt, Homo sapiens
  misc_RNA (1)...(19): siRNA sense strand
ggaagaagacccgugggaa

SEQ ID NO: 2538885 - RNA, 19 nt, Homo sapiens
  misc_RNA (1)...(19): siRNA sense strand
cuggagaagaugcaggaca

SEQ ID NO: 2538886 - RNA, 19 nt, Homo sapiens
  misc_RNA (1)...(19): siRNA sense strand
ggaaccugauuaaggacca

SEQ ID NO: 2538887 - RNA, 19 nt, Homo sapiens
  misc_RNA (1)...(19): siRNA sense strand
ugauugcgcacgugggaau

SEQ ID NO: 2538888 - RNA, 19 nt, Homo sapiens
  misc_RNA (1)...(19): siRNA sense strand
cguuugggcuccugaggca

SEQ ID NO: 2538889 - RNA, 19 nt, Homo sapiens
  misc_RNA (1)...(19): siRNA sense strand
uugaagaaaagaaggaaga

SEQ ID NO: 2538890 - RNA, 19 nt, Homo sapiens
  misc_RNA (1)...(19): siRNA sense strand
agggaguuaucaagcaaaa

SEQ ID NO: 2538891 - RNA, 19 nt, Homo sapiens
  misc_RNA (1)...(19): siRNA sense strand
caacaugaagagagagcag

SEQ ID NO: 2538892 - RNA, 19 nt, Homo sapiens
  misc_RNA (1)...(19): siRNA sense strand
uggagaagaugcaggacag

SEQ ID NO: 2538893 - RNA, 19 nt, Homo sapiens
  misc_RNA (1)...(19): siRNA sense strand
uugaagaggcuguggguaa

SEQ ID NO: 2538894 - RNA, 19 nt, Homo sapiens
  misc_RNA (1)...(19): siRNA sense strand
agucaaacagccugagaaa

SEQ ID NO: 2538895 - RNA, 19 nt, Homo sapiens
  misc_RNA (1)...(19): siRNA sense strand
aagagaacucagagagcaa

SEQ ID NO: 2538896 - RNA, 19 nt, Homo sapiens
  misc_RNA (1)...(19): siRNA sense strand
uugugaaguucuugggaau

SEQ ID NO: 2538897 - RNA, 19 nt, Homo sapiens
  misc_RNA (1)...(19): siRNA sense strand
cagaaaucucggaugaauu

SEQ ID NO: 2538898 - RNA, 19 nt, Homo sapiens
  misc_RNA (1)...(19): siRNA sense strand
agacugaugacgaaggcua

SEQ ID NO: 2538899 - RNA, 19 nt, Homo sapiens
  misc_RNA (1)...(19): siRNA sense strand
acgagauggugguguauga

SEQ ID NO: 2538900 - RNA, 19 nt, Homo sapiens
  misc_RNA (1)...(19): siRNA sense strand
gcaagcagcuggaagagga

SEQ ID NO: 2538901 - RNA, 19 nt, Homo sapiens
  misc_RNA (1)...(19): siRNA sense strand
cugggaaagaagacaacua

SEQ ID NO: 2538902 - RNA, 19 nt, Homo sapiens
  misc_RNA (1)...(19): siRNA sense strand
agucagagacggaguaugu

SEQ ID NO: 2538903 - RNA, 19 nt, Homo sapiens
  misc_RNA (1)...(19): siRNA sense strand
acgaaggcuaugaggauga

SEQ ID NO: 2538904 - RNA, 19 nt, Homo sapiens
  misc_RNA (1)...(19): siRNA sense strand
augaguaugugcuggaaga

SEQ ID NO: 2538905 - RNA, 19 nt, Homo sapiens
  misc_RNA (1)...(19): siRNA sense strand
gugugauggaugaugacaa

SEQ ID NO: 2538906 - RNA, 19 nt, Homo sapiens
  misc_RNA (1)...(19): siRNA sense strand
cuuaagacgggcagcgaga

SEQ ID NO: 2538907 - RNA, 19 nt, Homo sapiens
  misc_RNA (1)...(19): siRNA sense strand
agaaauucgacaagaagga

SEQ ID NO: 2538908 - RNA, 19 nt, Homo sapiens
  misc_RNA (1)...(19): siRNA sense strand
cuacaugaaacaagccauu

SEQ ID NO: 2538909 - RNA, 19 nt, Homo sapiens
  misc_RNA (1)...(19): siRNA sense strand
acucuagaaccaucagaaa

SEQ ID NO: 2538910 - RNA, 19 nt, Homo sapiens
  misc_RNA (1)...(19): siRNA sense strand
ggucaagcgcugggugaau

SEQ ID NO: 2538911 - RNA, 19 nt, Homo sapiens
  misc_RNA (1)...(19): siRNA sense strand
gcgggaagaggguggcuuu

SEQ ID NO: 2538912 - RNA, 19 nt, Homo sapiens
  misc_RNA (1)...(19): siRNA sense strand
aggguggcuuugaguauaa

SEQ ID NO: 2538913 - RNA, 19 nt, Homo sapiens
  misc_RNA (1)...(19): siRNA sense strand
cagcaucauugaagagaac

SEQ ID NO: 2538914 - RNA, 19 nt, Homo sapiens
  misc_RNA (1)...(19): siRNA sense strand
guaucuugguguugcugaa

SEQ ID NO: 2538915 - RNA, 19 nt, Homo sapiens
  misc_RNA (1)...(19): siRNA sense strand
gcguaagaaugaccgccua

SEQ ID NO: 2538916 - RNA, 19 nt, Homo sapiens
  misc_RNA (1)...(19): siRNA sense strand
gaauuugagaaggaggaaa

SEQ ID NO: 2538917 - RNA, 19 nt, Homo sapiens
  misc_RNA (1)...(19): siRNA sense strand
guaccaugugcguaagaau

SEQ ID NO: 2538918 - RNA, 19 nt, Homo sapiens
  misc_RNA (1)...(19): siRNA sense strand
cagcaaggucacacggcau

SEQ ID NO: 2538919 - RNA, 19 nt, Homo sapiens
  misc_RNA (1)...(19): siRNA sense strand
aauucaagguggugguugu

SEQ ID NO: 2538920 - RNA, 19 nt, Homo sapiens
  misc_RNA (1)...(19): siRNA sense strand
agcacgagaugguggugua

SEQ ID NO: 2538921 - RNA, 19 nt, Homo sapiens
  misc_RNA (1)...(19): siRNA sense strand
agaggguggcuuugaguau

SEQ ID NO: 2538922 - RNA, 19 nt, Homo sapiens
  misc_RNA (1)...(19): siRNA sense strand
ccucaaaguacauccgcuu

SEQ ID NO: 2538923 - RNA, 19 nt, Homo sapiens
  misc_RNA (1)...(19): siRNA sense strand
ugacugggaaagaagacaa

SEQ ID NO: 2538924 - RNA, 19 nt, Homo sapiens
  misc_RNA (1)...(19): siRNA sense strand
gaguggucuuggagcauga

SEQ ID NO: 2538925 - RNA, 19 nt, Homo sapiens
  misc_RNA (1)...(19): siRNA sense strand
acaagaaggaugaggaguc

SEQ ID NO: 2538926 - RNA, 19 nt, Homo sapiens
  misc_RNA (1)...(19): siRNA sense strand
cuaccaggcaggagaucuu

SEQ ID NO: 2538927 - RNA, 19 nt, Homo sapiens
  misc_RNA (1)...(19): siRNA sense strand
aggcuaugaggaugaguau

SEQ ID NO: 2538928 - RNA, 19 nt, Homo sapiens
  misc_RNA (1)...(19): siRNA sense strand
gggaugagguaggggauga

SEQ ID NO: 2538929 - RNA, 19 nt, Homo sapiens
  misc_RNA (1)...(19): siRNA sense strand
ccguguauuuaaugaaacu

SEQ ID NO: 2538930 - RNA, 19 nt, Homo sapiens
  misc_RNA (1)...(19): siRNA sense strand
ccagaaguuuggaggagcu

SEQ ID NO: 2538931 - RNA, 19 nt, Homo sapiens
  misc_RNA (1)...(19): siRNA sense strand
gaaccuggucacagauuca

SEQ ID NO: 2538932 - RNA, 19 nt, Homo sapiens
  misc_RNA (1)...(19): siRNA sense strand
cggaugaauucaagguggu

SEQ ID NO: 2538933 - RNA, 19 nt, Homo sapiens
  misc_RNA (1)...(19): siRNA sense strand
gcgcuaucguggacugcau

SEQ ID NO: 2538934 - RNA, 19 nt, Homo sapiens
  misc_RNA (1)...(19): siRNA sense strand
caaaagacaugacugggaa

SEQ ID NO: 2538935 - RNA, 19 nt, Homo sapiens
  misc_RNA (1)...(19): siRNA sense strand
ccuugagaagagugcggua

SEQ ID NO: 2538936 - RNA, 19 nt, Homo sapiens
  misc_RNA (1)...(19): siRNA sense strand
gguaauauugugaaguucu

SEQ ID NO: 2538937 - RNA, 19 nt, Homo sapiens
  misc_RNA (1)...(19): siRNA sense strand
ucuuggcaucugugggaua

SEQ ID NO: 2538938 - RNA, 19 nt, Homo sapiens
  misc_RNA (1)...(19): siRNA sense strand
aguuuggagcccagaauga

SEQ ID NO: 2538939 - RNA, 19 nt, Homo sapiens
  misc_RNA (1)...(19): siRNA sense strand
ggucagacaaagugccgga

SEQ ID NO: 2538940 - RNA, 19 nt, Homo sapiens
  misc_RNA (1)...(19): siRNA sense strand
guaaucuggaucuggagaa

SEQ ID NO: 2538941 - RNA, 19 nt, Homo sapiens
  misc_RNA (1)...(19): siRNA sense strand
ugauaaagcuuacgggaga

SEQ ID NO: 2538942 - RNA, 19 nt, Homo sapiens
  misc_RNA (1)...(19): siRNA sense strand
cuggaaagaaggugaagaa

SEQ ID NO: 2538943 - RNA, 19 nt, Homo sapiens
  misc_RNA (1)...(19): siRNA sense strand
aggaagaggaagaagaaga

SEQ ID NO: 2538944 - RNA, 19 nt, Homo sapiens
  misc_RNA (1)...(19): siRNA sense strand
aaagaaagcaggagacaca

SEQ ID NO: 2538945 - RNA, 19 nt, Homo sapiens
  misc_RNA (1)...(19): siRNA sense strand
uguccugaguggagagaau

SEQ ID NO: 2538946 - RNA, 19 nt, Homo sapiens
  misc_RNA (1)...(19): siRNA sense strand
gugcuaaaugcaagaagaa

SEQ ID NO: 2538947 - RNA, 19 nt, Homo sapiens
  misc_RNA (1)...(19): siRNA sense strand
ccaagaagaacaucggcaa

SEQ ID NO: 2538948 - RNA, 19 nt, Homo sapiens
  misc_RNA (1)...(19): siRNA sense strand
aagagagagaagaggagaa

SEQ ID NO: 2538949 - RNA, 19 nt, Homo sapiens
  misc_RNA (1)...(19): siRNA sense strand
agagagaagaggagaaacu

SEQ ID NO: 2538950 - RNA, 19 nt, Homo sapiens
  misc_RNA (1)...(19): siRNA sense strand
ggaaaggagcagaaggucu

SEQ ID NO: 2538951 - RNA, 19 nt, Homo sapiens
  misc_RNA (1)...(19): siRNA sense strand
ucaccaaggauguaggcua

SEQ ID NO: 2538952 - RNA, 19 nt, Homo sapiens
  misc_RNA (1)...(19): siRNA sense strand
agcagaaggucuuggugaa

SEQ ID NO: 2538953 - RNA, 19 nt, Homo sapiens
  misc_RNA (1)...(19): siRNA sense strand
cgacaagacucugggacga

SEQ ID NO: 2538954 - RNA, 19 nt, Homo sapiens
  misc_RNA (1)...(19): siRNA sense strand
ggagaaacuucaacgccuu

SEQ ID NO: 2538955 - RNA, 19 nt, Homo sapiens
  misc_RNA (1)...(19): siRNA sense strand
gagcagaaggucuugguga

SEQ ID NO: 2538956 - RNA, 19 nt, Homo sapiens
  misc_RNA (1)...(19): siRNA sense strand
aagaggaagaggaagaaga

SEQ ID NO: 2538957 - RNA, 19 nt, Homo sapiens
  misc_RNA (1)...(19): siRNA sense strand
gaagagucuccaaggaaaa

SEQ ID NO: 2538958 - RNA, 19 nt, Homo sapiens
  misc_RNA (1)...(19): siRNA sense strand
gagggaaggaaaagaaaau

SEQ ID NO: 2538959 - RNA, 19 nt, Homo sapiens
  misc_RNA (1)...(19): siRNA sense strand
ggacgaagaguuugaccga

SEQ ID NO: 2538960 - RNA, 19 nt, Homo sapiens
  misc_RNA (1)...(19): siRNA sense strand
caguagaagaggaugggca

SEQ ID NO: 2538961 - RNA, 19 nt, Homo sapiens
  misc_RNA (1)...(19): siRNA sense strand
caagaagaacaucggcaau

SEQ ID NO: 2538962 - RNA, 19 nt, Homo sapiens
  misc_RNA (1)...(19): siRNA sense strand
acgggaagaggaagaggaa

SEQ ID NO: 2538963 - RNA, 19 nt, Homo sapiens
  misc_RNA (1)...(19): siRNA sense strand
ggaaagaaggugaagaagc

SEQ ID NO: 2538964 - RNA, 19 nt, Homo sapiens
  misc_RNA (1)...(19): siRNA sense strand
ccuaccagcuggaggccuu

SEQ ID NO: 2538965 - RNA, 19 nt, Homo sapiens
  misc_RNA (1)...(19): siRNA sense strand
aguagaagaggaugggcau

SEQ ID NO: 2538966 - RNA, 19 nt, Homo sapiens
  misc_RNA (1)...(19): siRNA sense strand
ccaucgacgccaugcagaa

SEQ ID NO: 2538967 - RNA, 19 nt, Homo sapiens
  misc_RNA (1)...(19): siRNA sense strand
gggaagaucaccaaggaug

SEQ ID NO: 2538968 - RNA, 19 nt, Homo sapiens
  misc_RNA (1)...(19): siRNA sense strand
ccagaauaauggugauccu

SEQ ID NO: 2538969 - RNA, 19 nt, Homo sapiens
  misc_RNA (1)...(19): siRNA sense strand
cagaucacuccaagaagaa

SEQ ID NO: 2538970 - RNA, 19 nt, Homo sapiens
  misc_RNA (1)...(19): siRNA sense strand
gcagauucuaagacgguga

SEQ ID NO: 2538971 - RNA, 19 nt, Homo sapiens
  misc_RNA (1)...(19): siRNA sense strand
acgucaaggugguucugaa

SEQ ID NO: 2538972 - RNA, 19 nt, Homo sapiens
  misc_RNA (1)...(19): siRNA sense strand
aggccuacgugcuguucua

SEQ ID NO: 2538973 - RNA, 19 nt, Homo sapiens
  misc_RNA (1)...(19): siRNA sense strand
auuccaggcucuaagaaaa

SEQ ID NO: 2538974 - RNA, 19 nt, Homo sapiens
  misc_RNA (1)...(19): siRNA sense strand
gaaagaaggugaagaagcc

SEQ ID NO: 2538975 - RNA, 19 nt, Homo sapiens
  misc_RNA (1)...(19): siRNA sense strand
cagcagaucugggagccaa

SEQ ID NO: 2538976 - RNA, 19 nt, Homo sapiens
  misc_RNA (1)...(19): siRNA sense strand
cugaugugguccaggaacu

SEQ ID NO: 2538977 - RNA, 19 nt, Homo sapiens
  misc_RNA (1)...(19): siRNA sense strand
cgagggaaggaaaagaaaa

SEQ ID NO: 2538978 - RNA, 19 nt, Homo sapiens
  misc_RNA (1)...(19): siRNA sense strand
ugaagugcuccgugugcaa

SEQ ID NO: 2538979 - RNA, 19 nt, Homo sapiens
  misc_RNA (1)...(19): siRNA sense strand
guggauaaguugaaggagg

SEQ ID NO: 2538980 - RNA, 19 nt, Homo sapiens
  misc_RNA (1)...(19): siRNA sense strand
ggcaugggcugaaggggaa

SEQ ID NO: 2538981 - RNA, 19 nt, Homo sapiens
  misc_RNA (1)...(19): siRNA sense strand
ucucaaaugcccaaggagu

SEQ ID NO: 2538982 - RNA, 19 nt, Homo sapiens
  misc_RNA (1)...(19): siRNA sense strand
uggaggccuuaaagagcaa

SEQ ID NO: 2538983 - RNA, 19 nt, Homo sapiens
  misc_RNA (1)...(19): siRNA sense strand
cgucaaacgcaggcuacua

SEQ ID NO: 2538984 - RNA, 19 nt, Homo sapiens
  misc_RNA (1)...(19): siRNA sense strand
ugugcuaaaugcaagaaga

SEQ ID NO: 2538985 - RNA, 19 nt, Homo sapiens
  misc_RNA (1)...(19): siRNA sense strand
aguuagaacagcuguacaa

SEQ ID NO: 2538986 - RNA, 19 nt, Homo sapiens
  misc_RNA (1)...(19): siRNA sense strand
uggaacaagaauugaaaga

SEQ ID NO: 2538987 - RNA, 19 nt, Homo sapiens
  misc_RNA (1)...(19): siRNA sense strand
aaaucaucgcagaaggaua

SEQ ID NO: 2538988 - RNA, 19 nt, Homo sapiens
  misc_RNA (1)...(19): siRNA sense strand
acuggaacuuagugcuuaa

SEQ ID NO: 2538989 - RNA, 19 nt, Homo sapiens
  misc_RNA (1)...(19): siRNA sense strand
ggaagaaguuagaacagcu

SEQ ID NO: 2538990 - RNA, 19 nt, Homo sapiens
  misc_RNA (1)...(19): siRNA sense strand
guaaaaggaucauuggaca

SEQ ID NO: 2538991 - RNA, 19 nt, Homo sapiens
  misc_RNA (1)...(19): siRNA sense strand
aauuggaauagauggcaua

SEQ ID NO: 2538992 - RNA, 19 nt, Homo sapiens
  misc_RNA (1)...(19): siRNA sense strand
cccucaaauugcugggaca

SEQ ID NO: 2538993 - RNA, 19 nt, Homo sapiens
  misc_RNA (1)...(19): siRNA sense strand
ggaucauuggacaggaaga

SEQ ID NO: 2538994 - RNA, 19 nt, Homo sapiens
  misc_RNA (1)...(19): siRNA sense strand
ccucaaauugcugggacaa

SEQ ID NO: 2538995 - RNA, 19 nt, Homo sapiens
  misc_RNA (1)...(19): siRNA sense strand
gcguggaaguucagagcag

SEQ ID NO: 2538996 - RNA, 19 nt, Homo sapiens
  misc_RNA (1)...(19): siRNA sense strand
auggauggcaugacagaau

SEQ ID NO: 2538997 - RNA, 19 nt, Homo sapiens
  misc_RNA (1)...(19): siRNA sense strand
auugaaagaaccaggacga

SEQ ID NO: 2538998 - RNA, 19 nt, Homo sapiens
  misc_RNA (1)...(19): siRNA sense strand
aguugaaaucaucgcagaa

SEQ ID NO: 2538999 - RNA, 19 nt, Homo sapiens
  misc_RNA (1)...(19): siRNA sense strand
cuuagugcuuaauggaaga

SEQ ID NO: 2539000 - RNA, 19 nt, Homo sapiens
  misc_RNA (1)...(19): siRNA sense strand
agauggaacaagaauugaa

SEQ ID NO: 2539001 - RNA, 19 nt, Homo sapiens
  misc_RNA (1)...(19): siRNA sense strand
agaaguuagaacagcugua

SEQ ID NO: 2539002 - RNA, 19 nt, Homo sapiens
  misc_RNA (1)...(19): siRNA sense strand
auaaagaagagguggacgu

SEQ ID NO: 2539003 - RNA, 19 nt, Homo sapiens
  misc_RNA (1)...(19): siRNA sense strand
uggaagaagcagauuuaca

SEQ ID NO: 2539004 - RNA, 19 nt, Homo sapiens
  misc_RNA (1)...(19): siRNA sense strand
cagacuaggaagugccaca

SEQ ID NO: 2539005 - RNA, 19 nt, Homo sapiens
  misc_RNA (1)...(19): siRNA sense strand
auacagaucugguuggcca

SEQ ID NO: 2539006 - RNA, 19 nt, Homo sapiens
  misc_RNA (1)...(19): siRNA sense strand
cgacgauuucagaaguuau

SEQ ID NO: 2539007 - RNA, 19 nt, Homo sapiens
  misc_RNA (1)...(19): siRNA sense strand
uugauaaagaagaggugga

SEQ ID NO: 2539008 - RNA, 19 nt, Homo sapiens
  misc_RNA (1)...(19): siRNA sense strand
agugaaggaacgagagaaa

SEQ ID NO: 2539009 - RNA, 19 nt, Homo sapiens
  misc_RNA (1)...(19): siRNA sense strand
caauaaugcagaaacgaaa

SEQ ID NO: 2539010 - RNA, 19 nt, Homo sapiens
  misc_RNA (1)...(19): siRNA sense strand
gugaaaaccuacagaaaga

SEQ ID NO: 2539011 - RNA, 19 nt, Homo sapiens
  misc_RNA (1)...(19): siRNA sense strand
gugcaaacugugaggguga

SEQ ID NO: 2539012 - RNA, 19 nt, Homo sapiens
  misc_RNA (1)...(19): siRNA sense strand
cuguaugagacuagagcua

SEQ ID NO: 2539013 - RNA, 19 nt, Homo sapiens
  misc_RNA (1)...(19): siRNA sense strand
ccgcuuggaucuuggaaau

SEQ ID NO: 2539014 - RNA, 19 nt, Homo sapiens
  misc_RNA (1)...(19): siRNA sense strand
augaaagaauucugaguga

SEQ ID NO: 2539015 - RNA, 19 nt, Homo sapiens
  misc_RNA (1)...(19): siRNA sense strand
gaucuuggaaauagaacaa

SEQ ID NO: 2539016 - RNA, 19 nt, Homo sapiens
  misc_RNA (1)...(19): siRNA sense strand
gggcuuauuucgagcgguu

SEQ ID NO: 2539017 - RNA, 19 nt, Homo sapiens
  misc_RNA (1)...(19): siRNA sense strand
gagaaaagaaagcaugaaa

SEQ ID NO: 2539018 - RNA, 19 nt, Homo sapiens
  misc_RNA (1)...(19): siRNA sense strand
gccuaagaccguuggaauu

SEQ ID NO: 2539019 - RNA, 19 nt, Homo sapiens
  misc_RNA (1)...(19): siRNA sense strand
ccccaagaguagacagaaa

SEQ ID NO: 2539020 - RNA, 19 nt, Homo sapiens
  misc_RNA (1)...(19): siRNA sense strand
gcguaaaccagaugaaacu

SEQ ID NO: 2539021 - RNA, 19 nt, Homo sapiens
  misc_RNA (1)...(19): siRNA sense strand
cuauaaggucgaagauaca

SEQ ID NO: 2539022 - RNA, 19 nt, Homo sapiens
  misc_RNA (1)...(19): siRNA sense strand
uguacaaguuagaggaucu

SEQ ID NO: 2539023 - RNA, 19 nt, Homo sapiens
  misc_RNA (1)...(19): siRNA sense strand
cacaguuuauggugggaaa

SEQ ID NO: 2539024 - RNA, 19 nt, Homo sapiens
  misc_RNA (1)...(19): siRNA sense strand
ccaucaucaucuugaauuu

SEQ ID NO: 2539025 - RNA, 19 nt, Homo sapiens
  misc_RNA (1)...(19): siRNA sense strand
gcacgugacuuuaugccua

SEQ ID NO: 2539026 - RNA, 19 nt, Homo sapiens
  misc_RNA (1)...(19): siRNA sense strand
ucaacaagaaguaagggaa

SEQ ID NO: 2539027 - RNA, 19 nt, Homo sapiens
  misc_RNA (1)...(19): siRNA sense strand
guguaauguucuugaucga

SEQ ID NO: 2539028 - RNA, 19 nt, Homo sapiens
  misc_RNA (1)...(19): siRNA sense strand
acuaggaggaugugugauu

SEQ ID NO: 2539029 - RNA, 19 nt, Homo sapiens
  misc_RNA (1)...(19): siRNA sense strand
gugugaaaaccuacagaaa

SEQ ID NO: 2539030 - RNA, 19 nt, Homo sapiens
  misc_RNA (1)...(19): siRNA sense strand
gggugauguugcaaaugaa

SEQ ID NO: 2539031 - RNA, 19 nt, Homo sapiens
  misc_RNA (1)...(19): siRNA sense strand
gaaugaacuaggaggaugu

SEQ ID NO: 2539032 - RNA, 19 nt, Homo sapiens
  misc_RNA (1)...(19): siRNA sense strand
agaugaaacuggaaaauca

SEQ ID NO: 2539033 - RNA, 19 nt, Homo sapiens
  misc_RNA (1)...(19): siRNA sense strand
aacaaagaugggacagaaa

SEQ ID NO: 2539034 - RNA, 19 nt, Homo sapiens
  misc_RNA (1)...(19): siRNA sense strand
guauauuauucauggguuc

SEQ ID NO: 2539035 - RNA, 19 nt, Homo sapiens
  misc_RNA (1)...(19): siRNA sense strand
ccauaugaguugagcagcu

SEQ ID NO: 2539036 - RNA, 19 nt, Homo sapiens
  misc_RNA (1)...(19): siRNA sense strand
gaagaugacugaugcagga

SEQ ID NO: 2539037 - RNA, 19 nt, Homo sapiens
  misc_RNA (1)...(19): siRNA sense strand
caacaagaaguaagggaac

SEQ ID NO: 2539038 - RNA, 19 nt, Homo sapiens
  misc_RNA (1)...(19): siRNA sense strand
gagauguuaaagucagaaa

SEQ ID NO: 2539039 - RNA, 19 nt, Homo sapiens
  misc_RNA (1)...(19): siRNA sense strand
gugccaaagugaccgagaa

SEQ ID NO: 2539040 - RNA, 19 nt, Homo sapiens
  misc_RNA (1)...(19): siRNA sense strand
acuaaaugugauugcagaa

SEQ ID NO: 2539041 - RNA, 19 nt, Homo sapiens
  misc_RNA (1)...(19): siRNA sense strand
ccaaaagcaagcuguguaa

SEQ ID NO: 2539042 - RNA, 19 nt, Homo sapiens
  misc_RNA (1)...(19): siRNA sense strand
uugcagaaaguguggugaa

SEQ ID NO: 2539043 - RNA, 19 nt, Homo sapiens
  misc_RNA (1)...(19): siRNA sense strand
auggugaacuucuggauau

SEQ ID NO: 2539044 - RNA, 19 nt, Homo sapiens
  misc_RNA (1)...(19): siRNA sense strand
ugauagaacagaaccaaaa

SEQ ID NO: 2539045 - RNA, 19 nt, Homo sapiens
  misc_RNA (1)...(19): siRNA sense strand
gaacaaauacucugcgaug

SEQ ID NO: 2539046 - RNA, 19 nt, Homo sapiens
  misc_RNA (1)...(19): siRNA sense strand
uguauggaauggugaacuu

SEQ ID NO: 2539047 - RNA, 19 nt, Homo sapiens
  misc_RNA (1)...(19): siRNA sense strand
agaaaggauccucgggcuu

SEQ ID NO: 2539048 - RNA, 19 nt, Homo sapiens
  misc_RNA (1)...(19): siRNA sense strand
cuacagaaagauagcacca

SEQ ID NO: 2539049 - RNA, 19 nt, Homo sapiens
  misc_RNA (1)...(19): siRNA sense strand
aguuagguuauuugaggaa

SEQ ID NO: 2539050 - RNA, 19 nt, Homo sapiens
  misc_RNA (1)...(19): siRNA sense strand
uggugaacuucuggauaua

SEQ ID NO: 2539051 - RNA, 19 nt, Homo sapiens
  misc_RNA (1)...(19): siRNA sense strand
guggaaugaacuaggagga

SEQ ID NO: 2539052 - RNA, 19 nt, Homo sapiens
  misc_RNA (1)...(19): siRNA sense strand
gguuauuugaggaacucua

SEQ ID NO: 2539053 - RNA, 19 nt, Homo sapiens
  misc_RNA (1)...(19): siRNA sense strand
cauaauugaugacaggcau

SEQ ID NO: 2539054 - RNA, 19 nt, Homo sapiens
  misc_RNA (1)...(19): siRNA sense strand
cuugaagauugauagaaca

SEQ ID NO: 2539055 - RNA, 19 nt, Homo sapiens
  misc_RNA (1)...(19): siRNA sense strand
gugaacuucuggauauaau

SEQ ID NO: 2539056 - RNA, 19 nt, Homo sapiens
  misc_RNA (1)...(19): siRNA sense strand
uuacauuggaucaggcaga

SEQ ID NO: 2539057 - RNA, 19 nt, Homo sapiens
  misc_RNA (1)...(19): siRNA sense strand
ugaaguggagacugaacaa

SEQ ID NO: 2539058 - RNA, 19 nt, Homo sapiens
  misc_RNA (1)...(19): siRNA sense strand
gagcaauaaugcagaaacg

SEQ ID NO: 2539059 - RNA, 19 nt, Homo sapiens
  misc_RNA (1)...(19): siRNA sense strand
gaaaguguggugaagaaaa

SEQ ID NO: 2539060 - RNA, 19 nt, Homo sapiens
  misc_RNA (1)...(19): siRNA sense strand
uuucagaugccgauagaca

SEQ ID NO: 2539061 - RNA, 19 nt, Homo sapiens
  misc_RNA (1)...(19): siRNA sense strand
aggaggaagauggcggaua

SEQ ID NO: 2539062 - RNA, 19 nt, Homo sapiens
  misc_RNA (1)...(19): siRNA sense strand
gccaacaagaagaaguuau

SEQ ID NO: 2539063 - RNA, 19 nt, Homo sapiens
  misc_RNA (1)...(19): siRNA sense strand
aguuauacuuacuggugga

SEQ ID NO: 2539064 - RNA, 19 nt, Homo sapiens
  misc_RNA (1)...(19): siRNA sense strand
gcagagucaacauaaacaa

SEQ ID NO: 2539065 - RNA, 19 nt, Homo sapiens
  misc_RNA (1)...(19): siRNA sense strand
ggaucuguagugagccuua

SEQ ID NO: 2539066 - RNA, 19 nt, Homo sapiens
  misc_RNA (1)...(19): siRNA sense strand
agaaaguguggugaagaaa

SEQ ID NO: 2539067 - RNA, 19 nt, Homo sapiens
  misc_RNA (1)...(19): siRNA sense strand
uggucaaggccaugggcaa

SEQ ID NO: 2539068 - RNA, 19 nt, Homo sapiens
  misc_RNA (1)...(19): siRNA sense strand
gcgaggaggaugaagccaa

SEQ ID NO: 2539069 - RNA, 19 nt, Homo sapiens
  misc_RNA (1)...(19): siRNA sense strand
ccagagagcuccuugguca

SEQ ID NO: 2539070 - RNA, 19 nt, Homo sapiens
  misc_RNA (1)...(19): siRNA sense strand
acaacaucgcggugcgcaa

SEQ ID NO: 2539071 - RNA, 19 nt, Homo sapiens
  misc_RNA (1)...(19): siRNA sense strand
cagagagcuccuuggucaa

SEQ ID NO: 2539072 - RNA, 19 nt, Homo sapiens
  misc_RNA (1)...(19): siRNA sense strand
gccaagaagucgguggaca

SEQ ID NO: 2539073 - RNA, 19 nt, Homo sapiens
  misc_RNA (1)...(19): siRNA sense strand
cgguggacaagaacagcaa

SEQ ID NO: 2539074 - RNA, 19 nt, Homo sapiens
  misc_RNA (1)...(19): siRNA sense strand
acguggagacgcagcagaa

SEQ ID NO: 2539075 - RNA, 19 nt, Homo sapiens
  misc_RNA (1)...(19): siRNA sense strand
acaaugaccgccugcgcaa

SEQ ID NO: 2539076 - RNA, 19 nt, Homo sapiens
  misc_RNA (1)...(19): siRNA sense strand
cgggaaagguucugcccaa

SEQ ID NO: 2539077 - RNA, 19 nt, Homo sapiens
  misc_RNA (1)...(19): siRNA sense strand
acuucauggugcugaguaa

SEQ ID NO: 2539078 - RNA, 19 nt, Homo sapiens
  misc_RNA (1)...(19): siRNA sense strand
cauuggugacugugggaaa

SEQ ID NO: 2539079 - RNA, 19 nt, Homo sapiens
  misc_RNA (1)...(19): siRNA sense strand
caucacagcuacaugggaa

SEQ ID NO: 2539080 - RNA, 19 nt, Homo sapiens
  misc_RNA (1)...(19): siRNA sense strand
ggacuaagguggcuggacu

SEQ ID NO: 2539081 - RNA, 19 nt, Homo sapiens
  misc_RNA (1)...(19): siRNA sense strand
gccucaaacccaaggacaa

SEQ ID NO: 2539082 - RNA, 19 nt, Homo sapiens
  misc_RNA (1)...(19): siRNA sense strand
gagucuaucugcuuggcaa

SEQ ID NO: 2539083 - RNA, 19 nt, Homo sapiens
  misc_RNA (1)...(19): siRNA sense strand
gaaagaugcugauaggucu

SEQ ID NO: 2539084 - RNA, 19 nt, Homo sapiens
  misc_RNA (1)...(19): siRNA sense strand
ggaaagaugcugauagguc

SEQ ID NO: 2539085 - RNA, 19 nt, Homo sapiens
  misc_RNA (1)...(19): siRNA sense strand
ccucaaacccaaggacaau

SEQ ID NO: 2539086 - RNA, 19 nt, Homo sapiens
  misc_RNA (1)...(19): siRNA sense strand
ugauaggucuugcuggcua

SEQ ID NO: 2539087 - RNA, 19 nt, Homo sapiens
  misc_RNA (1)...(19): siRNA sense strand
cagcggagguugcaggguu

SEQ ID NO: 2539088 - RNA, 19 nt, Homo sapiens
  misc_RNA (1)...(19): siRNA sense strand
cggaagcacuaucagguca

SEQ ID NO: 2539089 - RNA, 19 nt, Homo sapiens
  misc_RNA (1)...(19): siRNA sense strand
ucuggaauguggaggacca

SEQ ID NO: 2539090 - RNA, 19 nt, Homo sapiens
  misc_RNA (1)...(19): siRNA sense strand
caucauugcuguagccaug

SEQ ID NO: 2539091 - RNA, 19 nt, Homo sapiens
  misc_RNA (1)...(19): siRNA sense strand
gggcauacauguggcggga

SEQ ID NO: 2539092 - RNA, 19 nt, Homo sapiens
  misc_RNA (1)...(19): siRNA sense strand
gggucaaguuuguuggccu

SEQ ID NO: 2539093 - RNA, 19 nt, Homo sapiens
  misc_RNA (1)...(19): siRNA sense strand
ugcacaaggacuacaacaa

SEQ ID NO: 2539094 - RNA, 19 nt, Homo sapiens
  misc_RNA (1)...(19): siRNA sense strand
acuagaacacaaagaaacu

SEQ ID NO: 2539095 - RNA, 19 nt, Homo sapiens
  misc_RNA (1)...(19): siRNA sense strand
caguggagcaaguggaaga

SEQ ID NO: 2539096 - RNA, 19 nt, Homo sapiens
  misc_RNA (1)...(19): siRNA sense strand
cggagaagauguacgccau

SEQ ID NO: 2539097 - RNA, 19 nt, Homo sapiens
  misc_RNA (1)...(19): siRNA sense strand
cgggacaacagcagggaca

SEQ ID NO: 2539098 - RNA, 19 nt, Homo sapiens
  misc_RNA (1)...(19): siRNA sense strand
gagaaaagcugaagaggag

SEQ ID NO: 2539099 - RNA, 19 nt, Homo sapiens
  misc_RNA (1)...(19): siRNA sense strand
acgacaaggaggacgugaa

SEQ ID NO: 2539100 - RNA, 19 nt, Homo sapiens
  misc_RNA (1)...(19): siRNA sense strand
acagagaugucaagccuga

SEQ ID NO: 2539101 - RNA, 19 nt, Homo sapiens
  misc_RNA (1)...(19): siRNA sense strand
ggccgguguuugacgacaa

SEQ ID NO: 2539102 - RNA, 19 nt, Homo sapiens
  misc_RNA (1)...(19): siRNA sense strand
uggcacuggcucuggacua

SEQ ID NO: 2539103 - RNA, 19 nt, Homo sapiens
  misc_RNA (1)...(19): siRNA sense strand
ccacagagaugucaagccu

SEQ ID NO: 2539104 - RNA, 19 nt, Homo sapiens
  misc_RNA (1)...(19): siRNA sense strand
ggaagaagaggaugggcuc

SEQ ID NO: 2539105 - RNA, 19 nt, Homo sapiens
  misc_RNA (1)...(19): siRNA sense strand
caacaaaggccgucugcac

SEQ ID NO: 2539106 - RNA, 19 nt, Homo sapiens
  misc_RNA (1)...(19): siRNA sense strand
agagaaaagcugaagagga

SEQ ID NO: 2539107 - RNA, 19 nt, Homo sapiens
  misc_RNA (1)...(19): siRNA sense strand
gggaacugaaugaggacaa

SEQ ID NO: 2539108 - RNA, 19 nt, Homo sapiens
  misc_RNA (1)...(19): siRNA sense strand
agaacaaguugaagagcga

SEQ ID NO: 2539109 - RNA, 19 nt, Homo sapiens
  misc_RNA (1)...(19): siRNA sense strand
ccgcaauacaggaggaguu

SEQ ID NO: 2539110 - RNA, 19 nt, Homo sapiens
  misc_RNA (1)...(19): siRNA sense strand
aagcaaugguucaggcaga

SEQ ID NO: 2539111 - RNA, 19 nt, Homo sapiens
  misc_RNA (1)...(19): siRNA sense strand
gcuuaaagaaggaaaagaa

SEQ ID NO: 2539112 - RNA, 19 nt, Homo sapiens
  misc_RNA (1)...(19): siRNA sense strand
cccaagaggaagaagucua

SEQ ID NO: 2539113 - RNA, 19 nt, Homo sapiens
  misc_RNA (1)...(19): siRNA sense strand
aggaagaagucuacaccca

SEQ ID NO: 2539114 - RNA, 19 nt, Homo sapiens
  misc_RNA (1)...(19): siRNA sense strand
cagcuauucccgugccaaa

SEQ ID NO: 2539115 - RNA, 19 nt, Homo sapiens
  misc_RNA (1)...(19): siRNA sense strand
caggagaagaaacgcuuaa

SEQ ID NO: 2539116 - RNA, 19 nt, Homo sapiens
  misc_RNA (1)...(19): siRNA sense strand
cuggauaaggacaucaaua

SEQ ID NO: 2539117 - RNA, 19 nt, Homo sapiens
  misc_RNA (1)...(19): siRNA sense strand
ggguaacacuccaaaauau

SEQ ID NO: 2539118 - RNA, 19 nt, Homo sapiens
  misc_RNA (1)...(19): siRNA sense strand
cugccauugacuugauaaa

SEQ ID NO: 2539119 - RNA, 19 nt, Homo sapiens
  misc_RNA (1)...(19): siRNA sense strand
aggagaauggaauggaaga

SEQ ID NO: 2539120 - RNA, 19 nt, Homo sapiens
  misc_RNA (1)...(19): siRNA sense strand
uggaggagucugugcucaa

SEQ ID NO: 2539121 - RNA, 19 nt, Homo sapiens
  misc_RNA (1)...(19): siRNA sense strand
augugaaccggguggacaa

SEQ ID NO: 2539122 - RNA, 19 nt, Homo sapiens
  misc_RNA (1)...(19): siRNA sense strand
gugaagaucaucaacgaca

SEQ ID NO: 2539123 - RNA, 19 nt, Homo sapiens
  misc_RNA (1)...(19): siRNA sense strand
ggaaacaguuaaugacccu

SEQ ID NO: 2539124 - RNA, 19 nt, Homo sapiens
  misc_RNA (1)...(19): siRNA sense strand
ggaaauucuccaaagagga

SEQ ID NO: 2539125 - RNA, 19 nt, Homo sapiens
  misc_RNA (1)...(19): siRNA sense strand
uauuggaaaccgaagggaa

SEQ ID NO: 2539126 - RNA, 19 nt, Homo sapiens
  misc_RNA (1)...(19): siRNA sense strand
guugaugaguagcgaucuu

SEQ ID NO: 2539127 - RNA, 19 nt, Homo sapiens
  misc_RNA (1)...(19): siRNA sense strand
ggaagaagucuacacccaa

SEQ ID NO: 2539128 - RNA, 19 nt, Homo sapiens
  misc_RNA (1)...(19): siRNA sense strand
cccaaggaggaaacaguua

SEQ ID NO: 2539129 - RNA, 19 nt, Homo sapiens
  misc_RNA (1)...(19): siRNA sense strand
aggaggaguuaggguacaa

SEQ ID NO: 2539130 - RNA, 19 nt, Homo sapiens
  misc_RNA (1)...(19): siRNA sense strand
ccauuagccuccuggacca

SEQ ID NO: 2539131 - RNA, 19 nt, Homo sapiens
  misc_RNA (1)...(19): siRNA sense strand
aggaggaaacaguuaauga

SEQ ID NO: 2539132 - RNA, 19 nt, Homo sapiens
  misc_RNA (1)...(19): siRNA sense strand
gaagggaacugaaugagga

SEQ ID NO: 2539133 - RNA, 19 nt, Homo sapiens
  misc_RNA (1)...(19): siRNA sense strand
auaaagcaucccaggaaga

SEQ ID NO: 2539134 - RNA, 19 nt, Homo sapiens
  misc_RNA (1)...(19): siRNA sense strand
gcuucgagaacaaguugaa

SEQ ID NO: 2539135 - RNA, 19 nt, Homo sapiens
  misc_RNA (1)...(19): siRNA sense strand
ccuaauuggggaagcggua

SEQ ID NO: 2539136 - RNA, 19 nt, Homo sapiens
  misc_RNA (1)...(19): siRNA sense strand
cuggcaaacaaaugcagua

SEQ ID NO: 2539137 - RNA, 19 nt, Homo sapiens
  misc_RNA (1)...(19): siRNA sense strand
cgcugaaggaaguggagga

SEQ ID NO: 2539138 - RNA, 19 nt, Homo sapiens
  misc_RNA (1)...(19): siRNA sense strand
cggagcuggugaagaucau

SEQ ID NO: 2539139 - RNA, 19 nt, Homo sapiens
  misc_RNA (1)...(19): siRNA sense strand
gagaaacaggagaagaaac

SEQ ID NO: 2539140 - RNA, 19 nt, Homo sapiens
  misc_RNA (1)...(19): siRNA sense strand
gggaaaacuuuguggacca

SEQ ID NO: 2539141 - RNA, 19 nt, Homo sapiens
  misc_RNA (1)...(19): siRNA sense strand
cgguggaggucaugggcuu

SEQ ID NO: 2539142 - RNA, 19 nt, Homo sapiens
  misc_RNA (1)...(19): siRNA sense strand
ccuauaagauguuagagga

SEQ ID NO: 2539143 - RNA, 19 nt, Homo sapiens
  misc_RNA (1)...(19): siRNA sense strand
gcuuuauuaacgagaucaa

SEQ ID NO: 2539144 - RNA, 19 nt, Homo sapiens
  misc_RNA (1)...(19): siRNA sense strand
uuugcugacugcugggaaa

SEQ ID NO: 2539145 - RNA, 19 nt, Homo sapiens
  misc_RNA (1)...(19): siRNA sense strand
uggacgaaacgcagugcua

SEQ ID NO: 2539146 - RNA, 19 nt, Homo sapiens
  misc_RNA (1)...(19): siRNA sense strand
agauguuagaggagcuaga

SEQ ID NO: 2539147 - RNA, 19 nt, Homo sapiens
  misc_RNA (1)...(19): siRNA sense strand
cagcaagacaugugugcaa

SEQ ID NO: 2539148 - RNA, 19 nt, Homo sapiens
  misc_RNA (1)...(19): siRNA sense strand
gugaugaagaugaggaaaa

SEQ ID NO: 2539149 - RNA, 19 nt, Homo sapiens
  misc_RNA (1)...(19): siRNA sense strand
cugaagaaggacuuaguaa

SEQ ID NO: 2539150 - RNA, 19 nt, Homo sapiens
  misc_RNA (1)...(19): siRNA sense strand
agaagaaaccaaagacaca

SEQ ID NO: 2539151 - RNA, 19 nt, Homo sapiens
  misc_RNA (1)...(19): siRNA sense strand
auauauagcuagugcagga

SEQ ID NO: 2539152 - RNA, 19 nt, Homo sapiens
  misc_RNA (1)...(19): siRNA sense strand
cuuuagauguagagccuau

SEQ ID NO: 2539153 - RNA, 19 nt, Homo sapiens
  misc_RNA (1)...(19): siRNA sense strand
aagaaaaggucaagagaac

SEQ ID NO: 2539154 - RNA, 19 nt, Homo sapiens
  misc_RNA (1)...(19): siRNA sense strand
gggcaaaauaucacaaauu

SEQ ID NO: 2539155 - RNA, 19 nt, Homo sapiens
  misc_RNA (1)...(19): siRNA sense strand
ggugaaucuccuaagcaaa

SEQ ID NO: 2539156 - RNA, 19 nt, Homo sapiens
  misc_RNA (1)...(19): siRNA sense strand
cuugcagacuugacgguaa

SEQ ID NO: 2539157 - RNA, 19 nt, Homo sapiens
  misc_RNA (1)...(19): siRNA sense strand
caguagauccuaauggaau

SEQ ID NO: 2539158 - RNA, 19 nt, Homo sapiens
  misc_RNA (1)...(19): siRNA sense strand
aggugaaucuccuaagcaa

SEQ ID NO: 2539159 - RNA, 19 nt, Homo sapiens
  misc_RNA (1)...(19): siRNA sense strand
uggugaaggagcuggagaa

SEQ ID NO: 2539160 - RNA, 19 nt, Homo sapiens
  misc_RNA (1)...(19): siRNA sense strand
cugaggaagcacugaaaga

SEQ ID NO: 2539161 - RNA, 19 nt, Homo sapiens
  misc_RNA (1)...(19): siRNA sense strand
cagaaugggcugaaccaau

SEQ ID NO: 2539162 - RNA, 19 nt, Homo sapiens
  misc_RNA (1)...(19): siRNA sense strand
cuuuauaggcugugaucca

SEQ ID NO: 2539163 - RNA, 19 nt, Homo sapiens
  misc_RNA (1)...(19): siRNA sense strand
caacagaguaguaagucau

SEQ ID NO: 2539164 - RNA, 19 nt, Homo sapiens
  misc_RNA (1)...(19): siRNA sense strand
gcucaugaagauagacaca

SEQ ID NO: 2539165 - RNA, 19 nt, Homo sapiens
  misc_RNA (1)...(19): siRNA sense strand
cacuuacaauggagauaaa

SEQ ID NO: 2539166 - RNA, 19 nt, Homo sapiens
  misc_RNA (1)...(19): siRNA sense strand
ucaacagaguaguaaguca

SEQ ID NO: 2539167 - RNA, 19 nt, Homo sapiens
  misc_RNA (1)...(19): siRNA sense strand
ccucagaauagccaguuaa

SEQ ID NO: 2539168 - RNA, 19 nt, Homo sapiens
  misc_RNA (1)...(19): siRNA sense strand
cagugaugaagaugaggaa

SEQ ID NO: 2539169 - RNA, 19 nt, Homo sapiens
  misc_RNA (1)...(19): siRNA sense strand
acauggaaucccaaguaua

SEQ ID NO: 2539170 - RNA, 19 nt, Homo sapiens
  misc_RNA (1)...(19): siRNA sense strand
auggaucaguagaaacaaa

SEQ ID NO: 2539171 - RNA, 19 nt, Homo sapiens
  misc_RNA (1)...(19): siRNA sense strand
cagacuugacgguaacaaa

SEQ ID NO: 2539172 - RNA, 19 nt, Homo sapiens
  misc_RNA (1)...(19): siRNA sense strand
cgaaagacauggaauccca

SEQ ID NO: 2539173 - RNA, 19 nt, Homo sapiens
  misc_RNA (1)...(19): siRNA sense strand
guacggucucagcggguaa

SEQ ID NO: 2539174 - RNA, 19 nt, Homo sapiens
  misc_RNA (1)...(19): siRNA sense strand
gauccagcucauaugguaa

SEQ ID NO: 2539175 - RNA, 19 nt, Homo sapiens
  misc_RNA (1)...(19): siRNA sense strand
aaauggaucaguagaaaca

SEQ ID NO: 2539176 - RNA, 19 nt, Homo sapiens
  misc_RNA (1)...(19): siRNA sense strand
aagcaaaagggacaagaaa

SEQ ID NO: 2539177 - RNA, 19 nt, Homo sapiens
  misc_RNA (1)...(19): siRNA sense strand
ucuacaaggcgaaagaaaa

SEQ ID NO: 2539178 - RNA, 19 nt, Homo sapiens
  misc_RNA (1)...(19): siRNA sense strand
ggucaagagaaccugaaga

SEQ ID NO: 2539179 - RNA, 19 nt, Homo sapiens
  misc_RNA (1)...(19): siRNA sense strand
ccugaauggaggugaaucu

SEQ ID NO: 2539180 - RNA, 19 nt, Homo sapiens
  misc_RNA (1)...(19): siRNA sense strand
cccagaaggaaaagacaaa

SEQ ID NO: 2539181 - RNA, 19 nt, Homo sapiens
  misc_RNA (1)...(19): siRNA sense strand
uauggaauuuagacagcaa

SEQ ID NO: 2539182 - RNA, 19 nt, Homo sapiens
  misc_RNA (1)...(19): siRNA sense strand
gaucaguagaaacaaagaa

SEQ ID NO: 2539183 - RNA, 19 nt, Homo sapiens
  misc_RNA (1)...(19): siRNA sense strand
ucauaucaacagaguagua

SEQ ID NO: 2539184 - RNA, 19 nt, Homo sapiens
  misc_RNA (1)...(19): siRNA sense strand
aggcgaaagaaaaggucaa

SEQ ID NO: 2539185 - RNA, 19 nt, Homo sapiens
  misc_RNA (1)...(19): siRNA sense strand
aaggcaucccagaaggaaa

SEQ ID NO: 2539186 - RNA, 19 nt, Homo sapiens
  misc_RNA (1)...(19): siRNA sense strand
cagaaagaaauuggaugaa

SEQ ID NO: 2539187 - RNA, 19 nt, Homo sapiens
  misc_RNA (1)...(19): siRNA sense strand
agcugaugcucuugccaaa

SEQ ID NO: 2539188 - RNA, 19 nt, Homo sapiens
  misc_RNA (1)...(19): siRNA sense strand
agucagaagaaaccaaaga

SEQ ID NO: 2539189 - RNA, 19 nt, Homo sapiens
  misc_RNA (1)...(19): siRNA sense strand
uauuauggguucugaugau

SEQ ID NO: 2539190 - RNA, 19 nt, Homo sapiens
  misc_RNA (1)...(19): siRNA sense strand
accaaauggaucaguagaa

SEQ ID NO: 2539191 - RNA, 19 nt, Homo sapiens
  misc_RNA (1)...(19): siRNA sense strand
aggcaucccagaaggaaaa

SEQ ID NO: 2539192 - RNA, 19 nt, Homo sapiens
  misc_RNA (1)...(19): siRNA sense strand
aguuaugauuugccugcua

SEQ ID NO: 2539193 - RNA, 19 nt, Homo sapiens
  misc_RNA (1)...(19): siRNA sense strand
uggaauaugccgaguccca

SEQ ID NO: 2539194 - RNA, 19 nt, Homo sapiens
  misc_RNA (1)...(19): siRNA sense strand
gcaagacaugugugcaaga

SEQ ID NO: 2539195 - RNA, 19 nt, Homo sapiens
  misc_RNA (1)...(19): siRNA sense strand
ucagaagaaaccaaagaca

SEQ ID NO: 2539196 - RNA, 19 nt, Homo sapiens
  misc_RNA (1)...(19): siRNA sense strand
augacaugaucgaaggcau

SEQ ID NO: 2539197 - RNA, 19 nt, Homo sapiens
  misc_RNA (1)...(19): siRNA sense strand
guguuuuaguggugguauu

SEQ ID NO: 2539198 - RNA, 19 nt, Homo sapiens
  misc_RNA (1)...(19): siRNA sense strand
gugaaucuccuaagcaaaa

SEQ ID NO: 2539199 - RNA, 19 nt, Homo sapiens
  misc_RNA (1)...(19): siRNA sense strand
aagacaugugugcaagaaa

SEQ ID NO: 2539200 - RNA, 19 nt, Homo sapiens
  misc_RNA (1)...(19): siRNA sense strand
aauauuagauguacggucu

SEQ ID NO: 2539201 - RNA, 19 nt, Homo sapiens
  misc_RNA (1)...(19): siRNA sense strand
ccgaugacagugaugaaga

SEQ ID NO: 2539202 - RNA, 19 nt, Homo sapiens
  misc_RNA (1)...(19): siRNA sense strand
augaagaacugcugggcau

SEQ ID NO: 2539203 - RNA, 19 nt, Homo sapiens
  misc_RNA (1)...(19): siRNA sense strand
ugacagagcugcagccuga

SEQ ID NO: 2539204 - RNA, 19 nt, Homo sapiens
  misc_RNA (1)...(19): siRNA sense strand
caagcaaggcacagggaga

SEQ ID NO: 2539205 - RNA, 19 nt, Homo sapiens
  misc_RNA (1)...(19): siRNA sense strand
ggaagguggcaguggcgaa

SEQ ID NO: 2539206 - RNA, 19 nt, Homo sapiens
  misc_RNA (1)...(19): siRNA sense strand
gaucaugaguuucggacca

SEQ ID NO: 2539207 - RNA, 19 nt, Homo sapiens
  misc_RNA (1)...(19): siRNA sense strand
augcaaggacgcagagaca

SEQ ID NO: 2539208 - RNA, 19 nt, Homo sapiens
  misc_RNA (1)...(19): siRNA sense strand
ccugacuggaggagagauu

SEQ ID NO: 2539209 - RNA, 19 nt, Homo sapiens
  misc_RNA (1)...(19): siRNA sense strand
gggcauagcaucuggcaug

SEQ ID NO: 2539210 - RNA, 19 nt, Homo sapiens
  misc_RNA (1)...(19): siRNA sense strand
cucugagacuggugaagaa

SEQ ID NO: 2539211 - RNA, 19 nt, Homo sapiens
  misc_RNA (1)...(19): siRNA sense strand
gaggacaagcuguggcuga

SEQ ID NO: 2539212 - RNA, 19 nt, Homo sapiens
  misc_RNA (1)...(19): siRNA sense strand
ccucugggcugcaaggaga

SEQ ID NO: 2539213 - RNA, 19 nt, Homo sapiens
  misc_RNA (1)...(19): siRNA sense strand
gaagaaagaaccgaggcaa

SEQ ID NO: 2539214 - RNA, 19 nt, Homo sapiens
  misc_RNA (1)...(19): siRNA sense strand
gcgucgucacaaagcgaaa

SEQ ID NO: 2539215 - RNA, 19 nt, Homo sapiens
  misc_RNA (1)...(19): siRNA sense strand
ccgcuggguugguggaagu

SEQ ID NO: 2539216 - RNA, 19 nt, Homo sapiens
  misc_RNA (1)...(19): siRNA sense strand
gaaguuacucugauggaca

SEQ ID NO: 2539217 - RNA, 19 nt, Homo sapiens
  misc_RNA (1)...(19): siRNA sense strand
ucacaaagcgaaagccgau

SEQ ID NO: 2539218 - RNA, 19 nt, Homo sapiens
  misc_RNA (1)...(19): siRNA sense strand
acagauacugaaugggaca

SEQ ID NO: 2539219 - RNA, 19 nt, Homo sapiens
  misc_RNA (1)...(19): siRNA sense strand
aagaaagaaccgaggcaac

SEQ ID NO: 2539220 - RNA, 19 nt, Homo sapiens
  misc_RNA (1)...(19): siRNA sense strand
ggaaagaucccuauccguu

SEQ ID NO: 2539221 - RNA, 19 nt, Homo sapiens
  misc_RNA (1)...(19): siRNA sense strand
uccagaagcuucaggcaca

SEQ ID NO: 2539222 - RNA, 19 nt, Homo sapiens
  misc_RNA (1)...(19): siRNA sense strand
uaugaagagcauugaggau

SEQ ID NO: 2539223 - RNA, 19 nt, Homo sapiens
  misc_RNA (1)...(19): siRNA sense strand
caacagauacugaauggga

SEQ ID NO: 2539224 - RNA, 19 nt, Homo sapiens
  misc_RNA (1)...(19): siRNA sense strand
gugaccaggaugugggcau

SEQ ID NO: 2539225 - RNA, 19 nt, Homo sapiens
  misc_RNA (1)...(19): siRNA sense strand
gaacuuccuucgagaggca

SEQ ID NO: 2539226 - RNA, 19 nt, Homo sapiens
  misc_RNA (1)...(19): siRNA sense strand
ccgugaagcugaaugugga

SEQ ID NO: 2539227 - RNA, 19 nt, Homo sapiens
  misc_RNA (1)...(19): siRNA sense strand
auguggaucgagaggacaa

SEQ ID NO: 2539228 - RNA, 19 nt, Homo sapiens
  misc_RNA (1)...(19): siRNA sense strand
gcugaggaccugacgcaga

SEQ ID NO: 2539229 - RNA, 19 nt, Homo sapiens
  misc_RNA (1)...(19): siRNA sense strand
gugaacagcaacagauacu

SEQ ID NO: 2539230 - RNA, 19 nt, Homo sapiens
  misc_RNA (1)...(19): siRNA sense strand
ccuuuaauguggaagccca

SEQ ID NO: 2539231 - RNA, 19 nt, Homo sapiens
  misc_RNA (1)...(19): siRNA sense strand
agaaggagaguuuggggaa

SEQ ID NO: 2539232 - RNA, 19 nt, Homo sapiens
  misc_RNA (1)...(19): siRNA sense strand
aggagguuaugaagagcau

SEQ ID NO: 2539233 - RNA, 19 nt, Homo sapiens
  misc_RNA (1)...(19): siRNA sense strand
agauacagugugagguguu

SEQ ID NO: 2539234 - RNA, 19 nt, Homo sapiens
  misc_RNA (1)...(19): siRNA sense strand
cuuuaauguggaagcccaa

SEQ ID NO: 2539235 - RNA, 19 nt, Homo sapiens
  misc_RNA (1)...(19): siRNA sense strand
ugaagaaagaaccgaggca

SEQ ID NO: 2539236 - RNA, 19 nt, Homo sapiens
  misc_RNA (1)...(19): siRNA sense strand
guaucaagauggaaggaga

SEQ ID NO: 2539237 - RNA, 19 nt, Homo sapiens
  misc_RNA (1)...(19): siRNA sense strand
ggagaaucgucauggccaa

SEQ ID NO: 2539238 - RNA, 19 nt, Homo sapiens
  misc_RNA (1)...(19): siRNA sense strand
gcaacaagauagugccaca

SEQ ID NO: 2539239 - RNA, 19 nt, Homo sapiens
  misc_RNA (1)...(19): siRNA sense strand
agacagaagaacaagaaau

SEQ ID NO: 2539240 - RNA, 19 nt, Homo sapiens
  misc_RNA (1)...(19): siRNA sense strand
cgucuaacuuacagauaau

SEQ ID NO: 2539241 - RNA, 19 nt, Homo sapiens
  misc_RNA (1)...(19): siRNA sense strand
cagcagagacagaagaaca

SEQ ID NO: 2539242 - RNA, 19 nt, Homo sapiens
  misc_RNA (1)...(19): siRNA sense strand
cagcagagacagaagaaca

SEQ ID NO: 2539243 - RNA, 19 nt, Homo sapiens
  misc_RNA (1)...(19): siRNA sense strand
ccucuauggaugcgggaua

SEQ ID NO: 2539244 - RNA, 19 nt, Homo sapiens
  misc_RNA (1)...(19): siRNA sense strand
agacagaagaacaaggaca

SEQ ID NO: 2539245 - RNA, 19 nt, Homo sapiens
  misc_RNA (1)...(19): siRNA sense strand
guggagggaguguggaaua

SEQ ID NO: 2539246 - RNA, 19 nt, Homo sapiens
  misc_RNA (1)...(19): siRNA sense strand
ccaaauucgcugaggagga

SEQ ID NO: 2539247 - RNA, 19 nt, Homo sapiens
  misc_RNA (1)...(19): siRNA sense strand
ggaacaagaaggugccaca

SEQ ID NO: 2539248 - RNA, 19 nt, Homo sapiens
  misc_RNA (1)...(19): siRNA sense strand
ggaacaagaaggugccaca

SEQ ID NO: 2539249 - RNA, 19 nt, Homo sapiens
  misc_RNA (1)...(19): siRNA sense strand
cagaauaacuucaguccca

SEQ ID NO: 2539250 - RNA, 19 nt, Homo sapiens
  misc_RNA (1)...(19): siRNA sense strand
aggaagaggauguaaggau

SEQ ID NO: 2539251 - RNA, 19 nt, Homo sapiens
  misc_RNA (1)...(19): siRNA sense strand
uguuagagggccuggaaau

SEQ ID NO: 2539252 - RNA, 19 nt, Homo sapiens
  misc_RNA (1)...(19): siRNA sense strand
uuagagagaugcagcggaa

SEQ ID NO: 2539253 - RNA, 19 nt, Homo sapiens
  misc_RNA (1)...(19): siRNA sense strand
gcgugaagcuucugugcga

SEQ ID NO: 2539254 - RNA, 19 nt, Homo sapiens
  misc_RNA (1)...(19): siRNA sense strand
auaauugggcuguggaaau

SEQ ID NO: 2539255 - RNA, 19 nt, Homo sapiens
  misc_RNA (1)...(19): siRNA sense strand
ccacagcagcagagacaga

SEQ ID NO: 2539256 - RNA, 19 nt, Homo sapiens
  misc_RNA (1)...(19): siRNA sense strand
ccacagcagcagagacaga

SEQ ID NO: 2539257 - RNA, 19 nt, Homo sapiens
  misc_RNA (1)...(19): siRNA sense strand
cggacaaugcccuggguga

SEQ ID NO: 2539258 - RNA, 19 nt, Homo sapiens
  misc_RNA (1)...(19): siRNA sense strand
gagaagacaaagaggucca

SEQ ID NO: 2539259 - RNA, 19 nt, Homo sapiens
  misc_RNA (1)...(19): siRNA sense strand
caggaaacaaggugacaga

SEQ ID NO: 2539260 - RNA, 19 nt, Homo sapiens
  misc_RNA (1)...(19): siRNA sense strand
aaagucaggaauugggaaa

SEQ ID NO: 2539261 - RNA, 19 nt, Homo sapiens
  misc_RNA (1)...(19): siRNA sense strand
acacaaggguugcgugcga

SEQ ID NO: 2539262 - RNA, 19 nt, Homo sapiens
  misc_RNA (1)...(19): siRNA sense strand
cggugguucugcacggaaa

SEQ ID NO: 2539263 - RNA, 19 nt, Homo sapiens
  misc_RNA (1)...(19): siRNA sense strand
cgagaaugccaacguggaa

SEQ ID NO: 2539264 - RNA, 19 nt, Homo sapiens
  misc_RNA (1)...(19): siRNA sense strand
gugacagaccagggaguaa

SEQ ID NO: 2539265 - RNA, 19 nt, Homo sapiens
  misc_RNA (1)...(19): siRNA sense strand
agagagaugcagcggaaga

SEQ ID NO: 2539266 - RNA, 19 nt, Homo sapiens
  misc_RNA (1)...(19): siRNA sense strand
ggaagaggauguaaggaug

SEQ ID NO: 2539267 - RNA, 19 nt, Homo sapiens
  misc_RNA (1)...(19): siRNA sense strand
gcugcugacuggccggaaa

SEQ ID NO: 2539268 - RNA, 19 nt, Homo sapiens
  misc_RNA (1)...(19): siRNA sense strand
ccuguuaguuagaggaauc

SEQ ID NO: 2539269 - RNA, 19 nt, Homo sapiens
  misc_RNA (1)...(19): siRNA sense strand
cugcagaggcugaugcuga

SEQ ID NO: 2539270 - RNA, 19 nt, Homo sapiens
  misc_RNA (1)...(19): siRNA sense strand
ugugcgaggucaugagaga

SEQ ID NO: 2539271 - RNA, 19 nt, Homo sapiens
  misc_RNA (1)...(19): siRNA sense strand
gaaacaaggugacagacca

SEQ ID NO: 2539272 - RNA, 19 nt, Homo sapiens
  misc_RNA (1)...(19): siRNA sense strand
uggaauaggaagucagugu

SEQ ID NO: 2539273 - RNA, 19 nt, Homo sapiens
  misc_RNA (1)...(19): siRNA sense strand
ugccacagcugcagagaca

SEQ ID NO: 2539274 - RNA, 19 nt, Homo sapiens
  misc_RNA (1)...(19): siRNA sense strand
ggguggaugucaaagggau

SEQ ID NO: 2539275 - RNA, 19 nt, Homo sapiens
  misc_RNA (1)...(19): siRNA sense strand
gaccgguacugguggaaaa

SEQ ID NO: 2539276 - RNA, 19 nt, Homo sapiens
  misc_RNA (1)...(19): siRNA sense strand
gacagaagaacaaggacau

SEQ ID NO: 2539277 - RNA, 19 nt, Homo sapiens
  misc_RNA (1)...(19): siRNA sense strand
agugaugccuugagagucu

SEQ ID NO: 2539278 - RNA, 19 nt, Homo sapiens
  misc_RNA (1)...(19): siRNA sense strand
gauaauugggcuguggaaa

SEQ ID NO: 2539279 - RNA, 19 nt, Homo sapiens
  misc_RNA (1)...(19): siRNA sense strand
ccaaggaccaagcaaggaa

SEQ ID NO: 2539280 - RNA, 19 nt, Homo sapiens
  misc_RNA (1)...(19): siRNA sense strand
gcacuugcgcuuaugggua

SEQ ID NO: 2539281 - RNA, 19 nt, Homo sapiens
  misc_RNA (1)...(19): siRNA sense strand
uggaguugguaaaguguca

SEQ ID NO: 2539282 - RNA, 19 nt, Homo sapiens
  misc_RNA (1)...(19): siRNA sense strand
gagacagaagaacaagaaa

SEQ ID NO: 2539283 - RNA, 19 nt, Homo sapiens
  misc_RNA (1)...(19): siRNA sense strand
ccucgugagcgaagacgua

SEQ ID NO: 2539284 - RNA, 19 nt, Homo sapiens
  misc_RNA (1)...(19): siRNA sense strand
auguaaggauggcguguga

SEQ ID NO: 2539285 - RNA, 19 nt, Homo sapiens
  misc_RNA (1)...(19): siRNA sense strand
cggagaaggcacgggauga

SEQ ID NO: 2539286 - RNA, 19 nt, Homo sapiens
  misc_RNA (1)...(19): siRNA sense strand
agacccugauguuuagaaa

SEQ ID NO: 2539287 - RNA, 19 nt, Homo sapiens
  misc_RNA (1)...(19): siRNA sense strand
ggacugaagcaaaagaaca

SEQ ID NO: 2539288 - RNA, 19 nt, Homo sapiens
  misc_RNA (1)...(19): siRNA sense strand
uaaggaagcugcuggagga

SEQ ID NO: 2539289 - RNA, 19 nt, Homo sapiens
  misc_RNA (1)...(19): siRNA sense strand
agcagagacagaagaacaa

SEQ ID NO: 2539290 - RNA, 19 nt, Homo sapiens
  misc_RNA (1)...(19): siRNA sense strand
agcagagacagaagaacaa

SEQ ID NO: 2539291 - RNA, 19 nt, Homo sapiens
  misc_RNA (1)...(19): siRNA sense strand
cuguggagggaguguggaa

SEQ ID NO: 2539292 - RNA, 19 nt, Homo sapiens
  misc_RNA (1)...(19): siRNA sense strand
ccauuagcaucuuugaaaa

SEQ ID NO: 2539293 - RNA, 19 nt, Homo sapiens
  misc_RNA (1)...(19): siRNA sense strand
gggaugacaugaaaagaca

SEQ ID NO: 2539294 - RNA, 19 nt, Homo sapiens
  misc_RNA (1)...(19): siRNA sense strand
aggacauggaggugacaca

SEQ ID NO: 2539295 - RNA, 19 nt, Homo sapiens
  misc_RNA (1)...(19): siRNA sense strand
aagaaggagagcaguguca

SEQ ID NO: 2539296 - RNA, 19 nt, Homo sapiens
  misc_RNA (1)...(19): siRNA sense strand
gagcagugucacagaguuc

SEQ ID NO: 2539297 - RNA, 19 nt, Homo sapiens
  misc_RNA (1)...(19): siRNA sense strand
ccucaugguucaaggacuc

SEQ ID NO: 2539298 - RNA, 19 nt, Homo sapiens
  misc_RNA (1)...(19): siRNA sense strand
gcaugaaguaccuggccaa

SEQ ID NO: 2539299 - RNA, 19 nt, Homo sapiens
  misc_RNA (1)...(19): siRNA sense strand
acauguacuccgugugcaa

SEQ ID NO: 2539300 - RNA, 19 nt, Homo sapiens
  misc_RNA (1)...(19): siRNA sense strand
gggagguguacaagggcau

SEQ ID NO: 2539301 - RNA, 19 nt, Homo sapiens
  misc_RNA (1)...(19): siRNA sense strand
acacagagaagcagcgagu

SEQ ID NO: 2539302 - RNA, 19 nt, Homo sapiens
  misc_RNA (1)...(19): siRNA sense strand
gcuacgagaagguggagga

SEQ ID NO: 2539303 - RNA, 19 nt, Homo sapiens
  misc_RNA (1)...(19): siRNA sense strand
ugaccaacgacgacaucaa

SEQ ID NO: 2539304 - RNA, 19 nt, Homo sapiens
  misc_RNA (1)...(19): siRNA sense strand
acgacgacaucaagaggau

SEQ ID NO: 2539305 - RNA, 19 nt, Homo sapiens
  misc_RNA (1)...(19): siRNA sense strand
ggacuuugcugcagcugga

SEQ ID NO: 2539306 - RNA, 19 nt, Homo sapiens
  misc_RNA (1)...(19): siRNA sense strand
ucacacacccguauggcaa

SEQ ID NO: 2539307 - RNA, 19 nt, Homo sapiens
  misc_RNA (1)...(19): siRNA sense strand
acgagaagguggaggaugc

SEQ ID NO: 2539308 - RNA, 19 nt, Homo sapiens
  misc_RNA (1)...(19): siRNA sense strand
gacucaaggaccaggugaa

SEQ ID NO: 2539309 - RNA, 19 nt, Homo sapiens
  misc_RNA (1)...(19): siRNA sense strand
gggaccugaugcagaacau

SEQ ID NO: 2539310 - RNA, 19 nt, Homo sapiens
  misc_RNA (1)...(19): siRNA sense strand
gaacagugcuggcccgagu

SEQ ID NO: 2539311 - RNA, 19 nt, Homo sapiens
  misc_RNA (1)...(19): siRNA sense strand
ggaagaaggaggugccggu

SEQ ID NO: 2539312 - RNA, 19 nt, Homo sapiens
  misc_RNA (1)...(19): siRNA sense strand
ucgucagcauccuggacaa

SEQ ID NO: 2539313 - RNA, 19 nt, Homo sapiens
  misc_RNA (1)...(19): siRNA sense strand
agaagcagcgaguggacuu

SEQ ID NO: 2539314 - RNA, 19 nt, Homo sapiens
  misc_RNA (1)...(19): siRNA sense strand
uggauaaugacgacagcaa

SEQ ID NO: 2539315 - RNA, 19 nt, Homo sapiens
  misc_RNA (1)...(19): siRNA sense strand
agaggaagcuguaccgaga

SEQ ID NO: 2539316 - RNA, 19 nt, Homo sapiens
  misc_RNA (1)...(19): siRNA sense strand
augugaugguggagaacuu

SEQ ID NO: 2539317 - RNA, 19 nt, Homo sapiens
  misc_RNA (1)...(19): siRNA sense strand
ccuucacggaggaggaauu

SEQ ID NO: 2539318 - RNA, 19 nt, Homo sapiens
  misc_RNA (1)...(19): siRNA sense strand
guggagaacuuuaggaacc

SEQ ID NO: 2539319 - RNA, 19 nt, Homo sapiens
  misc_RNA (1)...(19): siRNA sense strand
caacccgaagacagggaaa

SEQ ID NO: 2539320 - RNA, 19 nt, Homo sapiens
  misc_RNA (1)...(19): siRNA sense strand
uggauaaugacgacagcaa

SEQ ID NO: 2539321 - RNA, 19 nt, Homo sapiens
  misc_RNA (1)...(19): siRNA sense strand
agaggaagcuguaccgaga

SEQ ID NO: 2539322 - RNA, 19 nt, Homo sapiens
  misc_RNA (1)...(19): siRNA sense strand
augugaugguggagaacuu

SEQ ID NO: 2539323 - RNA, 19 nt, Homo sapiens
  misc_RNA (1)...(19): siRNA sense strand
ccuucacggaggaggaauu

SEQ ID NO: 2539324 - RNA, 19 nt, Homo sapiens
  misc_RNA (1)...(19): siRNA sense strand
guggagaacuuuaggaacc

SEQ ID NO: 2539325 - RNA, 19 nt, Homo sapiens
  misc_RNA (1)...(19): siRNA sense strand
caacccgaagacagggaaa

SEQ ID NO: 2539326 - RNA, 19 nt, Homo sapiens
  misc_RNA (1)...(19): siRNA sense strand
agauuuauguggagcucaa

SEQ ID NO: 2539327 - RNA, 19 nt, Homo sapiens
  misc_RNA (1)...(19): siRNA sense strand
aacaauuggcugagaacaa

SEQ ID NO: 2539328 - RNA, 19 nt, Homo sapiens
  misc_RNA (1)...(19): siRNA sense strand
cacugagauuagagaagua

SEQ ID NO: 2539329 - RNA, 19 nt, Homo sapiens
  misc_RNA (1)...(19): siRNA sense strand
aggaacaagaaacaaguua

SEQ ID NO: 2539330 - RNA, 19 nt, Homo sapiens
  misc_RNA (1)...(19): siRNA sense strand
gguggagguuagagggucu

SEQ ID NO: 2539331 - RNA, 19 nt, Homo sapiens
  misc_RNA (1)...(19): siRNA sense strand
cugcaguacagaaggcgaa

SEQ ID NO: 2539332 - RNA, 19 nt, Homo sapiens
  misc_RNA (1)...(19): siRNA sense strand
gugccaagcuugucgacca

SEQ ID NO: 2539333 - RNA, 19 nt, Homo sapiens
  misc_RNA (1)...(19): siRNA sense strand
cugucaacaagaagggauu

SEQ ID NO: 2539334 - RNA, 19 nt, Homo sapiens
  misc_RNA (1)...(19): siRNA sense strand
gcccauuuacagugaagaa

SEQ ID NO: 2539335 - RNA, 19 nt, Homo sapiens
  misc_RNA (1)...(19): siRNA sense strand
cagugaagaaucuggcuau

SEQ ID NO: 2539336 - RNA, 19 nt, Homo sapiens
  misc_RNA (1)...(19): siRNA sense strand
acugcaggugugagaauaa

SEQ ID NO: 2539337 - RNA, 19 nt, Homo sapiens
  misc_RNA (1)...(19): siRNA sense strand
agucaaaacaauuggcuga

SEQ ID NO: 2539338 - RNA, 19 nt, Homo sapiens
  misc_RNA (1)...(19): siRNA sense strand
ugaaauuucgagagcauca

SEQ ID NO: 2539339 - RNA, 19 nt, Homo sapiens
  misc_RNA (1)...(19): siRNA sense strand
agacauucaaccuguacua

SEQ ID NO: 2539340 - RNA, 19 nt, Homo sapiens
  misc_RNA (1)...(19): siRNA sense strand
ccacggugacagugacaga

SEQ ID NO: 2539341 - RNA, 19 nt, Homo sapiens
  misc_RNA (1)...(19): siRNA sense strand
acauggagucugaugauga

SEQ ID NO: 2539342 - RNA, 19 nt, Homo sapiens
  misc_RNA (1)...(19): siRNA sense strand
cuaugaagaaagagguuuu

SEQ ID NO: 2539343 - RNA, 19 nt, Homo sapiens
  misc_RNA (1)...(19): siRNA sense strand
augaaaagcaggaacaaga

SEQ ID NO: 2539344 - RNA, 19 nt, Homo sapiens
  misc_RNA (1)...(19): siRNA sense strand
uguccugacgauuaagaaa

SEQ ID NO: 2539345 - RNA, 19 nt, Homo sapiens
  misc_RNA (1)...(19): siRNA sense strand
gauuagagaaguagguccu

SEQ ID NO: 2539346 - RNA, 19 nt, Homo sapiens
  misc_RNA (1)...(19): siRNA sense strand
ggaucauauuggacuacga

SEQ ID NO: 2539347 - RNA, 19 nt, Homo sapiens
  misc_RNA (1)...(19): siRNA sense strand
gugguguggaugaacauua

SEQ ID NO: 2539348 - RNA, 19 nt, Homo sapiens
  misc_RNA (1)...(19): siRNA sense strand
caccauugcagcugaugaa

SEQ ID NO: 2539349 - RNA, 19 nt, Homo sapiens
  misc_RNA (1)...(19): siRNA sense strand
aaguagguccugucaacaa

SEQ ID NO: 2539350 - RNA, 19 nt, Homo sapiens
  misc_RNA (1)...(19): siRNA sense strand
auaaacgagaccucaguua

SEQ ID NO: 2539351 - RNA, 19 nt, Homo sapiens
  misc_RNA (1)...(19): siRNA sense strand
gggaagagaucaguggugu

SEQ ID NO: 2539352 - RNA, 19 nt, Homo sapiens
  misc_RNA (1)...(19): siRNA sense strand
agauuuauguggagcucaa

SEQ ID NO: 2539353 - RNA, 19 nt, Homo sapiens
  misc_RNA (1)...(19): siRNA sense strand
aacaauuggcugagaacaa

SEQ ID NO: 2539354 - RNA, 19 nt, Homo sapiens
  misc_RNA (1)...(19): siRNA sense strand
cacugagauuagagaagua

SEQ ID NO: 2539355 - RNA, 19 nt, Homo sapiens
  misc_RNA (1)...(19): siRNA sense strand
aggaacaagaaacaaguua

SEQ ID NO: 2539356 - RNA, 19 nt, Homo sapiens
  misc_RNA (1)...(19): siRNA sense strand
gguggagguuagagggucu

SEQ ID NO: 2539357 - RNA, 19 nt, Homo sapiens
  misc_RNA (1)...(19): siRNA sense strand
cugcaguacagaaggcgaa

SEQ ID NO: 2539358 - RNA, 19 nt, Homo sapiens
  misc_RNA (1)...(19): siRNA sense strand
gugccaagcuugucgacca

SEQ ID NO: 2539359 - RNA, 19 nt, Homo sapiens
  misc_RNA (1)...(19): siRNA sense strand
cugucaacaagaagggauu

SEQ ID NO: 2539360 - RNA, 19 nt, Homo sapiens
  misc_RNA (1)...(19): siRNA sense strand
gcccauuuacagugaagaa

SEQ ID NO: 2539361 - RNA, 19 nt, Homo sapiens
  misc_RNA (1)...(19): siRNA sense strand
cagugaagaaucuggcuau

SEQ ID NO: 2539362 - RNA, 19 nt, Homo sapiens
  misc_RNA (1)...(19): siRNA sense strand
acugcaggugugagaauaa

SEQ ID NO: 2539363 - RNA, 19 nt, Homo sapiens
  misc_RNA (1)...(19): siRNA sense strand
agucaaaacaauuggcuga

SEQ ID NO: 2539364 - RNA, 19 nt, Homo sapiens
  misc_RNA (1)...(19): siRNA sense strand
ugaaauuucgagagcauca

SEQ ID NO: 2539365 - RNA, 19 nt, Homo sapiens
  misc_RNA (1)...(19): siRNA sense strand
agacauucaaccuguacua

SEQ ID NO: 2539366 - RNA, 19 nt, Homo sapiens
  misc_RNA (1)...(19): siRNA sense strand
ccacggugacagugacaga

SEQ ID NO: 2539367 - RNA, 19 nt, Homo sapiens
  misc_RNA (1)...(19): siRNA sense strand
acauggagucugaugauga

SEQ ID NO: 2539368 - RNA, 19 nt, Homo sapiens
  misc_RNA (1)...(19): siRNA sense strand
cuaugaagaaagagguuuu

SEQ ID NO: 2539369 - RNA, 19 nt, Homo sapiens
  misc_RNA (1)...(19): siRNA sense strand
augaaaagcaggaacaaga

SEQ ID NO: 2539370 - RNA, 19 nt, Homo sapiens
  misc_RNA (1)...(19): siRNA sense strand
uguccugacgauuaagaaa

SEQ ID NO: 2539371 - RNA, 19 nt, Homo sapiens
  misc_RNA (1)...(19): siRNA sense strand
gauuagagaaguagguccu

SEQ ID NO: 2539372 - RNA, 19 nt, Homo sapiens
  misc_RNA (1)...(19): siRNA sense strand
ggaucauauuggacuacga

SEQ ID NO: 2539373 - RNA, 19 nt, Homo sapiens
  misc_RNA (1)...(19): siRNA sense strand
gugguguggaugaacauua

SEQ ID NO: 2539374 - RNA, 19 nt, Homo sapiens
  misc_RNA (1)...(19): siRNA sense strand
caccauugcagcugaugaa

SEQ ID NO: 2539375 - RNA, 19 nt, Homo sapiens
  misc_RNA (1)...(19): siRNA sense strand
aaguagguccugucaacaa

SEQ ID NO: 2539376 - RNA, 19 nt, Homo sapiens
  misc_RNA (1)...(19): siRNA sense strand
auaaacgagaccucaguua

SEQ ID NO: 2539377 - RNA, 19 nt, Homo sapiens
  misc_RNA (1)...(19): siRNA sense strand
gggaagagaucaguggugu

SEQ ID NO: 2539378 - RNA, 19 nt, Homo sapiens
  misc_RNA (1)...(19): siRNA sense strand
acuaaagaucgguggagaa

SEQ ID NO: 2539379 - RNA, 19 nt, Homo sapiens
  misc_RNA (1)...(19): siRNA sense strand
gggcuuugagagagggaga

SEQ ID NO: 2539380 - RNA, 19 nt, Homo sapiens
  misc_RNA (1)...(19): siRNA sense strand
caacuacacucuuuggaga

SEQ ID NO: 2539381 - RNA, 19 nt, Homo sapiens
  misc_RNA (1)...(19): siRNA sense strand
aggaaaacuaccuggagua

SEQ ID NO: 2539382 - RNA, 19 nt, Homo sapiens
  misc_RNA (1)...(19): siRNA sense strand
ugauaaucguccuggccau

SEQ ID NO: 2539383 - RNA, 19 nt, Homo sapiens
  misc_RNA (1)...(19): siRNA sense strand
acaaucaggucaugcccaa

SEQ ID NO: 2539384 - RNA, 19 nt, Homo sapiens
  misc_RNA (1)...(19): siRNA sense strand
augaacgggcuuugagaga

SEQ ID NO: 2539385 - RNA, 19 nt, Homo sapiens
  misc_RNA (1)...(19): siRNA sense strand
ccgaugagggcuccagcaa

SEQ ID NO: 2539386 - RNA, 19 nt, Homo sapiens
  misc_RNA (1)...(19): siRNA sense strand
aggcagaaaugcuggagag

SEQ ID NO: 2539387 - RNA, 19 nt, Homo sapiens
  misc_RNA (1)...(19): siRNA sense strand
ucagaaauugccaggacuu

SEQ ID NO: 2539388 - RNA, 19 nt, Homo sapiens
  misc_RNA (1)...(19): siRNA sense strand
cacuaaagaucgguggaga

SEQ ID NO: 2539389 - RNA, 19 nt, Homo sapiens
  misc_RNA (1)...(19): siRNA sense strand
gugccauugcagugauaua

SEQ ID NO: 2539390 - RNA, 19 nt, Homo sapiens
  misc_RNA (1)...(19): siRNA sense strand
cagugaaagaaacagcaaa

SEQ ID NO: 2539391 - RNA, 19 nt, Homo sapiens
  misc_RNA (1)...(19): siRNA sense strand
acagcaaacacuuaagauu

SEQ ID NO: 2539392 - RNA, 19 nt, Homo sapiens
  misc_RNA (1)...(19): siRNA sense strand
aagaaacagcaaacacuua

SEQ ID NO: 2539393 - RNA, 19 nt, Homo sapiens
  misc_RNA (1)...(19): siRNA sense strand
gcagugaaagaaacagcaa

SEQ ID NO: 2539394 - RNA, 19 nt, Homo sapiens
  misc_RNA (1)...(19): siRNA sense strand
uaugauaugcauugcggaa

SEQ ID NO: 2539395 - RNA, 19 nt, Homo sapiens
  misc_RNA (1)...(19): siRNA sense strand
gaaagaaacagcaaacacu

SEQ ID NO: 2539396 - RNA, 19 nt, Homo sapiens
  misc_RNA (1)...(19): siRNA sense strand
cagcaaacacuuaagauuc

SEQ ID NO: 2539397 - RNA, 19 nt, Homo sapiens
  misc_RNA (1)...(19): siRNA sense strand
agcaaacacuuaagauuca

SEQ ID NO: 2539398 - RNA, 19 nt, Homo sapiens
  misc_RNA (1)...(19): siRNA sense strand
ugauaugcauugcggaagu

SEQ ID NO: 2539399 - RNA, 19 nt, Homo sapiens
  misc_RNA (1)...(19): siRNA sense strand
agaaacagcaaacacuuaa

SEQ ID NO: 2539400 - RNA, 19 nt, Homo sapiens
  misc_RNA (1)...(19): siRNA sense strand
gggaagaugccaaggggaa

SEQ ID NO: 2539401 - RNA, 19 nt, Homo sapiens
  misc_RNA (1)...(19): siRNA sense strand
ggguacaggaguugcaaca

SEQ ID NO: 2539402 - RNA, 19 nt, Homo sapiens
  misc_RNA (1)...(19): siRNA sense strand
aggaacaaagagaggguca

SEQ ID NO: 2539403 - RNA, 19 nt, Homo sapiens
  misc_RNA (1)...(19): siRNA sense strand
cugcaaaagugcuagaaga

SEQ ID NO: 2539404 - RNA, 19 nt, Homo sapiens
  misc_RNA (1)...(19): siRNA sense strand
cgcaaugcauacaggaaca

SEQ ID NO: 2539405 - RNA, 19 nt, Homo sapiens
  misc_RNA (1)...(19): siRNA sense strand
ggaacaaagagagggucaa

SEQ ID NO: 2539406 - RNA, 19 nt, Homo sapiens
  misc_RNA (1)...(19): siRNA sense strand
gccuuuggaguaugggaaa

SEQ ID NO: 2539407 - RNA, 19 nt, Homo sapiens
  misc_RNA (1)...(19): siRNA sense strand
ugcaaaagugcuagaagaa

SEQ ID NO: 2539408 - RNA, 19 nt, Homo sapiens
  misc_RNA (1)...(19): siRNA sense strand
gggaaggacuguugcuggu

SEQ ID NO: 2539409 - RNA, 19 nt, Homo sapiens
  misc_RNA (1)...(19): siRNA sense strand
gggacauggucgaccgcaa

SEQ ID NO: 2539410 - RNA, 19 nt, Homo sapiens
  misc_RNA (1)...(19): siRNA sense strand
gggaagaugccaaggggaa

SEQ ID NO: 2539411 - RNA, 19 nt, Homo sapiens
  misc_RNA (1)...(19): siRNA sense strand
ggguacaggaguugcaaca

SEQ ID NO: 2539412 - RNA, 19 nt, Homo sapiens
  misc_RNA (1)...(19): siRNA sense strand
aggaacaaagagaggguca

SEQ ID NO: 2539413 - RNA, 19 nt, Homo sapiens
  misc_RNA (1)...(19): siRNA sense strand
cugcaaaagugcuagaaga

SEQ ID NO: 2539414 - RNA, 19 nt, Homo sapiens
  misc_RNA (1)...(19): siRNA sense strand
cgcaaugcauacaggaaca

SEQ ID NO: 2539415 - RNA, 19 nt, Homo sapiens
  misc_RNA (1)...(19): siRNA sense strand
ggaacaaagagagggucaa

SEQ ID NO: 2539416 - RNA, 19 nt, Homo sapiens
  misc_RNA (1)...(19): siRNA sense strand
gccuuuggaguaugggaaa

SEQ ID NO: 2539417 - RNA, 19 nt, Homo sapiens
  misc_RNA (1)...(19): siRNA sense strand
ugcaaaagugcuagaagaa

SEQ ID NO: 2539418 - RNA, 19 nt, Homo sapiens
  misc_RNA (1)...(19): siRNA sense strand
gggaaggacuguugcuggu

SEQ ID NO: 2539419 - RNA, 19 nt, Homo sapiens
  misc_RNA (1)...(19): siRNA sense strand
ccaagaagccugaggagga

SEQ ID NO: 2539420 - RNA, 19 nt, Homo sapiens
  misc_RNA (1)...(19): siRNA sense strand
ggucaugaguguagggaag

SEQ ID NO: 2539421 - RNA, 19 nt, Homo sapiens
  misc_RNA (1)...(19): siRNA sense strand
aggaaacgaaagaggagaa

SEQ ID NO: 2539422 - RNA, 19 nt, Homo sapiens
  misc_RNA (1)...(19): siRNA sense strand
ccaaggacgagaagggaga

SEQ ID NO: 2539423 - RNA, 19 nt, Homo sapiens
  misc_RNA (1)...(19): siRNA sense strand
agggaaggucacagagaau

SEQ ID NO: 2539424 - RNA, 19 nt, Homo sapiens
  misc_RNA (1)...(19): siRNA sense strand
agcaggacaucgagagcua

SEQ ID NO: 2539425 - RNA, 19 nt, Homo sapiens
  misc_RNA (1)...(19): siRNA sense strand
ggcagaaggaaccaggaaa

SEQ ID NO: 2539426 - RNA, 19 nt, Homo sapiens
  misc_RNA (1)...(19): siRNA sense strand
ugugagaagauuugcacua

SEQ ID NO: 2539427 - RNA, 19 nt, Homo sapiens
  misc_RNA (1)...(19): siRNA sense strand
agaagaaagcugaugaagu

SEQ ID NO: 2539428 - RNA, 19 nt, Homo sapiens
  misc_RNA (1)...(19): siRNA sense strand
ugacaagaaaccaaagaca

SEQ ID NO: 2539429 - RNA, 19 nt, Homo sapiens
  misc_RNA (1)...(19): siRNA sense strand
ccaagaggaaacugaguca

SEQ ID NO: 2539430 - RNA, 19 nt, Homo sapiens
  misc_RNA (1)...(19): siRNA sense strand
augccgagucagagagaga

SEQ ID NO: 2539431 - RNA, 19 nt, Homo sapiens
  misc_RNA (1)...(19): siRNA sense strand
gcgaccaaggacagcauaa

SEQ ID NO: 2539432 - RNA, 19 nt, Homo sapiens
  misc_RNA (1)...(19): siRNA sense strand
gagagaagacccagcacca

SEQ ID NO: 2539433 - RNA, 19 nt, Homo sapiens
  misc_RNA (1)...(19): siRNA sense strand
ccaaaagcguggccagcaa

SEQ ID NO: 2539434 - RNA, 19 nt, Homo sapiens
  misc_RNA (1)...(19): siRNA sense strand
gagaaugaguccacccaca

SEQ ID NO: 2539435 - RNA, 19 nt, Homo sapiens
  misc_RNA (1)...(19): siRNA sense strand
cggaugacaaccaggcaau

SEQ ID NO: 2539436 - RNA, 19 nt, Homo sapiens
  misc_RNA (1)...(19): siRNA sense strand
aggacaacacucaggauga

SEQ ID NO: 2539437 - RNA, 19 nt, Homo sapiens
  misc_RNA (1)...(19): siRNA sense strand
agaagagcgacgaugacaa

SEQ ID NO: 2539438 - RNA, 19 nt, Homo sapiens
  misc_RNA (1)...(19): siRNA sense strand
gcaccaaccugcugagccu

SEQ ID NO: 2539439 - RNA, 19 nt, Homo sapiens
  misc_RNA (1)...(19): siRNA sense strand
aggccaagaucaagcagga

SEQ ID NO: 2539440 - RNA, 19 nt, Homo sapiens
  misc_RNA (1)...(19): siRNA sense strand
ggggaaaggccauacaaau

SEQ ID NO: 2539441 - RNA, 19 nt, Homo sapiens
  misc_RNA (1)...(19): siRNA sense strand
aggaggacagcgagaauga

SEQ ID NO: 2539442 - RNA, 19 nt, Homo sapiens
  misc_RNA (1)...(19): siRNA sense strand
gcucacuggcucugcacaa

SEQ ID NO: 2539443 - RNA, 19 nt, Homo sapiens
  misc_RNA (1)...(19): siRNA sense strand
agacccagcaccagcuaaa

SEQ ID NO: 2539444 - RNA, 19 nt, Homo sapiens
  misc_RNA (1)...(19): siRNA sense strand
aagaggacgcgucgagcaa

SEQ ID NO: 2539445 - RNA, 19 nt, Homo sapiens
  misc_RNA (1)...(19): siRNA sense strand
ggugaggaggacagcgaga

SEQ ID NO: 2539446 - RNA, 19 nt, Homo sapiens
  misc_RNA (1)...(19): siRNA sense strand
cuacagaggcacaugcuca

SEQ ID NO: 2539447 - RNA, 19 nt, Homo sapiens
  misc_RNA (1)...(19): siRNA sense strand
gacaagaggaagaaggucu

SEQ ID NO: 2539448 - RNA, 19 nt, Homo sapiens
  misc_RNA (1)...(19): siRNA sense strand
caacacagacacuggagga

SEQ ID NO: 2539449 - RNA, 19 nt, Homo sapiens
  misc_RNA (1)...(19): siRNA sense strand
cgaccaaggacagcauaaa

SEQ ID NO: 2539450 - RNA, 19 nt, Homo sapiens
  misc_RNA (1)...(19): siRNA sense strand
cgggccagccugagaugaa

SEQ ID NO: 2539451 - RNA, 19 nt, Homo sapiens
  misc_RNA (1)...(19): siRNA sense strand
agacgcagcuggagcagga

SEQ ID NO: 2539452 - RNA, 19 nt, Homo sapiens
  misc_RNA (1)...(19): siRNA sense strand
gcauuguggucaagcccau

SEQ ID NO: 2539453 - RNA, 19 nt, Homo sapiens
  misc_RNA (1)...(19): siRNA sense strand
aggacagcgacaaggaaga

SEQ ID NO: 2539454 - RNA, 19 nt, Homo sapiens
  misc_RNA (1)...(19): siRNA sense strand
aguauggacuggagaccca

SEQ ID NO: 2539455 - RNA, 19 nt, Homo sapiens
  misc_RNA (1)...(19): siRNA sense strand
guccaagugaagcaggaaa

SEQ ID NO: 2539456 - RNA, 19 nt, Homo sapiens
  misc_RNA (1)...(19): siRNA sense strand
ccaugggcccagugaugaa

SEQ ID NO: 2539457 - RNA, 19 nt, Homo sapiens
  misc_RNA (1)...(19): siRNA sense strand
gcggaaagucacugagcuc

SEQ ID NO: 2539458 - RNA, 19 nt, Homo sapiens
  misc_RNA (1)...(19): siRNA sense strand
ccucugaaacguaggcgau

SEQ ID NO: 2539459 - RNA, 19 nt, Homo sapiens
  misc_RNA (1)...(19): siRNA sense strand
acagcagcauuguggucaa

SEQ ID NO: 2539460 - RNA, 19 nt, Homo sapiens
  misc_RNA (1)...(19): siRNA sense strand
aaggcagacaagaggaaga

SEQ ID NO: 2539461 - RNA, 19 nt, Homo sapiens
  misc_RNA (1)...(19): siRNA sense strand
ugaggaggacagcgagaau

SEQ ID NO: 2539462 - RNA, 19 nt, Homo sapiens
  misc_RNA (1)...(19): siRNA sense strand
ugaagauccaugagaagga

SEQ ID NO: 2539463 - RNA, 19 nt, Homo sapiens
  misc_RNA (1)...(19): siRNA sense strand
cgcugagcauggaggccaa

SEQ ID NO: 2539464 - RNA, 19 nt, Homo sapiens
  misc_RNA (1)...(19): siRNA sense strand
ccucaaaggcucaguggag

SEQ ID NO: 2539465 - RNA, 19 nt, Homo sapiens
  misc_RNA (1)...(19): siRNA sense strand
aaggauaucgagaagaaca

SEQ ID NO: 2539466 - RNA, 19 nt, Homo sapiens
  misc_RNA (1)...(19): siRNA sense strand
aggauaucgagaagaacau

SEQ ID NO: 2539467 - RNA, 19 nt, Homo sapiens
  misc_RNA (1)...(19): siRNA sense strand
aaacgaaagaggagaaguc

SEQ ID NO: 2539468 - RNA, 19 nt, Homo sapiens
  misc_RNA (1)...(19): siRNA sense strand
cggucaugaguguagggaa

SEQ ID NO: 2539469 - RNA, 19 nt, Homo sapiens
  misc_RNA (1)...(19): siRNA sense strand
gcuucaaguuccugggcac

SEQ ID NO: 2539470 - RNA, 19 nt, Homo sapiens
  misc_RNA (1)...(19): siRNA sense strand
augccaaacaccacgggaa

SEQ ID NO: 2539471 - RNA, 19 nt, Homo sapiens
  misc_RNA (1)...(19): siRNA sense strand
cagcaucugcggaaaguca

SEQ ID NO: 2539472 - RNA, 19 nt, Homo sapiens
  misc_RNA (1)...(19): siRNA sense strand
uggcagaaggaaccaggaa

SEQ ID NO: 2539473 - RNA, 19 nt, Homo sapiens
  misc_RNA (1)...(19): siRNA sense strand
aggccuggugcgaaacaaa

SEQ ID NO: 2539474 - RNA, 19 nt, Homo sapiens
  misc_RNA (1)...(19): siRNA sense strand
ccaagaucaagcaggagau

SEQ ID NO: 2539475 - RNA, 19 nt, Homo sapiens
  misc_RNA (1)...(19): siRNA sense strand
gcauaaagcaccugucccu

SEQ ID NO: 2539476 - RNA, 19 nt, Homo sapiens
  misc_RNA (1)...(19): siRNA sense strand
gccaagaucaagcaggaga

SEQ ID NO: 2539477 - RNA, 19 nt, Homo sapiens
  misc_RNA (1)...(19): siRNA sense strand
gggacaaccagaagcgcua

SEQ ID NO: 2539478 - RNA, 19 nt, Homo sapiens
  misc_RNA (1)...(19): siRNA sense strand
aggagaacacucugagcaa

SEQ ID NO: 2539479 - RNA, 19 nt, Homo sapiens
  misc_RNA (1)...(19): siRNA sense strand
agucugagcugaugaggga

SEQ ID NO: 2539480 - RNA, 19 nt, Homo sapiens
  misc_RNA (1)...(19): siRNA sense strand
gggagagaugccagagcuu

SEQ ID NO: 2539481 - RNA, 19 nt, Homo sapiens
  misc_RNA (1)...(19): siRNA sense strand
ccugaaggagcuggagaaa

SEQ ID NO: 2539482 - RNA, 19 nt, Homo sapiens
  misc_RNA (1)...(19): siRNA sense strand
aggagcaggucaaacgcua

SEQ ID NO: 2539483 - RNA, 19 nt, Homo sapiens
  misc_RNA (1)...(19): siRNA sense strand
gagcaagucgguuggggaa

SEQ ID NO: 2539484 - RNA, 19 nt, Homo sapiens
  misc_RNA (1)...(19): siRNA sense strand
ggccaagcucucuggguca

SEQ ID NO: 2539485 - RNA, 19 nt, Homo sapiens
  misc_RNA (1)...(19): siRNA sense strand
ggagaaaagagaaggaaau

SEQ ID NO: 2539486 - RNA, 19 nt, Homo sapiens
  misc_RNA (1)...(19): siRNA sense strand
agaagaaauguguggacaa

SEQ ID NO: 2539487 - RNA, 19 nt, Homo sapiens
  misc_RNA (1)...(19): siRNA sense strand
uguuaaagacauugccaua

SEQ ID NO: 2539488 - RNA, 19 nt, Homo sapiens
  misc_RNA (1)...(19): siRNA sense strand
cugaaagacaguaagcaaa

SEQ ID NO: 2539489 - RNA, 19 nt, Homo sapiens
  misc_RNA (1)...(19): siRNA sense strand
agucgaacauguagaaaga

SEQ ID NO: 2539490 - RNA, 19 nt, Homo sapiens
  misc_RNA (1)...(19): siRNA sense strand
auuuggagcaagagaguua

SEQ ID NO: 2539491 - RNA, 19 nt, Homo sapiens
  misc_RNA (1)...(19): siRNA sense strand
agaccaagcacauguuaaa

SEQ ID NO: 2539492 - RNA, 19 nt, Homo sapiens
  misc_RNA (1)...(19): siRNA sense strand
auguuaaacuucagcgcaa

SEQ ID NO: 2539493 - RNA, 19 nt, Homo sapiens
  misc_RNA (1)...(19): siRNA sense strand
cagccagacuugccagaaa

SEQ ID NO: 2539494 - RNA, 19 nt, Homo sapiens
  misc_RNA (1)...(19): siRNA sense strand
gaaguagaucauugugaaa

SEQ ID NO: 2539495 - RNA, 19 nt, Homo sapiens
  misc_RNA (1)...(19): siRNA sense strand
cugcagauguucagacaga

SEQ ID NO: 2539496 - RNA, 19 nt, Homo sapiens
  misc_RNA (1)...(19): siRNA sense strand
uaauaaagugugucagcaa

SEQ ID NO: 2539497 - RNA, 19 nt, Homo sapiens
  misc_RNA (1)...(19): siRNA sense strand
cagcacgacuacugaggaa

SEQ ID NO: 2539498 - RNA, 19 nt, Homo sapiens
  misc_RNA (1)...(19): siRNA sense strand
accagaagccugagaagaa

SEQ ID NO: 2539499 - RNA, 19 nt, Homo sapiens
  misc_RNA (1)...(19): siRNA sense strand
caguggaauuauagaagau

SEQ ID NO: 2539500 - RNA, 19 nt, Homo sapiens
  misc_RNA (1)...(19): siRNA sense strand
ugacaugauuggcguggaa

SEQ ID NO: 2539501 - RNA, 19 nt, Homo sapiens
  misc_RNA (1)...(19): siRNA sense strand
aaaacaagacagaggcaaa

SEQ ID NO: 2539502 - RNA, 19 nt, Homo sapiens
  misc_RNA (1)...(19): siRNA sense strand
guaguaugaaggagggaau

SEQ ID NO: 2539503 - RNA, 19 nt, Homo sapiens
  misc_RNA (1)...(19): siRNA sense strand
agacauugccauaaaucua

SEQ ID NO: 2539504 - RNA, 19 nt, Homo sapiens
  misc_RNA (1)...(19): siRNA sense strand
acugauaugcagaugauua

SEQ ID NO: 2539505 - RNA, 19 nt, Homo sapiens
  misc_RNA (1)...(19): siRNA sense strand
guaugaaagauggaagaaa

SEQ ID NO: 2539506 - RNA, 19 nt, Homo sapiens
  misc_RNA (1)...(19): siRNA sense strand
cugauaugcagaugauuaa

SEQ ID NO: 2539507 - RNA, 19 nt, Homo sapiens
  misc_RNA (1)...(19): siRNA sense strand
cagaagaaaacaugaacua

SEQ ID NO: 2539508 - RNA, 19 nt, Homo sapiens
  misc_RNA (1)...(19): siRNA sense strand
cgucuacaaaugagcauaa

SEQ ID NO: 2539509 - RNA, 19 nt, Homo sapiens
  misc_RNA (1)...(19): siRNA sense strand
cauuaaaacuucagagaac

SEQ ID NO: 2539510 - RNA, 19 nt, Homo sapiens
  misc_RNA (1)...(19): siRNA sense strand
cuuugaaacuugcuguuaa

SEQ ID NO: 2539511 - RNA, 19 nt, Homo sapiens
  misc_RNA (1)...(19): siRNA sense strand
cggcgugccuugugugauu

SEQ ID NO: 2539512 - RNA, 19 nt, Homo sapiens
  misc_RNA (1)...(19): siRNA sense strand
uuccaaagguccagagcau

SEQ ID NO: 2539513 - RNA, 19 nt, Homo sapiens
  misc_RNA (1)...(19): siRNA sense strand
acauagagacucaugagaa

SEQ ID NO: 2539514 - RNA, 19 nt, Homo sapiens
  misc_RNA (1)...(19): siRNA sense strand
ugaaagacaguaagcaaau

SEQ ID NO: 2539515 - RNA, 19 nt, Homo sapiens
  misc_RNA (1)...(19): siRNA sense strand
augucaaccugcagaagaa

SEQ ID NO: 2539516 - RNA, 19 nt, Homo sapiens
  misc_RNA (1)...(19): siRNA sense strand
gggaauaaccagcaaguac

SEQ ID NO: 2539517 - RNA, 19 nt, Homo sapiens
  misc_RNA (1)...(19): siRNA sense strand
acaaaugagcauaauggua

SEQ ID NO: 2539518 - RNA, 19 nt, Homo sapiens
  misc_RNA (1)...(19): siRNA sense strand
cuaccuacuucuacaacaa

SEQ ID NO: 2539519 - RNA, 19 nt, Homo sapiens
  misc_RNA (1)...(19): siRNA sense strand
ggucaauaugguaccgcaa

SEQ ID NO: 2539520 - RNA, 19 nt, Homo sapiens
  misc_RNA (1)...(19): siRNA sense strand
ggguacgcauucugaggaa

SEQ ID NO: 2539521 - RNA, 19 nt, Homo sapiens
  misc_RNA (1)...(19): siRNA sense strand
aggagaaaagagaaggaaa

SEQ ID NO: 2539522 - RNA, 19 nt, Homo sapiens
  misc_RNA (1)...(19): siRNA sense strand
ggaucaaucuaccuggaau

SEQ ID NO: 2539523 - RNA, 19 nt, Homo sapiens
  misc_RNA (1)...(19): siRNA sense strand
guggaaggauuuggagcaa

SEQ ID NO: 2539524 - RNA, 19 nt, Homo sapiens
  misc_RNA (1)...(19): siRNA sense strand
agaaggaagcauugaaagu

SEQ ID NO: 2539525 - RNA, 19 nt, Homo sapiens
  misc_RNA (1)...(19): siRNA sense strand
ccauuggaauugaacgauu

SEQ ID NO: 2539526 - RNA, 19 nt, Homo sapiens
  misc_RNA (1)...(19): siRNA sense strand
gcgaauaggaaugcaaauu

SEQ ID NO: 2539527 - RNA, 19 nt, Homo sapiens
  misc_RNA (1)...(19): siRNA sense strand
ccguaguguuguauuaaau

SEQ ID NO: 2539528 - RNA, 19 nt, Homo sapiens
  misc_RNA (1)...(19): siRNA sense strand
agguguugaagaagauaaa

SEQ ID NO: 2539529 - RNA, 19 nt, Homo sapiens
  misc_RNA (1)...(19): siRNA sense strand
cggucgugugcaaggaaua

SEQ ID NO: 2539530 - RNA, 19 nt, Homo sapiens
  misc_RNA (1)...(19): siRNA sense strand
ccaaggagaccaagcacau

SEQ ID NO: 2539531 - RNA, 19 nt, Homo sapiens
  misc_RNA (1)...(19): siRNA sense strand
ugucaagaaugaaguagau

SEQ ID NO: 2539532 - RNA, 19 nt, Homo sapiens
  misc_RNA (1)...(19): siRNA sense strand
gagaagaaauguguggaca

SEQ ID NO: 2539533 - RNA, 19 nt, Homo sapiens
  misc_RNA (1)...(19): siRNA sense strand
gaguaaaagucgaacaugu

SEQ ID NO: 2539534 - RNA, 19 nt, Homo sapiens
  misc_RNA (1)...(19): siRNA sense strand
cauagagacucaugagaac

SEQ ID NO: 2539535 - RNA, 19 nt, Homo sapiens
  misc_RNA (1)...(19): siRNA sense strand
ucucaaaugcaggcagaaa

SEQ ID NO: 2539536 - RNA, 19 nt, Homo sapiens
  misc_RNA (1)...(19): siRNA sense strand
augcauuauuucaugggaa

SEQ ID NO: 2539537 - RNA, 19 nt, Homo sapiens
  misc_RNA (1)...(19): siRNA sense strand
gcacugaugccaugcguga

SEQ ID NO: 2539538 - RNA, 19 nt, Homo sapiens
  misc_RNA (1)...(19): siRNA sense strand
aggaagggagucuggguuu

SEQ ID NO: 2539539 - RNA, 19 nt, Homo sapiens
  misc_RNA (1)...(19): siRNA sense strand
cauucgacccacauggaaa

SEQ ID NO: 2539540 - RNA, 19 nt, Homo sapiens
  misc_RNA (1)...(19): siRNA sense strand
ugauuggcguggaaggauu

SEQ ID NO: 2539541 - RNA, 19 nt, Homo sapiens
  misc_RNA (1)...(19): siRNA sense strand
uuuaauagccuuccaacaa

SEQ ID NO: 2539542 - RNA, 19 nt, Homo sapiens
  misc_RNA (1)...(19): siRNA sense strand
gcacgacuacugaggaaaa

SEQ ID NO: 2539543 - RNA, 19 nt, Homo sapiens
  misc_RNA (1)...(19): siRNA sense strand
cgugaauagucucccacaa

SEQ ID NO: 2539544 - RNA, 19 nt, Homo sapiens
  misc_RNA (1)...(19): siRNA sense strand
cuggaaugcaguuuacaua

SEQ ID NO: 2539545 - RNA, 19 nt, Homo sapiens
  misc_RNA (1)...(19): siRNA sense strand
ggaugaaguuugacgcaca

SEQ ID NO: 2539546 - RNA, 19 nt, Homo sapiens
  misc_RNA (1)...(19): siRNA sense strand
cugcagaacauaaaggcaa

SEQ ID NO: 2539547 - RNA, 19 nt, Homo sapiens
  misc_RNA (1)...(19): siRNA sense strand
ggaaggacaaggaaggcaa

SEQ ID NO: 2539548 - RNA, 19 nt, Homo sapiens
  misc_RNA (1)...(19): siRNA sense strand
ugugaaaucgagagagaga

SEQ ID NO: 2539549 - RNA, 19 nt, Homo sapiens
  misc_RNA (1)...(19): siRNA sense strand
agauggaggaagagggcau

SEQ ID NO: 2539550 - RNA, 19 nt, Homo sapiens
  misc_RNA (1)...(19): siRNA sense strand
aagcaaagaauaagccaga

SEQ ID NO: 2539551 - RNA, 19 nt, Homo sapiens
  misc_RNA (1)...(19): siRNA sense strand
ccaaaguuguccagggaag

SEQ ID NO: 2539552 - RNA, 19 nt, Homo sapiens
  misc_RNA (1)...(19): siRNA sense strand
gguggaagguugagugcgu

SEQ ID NO: 2539553 - RNA, 19 nt, Homo sapiens
  misc_RNA (1)...(19): siRNA sense strand
aucgaaagcaagacgguua

SEQ ID NO: 2539554 - RNA, 19 nt, Homo sapiens
  misc_RNA (1)...(19): siRNA sense strand
acccaagagcaaagagaca

SEQ ID NO: 2539555 - RNA, 19 nt, Homo sapiens
  misc_RNA (1)...(19): siRNA sense strand
gcaccaagcucacgcccau

SEQ ID NO: 2539556 - RNA, 19 nt, Homo sapiens
  misc_RNA (1)...(19): siRNA sense strand
ccaagagcaaagagacaca

SEQ ID NO: 2539557 - RNA, 19 nt, Homo sapiens
  misc_RNA (1)...(19): siRNA sense strand
ggaacucgcugcucgggaa

SEQ ID NO: 2539558 - RNA, 19 nt, Homo sapiens
  misc_RNA (1)...(19): siRNA sense strand
gagaaagcguucaaugcca

SEQ ID NO: 2539559 - RNA, 19 nt, Homo sapiens
  misc_RNA (1)...(19): siRNA sense strand
cggcugaagaaguaugaca

SEQ ID NO: 2539560 - RNA, 19 nt, Homo sapiens
  misc_RNA (1)...(19): siRNA sense strand
ggcugaagaaguaugacaa

SEQ ID NO: 2539561 - RNA, 19 nt, Homo sapiens
  misc_RNA (1)...(19): siRNA sense strand
ggccaaaguuguccaggga

SEQ ID NO: 2539562 - RNA, 19 nt, Homo sapiens
  misc_RNA (1)...(19): siRNA sense strand
ugggccagauggaggaaga

SEQ ID NO: 2539563 - RNA, 19 nt, Homo sapiens
  misc_RNA (1)...(19): siRNA sense strand
gccugaaccucucggccaa

SEQ ID NO: 2539564 - RNA, 19 nt, Homo sapiens
  misc_RNA (1)...(19): siRNA sense strand
aagaauaaggaguggagcu

SEQ ID NO: 2539565 - RNA, 19 nt, Homo sapiens
  misc_RNA (1)...(19): siRNA sense strand
caaccggaucgauggaaaa

SEQ ID NO: 2539566 - RNA, 19 nt, Homo sapiens
  misc_RNA (1)...(19): siRNA sense strand
gcuggaugucagaggagga

SEQ ID NO: 2539567 - RNA, 19 nt, Homo sapiens
  misc_RNA (1)...(19): siRNA sense strand
gggaagaagugcuuugcuc

SEQ ID NO: 2539568 - RNA, 19 nt, Homo sapiens
  misc_RNA (1)...(19): siRNA sense strand
cugcacuacaagagggaga

SEQ ID NO: 2539569 - RNA, 19 nt, Homo sapiens
  misc_RNA (1)...(19): siRNA sense strand
cuacacuggacaaggauau

SEQ ID NO: 2539570 - RNA, 19 nt, Homo sapiens
  misc_RNA (1)...(19): siRNA sense strand
gcccugagaccuugggaga

SEQ ID NO: 2539571 - RNA, 19 nt, Homo sapiens
  misc_RNA (1)...(19): siRNA sense strand
uggacaugguguuucggaa

SEQ ID NO: 2539572 - RNA, 19 nt, Homo sapiens
  misc_RNA (1)...(19): siRNA sense strand
ugaaagaaacccugcggau

SEQ ID NO: 2539573 - RNA, 19 nt, Homo sapiens
  misc_RNA (1)...(19): siRNA sense strand
ggauaagaagguuaggcga

SEQ ID NO: 2539574 - RNA, 19 nt, Homo sapiens
  misc_RNA (1)...(19): siRNA sense strand
gaaacgaggaggcggcuca

SEQ ID NO: 2539575 - RNA, 19 nt, Homo sapiens
  misc_RNA (1)...(19): siRNA sense strand
aagacuagcuucagcagga

SEQ ID NO: 2539576 - RNA, 19 nt, Homo sapiens
  misc_RNA (1)...(19): siRNA sense strand
acugaggaggugugggaca

SEQ ID NO: 2539577 - RNA, 19 nt, Homo sapiens
  misc_RNA (1)...(19): siRNA sense strand
cugccuagcaccuggacuu

SEQ ID NO: 2539578 - RNA, 19 nt, Homo sapiens
  misc_RNA (1)...(19): siRNA sense strand
ccugcggauaagaagguua

SEQ ID NO: 2539579 - RNA, 19 nt, Homo sapiens
  misc_RNA (1)...(19): siRNA sense strand
gaagaaaaggagagagaaa

SEQ ID NO: 2539580 - RNA, 19 nt, Homo sapiens
  misc_RNA (1)...(19): siRNA sense strand
agagagaaggaaagagaaa

SEQ ID NO: 2539581 - RNA, 19 nt, Homo sapiens
  misc_RNA (1)...(19): siRNA sense strand
agugaaugaaagagagaaa

SEQ ID NO: 2539582 - RNA, 19 nt, Homo sapiens
  misc_RNA (1)...(19): siRNA sense strand
gggaggaugacgagauuaa

SEQ ID NO: 2539583 - RNA, 19 nt, Homo sapiens
  misc_RNA (1)...(19): siRNA sense strand
caucagaaggagagaaaca

SEQ ID NO: 2539584 - RNA, 19 nt, Homo sapiens
  misc_RNA (1)...(19): siRNA sense strand
gggaagaaaaggagagaga

SEQ ID NO: 2539585 - RNA, 19 nt, Homo sapiens
  misc_RNA (1)...(19): siRNA sense strand
gagagaaagcaauggaaaa

SEQ ID NO: 2539586 - RNA, 19 nt, Homo sapiens
  misc_RNA (1)...(19): siRNA sense strand
aaacugagcuggaaggcua

SEQ ID NO: 2539587 - RNA, 19 nt, Homo sapiens
  misc_RNA (1)...(19): siRNA sense strand
agagaaggaaagagaaauu

SEQ ID NO: 2539588 - RNA, 19 nt, Homo sapiens
  misc_RNA (1)...(19): siRNA sense strand
ggaaagagaaauugcuaca

SEQ ID NO: 2539589 - RNA, 19 nt, Homo sapiens
  misc_RNA (1)...(19): siRNA sense strand
cagagaggcccuacagaaa

SEQ ID NO: 2539590 - RNA, 19 nt, Homo sapiens
  misc_RNA (1)...(19): siRNA sense strand
cuagaaaggagcaucgaaa

SEQ ID NO: 2539591 - RNA, 19 nt, Homo sapiens
  misc_RNA (1)...(19): siRNA sense strand
uggagaggauugaggaaga

SEQ ID NO: 2539592 - RNA, 19 nt, Homo sapiens
  misc_RNA (1)...(19): siRNA sense strand
gcagcagaguaaugagauu

SEQ ID NO: 2539593 - RNA, 19 nt, Homo sapiens
  misc_RNA (1)...(19): siRNA sense strand
ugaaagaagaugcucgaaa

SEQ ID NO: 2539594 - RNA, 19 nt, Homo sapiens
  misc_RNA (1)...(19): siRNA sense strand
cguagaagcauuaagaaga

SEQ ID NO: 2539595 - RNA, 19 nt, Homo sapiens
  misc_RNA (1)...(19): siRNA sense strand
gggaacugcuucugggaca

SEQ ID NO: 2539596 - RNA, 19 nt, Homo sapiens
  misc_RNA (1)...(19): siRNA sense strand
gggaagagaaaccgaucaa

SEQ ID NO: 2539597 - RNA, 19 nt, Homo sapiens
  misc_RNA (1)...(19): siRNA sense strand
agagauaaacagaaggaga

SEQ ID NO: 2539598 - RNA, 19 nt, Homo sapiens
  misc_RNA (1)...(19): siRNA sense strand
gaguggagcugaaggcgua

SEQ ID NO: 2539599 - RNA, 19 nt, Homo sapiens
  misc_RNA (1)...(19): siRNA sense strand
cgagauugacucugagauu

SEQ ID NO: 2539600 - RNA, 19 nt, Homo sapiens
  misc_RNA (1)...(19): siRNA sense strand
agaaauugcuacagagaag

SEQ ID NO: 2539601 - RNA, 19 nt, Homo sapiens
  misc_RNA (1)...(19): siRNA sense strand
agagagaaagcaauggaaa

SEQ ID NO: 2539602 - RNA, 19 nt, Homo sapiens
  misc_RNA (1)...(19): siRNA sense strand
augagaagcuggaugaaga

SEQ ID NO: 2539603 - RNA, 19 nt, Homo sapiens
  misc_RNA (1)...(19): siRNA sense strand
caggagagcagaaaggaau

SEQ ID NO: 2539604 - RNA, 19 nt, Homo sapiens
  misc_RNA (1)...(19): siRNA sense strand
cagaaugaacugauggaga

SEQ ID NO: 2539605 - RNA, 19 nt, Homo sapiens
  misc_RNA (1)...(19): siRNA sense strand
uggaacacauacaggaaau

SEQ ID NO: 2539606 - RNA, 19 nt, Homo sapiens
  misc_RNA (1)...(19): siRNA sense strand
gacaaauaucccauggaaa

SEQ ID NO: 2539607 - RNA, 19 nt, Homo sapiens
  misc_RNA (1)...(19): siRNA sense strand
aaagaaugcaacaggaauu

SEQ ID NO: 2539608 - RNA, 19 nt, Homo sapiens
  misc_RNA (1)...(19): siRNA sense strand
uggaaguaauacagcagaa

SEQ ID NO: 2539609 - RNA, 19 nt, Homo sapiens
  misc_RNA (1)...(19): siRNA sense strand
aaugaaagagagaaagcaa

SEQ ID NO: 2539610 - RNA, 19 nt, Homo sapiens
  misc_RNA (1)...(19): siRNA sense strand
agauuaauuuccugaguga

SEQ ID NO: 2539611 - RNA, 19 nt, Homo sapiens
  misc_RNA (1)...(19): siRNA sense strand
gaucagucagagagcauua

SEQ ID NO: 2539612 - RNA, 19 nt, Homo sapiens
  misc_RNA (1)...(19): siRNA sense strand
uugaagaggaccugagaga

SEQ ID NO: 2539613 - RNA, 19 nt, Homo sapiens
  misc_RNA (1)...(19): siRNA sense strand
caagauaaugagacagaga

SEQ ID NO: 2539614 - RNA, 19 nt, Homo sapiens
  misc_RNA (1)...(19): siRNA sense strand
cugcacaaauggagcauca

SEQ ID NO: 2539615 - RNA, 19 nt, Homo sapiens
  misc_RNA (1)...(19): siRNA sense strand
ugagagagaaggaaagaga

SEQ ID NO: 2539616 - RNA, 19 nt, Homo sapiens
  misc_RNA (1)...(19): siRNA sense strand
ggaagcaacuggagcagga

SEQ ID NO: 2539617 - RNA, 19 nt, Homo sapiens
  misc_RNA (1)...(19): siRNA sense strand
gcucaagguggaaguagaa

SEQ ID NO: 2539618 - RNA, 19 nt, Homo sapiens
  misc_RNA (1)...(19): siRNA sense strand
ugagaaagacagacugauu

SEQ ID NO: 2539619 - RNA, 19 nt, Homo sapiens
  misc_RNA (1)...(19): siRNA sense strand
ggaaacaguuggaacggca

SEQ ID NO: 2539620 - RNA, 19 nt, Homo sapiens
  misc_RNA (1)...(19): siRNA sense strand
auaaacagaaggagaauga

SEQ ID NO: 2539621 - RNA, 19 nt, Homo sapiens
  misc_RNA (1)...(19): siRNA sense strand
caaugaagugaaugaaaga

SEQ ID NO: 2539622 - RNA, 19 nt, Homo sapiens
  misc_RNA (1)...(19): siRNA sense strand
acguguugcuucagaaauu

SEQ ID NO: 2539623 - RNA, 19 nt, Homo sapiens
  misc_RNA (1)...(19): siRNA sense strand
gagagaagagcaaaggaga

SEQ ID NO: 2539624 - RNA, 19 nt, Homo sapiens
  misc_RNA (1)...(19): siRNA sense strand
ggaaaugaacacccagaau

SEQ ID NO: 2539625 - RNA, 19 nt, Homo sapiens
  misc_RNA (1)...(19): siRNA sense strand
gcuuuaauucagugccuua

SEQ ID NO: 2539626 - RNA, 19 nt, Homo sapiens
  misc_RNA (1)...(19): siRNA sense strand
uaaagaaagagcaggacau

SEQ ID NO: 2539627 - RNA, 19 nt, Homo sapiens
  misc_RNA (1)...(19): siRNA sense strand
ggauugaggaagacaacuu

SEQ ID NO: 2539628 - RNA, 19 nt, Homo sapiens
  misc_RNA (1)...(19): siRNA sense strand
ugagagaggcgucgggaga

SEQ ID NO: 2539629 - RNA, 19 nt, Homo sapiens
  misc_RNA (1)...(19): siRNA sense strand
caagaaaagaaguugcaaa

SEQ ID NO: 2539630 - RNA, 19 nt, Homo sapiens
  misc_RNA (1)...(19): siRNA sense strand
gaggagcagaucagcgaaa

SEQ ID NO: 2539631 - RNA, 19 nt, Homo sapiens
  misc_RNA (1)...(19): siRNA sense strand
gcccaagguaggacugaaa

SEQ ID NO: 2539632 - RNA, 19 nt, Homo sapiens
  misc_RNA (1)...(19): siRNA sense strand
cagcaaagaagcuacgaga

SEQ ID NO: 2539633 - RNA, 19 nt, Homo sapiens
  misc_RNA (1)...(19): siRNA sense strand
cagaaagaaggcagcgaga

SEQ ID NO: 2539634 - RNA, 19 nt, Homo sapiens
  misc_RNA (1)...(19): siRNA sense strand
gaaagaaggugcagcaggu

SEQ ID NO: 2539635 - RNA, 19 nt, Homo sapiens
  misc_RNA (1)...(19): siRNA sense strand
ggaagaucuccuaacuaaa

SEQ ID NO: 2539636 - RNA, 19 nt, Homo sapiens
  misc_RNA (1)...(19): siRNA sense strand
aagcacagacccaggaauu

SEQ ID NO: 2539637 - RNA, 19 nt, Homo sapiens
  misc_RNA (1)...(19): siRNA sense strand
uuuaauggcugcagaggau

SEQ ID NO: 2539638 - RNA, 19 nt, Homo sapiens
  misc_RNA (1)...(19): siRNA sense strand
ccacauuauuacuggaauc

SEQ ID NO: 2539639 - RNA, 19 nt, Homo sapiens
  misc_RNA (1)...(19): siRNA sense strand
aggaauacaagcugcagaa

SEQ ID NO: 2539640 - RNA, 19 nt, Homo sapiens
  misc_RNA (1)...(19): siRNA sense strand
aggccagugauguggauua

SEQ ID NO: 2539641 - RNA, 19 nt, Homo sapiens
  misc_RNA (1)...(19): siRNA sense strand
cugagcugcuggagaaauu

SEQ ID NO: 2539642 - RNA, 19 nt, Homo sapiens
  misc_RNA (1)...(19): siRNA sense strand
uggacuugguguuggaaga

SEQ ID NO: 2539643 - RNA, 19 nt, Homo sapiens
  misc_RNA (1)...(19): siRNA sense strand
acagaaggagaaugacaaa

SEQ ID NO: 2539644 - RNA, 19 nt, Homo sapiens
  misc_RNA (1)...(19): siRNA sense strand
ggauaaagccauucagggu

SEQ ID NO: 2539645 - RNA, 19 nt, Homo sapiens
  misc_RNA (1)...(19): siRNA sense strand
ugucaaagguggaggugga

SEQ ID NO: 2539646 - RNA, 19 nt, Homo sapiens
  misc_RNA (1)...(19): siRNA sense strand
guugaagaucugagggauu

SEQ ID NO: 2539647 - RNA, 19 nt, Homo sapiens
  misc_RNA (1)...(19): siRNA sense strand
uuucggaguuggaggacaa

SEQ ID NO: 2539648 - RNA, 19 nt, Homo sapiens
  misc_RNA (1)...(19): siRNA sense strand
ccugggaagugcagcgcua

SEQ ID NO: 2539649 - RNA, 19 nt, Homo sapiens
  misc_RNA (1)...(19): siRNA sense strand
ugacaaagcagcagcggga

SEQ ID NO: 2539650 - RNA, 19 nt, Homo sapiens
  misc_RNA (1)...(19): siRNA sense strand
uggaaaugguauuagagau

SEQ ID NO: 2539651 - RNA, 19 nt, Homo sapiens
  misc_RNA (1)...(19): siRNA sense strand
gugacaagcuggugagccu

SEQ ID NO: 2539652 - RNA, 19 nt, Homo sapiens
  misc_RNA (1)...(19): siRNA sense strand
agccaaagauggagugcca

SEQ ID NO: 2539653 - RNA, 19 nt, Homo sapiens
  misc_RNA (1)...(19): siRNA sense strand
agucgggauuccaggacaa

SEQ ID NO: 2539654 - RNA, 19 nt, Homo sapiens
  misc_RNA (1)...(19): siRNA sense strand
gagaacuaccggaggcaca

SEQ ID NO: 2539655 - RNA, 19 nt, Homo sapiens
  misc_RNA (1)...(19): siRNA sense strand
gggcaauggcugugcugga

SEQ ID NO: 2539656 - RNA, 19 nt, Homo sapiens
  misc_RNA (1)...(19): siRNA sense strand
agauugaagacauccgaaa

SEQ ID NO: 2539657 - RNA, 19 nt, Homo sapiens
  misc_RNA (1)...(19): siRNA sense strand
ccgaggugguggagucuau

SEQ ID NO: 2539658 - RNA, 19 nt, Homo sapiens
  misc_RNA (1)...(19): siRNA sense strand
cccaaggcuuugaguacaa

SEQ ID NO: 2539659 - RNA, 19 nt, Homo sapiens
  misc_RNA (1)...(19): siRNA sense strand
agguggagguggaggugga

SEQ ID NO: 2539660 - RNA, 19 nt, Homo sapiens
  misc_RNA (1)...(19): siRNA sense strand
uggagguggagguggaaau

SEQ ID NO: 2539661 - RNA, 19 nt, Homo sapiens
  misc_RNA (1)...(19): siRNA sense strand
ugaagaagagguuuggcaa

SEQ ID NO: 2539662 - RNA, 19 nt, Homo sapiens
  misc_RNA (1)...(19): siRNA sense strand
auugaagacauccgaaaua

SEQ ID NO: 2539663 - RNA, 19 nt, Homo sapiens
  misc_RNA (1)...(19): siRNA sense strand
acauagugguugaagaucu

SEQ ID NO: 2539664 - RNA, 19 nt, Homo sapiens
  misc_RNA (1)...(19): siRNA sense strand
ccauguaugaccuggauga

SEQ ID NO: 2539665 - RNA, 19 nt, Homo sapiens
  misc_RNA (1)...(19): siRNA sense strand
agccaaaugcuguguaaga

SEQ ID NO: 2539666 - RNA, 19 nt, Homo sapiens
  misc_RNA (1)...(19): siRNA sense strand
ucucuggagugguggccua

SEQ ID NO: 2539667 - RNA, 19 nt, Homo sapiens
  misc_RNA (1)...(19): siRNA sense strand
ugaagaaggaagcagccaa

SEQ ID NO: 2539668 - RNA, 19 nt, Homo sapiens
  misc_RNA (1)...(19): siRNA sense strand
gauugaagacauccgaaau

SEQ ID NO: 2539669 - RNA, 19 nt, Homo sapiens
  misc_RNA (1)...(19): siRNA sense strand
agguaugacaggugugcuu

SEQ ID NO: 2539670 - RNA, 19 nt, Homo sapiens
  misc_RNA (1)...(19): siRNA sense strand
uccggaagguccugaacaa

SEQ ID NO: 2539671 - RNA, 19 nt, Homo sapiens
  misc_RNA (1)...(19): siRNA sense strand
agaaggaagcagccaaaga

SEQ ID NO: 2539672 - RNA, 19 nt, Homo sapiens
  misc_RNA (1)...(19): siRNA sense strand
caggaaugaccaagaaugu

SEQ ID NO: 2539673 - RNA, 19 nt, Homo sapiens
  misc_RNA (1)...(19): siRNA sense strand
cgcuaugacggcugguuua

SEQ ID NO: 2539674 - RNA, 19 nt, Homo sapiens
  misc_RNA (1)...(19): siRNA sense strand
ccaauuacgccgacggugu

SEQ ID NO: 2539675 - RNA, 19 nt, Homo sapiens
  misc_RNA (1)...(19): siRNA sense strand
caagaagcuacaaaagaaa

SEQ ID NO: 2539676 - RNA, 19 nt, Homo sapiens
  misc_RNA (1)...(19): siRNA sense strand
gggaacgcauccuggagau

SEQ ID NO: 2539677 - RNA, 19 nt, Homo sapiens
  misc_RNA (1)...(19): siRNA sense strand
cuggauacccaaagcugua

SEQ ID NO: 2539678 - RNA, 19 nt, Homo sapiens
  misc_RNA (1)...(19): siRNA sense strand
gggaggacgaggagcuguu

SEQ ID NO: 2539679 - RNA, 19 nt, Homo sapiens
  misc_RNA (1)...(19): siRNA sense strand
gagaaaugccagcugucau

SEQ ID NO: 2539680 - RNA, 19 nt, Homo sapiens
  misc_RNA (1)...(19): siRNA sense strand
caaccuaagcagcucacaa

SEQ ID NO: 2539681 - RNA, 19 nt, Homo sapiens
  misc_RNA (1)...(19): siRNA sense strand
gcuacugguuugagaacac

SEQ ID NO: 2539682 - RNA, 19 nt, Homo sapiens
  misc_RNA (1)...(19): siRNA sense strand
guggaaaugguauuagaga

SEQ ID NO: 2539683 - RNA, 19 nt, Homo sapiens
  misc_RNA (1)...(19): siRNA sense strand
aagagagcgugaagaagga

SEQ ID NO: 2539684 - RNA, 19 nt, Homo sapiens
  misc_RNA (1)...(19): siRNA sense strand
uggcugacaaggauggcaa

SEQ ID NO: 2539685 - RNA, 19 nt, Homo sapiens
  misc_RNA (1)...(19): siRNA sense strand
cggaagaagguggagauca

SEQ ID NO: 2539686 - RNA, 19 nt, Homo sapiens
  misc_RNA (1)...(19): siRNA sense strand
agaacaucgcuguguauga

SEQ ID NO: 2539687 - RNA, 19 nt, Homo sapiens
  misc_RNA (1)...(19): siRNA sense strand
gagaagaugcagcgaggcu

SEQ ID NO: 2539688 - RNA, 19 nt, Homo sapiens
  misc_RNA (1)...(19): siRNA sense strand
acaagcgcuucguggagaa

SEQ ID NO: 2539689 - RNA, 19 nt, Homo sapiens
  misc_RNA (1)...(19): siRNA sense strand
agacuuuccucaaccgcua

SEQ ID NO: 2539690 - RNA, 19 nt, Homo sapiens
  misc_RNA (1)...(19): siRNA sense strand
gagaacacaagaagcuaca

SEQ ID NO: 2539691 - RNA, 19 nt, Homo sapiens
  misc_RNA (1)...(19): siRNA sense strand
ccgccgaguuccucaacau

SEQ ID NO: 2539692 - RNA, 19 nt, Homo sapiens
  misc_RNA (1)...(19): siRNA sense strand
gguuugagaacaccaggaa

SEQ ID NO: 2539693 - RNA, 19 nt, Homo sapiens
  misc_RNA (1)...(19): siRNA sense strand
gcgcuaugacggcugguuu

SEQ ID NO: 2539694 - RNA, 19 nt, Homo sapiens
  misc_RNA (1)...(19): siRNA sense strand
caggaaggauucaagggaa

SEQ ID NO: 2539695 - RNA, 19 nt, Homo sapiens
  misc_RNA (1)...(19): siRNA sense strand
cugaggaagaaaugaggaa

SEQ ID NO: 2539696 - RNA, 19 nt, Homo sapiens
  misc_RNA (1)...(19): siRNA sense strand
cggauggaacuuugggauu

SEQ ID NO: 2539697 - RNA, 19 nt, Homo sapiens
  misc_RNA (1)...(19): siRNA sense strand
aggaaggauucaagggaac

SEQ ID NO: 2539698 - RNA, 19 nt, Homo sapiens
  misc_RNA (1)...(19): siRNA sense strand
aggaaggcccucaggaaaa

SEQ ID NO: 2539699 - RNA, 19 nt, Homo sapiens
  misc_RNA (1)...(19): siRNA sense strand
ccgacaucacugaggaaga

SEQ ID NO: 2539700 - RNA, 19 nt, Homo sapiens
  misc_RNA (1)...(19): siRNA sense strand
ugagaaauauggaaaggca

SEQ ID NO: 2539701 - RNA, 19 nt, Homo sapiens
  misc_RNA (1)...(19): siRNA sense strand
gaggaagaaaugaggaaac

SEQ ID NO: 2539702 - RNA, 19 nt, Homo sapiens
  misc_RNA (1)...(19): siRNA sense strand
guuagaugaugaagaggga

SEQ ID NO: 2539703 - RNA, 19 nt, Homo sapiens
  misc_RNA (1)...(19): siRNA sense strand
cggaugggucagauggcua

SEQ ID NO: 2539704 - RNA, 19 nt, Homo sapiens
  misc_RNA (1)...(19): siRNA sense strand
aggaccaaguggaccgcaa

SEQ ID NO: 2539705 - RNA, 19 nt, Homo sapiens
  misc_RNA (1)...(19): siRNA sense strand
gcaacaggccagcagccaa

SEQ ID NO: 2539706 - RNA, 19 nt, Homo sapiens
  misc_RNA (1)...(19): siRNA sense strand
guggaaagcagcugcgugu

SEQ ID NO: 2539707 - RNA, 19 nt, Homo sapiens
  misc_RNA (1)...(19): siRNA sense strand
gcaaaugggcaacaggcca

SEQ ID NO: 2539708 - RNA, 19 nt, Homo sapiens
  misc_RNA (1)...(19): siRNA sense strand
caacugaacgcuuugguca

SEQ ID NO: 2539709 - RNA, 19 nt, Homo sapiens
  misc_RNA (1)...(19): siRNA sense strand
aggauaaaggauuuggcuu

SEQ ID NO: 2539710 - RNA, 19 nt, Homo sapiens
  misc_RNA (1)...(19): siRNA sense strand
ucacaaggaacgagagcag

SEQ ID NO: 2539711 - RNA, 19 nt, Homo sapiens
  misc_RNA (1)...(19): siRNA sense strand
uggagaagcagcagcagga

SEQ ID NO: 2539712 - RNA, 19 nt, Homo sapiens
  misc_RNA (1)...(19): siRNA sense strand
cuuuggaggaggugaagaa

SEQ ID NO: 2539713 - RNA, 19 nt, Homo sapiens
  misc_RNA (1)...(19): siRNA sense strand
ucaaagagcugcaccgcuu

SEQ ID NO: 2539714 - RNA, 19 nt, Homo sapiens
  misc_RNA (1)...(19): siRNA sense strand
gggcaaagcuguuggggug

SEQ ID NO: 2539715 - RNA, 19 nt, Homo sapiens
  misc_RNA (1)...(19): siRNA sense strand
gaggugaagaagaugaaaa

SEQ ID NO: 2539716 - RNA, 19 nt, Homo sapiens
  misc_RNA (1)...(19): siRNA sense strand
ccccaggacagcugagaua

SEQ ID NO: 2539717 - RNA, 19 nt, Homo sapiens
  misc_RNA (1)...(19): siRNA sense strand
aggaggugaagaagaugaa

SEQ ID NO: 2539718 - RNA, 19 nt, Homo sapiens
  misc_RNA (1)...(19): siRNA sense strand
ugugaggagaggagaguaa

SEQ ID NO: 2539719 - RNA, 19 nt, Homo sapiens
  misc_RNA (1)...(19): siRNA sense strand
aauuaaagagcaagaggua

SEQ ID NO: 2539720 - RNA, 19 nt, Homo sapiens
  misc_RNA (1)...(19): siRNA sense strand
acgaaagacauuagcagaa

SEQ ID NO: 2539721 - RNA, 19 nt, Homo sapiens
  misc_RNA (1)...(19): siRNA sense strand
agaacaugccaaagaaauu

SEQ ID NO: 2539722 - RNA, 19 nt, Homo sapiens
  misc_RNA (1)...(19): siRNA sense strand
aagacuuaaccgaaagaaa

SEQ ID NO: 2539723 - RNA, 19 nt, Homo sapiens
  misc_RNA (1)...(19): siRNA sense strand
uggcugagaaggaggaaaa

SEQ ID NO: 2539724 - RNA, 19 nt, Homo sapiens
  misc_RNA (1)...(19): siRNA sense strand
agacuuaaccgaaagaaaa

SEQ ID NO: 2539725 - RNA, 19 nt, Homo sapiens
  misc_RNA (1)...(19): siRNA sense strand
uguugaaugccacgagaaa

SEQ ID NO: 2539726 - RNA, 19 nt, Homo sapiens
  misc_RNA (1)...(19): siRNA sense strand
gcagcaugaacaacagaaa

SEQ ID NO: 2539727 - RNA, 19 nt, Homo sapiens
  misc_RNA (1)...(19): siRNA sense strand
cuacuaagcaacuggacuu

SEQ ID NO: 2539728 - RNA, 19 nt, Homo sapiens
  misc_RNA (1)...(19): siRNA sense strand
auucagaccaucagagaga

SEQ ID NO: 2539729 - RNA, 19 nt, Homo sapiens
  misc_RNA (1)...(19): siRNA sense strand
auacagcagccuugacaaa

SEQ ID NO: 2539730 - RNA, 19 nt, Homo sapiens
  misc_RNA (1)...(19): siRNA sense strand
uugaaugccacgagaaaga

SEQ ID NO: 2539731 - RNA, 19 nt, Homo sapiens
  misc_RNA (1)...(19): siRNA sense strand
gcucaacugauaaggaaaa

SEQ ID NO: 2539732 - RNA, 19 nt, Homo sapiens
  misc_RNA (1)...(19): siRNA sense strand
cuggaaaugauguggagau

SEQ ID NO: 2539733 - RNA, 19 nt, Homo sapiens
  misc_RNA (1)...(19): siRNA sense strand
ucugaaggcaaaugaaauu

SEQ ID NO: 2539734 - RNA, 19 nt, Homo sapiens
  misc_RNA (1)...(19): siRNA sense strand
cugaaaacuuuaaugggua

SEQ ID NO: 2539735 - RNA, 19 nt, Homo sapiens
  misc_RNA (1)...(19): siRNA sense strand
guuacuauucagcaagaaa

SEQ ID NO: 2539736 - RNA, 19 nt, Homo sapiens
  misc_RNA (1)...(19): siRNA sense strand
aauccaaauaccugaagaa

SEQ ID NO: 2539737 - RNA, 19 nt, Homo sapiens
  misc_RNA (1)...(19): siRNA sense strand
uuuaaaugugguagagaca

SEQ ID NO: 2539738 - RNA, 19 nt, Homo sapiens
  misc_RNA (1)...(19): siRNA sense strand
ggagaguaaguauaagaau

SEQ ID NO: 2539739 - RNA, 19 nt, Homo sapiens
  misc_RNA (1)...(19): siRNA sense strand
ugauguggagauaaagaaa

SEQ ID NO: 2539740 - RNA, 19 nt, Homo sapiens
  misc_RNA (1)...(19): siRNA sense strand
ugaaauguagcaaggaaga

SEQ ID NO: 2539741 - RNA, 19 nt, Homo sapiens
  misc_RNA (1)...(19): siRNA sense strand
ggugaaaugcaaagacugu

SEQ ID NO: 2539742 - RNA, 19 nt, Homo sapiens
  misc_RNA (1)...(19): siRNA sense strand
agaaagaaaagcacguuaa

SEQ ID NO: 2539743 - RNA, 19 nt, Homo sapiens
  misc_RNA (1)...(19): siRNA sense strand
agugagaaagcaagaugua

SEQ ID NO: 2539744 - RNA, 19 nt, Homo sapiens
  misc_RNA (1)...(19): siRNA sense strand
aaauguagcaaggaagaaa

SEQ ID NO: 2539745 - RNA, 19 nt, Homo sapiens
  misc_RNA (1)...(19): siRNA sense strand
guguugaagaggagcuaca

SEQ ID NO: 2539746 - RNA, 19 nt, Homo sapiens
  misc_RNA (1)...(19): siRNA sense strand
uuugaaauguagcaaggaa

SEQ ID NO: 2539747 - RNA, 19 nt, Homo sapiens
  misc_RNA (1)...(19): siRNA sense strand
aaaucaaggauaaggacca

SEQ ID NO: 2539748 - RNA, 19 nt, Homo sapiens
  misc_RNA (1)...(19): siRNA sense strand
cacaaucagaaguggaauu

SEQ ID NO: 2539749 - RNA, 19 nt, Homo sapiens
  misc_RNA (1)...(19): siRNA sense strand
uuaaagagcaagagguaug

SEQ ID NO: 2539750 - RNA, 19 nt, Homo sapiens
  misc_RNA (1)...(19): siRNA sense strand
aagaaaagcacguuaauca

SEQ ID NO: 2539751 - RNA, 19 nt, Homo sapiens
  misc_RNA (1)...(19): siRNA sense strand
caaaaggaacaaaaggaau

SEQ ID NO: 2539752 - RNA, 19 nt, Homo sapiens
  misc_RNA (1)...(19): siRNA sense strand
ugguagacuucuuagcuuu

SEQ ID NO: 2539753 - RNA, 19 nt, Homo sapiens
  misc_RNA (1)...(19): siRNA sense strand
acaaaaggaacaaaaggaa

SEQ ID NO: 2539754 - RNA, 19 nt, Homo sapiens
  misc_RNA (1)...(19): siRNA sense strand
aagaacaugccaaagaaau

SEQ ID NO: 2539755 - RNA, 19 nt, Homo sapiens
  misc_RNA (1)...(19): siRNA sense strand
gagaaagaaaagcacguua

SEQ ID NO: 2539756 - RNA, 19 nt, Homo sapiens
  misc_RNA (1)...(19): siRNA sense strand
agagcaagagguaugcaaa

SEQ ID NO: 2539757 - RNA, 19 nt, Homo sapiens
  misc_RNA (1)...(19): siRNA sense strand
uccaaauaccugaagaaaa

SEQ ID NO: 2539758 - RNA, 19 nt, Homo sapiens
  misc_RNA (1)...(19): siRNA sense strand
ccuuguuauaucugaggaa

SEQ ID NO: 2539759 - RNA, 19 nt, Homo sapiens
  misc_RNA (1)...(19): siRNA sense strand
aaugaaugggcgucacaua

SEQ ID NO: 2539760 - RNA, 19 nt, Homo sapiens
  misc_RNA (1)...(19): siRNA sense strand
gguaaguugaaauugaaga

SEQ ID NO: 2539761 - RNA, 19 nt, Homo sapiens
  misc_RNA (1)...(19): siRNA sense strand
agaaaagggaagauagcau

SEQ ID NO: 2539762 - RNA, 19 nt, Homo sapiens
  misc_RNA (1)...(19): siRNA sense strand
uuguuauaucugaggaaga

SEQ ID NO: 2539763 - RNA, 19 nt, Homo sapiens
  misc_RNA (1)...(19): siRNA sense strand
gcaaagacugugaggagag

SEQ ID NO: 2539764 - RNA, 19 nt, Homo sapiens
  misc_RNA (1)...(19): siRNA sense strand
cuuuaauggguaaguugaa

SEQ ID NO: 2539765 - RNA, 19 nt, Homo sapiens
  misc_RNA (1)...(19): siRNA sense strand
cugacaaaugaaaaggaaa

SEQ ID NO: 2539766 - RNA, 19 nt, Homo sapiens
  misc_RNA (1)...(19): siRNA sense strand
acuugaagaaagcaaacaa

SEQ ID NO: 2539767 - RNA, 19 nt, Homo sapiens
  misc_RNA (1)...(19): siRNA sense strand
augccuugcucaacugaua

SEQ ID NO: 2539768 - RNA, 19 nt, Homo sapiens
  misc_RNA (1)...(19): siRNA sense strand
cguuaaucagcuacaaaca

SEQ ID NO: 2539769 - RNA, 19 nt, Homo sapiens
  misc_RNA (1)...(19): siRNA sense strand
auacaauccaggaacaaaa

SEQ ID NO: 2539770 - RNA, 19 nt, Homo sapiens
  misc_RNA (1)...(19): siRNA sense strand
auggguaaguugaaauuga

SEQ ID NO: 2539771 - RNA, 19 nt, Homo sapiens
  misc_RNA (1)...(19): siRNA sense strand
agacggagcuccugggcaa

SEQ ID NO: 2539772 - RNA, 19 nt, Homo sapiens
  misc_RNA (1)...(19): siRNA sense strand
gaagagguguuucgaguaa

SEQ ID NO: 2539773 - RNA, 19 nt, Homo sapiens
  misc_RNA (1)...(19): siRNA sense strand
cgacaaagcuugcgggcuc

SEQ ID NO: 2539774 - RNA, 19 nt, Homo sapiens
  misc_RNA (1)...(19): siRNA sense strand
ccaaagaacucaugagccu

SEQ ID NO: 2539775 - RNA, 19 nt, Homo sapiens
  misc_RNA (1)...(19): siRNA sense strand
aggagaaggucuuggagga

SEQ ID NO: 2539776 - RNA, 19 nt, Homo sapiens
  misc_RNA (1)...(19): siRNA sense strand
gggaagagguguuucgagu

SEQ ID NO: 2539777 - RNA, 19 nt, Homo sapiens
  misc_RNA (1)...(19): siRNA sense strand
gagcagaaggaaugggcuu

SEQ ID NO: 2539778 - RNA, 19 nt, Homo sapiens
  misc_RNA (1)...(19): siRNA sense strand
cggaaguucucauggggaa

SEQ ID NO: 2539779 - RNA, 19 nt, Homo sapiens
  misc_RNA (1)...(19): siRNA sense strand
cggcaaugagagugggugu

SEQ ID NO: 2539780 - RNA, 19 nt, Homo sapiens
  misc_RNA (1)...(19): siRNA sense strand
gagaagagcugcagaccug

SEQ ID NO: 2539781 - RNA, 19 nt, Homo sapiens
  misc_RNA (1)...(19): siRNA sense strand
cgagauggcuuacggcuga

SEQ ID NO: 2539782 - RNA, 19 nt, Homo sapiens
  misc_RNA (1)...(19): siRNA sense strand
aggaggugguggugaaguu

SEQ ID NO: 2539783 - RNA, 19 nt, Homo sapiens
  misc_RNA (1)...(19): siRNA sense strand
gggagagcugugugggaca

SEQ ID NO: 2539784 - RNA, 19 nt, Homo sapiens
  misc_RNA (1)...(19): siRNA sense strand
acaccugagcagaaggaau

SEQ ID NO: 2539785 - RNA, 19 nt, Homo sapiens
  misc_RNA (1)...(19): siRNA sense strand
gacaggaucuucugggaga

SEQ ID NO: 2539786 - RNA, 19 nt, Homo sapiens
  misc_RNA (1)...(19): siRNA sense strand
uagugucagcagugggaua

SEQ ID NO: 2539787 - RNA, 19 nt, Homo sapiens
  misc_RNA (1)...(19): siRNA sense strand
ccuggaaccucaaggaacu

SEQ ID NO: 2539788 - RNA, 19 nt, Homo sapiens
  misc_RNA (1)...(19): siRNA sense strand
ggaagagguguuucgagua

SEQ ID NO: 2539789 - RNA, 19 nt, Homo sapiens
  misc_RNA (1)...(19): siRNA sense strand
gugaacaggcgcugcccaa

SEQ ID NO: 2539790 - RNA, 19 nt, Homo sapiens
  misc_RNA (1)...(19): siRNA sense strand
gcuuaacagccuuugaaga

SEQ ID NO: 2539791 - RNA, 19 nt, Homo sapiens
  misc_RNA (1)...(19): siRNA sense strand
auacaugggaagagguguu

SEQ ID NO: 2539792 - RNA, 19 nt, Homo sapiens
  misc_RNA (1)...(19): siRNA sense strand
cuguguggaugaagaggau

SEQ ID NO: 2539793 - RNA, 19 nt, Homo sapiens
  misc_RNA (1)...(19): siRNA sense strand
gaugagauccggaagcuga

SEQ ID NO: 2539794 - RNA, 19 nt, Homo sapiens
  misc_RNA (1)...(19): siRNA sense strand
auccggaagcugauggaaa

SEQ ID NO: 2539795 - RNA, 19 nt, Homo sapiens
  misc_RNA (1)...(19): siRNA sense strand
cuguggaacuggagggguu

SEQ ID NO: 2539796 - RNA, 19 nt, Homo sapiens
  misc_RNA (1)...(19): siRNA sense strand
cugcuguggacaaggaaaa

SEQ ID NO: 2539797 - RNA, 19 nt, Homo sapiens
  misc_RNA (1)...(19): siRNA sense strand
uugaagaggaccagagaug

SEQ ID NO: 2539798 - RNA, 19 nt, Homo sapiens
  misc_RNA (1)...(19): siRNA sense strand
ggaagcugauggaaagcca

SEQ ID NO: 2539799 - RNA, 19 nt, Homo sapiens
  misc_RNA (1)...(19): siRNA sense strand
aggcccagcuagagcggau

SEQ ID NO: 2539800 - RNA, 19 nt, Homo sapiens
  misc_RNA (1)...(19): siRNA sense strand
uggaagcaguggaggccca

SEQ ID NO: 2539801 - RNA, 19 nt, Homo sapiens
  misc_RNA (1)...(19): siRNA sense strand
cagagaaagcccaggacac

SEQ ID NO: 2539802 - RNA, 19 nt, Homo sapiens
  misc_RNA (1)...(19): siRNA sense strand
ggaugaagaggaugcggca

SEQ ID NO: 2539803 - RNA, 19 nt, Homo sapiens
  misc_RNA (1)...(19): siRNA sense strand
agaccaaacgucaucaaau

SEQ ID NO: 2539804 - RNA, 19 nt, Homo sapiens
  misc_RNA (1)...(19): siRNA sense strand
ggagaaggucuuggaggau

SEQ ID NO: 2539805 - RNA, 19 nt, Homo sapiens
  misc_RNA (1)...(19): siRNA sense strand
cgcuggucuuugaggagaa

SEQ ID NO: 2539806 - RNA, 19 nt, Homo sapiens
  misc_RNA (1)...(19): siRNA sense strand
cgaagauucugaagcucca

SEQ ID NO: 2539807 - RNA, 19 nt, Homo sapiens
  misc_RNA (1)...(19): siRNA sense strand
ugugaaucuugcugacuau

SEQ ID NO: 2539808 - RNA, 19 nt, Homo sapiens
  misc_RNA (1)...(19): siRNA sense strand
agaagaagucagaaggcua

SEQ ID NO: 2539809 - RNA, 19 nt, Homo sapiens
  misc_RNA (1)...(19): siRNA sense strand
aaaagagaccagaaggaaa

SEQ ID NO: 2539810 - RNA, 19 nt, Homo sapiens
  misc_RNA (1)...(19): siRNA sense strand
aggccaugcucuugggugu

SEQ ID NO: 2539811 - RNA, 19 nt, Homo sapiens
  misc_RNA (1)...(19): siRNA sense strand
cuguacugcuggagaaugu

SEQ ID NO: 2539812 - RNA, 19 nt, Homo sapiens
  misc_RNA (1)...(19): siRNA sense strand
uggacaugcugaaggccuu

SEQ ID NO: 2539813 - RNA, 19 nt, Homo sapiens
  misc_RNA (1)...(19): siRNA sense strand
cugaagaggacgcgaggaa

SEQ ID NO: 2539814 - RNA, 19 nt, Homo sapiens
  misc_RNA (1)...(19): siRNA sense strand
aaauaaggaaggaggaaaa

SEQ ID NO: 2539815 - RNA, 19 nt, Homo sapiens
  misc_RNA (1)...(19): siRNA sense strand
aggccaaacucaaagaaaa

SEQ ID NO: 2539816 - RNA, 19 nt, Homo sapiens
  misc_RNA (1)...(19): siRNA sense strand
aaacaaauucagaggacca

SEQ ID NO: 2539817 - RNA, 19 nt, Homo sapiens
  misc_RNA (1)...(19): siRNA sense strand
ccaaauaaggaaggaggaa

SEQ ID NO: 2539818 - RNA, 19 nt, Homo sapiens
  misc_RNA (1)...(19): siRNA sense strand
aguuagaggaagaggagca

SEQ ID NO: 2539819 - RNA, 19 nt, Homo sapiens
  misc_RNA (1)...(19): siRNA sense strand
agaaauacguugcaaggca

SEQ ID NO: 2539820 - RNA, 19 nt, Homo sapiens
  misc_RNA (1)...(19): siRNA sense strand
aauuauagaacaacgggaa

SEQ ID NO: 2539821 - RNA, 19 nt, Homo sapiens
  misc_RNA (1)...(19): siRNA sense strand
agaaauacuggcaaagaga

SEQ ID NO: 2539822 - RNA, 19 nt, Homo sapiens
  misc_RNA (1)...(19): siRNA sense strand
cagcagagacaguggugga

SEQ ID NO: 2539823 - RNA, 19 nt, Homo sapiens
  misc_RNA (1)...(19): siRNA sense strand
aggaaaacauugaccgauu

SEQ ID NO: 2539824 - RNA, 19 nt, Homo sapiens
  misc_RNA (1)...(19): siRNA sense strand
uuauguuagcuaugggaua

SEQ ID NO: 2539825 - RNA, 19 nt, Homo sapiens
  misc_RNA (1)...(19): siRNA sense strand
uguuggacgcugacaaaua

SEQ ID NO: 2539826 - RNA, 19 nt, Homo sapiens
  misc_RNA (1)...(19): siRNA sense strand
auguagaggcuuaugagua

SEQ ID NO: 2539827 - RNA, 19 nt, Homo sapiens
  misc_RNA (1)...(19): siRNA sense strand
ggcaauugagcguggaaca

SEQ ID NO: 2539828 - RNA, 19 nt, Homo sapiens
  misc_RNA (1)...(19): siRNA sense strand
caugagaagggcagagcuu

SEQ ID NO: 2539829 - RNA, 19 nt, Homo sapiens
  misc_RNA (1)...(19): siRNA sense strand
cgaaacuaucacaguggaa

SEQ ID NO: 2539830 - RNA, 19 nt, Homo sapiens
  misc_RNA (1)...(19): siRNA sense strand
uggaaaugauguagaggcu

SEQ ID NO: 2539831 - RNA, 19 nt, Homo sapiens
  misc_RNA (1)...(19): siRNA sense strand
uagaggaagaggagcaaaa

SEQ ID NO: 2539832 - RNA, 19 nt, Homo sapiens
  misc_RNA (1)...(19): siRNA sense strand
aaacuaucacaguggaaau

SEQ ID NO: 2539833 - RNA, 19 nt, Homo sapiens
  misc_RNA (1)...(19): siRNA sense strand
uggaacaggaaaugacaau

SEQ ID NO: 2539834 - RNA, 19 nt, Homo sapiens
  misc_RNA (1)...(19): siRNA sense strand
agacagugguggauccaga

SEQ ID NO: 2539835 - RNA, 19 nt, Homo sapiens
  misc_RNA (1)...(19): siRNA sense strand
cggagaaaaucaucagaga

SEQ ID NO: 2539836 - RNA, 19 nt, Homo sapiens
  misc_RNA (1)...(19): siRNA sense strand
gagaaaaucaucagagacu

SEQ ID NO: 2539837 - RNA, 19 nt, Homo sapiens
  misc_RNA (1)...(19): siRNA sense strand
ucacaguggaaaugaugua

SEQ ID NO: 2539838 - RNA, 19 nt, Homo sapiens
  misc_RNA (1)...(19): siRNA sense strand
caggauucaacuuuggaaa

SEQ ID NO: 2539839 - RNA, 19 nt, Homo sapiens
  misc_RNA (1)...(19): siRNA sense strand
cuacuuacuucaagggauc

SEQ ID NO: 2539840 - RNA, 19 nt, Homo sapiens
  misc_RNA (1)...(19): siRNA sense strand
ccucaacagacgaagacau

SEQ ID NO: 2539841 - RNA, 19 nt, Homo sapiens
  misc_RNA (1)...(19): siRNA sense strand
cgucaaugagauacuggaa

SEQ ID NO: 2539842 - RNA, 19 nt, Homo sapiens
  misc_RNA (1)...(19): siRNA sense strand
uggacacaguggauaacua

SEQ ID NO: 2539843 - RNA, 19 nt, Homo sapiens
  misc_RNA (1)...(19): siRNA sense strand
uggauauagugugguguua

SEQ ID NO: 2539844 - RNA, 19 nt, Homo sapiens
  misc_RNA (1)...(19): siRNA sense strand
ccaagagaggacuagaaau

SEQ ID NO: 2539845 - RNA, 19 nt, Homo sapiens
  misc_RNA (1)...(19): siRNA sense strand
acuagaaugcugugaaaau

SEQ ID NO: 2539846 - RNA, 19 nt, Homo sapiens
  misc_RNA (1)...(19): siRNA sense strand
gcagagaggaacuggccca

SEQ ID NO: 2539847 - RNA, 19 nt, Homo sapiens
  misc_RNA (1)...(19): siRNA sense strand
augagauacuggaagacau

SEQ ID NO: 2539848 - RNA, 19 nt, Homo sapiens
  misc_RNA (1)...(19): siRNA sense strand
ccuuuggacuucaagaaaa

SEQ ID NO: 2539849 - RNA, 19 nt, Homo sapiens
  misc_RNA (1)...(19): siRNA sense strand
gaggccaaacucaaagaaa

SEQ ID NO: 2539850 - RNA, 19 nt, Homo sapiens
  misc_RNA (1)...(19): siRNA sense strand
aauuaaacuuggcccagaa

SEQ ID NO: 2539851 - RNA, 19 nt, Homo sapiens
  misc_RNA (1)...(19): siRNA sense strand
ggacuagaaauacuggcaa

SEQ ID NO: 2539852 - RNA, 19 nt, Homo sapiens
  misc_RNA (1)...(19): siRNA sense strand
cugugaaaaugaaguagaa

SEQ ID NO: 2539853 - RNA, 19 nt, Homo sapiens
  misc_RNA (1)...(19): siRNA sense strand
agacgaagacauggagaca

SEQ ID NO: 2539854 - RNA, 19 nt, Homo sapiens
  misc_RNA (1)...(19): siRNA sense strand
aggcagaucaaucagaauu

SEQ ID NO: 2539855 - RNA, 19 nt, Homo sapiens
  misc_RNA (1)...(19): siRNA sense strand
ccaaaauagcugaaaccuu

SEQ ID NO: 2539856 - RNA, 19 nt, Homo sapiens
  misc_RNA (1)...(19): siRNA sense strand
aggaagaggagcaaaauga

SEQ ID NO: 2539857 - RNA, 19 nt, Homo sapiens
  misc_RNA (1)...(19): siRNA sense strand
agagaggacuagaaauacu

SEQ ID NO: 2539858 - RNA, 19 nt, Homo sapiens
  misc_RNA (1)...(19): siRNA sense strand
caaauauuucugugagugu

SEQ ID NO: 2539859 - RNA, 19 nt, Homo sapiens
  misc_RNA (1)...(19): siRNA sense strand
gauugguguacauggguuu

SEQ ID NO: 2539860 - RNA, 19 nt, Homo sapiens
  misc_RNA (1)...(19): siRNA sense strand
gcaggaaccucuagugccu

SEQ ID NO: 2539861 - RNA, 19 nt, Homo sapiens
  misc_RNA (1)...(19): siRNA sense strand
aagaacaaggcguggcuca

SEQ ID NO: 2539862 - RNA, 19 nt, Homo sapiens
  misc_RNA (1)...(19): siRNA sense strand
ugcuggacacaguggauaa

SEQ ID NO: 2539863 - RNA, 19 nt, Homo sapiens
  misc_RNA (1)...(19): siRNA sense strand
cagagcaugaggaagacua

SEQ ID NO: 2539864 - RNA, 19 nt, Homo sapiens
  misc_RNA (1)...(19): siRNA sense strand
uggcaaagagagcagcaga

SEQ ID NO: 2539865 - RNA, 19 nt, Homo sapiens
  misc_RNA (1)...(19): siRNA sense strand
aggcuuaugaguaucuuaa

SEQ ID NO: 2539866 - RNA, 19 nt, Homo sapiens
  misc_RNA (1)...(19): siRNA sense strand
auaggaagucagcaacaaa

SEQ ID NO: 2539867 - RNA, 19 nt, Homo sapiens
  misc_RNA (1)...(19): siRNA sense strand
cggaaguggagcuggugaa

SEQ ID NO: 2539868 - RNA, 19 nt, Homo sapiens
  misc_RNA (1)...(19): siRNA sense strand
ggaugaacauugcgcgacu

SEQ ID NO: 2539869 - RNA, 19 nt, Homo sapiens
  misc_RNA (1)...(19): siRNA sense strand
cuguggaagcggugaagau

SEQ ID NO: 2539870 - RNA, 19 nt, Homo sapiens
  misc_RNA (1)...(19): siRNA sense strand
gaaaaucgguccagaggga

SEQ ID NO: 2539871 - RNA, 19 nt, Homo sapiens
  misc_RNA (1)...(19): siRNA sense strand
gccucaaggagaugaucaa

SEQ ID NO: 2539872 - RNA, 19 nt, Homo sapiens
  misc_RNA (1)...(19): siRNA sense strand
cauugaaaguggaaagcuc

SEQ ID NO: 2539873 - RNA, 19 nt, Homo sapiens
  misc_RNA (1)...(19): siRNA sense strand
cccuagugguccagaaaau

SEQ ID NO: 2539874 - RNA, 19 nt, Homo sapiens
  misc_RNA (1)...(19): siRNA sense strand
cagagggacuggugaccca

SEQ ID NO: 2539875 - RNA, 19 nt, Homo sapiens
  misc_RNA (1)...(19): siRNA sense strand
cggaaguggagcuggugaa

SEQ ID NO: 2539876 - RNA, 19 nt, Homo sapiens
  misc_RNA (1)...(19): siRNA sense strand
ggaugaacauugcgcgacu

SEQ ID NO: 2539877 - RNA, 19 nt, Homo sapiens
  misc_RNA (1)...(19): siRNA sense strand
cuguggaagcggugaagau

SEQ ID NO: 2539878 - RNA, 19 nt, Homo sapiens
  misc_RNA (1)...(19): siRNA sense strand
gaaaaucgguccagaggga

SEQ ID NO: 2539879 - RNA, 19 nt, Homo sapiens
  misc_RNA (1)...(19): siRNA sense strand
gccucaaggagaugaucaa

SEQ ID NO: 2539880 - RNA, 19 nt, Homo sapiens
  misc_RNA (1)...(19): siRNA sense strand
cauugaaaguggaaagcuc

SEQ ID NO: 2539881 - RNA, 19 nt, Homo sapiens
  misc_RNA (1)...(19): siRNA sense strand
cccuagugguccagaaaau

SEQ ID NO: 2539882 - RNA, 19 nt, Homo sapiens
  misc_RNA (1)...(19): siRNA sense strand
cagagggacuggugaccca

SEQ ID NO: 2539883 - RNA, 19 nt, Homo sapiens
  misc_RNA (1)...(19): siRNA sense strand
gagaggaagaugaggguga

SEQ ID NO: 2539884 - RNA, 19 nt, Homo sapiens
  misc_RNA (1)...(19): siRNA sense strand
gcugaaaccucaagccgua

SEQ ID NO: 2539885 - RNA, 19 nt, Homo sapiens
  misc_RNA (1)...(19): siRNA sense strand
gagaggaaaucgaggcugu

SEQ ID NO: 2539886 - RNA, 19 nt, Homo sapiens
  misc_RNA (1)...(19): siRNA sense strand
cagcagggauacagggcca

SEQ ID NO: 2539887 - RNA, 19 nt, Homo sapiens
  misc_RNA (1)...(19): siRNA sense strand
gcugcuaugccgaggaaaa

SEQ ID NO: 2539888 - RNA, 19 nt, Homo sapiens
  misc_RNA (1)...(19): siRNA sense strand
uggcagagauccaggcugu

SEQ ID NO: 2539889 - RNA, 19 nt, Homo sapiens
  misc_RNA (1)...(19): siRNA sense strand
cagcacugauacaggacau

SEQ ID NO: 2539890 - RNA, 19 nt, Homo sapiens
  misc_RNA (1)...(19): siRNA sense strand
gcuaugugcuucugaggca

SEQ ID NO: 2539891 - RNA, 19 nt, Homo sapiens
  misc_RNA (1)...(19): siRNA sense strand
acaaagagauccacuggga

SEQ ID NO: 2539892 - RNA, 19 nt, Homo sapiens
  misc_RNA (1)...(19): siRNA sense strand
gggaagaagauccugcaga

SEQ ID NO: 2539893 - RNA, 19 nt, Homo sapiens
  misc_RNA (1)...(19): siRNA sense strand
caggacauagagagaggaa

SEQ ID NO: 2539894 - RNA, 19 nt, Homo sapiens
  misc_RNA (1)...(19): siRNA sense strand
caacacugcugcuggagga

SEQ ID NO: 2539895 - RNA, 19 nt, Homo sapiens
  misc_RNA (1)...(19): siRNA sense strand
ccucuaugcaugugggacu

SEQ ID NO: 2539896 - RNA, 19 nt, Homo sapiens
  misc_RNA (1)...(19): siRNA sense strand
ccauugaugcugaggccuu

SEQ ID NO: 2539897 - RNA, 19 nt, Homo sapiens
  misc_RNA (1)...(19): siRNA sense strand
gcugauggcuggauccaca

SEQ ID NO: 2539898 - RNA, 19 nt, Homo sapiens
  misc_RNA (1)...(19): siRNA sense strand
uggcaauagcuaugugcuu

SEQ ID NO: 2539899 - RNA, 19 nt, Homo sapiens
  misc_RNA (1)...(19): siRNA sense strand
ccccagagaugcaaagcaa

SEQ ID NO: 2539900 - RNA, 19 nt, Homo sapiens
  misc_RNA (1)...(19): siRNA sense strand
gugccaacgacauaggaga

SEQ ID NO: 2539901 - RNA, 19 nt, Homo sapiens
  misc_RNA (1)...(19): siRNA sense strand
cggaggaugaauggcaaua

SEQ ID NO: 2539902 - RNA, 19 nt, Homo sapiens
  misc_RNA (1)...(19): siRNA sense strand
aggccagugcaguggguga

SEQ ID NO: 2539903 - RNA, 19 nt, Homo sapiens
  misc_RNA (1)...(19): siRNA sense strand
gcucuaugugcuagccauu

SEQ ID NO: 2539904 - RNA, 19 nt, Homo sapiens
  misc_RNA (1)...(19): siRNA sense strand
agggagaccugggagggaa

SEQ ID NO: 2539905 - RNA, 19 nt, Homo sapiens
  misc_RNA (1)...(19): siRNA sense strand
gcggaggaugaauggcaau

SEQ ID NO: 2539906 - RNA, 19 nt, Homo sapiens
  misc_RNA (1)...(19): siRNA sense strand
caacaauggaguaccagca

SEQ ID NO: 2539907 - RNA, 19 nt, Homo sapiens
  misc_RNA (1)...(19): siRNA sense strand
gcaaagaucuugugccuca

SEQ ID NO: 2539908 - RNA, 19 nt, Homo sapiens
  misc_RNA (1)...(19): siRNA sense strand
ccaaaugggaguaugacga

SEQ ID NO: 2539909 - RNA, 19 nt, Homo sapiens
  misc_RNA (1)...(19): siRNA sense strand
cuggaaugggagaagacua

SEQ ID NO: 2539910 - RNA, 19 nt, Homo sapiens
  misc_RNA (1)...(19): siRNA sense strand
gggaguaugacgaaagcca

SEQ ID NO: 2539911 - RNA, 19 nt, Homo sapiens
  misc_RNA (1)...(19): siRNA sense strand
cucugauggugauggcaaa

SEQ ID NO: 2539912 - RNA, 19 nt, Homo sapiens
  misc_RNA (1)...(19): siRNA sense strand
gcgugguguaugauaacaa

SEQ ID NO: 2539913 - RNA, 19 nt, Homo sapiens
  misc_RNA (1)...(19): siRNA sense strand
aaaucaaagcccaugucaa

SEQ ID NO: 2539914 - RNA, 19 nt, Homo sapiens
  misc_RNA (1)...(19): siRNA sense strand
gguccugggccuaugucaa

SEQ ID NO: 2539915 - RNA, 19 nt, Homo sapiens
  misc_RNA (1)...(19): siRNA sense strand
uugcagagguccugggccu

SEQ ID NO: 2539916 - RNA, 19 nt, Homo sapiens
  misc_RNA (1)...(19): siRNA sense strand
cccauggcaucgagagcaa

SEQ ID NO: 2539917 - RNA, 19 nt, Homo sapiens
  misc_RNA (1)...(19): siRNA sense strand
gcauccagugugugaggaa

SEQ ID NO: 2539918 - RNA, 19 nt, Homo sapiens
  misc_RNA (1)...(19): siRNA sense strand
ggaagauucaacugggcau

SEQ ID NO: 2539919 - RNA, 19 nt, Homo sapiens
  misc_RNA (1)...(19): siRNA sense strand
gcguggacaagaagcggaa

SEQ ID NO: 2539920 - RNA, 19 nt, Homo sapiens
  misc_RNA (1)...(19): siRNA sense strand
ccuacgaggaccuggagau

SEQ ID NO: 2539921 - RNA, 19 nt, Homo sapiens
  misc_RNA (1)...(19): siRNA sense strand
acagcuacggcguggacaa

SEQ ID NO: 2539922 - RNA, 19 nt, Homo sapiens
  misc_RNA (1)...(19): siRNA sense strand
acaucagagcugcggauuu

SEQ ID NO: 2539923 - RNA, 19 nt, Homo sapiens
  misc_RNA (1)...(19): siRNA sense strand
ugugugaggaagaaggaga

SEQ ID NO: 2539924 - RNA, 19 nt, Homo sapiens
  misc_RNA (1)...(19): siRNA sense strand
cagucaagaaggagacaaa

SEQ ID NO: 2539925 - RNA, 19 nt, Homo sapiens
  misc_RNA (1)...(19): siRNA sense strand
gagaaauuaaggauggcaa

SEQ ID NO: 2539926 - RNA, 19 nt, Homo sapiens
  misc_RNA (1)...(19): siRNA sense strand
ugaugaaaccacugcagau

SEQ ID NO: 2539927 - RNA, 19 nt, Homo sapiens
  misc_RNA (1)...(19): siRNA sense strand
caucaggacucucagcaca

SEQ ID NO: 2539928 - RNA, 19 nt, Homo sapiens
  misc_RNA (1)...(19): siRNA sense strand
aaaugggauggcaaagaaa

SEQ ID NO: 2539929 - RNA, 19 nt, Homo sapiens
  misc_RNA (1)...(19): siRNA sense strand
agaugaaagaaaugggaua

SEQ ID NO: 2539930 - RNA, 19 nt, Homo sapiens
  misc_RNA (1)...(19): siRNA sense strand
auggaaaggaaguggaaga

SEQ ID NO: 2539931 - RNA, 19 nt, Homo sapiens
  misc_RNA (1)...(19): siRNA sense strand
acguguaugcagauggaaa

SEQ ID NO: 2539932 - RNA, 19 nt, Homo sapiens
  misc_RNA (1)...(19): siRNA sense strand
ggaaauaagccuaagagag

SEQ ID NO: 2539933 - RNA, 19 nt, Homo sapiens
  misc_RNA (1)...(19): siRNA sense strand
gcugcaacagagcgggaaa

SEQ ID NO: 2539934 - RNA, 19 nt, Homo sapiens
  misc_RNA (1)...(19): siRNA sense strand
uggagacaacagaaggaaa

SEQ ID NO: 2539935 - RNA, 19 nt, Homo sapiens
  misc_RNA (1)...(19): siRNA sense strand
gaggaacucaagaggaaaa

SEQ ID NO: 2539936 - RNA, 19 nt, Homo sapiens
  misc_RNA (1)...(19): siRNA sense strand
gaaaggaaguggaagacag

SEQ ID NO: 2539937 - RNA, 19 nt, Homo sapiens
  misc_RNA (1)...(19): siRNA sense strand
agauggaaaggaaguggaa

SEQ ID NO: 2539938 - RNA, 19 nt, Homo sapiens
  misc_RNA (1)...(19): siRNA sense strand
ccguaucgagggagaacuu

SEQ ID NO: 2539939 - RNA, 19 nt, Homo sapiens
  misc_RNA (1)...(19): siRNA sense strand
ccaugagugcagagaccau

SEQ ID NO: 2539940 - RNA, 19 nt, Homo sapiens
  misc_RNA (1)...(19): siRNA sense strand
uggugaacguguaugcaga

SEQ ID NO: 2539941 - RNA, 19 nt, Homo sapiens
  misc_RNA (1)...(19): siRNA sense strand
auagaaagugagcaagaga

SEQ ID NO: 2539942 - RNA, 19 nt, Homo sapiens
  misc_RNA (1)...(19): siRNA sense strand
aggaaguggaagacaggca

SEQ ID NO: 2539943 - RNA, 19 nt, Homo sapiens
  misc_RNA (1)...(19): siRNA sense strand
uggcaucacugcagggaag

SEQ ID NO: 2539944 - RNA, 19 nt, Homo sapiens
  misc_RNA (1)...(19): siRNA sense strand
uuaugaggauggagggauc

SEQ ID NO: 2539945 - RNA, 19 nt, Homo sapiens
  misc_RNA (1)...(19): siRNA sense strand
gugcagagaccauggagcu

SEQ ID NO: 2539946 - RNA, 19 nt, Homo sapiens
  misc_RNA (1)...(19): siRNA sense strand
acaaagugcagguggguua

SEQ ID NO: 2539947 - RNA, 19 nt, Homo sapiens
  misc_RNA (1)...(19): siRNA sense strand
aguccauaguagugauaaa

SEQ ID NO: 2539948 - RNA, 19 nt, Homo sapiens
  misc_RNA (1)...(19): siRNA sense strand
gaucaaaucuucaggcuca

SEQ ID NO: 2539949 - RNA, 19 nt, Homo sapiens
  misc_RNA (1)...(19): siRNA sense strand
caucauucuuggaggaaaa

SEQ ID NO: 2539950 - RNA, 19 nt, Homo sapiens
  misc_RNA (1)...(19): siRNA sense strand
gguucacacaggagggaaa

SEQ ID NO: 2539951 - RNA, 19 nt, Homo sapiens
  misc_RNA (1)...(19): siRNA sense strand
gagcauaucuucaagguca

SEQ ID NO: 2539952 - RNA, 19 nt, Homo sapiens
  misc_RNA (1)...(19): siRNA sense strand
cagauauagaguauggaaa

SEQ ID NO: 2539953 - RNA, 19 nt, Homo sapiens
  misc_RNA (1)...(19): siRNA sense strand
gugaauauggugagaacuu

SEQ ID NO: 2539954 - RNA, 19 nt, Homo sapiens
  misc_RNA (1)...(19): siRNA sense strand
acuuaaagaucaucagaga

SEQ ID NO: 2539955 - RNA, 19 nt, Homo sapiens
  misc_RNA (1)...(19): siRNA sense strand
aauccacacugaagagaaa

SEQ ID NO: 2539956 - RNA, 19 nt, Homo sapiens
  misc_RNA (1)...(19): siRNA sense strand
aauucacauuggagagaaa

SEQ ID NO: 2539957 - RNA, 19 nt, Homo sapiens
  misc_RNA (1)...(19): siRNA sense strand
aacaaaagauggagaguau

SEQ ID NO: 2539958 - RNA, 19 nt, Homo sapiens
  misc_RNA (1)...(19): siRNA sense strand
augugaagaaugugguaaa

SEQ ID NO: 2539959 - RNA, 19 nt, Homo sapiens
  misc_RNA (1)...(19): siRNA sense strand
aguccacacaggagagaaa

SEQ ID NO: 2539960 - RNA, 19 nt, Homo sapiens
  misc_RNA (1)...(19): siRNA sense strand
aguccacacaggagagaaa

SEQ ID NO: 2539961 - RNA, 19 nt, Homo sapiens
  misc_RNA (1)...(19): siRNA sense strand
aggaaugugauaagggauu

SEQ ID NO: 2539962 - RNA, 19 nt, Homo sapiens
  misc_RNA (1)...(19): siRNA sense strand
aggaauaccaguucagauu

SEQ ID NO: 2539963 - RNA, 19 nt, Homo sapiens
  misc_RNA (1)...(19): siRNA sense strand
ggaaaauguaucugaaaga

SEQ ID NO: 2539964 - RNA, 19 nt, Homo sapiens
  misc_RNA (1)...(19): siRNA sense strand
aaacagaggagaagcccua

SEQ ID NO: 2539965 - RNA, 19 nt, Homo sapiens
  misc_RNA (1)...(19): siRNA sense strand
uggagaaagaccauauaua

SEQ ID NO: 2539966 - RNA, 19 nt, Homo sapiens
  misc_RNA (1)...(19): siRNA sense strand
aggaaguaacaguaagcua

SEQ ID NO: 2539967 - RNA, 19 nt, Homo sapiens
  misc_RNA (1)...(19): siRNA sense strand
augauaaacuggaaguaca

SEQ ID NO: 2539968 - RNA, 19 nt, Homo sapiens
  misc_RNA (1)...(19): siRNA sense strand
caauucaaacagaggagaa

SEQ ID NO: 2539969 - RNA, 19 nt, Homo sapiens
  misc_RNA (1)...(19): siRNA sense strand
gcacaucauucuuggagga

SEQ ID NO: 2539970 - RNA, 19 nt, Homo sapiens
  misc_RNA (1)...(19): siRNA sense strand
cuauaaaagcgaagacuau

SEQ ID NO: 2539971 - RNA, 19 nt, Homo sapiens
  misc_RNA (1)...(19): siRNA sense strand
uggaaagggcuguaauuau

SEQ ID NO: 2539972 - RNA, 19 nt, Homo sapiens
  misc_RNA (1)...(19): siRNA sense strand
gggaugaaccccaugaaua

SEQ ID NO: 2539973 - RNA, 19 nt, Homo sapiens
  misc_RNA (1)...(19): siRNA sense strand
ccuuauaaaugugaggaau

SEQ ID NO: 2539974 - RNA, 19 nt, Homo sapiens
  misc_RNA (1)...(19): siRNA sense strand
gugguaaaggcuucaguaa

SEQ ID NO: 2539975 - RNA, 19 nt, Homo sapiens
  misc_RNA (1)...(19): siRNA sense strand
acguaaggagcaugggaau

SEQ ID NO: 2539976 - RNA, 19 nt, Homo sapiens
  misc_RNA (1)...(19): siRNA sense strand
augcaauauaugcggcaaa

SEQ ID NO: 2539977 - RNA, 19 nt, Homo sapiens
  misc_RNA (1)...(19): siRNA sense strand
gguucauauggaagagaau

SEQ ID NO: 2539978 - RNA, 19 nt, Homo sapiens
  misc_RNA (1)...(19): siRNA sense strand
agaggaagcuguaccgaga

SEQ ID NO: 2539979 - RNA, 19 nt, Homo sapiens
  misc_RNA (1)...(19): siRNA sense strand
uaucccagcuggagagaga

SEQ ID NO: 2539980 - RNA, 19 nt, Homo sapiens
  misc_RNA (1)...(19): siRNA sense strand
acacuaaggaacaaccaua

SEQ ID NO: 2539981 - RNA, 19 nt, Homo sapiens
  misc_RNA (1)...(19): siRNA sense strand
ggaugaaccccaugaauau

SEQ ID NO: 2539982 - RNA, 19 nt, Homo sapiens
  misc_RNA (1)...(19): siRNA sense strand
augugaugcuggagaacuu

SEQ ID NO: 2539983 - RNA, 19 nt, Homo sapiens
  misc_RNA (1)...(19): siRNA sense strand
auagaaaagccuucaguaa

SEQ ID NO: 2539984 - RNA, 19 nt, Homo sapiens
  misc_RNA (1)...(19): siRNA sense strand
gauggagaguauucaggaa

SEQ ID NO: 2539985 - RNA, 19 nt, Homo sapiens
  misc_RNA (1)...(19): siRNA sense strand
ggaaguacacagaaaagaa

SEQ ID NO: 2539986 - RNA, 19 nt, Homo sapiens
  misc_RNA (1)...(19): siRNA sense strand
cugccaugacuguggagaa

SEQ ID NO: 2539987 - RNA, 19 nt, Homo sapiens
  misc_RNA (1)...(19): siRNA sense strand
agagagaagaugauauuga

SEQ ID NO: 2539988 - RNA, 19 nt, Homo sapiens
  misc_RNA (1)...(19): siRNA sense strand
gagauguccuauaggcaca

SEQ ID NO: 2539989 - RNA, 19 nt, Homo sapiens
  misc_RNA (1)...(19): siRNA sense strand
ggguucauauggaagagaa

SEQ ID NO: 2539990 - RNA, 19 nt, Homo sapiens
  misc_RNA (1)...(19): siRNA sense strand
ccuuauaaaugcgaggaau

SEQ ID NO: 2539991 - RNA, 19 nt, Homo sapiens
  misc_RNA (1)...(19): siRNA sense strand
cccaugaauaugaggaaaa

SEQ ID NO: 2539992 - RNA, 19 nt, Homo sapiens
  misc_RNA (1)...(19): siRNA sense strand
gggaagggguucagucgaa

SEQ ID NO: 2539993 - RNA, 19 nt, Homo sapiens
  misc_RNA (1)...(19): siRNA sense strand
aaagcgaagacuaugguaa

SEQ ID NO: 2539994 - RNA, 19 nt, Homo sapiens
  misc_RNA (1)...(19): siRNA sense strand
acacugaagagaaacuaua

SEQ ID NO: 2539995 - RNA, 19 nt, Homo sapiens
  misc_RNA (1)...(19): siRNA sense strand
guggaaagggcuucaguca

SEQ ID NO: 2539996 - RNA, 19 nt, Homo sapiens
  misc_RNA (1)...(19): siRNA sense strand
guggaaagggcuucaguca

SEQ ID NO: 2539997 - RNA, 19 nt, Homo sapiens
  misc_RNA (1)...(19): siRNA sense strand
gaaucuacacagaaaugaa

SEQ ID NO: 2539998 - RNA, 19 nt, Homo sapiens
  misc_RNA (1)...(19): siRNA sense strand
aacuggaaguacacagaaa

SEQ ID NO: 2539999 - RNA, 19 nt, Homo sapiens
  misc_RNA (1)...(19): siRNA sense strand
ccaagaagacggagagcca

SEQ ID NO: 2540000 - RNA, 19 nt, Homo sapiens
  misc_RNA (1)...(19): siRNA sense strand
accacaaggccaagggcaa

SEQ ID NO: 2540001 - RNA, 19 nt, Homo sapiens
  misc_RNA (1)...(19): siRNA sense strand
acgacgaggagcucaacaa

SEQ ID NO: 2540002 - RNA, 19 nt, Homo sapiens
  misc_RNA (1)...(19): siRNA sense strand
uuuacaaagaucuggacaa

SEQ ID NO: 2540003 - RNA, 19 nt, Homo sapiens
  misc_RNA (1)...(19): siRNA sense strand
cugucuacaucuugguauu

SEQ ID NO: 2540004 - RNA, 19 nt, Homo sapiens
  misc_RNA (1)...(19): siRNA sense strand
uugugagagcuuugauuua

SEQ ID NO: 2540005 - RNA, 19 nt, Homo sapiens
  misc_RNA (1)...(19): siRNA sense strand
aguucaagcagaauggaga

SEQ ID NO: 2540006 - RNA, 19 nt, Homo sapiens
  misc_RNA (1)...(19): siRNA sense strand
cucccgagccacaaggaaa

SEQ ID NO: 2540007 - RNA, 19 nt, Homo sapiens
  misc_RNA (1)...(19): siRNA sense strand
uguaaacugcagagguuca

SEQ ID NO: 2540008 - RNA, 19 nt, Homo sapiens
  misc_RNA (1)...(19): siRNA sense strand
ucaggugacaagaggucua

SEQ ID NO: 2540009 - RNA, 19 nt, Homo sapiens
  misc_RNA (1)...(19): siRNA sense strand
gugacaagaggucuagcaa

SEQ ID NO: 2540010 - RNA, 19 nt, Homo sapiens
  misc_RNA (1)...(19): siRNA sense strand
gcuuucaaugacaggguuu

SEQ ID NO: 2540011 - RNA, 19 nt, Homo sapiens
  misc_RNA (1)...(19): siRNA sense strand
aagaagaagcgcaagggaa

SEQ ID NO: 2540012 - RNA, 19 nt, Homo sapiens
  misc_RNA (1)...(19): siRNA sense strand
auguauaagcaucgguuua

SEQ ID NO: 2540013 - RNA, 19 nt, Homo sapiens
  misc_RNA (1)...(19): siRNA sense strand
cccaaagcccgguggaaaa

SEQ ID NO: 2540014 - RNA, 19 nt, Homo sapiens
  misc_RNA (1)...(19): siRNA sense strand
ucagaagaagagaagcaaa

SEQ ID NO: 2540015 - RNA, 19 nt, Homo sapiens
  misc_RNA (1)...(19): siRNA sense strand
ccggaauagcccagccgaa

SEQ ID NO: 2540016 - RNA, 19 nt, Homo sapiens
  misc_RNA (1)...(19): siRNA sense strand
acccaaagcccgguggaaa

SEQ ID NO: 2540017 - RNA, 19 nt, Homo sapiens
  misc_RNA (1)...(19): siRNA sense strand
agucgaugcagcaguacaa

SEQ ID NO: 2540018 - RNA, 19 nt, Homo sapiens
  misc_RNA (1)...(19): siRNA sense strand
agauacaggcagaguucuu

SEQ ID NO: 2540019 - RNA, 19 nt, Homo sapiens
  misc_RNA (1)...(19): siRNA sense strand
ggaauagcccagccgaaga

SEQ ID NO: 2540020 - RNA, 19 nt, Homo sapiens
  misc_RNA (1)...(19): siRNA sense strand
agcacaagaagaagcgcaa

SEQ ID NO: 2540021 - RNA, 19 nt, Homo sapiens
  misc_RNA (1)...(19): siRNA sense strand
gcagauuucuaacugguuu

SEQ ID NO: 2540022 - RNA, 19 nt, Homo sapiens
  misc_RNA (1)...(19): siRNA sense strand
cagauuucuaacugguuua

SEQ ID NO: 2540023 - RNA, 19 nt, Homo sapiens
  misc_RNA (1)...(19): siRNA sense strand
ccagaugucaagagagaag

SEQ ID NO: 2540024 - RNA, 19 nt, Homo sapiens
  misc_RNA (1)...(19): siRNA sense strand
gagaagaagcaagagccua

SEQ ID NO: 2540025 - RNA, 19 nt, Homo sapiens
  misc_RNA (1)...(19): siRNA sense strand
gacccaaagcccagcccaa

SEQ ID NO: 2540026 - RNA, 19 nt, Homo sapiens
  misc_RNA (1)...(19): siRNA sense strand
agcuagagaagaagcaaga

SEQ ID NO: 2540027 - RNA, 19 nt, Homo sapiens
  misc_RNA (1)...(19): siRNA sense strand
ggauaugcuucaacagcgu

SEQ ID NO: 2540028 - RNA, 19 nt, Homo sapiens
  misc_RNA (1)...(19): siRNA sense strand
caguaaaggaagaggcaaa

SEQ ID NO: 2540029 - RNA, 19 nt, Homo sapiens
  misc_RNA (1)...(19): siRNA sense strand
cugaagaagaggagaaaga

SEQ ID NO: 2540030 - RNA, 19 nt, Homo sapiens
  misc_RNA (1)...(19): siRNA sense strand
ccacagagcuggaggcacu

SEQ ID NO: 2540031 - RNA, 19 nt, Homo sapiens
  misc_RNA (1)...(19): siRNA sense strand
cagugaaggaggaggagaa

SEQ ID NO: 2540032 - RNA, 19 nt, Homo sapiens
  misc_RNA (1)...(19): siRNA sense strand
gugaagaagaggaggcaga

SEQ ID NO: 2540033 - RNA, 19 nt, Homo sapiens
  misc_RNA (1)...(19): siRNA sense strand
cugccaagguggaggugaa

SEQ ID NO: 2540034 - RNA, 19 nt, Homo sapiens
  misc_RNA (1)...(19): siRNA sense strand
cagagaaggaagaggccaa

SEQ ID NO: 2540035 - RNA, 19 nt, Homo sapiens
  misc_RNA (1)...(19): siRNA sense strand
cagugaaggcagaagcaaa

SEQ ID NO: 2540036 - RNA, 19 nt, Homo sapiens
  misc_RNA (1)...(19): siRNA sense strand
cagugaaggcagaagcaaa

SEQ ID NO: 2540037 - RNA, 19 nt, Homo sapiens
  misc_RNA (1)...(19): siRNA sense strand
ccaagaaggaagaggcuga

SEQ ID NO: 2540038 - RNA, 19 nt, Homo sapiens
  misc_RNA (1)...(19): siRNA sense strand
ugacugaagaagaggagaa

SEQ ID NO: 2540039 - RNA, 19 nt, Homo sapiens
  misc_RNA (1)...(19): siRNA sense strand
cagugaaggaagaagcaaa

SEQ ID NO: 2540040 - RNA, 19 nt, Homo sapiens
  misc_RNA (1)...(19): siRNA sense strand
cagugaaggaagaagcaaa

SEQ ID NO: 2540041 - RNA, 19 nt, Homo sapiens
  misc_RNA (1)...(19): siRNA sense strand
cagugaaggaagaagcaaa

SEQ ID NO: 2540042 - RNA, 19 nt, Homo sapiens
  misc_RNA (1)...(19): siRNA sense strand
cagugaaggaagaagcaaa

SEQ ID NO: 2540043 - RNA, 19 nt, Homo sapiens
  misc_RNA (1)...(19): siRNA sense strand
gagaagucugagaaagaaa

SEQ ID NO: 2540044 - RNA, 19 nt, Homo sapiens
  misc_RNA (1)...(19): siRNA sense strand
agcccaagguggaggagaa

SEQ ID NO: 2540045 - RNA, 19 nt, Homo sapiens
  misc_RNA (1)...(19): siRNA sense strand
agguggaggugaaggaaga

SEQ ID NO: 2540046 - RNA, 19 nt, Homo sapiens
  misc_RNA (1)...(19): siRNA sense strand
ccaaggaggagaaggccaa

SEQ ID NO: 2540047 - RNA, 19 nt, Homo sapiens
  misc_RNA (1)...(19): siRNA sense strand
aggagaagaaggacagcaa

SEQ ID NO: 2540048 - RNA, 19 nt, Homo sapiens
  misc_RNA (1)...(19): siRNA sense strand
agacagaggccaaagccaa

SEQ ID NO: 2540049 - RNA, 19 nt, Homo sapiens
  misc_RNA (1)...(19): siRNA sense strand
aggccaaagccaaggaaga

SEQ ID NO: 2540050 - RNA, 19 nt, Homo sapiens
  misc_RNA (1)...(19): siRNA sense strand
ggggagaagaagaaacaaa

SEQ ID NO: 2540051 - RNA, 19 nt, Homo sapiens
  misc_RNA (1)...(19): siRNA sense strand
aauccaaaguugaagccaa

SEQ ID NO: 2540052 - RNA, 19 nt, Homo sapiens
  misc_RNA (1)...(19): siRNA sense strand
aggugaaggaagacgcuaa

SEQ ID NO: 2540053 - RNA, 19 nt, Homo sapiens
  misc_RNA (1)...(19): siRNA sense strand
gguggagaagucugagaaa

SEQ ID NO: 2540054 - RNA, 19 nt, Homo sapiens
  misc_RNA (1)...(19): siRNA sense strand
aggaacaccaagugggaga

SEQ ID NO: 2540055 - RNA, 19 nt, Homo sapiens
  misc_RNA (1)...(19): siRNA sense strand
agaaagaggccaaagagga

SEQ ID NO: 2540056 - RNA, 19 nt, Homo sapiens
  misc_RNA (1)...(19): siRNA sense strand
aagccaaggaagaugacaa

SEQ ID NO: 2540057 - RNA, 19 nt, Homo sapiens
  misc_RNA (1)...(19): siRNA sense strand
cugugauuguggaggaaca

SEQ ID NO: 2540058 - RNA, 19 nt, Homo sapiens
  misc_RNA (1)...(19): siRNA sense strand
aagaggagaaagaggccaa

SEQ ID NO: 2540059 - RNA, 19 nt, Homo sapiens
  misc_RNA (1)...(19): siRNA sense strand
acgcuaaacccaaagaaaa

SEQ ID NO: 2540060 - RNA, 19 nt, Homo sapiens
  misc_RNA (1)...(19): siRNA sense strand
aagaagugacugaagaaga

SEQ ID NO: 2540061 - RNA, 19 nt, Homo sapiens
  misc_RNA (1)...(19): siRNA sense strand
cagaugaugccaaggccaa

SEQ ID NO: 2540062 - RNA, 19 nt, Homo sapiens
  misc_RNA (1)...(19): siRNA sense strand
acauaaaggugaaaagcga

SEQ ID NO: 2540063 - RNA, 19 nt, Homo sapiens
  misc_RNA (1)...(19): siRNA sense strand
cccaaagaaggcagaggaa

SEQ ID NO: 2540064 - RNA, 19 nt, Homo sapiens
  misc_RNA (1)...(19): siRNA sense strand
aggcaaagucaccggcuga

SEQ ID NO: 2540065 - RNA, 19 nt, Homo sapiens
  misc_RNA (1)...(19): siRNA sense strand
ggugaaaagcgaagagaag

SEQ ID NO: 2540066 - RNA, 19 nt, Homo sapiens
  misc_RNA (1)...(19): siRNA sense strand
aggagaaagaggccaaaga

SEQ ID NO: 2540067 - RNA, 19 nt, Homo sapiens
  misc_RNA (1)...(19): siRNA sense strand
cugagaaggagaucccaaa

SEQ ID NO: 2540068 - RNA, 19 nt, Homo sapiens
  misc_RNA (1)...(19): siRNA sense strand
acagaggagaagaaggaca

SEQ ID NO: 2540069 - RNA, 19 nt, Homo sapiens
  misc_RNA (1)...(19): siRNA sense strand
aggugaagagugucggauu

SEQ ID NO: 2540070 - RNA, 19 nt, Homo sapiens
  misc_RNA (1)...(19): siRNA sense strand
aggaagacgcuaaacccaa

SEQ ID NO: 2540071 - RNA, 19 nt, Homo sapiens
  misc_RNA (1)...(19): siRNA sense strand
ccgcuaugggcgagcugua

SEQ ID NO: 2540072 - RNA, 19 nt, Homo sapiens
  misc_RNA (1)...(19): siRNA sense strand
aggcagaaaaggcugaaaa

SEQ ID NO: 2540073 - RNA, 19 nt, Homo sapiens
  misc_RNA (1)...(19): siRNA sense strand
aaagcgaagagaagaucaa

SEQ ID NO: 2540074 - RNA, 19 nt, Homo sapiens
  misc_RNA (1)...(19): siRNA sense strand
agucaccaguaaaggaaga

SEQ ID NO: 2540075 - RNA, 19 nt, Homo sapiens
  misc_RNA (1)...(19): siRNA sense strand
agagaaggaggaagcaaaa

SEQ ID NO: 2540076 - RNA, 19 nt, Homo sapiens
  misc_RNA (1)...(19): siRNA sense strand
agagaaggaggaagcaaaa

SEQ ID NO: 2540077 - RNA, 19 nt, Homo sapiens
  misc_RNA (1)...(19): siRNA sense strand
aggcagaggaagagaaagc

SEQ ID NO: 2540078 - RNA, 19 nt, Homo sapiens
  misc_RNA (1)...(19): siRNA sense strand
ccaagguggaggugaagga

SEQ ID NO: 2540079 - RNA, 19 nt, Homo sapiens
  misc_RNA (1)...(19): siRNA sense strand
agugaaggaagaagcaaaa

SEQ ID NO: 2540080 - RNA, 19 nt, Homo sapiens
  misc_RNA (1)...(19): siRNA sense strand
ccaaaguugaagccaagaa

SEQ ID NO: 2540081 - RNA, 19 nt, Homo sapiens
  misc_RNA (1)...(19): siRNA sense strand
ugaaaagcgaagagaagau

SEQ ID NO: 2540082 - RNA, 19 nt, Homo sapiens
  misc_RNA (1)...(19): siRNA sense strand
ccaucuuagaggaggacaa

SEQ ID NO: 2540083 - RNA, 19 nt, Homo sapiens
  misc_RNA (1)...(19): siRNA sense strand
cagcucaagcagaggccua

SEQ ID NO: 2540084 - RNA, 19 nt, Homo sapiens
  misc_RNA (1)...(19): siRNA sense strand
agaggaaagcauggaggaa

SEQ ID NO: 2540085 - RNA, 19 nt, Homo sapiens
  misc_RNA (1)...(19): siRNA sense strand
acagaguggaguacgagaa

SEQ ID NO: 2540086 - RNA, 19 nt, Homo sapiens
  misc_RNA (1)...(19): siRNA sense strand
gccaaaacagaguggagua

SEQ ID NO: 2540087 - RNA, 19 nt, Homo sapiens
  misc_RNA (1)...(19): siRNA sense strand
gcccaggagaggaaagcau

SEQ ID NO: 2540088 - RNA, 19 nt, Homo sapiens
  misc_RNA (1)...(19): siRNA sense strand
ucuuagaggaggacaagga

SEQ ID NO: 2540089 - RNA, 19 nt, Homo sapiens
  misc_RNA (1)...(19): siRNA sense strand
uauccaagacccagcucaa

SEQ ID NO: 2540090 - RNA, 19 nt, Homo sapiens
  misc_RNA (1)...(19): siRNA sense strand
gagaggaaagcauggagga

SEQ ID NO: 2540091 - RNA, 19 nt, Homo sapiens
  misc_RNA (1)...(19): siRNA sense strand
ccaucuuagaggaggacaa

SEQ ID NO: 2540092 - RNA, 19 nt, Homo sapiens
  misc_RNA (1)...(19): siRNA sense strand
cagcucaagcagaggccua

SEQ ID NO: 2540093 - RNA, 19 nt, Homo sapiens
  misc_RNA (1)...(19): siRNA sense strand
agaggaaagcauggaggaa

SEQ ID NO: 2540094 - RNA, 19 nt, Homo sapiens
  misc_RNA (1)...(19): siRNA sense strand
acagaguggaguacgagaa

SEQ ID NO: 2540095 - RNA, 19 nt, Homo sapiens
  misc_RNA (1)...(19): siRNA sense strand
gccaaaacagaguggagua

SEQ ID NO: 2540096 - RNA, 19 nt, Homo sapiens
  misc_RNA (1)...(19): siRNA sense strand
gcccaggagaggaaagcau

SEQ ID NO: 2540097 - RNA, 19 nt, Homo sapiens
  misc_RNA (1)...(19): siRNA sense strand
ucuuagaggaggacaagga

SEQ ID NO: 2540098 - RNA, 19 nt, Homo sapiens
  misc_RNA (1)...(19): siRNA sense strand
uauccaagacccagcucaa

SEQ ID NO: 2540099 - RNA, 19 nt, Homo sapiens
  misc_RNA (1)...(19): siRNA sense strand
gagaggaaagcauggagga

SEQ ID NO: 2540100 - RNA, 19 nt, Homo sapiens
  misc_RNA (1)...(19): siRNA sense strand
ccaucuuagaggaggacaa

SEQ ID NO: 2540101 - RNA, 19 nt, Homo sapiens
  misc_RNA (1)...(19): siRNA sense strand
cagcucaagcagaggccua

SEQ ID NO: 2540102 - RNA, 19 nt, Homo sapiens
  misc_RNA (1)...(19): siRNA sense strand
agaggaaagcauggaggaa

SEQ ID NO: 2540103 - RNA, 19 nt, Homo sapiens
  misc_RNA (1)...(19): siRNA sense strand
acagaguggaguacgagaa

SEQ ID NO: 2540104 - RNA, 19 nt, Homo sapiens
  misc_RNA (1)...(19): siRNA sense strand
gccaaaacagaguggagua

SEQ ID NO: 2540105 - RNA, 19 nt, Homo sapiens
  misc_RNA (1)...(19): siRNA sense strand
gcccaggagaggaaagcau

SEQ ID NO: 2540106 - RNA, 19 nt, Homo sapiens
  misc_RNA (1)...(19): siRNA sense strand
ucuuagaggaggacaagga

SEQ ID NO: 2540107 - RNA, 19 nt, Homo sapiens
  misc_RNA (1)...(19): siRNA sense strand
uauccaagacccagcucaa

SEQ ID NO: 2540108 - RNA, 19 nt, Homo sapiens
  misc_RNA (1)...(19): siRNA sense strand
gagaggaaagcauggagga

SEQ ID NO: 2540109 - RNA, 19 nt, Homo sapiens
  misc_RNA (1)...(19): siRNA sense strand
ccaucuuagaggaggacaa

SEQ ID NO: 2540110 - RNA, 19 nt, Homo sapiens
  misc_RNA (1)...(19): siRNA sense strand
cagcucaagcagaggccua

SEQ ID NO: 2540111 - RNA, 19 nt, Homo sapiens
  misc_RNA (1)...(19): siRNA sense strand
agaggaaagcauggaggaa

SEQ ID NO: 2540112 - RNA, 19 nt, Homo sapiens
  misc_RNA (1)...(19): siRNA sense strand
acagaguggaguacgagaa

SEQ ID NO: 2540113 - RNA, 19 nt, Homo sapiens
  misc_RNA (1)...(19): siRNA sense strand
gccaaaacagaguggagua

SEQ ID NO: 2540114 - RNA, 19 nt, Homo sapiens
  misc_RNA (1)...(19): siRNA sense strand
gcccaggagaggaaagcau

SEQ ID NO: 2540115 - RNA, 19 nt, Homo sapiens
  misc_RNA (1)...(19): siRNA sense strand
ucuuagaggaggacaagga

SEQ ID NO: 2540116 - RNA, 19 nt, Homo sapiens
  misc_RNA (1)...(19): siRNA sense strand
uauccaagacccagcucaa

SEQ ID NO: 2540117 - RNA, 19 nt, Homo sapiens
  misc_RNA (1)...(19): siRNA sense strand
gagaggaaagcauggagga

SEQ ID NO: 2540118 - RNA, 19 nt, Homo sapiens
  misc_RNA (1)...(19): siRNA sense strand
cagugaugguccagguuau

SEQ ID NO: 2540119 - RNA, 19 nt, Homo sapiens
  misc_RNA (1)...(19): siRNA sense strand
uguuaacacccacgagaaa

SEQ ID NO: 2540120 - RNA, 19 nt, Homo sapiens
  misc_RNA (1)...(19): siRNA sense strand
guuaaaaguuacacaccaa

SEQ ID NO: 2540121 - RNA, 19 nt, Homo sapiens
  misc_RNA (1)...(19): siRNA sense strand
ccagcaagcaacagaacau

SEQ ID NO: 2540122 - RNA, 19 nt, Homo sapiens
  misc_RNA (1)...(19): siRNA sense strand
cuucuuuaauggagagguu

SEQ ID NO: 2540123 - RNA, 19 nt, Homo sapiens
  misc_RNA (1)...(19): siRNA sense strand
ccuaaguugccaaaggauu

SEQ ID NO: 2540124 - RNA, 19 nt, Homo sapiens
  misc_RNA (1)...(19): siRNA sense strand
agauugcagaggagguaua

SEQ ID NO: 2540125 - RNA, 19 nt, Homo sapiens
  misc_RNA (1)...(19): siRNA sense strand
ucuuguuacagcagaauua

SEQ ID NO: 2540126 - RNA, 19 nt, Homo sapiens
  misc_RNA (1)...(19): siRNA sense strand
auggagagguucaagcaau

SEQ ID NO: 2540127 - RNA, 19 nt, Homo sapiens
  misc_RNA (1)...(19): siRNA sense strand
gaacgauguugcagcagga

SEQ ID NO: 2540128 - RNA, 19 nt, Homo sapiens
  misc_RNA (1)...(19): siRNA sense strand
ccauaauuggacacggauu

SEQ ID NO: 2540129 - RNA, 19 nt, Homo sapiens
  misc_RNA (1)...(19): siRNA sense strand
guuaaauauuguacgcguu

SEQ ID NO: 2540130 - RNA, 19 nt, Homo sapiens
  misc_RNA (1)...(19): siRNA sense strand
cagcagaauuagaagagag

SEQ ID NO: 2540131 - RNA, 19 nt, Homo sapiens
  misc_RNA (1)...(19): siRNA sense strand
cugcuuuacuggugaaucu

SEQ ID NO: 2540132 - RNA, 19 nt, Homo sapiens
  misc_RNA (1)...(19): siRNA sense strand
aguugggaguuacuagaaa

SEQ ID NO: 2540133 - RNA, 19 nt, Homo sapiens
  misc_RNA (1)...(19): siRNA sense strand
aggaaagauugcagaggag

SEQ ID NO: 2540134 - RNA, 19 nt, Homo sapiens
  misc_RNA (1)...(19): siRNA sense strand
uacaaagaucugugaccaa

SEQ ID NO: 2540135 - RNA, 19 nt, Homo sapiens
  misc_RNA (1)...(19): siRNA sense strand
ucugugaccaagauggaaa

SEQ ID NO: 2540136 - RNA, 19 nt, Homo sapiens
  misc_RNA (1)...(19): siRNA sense strand
aggccuuaguagccacaaa

SEQ ID NO: 2540137 - RNA, 19 nt, Homo sapiens
  misc_RNA (1)...(19): siRNA sense strand
gaccauaauuggacacgga

SEQ ID NO: 2540138 - RNA, 19 nt, Homo sapiens
  misc_RNA (1)...(19): siRNA sense strand
aaggaaagauugcagagga

SEQ ID NO: 2540139 - RNA, 19 nt, Homo sapiens
  misc_RNA (1)...(19): siRNA sense strand
ucaacaagcagaaggcguu

SEQ ID NO: 2540140 - RNA, 19 nt, Homo sapiens
  misc_RNA (1)...(19): siRNA sense strand
agcaacagaacauggacaa

SEQ ID NO: 2540141 - RNA, 19 nt, Homo sapiens
  misc_RNA (1)...(19): siRNA sense strand
cugugaaggcauuuaccua

SEQ ID NO: 2540142 - RNA, 19 nt, Homo sapiens
  misc_RNA (1)...(19): siRNA sense strand
accaaaagauuaugcaaga

SEQ ID NO: 2540143 - RNA, 19 nt, Homo sapiens
  misc_RNA (1)...(19): siRNA sense strand
aguuacacaccaagcggaa

SEQ ID NO: 2540144 - RNA, 19 nt, Homo sapiens
  misc_RNA (1)...(19): siRNA sense strand
cgauguugcagcaggaacu

SEQ ID NO: 2540145 - RNA, 19 nt, Homo sapiens
  misc_RNA (1)...(19): siRNA sense strand
cauggcgaccugaaggaaa

SEQ ID NO: 2540146 - RNA, 19 nt, Homo sapiens
  misc_RNA (1)...(19): siRNA sense strand
cagaaagaaucaugagcaa

SEQ ID NO: 2540147 - RNA, 19 nt, Homo sapiens
  misc_RNA (1)...(19): siRNA sense strand
cagcaaaguagaacagaaa

SEQ ID NO: 2540148 - RNA, 19 nt, Homo sapiens
  misc_RNA (1)...(19): siRNA sense strand
ccgaagaauuagcuggaaa

SEQ ID NO: 2540149 - RNA, 19 nt, Homo sapiens
  misc_RNA (1)...(19): siRNA sense strand
gcaggaagaaagaaagaaa

SEQ ID NO: 2540150 - RNA, 19 nt, Homo sapiens
  misc_RNA (1)...(19): siRNA sense strand
ugaaaaggcaagagagaaa

SEQ ID NO: 2540151 - RNA, 19 nt, Homo sapiens
  misc_RNA (1)...(19): siRNA sense strand
gguagaagaagaacagaaa

SEQ ID NO: 2540152 - RNA, 19 nt, Homo sapiens
  misc_RNA (1)...(19): siRNA sense strand
ggacaaauugcuuggagaa

SEQ ID NO: 2540153 - RNA, 19 nt, Homo sapiens
  misc_RNA (1)...(19): siRNA sense strand
acguuuaccugaugagaaa

SEQ ID NO: 2540154 - RNA, 19 nt, Homo sapiens
  misc_RNA (1)...(19): siRNA sense strand
ccauaaaauaagugagcaa

SEQ ID NO: 2540155 - RNA, 19 nt, Homo sapiens
  misc_RNA (1)...(19): siRNA sense strand
gauugaugaugaagacaaa

SEQ ID NO: 2540156 - RNA, 19 nt, Homo sapiens
  misc_RNA (1)...(19): siRNA sense strand
aggcagaauuagagaaacu

SEQ ID NO: 2540157 - RNA, 19 nt, Homo sapiens
  misc_RNA (1)...(19): siRNA sense strand
agacaaggcaacagaauau

SEQ ID NO: 2540158 - RNA, 19 nt, Homo sapiens
  misc_RNA (1)...(19): siRNA sense strand
cagaugaagaggaggaaga

SEQ ID NO: 2540159 - RNA, 19 nt, Homo sapiens
  misc_RNA (1)...(19): siRNA sense strand
cguagaagagaaagaacaa

SEQ ID NO: 2540160 - RNA, 19 nt, Homo sapiens
  misc_RNA (1)...(19): siRNA sense strand
agaaggugaaguagagaaa

SEQ ID NO: 2540161 - RNA, 19 nt, Homo sapiens
  misc_RNA (1)...(19): siRNA sense strand
gaaugagcuaagagaauua

SEQ ID NO: 2540162 - RNA, 19 nt, Homo sapiens
  misc_RNA (1)...(19): siRNA sense strand
ggacagaugaagaggagga

SEQ ID NO: 2540163 - RNA, 19 nt, Homo sapiens
  misc_RNA (1)...(19): siRNA sense strand
gguugaaacaaaugcuaaa

SEQ ID NO: 2540164 - RNA, 19 nt, Homo sapiens
  misc_RNA (1)...(19): siRNA sense strand
gcugaaaguaacucaaaua

SEQ ID NO: 2540165 - RNA, 19 nt, Homo sapiens
  misc_RNA (1)...(19): siRNA sense strand
acugaaagacuguggagaa

SEQ ID NO: 2540166 - RNA, 19 nt, Homo sapiens
  misc_RNA (1)...(19): siRNA sense strand
aaaugaaguucgaaagaga

SEQ ID NO: 2540167 - RNA, 19 nt, Homo sapiens
  misc_RNA (1)...(19): siRNA sense strand
caggaaagaugaagaaacu

SEQ ID NO: 2540168 - RNA, 19 nt, Homo sapiens
  misc_RNA (1)...(19): siRNA sense strand
gcugaaaagcagaguuaaa

SEQ ID NO: 2540169 - RNA, 19 nt, Homo sapiens
  misc_RNA (1)...(19): siRNA sense strand
ugaacaagaaggugaagua

SEQ ID NO: 2540170 - RNA, 19 nt, Homo sapiens
  misc_RNA (1)...(19): siRNA sense strand
gcaggcagaauuagagaaa

SEQ ID NO: 2540171 - RNA, 19 nt, Homo sapiens
  misc_RNA (1)...(19): siRNA sense strand
gcaacauaaagcagagcaa

SEQ ID NO: 2540172 - RNA, 19 nt, Homo sapiens
  misc_RNA (1)...(19): siRNA sense strand
ccagaauucuucaggaaaa

SEQ ID NO: 2540173 - RNA, 19 nt, Homo sapiens
  misc_RNA (1)...(19): siRNA sense strand
agaugaagaaggagaugaa

SEQ ID NO: 2540174 - RNA, 19 nt, Homo sapiens
  misc_RNA (1)...(19): siRNA sense strand
ggagauucauguugcacaa

SEQ ID NO: 2540175 - RNA, 19 nt, Homo sapiens
  misc_RNA (1)...(19): siRNA sense strand
gcaaaaugaugcugauaau

SEQ ID NO: 2540176 - RNA, 19 nt, Homo sapiens
  misc_RNA (1)...(19): siRNA sense strand
caauauauucagaggcaga

SEQ ID NO: 2540177 - RNA, 19 nt, Homo sapiens
  misc_RNA (1)...(19): siRNA sense strand
ugguguagaaagugauaaa

SEQ ID NO: 2540178 - RNA, 19 nt, Homo sapiens
  misc_RNA (1)...(19): siRNA sense strand
guuggaaggcgaagaacaa

SEQ ID NO: 2540179 - RNA, 19 nt, Homo sapiens
  misc_RNA (1)...(19): siRNA sense strand
gcaugaaugaucaggauuu

SEQ ID NO: 2540180 - RNA, 19 nt, Homo sapiens
  misc_RNA (1)...(19): siRNA sense strand
aaacugaaacagcggauaa

SEQ ID NO: 2540181 - RNA, 19 nt, Homo sapiens
  misc_RNA (1)...(19): siRNA sense strand
cagcagaagaagacaccaa

SEQ ID NO: 2540182 - RNA, 19 nt, Homo sapiens
  misc_RNA (1)...(19): siRNA sense strand
agagaaagaacaauggcaa

SEQ ID NO: 2540183 - RNA, 19 nt, Homo sapiens
  misc_RNA (1)...(19): siRNA sense strand
caguugaaccagugcuaua

SEQ ID NO: 2540184 - RNA, 19 nt, Homo sapiens
  misc_RNA (1)...(19): siRNA sense strand
agaaaaugguagaagaaga

SEQ ID NO: 2540185 - RNA, 19 nt, Homo sapiens
  misc_RNA (1)...(19): siRNA sense strand
cgaagaauuagcuggaaau

SEQ ID NO: 2540186 - RNA, 19 nt, Homo sapiens
  misc_RNA (1)...(19): siRNA sense strand
cggaagaagacgccaguuu

SEQ ID NO: 2540187 - RNA, 19 nt, Homo sapiens
  misc_RNA (1)...(19): siRNA sense strand
uugaaugagcuaagagaau

SEQ ID NO: 2540188 - RNA, 19 nt, Homo sapiens
  misc_RNA (1)...(19): siRNA sense strand
aagcagaagaggagggagu

SEQ ID NO: 2540189 - RNA, 19 nt, Homo sapiens
  misc_RNA (1)...(19): siRNA sense strand
gaauaugagcguaugaaga

SEQ ID NO: 2540190 - RNA, 19 nt, Homo sapiens
  misc_RNA (1)...(19): siRNA sense strand
aguuaaaucugcucaggaa

SEQ ID NO: 2540191 - RNA, 19 nt, Homo sapiens
  misc_RNA (1)...(19): siRNA sense strand
ggaugaugaugcagcucaa

SEQ ID NO: 2540192 - RNA, 19 nt, Homo sapiens
  misc_RNA (1)...(19): siRNA sense strand
ugagagaauaugagcguau

SEQ ID NO: 2540193 - RNA, 19 nt, Homo sapiens
  misc_RNA (1)...(19): siRNA sense strand
cagagaaaccaaggaauaa

SEQ ID NO: 2540194 - RNA, 19 nt, Homo sapiens
  misc_RNA (1)...(19): siRNA sense strand
guaugaagacugaggcuga

SEQ ID NO: 2540195 - RNA, 19 nt, Homo sapiens
  misc_RNA (1)...(19): siRNA sense strand
ggaaauucugagacacuaa

SEQ ID NO: 2540196 - RNA, 19 nt, Homo sapiens
  misc_RNA (1)...(19): siRNA sense strand
ugagagugcuacaggaaaa

SEQ ID NO: 2540197 - RNA, 19 nt, Homo sapiens
  misc_RNA (1)...(19): siRNA sense strand
agagaugggcgaacaguua

SEQ ID NO: 2540198 - RNA, 19 nt, Homo sapiens
  misc_RNA (1)...(19): siRNA sense strand
gcagcaacagagagagcua

SEQ ID NO: 2540199 - RNA, 19 nt, Homo sapiens
  misc_RNA (1)...(19): siRNA sense strand
augaagaggaggaagaaga

SEQ ID NO: 2540200 - RNA, 19 nt, Homo sapiens
  misc_RNA (1)...(19): siRNA sense strand
agaacaauggcaagaacaa

SEQ ID NO: 2540201 - RNA, 19 nt, Homo sapiens
  misc_RNA (1)...(19): siRNA sense strand
gcccagaauucuucaggaa

SEQ ID NO: 2540202 - RNA, 19 nt, Homo sapiens
  misc_RNA (1)...(19): siRNA sense strand
aaacuggaguaaugagaau

SEQ ID NO: 2540203 - RNA, 19 nt, Homo sapiens
  misc_RNA (1)...(19): siRNA sense strand
agaaagaaacugauugaca

SEQ ID NO: 2540204 - RNA, 19 nt, Homo sapiens
  misc_RNA (1)...(19): siRNA sense strand
ggaaagaggcaguagugca

SEQ ID NO: 2540205 - RNA, 19 nt, Homo sapiens
  misc_RNA (1)...(19): siRNA sense strand
acacagacuacuugagaca

SEQ ID NO: 2540206 - RNA, 19 nt, Homo sapiens
  misc_RNA (1)...(19): siRNA sense strand
aaauaacuguccugugaaa

SEQ ID NO: 2540207 - RNA, 19 nt, Homo sapiens
  misc_RNA (1)...(19): siRNA sense strand
ccuuaaagaacaagagaag

SEQ ID NO: 2540208 - RNA, 19 nt, Homo sapiens
  misc_RNA (1)...(19): siRNA sense strand
gugaagaugaugaggagga

SEQ ID NO: 2540209 - RNA, 19 nt, Homo sapiens
  misc_RNA (1)...(19): siRNA sense strand
aggaagaugaagaaaguga

SEQ ID NO: 2540210 - RNA, 19 nt, Homo sapiens
  misc_RNA (1)...(19): siRNA sense strand
gaaaaugguagaagaagaa

SEQ ID NO: 2540211 - RNA, 19 nt, Homo sapiens
  misc_RNA (1)...(19): siRNA sense strand
cagagaaacgauuggauca

SEQ ID NO: 2540212 - RNA, 19 nt, Homo sapiens
  misc_RNA (1)...(19): siRNA sense strand
acuaagagcucuacaggga

SEQ ID NO: 2540213 - RNA, 19 nt, Homo sapiens
  misc_RNA (1)...(19): siRNA sense strand
agaaaugagaagacaugaa

SEQ ID NO: 2540214 - RNA, 19 nt, Homo sapiens
  misc_RNA (1)...(19): siRNA sense strand
acgagaagccacuaguaaa

SEQ ID NO: 2540215 - RNA, 19 nt, Homo sapiens
  misc_RNA (1)...(19): siRNA sense strand
caaauugcuuggagaacuu

SEQ ID NO: 2540216 - RNA, 19 nt, Homo sapiens
  misc_RNA (1)...(19): siRNA sense strand
ugauugacauucaggagaa

SEQ ID NO: 2540217 - RNA, 19 nt, Homo sapiens
  misc_RNA (1)...(19): siRNA sense strand
caguaggacaccaugguua

SEQ ID NO: 2540218 - RNA, 19 nt, Homo sapiens
  misc_RNA (1)...(19): siRNA sense strand
gggaaaugacacagcaaaa

SEQ ID NO: 2540219 - RNA, 19 nt, Homo sapiens
  misc_RNA (1)...(19): siRNA sense strand
ccuggaugccacugagauu

SEQ ID NO: 2540220 - RNA, 19 nt, Homo sapiens
  misc_RNA (1)...(19): siRNA sense strand
ugcugagccugcugggaaa

SEQ ID NO: 2540221 - RNA, 19 nt, Homo sapiens
  misc_RNA (1)...(19): siRNA sense strand
gcaaaauggcggauggugu

SEQ ID NO: 2540222 - RNA, 19 nt, Homo sapiens
  misc_RNA (1)...(19): siRNA sense strand
gaucaucgccuaugcccua

SEQ ID NO: 2540223 - RNA, 19 nt, Homo sapiens
  misc_RNA (1)...(19): siRNA sense strand
gucaaauauuacagaucca

SEQ ID NO: 2540224 - RNA, 19 nt, Homo sapiens
  misc_RNA (1)...(19): siRNA sense strand
ugggaaaugacacagcaaa

SEQ ID NO: 2540225 - RNA, 19 nt, Homo sapiens
  misc_RNA (1)...(19): siRNA sense strand
cugcugagccugcugggaa

SEQ ID NO: 2540226 - RNA, 19 nt, Homo sapiens
  misc_RNA (1)...(19): siRNA sense strand
gaucuaaauuucacuggca

SEQ ID NO: 2540227 - RNA, 19 nt, Homo sapiens
  misc_RNA (1)...(19): siRNA sense strand
gguccugggaaaugacaca

SEQ ID NO: 2540228 - RNA, 19 nt, Homo sapiens
  misc_RNA (1)...(19): siRNA sense strand
aggaagaagcccagggaca

SEQ ID NO: 2540229 - RNA, 19 nt, Homo sapiens
  misc_RNA (1)...(19): siRNA sense strand
uggcaaaccaugcagggua

SEQ ID NO: 2540230 - RNA, 19 nt, Homo sapiens
  misc_RNA (1)...(19): siRNA sense strand
acaaggaguccgugggucu

SEQ ID NO: 2540231 - RNA, 19 nt, Homo sapiens
  misc_RNA (1)...(19): siRNA sense strand
uuggaagccaggaggugaa

SEQ ID NO: 2540232 - RNA, 19 nt, Homo sapiens
  misc_RNA (1)...(19): siRNA sense strand
gcuucaacaucguggacau

SEQ ID NO: 2540233 - RNA, 19 nt, Homo sapiens
  misc_RNA (1)...(19): siRNA sense strand
agcgggaaccagagaguaa

SEQ ID NO: 2540234 - RNA, 19 nt, Homo sapiens
  misc_RNA (1)...(19): siRNA sense strand
ggauacaaccugaaggaug

SEQ ID NO: 2540235 - RNA, 19 nt, Homo sapiens
  misc_RNA (1)...(19): siRNA sense strand
uguacaucuuccaggacaa

SEQ ID NO: 2540236 - RNA, 19 nt, Homo sapiens
  misc_RNA (1)...(19): siRNA sense strand
uggagauagaggagaagau

SEQ ID NO: 2540237 - RNA, 19 nt, Homo sapiens
  misc_RNA (1)...(19): siRNA sense strand
ggaagauuaccgaacgaga

SEQ ID NO: 2540238 - RNA, 19 nt, Homo sapiens
  misc_RNA (1)...(19): siRNA sense strand
cggccaacauggaggaccu

SEQ ID NO: 2540239 - RNA, 19 nt, Homo sapiens
  misc_RNA (1)...(19): siRNA sense strand
ugaaggaugaagaggggaa

SEQ ID NO: 2540240 - RNA, 19 nt, Homo sapiens
  misc_RNA (1)...(19): siRNA sense strand
ccaagaagauccugcacac

SEQ ID NO: 2540241 - RNA, 19 nt, Homo sapiens
  misc_RNA (1)...(19): siRNA sense strand
ccuacaugucggcggauga

SEQ ID NO: 2540242 - RNA, 19 nt, Homo sapiens
  misc_RNA (1)...(19): siRNA sense strand
ucuuccaggacaagguaaa

SEQ ID NO: 2540243 - RNA, 19 nt, Homo sapiens
  misc_RNA (1)...(19): siRNA sense strand
gcuucaacaucguggacau

SEQ ID NO: 2540244 - RNA, 19 nt, Homo sapiens
  misc_RNA (1)...(19): siRNA sense strand
agcgggaaccagagaguaa

SEQ ID NO: 2540245 - RNA, 19 nt, Homo sapiens
  misc_RNA (1)...(19): siRNA sense strand
ggauacaaccugaaggaug

SEQ ID NO: 2540246 - RNA, 19 nt, Homo sapiens
  misc_RNA (1)...(19): siRNA sense strand
uguacaucuuccaggacaa

SEQ ID NO: 2540247 - RNA, 19 nt, Homo sapiens
  misc_RNA (1)...(19): siRNA sense strand
uggagauagaggagaagau

SEQ ID NO: 2540248 - RNA, 19 nt, Homo sapiens
  misc_RNA (1)...(19): siRNA sense strand
ggaagauuaccgaacgaga

SEQ ID NO: 2540249 - RNA, 19 nt, Homo sapiens
  misc_RNA (1)...(19): siRNA sense strand
cggccaacauggaggaccu

SEQ ID NO: 2540250 - RNA, 19 nt, Homo sapiens
  misc_RNA (1)...(19): siRNA sense strand
ugaaggaugaagaggggaa

SEQ ID NO: 2540251 - RNA, 19 nt, Homo sapiens
  misc_RNA (1)...(19): siRNA sense strand
ccaagaagauccugcacac

SEQ ID NO: 2540252 - RNA, 19 nt, Homo sapiens
  misc_RNA (1)...(19): siRNA sense strand
ccuacaugucggcggauga

SEQ ID NO: 2540253 - RNA, 19 nt, Homo sapiens
  misc_RNA (1)...(19): siRNA sense strand
ucuuccaggacaagguaaa

SEQ ID NO: 2540254 - RNA, 19 nt, Homo sapiens
  misc_RNA (1)...(19): siRNA sense strand
gggaaauaagugagagaaa

SEQ ID NO: 2540255 - RNA, 19 nt, Homo sapiens
  misc_RNA (1)...(19): siRNA sense strand
ggacaaugguggaaggcca

SEQ ID NO: 2540256 - RNA, 19 nt, Homo sapiens
  misc_RNA (1)...(19): siRNA sense strand
agaagaaagaagaggaaaa

SEQ ID NO: 2540257 - RNA, 19 nt, Homo sapiens
  misc_RNA (1)...(19): siRNA sense strand
acaagaaacaggagaugaa

SEQ ID NO: 2540258 - RNA, 19 nt, Homo sapiens
  misc_RNA (1)...(19): siRNA sense strand
ggagagaguuugugccaga

SEQ ID NO: 2540259 - RNA, 19 nt, Homo sapiens
  misc_RNA (1)...(19): siRNA sense strand
ccagaauagcauugaagaa

SEQ ID NO: 2540260 - RNA, 19 nt, Homo sapiens
  misc_RNA (1)...(19): siRNA sense strand
cagauggagcugaggcaaa

SEQ ID NO: 2540261 - RNA, 19 nt, Homo sapiens
  misc_RNA (1)...(19): siRNA sense strand
gcuuaaagaaccuggcuau

SEQ ID NO: 2540262 - RNA, 19 nt, Homo sapiens
  misc_RNA (1)...(19): siRNA sense strand
guggaaggccaaauggaaa

SEQ ID NO: 2540263 - RNA, 19 nt, Homo sapiens
  misc_RNA (1)...(19): siRNA sense strand
ggaaaaggccagaagaaga

SEQ ID NO: 2540264 - RNA, 19 nt, Homo sapiens
  misc_RNA (1)...(19): siRNA sense strand
cggccagcccuuuggaaua

SEQ ID NO: 2540265 - RNA, 19 nt, Homo sapiens
  misc_RNA (1)...(19): siRNA sense strand
ccaaauggaaagaagucaa

SEQ ID NO: 2540266 - RNA, 19 nt, Homo sapiens
  misc_RNA (1)...(19): siRNA sense strand
cagcaaaggcaaaggaaug

SEQ ID NO: 2540267 - RNA, 19 nt, Homo sapiens
  misc_RNA (1)...(19): siRNA sense strand
agagaagaaagaagaggaa

SEQ ID NO: 2540268 - RNA, 19 nt, Homo sapiens
  misc_RNA (1)...(19): siRNA sense strand
agacugcauuauugggaaa

SEQ ID NO: 2540269 - RNA, 19 nt, Homo sapiens
  misc_RNA (1)...(19): siRNA sense strand
agaugaacccaaaggagaa

SEQ ID NO: 2540270 - RNA, 19 nt, Homo sapiens
  misc_RNA (1)...(19): siRNA sense strand
caugaaagcaggaagacau

SEQ ID NO: 2540271 - RNA, 19 nt, Homo sapiens
  misc_RNA (1)...(19): siRNA sense strand
gagaugaacccaaaggaga

SEQ ID NO: 2540272 - RNA, 19 nt, Homo sapiens
  misc_RNA (1)...(19): siRNA sense strand
gagaugaaguaauugguga

SEQ ID NO: 2540273 - RNA, 19 nt, Homo sapiens
  misc_RNA (1)...(19): siRNA sense strand
caucaugaaagcaggaaga

SEQ ID NO: 2540274 - RNA, 19 nt, Homo sapiens
  misc_RNA (1)...(19): siRNA sense strand
gauugaugacagugaauau

SEQ ID NO: 2540275 - RNA, 19 nt, Homo sapiens
  misc_RNA (1)...(19): siRNA sense strand
ggaaaaugucuauggauga

SEQ ID NO: 2540276 - RNA, 19 nt, Homo sapiens
  misc_RNA (1)...(19): siRNA sense strand
ccaacagaccuacgagcaa

SEQ ID NO: 2540277 - RNA, 19 nt, Homo sapiens
  misc_RNA (1)...(19): siRNA sense strand
gcaaaacauucuggggaaa

SEQ ID NO: 2540278 - RNA, 19 nt, Homo sapiens
  misc_RNA (1)...(19): siRNA sense strand
acauauugcugaaaggcau

SEQ ID NO: 2540279 - RNA, 19 nt, Homo sapiens
  misc_RNA (1)...(19): siRNA sense strand
uggaugaagcucuggagaa

SEQ ID NO: 2540280 - RNA, 19 nt, Homo sapiens
  misc_RNA (1)...(19): siRNA sense strand
caacauuccaacagaccua

SEQ ID NO: 2540281 - RNA, 19 nt, Homo sapiens
  misc_RNA (1)...(19): siRNA sense strand
agagaaaggaaauugaaga

SEQ ID NO: 2540282 - RNA, 19 nt, Homo sapiens
  misc_RNA (1)...(19): siRNA sense strand
uguuauaucgcuuggagaa

SEQ ID NO: 2540283 - RNA, 19 nt, Homo sapiens
  misc_RNA (1)...(19): siRNA sense strand
ucagaagcuucaagaaaca

SEQ ID NO: 2540284 - RNA, 19 nt, Homo sapiens
  misc_RNA (1)...(19): siRNA sense strand
ccauccaggugguaaggaa

SEQ ID NO: 2540285 - RNA, 19 nt, Homo sapiens
  misc_RNA (1)...(19): siRNA sense strand
ugauucagcaggagaaauu

SEQ ID NO: 2540286 - RNA, 19 nt, Homo sapiens
  misc_RNA (1)...(19): siRNA sense strand
gagaagaaagaagaggaaa

SEQ ID NO: 2540287 - RNA, 19 nt, Homo sapiens
  misc_RNA (1)...(19): siRNA sense strand
auaagugagagaaaggaaa

SEQ ID NO: 2540288 - RNA, 19 nt, Homo sapiens
  misc_RNA (1)...(19): siRNA sense strand
cuucaauguucaggagcaa

SEQ ID NO: 2540289 - RNA, 19 nt, Homo sapiens
  misc_RNA (1)...(19): siRNA sense strand
aaagacagccagaagacaa

SEQ ID NO: 2540290 - RNA, 19 nt, Homo sapiens
  misc_RNA (1)...(19): siRNA sense strand
uggugauacuguagagguu

SEQ ID NO: 2540291 - RNA, 19 nt, Homo sapiens
  misc_RNA (1)...(19): siRNA sense strand
uugaagaacuugauggugu

SEQ ID NO: 2540292 - RNA, 19 nt, Homo sapiens
  misc_RNA (1)...(19): siRNA sense strand
gguggaaggccaaauggaa

SEQ ID NO: 2540293 - RNA, 19 nt, Homo sapiens
  misc_RNA (1)...(19): siRNA sense strand
cauccaggugguaaggaaa

SEQ ID NO: 2540294 - RNA, 19 nt, Homo sapiens
  misc_RNA (1)...(19): siRNA sense strand
uggaaaugauucagcagga

SEQ ID NO: 2540295 - RNA, 19 nt, Homo sapiens
  misc_RNA (1)...(19): siRNA sense strand
agaucagcucuaugaauua

SEQ ID NO: 2540296 - RNA, 19 nt, Homo sapiens
  misc_RNA (1)...(19): siRNA sense strand
gcuucaauguucaggagca

SEQ ID NO: 2540297 - RNA, 19 nt, Homo sapiens
  misc_RNA (1)...(19): siRNA sense strand
augaaagcaggaagacaua

SEQ ID NO: 2540298 - RNA, 19 nt, Homo sapiens
  misc_RNA (1)...(19): siRNA sense strand
aggaggaagaagacccaua

SEQ ID NO: 2540299 - RNA, 19 nt, Homo sapiens
  misc_RNA (1)...(19): siRNA sense strand
ccaggaaauacaaaagaua

SEQ ID NO: 2540300 - RNA, 19 nt, Homo sapiens
  misc_RNA (1)...(19): siRNA sense strand
cugaagaccaguaugauga

SEQ ID NO: 2540301 - RNA, 19 nt, Homo sapiens
  misc_RNA (1)...(19): siRNA sense strand
aagaagaugcugaggaaug

SEQ ID NO: 2540302 - RNA, 19 nt, Homo sapiens
  misc_RNA (1)...(19): siRNA sense strand
aauaagugagagaaaggaa

SEQ ID NO: 2540303 - RNA, 19 nt, Homo sapiens
  misc_RNA (1)...(19): siRNA sense strand
aagagcaggaggaggaaga

SEQ ID NO: 2540304 - RNA, 19 nt, Homo sapiens
  misc_RNA (1)...(19): siRNA sense strand
cagauucaggagagaguuu

SEQ ID NO: 2540305 - RNA, 19 nt, Homo sapiens
  misc_RNA (1)...(19): siRNA sense strand
gggaaaaugucuauggaug

SEQ ID NO: 2540306 - RNA, 19 nt, Homo sapiens
  misc_RNA (1)...(19): siRNA sense strand
gggucauccugguguuaga

SEQ ID NO: 2540307 - RNA, 19 nt, Homo sapiens
  misc_RNA (1)...(19): siRNA sense strand
guugcaagaaagaucauua

SEQ ID NO: 2540308 - RNA, 19 nt, Homo sapiens
  misc_RNA (1)...(19): siRNA sense strand
gcaggagaaauuacgacaa

SEQ ID NO: 2540309 - RNA, 19 nt, Homo sapiens
  misc_RNA (1)...(19): siRNA sense strand
ugggaaaaggccagaagaa

SEQ ID NO: 2540310 - RNA, 19 nt, Homo sapiens
  misc_RNA (1)...(19): siRNA sense strand
agcaaaacauucuggggaa

SEQ ID NO: 2540311 - RNA, 19 nt, Homo sapiens
  misc_RNA (1)...(19): siRNA sense strand
aaauggaaggggaaggaaa

SEQ ID NO: 2540312 - RNA, 19 nt, Homo sapiens
  misc_RNA (1)...(19): siRNA sense strand
gugauacuguagagguuga

SEQ ID NO: 2540313 - RNA, 19 nt, Homo sapiens
  misc_RNA (1)...(19): siRNA sense strand
ggagcugaggcaaaugaaa

SEQ ID NO: 2540314 - RNA, 19 nt, Homo sapiens
  misc_RNA (1)...(19): siRNA sense strand
gguaaagaucaguggagga

SEQ ID NO: 2540315 - RNA, 19 nt, Homo sapiens
  misc_RNA (1)...(19): siRNA sense strand
aggaaaacuaccuggagua

SEQ ID NO: 2540316 - RNA, 19 nt, Homo sapiens
  misc_RNA (1)...(19): siRNA sense strand
ccaagaagcugcucaccca

SEQ ID NO: 2540317 - RNA, 19 nt, Homo sapiens
  misc_RNA (1)...(19): siRNA sense strand
augagugggcuuugagaga

SEQ ID NO: 2540318 - RNA, 19 nt, Homo sapiens
  misc_RNA (1)...(19): siRNA sense strand
cccaauauuucgugcagga

SEQ ID NO: 2540319 - RNA, 19 nt, Homo sapiens
  misc_RNA (1)...(19): siRNA sense strand
acaaucagaucaugcccaa

SEQ ID NO: 2540320 - RNA, 19 nt, Homo sapiens
  misc_RNA (1)...(19): siRNA sense strand
acgauggccugcuggguga

SEQ ID NO: 2540321 - RNA, 19 nt, Homo sapiens
  misc_RNA (1)...(19): siRNA sense strand
gguaaagaucaguggagga

SEQ ID NO: 2540322 - RNA, 19 nt, Homo sapiens
  misc_RNA (1)...(19): siRNA sense strand
aggaaaacuaccuggagua

SEQ ID NO: 2540323 - RNA, 19 nt, Homo sapiens
  misc_RNA (1)...(19): siRNA sense strand
ccaagaagcugcucaccca

SEQ ID NO: 2540324 - RNA, 19 nt, Homo sapiens
  misc_RNA (1)...(19): siRNA sense strand
augagugggcuuugagaga

SEQ ID NO: 2540325 - RNA, 19 nt, Homo sapiens
  misc_RNA (1)...(19): siRNA sense strand
cccaauauuucgugcagga

SEQ ID NO: 2540326 - RNA, 19 nt, Homo sapiens
  misc_RNA (1)...(19): siRNA sense strand
acaaucagaucaugcccaa

SEQ ID NO: 2540327 - RNA, 19 nt, Homo sapiens
  misc_RNA (1)...(19): siRNA sense strand
acgauggccugcuggguga

SEQ ID NO: 2540328 - RNA, 19 nt, Homo sapiens
  misc_RNA (1)...(19): siRNA sense strand
guauugaagaagauggaaa

SEQ ID NO: 2540329 - RNA, 19 nt, Homo sapiens
  misc_RNA (1)...(19): siRNA sense strand
cauuaagggcuguggaacu

SEQ ID NO: 2540330 - RNA, 19 nt, Homo sapiens
  misc_RNA (1)...(19): siRNA sense strand
uccauaagccauugguaaa

SEQ ID NO: 2540331 - RNA, 19 nt, Homo sapiens
  misc_RNA (1)...(19): siRNA sense strand
cucauaaagcagaaagcaa

SEQ ID NO: 2540332 - RNA, 19 nt, Homo sapiens
  misc_RNA (1)...(19): siRNA sense strand
ugaucaaguuggaguuuua

SEQ ID NO: 2540333 - RNA, 19 nt, Homo sapiens
  misc_RNA (1)...(19): siRNA sense strand
gguaaaggaaggugcugau

SEQ ID NO: 2540334 - RNA, 19 nt, Homo sapiens
  misc_RNA (1)...(19): siRNA sense strand
gaaccggaaacaugggaau

SEQ ID NO: 2540335 - RNA, 19 nt, Homo sapiens
  misc_RNA (1)...(19): siRNA sense strand
aggacaaaccaguucaaau

SEQ ID NO: 2540336 - RNA, 19 nt, Homo sapiens
  misc_RNA (1)...(19): siRNA sense strand
ucuccaaucagcagagcua

SEQ ID NO: 2540337 - RNA, 19 nt, Homo sapiens
  misc_RNA (1)...(19): siRNA sense strand
agauaucuccauugaagaa

SEQ ID NO: 2540338 - RNA, 19 nt, Homo sapiens
  misc_RNA (1)...(19): siRNA sense strand
ucaccaaaauggagagcga

SEQ ID NO: 2540339 - RNA, 19 nt, Homo sapiens
  misc_RNA (1)...(19): siRNA sense strand
gaauauaccucaacagcag

SEQ ID NO: 2540340 - RNA, 19 nt, Homo sapiens
  misc_RNA (1)...(19): siRNA sense strand
uauuaugagagcagagcau

SEQ ID NO: 2540341 - RNA, 19 nt, Homo sapiens
  misc_RNA (1)...(19): siRNA sense strand
uuccauaagccauugguaa

SEQ ID NO: 2540342 - RNA, 19 nt, Homo sapiens
  misc_RNA (1)...(19): siRNA sense strand
aagcagaaagcaaguccua

SEQ ID NO: 2540343 - RNA, 19 nt, Homo sapiens
  misc_RNA (1)...(19): siRNA sense strand
ugaaauaacugcuagcuuc

SEQ ID NO: 2540344 - RNA, 19 nt, Homo sapiens
  misc_RNA (1)...(19): siRNA sense strand
gagcaaugcauggcagaga

SEQ ID NO: 2540345 - RNA, 19 nt, Homo sapiens
  misc_RNA (1)...(19): siRNA sense strand
cagauauugaugaagauga

SEQ ID NO: 2540346 - RNA, 19 nt, Homo sapiens
  misc_RNA (1)...(19): siRNA sense strand
augcaggaauugauacaga

SEQ ID NO: 2540347 - RNA, 19 nt, Homo sapiens
  misc_RNA (1)...(19): siRNA sense strand
aguuuguuaugcaggaauu

SEQ ID NO: 2540348 - RNA, 19 nt, Homo sapiens
  misc_RNA (1)...(19): siRNA sense strand
uccaaucagcagagcuaua

SEQ ID NO: 2540349 - RNA, 19 nt, Homo sapiens
  misc_RNA (1)...(19): siRNA sense strand
cauaugugcuagaugacca

SEQ ID NO: 2540350 - RNA, 19 nt, Homo sapiens
  misc_RNA (1)...(19): siRNA sense strand
ugaccagaugugugaugaa

SEQ ID NO: 2540351 - RNA, 19 nt, Homo sapiens
  misc_RNA (1)...(19): siRNA sense strand
ccgaaauuuacucgcucaa

SEQ ID NO: 2540352 - RNA, 19 nt, Homo sapiens
  misc_RNA (1)...(19): siRNA sense strand
cgccaugaauauaccucaa

SEQ ID NO: 2540353 - RNA, 19 nt, Homo sapiens
  misc_RNA (1)...(19): siRNA sense strand
uuaugagagcagagcauga

SEQ ID NO: 2540354 - RNA, 19 nt, Homo sapiens
  misc_RNA (1)...(19): siRNA sense strand
gccauuaagggcuguggaa

SEQ ID NO: 2540355 - RNA, 19 nt, Homo sapiens
  misc_RNA (1)...(19): siRNA sense strand
guauugaagaagauggaaa

SEQ ID NO: 2540356 - RNA, 19 nt, Homo sapiens
  misc_RNA (1)...(19): siRNA sense strand
cauuaagggcuguggaacu

SEQ ID NO: 2540357 - RNA, 19 nt, Homo sapiens
  misc_RNA (1)...(19): siRNA sense strand
uccauaagccauugguaaa

SEQ ID NO: 2540358 - RNA, 19 nt, Homo sapiens
  misc_RNA (1)...(19): siRNA sense strand
cucauaaagcagaaagcaa

SEQ ID NO: 2540359 - RNA, 19 nt, Homo sapiens
  misc_RNA (1)...(19): siRNA sense strand
ugaucaaguuggaguuuua

SEQ ID NO: 2540360 - RNA, 19 nt, Homo sapiens
  misc_RNA (1)...(19): siRNA sense strand
gguaaaggaaggugcugau

SEQ ID NO: 2540361 - RNA, 19 nt, Homo sapiens
  misc_RNA (1)...(19): siRNA sense strand
gaaccggaaacaugggaau

SEQ ID NO: 2540362 - RNA, 19 nt, Homo sapiens
  misc_RNA (1)...(19): siRNA sense strand
aggacaaaccaguucaaau

SEQ ID NO: 2540363 - RNA, 19 nt, Homo sapiens
  misc_RNA (1)...(19): siRNA sense strand
ucuccaaucagcagagcua

SEQ ID NO: 2540364 - RNA, 19 nt, Homo sapiens
  misc_RNA (1)...(19): siRNA sense strand
agauaucuccauugaagaa

SEQ ID NO: 2540365 - RNA, 19 nt, Homo sapiens
  misc_RNA (1)...(19): siRNA sense strand
ucaccaaaauggagagcga

SEQ ID NO: 2540366 - RNA, 19 nt, Homo sapiens
  misc_RNA (1)...(19): siRNA sense strand
gaauauaccucaacagcag

SEQ ID NO: 2540367 - RNA, 19 nt, Homo sapiens
  misc_RNA (1)...(19): siRNA sense strand
uauuaugagagcagagcau

SEQ ID NO: 2540368 - RNA, 19 nt, Homo sapiens
  misc_RNA (1)...(19): siRNA sense strand
uuccauaagccauugguaa

SEQ ID NO: 2540369 - RNA, 19 nt, Homo sapiens
  misc_RNA (1)...(19): siRNA sense strand
aagcagaaagcaaguccua

SEQ ID NO: 2540370 - RNA, 19 nt, Homo sapiens
  misc_RNA (1)...(19): siRNA sense strand
ugaaauaacugcuagcuuc

SEQ ID NO: 2540371 - RNA, 19 nt, Homo sapiens
  misc_RNA (1)...(19): siRNA sense strand
gagcaaugcauggcagaga

SEQ ID NO: 2540372 - RNA, 19 nt, Homo sapiens
  misc_RNA (1)...(19): siRNA sense strand
cagauauugaugaagauga

SEQ ID NO: 2540373 - RNA, 19 nt, Homo sapiens
  misc_RNA (1)...(19): siRNA sense strand
augcaggaauugauacaga

SEQ ID NO: 2540374 - RNA, 19 nt, Homo sapiens
  misc_RNA (1)...(19): siRNA sense strand
aguuuguuaugcaggaauu

SEQ ID NO: 2540375 - RNA, 19 nt, Homo sapiens
  misc_RNA (1)...(19): siRNA sense strand
uccaaucagcagagcuaua

SEQ ID NO: 2540376 - RNA, 19 nt, Homo sapiens
  misc_RNA (1)...(19): siRNA sense strand
cauaugugcuagaugacca

SEQ ID NO: 2540377 - RNA, 19 nt, Homo sapiens
  misc_RNA (1)...(19): siRNA sense strand
ugaccagaugugugaugaa

SEQ ID NO: 2540378 - RNA, 19 nt, Homo sapiens
  misc_RNA (1)...(19): siRNA sense strand
ccgaaauuuacucgcucaa

SEQ ID NO: 2540379 - RNA, 19 nt, Homo sapiens
  misc_RNA (1)...(19): siRNA sense strand
cgccaugaauauaccucaa

SEQ ID NO: 2540380 - RNA, 19 nt, Homo sapiens
  misc_RNA (1)...(19): siRNA sense strand
uuaugagagcagagcauga

SEQ ID NO: 2540381 - RNA, 19 nt, Homo sapiens
  misc_RNA (1)...(19): siRNA sense strand
gccauuaagggcuguggaa

SEQ ID NO: 2540382 - RNA, 19 nt, Homo sapiens
  misc_RNA (1)...(19): siRNA sense strand
caagaauacaagaaggaaa

SEQ ID NO: 2540383 - RNA, 19 nt, Homo sapiens
  misc_RNA (1)...(19): siRNA sense strand
gauccaaaucacugagaaa

SEQ ID NO: 2540384 - RNA, 19 nt, Homo sapiens
  misc_RNA (1)...(19): siRNA sense strand
gcaagaaaacagaaagaua

SEQ ID NO: 2540385 - RNA, 19 nt, Homo sapiens
  misc_RNA (1)...(19): siRNA sense strand
agaaagugccaaacagaaa

SEQ ID NO: 2540386 - RNA, 19 nt, Homo sapiens
  misc_RNA (1)...(19): siRNA sense strand
agacaaaauuacagaguga

SEQ ID NO: 2540387 - RNA, 19 nt, Homo sapiens
  misc_RNA (1)...(19): siRNA sense strand
agaggaauccagagauaaa

SEQ ID NO: 2540388 - RNA, 19 nt, Homo sapiens
  misc_RNA (1)...(19): siRNA sense strand
acacaggaaacaagugaua

SEQ ID NO: 2540389 - RNA, 19 nt, Homo sapiens
  misc_RNA (1)...(19): siRNA sense strand
gggauugagcagaguguau

SEQ ID NO: 2540390 - RNA, 19 nt, Homo sapiens
  misc_RNA (1)...(19): siRNA sense strand
cccuagaacucaagaauca

SEQ ID NO: 2540391 - RNA, 19 nt, Homo sapiens
  misc_RNA (1)...(19): siRNA sense strand
agaagaaggaauacaagaa

SEQ ID NO: 2540392 - RNA, 19 nt, Homo sapiens
  misc_RNA (1)...(19): siRNA sense strand
uaauugaagcacagcgaaa

SEQ ID NO: 2540393 - RNA, 19 nt, Homo sapiens
  misc_RNA (1)...(19): siRNA sense strand
gcgaaaagccauucaggaa

SEQ ID NO: 2540394 - RNA, 19 nt, Homo sapiens
  misc_RNA (1)...(19): siRNA sense strand
aaacuacagcaaagagaaa

SEQ ID NO: 2540395 - RNA, 19 nt, Homo sapiens
  misc_RNA (1)...(19): siRNA sense strand
uggagaauucagagggauu

SEQ ID NO: 2540396 - RNA, 19 nt, Homo sapiens
  misc_RNA (1)...(19): siRNA sense strand
uggaagaauuauugagaac

SEQ ID NO: 2540397 - RNA, 19 nt, Homo sapiens
  misc_RNA (1)...(19): siRNA sense strand
aggaacagaacaagaacua

SEQ ID NO: 2540398 - RNA, 19 nt, Homo sapiens
  misc_RNA (1)...(19): siRNA sense strand
agaacuagaaagugccaaa

SEQ ID NO: 2540399 - RNA, 19 nt, Homo sapiens
  misc_RNA (1)...(19): siRNA sense strand
gaaagaaauugauaagcga

SEQ ID NO: 2540400 - RNA, 19 nt, Homo sapiens
  misc_RNA (1)...(19): siRNA sense strand
aaagagaagagaaggaaaa

SEQ ID NO: 2540401 - RNA, 19 nt, Homo sapiens
  misc_RNA (1)...(19): siRNA sense strand
cagaaacccaauuaagaaa

SEQ ID NO: 2540402 - RNA, 19 nt, Homo sapiens
  misc_RNA (1)...(19): siRNA sense strand
gcaacuugaaauagaaaga

SEQ ID NO: 2540403 - RNA, 19 nt, Homo sapiens
  misc_RNA (1)...(19): siRNA sense strand
gaaagauaauugaagcaca

SEQ ID NO: 2540404 - RNA, 19 nt, Homo sapiens
  misc_RNA (1)...(19): siRNA sense strand
ugagacagaaagaaaguaa

SEQ ID NO: 2540405 - RNA, 19 nt, Homo sapiens
  misc_RNA (1)...(19): siRNA sense strand
gcagaaaagacaaagaaau

SEQ ID NO: 2540406 - RNA, 19 nt, Homo sapiens
  misc_RNA (1)...(19): siRNA sense strand
gagaauaaggccuugaaaa

SEQ ID NO: 2540407 - RNA, 19 nt, Homo sapiens
  misc_RNA (1)...(19): siRNA sense strand
uuucagaagaagagacauu

SEQ ID NO: 2540408 - RNA, 19 nt, Homo sapiens
  misc_RNA (1)...(19): siRNA sense strand
gacuaaagaacuagaagau

SEQ ID NO: 2540409 - RNA, 19 nt, Homo sapiens
  misc_RNA (1)...(19): siRNA sense strand
acugaaguuuggagcuaua

SEQ ID NO: 2540410 - RNA, 19 nt, Homo sapiens
  misc_RNA (1)...(19): siRNA sense strand
guuaagaagcaacuugaaa

SEQ ID NO: 2540411 - RNA, 19 nt, Homo sapiens
  misc_RNA (1)...(19): siRNA sense strand
guuuggagcuauaagaaaa

SEQ ID NO: 2540412 - RNA, 19 nt, Homo sapiens
  misc_RNA (1)...(19): siRNA sense strand
uggaagagguugagaaagc

SEQ ID NO: 2540413 - RNA, 19 nt, Homo sapiens
  misc_RNA (1)...(19): siRNA sense strand
ugaggaacuucgugugcaa

SEQ ID NO: 2540414 - RNA, 19 nt, Homo sapiens
  misc_RNA (1)...(19): siRNA sense strand
uagaaagagaagagaagga

SEQ ID NO: 2540415 - RNA, 19 nt, Homo sapiens
  misc_RNA (1)...(19): siRNA sense strand
agaagaagagacauugaaa

SEQ ID NO: 2540416 - RNA, 19 nt, Homo sapiens
  misc_RNA (1)...(19): siRNA sense strand
gagagaaagaaguacauga

SEQ ID NO: 2540417 - RNA, 19 nt, Homo sapiens
  misc_RNA (1)...(19): siRNA sense strand
gagaaaucacagacaccua

SEQ ID NO: 2540418 - RNA, 19 nt, Homo sapiens
  misc_RNA (1)...(19): siRNA sense strand
acacugaaguuuggagcua

SEQ ID NO: 2540419 - RNA, 19 nt, Homo sapiens
  misc_RNA (1)...(19): siRNA sense strand
gaagauuuacagauagcaa

SEQ ID NO: 2540420 - RNA, 19 nt, Homo sapiens
  misc_RNA (1)...(19): siRNA sense strand
ccagagagaaagaaguaca

SEQ ID NO: 2540421 - RNA, 19 nt, Homo sapiens
  misc_RNA (1)...(19): siRNA sense strand
cauugaagaaagagacuca

SEQ ID NO: 2540422 - RNA, 19 nt, Homo sapiens
  misc_RNA (1)...(19): siRNA sense strand
gagcaaagaacaagaacag

SEQ ID NO: 2540423 - RNA, 19 nt, Homo sapiens
  misc_RNA (1)...(19): siRNA sense strand
aaagagaggcaaaagaaaa

SEQ ID NO: 2540424 - RNA, 19 nt, Homo sapiens
  misc_RNA (1)...(19): siRNA sense strand
caaaucacugagaaagaaa

SEQ ID NO: 2540425 - RNA, 19 nt, Homo sapiens
  misc_RNA (1)...(19): siRNA sense strand
cagaaagauaauugaagca

SEQ ID NO: 2540426 - RNA, 19 nt, Homo sapiens
  misc_RNA (1)...(19): siRNA sense strand
aacgagaagcuuaagaaua

SEQ ID NO: 2540427 - RNA, 19 nt, Homo sapiens
  misc_RNA (1)...(19): siRNA sense strand
aauccaacaccuugaacaa

SEQ ID NO: 2540428 - RNA, 19 nt, Homo sapiens
  misc_RNA (1)...(19): siRNA sense strand
aggaacugcaauuuggaaa

SEQ ID NO: 2540429 - RNA, 19 nt, Homo sapiens
  misc_RNA (1)...(19): siRNA sense strand
ggcuuuagaggaagauuua

SEQ ID NO: 2540430 - RNA, 19 nt, Homo sapiens
  misc_RNA (1)...(19): siRNA sense strand
agaagauugcugaagaauu

SEQ ID NO: 2540431 - RNA, 19 nt, Homo sapiens
  misc_RNA (1)...(19): siRNA sense strand
uuuggaagagguugagaaa

SEQ ID NO: 2540432 - RNA, 19 nt, Homo sapiens
  misc_RNA (1)...(19): siRNA sense strand
gcaaaagaaaacacagcua

SEQ ID NO: 2540433 - RNA, 19 nt, Homo sapiens
  misc_RNA (1)...(19): siRNA sense strand
gaagaagagacauugaaaa

SEQ ID NO: 2540434 - RNA, 19 nt, Homo sapiens
  misc_RNA (1)...(19): siRNA sense strand
ugacuaaagaacuagaaga

SEQ ID NO: 2540435 - RNA, 19 nt, Homo sapiens
  misc_RNA (1)...(19): siRNA sense strand
gcugaagaauuaaaaggaa

SEQ ID NO: 2540436 - RNA, 19 nt, Homo sapiens
  misc_RNA (1)...(19): siRNA sense strand
ugaaauagaaagagaagag

SEQ ID NO: 2540437 - RNA, 19 nt, Homo sapiens
  misc_RNA (1)...(19): siRNA sense strand
guuugugguuacugaauuu

SEQ ID NO: 2540438 - RNA, 19 nt, Homo sapiens
  misc_RNA (1)...(19): siRNA sense strand
cgcccaaagugguggacaa

SEQ ID NO: 2540439 - RNA, 19 nt, Homo sapiens
  misc_RNA (1)...(19): siRNA sense strand
gcugaauacaaacgacaga

SEQ ID NO: 2540440 - RNA, 19 nt, Homo sapiens
  misc_RNA (1)...(19): siRNA sense strand
gcaucagagcacaucaaau

SEQ ID NO: 2540441 - RNA, 19 nt, Homo sapiens
  misc_RNA (1)...(19): siRNA sense strand
gugagaagaggaaacguga

SEQ ID NO: 2540442 - RNA, 19 nt, Homo sapiens
  misc_RNA (1)...(19): siRNA sense strand
cgcccaaagugguggacaa

SEQ ID NO: 2540443 - RNA, 19 nt, Homo sapiens
  misc_RNA (1)...(19): siRNA sense strand
gcugaauacaaacgacaga

SEQ ID NO: 2540444 - RNA, 19 nt, Homo sapiens
  misc_RNA (1)...(19): siRNA sense strand
gcaucagagcacaucaaau

SEQ ID NO: 2540445 - RNA, 19 nt, Homo sapiens
  misc_RNA (1)...(19): siRNA sense strand
gugagaagaggaaacguga

SEQ ID NO: 2540446 - RNA, 19 nt, Homo sapiens
  misc_RNA (1)...(19): siRNA sense strand
cgcccaaagugguggacaa

SEQ ID NO: 2540447 - RNA, 19 nt, Homo sapiens
  misc_RNA (1)...(19): siRNA sense strand
gcugaauacaaacgacaga

SEQ ID NO: 2540448 - RNA, 19 nt, Homo sapiens
  misc_RNA (1)...(19): siRNA sense strand
gcaucagagcacaucaaau

SEQ ID NO: 2540449 - RNA, 19 nt, Homo sapiens
  misc_RNA (1)...(19): siRNA sense strand
gugagaagaggaaacguga

SEQ ID NO: 2540450 - RNA, 19 nt, Homo sapiens
  misc_RNA (1)...(19): siRNA sense strand
cgcccaaagugguggacaa

SEQ ID NO: 2540451 - RNA, 19 nt, Homo sapiens
  misc_RNA (1)...(19): siRNA sense strand
acaucaagcuucaggccga

SEQ ID NO: 2540452 - RNA, 19 nt, Homo sapiens
  misc_RNA (1)...(19): siRNA sense strand
gcugaauacaaacgacaga

SEQ ID NO: 2540453 - RNA, 19 nt, Homo sapiens
  misc_RNA (1)...(19): siRNA sense strand
gcaucagagcacaucaaau

SEQ ID NO: 2540454 - RNA, 19 nt, Homo sapiens
  misc_RNA (1)...(19): siRNA sense strand
gugagaagaggaaacguga

SEQ ID NO: 2540455 - RNA, 19 nt, Homo sapiens
  misc_RNA (1)...(19): siRNA sense strand
cgcccaaagugguggacaa

SEQ ID NO: 2540456 - RNA, 19 nt, Homo sapiens
  misc_RNA (1)...(19): siRNA sense strand
acaucaagcuucaggccga

SEQ ID NO: 2540457 - RNA, 19 nt, Homo sapiens
  misc_RNA (1)...(19): siRNA sense strand
gcugaauacaaacgacaga

SEQ ID NO: 2540458 - RNA, 19 nt, Homo sapiens
  misc_RNA (1)...(19): siRNA sense strand
gcaucagagcacaucaaau

SEQ ID NO: 2540459 - RNA, 19 nt, Homo sapiens
  misc_RNA (1)...(19): siRNA sense strand
gugagaagaggaaacguga

SEQ ID NO: 2540460 - RNA, 19 nt, Homo sapiens
  misc_RNA (1)...(19): siRNA sense strand
cuucggagcuggagcgcau

SEQ ID NO: 2540461 - RNA, 19 nt, Homo sapiens
  misc_RNA (1)...(19): siRNA sense strand
ccaccaucgucaagaccau

SEQ ID NO: 2540462 - RNA, 19 nt, Homo sapiens
  misc_RNA (1)...(19): siRNA sense strand
aguuauacuccguguacuu

SEQ ID NO: 2540463 - RNA, 19 nt, Homo sapiens
  misc_RNA (1)...(19): siRNA sense strand
ggagaaggcagcacaggca

SEQ ID NO: 2540464 - RNA, 19 nt, Homo sapiens
  misc_RNA (1)...(19): siRNA sense strand
cacugagcgugcaggacaa

SEQ ID NO: 2540465 - RNA, 19 nt, Homo sapiens
  misc_RNA (1)...(19): siRNA sense strand
gagcagagacagagcgacc

SEQ ID NO: 2540466 - RNA, 19 nt, Homo sapiens
  misc_RNA (1)...(19): siRNA sense strand
cuucggagcuggagcgcau

SEQ ID NO: 2540467 - RNA, 19 nt, Homo sapiens
  misc_RNA (1)...(19): siRNA sense strand
ccaccaucgucaagaccau

SEQ ID NO: 2540468 - RNA, 19 nt, Homo sapiens
  misc_RNA (1)...(19): siRNA sense strand
aguuauacuccguguacuu

SEQ ID NO: 2540469 - RNA, 19 nt, Homo sapiens
  misc_RNA (1)...(19): siRNA sense strand
ggagaaggcagcacaggca

SEQ ID NO: 2540470 - RNA, 19 nt, Homo sapiens
  misc_RNA (1)...(19): siRNA sense strand
cacugagcgugcaggacaa

SEQ ID NO: 2540471 - RNA, 19 nt, Homo sapiens
  misc_RNA (1)...(19): siRNA sense strand
gagcagagacagagcgacc

SEQ ID NO: 2540472 - RNA, 19 nt, Homo sapiens
  misc_RNA (1)...(19): siRNA sense strand
ccucagaagucgcaggcuc

SEQ ID NO: 2540473 - RNA, 19 nt, Homo sapiens
  misc_RNA (1)...(19): siRNA sense strand
ucgcaaagcaccaggacaa

SEQ ID NO: 2540474 - RNA, 19 nt, Homo sapiens
  misc_RNA (1)...(19): siRNA sense strand
ugacagagguggagcgguu

SEQ ID NO: 2540475 - RNA, 19 nt, Homo sapiens
  misc_RNA (1)...(19): siRNA sense strand
acucaaggcuguugugcaa

SEQ ID NO: 2540476 - RNA, 19 nt, Homo sapiens
  misc_RNA (1)...(19): siRNA sense strand
cuguauuccaagugaguua

SEQ ID NO: 2540477 - RNA, 19 nt, Homo sapiens
  misc_RNA (1)...(19): siRNA sense strand
ccagcaagaaauagcauaa

SEQ ID NO: 2540478 - RNA, 19 nt, Homo sapiens
  misc_RNA (1)...(19): siRNA sense strand
acgaaagaguacauggaga

SEQ ID NO: 2540479 - RNA, 19 nt, Homo sapiens
  misc_RNA (1)...(19): siRNA sense strand
uuacaaaaccagucagaaa

SEQ ID NO: 2540480 - RNA, 19 nt, Homo sapiens
  misc_RNA (1)...(19): siRNA sense strand
cgaucuagaaguagugcaa

SEQ ID NO: 2540481 - RNA, 19 nt, Homo sapiens
  misc_RNA (1)...(19): siRNA sense strand
ggaugaaauagaaaggaca

SEQ ID NO: 2540482 - RNA, 19 nt, Homo sapiens
  misc_RNA (1)...(19): siRNA sense strand
cagcaugugucuagagagu

SEQ ID NO: 2540483 - RNA, 19 nt, Homo sapiens
  misc_RNA (1)...(19): siRNA sense strand
cggcuaaagucuggccaaa

SEQ ID NO: 2540484 - RNA, 19 nt, Homo sapiens
  misc_RNA (1)...(19): siRNA sense strand
ggucgcaauccgugaacaa

SEQ ID NO: 2540485 - RNA, 19 nt, Homo sapiens
  misc_RNA (1)...(19): siRNA sense strand
gcaacauagacuacagauu

SEQ ID NO: 2540486 - RNA, 19 nt, Homo sapiens
  misc_RNA (1)...(19): siRNA sense strand
gauaaagaggagacuguau

SEQ ID NO: 2540487 - RNA, 19 nt, Homo sapiens
  misc_RNA (1)...(19): siRNA sense strand
guucaguagagaagugauu

SEQ ID NO: 2540488 - RNA, 19 nt, Homo sapiens
  misc_RNA (1)...(19): siRNA sense strand
gugcaaagaauccgugaga

SEQ ID NO: 2540489 - RNA, 19 nt, Homo sapiens
  misc_RNA (1)...(19): siRNA sense strand
uggcagaacccguuuacaa

SEQ ID NO: 2540490 - RNA, 19 nt, Homo sapiens
  misc_RNA (1)...(19): siRNA sense strand
ggaacaauuuggcaggcau

SEQ ID NO: 2540491 - RNA, 19 nt, Homo sapiens
  misc_RNA (1)...(19): siRNA sense strand
auacaaaauuggcagcaaa

SEQ ID NO: 2540492 - RNA, 19 nt, Homo sapiens
  misc_RNA (1)...(19): siRNA sense strand
gagaaacucugcagcccaa

SEQ ID NO: 2540493 - RNA, 19 nt, Homo sapiens
  misc_RNA (1)...(19): siRNA sense strand
uagaaguagugcaagaaaa

SEQ ID NO: 2540494 - RNA, 19 nt, Homo sapiens
  misc_RNA (1)...(19): siRNA sense strand
ccuuacagaauaugcuaaa

SEQ ID NO: 2540495 - RNA, 19 nt, Homo sapiens
  misc_RNA (1)...(19): siRNA sense strand
caauaaggauuucagcgaa

SEQ ID NO: 2540496 - RNA, 19 nt, Homo sapiens
  misc_RNA (1)...(19): siRNA sense strand
ccaauaaggauuucagcga

SEQ ID NO: 2540497 - RNA, 19 nt, Homo sapiens
  misc_RNA (1)...(19): siRNA sense strand
aguauuggaauguggagaa

SEQ ID NO: 2540498 - RNA, 19 nt, Homo sapiens
  misc_RNA (1)...(19): siRNA sense strand
cucaagagacauuacgaaa

SEQ ID NO: 2540499 - RNA, 19 nt, Homo sapiens
  misc_RNA (1)...(19): siRNA sense strand
gauaaaaggacauggucau

SEQ ID NO: 2540500 - RNA, 19 nt, Homo sapiens
  misc_RNA (1)...(19): siRNA sense strand
gaacaauuuggcaggcauu

SEQ ID NO: 2540501 - RNA, 19 nt, Homo sapiens
  misc_RNA (1)...(19): siRNA sense strand
cuguggaaccaaaggaaca

SEQ ID NO: 2540502 - RNA, 19 nt, Homo sapiens
  misc_RNA (1)...(19): siRNA sense strand
aaacaagccagcaagaaau

SEQ ID NO: 2540503 - RNA, 19 nt, Homo sapiens
  misc_RNA (1)...(19): siRNA sense strand
aggacauggucauaagaga

SEQ ID NO: 2540504 - RNA, 19 nt, Homo sapiens
  misc_RNA (1)...(19): siRNA sense strand
ggugaagaguguugagcuc

SEQ ID NO: 2540505 - RNA, 19 nt, Homo sapiens
  misc_RNA (1)...(19): siRNA sense strand
acucaggaugaaauagaaa

SEQ ID NO: 2540506 - RNA, 19 nt, Homo sapiens
  misc_RNA (1)...(19): siRNA sense strand
aucuagaaguagugcaaga

SEQ ID NO: 2540507 - RNA, 19 nt, Homo sapiens
  misc_RNA (1)...(19): siRNA sense strand
ggucauugugagagaauuc

SEQ ID NO: 2540508 - RNA, 19 nt, Homo sapiens
  misc_RNA (1)...(19): siRNA sense strand
ggauaaaaggacaugguca

SEQ ID NO: 2540509 - RNA, 19 nt, Homo sapiens
  misc_RNA (1)...(19): siRNA sense strand
agauaaugaugcuaagcca

SEQ ID NO: 2540510 - RNA, 19 nt, Homo sapiens
  misc_RNA (1)...(19): siRNA sense strand
cuguggaacuaaaggaugu

SEQ ID NO: 2540511 - RNA, 19 nt, Homo sapiens
  misc_RNA (1)...(19): siRNA sense strand
gcccagacccauuugcaaa

SEQ ID NO: 2540512 - RNA, 19 nt, Homo sapiens
  misc_RNA (1)...(19): siRNA sense strand
caagauaaugaaaugguga

SEQ ID NO: 2540513 - RNA, 19 nt, Homo sapiens
  misc_RNA (1)...(19): siRNA sense strand
gaaccaaaggaacagggaa

SEQ ID NO: 2540514 - RNA, 19 nt, Homo sapiens
  misc_RNA (1)...(19): siRNA sense strand
guaaagaaaacaaggaagu

SEQ ID NO: 2540515 - RNA, 19 nt, Homo sapiens
  misc_RNA (1)...(19): siRNA sense strand
caucaaugcuacugcaaag

SEQ ID NO: 2540516 - RNA, 19 nt, Homo sapiens
  misc_RNA (1)...(19): siRNA sense strand
gagugucagacuacggaua

SEQ ID NO: 2540517 - RNA, 19 nt, Homo sapiens
  misc_RNA (1)...(19): siRNA sense strand
ugucuaaacaagccagcaa

SEQ ID NO: 2540518 - RNA, 19 nt, Homo sapiens
  misc_RNA (1)...(19): siRNA sense strand
ugugacaucaguaaagaaa

SEQ ID NO: 2540519 - RNA, 19 nt, Homo sapiens
  misc_RNA (1)...(19): siRNA sense strand
aagauaaagaggagacugu

SEQ ID NO: 2540520 - RNA, 19 nt, Homo sapiens
  misc_RNA (1)...(19): siRNA sense strand
cuuagugaccugagacaca

SEQ ID NO: 2540521 - RNA, 19 nt, Homo sapiens
  misc_RNA (1)...(19): siRNA sense strand
guugaaugugucagaucua

SEQ ID NO: 2540522 - RNA, 19 nt, Homo sapiens
  misc_RNA (1)...(19): siRNA sense strand
ucagguagggucaggguuu

SEQ ID NO: 2540523 - RNA, 19 nt, Homo sapiens
  misc_RNA (1)...(19): siRNA sense strand
ggaaguuauucaagagcug

SEQ ID NO: 2540524 - RNA, 19 nt, Homo sapiens
  misc_RNA (1)...(19): siRNA sense strand
ugacagagguggagcgguu

SEQ ID NO: 2540525 - RNA, 19 nt, Homo sapiens
  misc_RNA (1)...(19): siRNA sense strand
ggaugaaauagaaaggaca

SEQ ID NO: 2540526 - RNA, 19 nt, Homo sapiens
  misc_RNA (1)...(19): siRNA sense strand
gagaaacucugcagcccaa

SEQ ID NO: 2540527 - RNA, 19 nt, Homo sapiens
  misc_RNA (1)...(19): siRNA sense strand
ccuuacagaauaugcuaaa

SEQ ID NO: 2540528 - RNA, 19 nt, Homo sapiens
  misc_RNA (1)...(19): siRNA sense strand
aguauuggaauguggagaa

SEQ ID NO: 2540529 - RNA, 19 nt, Homo sapiens
  misc_RNA (1)...(19): siRNA sense strand
cucaagagacauuacgaaa

SEQ ID NO: 2540530 - RNA, 19 nt, Homo sapiens
  misc_RNA (1)...(19): siRNA sense strand
gauaaaaggacauggucau

SEQ ID NO: 2540531 - RNA, 19 nt, Homo sapiens
  misc_RNA (1)...(19): siRNA sense strand
aggacauggucauaagaga

SEQ ID NO: 2540532 - RNA, 19 nt, Homo sapiens
  misc_RNA (1)...(19): siRNA sense strand
acucaggaugaaauagaaa

SEQ ID NO: 2540533 - RNA, 19 nt, Homo sapiens
  misc_RNA (1)...(19): siRNA sense strand
ggucauugugagagaauuc

SEQ ID NO: 2540534 - RNA, 19 nt, Homo sapiens
  misc_RNA (1)...(19): siRNA sense strand
ggauaaaaggacaugguca

SEQ ID NO: 2540535 - RNA, 19 nt, Homo sapiens
  misc_RNA (1)...(19): siRNA sense strand
caagauaaugaaaugguga

SEQ ID NO: 2540536 - RNA, 19 nt, Homo sapiens
  misc_RNA (1)...(19): siRNA sense strand
cauacuugguugagguuuu

SEQ ID NO: 2540537 - RNA, 19 nt, Homo sapiens
  misc_RNA (1)...(19): siRNA sense strand
cuuuacaaguauuggaaug

SEQ ID NO: 2540538 - RNA, 19 nt, Homo sapiens
  misc_RNA (1)...(19): siRNA sense strand
caaguaugucggagaaacu

SEQ ID NO: 2540539 - RNA, 19 nt, Homo sapiens
  misc_RNA (1)...(19): siRNA sense strand
uggaauguggagaagaaaa

SEQ ID NO: 2540540 - RNA, 19 nt, Homo sapiens
  misc_RNA (1)...(19): siRNA sense strand
gaagaaugugugaagcuca

SEQ ID NO: 2540541 - RNA, 19 nt, Homo sapiens
  misc_RNA (1)...(19): siRNA sense strand
caauaccaggaaagagcaa

SEQ ID NO: 2540542 - RNA, 19 nt, Homo sapiens
  misc_RNA (1)...(19): siRNA sense strand
ugauaagauggaagaaugu

SEQ ID NO: 2540543 - RNA, 19 nt, Homo sapiens
  misc_RNA (1)...(19): siRNA sense strand
guuugugaguugauugaca

SEQ ID NO: 2540544 - RNA, 19 nt, Homo sapiens
  misc_RNA (1)...(19): siRNA sense strand
ccgaacugcugaagagccu

SEQ ID NO: 2540545 - RNA, 19 nt, Homo sapiens
  misc_RNA (1)...(19): siRNA sense strand
ggagaagaaaagauccuua

SEQ ID NO: 2540546 - RNA, 19 nt, Homo sapiens
  misc_RNA (1)...(19): siRNA sense strand
cccaacaagauaaugaaau

SEQ ID NO: 2540547 - RNA, 19 nt, Homo sapiens
  misc_RNA (1)...(19): siRNA sense strand
cggcuuuaacucagaaacu

SEQ ID NO: 2540548 - RNA, 19 nt, Homo sapiens
  misc_RNA (1)...(19): siRNA sense strand
cgagaaagaucaaagggaa

SEQ ID NO: 2540549 - RNA, 19 nt, Homo sapiens
  misc_RNA (1)...(19): siRNA sense strand
caggaaacaugaugggcaa

SEQ ID NO: 2540550 - RNA, 19 nt, Homo sapiens
  misc_RNA (1)...(19): siRNA sense strand
aagcaauagaagaagguua

SEQ ID NO: 2540551 - RNA, 19 nt, Homo sapiens
  misc_RNA (1)...(19): siRNA sense strand
aguuggaauucuagacaaa

SEQ ID NO: 2540552 - RNA, 19 nt, Homo sapiens
  misc_RNA (1)...(19): siRNA sense strand
ggcaggaauauaagagaaa

SEQ ID NO: 2540553 - RNA, 19 nt, Homo sapiens
  misc_RNA (1)...(19): siRNA sense strand
gguuagugcccauuggaaa

SEQ ID NO: 2540554 - RNA, 19 nt, Homo sapiens
  misc_RNA (1)...(19): siRNA sense strand
gaguaaugaaggagagagu

SEQ ID NO: 2540555 - RNA, 19 nt, Homo sapiens
  misc_RNA (1)...(19): siRNA sense strand
ugugauuggugcaggagaa

SEQ ID NO: 2540556 - RNA, 19 nt, Homo sapiens
  misc_RNA (1)...(19): siRNA sense strand
aggcaaugcacaaaggauu

SEQ ID NO: 2540557 - RNA, 19 nt, Homo sapiens
  misc_RNA (1)...(19): siRNA sense strand
aguuaugucuuauggagaa

SEQ ID NO: 2540558 - RNA, 19 nt, Homo sapiens
  misc_RNA (1)...(19): siRNA sense strand
caggaugacuauugaggau

SEQ ID NO: 2540559 - RNA, 19 nt, Homo sapiens
  misc_RNA (1)...(19): siRNA sense strand
gaacauaccaggugugcca

SEQ ID NO: 2540560 - RNA, 19 nt, Homo sapiens
  misc_RNA (1)...(19): siRNA sense strand
uggcaggaauauaagagaa

SEQ ID NO: 2540561 - RNA, 19 nt, Homo sapiens
  misc_RNA (1)...(19): siRNA sense strand
gagaaagaucaaagggaac

SEQ ID NO: 2540562 - RNA, 19 nt, Homo sapiens
  misc_RNA (1)...(19): siRNA sense strand
cugggaacuugcaaggaaa

SEQ ID NO: 2540563 - RNA, 19 nt, Homo sapiens
  misc_RNA (1)...(19): siRNA sense strand
ugucagcagugcagaggaa

SEQ ID NO: 2540564 - RNA, 19 nt, Homo sapiens
  misc_RNA (1)...(19): siRNA sense strand
uguauggagcuauggaaua

SEQ ID NO: 2540565 - RNA, 19 nt, Homo sapiens
  misc_RNA (1)...(19): siRNA sense strand
ggaacuuguaguaggccaa

SEQ ID NO: 2540566 - RNA, 19 nt, Homo sapiens
  misc_RNA (1)...(19): siRNA sense strand
gguccauuauugagaacuu

SEQ ID NO: 2540567 - RNA, 19 nt, Homo sapiens
  misc_RNA (1)...(19): siRNA sense strand
aggaaugcugagaggaauu

SEQ ID NO: 2540568 - RNA, 19 nt, Homo sapiens
  misc_RNA (1)...(19): siRNA sense strand
cugcaguggccguuugaaa

SEQ ID NO: 2540569 - RNA, 19 nt, Homo sapiens
  misc_RNA (1)...(19): siRNA sense strand
ucaaguauuacgagaaaga

SEQ ID NO: 2540570 - RNA, 19 nt, Homo sapiens
  misc_RNA (1)...(19): siRNA sense strand
gggagaaggcacugugguu

SEQ ID NO: 2540571 - RNA, 19 nt, Homo sapiens
  misc_RNA (1)...(19): siRNA sense strand
cagaggaagaagcggaaaa

SEQ ID NO: 2540572 - RNA, 19 nt, Homo sapiens
  misc_RNA (1)...(19): siRNA sense strand
gugguuuggaugagaacua

SEQ ID NO: 2540573 - RNA, 19 nt, Homo sapiens
  misc_RNA (1)...(19): siRNA sense strand
cagcaaucucguuuguaaa

SEQ ID NO: 2540574 - RNA, 19 nt, Homo sapiens
  misc_RNA (1)...(19): siRNA sense strand
gugaaugugaagaugggua

SEQ ID NO: 2540575 - RNA, 19 nt, Homo sapiens
  misc_RNA (1)...(19): siRNA sense strand
gaaaucaaguauuacgaga

SEQ ID NO: 2540576 - RNA, 19 nt, Homo sapiens
  misc_RNA (1)...(19): siRNA sense strand
gaaagaccuuauugggaca

SEQ ID NO: 2540577 - RNA, 19 nt, Homo sapiens
  misc_RNA (1)...(19): siRNA sense strand
caagcuauuaagauggaaa

SEQ ID NO: 2540578 - RNA, 19 nt, Homo sapiens
  misc_RNA (1)...(19): siRNA sense strand
agaaauuagugguuuggau

SEQ ID NO: 2540579 - RNA, 19 nt, Homo sapiens
  misc_RNA (1)...(19): siRNA sense strand
agcaauagaagaagguuau

SEQ ID NO: 2540580 - RNA, 19 nt, Homo sapiens
  misc_RNA (1)...(19): siRNA sense strand
guaaugaaggagagaguac

SEQ ID NO: 2540581 - RNA, 19 nt, Homo sapiens
  misc_RNA (1)...(19): siRNA sense strand
agauguugcaguagccaua

SEQ ID NO: 2540582 - RNA, 19 nt, Homo sapiens
  misc_RNA (1)...(19): siRNA sense strand
uugaacagauaguuggaau

SEQ ID NO: 2540583 - RNA, 19 nt, Homo sapiens
  misc_RNA (1)...(19): siRNA sense strand
ugaacagauaguuggaauu

SEQ ID NO: 2540584 - RNA, 19 nt, Homo sapiens
  misc_RNA (1)...(19): siRNA sense strand
aggaauugcugcuggaaug

SEQ ID NO: 2540585 - RNA, 19 nt, Homo sapiens
  misc_RNA (1)...(19): siRNA sense strand
ggcaaugcacaaaggauuu

SEQ ID NO: 2540586 - RNA, 19 nt, Homo sapiens
  misc_RNA (1)...(19): siRNA sense strand
gguaaaauguuugaagcua

SEQ ID NO: 2540587 - RNA, 19 nt, Homo sapiens
  misc_RNA (1)...(19): siRNA sense strand
gcuggauucuaaagcacaa

SEQ ID NO: 2540588 - RNA, 19 nt, Homo sapiens
  misc_RNA (1)...(19): siRNA sense strand
cuggauuagaggauaacua

SEQ ID NO: 2540589 - RNA, 19 nt, Homo sapiens
  misc_RNA (1)...(19): siRNA sense strand
ugaccaagaaggcgaugaa

SEQ ID NO: 2540590 - RNA, 19 nt, Homo sapiens
  misc_RNA (1)...(19): siRNA sense strand
agggaaaccagucaugaua

SEQ ID NO: 2540591 - RNA, 19 nt, Homo sapiens
  misc_RNA (1)...(19): siRNA sense strand
caugauaguaauagaguuc

SEQ ID NO: 2540592 - RNA, 19 nt, Homo sapiens
  misc_RNA (1)...(19): siRNA sense strand
ccaaugggugggaagaaau

SEQ ID NO: 2540593 - RNA, 19 nt, Homo sapiens
  misc_RNA (1)...(19): siRNA sense strand
gccaagucauggagcccaa

SEQ ID NO: 2540594 - RNA, 19 nt, Homo sapiens
  misc_RNA (1)...(19): siRNA sense strand
agugacugguucagaauuu

SEQ ID NO: 2540595 - RNA, 19 nt, Homo sapiens
  misc_RNA (1)...(19): siRNA sense strand
cgguacccuucauggauua

SEQ ID NO: 2540596 - RNA, 19 nt, Homo sapiens
  misc_RNA (1)...(19): siRNA sense strand
auguuggauuguuggcaaa

SEQ ID NO: 2540597 - RNA, 19 nt, Homo sapiens
  misc_RNA (1)...(19): siRNA sense strand
ugugaugaguuuagggauc

SEQ ID NO: 2540598 - RNA, 19 nt, Homo sapiens
  misc_RNA (1)...(19): siRNA sense strand
ugcagaaggagaaugguua

SEQ ID NO: 2540599 - RNA, 19 nt, Homo sapiens
  misc_RNA (1)...(19): siRNA sense strand
ggaauagucaugugggaag

SEQ ID NO: 2540600 - RNA, 19 nt, Homo sapiens
  misc_RNA (1)...(19): siRNA sense strand
ggaucacacugguugguca

SEQ ID NO: 2540601 - RNA, 19 nt, Homo sapiens
  misc_RNA (1)...(19): siRNA sense strand
gcaaaaggagcgugcugaa

SEQ ID NO: 2540602 - RNA, 19 nt, Homo sapiens
  misc_RNA (1)...(19): siRNA sense strand
uggaaaauguaucugcaaa

SEQ ID NO: 2540603 - RNA, 19 nt, Homo sapiens
  misc_RNA (1)...(19): siRNA sense strand
gcagacuggauuagaggau

SEQ ID NO: 2540604 - RNA, 19 nt, Homo sapiens
  misc_RNA (1)...(19): siRNA sense strand
uagaggaagcuacagguaa

SEQ ID NO: 2540605 - RNA, 19 nt, Homo sapiens
  misc_RNA (1)...(19): siRNA sense strand
gagaaagaccuuauuggga

SEQ ID NO: 2540606 - RNA, 19 nt, Homo sapiens
  misc_RNA (1)...(19): siRNA sense strand
uuccaaaggcaaugcacaa

SEQ ID NO: 2540607 - RNA, 19 nt, Homo sapiens
  misc_RNA (1)...(19): siRNA sense strand
gugcagaggaagaagcgga

SEQ ID NO: 2540608 - RNA, 19 nt, Homo sapiens
  misc_RNA (1)...(19): siRNA sense strand
gugcagaaggagaaugguu

SEQ ID NO: 2540609 - RNA, 19 nt, Homo sapiens
  misc_RNA (1)...(19): siRNA sense strand
gcaagaaauaccuccgcua

SEQ ID NO: 2540610 - RNA, 19 nt, Homo sapiens
  misc_RNA (1)...(19): siRNA sense strand
cccugaagaagaagccaaa

SEQ ID NO: 2540611 - RNA, 19 nt, Homo sapiens
  misc_RNA (1)...(19): siRNA sense strand
cucccaacuuugaggccaa

SEQ ID NO: 2540612 - RNA, 19 nt, Homo sapiens
  misc_RNA (1)...(19): siRNA sense strand
ugauaggaaucgggagcuu

SEQ ID NO: 2540613 - RNA, 19 nt, Homo sapiens
  misc_RNA (1)...(19): siRNA sense strand
uagacaguguugaggacca

SEQ ID NO: 2540614 - RNA, 19 nt, Homo sapiens
  misc_RNA (1)...(19): siRNA sense strand
guaaggaguuuguggcuga

SEQ ID NO: 2540615 - RNA, 19 nt, Homo sapiens
  misc_RNA (1)...(19): siRNA sense strand
gcaaaaggauggaagccaa

SEQ ID NO: 2540616 - RNA, 19 nt, Homo sapiens
  misc_RNA (1)...(19): siRNA sense strand
gagaacuguuugagcgcau

SEQ ID NO: 2540617 - RNA, 19 nt, Homo sapiens
  misc_RNA (1)...(19): siRNA sense strand
gucgaaagugugugcauaa

SEQ ID NO: 2540618 - RNA, 19 nt, Homo sapiens
  misc_RNA (1)...(19): siRNA sense strand
ucacagagcaugaggugca

SEQ ID NO: 2540619 - RNA, 19 nt, Homo sapiens
  misc_RNA (1)...(19): siRNA sense strand
gaugaaacugaaagagcau

SEQ ID NO: 2540620 - RNA, 19 nt, Homo sapiens
  misc_RNA (1)...(19): siRNA sense strand
augcugagaaggugggaau

SEQ ID NO: 2540621 - RNA, 19 nt, Homo sapiens
  misc_RNA (1)...(19): siRNA sense strand
accuagauuugaaggacaa

SEQ ID NO: 2540622 - RNA, 19 nt, Homo sapiens
  misc_RNA (1)...(19): siRNA sense strand
cuggaaagcuguaugccau

SEQ ID NO: 2540623 - RNA, 19 nt, Homo sapiens
  misc_RNA (1)...(19): siRNA sense strand
guuugagcgcauuaagaaa

SEQ ID NO: 2540624 - RNA, 19 nt, Homo sapiens
  misc_RNA (1)...(19): siRNA sense strand
ggccaaaaccacagagcau

SEQ ID NO: 2540625 - RNA, 19 nt, Homo sapiens
  misc_RNA (1)...(19): siRNA sense strand
gcauacaaggacagaacga

SEQ ID NO: 2540626 - RNA, 19 nt, Homo sapiens
  misc_RNA (1)...(19): siRNA sense strand
ggacaaaccccugggagaa

SEQ ID NO: 2540627 - RNA, 19 nt, Homo sapiens
  misc_RNA (1)...(19): siRNA sense strand
agaagcuguuucagggcua

SEQ ID NO: 2540628 - RNA, 19 nt, Homo sapiens
  misc_RNA (1)...(19): siRNA sense strand
ccauccuauucaagcguaa

SEQ ID NO: 2540629 - RNA, 19 nt, Homo sapiens
  misc_RNA (1)...(19): siRNA sense strand
cuguaugccaugaaaguuu

SEQ ID NO: 2540630 - RNA, 19 nt, Homo sapiens
  misc_RNA (1)...(19): siRNA sense strand
ugaugaaacugaaagagca

SEQ ID NO: 2540631 - RNA, 19 nt, Homo sapiens
  misc_RNA (1)...(19): siRNA sense strand
gccaauacucaaaaggaaa

SEQ ID NO: 2540632 - RNA, 19 nt, Homo sapiens
  misc_RNA (1)...(19): siRNA sense strand
auacaaggacagaacgaca

SEQ ID NO: 2540633 - RNA, 19 nt, Homo sapiens
  misc_RNA (1)...(19): siRNA sense strand
ccugaagguccuaggaacu

SEQ ID NO: 2540634 - RNA, 19 nt, Homo sapiens
  misc_RNA (1)...(19): siRNA sense strand
ugaaacugaaagagcauau

SEQ ID NO: 2540635 - RNA, 19 nt, Homo sapiens
  misc_RNA (1)...(19): siRNA sense strand
gugcaaugaugaaggacuc

SEQ ID NO: 2540636 - RNA, 19 nt, Homo sapiens
  misc_RNA (1)...(19): siRNA sense strand
gaccuagauuugaaggaca

SEQ ID NO: 2540637 - RNA, 19 nt, Homo sapiens
  misc_RNA (1)...(19): siRNA sense strand
augaaagaucccaagaaga

SEQ ID NO: 2540638 - RNA, 19 nt, Homo sapiens
  misc_RNA (1)...(19): siRNA sense strand
ugaacguccuggagugaca

SEQ ID NO: 2540639 - RNA, 19 nt, Homo sapiens
  misc_RNA (1)...(19): siRNA sense strand
gggaugauuuagccgccaa

SEQ ID NO: 2540640 - RNA, 19 nt, Homo sapiens
  misc_RNA (1)...(19): siRNA sense strand
aggcaacaaucguucaaaa

SEQ ID NO: 2540641 - RNA, 19 nt, Homo sapiens
  misc_RNA (1)...(19): siRNA sense strand
cuaucaacacuaugaccua

SEQ ID NO: 2540642 - RNA, 19 nt, Homo sapiens
  misc_RNA (1)...(19): siRNA sense strand
aggacaaaccccugggaga

SEQ ID NO: 2540643 - RNA, 19 nt, Homo sapiens
  misc_RNA (1)...(19): siRNA sense strand
auuacuaacuggagcaucu

SEQ ID NO: 2540644 - RNA, 19 nt, Homo sapiens
  misc_RNA (1)...(19): siRNA sense strand
gaaggugggaauagaaaau

SEQ ID NO: 2540645 - RNA, 19 nt, Homo sapiens
  misc_RNA (1)...(19): siRNA sense strand
cagucaaaauaaucagcaa

SEQ ID NO: 2540646 - RNA, 19 nt, Homo sapiens
  misc_RNA (1)...(19): siRNA sense strand
ucugaaacucugugaagga

SEQ ID NO: 2540647 - RNA, 19 nt, Homo sapiens
  misc_RNA (1)...(19): siRNA sense strand
aacuggagcuuauggaaaa

SEQ ID NO: 2540648 - RNA, 19 nt, Homo sapiens
  misc_RNA (1)...(19): siRNA sense strand
gagauugggauguggucca

SEQ ID NO: 2540649 - RNA, 19 nt, Homo sapiens
  misc_RNA (1)...(19): siRNA sense strand
cugagaaggugggaauaga

SEQ ID NO: 2540650 - RNA, 19 nt, Homo sapiens
  misc_RNA (1)...(19): siRNA sense strand
acauuaugcuuuccagaca

SEQ ID NO: 2540651 - RNA, 19 nt, Homo sapiens
  misc_RNA (1)...(19): siRNA sense strand
ugagaaggugggaauagaa

SEQ ID NO: 2540652 - RNA, 19 nt, Homo sapiens
  misc_RNA (1)...(19): siRNA sense strand
cuguaagccacaugcauga

SEQ ID NO: 2540653 - RNA, 19 nt, Homo sapiens
  misc_RNA (1)...(19): siRNA sense strand
guaaggaguuuguggcuga

SEQ ID NO: 2540654 - RNA, 19 nt, Homo sapiens
  misc_RNA (1)...(19): siRNA sense strand
gcaaaaggauggaagccaa

SEQ ID NO: 2540655 - RNA, 19 nt, Homo sapiens
  misc_RNA (1)...(19): siRNA sense strand
gagaacuguuugagcgcau

SEQ ID NO: 2540656 - RNA, 19 nt, Homo sapiens
  misc_RNA (1)...(19): siRNA sense strand
gucgaaagugugugcauaa

SEQ ID NO: 2540657 - RNA, 19 nt, Homo sapiens
  misc_RNA (1)...(19): siRNA sense strand
ucacagagcaugaggugca

SEQ ID NO: 2540658 - RNA, 19 nt, Homo sapiens
  misc_RNA (1)...(19): siRNA sense strand
gaugaaacugaaagagcau

SEQ ID NO: 2540659 - RNA, 19 nt, Homo sapiens
  misc_RNA (1)...(19): siRNA sense strand
augcugagaaggugggaau

SEQ ID NO: 2540660 - RNA, 19 nt, Homo sapiens
  misc_RNA (1)...(19): siRNA sense strand
accuagauuugaaggacaa

SEQ ID NO: 2540661 - RNA, 19 nt, Homo sapiens
  misc_RNA (1)...(19): siRNA sense strand
cuggaaagcuguaugccau

SEQ ID NO: 2540662 - RNA, 19 nt, Homo sapiens
  misc_RNA (1)...(19): siRNA sense strand
guuugagcgcauuaagaaa

SEQ ID NO: 2540663 - RNA, 19 nt, Homo sapiens
  misc_RNA (1)...(19): siRNA sense strand
ggccaaaaccacagagcau

SEQ ID NO: 2540664 - RNA, 19 nt, Homo sapiens
  misc_RNA (1)...(19): siRNA sense strand
gcauacaaggacagaacga

SEQ ID NO: 2540665 - RNA, 19 nt, Homo sapiens
  misc_RNA (1)...(19): siRNA sense strand
ggacaaaccccugggagaa

SEQ ID NO: 2540666 - RNA, 19 nt, Homo sapiens
  misc_RNA (1)...(19): siRNA sense strand
agaagcuguuucagggcua

SEQ ID NO: 2540667 - RNA, 19 nt, Homo sapiens
  misc_RNA (1)...(19): siRNA sense strand
ccauccuauucaagcguaa

SEQ ID NO: 2540668 - RNA, 19 nt, Homo sapiens
  misc_RNA (1)...(19): siRNA sense strand
cuguaugccaugaaaguuu

SEQ ID NO: 2540669 - RNA, 19 nt, Homo sapiens
  misc_RNA (1)...(19): siRNA sense strand
ugaugaaacugaaagagca

SEQ ID NO: 2540670 - RNA, 19 nt, Homo sapiens
  misc_RNA (1)...(19): siRNA sense strand
gccaauacucaaaaggaaa

SEQ ID NO: 2540671 - RNA, 19 nt, Homo sapiens
  misc_RNA (1)...(19): siRNA sense strand
auacaaggacagaacgaca

SEQ ID NO: 2540672 - RNA, 19 nt, Homo sapiens
  misc_RNA (1)...(19): siRNA sense strand
ccugaagguccuaggaacu

SEQ ID NO: 2540673 - RNA, 19 nt, Homo sapiens
  misc_RNA (1)...(19): siRNA sense strand
ugaaacugaaagagcauau

SEQ ID NO: 2540674 - RNA, 19 nt, Homo sapiens
  misc_RNA (1)...(19): siRNA sense strand
gugcaaugaugaaggacuc

SEQ ID NO: 2540675 - RNA, 19 nt, Homo sapiens
  misc_RNA (1)...(19): siRNA sense strand
gaccuagauuugaaggaca

SEQ ID NO: 2540676 - RNA, 19 nt, Homo sapiens
  misc_RNA (1)...(19): siRNA sense strand
augaaagaucccaagaaga

SEQ ID NO: 2540677 - RNA, 19 nt, Homo sapiens
  misc_RNA (1)...(19): siRNA sense strand
ugaacguccuggagugaca

SEQ ID NO: 2540678 - RNA, 19 nt, Homo sapiens
  misc_RNA (1)...(19): siRNA sense strand
gggaugauuuagccgccaa

SEQ ID NO: 2540679 - RNA, 19 nt, Homo sapiens
  misc_RNA (1)...(19): siRNA sense strand
aggcaacaaucguucaaaa

SEQ ID NO: 2540680 - RNA, 19 nt, Homo sapiens
  misc_RNA (1)...(19): siRNA sense strand
cuaucaacacuaugaccua

SEQ ID NO: 2540681 - RNA, 19 nt, Homo sapiens
  misc_RNA (1)...(19): siRNA sense strand
aggacaaaccccugggaga

SEQ ID NO: 2540682 - RNA, 19 nt, Homo sapiens
  misc_RNA (1)...(19): siRNA sense strand
auuacuaacuggagcaucu

SEQ ID NO: 2540683 - RNA, 19 nt, Homo sapiens
  misc_RNA (1)...(19): siRNA sense strand
gaaggugggaauagaaaau

SEQ ID NO: 2540684 - RNA, 19 nt, Homo sapiens
  misc_RNA (1)...(19): siRNA sense strand
cagucaaaauaaucagcaa

SEQ ID NO: 2540685 - RNA, 19 nt, Homo sapiens
  misc_RNA (1)...(19): siRNA sense strand
ucugaaacucugugaagga

SEQ ID NO: 2540686 - RNA, 19 nt, Homo sapiens
  misc_RNA (1)...(19): siRNA sense strand
aacuggagcuuauggaaaa

SEQ ID NO: 2540687 - RNA, 19 nt, Homo sapiens
  misc_RNA (1)...(19): siRNA sense strand
gagauugggauguggucca

SEQ ID NO: 2540688 - RNA, 19 nt, Homo sapiens
  misc_RNA (1)...(19): siRNA sense strand
cugagaaggugggaauaga

SEQ ID NO: 2540689 - RNA, 19 nt, Homo sapiens
  misc_RNA (1)...(19): siRNA sense strand
acauuaugcuuuccagaca

SEQ ID NO: 2540690 - RNA, 19 nt, Homo sapiens
  misc_RNA (1)...(19): siRNA sense strand
ugagaaggugggaauagaa

SEQ ID NO: 2540691 - RNA, 19 nt, Homo sapiens
  misc_RNA (1)...(19): siRNA sense strand
cuguaagccacaugcauga

SEQ ID NO: 2540692 - RNA, 19 nt, Homo sapiens
  misc_RNA (1)...(19): siRNA sense strand
agaauuuaguugagagcaa

SEQ ID NO: 2540693 - RNA, 19 nt, Homo sapiens
  misc_RNA (1)...(19): siRNA sense strand
ccuuggaacuucugggaaa

SEQ ID NO: 2540694 - RNA, 19 nt, Homo sapiens
  misc_RNA (1)...(19): siRNA sense strand
aagaaaugguagaaggaau

SEQ ID NO: 2540695 - RNA, 19 nt, Homo sapiens
  misc_RNA (1)...(19): siRNA sense strand
ggacaagcuguuacggaaa

SEQ ID NO: 2540696 - RNA, 19 nt, Homo sapiens
  misc_RNA (1)...(19): siRNA sense strand
aaguggaaaucguaagaaa

SEQ ID NO: 2540697 - RNA, 19 nt, Homo sapiens
  misc_RNA (1)...(19): siRNA sense strand
ggaagggaagagagaacaa

SEQ ID NO: 2540698 - RNA, 19 nt, Homo sapiens
  misc_RNA (1)...(19): siRNA sense strand
agagagaacaaaagaguua

SEQ ID NO: 2540699 - RNA, 19 nt, Homo sapiens
  misc_RNA (1)...(19): siRNA sense strand
aagcauuguugaaggguga

SEQ ID NO: 2540700 - RNA, 19 nt, Homo sapiens
  misc_RNA (1)...(19): siRNA sense strand
ccuugaugguugaugcaaa

SEQ ID NO: 2540701 - RNA, 19 nt, Homo sapiens
  misc_RNA (1)...(19): siRNA sense strand
agauggaacuggaaugaau

SEQ ID NO: 2540702 - RNA, 19 nt, Homo sapiens
  misc_RNA (1)...(19): siRNA sense strand
cuacaaagcauuuaguaca

SEQ ID NO: 2540703 - RNA, 19 nt, Homo sapiens
  misc_RNA (1)...(19): siRNA sense strand
gcaacuuacauaugaagaa

SEQ ID NO: 2540704 - RNA, 19 nt, Homo sapiens
  misc_RNA (1)...(19): siRNA sense strand
ccacgagagaucaguuaaa

SEQ ID NO: 2540705 - RNA, 19 nt, Homo sapiens
  misc_RNA (1)...(19): siRNA sense strand
aggacuauaucaagagaca

SEQ ID NO: 2540706 - RNA, 19 nt, Homo sapiens
  misc_RNA (1)...(19): siRNA sense strand
caccaaugaagcugaauaa

SEQ ID NO: 2540707 - RNA, 19 nt, Homo sapiens
  misc_RNA (1)...(19): siRNA sense strand
cgacaaggacacaugguga

SEQ ID NO: 2540708 - RNA, 19 nt, Homo sapiens
  misc_RNA (1)...(19): siRNA sense strand
gugucaagugugaugauaa

SEQ ID NO: 2540709 - RNA, 19 nt, Homo sapiens
  misc_RNA (1)...(19): siRNA sense strand
aggcauugcuuggagauaa

SEQ ID NO: 2540710 - RNA, 19 nt, Homo sapiens
  misc_RNA (1)...(19): siRNA sense strand
gcuuggaagggaagagaga

SEQ ID NO: 2540711 - RNA, 19 nt, Homo sapiens
  misc_RNA (1)...(19): siRNA sense strand
agaaauagauagcucccaa

SEQ ID NO: 2540712 - RNA, 19 nt, Homo sapiens
  misc_RNA (1)...(19): siRNA sense strand
uggacaagcuguuacggaa

SEQ ID NO: 2540713 - RNA, 19 nt, Homo sapiens
  misc_RNA (1)...(19): siRNA sense strand
gcgaaaguggaaaucguaa

SEQ ID NO: 2540714 - RNA, 19 nt, Homo sapiens
  misc_RNA (1)...(19): siRNA sense strand
aguggaaugugaagaucaa

SEQ ID NO: 2540715 - RNA, 19 nt, Homo sapiens
  misc_RNA (1)...(19): siRNA sense strand
ggcugaaguucuugauaca

SEQ ID NO: 2540716 - RNA, 19 nt, Homo sapiens
  misc_RNA (1)...(19): siRNA sense strand
ggaaagaaaaucuggacuu

SEQ ID NO: 2540717 - RNA, 19 nt, Homo sapiens
  misc_RNA (1)...(19): siRNA sense strand
ccaccaaugaagcugaaua

SEQ ID NO: 2540718 - RNA, 19 nt, Homo sapiens
  misc_RNA (1)...(19): siRNA sense strand
agugugaugauaaggaaua

SEQ ID NO: 2540719 - RNA, 19 nt, Homo sapiens
  misc_RNA (1)...(19): siRNA sense strand
acgagagaucaguuaaaua

SEQ ID NO: 2540720 - RNA, 19 nt, Homo sapiens
  misc_RNA (1)...(19): siRNA sense strand
gcugaaacuaccaguaaaa

SEQ ID NO: 2540721 - RNA, 19 nt, Homo sapiens
  misc_RNA (1)...(19): siRNA sense strand
uguagaagcagauggauca

SEQ ID NO: 2540722 - RNA, 19 nt, Homo sapiens
  misc_RNA (1)...(19): siRNA sense strand
ggcugaaacuaccaguaaa

SEQ ID NO: 2540723 - RNA, 19 nt, Homo sapiens
  misc_RNA (1)...(19): siRNA sense strand
aggccgaugaugaggauuu

SEQ ID NO: 2540724 - RNA, 19 nt, Homo sapiens
  misc_RNA (1)...(19): siRNA sense strand
ggauuagugcugaggucau

SEQ ID NO: 2540725 - RNA, 19 nt, Homo sapiens
  misc_RNA (1)...(19): siRNA sense strand
aggcaaacucuuccacaua

SEQ ID NO: 2540726 - RNA, 19 nt, Homo sapiens
  misc_RNA (1)...(19): siRNA sense strand
agauauugcacuugaacca

SEQ ID NO: 2540727 - RNA, 19 nt, Homo sapiens
  misc_RNA (1)...(19): siRNA sense strand
ugaaaaggacggugaugaa

SEQ ID NO: 2540728 - RNA, 19 nt, Homo sapiens
  misc_RNA (1)...(19): siRNA sense strand
ggcauugcuuggagauaau

SEQ ID NO: 2540729 - RNA, 19 nt, Homo sapiens
  misc_RNA (1)...(19): siRNA sense strand
cuauauacuuggaguugga

SEQ ID NO: 2540730 - RNA, 19 nt, Homo sapiens
  misc_RNA (1)...(19): siRNA sense strand
cuaccaagaaggauaguca

SEQ ID NO: 2540731 - RNA, 19 nt, Homo sapiens
  misc_RNA (1)...(19): siRNA sense strand
uaggaagcuuggaagggaa

SEQ ID NO: 2540732 - RNA, 19 nt, Homo sapiens
  misc_RNA (1)...(19): siRNA sense strand
guugaaguucucaggacua

SEQ ID NO: 2540733 - RNA, 19 nt, Homo sapiens
  misc_RNA (1)...(19): siRNA sense strand
augagagacuacaggcauu

SEQ ID NO: 2540734 - RNA, 19 nt, Homo sapiens
  misc_RNA (1)...(19): siRNA sense strand
cggaagauggaggcaaaua

SEQ ID NO: 2540735 - RNA, 19 nt, Homo sapiens
  misc_RNA (1)...(19): siRNA sense strand
agggaagcauucagaacuu

SEQ ID NO: 2540736 - RNA, 19 nt, Homo sapiens
  misc_RNA (1)...(19): siRNA sense strand
ggccuaauguagaagcaga

SEQ ID NO: 2540737 - RNA, 19 nt, Homo sapiens
  misc_RNA (1)...(19): siRNA sense strand
ccagaugucuauggagaau

SEQ ID NO: 2540738 - RNA, 19 nt, Homo sapiens
  misc_RNA (1)...(19): siRNA sense strand
gguaugugauaguggaaug

SEQ ID NO: 2540739 - RNA, 19 nt, Homo sapiens
  misc_RNA (1)...(19): siRNA sense strand
gcauuuaguacaagaugga

SEQ ID NO: 2540740 - RNA, 19 nt, Homo sapiens
  misc_RNA (1)...(19): siRNA sense strand
ggaaugaauggcugaaacu

SEQ ID NO: 2540741 - RNA, 19 nt, Homo sapiens
  misc_RNA (1)...(19): siRNA sense strand
gauaguggaaugugaagau

SEQ ID NO: 2540742 - RNA, 19 nt, Homo sapiens
  misc_RNA (1)...(19): siRNA sense strand
ggaugaagaggcugugcau

SEQ ID NO: 2540743 - RNA, 19 nt, Homo sapiens
  misc_RNA (1)...(19): siRNA sense strand
agacaugcucugaucuuua

SEQ ID NO: 2540744 - RNA, 19 nt, Homo sapiens
  misc_RNA (1)...(19): siRNA sense strand
ugucagaaaaugugucaaa

SEQ ID NO: 2540745 - RNA, 19 nt, Homo sapiens
  misc_RNA (1)...(19): siRNA sense strand
uggagaugauuuacgucaa

SEQ ID NO: 2540746 - RNA, 19 nt, Homo sapiens
  misc_RNA (1)...(19): siRNA sense strand
ucauuucacucauggacaa

SEQ ID NO: 2540747 - RNA, 19 nt, Homo sapiens
  misc_RNA (1)...(19): siRNA sense strand
uggaagacccaauguugaa

SEQ ID NO: 2540748 - RNA, 19 nt, Homo sapiens
  misc_RNA (1)...(19): siRNA sense strand
cugcagugguggaacagau

SEQ ID NO: 2540749 - RNA, 19 nt, Homo sapiens
  misc_RNA (1)...(19): siRNA sense strand
cugaaguucuugauacaga

SEQ ID NO: 2540750 - RNA, 19 nt, Homo sapiens
  misc_RNA (1)...(19): siRNA sense strand
gugaagaucaagauacuca

SEQ ID NO: 2540751 - RNA, 19 nt, Homo sapiens
  misc_RNA (1)...(19): siRNA sense strand
gaaugggccaaaugggauu

SEQ ID NO: 2540752 - RNA, 19 nt, Homo sapiens
  misc_RNA (1)...(19): siRNA sense strand
augcaaacauuccagauau

SEQ ID NO: 2540753 - RNA, 19 nt, Homo sapiens
  misc_RNA (1)...(19): siRNA sense strand
cguccaaggccaugggcau

SEQ ID NO: 2540754 - RNA, 19 nt, Homo sapiens
  misc_RNA (1)...(19): siRNA sense strand
cacagaagaaggacggcaa

SEQ ID NO: 2540755 - RNA, 19 nt, Homo sapiens
  misc_RNA (1)...(19): siRNA sense strand
ggaaaggagaacagccgaa

SEQ ID NO: 2540756 - RNA, 19 nt, Homo sapiens
  misc_RNA (1)...(19): siRNA sense strand
gaagcgaacuaaacggaca

SEQ ID NO: 2540757 - RNA, 19 nt, Homo sapiens
  misc_RNA (1)...(19): siRNA sense strand
cgggaaucaagaagccaaa

SEQ ID NO: 2540758 - RNA, 19 nt, Homo sapiens
  misc_RNA (1)...(19): siRNA sense strand
gcaaggagcaguacgcaga

SEQ ID NO: 2540759 - RNA, 19 nt, Homo sapiens
  misc_RNA (1)...(19): siRNA sense strand
ucaagaagccaaaggccau

SEQ ID NO: 2540760 - RNA, 19 nt, Homo sapiens
  misc_RNA (1)...(19): siRNA sense strand
uggcggagggaaaggagaa

SEQ ID NO: 2540761 - RNA, 19 nt, Homo sapiens
  misc_RNA (1)...(19): siRNA sense strand
gccugaagaucaaggagga

SEQ ID NO: 2540762 - RNA, 19 nt, Homo sapiens
  misc_RNA (1)...(19): siRNA sense strand
ccaugaggaaguugagcuu

SEQ ID NO: 2540763 - RNA, 19 nt, Homo sapiens
  misc_RNA (1)...(19): siRNA sense strand
gcgggaaucaagaagccaa

SEQ ID NO: 2540764 - RNA, 19 nt, Homo sapiens
  misc_RNA (1)...(19): siRNA sense strand
cccgagaggaaccaggaaa

SEQ ID NO: 2540765 - RNA, 19 nt, Homo sapiens
  misc_RNA (1)...(19): siRNA sense strand
aguaugacaacgagaagaa

SEQ ID NO: 2540766 - RNA, 19 nt, Homo sapiens
  misc_RNA (1)...(19): siRNA sense strand
gcccaggagugaaggccaa

SEQ ID NO: 2540767 - RNA, 19 nt, Homo sapiens
  misc_RNA (1)...(19): siRNA sense strand
cggaaugaggacagcaaca

SEQ ID NO: 2540768 - RNA, 19 nt, Homo sapiens
  misc_RNA (1)...(19): siRNA sense strand
acaagaaagcugagcagga

SEQ ID NO: 2540769 - RNA, 19 nt, Homo sapiens
  misc_RNA (1)...(19): siRNA sense strand
agagagaguuugugcggca

SEQ ID NO: 2540770 - RNA, 19 nt, Homo sapiens
  misc_RNA (1)...(19): siRNA sense strand
aggaaggcccugcggaauu

SEQ ID NO: 2540771 - RNA, 19 nt, Homo sapiens
  misc_RNA (1)...(19): siRNA sense strand
gcaaggaguuggagacccu

SEQ ID NO: 2540772 - RNA, 19 nt, Homo sapiens
  misc_RNA (1)...(19): siRNA sense strand
ucaucaacauugugguaca

SEQ ID NO: 2540773 - RNA, 19 nt, Homo sapiens
  misc_RNA (1)...(19): siRNA sense strand
agaacgaauccauggccaa

SEQ ID NO: 2540774 - RNA, 19 nt, Homo sapiens
  misc_RNA (1)...(19): siRNA sense strand
uggaggaacugcaggagca

SEQ ID NO: 2540775 - RNA, 19 nt, Homo sapiens
  misc_RNA (1)...(19): siRNA sense strand
uggaggacacagagaccaa

SEQ ID NO: 2540776 - RNA, 19 nt, Homo sapiens
  misc_RNA (1)...(19): siRNA sense strand
gagaagaagugggagcuca

SEQ ID NO: 2540777 - RNA, 19 nt, Homo sapiens
  misc_RNA (1)...(19): siRNA sense strand
gaguugacacagagagagu

SEQ ID NO: 2540778 - RNA, 19 nt, Homo sapiens
  misc_RNA (1)...(19): siRNA sense strand
aggucauugcugagaagua

SEQ ID NO: 2540779 - RNA, 19 nt, Homo sapiens
  misc_RNA (1)...(19): siRNA sense strand
caugagugauuuugaggaa

SEQ ID NO: 2540780 - RNA, 19 nt, Homo sapiens
  misc_RNA (1)...(19): siRNA sense strand
agaagaagugggagcucau

SEQ ID NO: 2540781 - RNA, 19 nt, Homo sapiens
  misc_RNA (1)...(19): siRNA sense strand
cguaugacauggagagcac

SEQ ID NO: 2540782 - RNA, 19 nt, Homo sapiens
  misc_RNA (1)...(19): siRNA sense strand
cgguggagaacaugaacuu

SEQ ID NO: 2540783 - RNA, 19 nt, Homo sapiens
  misc_RNA (1)...(19): siRNA sense strand
ugguacauucgguggagaa

SEQ ID NO: 2540784 - RNA, 19 nt, Homo sapiens
  misc_RNA (1)...(19): siRNA sense strand
ccaucaaguccucugacaa

SEQ ID NO: 2540785 - RNA, 19 nt, Homo sapiens
  misc_RNA (1)...(19): siRNA sense strand
gcugaagagcuauguggau

SEQ ID NO: 2540786 - RNA, 19 nt, Homo sapiens
  misc_RNA (1)...(19): siRNA sense strand
ccacagaguaugagcgcag

SEQ ID NO: 2540787 - RNA, 19 nt, Homo sapiens
  misc_RNA (1)...(19): siRNA sense strand
agucugugguggaguacuu

SEQ ID NO: 2540788 - RNA, 19 nt, Homo sapiens
  misc_RNA (1)...(19): siRNA sense strand
cugagcaggagguggaaca

SEQ ID NO: 2540789 - RNA, 19 nt, Homo sapiens
  misc_RNA (1)...(19): siRNA sense strand
ggguuuaagaggcgaguuc

SEQ ID NO: 2540790 - RNA, 19 nt, Homo sapiens
  misc_RNA (1)...(19): siRNA sense strand
ugucagaggaggaccgcuu

SEQ ID NO: 2540791 - RNA, 19 nt, Homo sapiens
  misc_RNA (1)...(19): siRNA sense strand
uggagcagucuguggaaga

SEQ ID NO: 2540792 - RNA, 19 nt, Homo sapiens
  misc_RNA (1)...(19): siRNA sense strand
gagguggaacaguggaaaa

SEQ ID NO: 2540793 - RNA, 19 nt, Homo sapiens
  misc_RNA (1)...(19): siRNA sense strand
gccgaaagguagcagcuga

SEQ ID NO: 2540794 - RNA, 19 nt, Homo sapiens
  misc_RNA (1)...(19): siRNA sense strand
ccgaaagguagcagcugau

SEQ ID NO: 2540795 - RNA, 19 nt, Homo sapiens
  misc_RNA (1)...(19): siRNA sense strand
ccaagaacgcugugcugga

SEQ ID NO: 2540796 - RNA, 19 nt, Homo sapiens
  misc_RNA (1)...(19): siRNA sense strand
ccuaggaagacgcgacuca

SEQ ID NO: 2540797 - RNA, 19 nt, Homo sapiens
  misc_RNA (1)...(19): siRNA sense strand
uagaguugacacagagaga

SEQ ID NO: 2540798 - RNA, 19 nt, Homo sapiens
  misc_RNA (1)...(19): siRNA sense strand
guugacacagagagaguuu

SEQ ID NO: 2540799 - RNA, 19 nt, Homo sapiens
  misc_RNA (1)...(19): siRNA sense strand
augagaaggugcugcagga

SEQ ID NO: 2540800 - RNA, 19 nt, Homo sapiens
  misc_RNA (1)...(19): siRNA sense strand
gagcuggaggagagguuca

SEQ ID NO: 2540801 - RNA, 19 nt, Homo sapiens
  misc_RNA (1)...(19): siRNA sense strand
gccaagccauugaggcgua

SEQ ID NO: 2540802 - RNA, 19 nt, Homo sapiens
  misc_RNA (1)...(19): siRNA sense strand
cuguggaagaccucagcaa

SEQ ID NO: 2540803 - RNA, 19 nt, Homo sapiens
  misc_RNA (1)...(19): siRNA sense strand
aggugcagauccaggcgua

SEQ ID NO: 2540804 - RNA, 19 nt, Homo sapiens
  misc_RNA (1)...(19): siRNA sense strand
uggugaaggucauugcuga

SEQ ID NO: 2540805 - RNA, 19 nt, Homo sapiens
  misc_RNA (1)...(19): siRNA sense strand
aggagguggaacaguggaa

SEQ ID NO: 2540806 - RNA, 19 nt, Homo sapiens
  misc_RNA (1)...(19): siRNA sense strand
uuugaaaagcugauggaau

SEQ ID NO: 2540807 - RNA, 19 nt, Homo sapiens
  misc_RNA (1)...(19): siRNA sense strand
gagagcuggaggagagguu

SEQ ID NO: 2540808 - RNA, 19 nt, Homo sapiens
  misc_RNA (1)...(19): siRNA sense strand
cugcugagccaguaugaca

SEQ ID NO: 2540809 - RNA, 19 nt, Homo sapiens
  misc_RNA (1)...(19): siRNA sense strand
uggcagaaagagcgaaaua

SEQ ID NO: 2540810 - RNA, 19 nt, Homo sapiens
  misc_RNA (1)...(19): siRNA sense strand
cauuaaacugccaggagua

SEQ ID NO: 2540811 - RNA, 19 nt, Homo sapiens
  misc_RNA (1)...(19): siRNA sense strand
cagaagaagaucaugaaca

SEQ ID NO: 2540812 - RNA, 19 nt, Homo sapiens
  misc_RNA (1)...(19): siRNA sense strand
cgaugaaagcuuuacagaa

SEQ ID NO: 2540813 - RNA, 19 nt, Homo sapiens
  misc_RNA (1)...(19): siRNA sense strand
cuguaaauguaaccacaaa

SEQ ID NO: 2540814 - RNA, 19 nt, Homo sapiens
  misc_RNA (1)...(19): siRNA sense strand
caguuauacccaugaggaa

SEQ ID NO: 2540815 - RNA, 19 nt, Homo sapiens
  misc_RNA (1)...(19): siRNA sense strand
aagcaaguaucaugggaca

SEQ ID NO: 2540816 - RNA, 19 nt, Homo sapiens
  misc_RNA (1)...(19): siRNA sense strand
gugaaguggaugaaaauua

SEQ ID NO: 2540817 - RNA, 19 nt, Homo sapiens
  misc_RNA (1)...(19): siRNA sense strand
ccagcaacgaagugaauuu

SEQ ID NO: 2540818 - RNA, 19 nt, Homo sapiens
  misc_RNA (1)...(19): siRNA sense strand
cagucgaagauuugaguuu

SEQ ID NO: 2540819 - RNA, 19 nt, Homo sapiens
  misc_RNA (1)...(19): siRNA sense strand
uggaaucauccuagaguau

SEQ ID NO: 2540820 - RNA, 19 nt, Homo sapiens
  misc_RNA (1)...(19): siRNA sense strand
gcagagauuuccuagguga

SEQ ID NO: 2540821 - RNA, 19 nt, Homo sapiens
  misc_RNA (1)...(19): siRNA sense strand
cagugaugaucgugacaga

SEQ ID NO: 2540822 - RNA, 19 nt, Homo sapiens
  misc_RNA (1)...(19): siRNA sense strand
gugacagaguauauggaga

SEQ ID NO: 2540823 - RNA, 19 nt, Homo sapiens
  misc_RNA (1)...(19): siRNA sense strand
gcuggcagaaagagcgaaa

SEQ ID NO: 2540824 - RNA, 19 nt, Homo sapiens
  misc_RNA (1)...(19): siRNA sense strand
ugagagaguuauuggagca

SEQ ID NO: 2540825 - RNA, 19 nt, Homo sapiens
  misc_RNA (1)...(19): siRNA sense strand
aggcaggauaugaagagaa

SEQ ID NO: 2540826 - RNA, 19 nt, Homo sapiens
  misc_RNA (1)...(19): siRNA sense strand
cauccagagcugcggcaaa

SEQ ID NO: 2540827 - RNA, 19 nt, Homo sapiens
  misc_RNA (1)...(19): siRNA sense strand
gauuauuucaggagagagu

SEQ ID NO: 2540828 - RNA, 19 nt, Homo sapiens
  misc_RNA (1)...(19): siRNA sense strand
acaagauccagaagaggaa

SEQ ID NO: 2540829 - RNA, 19 nt, Homo sapiens
  misc_RNA (1)...(19): siRNA sense strand
agagauuggugaaguggau

SEQ ID NO: 2540830 - RNA, 19 nt, Homo sapiens
  misc_RNA (1)...(19): siRNA sense strand
aguuauuggagcaggugaa

SEQ ID NO: 2540831 - RNA, 19 nt, Homo sapiens
  misc_RNA (1)...(19): siRNA sense strand
aggugaauuuggugaaguu

SEQ ID NO: 2540832 - RNA, 19 nt, Homo sapiens
  misc_RNA (1)...(19): siRNA sense strand
ugaaggugcagcugguaaa

SEQ ID NO: 2540833 - RNA, 19 nt, Homo sapiens
  misc_RNA (1)...(19): siRNA sense strand
ccuuugagauugaggcagu

SEQ ID NO: 2540834 - RNA, 19 nt, Homo sapiens
  misc_RNA (1)...(19): siRNA sense strand
cggcaguaugugucuguaa

SEQ ID NO: 2540835 - RNA, 19 nt, Homo sapiens
  misc_RNA (1)...(19): siRNA sense strand
uaugcaaagugauggaaca

SEQ ID NO: 2540836 - RNA, 19 nt, Homo sapiens
  misc_RNA (1)...(19): siRNA sense strand
aggaaagacgugucauauu

SEQ ID NO: 2540837 - RNA, 19 nt, Homo sapiens
  misc_RNA (1)...(19): siRNA sense strand
cggcaaagcggccugaaaa

SEQ ID NO: 2540838 - RNA, 19 nt, Homo sapiens
  misc_RNA (1)...(19): siRNA sense strand
ggaagaugaucccgaggca

SEQ ID NO: 2540839 - RNA, 19 nt, Homo sapiens
  misc_RNA (1)...(19): siRNA sense strand
gagagacccuacugggaga

SEQ ID NO: 2540840 - RNA, 19 nt, Homo sapiens
  misc_RNA (1)...(19): siRNA sense strand
agauagaagcaucauguau

SEQ ID NO: 2540841 - RNA, 19 nt, Homo sapiens
  misc_RNA (1)...(19): siRNA sense strand
aaucagaauaacuggcuuu

SEQ ID NO: 2540842 - RNA, 19 nt, Homo sapiens
  misc_RNA (1)...(19): siRNA sense strand
gaacuuacauugauccaca

SEQ ID NO: 2540843 - RNA, 19 nt, Homo sapiens
  misc_RNA (1)...(19): siRNA sense strand
gcuggugcccaucgggaaa

SEQ ID NO: 2540844 - RNA, 19 nt, Homo sapiens
  misc_RNA (1)...(19): siRNA sense strand
ccggcaaagcggccugaaa

SEQ ID NO: 2540845 - RNA, 19 nt, Homo sapiens
  misc_RNA (1)...(19): siRNA sense strand
aaaguaaaccagugaugau

SEQ ID NO: 2540846 - RNA, 19 nt, Homo sapiens
  misc_RNA (1)...(19): siRNA sense strand
cagaaugggagaaacauca

SEQ ID NO: 2540847 - RNA, 19 nt, Homo sapiens
  misc_RNA (1)...(19): siRNA sense strand
gcaugugcaaggcaggaua

SEQ ID NO: 2540848 - RNA, 19 nt, Homo sapiens
  misc_RNA (1)...(19): siRNA sense strand
acgaauuugcuaaggagau

SEQ ID NO: 2540849 - RNA, 19 nt, Homo sapiens
  misc_RNA (1)...(19): siRNA sense strand
cagagauuuccuaggugaa

SEQ ID NO: 2540850 - RNA, 19 nt, Homo sapiens
  misc_RNA (1)...(19): siRNA sense strand
caccacaaggggaggaaaa

SEQ ID NO: 2540851 - RNA, 19 nt, Homo sapiens
  misc_RNA (1)...(19): siRNA sense strand
cgaagauuugaguuugaaa

SEQ ID NO: 2540852 - RNA, 19 nt, Homo sapiens
  misc_RNA (1)...(19): siRNA sense strand
caauggacgcuguggcuca

SEQ ID NO: 2540853 - RNA, 19 nt, Homo sapiens
  misc_RNA (1)...(19): siRNA sense strand
aggaaaaccaauacaucaa

SEQ ID NO: 2540854 - RNA, 19 nt, Homo sapiens
  misc_RNA (1)...(19): siRNA sense strand
gcuucaaccucuugugucu

SEQ ID NO: 2540855 - RNA, 19 nt, Homo sapiens
  misc_RNA (1)...(19): siRNA sense strand
aggcuauacugaaaagcaa

SEQ ID NO: 2540856 - RNA, 19 nt, Homo sapiens
  misc_RNA (1)...(19): siRNA sense strand
ggaauaguaaugugggaag

SEQ ID NO: 2540857 - RNA, 19 nt, Homo sapiens
  misc_RNA (1)...(19): siRNA sense strand
acguacagcagcaggcuau

SEQ ID NO: 2540858 - RNA, 19 nt, Homo sapiens
  misc_RNA (1)...(19): siRNA sense strand
gugggaagagauuggugaa

SEQ ID NO: 2540859 - RNA, 19 nt, Homo sapiens
  misc_RNA (1)...(19): siRNA sense strand
ccuacugggagaugaccaa

SEQ ID NO: 2540860 - RNA, 19 nt, Homo sapiens
  misc_RNA (1)...(19): siRNA sense strand
auguaucaccauugagaga

SEQ ID NO: 2540861 - RNA, 19 nt, Homo sapiens
  misc_RNA (1)...(19): siRNA sense strand
uuguaguggacguuugaaa

SEQ ID NO: 2540862 - RNA, 19 nt, Homo sapiens
  misc_RNA (1)...(19): siRNA sense strand
uuugaaacuaccaggaaaa

SEQ ID NO: 2540863 - RNA, 19 nt, Homo sapiens
  misc_RNA (1)...(19): siRNA sense strand
gggagaugaccaaucaaga

SEQ ID NO: 2540864 - RNA, 19 nt, Homo sapiens
  misc_RNA (1)...(19): siRNA sense strand
gagcgaaauagcaggccca

SEQ ID NO: 2540865 - RNA, 19 nt, Homo sapiens
  misc_RNA (1)...(19): siRNA sense strand
cuaauuuauuggcagaaca

SEQ ID NO: 2540866 - RNA, 19 nt, Homo sapiens
  misc_RNA (1)...(19): siRNA sense strand
uggcagaaagagcgaaaua

SEQ ID NO: 2540867 - RNA, 19 nt, Homo sapiens
  misc_RNA (1)...(19): siRNA sense strand
cauuaaacugccaggagua

SEQ ID NO: 2540868 - RNA, 19 nt, Homo sapiens
  misc_RNA (1)...(19): siRNA sense strand
cagaagaagaucaugaaca

SEQ ID NO: 2540869 - RNA, 19 nt, Homo sapiens
  misc_RNA (1)...(19): siRNA sense strand
cgaugaaagcuuuacagaa

SEQ ID NO: 2540870 - RNA, 19 nt, Homo sapiens
  misc_RNA (1)...(19): siRNA sense strand
cuguaaauguaaccacaaa

SEQ ID NO: 2540871 - RNA, 19 nt, Homo sapiens
  misc_RNA (1)...(19): siRNA sense strand
caguuauacccaugaggaa

SEQ ID NO: 2540872 - RNA, 19 nt, Homo sapiens
  misc_RNA (1)...(19): siRNA sense strand
aagcaaguaucaugggaca

SEQ ID NO: 2540873 - RNA, 19 nt, Homo sapiens
  misc_RNA (1)...(19): siRNA sense strand
gugaaguggaugaaaauua

SEQ ID NO: 2540874 - RNA, 19 nt, Homo sapiens
  misc_RNA (1)...(19): siRNA sense strand
ccagcaacgaagugaauuu

SEQ ID NO: 2540875 - RNA, 19 nt, Homo sapiens
  misc_RNA (1)...(19): siRNA sense strand
cagucgaagauuugaguuu

SEQ ID NO: 2540876 - RNA, 19 nt, Homo sapiens
  misc_RNA (1)...(19): siRNA sense strand
uggaaucauccuagaguau

SEQ ID NO: 2540877 - RNA, 19 nt, Homo sapiens
  misc_RNA (1)...(19): siRNA sense strand
gcagagauuuccuagguga

SEQ ID NO: 2540878 - RNA, 19 nt, Homo sapiens
  misc_RNA (1)...(19): siRNA sense strand
cagugaugaucgugacaga

SEQ ID NO: 2540879 - RNA, 19 nt, Homo sapiens
  misc_RNA (1)...(19): siRNA sense strand
gugacagaguauauggaga

SEQ ID NO: 2540880 - RNA, 19 nt, Homo sapiens
  misc_RNA (1)...(19): siRNA sense strand
gcuggcagaaagagcgaaa

SEQ ID NO: 2540881 - RNA, 19 nt, Homo sapiens
  misc_RNA (1)...(19): siRNA sense strand
ugagagaguuauuggagca

SEQ ID NO: 2540882 - RNA, 19 nt, Homo sapiens
  misc_RNA (1)...(19): siRNA sense strand
aggcaggauaugaagagaa

SEQ ID NO: 2540883 - RNA, 19 nt, Homo sapiens
  misc_RNA (1)...(19): siRNA sense strand
cauccagagcugcggcaaa

SEQ ID NO: 2540884 - RNA, 19 nt, Homo sapiens
  misc_RNA (1)...(19): siRNA sense strand
gauuauuucaggagagagu

SEQ ID NO: 2540885 - RNA, 19 nt, Homo sapiens
  misc_RNA (1)...(19): siRNA sense strand
acaagauccagaagaggaa

SEQ ID NO: 2540886 - RNA, 19 nt, Homo sapiens
  misc_RNA (1)...(19): siRNA sense strand
agagauuggugaaguggau

SEQ ID NO: 2540887 - RNA, 19 nt, Homo sapiens
  misc_RNA (1)...(19): siRNA sense strand
aguuauuggagcaggugaa

SEQ ID NO: 2540888 - RNA, 19 nt, Homo sapiens
  misc_RNA (1)...(19): siRNA sense strand
aggugaauuuggugaaguu

SEQ ID NO: 2540889 - RNA, 19 nt, Homo sapiens
  misc_RNA (1)...(19): siRNA sense strand
ugaaggugcagcugguaaa

SEQ ID NO: 2540890 - RNA, 19 nt, Homo sapiens
  misc_RNA (1)...(19): siRNA sense strand
ccuuugagauugaggcagu

SEQ ID NO: 2540891 - RNA, 19 nt, Homo sapiens
  misc_RNA (1)...(19): siRNA sense strand
cggcaguaugugucuguaa

SEQ ID NO: 2540892 - RNA, 19 nt, Homo sapiens
  misc_RNA (1)...(19): siRNA sense strand
uaugcaaagugauggaaca

SEQ ID NO: 2540893 - RNA, 19 nt, Homo sapiens
  misc_RNA (1)...(19): siRNA sense strand
aggaaagacgugucauauu

SEQ ID NO: 2540894 - RNA, 19 nt, Homo sapiens
  misc_RNA (1)...(19): siRNA sense strand
cggcaaagcggccugaaaa

SEQ ID NO: 2540895 - RNA, 19 nt, Homo sapiens
  misc_RNA (1)...(19): siRNA sense strand
ggaagaugaucccgaggca

SEQ ID NO: 2540896 - RNA, 19 nt, Homo sapiens
  misc_RNA (1)...(19): siRNA sense strand
gagagacccuacugggaga

SEQ ID NO: 2540897 - RNA, 19 nt, Homo sapiens
  misc_RNA (1)...(19): siRNA sense strand
agauagaagcaucauguau

SEQ ID NO: 2540898 - RNA, 19 nt, Homo sapiens
  misc_RNA (1)...(19): siRNA sense strand
aaucagaauaacuggcuuu

SEQ ID NO: 2540899 - RNA, 19 nt, Homo sapiens
  misc_RNA (1)...(19): siRNA sense strand
gaacuuacauugauccaca

SEQ ID NO: 2540900 - RNA, 19 nt, Homo sapiens
  misc_RNA (1)...(19): siRNA sense strand
gcuggugcccaucgggaaa

SEQ ID NO: 2540901 - RNA, 19 nt, Homo sapiens
  misc_RNA (1)...(19): siRNA sense strand
ccggcaaagcggccugaaa

SEQ ID NO: 2540902 - RNA, 19 nt, Homo sapiens
  misc_RNA (1)...(19): siRNA sense strand
aaaguaaaccagugaugau

SEQ ID NO: 2540903 - RNA, 19 nt, Homo sapiens
  misc_RNA (1)...(19): siRNA sense strand
cagaaugggagaaacauca

SEQ ID NO: 2540904 - RNA, 19 nt, Homo sapiens
  misc_RNA (1)...(19): siRNA sense strand
gcaugugcaaggcaggaua

SEQ ID NO: 2540905 - RNA, 19 nt, Homo sapiens
  misc_RNA (1)...(19): siRNA sense strand
acgaauuugcuaaggagau

SEQ ID NO: 2540906 - RNA, 19 nt, Homo sapiens
  misc_RNA (1)...(19): siRNA sense strand
cagagauuuccuaggugaa

SEQ ID NO: 2540907 - RNA, 19 nt, Homo sapiens
  misc_RNA (1)...(19): siRNA sense strand
caccacaaggggaggaaaa

SEQ ID NO: 2540908 - RNA, 19 nt, Homo sapiens
  misc_RNA (1)...(19): siRNA sense strand
cgaagauuugaguuugaaa

SEQ ID NO: 2540909 - RNA, 19 nt, Homo sapiens
  misc_RNA (1)...(19): siRNA sense strand
caauggacgcuguggcuca

SEQ ID NO: 2540910 - RNA, 19 nt, Homo sapiens
  misc_RNA (1)...(19): siRNA sense strand
aggaaaaccaauacaucaa

SEQ ID NO: 2540911 - RNA, 19 nt, Homo sapiens
  misc_RNA (1)...(19): siRNA sense strand
gcuucaaccucuugugucu

SEQ ID NO: 2540912 - RNA, 19 nt, Homo sapiens
  misc_RNA (1)...(19): siRNA sense strand
aggcuauacugaaaagcaa

SEQ ID NO: 2540913 - RNA, 19 nt, Homo sapiens
  misc_RNA (1)...(19): siRNA sense strand
ggaauaguaaugugggaag

SEQ ID NO: 2540914 - RNA, 19 nt, Homo sapiens
  misc_RNA (1)...(19): siRNA sense strand
acguacagcagcaggcuau

SEQ ID NO: 2540915 - RNA, 19 nt, Homo sapiens
  misc_RNA (1)...(19): siRNA sense strand
gugggaagagauuggugaa

SEQ ID NO: 2540916 - RNA, 19 nt, Homo sapiens
  misc_RNA (1)...(19): siRNA sense strand
ccuacugggagaugaccaa

SEQ ID NO: 2540917 - RNA, 19 nt, Homo sapiens
  misc_RNA (1)...(19): siRNA sense strand
auguaucaccauugagaga

SEQ ID NO: 2540918 - RNA, 19 nt, Homo sapiens
  misc_RNA (1)...(19): siRNA sense strand
uuguaguggacguuugaaa

SEQ ID NO: 2540919 - RNA, 19 nt, Homo sapiens
  misc_RNA (1)...(19): siRNA sense strand
uuugaaacuaccaggaaaa

SEQ ID NO: 2540920 - RNA, 19 nt, Homo sapiens
  misc_RNA (1)...(19): siRNA sense strand
gggagaugaccaaucaaga

SEQ ID NO: 2540921 - RNA, 19 nt, Homo sapiens
  misc_RNA (1)...(19): siRNA sense strand
gagcgaaauagcaggccca

SEQ ID NO: 2540922 - RNA, 19 nt, Homo sapiens
  misc_RNA (1)...(19): siRNA sense strand
cuaauuuauuggcagaaca

SEQ ID NO: 2540923 - RNA, 19 nt, Homo sapiens
  misc_RNA (1)...(19): siRNA sense strand
auuuagaugacaugggcua

SEQ ID NO: 2540924 - RNA, 19 nt, Homo sapiens
  misc_RNA (1)...(19): siRNA sense strand
aaacagaaagacagcguca

SEQ ID NO: 2540925 - RNA, 19 nt, Homo sapiens
  misc_RNA (1)...(19): siRNA sense strand
ggagcaaagccauucgcua

SEQ ID NO: 2540926 - RNA, 19 nt, Homo sapiens
  misc_RNA (1)...(19): siRNA sense strand
ccaaagaaaguacuggaga

SEQ ID NO: 2540927 - RNA, 19 nt, Homo sapiens
  misc_RNA (1)...(19): siRNA sense strand
ucauauuacccuaggugau

SEQ ID NO: 2540928 - RNA, 19 nt, Homo sapiens
  misc_RNA (1)...(19): siRNA sense strand
cgacacagcuggugccaug

SEQ ID NO: 2540929 - RNA, 19 nt, Homo sapiens
  misc_RNA (1)...(19): siRNA sense strand
acuuacagcaacaggguca

SEQ ID NO: 2540930 - RNA, 19 nt, Homo sapiens
  misc_RNA (1)...(19): siRNA sense strand
agguuaugaaacagaaaga

SEQ ID NO: 2540931 - RNA, 19 nt, Homo sapiens
  misc_RNA (1)...(19): siRNA sense strand
gggcuauaucguggagaau

SEQ ID NO: 2540932 - RNA, 19 nt, Homo sapiens
  misc_RNA (1)...(19): siRNA sense strand
caacaugggcuuuggggau

SEQ ID NO: 2540933 - RNA, 19 nt, Homo sapiens
  misc_RNA (1)...(19): siRNA sense strand
ccacagaguccauccgcuu

SEQ ID NO: 2540934 - RNA, 19 nt, Homo sapiens
  misc_RNA (1)...(19): siRNA sense strand
cggcagccuucaaugggaa

SEQ ID NO: 2540935 - RNA, 19 nt, Homo sapiens
  misc_RNA (1)...(19): siRNA sense strand
aagaacagauuauggccuu

SEQ ID NO: 2540936 - RNA, 19 nt, Homo sapiens
  misc_RNA (1)...(19): siRNA sense strand
uagccaggguggaugccaa

SEQ ID NO: 2540937 - RNA, 19 nt, Homo sapiens
  misc_RNA (1)...(19): siRNA sense strand
cacucaaagaacagauuau

SEQ ID NO: 2540938 - RNA, 19 nt, Homo sapiens
  misc_RNA (1)...(19): siRNA sense strand
auuuagaugacaugggcua

SEQ ID NO: 2540939 - RNA, 19 nt, Homo sapiens
  misc_RNA (1)...(19): siRNA sense strand
aaacagaaagacagcguca

SEQ ID NO: 2540940 - RNA, 19 nt, Homo sapiens
  misc_RNA (1)...(19): siRNA sense strand
ggagcaaagccauucgcua

SEQ ID NO: 2540941 - RNA, 19 nt, Homo sapiens
  misc_RNA (1)...(19): siRNA sense strand
ccaaagaaaguacuggaga

SEQ ID NO: 2540942 - RNA, 19 nt, Homo sapiens
  misc_RNA (1)...(19): siRNA sense strand
ucauauuacccuaggugau

SEQ ID NO: 2540943 - RNA, 19 nt, Homo sapiens
  misc_RNA (1)...(19): siRNA sense strand
cgacacagcuggugccaug

SEQ ID NO: 2540944 - RNA, 19 nt, Homo sapiens
  misc_RNA (1)...(19): siRNA sense strand
acuuacagcaacaggguca

SEQ ID NO: 2540945 - RNA, 19 nt, Homo sapiens
  misc_RNA (1)...(19): siRNA sense strand
agguuaugaaacagaaaga

SEQ ID NO: 2540946 - RNA, 19 nt, Homo sapiens
  misc_RNA (1)...(19): siRNA sense strand
gggcuauaucguggagaau

SEQ ID NO: 2540947 - RNA, 19 nt, Homo sapiens
  misc_RNA (1)...(19): siRNA sense strand
caacaugggcuuuggggau

SEQ ID NO: 2540948 - RNA, 19 nt, Homo sapiens
  misc_RNA (1)...(19): siRNA sense strand
ccacagaguccauccgcuu

SEQ ID NO: 2540949 - RNA, 19 nt, Homo sapiens
  misc_RNA (1)...(19): siRNA sense strand
cggcagccuucaaugggaa

SEQ ID NO: 2540950 - RNA, 19 nt, Homo sapiens
  misc_RNA (1)...(19): siRNA sense strand
aagaacagauuauggccuu

SEQ ID NO: 2540951 - RNA, 19 nt, Homo sapiens
  misc_RNA (1)...(19): siRNA sense strand
uagccaggguggaugccaa

SEQ ID NO: 2540952 - RNA, 19 nt, Homo sapiens
  misc_RNA (1)...(19): siRNA sense strand
cacucaaagaacagauuau

SEQ ID NO: 2540953 - RNA, 19 nt, Homo sapiens
  misc_RNA (1)...(19): siRNA sense strand
caacuauccgugaaggaca

SEQ ID NO: 2540954 - RNA, 19 nt, Homo sapiens
  misc_RNA (1)...(19): siRNA sense strand
ccguaaggauggcuugcau

SEQ ID NO: 2540955 - RNA, 19 nt, Homo sapiens
  misc_RNA (1)...(19): siRNA sense strand
caacuauccgugaaggaca

SEQ ID NO: 2540956 - RNA, 19 nt, Homo sapiens
  misc_RNA (1)...(19): siRNA sense strand
ucaucaaggccgaggacga

SEQ ID NO: 2540957 - RNA, 19 nt, Homo sapiens
  misc_RNA (1)...(19): siRNA sense strand
cauccugaagggugacaaa

SEQ ID NO: 2540958 - RNA, 19 nt, Homo sapiens
  misc_RNA (1)...(19): siRNA sense strand
ucaucaaggccgaggacga

SEQ ID NO: 2540959 - RNA, 19 nt, Homo sapiens
  misc_RNA (1)...(19): siRNA sense strand
cauccugaagggugacaaa

SEQ ID NO: 2540960 - RNA, 19 nt, Homo sapiens
  misc_RNA (1)...(19): siRNA sense strand
ccaucugccuuguggccaa

SEQ ID NO: 2540961 - RNA, 19 nt, Homo sapiens
  misc_RNA (1)...(19): siRNA sense strand
agacaauaucagcgugcau

SEQ ID NO: 2540962 - RNA, 19 nt, Homo sapiens
  misc_RNA (1)...(19): siRNA sense strand
agaucugcuuugugugcaa

SEQ ID NO: 2540963 - RNA, 19 nt, Homo sapiens
  misc_RNA (1)...(19): siRNA sense strand
cuguaaaagaaaagaagga

SEQ ID NO: 2540964 - RNA, 19 nt, Homo sapiens
  misc_RNA (1)...(19): siRNA sense strand
cagaaggaucagugccuca

SEQ ID NO: 2540965 - RNA, 19 nt, Homo sapiens
  misc_RNA (1)...(19): siRNA sense strand
gaacauccaacaugggcau

SEQ ID NO: 2540966 - RNA, 19 nt, Homo sapiens
  misc_RNA (1)...(19): siRNA sense strand
gaaaagaaggaaugccaga

SEQ ID NO: 2540967 - RNA, 19 nt, Homo sapiens
  misc_RNA (1)...(19): siRNA sense strand
cugcuuugugugcaagaaa

SEQ ID NO: 2540968 - RNA, 19 nt, Homo sapiens
  misc_RNA (1)...(19): siRNA sense strand
ccaucugccuuguggccaa

SEQ ID NO: 2540969 - RNA, 19 nt, Homo sapiens
  misc_RNA (1)...(19): siRNA sense strand
agacaauaucagcgugcau

SEQ ID NO: 2540970 - RNA, 19 nt, Homo sapiens
  misc_RNA (1)...(19): siRNA sense strand
agaucugcuuugugugcaa

SEQ ID NO: 2540971 - RNA, 19 nt, Homo sapiens
  misc_RNA (1)...(19): siRNA sense strand
cuguaaaagaaaagaagga

SEQ ID NO: 2540972 - RNA, 19 nt, Homo sapiens
  misc_RNA (1)...(19): siRNA sense strand
cagaaggaucagugccuca

SEQ ID NO: 2540973 - RNA, 19 nt, Homo sapiens
  misc_RNA (1)...(19): siRNA sense strand
gaacauccaacaugggcau

SEQ ID NO: 2540974 - RNA, 19 nt, Homo sapiens
  misc_RNA (1)...(19): siRNA sense strand
gaaaagaaggaaugccaga

SEQ ID NO: 2540975 - RNA, 19 nt, Homo sapiens
  misc_RNA (1)...(19): siRNA sense strand
cugcuuugugugcaagaaa

SEQ ID NO: 2540976 - RNA, 19 nt, Homo sapiens
  misc_RNA (1)...(19): siRNA sense strand
gugacaaggcccugcucaa

SEQ ID NO: 2540977 - RNA, 19 nt, Homo sapiens
  misc_RNA (1)...(19): siRNA sense strand
ccugcggagcugagagcaa

SEQ ID NO: 2540978 - RNA, 19 nt, Homo sapiens
  misc_RNA (1)...(19): siRNA sense strand
aggccaaagaggaccgaau

SEQ ID NO: 2540979 - RNA, 19 nt, Homo sapiens
  misc_RNA (1)...(19): siRNA sense strand
ggaacaagaccuuuggaac

SEQ ID NO: 2540980 - RNA, 19 nt, Homo sapiens
  misc_RNA (1)...(19): siRNA sense strand
ugaagaagaaccuggcuga

SEQ ID NO: 2540981 - RNA, 19 nt, Homo sapiens
  misc_RNA (1)...(19): siRNA sense strand
cuggagagcauccgggaga

SEQ ID NO: 2540982 - RNA, 19 nt, Homo sapiens
  misc_RNA (1)...(19): siRNA sense strand
gaacaagaccuuuggaacc

SEQ ID NO: 2540983 - RNA, 19 nt, Homo sapiens
  misc_RNA (1)...(19): siRNA sense strand
cugagagcaaugaggccaa

SEQ ID NO: 2540984 - RNA, 19 nt, Homo sapiens
  misc_RNA (1)...(19): siRNA sense strand
guuuguagagggaggaagu

SEQ ID NO: 2540985 - RNA, 19 nt, Homo sapiens
  misc_RNA (1)...(19): siRNA sense strand
agaagaaccuggcugacga

SEQ ID NO: 2540986 - RNA, 19 nt, Homo sapiens
  misc_RNA (1)...(19): siRNA sense strand
aggcauuuguaaaccaaca

SEQ ID NO: 2540987 - RNA, 19 nt, Homo sapiens
  misc_RNA (1)...(19): siRNA sense strand
cugaaggagaugcuggaga

SEQ ID NO: 2540988 - RNA, 19 nt, Homo sapiens
  misc_RNA (1)...(19): siRNA sense strand
ccaucaagcggcagacagu

SEQ ID NO: 2540989 - RNA, 19 nt, Homo sapiens
  misc_RNA (1)...(19): siRNA sense strand
gcaaauaccgauaugguga

SEQ ID NO: 2540990 - RNA, 19 nt, Homo sapiens
  misc_RNA (1)...(19): siRNA sense strand
caguauauaccaacggcaa

SEQ ID NO: 2540991 - RNA, 19 nt, Homo sapiens
  misc_RNA (1)...(19): siRNA sense strand
gggaauuccuggagcugga

SEQ ID NO: 2540992 - RNA, 19 nt, Homo sapiens
  misc_RNA (1)...(19): siRNA sense strand
aggacaaagcgcuggugaa

SEQ ID NO: 2540993 - RNA, 19 nt, Homo sapiens
  misc_RNA (1)...(19): siRNA sense strand
gaaccucaaacgugggcaa

SEQ ID NO: 2540994 - RNA, 19 nt, Homo sapiens
  misc_RNA (1)...(19): siRNA sense strand
aguauauaccaacggcaaa

SEQ ID NO: 2540995 - RNA, 19 nt, Homo sapiens
  misc_RNA (1)...(19): siRNA sense strand
gcaucagggaccuccgaaa

SEQ ID NO: 2540996 - RNA, 19 nt, Homo sapiens
  misc_RNA (1)...(19): siRNA sense strand
ccuccgaaacaguggcuau

SEQ ID NO: 2540997 - RNA, 19 nt, Homo sapiens
  misc_RNA (1)...(19): siRNA sense strand
ucgcaguagaagugaacau

SEQ ID NO: 2540998 - RNA, 19 nt, Homo sapiens
  misc_RNA (1)...(19): siRNA sense strand
acauugacguguuggagga

SEQ ID NO: 2540999 - RNA, 19 nt, Homo sapiens
  misc_RNA (1)...(19): siRNA sense strand
cugugaugcugcagaagga

SEQ ID NO: 2541000 - RNA, 19 nt, Homo sapiens
  misc_RNA (1)...(19): siRNA sense strand
gagaggugcccuugggugu

SEQ ID NO: 2541001 - RNA, 19 nt, Homo sapiens
  misc_RNA (1)...(19): siRNA sense strand
uggaggacuucuuggagga

SEQ ID NO: 2541002 - RNA, 19 nt, Homo sapiens
  misc_RNA (1)...(19): siRNA sense strand
gcaucaaagucaagcugcu

SEQ ID NO: 2541003 - RNA, 19 nt, Homo sapiens
  misc_RNA (1)...(19): siRNA sense strand
augccaagcuggagaagac

SEQ ID NO: 2541004 - RNA, 19 nt, Homo sapiens
  misc_RNA (1)...(19): siRNA sense strand
cuuggguguuggugauauu

SEQ ID NO: 2541005 - RNA, 19 nt, Homo sapiens
  misc_RNA (1)...(19): siRNA sense strand
ggaagaagcagaaggccaa

SEQ ID NO: 2541006 - RNA, 19 nt, Homo sapiens
  misc_RNA (1)...(19): siRNA sense strand
cagagauggacgugaggaa

SEQ ID NO: 2541007 - RNA, 19 nt, Homo sapiens
  misc_RNA (1)...(19): siRNA sense strand
acgugacgguggagaacaa

SEQ ID NO: 2541008 - RNA, 19 nt, Homo sapiens
  misc_RNA (1)...(19): siRNA sense strand
aggaagaagcagaaggcca

SEQ ID NO: 2541009 - RNA, 19 nt, Homo sapiens
  misc_RNA (1)...(19): siRNA sense strand
agcagaaggccaaggucaa

SEQ ID NO: 2541010 - RNA, 19 nt, Homo sapiens
  misc_RNA (1)...(19): siRNA sense strand
gcgacauggaccuggccaa

SEQ ID NO: 2541011 - RNA, 19 nt, Homo sapiens
  misc_RNA (1)...(19): siRNA sense strand
ccaaauaccccauggacga

SEQ ID NO: 2541012 - RNA, 19 nt, Homo sapiens
  misc_RNA (1)...(19): siRNA sense strand
aagcagaaggccaagguca

SEQ ID NO: 2541013 - RNA, 19 nt, Homo sapiens
  misc_RNA (1)...(19): siRNA sense strand
gcgugauccuguacagcau

SEQ ID NO: 2541014 - RNA, 19 nt, Homo sapiens
  misc_RNA (1)...(19): siRNA sense strand
uggacgagcaggagugcau

SEQ ID NO: 2541015 - RNA, 19 nt, Homo sapiens
  misc_RNA (1)...(19): siRNA sense strand
cggagagccaggagcacau

SEQ ID NO: 2541016 - RNA, 19 nt, Homo sapiens
  misc_RNA (1)...(19): siRNA sense strand
acgacgugacgguggagaa

SEQ ID NO: 2541017 - RNA, 19 nt, Homo sapiens
  misc_RNA (1)...(19): siRNA sense strand
gggcagagauggacgugag

SEQ ID NO: 2541018 - RNA, 19 nt, Homo sapiens
  misc_RNA (1)...(19): siRNA sense strand
gacaauagccggaggcaga

SEQ ID NO: 2541019 - RNA, 19 nt, Homo sapiens
  misc_RNA (1)...(19): siRNA sense strand
augaagaagagaagaucaa

SEQ ID NO: 2541020 - RNA, 19 nt, Homo sapiens
  misc_RNA (1)...(19): siRNA sense strand
aggcaaugaccgcgugcaa

SEQ ID NO: 2541021 - RNA, 19 nt, Homo sapiens
  misc_RNA (1)...(19): siRNA sense strand
aggccaaggagcugaucaa

SEQ ID NO: 2541022 - RNA, 19 nt, Homo sapiens
  misc_RNA (1)...(19): siRNA sense strand
ccguaaggguggagcacgu

SEQ ID NO: 2541023 - RNA, 19 nt, Homo sapiens
  misc_RNA (1)...(19): siRNA sense strand
ccucuaagcugguggaguc

SEQ ID NO: 2541024 - RNA, 19 nt, Homo sapiens
  misc_RNA (1)...(19): siRNA sense strand
uggaggagcgcaaggguga

SEQ ID NO: 2541025 - RNA, 19 nt, Homo sapiens
  misc_RNA (1)...(19): siRNA sense strand
aggagaagcugcagcgcgu

SEQ ID NO: 2541026 - RNA, 19 nt, Homo sapiens
  misc_RNA (1)...(19): siRNA sense strand
guggagaacauuaucgaca

SEQ ID NO: 2541027 - RNA, 19 nt, Homo sapiens
  misc_RNA (1)...(19): siRNA sense strand
ucacacagauggaggaggu

SEQ ID NO: 2541028 - RNA, 19 nt, Homo sapiens
  misc_RNA (1)...(19): siRNA sense strand
cccgggagcaagaggagaa

SEQ ID NO: 2541029 - RNA, 19 nt, Homo sapiens
  misc_RNA (1)...(19): siRNA sense strand
agcaugaagaagagaagau

SEQ ID NO: 2541030 - RNA, 19 nt, Homo sapiens
  misc_RNA (1)...(19): siRNA sense strand
caugaagaagagaagauca

SEQ ID NO: 2541031 - RNA, 19 nt, Homo sapiens
  misc_RNA (1)...(19): siRNA sense strand
ccgaaaugcugcggaccau

SEQ ID NO: 2541032 - RNA, 19 nt, Homo sapiens
  misc_RNA (1)...(19): siRNA sense strand
cgaugcugguggcaggcaa

SEQ ID NO: 2541033 - RNA, 19 nt, Homo sapiens
  misc_RNA (1)...(19): siRNA sense strand
agauggaggaggugugcca

SEQ ID NO: 2541034 - RNA, 19 nt, Homo sapiens
  misc_RNA (1)...(19): siRNA sense strand
gacaauagccggaggcaga

SEQ ID NO: 2541035 - RNA, 19 nt, Homo sapiens
  misc_RNA (1)...(19): siRNA sense strand
augaagaagagaagaucaa

SEQ ID NO: 2541036 - RNA, 19 nt, Homo sapiens
  misc_RNA (1)...(19): siRNA sense strand
aggcaaugaccgcgugcaa

SEQ ID NO: 2541037 - RNA, 19 nt, Homo sapiens
  misc_RNA (1)...(19): siRNA sense strand
aggccaaggagcugaucaa

SEQ ID NO: 2541038 - RNA, 19 nt, Homo sapiens
  misc_RNA (1)...(19): siRNA sense strand
ccguaaggguggagcacgu

SEQ ID NO: 2541039 - RNA, 19 nt, Homo sapiens
  misc_RNA (1)...(19): siRNA sense strand
ccucuaagcugguggaguc

SEQ ID NO: 2541040 - RNA, 19 nt, Homo sapiens
  misc_RNA (1)...(19): siRNA sense strand
uggaggagcgcaaggguga

SEQ ID NO: 2541041 - RNA, 19 nt, Homo sapiens
  misc_RNA (1)...(19): siRNA sense strand
aggagaagcugcagcgcgu

SEQ ID NO: 2541042 - RNA, 19 nt, Homo sapiens
  misc_RNA (1)...(19): siRNA sense strand
guggagaacauuaucgaca

SEQ ID NO: 2541043 - RNA, 19 nt, Homo sapiens
  misc_RNA (1)...(19): siRNA sense strand
ucacacagauggaggaggu

SEQ ID NO: 2541044 - RNA, 19 nt, Homo sapiens
  misc_RNA (1)...(19): siRNA sense strand
cccgggagcaagaggagaa

SEQ ID NO: 2541045 - RNA, 19 nt, Homo sapiens
  misc_RNA (1)...(19): siRNA sense strand
agcaugaagaagagaagau

SEQ ID NO: 2541046 - RNA, 19 nt, Homo sapiens
  misc_RNA (1)...(19): siRNA sense strand
caugaagaagagaagauca

SEQ ID NO: 2541047 - RNA, 19 nt, Homo sapiens
  misc_RNA (1)...(19): siRNA sense strand
ccgaaaugcugcggaccau

SEQ ID NO: 2541048 - RNA, 19 nt, Homo sapiens
  misc_RNA (1)...(19): siRNA sense strand
cgaugcugguggcaggcaa

SEQ ID NO: 2541049 - RNA, 19 nt, Homo sapiens
  misc_RNA (1)...(19): siRNA sense strand
agauggaggaggugugcca

SEQ ID NO: 2541050 - RNA, 19 nt, Homo sapiens
  misc_RNA (1)...(19): siRNA sense strand
cuggaugaauguagagaga

SEQ ID NO: 2541051 - RNA, 19 nt, Homo sapiens
  misc_RNA (1)...(19): siRNA sense strand
cuugcaaagaugagauuaa

SEQ ID NO: 2541052 - RNA, 19 nt, Homo sapiens
  misc_RNA (1)...(19): siRNA sense strand
cuaaggaagaagacagaga

SEQ ID NO: 2541053 - RNA, 19 nt, Homo sapiens
  misc_RNA (1)...(19): siRNA sense strand
caucaagagugaggggaaa

SEQ ID NO: 2541054 - RNA, 19 nt, Homo sapiens
  misc_RNA (1)...(19): siRNA sense strand
agauauaaacagaagagca

SEQ ID NO: 2541055 - RNA, 19 nt, Homo sapiens
  misc_RNA (1)...(19): siRNA sense strand
uggcaaaccuggaagugga

SEQ ID NO: 2541056 - RNA, 19 nt, Homo sapiens
  misc_RNA (1)...(19): siRNA sense strand
ucgcacugcuucugggcaa

SEQ ID NO: 2541057 - RNA, 19 nt, Homo sapiens
  misc_RNA (1)...(19): siRNA sense strand
ugggaauugccaaggagaa

SEQ ID NO: 2541058 - RNA, 19 nt, Homo sapiens
  misc_RNA (1)...(19): siRNA sense strand
cuuccagguucaagcaauu

SEQ ID NO: 2541059 - RNA, 19 nt, Homo sapiens
  misc_RNA (1)...(19): siRNA sense strand
cggguugaccuaaggaaga

SEQ ID NO: 2541060 - RNA, 19 nt, Homo sapiens
  misc_RNA (1)...(19): siRNA sense strand
ggacagaggcuuuaagguc

SEQ ID NO: 2541061 - RNA, 19 nt, Homo sapiens
  misc_RNA (1)...(19): siRNA sense strand
aaguaaugguggcugucua

SEQ ID NO: 2541062 - RNA, 19 nt, Homo sapiens
  misc_RNA (1)...(19): siRNA sense strand
ucacauugacacuugcaaa

SEQ ID NO: 2541063 - RNA, 19 nt, Homo sapiens
  misc_RNA (1)...(19): siRNA sense strand
ggaacgucaugaaggacca

SEQ ID NO: 2541064 - RNA, 19 nt, Homo sapiens
  misc_RNA (1)...(19): siRNA sense strand
ccauaguaaaguuagguca

SEQ ID NO: 2541065 - RNA, 19 nt, Homo sapiens
  misc_RNA (1)...(19): siRNA sense strand
cuuuguauauggaacacua

SEQ ID NO: 2541066 - RNA, 19 nt, Homo sapiens
  misc_RNA (1)...(19): siRNA sense strand
cauaguaaaguuaggucau

SEQ ID NO: 2541067 - RNA, 19 nt, Homo sapiens
  misc_RNA (1)...(19): siRNA sense strand
acaucaagagugaggggaa

SEQ ID NO: 2541068 - RNA, 19 nt, Homo sapiens
  misc_RNA (1)...(19): siRNA sense strand
gaaaguacuucaagggcug

SEQ ID NO: 2541069 - RNA, 19 nt, Homo sapiens
  misc_RNA (1)...(19): siRNA sense strand
guuuauucauugaugcaga

SEQ ID NO: 2541070 - RNA, 19 nt, Homo sapiens
  misc_RNA (1)...(19): siRNA sense strand
gaaaaggagagcagguuga

SEQ ID NO: 2541071 - RNA, 19 nt, Homo sapiens
  misc_RNA (1)...(19): siRNA sense strand
aguaaugguggcugucuaa

SEQ ID NO: 2541072 - RNA, 19 nt, Homo sapiens
  misc_RNA (1)...(19): siRNA sense strand
ucguauuuaaccuggcaaa

SEQ ID NO: 2541073 - RNA, 19 nt, Homo sapiens
  misc_RNA (1)...(19): siRNA sense strand
uugccguguuggagaucaa

SEQ ID NO: 2541074 - RNA, 19 nt, Homo sapiens
  misc_RNA (1)...(19): siRNA sense strand
ccauuaucgucguguggca

SEQ ID NO: 2541075 - RNA, 19 nt, Homo sapiens
  misc_RNA (1)...(19): siRNA sense strand
uggcugucuaagugauaua

SEQ ID NO: 2541076 - RNA, 19 nt, Homo sapiens
  misc_RNA (1)...(19): siRNA sense strand
agagcagguugaaguaaca

SEQ ID NO: 2541077 - RNA, 19 nt, Homo sapiens
  misc_RNA (1)...(19): siRNA sense strand
gaaaugggcucaagcacgu

SEQ ID NO: 2541078 - RNA, 19 nt, Homo sapiens
  misc_RNA (1)...(19): siRNA sense strand
ggaccguggaaguguuuga

SEQ ID NO: 2541079 - RNA, 19 nt, Homo sapiens
  misc_RNA (1)...(19): siRNA sense strand
guuuggaaucagagcguaa

SEQ ID NO: 2541080 - RNA, 19 nt, Homo sapiens
  misc_RNA (1)...(19): siRNA sense strand
gguuacaagagcagauauu

SEQ ID NO: 2541081 - RNA, 19 nt, Homo sapiens
  misc_RNA (1)...(19): siRNA sense strand
cagagauagaagaagcuua

SEQ ID NO: 2541082 - RNA, 19 nt, Homo sapiens
  misc_RNA (1)...(19): siRNA sense strand
gggcagaguccaugcaacu

SEQ ID NO: 2541083 - RNA, 19 nt, Homo sapiens
  misc_RNA (1)...(19): siRNA sense strand
aguuaaagaucaagcugca

SEQ ID NO: 2541084 - RNA, 19 nt, Homo sapiens
  misc_RNA (1)...(19): siRNA sense strand
agauggacccagagauaga

SEQ ID NO: 2541085 - RNA, 19 nt, Homo sapiens
  misc_RNA (1)...(19): siRNA sense strand
ugaggaugguugugaggau

SEQ ID NO: 2541086 - RNA, 19 nt, Homo sapiens
  misc_RNA (1)...(19): siRNA sense strand
gguuauucuuccaguuaca

SEQ ID NO: 2541087 - RNA, 19 nt, Homo sapiens
  misc_RNA (1)...(19): siRNA sense strand
aggaugguugugaggauua

SEQ ID NO: 2541088 - RNA, 19 nt, Homo sapiens
  misc_RNA (1)...(19): siRNA sense strand
cggagucagcaauggcuaa

SEQ ID NO: 2541089 - RNA, 19 nt, Homo sapiens
  misc_RNA (1)...(19): siRNA sense strand
uuguuaaaguugacaggau

SEQ ID NO: 2541090 - RNA, 19 nt, Homo sapiens
  misc_RNA (1)...(19): siRNA sense strand
gcguaagcgaaaacaguaa

SEQ ID NO: 2541091 - RNA, 19 nt, Homo sapiens
  misc_RNA (1)...(19): siRNA sense strand
ggaaagauggauauggaag

SEQ ID NO: 2541092 - RNA, 19 nt, Homo sapiens
  misc_RNA (1)...(19): siRNA sense strand
gaaucagagcguaagcgaa

SEQ ID NO: 2541093 - RNA, 19 nt, Homo sapiens
  misc_RNA (1)...(19): siRNA sense strand
guuaaaguugacaggauca

SEQ ID NO: 2541094 - RNA, 19 nt, Homo sapiens
  misc_RNA (1)...(19): siRNA sense strand
gauggauauggaagaaauu

SEQ ID NO: 2541095 - RNA, 19 nt, Homo sapiens
  misc_RNA (1)...(19): siRNA sense strand
acguuguccuagaugcaaa

SEQ ID NO: 2541096 - RNA, 19 nt, Homo sapiens
  misc_RNA (1)...(19): siRNA sense strand
cugcaguagagauguaaaa

SEQ ID NO: 2541097 - RNA, 19 nt, Homo sapiens
  misc_RNA (1)...(19): siRNA sense strand
agagaagcaacaccagaaa

SEQ ID NO: 2541098 - RNA, 19 nt, Homo sapiens
  misc_RNA (1)...(19): siRNA sense strand
cuucaaagaugucggacug

SEQ ID NO: 2541099 - RNA, 19 nt, Homo sapiens
  misc_RNA (1)...(19): siRNA sense strand
cuuuaugaaugaaccaaca

SEQ ID NO: 2541100 - RNA, 19 nt, Homo sapiens
  misc_RNA (1)...(19): siRNA sense strand
uccagauuaccaagagaaa

SEQ ID NO: 2541101 - RNA, 19 nt, Homo sapiens
  misc_RNA (1)...(19): siRNA sense strand
guauuaaugucuaagcugu

SEQ ID NO: 2541102 - RNA, 19 nt, Homo sapiens
  misc_RNA (1)...(19): siRNA sense strand
caccuaguucacaggauaa

SEQ ID NO: 2541103 - RNA, 19 nt, Homo sapiens
  misc_RNA (1)...(19): siRNA sense strand
aggaaagauggauauggaa

SEQ ID NO: 2541104 - RNA, 19 nt, Homo sapiens
  misc_RNA (1)...(19): siRNA sense strand
guuuggaaucagagcguaa

SEQ ID NO: 2541105 - RNA, 19 nt, Homo sapiens
  misc_RNA (1)...(19): siRNA sense strand
gguuacaagagcagauauu

SEQ ID NO: 2541106 - RNA, 19 nt, Homo sapiens
  misc_RNA (1)...(19): siRNA sense strand
cagagauagaagaagcuua

SEQ ID NO: 2541107 - RNA, 19 nt, Homo sapiens
  misc_RNA (1)...(19): siRNA sense strand
gggcagaguccaugcaacu

SEQ ID NO: 2541108 - RNA, 19 nt, Homo sapiens
  misc_RNA (1)...(19): siRNA sense strand
aguuaaagaucaagcugca

SEQ ID NO: 2541109 - RNA, 19 nt, Homo sapiens
  misc_RNA (1)...(19): siRNA sense strand
agauggacccagagauaga

SEQ ID NO: 2541110 - RNA, 19 nt, Homo sapiens
  misc_RNA (1)...(19): siRNA sense strand
ugaggaugguugugaggau

SEQ ID NO: 2541111 - RNA, 19 nt, Homo sapiens
  misc_RNA (1)...(19): siRNA sense strand
gguuauucuuccaguuaca

SEQ ID NO: 2541112 - RNA, 19 nt, Homo sapiens
  misc_RNA (1)...(19): siRNA sense strand
aggaugguugugaggauua

SEQ ID NO: 2541113 - RNA, 19 nt, Homo sapiens
  misc_RNA (1)...(19): siRNA sense strand
cggagucagcaauggcuaa

SEQ ID NO: 2541114 - RNA, 19 nt, Homo sapiens
  misc_RNA (1)...(19): siRNA sense strand
uuguuaaaguugacaggau

SEQ ID NO: 2541115 - RNA, 19 nt, Homo sapiens
  misc_RNA (1)...(19): siRNA sense strand
gcguaagcgaaaacaguaa

SEQ ID NO: 2541116 - RNA, 19 nt, Homo sapiens
  misc_RNA (1)...(19): siRNA sense strand
ggaaagauggauauggaag

SEQ ID NO: 2541117 - RNA, 19 nt, Homo sapiens
  misc_RNA (1)...(19): siRNA sense strand
gaaucagagcguaagcgaa

SEQ ID NO: 2541118 - RNA, 19 nt, Homo sapiens
  misc_RNA (1)...(19): siRNA sense strand
guuaaaguugacaggauca

SEQ ID NO: 2541119 - RNA, 19 nt, Homo sapiens
  misc_RNA (1)...(19): siRNA sense strand
gauggauauggaagaaauu

SEQ ID NO: 2541120 - RNA, 19 nt, Homo sapiens
  misc_RNA (1)...(19): siRNA sense strand
acguuguccuagaugcaaa

SEQ ID NO: 2541121 - RNA, 19 nt, Homo sapiens
  misc_RNA (1)...(19): siRNA sense strand
cugcaguagagauguaaaa

SEQ ID NO: 2541122 - RNA, 19 nt, Homo sapiens
  misc_RNA (1)...(19): siRNA sense strand
agagaagcaacaccagaaa

SEQ ID NO: 2541123 - RNA, 19 nt, Homo sapiens
  misc_RNA (1)...(19): siRNA sense strand
cuucaaagaugucggacug

SEQ ID NO: 2541124 - RNA, 19 nt, Homo sapiens
  misc_RNA (1)...(19): siRNA sense strand
cuuuaugaaugaaccaaca

SEQ ID NO: 2541125 - RNA, 19 nt, Homo sapiens
  misc_RNA (1)...(19): siRNA sense strand
uccagauuaccaagagaaa

SEQ ID NO: 2541126 - RNA, 19 nt, Homo sapiens
  misc_RNA (1)...(19): siRNA sense strand
guauuaaugucuaagcugu

SEQ ID NO: 2541127 - RNA, 19 nt, Homo sapiens
  misc_RNA (1)...(19): siRNA sense strand
caccuaguucacaggauaa

SEQ ID NO: 2541128 - RNA, 19 nt, Homo sapiens
  misc_RNA (1)...(19): siRNA sense strand
aggaaagauggauauggaa

SEQ ID NO: 2541129 - RNA, 19 nt, Homo sapiens
  misc_RNA (1)...(19): siRNA sense strand
guuuggaaucagagcguaa

SEQ ID NO: 2541130 - RNA, 19 nt, Homo sapiens
  misc_RNA (1)...(19): siRNA sense strand
gguuacaagagcagauauu

SEQ ID NO: 2541131 - RNA, 19 nt, Homo sapiens
  misc_RNA (1)...(19): siRNA sense strand
cagagauagaagaagcuua

SEQ ID NO: 2541132 - RNA, 19 nt, Homo sapiens
  misc_RNA (1)...(19): siRNA sense strand
gggcagaguccaugcaacu

SEQ ID NO: 2541133 - RNA, 19 nt, Homo sapiens
  misc_RNA (1)...(19): siRNA sense strand
aguuaaagaucaagcugca

SEQ ID NO: 2541134 - RNA, 19 nt, Homo sapiens
  misc_RNA (1)...(19): siRNA sense strand
agauggacccagagauaga

SEQ ID NO: 2541135 - RNA, 19 nt, Homo sapiens
  misc_RNA (1)...(19): siRNA sense strand
ugaggaugguugugaggau

SEQ ID NO: 2541136 - RNA, 19 nt, Homo sapiens
  misc_RNA (1)...(19): siRNA sense strand
gguuauucuuccaguuaca

SEQ ID NO: 2541137 - RNA, 19 nt, Homo sapiens
  misc_RNA (1)...(19): siRNA sense strand
aggaugguugugaggauua

SEQ ID NO: 2541138 - RNA, 19 nt, Homo sapiens
  misc_RNA (1)...(19): siRNA sense strand
uuguuaaaguugacaggau

SEQ ID NO: 2541139 - RNA, 19 nt, Homo sapiens
  misc_RNA (1)...(19): siRNA sense strand
gcguaagcgaaaacaguaa

SEQ ID NO: 2541140 - RNA, 19 nt, Homo sapiens
  misc_RNA (1)...(19): siRNA sense strand
ggaaagauggauauggaag

SEQ ID NO: 2541141 - RNA, 19 nt, Homo sapiens
  misc_RNA (1)...(19): siRNA sense strand
gaaucagagcguaagcgaa

SEQ ID NO: 2541142 - RNA, 19 nt, Homo sapiens
  misc_RNA (1)...(19): siRNA sense strand
guuaaaguugacaggauca

SEQ ID NO: 2541143 - RNA, 19 nt, Homo sapiens
  misc_RNA (1)...(19): siRNA sense strand
gauggauauggaagaaauu

SEQ ID NO: 2541144 - RNA, 19 nt, Homo sapiens
  misc_RNA (1)...(19): siRNA sense strand
acguuguccuagaugcaaa

SEQ ID NO: 2541145 - RNA, 19 nt, Homo sapiens
  misc_RNA (1)...(19): siRNA sense strand
cugcaguagagauguaaaa

SEQ ID NO: 2541146 - RNA, 19 nt, Homo sapiens
  misc_RNA (1)...(19): siRNA sense strand
agagaagcaacaccagaaa

SEQ ID NO: 2541147 - RNA, 19 nt, Homo sapiens
  misc_RNA (1)...(19): siRNA sense strand
cuucaaagaugucggacug

SEQ ID NO: 2541148 - RNA, 19 nt, Homo sapiens
  misc_RNA (1)...(19): siRNA sense strand
cuuuaugaaugaaccaaca

SEQ ID NO: 2541149 - RNA, 19 nt, Homo sapiens
  misc_RNA (1)...(19): siRNA sense strand
uccagauuaccaagagaaa

SEQ ID NO: 2541150 - RNA, 19 nt, Homo sapiens
  misc_RNA (1)...(19): siRNA sense strand
guauuaaugucuaagcugu

SEQ ID NO: 2541151 - RNA, 19 nt, Homo sapiens
  misc_RNA (1)...(19): siRNA sense strand
aggaaagauggauauggaa

SEQ ID NO: 2541152 - RNA, 19 nt, Homo sapiens
  misc_RNA (1)...(19): siRNA sense strand
gaguaaggcgcgagcggaa

SEQ ID NO: 2541153 - RNA, 19 nt, Homo sapiens
  misc_RNA (1)...(19): siRNA sense strand
agaucagcccggaggaaga

SEQ ID NO: 2541154 - RNA, 19 nt, Homo sapiens
  misc_RNA (1)...(19): siRNA sense strand
agauugaggagcugcagaa

SEQ ID NO: 2541155 - RNA, 19 nt, Homo sapiens
  misc_RNA (1)...(19): siRNA sense strand
cgucgaaggccuugugaac

SEQ ID NO: 2541156 - RNA, 19 nt, Homo sapiens
  misc_RNA (1)...(19): siRNA sense strand
acaaacuggaagaugagaa

SEQ ID NO: 2541157 - RNA, 19 nt, Homo sapiens
  misc_RNA (1)...(19): siRNA sense strand
gccuagagcuggugcugga

SEQ ID NO: 2541158 - RNA, 19 nt, Homo sapiens
  misc_RNA (1)...(19): siRNA sense strand
ggaggaaggaacugaccga

SEQ ID NO: 2541159 - RNA, 19 nt, Homo sapiens
  misc_RNA (1)...(19): siRNA sense strand
agacugacaaacuggaaga

SEQ ID NO: 2541160 - RNA, 19 nt, Homo sapiens
  misc_RNA (1)...(19): siRNA sense strand
aaucugggcugcagcgaga

SEQ ID NO: 2541161 - RNA, 19 nt, Homo sapiens
  misc_RNA (1)...(19): siRNA sense strand
agacaaacgcauuggcuau

SEQ ID NO: 2541162 - RNA, 19 nt, Homo sapiens
  misc_RNA (1)...(19): siRNA sense strand
gugaagaggaagagccuau

SEQ ID NO: 2541163 - RNA, 19 nt, Homo sapiens
  misc_RNA (1)...(19): siRNA sense strand
aggcaugaugaaagaauua

SEQ ID NO: 2541164 - RNA, 19 nt, Homo sapiens
  misc_RNA (1)...(19): siRNA sense strand
agacaaauggagagacaga

SEQ ID NO: 2541165 - RNA, 19 nt, Homo sapiens
  misc_RNA (1)...(19): siRNA sense strand
gcagagaucuugcaggaga

SEQ ID NO: 2541166 - RNA, 19 nt, Homo sapiens
  misc_RNA (1)...(19): siRNA sense strand
acgaaaugaugaugauuca

SEQ ID NO: 2541167 - RNA, 19 nt, Homo sapiens
  misc_RNA (1)...(19): siRNA sense strand
agaucuugcaggagaggua

SEQ ID NO: 2541168 - RNA, 19 nt, Homo sapiens
  misc_RNA (1)...(19): siRNA sense strand
caggagagguagagaagcu

SEQ ID NO: 2541169 - RNA, 19 nt, Homo sapiens
  misc_RNA (1)...(19): siRNA sense strand
gggaauaauauccgaggca

SEQ ID NO: 2541170 - RNA, 19 nt, Homo sapiens
  misc_RNA (1)...(19): siRNA sense strand
ggauauuaagucagagagu

SEQ ID NO: 2541171 - RNA, 19 nt, Homo sapiens
  misc_RNA (1)...(19): siRNA sense strand
cggaucaagcuuacauaua

SEQ ID NO: 2541172 - RNA, 19 nt, Homo sapiens
  misc_RNA (1)...(19): siRNA sense strand
cagcauugucccagcauuu

SEQ ID NO: 2541173 - RNA, 19 nt, Homo sapiens
  misc_RNA (1)...(19): siRNA sense strand
cugcaguaccaaagacauu

SEQ ID NO: 2541174 - RNA, 19 nt, Homo sapiens
  misc_RNA (1)...(19): siRNA sense strand
uggccagugugaagaggaa

SEQ ID NO: 2541175 - RNA, 19 nt, Homo sapiens
  misc_RNA (1)...(19): siRNA sense strand
cugcccuacuugagagaau

SEQ ID NO: 2541176 - RNA, 19 nt, Homo sapiens
  misc_RNA (1)...(19): siRNA sense strand
guugggaggaaaugacaua

SEQ ID NO: 2541177 - RNA, 19 nt, Homo sapiens
  misc_RNA (1)...(19): siRNA sense strand
gaauaauauccgaggcaug

SEQ ID NO: 2541178 - RNA, 19 nt, Homo sapiens
  misc_RNA (1)...(19): siRNA sense strand
ccaucacagcauacaguaa

SEQ ID NO: 2541179 - RNA, 19 nt, Homo sapiens
  misc_RNA (1)...(19): siRNA sense strand
cagacaaacgcauuggcua

SEQ ID NO: 2541180 - RNA, 19 nt, Homo sapiens
  misc_RNA (1)...(19): siRNA sense strand
uguaacagugauaacgaua

SEQ ID NO: 2541181 - RNA, 19 nt, Homo sapiens
  misc_RNA (1)...(19): siRNA sense strand
acgagaaaugauccagaaa

SEQ ID NO: 2541182 - RNA, 19 nt, Homo sapiens
  misc_RNA (1)...(19): siRNA sense strand
agugaagcuaugaaugaua

SEQ ID NO: 2541183 - RNA, 19 nt, Homo sapiens
  misc_RNA (1)...(19): siRNA sense strand
aggugaauauggugaucuu

SEQ ID NO: 2541184 - RNA, 19 nt, Homo sapiens
  misc_RNA (1)...(19): siRNA sense strand
cugguaaaugggaauaaua

SEQ ID NO: 2541185 - RNA, 19 nt, Homo sapiens
  misc_RNA (1)...(19): siRNA sense strand
ccagaaagaaugugcugca

SEQ ID NO: 2541186 - RNA, 19 nt, Homo sapiens
  misc_RNA (1)...(19): siRNA sense strand
agcagagggcaguagaaua

SEQ ID NO: 2541187 - RNA, 19 nt, Homo sapiens
  misc_RNA (1)...(19): siRNA sense strand
ccacaugaggucugcccua

SEQ ID NO: 2541188 - RNA, 19 nt, Homo sapiens
  misc_RNA (1)...(19): siRNA sense strand
cugaagaacgagaaaugau

SEQ ID NO: 2541189 - RNA, 19 nt, Homo sapiens
  misc_RNA (1)...(19): siRNA sense strand
cuguaaaccgaauuaagaa

SEQ ID NO: 2541190 - RNA, 19 nt, Homo sapiens
  misc_RNA (1)...(19): siRNA sense strand
cggauauucaccagaacau

SEQ ID NO: 2541191 - RNA, 19 nt, Homo sapiens
  misc_RNA (1)...(19): siRNA sense strand
agcaauucuuggugauuau

SEQ ID NO: 2541192 - RNA, 19 nt, Homo sapiens
  misc_RNA (1)...(19): siRNA sense strand
agaauggcuugaagauaga

SEQ ID NO: 2541193 - RNA, 19 nt, Homo sapiens
  misc_RNA (1)...(19): siRNA sense strand
cuaauaguguggagaugca

SEQ ID NO: 2541194 - RNA, 19 nt, Homo sapiens
  misc_RNA (1)...(19): siRNA sense strand
cagaaaugugugagcgaag

SEQ ID NO: 2541195 - RNA, 19 nt, Homo sapiens
  misc_RNA (1)...(19): siRNA sense strand
aggacgaaaugaugaugau

SEQ ID NO: 2541196 - RNA, 19 nt, Homo sapiens
  misc_RNA (1)...(19): siRNA sense strand
uggauuuguugggaggaaa

SEQ ID NO: 2541197 - RNA, 19 nt, Homo sapiens
  misc_RNA (1)...(19): siRNA sense strand
ugauauugcugcaggcauc

SEQ ID NO: 2541198 - RNA, 19 nt, Homo sapiens
  misc_RNA (1)...(19): siRNA sense strand
aaacgauggcauauagaca

SEQ ID NO: 2541199 - RNA, 19 nt, Homo sapiens
  misc_RNA (1)...(19): siRNA sense strand
agaaagaaugugcugcaau

SEQ ID NO: 2541200 - RNA, 19 nt, Homo sapiens
  misc_RNA (1)...(19): siRNA sense strand
guguggagaugcaugccua

SEQ ID NO: 2541201 - RNA, 19 nt, Homo sapiens
  misc_RNA (1)...(19): siRNA sense strand
ggaugaaguguuggauauu

SEQ ID NO: 2541202 - RNA, 19 nt, Homo sapiens
  misc_RNA (1)...(19): siRNA sense strand
aguaagaauggcuugaaga

SEQ ID NO: 2541203 - RNA, 19 nt, Homo sapiens
  misc_RNA (1)...(19): siRNA sense strand
cuccaacagcacagagcua

SEQ ID NO: 2541204 - RNA, 19 nt, Homo sapiens
  misc_RNA (1)...(19): siRNA sense strand
agaagcaacagcugcgaau

SEQ ID NO: 2541205 - RNA, 19 nt, Homo sapiens
  misc_RNA (1)...(19): siRNA sense strand
agccagaauuuaaagcaga

SEQ ID NO: 2541206 - RNA, 19 nt, Homo sapiens
  misc_RNA (1)...(19): siRNA sense strand
aagcagcauugauguggaa

SEQ ID NO: 2541207 - RNA, 19 nt, Homo sapiens
  misc_RNA (1)...(19): siRNA sense strand
aacccaagcugaagaacga

SEQ ID NO: 2541208 - RNA, 19 nt, Homo sapiens
  misc_RNA (1)...(19): siRNA sense strand
aaguuauguucgugaugau

SEQ ID NO: 2541209 - RNA, 19 nt, Homo sapiens
  misc_RNA (1)...(19): siRNA sense strand
ccgaauuaagaaagugguu

SEQ ID NO: 2541210 - RNA, 19 nt, Homo sapiens
  misc_RNA (1)...(19): siRNA sense strand
ccaacagcacagagcuaga

SEQ ID NO: 2541211 - RNA, 19 nt, Homo sapiens
  misc_RNA (1)...(19): siRNA sense strand
uugcaggagagguagagaa

SEQ ID NO: 2541212 - RNA, 19 nt, Homo sapiens
  misc_RNA (1)...(19): siRNA sense strand
guagagaagcuccugaaaa

SEQ ID NO: 2541213 - RNA, 19 nt, Homo sapiens
  misc_RNA (1)...(19): siRNA sense strand
ccuuccaaacgauggcaua

SEQ ID NO: 2541214 - RNA, 19 nt, Homo sapiens
  misc_RNA (1)...(19): siRNA sense strand
cagaaagaaugugcugcaa

SEQ ID NO: 2541215 - RNA, 19 nt, Homo sapiens
  misc_RNA (1)...(19): siRNA sense strand
gguagagaagcuccugaaa

SEQ ID NO: 2541216 - RNA, 19 nt, Homo sapiens
  misc_RNA (1)...(19): siRNA sense strand
guauaggugaauaugguga

SEQ ID NO: 2541217 - RNA, 19 nt, Homo sapiens
  misc_RNA (1)...(19): siRNA sense strand
gugcagacaaauggagaga

SEQ ID NO: 2541218 - RNA, 19 nt, Homo sapiens
  misc_RNA (1)...(19): siRNA sense strand
caagcugaagaacgagaaa

SEQ ID NO: 2541219 - RNA, 19 nt, Homo sapiens
  misc_RNA (1)...(19): siRNA sense strand
ggacaguuggagugccuca

SEQ ID NO: 2541220 - RNA, 19 nt, Homo sapiens
  misc_RNA (1)...(19): siRNA sense strand
cgaggcaugaugaaagaau

SEQ ID NO: 2541221 - RNA, 19 nt, Homo sapiens
  misc_RNA (1)...(19): siRNA sense strand
cagaggagcuggaggagga

SEQ ID NO: 2541222 - RNA, 19 nt, Homo sapiens
  misc_RNA (1)...(19): siRNA sense strand
cugcagaaggagaaggaga

SEQ ID NO: 2541223 - RNA, 19 nt, Homo sapiens
  misc_RNA (1)...(19): siRNA sense strand
cagagaagcugcaggcgga

SEQ ID NO: 2541224 - RNA, 19 nt, Homo sapiens
  misc_RNA (1)...(19): siRNA sense strand
agacagaggagcuggagga

SEQ ID NO: 2541225 - RNA, 19 nt, Homo sapiens
  misc_RNA (1)...(19): siRNA sense strand
ugcagaaggagaaggagaa

SEQ ID NO: 2541226 - RNA, 19 nt, Homo sapiens
  misc_RNA (1)...(19): siRNA sense strand
cagcagaaauuccggguag

SEQ ID NO: 2541227 - RNA, 19 nt, Homo sapiens
  misc_RNA (1)...(19): siRNA sense strand
aggagcuggaggaggagaa

SEQ ID NO: 2541228 - RNA, 19 nt, Homo sapiens
  misc_RNA (1)...(19): siRNA sense strand
aguucauguugguggcuca

SEQ ID NO: 2541229 - RNA, 19 nt, Homo sapiens
  misc_RNA (1)...(19): siRNA sense strand
agaaggagaaggagaagcu

SEQ ID NO: 2541230 - RNA, 19 nt, Homo sapiens
  misc_RNA (1)...(19): siRNA sense strand
gggaacaggucgacgggaa

SEQ ID NO: 2541231 - RNA, 19 nt, Homo sapiens
  misc_RNA (1)...(19): siRNA sense strand
ggauauaaguuucugggaa

SEQ ID NO: 2541232 - RNA, 19 nt, Homo sapiens
  misc_RNA (1)...(19): siRNA sense strand
ugaacaaaguugaaggaga

SEQ ID NO: 2541233 - RNA, 19 nt, Homo sapiens
  misc_RNA (1)...(19): siRNA sense strand
gaacaaaguugaaggagac

SEQ ID NO: 2541234 - RNA, 19 nt, Homo sapiens
  misc_RNA (1)...(19): siRNA sense strand
caucaaugagagaggugaa

SEQ ID NO: 2541235 - RNA, 19 nt, Homo sapiens
  misc_RNA (1)...(19): siRNA sense strand
cggagugaaggaaggauua

SEQ ID NO: 2541236 - RNA, 19 nt, Homo sapiens
  misc_RNA (1)...(19): siRNA sense strand
ucgaagaguacuacaggaa

SEQ ID NO: 2541237 - RNA, 19 nt, Homo sapiens
  misc_RNA (1)...(19): siRNA sense strand
cagaaacaucaaugagaga

SEQ ID NO: 2541238 - RNA, 19 nt, Homo sapiens
  misc_RNA (1)...(19): siRNA sense strand
ugaaagucgaagaguacua

SEQ ID NO: 2541239 - RNA, 19 nt, Homo sapiens
  misc_RNA (1)...(19): siRNA sense strand
cuuaaaucauguucgacaa

SEQ ID NO: 2541240 - RNA, 19 nt, Homo sapiens
  misc_RNA (1)...(19): siRNA sense strand
ccaugauuaccuaggacaa

SEQ ID NO: 2541241 - RNA, 19 nt, Homo sapiens
  misc_RNA (1)...(19): siRNA sense strand
ugacauuaauuguuggcau

SEQ ID NO: 2541242 - RNA, 19 nt, Homo sapiens
  misc_RNA (1)...(19): siRNA sense strand
gcggagugaaggaaggauu

SEQ ID NO: 2541243 - RNA, 19 nt, Homo sapiens
  misc_RNA (1)...(19): siRNA sense strand
gcuagaacuuggugacacu

SEQ ID NO: 2541244 - RNA, 19 nt, Homo sapiens
  misc_RNA (1)...(19): siRNA sense strand
gugaagccaucgagcaaaa

SEQ ID NO: 2541245 - RNA, 19 nt, Homo sapiens
  misc_RNA (1)...(19): siRNA sense strand
ucacacaagcugaagguca

SEQ ID NO: 2541246 - RNA, 19 nt, Homo sapiens
  misc_RNA (1)...(19): siRNA sense strand
auucagauacccagagaga

SEQ ID NO: 2541247 - RNA, 19 nt, Homo sapiens
  misc_RNA (1)...(19): siRNA sense strand
gguuccaccuugucguaaa

SEQ ID NO: 2541248 - RNA, 19 nt, Homo sapiens
  misc_RNA (1)...(19): siRNA sense strand
ccuuaaaucauguucgaca

SEQ ID NO: 2541249 - RNA, 19 nt, Homo sapiens
  misc_RNA (1)...(19): siRNA sense strand
agugaaagucgaagaguac

SEQ ID NO: 2541250 - RNA, 19 nt, Homo sapiens
  misc_RNA (1)...(19): siRNA sense strand
ggugguugucauucagaua

SEQ ID NO: 2541251 - RNA, 19 nt, Homo sapiens
  misc_RNA (1)...(19): siRNA sense strand
uugugaagccaucgagcaa

SEQ ID NO: 2541252 - RNA, 19 nt, Homo sapiens
  misc_RNA (1)...(19): siRNA sense strand
cacacaagcugaaggucau

SEQ ID NO: 2541253 - RNA, 19 nt, Homo sapiens
  misc_RNA (1)...(19): siRNA sense strand
agcaaaagcucgaccagaa

SEQ ID NO: 2541254 - RNA, 19 nt, Homo sapiens
  misc_RNA (1)...(19): siRNA sense strand
aggcagaugagaagcuaga

SEQ ID NO: 2541255 - RNA, 19 nt, Homo sapiens
  misc_RNA (1)...(19): siRNA sense strand
gcugaaggucauuuccaaa

SEQ ID NO: 2541256 - RNA, 19 nt, Homo sapiens
  misc_RNA (1)...(19): siRNA sense strand
ugucguaaacuuugugaga

SEQ ID NO: 2541257 - RNA, 19 nt, Homo sapiens
  misc_RNA (1)...(19): siRNA sense strand
ggcacugugugguggguga

SEQ ID NO: 2541258 - RNA, 19 nt, Homo sapiens
  misc_RNA (1)...(19): siRNA sense strand
gcacagaaugggcuggguu

SEQ ID NO: 2541259 - RNA, 19 nt, Homo sapiens
  misc_RNA (1)...(19): siRNA sense strand
aagugaugagcuagaguuu

SEQ ID NO: 2541260 - RNA, 19 nt, Homo sapiens
  misc_RNA (1)...(19): siRNA sense strand
agagauccaaucagugaaa

SEQ ID NO: 2541261 - RNA, 19 nt, Homo sapiens
  misc_RNA (1)...(19): siRNA sense strand
ggagcuugaaugugacaga

SEQ ID NO: 2541262 - RNA, 19 nt, Homo sapiens
  misc_RNA (1)...(19): siRNA sense strand
agaugagaagcuagaacuu

SEQ ID NO: 2541263 - RNA, 19 nt, Homo sapiens
  misc_RNA (1)...(19): siRNA sense strand
ugagagaggugaaagcgga

SEQ ID NO: 2541264 - RNA, 19 nt, Homo sapiens
  misc_RNA (1)...(19): siRNA sense strand
gguuaagagaacaggacug

SEQ ID NO: 2541265 - RNA, 19 nt, Homo sapiens
  misc_RNA (1)...(19): siRNA sense strand
ucagaagaaaacagaacaa

SEQ ID NO: 2541266 - RNA, 19 nt, Homo sapiens
  misc_RNA (1)...(19): siRNA sense strand
aaggauuaguccaaagagu

SEQ ID NO: 2541267 - RNA, 19 nt, Homo sapiens
  misc_RNA (1)...(19): siRNA sense strand
gcaagaaaucaguggcuca

SEQ ID NO: 2541268 - RNA, 19 nt, Homo sapiens
  misc_RNA (1)...(19): siRNA sense strand
gggccauguuguugggaca

SEQ ID NO: 2541269 - RNA, 19 nt, Homo sapiens
  misc_RNA (1)...(19): siRNA sense strand
gcaugaugaaagacugaaa

SEQ ID NO: 2541270 - RNA, 19 nt, Homo sapiens
  misc_RNA (1)...(19): siRNA sense strand
agaacaaauccguggaagu

SEQ ID NO: 2541271 - RNA, 19 nt, Homo sapiens
  misc_RNA (1)...(19): siRNA sense strand
cucuauacaaugagguuaa

SEQ ID NO: 2541272 - RNA, 19 nt, Homo sapiens
  misc_RNA (1)...(19): siRNA sense strand
uguuguugggacagagaua

SEQ ID NO: 2541273 - RNA, 19 nt, Homo sapiens
  misc_RNA (1)...(19): siRNA sense strand
gucuaguacaggagaauau

SEQ ID NO: 2541274 - RNA, 19 nt, Homo sapiens
  misc_RNA (1)...(19): siRNA sense strand
ccacauaugucaaccggga

SEQ ID NO: 2541275 - RNA, 19 nt, Homo sapiens
  misc_RNA (1)...(19): siRNA sense strand
ccauauucaaucuggucua

SEQ ID NO: 2541276 - RNA, 19 nt, Homo sapiens
  misc_RNA (1)...(19): siRNA sense strand
aagugaagacugacaucua

SEQ ID NO: 2541277 - RNA, 19 nt, Homo sapiens
  misc_RNA (1)...(19): siRNA sense strand
acuuccaucucaagcgaaa

SEQ ID NO: 2541278 - RNA, 19 nt, Homo sapiens
  misc_RNA (1)...(19): siRNA sense strand
cuggagaugaagaagaaaa

SEQ ID NO: 2541279 - RNA, 19 nt, Homo sapiens
  misc_RNA (1)...(19): siRNA sense strand
ccuacaacagugucagcaa

SEQ ID NO: 2541280 - RNA, 19 nt, Homo sapiens
  misc_RNA (1)...(19): siRNA sense strand
cuuccacaauggcaagaaa

SEQ ID NO: 2541281 - RNA, 19 nt, Homo sapiens
  misc_RNA (1)...(19): siRNA sense strand
gguuaacaauucaugcuga

SEQ ID NO: 2541282 - RNA, 19 nt, Homo sapiens
  misc_RNA (1)...(19): siRNA sense strand
ugcucagauugguggacaa

SEQ ID NO: 2541283 - RNA, 19 nt, Homo sapiens
  misc_RNA (1)...(19): siRNA sense strand
acuuugugauccagaccua

SEQ ID NO: 2541284 - RNA, 19 nt, Homo sapiens
  misc_RNA (1)...(19): siRNA sense strand
cuguuaugccuuuguauuu

SEQ ID NO: 2541285 - RNA, 19 nt, Homo sapiens
  misc_RNA (1)...(19): siRNA sense strand
ggacucucggaaagaacaa

SEQ ID NO: 2541286 - RNA, 19 nt, Homo sapiens
  misc_RNA (1)...(19): siRNA sense strand
ccggucuaguacaggagaa

SEQ ID NO: 2541287 - RNA, 19 nt, Homo sapiens
  misc_RNA (1)...(19): siRNA sense strand
ccaugaccaccuugaguau

SEQ ID NO: 2541288 - RNA, 19 nt, Homo sapiens
  misc_RNA (1)...(19): siRNA sense strand
aguaucagugccagaaauu

SEQ ID NO: 2541289 - RNA, 19 nt, Homo sapiens
  misc_RNA (1)...(19): siRNA sense strand
acugaaguuuggaagcuau

SEQ ID NO: 2541290 - RNA, 19 nt, Homo sapiens
  misc_RNA (1)...(19): siRNA sense strand
agucagcuaucaagggcau

SEQ ID NO: 2541291 - RNA, 19 nt, Homo sapiens
  misc_RNA (1)...(19): siRNA sense strand
ggaaagagacauuuagcca

SEQ ID NO: 2541292 - RNA, 19 nt, Homo sapiens
  misc_RNA (1)...(19): siRNA sense strand
agaagaaauguuaguggaa

SEQ ID NO: 2541293 - RNA, 19 nt, Homo sapiens
  misc_RNA (1)...(19): siRNA sense strand
gguaaaagaaagacugcaa

SEQ ID NO: 2541294 - RNA, 19 nt, Homo sapiens
  misc_RNA (1)...(19): siRNA sense strand
aagcaaggccucuggaaaa

SEQ ID NO: 2541295 - RNA, 19 nt, Homo sapiens
  misc_RNA (1)...(19): siRNA sense strand
agauauugacagagcuauu

SEQ ID NO: 2541296 - RNA, 19 nt, Homo sapiens
  misc_RNA (1)...(19): siRNA sense strand
gagcaauacgacuggcaau

SEQ ID NO: 2541297 - RNA, 19 nt, Homo sapiens
  misc_RNA (1)...(19): siRNA sense strand
aggacgaggucgaguggau

SEQ ID NO: 2541298 - RNA, 19 nt, Homo sapiens
  misc_RNA (1)...(19): siRNA sense strand
agaaaguuuacguggaaga

SEQ ID NO: 2541299 - RNA, 19 nt, Homo sapiens
  misc_RNA (1)...(19): siRNA sense strand
guguggugcugcugaggaa

SEQ ID NO: 2541300 - RNA, 19 nt, Homo sapiens
  misc_RNA (1)...(19): siRNA sense strand
uuuccaagacaaagagcaa

SEQ ID NO: 2541301 - RNA, 19 nt, Homo sapiens
  misc_RNA (1)...(19): siRNA sense strand
uaaacauggaaguggaaga

SEQ ID NO: 2541302 - RNA, 19 nt, Homo sapiens
  misc_RNA (1)...(19): siRNA sense strand
gaaagagacauuuagccaa

SEQ ID NO: 2541303 - RNA, 19 nt, Homo sapiens
  misc_RNA (1)...(19): siRNA sense strand
uagccaacaugaugggaga

SEQ ID NO: 2541304 - RNA, 19 nt, Homo sapiens
  misc_RNA (1)...(19): siRNA sense strand
guucaacauaggaaagaga

SEQ ID NO: 2541305 - RNA, 19 nt, Homo sapiens
  misc_RNA (1)...(19): siRNA sense strand
uguacaguaugaugagcaa

SEQ ID NO: 2541306 - RNA, 19 nt, Homo sapiens
  misc_RNA (1)...(19): siRNA sense strand
ucaacauaggaaagagaca

SEQ ID NO: 2541307 - RNA, 19 nt, Homo sapiens
  misc_RNA (1)...(19): siRNA sense strand
ugauuaaggaggaacuaga

SEQ ID NO: 2541308 - RNA, 19 nt, Homo sapiens
  misc_RNA (1)...(19): siRNA sense strand
uggaaguggaagaauaaaa

SEQ ID NO: 2541309 - RNA, 19 nt, Homo sapiens
  misc_RNA (1)...(19): siRNA sense strand
gggagaagauggccgucca

SEQ ID NO: 2541310 - RNA, 19 nt, Homo sapiens
  misc_RNA (1)...(19): siRNA sense strand
aggaagaauuugugcagag

SEQ ID NO: 2541311 - RNA, 19 nt, Homo sapiens
  misc_RNA (1)...(19): siRNA sense strand
uuauaaacauggaagugga

SEQ ID NO: 2541312 - RNA, 19 nt, Homo sapiens
  misc_RNA (1)...(19): siRNA sense strand
aguaugaugagcaaggaau

SEQ ID NO: 2541313 - RNA, 19 nt, Homo sapiens
  misc_RNA (1)...(19): siRNA sense strand
uagaagaaauguuagugga

SEQ ID NO: 2541314 - RNA, 19 nt, Homo sapiens
  misc_RNA (1)...(19): siRNA sense strand
uuguugaccggcugggaaa

SEQ ID NO: 2541315 - RNA, 19 nt, Homo sapiens
  misc_RNA (1)...(19): siRNA sense strand
caguaugaugagcaaggaa

SEQ ID NO: 2541316 - RNA, 19 nt, Homo sapiens
  misc_RNA (1)...(19): siRNA sense strand
cgaucacacaggacagaga

SEQ ID NO: 2541317 - RNA, 19 nt, Homo sapiens
  misc_RNA (1)...(19): siRNA sense strand
ugcaaaagcagaagcaauu

SEQ ID NO: 2541318 - RNA, 19 nt, Homo sapiens
  misc_RNA (1)...(19): siRNA sense strand
ucaccgaggacgaggucga

SEQ ID NO: 2541319 - RNA, 19 nt, Homo sapiens
  misc_RNA (1)...(19): siRNA sense strand
acggaagaagccaggccaa

SEQ ID NO: 2541320 - RNA, 19 nt, Homo sapiens
  misc_RNA (1)...(19): siRNA sense strand
agauauuaaggcuaagaca

SEQ ID NO: 2541321 - RNA, 19 nt, Homo sapiens
  misc_RNA (1)...(19): siRNA sense strand
ccaggaagguggaggagga

SEQ ID NO: 2541322 - RNA, 19 nt, Homo sapiens
  misc_RNA (1)...(19): siRNA sense strand
gcuguuucauugaggacau

SEQ ID NO: 2541323 - RNA, 19 nt, Homo sapiens
  misc_RNA (1)...(19): siRNA sense strand
uggccgacaaggugaggaa

SEQ ID NO: 2541324 - RNA, 19 nt, Homo sapiens
  misc_RNA (1)...(19): siRNA sense strand
aaagagagcaagaagagga

SEQ ID NO: 2541325 - RNA, 19 nt, Homo sapiens
  misc_RNA (1)...(19): siRNA sense strand
cccaaagagagcaagaaga

SEQ ID NO: 2541326 - RNA, 19 nt, Homo sapiens
  misc_RNA (1)...(19): siRNA sense strand
aagagagcaagaagaggaa

SEQ ID NO: 2541327 - RNA, 19 nt, Homo sapiens
  misc_RNA (1)...(19): siRNA sense strand
cggaucugguggaacgaga

SEQ ID NO: 2541328 - RNA, 19 nt, Homo sapiens
  misc_RNA (1)...(19): siRNA sense strand
gcaagaagaggaagcugga

SEQ ID NO: 2541329 - RNA, 19 nt, Homo sapiens
  misc_RNA (1)...(19): siRNA sense strand
agaacuaccagaagcgcuu

SEQ ID NO: 2541330 - RNA, 19 nt, Homo sapiens
  misc_RNA (1)...(19): siRNA sense strand
augacaggguccagaaacu

SEQ ID NO: 2541331 - RNA, 19 nt, Homo sapiens
  misc_RNA (1)...(19): siRNA sense strand
gcagccaccuucagggcaa

SEQ ID NO: 2541332 - RNA, 19 nt, Homo sapiens
  misc_RNA (1)...(19): siRNA sense strand
ccaugaguguggaucgcua

SEQ ID NO: 2541333 - RNA, 19 nt, Homo sapiens
  misc_RNA (1)...(19): siRNA sense strand
cggacauccuccugggcuu

SEQ ID NO: 2541334 - RNA, 19 nt, Homo sapiens
  misc_RNA (1)...(19): siRNA sense strand
augaagagaucgagugccu

SEQ ID NO: 2541335 - RNA, 19 nt, Homo sapiens
  misc_RNA (1)...(19): siRNA sense strand
gaugagaacuucaaggccu

SEQ ID NO: 2541336 - RNA, 19 nt, Homo sapiens
  misc_RNA (1)...(19): siRNA sense strand
acgccuuccuggaugagaa

SEQ ID NO: 2541337 - RNA, 19 nt, Homo sapiens
  misc_RNA (1)...(19): siRNA sense strand
gcuucuggccguuugggaa

SEQ ID NO: 2541338 - RNA, 19 nt, Homo sapiens
  misc_RNA (1)...(19): siRNA sense strand
gcagccaccuucagggcaa

SEQ ID NO: 2541339 - RNA, 19 nt, Homo sapiens
  misc_RNA (1)...(19): siRNA sense strand
ccaugaguguggaucgcua

SEQ ID NO: 2541340 - RNA, 19 nt, Homo sapiens
  misc_RNA (1)...(19): siRNA sense strand
cggacauccuccugggcuu

SEQ ID NO: 2541341 - RNA, 19 nt, Homo sapiens
  misc_RNA (1)...(19): siRNA sense strand
augaagagaucgagugccu

SEQ ID NO: 2541342 - RNA, 19 nt, Homo sapiens
  misc_RNA (1)...(19): siRNA sense strand
gaugagaacuucaaggccu

SEQ ID NO: 2541343 - RNA, 19 nt, Homo sapiens
  misc_RNA (1)...(19): siRNA sense strand
acgccuuccuggaugagaa

SEQ ID NO: 2541344 - RNA, 19 nt, Homo sapiens
  misc_RNA (1)...(19): siRNA sense strand
gcuucuggccguuugggaa

SEQ ID NO: 2541345 - RNA, 19 nt, Homo sapiens
  misc_RNA (1)...(19): siRNA sense strand
aguuaaaacaagagggaaa

SEQ ID NO: 2541346 - RNA, 19 nt, Homo sapiens
  misc_RNA (1)...(19): siRNA sense strand
gcaaagacacagagcaaaa

SEQ ID NO: 2541347 - RNA, 19 nt, Homo sapiens
  misc_RNA (1)...(19): siRNA sense strand
ccuagaaguauuagaggaa

SEQ ID NO: 2541348 - RNA, 19 nt, Homo sapiens
  misc_RNA (1)...(19): siRNA sense strand
agaagagagacuaaagaaa

SEQ ID NO: 2541349 - RNA, 19 nt, Homo sapiens
  misc_RNA (1)...(19): siRNA sense strand
gcuuaaaguagaaagagaa

SEQ ID NO: 2541350 - RNA, 19 nt, Homo sapiens
  misc_RNA (1)...(19): siRNA sense strand
aggaagaguaugagguaga

SEQ ID NO: 2541351 - RNA, 19 nt, Homo sapiens
  misc_RNA (1)...(19): siRNA sense strand
agcgaaaguauguggaaua

SEQ ID NO: 2541352 - RNA, 19 nt, Homo sapiens
  misc_RNA (1)...(19): siRNA sense strand
uggaguaacccuagaagua

SEQ ID NO: 2541353 - RNA, 19 nt, Homo sapiens
  misc_RNA (1)...(19): siRNA sense strand
guaaaaggaaggaagaaaa

SEQ ID NO: 2541354 - RNA, 19 nt, Homo sapiens
  misc_RNA (1)...(19): siRNA sense strand
aagaagaugagcaaagaaa

SEQ ID NO: 2541355 - RNA, 19 nt, Homo sapiens
  misc_RNA (1)...(19): siRNA sense strand
cgaugaagaagaaggucaa

SEQ ID NO: 2541356 - RNA, 19 nt, Homo sapiens
  misc_RNA (1)...(19): siRNA sense strand
ggcuuaaaguagaaagaga

SEQ ID NO: 2541357 - RNA, 19 nt, Homo sapiens
  misc_RNA (1)...(19): siRNA sense strand
cugaagaagaagaggaagu

SEQ ID NO: 2541358 - RNA, 19 nt, Homo sapiens
  misc_RNA (1)...(19): siRNA sense strand
acguagaagagauggaaau

SEQ ID NO: 2541359 - RNA, 19 nt, Homo sapiens
  misc_RNA (1)...(19): siRNA sense strand
acugaaagaagaugagcaa

SEQ ID NO: 2541360 - RNA, 19 nt, Homo sapiens
  misc_RNA (1)...(19): siRNA sense strand
gugaugaagauguggaaga

SEQ ID NO: 2541361 - RNA, 19 nt, Homo sapiens
  misc_RNA (1)...(19): siRNA sense strand
cagauguauuuguggaauu

SEQ ID NO: 2541362 - RNA, 19 nt, Homo sapiens
  misc_RNA (1)...(19): siRNA sense strand
aguuauaggagcaaagcua

SEQ ID NO: 2541363 - RNA, 19 nt, Homo sapiens
  misc_RNA (1)...(19): siRNA sense strand
acauagagaaagugccuua

SEQ ID NO: 2541364 - RNA, 19 nt, Homo sapiens
  misc_RNA (1)...(19): siRNA sense strand
aggcaauagcugaagaaga

SEQ ID NO: 2541365 - RNA, 19 nt, Homo sapiens
  misc_RNA (1)...(19): siRNA sense strand
caaaagaagaugcagaaaa

SEQ ID NO: 2541366 - RNA, 19 nt, Homo sapiens
  misc_RNA (1)...(19): siRNA sense strand
gcaaaaggaauuagaucaa

SEQ ID NO: 2541367 - RNA, 19 nt, Homo sapiens
  misc_RNA (1)...(19): siRNA sense strand
auuagaaaguggacgguau

SEQ ID NO: 2541368 - RNA, 19 nt, Homo sapiens
  misc_RNA (1)...(19): siRNA sense strand
aggaagcucuuguaggaaa

SEQ ID NO: 2541369 - RNA, 19 nt, Homo sapiens
  misc_RNA (1)...(19): siRNA sense strand
ggaauuaaaagcagaacaa

SEQ ID NO: 2541370 - RNA, 19 nt, Homo sapiens
  misc_RNA (1)...(19): siRNA sense strand
auacuagcauugagagcaa

SEQ ID NO: 2541371 - RNA, 19 nt, Homo sapiens
  misc_RNA (1)...(19): siRNA sense strand
guugaagaagagagacuaa

SEQ ID NO: 2541372 - RNA, 19 nt, Homo sapiens
  misc_RNA (1)...(19): siRNA sense strand
aagcagaacaacaucgaaa

SEQ ID NO: 2541373 - RNA, 19 nt, Homo sapiens
  misc_RNA (1)...(19): siRNA sense strand
aggaagaaagggaagauuu

SEQ ID NO: 2541374 - RNA, 19 nt, Homo sapiens
  misc_RNA (1)...(19): siRNA sense strand
ggggaaaagaggacaaaau

SEQ ID NO: 2541375 - RNA, 19 nt, Homo sapiens
  misc_RNA (1)...(19): siRNA sense strand
gcaaagaaauucaacggca

SEQ ID NO: 2541376 - RNA, 19 nt, Homo sapiens
  misc_RNA (1)...(19): siRNA sense strand
gugauauggucuaaaucua

SEQ ID NO: 2541377 - RNA, 19 nt, Homo sapiens
  misc_RNA (1)...(19): siRNA sense strand
gcgaugaagaagaagguca

SEQ ID NO: 2541378 - RNA, 19 nt, Homo sapiens
  misc_RNA (1)...(19): siRNA sense strand
agguagaacaagaugaaga

SEQ ID NO: 2541379 - RNA, 19 nt, Homo sapiens
  misc_RNA (1)...(19): siRNA sense strand
ggaagaagcagcugccaga

SEQ ID NO: 2541380 - RNA, 19 nt, Homo sapiens
  misc_RNA (1)...(19): siRNA sense strand
uaacacaagugaagcaaaa

SEQ ID NO: 2541381 - RNA, 19 nt, Homo sapiens
  misc_RNA (1)...(19): siRNA sense strand
cguaaaaggaaggaagaaa

SEQ ID NO: 2541382 - RNA, 19 nt, Homo sapiens
  misc_RNA (1)...(19): siRNA sense strand
aaacaaggaaaaugggaua

SEQ ID NO: 2541383 - RNA, 19 nt, Homo sapiens
  misc_RNA (1)...(19): siRNA sense strand
aguaugagguagaacaaga

SEQ ID NO: 2541384 - RNA, 19 nt, Homo sapiens
  misc_RNA (1)...(19): siRNA sense strand
acacaaaucagccggagaa

SEQ ID NO: 2541385 - RNA, 19 nt, Homo sapiens
  misc_RNA (1)...(19): siRNA sense strand
agaagaggaaguagccaaa

SEQ ID NO: 2541386 - RNA, 19 nt, Homo sapiens
  misc_RNA (1)...(19): siRNA sense strand
acacagagcaaaaggaauu

SEQ ID NO: 2541387 - RNA, 19 nt, Homo sapiens
  misc_RNA (1)...(19): siRNA sense strand
ucuuaauucuagaggacau

SEQ ID NO: 2541388 - RNA, 19 nt, Homo sapiens
  misc_RNA (1)...(19): siRNA sense strand
caguaugggaggugaggau

SEQ ID NO: 2541389 - RNA, 19 nt, Homo sapiens
  misc_RNA (1)...(19): siRNA sense strand
gcuuaguccucguagaaaa

SEQ ID NO: 2541390 - RNA, 19 nt, Homo sapiens
  misc_RNA (1)...(19): siRNA sense strand
guagaaagagaaaaggaaa

SEQ ID NO: 2541391 - RNA, 19 nt, Homo sapiens
  misc_RNA (1)...(19): siRNA sense strand
cugcaaucuuccaggcaau

SEQ ID NO: 2541392 - RNA, 19 nt, Homo sapiens
  misc_RNA (1)...(19): siRNA sense strand
aagaagaggaaguagccaa

SEQ ID NO: 2541393 - RNA, 19 nt, Homo sapiens
  misc_RNA (1)...(19): siRNA sense strand
acuuaaggagcaagaacaa

SEQ ID NO: 2541394 - RNA, 19 nt, Homo sapiens
  misc_RNA (1)...(19): siRNA sense strand
gugaggaaaacaaggaaaa

SEQ ID NO: 2541395 - RNA, 19 nt, Homo sapiens
  misc_RNA (1)...(19): siRNA sense strand
agauggaaauugaugaaca

SEQ ID NO: 2541396 - RNA, 19 nt, Homo sapiens
  misc_RNA (1)...(19): siRNA sense strand
ucgaagaaacuguggaagu

SEQ ID NO: 2541397 - RNA, 19 nt, Homo sapiens
  misc_RNA (1)...(19): siRNA sense strand
ggaagcucuuguaggaaau

SEQ ID NO: 2541398 - RNA, 19 nt, Homo sapiens
  misc_RNA (1)...(19): siRNA sense strand
caucaagguuacagaucga

SEQ ID NO: 2541399 - RNA, 19 nt, Homo sapiens
  misc_RNA (1)...(19): siRNA sense strand
aaagaaaggcgaugcugaa

SEQ ID NO: 2541400 - RNA, 19 nt, Homo sapiens
  misc_RNA (1)...(19): siRNA sense strand
acaacaagaaccuggaaga

SEQ ID NO: 2541401 - RNA, 19 nt, Homo sapiens
  misc_RNA (1)...(19): siRNA sense strand
gaacaauggugcaagguug

SEQ ID NO: 2541402 - RNA, 19 nt, Homo sapiens
  misc_RNA (1)...(19): siRNA sense strand
agaaccaacaccagugaaa

SEQ ID NO: 2541403 - RNA, 19 nt, Homo sapiens
  misc_RNA (1)...(19): siRNA sense strand
auauauuacgacaggcaaa

SEQ ID NO: 2541404 - RNA, 19 nt, Homo sapiens
  misc_RNA (1)...(19): siRNA sense strand
ugaaagaagaugagcaaag

SEQ ID NO: 2541405 - RNA, 19 nt, Homo sapiens
  misc_RNA (1)...(19): siRNA sense strand
acaccaacgaaaagagaaa

SEQ ID NO: 2541406 - RNA, 19 nt, Homo sapiens
  misc_RNA (1)...(19): siRNA sense strand
gugaggaggaagaguauga

SEQ ID NO: 2541407 - RNA, 19 nt, Homo sapiens
  misc_RNA (1)...(19): siRNA sense strand
agagaaguuacgugaagaa

SEQ ID NO: 2541408 - RNA, 19 nt, Homo sapiens
  misc_RNA (1)...(19): siRNA sense strand
augaagacguagaagagau

SEQ ID NO: 2541409 - RNA, 19 nt, Homo sapiens
  misc_RNA (1)...(19): siRNA sense strand
ggaagaaagggaagauuuu

SEQ ID NO: 2541410 - RNA, 19 nt, Homo sapiens
  misc_RNA (1)...(19): siRNA sense strand
ugaaugaagacguagaaga

SEQ ID NO: 2541411 - RNA, 19 nt, Homo sapiens
  misc_RNA (1)...(19): siRNA sense strand
ggucauaguaaaagacaga

SEQ ID NO: 2541412 - RNA, 19 nt, Homo sapiens
  misc_RNA (1)...(19): siRNA sense strand
gaaagaaaggcgaugcuga

SEQ ID NO: 2541413 - RNA, 19 nt, Homo sapiens
  misc_RNA (1)...(19): siRNA sense strand
caaacgaggaagaccacaa

SEQ ID NO: 2541414 - RNA, 19 nt, Homo sapiens
  misc_RNA (1)...(19): siRNA sense strand
agagaaaaggaaagagaga

SEQ ID NO: 2541415 - RNA, 19 nt, Homo sapiens
  misc_RNA (1)...(19): siRNA sense strand
aguuaaaacaagagggaaa

SEQ ID NO: 2541416 - RNA, 19 nt, Homo sapiens
  misc_RNA (1)...(19): siRNA sense strand
gcaaagacacagagcaaaa

SEQ ID NO: 2541417 - RNA, 19 nt, Homo sapiens
  misc_RNA (1)...(19): siRNA sense strand
ccuagaaguauuagaggaa

SEQ ID NO: 2541418 - RNA, 19 nt, Homo sapiens
  misc_RNA (1)...(19): siRNA sense strand
agaagagagacuaaagaaa

SEQ ID NO: 2541419 - RNA, 19 nt, Homo sapiens
  misc_RNA (1)...(19): siRNA sense strand
gcuuaaaguagaaagagaa

SEQ ID NO: 2541420 - RNA, 19 nt, Homo sapiens
  misc_RNA (1)...(19): siRNA sense strand
aggaagaguaugagguaga

SEQ ID NO: 2541421 - RNA, 19 nt, Homo sapiens
  misc_RNA (1)...(19): siRNA sense strand
agcgaaaguauguggaaua

SEQ ID NO: 2541422 - RNA, 19 nt, Homo sapiens
  misc_RNA (1)...(19): siRNA sense strand
uggaguaacccuagaagua

SEQ ID NO: 2541423 - RNA, 19 nt, Homo sapiens
  misc_RNA (1)...(19): siRNA sense strand
guaaaaggaaggaagaaaa

SEQ ID NO: 2541424 - RNA, 19 nt, Homo sapiens
  misc_RNA (1)...(19): siRNA sense strand
aagaagaugagcaaagaaa

SEQ ID NO: 2541425 - RNA, 19 nt, Homo sapiens
  misc_RNA (1)...(19): siRNA sense strand
cgaugaagaagaaggucaa

SEQ ID NO: 2541426 - RNA, 19 nt, Homo sapiens
  misc_RNA (1)...(19): siRNA sense strand
ggcuuaaaguagaaagaga

SEQ ID NO: 2541427 - RNA, 19 nt, Homo sapiens
  misc_RNA (1)...(19): siRNA sense strand
cugaagaagaagaggaagu

SEQ ID NO: 2541428 - RNA, 19 nt, Homo sapiens
  misc_RNA (1)...(19): siRNA sense strand
acguagaagagauggaaau

SEQ ID NO: 2541429 - RNA, 19 nt, Homo sapiens
  misc_RNA (1)...(19): siRNA sense strand
acugaaagaagaugagcaa

SEQ ID NO: 2541430 - RNA, 19 nt, Homo sapiens
  misc_RNA (1)...(19): siRNA sense strand
gugaugaagauguggaaga

SEQ ID NO: 2541431 - RNA, 19 nt, Homo sapiens
  misc_RNA (1)...(19): siRNA sense strand
cagauguauuuguggaauu

SEQ ID NO: 2541432 - RNA, 19 nt, Homo sapiens
  misc_RNA (1)...(19): siRNA sense strand
aguuauaggagcaaagcua

SEQ ID NO: 2541433 - RNA, 19 nt, Homo sapiens
  misc_RNA (1)...(19): siRNA sense strand
acauagagaaagugccuua

SEQ ID NO: 2541434 - RNA, 19 nt, Homo sapiens
  misc_RNA (1)...(19): siRNA sense strand
aggcaauagcugaagaaga

SEQ ID NO: 2541435 - RNA, 19 nt, Homo sapiens
  misc_RNA (1)...(19): siRNA sense strand
caaaagaagaugcagaaaa

SEQ ID NO: 2541436 - RNA, 19 nt, Homo sapiens
  misc_RNA (1)...(19): siRNA sense strand
gcaaaaggaauuagaucaa

SEQ ID NO: 2541437 - RNA, 19 nt, Homo sapiens
  misc_RNA (1)...(19): siRNA sense strand
auuagaaaguggacgguau

SEQ ID NO: 2541438 - RNA, 19 nt, Homo sapiens
  misc_RNA (1)...(19): siRNA sense strand
aggaagcucuuguaggaaa

SEQ ID NO: 2541439 - RNA, 19 nt, Homo sapiens
  misc_RNA (1)...(19): siRNA sense strand
ggaauuaaaagcagaacaa

SEQ ID NO: 2541440 - RNA, 19 nt, Homo sapiens
  misc_RNA (1)...(19): siRNA sense strand
auacuagcauugagagcaa

SEQ ID NO: 2541441 - RNA, 19 nt, Homo sapiens
  misc_RNA (1)...(19): siRNA sense strand
guugaagaagagagacuaa

SEQ ID NO: 2541442 - RNA, 19 nt, Homo sapiens
  misc_RNA (1)...(19): siRNA sense strand
aagcagaacaacaucgaaa

SEQ ID NO: 2541443 - RNA, 19 nt, Homo sapiens
  misc_RNA (1)...(19): siRNA sense strand
aggaagaaagggaagauuu

SEQ ID NO: 2541444 - RNA, 19 nt, Homo sapiens
  misc_RNA (1)...(19): siRNA sense strand
ggggaaaagaggacaaaau

SEQ ID NO: 2541445 - RNA, 19 nt, Homo sapiens
  misc_RNA (1)...(19): siRNA sense strand
gcaaagaaauucaacggca

SEQ ID NO: 2541446 - RNA, 19 nt, Homo sapiens
  misc_RNA (1)...(19): siRNA sense strand
gugauauggucuaaaucua

SEQ ID NO: 2541447 - RNA, 19 nt, Homo sapiens
  misc_RNA (1)...(19): siRNA sense strand
gcgaugaagaagaagguca

SEQ ID NO: 2541448 - RNA, 19 nt, Homo sapiens
  misc_RNA (1)...(19): siRNA sense strand
agguagaacaagaugaaga

SEQ ID NO: 2541449 - RNA, 19 nt, Homo sapiens
  misc_RNA (1)...(19): siRNA sense strand
ggaagaagcagcugccaga

SEQ ID NO: 2541450 - RNA, 19 nt, Homo sapiens
  misc_RNA (1)...(19): siRNA sense strand
uaacacaagugaagcaaaa

SEQ ID NO: 2541451 - RNA, 19 nt, Homo sapiens
  misc_RNA (1)...(19): siRNA sense strand
cguaaaaggaaggaagaaa

SEQ ID NO: 2541452 - RNA, 19 nt, Homo sapiens
  misc_RNA (1)...(19): siRNA sense strand
aaacaaggaaaaugggaua

SEQ ID NO: 2541453 - RNA, 19 nt, Homo sapiens
  misc_RNA (1)...(19): siRNA sense strand
aguaugagguagaacaaga

SEQ ID NO: 2541454 - RNA, 19 nt, Homo sapiens
  misc_RNA (1)...(19): siRNA sense strand
acacaaaucagccggagaa

SEQ ID NO: 2541455 - RNA, 19 nt, Homo sapiens
  misc_RNA (1)...(19): siRNA sense strand
agaagaggaaguagccaaa

SEQ ID NO: 2541456 - RNA, 19 nt, Homo sapiens
  misc_RNA (1)...(19): siRNA sense strand
acacagagcaaaaggaauu

SEQ ID NO: 2541457 - RNA, 19 nt, Homo sapiens
  misc_RNA (1)...(19): siRNA sense strand
ucuuaauucuagaggacau

SEQ ID NO: 2541458 - RNA, 19 nt, Homo sapiens
  misc_RNA (1)...(19): siRNA sense strand
caguaugggaggugaggau

SEQ ID NO: 2541459 - RNA, 19 nt, Homo sapiens
  misc_RNA (1)...(19): siRNA sense strand
gcuuaguccucguagaaaa

SEQ ID NO: 2541460 - RNA, 19 nt, Homo sapiens
  misc_RNA (1)...(19): siRNA sense strand
guagaaagagaaaaggaaa

SEQ ID NO: 2541461 - RNA, 19 nt, Homo sapiens
  misc_RNA (1)...(19): siRNA sense strand
cugcaaucuuccaggcaau

SEQ ID NO: 2541462 - RNA, 19 nt, Homo sapiens
  misc_RNA (1)...(19): siRNA sense strand
aagaagaggaaguagccaa

SEQ ID NO: 2541463 - RNA, 19 nt, Homo sapiens
  misc_RNA (1)...(19): siRNA sense strand
acuuaaggagcaagaacaa

SEQ ID NO: 2541464 - RNA, 19 nt, Homo sapiens
  misc_RNA (1)...(19): siRNA sense strand
gugaggaaaacaaggaaaa

SEQ ID NO: 2541465 - RNA, 19 nt, Homo sapiens
  misc_RNA (1)...(19): siRNA sense strand
agauggaaauugaugaaca

SEQ ID NO: 2541466 - RNA, 19 nt, Homo sapiens
  misc_RNA (1)...(19): siRNA sense strand
ucgaagaaacuguggaagu

SEQ ID NO: 2541467 - RNA, 19 nt, Homo sapiens
  misc_RNA (1)...(19): siRNA sense strand
ggaagcucuuguaggaaau

SEQ ID NO: 2541468 - RNA, 19 nt, Homo sapiens
  misc_RNA (1)...(19): siRNA sense strand
caucaagguuacagaucga

SEQ ID NO: 2541469 - RNA, 19 nt, Homo sapiens
  misc_RNA (1)...(19): siRNA sense strand
aaagaaaggcgaugcugaa

SEQ ID NO: 2541470 - RNA, 19 nt, Homo sapiens
  misc_RNA (1)...(19): siRNA sense strand
acaacaagaaccuggaaga

SEQ ID NO: 2541471 - RNA, 19 nt, Homo sapiens
  misc_RNA (1)...(19): siRNA sense strand
gaacaauggugcaagguug

SEQ ID NO: 2541472 - RNA, 19 nt, Homo sapiens
  misc_RNA (1)...(19): siRNA sense strand
agaaccaacaccagugaaa

SEQ ID NO: 2541473 - RNA, 19 nt, Homo sapiens
  misc_RNA (1)...(19): siRNA sense strand
auauauuacgacaggcaaa

SEQ ID NO: 2541474 - RNA, 19 nt, Homo sapiens
  misc_RNA (1)...(19): siRNA sense strand
ugaaagaagaugagcaaag

SEQ ID NO: 2541475 - RNA, 19 nt, Homo sapiens
  misc_RNA (1)...(19): siRNA sense strand
acaccaacgaaaagagaaa

SEQ ID NO: 2541476 - RNA, 19 nt, Homo sapiens
  misc_RNA (1)...(19): siRNA sense strand
gugaggaggaagaguauga

SEQ ID NO: 2541477 - RNA, 19 nt, Homo sapiens
  misc_RNA (1)...(19): siRNA sense strand
agagaaguuacgugaagaa

SEQ ID NO: 2541478 - RNA, 19 nt, Homo sapiens
  misc_RNA (1)...(19): siRNA sense strand
augaagacguagaagagau

SEQ ID NO: 2541479 - RNA, 19 nt, Homo sapiens
  misc_RNA (1)...(19): siRNA sense strand
ggaagaaagggaagauuuu

SEQ ID NO: 2541480 - RNA, 19 nt, Homo sapiens
  misc_RNA (1)...(19): siRNA sense strand
ugaaugaagacguagaaga

SEQ ID NO: 2541481 - RNA, 19 nt, Homo sapiens
  misc_RNA (1)...(19): siRNA sense strand
ggucauaguaaaagacaga

SEQ ID NO: 2541482 - RNA, 19 nt, Homo sapiens
  misc_RNA (1)...(19): siRNA sense strand
gaaagaaaggcgaugcuga

SEQ ID NO: 2541483 - RNA, 19 nt, Homo sapiens
  misc_RNA (1)...(19): siRNA sense strand
caaacgaggaagaccacaa

SEQ ID NO: 2541484 - RNA, 19 nt, Homo sapiens
  misc_RNA (1)...(19): siRNA sense strand
agagaaaaggaaagagaga

SEQ ID NO: 2541485 - RNA, 19 nt, Homo sapiens
  misc_RNA (1)...(19): siRNA sense strand
uguaauuuccugugcaaaa

SEQ ID NO: 2541486 - RNA, 19 nt, Homo sapiens
  misc_RNA (1)...(19): siRNA sense strand
ccaagaucgaggaugaaga

SEQ ID NO: 2541487 - RNA, 19 nt, Homo sapiens
  misc_RNA (1)...(19): siRNA sense strand
gcuaguauuugaagcacca

SEQ ID NO: 2541488 - RNA, 19 nt, Homo sapiens
  misc_RNA (1)...(19): siRNA sense strand
gagaacuuggaaauggaaa

SEQ ID NO: 2541489 - RNA, 19 nt, Homo sapiens
  misc_RNA (1)...(19): siRNA sense strand
cggauaugggacacuuaaa

SEQ ID NO: 2541490 - RNA, 19 nt, Homo sapiens
  misc_RNA (1)...(19): siRNA sense strand
agaagguguuggaggcacu

SEQ ID NO: 2541491 - RNA, 19 nt, Homo sapiens
  misc_RNA (1)...(19): siRNA sense strand
auaaagaggaggaagcugu

SEQ ID NO: 2541492 - RNA, 19 nt, Homo sapiens
  misc_RNA (1)...(19): siRNA sense strand
cuguuaccauagagaugaa

SEQ ID NO: 2541493 - RNA, 19 nt, Homo sapiens
  misc_RNA (1)...(19): siRNA sense strand
gauauuagcuccagcggug

SEQ ID NO: 2541494 - RNA, 19 nt, Homo sapiens
  misc_RNA (1)...(19): siRNA sense strand
uguaauuuccugugcaaaa

SEQ ID NO: 2541495 - RNA, 19 nt, Homo sapiens
  misc_RNA (1)...(19): siRNA sense strand
ccaagaucgaggaugaaga

SEQ ID NO: 2541496 - RNA, 19 nt, Homo sapiens
  misc_RNA (1)...(19): siRNA sense strand
gcuaguauuugaagcacca

SEQ ID NO: 2541497 - RNA, 19 nt, Homo sapiens
  misc_RNA (1)...(19): siRNA sense strand
gagaacuuggaaauggaaa

SEQ ID NO: 2541498 - RNA, 19 nt, Homo sapiens
  misc_RNA (1)...(19): siRNA sense strand
cggauaugggacacuuaaa

SEQ ID NO: 2541499 - RNA, 19 nt, Homo sapiens
  misc_RNA (1)...(19): siRNA sense strand
agaagguguuggaggcacu

SEQ ID NO: 2541500 - RNA, 19 nt, Homo sapiens
  misc_RNA (1)...(19): siRNA sense strand
auaaagaggaggaagcugu

SEQ ID NO: 2541501 - RNA, 19 nt, Homo sapiens
  misc_RNA (1)...(19): siRNA sense strand
cuguuaccauagagaugaa

SEQ ID NO: 2541502 - RNA, 19 nt, Homo sapiens
  misc_RNA (1)...(19): siRNA sense strand
gauauuagcuccagcggug

SEQ ID NO: 2541503 - RNA, 19 nt, Homo sapiens
  misc_RNA (1)...(19): siRNA sense strand
acucuuugcacgaggaauu

SEQ ID NO: 2541504 - RNA, 19 nt, Homo sapiens
  misc_RNA (1)...(19): siRNA sense strand
cgucgaagcacauggagga

SEQ ID NO: 2541505 - RNA, 19 nt, Homo sapiens
  misc_RNA (1)...(19): siRNA sense strand
caguuuacgucgaagcaca

SEQ ID NO: 2541506 - RNA, 19 nt, Homo sapiens
  misc_RNA (1)...(19): siRNA sense strand
ggaagaagcgcuuugggca

SEQ ID NO: 2541507 - RNA, 19 nt, Homo sapiens
  misc_RNA (1)...(19): siRNA sense strand
aguuuaucgcgucaagaaa

SEQ ID NO: 2541508 - RNA, 19 nt, Homo sapiens
  misc_RNA (1)...(19): siRNA sense strand
aaaugagaggaaagagaaa

SEQ ID NO: 2541509 - RNA, 19 nt, Homo sapiens
  misc_RNA (1)...(19): siRNA sense strand
ugaaaguguuaauggacau

SEQ ID NO: 2541510 - RNA, 19 nt, Homo sapiens
  misc_RNA (1)...(19): siRNA sense strand
cggacuagaaauugaugaa

SEQ ID NO: 2541511 - RNA, 19 nt, Homo sapiens
  misc_RNA (1)...(19): siRNA sense strand
auaaaugagaggaaagaga

SEQ ID NO: 2541512 - RNA, 19 nt, Homo sapiens
  misc_RNA (1)...(19): siRNA sense strand
gcaagguggaguuggaaaa

SEQ ID NO: 2541513 - RNA, 19 nt, Homo sapiens
  misc_RNA (1)...(19): siRNA sense strand
ucuuguugguggaggguuu

SEQ ID NO: 2541514 - RNA, 19 nt, Homo sapiens
  misc_RNA (1)...(19): siRNA sense strand
augcagaagcagaggucga

SEQ ID NO: 2541515 - RNA, 19 nt, Homo sapiens
  misc_RNA (1)...(19): siRNA sense strand
gaggaaagagaaaacaaaa

SEQ ID NO: 2541516 - RNA, 19 nt, Homo sapiens
  misc_RNA (1)...(19): siRNA sense strand
aagcagaggucgaggccac

SEQ ID NO: 2541517 - RNA, 19 nt, Homo sapiens
  misc_RNA (1)...(19): siRNA sense strand
augaaaguguuaauggaca

SEQ ID NO: 2541518 - RNA, 19 nt, Homo sapiens
  misc_RNA (1)...(19): siRNA sense strand
ggugaugaugguuggugua

SEQ ID NO: 2541519 - RNA, 19 nt, Homo sapiens
  misc_RNA (1)...(19): siRNA sense strand
cugaggugauuaagcaaga

SEQ ID NO: 2541520 - RNA, 19 nt, Homo sapiens
  misc_RNA (1)...(19): siRNA sense strand
ucuaaguggauaggaaaua

SEQ ID NO: 2541521 - RNA, 19 nt, Homo sapiens
  misc_RNA (1)...(19): siRNA sense strand
uggaauuugcacaagagaa

SEQ ID NO: 2541522 - RNA, 19 nt, Homo sapiens
  misc_RNA (1)...(19): siRNA sense strand
ucauucaugcccugggaua

SEQ ID NO: 2541523 - RNA, 19 nt, Homo sapiens
  misc_RNA (1)...(19): siRNA sense strand
agguggaguuggaaaagaa

SEQ ID NO: 2541524 - RNA, 19 nt, Homo sapiens
  misc_RNA (1)...(19): siRNA sense strand
aucaagaaauugugaccuu

SEQ ID NO: 2541525 - RNA, 19 nt, Homo sapiens
  misc_RNA (1)...(19): siRNA sense strand
gagaggaaagagaaaacaa

SEQ ID NO: 2541526 - RNA, 19 nt, Homo sapiens
  misc_RNA (1)...(19): siRNA sense strand
ugacaugguuaaagcugga

SEQ ID NO: 2541527 - RNA, 19 nt, Homo sapiens
  misc_RNA (1)...(19): siRNA sense strand
ggauucaauuuuaaggaga

SEQ ID NO: 2541528 - RNA, 19 nt, Homo sapiens
  misc_RNA (1)...(19): siRNA sense strand
gauuaagcaagaauaccaa

SEQ ID NO: 2541529 - RNA, 19 nt, Homo sapiens
  misc_RNA (1)...(19): siRNA sense strand
aggagaaauuguugcuuuu

SEQ ID NO: 2541530 - RNA, 19 nt, Homo sapiens
  misc_RNA (1)...(19): siRNA sense strand
acaauaaugauacagggaa

SEQ ID NO: 2541531 - RNA, 19 nt, Homo sapiens
  misc_RNA (1)...(19): siRNA sense strand
agaggaaagagaaaacaaa

SEQ ID NO: 2541532 - RNA, 19 nt, Homo sapiens
  misc_RNA (1)...(19): siRNA sense strand
ccaacuugaucuuugcaga

SEQ ID NO: 2541533 - RNA, 19 nt, Homo sapiens
  misc_RNA (1)...(19): siRNA sense strand
aacuacaccuacaggagaa

SEQ ID NO: 2541534 - RNA, 19 nt, Homo sapiens
  misc_RNA (1)...(19): siRNA sense strand
ugaugaugguugguguaaa

SEQ ID NO: 2541535 - RNA, 19 nt, Homo sapiens
  misc_RNA (1)...(19): siRNA sense strand
cuguagugcagcagaucau

SEQ ID NO: 2541536 - RNA, 19 nt, Homo sapiens
  misc_RNA (1)...(19): siRNA sense strand
cuugaucuuugcagaguau

SEQ ID NO: 2541537 - RNA, 19 nt, Homo sapiens
  misc_RNA (1)...(19): siRNA sense strand
aggugauuaagcaagaaua

SEQ ID NO: 2541538 - RNA, 19 nt, Homo sapiens
  misc_RNA (1)...(19): siRNA sense strand
gcuccugcuucgugggcua

SEQ ID NO: 2541539 - RNA, 19 nt, Homo sapiens
  misc_RNA (1)...(19): siRNA sense strand
ucauugagguugaggagga

SEQ ID NO: 2541540 - RNA, 19 nt, Homo sapiens
  misc_RNA (1)...(19): siRNA sense strand
aggaacaagaggacccaua

SEQ ID NO: 2541541 - RNA, 19 nt, Homo sapiens
  misc_RNA (1)...(19): siRNA sense strand
gcaggauggugcaggagca

SEQ ID NO: 2541542 - RNA, 19 nt, Homo sapiens
  misc_RNA (1)...(19): siRNA sense strand
ccgcaacugccaagacauu

SEQ ID NO: 2541543 - RNA, 19 nt, Homo sapiens
  misc_RNA (1)...(19): siRNA sense strand
gccagaagaacgugcccaa

SEQ ID NO: 2541544 - RNA, 19 nt, Homo sapiens
  misc_RNA (1)...(19): siRNA sense strand
acaagaugcucuaggcaac

SEQ ID NO: 2541545 - RNA, 19 nt, Homo sapiens
  misc_RNA (1)...(19): siRNA sense strand
gcaaagauauugacgagug

SEQ ID NO: 2541546 - RNA, 19 nt, Homo sapiens
  misc_RNA (1)...(19): siRNA sense strand
agguugaggaggaacaaga

SEQ ID NO: 2541547 - RNA, 19 nt, Homo sapiens
  misc_RNA (1)...(19): siRNA sense strand
cugcaaagauauugacgag

SEQ ID NO: 2541548 - RNA, 19 nt, Homo sapiens
  misc_RNA (1)...(19): siRNA sense strand
cuuuauacaagaugcucua

SEQ ID NO: 2541549 - RNA, 19 nt, Homo sapiens
  misc_RNA (1)...(19): siRNA sense strand
aagaaacggauaagaucau

SEQ ID NO: 2541550 - RNA, 19 nt, Homo sapiens
  misc_RNA (1)...(19): siRNA sense strand
ucaacgagugccagcgcua

SEQ ID NO: 2541551 - RNA, 19 nt, Homo sapiens
  misc_RNA (1)...(19): siRNA sense strand
gcuaugagcucacagagga

SEQ ID NO: 2541552 - RNA, 19 nt, Homo sapiens
  misc_RNA (1)...(19): siRNA sense strand
gcaucaacacagagggcuc

SEQ ID NO: 2541553 - RNA, 19 nt, Homo sapiens
  misc_RNA (1)...(19): siRNA sense strand
gcuccugcuucgugggcua

SEQ ID NO: 2541554 - RNA, 19 nt, Homo sapiens
  misc_RNA (1)...(19): siRNA sense strand
ucauugagguugaggagga

SEQ ID NO: 2541555 - RNA, 19 nt, Homo sapiens
  misc_RNA (1)...(19): siRNA sense strand
aggaacaagaggacccaua

SEQ ID NO: 2541556 - RNA, 19 nt, Homo sapiens
  misc_RNA (1)...(19): siRNA sense strand
gcaggauggugcaggagca

SEQ ID NO: 2541557 - RNA, 19 nt, Homo sapiens
  misc_RNA (1)...(19): siRNA sense strand
ccgcaacugccaagacauu

SEQ ID NO: 2541558 - RNA, 19 nt, Homo sapiens
  misc_RNA (1)...(19): siRNA sense strand
gccagaagaacgugcccaa

SEQ ID NO: 2541559 - RNA, 19 nt, Homo sapiens
  misc_RNA (1)...(19): siRNA sense strand
acaagaugcucuaggcaac

SEQ ID NO: 2541560 - RNA, 19 nt, Homo sapiens
  misc_RNA (1)...(19): siRNA sense strand
gcaaagauauugacgagug

SEQ ID NO: 2541561 - RNA, 19 nt, Homo sapiens
  misc_RNA (1)...(19): siRNA sense strand
agguugaggaggaacaaga

SEQ ID NO: 2541562 - RNA, 19 nt, Homo sapiens
  misc_RNA (1)...(19): siRNA sense strand
cugcaaagauauugacgag

SEQ ID NO: 2541563 - RNA, 19 nt, Homo sapiens
  misc_RNA (1)...(19): siRNA sense strand
cuuuauacaagaugcucua

SEQ ID NO: 2541564 - RNA, 19 nt, Homo sapiens
  misc_RNA (1)...(19): siRNA sense strand
aagaaacggauaagaucau

SEQ ID NO: 2541565 - RNA, 19 nt, Homo sapiens
  misc_RNA (1)...(19): siRNA sense strand
ucaacgagugccagcgcua

SEQ ID NO: 2541566 - RNA, 19 nt, Homo sapiens
  misc_RNA (1)...(19): siRNA sense strand
gcuaugagcucacagagga

SEQ ID NO: 2541567 - RNA, 19 nt, Homo sapiens
  misc_RNA (1)...(19): siRNA sense strand
gcaucaacacagagggcuc

SEQ ID NO: 2541568 - RNA, 19 nt, Homo sapiens
  misc_RNA (1)...(19): siRNA sense strand
gcuccugcuucgugggcua

SEQ ID NO: 2541569 - RNA, 19 nt, Homo sapiens
  misc_RNA (1)...(19): siRNA sense strand
ucauugagguugaggagga

SEQ ID NO: 2541570 - RNA, 19 nt, Homo sapiens
  misc_RNA (1)...(19): siRNA sense strand
aggaacaagaggacccaua

SEQ ID NO: 2541571 - RNA, 19 nt, Homo sapiens
  misc_RNA (1)...(19): siRNA sense strand
gcaggauggugcaggagca

SEQ ID NO: 2541572 - RNA, 19 nt, Homo sapiens
  misc_RNA (1)...(19): siRNA sense strand
ccgcaacugccaagacauu

SEQ ID NO: 2541573 - RNA, 19 nt, Homo sapiens
  misc_RNA (1)...(19): siRNA sense strand
gccagaagaacgugcccaa

SEQ ID NO: 2541574 - RNA, 19 nt, Homo sapiens
  misc_RNA (1)...(19): siRNA sense strand
acaagaugcucuaggcaac

SEQ ID NO: 2541575 - RNA, 19 nt, Homo sapiens
  misc_RNA (1)...(19): siRNA sense strand
gcaaagauauugacgagug

SEQ ID NO: 2541576 - RNA, 19 nt, Homo sapiens
  misc_RNA (1)...(19): siRNA sense strand
agguugaggaggaacaaga

SEQ ID NO: 2541577 - RNA, 19 nt, Homo sapiens
  misc_RNA (1)...(19): siRNA sense strand
cugcaaagauauugacgag

SEQ ID NO: 2541578 - RNA, 19 nt, Homo sapiens
  misc_RNA (1)...(19): siRNA sense strand
cuuuauacaagaugcucua

SEQ ID NO: 2541579 - RNA, 19 nt, Homo sapiens
  misc_RNA (1)...(19): siRNA sense strand
aagaaacggauaagaucau

SEQ ID NO: 2541580 - RNA, 19 nt, Homo sapiens
  misc_RNA (1)...(19): siRNA sense strand
ucaacgagugccagcgcua

SEQ ID NO: 2541581 - RNA, 19 nt, Homo sapiens
  misc_RNA (1)...(19): siRNA sense strand
gcuaugagcucacagagga

SEQ ID NO: 2541582 - RNA, 19 nt, Homo sapiens
  misc_RNA (1)...(19): siRNA sense strand
gcaucaacacagagggcuc

SEQ ID NO: 2541583 - RNA, 19 nt, Homo sapiens
  misc_RNA (1)...(19): siRNA sense strand
gcuccugcuucgugggcua

SEQ ID NO: 2541584 - RNA, 19 nt, Homo sapiens
  misc_RNA (1)...(19): siRNA sense strand
ucauugagguugaggagga

SEQ ID NO: 2541585 - RNA, 19 nt, Homo sapiens
  misc_RNA (1)...(19): siRNA sense strand
aggaacaagaggacccaua

SEQ ID NO: 2541586 - RNA, 19 nt, Homo sapiens
  misc_RNA (1)...(19): siRNA sense strand
gcaggauggugcaggagca

SEQ ID NO: 2541587 - RNA, 19 nt, Homo sapiens
  misc_RNA (1)...(19): siRNA sense strand
ccgcaacugccaagacauu

SEQ ID NO: 2541588 - RNA, 19 nt, Homo sapiens
  misc_RNA (1)...(19): siRNA sense strand
gccagaagaacgugcccaa

SEQ ID NO: 2541589 - RNA, 19 nt, Homo sapiens
  misc_RNA (1)...(19): siRNA sense strand
acaagaugcucuaggcaac

SEQ ID NO: 2541590 - RNA, 19 nt, Homo sapiens
  misc_RNA (1)...(19): siRNA sense strand
gcaaagauauugacgagug

SEQ ID NO: 2541591 - RNA, 19 nt, Homo sapiens
  misc_RNA (1)...(19): siRNA sense strand
agguugaggaggaacaaga

SEQ ID NO: 2541592 - RNA, 19 nt, Homo sapiens
  misc_RNA (1)...(19): siRNA sense strand
cugcaaagauauugacgag

SEQ ID NO: 2541593 - RNA, 19 nt, Homo sapiens
  misc_RNA (1)...(19): siRNA sense strand
cuuuauacaagaugcucua

SEQ ID NO: 2541594 - RNA, 19 nt, Homo sapiens
  misc_RNA (1)...(19): siRNA sense strand
aagaaacggauaagaucau

SEQ ID NO: 2541595 - RNA, 19 nt, Homo sapiens
  misc_RNA (1)...(19): siRNA sense strand
ucaacgagugccagcgcua

SEQ ID NO: 2541596 - RNA, 19 nt, Homo sapiens
  misc_RNA (1)...(19): siRNA sense strand
gcuaugagcucacagagga

SEQ ID NO: 2541597 - RNA, 19 nt, Homo sapiens
  misc_RNA (1)...(19): siRNA sense strand
gcaucaacacagagggcuc

SEQ ID NO: 2541598 - RNA, 19 nt, Homo sapiens
  misc_RNA (1)...(19): siRNA sense strand
gaucagaggcagaagagga

SEQ ID NO: 2541599 - RNA, 19 nt, Homo sapiens
  misc_RNA (1)...(19): siRNA sense strand
ccaccgucuucgagaggau

SEQ ID NO: 2541600 - RNA, 19 nt, Homo sapiens
  misc_RNA (1)...(19): siRNA sense strand
aggagcaagaggagcggaa

SEQ ID NO: 2541601 - RNA, 19 nt, Homo sapiens
  misc_RNA (1)...(19): siRNA sense strand
cugaaauccugaugcgcca

SEQ ID NO: 2541602 - RNA, 19 nt, Homo sapiens
  misc_RNA (1)...(19): siRNA sense strand
cagaagaggaggaggccag

SEQ ID NO: 2541603 - RNA, 19 nt, Homo sapiens
  misc_RNA (1)...(19): siRNA sense strand
gccuaaagcuccuggggca

SEQ ID NO: 2541604 - RNA, 19 nt, Homo sapiens
  misc_RNA (1)...(19): siRNA sense strand
ugccaggaccagagcaaga

SEQ ID NO: 2541605 - RNA, 19 nt, Homo sapiens
  misc_RNA (1)...(19): siRNA sense strand
gcccaagccaagaaggaau

SEQ ID NO: 2541606 - RNA, 19 nt, Homo sapiens
  misc_RNA (1)...(19): siRNA sense strand
ggacaagccagcagcagca

SEQ ID NO: 2541607 - RNA, 19 nt, Homo sapiens
  misc_RNA (1)...(19): siRNA sense strand
acaagaagauggugccaac

SEQ ID NO: 2541608 - RNA, 19 nt, Homo sapiens
  misc_RNA (1)...(19): siRNA sense strand
aagaaggaaugcugggauc

SEQ ID NO: 2541609 - RNA, 19 nt, Homo sapiens
  misc_RNA (1)...(19): siRNA sense strand
gguuuaaaucaggaaguga

SEQ ID NO: 2541610 - RNA, 19 nt, Homo sapiens
  misc_RNA (1)...(19): siRNA sense strand
cuucagaguucuuugugga

SEQ ID NO: 2541611 - RNA, 19 nt, Homo sapiens
  misc_RNA (1)...(19): siRNA sense strand
ucgaaaaguuggagauaaa

SEQ ID NO: 2541612 - RNA, 19 nt, Homo sapiens
  misc_RNA (1)...(19): siRNA sense strand
cauagagauggaagaguaa

SEQ ID NO: 2541613 - RNA, 19 nt, Homo sapiens
  misc_RNA (1)...(19): siRNA sense strand
acgaggaaggagugguaaa

SEQ ID NO: 2541614 - RNA, 19 nt, Homo sapiens
  misc_RNA (1)...(19): siRNA sense strand
caguauuguuagggauaaa

SEQ ID NO: 2541615 - RNA, 19 nt, Homo sapiens
  misc_RNA (1)...(19): siRNA sense strand
gaacaaauaugcaagucca

SEQ ID NO: 2541616 - RNA, 19 nt, Homo sapiens
  misc_RNA (1)...(19): siRNA sense strand
gguacaugcaguucagcaa

SEQ ID NO: 2541617 - RNA, 19 nt, Homo sapiens
  misc_RNA (1)...(19): siRNA sense strand
ccugaaaguggcagcaaga

SEQ ID NO: 2541618 - RNA, 19 nt, Homo sapiens
  misc_RNA (1)...(19): siRNA sense strand
ccacauuggcagacaaaau

SEQ ID NO: 2541619 - RNA, 19 nt, Homo sapiens
  misc_RNA (1)...(19): siRNA sense strand
aggaaggagugguaaaauu

SEQ ID NO: 2541620 - RNA, 19 nt, Homo sapiens
  misc_RNA (1)...(19): siRNA sense strand
guccaaauuccuagugauu

SEQ ID NO: 2541621 - RNA, 19 nt, Homo sapiens
  misc_RNA (1)...(19): siRNA sense strand
ccuuuauguccuagagcau

SEQ ID NO: 2541622 - RNA, 19 nt, Homo sapiens
  misc_RNA (1)...(19): siRNA sense strand
gugaggaacaauuugagaa

SEQ ID NO: 2541623 - RNA, 19 nt, Homo sapiens
  misc_RNA (1)...(19): siRNA sense strand
uagagauggaagaguaauu

SEQ ID NO: 2541624 - RNA, 19 nt, Homo sapiens
  misc_RNA (1)...(19): siRNA sense strand
gauacaggcucauugguca

SEQ ID NO: 2541625 - RNA, 19 nt, Homo sapiens
  misc_RNA (1)...(19): siRNA sense strand
caagaaaacaagcuacaaa

SEQ ID NO: 2541626 - RNA, 19 nt, Homo sapiens
  misc_RNA (1)...(19): siRNA sense strand
cucaguauuguuagggaua

SEQ ID NO: 2541627 - RNA, 19 nt, Homo sapiens
  misc_RNA (1)...(19): siRNA sense strand
uauagagagcauugguaau

SEQ ID NO: 2541628 - RNA, 19 nt, Homo sapiens
  misc_RNA (1)...(19): siRNA sense strand
agaagugcccugacagaga

SEQ ID NO: 2541629 - RNA, 19 nt, Homo sapiens
  misc_RNA (1)...(19): siRNA sense strand
ugucacagcaccagguaca

SEQ ID NO: 2541630 - RNA, 19 nt, Homo sapiens
  misc_RNA (1)...(19): siRNA sense strand
gagucaucuucgugggcca

SEQ ID NO: 2541631 - RNA, 19 nt, Homo sapiens
  misc_RNA (1)...(19): siRNA sense strand
agaccaggacgacgaggaa

SEQ ID NO: 2541632 - RNA, 19 nt, Homo sapiens
  misc_RNA (1)...(19): siRNA sense strand
aauuagaagcggcacagaa

SEQ ID NO: 2541633 - RNA, 19 nt, Homo sapiens
  misc_RNA (1)...(19): siRNA sense strand
aucacaaggcuaugaacaa

SEQ ID NO: 2541634 - RNA, 19 nt, Homo sapiens
  misc_RNA (1)...(19): siRNA sense strand
uguacauagagauggaaga

SEQ ID NO: 2541635 - RNA, 19 nt, Homo sapiens
  misc_RNA (1)...(19): siRNA sense strand
aggaacaauuugagaagug

SEQ ID NO: 2541636 - RNA, 19 nt, Homo sapiens
  misc_RNA (1)...(19): siRNA sense strand
ucaugguacauuugaagua

SEQ ID NO: 2541637 - RNA, 19 nt, Homo sapiens
  misc_RNA (1)...(19): siRNA sense strand
auuagaagcggcacagaau

SEQ ID NO: 2541638 - RNA, 19 nt, Homo sapiens
  misc_RNA (1)...(19): siRNA sense strand
caucacaaggcuaugaaca

SEQ ID NO: 2541639 - RNA, 19 nt, Homo sapiens
  misc_RNA (1)...(19): siRNA sense strand
gaauauuggaguugagcag

SEQ ID NO: 2541640 - RNA, 19 nt, Homo sapiens
  misc_RNA (1)...(19): siRNA sense strand
aguuguacauagagaugga

SEQ ID NO: 2541641 - RNA, 19 nt, Homo sapiens
  misc_RNA (1)...(19): siRNA sense strand
auguaaagaccuuccaaaa

SEQ ID NO: 2541642 - RNA, 19 nt, Homo sapiens
  misc_RNA (1)...(19): siRNA sense strand
gaauaaaauggaaggucga

SEQ ID NO: 2541643 - RNA, 19 nt, Homo sapiens
  misc_RNA (1)...(19): siRNA sense strand
gguuaugggcuggcaagua

SEQ ID NO: 2541644 - RNA, 19 nt, Homo sapiens
  misc_RNA (1)...(19): siRNA sense strand
gcuggcaaguacugagcuu

SEQ ID NO: 2541645 - RNA, 19 nt, Homo sapiens
  misc_RNA (1)...(19): siRNA sense strand
ucguaauggaccugaaagu

SEQ ID NO: 2541646 - RNA, 19 nt, Homo sapiens
  misc_RNA (1)...(19): siRNA sense strand
agaaagacugacuaaauca

SEQ ID NO: 2541647 - RNA, 19 nt, Homo sapiens
  misc_RNA (1)...(19): siRNA sense strand
auacaggcucauuggucaa

SEQ ID NO: 2541648 - RNA, 19 nt, Homo sapiens
  misc_RNA (1)...(19): siRNA sense strand
gcagauucgaguuguacau

SEQ ID NO: 2541649 - RNA, 19 nt, Homo sapiens
  misc_RNA (1)...(19): siRNA sense strand
aagaaguucaguggaauaa

SEQ ID NO: 2541650 - RNA, 19 nt, Homo sapiens
  misc_RNA (1)...(19): siRNA sense strand
gcacaaaucuuauugaagg

SEQ ID NO: 2541651 - RNA, 19 nt, Homo sapiens
  misc_RNA (1)...(19): siRNA sense strand
cugcaaccauugacagcuu

SEQ ID NO: 2541652 - RNA, 19 nt, Homo sapiens
  misc_RNA (1)...(19): siRNA sense strand
auauuggaguugagcagau

SEQ ID NO: 2541653 - RNA, 19 nt, Homo sapiens
  misc_RNA (1)...(19): siRNA sense strand
uggcaaguacugagcuuca

SEQ ID NO: 2541654 - RNA, 19 nt, Homo sapiens
  misc_RNA (1)...(19): siRNA sense strand
uggacaagaucgauggcua

SEQ ID NO: 2541655 - RNA, 19 nt, Homo sapiens
  misc_RNA (1)...(19): siRNA sense strand
ccguagaugaccugggcaa

SEQ ID NO: 2541656 - RNA, 19 nt, Homo sapiens
  misc_RNA (1)...(19): siRNA sense strand
ggugaggacugcagcgaga

SEQ ID NO: 2541657 - RNA, 19 nt, Homo sapiens
  misc_RNA (1)...(19): siRNA sense strand
cggccagaacugugaggaa

SEQ ID NO: 2541658 - RNA, 19 nt, Homo sapiens
  misc_RNA (1)...(19): siRNA sense strand
cagcaaacauccagcagca

SEQ ID NO: 2541659 - RNA, 19 nt, Homo sapiens
  misc_RNA (1)...(19): siRNA sense strand
cggacugcguggacagcua

SEQ ID NO: 2541660 - RNA, 19 nt, Homo sapiens
  misc_RNA (1)...(19): siRNA sense strand
augccaacauccaggacaa

SEQ ID NO: 2541661 - RNA, 19 nt, Homo sapiens
  misc_RNA (1)...(19): siRNA sense strand
gggacagccucaacgggua

SEQ ID NO: 2541662 - RNA, 19 nt, Homo sapiens
  misc_RNA (1)...(19): siRNA sense strand
gugaggaccugguggacga

SEQ ID NO: 2541663 - RNA, 19 nt, Homo sapiens
  misc_RNA (1)...(19): siRNA sense strand
ccgcaagcccagcagcaaa

SEQ ID NO: 2541664 - RNA, 19 nt, Homo sapiens
  misc_RNA (1)...(19): siRNA sense strand
ccgaggacuaugagagcuu

SEQ ID NO: 2541665 - RNA, 19 nt, Homo sapiens
  misc_RNA (1)...(19): siRNA sense strand
guaccgaggauguggacga

SEQ ID NO: 2541666 - RNA, 19 nt, Homo sapiens
  misc_RNA (1)...(19): siRNA sense strand
guggaagcaaggaggccaa

SEQ ID NO: 2541667 - RNA, 19 nt, Homo sapiens
  misc_RNA (1)...(19): siRNA sense strand
ggauccacugugagaacaa

SEQ ID NO: 2541668 - RNA, 19 nt, Homo sapiens
  misc_RNA (1)...(19): siRNA sense strand
aggcaagcccugcaagaau

SEQ ID NO: 2541669 - RNA, 19 nt, Homo sapiens
  misc_RNA (1)...(19): siRNA sense strand
gugcggaaggccagugcaa

SEQ ID NO: 2541670 - RNA, 19 nt, Homo sapiens
  misc_RNA (1)...(19): siRNA sense strand
cgggcaacagcgaggaaga

SEQ ID NO: 2541671 - RNA, 19 nt, Homo sapiens
  misc_RNA (1)...(19): siRNA sense strand
ccuacaagaucgaggccgu

SEQ ID NO: 2541672 - RNA, 19 nt, Homo sapiens
  misc_RNA (1)...(19): siRNA sense strand
gcaaggaggccaaggaccu

SEQ ID NO: 2541673 - RNA, 19 nt, Homo sapiens
  misc_RNA (1)...(19): siRNA sense strand
ggucaaugcgaguggcugu

SEQ ID NO: 2541674 - RNA, 19 nt, Homo sapiens
  misc_RNA (1)...(19): siRNA sense strand
cgacgauuguccaggaaac

SEQ ID NO: 2541675 - RNA, 19 nt, Homo sapiens
  misc_RNA (1)...(19): siRNA sense strand
gccagugucugcagggcua

SEQ ID NO: 2541676 - RNA, 19 nt, Homo sapiens
  misc_RNA (1)...(19): siRNA sense strand
ccaaggugcugcuggacca

SEQ ID NO: 2541677 - RNA, 19 nt, Homo sapiens
  misc_RNA (1)...(19): siRNA sense strand
gccagaacugugaggaaaa

SEQ ID NO: 2541678 - RNA, 19 nt, Homo sapiens
  misc_RNA (1)...(19): siRNA sense strand
ucaacaacaaugaguguga

SEQ ID NO: 2541679 - RNA, 19 nt, Homo sapiens
  misc_RNA (1)...(19): siRNA sense strand
ggacaagaucgauggcuac

SEQ ID NO: 2541680 - RNA, 19 nt, Homo sapiens
  misc_RNA (1)...(19): siRNA sense strand
ucaaugaguuccagugcga

SEQ ID NO: 2541681 - RNA, 19 nt, Homo sapiens
  misc_RNA (1)...(19): siRNA sense strand
ggaagugugaagcggccaa

SEQ ID NO: 2541682 - RNA, 19 nt, Homo sapiens
  misc_RNA (1)...(19): siRNA sense strand
ucgaugagugugcgggcaa

SEQ ID NO: 2541683 - RNA, 19 nt, Homo sapiens
  misc_RNA (1)...(19): siRNA sense strand
gcaacugccugcugcccua

SEQ ID NO: 2541684 - RNA, 19 nt, Homo sapiens
  misc_RNA (1)...(19): siRNA sense strand
cugcagugcuggaaguacu

SEQ ID NO: 2541685 - RNA, 19 nt, Homo sapiens
  misc_RNA (1)...(19): siRNA sense strand
gcgagaucaaccuggauga

SEQ ID NO: 2541686 - RNA, 19 nt, Homo sapiens
  misc_RNA (1)...(19): siRNA sense strand
agacaugaccaguggcuac

SEQ ID NO: 2541687 - RNA, 19 nt, Homo sapiens
  misc_RNA (1)...(19): siRNA sense strand
ccgacugcauggacgucaa

SEQ ID NO: 2541688 - RNA, 19 nt, Homo sapiens
  misc_RNA (1)...(19): siRNA sense strand
gcgccacgugugagaauga

SEQ ID NO: 2541689 - RNA, 19 nt, Homo sapiens
  misc_RNA (1)...(19): siRNA sense strand
aggcagacgugcagccacu

SEQ ID NO: 2541690 - RNA, 19 nt, Homo sapiens
  misc_RNA (1)...(19): siRNA sense strand
gacccaacugcgagaucaa

SEQ ID NO: 2541691 - RNA, 19 nt, Homo sapiens
  misc_RNA (1)...(19): siRNA sense strand
gcuccaacugcgacaccaa

SEQ ID NO: 2541692 - RNA, 19 nt, Homo sapiens
  misc_RNA (1)...(19): siRNA sense strand
acgccugacugcacagaga

SEQ ID NO: 2541693 - RNA, 19 nt, Homo sapiens
  misc_RNA (1)...(19): siRNA sense strand
gcaaggaccacuucagcga

SEQ ID NO: 2541694 - RNA, 19 nt, Homo sapiens
  misc_RNA (1)...(19): siRNA sense strand
cucaaggcacggaggaaga

SEQ ID NO: 2541695 - RNA, 19 nt, Homo sapiens
  misc_RNA (1)...(19): siRNA sense strand
cuugggaccuggaagggaa

SEQ ID NO: 2541696 - RNA, 19 nt, Homo sapiens
  misc_RNA (1)...(19): siRNA sense strand
ccuucaugggcaagcgcua

SEQ ID NO: 2541697 - RNA, 19 nt, Homo sapiens
  misc_RNA (1)...(19): siRNA sense strand
cuugggaccuggaagggaa

SEQ ID NO: 2541698 - RNA, 19 nt, Homo sapiens
  misc_RNA (1)...(19): siRNA sense strand
ccuucaugggcaagcgcua

SEQ ID NO: 2541699 - RNA, 19 nt, Homo sapiens
  misc_RNA (1)...(19): siRNA sense strand
cuugggaccuggaagggaa

SEQ ID NO: 2541700 - RNA, 19 nt, Homo sapiens
  misc_RNA (1)...(19): siRNA sense strand
ccuucaugggcaagcgcua

SEQ ID NO: 2541701 - RNA, 19 nt, Homo sapiens
  misc_RNA (1)...(19): siRNA sense strand
gggaagaaggagaaccuga

SEQ ID NO: 2541702 - RNA, 19 nt, Homo sapiens
  misc_RNA (1)...(19): siRNA sense strand
aggcugcgcaggaggagua

SEQ ID NO: 2541703 - RNA, 19 nt, Homo sapiens
  misc_RNA (1)...(19): siRNA sense strand
gcgggaagaaggagaaccu

SEQ ID NO: 2541704 - RNA, 19 nt, Homo sapiens
  misc_RNA (1)...(19): siRNA sense strand
gcagaugaguccacuggga

SEQ ID NO: 2541705 - RNA, 19 nt, Homo sapiens
  misc_RNA (1)...(19): siRNA sense strand
ccaucaaccucaaugccau

SEQ ID NO: 2541706 - RNA, 19 nt, Homo sapiens
  misc_RNA (1)...(19): siRNA sense strand
gcgcaggaggaguauguca

SEQ ID NO: 2541707 - RNA, 19 nt, Homo sapiens
  misc_RNA (1)...(19): siRNA sense strand
gggaagaaggagaaccuga

SEQ ID NO: 2541708 - RNA, 19 nt, Homo sapiens
  misc_RNA (1)...(19): siRNA sense strand
aggcugcgcaggaggagua

SEQ ID NO: 2541709 - RNA, 19 nt, Homo sapiens
  misc_RNA (1)...(19): siRNA sense strand
gcgggaagaaggagaaccu

SEQ ID NO: 2541710 - RNA, 19 nt, Homo sapiens
  misc_RNA (1)...(19): siRNA sense strand
gcagaugaguccacuggga

SEQ ID NO: 2541711 - RNA, 19 nt, Homo sapiens
  misc_RNA (1)...(19): siRNA sense strand
ccaucaaccucaaugccau

SEQ ID NO: 2541712 - RNA, 19 nt, Homo sapiens
  misc_RNA (1)...(19): siRNA sense strand
gcgcaggaggaguauguca

SEQ ID NO: 2541713 - RNA, 19 nt, Homo sapiens
  misc_RNA (1)...(19): siRNA sense strand
gggaagaaggagaaccuga

SEQ ID NO: 2541714 - RNA, 19 nt, Homo sapiens
  misc_RNA (1)...(19): siRNA sense strand
aggcugcgcaggaggagua

SEQ ID NO: 2541715 - RNA, 19 nt, Homo sapiens
  misc_RNA (1)...(19): siRNA sense strand
gcgggaagaaggagaaccu

SEQ ID NO: 2541716 - RNA, 19 nt, Homo sapiens
  misc_RNA (1)...(19): siRNA sense strand
gcagaugaguccacuggga

SEQ ID NO: 2541717 - RNA, 19 nt, Homo sapiens
  misc_RNA (1)...(19): siRNA sense strand
ccaucaaccucaaugccau

SEQ ID NO: 2541718 - RNA, 19 nt, Homo sapiens
  misc_RNA (1)...(19): siRNA sense strand
gcgcaggaggaguauguca

SEQ ID NO: 2541719 - RNA, 19 nt, Homo sapiens
  misc_RNA (1)...(19): siRNA sense strand
gauuaaaggaaauggcaga

SEQ ID NO: 2541720 - RNA, 19 nt, Homo sapiens
  misc_RNA (1)...(19): siRNA sense strand
agcaagagcugaaggcaca

SEQ ID NO: 2541721 - RNA, 19 nt, Homo sapiens
  misc_RNA (1)...(19): siRNA sense strand
ccacagaucucuauccgaa

SEQ ID NO: 2541722 - RNA, 19 nt, Homo sapiens
  misc_RNA (1)...(19): siRNA sense strand
auugagaaagggaaggaaa

SEQ ID NO: 2541723 - RNA, 19 nt, Homo sapiens
  misc_RNA (1)...(19): siRNA sense strand
accuugaggcugagcgaaa

SEQ ID NO: 2541724 - RNA, 19 nt, Homo sapiens
  misc_RNA (1)...(19): siRNA sense strand
uugagaaagggaaggaaau

SEQ ID NO: 2541725 - RNA, 19 nt, Homo sapiens
  misc_RNA (1)...(19): siRNA sense strand
ucauugaccuugaggcuga

SEQ ID NO: 2541726 - RNA, 19 nt, Homo sapiens
  misc_RNA (1)...(19): siRNA sense strand
augaacuacaggugauuaa

SEQ ID NO: 2541727 - RNA, 19 nt, Homo sapiens
  misc_RNA (1)...(19): siRNA sense strand
acauggagcaagagcugaa

SEQ ID NO: 2541728 - RNA, 19 nt, Homo sapiens
  misc_RNA (1)...(19): siRNA sense strand
ccauggaccuaaagccaga

SEQ ID NO: 2541729 - RNA, 19 nt, Homo sapiens
  misc_RNA (1)...(19): siRNA sense strand
ccgaaauccccgaggacuu

SEQ ID NO: 2541730 - RNA, 19 nt, Homo sapiens
  misc_RNA (1)...(19): siRNA sense strand
aggaaauggcagaacuuca

SEQ ID NO: 2541731 - RNA, 19 nt, Homo sapiens
  misc_RNA (1)...(19): siRNA sense strand
caaccaaacagaaggcagu

SEQ ID NO: 2541732 - RNA, 19 nt, Homo sapiens
  misc_RNA (1)...(19): siRNA sense strand
ggaaauucucacagauaac

SEQ ID NO: 2541733 - RNA, 19 nt, Homo sapiens
  misc_RNA (1)...(19): siRNA sense strand
gagcaagagcugaaggcac

SEQ ID NO: 2541734 - RNA, 19 nt, Homo sapiens
  misc_RNA (1)...(19): siRNA sense strand
gugcagagagcuugcgcca

SEQ ID NO: 2541735 - RNA, 19 nt, Homo sapiens
  misc_RNA (1)...(19): siRNA sense strand
ccuaaagguacccgugaca

SEQ ID NO: 2541736 - RNA, 19 nt, Homo sapiens
  misc_RNA (1)...(19): siRNA sense strand
ucuuacaggugcugggcca

SEQ ID NO: 2541737 - RNA, 19 nt, Homo sapiens
  misc_RNA (1)...(19): siRNA sense strand
aaggacaggagcaggaaca

SEQ ID NO: 2541738 - RNA, 19 nt, Homo sapiens
  misc_RNA (1)...(19): siRNA sense strand
agaacuucaccaugggaga

SEQ ID NO: 2541739 - RNA, 19 nt, Homo sapiens
  misc_RNA (1)...(19): siRNA sense strand
gggcaguggcucuggucuu

SEQ ID NO: 2541740 - RNA, 19 nt, Homo sapiens
  misc_RNA (1)...(19): siRNA sense strand
cccucuaccugcagaacaa

SEQ ID NO: 2541741 - RNA, 19 nt, Homo sapiens
  misc_RNA (1)...(19): siRNA sense strand
ugacagcccuggagcccaa

SEQ ID NO: 2541742 - RNA, 19 nt, Homo sapiens
  misc_RNA (1)...(19): siRNA sense strand
acgguaaccugcuggccaa

SEQ ID NO: 2541743 - RNA, 19 nt, Homo sapiens
  misc_RNA (1)...(19): siRNA sense strand
ccuacaacacgcuggccaa

SEQ ID NO: 2541744 - RNA, 19 nt, Homo sapiens
  misc_RNA (1)...(19): siRNA sense strand
aggucaacgugcaggucau

SEQ ID NO: 2541745 - RNA, 19 nt, Homo sapiens
  misc_RNA (1)...(19): siRNA sense strand
acgagaaugaccuggauga

SEQ ID NO: 2541746 - RNA, 19 nt, Homo sapiens
  misc_RNA (1)...(19): siRNA sense strand
agcucuaccugcaggacaa

SEQ ID NO: 2541747 - RNA, 19 nt, Homo sapiens
  misc_RNA (1)...(19): siRNA sense strand
gggacaagacagaguaccu

SEQ ID NO: 2541748 - RNA, 19 nt, Homo sapiens
  misc_RNA (1)...(19): siRNA sense strand
ccacacacaccauuggcua

SEQ ID NO: 2541749 - RNA, 19 nt, Homo sapiens
  misc_RNA (1)...(19): siRNA sense strand
ccgucagcauugaggagga

SEQ ID NO: 2541750 - RNA, 19 nt, Homo sapiens
  misc_RNA (1)...(19): siRNA sense strand
gcauugaggaggacgccuu

SEQ ID NO: 2541751 - RNA, 19 nt, Homo sapiens
  misc_RNA (1)...(19): siRNA sense strand
gcgccaaagaggaguacgu

SEQ ID NO: 2541752 - RNA, 19 nt, Homo sapiens
  misc_RNA (1)...(19): siRNA sense strand
aggaaaugugccagugaua

SEQ ID NO: 2541753 - RNA, 19 nt, Homo sapiens
  misc_RNA (1)...(19): siRNA sense strand
gcgaggaacaugaagagga

SEQ ID NO: 2541754 - RNA, 19 nt, Homo sapiens
  misc_RNA (1)...(19): siRNA sense strand
cuggaagacaccugcaaaa

SEQ ID NO: 2541755 - RNA, 19 nt, Homo sapiens
  misc_RNA (1)...(19): siRNA sense strand
ccaccaggccagaaaagaa

SEQ ID NO: 2541756 - RNA, 19 nt, Homo sapiens
  misc_RNA (1)...(19): siRNA sense strand
aggaaaugugccagugaua

SEQ ID NO: 2541757 - RNA, 19 nt, Homo sapiens
  misc_RNA (1)...(19): siRNA sense strand
gcgaggaacaugaagagga

SEQ ID NO: 2541758 - RNA, 19 nt, Homo sapiens
  misc_RNA (1)...(19): siRNA sense strand
cuggaagacaccugcaaaa

SEQ ID NO: 2541759 - RNA, 19 nt, Homo sapiens
  misc_RNA (1)...(19): siRNA sense strand
ccaccaggccagaaaagaa

SEQ ID NO: 2541760 - RNA, 19 nt, Homo sapiens
  misc_RNA (1)...(19): siRNA sense strand
aggaaaugugccagugaua

SEQ ID NO: 2541761 - RNA, 19 nt, Homo sapiens
  misc_RNA (1)...(19): siRNA sense strand
gcgaggaacaugaagagga

SEQ ID NO: 2541762 - RNA, 19 nt, Homo sapiens
  misc_RNA (1)...(19): siRNA sense strand
cuggaagacaccugcaaaa

SEQ ID NO: 2541763 - RNA, 19 nt, Homo sapiens
  misc_RNA (1)...(19): siRNA sense strand
ccaccaggccagaaaagaa

SEQ ID NO: 2541764 - RNA, 19 nt, Homo sapiens
  misc_RNA (1)...(19): siRNA sense strand
aggaaaugugccagugaua

SEQ ID NO: 2541765 - RNA, 19 nt, Homo sapiens
  misc_RNA (1)...(19): siRNA sense strand
gcgaggaacaugaagagga

SEQ ID NO: 2541766 - RNA, 19 nt, Homo sapiens
  misc_RNA (1)...(19): siRNA sense strand
cuggaagacaccugcaaaa

SEQ ID NO: 2541767 - RNA, 19 nt, Homo sapiens
  misc_RNA (1)...(19): siRNA sense strand
ccaccaggccagaaaagaa

SEQ ID NO: 2541768 - RNA, 19 nt, Homo sapiens
  misc_RNA (1)...(19): siRNA sense strand
cugagaaguuccagcgcuu

SEQ ID NO: 2541769 - RNA, 19 nt, Homo sapiens
  misc_RNA (1)...(19): siRNA sense strand
ggagaagagacuugcagca

SEQ ID NO: 2541770 - RNA, 19 nt, Homo sapiens
  misc_RNA (1)...(19): siRNA sense strand
ugaaugacuacguggacau

SEQ ID NO: 2541771 - RNA, 19 nt, Homo sapiens
  misc_RNA (1)...(19): siRNA sense strand
agaagagacuugcagcaga

SEQ ID NO: 2541772 - RNA, 19 nt, Homo sapiens
  misc_RNA (1)...(19): siRNA sense strand
cugagaaguuccagcgcuu

SEQ ID NO: 2541773 - RNA, 19 nt, Homo sapiens
  misc_RNA (1)...(19): siRNA sense strand
ggagaagagacuugcagca

SEQ ID NO: 2541774 - RNA, 19 nt, Homo sapiens
  misc_RNA (1)...(19): siRNA sense strand
ugaaugacuacguggacau

SEQ ID NO: 2541775 - RNA, 19 nt, Homo sapiens
  misc_RNA (1)...(19): siRNA sense strand
agaagagacuugcagcaga

SEQ ID NO: 2541776 - RNA, 19 nt, Homo sapiens
  misc_RNA (1)...(19): siRNA sense strand
ccucaugaaaguuggacaa

SEQ ID NO: 2541777 - RNA, 19 nt, Homo sapiens
  misc_RNA (1)...(19): siRNA sense strand
cuuuggagggccuggauaa

SEQ ID NO: 2541778 - RNA, 19 nt, Homo sapiens
  misc_RNA (1)...(19): siRNA sense strand
gcacuauuaagaaggaaaa

SEQ ID NO: 2541779 - RNA, 19 nt, Homo sapiens
  misc_RNA (1)...(19): siRNA sense strand
cccacagauaggagacaaa

SEQ ID NO: 2541780 - RNA, 19 nt, Homo sapiens
  misc_RNA (1)...(19): siRNA sense strand
aggaauaaagauccaacaa

SEQ ID NO: 2541781 - RNA, 19 nt, Homo sapiens
  misc_RNA (1)...(19): siRNA sense strand
caaauuucuaccuggacaa

SEQ ID NO: 2541782 - RNA, 19 nt, Homo sapiens
  misc_RNA (1)...(19): siRNA sense strand
uuucaagaauucagcccua

SEQ ID NO: 2541783 - RNA, 19 nt, Homo sapiens
  misc_RNA (1)...(19): siRNA sense strand
ccaaauuucuaccuggaca

SEQ ID NO: 2541784 - RNA, 19 nt, Homo sapiens
  misc_RNA (1)...(19): siRNA sense strand
agaacuagaagcugguaca

SEQ ID NO: 2541785 - RNA, 19 nt, Homo sapiens
  misc_RNA (1)...(19): siRNA sense strand
ugguacaaauggaagaagu

SEQ ID NO: 2541786 - RNA, 19 nt, Homo sapiens
  misc_RNA (1)...(19): siRNA sense strand
cuagaauuucagaagaaca

SEQ ID NO: 2541787 - RNA, 19 nt, Homo sapiens
  misc_RNA (1)...(19): siRNA sense strand
guucuagcacagacggcaa

SEQ ID NO: 2541788 - RNA, 19 nt, Homo sapiens
  misc_RNA (1)...(19): siRNA sense strand
ugcacuauuaagaaggaaa

SEQ ID NO: 2541789 - RNA, 19 nt, Homo sapiens
  misc_RNA (1)...(19): siRNA sense strand
uguacaucguccaggagau

SEQ ID NO: 2541790 - RNA, 19 nt, Homo sapiens
  misc_RNA (1)...(19): siRNA sense strand
ggaccgggauguacgggaa

SEQ ID NO: 2541791 - RNA, 19 nt, Homo sapiens
  misc_RNA (1)...(19): siRNA sense strand
gugaugagcuacagugcca

SEQ ID NO: 2541792 - RNA, 19 nt, Homo sapiens
  misc_RNA (1)...(19): siRNA sense strand
acaucgugcgggagguaaa

SEQ ID NO: 2541793 - RNA, 19 nt, Homo sapiens
  misc_RNA (1)...(19): siRNA sense strand
ugcgggagguaaaggacaa

SEQ ID NO: 2541794 - RNA, 19 nt, Homo sapiens
  misc_RNA (1)...(19): siRNA sense strand
gcagaguucccaaggacga

SEQ ID NO: 2541795 - RNA, 19 nt, Homo sapiens
  misc_RNA (1)...(19): siRNA sense strand
cugccguacuggaggccau

SEQ ID NO: 2541796 - RNA, 19 nt, Homo sapiens
  misc_RNA (1)...(19): siRNA sense strand
aggugaagcugcugcgcaa

SEQ ID NO: 2541797 - RNA, 19 nt, Homo sapiens
  misc_RNA (1)...(19): siRNA sense strand
cuguuaacuucuucaggaa

SEQ ID NO: 2541798 - RNA, 19 nt, Homo sapiens
  misc_RNA (1)...(19): siRNA sense strand
gcauugugagcgaggugaa

SEQ ID NO: 2541799 - RNA, 19 nt, Homo sapiens
  misc_RNA (1)...(19): siRNA sense strand
gagaacauuuacuggcuga

SEQ ID NO: 2541800 - RNA, 19 nt, Homo sapiens
  misc_RNA (1)...(19): siRNA sense strand
uuacauggcacaacggcaa

SEQ ID NO: 2541801 - RNA, 19 nt, Homo sapiens
  misc_RNA (1)...(19): siRNA sense strand
gccuggaaccugagagcga

SEQ ID NO: 2541802 - RNA, 19 nt, Homo sapiens
  misc_RNA (1)...(19): siRNA sense strand
aacaugaacucgcggguca

SEQ ID NO: 2541803 - RNA, 19 nt, Homo sapiens
  misc_RNA (1)...(19): siRNA sense strand
ccaaggagccugaggugcu

SEQ ID NO: 2541804 - RNA, 19 nt, Homo sapiens
  misc_RNA (1)...(19): siRNA sense strand
cagaagcggcagaucgaga

SEQ ID NO: 2541805 - RNA, 19 nt, Homo sapiens
  misc_RNA (1)...(19): siRNA sense strand
aguacaaggaccuggagca

SEQ ID NO: 2541806 - RNA, 19 nt, Homo sapiens
  misc_RNA (1)...(19): siRNA sense strand
ugcauaagcaggagcuaga

SEQ ID NO: 2541807 - RNA, 19 nt, Homo sapiens
  misc_RNA (1)...(19): siRNA sense strand
ucgcgcagcuugaggagca

SEQ ID NO: 2541808 - RNA, 19 nt, Homo sapiens
  misc_RNA (1)...(19): siRNA sense strand
ggcugggccuggagaacau

SEQ ID NO: 2541809 - RNA, 19 nt, Homo sapiens
  misc_RNA (1)...(19): siRNA sense strand
uggugaagccggagaacac

SEQ ID NO: 2541810 - RNA, 19 nt, Homo sapiens
  misc_RNA (1)...(19): siRNA sense strand
auucaaugguacaaggauu

SEQ ID NO: 2541811 - RNA, 19 nt, Homo sapiens
  misc_RNA (1)...(19): siRNA sense strand
aggcauuacaagcgggagu

SEQ ID NO: 2541812 - RNA, 19 nt, Homo sapiens
  misc_RNA (1)...(19): siRNA sense strand
cccaggagaagaagagaca

SEQ ID NO: 2541813 - RNA, 19 nt, Homo sapiens
  misc_RNA (1)...(19): siRNA sense strand
caaacacagaacuggaaaa

SEQ ID NO: 2541814 - RNA, 19 nt, Homo sapiens
  misc_RNA (1)...(19): siRNA sense strand
gagaagaagagacacggau

SEQ ID NO: 2541815 - RNA, 19 nt, Homo sapiens
  misc_RNA (1)...(19): siRNA sense strand
acgauguggcccuggaaga

SEQ ID NO: 2541816 - RNA, 19 nt, Homo sapiens
  misc_RNA (1)...(19): siRNA sense strand
guaagguguuucugggaac

SEQ ID NO: 2541817 - RNA, 19 nt, Homo sapiens
  misc_RNA (1)...(19): siRNA sense strand
gaacuacauugaagugcca

SEQ ID NO: 2541818 - RNA, 19 nt, Homo sapiens
  misc_RNA (1)...(19): siRNA sense strand
uguaagguguuucugggaa

SEQ ID NO: 2541819 - RNA, 19 nt, Homo sapiens
  misc_RNA (1)...(19): siRNA sense strand
auucaaugguacaaggauu

SEQ ID NO: 2541820 - RNA, 19 nt, Homo sapiens
  misc_RNA (1)...(19): siRNA sense strand
aggcauuacaagcgggagu

SEQ ID NO: 2541821 - RNA, 19 nt, Homo sapiens
  misc_RNA (1)...(19): siRNA sense strand
cccaggagaagaagagaca

SEQ ID NO: 2541822 - RNA, 19 nt, Homo sapiens
  misc_RNA (1)...(19): siRNA sense strand
caaacacagaacuggaaaa

SEQ ID NO: 2541823 - RNA, 19 nt, Homo sapiens
  misc_RNA (1)...(19): siRNA sense strand
gagaagaagagacacggau

SEQ ID NO: 2541824 - RNA, 19 nt, Homo sapiens
  misc_RNA (1)...(19): siRNA sense strand
acgauguggcccuggaaga

SEQ ID NO: 2541825 - RNA, 19 nt, Homo sapiens
  misc_RNA (1)...(19): siRNA sense strand
guaagguguuucugggaac

SEQ ID NO: 2541826 - RNA, 19 nt, Homo sapiens
  misc_RNA (1)...(19): siRNA sense strand
gaacuacauugaagugcca

SEQ ID NO: 2541827 - RNA, 19 nt, Homo sapiens
  misc_RNA (1)...(19): siRNA sense strand
uguaagguguuucugggaa

SEQ ID NO: 2541828 - RNA, 19 nt, Homo sapiens
  misc_RNA (1)...(19): siRNA sense strand
ugacaaaaucuauggacaa

SEQ ID NO: 2541829 - RNA, 19 nt, Homo sapiens
  misc_RNA (1)...(19): siRNA sense strand
ccgugauggugaaacauua

SEQ ID NO: 2541830 - RNA, 19 nt, Homo sapiens
  misc_RNA (1)...(19): siRNA sense strand
augagaaguuagaugcaau

SEQ ID NO: 2541831 - RNA, 19 nt, Homo sapiens
  misc_RNA (1)...(19): siRNA sense strand
aaaccgugauggugaaaca

SEQ ID NO: 2541832 - RNA, 19 nt, Homo sapiens
  misc_RNA (1)...(19): siRNA sense strand
aggaaaaguuggugauucu

SEQ ID NO: 2541833 - RNA, 19 nt, Homo sapiens
  misc_RNA (1)...(19): siRNA sense strand
uuauaaaccgugaugguga

SEQ ID NO: 2541834 - RNA, 19 nt, Homo sapiens
  misc_RNA (1)...(19): siRNA sense strand
acauuaacaaccaaaggaa

SEQ ID NO: 2541835 - RNA, 19 nt, Homo sapiens
  misc_RNA (1)...(19): siRNA sense strand
uauaaaccgugauggugaa

SEQ ID NO: 2541836 - RNA, 19 nt, Homo sapiens
  misc_RNA (1)...(19): siRNA sense strand
cgugauggugaaacauuaa

SEQ ID NO: 2541837 - RNA, 19 nt, Homo sapiens
  misc_RNA (1)...(19): siRNA sense strand
aauccauugaugugggcaa

SEQ ID NO: 2541838 - RNA, 19 nt, Homo sapiens
  misc_RNA (1)...(19): siRNA sense strand
ucuagauauugauggcuuu

SEQ ID NO: 2541839 - RNA, 19 nt, Homo sapiens
  misc_RNA (1)...(19): siRNA sense strand
agaacagaugcacgagaaa

SEQ ID NO: 2541840 - RNA, 19 nt, Homo sapiens
  misc_RNA (1)...(19): siRNA sense strand
gaguacacagacuggaaau

SEQ ID NO: 2541841 - RNA, 19 nt, Homo sapiens
  misc_RNA (1)...(19): siRNA sense strand
gugcagugcuacauggacu

SEQ ID NO: 2541842 - RNA, 19 nt, Homo sapiens
  misc_RNA (1)...(19): siRNA sense strand
guggagaacagaugcacga

SEQ ID NO: 2541843 - RNA, 19 nt, Homo sapiens
  misc_RNA (1)...(19): siRNA sense strand
cagagaagauucagcgcuu

SEQ ID NO: 2541844 - RNA, 19 nt, Homo sapiens
  misc_RNA (1)...(19): siRNA sense strand
cagagaagauucagcgcuu

SEQ ID NO: 2541845 - RNA, 19 nt, Homo sapiens
  misc_RNA (1)...(19): siRNA sense strand
cagagaagauucagcgcuu

SEQ ID NO: 2541846 - RNA, 19 nt, Homo sapiens
  misc_RNA (1)...(19): siRNA sense strand
uggaagacuuugagggaga

SEQ ID NO: 2541847 - RNA, 19 nt, Homo sapiens
  misc_RNA (1)...(19): siRNA sense strand
cggagaaguuccagcgcua

SEQ ID NO: 2541848 - RNA, 19 nt, Homo sapiens
  misc_RNA (1)...(19): siRNA sense strand
uggaagugucugaggauga

SEQ ID NO: 2541849 - RNA, 19 nt, Homo sapiens
  misc_RNA (1)...(19): siRNA sense strand
gagaagagcaucagcggga

SEQ ID NO: 2541850 - RNA, 19 nt, Homo sapiens
  misc_RNA (1)...(19): siRNA sense strand
gcuggaagacuuugaggga

SEQ ID NO: 2541851 - RNA, 19 nt, Homo sapiens
  misc_RNA (1)...(19): siRNA sense strand
gcgccuucucucugggcua

SEQ ID NO: 2541852 - RNA, 19 nt, Homo sapiens
  misc_RNA (1)...(19): siRNA sense strand
caauauaucuggaggccua

SEQ ID NO: 2541853 - RNA, 19 nt, Homo sapiens
  misc_RNA (1)...(19): siRNA sense strand
uggucuagcuacagugaaa

SEQ ID NO: 2541854 - RNA, 19 nt, Homo sapiens
  misc_RNA (1)...(19): siRNA sense strand
ccggaggagguguggaaua

SEQ ID NO: 2541855 - RNA, 19 nt, Homo sapiens
  misc_RNA (1)...(19): siRNA sense strand
agaccaaauuugagaugau

SEQ ID NO: 2541856 - RNA, 19 nt, Homo sapiens
  misc_RNA (1)...(19): siRNA sense strand
ugacuugauuagagaccaa

SEQ ID NO: 2541857 - RNA, 19 nt, Homo sapiens
  misc_RNA (1)...(19): siRNA sense strand
ggaacagucuacaagggaa

SEQ ID NO: 2541858 - RNA, 19 nt, Homo sapiens
  misc_RNA (1)...(19): siRNA sense strand
auguggaaguguuggagaa

SEQ ID NO: 2541859 - RNA, 19 nt, Homo sapiens
  misc_RNA (1)...(19): siRNA sense strand
uggaaguguuggagaaugu

SEQ ID NO: 2541860 - RNA, 19 nt, Homo sapiens
  misc_RNA (1)...(19): siRNA sense strand
acuccaacaaagagaacaa

SEQ ID NO: 2541861 - RNA, 19 nt, Homo sapiens
  misc_RNA (1)...(19): siRNA sense strand
gggacaaagaauuggaucu

SEQ ID NO: 2541862 - RNA, 19 nt, Homo sapiens
  misc_RNA (1)...(19): siRNA sense strand
cuggcuuacuggagaagaa

SEQ ID NO: 2541863 - RNA, 19 nt, Homo sapiens
  misc_RNA (1)...(19): siRNA sense strand
cgagaaaggaagucaucuu

SEQ ID NO: 2541864 - RNA, 19 nt, Homo sapiens
  misc_RNA (1)...(19): siRNA sense strand
acuuauagauauugcacga

SEQ ID NO: 2541865 - RNA, 19 nt, Homo sapiens
  misc_RNA (1)...(19): siRNA sense strand
cugucaaacaugugguuau

SEQ ID NO: 2541866 - RNA, 19 nt, Homo sapiens
  misc_RNA (1)...(19): siRNA sense strand
agugaaaucucgauggagu

SEQ ID NO: 2541867 - RNA, 19 nt, Homo sapiens
  misc_RNA (1)...(19): siRNA sense strand
gagaagaauugcaugugga

SEQ ID NO: 2541868 - RNA, 19 nt, Homo sapiens
  misc_RNA (1)...(19): siRNA sense strand
aagaauugcauguggaagu

SEQ ID NO: 2541869 - RNA, 19 nt, Homo sapiens
  misc_RNA (1)...(19): siRNA sense strand
gagugaugauugggagauu

SEQ ID NO: 2541870 - RNA, 19 nt, Homo sapiens
  misc_RNA (1)...(19): siRNA sense strand
agucaaucauccacagaga

SEQ ID NO: 2541871 - RNA, 19 nt, Homo sapiens
  misc_RNA (1)...(19): siRNA sense strand
aaagaaaagagaugagaga

SEQ ID NO: 2541872 - RNA, 19 nt, Homo sapiens
  misc_RNA (1)...(19): siRNA sense strand
acaacagggaccagauaau

SEQ ID NO: 2541873 - RNA, 19 nt, Homo sapiens
  misc_RNA (1)...(19): siRNA sense strand
ugaagagauuaauggcaga

SEQ ID NO: 2541874 - RNA, 19 nt, Homo sapiens
  misc_RNA (1)...(19): siRNA sense strand
guguguuaauuaugaccaa

SEQ ID NO: 2541875 - RNA, 19 nt, Homo sapiens
  misc_RNA (1)...(19): siRNA sense strand
guguggaauaucaaacaaa

SEQ ID NO: 2541876 - RNA, 19 nt, Homo sapiens
  misc_RNA (1)...(19): siRNA sense strand
gcagauuacagugggacaa

SEQ ID NO: 2541877 - RNA, 19 nt, Homo sapiens
  misc_RNA (1)...(19): siRNA sense strand
gcuuucagucagauguaua

SEQ ID NO: 2541878 - RNA, 19 nt, Homo sapiens
  misc_RNA (1)...(19): siRNA sense strand
caaacagaggacaguggua

SEQ ID NO: 2541879 - RNA, 19 nt, Homo sapiens
  misc_RNA (1)...(19): siRNA sense strand
acccaauaccacaggaaga

SEQ ID NO: 2541880 - RNA, 19 nt, Homo sapiens
  misc_RNA (1)...(19): siRNA sense strand
acagaaaucuccaggaccu

SEQ ID NO: 2541881 - RNA, 19 nt, Homo sapiens
  misc_RNA (1)...(19): siRNA sense strand
acaaagaauuggaucugga

SEQ ID NO: 2541882 - RNA, 19 nt, Homo sapiens
  misc_RNA (1)...(19): siRNA sense strand
gauuacagugggacaaaga

SEQ ID NO: 2541883 - RNA, 19 nt, Homo sapiens
  misc_RNA (1)...(19): siRNA sense strand
ggacaaauuugguggggag

SEQ ID NO: 2541884 - RNA, 19 nt, Homo sapiens
  misc_RNA (1)...(19): siRNA sense strand
uaaagaaagcacugaugau

SEQ ID NO: 2541885 - RNA, 19 nt, Homo sapiens
  misc_RNA (1)...(19): siRNA sense strand
gggaaaguggcauggugau

SEQ ID NO: 2541886 - RNA, 19 nt, Homo sapiens
  misc_RNA (1)...(19): siRNA sense strand
agauauugcacgacagacu

SEQ ID NO: 2541887 - RNA, 19 nt, Homo sapiens
  misc_RNA (1)...(19): siRNA sense strand
ugauuagagaccaaggauu

SEQ ID NO: 2541888 - RNA, 19 nt, Homo sapiens
  misc_RNA (1)...(19): siRNA sense strand
ggaauuguucuguaugaau

SEQ ID NO: 2541889 - RNA, 19 nt, Homo sapiens
  misc_RNA (1)...(19): siRNA sense strand
agaagaauugcauguggaa

SEQ ID NO: 2541890 - RNA, 19 nt, Homo sapiens
  misc_RNA (1)...(19): siRNA sense strand
acgugaaagccuuacagaa

SEQ ID NO: 2541891 - RNA, 19 nt, Homo sapiens
  misc_RNA (1)...(19): siRNA sense strand
cagaagacaggaaucgaau

SEQ ID NO: 2541892 - RNA, 19 nt, Homo sapiens
  misc_RNA (1)...(19): siRNA sense strand
uggugauguggcagugaaa

SEQ ID NO: 2541893 - RNA, 19 nt, Homo sapiens
  misc_RNA (1)...(19): siRNA sense strand
gcuagaugcacuccaacaa

SEQ ID NO: 2541894 - RNA, 19 nt, Homo sapiens
  misc_RNA (1)...(19): siRNA sense strand
acugaugaugagaggucua

SEQ ID NO: 2541895 - RNA, 19 nt, Homo sapiens
  misc_RNA (1)...(19): siRNA sense strand
acagaauucaggauggaga

SEQ ID NO: 2541896 - RNA, 19 nt, Homo sapiens
  misc_RNA (1)...(19): siRNA sense strand
agggaaaguggcaugguga

SEQ ID NO: 2541897 - RNA, 19 nt, Homo sapiens
  misc_RNA (1)...(19): siRNA sense strand
gugauguggcagugaaaau

SEQ ID NO: 2541898 - RNA, 19 nt, Homo sapiens
  misc_RNA (1)...(19): siRNA sense strand
gauggagagaagaaaccaa

SEQ ID NO: 2541899 - RNA, 19 nt, Homo sapiens
  misc_RNA (1)...(19): siRNA sense strand
ccaggaccucagcgagaaa

SEQ ID NO: 2541900 - RNA, 19 nt, Homo sapiens
  misc_RNA (1)...(19): siRNA sense strand
augaagaauacaccagcaa

SEQ ID NO: 2541901 - RNA, 19 nt, Homo sapiens
  misc_RNA (1)...(19): siRNA sense strand
ccagcaagcuagaugcacu

SEQ ID NO: 2541902 - RNA, 19 nt, Homo sapiens
  misc_RNA (1)...(19): siRNA sense strand
gaugagaggucuaauccca

SEQ ID NO: 2541903 - RNA, 19 nt, Homo sapiens
  misc_RNA (1)...(19): siRNA sense strand
gauuaaguugacacaggaa

SEQ ID NO: 2541904 - RNA, 19 nt, Homo sapiens
  misc_RNA (1)...(19): siRNA sense strand
uuacagugggacaaagaau

SEQ ID NO: 2541905 - RNA, 19 nt, Homo sapiens
  misc_RNA (1)...(19): siRNA sense strand
gaaaacacgacaugugaau

SEQ ID NO: 2541906 - RNA, 19 nt, Homo sapiens
  misc_RNA (1)...(19): siRNA sense strand
cucccaaugugcauauaaa

SEQ ID NO: 2541907 - RNA, 19 nt, Homo sapiens
  misc_RNA (1)...(19): siRNA sense strand
cagauuacagugggacaaa

SEQ ID NO: 2541908 - RNA, 19 nt, Homo sapiens
  misc_RNA (1)...(19): siRNA sense strand
cagugaaaauguugaaugu

SEQ ID NO: 2541909 - RNA, 19 nt, Homo sapiens
  misc_RNA (1)...(19): siRNA sense strand
uggauuacuuacacgccaa

SEQ ID NO: 2541910 - RNA, 19 nt, Homo sapiens
  misc_RNA (1)...(19): siRNA sense strand
guacggaguaacuguccaa

SEQ ID NO: 2541911 - RNA, 19 nt, Homo sapiens
  misc_RNA (1)...(19): siRNA sense strand
agaauacaccagcaagcua

SEQ ID NO: 2541912 - RNA, 19 nt, Homo sapiens
  misc_RNA (1)...(19): siRNA sense strand
aauucaggauggagagaag

SEQ ID NO: 2541913 - RNA, 19 nt, Homo sapiens
  misc_RNA (1)...(19): siRNA sense strand
aaugaaaacacuugguaga

SEQ ID NO: 2541914 - RNA, 19 nt, Homo sapiens
  misc_RNA (1)...(19): siRNA sense strand
aggcaaagaaauagaggga

SEQ ID NO: 2541915 - RNA, 19 nt, Homo sapiens
  misc_RNA (1)...(19): siRNA sense strand
uggugaaguucgugaggau

SEQ ID NO: 2541916 - RNA, 19 nt, Homo sapiens
  misc_RNA (1)...(19): siRNA sense strand
agaaggugaacuaggcaaa

SEQ ID NO: 2541917 - RNA, 19 nt, Homo sapiens
  misc_RNA (1)...(19): siRNA sense strand
cagaaggugaacuaggcaa

SEQ ID NO: 2541918 - RNA, 19 nt, Homo sapiens
  misc_RNA (1)...(19): siRNA sense strand
ccuuguuggaauugauauu

SEQ ID NO: 2541919 - RNA, 19 nt, Homo sapiens
  misc_RNA (1)...(19): siRNA sense strand
caaagaaauagagggaaaa

SEQ ID NO: 2541920 - RNA, 19 nt, Homo sapiens
  misc_RNA (1)...(19): siRNA sense strand
gcugacagaaacuggugaa

SEQ ID NO: 2541921 - RNA, 19 nt, Homo sapiens
  misc_RNA (1)...(19): siRNA sense strand
aagaauaugcuguagccau

SEQ ID NO: 2541922 - RNA, 19 nt, Homo sapiens
  misc_RNA (1)...(19): siRNA sense strand
gaaaauacaaugcagguga

SEQ ID NO: 2541923 - RNA, 19 nt, Homo sapiens
  misc_RNA (1)...(19): siRNA sense strand
gugaacuaggcaaagaaau

SEQ ID NO: 2541924 - RNA, 19 nt, Homo sapiens
  misc_RNA (1)...(19): siRNA sense strand
gugugcaaugagugaagaa

SEQ ID NO: 2541925 - RNA, 19 nt, Homo sapiens
  misc_RNA (1)...(19): siRNA sense strand
uagaagaauuggagcgaga

SEQ ID NO: 2541926 - RNA, 19 nt, Homo sapiens
  misc_RNA (1)...(19): siRNA sense strand
aggcugaguuauuggagaa

SEQ ID NO: 2541927 - RNA, 19 nt, Homo sapiens
  misc_RNA (1)...(19): siRNA sense strand
cuucaaucgcagaggagaa

SEQ ID NO: 2541928 - RNA, 19 nt, Homo sapiens
  misc_RNA (1)...(19): siRNA sense strand
gccaaauggacgacauaaa

SEQ ID NO: 2541929 - RNA, 19 nt, Homo sapiens
  misc_RNA (1)...(19): siRNA sense strand
cugcaaaggacaaugguga

SEQ ID NO: 2541930 - RNA, 19 nt, Homo sapiens
  misc_RNA (1)...(19): siRNA sense strand
ccacauagcccacaucaua

SEQ ID NO: 2541931 - RNA, 19 nt, Homo sapiens
  misc_RNA (1)...(19): siRNA sense strand
acaaagacaugguggucca

SEQ ID NO: 2541932 - RNA, 19 nt, Homo sapiens
  misc_RNA (1)...(19): siRNA sense strand
agcagaaaccuauaggaaa

SEQ ID NO: 2541933 - RNA, 19 nt, Homo sapiens
  misc_RNA (1)...(19): siRNA sense strand
cagccuuggaugaaauaaa

SEQ ID NO: 2541934 - RNA, 19 nt, Homo sapiens
  misc_RNA (1)...(19): siRNA sense strand
gauuagaggaggcggcuga

SEQ ID NO: 2541935 - RNA, 19 nt, Homo sapiens
  misc_RNA (1)...(19): siRNA sense strand
gcauaaacacuucacggaa

SEQ ID NO: 2541936 - RNA, 19 nt, Homo sapiens
  misc_RNA (1)...(19): siRNA sense strand
cagaugaugaggagcaaga

SEQ ID NO: 2541937 - RNA, 19 nt, Homo sapiens
  misc_RNA (1)...(19): siRNA sense strand
ugacagaagcagaacgguu

SEQ ID NO: 2541938 - RNA, 19 nt, Homo sapiens
  misc_RNA (1)...(19): siRNA sense strand
aagcugaggaccaggaaga

SEQ ID NO: 2541939 - RNA, 19 nt, Homo sapiens
  misc_RNA (1)...(19): siRNA sense strand
cucaaauguguucgagaaa

SEQ ID NO: 2541940 - RNA, 19 nt, Homo sapiens
  misc_RNA (1)...(19): siRNA sense strand
cgagaagcugaaaggaaaa

SEQ ID NO: 2541941 - RNA, 19 nt, Homo sapiens
  misc_RNA (1)...(19): siRNA sense strand
aggaccaggaagagaaaga

SEQ ID NO: 2541942 - RNA, 19 nt, Homo sapiens
  misc_RNA (1)...(19): siRNA sense strand
acauaaaauucccgaguca

SEQ ID NO: 2541943 - RNA, 19 nt, Homo sapiens
  misc_RNA (1)...(19): siRNA sense strand
agacuauuccagagacgaa

SEQ ID NO: 2541944 - RNA, 19 nt, Homo sapiens
  misc_RNA (1)...(19): siRNA sense strand
uugauguacuuguggaaaa

SEQ ID NO: 2541945 - RNA, 19 nt, Homo sapiens
  misc_RNA (1)...(19): siRNA sense strand
agccaaaugcagaaaguga

SEQ ID NO: 2541946 - RNA, 19 nt, Homo sapiens
  misc_RNA (1)...(19): siRNA sense strand
agcgagaagcugaaaggaa

SEQ ID NO: 2541947 - RNA, 19 nt, Homo sapiens
  misc_RNA (1)...(19): siRNA sense strand
cggagacagccuuggauga

SEQ ID NO: 2541948 - RNA, 19 nt, Homo sapiens
  misc_RNA (1)...(19): siRNA sense strand
augaagaugaugaugaaga

SEQ ID NO: 2541949 - RNA, 19 nt, Homo sapiens
  misc_RNA (1)...(19): siRNA sense strand
uagaaaugguuccagaaaa

SEQ ID NO: 2541950 - RNA, 19 nt, Homo sapiens
  misc_RNA (1)...(19): siRNA sense strand
gaugcauaugugagaagaa

SEQ ID NO: 2541951 - RNA, 19 nt, Homo sapiens
  misc_RNA (1)...(19): siRNA sense strand
cugaggaccaggaagagaa

SEQ ID NO: 2541952 - RNA, 19 nt, Homo sapiens
  misc_RNA (1)...(19): siRNA sense strand
gggaaaugcuuguugggug

SEQ ID NO: 2541953 - RNA, 19 nt, Homo sapiens
  misc_RNA (1)...(19): siRNA sense strand
acgaugaagaugaugauga

SEQ ID NO: 2541954 - RNA, 19 nt, Homo sapiens
  misc_RNA (1)...(19): siRNA sense strand
gcagcugacuuguugguga

SEQ ID NO: 2541955 - RNA, 19 nt, Homo sapiens
  misc_RNA (1)...(19): siRNA sense strand
ccaggaagagaaagaagau

SEQ ID NO: 2541956 - RNA, 19 nt, Homo sapiens
  misc_RNA (1)...(19): siRNA sense strand
ggacaauggugaagcugag

SEQ ID NO: 2541957 - RNA, 19 nt, Homo sapiens
  misc_RNA (1)...(19): siRNA sense strand
cagagacugcaaaggacaa

SEQ ID NO: 2541958 - RNA, 19 nt, Homo sapiens
  misc_RNA (1)...(19): siRNA sense strand
gagaagcgccugcaggaga

SEQ ID NO: 2541959 - RNA, 19 nt, Homo sapiens
  misc_RNA (1)...(19): siRNA sense strand
aagaugaugaugaagaaga

SEQ ID NO: 2541960 - RNA, 19 nt, Homo sapiens
  misc_RNA (1)...(19): siRNA sense strand
auauaaucuugaugagcca

SEQ ID NO: 2541961 - RNA, 19 nt, Homo sapiens
  misc_RNA (1)...(19): siRNA sense strand
cggaaugcagauaaaauua

SEQ ID NO: 2541962 - RNA, 19 nt, Homo sapiens
  misc_RNA (1)...(19): siRNA sense strand
ggaaaugcuuguugggugc

SEQ ID NO: 2541963 - RNA, 19 nt, Homo sapiens
  misc_RNA (1)...(19): siRNA sense strand
uguuagaaaugguuccaga

SEQ ID NO: 2541964 - RNA, 19 nt, Homo sapiens
  misc_RNA (1)...(19): siRNA sense strand
aagagaaagaagaugcuga

SEQ ID NO: 2541965 - RNA, 19 nt, Homo sapiens
  misc_RNA (1)...(19): siRNA sense strand
ccaaugaccaggauggcga

SEQ ID NO: 2541966 - RNA, 19 nt, Homo sapiens
  misc_RNA (1)...(19): siRNA sense strand
aagaugaagaugauguaga

SEQ ID NO: 2541967 - RNA, 19 nt, Homo sapiens
  misc_RNA (1)...(19): siRNA sense strand
ccugcaggagauagaagaa

SEQ ID NO: 2541968 - RNA, 19 nt, Homo sapiens
  misc_RNA (1)...(19): siRNA sense strand
cuucaagauuucaggcaug

SEQ ID NO: 2541969 - RNA, 19 nt, Homo sapiens
  misc_RNA (1)...(19): siRNA sense strand
ccagagacgaagaccacau

SEQ ID NO: 2541970 - RNA, 19 nt, Homo sapiens
  misc_RNA (1)...(19): siRNA sense strand
ugcaaaggacaauggugaa

SEQ ID NO: 2541971 - RNA, 19 nt, Homo sapiens
  misc_RNA (1)...(19): siRNA sense strand
uagaagaauuggagcgaga

SEQ ID NO: 2541972 - RNA, 19 nt, Homo sapiens
  misc_RNA (1)...(19): siRNA sense strand
aggcugaguuauuggagaa

SEQ ID NO: 2541973 - RNA, 19 nt, Homo sapiens
  misc_RNA (1)...(19): siRNA sense strand
cuucaaucgcagaggagaa

SEQ ID NO: 2541974 - RNA, 19 nt, Homo sapiens
  misc_RNA (1)...(19): siRNA sense strand
gccaaauggacgacauaaa

SEQ ID NO: 2541975 - RNA, 19 nt, Homo sapiens
  misc_RNA (1)...(19): siRNA sense strand
cugcaaaggacaaugguga

SEQ ID NO: 2541976 - RNA, 19 nt, Homo sapiens
  misc_RNA (1)...(19): siRNA sense strand
ccacauagcccacaucaua

SEQ ID NO: 2541977 - RNA, 19 nt, Homo sapiens
  misc_RNA (1)...(19): siRNA sense strand
acaaagacaugguggucca

SEQ ID NO: 2541978 - RNA, 19 nt, Homo sapiens
  misc_RNA (1)...(19): siRNA sense strand
agcagaaaccuauaggaaa

SEQ ID NO: 2541979 - RNA, 19 nt, Homo sapiens
  misc_RNA (1)...(19): siRNA sense strand
cagccuuggaugaaauaaa

SEQ ID NO: 2541980 - RNA, 19 nt, Homo sapiens
  misc_RNA (1)...(19): siRNA sense strand
gauuagaggaggcggcuga

SEQ ID NO: 2541981 - RNA, 19 nt, Homo sapiens
  misc_RNA (1)...(19): siRNA sense strand
gcauaaacacuucacggaa

SEQ ID NO: 2541982 - RNA, 19 nt, Homo sapiens
  misc_RNA (1)...(19): siRNA sense strand
cagaugaugaggagcaaga

SEQ ID NO: 2541983 - RNA, 19 nt, Homo sapiens
  misc_RNA (1)...(19): siRNA sense strand
ugacagaagcagaacgguu

SEQ ID NO: 2541984 - RNA, 19 nt, Homo sapiens
  misc_RNA (1)...(19): siRNA sense strand
aagcugaggaccaggaaga

SEQ ID NO: 2541985 - RNA, 19 nt, Homo sapiens
  misc_RNA (1)...(19): siRNA sense strand
cucaaauguguucgagaaa

SEQ ID NO: 2541986 - RNA, 19 nt, Homo sapiens
  misc_RNA (1)...(19): siRNA sense strand
cgagaagcugaaaggaaaa

SEQ ID NO: 2541987 - RNA, 19 nt, Homo sapiens
  misc_RNA (1)...(19): siRNA sense strand
aggaccaggaagagaaaga

SEQ ID NO: 2541988 - RNA, 19 nt, Homo sapiens
  misc_RNA (1)...(19): siRNA sense strand
acauaaaauucccgaguca

SEQ ID NO: 2541989 - RNA, 19 nt, Homo sapiens
  misc_RNA (1)...(19): siRNA sense strand
agacuauuccagagacgaa

SEQ ID NO: 2541990 - RNA, 19 nt, Homo sapiens
  misc_RNA (1)...(19): siRNA sense strand
uugauguacuuguggaaaa

SEQ ID NO: 2541991 - RNA, 19 nt, Homo sapiens
  misc_RNA (1)...(19): siRNA sense strand
agccaaaugcagaaaguga

SEQ ID NO: 2541992 - RNA, 19 nt, Homo sapiens
  misc_RNA (1)...(19): siRNA sense strand
agcgagaagcugaaaggaa

SEQ ID NO: 2541993 - RNA, 19 nt, Homo sapiens
  misc_RNA (1)...(19): siRNA sense strand
cggagacagccuuggauga

SEQ ID NO: 2541994 - RNA, 19 nt, Homo sapiens
  misc_RNA (1)...(19): siRNA sense strand
augaagaugaugaugaaga

SEQ ID NO: 2541995 - RNA, 19 nt, Homo sapiens
  misc_RNA (1)...(19): siRNA sense strand
uagaaaugguuccagaaaa

SEQ ID NO: 2541996 - RNA, 19 nt, Homo sapiens
  misc_RNA (1)...(19): siRNA sense strand
gaugcauaugugagaagaa

SEQ ID NO: 2541997 - RNA, 19 nt, Homo sapiens
  misc_RNA (1)...(19): siRNA sense strand
cugaggaccaggaagagaa

SEQ ID NO: 2541998 - RNA, 19 nt, Homo sapiens
  misc_RNA (1)...(19): siRNA sense strand
gggaaaugcuuguugggug

SEQ ID NO: 2541999 - RNA, 19 nt, Homo sapiens
  misc_RNA (1)...(19): siRNA sense strand
acgaugaagaugaugauga

SEQ ID NO: 2542000 - RNA, 19 nt, Homo sapiens
  misc_RNA (1)...(19): siRNA sense strand
gcagcugacuuguugguga

SEQ ID NO: 2542001 - RNA, 19 nt, Homo sapiens
  misc_RNA (1)...(19): siRNA sense strand
ccaggaagagaaagaagau

SEQ ID NO: 2542002 - RNA, 19 nt, Homo sapiens
  misc_RNA (1)...(19): siRNA sense strand
ggacaauggugaagcugag

SEQ ID NO: 2542003 - RNA, 19 nt, Homo sapiens
  misc_RNA (1)...(19): siRNA sense strand
cagagacugcaaaggacaa

SEQ ID NO: 2542004 - RNA, 19 nt, Homo sapiens
  misc_RNA (1)...(19): siRNA sense strand
gagaagcgccugcaggaga

SEQ ID NO: 2542005 - RNA, 19 nt, Homo sapiens
  misc_RNA (1)...(19): siRNA sense strand
aagaugaugaugaagaaga

SEQ ID NO: 2542006 - RNA, 19 nt, Homo sapiens
  misc_RNA (1)...(19): siRNA sense strand
auauaaucuugaugagcca

SEQ ID NO: 2542007 - RNA, 19 nt, Homo sapiens
  misc_RNA (1)...(19): siRNA sense strand
cggaaugcagauaaaauua

SEQ ID NO: 2542008 - RNA, 19 nt, Homo sapiens
  misc_RNA (1)...(19): siRNA sense strand
ggaaaugcuuguugggugc

SEQ ID NO: 2542009 - RNA, 19 nt, Homo sapiens
  misc_RNA (1)...(19): siRNA sense strand
uguuagaaaugguuccaga

SEQ ID NO: 2542010 - RNA, 19 nt, Homo sapiens
  misc_RNA (1)...(19): siRNA sense strand
aagagaaagaagaugcuga

SEQ ID NO: 2542011 - RNA, 19 nt, Homo sapiens
  misc_RNA (1)...(19): siRNA sense strand
ccaaugaccaggauggcga

SEQ ID NO: 2542012 - RNA, 19 nt, Homo sapiens
  misc_RNA (1)...(19): siRNA sense strand
aagaugaagaugauguaga

SEQ ID NO: 2542013 - RNA, 19 nt, Homo sapiens
  misc_RNA (1)...(19): siRNA sense strand
ccugcaggagauagaagaa

SEQ ID NO: 2542014 - RNA, 19 nt, Homo sapiens
  misc_RNA (1)...(19): siRNA sense strand
cuucaagauuucaggcaug

SEQ ID NO: 2542015 - RNA, 19 nt, Homo sapiens
  misc_RNA (1)...(19): siRNA sense strand
ccagagacgaagaccacau

SEQ ID NO: 2542016 - RNA, 19 nt, Homo sapiens
  misc_RNA (1)...(19): siRNA sense strand
ugcaaaggacaauggugaa

SEQ ID NO: 2542017 - RNA, 19 nt, Homo sapiens
  misc_RNA (1)...(19): siRNA sense strand
agucuguauuagugggaaa

SEQ ID NO: 2542018 - RNA, 19 nt, Homo sapiens
  misc_RNA (1)...(19): siRNA sense strand
cgaaggagcaguacggaga

SEQ ID NO: 2542019 - RNA, 19 nt, Homo sapiens
  misc_RNA (1)...(19): siRNA sense strand
cauucuuauuagaggagua

SEQ ID NO: 2542020 - RNA, 19 nt, Homo sapiens
  misc_RNA (1)...(19): siRNA sense strand
gguucaauuauguggucaa

SEQ ID NO: 2542021 - RNA, 19 nt, Homo sapiens
  misc_RNA (1)...(19): siRNA sense strand
gcuauugcaccuugggaga

SEQ ID NO: 2542022 - RNA, 19 nt, Homo sapiens
  misc_RNA (1)...(19): siRNA sense strand
uauuagaggaguagggaag

SEQ ID NO: 2542023 - RNA, 19 nt, Homo sapiens
  misc_RNA (1)...(19): siRNA sense strand
agucuguauuagugggaaa

SEQ ID NO: 2542024 - RNA, 19 nt, Homo sapiens
  misc_RNA (1)...(19): siRNA sense strand
cgaaggagcaguacggaga

SEQ ID NO: 2542025 - RNA, 19 nt, Homo sapiens
  misc_RNA (1)...(19): siRNA sense strand
cauucuuauuagaggagua

SEQ ID NO: 2542026 - RNA, 19 nt, Homo sapiens
  misc_RNA (1)...(19): siRNA sense strand
ccuggauggaguuggauua

SEQ ID NO: 2542027 - RNA, 19 nt, Homo sapiens
  misc_RNA (1)...(19): siRNA sense strand
gguucaauuauguggucaa

SEQ ID NO: 2542028 - RNA, 19 nt, Homo sapiens
  misc_RNA (1)...(19): siRNA sense strand
aaauagugaagauggagaa

SEQ ID NO: 2542029 - RNA, 19 nt, Homo sapiens
  misc_RNA (1)...(19): siRNA sense strand
gcuauugcaccuugggaga

SEQ ID NO: 2542030 - RNA, 19 nt, Homo sapiens
  misc_RNA (1)...(19): siRNA sense strand
uauuagaggaguagggaag

SEQ ID NO: 2542031 - RNA, 19 nt, Homo sapiens
  misc_RNA (1)...(19): siRNA sense strand
cagaaacuugaaagagaga

SEQ ID NO: 2542032 - RNA, 19 nt, Homo sapiens
  misc_RNA (1)...(19): siRNA sense strand
acagaagauggcuggaaga

SEQ ID NO: 2542033 - RNA, 19 nt, Homo sapiens
  misc_RNA (1)...(19): siRNA sense strand
agucuguauuagugggaaa

SEQ ID NO: 2542034 - RNA, 19 nt, Homo sapiens
  misc_RNA (1)...(19): siRNA sense strand
cgaaggagcaguacggaga

SEQ ID NO: 2542035 - RNA, 19 nt, Homo sapiens
  misc_RNA (1)...(19): siRNA sense strand
cauucuuauuagaggagua

SEQ ID NO: 2542036 - RNA, 19 nt, Homo sapiens
  misc_RNA (1)...(19): siRNA sense strand
ccuggauggaguuggauua

SEQ ID NO: 2542037 - RNA, 19 nt, Homo sapiens
  misc_RNA (1)...(19): siRNA sense strand
gguucaauuauguggucaa

SEQ ID NO: 2542038 - RNA, 19 nt, Homo sapiens
  misc_RNA (1)...(19): siRNA sense strand
aaauagugaagauggagaa

SEQ ID NO: 2542039 - RNA, 19 nt, Homo sapiens
  misc_RNA (1)...(19): siRNA sense strand
gcuauugcaccuugggaga

SEQ ID NO: 2542040 - RNA, 19 nt, Homo sapiens
  misc_RNA (1)...(19): siRNA sense strand
uauuagaggaguagggaag

SEQ ID NO: 2542041 - RNA, 19 nt, Homo sapiens
  misc_RNA (1)...(19): siRNA sense strand
cagaaacuugaaagagaga

SEQ ID NO: 2542042 - RNA, 19 nt, Homo sapiens
  misc_RNA (1)...(19): siRNA sense strand
acagaagauggcuggaaga

SEQ ID NO: 2542043 - RNA, 19 nt, Homo sapiens
  misc_RNA (1)...(19): siRNA sense strand
ugggauaacuagaggucaa

SEQ ID NO: 2542044 - RNA, 19 nt, Homo sapiens
  misc_RNA (1)...(19): siRNA sense strand
ggagaugaggagaaggaaa

SEQ ID NO: 2542045 - RNA, 19 nt, Homo sapiens
  misc_RNA (1)...(19): siRNA sense strand
ugaaagaggccgaggcuga

SEQ ID NO: 2542046 - RNA, 19 nt, Homo sapiens
  misc_RNA (1)...(19): siRNA sense strand
uggagaaacaggagagaca

SEQ ID NO: 2542047 - RNA, 19 nt, Homo sapiens
  misc_RNA (1)...(19): siRNA sense strand
gaagaaaagaugagaaaca

SEQ ID NO: 2542048 - RNA, 19 nt, Homo sapiens
  misc_RNA (1)...(19): siRNA sense strand
ccuaagaagaagauucaaa

SEQ ID NO: 2542049 - RNA, 19 nt, Homo sapiens
  misc_RNA (1)...(19): siRNA sense strand
ccuguaaagccaagaagaa

SEQ ID NO: 2542050 - RNA, 19 nt, Homo sapiens
  misc_RNA (1)...(19): siRNA sense strand
acggaaugcuaaaggaaaa

SEQ ID NO: 2542051 - RNA, 19 nt, Homo sapiens
  misc_RNA (1)...(19): siRNA sense strand
agaggagaguucagagaau

SEQ ID NO: 2542052 - RNA, 19 nt, Homo sapiens
  misc_RNA (1)...(19): siRNA sense strand
uggaagaaaagaugagaaa

SEQ ID NO: 2542053 - RNA, 19 nt, Homo sapiens
  misc_RNA (1)...(19): siRNA sense strand
acaauuaaacagacagcaa

SEQ ID NO: 2542054 - RNA, 19 nt, Homo sapiens
  misc_RNA (1)...(19): siRNA sense strand
gagugugaauaguggaaaa

SEQ ID NO: 2542055 - RNA, 19 nt, Homo sapiens
  misc_RNA (1)...(19): siRNA sense strand
aagaaauacagaagcgauu

SEQ ID NO: 2542056 - RNA, 19 nt, Homo sapiens
  misc_RNA (1)...(19): siRNA sense strand
aggagaagaacaugcuaaa

SEQ ID NO: 2542057 - RNA, 19 nt, Homo sapiens
  misc_RNA (1)...(19): siRNA sense strand
caagagacgaaaaggaaaa

SEQ ID NO: 2542058 - RNA, 19 nt, Homo sapiens
  misc_RNA (1)...(19): siRNA sense strand
agagaagcuggaagaaaua

SEQ ID NO: 2542059 - RNA, 19 nt, Homo sapiens
  misc_RNA (1)...(19): siRNA sense strand
gaagaaauagauuggguga

SEQ ID NO: 2542060 - RNA, 19 nt, Homo sapiens
  misc_RNA (1)...(19): siRNA sense strand
aaagauaggaggagaaacu

SEQ ID NO: 2542061 - RNA, 19 nt, Homo sapiens
  misc_RNA (1)...(19): siRNA sense strand
ccuuacaagagcagcuaaa

SEQ ID NO: 2542062 - RNA, 19 nt, Homo sapiens
  misc_RNA (1)...(19): siRNA sense strand
ccaagaagaagaauggaga

SEQ ID NO: 2542063 - RNA, 19 nt, Homo sapiens
  misc_RNA (1)...(19): siRNA sense strand
agagagaagcuggaagaaa

SEQ ID NO: 2542064 - RNA, 19 nt, Homo sapiens
  misc_RNA (1)...(19): siRNA sense strand
ggcugaugauggagaaaca

SEQ ID NO: 2542065 - RNA, 19 nt, Homo sapiens
  misc_RNA (1)...(19): siRNA sense strand
cagaaaauccuaaaagcaa

SEQ ID NO: 2542066 - RNA, 19 nt, Homo sapiens
  misc_RNA (1)...(19): siRNA sense strand
aagaguugcaagaggaauu

SEQ ID NO: 2542067 - RNA, 19 nt, Homo sapiens
  misc_RNA (1)...(19): siRNA sense strand
ccgcacugcuggaagaaaa

SEQ ID NO: 2542068 - RNA, 19 nt, Homo sapiens
  misc_RNA (1)...(19): siRNA sense strand
cugagaugcaggagcgcua

SEQ ID NO: 2542069 - RNA, 19 nt, Homo sapiens
  misc_RNA (1)...(19): siRNA sense strand
aggagagacaagagacgaa

SEQ ID NO: 2542070 - RNA, 19 nt, Homo sapiens
  misc_RNA (1)...(19): siRNA sense strand
ccgaacaagcacugcagua

SEQ ID NO: 2542071 - RNA, 19 nt, Homo sapiens
  misc_RNA (1)...(19): siRNA sense strand
guuaccaagaggagaagaa

SEQ ID NO: 2542072 - RNA, 19 nt, Homo sapiens
  misc_RNA (1)...(19): siRNA sense strand
aggaaaagauggccagaga

SEQ ID NO: 2542073 - RNA, 19 nt, Homo sapiens
  misc_RNA (1)...(19): siRNA sense strand
ggaugaggaggaagacaau

SEQ ID NO: 2542074 - RNA, 19 nt, Homo sapiens
  misc_RNA (1)...(19): siRNA sense strand
uguaaagccaagaagaaga

SEQ ID NO: 2542075 - RNA, 19 nt, Homo sapiens
  misc_RNA (1)...(19): siRNA sense strand
ggagagaacaacuugccua

SEQ ID NO: 2542076 - RNA, 19 nt, Homo sapiens
  misc_RNA (1)...(19): siRNA sense strand
uggacagacucccgaacaa

SEQ ID NO: 2542077 - RNA, 19 nt, Homo sapiens
  misc_RNA (1)...(19): siRNA sense strand
uccaaagauaggaggagaa

SEQ ID NO: 2542078 - RNA, 19 nt, Homo sapiens
  misc_RNA (1)...(19): siRNA sense strand
ggucuuaauuaugggugaa

SEQ ID NO: 2542079 - RNA, 19 nt, Homo sapiens
  misc_RNA (1)...(19): siRNA sense strand
aaauagauugggugacauu

SEQ ID NO: 2542080 - RNA, 19 nt, Homo sapiens
  misc_RNA (1)...(19): siRNA sense strand
ugaagaagguuacgccaca

SEQ ID NO: 2542081 - RNA, 19 nt, Homo sapiens
  misc_RNA (1)...(19): siRNA sense strand
accaagaggagaagaacau

SEQ ID NO: 2542082 - RNA, 19 nt, Homo sapiens
  misc_RNA (1)...(19): siRNA sense strand
ugcaagaggaauuaaggaa

SEQ ID NO: 2542083 - RNA, 19 nt, Homo sapiens
  misc_RNA (1)...(19): siRNA sense strand
cggaacaaaccuaguggga

SEQ ID NO: 2542084 - RNA, 19 nt, Homo sapiens
  misc_RNA (1)...(19): siRNA sense strand
gaagaaauacagaagcgau

SEQ ID NO: 2542085 - RNA, 19 nt, Homo sapiens
  misc_RNA (1)...(19): siRNA sense strand
uuggagauauggaggacuu

SEQ ID NO: 2542086 - RNA, 19 nt, Homo sapiens
  misc_RNA (1)...(19): siRNA sense strand
gcucaguacaagaagcuca

SEQ ID NO: 2542087 - RNA, 19 nt, Homo sapiens
  misc_RNA (1)...(19): siRNA sense strand
ugaaggaacguguagaaaa

SEQ ID NO: 2542088 - RNA, 19 nt, Homo sapiens
  misc_RNA (1)...(19): siRNA sense strand
cuuaaggagaggagaguuc

SEQ ID NO: 2542089 - RNA, 19 nt, Homo sapiens
  misc_RNA (1)...(19): siRNA sense strand
gacggaaugcuaaaggaaa

SEQ ID NO: 2542090 - RNA, 19 nt, Homo sapiens
  misc_RNA (1)...(19): siRNA sense strand
augaagaguugcaagagga

SEQ ID NO: 2542091 - RNA, 19 nt, Homo sapiens
  misc_RNA (1)...(19): siRNA sense strand
gcuugaugucccugcgcua

SEQ ID NO: 2542092 - RNA, 19 nt, Homo sapiens
  misc_RNA (1)...(19): siRNA sense strand
cagacgauuucucggaaca

SEQ ID NO: 2542093 - RNA, 19 nt, Homo sapiens
  misc_RNA (1)...(19): siRNA sense strand
aaagauggccagagagaag

SEQ ID NO: 2542094 - RNA, 19 nt, Homo sapiens
  misc_RNA (1)...(19): siRNA sense strand
cagcauauggaaacugaau

SEQ ID NO: 2542095 - RNA, 19 nt, Homo sapiens
  misc_RNA (1)...(19): siRNA sense strand
ucuguuaccaagaggagaa

SEQ ID NO: 2542096 - RNA, 19 nt, Homo sapiens
  misc_RNA (1)...(19): siRNA sense strand
ugggauaacuagaggucaa

SEQ ID NO: 2542097 - RNA, 19 nt, Homo sapiens
  misc_RNA (1)...(19): siRNA sense strand
ggagaugaggagaaggaaa

SEQ ID NO: 2542098 - RNA, 19 nt, Homo sapiens
  misc_RNA (1)...(19): siRNA sense strand
ugaaagaggccgaggcuga

SEQ ID NO: 2542099 - RNA, 19 nt, Homo sapiens
  misc_RNA (1)...(19): siRNA sense strand
uggagaaacaggagagaca

SEQ ID NO: 2542100 - RNA, 19 nt, Homo sapiens
  misc_RNA (1)...(19): siRNA sense strand
gaagaaaagaugagaaaca

SEQ ID NO: 2542101 - RNA, 19 nt, Homo sapiens
  misc_RNA (1)...(19): siRNA sense strand
ccuaagaagaagauucaaa

SEQ ID NO: 2542102 - RNA, 19 nt, Homo sapiens
  misc_RNA (1)...(19): siRNA sense strand
ccuguaaagccaagaagaa

SEQ ID NO: 2542103 - RNA, 19 nt, Homo sapiens
  misc_RNA (1)...(19): siRNA sense strand
acggaaugcuaaaggaaaa

SEQ ID NO: 2542104 - RNA, 19 nt, Homo sapiens
  misc_RNA (1)...(19): siRNA sense strand
agaggagaguucagagaau

SEQ ID NO: 2542105 - RNA, 19 nt, Homo sapiens
  misc_RNA (1)...(19): siRNA sense strand
uggaagaaaagaugagaaa

SEQ ID NO: 2542106 - RNA, 19 nt, Homo sapiens
  misc_RNA (1)...(19): siRNA sense strand
acaauuaaacagacagcaa

SEQ ID NO: 2542107 - RNA, 19 nt, Homo sapiens
  misc_RNA (1)...(19): siRNA sense strand
gagugugaauaguggaaaa

SEQ ID NO: 2542108 - RNA, 19 nt, Homo sapiens
  misc_RNA (1)...(19): siRNA sense strand
aagaaauacagaagcgauu

SEQ ID NO: 2542109 - RNA, 19 nt, Homo sapiens
  misc_RNA (1)...(19): siRNA sense strand
aggagaagaacaugcuaaa

SEQ ID NO: 2542110 - RNA, 19 nt, Homo sapiens
  misc_RNA (1)...(19): siRNA sense strand
caagagacgaaaaggaaaa

SEQ ID NO: 2542111 - RNA, 19 nt, Homo sapiens
  misc_RNA (1)...(19): siRNA sense strand
agagaagcuggaagaaaua

SEQ ID NO: 2542112 - RNA, 19 nt, Homo sapiens
  misc_RNA (1)...(19): siRNA sense strand
gaagaaauagauuggguga

SEQ ID NO: 2542113 - RNA, 19 nt, Homo sapiens
  misc_RNA (1)...(19): siRNA sense strand
aaagauaggaggagaaacu

SEQ ID NO: 2542114 - RNA, 19 nt, Homo sapiens
  misc_RNA (1)...(19): siRNA sense strand
ccuuacaagagcagcuaaa

SEQ ID NO: 2542115 - RNA, 19 nt, Homo sapiens
  misc_RNA (1)...(19): siRNA sense strand
ccaagaagaagaauggaga

SEQ ID NO: 2542116 - RNA, 19 nt, Homo sapiens
  misc_RNA (1)...(19): siRNA sense strand
agagagaagcuggaagaaa

SEQ ID NO: 2542117 - RNA, 19 nt, Homo sapiens
  misc_RNA (1)...(19): siRNA sense strand
ggcugaugauggagaaaca

SEQ ID NO: 2542118 - RNA, 19 nt, Homo sapiens
  misc_RNA (1)...(19): siRNA sense strand
cagaaaauccuaaaagcaa

SEQ ID NO: 2542119 - RNA, 19 nt, Homo sapiens
  misc_RNA (1)...(19): siRNA sense strand
aagaguugcaagaggaauu

SEQ ID NO: 2542120 - RNA, 19 nt, Homo sapiens
  misc_RNA (1)...(19): siRNA sense strand
ccgcacugcuggaagaaaa

SEQ ID NO: 2542121 - RNA, 19 nt, Homo sapiens
  misc_RNA (1)...(19): siRNA sense strand
cugagaugcaggagcgcua

SEQ ID NO: 2542122 - RNA, 19 nt, Homo sapiens
  misc_RNA (1)...(19): siRNA sense strand
aggagagacaagagacgaa

SEQ ID NO: 2542123 - RNA, 19 nt, Homo sapiens
  misc_RNA (1)...(19): siRNA sense strand
ccgaacaagcacugcagua

SEQ ID NO: 2542124 - RNA, 19 nt, Homo sapiens
  misc_RNA (1)...(19): siRNA sense strand
guuaccaagaggagaagaa

SEQ ID NO: 2542125 - RNA, 19 nt, Homo sapiens
  misc_RNA (1)...(19): siRNA sense strand
aggaaaagauggccagaga

SEQ ID NO: 2542126 - RNA, 19 nt, Homo sapiens
  misc_RNA (1)...(19): siRNA sense strand
ggaugaggaggaagacaau

SEQ ID NO: 2542127 - RNA, 19 nt, Homo sapiens
  misc_RNA (1)...(19): siRNA sense strand
uguaaagccaagaagaaga

SEQ ID NO: 2542128 - RNA, 19 nt, Homo sapiens
  misc_RNA (1)...(19): siRNA sense strand
ggagagaacaacuugccua

SEQ ID NO: 2542129 - RNA, 19 nt, Homo sapiens
  misc_RNA (1)...(19): siRNA sense strand
uggacagacucccgaacaa

SEQ ID NO: 2542130 - RNA, 19 nt, Homo sapiens
  misc_RNA (1)...(19): siRNA sense strand
uccaaagauaggaggagaa

SEQ ID NO: 2542131 - RNA, 19 nt, Homo sapiens
  misc_RNA (1)...(19): siRNA sense strand
ggucuuaauuaugggugaa

SEQ ID NO: 2542132 - RNA, 19 nt, Homo sapiens
  misc_RNA (1)...(19): siRNA sense strand
aaauagauugggugacauu

SEQ ID NO: 2542133 - RNA, 19 nt, Homo sapiens
  misc_RNA (1)...(19): siRNA sense strand
ugaagaagguuacgccaca

SEQ ID NO: 2542134 - RNA, 19 nt, Homo sapiens
  misc_RNA (1)...(19): siRNA sense strand
accaagaggagaagaacau

SEQ ID NO: 2542135 - RNA, 19 nt, Homo sapiens
  misc_RNA (1)...(19): siRNA sense strand
ugcaagaggaauuaaggaa

SEQ ID NO: 2542136 - RNA, 19 nt, Homo sapiens
  misc_RNA (1)...(19): siRNA sense strand
cggaacaaaccuaguggga

SEQ ID NO: 2542137 - RNA, 19 nt, Homo sapiens
  misc_RNA (1)...(19): siRNA sense strand
gaagaaauacagaagcgau

SEQ ID NO: 2542138 - RNA, 19 nt, Homo sapiens
  misc_RNA (1)...(19): siRNA sense strand
uuggagauauggaggacuu

SEQ ID NO: 2542139 - RNA, 19 nt, Homo sapiens
  misc_RNA (1)...(19): siRNA sense strand
gcucaguacaagaagcuca

SEQ ID NO: 2542140 - RNA, 19 nt, Homo sapiens
  misc_RNA (1)...(19): siRNA sense strand
ugaaggaacguguagaaaa

SEQ ID NO: 2542141 - RNA, 19 nt, Homo sapiens
  misc_RNA (1)...(19): siRNA sense strand
cuuaaggagaggagaguuc

SEQ ID NO: 2542142 - RNA, 19 nt, Homo sapiens
  misc_RNA (1)...(19): siRNA sense strand
gacggaaugcuaaaggaaa

SEQ ID NO: 2542143 - RNA, 19 nt, Homo sapiens
  misc_RNA (1)...(19): siRNA sense strand
augaagaguugcaagagga

SEQ ID NO: 2542144 - RNA, 19 nt, Homo sapiens
  misc_RNA (1)...(19): siRNA sense strand
gcuugaugucccugcgcua

SEQ ID NO: 2542145 - RNA, 19 nt, Homo sapiens
  misc_RNA (1)...(19): siRNA sense strand
cagacgauuucucggaaca

SEQ ID NO: 2542146 - RNA, 19 nt, Homo sapiens
  misc_RNA (1)...(19): siRNA sense strand
aaagauggccagagagaag

SEQ ID NO: 2542147 - RNA, 19 nt, Homo sapiens
  misc_RNA (1)...(19): siRNA sense strand
cagcauauggaaacugaau

SEQ ID NO: 2542148 - RNA, 19 nt, Homo sapiens
  misc_RNA (1)...(19): siRNA sense strand
ucuguuaccaagaggagaa

SEQ ID NO: 2542149 - RNA, 19 nt, Homo sapiens
  misc_RNA (1)...(19): siRNA sense strand
uggaaauacaggaggaaga

SEQ ID NO: 2542150 - RNA, 19 nt, Homo sapiens
  misc_RNA (1)...(19): siRNA sense strand
ccauuuauacccugggcua

SEQ ID NO: 2542151 - RNA, 19 nt, Homo sapiens
  misc_RNA (1)...(19): siRNA sense strand
acccggaggaugagagcaa

SEQ ID NO: 2542152 - RNA, 19 nt, Homo sapiens
  misc_RNA (1)...(19): siRNA sense strand
ggucagagacguucccaga

SEQ ID NO: 2542153 - RNA, 19 nt, Homo sapiens
  misc_RNA (1)...(19): siRNA sense strand
aagcaggaaacauaagcaa

SEQ ID NO: 2542154 - RNA, 19 nt, Homo sapiens
  misc_RNA (1)...(19): siRNA sense strand
ccaucucagugcuggucaa

SEQ ID NO: 2542155 - RNA, 19 nt, Homo sapiens
  misc_RNA (1)...(19): siRNA sense strand
aguacaagaggcuggccaa

SEQ ID NO: 2542156 - RNA, 19 nt, Homo sapiens
  misc_RNA (1)...(19): siRNA sense strand
ccggaggaugagagcaaga

SEQ ID NO: 2542157 - RNA, 19 nt, Homo sapiens
  misc_RNA (1)...(19): siRNA sense strand
agcaggaaacauaagcaaa

SEQ ID NO: 2542158 - RNA, 19 nt, Homo sapiens
  misc_RNA (1)...(19): siRNA sense strand
acagugaggugcagugcga

SEQ ID NO: 2542159 - RNA, 19 nt, Homo sapiens
  misc_RNA (1)...(19): siRNA sense strand
gcaaagagacccagggaug

SEQ ID NO: 2542160 - RNA, 19 nt, Homo sapiens
  misc_RNA (1)...(19): siRNA sense strand
ucuaagaaagaguggaaaa

SEQ ID NO: 2542161 - RNA, 19 nt, Homo sapiens
  misc_RNA (1)...(19): siRNA sense strand
guguauaugaagagaaacu

SEQ ID NO: 2542162 - RNA, 19 nt, Homo sapiens
  misc_RNA (1)...(19): siRNA sense strand
agaugaaauacucggagaa

SEQ ID NO: 2542163 - RNA, 19 nt, Homo sapiens
  misc_RNA (1)...(19): siRNA sense strand
aagagaaacuauaaggcca

SEQ ID NO: 2542164 - RNA, 19 nt, Homo sapiens
  misc_RNA (1)...(19): siRNA sense strand
gagagaaagcagcugguga

SEQ ID NO: 2542165 - RNA, 19 nt, Homo sapiens
  misc_RNA (1)...(19): siRNA sense strand
gcaucagagaagagaagca

SEQ ID NO: 2542166 - RNA, 19 nt, Homo sapiens
  misc_RNA (1)...(19): siRNA sense strand
aagaugaaauacucggaga

SEQ ID NO: 2542167 - RNA, 19 nt, Homo sapiens
  misc_RNA (1)...(19): siRNA sense strand
agagaaacuauaaggccau

SEQ ID NO: 2542168 - RNA, 19 nt, Homo sapiens
  misc_RNA (1)...(19): siRNA sense strand
ccaagaagccagcagagga

SEQ ID NO: 2542169 - RNA, 19 nt, Homo sapiens
  misc_RNA (1)...(19): siRNA sense strand
augaaauacucggagaaaa

SEQ ID NO: 2542170 - RNA, 19 nt, Homo sapiens
  misc_RNA (1)...(19): siRNA sense strand
gagaagagaagcaaggccu

SEQ ID NO: 2542171 - RNA, 19 nt, Homo sapiens
  misc_RNA (1)...(19): siRNA sense strand
aaacaugccuggacccaca

SEQ ID NO: 2542172 - RNA, 19 nt, Homo sapiens
  misc_RNA (1)...(19): siRNA sense strand
acagagagaauuaaggcaa

SEQ ID NO: 2542173 - RNA, 19 nt, Homo sapiens
  misc_RNA (1)...(19): siRNA sense strand
gagauggauuugagggcca

SEQ ID NO: 2542174 - RNA, 19 nt, Homo sapiens
  misc_RNA (1)...(19): siRNA sense strand
augcaaacagugugaugaa

SEQ ID NO: 2542175 - RNA, 19 nt, Homo sapiens
  misc_RNA (1)...(19): siRNA sense strand
cugaaauguuugcugagau

SEQ ID NO: 2542176 - RNA, 19 nt, Homo sapiens
  misc_RNA (1)...(19): siRNA sense strand
cuugaugcagcuugauaaa

SEQ ID NO: 2542177 - RNA, 19 nt, Homo sapiens
  misc_RNA (1)...(19): siRNA sense strand
agucaggaauugaagcgau

SEQ ID NO: 2542178 - RNA, 19 nt, Homo sapiens
  misc_RNA (1)...(19): siRNA sense strand
acuucagguugaugagaaa

SEQ ID NO: 2542179 - RNA, 19 nt, Homo sapiens
  misc_RNA (1)...(19): siRNA sense strand
acaaaggccuugaagccaa

SEQ ID NO: 2542180 - RNA, 19 nt, Homo sapiens
  misc_RNA (1)...(19): siRNA sense strand
cauuaaagaagaaggacuc

SEQ ID NO: 2542181 - RNA, 19 nt, Homo sapiens
  misc_RNA (1)...(19): siRNA sense strand
ucauuaaagaagaaggacu

SEQ ID NO: 2542182 - RNA, 19 nt, Homo sapiens
  misc_RNA (1)...(19): siRNA sense strand
agaucugguaguuggguuu

SEQ ID NO: 2542183 - RNA, 19 nt, Homo sapiens
  misc_RNA (1)...(19): siRNA sense strand
gaguaagacguuuuggaau

SEQ ID NO: 2542184 - RNA, 19 nt, Homo sapiens
  misc_RNA (1)...(19): siRNA sense strand
acacagaaguucagcguca

SEQ ID NO: 2542185 - RNA, 19 nt, Homo sapiens
  misc_RNA (1)...(19): siRNA sense strand
gagaggagcucauuggaga

SEQ ID NO: 2542186 - RNA, 19 nt, Homo sapiens
  misc_RNA (1)...(19): siRNA sense strand
ccuaugaggccgagggacu

SEQ ID NO: 2542187 - RNA, 19 nt, Homo sapiens
  misc_RNA (1)...(19): siRNA sense strand
ccgaugaagaugugaagau

SEQ ID NO: 2542188 - RNA, 19 nt, Homo sapiens
  misc_RNA (1)...(19): siRNA sense strand
ccauggagcaacagagcau

SEQ ID NO: 2542189 - RNA, 19 nt, Homo sapiens
  misc_RNA (1)...(19): siRNA sense strand
aggaaagaaucuauggcga

SEQ ID NO: 2542190 - RNA, 19 nt, Homo sapiens
  misc_RNA (1)...(19): siRNA sense strand
uggccaagaaggacaacaa

SEQ ID NO: 2542191 - RNA, 19 nt, Homo sapiens
  misc_RNA (1)...(19): siRNA sense strand
cgacaugugcaaagagaac

SEQ ID NO: 2542192 - RNA, 19 nt, Homo sapiens
  misc_RNA (1)...(19): siRNA sense strand
agauagagcugacuggcau

SEQ ID NO: 2542193 - RNA, 19 nt, Homo sapiens
  misc_RNA (1)...(19): siRNA sense strand
gggaacugaccgaugaaga

SEQ ID NO: 2542194 - RNA, 19 nt, Homo sapiens
  misc_RNA (1)...(19): siRNA sense strand
gaaagaaucuauggcgaca

SEQ ID NO: 2542195 - RNA, 19 nt, Homo sapiens
  misc_RNA (1)...(19): siRNA sense strand
cccagaaccaggaggugaa

SEQ ID NO: 2542196 - RNA, 19 nt, Homo sapiens
  misc_RNA (1)...(19): siRNA sense strand
ugaagcaguuaguggcaga

SEQ ID NO: 2542197 - RNA, 19 nt, Homo sapiens
  misc_RNA (1)...(19): siRNA sense strand
caagguugcuguaggggaa

SEQ ID NO: 2542198 - RNA, 19 nt, Homo sapiens
  misc_RNA (1)...(19): siRNA sense strand
gcgaugaggaggacgagga

SEQ ID NO: 2542199 - RNA, 19 nt, Homo sapiens
  misc_RNA (1)...(19): siRNA sense strand
ggaaaaugauccugcagca

SEQ ID NO: 2542200 - RNA, 19 nt, Homo sapiens
  misc_RNA (1)...(19): siRNA sense strand
aggacaagguggccaagau

SEQ ID NO: 2542201 - RNA, 19 nt, Homo sapiens
  misc_RNA (1)...(19): siRNA sense strand
gcaucagcgacaugugcaa

SEQ ID NO: 2542202 - RNA, 19 nt, Homo sapiens
  misc_RNA (1)...(19): siRNA sense strand
uggugaacuaugaggacuu

SEQ ID NO: 2542203 - RNA, 19 nt, Homo sapiens
  misc_RNA (1)...(19): siRNA sense strand
agaccaucuaucagaacua

SEQ ID NO: 2542204 - RNA, 19 nt, Homo sapiens
  misc_RNA (1)...(19): siRNA sense strand
ggaaagaaucuauggcgac

SEQ ID NO: 2542205 - RNA, 19 nt, Homo sapiens
  misc_RNA (1)...(19): siRNA sense strand
gcgacaugugcaaagagaa

SEQ ID NO: 2542206 - RNA, 19 nt, Homo sapiens
  misc_RNA (1)...(19): siRNA sense strand
agagccugguggugaacua

SEQ ID NO: 2542207 - RNA, 19 nt, Homo sapiens
  misc_RNA (1)...(19): siRNA sense strand
agccaggagacgagauaga

SEQ ID NO: 2542208 - RNA, 19 nt, Homo sapiens
  misc_RNA (1)...(19): siRNA sense strand
cugagaaggacuuggugga

SEQ ID NO: 2542209 - RNA, 19 nt, Homo sapiens
  misc_RNA (1)...(19): siRNA sense strand
gcacucacgucgacagcca

SEQ ID NO: 2542210 - RNA, 19 nt, Homo sapiens
  misc_RNA (1)...(19): siRNA sense strand
uaucagaacuaccagcgua

SEQ ID NO: 2542211 - RNA, 19 nt, Homo sapiens
  misc_RNA (1)...(19): siRNA sense strand
ccagcaacaaggaggagga

SEQ ID NO: 2542212 - RNA, 19 nt, Homo sapiens
  misc_RNA (1)...(19): siRNA sense strand
gcaucgagaaccuggagga

SEQ ID NO: 2542213 - RNA, 19 nt, Homo sapiens
  misc_RNA (1)...(19): siRNA sense strand
gagauggcauggaaaggga

SEQ ID NO: 2542214 - RNA, 19 nt, Homo sapiens
  misc_RNA (1)...(19): siRNA sense strand
guuugaagaagcagagaaa

SEQ ID NO: 2542215 - RNA, 19 nt, Homo sapiens
  misc_RNA (1)...(19): siRNA sense strand
aaauagacauugaagguga

SEQ ID NO: 2542216 - RNA, 19 nt, Homo sapiens
  misc_RNA (1)...(19): siRNA sense strand
acaacagagacaagaacaa

SEQ ID NO: 2542217 - RNA, 19 nt, Homo sapiens
  misc_RNA (1)...(19): siRNA sense strand
cgacgaaggcaaagggaag

SEQ ID NO: 2542218 - RNA, 19 nt, Homo sapiens
  misc_RNA (1)...(19): siRNA sense strand
cuuacaaguuagaugguga

SEQ ID NO: 2542219 - RNA, 19 nt, Homo sapiens
  misc_RNA (1)...(19): siRNA sense strand
cucaaggguuauauggaaa

SEQ ID NO: 2542220 - RNA, 19 nt, Homo sapiens
  misc_RNA (1)...(19): siRNA sense strand
guuuaaaguucuagcuaac

SEQ ID NO: 2542221 - RNA, 19 nt, Homo sapiens
  misc_RNA (1)...(19): siRNA sense strand
ugguaaauccagagaaucu

SEQ ID NO: 2542222 - RNA, 19 nt, Homo sapiens
  misc_RNA (1)...(19): siRNA sense strand
aggaaauaaugcuggccau

SEQ ID NO: 2542223 - RNA, 19 nt, Homo sapiens
  misc_RNA (1)...(19): siRNA sense strand
acauggaccaccaaagaaa

SEQ ID NO: 2542224 - RNA, 19 nt, Homo sapiens
  misc_RNA (1)...(19): siRNA sense strand
acaagaacaagcaggaaaa

SEQ ID NO: 2542225 - RNA, 19 nt, Homo sapiens
  misc_RNA (1)...(19): siRNA sense strand
gcgacgaaggcaaagggaa

SEQ ID NO: 2542226 - RNA, 19 nt, Homo sapiens
  misc_RNA (1)...(19): siRNA sense strand
gcaaagggaagguggugga

SEQ ID NO: 2542227 - RNA, 19 nt, Homo sapiens
  misc_RNA (1)...(19): siRNA sense strand
aggauggaacacagacaua

SEQ ID NO: 2542228 - RNA, 19 nt, Homo sapiens
  misc_RNA (1)...(19): siRNA sense strand
aguguauggaguugugaaa

SEQ ID NO: 2542229 - RNA, 19 nt, Homo sapiens
  misc_RNA (1)...(19): siRNA sense strand
guaacuacuggaaggaaaa

SEQ ID NO: 2542230 - RNA, 19 nt, Homo sapiens
  misc_RNA (1)...(19): siRNA sense strand
uggacauguuuacggaaau

SEQ ID NO: 2542231 - RNA, 19 nt, Homo sapiens
  misc_RNA (1)...(19): siRNA sense strand
uuggacauguuuacggaaa

SEQ ID NO: 2542232 - RNA, 19 nt, Homo sapiens
  misc_RNA (1)...(19): siRNA sense strand
gagacaagaacaagcagga

SEQ ID NO: 2542233 - RNA, 19 nt, Homo sapiens
  misc_RNA (1)...(19): siRNA sense strand
guccaaagcugcucggagu

SEQ ID NO: 2542234 - RNA, 19 nt, Homo sapiens
  misc_RNA (1)...(19): siRNA sense strand
aacaagggguagagaguuu

SEQ ID NO: 2542235 - RNA, 19 nt, Homo sapiens
  misc_RNA (1)...(19): siRNA sense strand
augcaagggcguuuaaaga

SEQ ID NO: 2542236 - RNA, 19 nt, Homo sapiens
  misc_RNA (1)...(19): siRNA sense strand
uuggaaauggugugguaau

SEQ ID NO: 2542237 - RNA, 19 nt, Homo sapiens
  misc_RNA (1)...(19): siRNA sense strand
cuugguagaaggugcaaau

SEQ ID NO: 2542238 - RNA, 19 nt, Homo sapiens
  misc_RNA (1)...(19): siRNA sense strand
cuuuggaaauagacauuga

SEQ ID NO: 2542239 - RNA, 19 nt, Homo sapiens
  misc_RNA (1)...(19): siRNA sense strand
cugaugguauccaggaaca

SEQ ID NO: 2542240 - RNA, 19 nt, Homo sapiens
  misc_RNA (1)...(19): siRNA sense strand
aauagacauugaaggugaa

SEQ ID NO: 2542241 - RNA, 19 nt, Homo sapiens
  misc_RNA (1)...(19): siRNA sense strand
caaacaagggguagagagu

SEQ ID NO: 2542242 - RNA, 19 nt, Homo sapiens
  misc_RNA (1)...(19): siRNA sense strand
cugccagggaggaaauaau

SEQ ID NO: 2542243 - RNA, 19 nt, Homo sapiens
  misc_RNA (1)...(19): siRNA sense strand
agauauugauuuugggacu

SEQ ID NO: 2542244 - RNA, 19 nt, Homo sapiens
  misc_RNA (1)...(19): siRNA sense strand
cggaaaucaaaguuggagu

SEQ ID NO: 2542245 - RNA, 19 nt, Homo sapiens
  misc_RNA (1)...(19): siRNA sense strand
cagagcaagacaaugaaau

SEQ ID NO: 2542246 - RNA, 19 nt, Homo sapiens
  misc_RNA (1)...(19): siRNA sense strand
aaauguuggagaaguguau

SEQ ID NO: 2542247 - RNA, 19 nt, Homo sapiens
  misc_RNA (1)...(19): siRNA sense strand
uggagaaguguauggaguu

SEQ ID NO: 2542248 - RNA, 19 nt, Homo sapiens
  misc_RNA (1)...(19): siRNA sense strand
uuggagaaguguauggagu

SEQ ID NO: 2542249 - RNA, 19 nt, Homo sapiens
  misc_RNA (1)...(19): siRNA sense strand
agaagcaacagcagggaaa

SEQ ID NO: 2542250 - RNA, 19 nt, Homo sapiens
  misc_RNA (1)...(19): siRNA sense strand
aggguaacaugaagauaaa

SEQ ID NO: 2542251 - RNA, 19 nt, Homo sapiens
  misc_RNA (1)...(19): siRNA sense strand
gcgagagggcuguggaaca

SEQ ID NO: 2542252 - RNA, 19 nt, Homo sapiens
  misc_RNA (1)...(19): siRNA sense strand
aaugaagggcuguguguaa

SEQ ID NO: 2542253 - RNA, 19 nt, Homo sapiens
  misc_RNA (1)...(19): siRNA sense strand
cagucuaaguggagaaucu

SEQ ID NO: 2542254 - RNA, 19 nt, Homo sapiens
  misc_RNA (1)...(19): siRNA sense strand
agauaaaugagacgagaga

SEQ ID NO: 2542255 - RNA, 19 nt, Homo sapiens
  misc_RNA (1)...(19): siRNA sense strand
ugauauaaauguuggugga

SEQ ID NO: 2542256 - RNA, 19 nt, Homo sapiens
  misc_RNA (1)...(19): siRNA sense strand
caggaagugccaugguaaa

SEQ ID NO: 2542257 - RNA, 19 nt, Homo sapiens
  misc_RNA (1)...(19): siRNA sense strand
uggcuugccugaagguaaa

SEQ ID NO: 2542258 - RNA, 19 nt, Homo sapiens
  misc_RNA (1)...(19): siRNA sense strand
guacagucuaaguggagaa

SEQ ID NO: 2542259 - RNA, 19 nt, Homo sapiens
  misc_RNA (1)...(19): siRNA sense strand
aaggguaacaugaagauaa

SEQ ID NO: 2542260 - RNA, 19 nt, Homo sapiens
  misc_RNA (1)...(19): siRNA sense strand
uauaaauguugguggaacu

SEQ ID NO: 2542261 - RNA, 19 nt, Homo sapiens
  misc_RNA (1)...(19): siRNA sense strand
uguuugugguugugaguuu

SEQ ID NO: 2542262 - RNA, 19 nt, Homo sapiens
  misc_RNA (1)...(19): siRNA sense strand
agugguaaacugaggaaaa

SEQ ID NO: 2542263 - RNA, 19 nt, Homo sapiens
  misc_RNA (1)...(19): siRNA sense strand
uggaaaaggaguuaggauu

SEQ ID NO: 2542264 - RNA, 19 nt, Homo sapiens
  misc_RNA (1)...(19): siRNA sense strand
gguuggaaguacaagcaga

SEQ ID NO: 2542265 - RNA, 19 nt, Homo sapiens
  misc_RNA (1)...(19): siRNA sense strand
gcacaacaguggaagcagu

SEQ ID NO: 2542266 - RNA, 19 nt, Homo sapiens
  misc_RNA (1)...(19): siRNA sense strand
gaagguaaaucuagugcca

SEQ ID NO: 2542267 - RNA, 19 nt, Homo sapiens
  misc_RNA (1)...(19): siRNA sense strand
ccaugauauucgcuugaua

SEQ ID NO: 2542268 - RNA, 19 nt, Homo sapiens
  misc_RNA (1)...(19): siRNA sense strand
cuguggauaugcugugaua

SEQ ID NO: 2542269 - RNA, 19 nt, Homo sapiens
  misc_RNA (1)...(19): siRNA sense strand
acaugguaacaauggaaua

SEQ ID NO: 2542270 - RNA, 19 nt, Homo sapiens
  misc_RNA (1)...(19): siRNA sense strand
uuucaaagcacaaacggaa

SEQ ID NO: 2542271 - RNA, 19 nt, Homo sapiens
  misc_RNA (1)...(19): siRNA sense strand
gggaaguguuggugggcug

SEQ ID NO: 2542272 - RNA, 19 nt, Homo sapiens
  misc_RNA (1)...(19): siRNA sense strand
ccuacaucccauuggacaa

SEQ ID NO: 2542273 - RNA, 19 nt, Homo sapiens
  misc_RNA (1)...(19): siRNA sense strand
aaaauuaacuugugggcga

SEQ ID NO: 2542274 - RNA, 19 nt, Homo sapiens
  misc_RNA (1)...(19): siRNA sense strand
ugguuguguaugaaagaaa

SEQ ID NO: 2542275 - RNA, 19 nt, Homo sapiens
  misc_RNA (1)...(19): siRNA sense strand
guggcuugccugaagguaa

SEQ ID NO: 2542276 - RNA, 19 nt, Homo sapiens
  misc_RNA (1)...(19): siRNA sense strand
acguaaaucaagggagcua

SEQ ID NO: 2542277 - RNA, 19 nt, Homo sapiens
  misc_RNA (1)...(19): siRNA sense strand
aagaaacccuggagccgaa

SEQ ID NO: 2542278 - RNA, 19 nt, Homo sapiens
  misc_RNA (1)...(19): siRNA sense strand
aguaguagcugcagugacu

SEQ ID NO: 2542279 - RNA, 19 nt, Homo sapiens
  misc_RNA (1)...(19): siRNA sense strand
ugauaaugccagcaccaaa

SEQ ID NO: 2542280 - RNA, 19 nt, Homo sapiens
  misc_RNA (1)...(19): siRNA sense strand
cgguguuccuauuauguua

SEQ ID NO: 2542281 - RNA, 19 nt, Homo sapiens
  misc_RNA (1)...(19): siRNA sense strand
agcacgaacucaagugaau

SEQ ID NO: 2542282 - RNA, 19 nt, Homo sapiens
  misc_RNA (1)...(19): siRNA sense strand
gguuguguaugaaagaaau

SEQ ID NO: 2542283 - RNA, 19 nt, Homo sapiens
  misc_RNA (1)...(19): siRNA sense strand
gagaggacauggaugcaca

SEQ ID NO: 2542284 - RNA, 19 nt, Homo sapiens
  misc_RNA (1)...(19): siRNA sense strand
gcuaugaaggcaaggaugu

SEQ ID NO: 2542285 - RNA, 19 nt, Homo sapiens
  misc_RNA (1)...(19): siRNA sense strand
agaaagaacgguacagucu

SEQ ID NO: 2542286 - RNA, 19 nt, Homo sapiens
  misc_RNA (1)...(19): siRNA sense strand
gagucaaagccauccaaau

SEQ ID NO: 2542287 - RNA, 19 nt, Homo sapiens
  misc_RNA (1)...(19): siRNA sense strand
cauuggacaaagaaggcaa

SEQ ID NO: 2542288 - RNA, 19 nt, Homo sapiens
  misc_RNA (1)...(19): siRNA sense strand
gcaacaguauggaggugca

SEQ ID NO: 2542289 - RNA, 19 nt, Homo sapiens
  misc_RNA (1)...(19): siRNA sense strand
ugaccuagaaagcaugaaa

SEQ ID NO: 2542290 - RNA, 19 nt, Homo sapiens
  misc_RNA (1)...(19): siRNA sense strand
gaauaggagccauccgaga

SEQ ID NO: 2542291 - RNA, 19 nt, Homo sapiens
  misc_RNA (1)...(19): siRNA sense strand
ugugauagcauuuggaugu

SEQ ID NO: 2542292 - RNA, 19 nt, Homo sapiens
  misc_RNA (1)...(19): siRNA sense strand
aagagagagcccagagcuu

SEQ ID NO: 2542293 - RNA, 19 nt, Homo sapiens
  misc_RNA (1)...(19): siRNA sense strand
aggaguuaggauugaauuu

SEQ ID NO: 2542294 - RNA, 19 nt, Homo sapiens
  misc_RNA (1)...(19): siRNA sense strand
guugaaucauauugcugaa

SEQ ID NO: 2542295 - RNA, 19 nt, Homo sapiens
  misc_RNA (1)...(19): siRNA sense strand
cugaagaacaugguaacaa

SEQ ID NO: 2542296 - RNA, 19 nt, Homo sapiens
  misc_RNA (1)...(19): siRNA sense strand
caugguaacaauggaauaa

SEQ ID NO: 2542297 - RNA, 19 nt, Homo sapiens
  misc_RNA (1)...(19): siRNA sense strand
cugaaauguguacugauaa

SEQ ID NO: 2542298 - RNA, 19 nt, Homo sapiens
  misc_RNA (1)...(19): siRNA sense strand
uugcugaagaacaugguaa

SEQ ID NO: 2542299 - RNA, 19 nt, Homo sapiens
  misc_RNA (1)...(19): siRNA sense strand
cugugaugcugcucgacaa

SEQ ID NO: 2542300 - RNA, 19 nt, Homo sapiens
  misc_RNA (1)...(19): siRNA sense strand
ucaggaagugccaugguaa

SEQ ID NO: 2542301 - RNA, 19 nt, Homo sapiens
  misc_RNA (1)...(19): siRNA sense strand
uggaagcaguaguguggau

SEQ ID NO: 2542302 - RNA, 19 nt, Homo sapiens
  misc_RNA (1)...(19): siRNA sense strand
cuagaaagcaugaaaacuu

SEQ ID NO: 2542303 - RNA, 19 nt, Homo sapiens
  misc_RNA (1)...(19): siRNA sense strand
agaagcaacagcagggaaa

SEQ ID NO: 2542304 - RNA, 19 nt, Homo sapiens
  misc_RNA (1)...(19): siRNA sense strand
aggguaacaugaagauaaa

SEQ ID NO: 2542305 - RNA, 19 nt, Homo sapiens
  misc_RNA (1)...(19): siRNA sense strand
gcgagagggcuguggaaca

SEQ ID NO: 2542306 - RNA, 19 nt, Homo sapiens
  misc_RNA (1)...(19): siRNA sense strand
aaugaagggcuguguguaa

SEQ ID NO: 2542307 - RNA, 19 nt, Homo sapiens
  misc_RNA (1)...(19): siRNA sense strand
cagucuaaguggagaaucu

SEQ ID NO: 2542308 - RNA, 19 nt, Homo sapiens
  misc_RNA (1)...(19): siRNA sense strand
agauaaaugagacgagaga

SEQ ID NO: 2542309 - RNA, 19 nt, Homo sapiens
  misc_RNA (1)...(19): siRNA sense strand
ugauauaaauguuggugga

SEQ ID NO: 2542310 - RNA, 19 nt, Homo sapiens
  misc_RNA (1)...(19): siRNA sense strand
caggaagugccaugguaaa

SEQ ID NO: 2542311 - RNA, 19 nt, Homo sapiens
  misc_RNA (1)...(19): siRNA sense strand
uggcuugccugaagguaaa

SEQ ID NO: 2542312 - RNA, 19 nt, Homo sapiens
  misc_RNA (1)...(19): siRNA sense strand
guacagucuaaguggagaa

SEQ ID NO: 2542313 - RNA, 19 nt, Homo sapiens
  misc_RNA (1)...(19): siRNA sense strand
aaggguaacaugaagauaa

SEQ ID NO: 2542314 - RNA, 19 nt, Homo sapiens
  misc_RNA (1)...(19): siRNA sense strand
uauaaauguugguggaacu

SEQ ID NO: 2542315 - RNA, 19 nt, Homo sapiens
  misc_RNA (1)...(19): siRNA sense strand
uguuugugguugugaguuu

SEQ ID NO: 2542316 - RNA, 19 nt, Homo sapiens
  misc_RNA (1)...(19): siRNA sense strand
agugguaaacugaggaaaa

SEQ ID NO: 2542317 - RNA, 19 nt, Homo sapiens
  misc_RNA (1)...(19): siRNA sense strand
uggaaaaggaguuaggauu

SEQ ID NO: 2542318 - RNA, 19 nt, Homo sapiens
  misc_RNA (1)...(19): siRNA sense strand
gguuggaaguacaagcaga

SEQ ID NO: 2542319 - RNA, 19 nt, Homo sapiens
  misc_RNA (1)...(19): siRNA sense strand
gcacaacaguggaagcagu

SEQ ID NO: 2542320 - RNA, 19 nt, Homo sapiens
  misc_RNA (1)...(19): siRNA sense strand
gaagguaaaucuagugcca

SEQ ID NO: 2542321 - RNA, 19 nt, Homo sapiens
  misc_RNA (1)...(19): siRNA sense strand
ccaugauauucgcuugaua

SEQ ID NO: 2542322 - RNA, 19 nt, Homo sapiens
  misc_RNA (1)...(19): siRNA sense strand
cuguggauaugcugugaua

SEQ ID NO: 2542323 - RNA, 19 nt, Homo sapiens
  misc_RNA (1)...(19): siRNA sense strand
acaugguaacaauggaaua

SEQ ID NO: 2542324 - RNA, 19 nt, Homo sapiens
  misc_RNA (1)...(19): siRNA sense strand
uuucaaagcacaaacggaa

SEQ ID NO: 2542325 - RNA, 19 nt, Homo sapiens
  misc_RNA (1)...(19): siRNA sense strand
gggaaguguuggugggcug

SEQ ID NO: 2542326 - RNA, 19 nt, Homo sapiens
  misc_RNA (1)...(19): siRNA sense strand
ccuacaucccauuggacaa

SEQ ID NO: 2542327 - RNA, 19 nt, Homo sapiens
  misc_RNA (1)...(19): siRNA sense strand
aaaauuaacuugugggcga

SEQ ID NO: 2542328 - RNA, 19 nt, Homo sapiens
  misc_RNA (1)...(19): siRNA sense strand
ugguuguguaugaaagaaa

SEQ ID NO: 2542329 - RNA, 19 nt, Homo sapiens
  misc_RNA (1)...(19): siRNA sense strand
guggcuugccugaagguaa

SEQ ID NO: 2542330 - RNA, 19 nt, Homo sapiens
  misc_RNA (1)...(19): siRNA sense strand
acguaaaucaagggagcua

SEQ ID NO: 2542331 - RNA, 19 nt, Homo sapiens
  misc_RNA (1)...(19): siRNA sense strand
aagaaacccuggagccgaa

SEQ ID NO: 2542332 - RNA, 19 nt, Homo sapiens
  misc_RNA (1)...(19): siRNA sense strand
aguaguagcugcagugacu

SEQ ID NO: 2542333 - RNA, 19 nt, Homo sapiens
  misc_RNA (1)...(19): siRNA sense strand
ugauaaugccagcaccaaa

SEQ ID NO: 2542334 - RNA, 19 nt, Homo sapiens
  misc_RNA (1)...(19): siRNA sense strand
cgguguuccuauuauguua

SEQ ID NO: 2542335 - RNA, 19 nt, Homo sapiens
  misc_RNA (1)...(19): siRNA sense strand
agcacgaacucaagugaau

SEQ ID NO: 2542336 - RNA, 19 nt, Homo sapiens
  misc_RNA (1)...(19): siRNA sense strand
gguuguguaugaaagaaau

SEQ ID NO: 2542337 - RNA, 19 nt, Homo sapiens
  misc_RNA (1)...(19): siRNA sense strand
gagaggacauggaugcaca

SEQ ID NO: 2542338 - RNA, 19 nt, Homo sapiens
  misc_RNA (1)...(19): siRNA sense strand
gcuaugaaggcaaggaugu

SEQ ID NO: 2542339 - RNA, 19 nt, Homo sapiens
  misc_RNA (1)...(19): siRNA sense strand
agaaagaacgguacagucu

SEQ ID NO: 2542340 - RNA, 19 nt, Homo sapiens
  misc_RNA (1)...(19): siRNA sense strand
gagucaaagccauccaaau

SEQ ID NO: 2542341 - RNA, 19 nt, Homo sapiens
  misc_RNA (1)...(19): siRNA sense strand
cauuggacaaagaaggcaa

SEQ ID NO: 2542342 - RNA, 19 nt, Homo sapiens
  misc_RNA (1)...(19): siRNA sense strand
gcaacaguauggaggugca

SEQ ID NO: 2542343 - RNA, 19 nt, Homo sapiens
  misc_RNA (1)...(19): siRNA sense strand
ugaccuagaaagcaugaaa

SEQ ID NO: 2542344 - RNA, 19 nt, Homo sapiens
  misc_RNA (1)...(19): siRNA sense strand
gaauaggagccauccgaga

SEQ ID NO: 2542345 - RNA, 19 nt, Homo sapiens
  misc_RNA (1)...(19): siRNA sense strand
ugugauagcauuuggaugu

SEQ ID NO: 2542346 - RNA, 19 nt, Homo sapiens
  misc_RNA (1)...(19): siRNA sense strand
aagagagagcccagagcuu

SEQ ID NO: 2542347 - RNA, 19 nt, Homo sapiens
  misc_RNA (1)...(19): siRNA sense strand
aggaguuaggauugaauuu

SEQ ID NO: 2542348 - RNA, 19 nt, Homo sapiens
  misc_RNA (1)...(19): siRNA sense strand
guugaaucauauugcugaa

SEQ ID NO: 2542349 - RNA, 19 nt, Homo sapiens
  misc_RNA (1)...(19): siRNA sense strand
cugaagaacaugguaacaa

SEQ ID NO: 2542350 - RNA, 19 nt, Homo sapiens
  misc_RNA (1)...(19): siRNA sense strand
caugguaacaauggaauaa

SEQ ID NO: 2542351 - RNA, 19 nt, Homo sapiens
  misc_RNA (1)...(19): siRNA sense strand
cugaaauguguacugauaa

SEQ ID NO: 2542352 - RNA, 19 nt, Homo sapiens
  misc_RNA (1)...(19): siRNA sense strand
uugcugaagaacaugguaa

SEQ ID NO: 2542353 - RNA, 19 nt, Homo sapiens
  misc_RNA (1)...(19): siRNA sense strand
cugugaugcugcucgacaa

SEQ ID NO: 2542354 - RNA, 19 nt, Homo sapiens
  misc_RNA (1)...(19): siRNA sense strand
ucaggaagugccaugguaa

SEQ ID NO: 2542355 - RNA, 19 nt, Homo sapiens
  misc_RNA (1)...(19): siRNA sense strand
uggaagcaguaguguggau

SEQ ID NO: 2542356 - RNA, 19 nt, Homo sapiens
  misc_RNA (1)...(19): siRNA sense strand
cuagaaagcaugaaaacuu

SEQ ID NO: 2542357 - RNA, 19 nt, Homo sapiens
  misc_RNA (1)...(19): siRNA sense strand
aggaagaauuacugggaga

SEQ ID NO: 2542358 - RNA, 19 nt, Homo sapiens
  misc_RNA (1)...(19): siRNA sense strand
gugggauauuccagagaaa

SEQ ID NO: 2542359 - RNA, 19 nt, Homo sapiens
  misc_RNA (1)...(19): siRNA sense strand
aggaauugguggagagaag

SEQ ID NO: 2542360 - RNA, 19 nt, Homo sapiens
  misc_RNA (1)...(19): siRNA sense strand
gggauauuccagagaaaca

SEQ ID NO: 2542361 - RNA, 19 nt, Homo sapiens
  misc_RNA (1)...(19): siRNA sense strand
agaaagagcgagauggaca

SEQ ID NO: 2542362 - RNA, 19 nt, Homo sapiens
  misc_RNA (1)...(19): siRNA sense strand
uggauguggucgagaugaa

SEQ ID NO: 2542363 - RNA, 19 nt, Homo sapiens
  misc_RNA (1)...(19): siRNA sense strand
aagcaaauucagagauuca

SEQ ID NO: 2542364 - RNA, 19 nt, Homo sapiens
  misc_RNA (1)...(19): siRNA sense strand
ccucaaaggaauuggugga

SEQ ID NO: 2542365 - RNA, 19 nt, Homo sapiens
  misc_RNA (1)...(19): siRNA sense strand
uuugaagaucucugggaua

SEQ ID NO: 2542366 - RNA, 19 nt, Homo sapiens
  misc_RNA (1)...(19): siRNA sense strand
aauugaagaaagagcgaga

SEQ ID NO: 2542367 - RNA, 19 nt, Homo sapiens
  misc_RNA (1)...(19): siRNA sense strand
cuguggaugcugugaagaa

SEQ ID NO: 2542368 - RNA, 19 nt, Homo sapiens
  misc_RNA (1)...(19): siRNA sense strand
aggcaagagauccgaguga

SEQ ID NO: 2542369 - RNA, 19 nt, Homo sapiens
  misc_RNA (1)...(19): siRNA sense strand
aagaggaugggaagacaaa

SEQ ID NO: 2542370 - RNA, 19 nt, Homo sapiens
  misc_RNA (1)...(19): siRNA sense strand
ucgacaagcagcaggcgaa

SEQ ID NO: 2542371 - RNA, 19 nt, Homo sapiens
  misc_RNA (1)...(19): siRNA sense strand
ugaacaucgcagagcacua

SEQ ID NO: 2542372 - RNA, 19 nt, Homo sapiens
  misc_RNA (1)...(19): siRNA sense strand
gggagagaaauucaagcaa

SEQ ID NO: 2542373 - RNA, 19 nt, Homo sapiens
  misc_RNA (1)...(19): siRNA sense strand
gccugaagacaaagauauu

SEQ ID NO: 2542374 - RNA, 19 nt, Homo sapiens
  misc_RNA (1)...(19): siRNA sense strand
gggcacaagaagagggguu

SEQ ID NO: 2542375 - RNA, 19 nt, Homo sapiens
  misc_RNA (1)...(19): siRNA sense strand
gcguacuggcuguggacuu

SEQ ID NO: 2542376 - RNA, 19 nt, Homo sapiens
  misc_RNA (1)...(19): siRNA sense strand
cccaggaagcagauggaau

SEQ ID NO: 2542377 - RNA, 19 nt, Homo sapiens
  misc_RNA (1)...(19): siRNA sense strand
ugugaaagguaccugguga

SEQ ID NO: 2542378 - RNA, 19 nt, Homo sapiens
  misc_RNA (1)...(19): siRNA sense strand
caggaacagaucaagcaaa

SEQ ID NO: 2542379 - RNA, 19 nt, Homo sapiens
  misc_RNA (1)...(19): siRNA sense strand
ggacgacgugagcgaggaa

SEQ ID NO: 2542380 - RNA, 19 nt, Homo sapiens
  misc_RNA (1)...(19): siRNA sense strand
aagagauccgagugaggaa

SEQ ID NO: 2542381 - RNA, 19 nt, Homo sapiens
  misc_RNA (1)...(19): siRNA sense strand
guguccugguggagccaua

SEQ ID NO: 2542382 - RNA, 19 nt, Homo sapiens
  misc_RNA (1)...(19): siRNA sense strand
gccauaaucaucugggaca

SEQ ID NO: 2542383 - RNA, 19 nt, Homo sapiens
  misc_RNA (1)...(19): siRNA sense strand
accaaauggaaguaaguuu

SEQ ID NO: 2542384 - RNA, 19 nt, Homo sapiens
  misc_RNA (1)...(19): siRNA sense strand
caaaggaauugguggagag

SEQ ID NO: 2542385 - RNA, 19 nt, Homo sapiens
  misc_RNA (1)...(19): siRNA sense strand
gugccugaagacaaagaua

SEQ ID NO: 2542386 - RNA, 19 nt, Homo sapiens
  misc_RNA (1)...(19): siRNA sense strand
cagcacacauuccggguca

SEQ ID NO: 2542387 - RNA, 19 nt, Homo sapiens
  misc_RNA (1)...(19): siRNA sense strand
ccauaaucaucugggacau

SEQ ID NO: 2542388 - RNA, 19 nt, Homo sapiens
  misc_RNA (1)...(19): siRNA sense strand
gguauauuuuccuggagua

SEQ ID NO: 2542389 - RNA, 19 nt, Homo sapiens
  misc_RNA (1)...(19): siRNA sense strand
gaacuuacguuacuggcuu

SEQ ID NO: 2542390 - RNA, 19 nt, Homo sapiens
  misc_RNA (1)...(19): siRNA sense strand
ggagccauaagguggacaa

SEQ ID NO: 2542391 - RNA, 19 nt, Homo sapiens
  misc_RNA (1)...(19): siRNA sense strand
guggucgagaugaaagaaa

SEQ ID NO: 2542392 - RNA, 19 nt, Homo sapiens
  misc_RNA (1)...(19): siRNA sense strand
ccgaccgacuugagaaacu

SEQ ID NO: 2542393 - RNA, 19 nt, Homo sapiens
  misc_RNA (1)...(19): siRNA sense strand
ugauggacacgcaggauga

SEQ ID NO: 2542394 - RNA, 19 nt, Homo sapiens
  misc_RNA (1)...(19): siRNA sense strand
gcagagcacuacauggcuu

SEQ ID NO: 2542395 - RNA, 19 nt, Homo sapiens
  misc_RNA (1)...(19): siRNA sense strand
ugggaagacaaaaggguau

SEQ ID NO: 2542396 - RNA, 19 nt, Homo sapiens
  misc_RNA (1)...(19): siRNA sense strand
agacuacuugugugugaaa

SEQ ID NO: 2542397 - RNA, 19 nt, Homo sapiens
  misc_RNA (1)...(19): siRNA sense strand
gugugaaaguagauaggac

SEQ ID NO: 2542398 - RNA, 19 nt, Homo sapiens
  misc_RNA (1)...(19): siRNA sense strand
ggaaaauggcccaggagcu

SEQ ID NO: 2542399 - RNA, 19 nt, Homo sapiens
  misc_RNA (1)...(19): siRNA sense strand
aggaagaauuacugggaga

SEQ ID NO: 2542400 - RNA, 19 nt, Homo sapiens
  misc_RNA (1)...(19): siRNA sense strand
gugggauauuccagagaaa

SEQ ID NO: 2542401 - RNA, 19 nt, Homo sapiens
  misc_RNA (1)...(19): siRNA sense strand
aggaauugguggagagaag

SEQ ID NO: 2542402 - RNA, 19 nt, Homo sapiens
  misc_RNA (1)...(19): siRNA sense strand
gggauauuccagagaaaca

SEQ ID NO: 2542403 - RNA, 19 nt, Homo sapiens
  misc_RNA (1)...(19): siRNA sense strand
agaaagagcgagauggaca

SEQ ID NO: 2542404 - RNA, 19 nt, Homo sapiens
  misc_RNA (1)...(19): siRNA sense strand
uggauguggucgagaugaa

SEQ ID NO: 2542405 - RNA, 19 nt, Homo sapiens
  misc_RNA (1)...(19): siRNA sense strand
aagcaaauucagagauuca

SEQ ID NO: 2542406 - RNA, 19 nt, Homo sapiens
  misc_RNA (1)...(19): siRNA sense strand
ccucaaaggaauuggugga

SEQ ID NO: 2542407 - RNA, 19 nt, Homo sapiens
  misc_RNA (1)...(19): siRNA sense strand
uuugaagaucucugggaua

SEQ ID NO: 2542408 - RNA, 19 nt, Homo sapiens
  misc_RNA (1)...(19): siRNA sense strand
aauugaagaaagagcgaga

SEQ ID NO: 2542409 - RNA, 19 nt, Homo sapiens
  misc_RNA (1)...(19): siRNA sense strand
cuguggaugcugugaagaa

SEQ ID NO: 2542410 - RNA, 19 nt, Homo sapiens
  misc_RNA (1)...(19): siRNA sense strand
aggcaagagauccgaguga

SEQ ID NO: 2542411 - RNA, 19 nt, Homo sapiens
  misc_RNA (1)...(19): siRNA sense strand
aagaggaugggaagacaaa

SEQ ID NO: 2542412 - RNA, 19 nt, Homo sapiens
  misc_RNA (1)...(19): siRNA sense strand
ucgacaagcagcaggcgaa

SEQ ID NO: 2542413 - RNA, 19 nt, Homo sapiens
  misc_RNA (1)...(19): siRNA sense strand
ugaacaucgcagagcacua

SEQ ID NO: 2542414 - RNA, 19 nt, Homo sapiens
  misc_RNA (1)...(19): siRNA sense strand
gggagagaaauucaagcaa

SEQ ID NO: 2542415 - RNA, 19 nt, Homo sapiens
  misc_RNA (1)...(19): siRNA sense strand
gccugaagacaaagauauu

SEQ ID NO: 2542416 - RNA, 19 nt, Homo sapiens
  misc_RNA (1)...(19): siRNA sense strand
gggcacaagaagagggguu

SEQ ID NO: 2542417 - RNA, 19 nt, Homo sapiens
  misc_RNA (1)...(19): siRNA sense strand
gcguacuggcuguggacuu

SEQ ID NO: 2542418 - RNA, 19 nt, Homo sapiens
  misc_RNA (1)...(19): siRNA sense strand
cccaggaagcagauggaau

SEQ ID NO: 2542419 - RNA, 19 nt, Homo sapiens
  misc_RNA (1)...(19): siRNA sense strand
ugugaaagguaccugguga

SEQ ID NO: 2542420 - RNA, 19 nt, Homo sapiens
  misc_RNA (1)...(19): siRNA sense strand
caggaacagaucaagcaaa

SEQ ID NO: 2542421 - RNA, 19 nt, Homo sapiens
  misc_RNA (1)...(19): siRNA sense strand
ggacgacgugagcgaggaa

SEQ ID NO: 2542422 - RNA, 19 nt, Homo sapiens
  misc_RNA (1)...(19): siRNA sense strand
aagagauccgagugaggaa

SEQ ID NO: 2542423 - RNA, 19 nt, Homo sapiens
  misc_RNA (1)...(19): siRNA sense strand
guguccugguggagccaua

SEQ ID NO: 2542424 - RNA, 19 nt, Homo sapiens
  misc_RNA (1)...(19): siRNA sense strand
gccauaaucaucugggaca

SEQ ID NO: 2542425 - RNA, 19 nt, Homo sapiens
  misc_RNA (1)...(19): siRNA sense strand
accaaauggaaguaaguuu

SEQ ID NO: 2542426 - RNA, 19 nt, Homo sapiens
  misc_RNA (1)...(19): siRNA sense strand
caaaggaauugguggagag

SEQ ID NO: 2542427 - RNA, 19 nt, Homo sapiens
  misc_RNA (1)...(19): siRNA sense strand
gugccugaagacaaagaua

SEQ ID NO: 2542428 - RNA, 19 nt, Homo sapiens
  misc_RNA (1)...(19): siRNA sense strand
cagcacacauuccggguca

SEQ ID NO: 2542429 - RNA, 19 nt, Homo sapiens
  misc_RNA (1)...(19): siRNA sense strand
ccauaaucaucugggacau

SEQ ID NO: 2542430 - RNA, 19 nt, Homo sapiens
  misc_RNA (1)...(19): siRNA sense strand
gguauauuuuccuggagua

SEQ ID NO: 2542431 - RNA, 19 nt, Homo sapiens
  misc_RNA (1)...(19): siRNA sense strand
gaacuuacguuacuggcuu

SEQ ID NO: 2542432 - RNA, 19 nt, Homo sapiens
  misc_RNA (1)...(19): siRNA sense strand
ggagccauaagguggacaa

SEQ ID NO: 2542433 - RNA, 19 nt, Homo sapiens
  misc_RNA (1)...(19): siRNA sense strand
guggucgagaugaaagaaa

SEQ ID NO: 2542434 - RNA, 19 nt, Homo sapiens
  misc_RNA (1)...(19): siRNA sense strand
ccgaccgacuugagaaacu

SEQ ID NO: 2542435 - RNA, 19 nt, Homo sapiens
  misc_RNA (1)...(19): siRNA sense strand
ugauggacacgcaggauga

SEQ ID NO: 2542436 - RNA, 19 nt, Homo sapiens
  misc_RNA (1)...(19): siRNA sense strand
gcagagcacuacauggcuu

SEQ ID NO: 2542437 - RNA, 19 nt, Homo sapiens
  misc_RNA (1)...(19): siRNA sense strand
ugggaagacaaaaggguau

SEQ ID NO: 2542438 - RNA, 19 nt, Homo sapiens
  misc_RNA (1)...(19): siRNA sense strand
agacuacuugugugugaaa

SEQ ID NO: 2542439 - RNA, 19 nt, Homo sapiens
  misc_RNA (1)...(19): siRNA sense strand
gugugaaaguagauaggac

SEQ ID NO: 2542440 - RNA, 19 nt, Homo sapiens
  misc_RNA (1)...(19): siRNA sense strand
ggaaaauggcccaggagcu

SEQ ID NO: 2542441 - RNA, 19 nt, Homo sapiens
  misc_RNA (1)...(19): siRNA sense strand
gcaucuacugcaaggaaga

SEQ ID NO: 2542442 - RNA, 19 nt, Homo sapiens
  misc_RNA (1)...(19): siRNA sense strand
gagccaaguucaggcgcaa

SEQ ID NO: 2542443 - RNA, 19 nt, Homo sapiens
  misc_RNA (1)...(19): siRNA sense strand
gcaagaucucggaccgcua

SEQ ID NO: 2542444 - RNA, 19 nt, Homo sapiens
  misc_RNA (1)...(19): siRNA sense strand
guggacaagcaguggcaca

SEQ ID NO: 2542445 - RNA, 19 nt, Homo sapiens
  misc_RNA (1)...(19): siRNA sense strand
gccagaagaccaagcgcau

SEQ ID NO: 2542446 - RNA, 19 nt, Homo sapiens
  misc_RNA (1)...(19): siRNA sense strand
cgucuuaacuucugugccu

SEQ ID NO: 2542447 - RNA, 19 nt, Homo sapiens
  misc_RNA (1)...(19): siRNA sense strand
cagaagaugaagaggagaa

SEQ ID NO: 2542448 - RNA, 19 nt, Homo sapiens
  misc_RNA (1)...(19): siRNA sense strand
cuaccaaggaugaggagaa

SEQ ID NO: 2542449 - RNA, 19 nt, Homo sapiens
  misc_RNA (1)...(19): siRNA sense strand
agaaaguggaguugaguga

SEQ ID NO: 2542450 - RNA, 19 nt, Homo sapiens
  misc_RNA (1)...(19): siRNA sense strand
acgaggaagaccagggaau

SEQ ID NO: 2542451 - RNA, 19 nt, Homo sapiens
  misc_RNA (1)...(19): siRNA sense strand
cgggaggcucagagagauu

SEQ ID NO: 2542452 - RNA, 19 nt, Homo sapiens
  misc_RNA (1)...(19): siRNA sense strand
agacagaagaugaagagga

SEQ ID NO: 2542453 - RNA, 19 nt, Homo sapiens
  misc_RNA (1)...(19): siRNA sense strand
auguuaagcagaugagcaa

SEQ ID NO: 2542454 - RNA, 19 nt, Homo sapiens
  misc_RNA (1)...(19): siRNA sense strand
aggaugaaucagagacaga

SEQ ID NO: 2542455 - RNA, 19 nt, Homo sapiens
  misc_RNA (1)...(19): siRNA sense strand
aagaggaagagaaggaaga

SEQ ID NO: 2542456 - RNA, 19 nt, Homo sapiens
  misc_RNA (1)...(19): siRNA sense strand
gaacaauccccuugagaca

SEQ ID NO: 2542457 - RNA, 19 nt, Homo sapiens
  misc_RNA (1)...(19): siRNA sense strand
gugacacagaggaggaaau

SEQ ID NO: 2542458 - RNA, 19 nt, Homo sapiens
  misc_RNA (1)...(19): siRNA sense strand
gaauccagguugaaggcau

SEQ ID NO: 2542459 - RNA, 19 nt, Homo sapiens
  misc_RNA (1)...(19): siRNA sense strand
ucacaggagaccaaggaau

SEQ ID NO: 2542460 - RNA, 19 nt, Homo sapiens
  misc_RNA (1)...(19): siRNA sense strand
uaagaagaccauagagcga

SEQ ID NO: 2542461 - RNA, 19 nt, Homo sapiens
  misc_RNA (1)...(19): siRNA sense strand
agggaauuuaucagagcaa

SEQ ID NO: 2542462 - RNA, 19 nt, Homo sapiens
  misc_RNA (1)...(19): siRNA sense strand
aggaaaugccucaaguaca

SEQ ID NO: 2542463 - RNA, 19 nt, Homo sapiens
  misc_RNA (1)...(19): siRNA sense strand
gaacaaugccuuugaggag

SEQ ID NO: 2542464 - RNA, 19 nt, Homo sapiens
  misc_RNA (1)...(19): siRNA sense strand
agaagaugaagaggagaaa

SEQ ID NO: 2542465 - RNA, 19 nt, Homo sapiens
  misc_RNA (1)...(19): siRNA sense strand
aagaggaccaggagcagaa

SEQ ID NO: 2542466 - RNA, 19 nt, Homo sapiens
  misc_RNA (1)...(19): siRNA sense strand
gcauugaugaauuugacaa

SEQ ID NO: 2542467 - RNA, 19 nt, Homo sapiens
  misc_RNA (1)...(19): siRNA sense strand
gccaagaggaccaggagca

SEQ ID NO: 2542468 - RNA, 19 nt, Homo sapiens
  misc_RNA (1)...(19): siRNA sense strand
caggagcagaagaggaaga

SEQ ID NO: 2542469 - RNA, 19 nt, Homo sapiens
  misc_RNA (1)...(19): siRNA sense strand
cccuaugacuucagugaca

SEQ ID NO: 2542470 - RNA, 19 nt, Homo sapiens
  misc_RNA (1)...(19): siRNA sense strand
ccaagcaguaugaggaguu

SEQ ID NO: 2542471 - RNA, 19 nt, Homo sapiens
  misc_RNA (1)...(19): siRNA sense strand
gagcaaaguucgggagcug

SEQ ID NO: 2542472 - RNA, 19 nt, Homo sapiens
  misc_RNA (1)...(19): siRNA sense strand
aauccagguugaaggcauu

SEQ ID NO: 2542473 - RNA, 19 nt, Homo sapiens
  misc_RNA (1)...(19): siRNA sense strand
ggaauuuaucagagcaaag

SEQ ID NO: 2542474 - RNA, 19 nt, Homo sapiens
  misc_RNA (1)...(19): siRNA sense strand
gacuaugucaagaaagcaa

SEQ ID NO: 2542475 - RNA, 19 nt, Homo sapiens
  misc_RNA (1)...(19): siRNA sense strand
agucucagcuucugcggua

SEQ ID NO: 2542476 - RNA, 19 nt, Homo sapiens
  misc_RNA (1)...(19): siRNA sense strand
accaggagcagaagaggaa

SEQ ID NO: 2542477 - RNA, 19 nt, Homo sapiens
  misc_RNA (1)...(19): siRNA sense strand
agguaugaccaguauaaga

SEQ ID NO: 2542478 - RNA, 19 nt, Homo sapiens
  misc_RNA (1)...(19): siRNA sense strand
ccuacauugcagaagagua

SEQ ID NO: 2542479 - RNA, 19 nt, Homo sapiens
  misc_RNA (1)...(19): siRNA sense strand
agauuuaugagaagcauga

SEQ ID NO: 2542480 - RNA, 19 nt, Homo sapiens
  misc_RNA (1)...(19): siRNA sense strand
aggagaagauggugagugc

SEQ ID NO: 2542481 - RNA, 19 nt, Homo sapiens
  misc_RNA (1)...(19): siRNA sense strand
cagacucacaggagaccaa

SEQ ID NO: 2542482 - RNA, 19 nt, Homo sapiens
  misc_RNA (1)...(19): siRNA sense strand
uaagaagcgaagugaggau

SEQ ID NO: 2542483 - RNA, 19 nt, Homo sapiens
  misc_RNA (1)...(19): siRNA sense strand
gcaaaguucgggagcugau

SEQ ID NO: 2542484 - RNA, 19 nt, Homo sapiens
  misc_RNA (1)...(19): siRNA sense strand
uggucuguguggagggcau

SEQ ID NO: 2542485 - RNA, 19 nt, Homo sapiens
  misc_RNA (1)...(19): siRNA sense strand
ggaaagaagggaggcuaca

SEQ ID NO: 2542486 - RNA, 19 nt, Homo sapiens
  misc_RNA (1)...(19): siRNA sense strand
guaccguggugcuggacga

SEQ ID NO: 2542487 - RNA, 19 nt, Homo sapiens
  misc_RNA (1)...(19): siRNA sense strand
ggagaaaagccaagaggac

SEQ ID NO: 2542488 - RNA, 19 nt, Homo sapiens
  misc_RNA (1)...(19): siRNA sense strand
agaaaagccaagaggacca

SEQ ID NO: 2542489 - RNA, 19 nt, Homo sapiens
  misc_RNA (1)...(19): siRNA sense strand
caggaagaucagcaggaca

SEQ ID NO: 2542490 - RNA, 19 nt, Homo sapiens
  misc_RNA (1)...(19): siRNA sense strand
ugaggaugaaucagagaca

SEQ ID NO: 2542491 - RNA, 19 nt, Homo sapiens
  misc_RNA (1)...(19): siRNA sense strand
cuggaaagaagggaggcua

SEQ ID NO: 2542492 - RNA, 19 nt, Homo sapiens
  misc_RNA (1)...(19): siRNA sense strand
ugguuugcauugaugaauu

SEQ ID NO: 2542493 - RNA, 19 nt, Homo sapiens
  misc_RNA (1)...(19): siRNA sense strand
gaagaaacguaagaagcga

SEQ ID NO: 2542494 - RNA, 19 nt, Homo sapiens
  misc_RNA (1)...(19): siRNA sense strand
aagaaacguaagaagcgaa

SEQ ID NO: 2542495 - RNA, 19 nt, Homo sapiens
  misc_RNA (1)...(19): siRNA sense strand
agagagauuaccuggacuu

SEQ ID NO: 2542496 - RNA, 19 nt, Homo sapiens
  misc_RNA (1)...(19): siRNA sense strand
ggaugaaagcaaaggcuca

SEQ ID NO: 2542497 - RNA, 19 nt, Homo sapiens
  misc_RNA (1)...(19): siRNA sense strand
cggcagugaacaauagcua

SEQ ID NO: 2542498 - RNA, 19 nt, Homo sapiens
  misc_RNA (1)...(19): siRNA sense strand
ccuuaugugaagugaccaa

SEQ ID NO: 2542499 - RNA, 19 nt, Homo sapiens
  misc_RNA (1)...(19): siRNA sense strand
agaacaggucagagacaga

SEQ ID NO: 2542500 - RNA, 19 nt, Homo sapiens
  misc_RNA (1)...(19): siRNA sense strand
aaccuaaggaugaaagcaa

SEQ ID NO: 2542501 - RNA, 19 nt, Homo sapiens
  misc_RNA (1)...(19): siRNA sense strand
guguuaaagacgccgacua

SEQ ID NO: 2542502 - RNA, 19 nt, Homo sapiens
  misc_RNA (1)...(19): siRNA sense strand
gaaggaagauccaaaccca

SEQ ID NO: 2542503 - RNA, 19 nt, Homo sapiens
  misc_RNA (1)...(19): siRNA sense strand
acagaacaggucagagaca

SEQ ID NO: 2542504 - RNA, 19 nt, Homo sapiens
  misc_RNA (1)...(19): siRNA sense strand
aacagaaaugugaccgaua

SEQ ID NO: 2542505 - RNA, 19 nt, Homo sapiens
  misc_RNA (1)...(19): siRNA sense strand
gauaaagggccguggcuca

SEQ ID NO: 2542506 - RNA, 19 nt, Homo sapiens
  misc_RNA (1)...(19): siRNA sense strand
aagaaauagcagagaaacu

SEQ ID NO: 2542507 - RNA, 19 nt, Homo sapiens
  misc_RNA (1)...(19): siRNA sense strand
ggggauaaagcaagcaaaa

SEQ ID NO: 2542508 - RNA, 19 nt, Homo sapiens
  misc_RNA (1)...(19): siRNA sense strand
cgagaagcaaugauggcaa

SEQ ID NO: 2542509 - RNA, 19 nt, Homo sapiens
  misc_RNA (1)...(19): siRNA sense strand
ugauaacuguagauggcaa

SEQ ID NO: 2542510 - RNA, 19 nt, Homo sapiens
  misc_RNA (1)...(19): siRNA sense strand
agacaguaccacaggagau

SEQ ID NO: 2542511 - RNA, 19 nt, Homo sapiens
  misc_RNA (1)...(19): siRNA sense strand
cuuuauaccaccugcgauu

SEQ ID NO: 2542512 - RNA, 19 nt, Homo sapiens
  misc_RNA (1)...(19): siRNA sense strand
cugccuaucuacaggacau

SEQ ID NO: 2542513 - RNA, 19 nt, Homo sapiens
  misc_RNA (1)...(19): siRNA sense strand
ucuacaggacauugagaau

SEQ ID NO: 2542514 - RNA, 19 nt, Homo sapiens
  misc_RNA (1)...(19): siRNA sense strand
acaacgaggugaagagcgu

SEQ ID NO: 2542515 - RNA, 19 nt, Homo sapiens
  misc_RNA (1)...(19): siRNA sense strand
aggauaaguuugaggugcu

SEQ ID NO: 2542516 - RNA, 19 nt, Homo sapiens
  misc_RNA (1)...(19): siRNA sense strand
ggauucagaagaaaggaga

SEQ ID NO: 2542517 - RNA, 19 nt, Homo sapiens
  misc_RNA (1)...(19): siRNA sense strand
ccaccgacuauaauggcaa

SEQ ID NO: 2542518 - RNA, 19 nt, Homo sapiens
  misc_RNA (1)...(19): siRNA sense strand
acucagaugccuuggagca

SEQ ID NO: 2542519 - RNA, 19 nt, Homo sapiens
  misc_RNA (1)...(19): siRNA sense strand
cucccugagaugagugaaa

SEQ ID NO: 2542520 - RNA, 19 nt, Homo sapiens
  misc_RNA (1)...(19): siRNA sense strand
gauaacuguagauggcaau

SEQ ID NO: 2542521 - RNA, 19 nt, Homo sapiens
  misc_RNA (1)...(19): siRNA sense strand
aaaaggugguagaggacau

SEQ ID NO: 2542522 - RNA, 19 nt, Homo sapiens
  misc_RNA (1)...(19): siRNA sense strand
uggagaaauuuuacgauga

SEQ ID NO: 2542523 - RNA, 19 nt, Homo sapiens
  misc_RNA (1)...(19): siRNA sense strand
cugcaguccugguuguaca

SEQ ID NO: 2542524 - RNA, 19 nt, Homo sapiens
  misc_RNA (1)...(19): siRNA sense strand
ucagaagaaaggagaucca

SEQ ID NO: 2542525 - RNA, 19 nt, Homo sapiens
  misc_RNA (1)...(19): siRNA sense strand
agaagaaaggagauccaca

SEQ ID NO: 2542526 - RNA, 19 nt, Homo sapiens
  misc_RNA (1)...(19): siRNA sense strand
ccacgaaggacaaggacgu

SEQ ID NO: 2542527 - RNA, 19 nt, Homo sapiens
  misc_RNA (1)...(19): siRNA sense strand
cagggacagaggaggcuaa

SEQ ID NO: 2542528 - RNA, 19 nt, Homo sapiens
  misc_RNA (1)...(19): siRNA sense strand
cuaaugaggacauggagga

SEQ ID NO: 2542529 - RNA, 19 nt, Homo sapiens
  misc_RNA (1)...(19): siRNA sense strand
uggaggaguuaaugggucu

SEQ ID NO: 2542530 - RNA, 19 nt, Homo sapiens
  misc_RNA (1)...(19): siRNA sense strand
cugggaagcuccuggccuu

SEQ ID NO: 2542531 - RNA, 19 nt, Homo sapiens
  misc_RNA (1)...(19): siRNA sense strand
ucaucaacuaugugggcuu

SEQ ID NO: 2542532 - RNA, 19 nt, Homo sapiens
  misc_RNA (1)...(19): siRNA sense strand
augaggacauggaggagca

SEQ ID NO: 2542533 - RNA, 19 nt, Homo sapiens
  misc_RNA (1)...(19): siRNA sense strand
ccacgaaggacaaggacgu

SEQ ID NO: 2542534 - RNA, 19 nt, Homo sapiens
  misc_RNA (1)...(19): siRNA sense strand
cagggacagaggaggcuaa

SEQ ID NO: 2542535 - RNA, 19 nt, Homo sapiens
  misc_RNA (1)...(19): siRNA sense strand
cuaaugaggacauggagga

SEQ ID NO: 2542536 - RNA, 19 nt, Homo sapiens
  misc_RNA (1)...(19): siRNA sense strand
uggaggaguuaaugggucu

SEQ ID NO: 2542537 - RNA, 19 nt, Homo sapiens
  misc_RNA (1)...(19): siRNA sense strand
ucaucaacuaugugggcuu

SEQ ID NO: 2542538 - RNA, 19 nt, Homo sapiens
  misc_RNA (1)...(19): siRNA sense strand
augaggacauggaggagca

SEQ ID NO: 2542539 - RNA, 19 nt, Homo sapiens
  misc_RNA (1)...(19): siRNA sense strand
ggagaagaauagaggacga

SEQ ID NO: 2542540 - RNA, 19 nt, Homo sapiens
  misc_RNA (1)...(19): siRNA sense strand
cggaaacaucauauggaau

SEQ ID NO: 2542541 - RNA, 19 nt, Homo sapiens
  misc_RNA (1)...(19): siRNA sense strand
auauaauucugcugggaca

SEQ ID NO: 2542542 - RNA, 19 nt, Homo sapiens
  misc_RNA (1)...(19): siRNA sense strand
agucggaaguaaaaggaua

SEQ ID NO: 2542543 - RNA, 19 nt, Homo sapiens
  misc_RNA (1)...(19): siRNA sense strand
uggcagcagcagugaacaa

SEQ ID NO: 2542544 - RNA, 19 nt, Homo sapiens
  misc_RNA (1)...(19): siRNA sense strand
cuucaacaacaaaggagaa

SEQ ID NO: 2542545 - RNA, 19 nt, Homo sapiens
  misc_RNA (1)...(19): siRNA sense strand
caacaaaggagaaggcccu

SEQ ID NO: 2542546 - RNA, 19 nt, Homo sapiens
  misc_RNA (1)...(19): siRNA sense strand
aaauacgaacaguuggaaa

SEQ ID NO: 2542547 - RNA, 19 nt, Homo sapiens
  misc_RNA (1)...(19): siRNA sense strand
aggacgaauacaagguuau

SEQ ID NO: 2542548 - RNA, 19 nt, Homo sapiens
  misc_RNA (1)...(19): siRNA sense strand
guuggaaaucagacaucaa

SEQ ID NO: 2542549 - RNA, 19 nt, Homo sapiens
  misc_RNA (1)...(19): siRNA sense strand
gaacagacaaagcagcaca

SEQ ID NO: 2542550 - RNA, 19 nt, Homo sapiens
  misc_RNA (1)...(19): siRNA sense strand
aaauuaagccauucagcga

SEQ ID NO: 2542551 - RNA, 19 nt, Homo sapiens
  misc_RNA (1)...(19): siRNA sense strand
caaagauaucaaaugccua

SEQ ID NO: 2542552 - RNA, 19 nt, Homo sapiens
  misc_RNA (1)...(19): siRNA sense strand
ggagaagaauagaggacga

SEQ ID NO: 2542553 - RNA, 19 nt, Homo sapiens
  misc_RNA (1)...(19): siRNA sense strand
cggaaacaucauauggaau

SEQ ID NO: 2542554 - RNA, 19 nt, Homo sapiens
  misc_RNA (1)...(19): siRNA sense strand
auauaauucugcugggaca

SEQ ID NO: 2542555 - RNA, 19 nt, Homo sapiens
  misc_RNA (1)...(19): siRNA sense strand
agucggaaguaaaaggaua

SEQ ID NO: 2542556 - RNA, 19 nt, Homo sapiens
  misc_RNA (1)...(19): siRNA sense strand
uggcagcagcagugaacaa

SEQ ID NO: 2542557 - RNA, 19 nt, Homo sapiens
  misc_RNA (1)...(19): siRNA sense strand
cuucaacaacaaaggagaa

SEQ ID NO: 2542558 - RNA, 19 nt, Homo sapiens
  misc_RNA (1)...(19): siRNA sense strand
caacaaaggagaaggcccu

SEQ ID NO: 2542559 - RNA, 19 nt, Homo sapiens
  misc_RNA (1)...(19): siRNA sense strand
aaauacgaacaguuggaaa

SEQ ID NO: 2542560 - RNA, 19 nt, Homo sapiens
  misc_RNA (1)...(19): siRNA sense strand
aggacgaauacaagguuau

SEQ ID NO: 2542561 - RNA, 19 nt, Homo sapiens
  misc_RNA (1)...(19): siRNA sense strand
guuggaaaucagacaucaa

SEQ ID NO: 2542562 - RNA, 19 nt, Homo sapiens
  misc_RNA (1)...(19): siRNA sense strand
gaacagacaaagcagcaca

SEQ ID NO: 2542563 - RNA, 19 nt, Homo sapiens
  misc_RNA (1)...(19): siRNA sense strand
aaauuaagccauucagcga

SEQ ID NO: 2542564 - RNA, 19 nt, Homo sapiens
  misc_RNA (1)...(19): siRNA sense strand
caaagauaucaaaugccua

SEQ ID NO: 2542565 - RNA, 19 nt, Homo sapiens
  misc_RNA (1)...(19): siRNA sense strand
ggagaagaauagaggacga

SEQ ID NO: 2542566 - RNA, 19 nt, Homo sapiens
  misc_RNA (1)...(19): siRNA sense strand
cggaaacaucauauggaau

SEQ ID NO: 2542567 - RNA, 19 nt, Homo sapiens
  misc_RNA (1)...(19): siRNA sense strand
auauaauucugcugggaca

SEQ ID NO: 2542568 - RNA, 19 nt, Homo sapiens
  misc_RNA (1)...(19): siRNA sense strand
agucggaaguaaaaggaua

SEQ ID NO: 2542569 - RNA, 19 nt, Homo sapiens
  misc_RNA (1)...(19): siRNA sense strand
uggcagcagcagugaacaa

SEQ ID NO: 2542570 - RNA, 19 nt, Homo sapiens
  misc_RNA (1)...(19): siRNA sense strand
cuucaacaacaaaggagaa

SEQ ID NO: 2542571 - RNA, 19 nt, Homo sapiens
  misc_RNA (1)...(19): siRNA sense strand
caacaaaggagaaggcccu

SEQ ID NO: 2542572 - RNA, 19 nt, Homo sapiens
  misc_RNA (1)...(19): siRNA sense strand
aaauacgaacaguuggaaa

SEQ ID NO: 2542573 - RNA, 19 nt, Homo sapiens
  misc_RNA (1)...(19): siRNA sense strand
aggacgaauacaagguuau

SEQ ID NO: 2542574 - RNA, 19 nt, Homo sapiens
  misc_RNA (1)...(19): siRNA sense strand
guuggaaaucagacaucaa

SEQ ID NO: 2542575 - RNA, 19 nt, Homo sapiens
  misc_RNA (1)...(19): siRNA sense strand
gaacagacaaagcagcaca

SEQ ID NO: 2542576 - RNA, 19 nt, Homo sapiens
  misc_RNA (1)...(19): siRNA sense strand
aaauuaagccauucagcga

SEQ ID NO: 2542577 - RNA, 19 nt, Homo sapiens
  misc_RNA (1)...(19): siRNA sense strand
caaagauaucaaaugccua

SEQ ID NO: 2542578 - RNA, 19 nt, Homo sapiens
  misc_RNA (1)...(19): siRNA sense strand
ccagauguuuguugggaca

SEQ ID NO: 2542579 - RNA, 19 nt, Homo sapiens
  misc_RNA (1)...(19): siRNA sense strand
guuuguugggacagaaaua

SEQ ID NO: 2542580 - RNA, 19 nt, Homo sapiens
  misc_RNA (1)...(19): siRNA sense strand
ugaauguggauuacagcaa

SEQ ID NO: 2542581 - RNA, 19 nt, Homo sapiens
  misc_RNA (1)...(19): siRNA sense strand
uggagcuacuggagcaaca

SEQ ID NO: 2542582 - RNA, 19 nt, Homo sapiens
  misc_RNA (1)...(19): siRNA sense strand
ggaugugaauggaggcgau

SEQ ID NO: 2542583 - RNA, 19 nt, Homo sapiens
  misc_RNA (1)...(19): siRNA sense strand
ggaugugaauggaggcgau

SEQ ID NO: 2542584 - RNA, 19 nt, Homo sapiens
  misc_RNA (1)...(19): siRNA sense strand
ggaugugaauggaggcgau

SEQ ID NO: 2542585 - RNA, 19 nt, Homo sapiens
  misc_RNA (1)...(19): siRNA sense strand
cagaagaggugcuggguca

SEQ ID NO: 2542586 - RNA, 19 nt, Homo sapiens
  misc_RNA (1)...(19): siRNA sense strand
agaugaagaauuagguauc

SEQ ID NO: 2542587 - RNA, 19 nt, Homo sapiens
  misc_RNA (1)...(19): siRNA sense strand
gugcagagguauuggguca

SEQ ID NO: 2542588 - RNA, 19 nt, Homo sapiens
  misc_RNA (1)...(19): siRNA sense strand
augaaaacucagagaagaa

SEQ ID NO: 2542589 - RNA, 19 nt, Homo sapiens
  misc_RNA (1)...(19): siRNA sense strand
aagaaaaggaagagggcca

SEQ ID NO: 2542590 - RNA, 19 nt, Homo sapiens
  misc_RNA (1)...(19): siRNA sense strand
ugguaagguugauggcaca

SEQ ID NO: 2542591 - RNA, 19 nt, Homo sapiens
  misc_RNA (1)...(19): siRNA sense strand
ucacaugauuucagggauc

SEQ ID NO: 2542592 - RNA, 19 nt, Homo sapiens
  misc_RNA (1)...(19): siRNA sense strand
cuguaaagcagaugcaagu

SEQ ID NO: 2542593 - RNA, 19 nt, Homo sapiens
  misc_RNA (1)...(19): siRNA sense strand
aggaguuacaguugaaaca

SEQ ID NO: 2542594 - RNA, 19 nt, Homo sapiens
  misc_RNA (1)...(19): siRNA sense strand
acuccaggaagaaggcaaa

SEQ ID NO: 2542595 - RNA, 19 nt, Homo sapiens
  misc_RNA (1)...(19): siRNA sense strand
cuuuguaugucgugaagca

SEQ ID NO: 2542596 - RNA, 19 nt, Homo sapiens
  misc_RNA (1)...(19): siRNA sense strand
caacuggauuuauggggaa

SEQ ID NO: 2542597 - RNA, 19 nt, Homo sapiens
  misc_RNA (1)...(19): siRNA sense strand
ucagagaagaaaaggaaga

SEQ ID NO: 2542598 - RNA, 19 nt, Homo sapiens
  misc_RNA (1)...(19): siRNA sense strand
guaaugugcuuauuggcuu

SEQ ID NO: 2542599 - RNA, 19 nt, Homo sapiens
  misc_RNA (1)...(19): siRNA sense strand
ugauuaagagccagggcca

SEQ ID NO: 2542600 - RNA, 19 nt, Homo sapiens
  misc_RNA (1)...(19): siRNA sense strand
ccuaucacauacauggcaa

SEQ ID NO: 2542601 - RNA, 19 nt, Homo sapiens
  misc_RNA (1)...(19): siRNA sense strand
ggaugaaaacucagagaag

SEQ ID NO: 2542602 - RNA, 19 nt, Homo sapiens
  misc_RNA (1)...(19): siRNA sense strand
acucagagaagaaaaggaa

SEQ ID NO: 2542603 - RNA, 19 nt, Homo sapiens
  misc_RNA (1)...(19): siRNA sense strand
uuguguuugugguggguuu

SEQ ID NO: 2542604 - RNA, 19 nt, Homo sapiens
  misc_RNA (1)...(19): siRNA sense strand
gauacaaacaacuuggcaa

SEQ ID NO: 2542605 - RNA, 19 nt, Homo sapiens
  misc_RNA (1)...(19): siRNA sense strand
aauuaagugcccugaagaa

SEQ ID NO: 2542606 - RNA, 19 nt, Homo sapiens
  misc_RNA (1)...(19): siRNA sense strand
acaacuggguauuuggaga

SEQ ID NO: 2542607 - RNA, 19 nt, Homo sapiens
  misc_RNA (1)...(19): siRNA sense strand
cuaacuacuacuacaacaa

SEQ ID NO: 2542608 - RNA, 19 nt, Homo sapiens
  misc_RNA (1)...(19): siRNA sense strand
cagucaucuucuauggcaa

SEQ ID NO: 2542609 - RNA, 19 nt, Homo sapiens
  misc_RNA (1)...(19): siRNA sense strand
gaucauagaugguuguggu

SEQ ID NO: 2542610 - RNA, 19 nt, Homo sapiens
  misc_RNA (1)...(19): siRNA sense strand
gcaucagcaucaaccgcua

SEQ ID NO: 2542611 - RNA, 19 nt, Homo sapiens
  misc_RNA (1)...(19): siRNA sense strand
acaacaacacugauggcuu

SEQ ID NO: 2542612 - RNA, 19 nt, Homo sapiens
  misc_RNA (1)...(19): siRNA sense strand
auuaagugcccugaagaaa

SEQ ID NO: 2542613 - RNA, 19 nt, Homo sapiens
  misc_RNA (1)...(19): siRNA sense strand
aaugggaacaacuggguau

SEQ ID NO: 2542614 - RNA, 19 nt, Homo sapiens
  misc_RNA (1)...(19): siRNA sense strand
ggacuuaaguugaacggca

SEQ ID NO: 2542615 - RNA, 19 nt, Homo sapiens
  misc_RNA (1)...(19): siRNA sense strand
ggauaaacugagaaaagaa

SEQ ID NO: 2542616 - RNA, 19 nt, Homo sapiens
  misc_RNA (1)...(19): siRNA sense strand
caggaaggggcgaaagaua

SEQ ID NO: 2542617 - RNA, 19 nt, Homo sapiens
  misc_RNA (1)...(19): siRNA sense strand
gggcgaaagauauguggga

SEQ ID NO: 2542618 - RNA, 19 nt, Homo sapiens
  misc_RNA (1)...(19): siRNA sense strand
acgacaagacgaacaucaa

SEQ ID NO: 2542619 - RNA, 19 nt, Homo sapiens
  misc_RNA (1)...(19): siRNA sense strand
ugugggauaaacugagaaa

SEQ ID NO: 2542620 - RNA, 19 nt, Homo sapiens
  misc_RNA (1)...(19): siRNA sense strand
ggucacagcccuuacggau

SEQ ID NO: 2542621 - RNA, 19 nt, Homo sapiens
  misc_RNA (1)...(19): siRNA sense strand
gagcaguggcguagaaaau

SEQ ID NO: 2542622 - RNA, 19 nt, Homo sapiens
  misc_RNA (1)...(19): siRNA sense strand
gggugauggacaagaccaa

SEQ ID NO: 2542623 - RNA, 19 nt, Homo sapiens
  misc_RNA (1)...(19): siRNA sense strand
ggacaagaccaaaggggca

SEQ ID NO: 2542624 - RNA, 19 nt, Homo sapiens
  misc_RNA (1)...(19): siRNA sense strand
cugcagaaaaugaaggaau

SEQ ID NO: 2542625 - RNA, 19 nt, Homo sapiens
  misc_RNA (1)...(19): siRNA sense strand
ccuuuaaagaagugucuga

SEQ ID NO: 2542626 - RNA, 19 nt, Homo sapiens
  misc_RNA (1)...(19): siRNA sense strand
aagaauguguauagugcca

SEQ ID NO: 2542627 - RNA, 19 nt, Homo sapiens
  misc_RNA (1)...(19): siRNA sense strand
cugaggaagaacuagaaaa

SEQ ID NO: 2542628 - RNA, 19 nt, Homo sapiens
  misc_RNA (1)...(19): siRNA sense strand
gacaagagcagccaggaga

SEQ ID NO: 2542629 - RNA, 19 nt, Homo sapiens
  misc_RNA (1)...(19): siRNA sense strand
ggaagaauguguauagugc

SEQ ID NO: 2542630 - RNA, 19 nt, Homo sapiens
  misc_RNA (1)...(19): siRNA sense strand
cagaaauggcauagugaaa

SEQ ID NO: 2542631 - RNA, 19 nt, Homo sapiens
  misc_RNA (1)...(19): siRNA sense strand
ggaucuuggucgagaacaa

SEQ ID NO: 2542632 - RNA, 19 nt, Homo sapiens
  misc_RNA (1)...(19): siRNA sense strand
cuacaaagaacuugagaca

SEQ ID NO: 2542633 - RNA, 19 nt, Homo sapiens
  misc_RNA (1)...(19): siRNA sense strand
guuaaucauuggagagcaa

SEQ ID NO: 2542634 - RNA, 19 nt, Homo sapiens
  misc_RNA (1)...(19): siRNA sense strand
gaaugaaagaagacagaau

SEQ ID NO: 2542635 - RNA, 19 nt, Homo sapiens
  misc_RNA (1)...(19): siRNA sense strand
ggguauacaucaacgagaa

SEQ ID NO: 2542636 - RNA, 19 nt, Homo sapiens
  misc_RNA (1)...(19): siRNA sense strand
cagauauacaagagagauu

SEQ ID NO: 2542637 - RNA, 19 nt, Homo sapiens
  misc_RNA (1)...(19): siRNA sense strand
caguuaacccauaaagaua

SEQ ID NO: 2542638 - RNA, 19 nt, Homo sapiens
  misc_RNA (1)...(19): siRNA sense strand
ucucaaaugcccaaggaaa

SEQ ID NO: 2542639 - RNA, 19 nt, Homo sapiens
  misc_RNA (1)...(19): siRNA sense strand
gagcaaaaccuaaaguaaa

SEQ ID NO: 2542640 - RNA, 19 nt, Homo sapiens
  misc_RNA (1)...(19): siRNA sense strand
uggcagugauauugagcua

SEQ ID NO: 2542641 - RNA, 19 nt, Homo sapiens
  misc_RNA (1)...(19): siRNA sense strand
cggaaaagagcaaagaaaa

SEQ ID NO: 2542642 - RNA, 19 nt, Homo sapiens
  misc_RNA (1)...(19): siRNA sense strand
acaugaaacuggagaacca

SEQ ID NO: 2542643 - RNA, 19 nt, Homo sapiens
  misc_RNA (1)...(19): siRNA sense strand
agaccaacagauagaaaua

SEQ ID NO: 2542644 - RNA, 19 nt, Homo sapiens
  misc_RNA (1)...(19): siRNA sense strand
acacaguaauccugaagaa

SEQ ID NO: 2542645 - RNA, 19 nt, Homo sapiens
  misc_RNA (1)...(19): siRNA sense strand
cagcagucuuaguggguau

SEQ ID NO: 2542646 - RNA, 19 nt, Homo sapiens
  misc_RNA (1)...(19): siRNA sense strand
uagaagagaugguagaaaa

SEQ ID NO: 2542647 - RNA, 19 nt, Homo sapiens
  misc_RNA (1)...(19): siRNA sense strand
ccuuauuauaugugggauu

SEQ ID NO: 2542648 - RNA, 19 nt, Homo sapiens
  misc_RNA (1)...(19): siRNA sense strand
gaagaauguuguaggagga

SEQ ID NO: 2542649 - RNA, 19 nt, Homo sapiens
  misc_RNA (1)...(19): siRNA sense strand
guuugaagauggagaaaau

SEQ ID NO: 2542650 - RNA, 19 nt, Homo sapiens
  misc_RNA (1)...(19): siRNA sense strand
caguaauccugaagaacau

SEQ ID NO: 2542651 - RNA, 19 nt, Homo sapiens
  misc_RNA (1)...(19): siRNA sense strand
uggaugaaauagagaacuu

SEQ ID NO: 2542652 - RNA, 19 nt, Homo sapiens
  misc_RNA (1)...(19): siRNA sense strand
gggcagaacaauucaguca

SEQ ID NO: 2542653 - RNA, 19 nt, Homo sapiens
  misc_RNA (1)...(19): siRNA sense strand
ucaaagagugggaagacaa

SEQ ID NO: 2542654 - RNA, 19 nt, Homo sapiens
  misc_RNA (1)...(19): siRNA sense strand
aguuaaggagucagguaaa

SEQ ID NO: 2542655 - RNA, 19 nt, Homo sapiens
  misc_RNA (1)...(19): siRNA sense strand
gcuaaugguagaagcagua

SEQ ID NO: 2542656 - RNA, 19 nt, Homo sapiens
  misc_RNA (1)...(19): siRNA sense strand
guguacaagcagaacguua

SEQ ID NO: 2542657 - RNA, 19 nt, Homo sapiens
  misc_RNA (1)...(19): siRNA sense strand
agagauugguugagagucu

SEQ ID NO: 2542658 - RNA, 19 nt, Homo sapiens
  misc_RNA (1)...(19): siRNA sense strand
gaagaguagcugugguuau

SEQ ID NO: 2542659 - RNA, 19 nt, Homo sapiens
  misc_RNA (1)...(19): siRNA sense strand
cccaaagugcagugauaua

SEQ ID NO: 2542660 - RNA, 19 nt, Homo sapiens
  misc_RNA (1)...(19): siRNA sense strand
ugucaagguuacugcacaa

SEQ ID NO: 2542661 - RNA, 19 nt, Homo sapiens
  misc_RNA (1)...(19): siRNA sense strand
aauuauuaguccaggcaau

SEQ ID NO: 2542662 - RNA, 19 nt, Homo sapiens
  misc_RNA (1)...(19): siRNA sense strand
ccuacaaagacaugauauu

SEQ ID NO: 2542663 - RNA, 19 nt, Homo sapiens
  misc_RNA (1)...(19): siRNA sense strand
gguuacugcacaagauuua

SEQ ID NO: 2542664 - RNA, 19 nt, Homo sapiens
  misc_RNA (1)...(19): siRNA sense strand
cuucaaaaugggacagaaa

SEQ ID NO: 2542665 - RNA, 19 nt, Homo sapiens
  misc_RNA (1)...(19): siRNA sense strand
ccagaagaguguggaacua

SEQ ID NO: 2542666 - RNA, 19 nt, Homo sapiens
  misc_RNA (1)...(19): siRNA sense strand
gaugaaaaggagcggguua

SEQ ID NO: 2542667 - RNA, 19 nt, Homo sapiens
  misc_RNA (1)...(19): siRNA sense strand
gauuuagagaacugguaua

SEQ ID NO: 2542668 - RNA, 19 nt, Homo sapiens
  misc_RNA (1)...(19): siRNA sense strand
gcacaagauuuaauaggca

SEQ ID NO: 2542669 - RNA, 19 nt, Homo sapiens
  misc_RNA (1)...(19): siRNA sense strand
cagccauagccaaggacaa

SEQ ID NO: 2542670 - RNA, 19 nt, Homo sapiens
  misc_RNA (1)...(19): siRNA sense strand
ccaaagagaccuucaggau

SEQ ID NO: 2542671 - RNA, 19 nt, Homo sapiens
  misc_RNA (1)...(19): siRNA sense strand
agugaauggauuuggagaa

SEQ ID NO: 2542672 - RNA, 19 nt, Homo sapiens
  misc_RNA (1)...(19): siRNA sense strand
caggagacuuacauugaaa

SEQ ID NO: 2542673 - RNA, 19 nt, Homo sapiens
  misc_RNA (1)...(19): siRNA sense strand
cgugaaugcccaagaggau

SEQ ID NO: 2542674 - RNA, 19 nt, Homo sapiens
  misc_RNA (1)...(19): siRNA sense strand
ccagaugaagagacgauua

SEQ ID NO: 2542675 - RNA, 19 nt, Homo sapiens
  misc_RNA (1)...(19): siRNA sense strand
cagaugaagagacgauuaa

SEQ ID NO: 2542676 - RNA, 19 nt, Homo sapiens
  misc_RNA (1)...(19): siRNA sense strand
aaauagaagagaugguaga

SEQ ID NO: 2542677 - RNA, 19 nt, Homo sapiens
  misc_RNA (1)...(19): siRNA sense strand
aaauaaggauggaagcaca

SEQ ID NO: 2542678 - RNA, 19 nt, Homo sapiens
  misc_RNA (1)...(19): siRNA sense strand
ggagcaaaaccuaaaguaa

SEQ ID NO: 2542679 - RNA, 19 nt, Homo sapiens
  misc_RNA (1)...(19): siRNA sense strand
cagcaguacaaauacgaaa

SEQ ID NO: 2542680 - RNA, 19 nt, Homo sapiens
  misc_RNA (1)...(19): siRNA sense strand
aagaaggaucagaguacua

SEQ ID NO: 2542681 - RNA, 19 nt, Homo sapiens
  misc_RNA (1)...(19): siRNA sense strand
ggaagacaacucagggaga

SEQ ID NO: 2542682 - RNA, 19 nt, Homo sapiens
  misc_RNA (1)...(19): siRNA sense strand
caaagagugggaagacaaa

SEQ ID NO: 2542683 - RNA, 19 nt, Homo sapiens
  misc_RNA (1)...(19): siRNA sense strand
gggaagaguagcugugguu

SEQ ID NO: 2542684 - RNA, 19 nt, Homo sapiens
  misc_RNA (1)...(19): siRNA sense strand
ccugauauguaaaguugua

SEQ ID NO: 2542685 - RNA, 19 nt, Homo sapiens
  misc_RNA (1)...(19): siRNA sense strand
cugaagaacaugccacuua

SEQ ID NO: 2542686 - RNA, 19 nt, Homo sapiens
  misc_RNA (1)...(19): siRNA sense strand
acacagaagagcuggaguu

SEQ ID NO: 2542687 - RNA, 19 nt, Homo sapiens
  misc_RNA (1)...(19): siRNA sense strand
guuauaagucagcaguuaa

SEQ ID NO: 2542688 - RNA, 19 nt, Homo sapiens
  misc_RNA (1)...(19): siRNA sense strand
agacaaaggagucacagua

SEQ ID NO: 2542689 - RNA, 19 nt, Homo sapiens
  misc_RNA (1)...(19): siRNA sense strand
ggauuucuguuaugggcaa

SEQ ID NO: 2542690 - RNA, 19 nt, Homo sapiens
  misc_RNA (1)...(19): siRNA sense strand
acauugaaauccagacaga

SEQ ID NO: 2542691 - RNA, 19 nt, Homo sapiens
  misc_RNA (1)...(19): siRNA sense strand
uguuauaagucagcaguua

SEQ ID NO: 2542692 - RNA, 19 nt, Homo sapiens
  misc_RNA (1)...(19): siRNA sense strand
cgacgaaaucuugaaguua

SEQ ID NO: 2542693 - RNA, 19 nt, Homo sapiens
  misc_RNA (1)...(19): siRNA sense strand
uagaaauacuucagaguuc

SEQ ID NO: 2542694 - RNA, 19 nt, Homo sapiens
  misc_RNA (1)...(19): siRNA sense strand
ggaagggauuacagccauu

SEQ ID NO: 2542695 - RNA, 19 nt, Homo sapiens
  misc_RNA (1)...(19): siRNA sense strand
ugguauucuuccuggcuua

SEQ ID NO: 2542696 - RNA, 19 nt, Homo sapiens
  misc_RNA (1)...(19): siRNA sense strand
gaguacuaugagagaacaa

SEQ ID NO: 2542697 - RNA, 19 nt, Homo sapiens
  misc_RNA (1)...(19): siRNA sense strand
cugaauuacagcugaccaa

SEQ ID NO: 2542698 - RNA, 19 nt, Homo sapiens
  misc_RNA (1)...(19): siRNA sense strand
cccaauaacuugaaugaca

SEQ ID NO: 2542699 - RNA, 19 nt, Homo sapiens
  misc_RNA (1)...(19): siRNA sense strand
ugcaaagaucagagugaaa

SEQ ID NO: 2542700 - RNA, 19 nt, Homo sapiens
  misc_RNA (1)...(19): siRNA sense strand
gggagaagaagcccaauaa

SEQ ID NO: 2542701 - RNA, 19 nt, Homo sapiens
  misc_RNA (1)...(19): siRNA sense strand
gggcagacagcaaagggaa

SEQ ID NO: 2542702 - RNA, 19 nt, Homo sapiens
  misc_RNA (1)...(19): siRNA sense strand
cggcaggguuugaagcuga

SEQ ID NO: 2542703 - RNA, 19 nt, Homo sapiens
  misc_RNA (1)...(19): siRNA sense strand
cgggagaagaagcccaaua

SEQ ID NO: 2542704 - RNA, 19 nt, Homo sapiens
  misc_RNA (1)...(19): siRNA sense strand
ccugcaaagaucagaguga

SEQ ID NO: 2542705 - RNA, 19 nt, Homo sapiens
  misc_RNA (1)...(19): siRNA sense strand
agaagaagcccaauaacuu

SEQ ID NO: 2542706 - RNA, 19 nt, Homo sapiens
  misc_RNA (1)...(19): siRNA sense strand
ugguguacccugagagcuu

SEQ ID NO: 2542707 - RNA, 19 nt, Homo sapiens
  misc_RNA (1)...(19): siRNA sense strand
gagaagaagcccaauaacu

SEQ ID NO: 2542708 - RNA, 19 nt, Homo sapiens
  misc_RNA (1)...(19): siRNA sense strand
caaagaucagagugaaaca

SEQ ID NO: 2542709 - RNA, 19 nt, Homo sapiens
  misc_RNA (1)...(19): siRNA sense strand
ccuccuucuuccugaacua

SEQ ID NO: 2542710 - RNA, 19 nt, Homo sapiens
  misc_RNA (1)...(19): siRNA sense strand
cagaguggugccugggaau

SEQ ID NO: 2542711 - RNA, 19 nt, Homo sapiens
  misc_RNA (1)...(19): siRNA sense strand
gcaugauccuggugcccuu

SEQ ID NO: 2542712 - RNA, 19 nt, Homo sapiens
  misc_RNA (1)...(19): siRNA sense strand
gcggaagaggacccugaaa

SEQ ID NO: 2542713 - RNA, 19 nt, Homo sapiens
  misc_RNA (1)...(19): siRNA sense strand
cccaauaacuugaaugaca

SEQ ID NO: 2542714 - RNA, 19 nt, Homo sapiens
  misc_RNA (1)...(19): siRNA sense strand
ugcaaagaucagagugaaa

SEQ ID NO: 2542715 - RNA, 19 nt, Homo sapiens
  misc_RNA (1)...(19): siRNA sense strand
gggagaagaagcccaauaa

SEQ ID NO: 2542716 - RNA, 19 nt, Homo sapiens
  misc_RNA (1)...(19): siRNA sense strand
gggcagacagcaaagggaa

SEQ ID NO: 2542717 - RNA, 19 nt, Homo sapiens
  misc_RNA (1)...(19): siRNA sense strand
cggcaggguuugaagcuga

SEQ ID NO: 2542718 - RNA, 19 nt, Homo sapiens
  misc_RNA (1)...(19): siRNA sense strand
cgggagaagaagcccaaua

SEQ ID NO: 2542719 - RNA, 19 nt, Homo sapiens
  misc_RNA (1)...(19): siRNA sense strand
ccugcaaagaucagaguga

SEQ ID NO: 2542720 - RNA, 19 nt, Homo sapiens
  misc_RNA (1)...(19): siRNA sense strand
agaagaagcccaauaacuu

SEQ ID NO: 2542721 - RNA, 19 nt, Homo sapiens
  misc_RNA (1)...(19): siRNA sense strand
ugguguacccugagagcuu

SEQ ID NO: 2542722 - RNA, 19 nt, Homo sapiens
  misc_RNA (1)...(19): siRNA sense strand
gagaagaagcccaauaacu

SEQ ID NO: 2542723 - RNA, 19 nt, Homo sapiens
  misc_RNA (1)...(19): siRNA sense strand
caaagaucagagugaaaca

SEQ ID NO: 2542724 - RNA, 19 nt, Homo sapiens
  misc_RNA (1)...(19): siRNA sense strand
ccuccuucuuccugaacua

SEQ ID NO: 2542725 - RNA, 19 nt, Homo sapiens
  misc_RNA (1)...(19): siRNA sense strand
cagaguggugccugggaau

SEQ ID NO: 2542726 - RNA, 19 nt, Homo sapiens
  misc_RNA (1)...(19): siRNA sense strand
gcaugauccuggugcccuu

SEQ ID NO: 2542727 - RNA, 19 nt, Homo sapiens
  misc_RNA (1)...(19): siRNA sense strand
gcggaagaggacccugaaa

SEQ ID NO: 2542728 - RNA, 19 nt, Homo sapiens
  misc_RNA (1)...(19): siRNA sense strand
aaauaaugaagguggacaa

SEQ ID NO: 2542729 - RNA, 19 nt, Homo sapiens
  misc_RNA (1)...(19): siRNA sense strand
cuagagaggcugucggcaa

SEQ ID NO: 2542730 - RNA, 19 nt, Homo sapiens
  misc_RNA (1)...(19): siRNA sense strand
gcucagcucuauagggaga

SEQ ID NO: 2542731 - RNA, 19 nt, Homo sapiens
  misc_RNA (1)...(19): siRNA sense strand
aaaugaaggagcaggaaga

SEQ ID NO: 2542732 - RNA, 19 nt, Homo sapiens
  misc_RNA (1)...(19): siRNA sense strand
ugaagguggacaagagcaa

SEQ ID NO: 2542733 - RNA, 19 nt, Homo sapiens
  misc_RNA (1)...(19): siRNA sense strand
ggacaagagcaaggaccaa

SEQ ID NO: 2542734 - RNA, 19 nt, Homo sapiens
  misc_RNA (1)...(19): siRNA sense strand
ggaaaauaaugaaggugga

SEQ ID NO: 2542735 - RNA, 19 nt, Homo sapiens
  misc_RNA (1)...(19): siRNA sense strand
gcuugauaguugugugguu

SEQ ID NO: 2542736 - RNA, 19 nt, Homo sapiens
  misc_RNA (1)...(19): siRNA sense strand
acaccaaugccaaguacaa

SEQ ID NO: 2542737 - RNA, 19 nt, Homo sapiens
  misc_RNA (1)...(19): siRNA sense strand
ccagaagaaguuuggcaau

SEQ ID NO: 2542738 - RNA, 19 nt, Homo sapiens
  misc_RNA (1)...(19): siRNA sense strand
ggaagcagccagcagggaa

SEQ ID NO: 2542739 - RNA, 19 nt, Homo sapiens
  misc_RNA (1)...(19): siRNA sense strand
cggauaaaaugaaggagca

SEQ ID NO: 2542740 - RNA, 19 nt, Homo sapiens
  misc_RNA (1)...(19): siRNA sense strand
agaaagacgaaaagaugaa

SEQ ID NO: 2542741 - RNA, 19 nt, Homo sapiens
  misc_RNA (1)...(19): siRNA sense strand
aguauaaugaugacaguga

SEQ ID NO: 2542742 - RNA, 19 nt, Homo sapiens
  misc_RNA (1)...(19): siRNA sense strand
gaagacaaucccaggcuga

SEQ ID NO: 2542743 - RNA, 19 nt, Homo sapiens
  misc_RNA (1)...(19): siRNA sense strand
cuggcaaacacaugcuuua

SEQ ID NO: 2542744 - RNA, 19 nt, Homo sapiens
  misc_RNA (1)...(19): siRNA sense strand
ccgacauggcgcaguucaa

SEQ ID NO: 2542745 - RNA, 19 nt, Homo sapiens
  misc_RNA (1)...(19): siRNA sense strand
gaguuaaggagcaguucuu

SEQ ID NO: 2542746 - RNA, 19 nt, Homo sapiens
  misc_RNA (1)...(19): siRNA sense strand
acaucaaggccuguggaaa

SEQ ID NO: 2542747 - RNA, 19 nt, Homo sapiens
  misc_RNA (1)...(19): siRNA sense strand
uggaaaccacuuuggaaaa

SEQ ID NO: 2542748 - RNA, 19 nt, Homo sapiens
  misc_RNA (1)...(19): siRNA sense strand
gagaucgguugcuggaaaa

SEQ ID NO: 2542749 - RNA, 19 nt, Homo sapiens
  misc_RNA (1)...(19): siRNA sense strand
cuucaauucaggaucgcua

SEQ ID NO: 2542750 - RNA, 19 nt, Homo sapiens
  misc_RNA (1)...(19): siRNA sense strand
gccuauaaggaucuugaaa

SEQ ID NO: 2542751 - RNA, 19 nt, Homo sapiens
  misc_RNA (1)...(19): siRNA sense strand
ggccaaggugguaucuaaa

SEQ ID NO: 2542752 - RNA, 19 nt, Homo sapiens
  misc_RNA (1)...(19): siRNA sense strand
cagaaguguuauuucacau

SEQ ID NO: 2542753 - RNA, 19 nt, Homo sapiens
  misc_RNA (1)...(19): siRNA sense strand
cauucagugacuucagaua

SEQ ID NO: 2542754 - RNA, 19 nt, Homo sapiens
  misc_RNA (1)...(19): siRNA sense strand
cgaucuacagaguuggauu

SEQ ID NO: 2542755 - RNA, 19 nt, Homo sapiens
  misc_RNA (1)...(19): siRNA sense strand
caugcaagucggaggaaac

SEQ ID NO: 2542756 - RNA, 19 nt, Homo sapiens
  misc_RNA (1)...(19): siRNA sense strand
aaguuugggagcucagaaa

SEQ ID NO: 2542757 - RNA, 19 nt, Homo sapiens
  misc_RNA (1)...(19): siRNA sense strand
caucauuacgauuagccua

SEQ ID NO: 2542758 - RNA, 19 nt, Homo sapiens
  misc_RNA (1)...(19): siRNA sense strand
cccagaagaaguuuggcaa

SEQ ID NO: 2542759 - RNA, 19 nt, Homo sapiens
  misc_RNA (1)...(19): siRNA sense strand
ccaaugacaccaaugccaa

SEQ ID NO: 2542760 - RNA, 19 nt, Homo sapiens
  misc_RNA (1)...(19): siRNA sense strand
cgauuagccuauaaggauc

SEQ ID NO: 2542761 - RNA, 19 nt, Homo sapiens
  misc_RNA (1)...(19): siRNA sense strand
ccaguggaguuaaggagca

SEQ ID NO: 2542762 - RNA, 19 nt, Homo sapiens
  misc_RNA (1)...(19): siRNA sense strand
ugggaugacaguucagauu

SEQ ID NO: 2542763 - RNA, 19 nt, Homo sapiens
  misc_RNA (1)...(19): siRNA sense strand
ccaccaaaggaggaagauu

SEQ ID NO: 2542764 - RNA, 19 nt, Homo sapiens
  misc_RNA (1)...(19): siRNA sense strand
ggcaucagcaauagcagaa

SEQ ID NO: 2542765 - RNA, 19 nt, Homo sapiens
  misc_RNA (1)...(19): siRNA sense strand
gggcaucagcaauagcaga

SEQ ID NO: 2542766 - RNA, 19 nt, Homo sapiens
  misc_RNA (1)...(19): siRNA sense strand
auuaugagccaguugaaaa

SEQ ID NO: 2542767 - RNA, 19 nt, Homo sapiens
  misc_RNA (1)...(19): siRNA sense strand
cagaaauuccagaaggcua

SEQ ID NO: 2542768 - RNA, 19 nt, Homo sapiens
  misc_RNA (1)...(19): siRNA sense strand
agacaauugacaaggaacu

SEQ ID NO: 2542769 - RNA, 19 nt, Homo sapiens
  misc_RNA (1)...(19): siRNA sense strand
aggagcuggaagugcgaaa

SEQ ID NO: 2542770 - RNA, 19 nt, Homo sapiens
  misc_RNA (1)...(19): siRNA sense strand
gcaugugagaggagaugga

SEQ ID NO: 2542771 - RNA, 19 nt, Homo sapiens
  misc_RNA (1)...(19): siRNA sense strand
acuaugagacaauugacaa

SEQ ID NO: 2542772 - RNA, 19 nt, Homo sapiens
  misc_RNA (1)...(19): siRNA sense strand
ugggauuccaguagcaauu

SEQ ID NO: 2542773 - RNA, 19 nt, Homo sapiens
  misc_RNA (1)...(19): siRNA sense strand
ugguauuacuaugagacaa

SEQ ID NO: 2542774 - RNA, 19 nt, Homo sapiens
  misc_RNA (1)...(19): siRNA sense strand
ucugaaaacccuugagaau

SEQ ID NO: 2542775 - RNA, 19 nt, Homo sapiens
  misc_RNA (1)...(19): siRNA sense strand
aagacauucugauggaaaa

SEQ ID NO: 2542776 - RNA, 19 nt, Homo sapiens
  misc_RNA (1)...(19): siRNA sense strand
ccucaauggggaagaccaa

SEQ ID NO: 2542777 - RNA, 19 nt, Homo sapiens
  misc_RNA (1)...(19): siRNA sense strand
aagcagaauuggagggcau

SEQ ID NO: 2542778 - RNA, 19 nt, Homo sapiens
  misc_RNA (1)...(19): siRNA sense strand
agaccaauggcuagagaaa

SEQ ID NO: 2542779 - RNA, 19 nt, Homo sapiens
  misc_RNA (1)...(19): siRNA sense strand
ccucaaggagagaagauaa

SEQ ID NO: 2542780 - RNA, 19 nt, Homo sapiens
  misc_RNA (1)...(19): siRNA sense strand
guuuaauggucuugggcuu

SEQ ID NO: 2542781 - RNA, 19 nt, Homo sapiens
  misc_RNA (1)...(19): siRNA sense strand
ccagaaaucacuuggaaaa

SEQ ID NO: 2542782 - RNA, 19 nt, Homo sapiens
  misc_RNA (1)...(19): siRNA sense strand
aaaggaagaagaugggaaa

SEQ ID NO: 2542783 - RNA, 19 nt, Homo sapiens
  misc_RNA (1)...(19): siRNA sense strand
ccugaaagauggaucaaaa

SEQ ID NO: 2542784 - RNA, 19 nt, Homo sapiens
  misc_RNA (1)...(19): siRNA sense strand
caaaagaagacgacagcaa

SEQ ID NO: 2542785 - RNA, 19 nt, Homo sapiens
  misc_RNA (1)...(19): siRNA sense strand
aaauaaggcaggagaagau

SEQ ID NO: 2542786 - RNA, 19 nt, Homo sapiens
  misc_RNA (1)...(19): siRNA sense strand
aaguaaagaacucgaagaa

SEQ ID NO: 2542787 - RNA, 19 nt, Homo sapiens
  misc_RNA (1)...(19): siRNA sense strand
ugucaaagaaguagcguca

SEQ ID NO: 2542788 - RNA, 19 nt, Homo sapiens
  misc_RNA (1)...(19): siRNA sense strand
gcuuaguguuggagaaucu

SEQ ID NO: 2542789 - RNA, 19 nt, Homo sapiens
  misc_RNA (1)...(19): siRNA sense strand
ucacuggagaagagauaaa

SEQ ID NO: 2542790 - RNA, 19 nt, Homo sapiens
  misc_RNA (1)...(19): siRNA sense strand
caacagaugccaaaggaca

SEQ ID NO: 2542791 - RNA, 19 nt, Homo sapiens
  misc_RNA (1)...(19): siRNA sense strand
ggagaugagaacagaggau

SEQ ID NO: 2542792 - RNA, 19 nt, Homo sapiens
  misc_RNA (1)...(19): siRNA sense strand
cuguaaauggaaagggaca

SEQ ID NO: 2542793 - RNA, 19 nt, Homo sapiens
  misc_RNA (1)...(19): siRNA sense strand
ccacaaauaaggcaggaga

SEQ ID NO: 2542794 - RNA, 19 nt, Homo sapiens
  misc_RNA (1)...(19): siRNA sense strand
acagaggaugaaagaguua

SEQ ID NO: 2542795 - RNA, 19 nt, Homo sapiens
  misc_RNA (1)...(19): siRNA sense strand
gcaucaauucacuggagaa

SEQ ID NO: 2542796 - RNA, 19 nt, Homo sapiens
  misc_RNA (1)...(19): siRNA sense strand
aggaagaagaugggaaaga

SEQ ID NO: 2542797 - RNA, 19 nt, Homo sapiens
  misc_RNA (1)...(19): siRNA sense strand
uggcaagcucauugaagaa

SEQ ID NO: 2542798 - RNA, 19 nt, Homo sapiens
  misc_RNA (1)...(19): siRNA sense strand
agaugagaacagaggauga

SEQ ID NO: 2542799 - RNA, 19 nt, Homo sapiens
  misc_RNA (1)...(19): siRNA sense strand
ggaugaaagaguuacuaau

SEQ ID NO: 2542800 - RNA, 19 nt, Homo sapiens
  misc_RNA (1)...(19): siRNA sense strand
auucaaacaaggagaagau

SEQ ID NO: 2542801 - RNA, 19 nt, Homo sapiens
  misc_RNA (1)...(19): siRNA sense strand
aggagaagaugaaaagcaa

SEQ ID NO: 2542802 - RNA, 19 nt, Homo sapiens
  misc_RNA (1)...(19): siRNA sense strand
agagcuuaguguuggagaa

SEQ ID NO: 2542803 - RNA, 19 nt, Homo sapiens
  misc_RNA (1)...(19): siRNA sense strand
ugucagauucagggagaua

SEQ ID NO: 2542804 - RNA, 19 nt, Homo sapiens
  misc_RNA (1)...(19): siRNA sense strand
auucacuggagaagagaua

SEQ ID NO: 2542805 - RNA, 19 nt, Homo sapiens
  misc_RNA (1)...(19): siRNA sense strand
gcccaguaaaugagccaaa

SEQ ID NO: 2542806 - RNA, 19 nt, Homo sapiens
  misc_RNA (1)...(19): siRNA sense strand
uaaaggaagaagaugggaa

SEQ ID NO: 2542807 - RNA, 19 nt, Homo sapiens
  misc_RNA (1)...(19): siRNA sense strand
cagagagaggagaagaaau

SEQ ID NO: 2542808 - RNA, 19 nt, Homo sapiens
  misc_RNA (1)...(19): siRNA sense strand
gguggaugucaaagaagua

SEQ ID NO: 2542809 - RNA, 19 nt, Homo sapiens
  misc_RNA (1)...(19): siRNA sense strand
guaaagaacucgaagaagg

SEQ ID NO: 2542810 - RNA, 19 nt, Homo sapiens
  misc_RNA (1)...(19): siRNA sense strand
agacgacagcaaagcauaa

SEQ ID NO: 2542811 - RNA, 19 nt, Homo sapiens
  misc_RNA (1)...(19): siRNA sense strand
cuucacauguacagcgauu

SEQ ID NO: 2542812 - RNA, 19 nt, Homo sapiens
  misc_RNA (1)...(19): siRNA sense strand
aaaggaagguguuagguca

SEQ ID NO: 2542813 - RNA, 19 nt, Homo sapiens
  misc_RNA (1)...(19): siRNA sense strand
gcuugucaguagcgggcaa

SEQ ID NO: 2542814 - RNA, 19 nt, Homo sapiens
  misc_RNA (1)...(19): siRNA sense strand
cacuaaucauauaggaaca

SEQ ID NO: 2542815 - RNA, 19 nt, Homo sapiens
  misc_RNA (1)...(19): siRNA sense strand
agggauauaucguugucaa

SEQ ID NO: 2542816 - RNA, 19 nt, Homo sapiens
  misc_RNA (1)...(19): siRNA sense strand
ugagaauggucaagucaca

SEQ ID NO: 2542817 - RNA, 19 nt, Homo sapiens
  misc_RNA (1)...(19): siRNA sense strand
gacuuauaguacaggaaga

SEQ ID NO: 2542818 - RNA, 19 nt, Homo sapiens
  misc_RNA (1)...(19): siRNA sense strand
ccuuaugucugcagggcca

SEQ ID NO: 2542819 - RNA, 19 nt, Homo sapiens
  misc_RNA (1)...(19): siRNA sense strand
caggaagaaagaugauauu

SEQ ID NO: 2542820 - RNA, 19 nt, Homo sapiens
  misc_RNA (1)...(19): siRNA sense strand
aagaacucgaagaaggaaa

SEQ ID NO: 2542821 - RNA, 19 nt, Homo sapiens
  misc_RNA (1)...(19): siRNA sense strand
uagaagaugcagggauaua

SEQ ID NO: 2542822 - RNA, 19 nt, Homo sapiens
  misc_RNA (1)...(19): siRNA sense strand
caaacaaggagaagaugca

SEQ ID NO: 2542823 - RNA, 19 nt, Homo sapiens
  misc_RNA (1)...(19): siRNA sense strand
aggcaggagaagaugaaaa

SEQ ID NO: 2542824 - RNA, 19 nt, Homo sapiens
  misc_RNA (1)...(19): siRNA sense strand
cuacauaugagaaugguca

SEQ ID NO: 2542825 - RNA, 19 nt, Homo sapiens
  misc_RNA (1)...(19): siRNA sense strand
acucguaugugaugcggaa

SEQ ID NO: 2542826 - RNA, 19 nt, Homo sapiens
  misc_RNA (1)...(19): siRNA sense strand
aggaacaagauuucaagaa

SEQ ID NO: 2542827 - RNA, 19 nt, Homo sapiens
  misc_RNA (1)...(19): siRNA sense strand
guaaagauaaggaagacca

SEQ ID NO: 2542828 - RNA, 19 nt, Homo sapiens
  misc_RNA (1)...(19): siRNA sense strand
ccuauggagugaagaucau

SEQ ID NO: 2542829 - RNA, 19 nt, Homo sapiens
  misc_RNA (1)...(19): siRNA sense strand
acuaggagaauguguggaa

SEQ ID NO: 2542830 - RNA, 19 nt, Homo sapiens
  misc_RNA (1)...(19): siRNA sense strand
caauaaaagugaugaaggu

SEQ ID NO: 2542831 - RNA, 19 nt, Homo sapiens
  misc_RNA (1)...(19): siRNA sense strand
agguauauacagaugugaa

SEQ ID NO: 2542832 - RNA, 19 nt, Homo sapiens
  misc_RNA (1)...(19): siRNA sense strand
acaaggagaagaugcagaa

SEQ ID NO: 2542833 - RNA, 19 nt, Homo sapiens
  misc_RNA (1)...(19): siRNA sense strand
agcagagagaggagaagaa

SEQ ID NO: 2542834 - RNA, 19 nt, Homo sapiens
  misc_RNA (1)...(19): siRNA sense strand
cacaaauaaggcaggagaa

SEQ ID NO: 2542835 - RNA, 19 nt, Homo sapiens
  misc_RNA (1)...(19): siRNA sense strand
aaagaaguagcgucagaaa

SEQ ID NO: 2542836 - RNA, 19 nt, Homo sapiens
  misc_RNA (1)...(19): siRNA sense strand
cgacaucauucaaucaaaa

SEQ ID NO: 2542837 - RNA, 19 nt, Homo sapiens
  misc_RNA (1)...(19): siRNA sense strand
acagaggguaguagugcaa

SEQ ID NO: 2542838 - RNA, 19 nt, Homo sapiens
  misc_RNA (1)...(19): siRNA sense strand
agagagaggagaagaaaug

SEQ ID NO: 2542839 - RNA, 19 nt, Homo sapiens
  misc_RNA (1)...(19): siRNA sense strand
caaauaaggcaggagaaga

SEQ ID NO: 2542840 - RNA, 19 nt, Homo sapiens
  misc_RNA (1)...(19): siRNA sense strand
cuacagaaauauauggaga

SEQ ID NO: 2542841 - RNA, 19 nt, Homo sapiens
  misc_RNA (1)...(19): siRNA sense strand
agauacauuucgagccaaa

SEQ ID NO: 2542842 - RNA, 19 nt, Homo sapiens
  misc_RNA (1)...(19): siRNA sense strand
aagaauugguccaggagau

SEQ ID NO: 2542843 - RNA, 19 nt, Homo sapiens
  misc_RNA (1)...(19): siRNA sense strand
auauggagaaccugaguaa

SEQ ID NO: 2542844 - RNA, 19 nt, Homo sapiens
  misc_RNA (1)...(19): siRNA sense strand
ggugacagcuggaaggacu

SEQ ID NO: 2542845 - RNA, 19 nt, Homo sapiens
  misc_RNA (1)...(19): siRNA sense strand
cuggaagcauaaagcacua

SEQ ID NO: 2542846 - RNA, 19 nt, Homo sapiens
  misc_RNA (1)...(19): siRNA sense strand
uuucguguguugagagcua

SEQ ID NO: 2542847 - RNA, 19 nt, Homo sapiens
  misc_RNA (1)...(19): siRNA sense strand
gagcccagucagagcgaau

SEQ ID NO: 2542848 - RNA, 19 nt, Homo sapiens
  misc_RNA (1)...(19): siRNA sense strand
agaugagguggaugugaaa

SEQ ID NO: 2542849 - RNA, 19 nt, Homo sapiens
  misc_RNA (1)...(19): siRNA sense strand
ggauuugcgaauagauaca

SEQ ID NO: 2542850 - RNA, 19 nt, Homo sapiens
  misc_RNA (1)...(19): siRNA sense strand
aaggcaaaccauugaucaa

SEQ ID NO: 2542851 - RNA, 19 nt, Homo sapiens
  misc_RNA (1)...(19): siRNA sense strand
uugacauguaccagaauua

SEQ ID NO: 2542852 - RNA, 19 nt, Homo sapiens
  misc_RNA (1)...(19): siRNA sense strand
aguagaaugccaacaagaa

SEQ ID NO: 2542853 - RNA, 19 nt, Homo sapiens
  misc_RNA (1)...(19): siRNA sense strand
caacaaagugcuagaaaac

SEQ ID NO: 2542854 - RNA, 19 nt, Homo sapiens
  misc_RNA (1)...(19): siRNA sense strand
cugaguaaggaguaccaaa

SEQ ID NO: 2542855 - RNA, 19 nt, Homo sapiens
  misc_RNA (1)...(19): siRNA sense strand
gcuaguaguagaaugccaa

SEQ ID NO: 2542856 - RNA, 19 nt, Homo sapiens
  misc_RNA (1)...(19): siRNA sense strand
aguaagaauugguccagga

SEQ ID NO: 2542857 - RNA, 19 nt, Homo sapiens
  misc_RNA (1)...(19): siRNA sense strand
agaauugguccaggagaua

SEQ ID NO: 2542858 - RNA, 19 nt, Homo sapiens
  misc_RNA (1)...(19): siRNA sense strand
ccaagaaauucaggagacu

SEQ ID NO: 2542859 - RNA, 19 nt, Homo sapiens
  misc_RNA (1)...(19): siRNA sense strand
ccaaaggagaaauaugaca

SEQ ID NO: 2542860 - RNA, 19 nt, Homo sapiens
  misc_RNA (1)...(19): siRNA sense strand
aaggauuugcgaauagaua

SEQ ID NO: 2542861 - RNA, 19 nt, Homo sapiens
  misc_RNA (1)...(19): siRNA sense strand
agauauugccaucaagaca

SEQ ID NO: 2542862 - RNA, 19 nt, Homo sapiens
  misc_RNA (1)...(19): siRNA sense strand
augagguggaugugaaauu

SEQ ID NO: 2542863 - RNA, 19 nt, Homo sapiens
  misc_RNA (1)...(19): siRNA sense strand
agcagauuauugagaaaga

SEQ ID NO: 2542864 - RNA, 19 nt, Homo sapiens
  misc_RNA (1)...(19): siRNA sense strand
cagauuauugagaaagaca

SEQ ID NO: 2542865 - RNA, 19 nt, Homo sapiens
  misc_RNA (1)...(19): siRNA sense strand
gaauuauacaccagcagau

SEQ ID NO: 2542866 - RNA, 19 nt, Homo sapiens
  misc_RNA (1)...(19): siRNA sense strand
caaaggagcaggagggcag

SEQ ID NO: 2542867 - RNA, 19 nt, Homo sapiens
  misc_RNA (1)...(19): siRNA sense strand
uugagaaagacaagcguca

SEQ ID NO: 2542868 - RNA, 19 nt, Homo sapiens
  misc_RNA (1)...(19): siRNA sense strand
aagacaagcgucagcaaca

SEQ ID NO: 2542869 - RNA, 19 nt, Homo sapiens
  misc_RNA (1)...(19): siRNA sense strand
ccacaggauagcauaugaa

SEQ ID NO: 2542870 - RNA, 19 nt, Homo sapiens
  misc_RNA (1)...(19): siRNA sense strand
cagcagaugaagaagccau

SEQ ID NO: 2542871 - RNA, 19 nt, Homo sapiens
  misc_RNA (1)...(19): siRNA sense strand
aguaguagaaugccaacaa

SEQ ID NO: 2542872 - RNA, 19 nt, Homo sapiens
  misc_RNA (1)...(19): siRNA sense strand
agcagauuaugguggacua

SEQ ID NO: 2542873 - RNA, 19 nt, Homo sapiens
  misc_RNA (1)...(19): siRNA sense strand
agauuaugguggacuacau

SEQ ID NO: 2542874 - RNA, 19 nt, Homo sapiens
  misc_RNA (1)...(19): siRNA sense strand
guucgugauauuaaggaau

SEQ ID NO: 2542875 - RNA, 19 nt, Homo sapiens
  misc_RNA (1)...(19): siRNA sense strand
cugaacaagcaauugaaga

SEQ ID NO: 2542876 - RNA, 19 nt, Homo sapiens
  misc_RNA (1)...(19): siRNA sense strand
gcgaauucggacauauaau

SEQ ID NO: 2542877 - RNA, 19 nt, Homo sapiens
  misc_RNA (1)...(19): siRNA sense strand
gcagcauaucccugugaau

SEQ ID NO: 2542878 - RNA, 19 nt, Homo sapiens
  misc_RNA (1)...(19): siRNA sense strand
gugggaagggccuggauca

SEQ ID NO: 2542879 - RNA, 19 nt, Homo sapiens
  misc_RNA (1)...(19): siRNA sense strand
ggacauauaauuucaccca

SEQ ID NO: 2542880 - RNA, 19 nt, Homo sapiens
  misc_RNA (1)...(19): siRNA sense strand
gugacagcuggaaggacua

SEQ ID NO: 2542881 - RNA, 19 nt, Homo sapiens
  misc_RNA (1)...(19): siRNA sense strand
ugcuauaaacacuggcaau

SEQ ID NO: 2542882 - RNA, 19 nt, Homo sapiens
  misc_RNA (1)...(19): siRNA sense strand
auagauacauuucgagcca

SEQ ID NO: 2542883 - RNA, 19 nt, Homo sapiens
  misc_RNA (1)...(19): siRNA sense strand
gggaacaagagcccaguca

SEQ ID NO: 2542884 - RNA, 19 nt, Homo sapiens
  misc_RNA (1)...(19): siRNA sense strand
gccuaaauaaacaagauga

SEQ ID NO: 2542885 - RNA, 19 nt, Homo sapiens
  misc_RNA (1)...(19): siRNA sense strand
uauucaaagcagagaacaa

SEQ ID NO: 2542886 - RNA, 19 nt, Homo sapiens
  misc_RNA (1)...(19): siRNA sense strand
ccgaagaagaauaaugaca

SEQ ID NO: 2542887 - RNA, 19 nt, Homo sapiens
  misc_RNA (1)...(19): siRNA sense strand
gagaacaaucccuggguga

SEQ ID NO: 2542888 - RNA, 19 nt, Homo sapiens
  misc_RNA (1)...(19): siRNA sense strand
gcagacacaugcaggccaa

SEQ ID NO: 2542889 - RNA, 19 nt, Homo sapiens
  misc_RNA (1)...(19): siRNA sense strand
agaauuuggaggugcucaa

SEQ ID NO: 2542890 - RNA, 19 nt, Homo sapiens
  misc_RNA (1)...(19): siRNA sense strand
agccauaacaagcuaacaa

SEQ ID NO: 2542891 - RNA, 19 nt, Homo sapiens
  misc_RNA (1)...(19): siRNA sense strand
acaaauaccucuacggcag

SEQ ID NO: 2542892 - RNA, 19 nt, Homo sapiens
  misc_RNA (1)...(19): siRNA sense strand
acccagaaccaccgaagaa

SEQ ID NO: 2542893 - RNA, 19 nt, Homo sapiens
  misc_RNA (1)...(19): siRNA sense strand
cgaacaucgcagaacugaa

SEQ ID NO: 2542894 - RNA, 19 nt, Homo sapiens
  misc_RNA (1)...(19): siRNA sense strand
uauucaaagcagagaacaa

SEQ ID NO: 2542895 - RNA, 19 nt, Homo sapiens
  misc_RNA (1)...(19): siRNA sense strand
ccgaagaagaauaaugaca

SEQ ID NO: 2542896 - RNA, 19 nt, Homo sapiens
  misc_RNA (1)...(19): siRNA sense strand
gagaacaaucccuggguga

SEQ ID NO: 2542897 - RNA, 19 nt, Homo sapiens
  misc_RNA (1)...(19): siRNA sense strand
gcagacacaugcaggccaa

SEQ ID NO: 2542898 - RNA, 19 nt, Homo sapiens
  misc_RNA (1)...(19): siRNA sense strand
agaauuuggaggugcucaa

SEQ ID NO: 2542899 - RNA, 19 nt, Homo sapiens
  misc_RNA (1)...(19): siRNA sense strand
acaaauaccucuacggcag

SEQ ID NO: 2542900 - RNA, 19 nt, Homo sapiens
  misc_RNA (1)...(19): siRNA sense strand
acccagaaccaccgaagaa

SEQ ID NO: 2542901 - RNA, 19 nt, Homo sapiens
  misc_RNA (1)...(19): siRNA sense strand
cgaacaucgcagaacugaa

SEQ ID NO: 2542902 - RNA, 19 nt, Homo sapiens
  misc_RNA (1)...(19): siRNA sense strand
gguuagaagaggaggucaa

SEQ ID NO: 2542903 - RNA, 19 nt, Homo sapiens
  misc_RNA (1)...(19): siRNA sense strand
cggacgagcuccuggaaaa

SEQ ID NO: 2542904 - RNA, 19 nt, Homo sapiens
  misc_RNA (1)...(19): siRNA sense strand
gaaagaagauuuaggggau

SEQ ID NO: 2542905 - RNA, 19 nt, Homo sapiens
  misc_RNA (1)...(19): siRNA sense strand
aggucaaugaucugagaaa

SEQ ID NO: 2542906 - RNA, 19 nt, Homo sapiens
  misc_RNA (1)...(19): siRNA sense strand
ggaaaugucccaagccgaa

SEQ ID NO: 2542907 - RNA, 19 nt, Homo sapiens
  misc_RNA (1)...(19): siRNA sense strand
aguuggguccugagagaaa

SEQ ID NO: 2542908 - RNA, 19 nt, Homo sapiens
  misc_RNA (1)...(19): siRNA sense strand
gggcaacaggagaagaaga

SEQ ID NO: 2542909 - RNA, 19 nt, Homo sapiens
  misc_RNA (1)...(19): siRNA sense strand
gagaagaagagcaaaggca

SEQ ID NO: 2542910 - RNA, 19 nt, Homo sapiens
  misc_RNA (1)...(19): siRNA sense strand
aggaaacagccaagggcau

SEQ ID NO: 2542911 - RNA, 19 nt, Homo sapiens
  misc_RNA (1)...(19): siRNA sense strand
cagaguggcaggaggacau

SEQ ID NO: 2542912 - RNA, 19 nt, Homo sapiens
  misc_RNA (1)...(19): siRNA sense strand
gcugaagccaggaggcaca

SEQ ID NO: 2542913 - RNA, 19 nt, Homo sapiens
  misc_RNA (1)...(19): siRNA sense strand
ggucaaugaucugagaaaa

SEQ ID NO: 2542914 - RNA, 19 nt, Homo sapiens
  misc_RNA (1)...(19): siRNA sense strand
gagcagaagcuggagaaaa

SEQ ID NO: 2542915 - RNA, 19 nt, Homo sapiens
  misc_RNA (1)...(19): siRNA sense strand
gguaauugccaucggccau

SEQ ID NO: 2542916 - RNA, 19 nt, Homo sapiens
  misc_RNA (1)...(19): siRNA sense strand
ccgggcaacaggagaagaa

SEQ ID NO: 2542917 - RNA, 19 nt, Homo sapiens
  misc_RNA (1)...(19): siRNA sense strand
agucaguaacccagagcuu

SEQ ID NO: 2542918 - RNA, 19 nt, Homo sapiens
  misc_RNA (1)...(19): siRNA sense strand
agguugagucuuuggugaa

SEQ ID NO: 2542919 - RNA, 19 nt, Homo sapiens
  misc_RNA (1)...(19): siRNA sense strand
ggaaagaagauuuagggga

SEQ ID NO: 2542920 - RNA, 19 nt, Homo sapiens
  misc_RNA (1)...(19): siRNA sense strand
cugaagacaagcaacgcaa

SEQ ID NO: 2542921 - RNA, 19 nt, Homo sapiens
  misc_RNA (1)...(19): siRNA sense strand
caacaggagaagaagagca

SEQ ID NO: 2542922 - RNA, 19 nt, Homo sapiens
  misc_RNA (1)...(19): siRNA sense strand
caagggaggaugaggaaac

SEQ ID NO: 2542923 - RNA, 19 nt, Homo sapiens
  misc_RNA (1)...(19): siRNA sense strand
cuaagaaugaugaggcagu

SEQ ID NO: 2542924 - RNA, 19 nt, Homo sapiens
  misc_RNA (1)...(19): siRNA sense strand
caggagaagaagagcaaag

SEQ ID NO: 2542925 - RNA, 19 nt, Homo sapiens
  misc_RNA (1)...(19): siRNA sense strand
gggacugggaagagugcga

SEQ ID NO: 2542926 - RNA, 19 nt, Homo sapiens
  misc_RNA (1)...(19): siRNA sense strand
uguuuguccugcugugaaa

SEQ ID NO: 2542927 - RNA, 19 nt, Homo sapiens
  misc_RNA (1)...(19): siRNA sense strand
cuaccgggcaacaggagaa

SEQ ID NO: 2542928 - RNA, 19 nt, Homo sapiens
  misc_RNA (1)...(19): siRNA sense strand
uuuagugagcagucaguaa

SEQ ID NO: 2542929 - RNA, 19 nt, Homo sapiens
  misc_RNA (1)...(19): siRNA sense strand
ucacaagggaggaugagga

SEQ ID NO: 2542930 - RNA, 19 nt, Homo sapiens
  misc_RNA (1)...(19): siRNA sense strand
aacaggagaagaagagcaa

SEQ ID NO: 2542931 - RNA, 19 nt, Homo sapiens
  misc_RNA (1)...(19): siRNA sense strand
ucaaaaugugccagagaga

SEQ ID NO: 2542932 - RNA, 19 nt, Homo sapiens
  misc_RNA (1)...(19): siRNA sense strand
auaguaaggaugagcagau

SEQ ID NO: 2542933 - RNA, 19 nt, Homo sapiens
  misc_RNA (1)...(19): siRNA sense strand
aaaaugugccagagagaga

SEQ ID NO: 2542934 - RNA, 19 nt, Homo sapiens
  misc_RNA (1)...(19): siRNA sense strand
uuacgaaauacgcgauuau

SEQ ID NO: 2542935 - RNA, 19 nt, Homo sapiens
  misc_RNA (1)...(19): siRNA sense strand
cacuaagaaugaugaggca

SEQ ID NO: 2542936 - RNA, 19 nt, Homo sapiens
  misc_RNA (1)...(19): siRNA sense strand
cauacuucuuaccaggaaa

SEQ ID NO: 2542937 - RNA, 19 nt, Homo sapiens
  misc_RNA (1)...(19): siRNA sense strand
caacaaagaaacaggccag

SEQ ID NO: 2542938 - RNA, 19 nt, Homo sapiens
  misc_RNA (1)...(19): siRNA sense strand
cacaagggaggaugaggaa

SEQ ID NO: 2542939 - RNA, 19 nt, Homo sapiens
  misc_RNA (1)...(19): siRNA sense strand
uguuggagcuccuucgcaa

SEQ ID NO: 2542940 - RNA, 19 nt, Homo sapiens
  misc_RNA (1)...(19): siRNA sense strand
uggagcagacuuuacgaaa

SEQ ID NO: 2542941 - RNA, 19 nt, Homo sapiens
  misc_RNA (1)...(19): siRNA sense strand
acaaaacagcuguggcgaa

SEQ ID NO: 2542942 - RNA, 19 nt, Homo sapiens
  misc_RNA (1)...(19): siRNA sense strand
agucuuuggugaauacgaa

SEQ ID NO: 2542943 - RNA, 19 nt, Homo sapiens
  misc_RNA (1)...(19): siRNA sense strand
gaucaaaaugugccagaga

SEQ ID NO: 2542944 - RNA, 19 nt, Homo sapiens
  misc_RNA (1)...(19): siRNA sense strand
cccaggaaacccaggugaa

SEQ ID NO: 2542945 - RNA, 19 nt, Homo sapiens
  misc_RNA (1)...(19): siRNA sense strand
ucacaaaagaagagacauu

SEQ ID NO: 2542946 - RNA, 19 nt, Homo sapiens
  misc_RNA (1)...(19): siRNA sense strand
acauuaaagaauuggguga

SEQ ID NO: 2542947 - RNA, 19 nt, Homo sapiens
  misc_RNA (1)...(19): siRNA sense strand
ccaaaaugagcuacauaaa

SEQ ID NO: 2542948 - RNA, 19 nt, Homo sapiens
  misc_RNA (1)...(19): siRNA sense strand
cauuaaagaauugggugaa

SEQ ID NO: 2542949 - RNA, 19 nt, Homo sapiens
  misc_RNA (1)...(19): siRNA sense strand
gguuuguggaagacaguuu

SEQ ID NO: 2542950 - RNA, 19 nt, Homo sapiens
  misc_RNA (1)...(19): siRNA sense strand
ggagagagaugcaaaggac

SEQ ID NO: 2542951 - RNA, 19 nt, Homo sapiens
  misc_RNA (1)...(19): siRNA sense strand
gggugaaagagcuucgaca

SEQ ID NO: 2542952 - RNA, 19 nt, Homo sapiens
  misc_RNA (1)...(19): siRNA sense strand
gauccaaacaucaacccaa

SEQ ID NO: 2542953 - RNA, 19 nt, Homo sapiens
  misc_RNA (1)...(19): siRNA sense strand
ucauggagagagaugcaaa

SEQ ID NO: 2542954 - RNA, 19 nt, Homo sapiens
  misc_RNA (1)...(19): siRNA sense strand
cgcgauaaacauaaaugaa

SEQ ID NO: 2542955 - RNA, 19 nt, Homo sapiens
  misc_RNA (1)...(19): siRNA sense strand
cagcuggacaagaacgauu

SEQ ID NO: 2542956 - RNA, 19 nt, Homo sapiens
  misc_RNA (1)...(19): siRNA sense strand
cugggauacagcuggacaa

SEQ ID NO: 2542957 - RNA, 19 nt, Homo sapiens
  misc_RNA (1)...(19): siRNA sense strand
aagagaagucauggagaga

SEQ ID NO: 2542958 - RNA, 19 nt, Homo sapiens
  misc_RNA (1)...(19): siRNA sense strand
gcauauagcagcugggaga

SEQ ID NO: 2542959 - RNA, 19 nt, Homo sapiens
  misc_RNA (1)...(19): siRNA sense strand
ggguauacuucaugugaca

SEQ ID NO: 2542960 - RNA, 19 nt, Homo sapiens
  misc_RNA (1)...(19): siRNA sense strand
ccuucaaauauuagagcaa

SEQ ID NO: 2542961 - RNA, 19 nt, Homo sapiens
  misc_RNA (1)...(19): siRNA sense strand
cuguaaaccucuuugggaa

SEQ ID NO: 2542962 - RNA, 19 nt, Homo sapiens
  misc_RNA (1)...(19): siRNA sense strand
ggaaaaugcaggagaggau

SEQ ID NO: 2542963 - RNA, 19 nt, Homo sapiens
  misc_RNA (1)...(19): siRNA sense strand
aaguacagguccaggguau

SEQ ID NO: 2542964 - RNA, 19 nt, Homo sapiens
  misc_RNA (1)...(19): siRNA sense strand
aggaagaugugguggagga

SEQ ID NO: 2542965 - RNA, 19 nt, Homo sapiens
  misc_RNA (1)...(19): siRNA sense strand
caaccuaaacagagaggau

SEQ ID NO: 2542966 - RNA, 19 nt, Homo sapiens
  misc_RNA (1)...(19): siRNA sense strand
cuucaaaacuccaaaguau

SEQ ID NO: 2542967 - RNA, 19 nt, Homo sapiens
  misc_RNA (1)...(19): siRNA sense strand
uauugaaaccacagagcaa

SEQ ID NO: 2542968 - RNA, 19 nt, Homo sapiens
  misc_RNA (1)...(19): siRNA sense strand
guggaggcccugagacaaa

SEQ ID NO: 2542969 - RNA, 19 nt, Homo sapiens
  misc_RNA (1)...(19): siRNA sense strand
gggaaaacacugugaggau

SEQ ID NO: 2542970 - RNA, 19 nt, Homo sapiens
  misc_RNA (1)...(19): siRNA sense strand
uguaaaccucuuugggaaa

SEQ ID NO: 2542971 - RNA, 19 nt, Homo sapiens
  misc_RNA (1)...(19): siRNA sense strand
guaucuuacucaagcacaa

SEQ ID NO: 2542972 - RNA, 19 nt, Homo sapiens
  misc_RNA (1)...(19): siRNA sense strand
ugacaggagacgugaagau

SEQ ID NO: 2542973 - RNA, 19 nt, Homo sapiens
  misc_RNA (1)...(19): siRNA sense strand
cuuggaaacuagugaacca

SEQ ID NO: 2542974 - RNA, 19 nt, Homo sapiens
  misc_RNA (1)...(19): siRNA sense strand
ucucaaagcagcaggagca

SEQ ID NO: 2542975 - RNA, 19 nt, Homo sapiens
  misc_RNA (1)...(19): siRNA sense strand
guauacuucaugugacaaa

SEQ ID NO: 2542976 - RNA, 19 nt, Homo sapiens
  misc_RNA (1)...(19): siRNA sense strand
gaagaagugcagaggaaac

SEQ ID NO: 2542977 - RNA, 19 nt, Homo sapiens
  misc_RNA (1)...(19): siRNA sense strand
aggagaggaugaaggaguu

SEQ ID NO: 2542978 - RNA, 19 nt, Homo sapiens
  misc_RNA (1)...(19): siRNA sense strand
caggagaggaugaaggagu

SEQ ID NO: 2542979 - RNA, 19 nt, Homo sapiens
  misc_RNA (1)...(19): siRNA sense strand
agucuuacccucaggucaa

SEQ ID NO: 2542980 - RNA, 19 nt, Homo sapiens
  misc_RNA (1)...(19): siRNA sense strand
ccacagagcaagaucagga

SEQ ID NO: 2542981 - RNA, 19 nt, Homo sapiens
  misc_RNA (1)...(19): siRNA sense strand
ugggaaggccugaacaaau

SEQ ID NO: 2542982 - RNA, 19 nt, Homo sapiens
  misc_RNA (1)...(19): siRNA sense strand
aggaaaucugacuuggaaa

SEQ ID NO: 2542983 - RNA, 19 nt, Homo sapiens
  misc_RNA (1)...(19): siRNA sense strand
gucagaagcucaugcccaa

SEQ ID NO: 2542984 - RNA, 19 nt, Homo sapiens
  misc_RNA (1)...(19): siRNA sense strand
ugguggaggcccugagaca

SEQ ID NO: 2542985 - RNA, 19 nt, Homo sapiens
  misc_RNA (1)...(19): siRNA sense strand
cagcugggagaucgggaaa

SEQ ID NO: 2542986 - RNA, 19 nt, Homo sapiens
  misc_RNA (1)...(19): siRNA sense strand
accuaaacagagaggauuu

SEQ ID NO: 2542987 - RNA, 19 nt, Homo sapiens
  misc_RNA (1)...(19): siRNA sense strand
ugggaaggauuuggagauu

SEQ ID NO: 2542988 - RNA, 19 nt, Homo sapiens
  misc_RNA (1)...(19): siRNA sense strand
augacagaggcguguauaa

SEQ ID NO: 2542989 - RNA, 19 nt, Homo sapiens
  misc_RNA (1)...(19): siRNA sense strand
acuagaaauuccugaucca

SEQ ID NO: 2542990 - RNA, 19 nt, Homo sapiens
  misc_RNA (1)...(19): siRNA sense strand
ggucaaaaucugcaacuau

SEQ ID NO: 2542991 - RNA, 19 nt, Homo sapiens
  misc_RNA (1)...(19): siRNA sense strand
aggacaugguggucggcuu

SEQ ID NO: 2542992 - RNA, 19 nt, Homo sapiens
  misc_RNA (1)...(19): siRNA sense strand
gauuuuaugaagaggaaga

SEQ ID NO: 2542993 - RNA, 19 nt, Homo sapiens
  misc_RNA (1)...(19): siRNA sense strand
agaagaagugcagaggaaa

SEQ ID NO: 2542994 - RNA, 19 nt, Homo sapiens
  misc_RNA (1)...(19): siRNA sense strand
gggcugacgucaaugcuca

SEQ ID NO: 2542995 - RNA, 19 nt, Homo sapiens
  misc_RNA (1)...(19): siRNA sense strand
cacaaggagacaugaaaca

SEQ ID NO: 2542996 - RNA, 19 nt, Homo sapiens
  misc_RNA (1)...(19): siRNA sense strand
ggaagaaaaugguggaguc

SEQ ID NO: 2542997 - RNA, 19 nt, Homo sapiens
  misc_RNA (1)...(19): siRNA sense strand
ugggaaaccauaugagcca

SEQ ID NO: 2542998 - RNA, 19 nt, Homo sapiens
  misc_RNA (1)...(19): siRNA sense strand
cugaagaugugaagcugca

SEQ ID NO: 2542999 - RNA, 19 nt, Homo sapiens
  misc_RNA (1)...(19): siRNA sense strand
cugggaaggauuuggagau

SEQ ID NO: 2543000 - RNA, 19 nt, Homo sapiens
  misc_RNA (1)...(19): siRNA sense strand
ggaaaucugacuuggaaac

SEQ ID NO: 2543001 - RNA, 19 nt, Homo sapiens
  misc_RNA (1)...(19): siRNA sense strand
ugguaguggcgguggagga

SEQ ID NO: 2543002 - RNA, 19 nt, Homo sapiens
  misc_RNA (1)...(19): siRNA sense strand
acgccaucuaugacaguaa

SEQ ID NO: 2543003 - RNA, 19 nt, Homo sapiens
  misc_RNA (1)...(19): siRNA sense strand
acagauguucauagacaau

SEQ ID NO: 2543004 - RNA, 19 nt, Homo sapiens
  misc_RNA (1)...(19): siRNA sense strand
ggaugaaggaguugugccu

SEQ ID NO: 2543005 - RNA, 19 nt, Homo sapiens
  misc_RNA (1)...(19): siRNA sense strand
ccgaagcaauugaagugau

SEQ ID NO: 2543006 - RNA, 19 nt, Homo sapiens
  misc_RNA (1)...(19): siRNA sense strand
cagaaguauuucaaccaca

SEQ ID NO: 2543007 - RNA, 19 nt, Homo sapiens
  misc_RNA (1)...(19): siRNA sense strand
ucauagacaauuugccauu

SEQ ID NO: 2543008 - RNA, 19 nt, Homo sapiens
  misc_RNA (1)...(19): siRNA sense strand
gugcagaggaaacgucaga

SEQ ID NO: 2543009 - RNA, 19 nt, Homo sapiens
  misc_RNA (1)...(19): siRNA sense strand
ggguacagucagagagcug

SEQ ID NO: 2543010 - RNA, 19 nt, Homo sapiens
  misc_RNA (1)...(19): siRNA sense strand
ucuacuauccugaaaucaa

SEQ ID NO: 2543011 - RNA, 19 nt, Homo sapiens
  misc_RNA (1)...(19): siRNA sense strand
gaaaguuauugaaaccaca

SEQ ID NO: 2543012 - RNA, 19 nt, Homo sapiens
  misc_RNA (1)...(19): siRNA sense strand
cuggcagguauuugacaua

SEQ ID NO: 2543013 - RNA, 19 nt, Homo sapiens
  misc_RNA (1)...(19): siRNA sense strand
cacagauguucauagacaa

SEQ ID NO: 2543014 - RNA, 19 nt, Homo sapiens
  misc_RNA (1)...(19): siRNA sense strand
cgucagaagcucaugccca

SEQ ID NO: 2543015 - RNA, 19 nt, Homo sapiens
  misc_RNA (1)...(19): siRNA sense strand
cuagccaugaugagcaaua

SEQ ID NO: 2543016 - RNA, 19 nt, Homo sapiens
  misc_RNA (1)...(19): siRNA sense strand
acagagaccuggcuggcaa

SEQ ID NO: 2543017 - RNA, 19 nt, Homo sapiens
  misc_RNA (1)...(19): siRNA sense strand
guuugggaaggcagggaaa

SEQ ID NO: 2543018 - RNA, 19 nt, Homo sapiens
  misc_RNA (1)...(19): siRNA sense strand
ucaucaaggccuauggcau

SEQ ID NO: 2543019 - RNA, 19 nt, Homo sapiens
  misc_RNA (1)...(19): siRNA sense strand
ccauauuccgucuuggcaa

SEQ ID NO: 2543020 - RNA, 19 nt, Homo sapiens
  misc_RNA (1)...(19): siRNA sense strand
agggaggcaucaugggcau

SEQ ID NO: 2543021 - RNA, 19 nt, Homo sapiens
  misc_RNA (1)...(19): siRNA sense strand
caucaaggccuauggcauc

SEQ ID NO: 2543022 - RNA, 19 nt, Homo sapiens
  misc_RNA (1)...(19): siRNA sense strand
cgucgaaaggugagaaaga

SEQ ID NO: 2543023 - RNA, 19 nt, Homo sapiens
  misc_RNA (1)...(19): siRNA sense strand
cgacaaagccggaguccca

SEQ ID NO: 2543024 - RNA, 19 nt, Homo sapiens
  misc_RNA (1)...(19): siRNA sense strand
uggagaagguggaugguga

SEQ ID NO: 2543025 - RNA, 19 nt, Homo sapiens
  misc_RNA (1)...(19): siRNA sense strand
cagaaaagccaucaggaaa

SEQ ID NO: 2543026 - RNA, 19 nt, Homo sapiens
  misc_RNA (1)...(19): siRNA sense strand
gcucagaucaagaaggaga

SEQ ID NO: 2543027 - RNA, 19 nt, Homo sapiens
  misc_RNA (1)...(19): siRNA sense strand
agaaaagccaucaggaaaa

SEQ ID NO: 2543028 - RNA, 19 nt, Homo sapiens
  misc_RNA (1)...(19): siRNA sense strand
cugaagaggaagaaacgaa

SEQ ID NO: 2543029 - RNA, 19 nt, Homo sapiens
  misc_RNA (1)...(19): siRNA sense strand
gcggaaagggagagcagau

SEQ ID NO: 2543030 - RNA, 19 nt, Homo sapiens
  misc_RNA (1)...(19): siRNA sense strand
ccacagaagaagaagagga

SEQ ID NO: 2543031 - RNA, 19 nt, Homo sapiens
  misc_RNA (1)...(19): siRNA sense strand
ccaaugaggaggaggagga

SEQ ID NO: 2543032 - RNA, 19 nt, Homo sapiens
  misc_RNA (1)...(19): siRNA sense strand
cuguggagcuggugcggua

SEQ ID NO: 2543033 - RNA, 19 nt, Homo sapiens
  misc_RNA (1)...(19): siRNA sense strand
guucuguguuggaggaaaa

SEQ ID NO: 2543034 - RNA, 19 nt, Homo sapiens
  misc_RNA (1)...(19): siRNA sense strand
agaaagacccaacgggaca

SEQ ID NO: 2543035 - RNA, 19 nt, Homo sapiens
  misc_RNA (1)...(19): siRNA sense strand
ggcacaagucagaagacaa

SEQ ID NO: 2543036 - RNA, 19 nt, Homo sapiens
  misc_RNA (1)...(19): siRNA sense strand
cagaagaagaagaggaggu

SEQ ID NO: 2543037 - RNA, 19 nt, Homo sapiens
  misc_RNA (1)...(19): siRNA sense strand
ccaacaaaguccaggggau

SEQ ID NO: 2543038 - RNA, 19 nt, Homo sapiens
  misc_RNA (1)...(19): siRNA sense strand
ccaccugagugcagcgaga

SEQ ID NO: 2543039 - RNA, 19 nt, Homo sapiens
  misc_RNA (1)...(19): siRNA sense strand
augaggaggaggaggaaga

SEQ ID NO: 2543040 - RNA, 19 nt, Homo sapiens
  misc_RNA (1)...(19): siRNA sense strand
ugacagagcaagaagacga

SEQ ID NO: 2543041 - RNA, 19 nt, Homo sapiens
  misc_RNA (1)...(19): siRNA sense strand
guguucagucaaugggaaa

SEQ ID NO: 2543042 - RNA, 19 nt, Homo sapiens
  misc_RNA (1)...(19): siRNA sense strand
ggaacguggcagaggcuga

SEQ ID NO: 2543043 - RNA, 19 nt, Homo sapiens
  misc_RNA (1)...(19): siRNA sense strand
aggaggaggaggaagaaga

SEQ ID NO: 2543044 - RNA, 19 nt, Homo sapiens
  misc_RNA (1)...(19): siRNA sense strand
cgagaaaugcccuggagga

SEQ ID NO: 2543045 - RNA, 19 nt, Homo sapiens
  misc_RNA (1)...(19): siRNA sense strand
gcaucaacgaggagagaag

SEQ ID NO: 2543046 - RNA, 19 nt, Homo sapiens
  misc_RNA (1)...(19): siRNA sense strand
aagaagaagaggagguaac

SEQ ID NO: 2543047 - RNA, 19 nt, Homo sapiens
  misc_RNA (1)...(19): siRNA sense strand
agacagugaagaugugaau

SEQ ID NO: 2543048 - RNA, 19 nt, Homo sapiens
  misc_RNA (1)...(19): siRNA sense strand
gcagcaaacagaagggacu

SEQ ID NO: 2543049 - RNA, 19 nt, Homo sapiens
  misc_RNA (1)...(19): siRNA sense strand
aagaagaggaggagggccu

SEQ ID NO: 2543050 - RNA, 19 nt, Homo sapiens
  misc_RNA (1)...(19): siRNA sense strand
ggaucuggggcgagugaaa

SEQ ID NO: 2543051 - RNA, 19 nt, Homo sapiens
  misc_RNA (1)...(19): siRNA sense strand
ccagaugaugugacggaau

SEQ ID NO: 2543052 - RNA, 19 nt, Homo sapiens
  misc_RNA (1)...(19): siRNA sense strand
aggaggaagaagaggagga

SEQ ID NO: 2543053 - RNA, 19 nt, Homo sapiens
  misc_RNA (1)...(19): siRNA sense strand
aaacgaaagugcaagacca

SEQ ID NO: 2543054 - RNA, 19 nt, Homo sapiens
  misc_RNA (1)...(19): siRNA sense strand
ugguaucucuggaggugaa

SEQ ID NO: 2543055 - RNA, 19 nt, Homo sapiens
  misc_RNA (1)...(19): siRNA sense strand
cugccaagccuuaugaaga

SEQ ID NO: 2543056 - RNA, 19 nt, Homo sapiens
  misc_RNA (1)...(19): siRNA sense strand
cgccacagcuggaacgaga

SEQ ID NO: 2543057 - RNA, 19 nt, Homo sapiens
  misc_RNA (1)...(19): siRNA sense strand
acagugaagaugugaauca

SEQ ID NO: 2543058 - RNA, 19 nt, Homo sapiens
  misc_RNA (1)...(19): siRNA sense strand
augacaaccuggagaccau

SEQ ID NO: 2543059 - RNA, 19 nt, Homo sapiens
  misc_RNA (1)...(19): siRNA sense strand
ccgucucagaagaggcaaa

SEQ ID NO: 2543060 - RNA, 19 nt, Homo sapiens
  misc_RNA (1)...(19): siRNA sense strand
agaucaagaaggagacgau

SEQ ID NO: 2543061 - RNA, 19 nt, Homo sapiens
  misc_RNA (1)...(19): siRNA sense strand
ugacaugggaagccaggaa

SEQ ID NO: 2543062 - RNA, 19 nt, Homo sapiens
  misc_RNA (1)...(19): siRNA sense strand
caggaaaacgaaagugcaa

SEQ ID NO: 2543063 - RNA, 19 nt, Homo sapiens
  misc_RNA (1)...(19): siRNA sense strand
ggaaaacgaaagugcaaga

SEQ ID NO: 2543064 - RNA, 19 nt, Homo sapiens
  misc_RNA (1)...(19): siRNA sense strand
gcaggagacacgaagccua

SEQ ID NO: 2543065 - RNA, 19 nt, Homo sapiens
  misc_RNA (1)...(19): siRNA sense strand
gggcuucagauucaggaaa

SEQ ID NO: 2543066 - RNA, 19 nt, Homo sapiens
  misc_RNA (1)...(19): siRNA sense strand
acaccaaugaggaggagga

SEQ ID NO: 2543067 - RNA, 19 nt, Homo sapiens
  misc_RNA (1)...(19): siRNA sense strand
cggcaagguguuggagaga

SEQ ID NO: 2543068 - RNA, 19 nt, Homo sapiens
  misc_RNA (1)...(19): siRNA sense strand
aggcuggugcugagggaca

SEQ ID NO: 2543069 - RNA, 19 nt, Homo sapiens
  misc_RNA (1)...(19): siRNA sense strand
gaaaagagcacaauggagu

SEQ ID NO: 2543070 - RNA, 19 nt, Homo sapiens
  misc_RNA (1)...(19): siRNA sense strand
ggcaaaugugggacaccaa

SEQ ID NO: 2543071 - RNA, 19 nt, Homo sapiens
  misc_RNA (1)...(19): siRNA sense strand
cuuaugaagaacaagucaa

SEQ ID NO: 2543072 - RNA, 19 nt, Homo sapiens
  misc_RNA (1)...(19): siRNA sense strand
ggagaagguggauggugau

SEQ ID NO: 2543073 - RNA, 19 nt, Homo sapiens
  misc_RNA (1)...(19): siRNA sense strand
gcucgagugaaacaggaaa

SEQ ID NO: 2543074 - RNA, 19 nt, Homo sapiens
  misc_RNA (1)...(19): siRNA sense strand
gagugaaacaggaaagcgu

SEQ ID NO: 2543075 - RNA, 19 nt, Homo sapiens
  misc_RNA (1)...(19): siRNA sense strand
ggcuucagauucaggaaaa

SEQ ID NO: 2543076 - RNA, 19 nt, Homo sapiens
  misc_RNA (1)...(19): siRNA sense strand
aggcaaaggauguuguucu

SEQ ID NO: 2543077 - RNA, 19 nt, Homo sapiens
  misc_RNA (1)...(19): siRNA sense strand
caucccugcugcugaacaa

SEQ ID NO: 2543078 - RNA, 19 nt, Homo sapiens
  misc_RNA (1)...(19): siRNA sense strand
acagccaagcacagugaaa

SEQ ID NO: 2543079 - RNA, 19 nt, Homo sapiens
  misc_RNA (1)...(19): siRNA sense strand
gcuaagcgucgaaagguga

SEQ ID NO: 2543080 - RNA, 19 nt, Homo sapiens
  misc_RNA (1)...(19): siRNA sense strand
aguuggaaguggcagcaau

SEQ ID NO: 2543081 - RNA, 19 nt, Homo sapiens
  misc_RNA (1)...(19): siRNA sense strand
aagaaagcaaagagcaguu

SEQ ID NO: 2543082 - RNA, 19 nt, Homo sapiens
  misc_RNA (1)...(19): siRNA sense strand
cggaaagggagagcagauu

SEQ ID NO: 2543083 - RNA, 19 nt, Homo sapiens
  misc_RNA (1)...(19): siRNA sense strand
gggaauagucagagggauc

SEQ ID NO: 2543084 - RNA, 19 nt, Homo sapiens
  misc_RNA (1)...(19): siRNA sense strand
gcugaauguaacagaggaa

SEQ ID NO: 2543085 - RNA, 19 nt, Homo sapiens
  misc_RNA (1)...(19): siRNA sense strand
cuuggaaagaugagguauu

SEQ ID NO: 2543086 - RNA, 19 nt, Homo sapiens
  misc_RNA (1)...(19): siRNA sense strand
gaucacaaucuuucagcua

SEQ ID NO: 2543087 - RNA, 19 nt, Homo sapiens
  misc_RNA (1)...(19): siRNA sense strand
agugagaguuccagggucu

SEQ ID NO: 2543088 - RNA, 19 nt, Homo sapiens
  misc_RNA (1)...(19): siRNA sense strand
cggcagcagcagugagagu

SEQ ID NO: 2543089 - RNA, 19 nt, Homo sapiens
  misc_RNA (1)...(19): siRNA sense strand
gggcgagggaauagucaga

SEQ ID NO: 2543090 - RNA, 19 nt, Homo sapiens
  misc_RNA (1)...(19): siRNA sense strand
acuccgaauuagcggugua

SEQ ID NO: 2543091 - RNA, 19 nt, Homo sapiens
  misc_RNA (1)...(19): siRNA sense strand
gggcuuugagauugugaga

SEQ ID NO: 2543092 - RNA, 19 nt, Homo sapiens
  misc_RNA (1)...(19): siRNA sense strand
auguuguaaucgugcaaau

SEQ ID NO: 2543093 - RNA, 19 nt, Homo sapiens
  misc_RNA (1)...(19): siRNA sense strand
gcauguuguaaucgugcaa

SEQ ID NO: 2543094 - RNA, 19 nt, Homo sapiens
  misc_RNA (1)...(19): siRNA sense strand
ugaauguaacagaggaacu

SEQ ID NO: 2543095 - RNA, 19 nt, Homo sapiens
  misc_RNA (1)...(19): siRNA sense strand
gcuuugagauugugagacc

SEQ ID NO: 2543096 - RNA, 19 nt, Homo sapiens
  misc_RNA (1)...(19): siRNA sense strand
ucacagacgccaaacgcau

SEQ ID NO: 2543097 - RNA, 19 nt, Homo sapiens
  misc_RNA (1)...(19): siRNA sense strand
gagcagauguuuagggaca

SEQ ID NO: 2543098 - RNA, 19 nt, Homo sapiens
  misc_RNA (1)...(19): siRNA sense strand
aggcuuuggaagugauaaa

SEQ ID NO: 2543099 - RNA, 19 nt, Homo sapiens
  misc_RNA (1)...(19): siRNA sense strand
agauaaagaaagacacaca

SEQ ID NO: 2543100 - RNA, 19 nt, Homo sapiens
  misc_RNA (1)...(19): siRNA sense strand
aagugaagauuauggccaa

SEQ ID NO: 2543101 - RNA, 19 nt, Homo sapiens
  misc_RNA (1)...(19): siRNA sense strand
ggaugaagcgugccgggaa

SEQ ID NO: 2543102 - RNA, 19 nt, Homo sapiens
  misc_RNA (1)...(19): siRNA sense strand
ccugaaacaaagagaccau

SEQ ID NO: 2543103 - RNA, 19 nt, Homo sapiens
  misc_RNA (1)...(19): siRNA sense strand
gagagagccaugaaggaca

SEQ ID NO: 2543104 - RNA, 19 nt, Homo sapiens
  misc_RNA (1)...(19): siRNA sense strand
agauguagaagaaggagau

SEQ ID NO: 2543105 - RNA, 19 nt, Homo sapiens
  misc_RNA (1)...(19): siRNA sense strand
gugaaaaccaacaagagua

SEQ ID NO: 2543106 - RNA, 19 nt, Homo sapiens
  misc_RNA (1)...(19): siRNA sense strand
ugacuaaaggagaaguuca

SEQ ID NO: 2543107 - RNA, 19 nt, Homo sapiens
  misc_RNA (1)...(19): siRNA sense strand
cugaucaaggucauagaaa

SEQ ID NO: 2543108 - RNA, 19 nt, Homo sapiens
  misc_RNA (1)...(19): siRNA sense strand
aagaaaagcucaagccacu

SEQ ID NO: 2543109 - RNA, 19 nt, Homo sapiens
  misc_RNA (1)...(19): siRNA sense strand
aagauguagaagaaggaga

SEQ ID NO: 2543110 - RNA, 19 nt, Homo sapiens
  misc_RNA (1)...(19): siRNA sense strand
gagaaaaugaagauagaac

SEQ ID NO: 2543111 - RNA, 19 nt, Homo sapiens
  misc_RNA (1)...(19): siRNA sense strand
aaggcaagaagcugaaaga

SEQ ID NO: 2543112 - RNA, 19 nt, Homo sapiens
  misc_RNA (1)...(19): siRNA sense strand
gguggaaggaggagagaaa

SEQ ID NO: 2543113 - RNA, 19 nt, Homo sapiens
  misc_RNA (1)...(19): siRNA sense strand
cggcugaaguugauggcaa

SEQ ID NO: 2543114 - RNA, 19 nt, Homo sapiens
  misc_RNA (1)...(19): siRNA sense strand
gcgagaaggagaaggaaga

SEQ ID NO: 2543115 - RNA, 19 nt, Homo sapiens
  misc_RNA (1)...(19): siRNA sense strand
cugaagaagaguuuggaaa

SEQ ID NO: 2543116 - RNA, 19 nt, Homo sapiens
  misc_RNA (1)...(19): siRNA sense strand
uggaagagauggaagaaaa

SEQ ID NO: 2543117 - RNA, 19 nt, Homo sapiens
  misc_RNA (1)...(19): siRNA sense strand
uggaaggagugcuggcaaa

SEQ ID NO: 2543118 - RNA, 19 nt, Homo sapiens
  misc_RNA (1)...(19): siRNA sense strand
gguaagaaugucuggaaga

SEQ ID NO: 2543119 - RNA, 19 nt, Homo sapiens
  misc_RNA (1)...(19): siRNA sense strand
gcgaagaagaaucggauga

SEQ ID NO: 2543120 - RNA, 19 nt, Homo sapiens
  misc_RNA (1)...(19): siRNA sense strand
aagaaaaccuacagagauu

SEQ ID NO: 2543121 - RNA, 19 nt, Homo sapiens
  misc_RNA (1)...(19): siRNA sense strand
aagaggaggaggagaggaa

SEQ ID NO: 2543122 - RNA, 19 nt, Homo sapiens
  misc_RNA (1)...(19): siRNA sense strand
cggaugagaucguggagga

SEQ ID NO: 2543123 - RNA, 19 nt, Homo sapiens
  misc_RNA (1)...(19): siRNA sense strand
ccaaagaaauggaaaacau

SEQ ID NO: 2543124 - RNA, 19 nt, Homo sapiens
  misc_RNA (1)...(19): siRNA sense strand
acacuaauuaggaugguaa

SEQ ID NO: 2543125 - RNA, 19 nt, Homo sapiens
  misc_RNA (1)...(19): siRNA sense strand
gcgaugaggaagacgaaga

SEQ ID NO: 2543126 - RNA, 19 nt, Homo sapiens
  misc_RNA (1)...(19): siRNA sense strand
uguuaugguugaugccaaa

SEQ ID NO: 2543127 - RNA, 19 nt, Homo sapiens
  misc_RNA (1)...(19): siRNA sense strand
agacgaacuaauugaagaa

SEQ ID NO: 2543128 - RNA, 19 nt, Homo sapiens
  misc_RNA (1)...(19): siRNA sense strand
gaggaggaggagaggaaga

SEQ ID NO: 2543129 - RNA, 19 nt, Homo sapiens
  misc_RNA (1)...(19): siRNA sense strand
ccuuaaacagcaagaccua

SEQ ID NO: 2543130 - RNA, 19 nt, Homo sapiens
  misc_RNA (1)...(19): siRNA sense strand
agaagaaagcggagccuca

SEQ ID NO: 2543131 - RNA, 19 nt, Homo sapiens
  misc_RNA (1)...(19): siRNA sense strand
aagacgaagaagacgauua

SEQ ID NO: 2543132 - RNA, 19 nt, Homo sapiens
  misc_RNA (1)...(19): siRNA sense strand
uggaaaggguuuugaugaa

SEQ ID NO: 2543133 - RNA, 19 nt, Homo sapiens
  misc_RNA (1)...(19): siRNA sense strand
ccacagcaucagugaguga

SEQ ID NO: 2543134 - RNA, 19 nt, Homo sapiens
  misc_RNA (1)...(19): siRNA sense strand
ucucauuggaggugguaau

SEQ ID NO: 2543135 - RNA, 19 nt, Homo sapiens
  misc_RNA (1)...(19): siRNA sense strand
ugccacaagaggagguaaa

SEQ ID NO: 2543136 - RNA, 19 nt, Homo sapiens
  misc_RNA (1)...(19): siRNA sense strand
ccucaaaacaugaagcauu

SEQ ID NO: 2543137 - RNA, 19 nt, Homo sapiens
  misc_RNA (1)...(19): siRNA sense strand
ggugcaaccuccagacaca

SEQ ID NO: 2543138 - RNA, 19 nt, Homo sapiens
  misc_RNA (1)...(19): siRNA sense strand
gugauaaggucaaugagga

SEQ ID NO: 2543139 - RNA, 19 nt, Homo sapiens
  misc_RNA (1)...(19): siRNA sense strand
ggaucaagaaguucgaaca

SEQ ID NO: 2543140 - RNA, 19 nt, Homo sapiens
  misc_RNA (1)...(19): siRNA sense strand
ggucagauuuaauggugga

SEQ ID NO: 2543141 - RNA, 19 nt, Homo sapiens
  misc_RNA (1)...(19): siRNA sense strand
aggaagaguuggagcggcu

SEQ ID NO: 2543142 - RNA, 19 nt, Homo sapiens
  misc_RNA (1)...(19): siRNA sense strand
gaggaggagaggaagaaga

SEQ ID NO: 2543143 - RNA, 19 nt, Homo sapiens
  misc_RNA (1)...(19): siRNA sense strand
gcgaggagagugagaacca

SEQ ID NO: 2543144 - RNA, 19 nt, Homo sapiens
  misc_RNA (1)...(19): siRNA sense strand
agggagacaccgugauauu

SEQ ID NO: 2543145 - RNA, 19 nt, Homo sapiens
  misc_RNA (1)...(19): siRNA sense strand
agaaagaggaggaggagag

SEQ ID NO: 2543146 - RNA, 19 nt, Homo sapiens
  misc_RNA (1)...(19): siRNA sense strand
aaacuuugcagcauggaaa

SEQ ID NO: 2543147 - RNA, 19 nt, Homo sapiens
  misc_RNA (1)...(19): siRNA sense strand
aggucaaugaggagaugua

SEQ ID NO: 2543148 - RNA, 19 nt, Homo sapiens
  misc_RNA (1)...(19): siRNA sense strand
aagaagaaucggaugagau

SEQ ID NO: 2543149 - RNA, 19 nt, Homo sapiens
  misc_RNA (1)...(19): siRNA sense strand
uuggaaagcaccuggaaca

SEQ ID NO: 2543150 - RNA, 19 nt, Homo sapiens
  misc_RNA (1)...(19): siRNA sense strand
ccaaacagucagaguggca

SEQ ID NO: 2543151 - RNA, 19 nt, Homo sapiens
  misc_RNA (1)...(19): siRNA sense strand
aggacagcgaugaggaaga

SEQ ID NO: 2543152 - RNA, 19 nt, Homo sapiens
  misc_RNA (1)...(19): siRNA sense strand
gguucagaguggaggcugu

SEQ ID NO: 2543153 - RNA, 19 nt, Homo sapiens
  misc_RNA (1)...(19): siRNA sense strand
cgacccaaguccagaaacu

SEQ ID NO: 2543154 - RNA, 19 nt, Homo sapiens
  misc_RNA (1)...(19): siRNA sense strand
cagauuuaaugguggagca

SEQ ID NO: 2543155 - RNA, 19 nt, Homo sapiens
  misc_RNA (1)...(19): siRNA sense strand
agauguacauagaaagguu

SEQ ID NO: 2543156 - RNA, 19 nt, Homo sapiens
  misc_RNA (1)...(19): siRNA sense strand
aggaagacgaagaagacga

SEQ ID NO: 2543157 - RNA, 19 nt, Homo sapiens
  misc_RNA (1)...(19): siRNA sense strand
cagcagaagaucagcaaac

SEQ ID NO: 2543158 - RNA, 19 nt, Homo sapiens
  misc_RNA (1)...(19): siRNA sense strand
ccgagcugauucugagcaa

SEQ ID NO: 2543159 - RNA, 19 nt, Homo sapiens
  misc_RNA (1)...(19): siRNA sense strand
cgccaagggaggaaaugua

SEQ ID NO: 2543160 - RNA, 19 nt, Homo sapiens
  misc_RNA (1)...(19): siRNA sense strand
gaucaagaaguucgaacau

SEQ ID NO: 2543161 - RNA, 19 nt, Homo sapiens
  misc_RNA (1)...(19): siRNA sense strand
ggauggacuuacagcuuca

SEQ ID NO: 2543162 - RNA, 19 nt, Homo sapiens
  misc_RNA (1)...(19): siRNA sense strand
cgaugaggaagacgaagaa

SEQ ID NO: 2543163 - RNA, 19 nt, Homo sapiens
  misc_RNA (1)...(19): siRNA sense strand
ccuccagacacaugggaca

SEQ ID NO: 2543164 - RNA, 19 nt, Homo sapiens
  misc_RNA (1)...(19): siRNA sense strand
uggaaggaggagagaaacu

SEQ ID NO: 2543165 - RNA, 19 nt, Homo sapiens
  misc_RNA (1)...(19): siRNA sense strand
caggauugcauuugaaguu

SEQ ID NO: 2543166 - RNA, 19 nt, Homo sapiens
  misc_RNA (1)...(19): siRNA sense strand
augaggaagacgaagaaga

SEQ ID NO: 2543167 - RNA, 19 nt, Homo sapiens
  misc_RNA (1)...(19): siRNA sense strand
cugugaaggugaagcuguu

SEQ ID NO: 2543168 - RNA, 19 nt, Homo sapiens
  misc_RNA (1)...(19): siRNA sense strand
gcacaauggagguggaagg

SEQ ID NO: 2543169 - RNA, 19 nt, Homo sapiens
  misc_RNA (1)...(19): siRNA sense strand
cuggaagagauggaagaaa

SEQ ID NO: 2543170 - RNA, 19 nt, Homo sapiens
  misc_RNA (1)...(19): siRNA sense strand
aaaggaacguuuugaagaa

SEQ ID NO: 2543171 - RNA, 19 nt, Homo sapiens
  misc_RNA (1)...(19): siRNA sense strand
agaaggagaaggaagaguu

SEQ ID NO: 2543172 - RNA, 19 nt, Homo sapiens
  misc_RNA (1)...(19): siRNA sense strand
gcuccaaaucgcaucguau

SEQ ID NO: 2543173 - RNA, 19 nt, Homo sapiens
  misc_RNA (1)...(19): siRNA sense strand
auggcuacacuguggauua

SEQ ID NO: 2543174 - RNA, 19 nt, Homo sapiens
  misc_RNA (1)...(19): siRNA sense strand
cugcagggcaucagcauga

SEQ ID NO: 2543175 - RNA, 19 nt, Homo sapiens
  misc_RNA (1)...(19): siRNA sense strand
gauauuugccagugacgau

SEQ ID NO: 2543176 - RNA, 19 nt, Homo sapiens
  misc_RNA (1)...(19): siRNA sense strand
gagcgggagucaugggaac

SEQ ID NO: 2543177 - RNA, 19 nt, Homo sapiens
  misc_RNA (1)...(19): siRNA sense strand
cagauaugacgaagggacu

SEQ ID NO: 2543178 - RNA, 19 nt, Homo sapiens
  misc_RNA (1)...(19): siRNA sense strand
gguggaaggaggagagaaa

SEQ ID NO: 2543179 - RNA, 19 nt, Homo sapiens
  misc_RNA (1)...(19): siRNA sense strand
cggcugaaguugauggcaa

SEQ ID NO: 2543180 - RNA, 19 nt, Homo sapiens
  misc_RNA (1)...(19): siRNA sense strand
gcgagaaggagaaggaaga

SEQ ID NO: 2543181 - RNA, 19 nt, Homo sapiens
  misc_RNA (1)...(19): siRNA sense strand
cugaagaagaguuuggaaa

SEQ ID NO: 2543182 - RNA, 19 nt, Homo sapiens
  misc_RNA (1)...(19): siRNA sense strand
uggaagagauggaagaaaa

SEQ ID NO: 2543183 - RNA, 19 nt, Homo sapiens
  misc_RNA (1)...(19): siRNA sense strand
uggaaggagugcuggcaaa

SEQ ID NO: 2543184 - RNA, 19 nt, Homo sapiens
  misc_RNA (1)...(19): siRNA sense strand
gguaagaaugucuggaaga

SEQ ID NO: 2543185 - RNA, 19 nt, Homo sapiens
  misc_RNA (1)...(19): siRNA sense strand
gcgaagaagaaucggauga

SEQ ID NO: 2543186 - RNA, 19 nt, Homo sapiens
  misc_RNA (1)...(19): siRNA sense strand
aagaaaaccuacagagauu

SEQ ID NO: 2543187 - RNA, 19 nt, Homo sapiens
  misc_RNA (1)...(19): siRNA sense strand
aagaggaggaggagaggaa

SEQ ID NO: 2543188 - RNA, 19 nt, Homo sapiens
  misc_RNA (1)...(19): siRNA sense strand
cggaugagaucguggagga

SEQ ID NO: 2543189 - RNA, 19 nt, Homo sapiens
  misc_RNA (1)...(19): siRNA sense strand
ccaaagaaauggaaaacau

SEQ ID NO: 2543190 - RNA, 19 nt, Homo sapiens
  misc_RNA (1)...(19): siRNA sense strand
acacuaauuaggaugguaa

SEQ ID NO: 2543191 - RNA, 19 nt, Homo sapiens
  misc_RNA (1)...(19): siRNA sense strand
gcgaugaggaagacgaaga

SEQ ID NO: 2543192 - RNA, 19 nt, Homo sapiens
  misc_RNA (1)...(19): siRNA sense strand
uguuaugguugaugccaaa

SEQ ID NO: 2543193 - RNA, 19 nt, Homo sapiens
  misc_RNA (1)...(19): siRNA sense strand
agacgaacuaauugaagaa

SEQ ID NO: 2543194 - RNA, 19 nt, Homo sapiens
  misc_RNA (1)...(19): siRNA sense strand
gaggaggaggagaggaaga

SEQ ID NO: 2543195 - RNA, 19 nt, Homo sapiens
  misc_RNA (1)...(19): siRNA sense strand
ccuuaaacagcaagaccua

SEQ ID NO: 2543196 - RNA, 19 nt, Homo sapiens
  misc_RNA (1)...(19): siRNA sense strand
agaagaaagcggagccuca

SEQ ID NO: 2543197 - RNA, 19 nt, Homo sapiens
  misc_RNA (1)...(19): siRNA sense strand
aagacgaagaagacgauua

SEQ ID NO: 2543198 - RNA, 19 nt, Homo sapiens
  misc_RNA (1)...(19): siRNA sense strand
uggaaaggguuuugaugaa

SEQ ID NO: 2543199 - RNA, 19 nt, Homo sapiens
  misc_RNA (1)...(19): siRNA sense strand
ccacagcaucagugaguga

SEQ ID NO: 2543200 - RNA, 19 nt, Homo sapiens
  misc_RNA (1)...(19): siRNA sense strand
ucucauuggaggugguaau

SEQ ID NO: 2543201 - RNA, 19 nt, Homo sapiens
  misc_RNA (1)...(19): siRNA sense strand
ugccacaagaggagguaaa

SEQ ID NO: 2543202 - RNA, 19 nt, Homo sapiens
  misc_RNA (1)...(19): siRNA sense strand
ccucaaaacaugaagcauu

SEQ ID NO: 2543203 - RNA, 19 nt, Homo sapiens
  misc_RNA (1)...(19): siRNA sense strand
ggugcaaccuccagacaca

SEQ ID NO: 2543204 - RNA, 19 nt, Homo sapiens
  misc_RNA (1)...(19): siRNA sense strand
gugauaaggucaaugagga

SEQ ID NO: 2543205 - RNA, 19 nt, Homo sapiens
  misc_RNA (1)...(19): siRNA sense strand
ggaucaagaaguucgaaca

SEQ ID NO: 2543206 - RNA, 19 nt, Homo sapiens
  misc_RNA (1)...(19): siRNA sense strand
ggucagauuuaauggugga

SEQ ID NO: 2543207 - RNA, 19 nt, Homo sapiens
  misc_RNA (1)...(19): siRNA sense strand
aggaagaguuggagcggcu

SEQ ID NO: 2543208 - RNA, 19 nt, Homo sapiens
  misc_RNA (1)...(19): siRNA sense strand
gaggaggagaggaagaaga

SEQ ID NO: 2543209 - RNA, 19 nt, Homo sapiens
  misc_RNA (1)...(19): siRNA sense strand
gcgaggagagugagaacca

SEQ ID NO: 2543210 - RNA, 19 nt, Homo sapiens
  misc_RNA (1)...(19): siRNA sense strand
agggagacaccgugauauu

SEQ ID NO: 2543211 - RNA, 19 nt, Homo sapiens
  misc_RNA (1)...(19): siRNA sense strand
agaaagaggaggaggagag

SEQ ID NO: 2543212 - RNA, 19 nt, Homo sapiens
  misc_RNA (1)...(19): siRNA sense strand
aaacuuugcagcauggaaa

SEQ ID NO: 2543213 - RNA, 19 nt, Homo sapiens
  misc_RNA (1)...(19): siRNA sense strand
aggucaaugaggagaugua

SEQ ID NO: 2543214 - RNA, 19 nt, Homo sapiens
  misc_RNA (1)...(19): siRNA sense strand
aagaagaaucggaugagau

SEQ ID NO: 2543215 - RNA, 19 nt, Homo sapiens
  misc_RNA (1)...(19): siRNA sense strand
uuggaaagcaccuggaaca

SEQ ID NO: 2543216 - RNA, 19 nt, Homo sapiens
  misc_RNA (1)...(19): siRNA sense strand
ccaaacagucagaguggca

SEQ ID NO: 2543217 - RNA, 19 nt, Homo sapiens
  misc_RNA (1)...(19): siRNA sense strand
aggacagcgaugaggaaga

SEQ ID NO: 2543218 - RNA, 19 nt, Homo sapiens
  misc_RNA (1)...(19): siRNA sense strand
gguucagaguggaggcugu

SEQ ID NO: 2543219 - RNA, 19 nt, Homo sapiens
  misc_RNA (1)...(19): siRNA sense strand
cgacccaaguccagaaacu

SEQ ID NO: 2543220 - RNA, 19 nt, Homo sapiens
  misc_RNA (1)...(19): siRNA sense strand
cagauuuaaugguggagca

SEQ ID NO: 2543221 - RNA, 19 nt, Homo sapiens
  misc_RNA (1)...(19): siRNA sense strand
agauguacauagaaagguu

SEQ ID NO: 2543222 - RNA, 19 nt, Homo sapiens
  misc_RNA (1)...(19): siRNA sense strand
aggaagacgaagaagacga

SEQ ID NO: 2543223 - RNA, 19 nt, Homo sapiens
  misc_RNA (1)...(19): siRNA sense strand
cagcagaagaucagcaaac

SEQ ID NO: 2543224 - RNA, 19 nt, Homo sapiens
  misc_RNA (1)...(19): siRNA sense strand
ccgagcugauucugagcaa

SEQ ID NO: 2543225 - RNA, 19 nt, Homo sapiens
  misc_RNA (1)...(19): siRNA sense strand
cgccaagggaggaaaugua

SEQ ID NO: 2543226 - RNA, 19 nt, Homo sapiens
  misc_RNA (1)...(19): siRNA sense strand
gaucaagaaguucgaacau

SEQ ID NO: 2543227 - RNA, 19 nt, Homo sapiens
  misc_RNA (1)...(19): siRNA sense strand
ggauggacuuacagcuuca

SEQ ID NO: 2543228 - RNA, 19 nt, Homo sapiens
  misc_RNA (1)...(19): siRNA sense strand
cgaugaggaagacgaagaa

SEQ ID NO: 2543229 - RNA, 19 nt, Homo sapiens
  misc_RNA (1)...(19): siRNA sense strand
ccuccagacacaugggaca

SEQ ID NO: 2543230 - RNA, 19 nt, Homo sapiens
  misc_RNA (1)...(19): siRNA sense strand
uggaaggaggagagaaacu

SEQ ID NO: 2543231 - RNA, 19 nt, Homo sapiens
  misc_RNA (1)...(19): siRNA sense strand
caggauugcauuugaaguu

SEQ ID NO: 2543232 - RNA, 19 nt, Homo sapiens
  misc_RNA (1)...(19): siRNA sense strand
augaggaagacgaagaaga

SEQ ID NO: 2543233 - RNA, 19 nt, Homo sapiens
  misc_RNA (1)...(19): siRNA sense strand
cugugaaggugaagcuguu

SEQ ID NO: 2543234 - RNA, 19 nt, Homo sapiens
  misc_RNA (1)...(19): siRNA sense strand
gcacaauggagguggaagg

SEQ ID NO: 2543235 - RNA, 19 nt, Homo sapiens
  misc_RNA (1)...(19): siRNA sense strand
cuggaagagauggaagaaa

SEQ ID NO: 2543236 - RNA, 19 nt, Homo sapiens
  misc_RNA (1)...(19): siRNA sense strand
aaaggaacguuuugaagaa

SEQ ID NO: 2543237 - RNA, 19 nt, Homo sapiens
  misc_RNA (1)...(19): siRNA sense strand
agaaggagaaggaagaguu

SEQ ID NO: 2543238 - RNA, 19 nt, Homo sapiens
  misc_RNA (1)...(19): siRNA sense strand
gcuccaaaucgcaucguau

SEQ ID NO: 2543239 - RNA, 19 nt, Homo sapiens
  misc_RNA (1)...(19): siRNA sense strand
auggcuacacuguggauua

SEQ ID NO: 2543240 - RNA, 19 nt, Homo sapiens
  misc_RNA (1)...(19): siRNA sense strand
cugcagggcaucagcauga

SEQ ID NO: 2543241 - RNA, 19 nt, Homo sapiens
  misc_RNA (1)...(19): siRNA sense strand
gauauuugccagugacgau

SEQ ID NO: 2543242 - RNA, 19 nt, Homo sapiens
  misc_RNA (1)...(19): siRNA sense strand
gagcgggagucaugggaac

SEQ ID NO: 2543243 - RNA, 19 nt, Homo sapiens
  misc_RNA (1)...(19): siRNA sense strand
cagauaugacgaagggacu

SEQ ID NO: 2543244 - RNA, 19 nt, Homo sapiens
  misc_RNA (1)...(19): siRNA sense strand
gguggaaggaggagagaaa

SEQ ID NO: 2543245 - RNA, 19 nt, Homo sapiens
  misc_RNA (1)...(19): siRNA sense strand
cggcugaaguugauggcaa

SEQ ID NO: 2543246 - RNA, 19 nt, Homo sapiens
  misc_RNA (1)...(19): siRNA sense strand
gcgagaaggagaaggaaga

SEQ ID NO: 2543247 - RNA, 19 nt, Homo sapiens
  misc_RNA (1)...(19): siRNA sense strand
cugaagaagaguuuggaaa

SEQ ID NO: 2543248 - RNA, 19 nt, Homo sapiens
  misc_RNA (1)...(19): siRNA sense strand
uggaagagauggaagaaaa

SEQ ID NO: 2543249 - RNA, 19 nt, Homo sapiens
  misc_RNA (1)...(19): siRNA sense strand
uggaaggagugcuggcaaa

SEQ ID NO: 2543250 - RNA, 19 nt, Homo sapiens
  misc_RNA (1)...(19): siRNA sense strand
gguaagaaugucuggaaga

SEQ ID NO: 2543251 - RNA, 19 nt, Homo sapiens
  misc_RNA (1)...(19): siRNA sense strand
gcgaagaagaaucggauga

SEQ ID NO: 2543252 - RNA, 19 nt, Homo sapiens
  misc_RNA (1)...(19): siRNA sense strand
aagaaaaccuacagagauu

SEQ ID NO: 2543253 - RNA, 19 nt, Homo sapiens
  misc_RNA (1)...(19): siRNA sense strand
aagaggaggaggagaggaa

SEQ ID NO: 2543254 - RNA, 19 nt, Homo sapiens
  misc_RNA (1)...(19): siRNA sense strand
cggaugagaucguggagga

SEQ ID NO: 2543255 - RNA, 19 nt, Homo sapiens
  misc_RNA (1)...(19): siRNA sense strand
ccaaagaaauggaaaacau

SEQ ID NO: 2543256 - RNA, 19 nt, Homo sapiens
  misc_RNA (1)...(19): siRNA sense strand
acacuaauuaggaugguaa

SEQ ID NO: 2543257 - RNA, 19 nt, Homo sapiens
  misc_RNA (1)...(19): siRNA sense strand
gcgaugaggaagacgaaga

SEQ ID NO: 2543258 - RNA, 19 nt, Homo sapiens
  misc_RNA (1)...(19): siRNA sense strand
uguuaugguugaugccaaa

SEQ ID NO: 2543259 - RNA, 19 nt, Homo sapiens
  misc_RNA (1)...(19): siRNA sense strand
agacgaacuaauugaagaa

SEQ ID NO: 2543260 - RNA, 19 nt, Homo sapiens
  misc_RNA (1)...(19): siRNA sense strand
gaggaggaggagaggaaga

SEQ ID NO: 2543261 - RNA, 19 nt, Homo sapiens
  misc_RNA (1)...(19): siRNA sense strand
ccuuaaacagcaagaccua

SEQ ID NO: 2543262 - RNA, 19 nt, Homo sapiens
  misc_RNA (1)...(19): siRNA sense strand
agaagaaagcggagccuca

SEQ ID NO: 2543263 - RNA, 19 nt, Homo sapiens
  misc_RNA (1)...(19): siRNA sense strand
aagacgaagaagacgauua

SEQ ID NO: 2543264 - RNA, 19 nt, Homo sapiens
  misc_RNA (1)...(19): siRNA sense strand
uggaaaggguuuugaugaa

SEQ ID NO: 2543265 - RNA, 19 nt, Homo sapiens
  misc_RNA (1)...(19): siRNA sense strand
ccacagcaucagugaguga

SEQ ID NO: 2543266 - RNA, 19 nt, Homo sapiens
  misc_RNA (1)...(19): siRNA sense strand
ucucauuggaggugguaau

SEQ ID NO: 2543267 - RNA, 19 nt, Homo sapiens
  misc_RNA (1)...(19): siRNA sense strand
ugccacaagaggagguaaa

SEQ ID NO: 2543268 - RNA, 19 nt, Homo sapiens
  misc_RNA (1)...(19): siRNA sense strand
ccucaaaacaugaagcauu

SEQ ID NO: 2543269 - RNA, 19 nt, Homo sapiens
  misc_RNA (1)...(19): siRNA sense strand
ggugcaaccuccagacaca

SEQ ID NO: 2543270 - RNA, 19 nt, Homo sapiens
  misc_RNA (1)...(19): siRNA sense strand
gugauaaggucaaugagga

SEQ ID NO: 2543271 - RNA, 19 nt, Homo sapiens
  misc_RNA (1)...(19): siRNA sense strand
ggaucaagaaguucgaaca

SEQ ID NO: 2543272 - RNA, 19 nt, Homo sapiens
  misc_RNA (1)...(19): siRNA sense strand
ggucagauuuaauggugga

SEQ ID NO: 2543273 - RNA, 19 nt, Homo sapiens
  misc_RNA (1)...(19): siRNA sense strand
aggaagaguuggagcggcu

SEQ ID NO: 2543274 - RNA, 19 nt, Homo sapiens
  misc_RNA (1)...(19): siRNA sense strand
gaggaggagaggaagaaga

SEQ ID NO: 2543275 - RNA, 19 nt, Homo sapiens
  misc_RNA (1)...(19): siRNA sense strand
gcgaggagagugagaacca

SEQ ID NO: 2543276 - RNA, 19 nt, Homo sapiens
  misc_RNA (1)...(19): siRNA sense strand
agggagacaccgugauauu

SEQ ID NO: 2543277 - RNA, 19 nt, Homo sapiens
  misc_RNA (1)...(19): siRNA sense strand
agaaagaggaggaggagag

SEQ ID NO: 2543278 - RNA, 19 nt, Homo sapiens
  misc_RNA (1)...(19): siRNA sense strand
aaacuuugcagcauggaaa

SEQ ID NO: 2543279 - RNA, 19 nt, Homo sapiens
  misc_RNA (1)...(19): siRNA sense strand
aggucaaugaggagaugua

SEQ ID NO: 2543280 - RNA, 19 nt, Homo sapiens
  misc_RNA (1)...(19): siRNA sense strand
aagaagaaucggaugagau

SEQ ID NO: 2543281 - RNA, 19 nt, Homo sapiens
  misc_RNA (1)...(19): siRNA sense strand
uuggaaagcaccuggaaca

SEQ ID NO: 2543282 - RNA, 19 nt, Homo sapiens
  misc_RNA (1)...(19): siRNA sense strand
ccaaacagucagaguggca

SEQ ID NO: 2543283 - RNA, 19 nt, Homo sapiens
  misc_RNA (1)...(19): siRNA sense strand
aggacagcgaugaggaaga

SEQ ID NO: 2543284 - RNA, 19 nt, Homo sapiens
  misc_RNA (1)...(19): siRNA sense strand
gguucagaguggaggcugu

SEQ ID NO: 2543285 - RNA, 19 nt, Homo sapiens
  misc_RNA (1)...(19): siRNA sense strand
cgacccaaguccagaaacu

SEQ ID NO: 2543286 - RNA, 19 nt, Homo sapiens
  misc_RNA (1)...(19): siRNA sense strand
cagauuuaaugguggagca

SEQ ID NO: 2543287 - RNA, 19 nt, Homo sapiens
  misc_RNA (1)...(19): siRNA sense strand
agauguacauagaaagguu

SEQ ID NO: 2543288 - RNA, 19 nt, Homo sapiens
  misc_RNA (1)...(19): siRNA sense strand
aggaagacgaagaagacga

SEQ ID NO: 2543289 - RNA, 19 nt, Homo sapiens
  misc_RNA (1)...(19): siRNA sense strand
cagcagaagaucagcaaac

SEQ ID NO: 2543290 - RNA, 19 nt, Homo sapiens
  misc_RNA (1)...(19): siRNA sense strand
ccgagcugauucugagcaa

SEQ ID NO: 2543291 - RNA, 19 nt, Homo sapiens
  misc_RNA (1)...(19): siRNA sense strand
cgccaagggaggaaaugua

SEQ ID NO: 2543292 - RNA, 19 nt, Homo sapiens
  misc_RNA (1)...(19): siRNA sense strand
gaucaagaaguucgaacau

SEQ ID NO: 2543293 - RNA, 19 nt, Homo sapiens
  misc_RNA (1)...(19): siRNA sense strand
ggauggacuuacagcuuca

SEQ ID NO: 2543294 - RNA, 19 nt, Homo sapiens
  misc_RNA (1)...(19): siRNA sense strand
cgaugaggaagacgaagaa

SEQ ID NO: 2543295 - RNA, 19 nt, Homo sapiens
  misc_RNA (1)...(19): siRNA sense strand
ccuccagacacaugggaca

SEQ ID NO: 2543296 - RNA, 19 nt, Homo sapiens
  misc_RNA (1)...(19): siRNA sense strand
uggaaggaggagagaaacu

SEQ ID NO: 2543297 - RNA, 19 nt, Homo sapiens
  misc_RNA (1)...(19): siRNA sense strand
caggauugcauuugaaguu

SEQ ID NO: 2543298 - RNA, 19 nt, Homo sapiens
  misc_RNA (1)...(19): siRNA sense strand
augaggaagacgaagaaga

SEQ ID NO: 2543299 - RNA, 19 nt, Homo sapiens
  misc_RNA (1)...(19): siRNA sense strand
cugugaaggugaagcuguu

SEQ ID NO: 2543300 - RNA, 19 nt, Homo sapiens
  misc_RNA (1)...(19): siRNA sense strand
gcacaauggagguggaagg

SEQ ID NO: 2543301 - RNA, 19 nt, Homo sapiens
  misc_RNA (1)...(19): siRNA sense strand
cuggaagagauggaagaaa

SEQ ID NO: 2543302 - RNA, 19 nt, Homo sapiens
  misc_RNA (1)...(19): siRNA sense strand
aaaggaacguuuugaagaa

SEQ ID NO: 2543303 - RNA, 19 nt, Homo sapiens
  misc_RNA (1)...(19): siRNA sense strand
agaaggagaaggaagaguu

SEQ ID NO: 2543304 - RNA, 19 nt, Homo sapiens
  misc_RNA (1)...(19): siRNA sense strand
gcuccaaaucgcaucguau

SEQ ID NO: 2543305 - RNA, 19 nt, Homo sapiens
  misc_RNA (1)...(19): siRNA sense strand
auggcuacacuguggauua

SEQ ID NO: 2543306 - RNA, 19 nt, Homo sapiens
  misc_RNA (1)...(19): siRNA sense strand
cugcagggcaucagcauga

SEQ ID NO: 2543307 - RNA, 19 nt, Homo sapiens
  misc_RNA (1)...(19): siRNA sense strand
gauauuugccagugacgau

SEQ ID NO: 2543308 - RNA, 19 nt, Homo sapiens
  misc_RNA (1)...(19): siRNA sense strand
gagcgggagucaugggaac

SEQ ID NO: 2543309 - RNA, 19 nt, Homo sapiens
  misc_RNA (1)...(19): siRNA sense strand
cagauaugacgaagggacu

SEQ ID NO: 2543310 - RNA, 19 nt, Homo sapiens
  misc_RNA (1)...(19): siRNA sense strand
cagacauaaaggagagcaa

SEQ ID NO: 2543311 - RNA, 19 nt, Homo sapiens
  misc_RNA (1)...(19): siRNA sense strand
augaaguuccugagugaaa

SEQ ID NO: 2543312 - RNA, 19 nt, Homo sapiens
  misc_RNA (1)...(19): siRNA sense strand
ugaagaagcugguggugga

SEQ ID NO: 2543313 - RNA, 19 nt, Homo sapiens
  misc_RNA (1)...(19): siRNA sense strand
agagaguggcagacauaaa

SEQ ID NO: 2543314 - RNA, 19 nt, Homo sapiens
  misc_RNA (1)...(19): siRNA sense strand
ucagcaaagccaagaacaa

SEQ ID NO: 2543315 - RNA, 19 nt, Homo sapiens
  misc_RNA (1)...(19): siRNA sense strand
acaaguugauaauggagaa

SEQ ID NO: 2543316 - RNA, 19 nt, Homo sapiens
  misc_RNA (1)...(19): siRNA sense strand
caacaagaacauugaaacu

SEQ ID NO: 2543317 - RNA, 19 nt, Homo sapiens
  misc_RNA (1)...(19): siRNA sense strand
gcauaaauuagcagagaag

SEQ ID NO: 2543318 - RNA, 19 nt, Homo sapiens
  misc_RNA (1)...(19): siRNA sense strand
aaggagagcccgagaggga

SEQ ID NO: 2543319 - RNA, 19 nt, Homo sapiens
  misc_RNA (1)...(19): siRNA sense strand
gucagauggucuuggagua

SEQ ID NO: 2543320 - RNA, 19 nt, Homo sapiens
  misc_RNA (1)...(19): siRNA sense strand
guuugaaaggguauggcaa

SEQ ID NO: 2543321 - RNA, 19 nt, Homo sapiens
  misc_RNA (1)...(19): siRNA sense strand
aggaacauguaauugcaaa

SEQ ID NO: 2543322 - RNA, 19 nt, Homo sapiens
  misc_RNA (1)...(19): siRNA sense strand
gggcugaaaaugugcuaaa

SEQ ID NO: 2543323 - RNA, 19 nt, Homo sapiens
  misc_RNA (1)...(19): siRNA sense strand
ggaccaguacaucgugaaa

SEQ ID NO: 2543324 - RNA, 19 nt, Homo sapiens
  misc_RNA (1)...(19): siRNA sense strand
gcuguuggcaggagucaaa

SEQ ID NO: 2543325 - RNA, 19 nt, Homo sapiens
  misc_RNA (1)...(19): siRNA sense strand
agaagcuggugguggaaaa

SEQ ID NO: 2543326 - RNA, 19 nt, Homo sapiens
  misc_RNA (1)...(19): siRNA sense strand
agaugugcccagaggagua

SEQ ID NO: 2543327 - RNA, 19 nt, Homo sapiens
  misc_RNA (1)...(19): siRNA sense strand
gcugagagucaccggaaga

SEQ ID NO: 2543328 - RNA, 19 nt, Homo sapiens
  misc_RNA (1)...(19): siRNA sense strand
acaaacugguaccuggaaa

SEQ ID NO: 2543329 - RNA, 19 nt, Homo sapiens
  misc_RNA (1)...(19): siRNA sense strand
gagcagaacuucagugcag

SEQ ID NO: 2543330 - RNA, 19 nt, Homo sapiens
  misc_RNA (1)...(19): siRNA sense strand
cugaagaagcugacagaag

SEQ ID NO: 2543331 - RNA, 19 nt, Homo sapiens
  misc_RNA (1)...(19): siRNA sense strand
cauaaaggagagcaaggaa

SEQ ID NO: 2543332 - RNA, 19 nt, Homo sapiens
  misc_RNA (1)...(19): siRNA sense strand
cuggauuaucauuggguuu

SEQ ID NO: 2543333 - RNA, 19 nt, Homo sapiens
  misc_RNA (1)...(19): siRNA sense strand
ccagagaaggggagcagaa

SEQ ID NO: 2543334 - RNA, 19 nt, Homo sapiens
  misc_RNA (1)...(19): siRNA sense strand
agccaggagcugagaguca

SEQ ID NO: 2543335 - RNA, 19 nt, Homo sapiens
  misc_RNA (1)...(19): siRNA sense strand
gcacaaagucaccgaggac

SEQ ID NO: 2543336 - RNA, 19 nt, Homo sapiens
  misc_RNA (1)...(19): siRNA sense strand
gugacaucauucagaacuu

SEQ ID NO: 2543337 - RNA, 19 nt, Homo sapiens
  misc_RNA (1)...(19): siRNA sense strand
agauuguggagcugaagaa

SEQ ID NO: 2543338 - RNA, 19 nt, Homo sapiens
  misc_RNA (1)...(19): siRNA sense strand
ugccauugcuaaucugaaa

SEQ ID NO: 2543339 - RNA, 19 nt, Homo sapiens
  misc_RNA (1)...(19): siRNA sense strand
gcuuaaaaccagaaaucga

SEQ ID NO: 2543340 - RNA, 19 nt, Homo sapiens
  misc_RNA (1)...(19): siRNA sense strand
aggugugggcugugacauu

SEQ ID NO: 2543341 - RNA, 19 nt, Homo sapiens
  misc_RNA (1)...(19): siRNA sense strand
agaaggaugguuacaacaa

SEQ ID NO: 2543342 - RNA, 19 nt, Homo sapiens
  misc_RNA (1)...(19): siRNA sense strand
uuguggaugucauggaauu

SEQ ID NO: 2543343 - RNA, 19 nt, Homo sapiens
  misc_RNA (1)...(19): siRNA sense strand
cagaagaguuugggccuca

SEQ ID NO: 2543344 - RNA, 19 nt, Homo sapiens
  misc_RNA (1)...(19): siRNA sense strand
agcauaaauuagcagagaa

SEQ ID NO: 2543345 - RNA, 19 nt, Homo sapiens
  misc_RNA (1)...(19): siRNA sense strand
ccaacauggacaagcuaca

SEQ ID NO: 2543346 - RNA, 19 nt, Homo sapiens
  misc_RNA (1)...(19): siRNA sense strand
cagaacuggcacugacaau

SEQ ID NO: 2543347 - RNA, 19 nt, Homo sapiens
  misc_RNA (1)...(19): siRNA sense strand
acauuuaggaccaguacau

SEQ ID NO: 2543348 - RNA, 19 nt, Homo sapiens
  misc_RNA (1)...(19): siRNA sense strand
agaaauuucccaacauaga

SEQ ID NO: 2543349 - RNA, 19 nt, Homo sapiens
  misc_RNA (1)...(19): siRNA sense strand
uggaagaguuggccaagca

SEQ ID NO: 2543350 - RNA, 19 nt, Homo sapiens
  misc_RNA (1)...(19): siRNA sense strand
gagaaggggagcagaacuu

SEQ ID NO: 2543351 - RNA, 19 nt, Homo sapiens
  misc_RNA (1)...(19): siRNA sense strand
uccaauagccagugccaga

SEQ ID NO: 2543352 - RNA, 19 nt, Homo sapiens
  misc_RNA (1)...(19): siRNA sense strand
ccuguuuagcaguuugaaa

SEQ ID NO: 2543353 - RNA, 19 nt, Homo sapiens
  misc_RNA (1)...(19): siRNA sense strand
auaaauuagcagagaagcu

SEQ ID NO: 2543354 - RNA, 19 nt, Homo sapiens
  misc_RNA (1)...(19): siRNA sense strand
gugaaaaccugauguggca

SEQ ID NO: 2543355 - RNA, 19 nt, Homo sapiens
  misc_RNA (1)...(19): siRNA sense strand
agucauuuguggaugucau

SEQ ID NO: 2543356 - RNA, 19 nt, Homo sapiens
  misc_RNA (1)...(19): siRNA sense strand
ggguauggcaagagagugg

SEQ ID NO: 2543357 - RNA, 19 nt, Homo sapiens
  misc_RNA (1)...(19): siRNA sense strand
ccauugagugcuugaagga

SEQ ID NO: 2543358 - RNA, 19 nt, Homo sapiens
  misc_RNA (1)...(19): siRNA sense strand
gaugguuacaacaacaaua

SEQ ID NO: 2543359 - RNA, 19 nt, Homo sapiens
  misc_RNA (1)...(19): siRNA sense strand
ccaacuacuaccagucauu

SEQ ID NO: 2543360 - RNA, 19 nt, Homo sapiens
  misc_RNA (1)...(19): siRNA sense strand
agauggucuuggaguauga

SEQ ID NO: 2543361 - RNA, 19 nt, Homo sapiens
  misc_RNA (1)...(19): siRNA sense strand
cugcuaauucagauacaau

SEQ ID NO: 2543362 - RNA, 19 nt, Homo sapiens
  misc_RNA (1)...(19): siRNA sense strand
caaguugauaauggagaaa

SEQ ID NO: 2543363 - RNA, 19 nt, Homo sapiens
  misc_RNA (1)...(19): siRNA sense strand
gugcuaaagcgcaugacca

SEQ ID NO: 2543364 - RNA, 19 nt, Homo sapiens
  misc_RNA (1)...(19): siRNA sense strand
ccgccgaugcucagagaua

SEQ ID NO: 2543365 - RNA, 19 nt, Homo sapiens
  misc_RNA (1)...(19): siRNA sense strand
aaaugauggaggaggcaaa

SEQ ID NO: 2543366 - RNA, 19 nt, Homo sapiens
  misc_RNA (1)...(19): siRNA sense strand
gagucugaggagaaggaaa

SEQ ID NO: 2543367 - RNA, 19 nt, Homo sapiens
  misc_RNA (1)...(19): siRNA sense strand
ccguagggaugccgccaaa

SEQ ID NO: 2543368 - RNA, 19 nt, Homo sapiens
  misc_RNA (1)...(19): siRNA sense strand
acuucacgcuggugggcaa

SEQ ID NO: 2543369 - RNA, 19 nt, Homo sapiens
  misc_RNA (1)...(19): siRNA sense strand
acaaggaaaugauggagga

SEQ ID NO: 2543370 - RNA, 19 nt, Homo sapiens
  misc_RNA (1)...(19): siRNA sense strand
gguuagcagccacgaacaa

SEQ ID NO: 2543371 - RNA, 19 nt, Homo sapiens
  misc_RNA (1)...(19): siRNA sense strand
aagcgucaguacaaggaaa

SEQ ID NO: 2543372 - RNA, 19 nt, Homo sapiens
  misc_RNA (1)...(19): siRNA sense strand
caagacaggagcaggacau

SEQ ID NO: 2543373 - RNA, 19 nt, Homo sapiens
  misc_RNA (1)...(19): siRNA sense strand
gggaagacuccuacggaac

SEQ ID NO: 2543374 - RNA, 19 nt, Homo sapiens
  misc_RNA (1)...(19): siRNA sense strand
ggacaaauugccccagaaa

SEQ ID NO: 2543375 - RNA, 19 nt, Homo sapiens
  misc_RNA (1)...(19): siRNA sense strand
cuucgugagagcugugaua

SEQ ID NO: 2543376 - RNA, 19 nt, Homo sapiens
  misc_RNA (1)...(19): siRNA sense strand
ggaaaggggugcagagccu

SEQ ID NO: 2543377 - RNA, 19 nt, Homo sapiens
  misc_RNA (1)...(19): siRNA sense strand
acggagaccacaagcagua

SEQ ID NO: 2543378 - RNA, 19 nt, Homo sapiens
  misc_RNA (1)...(19): siRNA sense strand
cgugaguguggcugaaauu

SEQ ID NO: 2543379 - RNA, 19 nt, Homo sapiens
  misc_RNA (1)...(19): siRNA sense strand
uuugaugcucugaaagaua

SEQ ID NO: 2543380 - RNA, 19 nt, Homo sapiens
  misc_RNA (1)...(19): siRNA sense strand
ccguggacguagacagcga

SEQ ID NO: 2543381 - RNA, 19 nt, Homo sapiens
  misc_RNA (1)...(19): siRNA sense strand
aggagaagaucuuugccau

SEQ ID NO: 2543382 - RNA, 19 nt, Homo sapiens
  misc_RNA (1)...(19): siRNA sense strand
ucgaauuggagauggcaca

SEQ ID NO: 2543383 - RNA, 19 nt, Homo sapiens
  misc_RNA (1)...(19): siRNA sense strand
gcugaaauuacguucgaca

SEQ ID NO: 2543384 - RNA, 19 nt, Homo sapiens
  misc_RNA (1)...(19): siRNA sense strand
guuucaacuuggacacaga

SEQ ID NO: 2543385 - RNA, 19 nt, Homo sapiens
  misc_RNA (1)...(19): siRNA sense strand
gugauaagccaguuccaga

SEQ ID NO: 2543386 - RNA, 19 nt, Homo sapiens
  misc_RNA (1)...(19): siRNA sense strand
cgagcuggcccucuggaaa

SEQ ID NO: 2543387 - RNA, 19 nt, Homo sapiens
  misc_RNA (1)...(19): siRNA sense strand
ggggaagacuccuacggaa

SEQ ID NO: 2543388 - RNA, 19 nt, Homo sapiens
  misc_RNA (1)...(19): siRNA sense strand
caaugugagcagugagaac

SEQ ID NO: 2543389 - RNA, 19 nt, Homo sapiens
  misc_RNA (1)...(19): siRNA sense strand
uggaggaggcaaauggaca

SEQ ID NO: 2543390 - RNA, 19 nt, Homo sapiens
  misc_RNA (1)...(19): siRNA sense strand
gcccaagacaggagcagga

SEQ ID NO: 2543391 - RNA, 19 nt, Homo sapiens
  misc_RNA (1)...(19): siRNA sense strand
gggacucuuaccuggguua

SEQ ID NO: 2543392 - RNA, 19 nt, Homo sapiens
  misc_RNA (1)...(19): siRNA sense strand
ccaaggcuguccugggaga

SEQ ID NO: 2543393 - RNA, 19 nt, Homo sapiens
  misc_RNA (1)...(19): siRNA sense strand
guucacagccuuagcaacu

SEQ ID NO: 2543394 - RNA, 19 nt, Homo sapiens
  misc_RNA (1)...(19): siRNA sense strand
gggaagaaagaaggcgaca

SEQ ID NO: 2543395 - RNA, 19 nt, Homo sapiens
  misc_RNA (1)...(19): siRNA sense strand
cagcaggcaucauccgcua

SEQ ID NO: 2543396 - RNA, 19 nt, Homo sapiens
  misc_RNA (1)...(19): siRNA sense strand
ggauggauguggaggucuc

SEQ ID NO: 2543397 - RNA, 19 nt, Homo sapiens
  misc_RNA (1)...(19): siRNA sense strand
ggguuuacauacacggcca

SEQ ID NO: 2543398 - RNA, 19 nt, Homo sapiens
  misc_RNA (1)...(19): siRNA sense strand
aaaaccaacugaaggagaa

SEQ ID NO: 2543399 - RNA, 19 nt, Homo sapiens
  misc_RNA (1)...(19): siRNA sense strand
gaccauaucugccaggaca

SEQ ID NO: 2543400 - RNA, 19 nt, Homo sapiens
  misc_RNA (1)...(19): siRNA sense strand
agaagaaggugucggucgu

SEQ ID NO: 2543401 - RNA, 19 nt, Homo sapiens
  misc_RNA (1)...(19): siRNA sense strand
ugaaauuacguucgacaca

SEQ ID NO: 2543402 - RNA, 19 nt, Homo sapiens
  misc_RNA (1)...(19): siRNA sense strand
agaaguacaagguccacaa

SEQ ID NO: 2543403 - RNA, 19 nt, Homo sapiens
  misc_RNA (1)...(19): siRNA sense strand
ucuucaagcgucaguacaa

SEQ ID NO: 2543404 - RNA, 19 nt, Homo sapiens
  misc_RNA (1)...(19): siRNA sense strand
cggugaaguaugcugucua

SEQ ID NO: 2543405 - RNA, 19 nt, Homo sapiens
  misc_RNA (1)...(19): siRNA sense strand
ggaugaaggccgaagucac

SEQ ID NO: 2543406 - RNA, 19 nt, Homo sapiens
  misc_RNA (1)...(19): siRNA sense strand
cagaucaccuucuuggcua

SEQ ID NO: 2543407 - RNA, 19 nt, Homo sapiens
  misc_RNA (1)...(19): siRNA sense strand
acuucacuuucgaggaauu

SEQ ID NO: 2543408 - RNA, 19 nt, Homo sapiens
  misc_RNA (1)...(19): siRNA sense strand
ccagaaaacgggacacaga

SEQ ID NO: 2543409 - RNA, 19 nt, Homo sapiens
  misc_RNA (1)...(19): siRNA sense strand
auguagaccaagaggaaau

SEQ ID NO: 2543410 - RNA, 19 nt, Homo sapiens
  misc_RNA (1)...(19): siRNA sense strand
agguaugguaagagaguga

SEQ ID NO: 2543411 - RNA, 19 nt, Homo sapiens
  misc_RNA (1)...(19): siRNA sense strand
uggaacucccauagagaaa

SEQ ID NO: 2543412 - RNA, 19 nt, Homo sapiens
  misc_RNA (1)...(19): siRNA sense strand
gcagagaaggacagcucaa

SEQ ID NO: 2543413 - RNA, 19 nt, Homo sapiens
  misc_RNA (1)...(19): siRNA sense strand
gcagagaaauuaauggacu

SEQ ID NO: 2543414 - RNA, 19 nt, Homo sapiens
  misc_RNA (1)...(19): siRNA sense strand
uggucaggucaaagaguua

SEQ ID NO: 2543415 - RNA, 19 nt, Homo sapiens
  misc_RNA (1)...(19): siRNA sense strand
gagaagaacucaaagagcu

SEQ ID NO: 2543416 - RNA, 19 nt, Homo sapiens
  misc_RNA (1)...(19): siRNA sense strand
ucaaagaguuaguggaagc

SEQ ID NO: 2543417 - RNA, 19 nt, Homo sapiens
  misc_RNA (1)...(19): siRNA sense strand
ccuuggaccugauggcaga

SEQ ID NO: 2543418 - RNA, 19 nt, Homo sapiens
  misc_RNA (1)...(19): siRNA sense strand
agaaauuagacggauguaa

SEQ ID NO: 2543419 - RNA, 19 nt, Homo sapiens
  misc_RNA (1)...(19): siRNA sense strand
aagaguuaguggaagcaga

SEQ ID NO: 2543420 - RNA, 19 nt, Homo sapiens
  misc_RNA (1)...(19): siRNA sense strand
cagaagaucgagaagcuca

SEQ ID NO: 2543421 - RNA, 19 nt, Homo sapiens
  misc_RNA (1)...(19): siRNA sense strand
cgacgauauuugggaagau

SEQ ID NO: 2543422 - RNA, 19 nt, Homo sapiens
  misc_RNA (1)...(19): siRNA sense strand
uaguggaagcagaguuauu

SEQ ID NO: 2543423 - RNA, 19 nt, Homo sapiens
  misc_RNA (1)...(19): siRNA sense strand
ugcaagcggaugaggcuaa

SEQ ID NO: 2543424 - RNA, 19 nt, Homo sapiens
  misc_RNA (1)...(19): siRNA sense strand
aggaaaucuuggacuuuga

SEQ ID NO: 2543425 - RNA, 19 nt, Homo sapiens
  misc_RNA (1)...(19): siRNA sense strand
guaugguaagagagugauu

SEQ ID NO: 2543426 - RNA, 19 nt, Homo sapiens
  misc_RNA (1)...(19): siRNA sense strand
ccaagaggaaauuguggau

SEQ ID NO: 2543427 - RNA, 19 nt, Homo sapiens
  misc_RNA (1)...(19): siRNA sense strand
aggugacugcagagaaauu

SEQ ID NO: 2543428 - RNA, 19 nt, Homo sapiens
  misc_RNA (1)...(19): siRNA sense strand
uagagaaauuagacggaug

SEQ ID NO: 2543429 - RNA, 19 nt, Homo sapiens
  misc_RNA (1)...(19): siRNA sense strand
aaucuuggacuuugaucaa

SEQ ID NO: 2543430 - RNA, 19 nt, Homo sapiens
  misc_RNA (1)...(19): siRNA sense strand
uggacuuacgaaaugaaua

SEQ ID NO: 2543431 - RNA, 19 nt, Homo sapiens
  misc_RNA (1)...(19): siRNA sense strand
gaaaguaaggaguggcuag

SEQ ID NO: 2543432 - RNA, 19 nt, Homo sapiens
  misc_RNA (1)...(19): siRNA sense strand
gucagaagaucgagaagcu

SEQ ID NO: 2543433 - RNA, 19 nt, Homo sapiens
  misc_RNA (1)...(19): siRNA sense strand
uggaucugauguagaccaa

SEQ ID NO: 2543434 - RNA, 19 nt, Homo sapiens
  misc_RNA (1)...(19): siRNA sense strand
gcggaugaggcuaauaaaa

SEQ ID NO: 2543435 - RNA, 19 nt, Homo sapiens
  misc_RNA (1)...(19): siRNA sense strand
uggaucaaagguaugguaa

SEQ ID NO: 2543436 - RNA, 19 nt, Homo sapiens
  misc_RNA (1)...(19): siRNA sense strand
ggaucaaagguaugguaag

SEQ ID NO: 2543437 - RNA, 19 nt, Homo sapiens
  misc_RNA (1)...(19): siRNA sense strand
auguagaccaagaggaaau

SEQ ID NO: 2543438 - RNA, 19 nt, Homo sapiens
  misc_RNA (1)...(19): siRNA sense strand
agguaugguaagagaguga

SEQ ID NO: 2543439 - RNA, 19 nt, Homo sapiens
  misc_RNA (1)...(19): siRNA sense strand
uggaacucccauagagaaa

SEQ ID NO: 2543440 - RNA, 19 nt, Homo sapiens
  misc_RNA (1)...(19): siRNA sense strand
gcagagaaggacagcucaa

SEQ ID NO: 2543441 - RNA, 19 nt, Homo sapiens
  misc_RNA (1)...(19): siRNA sense strand
gcagagaaauuaauggacu

SEQ ID NO: 2543442 - RNA, 19 nt, Homo sapiens
  misc_RNA (1)...(19): siRNA sense strand
uggucaggucaaagaguua

SEQ ID NO: 2543443 - RNA, 19 nt, Homo sapiens
  misc_RNA (1)...(19): siRNA sense strand
gagaagaacucaaagagcu

SEQ ID NO: 2543444 - RNA, 19 nt, Homo sapiens
  misc_RNA (1)...(19): siRNA sense strand
ucaaagaguuaguggaagc

SEQ ID NO: 2543445 - RNA, 19 nt, Homo sapiens
  misc_RNA (1)...(19): siRNA sense strand
ccuuggaccugauggcaga

SEQ ID NO: 2543446 - RNA, 19 nt, Homo sapiens
  misc_RNA (1)...(19): siRNA sense strand
agaaauuagacggauguaa

SEQ ID NO: 2543447 - RNA, 19 nt, Homo sapiens
  misc_RNA (1)...(19): siRNA sense strand
aagaguuaguggaagcaga

SEQ ID NO: 2543448 - RNA, 19 nt, Homo sapiens
  misc_RNA (1)...(19): siRNA sense strand
cgacgauauuugggaagau

SEQ ID NO: 2543449 - RNA, 19 nt, Homo sapiens
  misc_RNA (1)...(19): siRNA sense strand
uaguggaagcagaguuauu

SEQ ID NO: 2543450 - RNA, 19 nt, Homo sapiens
  misc_RNA (1)...(19): siRNA sense strand
ugcaagcggaugaggcuaa

SEQ ID NO: 2543451 - RNA, 19 nt, Homo sapiens
  misc_RNA (1)...(19): siRNA sense strand
aggaaaucuuggacuuuga

SEQ ID NO: 2543452 - RNA, 19 nt, Homo sapiens
  misc_RNA (1)...(19): siRNA sense strand
guaugguaagagagugauu

SEQ ID NO: 2543453 - RNA, 19 nt, Homo sapiens
  misc_RNA (1)...(19): siRNA sense strand
ccaagaggaaauuguggau

SEQ ID NO: 2543454 - RNA, 19 nt, Homo sapiens
  misc_RNA (1)...(19): siRNA sense strand
aggugacugcagagaaauu

SEQ ID NO: 2543455 - RNA, 19 nt, Homo sapiens
  misc_RNA (1)...(19): siRNA sense strand
uagagaaauuagacggaug

SEQ ID NO: 2543456 - RNA, 19 nt, Homo sapiens
  misc_RNA (1)...(19): siRNA sense strand
aaucuuggacuuugaucaa

SEQ ID NO: 2543457 - RNA, 19 nt, Homo sapiens
  misc_RNA (1)...(19): siRNA sense strand
uggacuuacgaaaugaaua

SEQ ID NO: 2543458 - RNA, 19 nt, Homo sapiens
  misc_RNA (1)...(19): siRNA sense strand
gaaaguaaggaguggcuag

SEQ ID NO: 2543459 - RNA, 19 nt, Homo sapiens
  misc_RNA (1)...(19): siRNA sense strand
uggaucugauguagaccaa

SEQ ID NO: 2543460 - RNA, 19 nt, Homo sapiens
  misc_RNA (1)...(19): siRNA sense strand
gcggaugaggcuaauaaaa

SEQ ID NO: 2543461 - RNA, 19 nt, Homo sapiens
  misc_RNA (1)...(19): siRNA sense strand
uggaucaaagguaugguaa

SEQ ID NO: 2543462 - RNA, 19 nt, Homo sapiens
  misc_RNA (1)...(19): siRNA sense strand
ggaucaaagguaugguaag

SEQ ID NO: 2543463 - RNA, 19 nt, Homo sapiens
  misc_RNA (1)...(19): siRNA sense strand
auguagaccaagaggaaau

SEQ ID NO: 2543464 - RNA, 19 nt, Homo sapiens
  misc_RNA (1)...(19): siRNA sense strand
agguaugguaagagaguga

SEQ ID NO: 2543465 - RNA, 19 nt, Homo sapiens
  misc_RNA (1)...(19): siRNA sense strand
uggaacucccauagagaaa

SEQ ID NO: 2543466 - RNA, 19 nt, Homo sapiens
  misc_RNA (1)...(19): siRNA sense strand
gcagagaaggacagcucaa

SEQ ID NO: 2543467 - RNA, 19 nt, Homo sapiens
  misc_RNA (1)...(19): siRNA sense strand
gcagagaaauuaauggacu

SEQ ID NO: 2543468 - RNA, 19 nt, Homo sapiens
  misc_RNA (1)...(19): siRNA sense strand
uggucaggucaaagaguua

SEQ ID NO: 2543469 - RNA, 19 nt, Homo sapiens
  misc_RNA (1)...(19): siRNA sense strand
gagaagaacucaaagagcu

SEQ ID NO: 2543470 - RNA, 19 nt, Homo sapiens
  misc_RNA (1)...(19): siRNA sense strand
ucaaagaguuaguggaagc

SEQ ID NO: 2543471 - RNA, 19 nt, Homo sapiens
  misc_RNA (1)...(19): siRNA sense strand
ccuuggaccugauggcaga

SEQ ID NO: 2543472 - RNA, 19 nt, Homo sapiens
  misc_RNA (1)...(19): siRNA sense strand
agaaauuagacggauguaa

SEQ ID NO: 2543473 - RNA, 19 nt, Homo sapiens
  misc_RNA (1)...(19): siRNA sense strand
aagaguuaguggaagcaga

SEQ ID NO: 2543474 - RNA, 19 nt, Homo sapiens
  misc_RNA (1)...(19): siRNA sense strand
cagaagaucgagaagcuca

SEQ ID NO: 2543475 - RNA, 19 nt, Homo sapiens
  misc_RNA (1)...(19): siRNA sense strand
cgacgauauuugggaagau

SEQ ID NO: 2543476 - RNA, 19 nt, Homo sapiens
  misc_RNA (1)...(19): siRNA sense strand
uaguggaagcagaguuauu

SEQ ID NO: 2543477 - RNA, 19 nt, Homo sapiens
  misc_RNA (1)...(19): siRNA sense strand
ugcaagcggaugaggcuaa

SEQ ID NO: 2543478 - RNA, 19 nt, Homo sapiens
  misc_RNA (1)...(19): siRNA sense strand
aggaaaucuuggacuuuga

SEQ ID NO: 2543479 - RNA, 19 nt, Homo sapiens
  misc_RNA (1)...(19): siRNA sense strand
guaugguaagagagugauu

SEQ ID NO: 2543480 - RNA, 19 nt, Homo sapiens
  misc_RNA (1)...(19): siRNA sense strand
ccaagaggaaauuguggau

SEQ ID NO: 2543481 - RNA, 19 nt, Homo sapiens
  misc_RNA (1)...(19): siRNA sense strand
aggugacugcagagaaauu

SEQ ID NO: 2543482 - RNA, 19 nt, Homo sapiens
  misc_RNA (1)...(19): siRNA sense strand
uagagaaauuagacggaug

SEQ ID NO: 2543483 - RNA, 19 nt, Homo sapiens
  misc_RNA (1)...(19): siRNA sense strand
aaucuuggacuuugaucaa

SEQ ID NO: 2543484 - RNA, 19 nt, Homo sapiens
  misc_RNA (1)...(19): siRNA sense strand
uggacuuacgaaaugaaua

SEQ ID NO: 2543485 - RNA, 19 nt, Homo sapiens
  misc_RNA (1)...(19): siRNA sense strand
gaaaguaaggaguggcuag

SEQ ID NO: 2543486 - RNA, 19 nt, Homo sapiens
  misc_RNA (1)...(19): siRNA sense strand
gucagaagaucgagaagcu

SEQ ID NO: 2543487 - RNA, 19 nt, Homo sapiens
  misc_RNA (1)...(19): siRNA sense strand
uggaucugauguagaccaa

SEQ ID NO: 2543488 - RNA, 19 nt, Homo sapiens
  misc_RNA (1)...(19): siRNA sense strand
gcggaugaggcuaauaaaa

SEQ ID NO: 2543489 - RNA, 19 nt, Homo sapiens
  misc_RNA (1)...(19): siRNA sense strand
uggaucaaagguaugguaa

SEQ ID NO: 2543490 - RNA, 19 nt, Homo sapiens
  misc_RNA (1)...(19): siRNA sense strand
ggaucaaagguaugguaag

SEQ ID NO: 2543491 - RNA, 19 nt, Homo sapiens
  misc_RNA (1)...(19): siRNA sense strand
auguagaccaagaggaaau

SEQ ID NO: 2543492 - RNA, 19 nt, Homo sapiens
  misc_RNA (1)...(19): siRNA sense strand
agguaugguaagagaguga

SEQ ID NO: 2543493 - RNA, 19 nt, Homo sapiens
  misc_RNA (1)...(19): siRNA sense strand
uggaacucccauagagaaa

SEQ ID NO: 2543494 - RNA, 19 nt, Homo sapiens
  misc_RNA (1)...(19): siRNA sense strand
gcagagaaggacagcucaa

SEQ ID NO: 2543495 - RNA, 19 nt, Homo sapiens
  misc_RNA (1)...(19): siRNA sense strand
gcagagaaauuaauggacu

SEQ ID NO: 2543496 - RNA, 19 nt, Homo sapiens
  misc_RNA (1)...(19): siRNA sense strand
uggucaggucaaagaguua

SEQ ID NO: 2543497 - RNA, 19 nt, Homo sapiens
  misc_RNA (1)...(19): siRNA sense strand
gagaagaacucaaagagcu

SEQ ID NO: 2543498 - RNA, 19 nt, Homo sapiens
  misc_RNA (1)...(19): siRNA sense strand
ucaaagaguuaguggaagc

SEQ ID NO: 2543499 - RNA, 19 nt, Homo sapiens
  misc_RNA (1)...(19): siRNA sense strand
ccuuggaccugauggcaga

SEQ ID NO: 2543500 - RNA, 19 nt, Homo sapiens
  misc_RNA (1)...(19): siRNA sense strand
agaaauuagacggauguaa

SEQ ID NO: 2543501 - RNA, 19 nt, Homo sapiens
  misc_RNA (1)...(19): siRNA sense strand
aagaguuaguggaagcaga

SEQ ID NO: 2543502 - RNA, 19 nt, Homo sapiens
  misc_RNA (1)...(19): siRNA sense strand
cagaagaucgagaagcuca

SEQ ID NO: 2543503 - RNA, 19 nt, Homo sapiens
  misc_RNA (1)...(19): siRNA sense strand
cgacgauauuugggaagau

SEQ ID NO: 2543504 - RNA, 19 nt, Homo sapiens
  misc_RNA (1)...(19): siRNA sense strand
uaguggaagcagaguuauu

SEQ ID NO: 2543505 - RNA, 19 nt, Homo sapiens
  misc_RNA (1)...(19): siRNA sense strand
ugcaagcggaugaggcuaa

SEQ ID NO: 2543506 - RNA, 19 nt, Homo sapiens
  misc_RNA (1)...(19): siRNA sense strand
aggaaaucuuggacuuuga

SEQ ID NO: 2543507 - RNA, 19 nt, Homo sapiens
  misc_RNA (1)...(19): siRNA sense strand
guaugguaagagagugauu

SEQ ID NO: 2543508 - RNA, 19 nt, Homo sapiens
  misc_RNA (1)...(19): siRNA sense strand
ccaagaggaaauuguggau

SEQ ID NO: 2543509 - RNA, 19 nt, Homo sapiens
  misc_RNA (1)...(19): siRNA sense strand
aggugacugcagagaaauu

SEQ ID NO: 2543510 - RNA, 19 nt, Homo sapiens
  misc_RNA (1)...(19): siRNA sense strand
uagagaaauuagacggaug

SEQ ID NO: 2543511 - RNA, 19 nt, Homo sapiens
  misc_RNA (1)...(19): siRNA sense strand
aaucuuggacuuugaucaa

SEQ ID NO: 2543512 - RNA, 19 nt, Homo sapiens
  misc_RNA (1)...(19): siRNA sense strand
uggacuuacgaaaugaaua

SEQ ID NO: 2543513 - RNA, 19 nt, Homo sapiens
  misc_RNA (1)...(19): siRNA sense strand
gaaaguaaggaguggcuag

SEQ ID NO: 2543514 - RNA, 19 nt, Homo sapiens
  misc_RNA (1)...(19): siRNA sense strand
gucagaagaucgagaagcu

SEQ ID NO: 2543515 - RNA, 19 nt, Homo sapiens
  misc_RNA (1)...(19): siRNA sense strand
uggaucugauguagaccaa

SEQ ID NO: 2543516 - RNA, 19 nt, Homo sapiens
  misc_RNA (1)...(19): siRNA sense strand
gcggaugaggcuaauaaaa

SEQ ID NO: 2543517 - RNA, 19 nt, Homo sapiens
  misc_RNA (1)...(19): siRNA sense strand
uggaucaaagguaugguaa

SEQ ID NO: 2543518 - RNA, 19 nt, Homo sapiens
  misc_RNA (1)...(19): siRNA sense strand
ggaucaaagguaugguaag

SEQ ID NO: 2543519 - RNA, 19 nt, Homo sapiens
  misc_RNA (1)...(19): siRNA sense strand
auguagaccaagaggaaau

SEQ ID NO: 2543520 - RNA, 19 nt, Homo sapiens
  misc_RNA (1)...(19): siRNA sense strand
agguaugguaagagaguga

SEQ ID NO: 2543521 - RNA, 19 nt, Homo sapiens
  misc_RNA (1)...(19): siRNA sense strand
uggaacucccauagagaaa

SEQ ID NO: 2543522 - RNA, 19 nt, Homo sapiens
  misc_RNA (1)...(19): siRNA sense strand
gcagagaaggacagcucaa

SEQ ID NO: 2543523 - RNA, 19 nt, Homo sapiens
  misc_RNA (1)...(19): siRNA sense strand
gcagagaaauuaauggacu

SEQ ID NO: 2543524 - RNA, 19 nt, Homo sapiens
  misc_RNA (1)...(19): siRNA sense strand
uggucaggucaaagaguua

SEQ ID NO: 2543525 - RNA, 19 nt, Homo sapiens
  misc_RNA (1)...(19): siRNA sense strand
gagaagaacucaaagagcu

SEQ ID NO: 2543526 - RNA, 19 nt, Homo sapiens
  misc_RNA (1)...(19): siRNA sense strand
ucaaagaguuaguggaagc

SEQ ID NO: 2543527 - RNA, 19 nt, Homo sapiens
  misc_RNA (1)...(19): siRNA sense strand
ccuuggaccugauggcaga

SEQ ID NO: 2543528 - RNA, 19 nt, Homo sapiens
  misc_RNA (1)...(19): siRNA sense strand
agaaauuagacggauguaa

SEQ ID NO: 2543529 - RNA, 19 nt, Homo sapiens
  misc_RNA (1)...(19): siRNA sense strand
aagaguuaguggaagcaga

SEQ ID NO: 2543530 - RNA, 19 nt, Homo sapiens
  misc_RNA (1)...(19): siRNA sense strand
cagaagaucgagaagcuca

SEQ ID NO: 2543531 - RNA, 19 nt, Homo sapiens
  misc_RNA (1)...(19): siRNA sense strand
cgacgauauuugggaagau

SEQ ID NO: 2543532 - RNA, 19 nt, Homo sapiens
  misc_RNA (1)...(19): siRNA sense strand
uaguggaagcagaguuauu

SEQ ID NO: 2543533 - RNA, 19 nt, Homo sapiens
  misc_RNA (1)...(19): siRNA sense strand
ugcaagcggaugaggcuaa

SEQ ID NO: 2543534 - RNA, 19 nt, Homo sapiens
  misc_RNA (1)...(19): siRNA sense strand
aggaaaucuuggacuuuga

SEQ ID NO: 2543535 - RNA, 19 nt, Homo sapiens
  misc_RNA (1)...(19): siRNA sense strand
guaugguaagagagugauu

SEQ ID NO: 2543536 - RNA, 19 nt, Homo sapiens
  misc_RNA (1)...(19): siRNA sense strand
ccaagaggaaauuguggau

SEQ ID NO: 2543537 - RNA, 19 nt, Homo sapiens
  misc_RNA (1)...(19): siRNA sense strand
aggugacugcagagaaauu

SEQ ID NO: 2543538 - RNA, 19 nt, Homo sapiens
  misc_RNA (1)...(19): siRNA sense strand
uagagaaauuagacggaug

SEQ ID NO: 2543539 - RNA, 19 nt, Homo sapiens
  misc_RNA (1)...(19): siRNA sense strand
aaucuuggacuuugaucaa

SEQ ID NO: 2543540 - RNA, 19 nt, Homo sapiens
  misc_RNA (1)...(19): siRNA sense strand
uggacuuacgaaaugaaua

SEQ ID NO: 2543541 - RNA, 19 nt, Homo sapiens
  misc_RNA (1)...(19): siRNA sense strand
gaaaguaaggaguggcuag

SEQ ID NO: 2543542 - RNA, 19 nt, Homo sapiens
  misc_RNA (1)...(19): siRNA sense strand
gucagaagaucgagaagcu

SEQ ID NO: 2543543 - RNA, 19 nt, Homo sapiens
  misc_RNA (1)...(19): siRNA sense strand
uggaucugauguagaccaa

SEQ ID NO: 2543544 - RNA, 19 nt, Homo sapiens
  misc_RNA (1)...(19): siRNA sense strand
gcggaugaggcuaauaaaa

SEQ ID NO: 2543545 - RNA, 19 nt, Homo sapiens
  misc_RNA (1)...(19): siRNA sense strand
uggaucaaagguaugguaa

SEQ ID NO: 2543546 - RNA, 19 nt, Homo sapiens
  misc_RNA (1)...(19): siRNA sense strand
ggaucaaagguaugguaag

SEQ ID NO: 2543547 - RNA, 19 nt, Homo sapiens
  misc_RNA (1)...(19): siRNA sense strand
acauagaacaggugccaca

SEQ ID NO: 2543548 - RNA, 19 nt, Homo sapiens
  misc_RNA (1)...(19): siRNA sense strand
cgacauacguccaggcccu

SEQ ID NO: 2543549 - RNA, 19 nt, Homo sapiens
  misc_RNA (1)...(19): siRNA sense strand
gcuucauucccaagaacua

SEQ ID NO: 2543550 - RNA, 19 nt, Homo sapiens
  misc_RNA (1)...(19): siRNA sense strand
acgaagaaugugaucagaa

SEQ ID NO: 2543551 - RNA, 19 nt, Homo sapiens
  misc_RNA (1)...(19): siRNA sense strand
guggauuaucacagaucua

SEQ ID NO: 2543552 - RNA, 19 nt, Homo sapiens
  misc_RNA (1)...(19): siRNA sense strand
acauagaaaugaaaccaca

SEQ ID NO: 2543553 - RNA, 19 nt, Homo sapiens
  misc_RNA (1)...(19): siRNA sense strand
cagauauuccugcgggaca

SEQ ID NO: 2543554 - RNA, 19 nt, Homo sapiens
  misc_RNA (1)...(19): siRNA sense strand
ggcagagcuuaauggaaaa

SEQ ID NO: 2543555 - RNA, 19 nt, Homo sapiens
  misc_RNA (1)...(19): siRNA sense strand
cuucaaagcuacugcagac

SEQ ID NO: 2543556 - RNA, 19 nt, Homo sapiens
  misc_RNA (1)...(19): siRNA sense strand
gggacauccucaagguuuu

SEQ ID NO: 2543557 - RNA, 19 nt, Homo sapiens
  misc_RNA (1)...(19): siRNA sense strand
ggacauagaacaggugcca

SEQ ID NO: 2543558 - RNA, 19 nt, Homo sapiens
  misc_RNA (1)...(19): siRNA sense strand
acuucaaggugcuccgaga

SEQ ID NO: 2543559 - RNA, 19 nt, Homo sapiens
  misc_RNA (1)...(19): siRNA sense strand
acauagaacaggugccaca

SEQ ID NO: 2543560 - RNA, 19 nt, Homo sapiens
  misc_RNA (1)...(19): siRNA sense strand
cgacauacguccaggcccu

SEQ ID NO: 2543561 - RNA, 19 nt, Homo sapiens
  misc_RNA (1)...(19): siRNA sense strand
gcuucauucccaagaacua

SEQ ID NO: 2543562 - RNA, 19 nt, Homo sapiens
  misc_RNA (1)...(19): siRNA sense strand
acgaagaaugugaucagaa

SEQ ID NO: 2543563 - RNA, 19 nt, Homo sapiens
  misc_RNA (1)...(19): siRNA sense strand
guggauuaucacagaucua

SEQ ID NO: 2543564 - RNA, 19 nt, Homo sapiens
  misc_RNA (1)...(19): siRNA sense strand
acauagaaaugaaaccaca

SEQ ID NO: 2543565 - RNA, 19 nt, Homo sapiens
  misc_RNA (1)...(19): siRNA sense strand
cagauauuccugcgggaca

SEQ ID NO: 2543566 - RNA, 19 nt, Homo sapiens
  misc_RNA (1)...(19): siRNA sense strand
ggcagagcuuaauggaaaa

SEQ ID NO: 2543567 - RNA, 19 nt, Homo sapiens
  misc_RNA (1)...(19): siRNA sense strand
cuucaaagcuacugcagac

SEQ ID NO: 2543568 - RNA, 19 nt, Homo sapiens
  misc_RNA (1)...(19): siRNA sense strand
gggacauccucaagguuuu

SEQ ID NO: 2543569 - RNA, 19 nt, Homo sapiens
  misc_RNA (1)...(19): siRNA sense strand
ggacauagaacaggugcca

SEQ ID NO: 2543570 - RNA, 19 nt, Homo sapiens
  misc_RNA (1)...(19): siRNA sense strand
acuucaaggugcuccgaga

SEQ ID NO: 2543571 - RNA, 19 nt, Homo sapiens
  misc_RNA (1)...(19): siRNA sense strand
ggaagcaaaucaagugaaa

SEQ ID NO: 2543572 - RNA, 19 nt, Homo sapiens
  misc_RNA (1)...(19): siRNA sense strand
aaguaaaagaccaggaaaa

SEQ ID NO: 2543573 - RNA, 19 nt, Homo sapiens
  misc_RNA (1)...(19): siRNA sense strand
agacagaagagcuggaaaa

SEQ ID NO: 2543574 - RNA, 19 nt, Homo sapiens
  misc_RNA (1)...(19): siRNA sense strand
caauagaaacaacaggaaa

SEQ ID NO: 2543575 - RNA, 19 nt, Homo sapiens
  misc_RNA (1)...(19): siRNA sense strand
augaauugcaugagaaaca

SEQ ID NO: 2543576 - RNA, 19 nt, Homo sapiens
  misc_RNA (1)...(19): siRNA sense strand
agaugcaaauggagagaga

SEQ ID NO: 2543577 - RNA, 19 nt, Homo sapiens
  misc_RNA (1)...(19): siRNA sense strand
cuucagaacagacuagaaa

SEQ ID NO: 2543578 - RNA, 19 nt, Homo sapiens
  misc_RNA (1)...(19): siRNA sense strand
cuaaauaugaaguggaacu

SEQ ID NO: 2543579 - RNA, 19 nt, Homo sapiens
  misc_RNA (1)...(19): siRNA sense strand
agaaaagaggauacagaaa

SEQ ID NO: 2543580 - RNA, 19 nt, Homo sapiens
  misc_RNA (1)...(19): siRNA sense strand
agaacagacuagaaagcuu

SEQ ID NO: 2543581 - RNA, 19 nt, Homo sapiens
  misc_RNA (1)...(19): siRNA sense strand
gcaguuaauaagugaacau

SEQ ID NO: 2543582 - RNA, 19 nt, Homo sapiens
  misc_RNA (1)...(19): siRNA sense strand
aggauugagcaguuaauaa

SEQ ID NO: 2543583 - RNA, 19 nt, Homo sapiens
  misc_RNA (1)...(19): siRNA sense strand
aagaggauacagaaaguaa

SEQ ID NO: 2543584 - RNA, 19 nt, Homo sapiens
  misc_RNA (1)...(19): siRNA sense strand
cccaggaggauuuaagaaa

SEQ ID NO: 2543585 - RNA, 19 nt, Homo sapiens
  misc_RNA (1)...(19): siRNA sense strand
aagcaaaucaagugaaacu

SEQ ID NO: 2543586 - RNA, 19 nt, Homo sapiens
  misc_RNA (1)...(19): siRNA sense strand
guagagagccagucacauu

SEQ ID NO: 2543587 - RNA, 19 nt, Homo sapiens
  misc_RNA (1)...(19): siRNA sense strand
ccaaaugccuuaaagagga

SEQ ID NO: 2543588 - RNA, 19 nt, Homo sapiens
  misc_RNA (1)...(19): siRNA sense strand
cagaagagcuggaaaagca

SEQ ID NO: 2543589 - RNA, 19 nt, Homo sapiens
  misc_RNA (1)...(19): siRNA sense strand
agaucagacaugugccaua

SEQ ID NO: 2543590 - RNA, 19 nt, Homo sapiens
  misc_RNA (1)...(19): siRNA sense strand
ccaauagaaacaacaggaa

SEQ ID NO: 2543591 - RNA, 19 nt, Homo sapiens
  misc_RNA (1)...(19): siRNA sense strand
aacaggacuuacugagaaa

SEQ ID NO: 2543592 - RNA, 19 nt, Homo sapiens
  misc_RNA (1)...(19): siRNA sense strand
uagaagauuuacagcugaa

SEQ ID NO: 2543593 - RNA, 19 nt, Homo sapiens
  misc_RNA (1)...(19): siRNA sense strand
aagugaaacucuuaguaga

SEQ ID NO: 2543594 - RNA, 19 nt, Homo sapiens
  misc_RNA (1)...(19): siRNA sense strand
gaucagaaaucaagaaaag

SEQ ID NO: 2543595 - RNA, 19 nt, Homo sapiens
  misc_RNA (1)...(19): siRNA sense strand
uguuaaagauucacagucu

SEQ ID NO: 2543596 - RNA, 19 nt, Homo sapiens
  misc_RNA (1)...(19): siRNA sense strand
agagcaagcaagaaaccaa

SEQ ID NO: 2543597 - RNA, 19 nt, Homo sapiens
  misc_RNA (1)...(19): siRNA sense strand
gaaucaaaagcuugggaau

SEQ ID NO: 2543598 - RNA, 19 nt, Homo sapiens
  misc_RNA (1)...(19): siRNA sense strand
ggacagagcgugaucaauc

SEQ ID NO: 2543599 - RNA, 19 nt, Homo sapiens
  misc_RNA (1)...(19): siRNA sense strand
gcaggaagcuucagaacag

SEQ ID NO: 2543600 - RNA, 19 nt, Homo sapiens
  misc_RNA (1)...(19): siRNA sense strand
uguaugaagacaagacaga

SEQ ID NO: 2543601 - RNA, 19 nt, Homo sapiens
  misc_RNA (1)...(19): siRNA sense strand
uucaagagcaagcaagaaa

SEQ ID NO: 2543602 - RNA, 19 nt, Homo sapiens
  misc_RNA (1)...(19): siRNA sense strand
gugaacaugaaguugaaau

SEQ ID NO: 2543603 - RNA, 19 nt, Homo sapiens
  misc_RNA (1)...(19): siRNA sense strand
ccggacagagcgugaucaa

SEQ ID NO: 2543604 - RNA, 19 nt, Homo sapiens
  misc_RNA (1)...(19): siRNA sense strand
agaggauacagaaaguaaa

SEQ ID NO: 2543605 - RNA, 19 nt, Homo sapiens
  misc_RNA (1)...(19): siRNA sense strand
gaggauacagaaaguaaaa

SEQ ID NO: 2543606 - RNA, 19 nt, Homo sapiens
  misc_RNA (1)...(19): siRNA sense strand
agauuuacagagaagacua

SEQ ID NO: 2543607 - RNA, 19 nt, Homo sapiens
  misc_RNA (1)...(19): siRNA sense strand
aguugaaauaacaggacuu

SEQ ID NO: 2543608 - RNA, 19 nt, Homo sapiens
  misc_RNA (1)...(19): siRNA sense strand
cugaauuaagggaagccaa

SEQ ID NO: 2543609 - RNA, 19 nt, Homo sapiens
  misc_RNA (1)...(19): siRNA sense strand
aagauuuacagcugaagaa

SEQ ID NO: 2543610 - RNA, 19 nt, Homo sapiens
  misc_RNA (1)...(19): siRNA sense strand
caagcaaugucuucaauga

SEQ ID NO: 2543611 - RNA, 19 nt, Homo sapiens
  misc_RNA (1)...(19): siRNA sense strand
ggauauuuccaguagagga

SEQ ID NO: 2543612 - RNA, 19 nt, Homo sapiens
  misc_RNA (1)...(19): siRNA sense strand
gauauuuccaguagaggau

SEQ ID NO: 2543613 - RNA, 19 nt, Homo sapiens
  misc_RNA (1)...(19): siRNA sense strand
caggagaugcaaauggaga

SEQ ID NO: 2543614 - RNA, 19 nt, Homo sapiens
  misc_RNA (1)...(19): siRNA sense strand
cauucaagagcaagcaaga

SEQ ID NO: 2543615 - RNA, 19 nt, Homo sapiens
  misc_RNA (1)...(19): siRNA sense strand
ucacauuacacgcaggaga

SEQ ID NO: 2543616 - RNA, 19 nt, Homo sapiens
  misc_RNA (1)...(19): siRNA sense strand
gguagaagauuuacagcug

SEQ ID NO: 2543617 - RNA, 19 nt, Homo sapiens
  misc_RNA (1)...(19): siRNA sense strand
auuuacagcugaagaacca

SEQ ID NO: 2543618 - RNA, 19 nt, Homo sapiens
  misc_RNA (1)...(19): siRNA sense strand
caagaaaagaggauacaga

SEQ ID NO: 2543619 - RNA, 19 nt, Homo sapiens
  misc_RNA (1)...(19): siRNA sense strand
augcaaauggagagagaug

SEQ ID NO: 2543620 - RNA, 19 nt, Homo sapiens
  misc_RNA (1)...(19): siRNA sense strand
cugcaacaacaccaagaua

SEQ ID NO: 2543621 - RNA, 19 nt, Homo sapiens
  misc_RNA (1)...(19): siRNA sense strand
agagagaugcuauggcuga

SEQ ID NO: 2543622 - RNA, 19 nt, Homo sapiens
  misc_RNA (1)...(19): siRNA sense strand
cuucaagaaauccggucaa

SEQ ID NO: 2543623 - RNA, 19 nt, Homo sapiens
  misc_RNA (1)...(19): siRNA sense strand
ggauacagaaaguaaaaga

SEQ ID NO: 2543624 - RNA, 19 nt, Homo sapiens
  misc_RNA (1)...(19): siRNA sense strand
cagcugaagaaccaagcaa

SEQ ID NO: 2543625 - RNA, 19 nt, Homo sapiens
  misc_RNA (1)...(19): siRNA sense strand
ugucuucaaugaucagaaa

SEQ ID NO: 2543626 - RNA, 19 nt, Homo sapiens
  misc_RNA (1)...(19): siRNA sense strand
gcaaugucuucaaugauca

SEQ ID NO: 2543627 - RNA, 19 nt, Homo sapiens
  misc_RNA (1)...(19): siRNA sense strand
gcaaauggagagagaugcu

SEQ ID NO: 2543628 - RNA, 19 nt, Homo sapiens
  misc_RNA (1)...(19): siRNA sense strand
aaaggauguaugaagacaa

SEQ ID NO: 2543629 - RNA, 19 nt, Homo sapiens
  misc_RNA (1)...(19): siRNA sense strand
agacaagacagaagagcug

SEQ ID NO: 2543630 - RNA, 19 nt, Homo sapiens
  misc_RNA (1)...(19): siRNA sense strand
agacuagaaagcuugcaaa

SEQ ID NO: 2543631 - RNA, 19 nt, Homo sapiens
  misc_RNA (1)...(19): siRNA sense strand
aaacucugguagaagauuu

SEQ ID NO: 2543632 - RNA, 19 nt, Homo sapiens
  misc_RNA (1)...(19): siRNA sense strand
gguuacagcuggaaacgga

SEQ ID NO: 2543633 - RNA, 19 nt, Homo sapiens
  misc_RNA (1)...(19): siRNA sense strand
ucaccaaagucaagggcgu

SEQ ID NO: 2543634 - RNA, 19 nt, Homo sapiens
  misc_RNA (1)...(19): siRNA sense strand
agaaguaugucaucgccaa

SEQ ID NO: 2543635 - RNA, 19 nt, Homo sapiens
  misc_RNA (1)...(19): siRNA sense strand
agaacaagaaggugggccu

SEQ ID NO: 2543636 - RNA, 19 nt, Homo sapiens
  misc_RNA (1)...(19): siRNA sense strand
gguuacagcuggaaacgga

SEQ ID NO: 2543637 - RNA, 19 nt, Homo sapiens
  misc_RNA (1)...(19): siRNA sense strand
ucaccaaagucaagggcgu

SEQ ID NO: 2543638 - RNA, 19 nt, Homo sapiens
  misc_RNA (1)...(19): siRNA sense strand
agaaguaugucaucgccaa

SEQ ID NO: 2543639 - RNA, 19 nt, Homo sapiens
  misc_RNA (1)...(19): siRNA sense strand
agaacaagaaggugggccu

SEQ ID NO: 2543640 - RNA, 19 nt, Homo sapiens
  misc_RNA (1)...(19): siRNA sense strand
gguuacagcuggaaacgga

SEQ ID NO: 2543641 - RNA, 19 nt, Homo sapiens
  misc_RNA (1)...(19): siRNA sense strand
ucaccaaagucaagggcgu

SEQ ID NO: 2543642 - RNA, 19 nt, Homo sapiens
  misc_RNA (1)...(19): siRNA sense strand
agaaguaugucaucgccaa

SEQ ID NO: 2543643 - RNA, 19 nt, Homo sapiens
  misc_RNA (1)...(19): siRNA sense strand
agaacaagaaggugggccu

SEQ ID NO: 2543644 - RNA, 19 nt, Homo sapiens
  misc_RNA (1)...(19): siRNA sense strand
agaagauagccgaggaaau

SEQ ID NO: 2543645 - RNA, 19 nt, Homo sapiens
  misc_RNA (1)...(19): siRNA sense strand
uggaaggagaugagggcaa

SEQ ID NO: 2543646 - RNA, 19 nt, Homo sapiens
  misc_RNA (1)...(19): siRNA sense strand
ggccauugucacugggaaa

SEQ ID NO: 2543647 - RNA, 19 nt, Homo sapiens
  misc_RNA (1)...(19): siRNA sense strand
gggcaacagcagaggacuu

SEQ ID NO: 2543648 - RNA, 19 nt, Homo sapiens
  misc_RNA (1)...(19): siRNA sense strand
aggaaaucaccgugggaca

SEQ ID NO: 2543649 - RNA, 19 nt, Homo sapiens
  misc_RNA (1)...(19): siRNA sense strand
gaagaaaggaugaugacca

SEQ ID NO: 2543650 - RNA, 19 nt, Homo sapiens
  misc_RNA (1)...(19): siRNA sense strand
ccaugaaggagcuggccaa

SEQ ID NO: 2543651 - RNA, 19 nt, Homo sapiens
  misc_RNA (1)...(19): siRNA sense strand
ccauguacacaaaggacua

SEQ ID NO: 2543652 - RNA, 19 nt, Homo sapiens
  misc_RNA (1)...(19): siRNA sense strand
uggaucaguucaagagcaa

SEQ ID NO: 2543653 - RNA, 19 nt, Homo sapiens
  misc_RNA (1)...(19): siRNA sense strand
aggacaaacgacaggauau

SEQ ID NO: 2543654 - RNA, 19 nt, Homo sapiens
  misc_RNA (1)...(19): siRNA sense strand
acacaaaggacuacaaaau

SEQ ID NO: 2543655 - RNA, 19 nt, Homo sapiens
  misc_RNA (1)...(19): siRNA sense strand
ggagaacaguagccgggaa

SEQ ID NO: 2543656 - RNA, 19 nt, Homo sapiens
  misc_RNA (1)...(19): siRNA sense strand
gggagaagauccagcccga

SEQ ID NO: 2543657 - RNA, 19 nt, Homo sapiens
  misc_RNA (1)...(19): siRNA sense strand
aacaagaccuggaaggaga

SEQ ID NO: 2543658 - RNA, 19 nt, Homo sapiens
  misc_RNA (1)...(19): siRNA sense strand
ccuugaaaucgaccagaaa

SEQ ID NO: 2543659 - RNA, 19 nt, Homo sapiens
  misc_RNA (1)...(19): siRNA sense strand
ccagaagauagccgaggaa

SEQ ID NO: 2543660 - RNA, 19 nt, Homo sapiens
  misc_RNA (1)...(19): siRNA sense strand
uggccauccuggagagcau

SEQ ID NO: 2543661 - RNA, 19 nt, Homo sapiens
  misc_RNA (1)...(19): siRNA sense strand
acuacaaaaugcugggauu

SEQ ID NO: 2543662 - RNA, 19 nt, Homo sapiens
  misc_RNA (1)...(19): siRNA sense strand
gaaugcuggccuuggacaa

SEQ ID NO: 2543663 - RNA, 19 nt, Homo sapiens
  misc_RNA (1)...(19): siRNA sense strand
ucgcagugacauuaagaau

SEQ ID NO: 2543664 - RNA, 19 nt, Homo sapiens
  misc_RNA (1)...(19): siRNA sense strand
gagaagauccagcccgaga

SEQ ID NO: 2543665 - RNA, 19 nt, Homo sapiens
  misc_RNA (1)...(19): siRNA sense strand
ccgagauccuugagcugau

SEQ ID NO: 2543666 - RNA, 19 nt, Homo sapiens
  misc_RNA (1)...(19): siRNA sense strand
ggaugaugaccaagaugga

SEQ ID NO: 2543667 - RNA, 19 nt, Homo sapiens
  misc_RNA (1)...(19): siRNA sense strand
ccugggagugggaccgaaa

SEQ ID NO: 2543668 - RNA, 19 nt, Homo sapiens
  misc_RNA (1)...(19): siRNA sense strand
caguagccgggaagacaaa

SEQ ID NO: 2543669 - RNA, 19 nt, Homo sapiens
  misc_RNA (1)...(19): siRNA sense strand
uugcagacauuaaggccau

SEQ ID NO: 2543670 - RNA, 19 nt, Homo sapiens
  misc_RNA (1)...(19): siRNA sense strand
agaaaagugcucugaaaca

SEQ ID NO: 2543671 - RNA, 19 nt, Homo sapiens
  misc_RNA (1)...(19): siRNA sense strand
aaauaugaguacugcaucu

SEQ ID NO: 2543672 - RNA, 19 nt, Homo sapiens
  misc_RNA (1)...(19): siRNA sense strand
cuggaagaaaggaugauga

SEQ ID NO: 2543673 - RNA, 19 nt, Homo sapiens
  misc_RNA (1)...(19): siRNA sense strand
cgcaaagccauguacacaa

SEQ ID NO: 2543674 - RNA, 19 nt, Homo sapiens
  misc_RNA (1)...(19): siRNA sense strand
cugacaaggcucguggaaa

SEQ ID NO: 2543675 - RNA, 19 nt, Homo sapiens
  misc_RNA (1)...(19): siRNA sense strand
uccuagagcucauggacca

SEQ ID NO: 2543676 - RNA, 19 nt, Homo sapiens
  misc_RNA (1)...(19): siRNA sense strand
accaaaaugcucugugaaa

SEQ ID NO: 2543677 - RNA, 19 nt, Homo sapiens
  misc_RNA (1)...(19): siRNA sense strand
agucugagaggaugaguca

SEQ ID NO: 2543678 - RNA, 19 nt, Homo sapiens
  misc_RNA (1)...(19): siRNA sense strand
acgccauugcacugauuaa

SEQ ID NO: 2543679 - RNA, 19 nt, Homo sapiens
  misc_RNA (1)...(19): siRNA sense strand
ccgggaagacaaacaugaa

SEQ ID NO: 2543680 - RNA, 19 nt, Homo sapiens
  misc_RNA (1)...(19): siRNA sense strand
ccaugguggacgugucaau

SEQ ID NO: 2543681 - RNA, 19 nt, Homo sapiens
  misc_RNA (1)...(19): siRNA sense strand
cagaagauagccgaggaaa

SEQ ID NO: 2543682 - RNA, 19 nt, Homo sapiens
  misc_RNA (1)...(19): siRNA sense strand
ugggaaccgccgaaggcaa

SEQ ID NO: 2543683 - RNA, 19 nt, Homo sapiens
  misc_RNA (1)...(19): siRNA sense strand
agaagauagccgaggaaau

SEQ ID NO: 2543684 - RNA, 19 nt, Homo sapiens
  misc_RNA (1)...(19): siRNA sense strand
uggaaggagaugagggcaa

SEQ ID NO: 2543685 - RNA, 19 nt, Homo sapiens
  misc_RNA (1)...(19): siRNA sense strand
ggccauugucacugggaaa

SEQ ID NO: 2543686 - RNA, 19 nt, Homo sapiens
  misc_RNA (1)...(19): siRNA sense strand
gggcaacagcagaggacuu

SEQ ID NO: 2543687 - RNA, 19 nt, Homo sapiens
  misc_RNA (1)...(19): siRNA sense strand
aggaaaucaccgugggaca

SEQ ID NO: 2543688 - RNA, 19 nt, Homo sapiens
  misc_RNA (1)...(19): siRNA sense strand
gaagaaaggaugaugacca

SEQ ID NO: 2543689 - RNA, 19 nt, Homo sapiens
  misc_RNA (1)...(19): siRNA sense strand
ccaugaaggagcuggccaa

SEQ ID NO: 2543690 - RNA, 19 nt, Homo sapiens
  misc_RNA (1)...(19): siRNA sense strand
ccauguacacaaaggacua

SEQ ID NO: 2543691 - RNA, 19 nt, Homo sapiens
  misc_RNA (1)...(19): siRNA sense strand
uggaucaguucaagagcaa

SEQ ID NO: 2543692 - RNA, 19 nt, Homo sapiens
  misc_RNA (1)...(19): siRNA sense strand
aggacaaacgacaggauau

SEQ ID NO: 2543693 - RNA, 19 nt, Homo sapiens
  misc_RNA (1)...(19): siRNA sense strand
acacaaaggacuacaaaau

SEQ ID NO: 2543694 - RNA, 19 nt, Homo sapiens
  misc_RNA (1)...(19): siRNA sense strand
ggagaacaguagccgggaa

SEQ ID NO: 2543695 - RNA, 19 nt, Homo sapiens
  misc_RNA (1)...(19): siRNA sense strand
gggagaagauccagcccga

SEQ ID NO: 2543696 - RNA, 19 nt, Homo sapiens
  misc_RNA (1)...(19): siRNA sense strand
aacaagaccuggaaggaga

SEQ ID NO: 2543697 - RNA, 19 nt, Homo sapiens
  misc_RNA (1)...(19): siRNA sense strand
ccuugaaaucgaccagaaa

SEQ ID NO: 2543698 - RNA, 19 nt, Homo sapiens
  misc_RNA (1)...(19): siRNA sense strand
ccagaagauagccgaggaa

SEQ ID NO: 2543699 - RNA, 19 nt, Homo sapiens
  misc_RNA (1)...(19): siRNA sense strand
uggccauccuggagagcau

SEQ ID NO: 2543700 - RNA, 19 nt, Homo sapiens
  misc_RNA (1)...(19): siRNA sense strand
acuacaaaaugcugggauu

SEQ ID NO: 2543701 - RNA, 19 nt, Homo sapiens
  misc_RNA (1)...(19): siRNA sense strand
gaaugcuggccuuggacaa

SEQ ID NO: 2543702 - RNA, 19 nt, Homo sapiens
  misc_RNA (1)...(19): siRNA sense strand
ucgcagugacauuaagaau

SEQ ID NO: 2543703 - RNA, 19 nt, Homo sapiens
  misc_RNA (1)...(19): siRNA sense strand
gagaagauccagcccgaga

SEQ ID NO: 2543704 - RNA, 19 nt, Homo sapiens
  misc_RNA (1)...(19): siRNA sense strand
ccgagauccuugagcugau

SEQ ID NO: 2543705 - RNA, 19 nt, Homo sapiens
  misc_RNA (1)...(19): siRNA sense strand
ggaugaugaccaagaugga

SEQ ID NO: 2543706 - RNA, 19 nt, Homo sapiens
  misc_RNA (1)...(19): siRNA sense strand
ccugggagugggaccgaaa

SEQ ID NO: 2543707 - RNA, 19 nt, Homo sapiens
  misc_RNA (1)...(19): siRNA sense strand
caguagccgggaagacaaa

SEQ ID NO: 2543708 - RNA, 19 nt, Homo sapiens
  misc_RNA (1)...(19): siRNA sense strand
uugcagacauuaaggccau

SEQ ID NO: 2543709 - RNA, 19 nt, Homo sapiens
  misc_RNA (1)...(19): siRNA sense strand
agaaaagugcucugaaaca

SEQ ID NO: 2543710 - RNA, 19 nt, Homo sapiens
  misc_RNA (1)...(19): siRNA sense strand
aaauaugaguacugcaucu

SEQ ID NO: 2543711 - RNA, 19 nt, Homo sapiens
  misc_RNA (1)...(19): siRNA sense strand
cuggaagaaaggaugauga

SEQ ID NO: 2543712 - RNA, 19 nt, Homo sapiens
  misc_RNA (1)...(19): siRNA sense strand
cgcaaagccauguacacaa

SEQ ID NO: 2543713 - RNA, 19 nt, Homo sapiens
  misc_RNA (1)...(19): siRNA sense strand
cugacaaggcucguggaaa

SEQ ID NO: 2543714 - RNA, 19 nt, Homo sapiens
  misc_RNA (1)...(19): siRNA sense strand
uccuagagcucauggacca

SEQ ID NO: 2543715 - RNA, 19 nt, Homo sapiens
  misc_RNA (1)...(19): siRNA sense strand
accaaaaugcucugugaaa

SEQ ID NO: 2543716 - RNA, 19 nt, Homo sapiens
  misc_RNA (1)...(19): siRNA sense strand
agucugagaggaugaguca

SEQ ID NO: 2543717 - RNA, 19 nt, Homo sapiens
  misc_RNA (1)...(19): siRNA sense strand
acgccauugcacugauuaa

SEQ ID NO: 2543718 - RNA, 19 nt, Homo sapiens
  misc_RNA (1)...(19): siRNA sense strand
ccgggaagacaaacaugaa

SEQ ID NO: 2543719 - RNA, 19 nt, Homo sapiens
  misc_RNA (1)...(19): siRNA sense strand
ccaugguggacgugucaau

SEQ ID NO: 2543720 - RNA, 19 nt, Homo sapiens
  misc_RNA (1)...(19): siRNA sense strand
cagaagauagccgaggaaa

SEQ ID NO: 2543721 - RNA, 19 nt, Homo sapiens
  misc_RNA (1)...(19): siRNA sense strand
ugggaaccgccgaaggcaa

SEQ ID NO: 2543722 - RNA, 19 nt, Homo sapiens
  misc_RNA (1)...(19): siRNA sense strand
agaagauagccgaggaaau

SEQ ID NO: 2543723 - RNA, 19 nt, Homo sapiens
  misc_RNA (1)...(19): siRNA sense strand
uggaaggagaugagggcaa

SEQ ID NO: 2543724 - RNA, 19 nt, Homo sapiens
  misc_RNA (1)...(19): siRNA sense strand
ggccauugucacugggaaa

SEQ ID NO: 2543725 - RNA, 19 nt, Homo sapiens
  misc_RNA (1)...(19): siRNA sense strand
gggcaacagcagaggacuu

SEQ ID NO: 2543726 - RNA, 19 nt, Homo sapiens
  misc_RNA (1)...(19): siRNA sense strand
aggaaaucaccgugggaca

SEQ ID NO: 2543727 - RNA, 19 nt, Homo sapiens
  misc_RNA (1)...(19): siRNA sense strand
gaagaaaggaugaugacca

SEQ ID NO: 2543728 - RNA, 19 nt, Homo sapiens
  misc_RNA (1)...(19): siRNA sense strand
ccaugaaggagcuggccaa

SEQ ID NO: 2543729 - RNA, 19 nt, Homo sapiens
  misc_RNA (1)...(19): siRNA sense strand
ccauguacacaaaggacua

SEQ ID NO: 2543730 - RNA, 19 nt, Homo sapiens
  misc_RNA (1)...(19): siRNA sense strand
uggaucaguucaagagcaa

SEQ ID NO: 2543731 - RNA, 19 nt, Homo sapiens
  misc_RNA (1)...(19): siRNA sense strand
aggacaaacgacaggauau

SEQ ID NO: 2543732 - RNA, 19 nt, Homo sapiens
  misc_RNA (1)...(19): siRNA sense strand
acacaaaggacuacaaaau

SEQ ID NO: 2543733 - RNA, 19 nt, Homo sapiens
  misc_RNA (1)...(19): siRNA sense strand
ggagaacaguagccgggaa

SEQ ID NO: 2543734 - RNA, 19 nt, Homo sapiens
  misc_RNA (1)...(19): siRNA sense strand
gggagaagauccagcccga

SEQ ID NO: 2543735 - RNA, 19 nt, Homo sapiens
  misc_RNA (1)...(19): siRNA sense strand
aacaagaccuggaaggaga

SEQ ID NO: 2543736 - RNA, 19 nt, Homo sapiens
  misc_RNA (1)...(19): siRNA sense strand
ccuugaaaucgaccagaaa

SEQ ID NO: 2543737 - RNA, 19 nt, Homo sapiens
  misc_RNA (1)...(19): siRNA sense strand
ccagaagauagccgaggaa

SEQ ID NO: 2543738 - RNA, 19 nt, Homo sapiens
  misc_RNA (1)...(19): siRNA sense strand
uggccauccuggagagcau

SEQ ID NO: 2543739 - RNA, 19 nt, Homo sapiens
  misc_RNA (1)...(19): siRNA sense strand
acuacaaaaugcugggauu

SEQ ID NO: 2543740 - RNA, 19 nt, Homo sapiens
  misc_RNA (1)...(19): siRNA sense strand
gaaugcuggccuuggacaa

SEQ ID NO: 2543741 - RNA, 19 nt, Homo sapiens
  misc_RNA (1)...(19): siRNA sense strand
ucgcagugacauuaagaau

SEQ ID NO: 2543742 - RNA, 19 nt, Homo sapiens
  misc_RNA (1)...(19): siRNA sense strand
gagaagauccagcccgaga

SEQ ID NO: 2543743 - RNA, 19 nt, Homo sapiens
  misc_RNA (1)...(19): siRNA sense strand
ccgagauccuugagcugau

SEQ ID NO: 2543744 - RNA, 19 nt, Homo sapiens
  misc_RNA (1)...(19): siRNA sense strand
ggaugaugaccaagaugga

SEQ ID NO: 2543745 - RNA, 19 nt, Homo sapiens
  misc_RNA (1)...(19): siRNA sense strand
ccugggagugggaccgaaa

SEQ ID NO: 2543746 - RNA, 19 nt, Homo sapiens
  misc_RNA (1)...(19): siRNA sense strand
caguagccgggaagacaaa

SEQ ID NO: 2543747 - RNA, 19 nt, Homo sapiens
  misc_RNA (1)...(19): siRNA sense strand
uugcagacauuaaggccau

SEQ ID NO: 2543748 - RNA, 19 nt, Homo sapiens
  misc_RNA (1)...(19): siRNA sense strand
agaaaagugcucugaaaca

SEQ ID NO: 2543749 - RNA, 19 nt, Homo sapiens
  misc_RNA (1)...(19): siRNA sense strand
aaauaugaguacugcaucu

SEQ ID NO: 2543750 - RNA, 19 nt, Homo sapiens
  misc_RNA (1)...(19): siRNA sense strand
cuggaagaaaggaugauga

SEQ ID NO: 2543751 - RNA, 19 nt, Homo sapiens
  misc_RNA (1)...(19): siRNA sense strand
cgcaaagccauguacacaa

SEQ ID NO: 2543752 - RNA, 19 nt, Homo sapiens
  misc_RNA (1)...(19): siRNA sense strand
cugacaaggcucguggaaa

SEQ ID NO: 2543753 - RNA, 19 nt, Homo sapiens
  misc_RNA (1)...(19): siRNA sense strand
uccuagagcucauggacca

SEQ ID NO: 2543754 - RNA, 19 nt, Homo sapiens
  misc_RNA (1)...(19): siRNA sense strand
accaaaaugcucugugaaa

SEQ ID NO: 2543755 - RNA, 19 nt, Homo sapiens
  misc_RNA (1)...(19): siRNA sense strand
agucugagaggaugaguca

SEQ ID NO: 2543756 - RNA, 19 nt, Homo sapiens
  misc_RNA (1)...(19): siRNA sense strand
acgccauugcacugauuaa

SEQ ID NO: 2543757 - RNA, 19 nt, Homo sapiens
  misc_RNA (1)...(19): siRNA sense strand
ccgggaagacaaacaugaa

SEQ ID NO: 2543758 - RNA, 19 nt, Homo sapiens
  misc_RNA (1)...(19): siRNA sense strand
ccaugguggacgugucaau

SEQ ID NO: 2543759 - RNA, 19 nt, Homo sapiens
  misc_RNA (1)...(19): siRNA sense strand
cagaagauagccgaggaaa

SEQ ID NO: 2543760 - RNA, 19 nt, Homo sapiens
  misc_RNA (1)...(19): siRNA sense strand
ugggaaccgccgaaggcaa

SEQ ID NO: 2543761 - RNA, 19 nt, Homo sapiens
  misc_RNA (1)...(19): siRNA sense strand
agauauugggcuugggaua

SEQ ID NO: 2543762 - RNA, 19 nt, Homo sapiens
  misc_RNA (1)...(19): siRNA sense strand
aggaaagugcugagaaaca

SEQ ID NO: 2543763 - RNA, 19 nt, Homo sapiens
  misc_RNA (1)...(19): siRNA sense strand
agguagaacaaauggaaga

SEQ ID NO: 2543764 - RNA, 19 nt, Homo sapiens
  misc_RNA (1)...(19): siRNA sense strand
cugaaugaugugauggaua

SEQ ID NO: 2543765 - RNA, 19 nt, Homo sapiens
  misc_RNA (1)...(19): siRNA sense strand
cuugaagaauggcaggaaa

SEQ ID NO: 2543766 - RNA, 19 nt, Homo sapiens
  misc_RNA (1)...(19): siRNA sense strand
cgacaguacauggaggaaa

SEQ ID NO: 2543767 - RNA, 19 nt, Homo sapiens
  misc_RNA (1)...(19): siRNA sense strand
caagcauguuauugaagaa

SEQ ID NO: 2543768 - RNA, 19 nt, Homo sapiens
  misc_RNA (1)...(19): siRNA sense strand
cuaaagucagagagaggua

SEQ ID NO: 2543769 - RNA, 19 nt, Homo sapiens
  misc_RNA (1)...(19): siRNA sense strand
gagagagguaugugcaaau

SEQ ID NO: 2543770 - RNA, 19 nt, Homo sapiens
  misc_RNA (1)...(19): siRNA sense strand
uugaagaauggcaggaaau

SEQ ID NO: 2543771 - RNA, 19 nt, Homo sapiens
  misc_RNA (1)...(19): siRNA sense strand
aguuaguggcagaaagaga

SEQ ID NO: 2543772 - RNA, 19 nt, Homo sapiens
  misc_RNA (1)...(19): siRNA sense strand
ugauauaggaguugcgcga

SEQ ID NO: 2543773 - RNA, 19 nt, Homo sapiens
  misc_RNA (1)...(19): siRNA sense strand
auauaggaguugcgcgauu

SEQ ID NO: 2543774 - RNA, 19 nt, Homo sapiens
  misc_RNA (1)...(19): siRNA sense strand
ggcaggaaauagaugaaaa

SEQ ID NO: 2543775 - RNA, 19 nt, Homo sapiens
  misc_RNA (1)...(19): siRNA sense strand
aaagagaaaggauggagaa

SEQ ID NO: 2543776 - RNA, 19 nt, Homo sapiens
  misc_RNA (1)...(19): siRNA sense strand
ccuucaacaucuacagaga

SEQ ID NO: 2543777 - RNA, 19 nt, Homo sapiens
  misc_RNA (1)...(19): siRNA sense strand
acaucuacagagaaggaaa

SEQ ID NO: 2543778 - RNA, 19 nt, Homo sapiens
  misc_RNA (1)...(19): siRNA sense strand
cggaaaagaaugccaaaau

SEQ ID NO: 2543779 - RNA, 19 nt, Homo sapiens
  misc_RNA (1)...(19): siRNA sense strand
caaagagaaaggauggaga

SEQ ID NO: 2543780 - RNA, 19 nt, Homo sapiens
  misc_RNA (1)...(19): siRNA sense strand
auggagaaacuuagugaau

SEQ ID NO: 2543781 - RNA, 19 nt, Homo sapiens
  misc_RNA (1)...(19): siRNA sense strand
caggaaaacugggcagaua

SEQ ID NO: 2543782 - RNA, 19 nt, Homo sapiens
  misc_RNA (1)...(19): siRNA sense strand
ugaagaaggaacagaccau

SEQ ID NO: 2543783 - RNA, 19 nt, Homo sapiens
  misc_RNA (1)...(19): siRNA sense strand
aagaauggcaggaaauaga

SEQ ID NO: 2543784 - RNA, 19 nt, Homo sapiens
  misc_RNA (1)...(19): siRNA sense strand
ccugaaggugauugaaaga

SEQ ID NO: 2543785 - RNA, 19 nt, Homo sapiens
  misc_RNA (1)...(19): siRNA sense strand
caucagagcgacaguacau

SEQ ID NO: 2543786 - RNA, 19 nt, Homo sapiens
  misc_RNA (1)...(19): siRNA sense strand
guguggaaaaucaggaaua

SEQ ID NO: 2543787 - RNA, 19 nt, Homo sapiens
  misc_RNA (1)...(19): siRNA sense strand
ggaccaacgaagaugcaca

SEQ ID NO: 2543788 - RNA, 19 nt, Homo sapiens
  misc_RNA (1)...(19): siRNA sense strand
ucaugaacuuauucgacaa

SEQ ID NO: 2543789 - RNA, 19 nt, Homo sapiens
  misc_RNA (1)...(19): siRNA sense strand
ggugauugaaagaaauaga

SEQ ID NO: 2543790 - RNA, 19 nt, Homo sapiens
  misc_RNA (1)...(19): siRNA sense strand
gggauauuuaaucggcaua

SEQ ID NO: 2543791 - RNA, 19 nt, Homo sapiens
  misc_RNA (1)...(19): siRNA sense strand
guuaaaccuuacugguauu

SEQ ID NO: 2543792 - RNA, 19 nt, Homo sapiens
  misc_RNA (1)...(19): siRNA sense strand
augaaaucacacuuggaua

SEQ ID NO: 2543793 - RNA, 19 nt, Homo sapiens
  misc_RNA (1)...(19): siRNA sense strand
cagagagagguaugugcaa

SEQ ID NO: 2543794 - RNA, 19 nt, Homo sapiens
  misc_RNA (1)...(19): siRNA sense strand
gcccugaaggugauugaaa

SEQ ID NO: 2543795 - RNA, 19 nt, Homo sapiens
  misc_RNA (1)...(19): siRNA sense strand
gauuggagcuagaugcgau

SEQ ID NO: 2543796 - RNA, 19 nt, Homo sapiens
  misc_RNA (1)...(19): siRNA sense strand
cugucuaaagucagagaga

SEQ ID NO: 2543797 - RNA, 19 nt, Homo sapiens
  misc_RNA (1)...(19): siRNA sense strand
ugccaaaauaguagaagaa

SEQ ID NO: 2543798 - RNA, 19 nt, Homo sapiens
  misc_RNA (1)...(19): siRNA sense strand
agaacaaauggaagagucu

SEQ ID NO: 2543799 - RNA, 19 nt, Homo sapiens
  misc_RNA (1)...(19): siRNA sense strand
uagaaguggcccagcugaa

SEQ ID NO: 2543800 - RNA, 19 nt, Homo sapiens
  misc_RNA (1)...(19): siRNA sense strand
gcuggaauaaauacacuaa

SEQ ID NO: 2543801 - RNA, 19 nt, Homo sapiens
  misc_RNA (1)...(19): siRNA sense strand
uuaaacaagagguagaaca

SEQ ID NO: 2543802 - RNA, 19 nt, Homo sapiens
  misc_RNA (1)...(19): siRNA sense strand
gaagagucuacaagcgaga

SEQ ID NO: 2543803 - RNA, 19 nt, Homo sapiens
  misc_RNA (1)...(19): siRNA sense strand
caacaauggcuuuugaaga

SEQ ID NO: 2543804 - RNA, 19 nt, Homo sapiens
  misc_RNA (1)...(19): siRNA sense strand
ugguaaacuugcugauuuu

SEQ ID NO: 2543805 - RNA, 19 nt, Homo sapiens
  misc_RNA (1)...(19): siRNA sense strand
aaaguuaguggcagaaaga

SEQ ID NO: 2543806 - RNA, 19 nt, Homo sapiens
  misc_RNA (1)...(19): siRNA sense strand
gaauuggcccugaagguga

SEQ ID NO: 2543807 - RNA, 19 nt, Homo sapiens
  misc_RNA (1)...(19): siRNA sense strand
caucuacagagaaggaaaa

SEQ ID NO: 2543808 - RNA, 19 nt, Homo sapiens
  misc_RNA (1)...(19): siRNA sense strand
gagugauggaccagcgcau

SEQ ID NO: 2543809 - RNA, 19 nt, Homo sapiens
  misc_RNA (1)...(19): siRNA sense strand
aagagaaaggauggagaau

SEQ ID NO: 2543810 - RNA, 19 nt, Homo sapiens
  misc_RNA (1)...(19): siRNA sense strand
aacuuaaacaagagguaga

SEQ ID NO: 2543811 - RNA, 19 nt, Homo sapiens
  misc_RNA (1)...(19): siRNA sense strand
ggauauuuaaucggcauaa

SEQ ID NO: 2543812 - RNA, 19 nt, Homo sapiens
  misc_RNA (1)...(19): siRNA sense strand
aguacauggaggaaauuau

SEQ ID NO: 2543813 - RNA, 19 nt, Homo sapiens
  misc_RNA (1)...(19): siRNA sense strand
ugaagauaggcaaugaaau

SEQ ID NO: 2543814 - RNA, 19 nt, Homo sapiens
  misc_RNA (1)...(19): siRNA sense strand
caacgguaacauugaacuu

SEQ ID NO: 2543815 - RNA, 19 nt, Homo sapiens
  misc_RNA (1)...(19): siRNA sense strand
gugcugagaaacaugauau

SEQ ID NO: 2543816 - RNA, 19 nt, Homo sapiens
  misc_RNA (1)...(19): siRNA sense strand
aagaaggaacagaccauuu

SEQ ID NO: 2543817 - RNA, 19 nt, Homo sapiens
  misc_RNA (1)...(19): siRNA sense strand
agauauugggcuugggaua

SEQ ID NO: 2543818 - RNA, 19 nt, Homo sapiens
  misc_RNA (1)...(19): siRNA sense strand
agucuaaagaagagaaaga

SEQ ID NO: 2543819 - RNA, 19 nt, Homo sapiens
  misc_RNA (1)...(19): siRNA sense strand
ccagacaggcagaggagaa

SEQ ID NO: 2543820 - RNA, 19 nt, Homo sapiens
  misc_RNA (1)...(19): siRNA sense strand
aggaaagugcugagaaaca

SEQ ID NO: 2543821 - RNA, 19 nt, Homo sapiens
  misc_RNA (1)...(19): siRNA sense strand
agguagaacaaauggaaga

SEQ ID NO: 2543822 - RNA, 19 nt, Homo sapiens
  misc_RNA (1)...(19): siRNA sense strand
cugaaugaugugauggaua

SEQ ID NO: 2543823 - RNA, 19 nt, Homo sapiens
  misc_RNA (1)...(19): siRNA sense strand
cuugaagaauggcaggaaa

SEQ ID NO: 2543824 - RNA, 19 nt, Homo sapiens
  misc_RNA (1)...(19): siRNA sense strand
cgacaguacauggaggaaa

SEQ ID NO: 2543825 - RNA, 19 nt, Homo sapiens
  misc_RNA (1)...(19): siRNA sense strand
ucaagaugaaagagaagua

SEQ ID NO: 2543826 - RNA, 19 nt, Homo sapiens
  misc_RNA (1)...(19): siRNA sense strand
caagcauguuauugaagaa

SEQ ID NO: 2543827 - RNA, 19 nt, Homo sapiens
  misc_RNA (1)...(19): siRNA sense strand
cuaaagucagagagaggua

SEQ ID NO: 2543828 - RNA, 19 nt, Homo sapiens
  misc_RNA (1)...(19): siRNA sense strand
gagagagguaugugcaaau

SEQ ID NO: 2543829 - RNA, 19 nt, Homo sapiens
  misc_RNA (1)...(19): siRNA sense strand
uugaagaauggcaggaaau

SEQ ID NO: 2543830 - RNA, 19 nt, Homo sapiens
  misc_RNA (1)...(19): siRNA sense strand
cucaaaaucuccaaagaaa

SEQ ID NO: 2543831 - RNA, 19 nt, Homo sapiens
  misc_RNA (1)...(19): siRNA sense strand
aguuaguggcagaaagaga

SEQ ID NO: 2543832 - RNA, 19 nt, Homo sapiens
  misc_RNA (1)...(19): siRNA sense strand
ggagucuaaagaagagaaa

SEQ ID NO: 2543833 - RNA, 19 nt, Homo sapiens
  misc_RNA (1)...(19): siRNA sense strand
ugauauaggaguugcgcga

SEQ ID NO: 2543834 - RNA, 19 nt, Homo sapiens
  misc_RNA (1)...(19): siRNA sense strand
auauaggaguugcgcgauu

SEQ ID NO: 2543835 - RNA, 19 nt, Homo sapiens
  misc_RNA (1)...(19): siRNA sense strand
ggcaggaaauagaugaaaa

SEQ ID NO: 2543836 - RNA, 19 nt, Homo sapiens
  misc_RNA (1)...(19): siRNA sense strand
aaagagaaaggauggagaa

SEQ ID NO: 2543837 - RNA, 19 nt, Homo sapiens
  misc_RNA (1)...(19): siRNA sense strand
ccuucaacaucuacagaga

SEQ ID NO: 2543838 - RNA, 19 nt, Homo sapiens
  misc_RNA (1)...(19): siRNA sense strand
acaucuacagagaaggaaa

SEQ ID NO: 2543839 - RNA, 19 nt, Homo sapiens
  misc_RNA (1)...(19): siRNA sense strand
cggaaaagaaugccaaaau

SEQ ID NO: 2543840 - RNA, 19 nt, Homo sapiens
  misc_RNA (1)...(19): siRNA sense strand
caaagagaaaggauggaga

SEQ ID NO: 2543841 - RNA, 19 nt, Homo sapiens
  misc_RNA (1)...(19): siRNA sense strand
auggagaaacuuagugaau

SEQ ID NO: 2543842 - RNA, 19 nt, Homo sapiens
  misc_RNA (1)...(19): siRNA sense strand
caggaaaacugggcagaua

SEQ ID NO: 2543843 - RNA, 19 nt, Homo sapiens
  misc_RNA (1)...(19): siRNA sense strand
aggcagaggagaaguuuga

SEQ ID NO: 2543844 - RNA, 19 nt, Homo sapiens
  misc_RNA (1)...(19): siRNA sense strand
ugaagaaggaacagaccau

SEQ ID NO: 2543845 - RNA, 19 nt, Homo sapiens
  misc_RNA (1)...(19): siRNA sense strand
aagaauggcaggaaauaga

SEQ ID NO: 2543846 - RNA, 19 nt, Homo sapiens
  misc_RNA (1)...(19): siRNA sense strand
gguugaaaauagagccaga

SEQ ID NO: 2543847 - RNA, 19 nt, Homo sapiens
  misc_RNA (1)...(19): siRNA sense strand
ccugaaggugauugaaaga

SEQ ID NO: 2543848 - RNA, 19 nt, Homo sapiens
  misc_RNA (1)...(19): siRNA sense strand
caucagagcgacaguacau

SEQ ID NO: 2543849 - RNA, 19 nt, Homo sapiens
  misc_RNA (1)...(19): siRNA sense strand
aaauagagccagacaggca

SEQ ID NO: 2543850 - RNA, 19 nt, Homo sapiens
  misc_RNA (1)...(19): siRNA sense strand
ggaccaacgaagaugcaca

SEQ ID NO: 2543851 - RNA, 19 nt, Homo sapiens
  misc_RNA (1)...(19): siRNA sense strand
ucaugaacuuauucgacaa

SEQ ID NO: 2543852 - RNA, 19 nt, Homo sapiens
  misc_RNA (1)...(19): siRNA sense strand
ggugauugaaagaaauaga

SEQ ID NO: 2543853 - RNA, 19 nt, Homo sapiens
  misc_RNA (1)...(19): siRNA sense strand
guguggaaaaucaggaaua

SEQ ID NO: 2543854 - RNA, 19 nt, Homo sapiens
  misc_RNA (1)...(19): siRNA sense strand
gggauauuuaaucggcaua

SEQ ID NO: 2543855 - RNA, 19 nt, Homo sapiens
  misc_RNA (1)...(19): siRNA sense strand
guuaaaccuuacugguauu

SEQ ID NO: 2543856 - RNA, 19 nt, Homo sapiens
  misc_RNA (1)...(19): siRNA sense strand
uugaacauaugcaggagaa

SEQ ID NO: 2543857 - RNA, 19 nt, Homo sapiens
  misc_RNA (1)...(19): siRNA sense strand
augaaaucacacuuggaua

SEQ ID NO: 2543858 - RNA, 19 nt, Homo sapiens
  misc_RNA (1)...(19): siRNA sense strand
aggaauuagucaugacauc

SEQ ID NO: 2543859 - RNA, 19 nt, Homo sapiens
  misc_RNA (1)...(19): siRNA sense strand
cagagagagguaugugcaa

SEQ ID NO: 2543860 - RNA, 19 nt, Homo sapiens
  misc_RNA (1)...(19): siRNA sense strand
gcccugaaggugauugaaa

SEQ ID NO: 2543861 - RNA, 19 nt, Homo sapiens
  misc_RNA (1)...(19): siRNA sense strand
uugaagaugcauaugagaa

SEQ ID NO: 2543862 - RNA, 19 nt, Homo sapiens
  misc_RNA (1)...(19): siRNA sense strand
gauuggagcuagaugcgau

SEQ ID NO: 2543863 - RNA, 19 nt, Homo sapiens
  misc_RNA (1)...(19): siRNA sense strand
cugucuaaagucagagaga

SEQ ID NO: 2543864 - RNA, 19 nt, Homo sapiens
  misc_RNA (1)...(19): siRNA sense strand
aagaaaggagucuaaagaa

SEQ ID NO: 2543865 - RNA, 19 nt, Homo sapiens
  misc_RNA (1)...(19): siRNA sense strand
ugccaaaauaguagaagaa

SEQ ID NO: 2543866 - RNA, 19 nt, Homo sapiens
  misc_RNA (1)...(19): siRNA sense strand
cagcaaaagcgaagagcaa

SEQ ID NO: 2543867 - RNA, 19 nt, Homo sapiens
  misc_RNA (1)...(19): siRNA sense strand
aggagaacacaaacagaaa

SEQ ID NO: 2543868 - RNA, 19 nt, Homo sapiens
  misc_RNA (1)...(19): siRNA sense strand
agacaauauuggaagagga

SEQ ID NO: 2543869 - RNA, 19 nt, Homo sapiens
  misc_RNA (1)...(19): siRNA sense strand
cagaaaaugggcaaagaaa

SEQ ID NO: 2543870 - RNA, 19 nt, Homo sapiens
  misc_RNA (1)...(19): siRNA sense strand
caauauuggaagaggaugu

SEQ ID NO: 2543871 - RNA, 19 nt, Homo sapiens
  misc_RNA (1)...(19): siRNA sense strand
gcaaaagcgaagagcaaga

SEQ ID NO: 2543872 - RNA, 19 nt, Homo sapiens
  misc_RNA (1)...(19): siRNA sense strand
guguuuaugaugugccaaa

SEQ ID NO: 2543873 - RNA, 19 nt, Homo sapiens
  misc_RNA (1)...(19): siRNA sense strand
cagaaagaaaggucaggau

SEQ ID NO: 2543874 - RNA, 19 nt, Homo sapiens
  misc_RNA (1)...(19): siRNA sense strand
auugaagcaaagagaagaa

SEQ ID NO: 2543875 - RNA, 19 nt, Homo sapiens
  misc_RNA (1)...(19): siRNA sense strand
uggauauguuugugggaag

SEQ ID NO: 2543876 - RNA, 19 nt, Homo sapiens
  misc_RNA (1)...(19): siRNA sense strand
gugaacaagcuguguacca

SEQ ID NO: 2543877 - RNA, 19 nt, Homo sapiens
  misc_RNA (1)...(19): siRNA sense strand
uuccaaaggagaacacaaa

SEQ ID NO: 2543878 - RNA, 19 nt, Homo sapiens
  misc_RNA (1)...(19): siRNA sense strand
gagaacacaaacagaaaau

SEQ ID NO: 2543879 - RNA, 19 nt, Homo sapiens
  misc_RNA (1)...(19): siRNA sense strand
augaauugaagcaaagaga

SEQ ID NO: 2543880 - RNA, 19 nt, Homo sapiens
  misc_RNA (1)...(19): siRNA sense strand
aaggauaagcagugugaac

SEQ ID NO: 2543881 - RNA, 19 nt, Homo sapiens
  misc_RNA (1)...(19): siRNA sense strand
guuuaaaggugaagggguc

SEQ ID NO: 2543882 - RNA, 19 nt, Homo sapiens
  misc_RNA (1)...(19): siRNA sense strand
gguccgguacaaagccaaa

SEQ ID NO: 2543883 - RNA, 19 nt, Homo sapiens
  misc_RNA (1)...(19): siRNA sense strand
ccuacauugcaaaggacau

SEQ ID NO: 2543884 - RNA, 19 nt, Homo sapiens
  misc_RNA (1)...(19): siRNA sense strand
ccgacaagcccaggcagaa

SEQ ID NO: 2543885 - RNA, 19 nt, Homo sapiens
  misc_RNA (1)...(19): siRNA sense strand
ccaaugagcugaugggcuu

SEQ ID NO: 2543886 - RNA, 19 nt, Homo sapiens
  misc_RNA (1)...(19): siRNA sense strand
gagaagauccagagggcca

SEQ ID NO: 2543887 - RNA, 19 nt, Homo sapiens
  misc_RNA (1)...(19): siRNA sense strand
uggcgaagcuggaagguga

SEQ ID NO: 2543888 - RNA, 19 nt, Homo sapiens
  misc_RNA (1)...(19): siRNA sense strand
agguacaagcggagaucaa

SEQ ID NO: 2543889 - RNA, 19 nt, Homo sapiens
  misc_RNA (1)...(19): siRNA sense strand
cuuugaugccuguggguuu

SEQ ID NO: 2543890 - RNA, 19 nt, Homo sapiens
  misc_RNA (1)...(19): siRNA sense strand
ccagagaaugucagcaaaa

SEQ ID NO: 2543891 - RNA, 19 nt, Homo sapiens
  misc_RNA (1)...(19): siRNA sense strand
ggauaugaaugacagcaca

SEQ ID NO: 2543892 - RNA, 19 nt, Homo sapiens
  misc_RNA (1)...(19): siRNA sense strand
augcggagcaggacagcaa

SEQ ID NO: 2543893 - RNA, 19 nt, Homo sapiens
  misc_RNA (1)...(19): siRNA sense strand
gaggauggcuggucggaac

SEQ ID NO: 2543894 - RNA, 19 nt, Homo sapiens
  misc_RNA (1)...(19): siRNA sense strand
ucgucauccuugugcagaa

SEQ ID NO: 2543895 - RNA, 19 nt, Homo sapiens
  misc_RNA (1)...(19): siRNA sense strand
gcggagaucaagcgaaaau

SEQ ID NO: 2543896 - RNA, 19 nt, Homo sapiens
  misc_RNA (1)...(19): siRNA sense strand
agaccgaaaccauuggaga

SEQ ID NO: 2543897 - RNA, 19 nt, Homo sapiens
  misc_RNA (1)...(19): siRNA sense strand
gggaaacagaccagggaua

SEQ ID NO: 2543898 - RNA, 19 nt, Homo sapiens
  misc_RNA (1)...(19): siRNA sense strand
uaguaaacgaguaggaaua

SEQ ID NO: 2543899 - RNA, 19 nt, Homo sapiens
  misc_RNA (1)...(19): siRNA sense strand
caugaaugcuugugaagaa

SEQ ID NO: 2543900 - RNA, 19 nt, Homo sapiens
  misc_RNA (1)...(19): siRNA sense strand
cuggaagaaaggagagaaa

SEQ ID NO: 2543901 - RNA, 19 nt, Homo sapiens
  misc_RNA (1)...(19): siRNA sense strand
caaaugagauggaaggcua

SEQ ID NO: 2543902 - RNA, 19 nt, Homo sapiens
  misc_RNA (1)...(19): siRNA sense strand
guuuguaacuggaggaaaa

SEQ ID NO: 2543903 - RNA, 19 nt, Homo sapiens
  misc_RNA (1)...(19): siRNA sense strand
ccuaguagaucaugcauua

SEQ ID NO: 2543904 - RNA, 19 nt, Homo sapiens
  misc_RNA (1)...(19): siRNA sense strand
gcaagaggaaguaaagaua

SEQ ID NO: 2543905 - RNA, 19 nt, Homo sapiens
  misc_RNA (1)...(19): siRNA sense strand
gguuaugacugucgaagua

SEQ ID NO: 2543906 - RNA, 19 nt, Homo sapiens
  misc_RNA (1)...(19): siRNA sense strand
ggucauacagauagaauau

SEQ ID NO: 2543907 - RNA, 19 nt, Homo sapiens
  misc_RNA (1)...(19): siRNA sense strand
gcagacaaaugauggaaau

SEQ ID NO: 2543908 - RNA, 19 nt, Homo sapiens
  misc_RNA (1)...(19): siRNA sense strand
gaaagaugcuguucacaua

SEQ ID NO: 2543909 - RNA, 19 nt, Homo sapiens
  misc_RNA (1)...(19): siRNA sense strand
ggaagaaaggagagaaacu

SEQ ID NO: 2543910 - RNA, 19 nt, Homo sapiens
  misc_RNA (1)...(19): siRNA sense strand
agacaaacaauguaggcaa

SEQ ID NO: 2543911 - RNA, 19 nt, Homo sapiens
  misc_RNA (1)...(19): siRNA sense strand
ggaggcaauucaugaguua

SEQ ID NO: 2543912 - RNA, 19 nt, Homo sapiens
  misc_RNA (1)...(19): siRNA sense strand
gacaaguacagaagaaaua

SEQ ID NO: 2543913 - RNA, 19 nt, Homo sapiens
  misc_RNA (1)...(19): siRNA sense strand
guguguaucuggagagaca

SEQ ID NO: 2543914 - RNA, 19 nt, Homo sapiens
  misc_RNA (1)...(19): siRNA sense strand
auggaaggcuaucgagaaa

SEQ ID NO: 2543915 - RNA, 19 nt, Homo sapiens
  misc_RNA (1)...(19): siRNA sense strand
gugauugaucucagggaaa

SEQ ID NO: 2543916 - RNA, 19 nt, Homo sapiens
  misc_RNA (1)...(19): siRNA sense strand
agaacagugcaaagagaaa

SEQ ID NO: 2543917 - RNA, 19 nt, Homo sapiens
  misc_RNA (1)...(19): siRNA sense strand
aggcagagacuguaggaau

SEQ ID NO: 2543918 - RNA, 19 nt, Homo sapiens
  misc_RNA (1)...(19): siRNA sense strand
ggugcaagaaagaaauaaa

SEQ ID NO: 2543919 - RNA, 19 nt, Homo sapiens
  misc_RNA (1)...(19): siRNA sense strand
ggauauuagaggaaagcuu

SEQ ID NO: 2543920 - RNA, 19 nt, Homo sapiens
  misc_RNA (1)...(19): siRNA sense strand
aggcaauucaugaguuaaa

SEQ ID NO: 2543921 - RNA, 19 nt, Homo sapiens
  misc_RNA (1)...(19): siRNA sense strand
guuacaagggagaaugaaa

SEQ ID NO: 2543922 - RNA, 19 nt, Homo sapiens
  misc_RNA (1)...(19): siRNA sense strand
aaacaauguaggcaagaaa

SEQ ID NO: 2543923 - RNA, 19 nt, Homo sapiens
  misc_RNA (1)...(19): siRNA sense strand
aaaugauggaaaugggaaa

SEQ ID NO: 2543924 - RNA, 19 nt, Homo sapiens
  misc_RNA (1)...(19): siRNA sense strand
ggaaaggaagugacaagua

SEQ ID NO: 2543925 - RNA, 19 nt, Homo sapiens
  misc_RNA (1)...(19): siRNA sense strand
ugaaauugaacaagagaca

SEQ ID NO: 2543926 - RNA, 19 nt, Homo sapiens
  misc_RNA (1)...(19): siRNA sense strand
cuaaagggaaauuuggaaa

SEQ ID NO: 2543927 - RNA, 19 nt, Homo sapiens
  misc_RNA (1)...(19): siRNA sense strand
cggaaguuguacauauuaa

SEQ ID NO: 2543928 - RNA, 19 nt, Homo sapiens
  misc_RNA (1)...(19): siRNA sense strand
gcugaugacuauggaauua

SEQ ID NO: 2543929 - RNA, 19 nt, Homo sapiens
  misc_RNA (1)...(19): siRNA sense strand
gggaaagagccuuauauuu

SEQ ID NO: 2543930 - RNA, 19 nt, Homo sapiens
  misc_RNA (1)...(19): siRNA sense strand
gaucaugcauuaauagcaa

SEQ ID NO: 2543931 - RNA, 19 nt, Homo sapiens
  misc_RNA (1)...(19): siRNA sense strand
agugacaaguacagaagaa

SEQ ID NO: 2543932 - RNA, 19 nt, Homo sapiens
  misc_RNA (1)...(19): siRNA sense strand
gggacuagacccagaacau

SEQ ID NO: 2543933 - RNA, 19 nt, Homo sapiens
  misc_RNA (1)...(19): siRNA sense strand
cauuuauaaucgacagcaa

SEQ ID NO: 2543934 - RNA, 19 nt, Homo sapiens
  misc_RNA (1)...(19): siRNA sense strand
uggcagagaugguuguauu

SEQ ID NO: 2543935 - RNA, 19 nt, Homo sapiens
  misc_RNA (1)...(19): siRNA sense strand
ggacugaagagauggcuuu

SEQ ID NO: 2543936 - RNA, 19 nt, Homo sapiens
  misc_RNA (1)...(19): siRNA sense strand
ccuugaaguaaauggaauu

SEQ ID NO: 2543937 - RNA, 19 nt, Homo sapiens
  misc_RNA (1)...(19): siRNA sense strand
uggaaauuauauuggccaa

SEQ ID NO: 2543938 - RNA, 19 nt, Homo sapiens
  misc_RNA (1)...(19): siRNA sense strand
gaguaaaacaugugaaguu

SEQ ID NO: 2543939 - RNA, 19 nt, Homo sapiens
  misc_RNA (1)...(19): siRNA sense strand
ggaaaggaaucaaucuuau

SEQ ID NO: 2543940 - RNA, 19 nt, Homo sapiens
  misc_RNA (1)...(19): siRNA sense strand
gaggauugauuggaagaaa

SEQ ID NO: 2543941 - RNA, 19 nt, Homo sapiens
  misc_RNA (1)...(19): siRNA sense strand
ggaacacaggacagugaaa

SEQ ID NO: 2543942 - RNA, 19 nt, Homo sapiens
  misc_RNA (1)...(19): siRNA sense strand
ucucaagaccuaugcuaua

SEQ ID NO: 2543943 - RNA, 19 nt, Homo sapiens
  misc_RNA (1)...(19): siRNA sense strand
cuuuaaugguguggacaaa

SEQ ID NO: 2543944 - RNA, 19 nt, Homo sapiens
  misc_RNA (1)...(19): siRNA sense strand
cggccaaggagaucguaua

SEQ ID NO: 2543945 - RNA, 19 nt, Homo sapiens
  misc_RNA (1)...(19): siRNA sense strand
gugaaauacuagaagugga

SEQ ID NO: 2543946 - RNA, 19 nt, Homo sapiens
  misc_RNA (1)...(19): siRNA sense strand
gugaagaauccgacauuga

SEQ ID NO: 2543947 - RNA, 19 nt, Homo sapiens
  misc_RNA (1)...(19): siRNA sense strand
cugagaaagcugaugucaa

SEQ ID NO: 2543948 - RNA, 19 nt, Homo sapiens
  misc_RNA (1)...(19): siRNA sense strand
ugacaaguacagaagaaau

SEQ ID NO: 2543949 - RNA, 19 nt, Homo sapiens
  misc_RNA (1)...(19): siRNA sense strand
aggaaaagaugguauagua

SEQ ID NO: 2543950 - RNA, 19 nt, Homo sapiens
  misc_RNA (1)...(19): siRNA sense strand
gggaaauuuggaaaguuua

SEQ ID NO: 2543951 - RNA, 19 nt, Homo sapiens
  misc_RNA (1)...(19): siRNA sense strand
acaaaagguucuuggguca

SEQ ID NO: 2543952 - RNA, 19 nt, Homo sapiens
  misc_RNA (1)...(19): siRNA sense strand
gcuccuggucauacagaua

SEQ ID NO: 2543953 - RNA, 19 nt, Homo sapiens
  misc_RNA (1)...(19): siRNA sense strand
ugacggaaguuguacauau

SEQ ID NO: 2543954 - RNA, 19 nt, Homo sapiens
  misc_RNA (1)...(19): siRNA sense strand
acgaguaggaauaugcaaa

SEQ ID NO: 2543955 - RNA, 19 nt, Homo sapiens
  misc_RNA (1)...(19): siRNA sense strand
ccacauucuaguuggaaca

SEQ ID NO: 2543956 - RNA, 19 nt, Homo sapiens
  misc_RNA (1)...(19): siRNA sense strand
aguuacagcugaugacuau

SEQ ID NO: 2543957 - RNA, 19 nt, Homo sapiens
  misc_RNA (1)...(19): siRNA sense strand
guaguaaacgaguaggaau

SEQ ID NO: 2543958 - RNA, 19 nt, Homo sapiens
  misc_RNA (1)...(19): siRNA sense strand
ggacuuaugaugacagcau

SEQ ID NO: 2543959 - RNA, 19 nt, Homo sapiens
  misc_RNA (1)...(19): siRNA sense strand
cgggugaccuucagacaau

SEQ ID NO: 2543960 - RNA, 19 nt, Homo sapiens
  misc_RNA (1)...(19): siRNA sense strand
uugaaauuguggugcaaga

SEQ ID NO: 2543961 - RNA, 19 nt, Homo sapiens
  misc_RNA (1)...(19): siRNA sense strand
aggauugauuggaagaaaa

SEQ ID NO: 2543962 - RNA, 19 nt, Homo sapiens
  misc_RNA (1)...(19): siRNA sense strand
uguaaugaguaguaaacga

SEQ ID NO: 2543963 - RNA, 19 nt, Homo sapiens
  misc_RNA (1)...(19): siRNA sense strand
cgguuaaacugugggauca

SEQ ID NO: 2543964 - RNA, 19 nt, Homo sapiens
  misc_RNA (1)...(19): siRNA sense strand
uguuagugcuggaggugau

SEQ ID NO: 2543965 - RNA, 19 nt, Homo sapiens
  misc_RNA (1)...(19): siRNA sense strand
ggaagugacaaguacagaa

SEQ ID NO: 2543966 - RNA, 19 nt, Homo sapiens
  misc_RNA (1)...(19): siRNA sense strand
caagaggaaguaaagauaa

SEQ ID NO: 2543967 - RNA, 19 nt, Homo sapiens
  misc_RNA (1)...(19): siRNA sense strand
gcauuaauagcaaggugua

SEQ ID NO: 2543968 - RNA, 19 nt, Homo sapiens
  misc_RNA (1)...(19): siRNA sense strand
gguugauauuuauggaguu

SEQ ID NO: 2543969 - RNA, 19 nt, Homo sapiens
  misc_RNA (1)...(19): siRNA sense strand
gaggaaaggaagugacaag

SEQ ID NO: 2543970 - RNA, 19 nt, Homo sapiens
  misc_RNA (1)...(19): siRNA sense strand
gggagaaagcagaggaacu

SEQ ID NO: 2543971 - RNA, 19 nt, Homo sapiens
  misc_RNA (1)...(19): siRNA sense strand
ccauggaagcagagagaag

SEQ ID NO: 2543972 - RNA, 19 nt, Homo sapiens
  misc_RNA (1)...(19): siRNA sense strand
gcagagagaagcaaggcca

SEQ ID NO: 2543973 - RNA, 19 nt, Homo sapiens
  misc_RNA (1)...(19): siRNA sense strand
cagggagaaagcagaggaa

SEQ ID NO: 2543974 - RNA, 19 nt, Homo sapiens
  misc_RNA (1)...(19): siRNA sense strand
ggaucagacacuacaggau

SEQ ID NO: 2543975 - RNA, 19 nt, Homo sapiens
  misc_RNA (1)...(19): siRNA sense strand
gggagaaagcagaggaacu

SEQ ID NO: 2543976 - RNA, 19 nt, Homo sapiens
  misc_RNA (1)...(19): siRNA sense strand
ccauggaagcagagagaag

SEQ ID NO: 2543977 - RNA, 19 nt, Homo sapiens
  misc_RNA (1)...(19): siRNA sense strand
gcagagagaagcaaggcca

SEQ ID NO: 2543978 - RNA, 19 nt, Homo sapiens
  misc_RNA (1)...(19): siRNA sense strand
cagggagaaagcagaggaa

SEQ ID NO: 2543979 - RNA, 19 nt, Homo sapiens
  misc_RNA (1)...(19): siRNA sense strand
ggaucagacacuacaggau

SEQ ID NO: 2543980 - RNA, 19 nt, Homo sapiens
  misc_RNA (1)...(19): siRNA sense strand
gggagaagcuggaggugcu

SEQ ID NO: 2543981 - RNA, 19 nt, Homo sapiens
  misc_RNA (1)...(19): siRNA sense strand
agaaagaagacaugaggcu

SEQ ID NO: 2543982 - RNA, 19 nt, Homo sapiens
  misc_RNA (1)...(19): siRNA sense strand
aggaggaggugaagcagca

SEQ ID NO: 2543983 - RNA, 19 nt, Homo sapiens
  misc_RNA (1)...(19): siRNA sense strand
ccaacaagcaccugcagga

SEQ ID NO: 2543984 - RNA, 19 nt, Homo sapiens
  misc_RNA (1)...(19): siRNA sense strand
cugcagaagaucaugacca

SEQ ID NO: 2543985 - RNA, 19 nt, Homo sapiens
  misc_RNA (1)...(19): siRNA sense strand
uggcccaggaggaggugaa

SEQ ID NO: 2543986 - RNA, 19 nt, Homo sapiens
  misc_RNA (1)...(19): siRNA sense strand
gagaggacauacggggaaa

SEQ ID NO: 2543987 - RNA, 19 nt, Homo sapiens
  misc_RNA (1)...(19): siRNA sense strand
aggaggaggugaagcagca

SEQ ID NO: 2543988 - RNA, 19 nt, Homo sapiens
  misc_RNA (1)...(19): siRNA sense strand
ccaacaagcaccugcagga

SEQ ID NO: 2543989 - RNA, 19 nt, Homo sapiens
  misc_RNA (1)...(19): siRNA sense strand
uggcccaggaggaggugaa

SEQ ID NO: 2543990 - RNA, 19 nt, Homo sapiens
  misc_RNA (1)...(19): siRNA sense strand
gggagaagcuggaggugcu

SEQ ID NO: 2543991 - RNA, 19 nt, Homo sapiens
  misc_RNA (1)...(19): siRNA sense strand
agaaagaagacaugaggcu

SEQ ID NO: 2543992 - RNA, 19 nt, Homo sapiens
  misc_RNA (1)...(19): siRNA sense strand
aggaggaggugaagcagca

SEQ ID NO: 2543993 - RNA, 19 nt, Homo sapiens
  misc_RNA (1)...(19): siRNA sense strand
ccaacaagcaccugcagga

SEQ ID NO: 2543994 - RNA, 19 nt, Homo sapiens
  misc_RNA (1)...(19): siRNA sense strand
cugcagaagaucaugacca

SEQ ID NO: 2543995 - RNA, 19 nt, Homo sapiens
  misc_RNA (1)...(19): siRNA sense strand
uggcccaggaggaggugaa

SEQ ID NO: 2543996 - RNA, 19 nt, Homo sapiens
  misc_RNA (1)...(19): siRNA sense strand
gagaggacauacggggaaa

SEQ ID NO: 2543997 - RNA, 19 nt, Homo sapiens
  misc_RNA (1)...(19): siRNA sense strand
aucuacaacucgaggccua

SEQ ID NO: 2543998 - RNA, 19 nt, Homo sapiens
  misc_RNA (1)...(19): siRNA sense strand
agaaaugaagacuagccaa

SEQ ID NO: 2543999 - RNA, 19 nt, Homo sapiens
  misc_RNA (1)...(19): siRNA sense strand
gaaaugaagacuagccaag

SEQ ID NO: 2544000 - RNA, 19 nt, Homo sapiens
  misc_RNA (1)...(19): siRNA sense strand
caguagugaugcagaaaau

SEQ ID NO: 2544001 - RNA, 19 nt, Homo sapiens
  misc_RNA (1)...(19): siRNA sense strand
cagacuucguaaagaucaa

SEQ ID NO: 2544002 - RNA, 19 nt, Homo sapiens
  misc_RNA (1)...(19): siRNA sense strand
acuaugaggaagacgacaa

SEQ ID NO: 2544003 - RNA, 19 nt, Homo sapiens
  misc_RNA (1)...(19): siRNA sense strand
aggaagacgacaaugaaga

SEQ ID NO: 2544004 - RNA, 19 nt, Homo sapiens
  misc_RNA (1)...(19): siRNA sense strand
cgggauuacaacauagcaa

SEQ ID NO: 2544005 - RNA, 19 nt, Homo sapiens
  misc_RNA (1)...(19): siRNA sense strand
ccuaauggugaacgggauu

SEQ ID NO: 2544006 - RNA, 19 nt, Homo sapiens
  misc_RNA (1)...(19): siRNA sense strand
aaaugaagugacagaacau

SEQ ID NO: 2544007 - RNA, 19 nt, Homo sapiens
  misc_RNA (1)...(19): siRNA sense strand
aagaaaaugaagugacaga

SEQ ID NO: 2544008 - RNA, 19 nt, Homo sapiens
  misc_RNA (1)...(19): siRNA sense strand
gccuaauggugaacgggau

SEQ ID NO: 2544009 - RNA, 19 nt, Homo sapiens
  misc_RNA (1)...(19): siRNA sense strand
cauagagcuagaagaaaca

SEQ ID NO: 2544010 - RNA, 19 nt, Homo sapiens
  misc_RNA (1)...(19): siRNA sense strand
guguguagacccuuggcua

SEQ ID NO: 2544011 - RNA, 19 nt, Homo sapiens
  misc_RNA (1)...(19): siRNA sense strand
cuuuauuggugaaucauca

SEQ ID NO: 2544012 - RNA, 19 nt, Homo sapiens
  misc_RNA (1)...(19): siRNA sense strand
guaugauguaugugccauu

SEQ ID NO: 2544013 - RNA, 19 nt, Homo sapiens
  misc_RNA (1)...(19): siRNA sense strand
augaggaagacgacaauga

SEQ ID NO: 2544014 - RNA, 19 nt, Homo sapiens
  misc_RNA (1)...(19): siRNA sense strand
augcacagagagcaggaua

SEQ ID NO: 2544015 - RNA, 19 nt, Homo sapiens
  misc_RNA (1)...(19): siRNA sense strand
caguagugaugcagaaaau

SEQ ID NO: 2544016 - RNA, 19 nt, Homo sapiens
  misc_RNA (1)...(19): siRNA sense strand
cagacuucguaaagaucaa

SEQ ID NO: 2544017 - RNA, 19 nt, Homo sapiens
  misc_RNA (1)...(19): siRNA sense strand
acuaugaggaagacgacaa

SEQ ID NO: 2544018 - RNA, 19 nt, Homo sapiens
  misc_RNA (1)...(19): siRNA sense strand
aggaagacgacaaugaaga

SEQ ID NO: 2544019 - RNA, 19 nt, Homo sapiens
  misc_RNA (1)...(19): siRNA sense strand
cgggauuacaacauagcaa

SEQ ID NO: 2544020 - RNA, 19 nt, Homo sapiens
  misc_RNA (1)...(19): siRNA sense strand
ccuaauggugaacgggauu

SEQ ID NO: 2544021 - RNA, 19 nt, Homo sapiens
  misc_RNA (1)...(19): siRNA sense strand
aaaugaagugacagaacau

SEQ ID NO: 2544022 - RNA, 19 nt, Homo sapiens
  misc_RNA (1)...(19): siRNA sense strand
aagaaaaugaagugacaga

SEQ ID NO: 2544023 - RNA, 19 nt, Homo sapiens
  misc_RNA (1)...(19): siRNA sense strand
gccuaauggugaacgggau

SEQ ID NO: 2544024 - RNA, 19 nt, Homo sapiens
  misc_RNA (1)...(19): siRNA sense strand
cauagagcuagaagaaaca

SEQ ID NO: 2544025 - RNA, 19 nt, Homo sapiens
  misc_RNA (1)...(19): siRNA sense strand
guguguagacccuuggcua

SEQ ID NO: 2544026 - RNA, 19 nt, Homo sapiens
  misc_RNA (1)...(19): siRNA sense strand
cuuuauuggugaaucauca

SEQ ID NO: 2544027 - RNA, 19 nt, Homo sapiens
  misc_RNA (1)...(19): siRNA sense strand
guaugauguaugugccauu

SEQ ID NO: 2544028 - RNA, 19 nt, Homo sapiens
  misc_RNA (1)...(19): siRNA sense strand
augaggaagacgacaauga

SEQ ID NO: 2544029 - RNA, 19 nt, Homo sapiens
  misc_RNA (1)...(19): siRNA sense strand
augcacagagagcaggaua

SEQ ID NO: 2544030 - RNA, 19 nt, Homo sapiens
  misc_RNA (1)...(19): siRNA sense strand
augcacagagagcaggaua

SEQ ID NO: 2544031 - RNA, 19 nt, Homo sapiens
  misc_RNA (1)...(19): siRNA sense strand
caguagugaugcagaaaau

SEQ ID NO: 2544032 - RNA, 19 nt, Homo sapiens
  misc_RNA (1)...(19): siRNA sense strand
cagacuucguaaagaucaa

SEQ ID NO: 2544033 - RNA, 19 nt, Homo sapiens
  misc_RNA (1)...(19): siRNA sense strand
acuaugaggaagacgacaa

SEQ ID NO: 2544034 - RNA, 19 nt, Homo sapiens
  misc_RNA (1)...(19): siRNA sense strand
aggaagacgacaaugaaga

SEQ ID NO: 2544035 - RNA, 19 nt, Homo sapiens
  misc_RNA (1)...(19): siRNA sense strand
cgggauuacaacauagcaa

SEQ ID NO: 2544036 - RNA, 19 nt, Homo sapiens
  misc_RNA (1)...(19): siRNA sense strand
ccuaauggugaacgggauu

SEQ ID NO: 2544037 - RNA, 19 nt, Homo sapiens
  misc_RNA (1)...(19): siRNA sense strand
aaaugaagugacagaacau

SEQ ID NO: 2544038 - RNA, 19 nt, Homo sapiens
  misc_RNA (1)...(19): siRNA sense strand
aagaaaaugaagugacaga

SEQ ID NO: 2544039 - RNA, 19 nt, Homo sapiens
  misc_RNA (1)...(19): siRNA sense strand
gccuaauggugaacgggau

SEQ ID NO: 2544040 - RNA, 19 nt, Homo sapiens
  misc_RNA (1)...(19): siRNA sense strand
guguguagacccuuggcua

SEQ ID NO: 2544041 - RNA, 19 nt, Homo sapiens
  misc_RNA (1)...(19): siRNA sense strand
cauagagcuagaagaaaca

SEQ ID NO: 2544042 - RNA, 19 nt, Homo sapiens
  misc_RNA (1)...(19): siRNA sense strand
guaugauguaugugccauu

SEQ ID NO: 2544043 - RNA, 19 nt, Homo sapiens
  misc_RNA (1)...(19): siRNA sense strand
augaggaagacgacaauga

SEQ ID NO: 2544044 - RNA, 19 nt, Homo sapiens
  misc_RNA (1)...(19): siRNA sense strand
caguagugaugcagaaaau

SEQ ID NO: 2544045 - RNA, 19 nt, Homo sapiens
  misc_RNA (1)...(19): siRNA sense strand
cagacuucguaaagaucaa

SEQ ID NO: 2544046 - RNA, 19 nt, Homo sapiens
  misc_RNA (1)...(19): siRNA sense strand
acuaugaggaagacgacaa

SEQ ID NO: 2544047 - RNA, 19 nt, Homo sapiens
  misc_RNA (1)...(19): siRNA sense strand
aggaagacgacaaugaaga

SEQ ID NO: 2544048 - RNA, 19 nt, Homo sapiens
  misc_RNA (1)...(19): siRNA sense strand
cgggauuacaacauagcaa

SEQ ID NO: 2544049 - RNA, 19 nt, Homo sapiens
  misc_RNA (1)...(19): siRNA sense strand
ccuaauggugaacgggauu

SEQ ID NO: 2544050 - RNA, 19 nt, Homo sapiens
  misc_RNA (1)...(19): siRNA sense strand
aaaugaagugacagaacau

SEQ ID NO: 2544051 - RNA, 19 nt, Homo sapiens
  misc_RNA (1)...(19): siRNA sense strand
aagaaaaugaagugacaga

SEQ ID NO: 2544052 - RNA, 19 nt, Homo sapiens
  misc_RNA (1)...(19): siRNA sense strand
gccuaauggugaacgggau

SEQ ID NO: 2544053 - RNA, 19 nt, Homo sapiens
  misc_RNA (1)...(19): siRNA sense strand
guguguagacccuuggcua

SEQ ID NO: 2544054 - RNA, 19 nt, Homo sapiens
  misc_RNA (1)...(19): siRNA sense strand
cauagagcuagaagaaaca

SEQ ID NO: 2544055 - RNA, 19 nt, Homo sapiens
  misc_RNA (1)...(19): siRNA sense strand
guaugauguaugugccauu

SEQ ID NO: 2544056 - RNA, 19 nt, Homo sapiens
  misc_RNA (1)...(19): siRNA sense strand
augaggaagacgacaauga

SEQ ID NO: 2544057 - RNA, 19 nt, Homo sapiens
  misc_RNA (1)...(19): siRNA sense strand
gggagaagcaguuggagga

SEQ ID NO: 2544058 - RNA, 19 nt, Homo sapiens
  misc_RNA (1)...(19): siRNA sense strand
acauggacgugaaagggaa

SEQ ID NO: 2544059 - RNA, 19 nt, Homo sapiens
  misc_RNA (1)...(19): siRNA sense strand
ccugagaucaccugggaga

SEQ ID NO: 2544060 - RNA, 19 nt, Homo sapiens
  misc_RNA (1)...(19): siRNA sense strand
ccaacgugaccgugagcga

SEQ ID NO: 2544061 - RNA, 19 nt, Homo sapiens
  misc_RNA (1)...(19): siRNA sense strand
gccucaaguuccugggcca

SEQ ID NO: 2544062 - RNA, 19 nt, Homo sapiens
  misc_RNA (1)...(19): siRNA sense strand
aggcagaagaagagagaaa

SEQ ID NO: 2544063 - RNA, 19 nt, Homo sapiens
  misc_RNA (1)...(19): siRNA sense strand
cggaacaagaagaggguaa

SEQ ID NO: 2544064 - RNA, 19 nt, Homo sapiens
  misc_RNA (1)...(19): siRNA sense strand
gagcagaaguagaggucga

SEQ ID NO: 2544065 - RNA, 19 nt, Homo sapiens
  misc_RNA (1)...(19): siRNA sense strand
agacaaucaaugaaggaaa

SEQ ID NO: 2544066 - RNA, 19 nt, Homo sapiens
  misc_RNA (1)...(19): siRNA sense strand
gcaaagaauuggaaccaga

SEQ ID NO: 2544067 - RNA, 19 nt, Homo sapiens
  misc_RNA (1)...(19): siRNA sense strand
caggagaggaagaggaaaa

SEQ ID NO: 2544068 - RNA, 19 nt, Homo sapiens
  misc_RNA (1)...(19): siRNA sense strand
gggacauaauagagauaga

SEQ ID NO: 2544069 - RNA, 19 nt, Homo sapiens
  misc_RNA (1)...(19): siRNA sense strand
aggucgagcuagaaauaaa

SEQ ID NO: 2544070 - RNA, 19 nt, Homo sapiens
  misc_RNA (1)...(19): siRNA sense strand
ccagagagcaagagcaaaa

SEQ ID NO: 2544071 - RNA, 19 nt, Homo sapiens
  misc_RNA (1)...(19): siRNA sense strand
caguacauccagagagcaa

SEQ ID NO: 2544072 - RNA, 19 nt, Homo sapiens
  misc_RNA (1)...(19): siRNA sense strand
caaaggaaccggcgaauau

SEQ ID NO: 2544073 - RNA, 19 nt, Homo sapiens
  misc_RNA (1)...(19): siRNA sense strand
ggaucaaaggauaagaauu

SEQ ID NO: 2544074 - RNA, 19 nt, Homo sapiens
  misc_RNA (1)...(19): siRNA sense strand
ggaaaaggaaauagcgauu

SEQ ID NO: 2544075 - RNA, 19 nt, Homo sapiens
  misc_RNA (1)...(19): siRNA sense strand
caaaaggaucaaaggauaa

SEQ ID NO: 2544076 - RNA, 19 nt, Homo sapiens
  misc_RNA (1)...(19): siRNA sense strand
agguuaagauggaggagga

SEQ ID NO: 2544077 - RNA, 19 nt, Homo sapiens
  misc_RNA (1)...(19): siRNA sense strand
gaguagaagucgaagcagu

SEQ ID NO: 2544078 - RNA, 19 nt, Homo sapiens
  misc_RNA (1)...(19): siRNA sense strand
agagaaagcagguugaaaa

SEQ ID NO: 2544079 - RNA, 19 nt, Homo sapiens
  misc_RNA (1)...(19): siRNA sense strand
agugagaagcagcaggaua

SEQ ID NO: 2544080 - RNA, 19 nt, Homo sapiens
  misc_RNA (1)...(19): siRNA sense strand
gaguagucgaucaggcaaa

SEQ ID NO: 2544081 - RNA, 19 nt, Homo sapiens
  misc_RNA (1)...(19): siRNA sense strand
cgucggaccagaagagaau

SEQ ID NO: 2544082 - RNA, 19 nt, Homo sapiens
  misc_RNA (1)...(19): siRNA sense strand
aggaagaggaaaaggaaau

SEQ ID NO: 2544083 - RNA, 19 nt, Homo sapiens
  misc_RNA (1)...(19): siRNA sense strand
agagaaugucagugcuuua

SEQ ID NO: 2544084 - RNA, 19 nt, Homo sapiens
  misc_RNA (1)...(19): siRNA sense strand
ggaaaaggccaaagagagu

SEQ ID NO: 2544085 - RNA, 19 nt, Homo sapiens
  misc_RNA (1)...(19): siRNA sense strand
gcgccaggaaauugaacaa

SEQ ID NO: 2544086 - RNA, 19 nt, Homo sapiens
  misc_RNA (1)...(19): siRNA sense strand
ggaaugaacauaaugccaa

SEQ ID NO: 2544087 - RNA, 19 nt, Homo sapiens
  misc_RNA (1)...(19): siRNA sense strand
gcuagagaugguugagaau

SEQ ID NO: 2544088 - RNA, 19 nt, Homo sapiens
  misc_RNA (1)...(19): siRNA sense strand
aguagaagucgaagcagua

SEQ ID NO: 2544089 - RNA, 19 nt, Homo sapiens
  misc_RNA (1)...(19): siRNA sense strand
cggaggaugaugauguuaa

SEQ ID NO: 2544090 - RNA, 19 nt, Homo sapiens
  misc_RNA (1)...(19): siRNA sense strand
aggagguaauggaaacuaa

SEQ ID NO: 2544091 - RNA, 19 nt, Homo sapiens
  misc_RNA (1)...(19): siRNA sense strand
ugaagagaggcgugcuaaa

SEQ ID NO: 2544092 - RNA, 19 nt, Homo sapiens
  misc_RNA (1)...(19): siRNA sense strand
gcaaaggaaccggcgaaua

SEQ ID NO: 2544093 - RNA, 19 nt, Homo sapiens
  misc_RNA (1)...(19): siRNA sense strand
ggaugaaaagggaaagcaa

SEQ ID NO: 2544094 - RNA, 19 nt, Homo sapiens
  misc_RNA (1)...(19): siRNA sense strand
gguaagggaaagugagaag

SEQ ID NO: 2544095 - RNA, 19 nt, Homo sapiens
  misc_RNA (1)...(19): siRNA sense strand
uaguaguaguagugagagu

SEQ ID NO: 2544096 - RNA, 19 nt, Homo sapiens
  misc_RNA (1)...(19): siRNA sense strand
aagggauacuucaggacua

SEQ ID NO: 2544097 - RNA, 19 nt, Homo sapiens
  misc_RNA (1)...(19): siRNA sense strand
aagcaaaggaaccggcgaa

SEQ ID NO: 2544098 - RNA, 19 nt, Homo sapiens
  misc_RNA (1)...(19): siRNA sense strand
agguagacgcaucgaauuu

SEQ ID NO: 2544099 - RNA, 19 nt, Homo sapiens
  misc_RNA (1)...(19): siRNA sense strand
aaauagaggaagcaggaga

SEQ ID NO: 2544100 - RNA, 19 nt, Homo sapiens
  misc_RNA (1)...(19): siRNA sense strand
uguagaaccuucagaaaau

SEQ ID NO: 2544101 - RNA, 19 nt, Homo sapiens
  misc_RNA (1)...(19): siRNA sense strand
gguugaaaaugaaaggaga

SEQ ID NO: 2544102 - RNA, 19 nt, Homo sapiens
  misc_RNA (1)...(19): siRNA sense strand
agcaucagguggugcguaa

SEQ ID NO: 2544103 - RNA, 19 nt, Homo sapiens
  misc_RNA (1)...(19): siRNA sense strand
cagcagagauaguagcagu

SEQ ID NO: 2544104 - RNA, 19 nt, Homo sapiens
  misc_RNA (1)...(19): siRNA sense strand
aguaguagugagaguagaa

SEQ ID NO: 2544105 - RNA, 19 nt, Homo sapiens
  misc_RNA (1)...(19): siRNA sense strand
agguagaggacgugguagu

SEQ ID NO: 2544106 - RNA, 19 nt, Homo sapiens
  misc_RNA (1)...(19): siRNA sense strand
ggaaacugagguaagggaa

SEQ ID NO: 2544107 - RNA, 19 nt, Homo sapiens
  misc_RNA (1)...(19): siRNA sense strand
aggaagcaggagaggaaga

SEQ ID NO: 2544108 - RNA, 19 nt, Homo sapiens
  misc_RNA (1)...(19): siRNA sense strand
guguagaaccuucagaaaa

SEQ ID NO: 2544109 - RNA, 19 nt, Homo sapiens
  misc_RNA (1)...(19): siRNA sense strand
aagcaagaguagaagucga

SEQ ID NO: 2544110 - RNA, 19 nt, Homo sapiens
  misc_RNA (1)...(19): siRNA sense strand
gaugaaaagggaaagcaaa

SEQ ID NO: 2544111 - RNA, 19 nt, Homo sapiens
  misc_RNA (1)...(19): siRNA sense strand
aguugaaaguguagaaccu

SEQ ID NO: 2544112 - RNA, 19 nt, Homo sapiens
  misc_RNA (1)...(19): siRNA sense strand
gaggaagaggaaaaggaaa

SEQ ID NO: 2544113 - RNA, 19 nt, Homo sapiens
  misc_RNA (1)...(19): siRNA sense strand
agaacguggaugagaacau

SEQ ID NO: 2544114 - RNA, 19 nt, Homo sapiens
  misc_RNA (1)...(19): siRNA sense strand
aggaaauggagguuaagau

SEQ ID NO: 2544115 - RNA, 19 nt, Homo sapiens
  misc_RNA (1)...(19): siRNA sense strand
gaaaaugaaaggagagaac

SEQ ID NO: 2544116 - RNA, 19 nt, Homo sapiens
  misc_RNA (1)...(19): siRNA sense strand
guuaagauggaggaggaaa

SEQ ID NO: 2544117 - RNA, 19 nt, Homo sapiens
  misc_RNA (1)...(19): siRNA sense strand
ccgaaugacgugaggccca

SEQ ID NO: 2544118 - RNA, 19 nt, Homo sapiens
  misc_RNA (1)...(19): siRNA sense strand
aggacgugguaguuuauua

SEQ ID NO: 2544119 - RNA, 19 nt, Homo sapiens
  misc_RNA (1)...(19): siRNA sense strand
guaagguggcucagcgaga

SEQ ID NO: 2544120 - RNA, 19 nt, Homo sapiens
  misc_RNA (1)...(19): siRNA sense strand
cuaccugagaggaaggauu

SEQ ID NO: 2544121 - RNA, 19 nt, Homo sapiens
  misc_RNA (1)...(19): siRNA sense strand
gggugaagcuggagagaau

SEQ ID NO: 2544122 - RNA, 19 nt, Homo sapiens
  misc_RNA (1)...(19): siRNA sense strand
gcaaagaauucacaaguaa

SEQ ID NO: 2544123 - RNA, 19 nt, Homo sapiens
  misc_RNA (1)...(19): siRNA sense strand
cgucgugacuugaggauaa

SEQ ID NO: 2544124 - RNA, 19 nt, Homo sapiens
  misc_RNA (1)...(19): siRNA sense strand
gagaauaucuggaaagaga

SEQ ID NO: 2544125 - RNA, 19 nt, Homo sapiens
  misc_RNA (1)...(19): siRNA sense strand
agacagggauggugauaaa

SEQ ID NO: 2544126 - RNA, 19 nt, Homo sapiens
  misc_RNA (1)...(19): siRNA sense strand
agacaaacaccgagaagaa

SEQ ID NO: 2544127 - RNA, 19 nt, Homo sapiens
  misc_RNA (1)...(19): siRNA sense strand
uggacaagcugaagauaaa

SEQ ID NO: 2544128 - RNA, 19 nt, Homo sapiens
  misc_RNA (1)...(19): siRNA sense strand
caagaagaguuaagagauu

SEQ ID NO: 2544129 - RNA, 19 nt, Homo sapiens
  misc_RNA (1)...(19): siRNA sense strand
gcacagaggugaagcccaa

SEQ ID NO: 2544130 - RNA, 19 nt, Homo sapiens
  misc_RNA (1)...(19): siRNA sense strand
gaauaauguuugagguaca

SEQ ID NO: 2544131 - RNA, 19 nt, Homo sapiens
  misc_RNA (1)...(19): siRNA sense strand
ggagguaauugcagacaaa

SEQ ID NO: 2544132 - RNA, 19 nt, Homo sapiens
  misc_RNA (1)...(19): siRNA sense strand
guucaugagcuaagaauaa

SEQ ID NO: 2544133 - RNA, 19 nt, Homo sapiens
  misc_RNA (1)...(19): siRNA sense strand
ggaugaaucuaauguguua

SEQ ID NO: 2544134 - RNA, 19 nt, Homo sapiens
  misc_RNA (1)...(19): siRNA sense strand
agauaaagagggagaaaga

SEQ ID NO: 2544135 - RNA, 19 nt, Homo sapiens
  misc_RNA (1)...(19): siRNA sense strand
gccaagagcuggaggugaa

SEQ ID NO: 2544136 - RNA, 19 nt, Homo sapiens
  misc_RNA (1)...(19): siRNA sense strand
gagaauaauguuugaggua

SEQ ID NO: 2544137 - RNA, 19 nt, Homo sapiens
  misc_RNA (1)...(19): siRNA sense strand
gggaagacuuugaugaaga

SEQ ID NO: 2544138 - RNA, 19 nt, Homo sapiens
  misc_RNA (1)...(19): siRNA sense strand
ggucaaagaaguaugaauu

SEQ ID NO: 2544139 - RNA, 19 nt, Homo sapiens
  misc_RNA (1)...(19): siRNA sense strand
cgugauugaugcagauaaa

SEQ ID NO: 2544140 - RNA, 19 nt, Homo sapiens
  misc_RNA (1)...(19): siRNA sense strand
gugcuuaagcugaaaguua

SEQ ID NO: 2544141 - RNA, 19 nt, Homo sapiens
  misc_RNA (1)...(19): siRNA sense strand
gagagaauccagaagauaa

SEQ ID NO: 2544142 - RNA, 19 nt, Homo sapiens
  misc_RNA (1)...(19): siRNA sense strand
ggagaaaagccaaaaguua

SEQ ID NO: 2544143 - RNA, 19 nt, Homo sapiens
  misc_RNA (1)...(19): siRNA sense strand
cauaagacauucucggaaa

SEQ ID NO: 2544144 - RNA, 19 nt, Homo sapiens
  misc_RNA (1)...(19): siRNA sense strand
gaucaaacaugacggaauu

SEQ ID NO: 2544145 - RNA, 19 nt, Homo sapiens
  misc_RNA (1)...(19): siRNA sense strand
gggaaggagaggagguuau

SEQ ID NO: 2544146 - RNA, 19 nt, Homo sapiens
  misc_RNA (1)...(19): siRNA sense strand
ucacacacgugcugagaaa

SEQ ID NO: 2544147 - RNA, 19 nt, Homo sapiens
  misc_RNA (1)...(19): siRNA sense strand
ccaaggagcuaaagaacau

SEQ ID NO: 2544148 - RNA, 19 nt, Homo sapiens
  misc_RNA (1)...(19): siRNA sense strand
ggaucaaacaugacggaau

SEQ ID NO: 2544149 - RNA, 19 nt, Homo sapiens
  misc_RNA (1)...(19): siRNA sense strand
guggaauacuuaugaacua

SEQ ID NO: 2544150 - RNA, 19 nt, Homo sapiens
  misc_RNA (1)...(19): siRNA sense strand
ggaaagauccagaaagcau

SEQ ID NO: 2544151 - RNA, 19 nt, Homo sapiens
  misc_RNA (1)...(19): siRNA sense strand
gagaggagguuauguuuaa

SEQ ID NO: 2544152 - RNA, 19 nt, Homo sapiens
  misc_RNA (1)...(19): siRNA sense strand
gcgcuggaauugacagaua

SEQ ID NO: 2544153 - RNA, 19 nt, Homo sapiens
  misc_RNA (1)...(19): siRNA sense strand
gagcagagcugggugaaua

SEQ ID NO: 2544154 - RNA, 19 nt, Homo sapiens
  misc_RNA (1)...(19): siRNA sense strand
ggaugaugaguaugagaaa

SEQ ID NO: 2544155 - RNA, 19 nt, Homo sapiens
  misc_RNA (1)...(19): siRNA sense strand
cagaagauaaagagggaga

SEQ ID NO: 2544156 - RNA, 19 nt, Homo sapiens
  misc_RNA (1)...(19): siRNA sense strand
agguacaggacuugaaaua

SEQ ID NO: 2544157 - RNA, 19 nt, Homo sapiens
  misc_RNA (1)...(19): siRNA sense strand
gaacgugaacgaugggaaa

SEQ ID NO: 2544158 - RNA, 19 nt, Homo sapiens
  misc_RNA (1)...(19): siRNA sense strand
uuacaaagccagugucuaa

SEQ ID NO: 2544159 - RNA, 19 nt, Homo sapiens
  misc_RNA (1)...(19): siRNA sense strand
gccaagaaauccaggaaca

SEQ ID NO: 2544160 - RNA, 19 nt, Homo sapiens
  misc_RNA (1)...(19): siRNA sense strand
gaaagaagaagcagaccaa

SEQ ID NO: 2544161 - RNA, 19 nt, Homo sapiens
  misc_RNA (1)...(19): siRNA sense strand
gcauguugcuuaugaagaa

SEQ ID NO: 2544162 - RNA, 19 nt, Homo sapiens
  misc_RNA (1)...(19): siRNA sense strand
ccuacaaacuugacccaua

SEQ ID NO: 2544163 - RNA, 19 nt, Homo sapiens
  misc_RNA (1)...(19): siRNA sense strand
ugacugaggaagagaaauu

SEQ ID NO: 2544164 - RNA, 19 nt, Homo sapiens
  misc_RNA (1)...(19): siRNA sense strand
ggugaauacaucagaagaa

SEQ ID NO: 2544165 - RNA, 19 nt, Homo sapiens
  misc_RNA (1)...(19): siRNA sense strand
cagcaagaaugucgcuaaa

SEQ ID NO: 2544166 - RNA, 19 nt, Homo sapiens
  misc_RNA (1)...(19): siRNA sense strand
ccauaagggagaagaugaa

SEQ ID NO: 2544167 - RNA, 19 nt, Homo sapiens
  misc_RNA (1)...(19): siRNA sense strand
uggagaaccugaagagaga

SEQ ID NO: 2544168 - RNA, 19 nt, Homo sapiens
  misc_RNA (1)...(19): siRNA sense strand
ugucaaagcucuuggccau

SEQ ID NO: 2544169 - RNA, 19 nt, Homo sapiens
  misc_RNA (1)...(19): siRNA sense strand
gaagauaaagagggagaaa

SEQ ID NO: 2544170 - RNA, 19 nt, Homo sapiens
  misc_RNA (1)...(19): siRNA sense strand
gaaaucaacuugccagaua

SEQ ID NO: 2544171 - RNA, 19 nt, Homo sapiens
  misc_RNA (1)...(19): siRNA sense strand
agauuaagguccauaggaa

SEQ ID NO: 2544172 - RNA, 19 nt, Homo sapiens
  misc_RNA (1)...(19): siRNA sense strand
gcugaaaagaagaagguua

SEQ ID NO: 2544173 - RNA, 19 nt, Homo sapiens
  misc_RNA (1)...(19): siRNA sense strand
auauggagauggagaagaa

SEQ ID NO: 2544174 - RNA, 19 nt, Homo sapiens
  misc_RNA (1)...(19): siRNA sense strand
agaagaagguuaugagcca

SEQ ID NO: 2544175 - RNA, 19 nt, Homo sapiens
  misc_RNA (1)...(19): siRNA sense strand
uugcaaagguucaggcaga

SEQ ID NO: 2544176 - RNA, 19 nt, Homo sapiens
  misc_RNA (1)...(19): siRNA sense strand
gaagaaggccaguguggua

SEQ ID NO: 2544177 - RNA, 19 nt, Homo sapiens
  misc_RNA (1)...(19): siRNA sense strand
ugaugaaggagaagaagaa

SEQ ID NO: 2544178 - RNA, 19 nt, Homo sapiens
  misc_RNA (1)...(19): siRNA sense strand
acauggagauugaaagaau

SEQ ID NO: 2544179 - RNA, 19 nt, Homo sapiens
  misc_RNA (1)...(19): siRNA sense strand
acgaauugacugaggaaga

SEQ ID NO: 2544180 - RNA, 19 nt, Homo sapiens
  misc_RNA (1)...(19): siRNA sense strand
ccaaggaggcgcuggaauu

SEQ ID NO: 2544181 - RNA, 19 nt, Homo sapiens
  misc_RNA (1)...(19): siRNA sense strand
gagaggagcugaagaaagu

SEQ ID NO: 2544182 - RNA, 19 nt, Homo sapiens
  misc_RNA (1)...(19): siRNA sense strand
gggcaauugcacagcuuaa

SEQ ID NO: 2544183 - RNA, 19 nt, Homo sapiens
  misc_RNA (1)...(19): siRNA sense strand
uaacagacuuggagaagau

SEQ ID NO: 2544184 - RNA, 19 nt, Homo sapiens
  misc_RNA (1)...(19): siRNA sense strand
gggagauggcuuuggaaga

SEQ ID NO: 2544185 - RNA, 19 nt, Homo sapiens
  misc_RNA (1)...(19): siRNA sense strand
gggaugaccucuucaacaa

SEQ ID NO: 2544186 - RNA, 19 nt, Homo sapiens
  misc_RNA (1)...(19): siRNA sense strand
gcguaagggcaaagaggau

SEQ ID NO: 2544187 - RNA, 19 nt, Homo sapiens
  misc_RNA (1)...(19): siRNA sense strand
agauaagagaaguguggaa

SEQ ID NO: 2544188 - RNA, 19 nt, Homo sapiens
  misc_RNA (1)...(19): siRNA sense strand
gcaagaaugucgcuaaauu

SEQ ID NO: 2544189 - RNA, 19 nt, Homo sapiens
  misc_RNA (1)...(19): siRNA sense strand
gagaagaaguugguggaau

SEQ ID NO: 2544190 - RNA, 19 nt, Homo sapiens
  misc_RNA (1)...(19): siRNA sense strand
ccaacgagguggagcagau

SEQ ID NO: 2544191 - RNA, 19 nt, Homo sapiens
  misc_RNA (1)...(19): siRNA sense strand
guggagagccaaagaucaa

SEQ ID NO: 2544192 - RNA, 19 nt, Homo sapiens
  misc_RNA (1)...(19): siRNA sense strand
cagaguggguugagaacuu

SEQ ID NO: 2544193 - RNA, 19 nt, Homo sapiens
  misc_RNA (1)...(19): siRNA sense strand
gaucaacgagcuagugaaa

SEQ ID NO: 2544194 - RNA, 19 nt, Homo sapiens
  misc_RNA (1)...(19): siRNA sense strand
augagaaacuucagguauu

SEQ ID NO: 2544195 - RNA, 19 nt, Homo sapiens
  misc_RNA (1)...(19): siRNA sense strand
agagaauccagaagauaaa

SEQ ID NO: 2544196 - RNA, 19 nt, Homo sapiens
  misc_RNA (1)...(19): siRNA sense strand
ugaugcagcuggagaagaa

SEQ ID NO: 2544197 - RNA, 19 nt, Homo sapiens
  misc_RNA (1)...(19): siRNA sense strand
ucgcuaaauuacagaaaca

SEQ ID NO: 2544198 - RNA, 19 nt, Homo sapiens
  misc_RNA (1)...(19): siRNA sense strand
cagaaagaacuuagagagu

SEQ ID NO: 2544199 - RNA, 19 nt, Homo sapiens
  misc_RNA (1)...(19): siRNA sense strand
ggacauaaagacauucaaa

SEQ ID NO: 2544200 - RNA, 19 nt, Homo sapiens
  misc_RNA (1)...(19): siRNA sense strand
uggcaaaccugcaaaugaa

SEQ ID NO: 2544201 - RNA, 19 nt, Homo sapiens
  misc_RNA (1)...(19): siRNA sense strand
acucagugcuggaugacaa

SEQ ID NO: 2544202 - RNA, 19 nt, Homo sapiens
  misc_RNA (1)...(19): siRNA sense strand
cagcacuucuugagaggaa

SEQ ID NO: 2544203 - RNA, 19 nt, Homo sapiens
  misc_RNA (1)...(19): siRNA sense strand
caauaaacaccgcuguaaa

SEQ ID NO: 2544204 - RNA, 19 nt, Homo sapiens
  misc_RNA (1)...(19): siRNA sense strand
ggaucaaacagcugcagaa

SEQ ID NO: 2544205 - RNA, 19 nt, Homo sapiens
  misc_RNA (1)...(19): siRNA sense strand
ucaaacagcugcagaacau

SEQ ID NO: 2544206 - RNA, 19 nt, Homo sapiens
  misc_RNA (1)...(19): siRNA sense strand
gaucacaaauguugcaaaa

SEQ ID NO: 2544207 - RNA, 19 nt, Homo sapiens
  misc_RNA (1)...(19): siRNA sense strand
ggaaguaaaccuugcuuau

SEQ ID NO: 2544208 - RNA, 19 nt, Homo sapiens
  misc_RNA (1)...(19): siRNA sense strand
cggugaugaaggagaagaa

SEQ ID NO: 2544209 - RNA, 19 nt, Homo sapiens
  misc_RNA (1)...(19): siRNA sense strand
uaagcaaacugauguguua

SEQ ID NO: 2544210 - RNA, 19 nt, Homo sapiens
  misc_RNA (1)...(19): siRNA sense strand
ccacagacccuggaagaaa

SEQ ID NO: 2544211 - RNA, 19 nt, Homo sapiens
  misc_RNA (1)...(19): siRNA sense strand
cgacggacauaaagacauu

SEQ ID NO: 2544212 - RNA, 19 nt, Homo sapiens
  misc_RNA (1)...(19): siRNA sense strand
ccaacaacgccgagagagu

SEQ ID NO: 2544213 - RNA, 19 nt, Homo sapiens
  misc_RNA (1)...(19): siRNA sense strand
cuaaggugaacuugaaaua

SEQ ID NO: 2544214 - RNA, 19 nt, Homo sapiens
  misc_RNA (1)...(19): siRNA sense strand
ggagauggcuuuggaagaa

SEQ ID NO: 2544215 - RNA, 19 nt, Homo sapiens
  misc_RNA (1)...(19): siRNA sense strand
ucaacaaggucaaagaaca

SEQ ID NO: 2544216 - RNA, 19 nt, Homo sapiens
  misc_RNA (1)...(19): siRNA sense strand
augcagaaaccaagaaaga

SEQ ID NO: 2544217 - RNA, 19 nt, Homo sapiens
  misc_RNA (1)...(19): siRNA sense strand
ccacccaaugugagaauaa

SEQ ID NO: 2544218 - RNA, 19 nt, Homo sapiens
  misc_RNA (1)...(19): siRNA sense strand
gcaacguggcgcaguauaa

SEQ ID NO: 2544219 - RNA, 19 nt, Homo sapiens
  misc_RNA (1)...(19): siRNA sense strand
ggaacugccuuacaggaaa

SEQ ID NO: 2544220 - RNA, 19 nt, Homo sapiens
  misc_RNA (1)...(19): siRNA sense strand
aagaauaaccaaucaggua

SEQ ID NO: 2544221 - RNA, 19 nt, Homo sapiens
  misc_RNA (1)...(19): siRNA sense strand
aauucauacuggagggaaa

SEQ ID NO: 2544222 - RNA, 19 nt, Homo sapiens
  misc_RNA (1)...(19): siRNA sense strand
gcaaaauauuccaguguaa

SEQ ID NO: 2544223 - RNA, 19 nt, Homo sapiens
  misc_RNA (1)...(19): siRNA sense strand
guguaaagaauguggaaaa

SEQ ID NO: 2544224 - RNA, 19 nt, Homo sapiens
  misc_RNA (1)...(19): siRNA sense strand
uauucauacuggagagaaa

SEQ ID NO: 2544225 - RNA, 19 nt, Homo sapiens
  misc_RNA (1)...(19): siRNA sense strand
auguaaagaauguggcaaa

SEQ ID NO: 2544226 - RNA, 19 nt, Homo sapiens
  misc_RNA (1)...(19): siRNA sense strand
auguaaagaauguggcaaa

SEQ ID NO: 2544227 - RNA, 19 nt, Homo sapiens
  misc_RNA (1)...(19): siRNA sense strand
aauucauacugcagagaaa

SEQ ID NO: 2544228 - RNA, 19 nt, Homo sapiens
  misc_RNA (1)...(19): siRNA sense strand
auaugaagaauguggcaaa

SEQ ID NO: 2544229 - RNA, 19 nt, Homo sapiens
  misc_RNA (1)...(19): siRNA sense strand
gcuguaaacauguggauga

SEQ ID NO: 2544230 - RNA, 19 nt, Homo sapiens
  misc_RNA (1)...(19): siRNA sense strand
aauucauacgggagagaaa

SEQ ID NO: 2544231 - RNA, 19 nt, Homo sapiens
  misc_RNA (1)...(19): siRNA sense strand
augugaagaaugugacaaa

SEQ ID NO: 2544232 - RNA, 19 nt, Homo sapiens
  misc_RNA (1)...(19): siRNA sense strand
augugaagaauguggcaaa

SEQ ID NO: 2544233 - RNA, 19 nt, Homo sapiens
  misc_RNA (1)...(19): siRNA sense strand
augugaagaauguggcaaa

SEQ ID NO: 2544234 - RNA, 19 nt, Homo sapiens
  misc_RNA (1)...(19): siRNA sense strand
augugaagaauguggcaaa

SEQ ID NO: 2544235 - RNA, 19 nt, Homo sapiens
  misc_RNA (1)...(19): siRNA sense strand
cuaaagagaaacucaacaa

SEQ ID NO: 2544236 - RNA, 19 nt, Homo sapiens
  misc_RNA (1)...(19): siRNA sense strand
augugaagaauguggcaaa

SEQ ID NO: 2544237 - RNA, 19 nt, Homo sapiens
  misc_RNA (1)...(19): siRNA sense strand
augugaagaauguggcaaa

SEQ ID NO: 2544238 - RNA, 19 nt, Homo sapiens
  misc_RNA (1)...(19): siRNA sense strand
ccuuaauaaacaggagaaa

SEQ ID NO: 2544239 - RNA, 19 nt, Homo sapiens
  misc_RNA (1)...(19): siRNA sense strand
agagaagacauacaggaaa

SEQ ID NO: 2544240 - RNA, 19 nt, Homo sapiens
  misc_RNA (1)...(19): siRNA sense strand
aagagaagacauacaggaa

SEQ ID NO: 2544241 - RNA, 19 nt, Homo sapiens
  misc_RNA (1)...(19): siRNA sense strand
acucaacaaaugugaagaa

SEQ ID NO: 2544242 - RNA, 19 nt, Homo sapiens
  misc_RNA (1)...(19): siRNA sense strand
acucaacaaaugugaagaa

SEQ ID NO: 2544243 - RNA, 19 nt, Homo sapiens
  misc_RNA (1)...(19): siRNA sense strand
acaccguacuauacauaaa

SEQ ID NO: 2544244 - RNA, 19 nt, Homo sapiens
  misc_RNA (1)...(19): siRNA sense strand
aaccaauguuugacagcua

SEQ ID NO: 2544245 - RNA, 19 nt, Homo sapiens
  misc_RNA (1)...(19): siRNA sense strand
gcuuauaaccgauucucaa

SEQ ID NO: 2544246 - RNA, 19 nt, Homo sapiens
  misc_RNA (1)...(19): siRNA sense strand
aagacauacaggaaacaaa

SEQ ID NO: 2544247 - RNA, 19 nt, Homo sapiens
  misc_RNA (1)...(19): siRNA sense strand
gaagaaugugacagagcuu

SEQ ID NO: 2544248 - RNA, 19 nt, Homo sapiens
  misc_RNA (1)...(19): siRNA sense strand
ccuacaaaugugaagaaca

SEQ ID NO: 2544249 - RNA, 19 nt, Homo sapiens
  misc_RNA (1)...(19): siRNA sense strand
ggagauuauggcagagcuu

SEQ ID NO: 2544250 - RNA, 19 nt, Homo sapiens
  misc_RNA (1)...(19): siRNA sense strand
augugaagaauguggaaaa

SEQ ID NO: 2544251 - RNA, 19 nt, Homo sapiens
  misc_RNA (1)...(19): siRNA sense strand
augugaagaauguggaaaa

SEQ ID NO: 2544252 - RNA, 19 nt, Homo sapiens
  misc_RNA (1)...(19): siRNA sense strand
augugaagaauguggaaaa

SEQ ID NO: 2544253 - RNA, 19 nt, Homo sapiens
  misc_RNA (1)...(19): siRNA sense strand
augugaagaauguggaaaa

SEQ ID NO: 2544254 - RNA, 19 nt, Homo sapiens
  misc_RNA (1)...(19): siRNA sense strand
ggagaaaagcccuacaaau

SEQ ID NO: 2544255 - RNA, 19 nt, Homo sapiens
  misc_RNA (1)...(19): siRNA sense strand
ucacaacuuacuaggcaua

SEQ ID NO: 2544256 - RNA, 19 nt, Homo sapiens
  misc_RNA (1)...(19): siRNA sense strand
uggccagagcagaacauaa

SEQ ID NO: 2544257 - RNA, 19 nt, Homo sapiens
  misc_RNA (1)...(19): siRNA sense strand
aagaaaaggcuguaaacau

SEQ ID NO: 2544258 - RNA, 19 nt, Homo sapiens
  misc_RNA (1)...(19): siRNA sense strand
ccuauaaaugugaggaaug

SEQ ID NO: 2544259 - RNA, 19 nt, Homo sapiens
  misc_RNA (1)...(19): siRNA sense strand
ccucaacccuuaauagaca

SEQ ID NO: 2544260 - RNA, 19 nt, Homo sapiens
  misc_RNA (1)...(19): siRNA sense strand
cuaacucagcauagaagaa

SEQ ID NO: 2544261 - RNA, 19 nt, Homo sapiens
  misc_RNA (1)...(19): siRNA sense strand
acucaaaccuaauuaacca

SEQ ID NO: 2544262 - RNA, 19 nt, Homo sapiens
  misc_RNA (1)...(19): siRNA sense strand
augugaggaauguggcaaa

SEQ ID NO: 2544263 - RNA, 19 nt, Homo sapiens
  misc_RNA (1)...(19): siRNA sense strand
ggagggaaacucaacaaau

SEQ ID NO: 2544264 - RNA, 19 nt, Homo sapiens
  misc_RNA (1)...(19): siRNA sense strand
ggaagagaaacccuacaaa

SEQ ID NO: 2544265 - RNA, 19 nt, Homo sapiens
  misc_RNA (1)...(19): siRNA sense strand
gcauagaagaauucauacu

SEQ ID NO: 2544266 - RNA, 19 nt, Homo sapiens
  misc_RNA (1)...(19): siRNA sense strand
aggaagaggaagaggaaga

SEQ ID NO: 2544267 - RNA, 19 nt, Homo sapiens
  misc_RNA (1)...(19): siRNA sense strand
aggaggaggaagaggaaga

SEQ ID NO: 2544268 - RNA, 19 nt, Homo sapiens
  misc_RNA (1)...(19): siRNA sense strand
ggagaaagccaaagaggag

SEQ ID NO: 2544269 - RNA, 19 nt, Homo sapiens
  misc_RNA (1)...(19): siRNA sense strand
ggccaaagccacagccaga

SEQ ID NO: 2544270 - RNA, 19 nt, Homo sapiens
  misc_RNA (1)...(19): siRNA sense strand
gggagaaagccaaagagga

SEQ ID NO: 2544271 - RNA, 19 nt, Homo sapiens
  misc_RNA (1)...(19): siRNA sense strand
aggaggaggaggaagaaga

SEQ ID NO: 2544272 - RNA, 19 nt, Homo sapiens
  misc_RNA (1)...(19): siRNA sense strand
gggaggaggaggaagagga

SEQ ID NO: 2544273 - RNA, 19 nt, Homo sapiens
  misc_RNA (1)...(19): siRNA sense strand
ccaguagcacggaggaaaa

SEQ ID NO: 2544274 - RNA, 19 nt, Homo sapiens
  misc_RNA (1)...(19): siRNA sense strand
gaagaggaaauaagagcca

SEQ ID NO: 2544275 - RNA, 19 nt, Homo sapiens
  misc_RNA (1)...(19): siRNA sense strand
ggaaauaagagccagcguu

SEQ ID NO: 2544276 - RNA, 19 nt, Homo sapiens
  misc_RNA (1)...(19): siRNA sense strand
aagccaaagaggagaugca

SEQ ID NO: 2544277 - RNA, 19 nt, Homo sapiens
  misc_RNA (1)...(19): siRNA sense strand
aggaggaagaggaagagga

SEQ ID NO: 2544278 - RNA, 19 nt, Homo sapiens
  misc_RNA (1)...(19): siRNA sense strand
agaaagccaaagaggagau

SEQ ID NO: 2544279 - RNA, 19 nt, Homo sapiens
  misc_RNA (1)...(19): siRNA sense strand
aagaagaaggggaggagga

SEQ ID NO: 2544280 - RNA, 19 nt, Homo sapiens
  misc_RNA (1)...(19): siRNA sense strand
uggucaaggucaagggcaa

SEQ ID NO: 2544281 - RNA, 19 nt, Homo sapiens
  misc_RNA (1)...(19): siRNA sense strand
ggaaagaagagaaggccau

SEQ ID NO: 2544282 - RNA, 19 nt, Homo sapiens
  misc_RNA (1)...(19): siRNA sense strand
acgccaagcaggaggauau

SEQ ID NO: 2544283 - RNA, 19 nt, Homo sapiens
  misc_RNA (1)...(19): siRNA sense strand
acguugagcuggaggccaa

SEQ ID NO: 2544284 - RNA, 19 nt, Homo sapiens
  misc_RNA (1)...(19): siRNA sense strand
uggaggagcugcaggccua

SEQ ID NO: 2544285 - RNA, 19 nt, Homo sapiens
  misc_RNA (1)...(19): siRNA sense strand
ccaaggagaugaagcggau

SEQ ID NO: 2544286 - RNA, 19 nt, Homo sapiens
  misc_RNA (1)...(19): siRNA sense strand
agaaagaggagauggagga

SEQ ID NO: 2544287 - RNA, 19 nt, Homo sapiens
  misc_RNA (1)...(19): siRNA sense strand
ugaacaugcgugugggaau

SEQ ID NO: 2544288 - RNA, 19 nt, Homo sapiens
  misc_RNA (1)...(19): siRNA sense strand
cagaggagaaagaggagau

SEQ ID NO: 2544289 - RNA, 19 nt, Homo sapiens
  misc_RNA (1)...(19): siRNA sense strand
ccuacgacaaggugggcaa

SEQ ID NO: 2544290 - RNA, 19 nt, Homo sapiens
  misc_RNA (1)...(19): siRNA sense strand
ggucaaggucaagggcaaa

SEQ ID NO: 2544291 - RNA, 19 nt, Homo sapiens
  misc_RNA (1)...(19): siRNA sense strand
ggucugagcacguccgcaa

SEQ ID NO: 2544292 - RNA, 19 nt, Homo sapiens
  misc_RNA (1)...(19): siRNA sense strand
ccacagaggagaaagagga

SEQ ID NO: 2544293 - RNA, 19 nt, Homo sapiens
  misc_RNA (1)...(19): siRNA sense strand
cggacaaacuggagcggcu

SEQ ID NO: 2544294 - RNA, 19 nt, Homo sapiens
  misc_RNA (1)...(19): siRNA sense strand
aggagaaagaggagaugga

SEQ ID NO: 2544295 - RNA, 19 nt, Homo sapiens
  misc_RNA (1)...(19): siRNA sense strand
uggcguugcugcagauauu

SEQ ID NO: 2544296 - RNA, 19 nt, Homo sapiens
  misc_RNA (1)...(19): siRNA sense strand
ccauggagaugaaagcaga

SEQ ID NO: 2544297 - RNA, 19 nt, Homo sapiens
  misc_RNA (1)...(19): siRNA sense strand
cggaaagaagagaaggcca

SEQ ID NO: 2544298 - RNA, 19 nt, Homo sapiens
  misc_RNA (1)...(19): siRNA sense strand
agccugacuuagagaagaa

SEQ ID NO: 2544299 - RNA, 19 nt, Homo sapiens
  misc_RNA (1)...(19): siRNA sense strand
aagcagacaucaacgccaa

SEQ ID NO: 2544300 - RNA, 19 nt, Homo sapiens
  misc_RNA (1)...(19): siRNA sense strand
ccaugaucgccaagaugaa

SEQ ID NO: 2544301 - RNA, 19 nt, Homo sapiens
  misc_RNA (1)...(19): siRNA sense strand
gagcagggcuucuguggca

SEQ ID NO: 2544302 - RNA, 19 nt, Homo sapiens
  misc_RNA (1)...(19): siRNA sense strand
uggacaugaucgaggccau

SEQ ID NO: 2544303 - RNA, 19 nt, Homo sapiens
  misc_RNA (1)...(19): siRNA sense strand
cugaggaugaaguggauga

SEQ ID NO: 2544304 - RNA, 19 nt, Homo sapiens
  misc_RNA (1)...(19): siRNA sense strand
gggagaaccagcagcagga

SEQ ID NO: 2544305 - RNA, 19 nt, Homo sapiens
  misc_RNA (1)...(19): siRNA sense strand
gagcacaacaucagcgcga

SEQ ID NO: 2544306 - RNA, 19 nt, Homo sapiens
  misc_RNA (1)...(19): siRNA sense strand
agaugaagaucgggcucaa

SEQ ID NO: 2544307 - RNA, 19 nt, Homo sapiens
  misc_RNA (1)...(19): siRNA sense strand
uugcugacaucgagggcuu

SEQ ID NO: 2544308 - RNA, 19 nt, Homo sapiens
  misc_RNA (1)...(19): siRNA sense strand
aggccacagaggagaaaga

SEQ ID NO: 2544309 - RNA, 19 nt, Homo sapiens
  misc_RNA (1)...(19): siRNA sense strand
uugaagaccccaaggacaa

SEQ ID NO: 2544310 - RNA, 19 nt, Homo sapiens
  misc_RNA (1)...(19): siRNA sense strand
agaaguucccgucggacaa

SEQ ID NO: 2544311 - RNA, 19 nt, Homo sapiens
  misc_RNA (1)...(19): siRNA sense strand
ucaacauguucacgugcaa

SEQ ID NO: 2544312 - RNA, 19 nt, Homo sapiens
  misc_RNA (1)...(19): siRNA sense strand
acgccuaccucaaggagca

SEQ ID NO: 2544313 - RNA, 19 nt, Homo sapiens
  misc_RNA (1)...(19): siRNA sense strand
aagaggagauggaggagcu

SEQ ID NO: 2544314 - RNA, 19 nt, Homo sapiens
  misc_RNA (1)...(19): siRNA sense strand
aggccaacaacgagggugu

SEQ ID NO: 2544315 - RNA, 19 nt, Homo sapiens
  misc_RNA (1)...(19): siRNA sense strand
cauaagauuuacauccaga

SEQ ID NO: 2544316 - RNA, 19 nt, Homo sapiens
  misc_RNA (1)...(19): siRNA sense strand
gcuuggcacaggagcacaa

SEQ ID NO: 2544317 - RNA, 19 nt, Homo sapiens
  misc_RNA (1)...(19): siRNA sense strand
ucgggaagcuggugcucau

SEQ ID NO: 2544318 - RNA, 19 nt, Homo sapiens
  misc_RNA (1)...(19): siRNA sense strand
acaaggagcugguggccca

SEQ ID NO: 2544319 - RNA, 19 nt, Homo sapiens
  misc_RNA (1)...(19): siRNA sense strand
aggaaacccaggagagaua

SEQ ID NO: 2544320 - RNA, 19 nt, Homo sapiens
  misc_RNA (1)...(19): siRNA sense strand
ggagagauauagacggcua

SEQ ID NO: 2544321 - RNA, 19 nt, Homo sapiens
  misc_RNA (1)...(19): siRNA sense strand
aggcugaaguaaagaggaa

SEQ ID NO: 2544322 - RNA, 19 nt, Homo sapiens
  misc_RNA (1)...(19): siRNA sense strand
gaaguaaagaggaaggcua

SEQ ID NO: 2544323 - RNA, 19 nt, Homo sapiens
  misc_RNA (1)...(19): siRNA sense strand
agauguugccauugggaaa

SEQ ID NO: 2544324 - RNA, 19 nt, Homo sapiens
  misc_RNA (1)...(19): siRNA sense strand
gcuaaagagagaugcagaa

SEQ ID NO: 2544325 - RNA, 19 nt, Homo sapiens
  misc_RNA (1)...(19): siRNA sense strand
aggcagagacucagcacaa

SEQ ID NO: 2544326 - RNA, 19 nt, Homo sapiens
  misc_RNA (1)...(19): siRNA sense strand
uggaagaagaggaggcuga

SEQ ID NO: 2544327 - RNA, 19 nt, Homo sapiens
  misc_RNA (1)...(19): siRNA sense strand
aggacaagguagaugauca

SEQ ID NO: 2544328 - RNA, 19 nt, Homo sapiens
  misc_RNA (1)...(19): siRNA sense strand
aggaagaggaucaaggaga

SEQ ID NO: 2544329 - RNA, 19 nt, Homo sapiens
  misc_RNA (1)...(19): siRNA sense strand
gaaagaagaaucagggacu

SEQ ID NO: 2544330 - RNA, 19 nt, Homo sapiens
  misc_RNA (1)...(19): siRNA sense strand
cuaucaaagaagaguguuu

SEQ ID NO: 2544331 - RNA, 19 nt, Homo sapiens
  misc_RNA (1)...(19): siRNA sense strand
gugcagagaucaaggugga

SEQ ID NO: 2544332 - RNA, 19 nt, Homo sapiens
  misc_RNA (1)...(19): siRNA sense strand
cuuuagaggcagagacuca

SEQ ID NO: 2544333 - RNA, 19 nt, Homo sapiens
  misc_RNA (1)...(19): siRNA sense strand
agauguuauuguucggaaa

SEQ ID NO: 2544334 - RNA, 19 nt, Homo sapiens
  misc_RNA (1)...(19): siRNA sense strand
gaaauugacugcugagcga

SEQ ID NO: 2544335 - RNA, 19 nt, Homo sapiens
  misc_RNA (1)...(19): siRNA sense strand
cggucaagcaagagagacu

SEQ ID NO: 2544336 - RNA, 19 nt, Homo sapiens
  misc_RNA (1)...(19): siRNA sense strand
agggagaagugguggaaac

SEQ ID NO: 2544337 - RNA, 19 nt, Homo sapiens
  misc_RNA (1)...(19): siRNA sense strand
gugaggaugaggaggaaga

SEQ ID NO: 2544338 - RNA, 19 nt, Homo sapiens
  misc_RNA (1)...(19): siRNA sense strand
guacaauagcucagaccau

SEQ ID NO: 2544339 - RNA, 19 nt, Homo sapiens
  misc_RNA (1)...(19): siRNA sense strand
agaaagugauaaaggaaac

SEQ ID NO: 2544340 - RNA, 19 nt, Homo sapiens
  misc_RNA (1)...(19): siRNA sense strand
caguggagaugcagcgaga

SEQ ID NO: 2544341 - RNA, 19 nt, Homo sapiens
  misc_RNA (1)...(19): siRNA sense strand
ugucagacucauugaaaga

SEQ ID NO: 2544342 - RNA, 19 nt, Homo sapiens
  misc_RNA (1)...(19): siRNA sense strand
gggaaguacugcagcugga

SEQ ID NO: 2544343 - RNA, 19 nt, Homo sapiens
  misc_RNA (1)...(19): siRNA sense strand
caucaugcuuguauggaga

SEQ ID NO: 2544344 - RNA, 19 nt, Homo sapiens
  misc_RNA (1)...(19): siRNA sense strand
gugaaauauccaugaucau

SEQ ID NO: 2544345 - RNA, 19 nt, Homo sapiens
  misc_RNA (1)...(19): siRNA sense strand
ccgaaauaguagcuggagu

SEQ ID NO: 2544346 - RNA, 19 nt, Homo sapiens
  misc_RNA (1)...(19): siRNA sense strand
ugggaaaggcgaugagacu

SEQ ID NO: 2544347 - RNA, 19 nt, Homo sapiens
  misc_RNA (1)...(19): siRNA sense strand
agaaauuggaagaagagga

SEQ ID NO: 2544348 - RNA, 19 nt, Homo sapiens
  misc_RNA (1)...(19): siRNA sense strand
gagagauuguugaagcaga

SEQ ID NO: 2544349 - RNA, 19 nt, Homo sapiens
  misc_RNA (1)...(19): siRNA sense strand
ggucaaugagagugaaaug

SEQ ID NO: 2544350 - RNA, 19 nt, Homo sapiens
  misc_RNA (1)...(19): siRNA sense strand
gauacaugguggggagaua

SEQ ID NO: 2544351 - RNA, 19 nt, Homo sapiens
  misc_RNA (1)...(19): siRNA sense strand
agccuaaggaagaggauca

SEQ ID NO: 2544352 - RNA, 19 nt, Homo sapiens
  misc_RNA (1)...(19): siRNA sense strand
aaucaagcccuuugcagaa

SEQ ID NO: 2544353 - RNA, 19 nt, Homo sapiens
  misc_RNA (1)...(19): siRNA sense strand
ugaagauccuuuagaggca

SEQ ID NO: 2544354 - RNA, 19 nt, Homo sapiens
  misc_RNA (1)...(19): siRNA sense strand
uaaaagucuucgagggaga

SEQ ID NO: 2544355 - RNA, 19 nt, Homo sapiens
  misc_RNA (1)...(19): siRNA sense strand
gagagauauagacggcuaa

SEQ ID NO: 2544356 - RNA, 19 nt, Homo sapiens
  misc_RNA (1)...(19): siRNA sense strand
uugccaucauugaggacaa

SEQ ID NO: 2544357 - RNA, 19 nt, Homo sapiens
  misc_RNA (1)...(19): siRNA sense strand
agaaauggauaaugaaccu

SEQ ID NO: 2544358 - RNA, 19 nt, Homo sapiens
  misc_RNA (1)...(19): siRNA sense strand
uggcugagaagauggauau

SEQ ID NO: 2544359 - RNA, 19 nt, Homo sapiens
  misc_RNA (1)...(19): siRNA sense strand
agagauuguugaagcagau

SEQ ID NO: 2544360 - RNA, 19 nt, Homo sapiens
  misc_RNA (1)...(19): siRNA sense strand
cugcagaaccagagccagu

SEQ ID NO: 2544361 - RNA, 19 nt, Homo sapiens
  misc_RNA (1)...(19): siRNA sense strand
gauccgaagcacagcugaa

SEQ ID NO: 2544362 - RNA, 19 nt, Homo sapiens
  misc_RNA (1)...(19): siRNA sense strand
ucauugaggacaagguaga

SEQ ID NO: 2544363 - RNA, 19 nt, Homo sapiens
  misc_RNA (1)...(19): siRNA sense strand
aggaagauggugucaguga

SEQ ID NO: 2544364 - RNA, 19 nt, Homo sapiens
  misc_RNA (1)...(19): siRNA sense strand
auagacggcuaaagagaga

SEQ ID NO: 2544365 - RNA, 19 nt, Homo sapiens
  misc_RNA (1)...(19): siRNA sense strand
cagcagacuggaugagcuu

SEQ ID NO: 2544366 - RNA, 19 nt, Homo sapiens
  misc_RNA (1)...(19): siRNA sense strand
caggugaagagcuggauuu

SEQ ID NO: 2544367 - RNA, 19 nt, Homo sapiens
  misc_RNA (1)...(19): siRNA sense strand
gcuaaaagucuucgaggga

SEQ ID NO: 2544368 - RNA, 19 nt, Homo sapiens
  misc_RNA (1)...(19): siRNA sense strand
auauagacggcuaaagaga

SEQ ID NO: 2544369 - RNA, 19 nt, Homo sapiens
  misc_RNA (1)...(19): siRNA sense strand
gugaaauggcuguggcuuc

SEQ ID NO: 2544370 - RNA, 19 nt, Homo sapiens
  misc_RNA (1)...(19): siRNA sense strand
guaucaguuagcagagcaa

SEQ ID NO: 2544371 - RNA, 19 nt, Homo sapiens
  misc_RNA (1)...(19): siRNA sense strand
ggaucaaggagaaggcuac

SEQ ID NO: 2544372 - RNA, 19 nt, Homo sapiens
  misc_RNA (1)...(19): siRNA sense strand
agcgagaugucuuggaaca

SEQ ID NO: 2544373 - RNA, 19 nt, Homo sapiens
  misc_RNA (1)...(19): siRNA sense strand
ccgagagaagcuauguuua

SEQ ID NO: 2544374 - RNA, 19 nt, Homo sapiens
  misc_RNA (1)...(19): siRNA sense strand
ggcuaaagagagaugcaga

SEQ ID NO: 2544375 - RNA, 19 nt, Homo sapiens
  misc_RNA (1)...(19): siRNA sense strand
agagagaugcagaacuaau

SEQ ID NO: 2544376 - RNA, 19 nt, Homo sapiens
  misc_RNA (1)...(19): siRNA sense strand
caggugaggaugaggagga

SEQ ID NO: 2544377 - RNA, 19 nt, Homo sapiens
  misc_RNA (1)...(19): siRNA sense strand
gagucugggaucagugcua

SEQ ID NO: 2544378 - RNA, 19 nt, Homo sapiens
  misc_RNA (1)...(19): siRNA sense strand
caaucaagcccuuugcaga

SEQ ID NO: 2544379 - RNA, 19 nt, Homo sapiens
  misc_RNA (1)...(19): siRNA sense strand
aggaaacccaggagagaua

SEQ ID NO: 2544380 - RNA, 19 nt, Homo sapiens
  misc_RNA (1)...(19): siRNA sense strand
ggagagauauagacggcua

SEQ ID NO: 2544381 - RNA, 19 nt, Homo sapiens
  misc_RNA (1)...(19): siRNA sense strand
aggcugaaguaaagaggaa

SEQ ID NO: 2544382 - RNA, 19 nt, Homo sapiens
  misc_RNA (1)...(19): siRNA sense strand
gaaguaaagaggaaggcua

SEQ ID NO: 2544383 - RNA, 19 nt, Homo sapiens
  misc_RNA (1)...(19): siRNA sense strand
agauguugccauugggaaa

SEQ ID NO: 2544384 - RNA, 19 nt, Homo sapiens
  misc_RNA (1)...(19): siRNA sense strand
gcuaaagagagaugcagaa

SEQ ID NO: 2544385 - RNA, 19 nt, Homo sapiens
  misc_RNA (1)...(19): siRNA sense strand
aggcagagacucagcacaa

SEQ ID NO: 2544386 - RNA, 19 nt, Homo sapiens
  misc_RNA (1)...(19): siRNA sense strand
uggaagaagaggaggcuga

SEQ ID NO: 2544387 - RNA, 19 nt, Homo sapiens
  misc_RNA (1)...(19): siRNA sense strand
aggacaagguagaugauca

SEQ ID NO: 2544388 - RNA, 19 nt, Homo sapiens
  misc_RNA (1)...(19): siRNA sense strand
aggaagaggaucaaggaga

SEQ ID NO: 2544389 - RNA, 19 nt, Homo sapiens
  misc_RNA (1)...(19): siRNA sense strand
gaaagaagaaucagggacu

SEQ ID NO: 2544390 - RNA, 19 nt, Homo sapiens
  misc_RNA (1)...(19): siRNA sense strand
cuaucaaagaagaguguuu

SEQ ID NO: 2544391 - RNA, 19 nt, Homo sapiens
  misc_RNA (1)...(19): siRNA sense strand
gugcagagaucaaggugga

SEQ ID NO: 2544392 - RNA, 19 nt, Homo sapiens
  misc_RNA (1)...(19): siRNA sense strand
cuuuagaggcagagacuca

SEQ ID NO: 2544393 - RNA, 19 nt, Homo sapiens
  misc_RNA (1)...(19): siRNA sense strand
agauguuauuguucggaaa

SEQ ID NO: 2544394 - RNA, 19 nt, Homo sapiens
  misc_RNA (1)...(19): siRNA sense strand
gaaauugacugcugagcga

SEQ ID NO: 2544395 - RNA, 19 nt, Homo sapiens
  misc_RNA (1)...(19): siRNA sense strand
cggucaagcaagagagacu

SEQ ID NO: 2544396 - RNA, 19 nt, Homo sapiens
  misc_RNA (1)...(19): siRNA sense strand
agggagaagugguggaaac

SEQ ID NO: 2544397 - RNA, 19 nt, Homo sapiens
  misc_RNA (1)...(19): siRNA sense strand
gugaggaugaggaggaaga

SEQ ID NO: 2544398 - RNA, 19 nt, Homo sapiens
  misc_RNA (1)...(19): siRNA sense strand
guacaauagcucagaccau

SEQ ID NO: 2544399 - RNA, 19 nt, Homo sapiens
  misc_RNA (1)...(19): siRNA sense strand
agaaagugauaaaggaaac

SEQ ID NO: 2544400 - RNA, 19 nt, Homo sapiens
  misc_RNA (1)...(19): siRNA sense strand
caguggagaugcagcgaga

SEQ ID NO: 2544401 - RNA, 19 nt, Homo sapiens
  misc_RNA (1)...(19): siRNA sense strand
ugucagacucauugaaaga

SEQ ID NO: 2544402 - RNA, 19 nt, Homo sapiens
  misc_RNA (1)...(19): siRNA sense strand
gggaaguacugcagcugga

SEQ ID NO: 2544403 - RNA, 19 nt, Homo sapiens
  misc_RNA (1)...(19): siRNA sense strand
caucaugcuuguauggaga

SEQ ID NO: 2544404 - RNA, 19 nt, Homo sapiens
  misc_RNA (1)...(19): siRNA sense strand
gugaaauauccaugaucau

SEQ ID NO: 2544405 - RNA, 19 nt, Homo sapiens
  misc_RNA (1)...(19): siRNA sense strand
ccgaaauaguagcuggagu

SEQ ID NO: 2544406 - RNA, 19 nt, Homo sapiens
  misc_RNA (1)...(19): siRNA sense strand
ugggaaaggcgaugagacu

SEQ ID NO: 2544407 - RNA, 19 nt, Homo sapiens
  misc_RNA (1)...(19): siRNA sense strand
agaaauuggaagaagagga

SEQ ID NO: 2544408 - RNA, 19 nt, Homo sapiens
  misc_RNA (1)...(19): siRNA sense strand
gagagauuguugaagcaga

SEQ ID NO: 2544409 - RNA, 19 nt, Homo sapiens
  misc_RNA (1)...(19): siRNA sense strand
ggucaaugagagugaaaug

SEQ ID NO: 2544410 - RNA, 19 nt, Homo sapiens
  misc_RNA (1)...(19): siRNA sense strand
gauacaugguggggagaua

SEQ ID NO: 2544411 - RNA, 19 nt, Homo sapiens
  misc_RNA (1)...(19): siRNA sense strand
agccuaaggaagaggauca

SEQ ID NO: 2544412 - RNA, 19 nt, Homo sapiens
  misc_RNA (1)...(19): siRNA sense strand
aaucaagcccuuugcagaa

SEQ ID NO: 2544413 - RNA, 19 nt, Homo sapiens
  misc_RNA (1)...(19): siRNA sense strand
ugaagauccuuuagaggca

SEQ ID NO: 2544414 - RNA, 19 nt, Homo sapiens
  misc_RNA (1)...(19): siRNA sense strand
uaaaagucuucgagggaga

SEQ ID NO: 2544415 - RNA, 19 nt, Homo sapiens
  misc_RNA (1)...(19): siRNA sense strand
gagagauauagacggcuaa

SEQ ID NO: 2544416 - RNA, 19 nt, Homo sapiens
  misc_RNA (1)...(19): siRNA sense strand
uugccaucauugaggacaa

SEQ ID NO: 2544417 - RNA, 19 nt, Homo sapiens
  misc_RNA (1)...(19): siRNA sense strand
agaaauggauaaugaaccu

SEQ ID NO: 2544418 - RNA, 19 nt, Homo sapiens
  misc_RNA (1)...(19): siRNA sense strand
uggcugagaagauggauau

SEQ ID NO: 2544419 - RNA, 19 nt, Homo sapiens
  misc_RNA (1)...(19): siRNA sense strand
agagauuguugaagcagau

SEQ ID NO: 2544420 - RNA, 19 nt, Homo sapiens
  misc_RNA (1)...(19): siRNA sense strand
cugcagaaccagagccagu

SEQ ID NO: 2544421 - RNA, 19 nt, Homo sapiens
  misc_RNA (1)...(19): siRNA sense strand
gauccgaagcacagcugaa

SEQ ID NO: 2544422 - RNA, 19 nt, Homo sapiens
  misc_RNA (1)...(19): siRNA sense strand
ucauugaggacaagguaga

SEQ ID NO: 2544423 - RNA, 19 nt, Homo sapiens
  misc_RNA (1)...(19): siRNA sense strand
aggaagauggugucaguga

SEQ ID NO: 2544424 - RNA, 19 nt, Homo sapiens
  misc_RNA (1)...(19): siRNA sense strand
auagacggcuaaagagaga

SEQ ID NO: 2544425 - RNA, 19 nt, Homo sapiens
  misc_RNA (1)...(19): siRNA sense strand
cagcagacuggaugagcuu

SEQ ID NO: 2544426 - RNA, 19 nt, Homo sapiens
  misc_RNA (1)...(19): siRNA sense strand
caggugaagagcuggauuu

SEQ ID NO: 2544427 - RNA, 19 nt, Homo sapiens
  misc_RNA (1)...(19): siRNA sense strand
gcuaaaagucuucgaggga

SEQ ID NO: 2544428 - RNA, 19 nt, Homo sapiens
  misc_RNA (1)...(19): siRNA sense strand
auauagacggcuaaagaga

SEQ ID NO: 2544429 - RNA, 19 nt, Homo sapiens
  misc_RNA (1)...(19): siRNA sense strand
gugaaauggcuguggcuuc

SEQ ID NO: 2544430 - RNA, 19 nt, Homo sapiens
  misc_RNA (1)...(19): siRNA sense strand
guaucaguuagcagagcaa

SEQ ID NO: 2544431 - RNA, 19 nt, Homo sapiens
  misc_RNA (1)...(19): siRNA sense strand
ggaucaaggagaaggcuac

SEQ ID NO: 2544432 - RNA, 19 nt, Homo sapiens
  misc_RNA (1)...(19): siRNA sense strand
agcgagaugucuuggaaca

SEQ ID NO: 2544433 - RNA, 19 nt, Homo sapiens
  misc_RNA (1)...(19): siRNA sense strand
ccgagagaagcuauguuua

SEQ ID NO: 2544434 - RNA, 19 nt, Homo sapiens
  misc_RNA (1)...(19): siRNA sense strand
ggcuaaagagagaugcaga

SEQ ID NO: 2544435 - RNA, 19 nt, Homo sapiens
  misc_RNA (1)...(19): siRNA sense strand
agagagaugcagaacuaau

SEQ ID NO: 2544436 - RNA, 19 nt, Homo sapiens
  misc_RNA (1)...(19): siRNA sense strand
caggugaggaugaggagga

SEQ ID NO: 2544437 - RNA, 19 nt, Homo sapiens
  misc_RNA (1)...(19): siRNA sense strand
gagucugggaucagugcua

SEQ ID NO: 2544438 - RNA, 19 nt, Homo sapiens
  misc_RNA (1)...(19): siRNA sense strand
caaucaagcccuuugcaga

SEQ ID NO: 2544439 - RNA, 19 nt, Homo sapiens
  misc_RNA (1)...(19): siRNA sense strand
aggcugaaguaaagaggaa

SEQ ID NO: 2544440 - RNA, 19 nt, Homo sapiens
  misc_RNA (1)...(19): siRNA sense strand
gaaguaaagaggaaggcua

SEQ ID NO: 2544441 - RNA, 19 nt, Homo sapiens
  misc_RNA (1)...(19): siRNA sense strand
agauguugccauugggaaa

SEQ ID NO: 2544442 - RNA, 19 nt, Homo sapiens
  misc_RNA (1)...(19): siRNA sense strand
aggcagagacucagcacaa

SEQ ID NO: 2544443 - RNA, 19 nt, Homo sapiens
  misc_RNA (1)...(19): siRNA sense strand
uggaagaagaggaggcuga

SEQ ID NO: 2544444 - RNA, 19 nt, Homo sapiens
  misc_RNA (1)...(19): siRNA sense strand
aggacaagguagaugauca

SEQ ID NO: 2544445 - RNA, 19 nt, Homo sapiens
  misc_RNA (1)...(19): siRNA sense strand
aggaagaggaucaaggaga

SEQ ID NO: 2544446 - RNA, 19 nt, Homo sapiens
  misc_RNA (1)...(19): siRNA sense strand
gaaagaagaaucagggacu

SEQ ID NO: 2544447 - RNA, 19 nt, Homo sapiens
  misc_RNA (1)...(19): siRNA sense strand
cuaucaaagaagaguguuu

SEQ ID NO: 2544448 - RNA, 19 nt, Homo sapiens
  misc_RNA (1)...(19): siRNA sense strand
gugcagagaucaaggugga

SEQ ID NO: 2544449 - RNA, 19 nt, Homo sapiens
  misc_RNA (1)...(19): siRNA sense strand
cuuuagaggcagagacuca

SEQ ID NO: 2544450 - RNA, 19 nt, Homo sapiens
  misc_RNA (1)...(19): siRNA sense strand
cggucaagcaagagagacu

SEQ ID NO: 2544451 - RNA, 19 nt, Homo sapiens
  misc_RNA (1)...(19): siRNA sense strand
gugaggaugaggaggaaga

SEQ ID NO: 2544452 - RNA, 19 nt, Homo sapiens
  misc_RNA (1)...(19): siRNA sense strand
guacaauagcucagaccau

SEQ ID NO: 2544453 - RNA, 19 nt, Homo sapiens
  misc_RNA (1)...(19): siRNA sense strand
caguggagaugcagcgaga

SEQ ID NO: 2544454 - RNA, 19 nt, Homo sapiens
  misc_RNA (1)...(19): siRNA sense strand
ugucagacucauugaaaga

SEQ ID NO: 2544455 - RNA, 19 nt, Homo sapiens
  misc_RNA (1)...(19): siRNA sense strand
gggaaguacugcagcugga

SEQ ID NO: 2544456 - RNA, 19 nt, Homo sapiens
  misc_RNA (1)...(19): siRNA sense strand
caucaugcuuguauggaga

SEQ ID NO: 2544457 - RNA, 19 nt, Homo sapiens
  misc_RNA (1)...(19): siRNA sense strand
gugaaauauccaugaucau

SEQ ID NO: 2544458 - RNA, 19 nt, Homo sapiens
  misc_RNA (1)...(19): siRNA sense strand
ccgaaauaguagcuggagu

SEQ ID NO: 2544459 - RNA, 19 nt, Homo sapiens
  misc_RNA (1)...(19): siRNA sense strand
ugggaaaggcgaugagacu

SEQ ID NO: 2544460 - RNA, 19 nt, Homo sapiens
  misc_RNA (1)...(19): siRNA sense strand
gagagauuguugaagcaga

SEQ ID NO: 2544461 - RNA, 19 nt, Homo sapiens
  misc_RNA (1)...(19): siRNA sense strand
agaaauuggaagaagagga

SEQ ID NO: 2544462 - RNA, 19 nt, Homo sapiens
  misc_RNA (1)...(19): siRNA sense strand
ggucaaugagagugaaaug

SEQ ID NO: 2544463 - RNA, 19 nt, Homo sapiens
  misc_RNA (1)...(19): siRNA sense strand
gauacaugguggggagaua

SEQ ID NO: 2544464 - RNA, 19 nt, Homo sapiens
  misc_RNA (1)...(19): siRNA sense strand
agccuaaggaagaggauca

SEQ ID NO: 2544465 - RNA, 19 nt, Homo sapiens
  misc_RNA (1)...(19): siRNA sense strand
ugaagauccuuuagaggca

SEQ ID NO: 2544466 - RNA, 19 nt, Homo sapiens
  misc_RNA (1)...(19): siRNA sense strand
uaaaagucuucgagggaga

SEQ ID NO: 2544467 - RNA, 19 nt, Homo sapiens
  misc_RNA (1)...(19): siRNA sense strand
uugccaucauugaggacaa

SEQ ID NO: 2544468 - RNA, 19 nt, Homo sapiens
  misc_RNA (1)...(19): siRNA sense strand
agaaauggauaaugaaccu

SEQ ID NO: 2544469 - RNA, 19 nt, Homo sapiens
  misc_RNA (1)...(19): siRNA sense strand
uggcugagaagauggauau

SEQ ID NO: 2544470 - RNA, 19 nt, Homo sapiens
  misc_RNA (1)...(19): siRNA sense strand
agagauuguugaagcagau

SEQ ID NO: 2544471 - RNA, 19 nt, Homo sapiens
  misc_RNA (1)...(19): siRNA sense strand
cugcagaaccagagccagu

SEQ ID NO: 2544472 - RNA, 19 nt, Homo sapiens
  misc_RNA (1)...(19): siRNA sense strand
gauccgaagcacagcugaa

SEQ ID NO: 2544473 - RNA, 19 nt, Homo sapiens
  misc_RNA (1)...(19): siRNA sense strand
ucauugaggacaagguaga

SEQ ID NO: 2544474 - RNA, 19 nt, Homo sapiens
  misc_RNA (1)...(19): siRNA sense strand
aggaagauggugucaguga

SEQ ID NO: 2544475 - RNA, 19 nt, Homo sapiens
  misc_RNA (1)...(19): siRNA sense strand
caggugaagagcuggauuu

SEQ ID NO: 2544476 - RNA, 19 nt, Homo sapiens
  misc_RNA (1)...(19): siRNA sense strand
gcuaaaagucuucgaggga

SEQ ID NO: 2544477 - RNA, 19 nt, Homo sapiens
  misc_RNA (1)...(19): siRNA sense strand
gugaaauggcuguggcuuc

SEQ ID NO: 2544478 - RNA, 19 nt, Homo sapiens
  misc_RNA (1)...(19): siRNA sense strand
ggaucaaggagaaggcuac

SEQ ID NO: 2544479 - RNA, 19 nt, Homo sapiens
  misc_RNA (1)...(19): siRNA sense strand
agcgagaugucuuggaaca

SEQ ID NO: 2544480 - RNA, 19 nt, Homo sapiens
  misc_RNA (1)...(19): siRNA sense strand
caggugaggaugaggagga

SEQ ID NO: 2544481 - RNA, 19 nt, Homo sapiens
  misc_RNA (1)...(19): siRNA sense strand
gagucugggaucagugcua

SEQ ID NO: 2544482 - RNA, 19 nt, Homo sapiens
  misc_RNA (1)...(19): siRNA sense strand
aagaauuagaucuggcuga

SEQ ID NO: 2544483 - RNA, 19 nt, Homo sapiens
  misc_RNA (1)...(19): siRNA sense strand
agucauuucaggagccgaa

SEQ ID NO: 2544484 - RNA, 19 nt, Homo sapiens
  misc_RNA (1)...(19): siRNA sense strand
cuggcugagaagauggaua

SEQ ID NO: 2544485 - RNA, 19 nt, Homo sapiens
  misc_RNA (1)...(19): siRNA sense strand
uggagagauuguugaagca

SEQ ID NO: 2544486 - RNA, 19 nt, Homo sapiens
  misc_RNA (1)...(19): siRNA sense strand
aggaucaaggagaaggcua

SEQ ID NO: 2544487 - RNA, 19 nt, Homo sapiens
  misc_RNA (1)...(19): siRNA sense strand
acgcaguugauuaugcaaa

SEQ ID NO: 2544488 - RNA, 19 nt, Homo sapiens
  misc_RNA (1)...(19): siRNA sense strand
uggauauugcugugucuua

SEQ ID NO: 2544489 - RNA, 19 nt, Homo sapiens
  misc_RNA (1)...(19): siRNA sense strand
aaacggaaaacaagggaau

SEQ ID NO: 2544490 - RNA, 19 nt, Homo sapiens
  misc_RNA (1)...(19): siRNA sense strand
cagaaaauuuggaagaaag

SEQ ID NO: 2544491 - RNA, 19 nt, Homo sapiens
  misc_RNA (1)...(19): siRNA sense strand
aagaagaaucagggacuau

SEQ ID NO: 2544492 - RNA, 19 nt, Homo sapiens
  misc_RNA (1)...(19): siRNA sense strand
ccgcaaacaggaugcuuca

SEQ ID NO: 2544493 - RNA, 19 nt, Homo sapiens
  misc_RNA (1)...(19): siRNA sense strand
ggacuuugaggaaacggaa

SEQ ID NO: 2544494 - RNA, 19 nt, Homo sapiens
  misc_RNA (1)...(19): siRNA sense strand
acucagcacaaguuugaaa

SEQ ID NO: 2544495 - RNA, 19 nt, Homo sapiens
  misc_RNA (1)...(19): siRNA sense strand
aggacuuagaugaggaacu

SEQ ID NO: 2544496 - RNA, 19 nt, Homo sapiens
  misc_RNA (1)...(19): siRNA sense strand
gugaggaucaggaagcuau

SEQ ID NO: 2544497 - RNA, 19 nt, Homo sapiens
  misc_RNA (1)...(19): siRNA sense strand
guguagcuccagugaguca

SEQ ID NO: 2544498 - RNA, 19 nt, Homo sapiens
  misc_RNA (1)...(19): siRNA sense strand
ccaaugacauggaggagga

SEQ ID NO: 2544499 - RNA, 19 nt, Homo sapiens
  misc_RNA (1)...(19): siRNA sense strand
uggaaaaggaagagggagu

SEQ ID NO: 2544500 - RNA, 19 nt, Homo sapiens
  misc_RNA (1)...(19): siRNA sense strand
gacaaagaucugagggugu

SEQ ID NO: 2544501 - RNA, 19 nt, Homo sapiens
  misc_RNA (1)...(19): siRNA sense strand
cugaggagucggaggagga

SEQ ID NO: 2544502 - RNA, 19 nt, Homo sapiens
  misc_RNA (1)...(19): siRNA sense strand
gggacaaagaucugagggu

SEQ ID NO: 2544503 - RNA, 19 nt, Homo sapiens
  misc_RNA (1)...(19): siRNA sense strand
cugaggaggagccggagaa

SEQ ID NO: 2544504 - RNA, 19 nt, Homo sapiens
  misc_RNA (1)...(19): siRNA sense strand
ccagaggaguuggaggaga

SEQ ID NO: 2544505 - RNA, 19 nt, Homo sapiens
  misc_RNA (1)...(19): siRNA sense strand
gauccaggcuuaugaccca

SEQ ID NO: 2544506 - RNA, 19 nt, Homo sapiens
  misc_RNA (1)...(19): siRNA sense strand
uccaugagcugcagggcuu

SEQ ID NO: 2544507 - RNA, 19 nt, Homo sapiens
  misc_RNA (1)...(19): siRNA sense strand
gggcucaagaugaagcuga

SEQ ID NO: 2544508 - RNA, 19 nt, Homo sapiens
  misc_RNA (1)...(19): siRNA sense strand
ccaagaaaacggagaguca

SEQ ID NO: 2544509 - RNA, 19 nt, Homo sapiens
  misc_RNA (1)...(19): siRNA sense strand
gcggaaagcagggaggcaa

SEQ ID NO: 2544510 - RNA, 19 nt, Homo sapiens
  misc_RNA (1)...(19): siRNA sense strand
ccgugaggaaugacgaaga

SEQ ID NO: 2544511 - RNA, 19 nt, Homo sapiens
  misc_RNA (1)...(19): siRNA sense strand
gggacaauauccaaggcau

SEQ ID NO: 2544512 - RNA, 19 nt, Homo sapiens
  misc_RNA (1)...(19): siRNA sense strand
cggccauggauguggugua

SEQ ID NO: 2544513 - RNA, 19 nt, Homo sapiens
  misc_RNA (1)...(19): siRNA sense strand
guggcaaggggcuggguaa

SEQ ID NO: 2544514 - RNA, 19 nt, Homo sapiens
  misc_RNA (1)...(19): siRNA sense strand
uggagaacgugauccguga

SEQ ID NO: 2544515 - RNA, 19 nt, Homo sapiens
  misc_RNA (1)...(19): siRNA sense strand
acaaauuaggauagcucaa

SEQ ID NO: 2544516 - RNA, 19 nt, Homo sapiens
  misc_RNA (1)...(19): siRNA sense strand
gaacaaauuaggauagcuc

SEQ ID NO: 2544517 - RNA, 19 nt, Homo sapiens
  misc_RNA (1)...(19): siRNA sense strand
aguuuaugacccuggaaga

SEQ ID NO: 2544518 - RNA, 19 nt, Homo sapiens
  misc_RNA (1)...(19): siRNA sense strand
cguaauaaugggagccaaa

SEQ ID NO: 2544519 - RNA, 19 nt, Homo sapiens
  misc_RNA (1)...(19): siRNA sense strand
aggugaaaguacugaggaa

SEQ ID NO: 2544520 - RNA, 19 nt, Homo sapiens
  misc_RNA (1)...(19): siRNA sense strand
cagaauauacagaaggcaa

SEQ ID NO: 2544521 - RNA, 19 nt, Homo sapiens
  misc_RNA (1)...(19): siRNA sense strand
ugacaaaggaaguggugau

SEQ ID NO: 2544522 - RNA, 19 nt, Homo sapiens
  misc_RNA (1)...(19): siRNA sense strand
guggagaaaauguggaaaa

SEQ ID NO: 2544523 - RNA, 19 nt, Homo sapiens
  misc_RNA (1)...(19): siRNA sense strand
gccaaaggcaaguggaaaa

SEQ ID NO: 2544524 - RNA, 19 nt, Homo sapiens
  misc_RNA (1)...(19): siRNA sense strand
agaagugggcaaagaggaa

SEQ ID NO: 2544525 - RNA, 19 nt, Homo sapiens
  misc_RNA (1)...(19): siRNA sense strand
caucggagaaccagagcaa

SEQ ID NO: 2544526 - RNA, 19 nt, Homo sapiens
  misc_RNA (1)...(19): siRNA sense strand
caucuagaucagaacgaaa

SEQ ID NO: 2544527 - RNA, 19 nt, Homo sapiens
  misc_RNA (1)...(19): siRNA sense strand
ucggagaaccagagcaaga

SEQ ID NO: 2544528 - RNA, 19 nt, Homo sapiens
  misc_RNA (1)...(19): siRNA sense strand
ugaagaagauuauaggcuu

SEQ ID NO: 2544529 - RNA, 19 nt, Homo sapiens
  misc_RNA (1)...(19): siRNA sense strand
cagccaaaggcaaguggaa

SEQ ID NO: 2544530 - RNA, 19 nt, Homo sapiens
  misc_RNA (1)...(19): siRNA sense strand
aaacaacagccaaaggcaa

SEQ ID NO: 2544531 - RNA, 19 nt, Homo sapiens
  misc_RNA (1)...(19): siRNA sense strand
uggugaaucuacaggauca

SEQ ID NO: 2544532 - RNA, 19 nt, Homo sapiens
  misc_RNA (1)...(19): siRNA sense strand
cugcauccaaugagugaaa

SEQ ID NO: 2544533 - RNA, 19 nt, Homo sapiens
  misc_RNA (1)...(19): siRNA sense strand
cgcaaaacucagaugaaaa

SEQ ID NO: 2544534 - RNA, 19 nt, Homo sapiens
  misc_RNA (1)...(19): siRNA sense strand
guggaaaacaacagccaaa

SEQ ID NO: 2544535 - RNA, 19 nt, Homo sapiens
  misc_RNA (1)...(19): siRNA sense strand
guugcuaaguagaggucuu

SEQ ID NO: 2544536 - RNA, 19 nt, Homo sapiens
  misc_RNA (1)...(19): siRNA sense strand
gcaaauuaaagaaggccca

SEQ ID NO: 2544537 - RNA, 19 nt, Homo sapiens
  misc_RNA (1)...(19): siRNA sense strand
agacaaacuggaaauacaa

SEQ ID NO: 2544538 - RNA, 19 nt, Homo sapiens
  misc_RNA (1)...(19): siRNA sense strand
gcucagucucaaaucgaaa

SEQ ID NO: 2544539 - RNA, 19 nt, Homo sapiens
  misc_RNA (1)...(19): siRNA sense strand
uugaacauccuuugguaaa

SEQ ID NO: 2544540 - RNA, 19 nt, Homo sapiens
  misc_RNA (1)...(19): siRNA sense strand
ccgcaaaacucagaugaaa

SEQ ID NO: 2544541 - RNA, 19 nt, Homo sapiens
  misc_RNA (1)...(19): siRNA sense strand
ugacauugaggcagcaaau

SEQ ID NO: 2544542 - RNA, 19 nt, Homo sapiens
  misc_RNA (1)...(19): siRNA sense strand
aguucguccuggagaauau

SEQ ID NO: 2544543 - RNA, 19 nt, Homo sapiens
  misc_RNA (1)...(19): siRNA sense strand
agaugaaaauagaggagga

SEQ ID NO: 2544544 - RNA, 19 nt, Homo sapiens
  misc_RNA (1)...(19): siRNA sense strand
ucuuaaaugaggaugauga

SEQ ID NO: 2544545 - RNA, 19 nt, Homo sapiens
  misc_RNA (1)...(19): siRNA sense strand
ucaccaaagaacagauuga

SEQ ID NO: 2544546 - RNA, 19 nt, Homo sapiens
  misc_RNA (1)...(19): siRNA sense strand
gcauccaaugagugaaauu

SEQ ID NO: 2544547 - RNA, 19 nt, Homo sapiens
  misc_RNA (1)...(19): siRNA sense strand
aagaguucguccuggagaa

SEQ ID NO: 2544548 - RNA, 19 nt, Homo sapiens
  misc_RNA (1)...(19): siRNA sense strand
cuaugaaagugaacgagga

SEQ ID NO: 2544549 - RNA, 19 nt, Homo sapiens
  misc_RNA (1)...(19): siRNA sense strand
caaacuggaaauacaacaa

SEQ ID NO: 2544550 - RNA, 19 nt, Homo sapiens
  misc_RNA (1)...(19): siRNA sense strand
uacaacaagaagugggcaa

SEQ ID NO: 2544551 - RNA, 19 nt, Homo sapiens
  misc_RNA (1)...(19): siRNA sense strand
acaacaagaagugggcaaa

SEQ ID NO: 2544552 - RNA, 19 nt, Homo sapiens
  misc_RNA (1)...(19): siRNA sense strand
acucagauuccaaugacaa

SEQ ID NO: 2544553 - RNA, 19 nt, Homo sapiens
  misc_RNA (1)...(19): siRNA sense strand
guaaaugagacggagggaa

SEQ ID NO: 2544554 - RNA, 19 nt, Homo sapiens
  misc_RNA (1)...(19): siRNA sense strand
aaugagaaguuuuggugaa

SEQ ID NO: 2544555 - RNA, 19 nt, Homo sapiens
  misc_RNA (1)...(19): siRNA sense strand
aggcaacaaacuucguaaa

SEQ ID NO: 2544556 - RNA, 19 nt, Homo sapiens
  misc_RNA (1)...(19): siRNA sense strand
auguuaaggcagauaauga

SEQ ID NO: 2544557 - RNA, 19 nt, Homo sapiens
  misc_RNA (1)...(19): siRNA sense strand
uuguaaauaaccugaguga

SEQ ID NO: 2544558 - RNA, 19 nt, Homo sapiens
  misc_RNA (1)...(19): siRNA sense strand
aaccagagcaagagcugaa

SEQ ID NO: 2544559 - RNA, 19 nt, Homo sapiens
  misc_RNA (1)...(19): siRNA sense strand
uaaaugagacggagggaag

SEQ ID NO: 2544560 - RNA, 19 nt, Homo sapiens
  misc_RNA (1)...(19): siRNA sense strand
caguaaugaaggaagcuca

SEQ ID NO: 2544561 - RNA, 19 nt, Homo sapiens
  misc_RNA (1)...(19): siRNA sense strand
agaggucagaggagggcaa

SEQ ID NO: 2544562 - RNA, 19 nt, Homo sapiens
  misc_RNA (1)...(19): siRNA sense strand
cagagcaagagcugaaaga

SEQ ID NO: 2544563 - RNA, 19 nt, Homo sapiens
  misc_RNA (1)...(19): siRNA sense strand
cgaaauauggaaagggcag

SEQ ID NO: 2544564 - RNA, 19 nt, Homo sapiens
  misc_RNA (1)...(19): siRNA sense strand
ccugagugaagaagauuau

SEQ ID NO: 2544565 - RNA, 19 nt, Homo sapiens
  misc_RNA (1)...(19): siRNA sense strand
gagauaaauguuaaccgua

SEQ ID NO: 2544566 - RNA, 19 nt, Homo sapiens
  misc_RNA (1)...(19): siRNA sense strand
acauugaggcagcaaauau

SEQ ID NO: 2544567 - RNA, 19 nt, Homo sapiens
  misc_RNA (1)...(19): siRNA sense strand
gaguggaagaggagguucu

SEQ ID NO: 2544568 - RNA, 19 nt, Homo sapiens
  misc_RNA (1)...(19): siRNA sense strand
cagaggagggcaagaagca

SEQ ID NO: 2544569 - RNA, 19 nt, Homo sapiens
  misc_RNA (1)...(19): siRNA sense strand
aauacugguuuaagugaga

SEQ ID NO: 2544570 - RNA, 19 nt, Homo sapiens
  misc_RNA (1)...(19): siRNA sense strand
gcagauaaugacagguuuu

SEQ ID NO: 2544571 - RNA, 19 nt, Homo sapiens
  misc_RNA (1)...(19): siRNA sense strand
aggcgagagggucgacaua

SEQ ID NO: 2544572 - RNA, 19 nt, Homo sapiens
  misc_RNA (1)...(19): siRNA sense strand
ugaccaaccuagaggacuc

SEQ ID NO: 2544573 - RNA, 19 nt, Homo sapiens
  misc_RNA (1)...(19): siRNA sense strand
aaauaaccugagugaagaa

SEQ ID NO: 2544574 - RNA, 19 nt, Homo sapiens
  misc_RNA (1)...(19): siRNA sense strand
cggcagagagauagcauag

SEQ ID NO: 2544575 - RNA, 19 nt, Homo sapiens
  misc_RNA (1)...(19): siRNA sense strand
aggcagauaaugacagguu

SEQ ID NO: 2544576 - RNA, 19 nt, Homo sapiens
  misc_RNA (1)...(19): siRNA sense strand
agucuuagcuucugguaac

SEQ ID NO: 2544577 - RNA, 19 nt, Homo sapiens
  misc_RNA (1)...(19): siRNA sense strand
cguaauaaugggagccaaa

SEQ ID NO: 2544578 - RNA, 19 nt, Homo sapiens
  misc_RNA (1)...(19): siRNA sense strand
aggugaaaguacugaggaa

SEQ ID NO: 2544579 - RNA, 19 nt, Homo sapiens
  misc_RNA (1)...(19): siRNA sense strand
cagaauauacagaaggcaa

SEQ ID NO: 2544580 - RNA, 19 nt, Homo sapiens
  misc_RNA (1)...(19): siRNA sense strand
ugacaaaggaaguggugau

SEQ ID NO: 2544581 - RNA, 19 nt, Homo sapiens
  misc_RNA (1)...(19): siRNA sense strand
guggagaaaauguggaaaa

SEQ ID NO: 2544582 - RNA, 19 nt, Homo sapiens
  misc_RNA (1)...(19): siRNA sense strand
gccaaaggcaaguggaaaa

SEQ ID NO: 2544583 - RNA, 19 nt, Homo sapiens
  misc_RNA (1)...(19): siRNA sense strand
agaagugggcaaagaggaa

SEQ ID NO: 2544584 - RNA, 19 nt, Homo sapiens
  misc_RNA (1)...(19): siRNA sense strand
caucggagaaccagagcaa

SEQ ID NO: 2544585 - RNA, 19 nt, Homo sapiens
  misc_RNA (1)...(19): siRNA sense strand
caucuagaucagaacgaaa

SEQ ID NO: 2544586 - RNA, 19 nt, Homo sapiens
  misc_RNA (1)...(19): siRNA sense strand
ucggagaaccagagcaaga

SEQ ID NO: 2544587 - RNA, 19 nt, Homo sapiens
  misc_RNA (1)...(19): siRNA sense strand
ugaagaagauuauaggcuu

SEQ ID NO: 2544588 - RNA, 19 nt, Homo sapiens
  misc_RNA (1)...(19): siRNA sense strand
cagccaaaggcaaguggaa

SEQ ID NO: 2544589 - RNA, 19 nt, Homo sapiens
  misc_RNA (1)...(19): siRNA sense strand
aaacaacagccaaaggcaa

SEQ ID NO: 2544590 - RNA, 19 nt, Homo sapiens
  misc_RNA (1)...(19): siRNA sense strand
uggugaaucuacaggauca

SEQ ID NO: 2544591 - RNA, 19 nt, Homo sapiens
  misc_RNA (1)...(19): siRNA sense strand
cugcauccaaugagugaaa

SEQ ID NO: 2544592 - RNA, 19 nt, Homo sapiens
  misc_RNA (1)...(19): siRNA sense strand
cgcaaaacucagaugaaaa

SEQ ID NO: 2544593 - RNA, 19 nt, Homo sapiens
  misc_RNA (1)...(19): siRNA sense strand
guggaaaacaacagccaaa

SEQ ID NO: 2544594 - RNA, 19 nt, Homo sapiens
  misc_RNA (1)...(19): siRNA sense strand
guugcuaaguagaggucuu

SEQ ID NO: 2544595 - RNA, 19 nt, Homo sapiens
  misc_RNA (1)...(19): siRNA sense strand
gcaaauuaaagaaggccca

SEQ ID NO: 2544596 - RNA, 19 nt, Homo sapiens
  misc_RNA (1)...(19): siRNA sense strand
agacaaacuggaaauacaa

SEQ ID NO: 2544597 - RNA, 19 nt, Homo sapiens
  misc_RNA (1)...(19): siRNA sense strand
gcucagucucaaaucgaaa

SEQ ID NO: 2544598 - RNA, 19 nt, Homo sapiens
  misc_RNA (1)...(19): siRNA sense strand
uugaacauccuuugguaaa

SEQ ID NO: 2544599 - RNA, 19 nt, Homo sapiens
  misc_RNA (1)...(19): siRNA sense strand
ccgcaaaacucagaugaaa

SEQ ID NO: 2544600 - RNA, 19 nt, Homo sapiens
  misc_RNA (1)...(19): siRNA sense strand
ugacauugaggcagcaaau

SEQ ID NO: 2544601 - RNA, 19 nt, Homo sapiens
  misc_RNA (1)...(19): siRNA sense strand
aguucguccuggagaauau

SEQ ID NO: 2544602 - RNA, 19 nt, Homo sapiens
  misc_RNA (1)...(19): siRNA sense strand
agaugaaaauagaggagga

SEQ ID NO: 2544603 - RNA, 19 nt, Homo sapiens
  misc_RNA (1)...(19): siRNA sense strand
ucuuaaaugaggaugauga

SEQ ID NO: 2544604 - RNA, 19 nt, Homo sapiens
  misc_RNA (1)...(19): siRNA sense strand
ucaccaaagaacagauuga

SEQ ID NO: 2544605 - RNA, 19 nt, Homo sapiens
  misc_RNA (1)...(19): siRNA sense strand
gcauccaaugagugaaauu

SEQ ID NO: 2544606 - RNA, 19 nt, Homo sapiens
  misc_RNA (1)...(19): siRNA sense strand
aagaguucguccuggagaa

SEQ ID NO: 2544607 - RNA, 19 nt, Homo sapiens
  misc_RNA (1)...(19): siRNA sense strand
cuaugaaagugaacgagga

SEQ ID NO: 2544608 - RNA, 19 nt, Homo sapiens
  misc_RNA (1)...(19): siRNA sense strand
caaacuggaaauacaacaa

SEQ ID NO: 2544609 - RNA, 19 nt, Homo sapiens
  misc_RNA (1)...(19): siRNA sense strand
uacaacaagaagugggcaa

SEQ ID NO: 2544610 - RNA, 19 nt, Homo sapiens
  misc_RNA (1)...(19): siRNA sense strand
acaacaagaagugggcaaa

SEQ ID NO: 2544611 - RNA, 19 nt, Homo sapiens
  misc_RNA (1)...(19): siRNA sense strand
acucagauuccaaugacaa

SEQ ID NO: 2544612 - RNA, 19 nt, Homo sapiens
  misc_RNA (1)...(19): siRNA sense strand
guaaaugagacggagggaa

SEQ ID NO: 2544613 - RNA, 19 nt, Homo sapiens
  misc_RNA (1)...(19): siRNA sense strand
aaugagaaguuuuggugaa

SEQ ID NO: 2544614 - RNA, 19 nt, Homo sapiens
  misc_RNA (1)...(19): siRNA sense strand
aggcaacaaacuucguaaa

SEQ ID NO: 2544615 - RNA, 19 nt, Homo sapiens
  misc_RNA (1)...(19): siRNA sense strand
auguuaaggcagauaauga

SEQ ID NO: 2544616 - RNA, 19 nt, Homo sapiens
  misc_RNA (1)...(19): siRNA sense strand
uuguaaauaaccugaguga

SEQ ID NO: 2544617 - RNA, 19 nt, Homo sapiens
  misc_RNA (1)...(19): siRNA sense strand
aaccagagcaagagcugaa

SEQ ID NO: 2544618 - RNA, 19 nt, Homo sapiens
  misc_RNA (1)...(19): siRNA sense strand
uaaaugagacggagggaag

SEQ ID NO: 2544619 - RNA, 19 nt, Homo sapiens
  misc_RNA (1)...(19): siRNA sense strand
caguaaugaaggaagcuca

SEQ ID NO: 2544620 - RNA, 19 nt, Homo sapiens
  misc_RNA (1)...(19): siRNA sense strand
agaggucagaggagggcaa

SEQ ID NO: 2544621 - RNA, 19 nt, Homo sapiens
  misc_RNA (1)...(19): siRNA sense strand
cagagcaagagcugaaaga

SEQ ID NO: 2544622 - RNA, 19 nt, Homo sapiens
  misc_RNA (1)...(19): siRNA sense strand
cgaaauauggaaagggcag

SEQ ID NO: 2544623 - RNA, 19 nt, Homo sapiens
  misc_RNA (1)...(19): siRNA sense strand
ccugagugaagaagauuau

SEQ ID NO: 2544624 - RNA, 19 nt, Homo sapiens
  misc_RNA (1)...(19): siRNA sense strand
gagauaaauguuaaccgua

SEQ ID NO: 2544625 - RNA, 19 nt, Homo sapiens
  misc_RNA (1)...(19): siRNA sense strand
acauugaggcagcaaauau

SEQ ID NO: 2544626 - RNA, 19 nt, Homo sapiens
  misc_RNA (1)...(19): siRNA sense strand
gaguggaagaggagguucu

SEQ ID NO: 2544627 - RNA, 19 nt, Homo sapiens
  misc_RNA (1)...(19): siRNA sense strand
cagaggagggcaagaagca

SEQ ID NO: 2544628 - RNA, 19 nt, Homo sapiens
  misc_RNA (1)...(19): siRNA sense strand
aauacugguuuaagugaga

SEQ ID NO: 2544629 - RNA, 19 nt, Homo sapiens
  misc_RNA (1)...(19): siRNA sense strand
gcagauaaugacagguuuu

SEQ ID NO: 2544630 - RNA, 19 nt, Homo sapiens
  misc_RNA (1)...(19): siRNA sense strand
aggcgagagggucgacaua

SEQ ID NO: 2544631 - RNA, 19 nt, Homo sapiens
  misc_RNA (1)...(19): siRNA sense strand
ugaccaaccuagaggacuc

SEQ ID NO: 2544632 - RNA, 19 nt, Homo sapiens
  misc_RNA (1)...(19): siRNA sense strand
aaauaaccugagugaagaa

SEQ ID NO: 2544633 - RNA, 19 nt, Homo sapiens
  misc_RNA (1)...(19): siRNA sense strand
cggcagagagauagcauag

SEQ ID NO: 2544634 - RNA, 19 nt, Homo sapiens
  misc_RNA (1)...(19): siRNA sense strand
aggcagauaaugacagguu

SEQ ID NO: 2544635 - RNA, 19 nt, Homo sapiens
  misc_RNA (1)...(19): siRNA sense strand
agucuuagcuucugguaac

SEQ ID NO: 2544636 - RNA, 19 nt, Homo sapiens
  misc_RNA (1)...(19): siRNA sense strand
ccaagaaguuugaggaggu

SEQ ID NO: 2544637 - RNA, 19 nt, Homo sapiens
  misc_RNA (1)...(19): siRNA sense strand
aguacaaagccaagaaguu

SEQ ID NO: 2544638 - RNA, 19 nt, Homo sapiens
  misc_RNA (1)...(19): siRNA sense strand
ggaaaauggcagugaguac

SEQ ID NO: 2544639 - RNA, 19 nt, Homo sapiens
  misc_RNA (1)...(19): siRNA sense strand
aguuugaggaggugaauga

SEQ ID NO: 2544640 - RNA, 19 nt, Homo sapiens
  misc_RNA (1)...(19): siRNA sense strand
gggugugcgacuuggacaa

SEQ ID NO: 2544641 - RNA, 19 nt, Homo sapiens
  misc_RNA (1)...(19): siRNA sense strand
ggguaggggacguggucaa

SEQ ID NO: 2544642 - RNA, 19 nt, Homo sapiens
  misc_RNA (1)...(19): siRNA sense strand
agaaguuugaggaggugaa

SEQ ID NO: 2544643 - RNA, 19 nt, Homo sapiens
  misc_RNA (1)...(19): siRNA sense strand
cccagagagugaggagaaa

SEQ ID NO: 2544644 - RNA, 19 nt, Homo sapiens
  misc_RNA (1)...(19): siRNA sense strand
gcuccggacucuacgccaa

SEQ ID NO: 2544645 - RNA, 19 nt, Homo sapiens
  misc_RNA (1)...(19): siRNA sense strand
gugaaugagacuacgcuga

SEQ ID NO: 2544646 - RNA, 19 nt, Homo sapiens
  misc_RNA (1)...(19): siRNA sense strand
uaaccaaggugaagggcuc

SEQ ID NO: 2544647 - RNA, 19 nt, Homo sapiens
  misc_RNA (1)...(19): siRNA sense strand
caaagaagucggaggguga

SEQ ID NO: 2544648 - RNA, 19 nt, Homo sapiens
  misc_RNA (1)...(19): siRNA sense strand
acgacaaggaugagaagaa

SEQ ID NO: 2544649 - RNA, 19 nt, Homo sapiens
  misc_RNA (1)...(19): siRNA sense strand
agaagaaggaagacggcaa

SEQ ID NO: 2544650 - RNA, 19 nt, Homo sapiens
  misc_RNA (1)...(19): siRNA sense strand
gaucgaaggcgcagggaca

SEQ ID NO: 2544651 - RNA, 19 nt, Homo sapiens
  misc_RNA (1)...(19): siRNA sense strand
gggaagugcuggaguggca

SEQ ID NO: 2544652 - RNA, 19 nt, Homo sapiens
  misc_RNA (1)...(19): siRNA sense strand
gcaaagacccagagcagga

SEQ ID NO: 2544653 - RNA, 19 nt, Homo sapiens
  misc_RNA (1)...(19): siRNA sense strand
aggaggagcaggcaggaaa

SEQ ID NO: 2544654 - RNA, 19 nt, Homo sapiens
  misc_RNA (1)...(19): siRNA sense strand
aggaacugggcaaggauaa

SEQ ID NO: 2544655 - RNA, 19 nt, Homo sapiens
  misc_RNA (1)...(19): siRNA sense strand
cggcaagcaggcugagaau

SEQ ID NO: 2544656 - RNA, 19 nt, Homo sapiens
  misc_RNA (1)...(19): siRNA sense strand
aggaugagaagaaggaaga

SEQ ID NO: 2544657 - RNA, 19 nt, Homo sapiens
  misc_RNA (1)...(19): siRNA sense strand
gcaagaagcggaaccggaa

SEQ ID NO: 2544658 - RNA, 19 nt, Homo sapiens
  misc_RNA (1)...(19): siRNA sense strand
gcgcaaagacccagagcag

SEQ ID NO: 2544659 - RNA, 19 nt, Homo sapiens
  misc_RNA (1)...(19): siRNA sense strand
cagagaaaauugaggaagu

SEQ ID NO: 2544660 - RNA, 19 nt, Homo sapiens
  misc_RNA (1)...(19): siRNA sense strand
aggagaaggagaagcccaa

SEQ ID NO: 2544661 - RNA, 19 nt, Homo sapiens
  misc_RNA (1)...(19): siRNA sense strand
cagagcaggaaguggagaa

SEQ ID NO: 2544662 - RNA, 19 nt, Homo sapiens
  misc_RNA (1)...(19): siRNA sense strand
aagaagacuccgagaagga

SEQ ID NO: 2544663 - RNA, 19 nt, Homo sapiens
  misc_RNA (1)...(19): siRNA sense strand
aggaagaagaaugggagaa

SEQ ID NO: 2544664 - RNA, 19 nt, Homo sapiens
  misc_RNA (1)...(19): siRNA sense strand
ccgcgagagagaugaaaga

SEQ ID NO: 2544665 - RNA, 19 nt, Homo sapiens
  misc_RNA (1)...(19): siRNA sense strand
agaucaacguggagcggga

SEQ ID NO: 2544666 - RNA, 19 nt, Homo sapiens
  misc_RNA (1)...(19): siRNA sense strand
guccugaguuugugcgcaa

SEQ ID NO: 2544667 - RNA, 19 nt, Homo sapiens
  misc_RNA (1)...(19): siRNA sense strand
aggagaaggaggaggccga

SEQ ID NO: 2544668 - RNA, 19 nt, Homo sapiens
  misc_RNA (1)...(19): siRNA sense strand
cgcucaaggagaaggagaa

SEQ ID NO: 2544669 - RNA, 19 nt, Homo sapiens
  misc_RNA (1)...(19): siRNA sense strand
ccacagaagcgcaugagga

SEQ ID NO: 2544670 - RNA, 19 nt, Homo sapiens
  misc_RNA (1)...(19): siRNA sense strand
cggcagagaucaacgugga

SEQ ID NO: 2544671 - RNA, 19 nt, Homo sapiens
  misc_RNA (1)...(19): siRNA sense strand
aggcugaggaggagaagga

SEQ ID NO: 2544672 - RNA, 19 nt, Homo sapiens
  misc_RNA (1)...(19): siRNA sense strand
gcaagaaauucaagggucc

SEQ ID NO: 2544673 - RNA, 19 nt, Homo sapiens
  misc_RNA (1)...(19): siRNA sense strand
aggaggaggaggaggagca

SEQ ID NO: 2544674 - RNA, 19 nt, Homo sapiens
  misc_RNA (1)...(19): siRNA sense strand
cgagagagaugaaagacgu

SEQ ID NO: 2544675 - RNA, 19 nt, Homo sapiens
  misc_RNA (1)...(19): siRNA sense strand
ucuccuggacauagacaaa

SEQ ID NO: 2544676 - RNA, 19 nt, Homo sapiens
  misc_RNA (1)...(19): siRNA sense strand
ucucagaggaagaggccca

SEQ ID NO: 2544677 - RNA, 19 nt, Homo sapiens
  misc_RNA (1)...(19): siRNA sense strand
uggaugcagccgugauuaa

SEQ ID NO: 2544678 - RNA, 19 nt, Homo sapiens
  misc_RNA (1)...(19): siRNA sense strand
aaguaagcgccgaggagga

SEQ ID NO: 2544679 - RNA, 19 nt, Homo sapiens
  misc_RNA (1)...(19): siRNA sense strand
uggaugacucgguggauga

SEQ ID NO: 2544680 - RNA, 19 nt, Homo sapiens
  misc_RNA (1)...(19): siRNA sense strand
caguucuaaugaugacaaa

SEQ ID NO: 2544681 - RNA, 19 nt, Homo sapiens
  misc_RNA (1)...(19): siRNA sense strand
acacgcaggaacugggcaa

SEQ ID NO: 2544682 - RNA, 19 nt, Homo sapiens
  misc_RNA (1)...(19): siRNA sense strand
gcgcucaaggagaaggaga

SEQ ID NO: 2544683 - RNA, 19 nt, Homo sapiens
  misc_RNA (1)...(19): siRNA sense strand
cagcucugccugagaucaa

SEQ ID NO: 2544684 - RNA, 19 nt, Homo sapiens
  misc_RNA (1)...(19): siRNA sense strand
uggaaggaggcacggagaa

SEQ ID NO: 2544685 - RNA, 19 nt, Homo sapiens
  misc_RNA (1)...(19): siRNA sense strand
cugaggaggagaaggagga

SEQ ID NO: 2544686 - RNA, 19 nt, Homo sapiens
  misc_RNA (1)...(19): siRNA sense strand
ggaacccggcagagaucaa

SEQ ID NO: 2544687 - RNA, 19 nt, Homo sapiens
  misc_RNA (1)...(19): siRNA sense strand
gcagcauugcagagauuga

SEQ ID NO: 2544688 - RNA, 19 nt, Homo sapiens
  misc_RNA (1)...(19): siRNA sense strand
aggcaacagaugcaggauu

SEQ ID NO: 2544689 - RNA, 19 nt, Homo sapiens
  misc_RNA (1)...(19): siRNA sense strand
ccaaggaagaagaauggga

SEQ ID NO: 2544690 - RNA, 19 nt, Homo sapiens
  misc_RNA (1)...(19): siRNA sense strand
aaggaagaagaaugggaga

SEQ ID NO: 2544691 - RNA, 19 nt, Homo sapiens
  misc_RNA (1)...(19): siRNA sense strand
aaggaggcacggagaauga

SEQ ID NO: 2544692 - RNA, 19 nt, Homo sapiens
  misc_RNA (1)...(19): siRNA sense strand
gaaagaagaaggacgggcu

SEQ ID NO: 2544693 - RNA, 19 nt, Homo sapiens
  misc_RNA (1)...(19): siRNA sense strand
acguggagcgggaugagaa

SEQ ID NO: 2544694 - RNA, 19 nt, Homo sapiens
  misc_RNA (1)...(19): siRNA sense strand
ggacgauuggaaugacaga

SEQ ID NO: 2544695 - RNA, 19 nt, Homo sapiens
  misc_RNA (1)...(19): siRNA sense strand
acgauuggaaugacagaga

SEQ ID NO: 2544696 - RNA, 19 nt, Homo sapiens
  misc_RNA (1)...(19): siRNA sense strand
ccgcaucagucacggggaa

SEQ ID NO: 2544697 - RNA, 19 nt, Homo sapiens
  misc_RNA (1)...(19): siRNA sense strand
ggagaaugaucuucgcauc

SEQ ID NO: 2544698 - RNA, 19 nt, Homo sapiens
  misc_RNA (1)...(19): siRNA sense strand
caaagaagucggaggguga

SEQ ID NO: 2544699 - RNA, 19 nt, Homo sapiens
  misc_RNA (1)...(19): siRNA sense strand
acgacaaggaugagaagaa

SEQ ID NO: 2544700 - RNA, 19 nt, Homo sapiens
  misc_RNA (1)...(19): siRNA sense strand
agaagaaggaagacggcaa

SEQ ID NO: 2544701 - RNA, 19 nt, Homo sapiens
  misc_RNA (1)...(19): siRNA sense strand
gggaagugcuggaguggca

SEQ ID NO: 2544702 - RNA, 19 nt, Homo sapiens
  misc_RNA (1)...(19): siRNA sense strand
gcaaagacccagagcagga

SEQ ID NO: 2544703 - RNA, 19 nt, Homo sapiens
  misc_RNA (1)...(19): siRNA sense strand
aggaggagcaggcaggaaa

SEQ ID NO: 2544704 - RNA, 19 nt, Homo sapiens
  misc_RNA (1)...(19): siRNA sense strand
aggaacugggcaaggauaa

SEQ ID NO: 2544705 - RNA, 19 nt, Homo sapiens
  misc_RNA (1)...(19): siRNA sense strand
cggcaagcaggcugagaau

SEQ ID NO: 2544706 - RNA, 19 nt, Homo sapiens
  misc_RNA (1)...(19): siRNA sense strand
aggaugagaagaaggaaga

SEQ ID NO: 2544707 - RNA, 19 nt, Homo sapiens
  misc_RNA (1)...(19): siRNA sense strand
gcaagaagcggaaccggaa

SEQ ID NO: 2544708 - RNA, 19 nt, Homo sapiens
  misc_RNA (1)...(19): siRNA sense strand
gcgcaaagacccagagcag

SEQ ID NO: 2544709 - RNA, 19 nt, Homo sapiens
  misc_RNA (1)...(19): siRNA sense strand
cagagaaaauugaggaagu

SEQ ID NO: 2544710 - RNA, 19 nt, Homo sapiens
  misc_RNA (1)...(19): siRNA sense strand
aggagaaggagaagcccaa

SEQ ID NO: 2544711 - RNA, 19 nt, Homo sapiens
  misc_RNA (1)...(19): siRNA sense strand
cagagcaggaaguggagaa

SEQ ID NO: 2544712 - RNA, 19 nt, Homo sapiens
  misc_RNA (1)...(19): siRNA sense strand
aagaagacuccgagaagga

SEQ ID NO: 2544713 - RNA, 19 nt, Homo sapiens
  misc_RNA (1)...(19): siRNA sense strand
aggaagaagaaugggagaa

SEQ ID NO: 2544714 - RNA, 19 nt, Homo sapiens
  misc_RNA (1)...(19): siRNA sense strand
agaucaacguggagcggga

SEQ ID NO: 2544715 - RNA, 19 nt, Homo sapiens
  misc_RNA (1)...(19): siRNA sense strand
guccugaguuugugcgcaa

SEQ ID NO: 2544716 - RNA, 19 nt, Homo sapiens
  misc_RNA (1)...(19): siRNA sense strand
aggagaaggaggaggccga

SEQ ID NO: 2544717 - RNA, 19 nt, Homo sapiens
  misc_RNA (1)...(19): siRNA sense strand
cgcucaaggagaaggagaa

SEQ ID NO: 2544718 - RNA, 19 nt, Homo sapiens
  misc_RNA (1)...(19): siRNA sense strand
cggcagagaucaacgugga

SEQ ID NO: 2544719 - RNA, 19 nt, Homo sapiens
  misc_RNA (1)...(19): siRNA sense strand
aggcugaggaggagaagga

SEQ ID NO: 2544720 - RNA, 19 nt, Homo sapiens
  misc_RNA (1)...(19): siRNA sense strand
gcaagaaauucaagggucc

SEQ ID NO: 2544721 - RNA, 19 nt, Homo sapiens
  misc_RNA (1)...(19): siRNA sense strand
aggaggaggaggaggagca

SEQ ID NO: 2544722 - RNA, 19 nt, Homo sapiens
  misc_RNA (1)...(19): siRNA sense strand
ucuccuggacauagacaaa

SEQ ID NO: 2544723 - RNA, 19 nt, Homo sapiens
  misc_RNA (1)...(19): siRNA sense strand
ucucagaggaagaggccca

SEQ ID NO: 2544724 - RNA, 19 nt, Homo sapiens
  misc_RNA (1)...(19): siRNA sense strand
uggaugcagccgugauuaa

SEQ ID NO: 2544725 - RNA, 19 nt, Homo sapiens
  misc_RNA (1)...(19): siRNA sense strand
aaguaagcgccgaggagga

SEQ ID NO: 2544726 - RNA, 19 nt, Homo sapiens
  misc_RNA (1)...(19): siRNA sense strand
uggaugacucgguggauga

SEQ ID NO: 2544727 - RNA, 19 nt, Homo sapiens
  misc_RNA (1)...(19): siRNA sense strand
caguucuaaugaugacaaa

SEQ ID NO: 2544728 - RNA, 19 nt, Homo sapiens
  misc_RNA (1)...(19): siRNA sense strand
acacgcaggaacugggcaa

SEQ ID NO: 2544729 - RNA, 19 nt, Homo sapiens
  misc_RNA (1)...(19): siRNA sense strand
gcgcucaaggagaaggaga

SEQ ID NO: 2544730 - RNA, 19 nt, Homo sapiens
  misc_RNA (1)...(19): siRNA sense strand
cagcucugccugagaucaa

SEQ ID NO: 2544731 - RNA, 19 nt, Homo sapiens
  misc_RNA (1)...(19): siRNA sense strand
uggaaggaggcacggagaa

SEQ ID NO: 2544732 - RNA, 19 nt, Homo sapiens
  misc_RNA (1)...(19): siRNA sense strand
cugaggaggagaaggagga

SEQ ID NO: 2544733 - RNA, 19 nt, Homo sapiens
  misc_RNA (1)...(19): siRNA sense strand
ggaacccggcagagaucaa

SEQ ID NO: 2544734 - RNA, 19 nt, Homo sapiens
  misc_RNA (1)...(19): siRNA sense strand
aggcaacagaugcaggauu

SEQ ID NO: 2544735 - RNA, 19 nt, Homo sapiens
  misc_RNA (1)...(19): siRNA sense strand
gcagcauugcagagauuga

SEQ ID NO: 2544736 - RNA, 19 nt, Homo sapiens
  misc_RNA (1)...(19): siRNA sense strand
ccaaggaagaagaauggga

SEQ ID NO: 2544737 - RNA, 19 nt, Homo sapiens
  misc_RNA (1)...(19): siRNA sense strand
aaggaagaagaaugggaga

SEQ ID NO: 2544738 - RNA, 19 nt, Homo sapiens
  misc_RNA (1)...(19): siRNA sense strand
aaggaggcacggagaauga

SEQ ID NO: 2544739 - RNA, 19 nt, Homo sapiens
  misc_RNA (1)...(19): siRNA sense strand
gaaagaagaaggacgggcu

SEQ ID NO: 2544740 - RNA, 19 nt, Homo sapiens
  misc_RNA (1)...(19): siRNA sense strand
acguggagcgggaugagaa

SEQ ID NO: 2544741 - RNA, 19 nt, Homo sapiens
  misc_RNA (1)...(19): siRNA sense strand
ccgcaucagucacggggaa

SEQ ID NO: 2544742 - RNA, 19 nt, Homo sapiens
  misc_RNA (1)...(19): siRNA sense strand
ggagaaugaucuucgcauc

SEQ ID NO: 2544743 - RNA, 19 nt, Homo sapiens
  misc_RNA (1)...(19): siRNA sense strand
guggguggaaugaaggaaa

SEQ ID NO: 2544744 - RNA, 19 nt, Homo sapiens
  misc_RNA (1)...(19): siRNA sense strand
gaguuaaggccguuaggga

SEQ ID NO: 2544745 - RNA, 19 nt, Homo sapiens
  misc_RNA (1)...(19): siRNA sense strand
agggauggccagucaggaa

SEQ ID NO: 2544746 - RNA, 19 nt, Homo sapiens
  misc_RNA (1)...(19): siRNA sense strand
acguaugacaacccagaua

SEQ ID NO: 2544747 - RNA, 19 nt, Homo sapiens
  misc_RNA (1)...(19): siRNA sense strand
aguuaaggccguuagggau

SEQ ID NO: 2544748 - RNA, 19 nt, Homo sapiens
  misc_RNA (1)...(19): siRNA sense strand
ggaugacuauggagccaga

SEQ ID NO: 2544749 - RNA, 19 nt, Homo sapiens
  misc_RNA (1)...(19): siRNA sense strand
guggguggaaugaaggaaa

SEQ ID NO: 2544750 - RNA, 19 nt, Homo sapiens
  misc_RNA (1)...(19): siRNA sense strand
gaguuaaggccguuaggga

SEQ ID NO: 2544751 - RNA, 19 nt, Homo sapiens
  misc_RNA (1)...(19): siRNA sense strand
agggauggccagucaggaa

SEQ ID NO: 2544752 - RNA, 19 nt, Homo sapiens
  misc_RNA (1)...(19): siRNA sense strand
acguaugacaacccagaua

SEQ ID NO: 2544753 - RNA, 19 nt, Homo sapiens
  misc_RNA (1)...(19): siRNA sense strand
aguuaaggccguuagggau

SEQ ID NO: 2544754 - RNA, 19 nt, Homo sapiens
  misc_RNA (1)...(19): siRNA sense strand
ggaugacuauggagccaga

SEQ ID NO: 2544755 - RNA, 19 nt, Homo sapiens
  misc_RNA (1)...(19): siRNA sense strand
guggguggaaugaaggaaa

SEQ ID NO: 2544756 - RNA, 19 nt, Homo sapiens
  misc_RNA (1)...(19): siRNA sense strand
gaguuaaggccguuaggga

SEQ ID NO: 2544757 - RNA, 19 nt, Homo sapiens
  misc_RNA (1)...(19): siRNA sense strand
agggauggccagucaggaa

SEQ ID NO: 2544758 - RNA, 19 nt, Homo sapiens
  misc_RNA (1)...(19): siRNA sense strand
acguaugacaacccagaua

SEQ ID NO: 2544759 - RNA, 19 nt, Homo sapiens
  misc_RNA (1)...(19): siRNA sense strand
aguuaaggccguuagggau

SEQ ID NO: 2544760 - RNA, 19 nt, Homo sapiens
  misc_RNA (1)...(19): siRNA sense strand
ggaugacuauggagccaga

SEQ ID NO: 2544761 - RNA, 19 nt, Homo sapiens
  misc_RNA (1)...(19): siRNA sense strand
guggguggaaugaaggaaa

SEQ ID NO: 2544762 - RNA, 19 nt, Homo sapiens
  misc_RNA (1)...(19): siRNA sense strand
gaguuaaggccguuaggga

SEQ ID NO: 2544763 - RNA, 19 nt, Homo sapiens
  misc_RNA (1)...(19): siRNA sense strand
agggauggccagucaggaa

SEQ ID NO: 2544764 - RNA, 19 nt, Homo sapiens
  misc_RNA (1)...(19): siRNA sense strand
aguuaaggccguuagggau

SEQ ID NO: 2544765 - RNA, 19 nt, Homo sapiens
  misc_RNA (1)...(19): siRNA sense strand
ggaugacuauggagccaga

SEQ ID NO: 2544766 - RNA, 19 nt, Homo sapiens
  misc_RNA (1)...(19): siRNA sense strand
gauuugaaguugcgggaca

SEQ ID NO: 2544767 - RNA, 19 nt, Homo sapiens
  misc_RNA (1)...(19): siRNA sense strand
aggugaagcuacaggacuu

SEQ ID NO: 2544768 - RNA, 19 nt, Homo sapiens
  misc_RNA (1)...(19): siRNA sense strand
acuuuaaaggauagagcua

SEQ ID NO: 2544769 - RNA, 19 nt, Homo sapiens
  misc_RNA (1)...(19): siRNA sense strand
aggcagaagaaacagaaua

SEQ ID NO: 2544770 - RNA, 19 nt, Homo sapiens
  misc_RNA (1)...(19): siRNA sense strand
gguugaaaacuuagaggaa

SEQ ID NO: 2544771 - RNA, 19 nt, Homo sapiens
  misc_RNA (1)...(19): siRNA sense strand
aguguugguaugagggaaa

SEQ ID NO: 2544772 - RNA, 19 nt, Homo sapiens
  misc_RNA (1)...(19): siRNA sense strand
aaggauagagcuagagaga

SEQ ID NO: 2544773 - RNA, 19 nt, Homo sapiens
  misc_RNA (1)...(19): siRNA sense strand
cugaaauauuccuaccaaa

SEQ ID NO: 2544774 - RNA, 19 nt, Homo sapiens
  misc_RNA (1)...(19): siRNA sense strand
uuuaaaggauagagcuaga

SEQ ID NO: 2544775 - RNA, 19 nt, Homo sapiens
  misc_RNA (1)...(19): siRNA sense strand
uugaaaacuuagaggaaca

SEQ ID NO: 2544776 - RNA, 19 nt, Homo sapiens
  misc_RNA (1)...(19): siRNA sense strand
cuaccgaagcacuagauaa

SEQ ID NO: 2544777 - RNA, 19 nt, Homo sapiens
  misc_RNA (1)...(19): siRNA sense strand
agugaaguggaaaggauua

SEQ ID NO: 2544778 - RNA, 19 nt, Homo sapiens
  misc_RNA (1)...(19): siRNA sense strand
gcaaaucaucuaugggcuu

SEQ ID NO: 2544779 - RNA, 19 nt, Homo sapiens
  misc_RNA (1)...(19): siRNA sense strand
gagcauauguccugaggcu

SEQ ID NO: 2544780 - RNA, 19 nt, Homo sapiens
  misc_RNA (1)...(19): siRNA sense strand
uggagaaauaugaacacua

SEQ ID NO: 2544781 - RNA, 19 nt, Homo sapiens
  misc_RNA (1)...(19): siRNA sense strand
uuagaaacccugaagguga

SEQ ID NO: 2544782 - RNA, 19 nt, Homo sapiens
  misc_RNA (1)...(19): siRNA sense strand
agaccaaagcaaagcuaca

SEQ ID NO: 2544783 - RNA, 19 nt, Homo sapiens
  misc_RNA (1)...(19): siRNA sense strand
gguuguuaaugguugaaaa

SEQ ID NO: 2544784 - RNA, 19 nt, Homo sapiens
  misc_RNA (1)...(19): siRNA sense strand
uggaaaugaccauguuaau

SEQ ID NO: 2544785 - RNA, 19 nt, Homo sapiens
  misc_RNA (1)...(19): siRNA sense strand
acuaaugaguuuuguggaa

SEQ ID NO: 2544786 - RNA, 19 nt, Homo sapiens
  misc_RNA (1)...(19): siRNA sense strand
cagugaaguggaaaggauu

SEQ ID NO: 2544787 - RNA, 19 nt, Homo sapiens
  misc_RNA (1)...(19): siRNA sense strand
agaccauucuggagccaau

SEQ ID NO: 2544788 - RNA, 19 nt, Homo sapiens
  misc_RNA (1)...(19): siRNA sense strand
cuugcuaaccauuggaauu

SEQ ID NO: 2544789 - RNA, 19 nt, Homo sapiens
  misc_RNA (1)...(19): siRNA sense strand
cagaagaaacagaauacca

SEQ ID NO: 2544790 - RNA, 19 nt, Homo sapiens
  misc_RNA (1)...(19): siRNA sense strand
augcagaguuccaaagagu

SEQ ID NO: 2544791 - RNA, 19 nt, Homo sapiens
  misc_RNA (1)...(19): siRNA sense strand
acuuagaggaacauaguga

SEQ ID NO: 2544792 - RNA, 19 nt, Homo sapiens
  misc_RNA (1)...(19): siRNA sense strand
ucauacagguuuugaucaa

SEQ ID NO: 2544793 - RNA, 19 nt, Homo sapiens
  misc_RNA (1)...(19): siRNA sense strand
acuauuaagggcacacaaa

SEQ ID NO: 2544794 - RNA, 19 nt, Homo sapiens
  misc_RNA (1)...(19): siRNA sense strand
aaacuauaucccugccaaa

SEQ ID NO: 2544795 - RNA, 19 nt, Homo sapiens
  misc_RNA (1)...(19): siRNA sense strand
gugaaguggaaaggauuaa

SEQ ID NO: 2544796 - RNA, 19 nt, Homo sapiens
  misc_RNA (1)...(19): siRNA sense strand
uugcagauguuguacaaaa

SEQ ID NO: 2544797 - RNA, 19 nt, Homo sapiens
  misc_RNA (1)...(19): siRNA sense strand
accaaaagguagaucaaau

SEQ ID NO: 2544798 - RNA, 19 nt, Homo sapiens
  misc_RNA (1)...(19): siRNA sense strand
ucgagaaaauguuaaggaa

SEQ ID NO: 2544799 - RNA, 19 nt, Homo sapiens
  misc_RNA (1)...(19): siRNA sense strand
cuaagauguuguaugcaga

SEQ ID NO: 2544800 - RNA, 19 nt, Homo sapiens
  misc_RNA (1)...(19): siRNA sense strand
accaaaugcccacagaaua

SEQ ID NO: 2544801 - RNA, 19 nt, Homo sapiens
  misc_RNA (1)...(19): siRNA sense strand
gcacggacuaugccagcaa

SEQ ID NO: 2544802 - RNA, 19 nt, Homo sapiens
  misc_RNA (1)...(19): siRNA sense strand
ucuaagaacagagggagaa

SEQ ID NO: 2544803 - RNA, 19 nt, Homo sapiens
  misc_RNA (1)...(19): siRNA sense strand
uuguggaagaucauaguaa

SEQ ID NO: 2544804 - RNA, 19 nt, Homo sapiens
  misc_RNA (1)...(19): siRNA sense strand
uaccgaagcacuagauaau

SEQ ID NO: 2544805 - RNA, 19 nt, Homo sapiens
  misc_RNA (1)...(19): siRNA sense strand
aaccaaaugcccacagaau

SEQ ID NO: 2544806 - RNA, 19 nt, Homo sapiens
  misc_RNA (1)...(19): siRNA sense strand
ccaaaagguagaucaaauu

SEQ ID NO: 2544807 - RNA, 19 nt, Homo sapiens
  misc_RNA (1)...(19): siRNA sense strand
aagaacagagggagaacca

SEQ ID NO: 2544808 - RNA, 19 nt, Homo sapiens
  misc_RNA (1)...(19): siRNA sense strand
gaacagagggagaaccacu

SEQ ID NO: 2544809 - RNA, 19 nt, Homo sapiens
  misc_RNA (1)...(19): siRNA sense strand
ccauggaagaauaccaaca

SEQ ID NO: 2544810 - RNA, 19 nt, Homo sapiens
  misc_RNA (1)...(19): siRNA sense strand
auucaaugccacaagguca

SEQ ID NO: 2544811 - RNA, 19 nt, Homo sapiens
  misc_RNA (1)...(19): siRNA sense strand
ggaggagacaccaccgaau

SEQ ID NO: 2544812 - RNA, 19 nt, Homo sapiens
  misc_RNA (1)...(19): siRNA sense strand
gagcuagagagaagaucca

SEQ ID NO: 2544813 - RNA, 19 nt, Homo sapiens
  misc_RNA (1)...(19): siRNA sense strand
caguggagaaauaugaaca

SEQ ID NO: 2544814 - RNA, 19 nt, Homo sapiens
  misc_RNA (1)...(19): siRNA sense strand
ggguuuugcccauugaaua

SEQ ID NO: 2544815 - RNA, 19 nt, Homo sapiens
  misc_RNA (1)...(19): siRNA sense strand
uagaacuggccaaggauca

SEQ ID NO: 2544816 - RNA, 19 nt, Homo sapiens
  misc_RNA (1)...(19): siRNA sense strand
ccgaacuagaugagaccaa

SEQ ID NO: 2544817 - RNA, 19 nt, Homo sapiens
  misc_RNA (1)...(19): siRNA sense strand
ugacuaaagugcaggccga

SEQ ID NO: 2544818 - RNA, 19 nt, Homo sapiens
  misc_RNA (1)...(19): siRNA sense strand
ucuacaaaggcgaggccaa

SEQ ID NO: 2544819 - RNA, 19 nt, Homo sapiens
  misc_RNA (1)...(19): siRNA sense strand
cugucaaagaacaagacua

SEQ ID NO: 2544820 - RNA, 19 nt, Homo sapiens
  misc_RNA (1)...(19): siRNA sense strand
gaacacagucuaaagccuu

SEQ ID NO: 2544821 - RNA, 19 nt, Homo sapiens
  misc_RNA (1)...(19): siRNA sense strand
gaacuagaugagaccaaaa

SEQ ID NO: 2544822 - RNA, 19 nt, Homo sapiens
  misc_RNA (1)...(19): siRNA sense strand
gcgaugugcuggaggccaa

SEQ ID NO: 2544823 - RNA, 19 nt, Homo sapiens
  misc_RNA (1)...(19): siRNA sense strand
gcgaugagcugguggccau

SEQ ID NO: 2544824 - RNA, 19 nt, Homo sapiens
  misc_RNA (1)...(19): siRNA sense strand
ugacguugaaagaggcaaa

SEQ ID NO: 2544825 - RNA, 19 nt, Homo sapiens
  misc_RNA (1)...(19): siRNA sense strand
aggccaacgaggugcggaa

SEQ ID NO: 2544826 - RNA, 19 nt, Homo sapiens
  misc_RNA (1)...(19): siRNA sense strand
gcauccagaccgugggaca

SEQ ID NO: 2544827 - RNA, 19 nt, Homo sapiens
  misc_RNA (1)...(19): siRNA sense strand
cguugaaagaggcaaauga

SEQ ID NO: 2544828 - RNA, 19 nt, Homo sapiens
  misc_RNA (1)...(19): siRNA sense strand
ccugcagcguagcaagaaa

SEQ ID NO: 2544829 - RNA, 19 nt, Homo sapiens
  misc_RNA (1)...(19): siRNA sense strand
cagcguagcaagaaaggga

SEQ ID NO: 2544830 - RNA, 19 nt, Homo sapiens
  misc_RNA (1)...(19): siRNA sense strand
gaagaagaaccgagacuac

SEQ ID NO: 2544831 - RNA, 19 nt, Homo sapiens
  misc_RNA (1)...(19): siRNA sense strand
ugacagcagcccaggccaa

SEQ ID NO: 2544832 - RNA, 19 nt, Homo sapiens
  misc_RNA (1)...(19): siRNA sense strand
cugaagaagaaccgagacu

SEQ ID NO: 2544833 - RNA, 19 nt, Homo sapiens
  misc_RNA (1)...(19): siRNA sense strand
ccccagaguuccaggccaa

SEQ ID NO: 2544834 - RNA, 19 nt, Homo sapiens
  misc_RNA (1)...(19): siRNA sense strand
aggccaagaaccugauuga

SEQ ID NO: 2544835 - RNA, 19 nt, Homo sapiens
  misc_RNA (1)...(19): siRNA sense strand
ccacagugaugaugggcuc

SEQ ID NO: 2544836 - RNA, 19 nt, Homo sapiens
  misc_RNA (1)...(19): siRNA sense strand
ucauagacuucauagcuga

SEQ ID NO: 2544837 - RNA, 19 nt, Homo sapiens
  misc_RNA (1)...(19): siRNA sense strand
gggauaaagugaagaucgc

SEQ ID NO: 2544838 - RNA, 19 nt, Homo sapiens
  misc_RNA (1)...(19): siRNA sense strand
gcgaugugcuggaggccaa

SEQ ID NO: 2544839 - RNA, 19 nt, Homo sapiens
  misc_RNA (1)...(19): siRNA sense strand
gcgaugagcugguggccau

SEQ ID NO: 2544840 - RNA, 19 nt, Homo sapiens
  misc_RNA (1)...(19): siRNA sense strand
ugacguugaaagaggcaaa

SEQ ID NO: 2544841 - RNA, 19 nt, Homo sapiens
  misc_RNA (1)...(19): siRNA sense strand
aggccaacgaggugcggaa

SEQ ID NO: 2544842 - RNA, 19 nt, Homo sapiens
  misc_RNA (1)...(19): siRNA sense strand
gcauccagaccgugggaca

SEQ ID NO: 2544843 - RNA, 19 nt, Homo sapiens
  misc_RNA (1)...(19): siRNA sense strand
cguugaaagaggcaaauga

SEQ ID NO: 2544844 - RNA, 19 nt, Homo sapiens
  misc_RNA (1)...(19): siRNA sense strand
ccugcagcguagcaagaaa

SEQ ID NO: 2544845 - RNA, 19 nt, Homo sapiens
  misc_RNA (1)...(19): siRNA sense strand
cagcguagcaagaaaggga

SEQ ID NO: 2544846 - RNA, 19 nt, Homo sapiens
  misc_RNA (1)...(19): siRNA sense strand
gaagaagaaccgagacuac

SEQ ID NO: 2544847 - RNA, 19 nt, Homo sapiens
  misc_RNA (1)...(19): siRNA sense strand
ugacagcagcccaggccaa

SEQ ID NO: 2544848 - RNA, 19 nt, Homo sapiens
  misc_RNA (1)...(19): siRNA sense strand
cugaagaagaaccgagacu

SEQ ID NO: 2544849 - RNA, 19 nt, Homo sapiens
  misc_RNA (1)...(19): siRNA sense strand
ccccagaguuccaggccaa

SEQ ID NO: 2544850 - RNA, 19 nt, Homo sapiens
  misc_RNA (1)...(19): siRNA sense strand
aggccaagaaccugauuga

SEQ ID NO: 2544851 - RNA, 19 nt, Homo sapiens
  misc_RNA (1)...(19): siRNA sense strand
ccacagugaugaugggcuc

SEQ ID NO: 2544852 - RNA, 19 nt, Homo sapiens
  misc_RNA (1)...(19): siRNA sense strand
ucauagacuucauagcuga

SEQ ID NO: 2544853 - RNA, 19 nt, Homo sapiens
  misc_RNA (1)...(19): siRNA sense strand
gggauaaagugaagaucgc

SEQ ID NO: 2544854 - RNA, 19 nt, Homo sapiens
  misc_RNA (1)...(19): siRNA sense strand
cgucauaggagaaggcuca

SEQ ID NO: 2544855 - RNA, 19 nt, Homo sapiens
  misc_RNA (1)...(19): siRNA sense strand
acaaagagaagcaaggcca

SEQ ID NO: 2544856 - RNA, 19 nt, Homo sapiens
  misc_RNA (1)...(19): siRNA sense strand
ccaucaucgucauaggaga

SEQ ID NO: 2544857 - RNA, 19 nt, Homo sapiens
  misc_RNA (1)...(19): siRNA sense strand
ccaacuacugcgaggagga

SEQ ID NO: 2544858 - RNA, 19 nt, Homo sapiens
  misc_RNA (1)...(19): siRNA sense strand
gugucaggcucgugcacca

SEQ ID NO: 2544859 - RNA, 19 nt, Homo sapiens
  misc_RNA (1)...(19): siRNA sense strand
cggagauguacacgugcaa

SEQ ID NO: 2544860 - RNA, 19 nt, Homo sapiens
  misc_RNA (1)...(19): siRNA sense strand
ucuuugagcacgagguaaa

SEQ ID NO: 2544861 - RNA, 19 nt, Homo sapiens
  misc_RNA (1)...(19): siRNA sense strand
agauggaggccgugaacau

SEQ ID NO: 2544862 - RNA, 19 nt, Homo sapiens
  misc_RNA (1)...(19): siRNA sense strand
aggagaagaugguggugga

SEQ ID NO: 2544863 - RNA, 19 nt, Homo sapiens
  misc_RNA (1)...(19): siRNA sense strand
ucgcugagcucgugcccaa

SEQ ID NO: 2544864 - RNA, 19 nt, Homo sapiens
  misc_RNA (1)...(19): siRNA sense strand
caucaauucuuucggcaca

SEQ ID NO: 2544865 - RNA, 19 nt, Homo sapiens
  misc_RNA (1)...(19): siRNA sense strand
gagacaagacgcuggagga

SEQ ID NO: 2544866 - RNA, 19 nt, Homo sapiens
  misc_RNA (1)...(19): siRNA sense strand
gaaccaugccuaugagcca

SEQ ID NO: 2544867 - RNA, 19 nt, Homo sapiens
  misc_RNA (1)...(19): siRNA sense strand
cgcuagaggacuugaaacu

SEQ ID NO: 2544868 - RNA, 19 nt, Homo sapiens
  misc_RNA (1)...(19): siRNA sense strand
acgacuaugaacaggucaa

SEQ ID NO: 2544869 - RNA, 19 nt, Homo sapiens
  misc_RNA (1)...(19): siRNA sense strand
acaucgagaucauccgcaa

SEQ ID NO: 2544870 - RNA, 19 nt, Homo sapiens
  misc_RNA (1)...(19): siRNA sense strand
gugccaagcucuuuccaca

SEQ ID NO: 2544871 - RNA, 19 nt, Homo sapiens
  misc_RNA (1)...(19): siRNA sense strand
augaacaggucaagaacgu

SEQ ID NO: 2544872 - RNA, 19 nt, Homo sapiens
  misc_RNA (1)...(19): siRNA sense strand
acgagguaaagcugaacaa

SEQ ID NO: 2544873 - RNA, 19 nt, Homo sapiens
  misc_RNA (1)...(19): siRNA sense strand
agcacgagguaaagcugaa

SEQ ID NO: 2544874 - RNA, 19 nt, Homo sapiens
  misc_RNA (1)...(19): siRNA sense strand
ccaaagugcuugugggcaa

SEQ ID NO: 2544875 - RNA, 19 nt, Homo sapiens
  misc_RNA (1)...(19): siRNA sense strand
ccguggaaaucgagggcga

SEQ ID NO: 2544876 - RNA, 19 nt, Homo sapiens
  misc_RNA (1)...(19): siRNA sense strand
aaaucgagggcgagaagau

SEQ ID NO: 2544877 - RNA, 19 nt, Homo sapiens
  misc_RNA (1)...(19): siRNA sense strand
gggacuccaacgugggcaa

SEQ ID NO: 2544878 - RNA, 19 nt, Homo sapiens
  misc_RNA (1)...(19): siRNA sense strand
ggcguggacuucagggaga

SEQ ID NO: 2544879 - RNA, 19 nt, Homo sapiens
  misc_RNA (1)...(19): siRNA sense strand
cgauugaaggcccagaaau

SEQ ID NO: 2544880 - RNA, 19 nt, Homo sapiens
  misc_RNA (1)...(19): siRNA sense strand
uggaaauauaucugcgaau

SEQ ID NO: 2544881 - RNA, 19 nt, Homo sapiens
  misc_RNA (1)...(19): siRNA sense strand
aggugaaggugaaggugca

SEQ ID NO: 2544882 - RNA, 19 nt, Homo sapiens
  misc_RNA (1)...(19): siRNA sense strand
cgaaauagaaaacaggauu

SEQ ID NO: 2544883 - RNA, 19 nt, Homo sapiens
  misc_RNA (1)...(19): siRNA sense strand
cagagauauccgcuauaaa

SEQ ID NO: 2544884 - RNA, 19 nt, Homo sapiens
  misc_RNA (1)...(19): siRNA sense strand
ucauggaaucacagaccaa

SEQ ID NO: 2544885 - RNA, 19 nt, Homo sapiens
  misc_RNA (1)...(19): siRNA sense strand
gguuguugucuauggguca

SEQ ID NO: 2544886 - RNA, 19 nt, Homo sapiens
  misc_RNA (1)...(19): siRNA sense strand
ucuauaaccugcagccaga

SEQ ID NO: 2544887 - RNA, 19 nt, Homo sapiens
  misc_RNA (1)...(19): siRNA sense strand
aggcagaaacagcacgaga

SEQ ID NO: 2544888 - RNA, 19 nt, Homo sapiens
  misc_RNA (1)...(19): siRNA sense strand
cccaaugauacaaagaaau

SEQ ID NO: 2544889 - RNA, 19 nt, Homo sapiens
  misc_RNA (1)...(19): siRNA sense strand
augcaggaaauaaaggaau

SEQ ID NO: 2544890 - RNA, 19 nt, Homo sapiens
  misc_RNA (1)...(19): siRNA sense strand
aauaaaggaauauggagca

SEQ ID NO: 2544891 - RNA, 19 nt, Homo sapiens
  misc_RNA (1)...(19): siRNA sense strand
gaaagcaaacagaacccaa

SEQ ID NO: 2544892 - RNA, 19 nt, Homo sapiens
  misc_RNA (1)...(19): siRNA sense strand
cucucagaaugcugguaaa

SEQ ID NO: 2544893 - RNA, 19 nt, Homo sapiens
  misc_RNA (1)...(19): siRNA sense strand
gaugcaggaaauaaaggaa

SEQ ID NO: 2544894 - RNA, 19 nt, Homo sapiens
  misc_RNA (1)...(19): siRNA sense strand
aauuuguagaggugcuuaa

SEQ ID NO: 2544895 - RNA, 19 nt, Homo sapiens
  misc_RNA (1)...(19): siRNA sense strand
guggaaauauaucugcgaa

SEQ ID NO: 2544896 - RNA, 19 nt, Homo sapiens
  misc_RNA (1)...(19): siRNA sense strand
gcuccauaaucgugggaau

SEQ ID NO: 2544897 - RNA, 19 nt, Homo sapiens
  misc_RNA (1)...(19): siRNA sense strand
gcgcuuacgaggaggucaa

SEQ ID NO: 2544898 - RNA, 19 nt, Homo sapiens
  misc_RNA (1)...(19): siRNA sense strand
cugaauaccuuccggguga

SEQ ID NO: 2544899 - RNA, 19 nt, Homo sapiens
  misc_RNA (1)...(19): siRNA sense strand
gugacuauaaugaggacaa

SEQ ID NO: 2544900 - RNA, 19 nt, Homo sapiens
  misc_RNA (1)...(19): siRNA sense strand
cccaacaggaagaaaguaa

SEQ ID NO: 2544901 - RNA, 19 nt, Homo sapiens
  misc_RNA (1)...(19): siRNA sense strand
augcguauaucgugggcaa

SEQ ID NO: 2544902 - RNA, 19 nt, Homo sapiens
  misc_RNA (1)...(19): siRNA sense strand
gggccagugccuucggaaa

SEQ ID NO: 2544903 - RNA, 19 nt, Homo sapiens
  misc_RNA (1)...(19): siRNA sense strand
ggacguaugaggugggacu

SEQ ID NO: 2544904 - RNA, 19 nt, Homo sapiens
  misc_RNA (1)...(19): siRNA sense strand
ccugacacccugugaacaa

SEQ ID NO: 2544905 - RNA, 19 nt, Homo sapiens
  misc_RNA (1)...(19): siRNA sense strand
aggugggacuggaagacaa

SEQ ID NO: 2544906 - RNA, 19 nt, Homo sapiens
  misc_RNA (1)...(19): siRNA sense strand
agauguugcuggacggaca

SEQ ID NO: 2544907 - RNA, 19 nt, Homo sapiens
  misc_RNA (1)...(19): siRNA sense strand
acaauguacuggacggaca

SEQ ID NO: 2544908 - RNA, 19 nt, Homo sapiens
  misc_RNA (1)...(19): siRNA sense strand
ugacgaagaaagagugcuu

SEQ ID NO: 2544909 - RNA, 19 nt, Homo sapiens
  misc_RNA (1)...(19): siRNA sense strand
cguauaaugcugccaacaa

SEQ ID NO: 2544910 - RNA, 19 nt, Homo sapiens
  misc_RNA (1)...(19): siRNA sense strand
ggacaaagauggcagagag

SEQ ID NO: 2544911 - RNA, 19 nt, Homo sapiens
  misc_RNA (1)...(19): siRNA sense strand
gacuugacccagagaacua

SEQ ID NO: 2544912 - RNA, 19 nt, Homo sapiens
  misc_RNA (1)...(19): siRNA sense strand
ucuacaaguuccagagacu

SEQ ID NO: 2544913 - RNA, 19 nt, Homo sapiens
  misc_RNA (1)...(19): siRNA sense strand
augaggacaauuuggauua

SEQ ID NO: 2544914 - RNA, 19 nt, Homo sapiens
  misc_RNA (1)...(19): siRNA sense strand
gggauggauuucagugcau

SEQ ID NO: 2544915 - RNA, 19 nt, Homo sapiens
  misc_RNA (1)...(19): siRNA sense strand
gggucuuugccuuguauaa

SEQ ID NO: 2544916 - RNA, 19 nt, Homo sapiens
  misc_RNA (1)...(19): siRNA sense strand
aggacaauuuggauuacua

SEQ ID NO: 2544917 - RNA, 19 nt, Homo sapiens
  misc_RNA (1)...(19): siRNA sense strand
agagguagacagagauuca

SEQ ID NO: 2544918 - RNA, 19 nt, Homo sapiens
  misc_RNA (1)...(19): siRNA sense strand
ggccagugccuucggaaau

SEQ ID NO: 2544919 - RNA, 19 nt, Homo sapiens
  misc_RNA (1)...(19): siRNA sense strand
cagagaacuaccugagcau

SEQ ID NO: 2544920 - RNA, 19 nt, Homo sapiens
  misc_RNA (1)...(19): siRNA sense strand
ccuucagcaucguaagcua

SEQ ID NO: 2544921 - RNA, 19 nt, Homo sapiens
  misc_RNA (1)...(19): siRNA sense strand
aaacgcaguauguggacua

SEQ ID NO: 2544922 - RNA, 19 nt, Homo sapiens
  misc_RNA (1)...(19): siRNA sense strand
gauuacgacugccgggaga

SEQ ID NO: 2544923 - RNA, 19 nt, Homo sapiens
  misc_RNA (1)...(19): siRNA sense strand
cccugaaggacuugccaua

SEQ ID NO: 2544924 - RNA, 19 nt, Homo sapiens
  misc_RNA (1)...(19): siRNA sense strand
cgagugaaugggaaaguga

SEQ ID NO: 2544925 - RNA, 19 nt, Homo sapiens
  misc_RNA (1)...(19): siRNA sense strand
ugaaugaggaggaagcuga

SEQ ID NO: 2544926 - RNA, 19 nt, Homo sapiens
  misc_RNA (1)...(19): siRNA sense strand
cuacccagauggagggcca

SEQ ID NO: 2544927 - RNA, 19 nt, Homo sapiens
  misc_RNA (1)...(19): siRNA sense strand
augaggaggaagcugaaua

SEQ ID NO: 2544928 - RNA, 19 nt, Homo sapiens
  misc_RNA (1)...(19): siRNA sense strand
ggcagaugcaggaaccaaa

SEQ ID NO: 2544929 - RNA, 19 nt, Homo sapiens
  misc_RNA (1)...(19): siRNA sense strand
uggaaagugacuauaauga

SEQ ID NO: 2544930 - RNA, 19 nt, Homo sapiens
  misc_RNA (1)...(19): siRNA sense strand
ccagagguagacagagauu

SEQ ID NO: 2544931 - RNA, 19 nt, Homo sapiens
  misc_RNA (1)...(19): siRNA sense strand
guuccaacaccgaggucuu

SEQ ID NO: 2544932 - RNA, 19 nt, Homo sapiens
  misc_RNA (1)...(19): siRNA sense strand
uggagaaaacagaagaauu

SEQ ID NO: 2544933 - RNA, 19 nt, Homo sapiens
  misc_RNA (1)...(19): siRNA sense strand
cugaugggucugauagcua

SEQ ID NO: 2544934 - RNA, 19 nt, Homo sapiens
  misc_RNA (1)...(19): siRNA sense strand
ccauauuucagcuugacua

SEQ ID NO: 2544935 - RNA, 19 nt, Homo sapiens
  misc_RNA (1)...(19): siRNA sense strand
caucguaagcuaugcagau

SEQ ID NO: 2544936 - RNA, 19 nt, Homo sapiens
  misc_RNA (1)...(19): siRNA sense strand
cuuacaauguccagcuuca

SEQ ID NO: 2544937 - RNA, 19 nt, Homo sapiens
  misc_RNA (1)...(19): siRNA sense strand
ccgaggucuucacguauaa

SEQ ID NO: 2544938 - RNA, 19 nt, Homo sapiens
  misc_RNA (1)...(19): siRNA sense strand
gaugaaaaugaaugugcaa

SEQ ID NO: 2544939 - RNA, 19 nt, Homo sapiens
  misc_RNA (1)...(19): siRNA sense strand
ugauaagcccugaaggacu

SEQ ID NO: 2544940 - RNA, 19 nt, Homo sapiens
  misc_RNA (1)...(19): siRNA sense strand
ucugauaagcccugaagga

SEQ ID NO: 2544941 - RNA, 19 nt, Homo sapiens
  misc_RNA (1)...(19): siRNA sense strand
gggacuugacccagagaac

SEQ ID NO: 2544942 - RNA, 19 nt, Homo sapiens
  misc_RNA (1)...(19): siRNA sense strand
agaccaacauucaaggcca

SEQ ID NO: 2544943 - RNA, 19 nt, Homo sapiens
  misc_RNA (1)...(19): siRNA sense strand
ccagggagauggacggaac

SEQ ID NO: 2544944 - RNA, 19 nt, Homo sapiens
  misc_RNA (1)...(19): siRNA sense strand
gugaacaacagcagcgcca

SEQ ID NO: 2544945 - RNA, 19 nt, Homo sapiens
  misc_RNA (1)...(19): siRNA sense strand
gggcagaugcaggaaccaa

SEQ ID NO: 2544946 - RNA, 19 nt, Homo sapiens
  misc_RNA (1)...(19): siRNA sense strand
gaaugaggaggaagcugaa

SEQ ID NO: 2544947 - RNA, 19 nt, Homo sapiens
  misc_RNA (1)...(19): siRNA sense strand
caaggaaaccugugaacac

SEQ ID NO: 2544948 - RNA, 19 nt, Homo sapiens
  misc_RNA (1)...(19): siRNA sense strand
gugaaccagaggaggcauu

SEQ ID NO: 2544949 - RNA, 19 nt, Homo sapiens
  misc_RNA (1)...(19): siRNA sense strand
ccacagcagcauugauguu

SEQ ID NO: 2544950 - RNA, 19 nt, Homo sapiens
  misc_RNA (1)...(19): siRNA sense strand
acggaagcauccagcccua

SEQ ID NO: 2544951 - RNA, 19 nt, Homo sapiens
  misc_RNA (1)...(19): siRNA sense strand
ccuuguauaaugacgaaga

SEQ ID NO: 2544952 - RNA, 19 nt, Homo sapiens
  misc_RNA (1)...(19): siRNA sense strand
ugaguaucucccagaacaa

SEQ ID NO: 2544953 - RNA, 19 nt, Homo sapiens
  misc_RNA (1)...(19): siRNA sense strand
cuuguauaaugacgaagaa

SEQ ID NO: 2544954 - RNA, 19 nt, Homo sapiens
  misc_RNA (1)...(19): siRNA sense strand
cggucaaagaagauucaga

SEQ ID NO: 2544955 - RNA, 19 nt, Homo sapiens
  misc_RNA (1)...(19): siRNA sense strand
aagagaaaguaaagggucu

SEQ ID NO: 2544956 - RNA, 19 nt, Homo sapiens
  misc_RNA (1)...(19): siRNA sense strand
cccuggaaauggaggaaaa

SEQ ID NO: 2544957 - RNA, 19 nt, Homo sapiens
  misc_RNA (1)...(19): siRNA sense strand
aagaagagaaaucaagcaa

SEQ ID NO: 2544958 - RNA, 19 nt, Homo sapiens
  misc_RNA (1)...(19): siRNA sense strand
agaagagaaaucaagcaaa

SEQ ID NO: 2544959 - RNA, 19 nt, Homo sapiens
  misc_RNA (1)...(19): siRNA sense strand
ugaugaauuaagagacaga

SEQ ID NO: 2544960 - RNA, 19 nt, Homo sapiens
  misc_RNA (1)...(19): siRNA sense strand
cagacagagcaggaagaaa

SEQ ID NO: 2544961 - RNA, 19 nt, Homo sapiens
  misc_RNA (1)...(19): siRNA sense strand
augaagaaagacaggagau

SEQ ID NO: 2544962 - RNA, 19 nt, Homo sapiens
  misc_RNA (1)...(19): siRNA sense strand
uggagaugauggagcagga

SEQ ID NO: 2544963 - RNA, 19 nt, Homo sapiens
  misc_RNA (1)...(19): siRNA sense strand
ccaaagaagcggcuggaug

SEQ ID NO: 2544964 - RNA, 19 nt, Homo sapiens
  misc_RNA (1)...(19): siRNA sense strand
cgaacugccgcuaaggaau

SEQ ID NO: 2544965 - RNA, 19 nt, Homo sapiens
  misc_RNA (1)...(19): siRNA sense strand
gggaggaggcuuggagcuu

SEQ ID NO: 2544966 - RNA, 19 nt, Homo sapiens
  misc_RNA (1)...(19): siRNA sense strand
uggaacacugccacggaaa

SEQ ID NO: 2544967 - RNA, 19 nt, Homo sapiens
  misc_RNA (1)...(19): siRNA sense strand
gcagacaaacccuggacga

SEQ ID NO: 2544968 - RNA, 19 nt, Homo sapiens
  misc_RNA (1)...(19): siRNA sense strand
aagcuaaggaaccggccaa

SEQ ID NO: 2544969 - RNA, 19 nt, Homo sapiens
  misc_RNA (1)...(19): siRNA sense strand
acgaggaggcgcugaacga

SEQ ID NO: 2544970 - RNA, 19 nt, Homo sapiens
  misc_RNA (1)...(19): siRNA sense strand
ggaaaugcaagaaggagcu

SEQ ID NO: 2544971 - RNA, 19 nt, Homo sapiens
  misc_RNA (1)...(19): siRNA sense strand
agacaaacccuggacgaga

SEQ ID NO: 2544972 - RNA, 19 nt, Homo sapiens
  misc_RNA (1)...(19): siRNA sense strand
cggaaaugcaagaaggagc

SEQ ID NO: 2544973 - RNA, 19 nt, Homo sapiens
  misc_RNA (1)...(19): siRNA sense strand
aagcuuaaucagagaccca

SEQ ID NO: 2544974 - RNA, 19 nt, Homo sapiens
  misc_RNA (1)...(19): siRNA sense strand
aagagaaaguaaagggucu

SEQ ID NO: 2544975 - RNA, 19 nt, Homo sapiens
  misc_RNA (1)...(19): siRNA sense strand
cccuggaaauggaggaaaa

SEQ ID NO: 2544976 - RNA, 19 nt, Homo sapiens
  misc_RNA (1)...(19): siRNA sense strand
aagaagagaaaucaagcaa

SEQ ID NO: 2544977 - RNA, 19 nt, Homo sapiens
  misc_RNA (1)...(19): siRNA sense strand
agaagagaaaucaagcaaa

SEQ ID NO: 2544978 - RNA, 19 nt, Homo sapiens
  misc_RNA (1)...(19): siRNA sense strand
ugaugaauuaagagacaga

SEQ ID NO: 2544979 - RNA, 19 nt, Homo sapiens
  misc_RNA (1)...(19): siRNA sense strand
cagacagagcaggaagaaa

SEQ ID NO: 2544980 - RNA, 19 nt, Homo sapiens
  misc_RNA (1)...(19): siRNA sense strand
augaagaaagacaggagau

SEQ ID NO: 2544981 - RNA, 19 nt, Homo sapiens
  misc_RNA (1)...(19): siRNA sense strand
uggagaugauggagcagga

SEQ ID NO: 2544982 - RNA, 19 nt, Homo sapiens
  misc_RNA (1)...(19): siRNA sense strand
ccaaagaagcggcuggaug

SEQ ID NO: 2544983 - RNA, 19 nt, Homo sapiens
  misc_RNA (1)...(19): siRNA sense strand
cgaacugccgcuaaggaau

SEQ ID NO: 2544984 - RNA, 19 nt, Homo sapiens
  misc_RNA (1)...(19): siRNA sense strand
gggaggaggcuuggagcuu

SEQ ID NO: 2544985 - RNA, 19 nt, Homo sapiens
  misc_RNA (1)...(19): siRNA sense strand
uggaacacugccacggaaa

SEQ ID NO: 2544986 - RNA, 19 nt, Homo sapiens
  misc_RNA (1)...(19): siRNA sense strand
gcagacaaacccuggacga

SEQ ID NO: 2544987 - RNA, 19 nt, Homo sapiens
  misc_RNA (1)...(19): siRNA sense strand
aagcuaaggaaccggccaa

SEQ ID NO: 2544988 - RNA, 19 nt, Homo sapiens
  misc_RNA (1)...(19): siRNA sense strand
acgaggaggcgcugaacga

SEQ ID NO: 2544989 - RNA, 19 nt, Homo sapiens
  misc_RNA (1)...(19): siRNA sense strand
ggaaaugcaagaaggagcu

SEQ ID NO: 2544990 - RNA, 19 nt, Homo sapiens
  misc_RNA (1)...(19): siRNA sense strand
agacaaacccuggacgaga

SEQ ID NO: 2544991 - RNA, 19 nt, Homo sapiens
  misc_RNA (1)...(19): siRNA sense strand
cggaaaugcaagaaggagc

SEQ ID NO: 2544992 - RNA, 19 nt, Homo sapiens
  misc_RNA (1)...(19): siRNA sense strand
aagcuuaaucagagaccca

SEQ ID NO: 2544993 - RNA, 19 nt, Homo sapiens
  misc_RNA (1)...(19): siRNA sense strand
aagagaaaguaaagggucu

SEQ ID NO: 2544994 - RNA, 19 nt, Homo sapiens
  misc_RNA (1)...(19): siRNA sense strand
cccuggaaauggaggaaaa

SEQ ID NO: 2544995 - RNA, 19 nt, Homo sapiens
  misc_RNA (1)...(19): siRNA sense strand
aagaagagaaaucaagcaa

SEQ ID NO: 2544996 - RNA, 19 nt, Homo sapiens
  misc_RNA (1)...(19): siRNA sense strand
agaagagaaaucaagcaaa

SEQ ID NO: 2544997 - RNA, 19 nt, Homo sapiens
  misc_RNA (1)...(19): siRNA sense strand
ugaugaauuaagagacaga

SEQ ID NO: 2544998 - RNA, 19 nt, Homo sapiens
  misc_RNA (1)...(19): siRNA sense strand
cagacagagcaggaagaaa

SEQ ID NO: 2544999 - RNA, 19 nt, Homo sapiens
  misc_RNA (1)...(19): siRNA sense strand
augaagaaagacaggagau

SEQ ID NO: 2545000 - RNA, 19 nt, Homo sapiens
  misc_RNA (1)...(19): siRNA sense strand
uggagaugauggagcagga

SEQ ID NO: 2545001 - RNA, 19 nt, Homo sapiens
  misc_RNA (1)...(19): siRNA sense strand
ccaaagaagcggcuggaug

SEQ ID NO: 2545002 - RNA, 19 nt, Homo sapiens
  misc_RNA (1)...(19): siRNA sense strand
cgaacugccgcuaaggaau

SEQ ID NO: 2545003 - RNA, 19 nt, Homo sapiens
  misc_RNA (1)...(19): siRNA sense strand
gggaggaggcuuggagcuu

SEQ ID NO: 2545004 - RNA, 19 nt, Homo sapiens
  misc_RNA (1)...(19): siRNA sense strand
uggaacacugccacggaaa

SEQ ID NO: 2545005 - RNA, 19 nt, Homo sapiens
  misc_RNA (1)...(19): siRNA sense strand
gcagacaaacccuggacga

SEQ ID NO: 2545006 - RNA, 19 nt, Homo sapiens
  misc_RNA (1)...(19): siRNA sense strand
aagcuaaggaaccggccaa

SEQ ID NO: 2545007 - RNA, 19 nt, Homo sapiens
  misc_RNA (1)...(19): siRNA sense strand
acgaggaggcgcugaacga

SEQ ID NO: 2545008 - RNA, 19 nt, Homo sapiens
  misc_RNA (1)...(19): siRNA sense strand
ggaaaugcaagaaggagcu

SEQ ID NO: 2545009 - RNA, 19 nt, Homo sapiens
  misc_RNA (1)...(19): siRNA sense strand
agacaaacccuggacgaga

SEQ ID NO: 2545010 - RNA, 19 nt, Homo sapiens
  misc_RNA (1)...(19): siRNA sense strand
cggaaaugcaagaaggagc

SEQ ID NO: 2545011 - RNA, 19 nt, Homo sapiens
  misc_RNA (1)...(19): siRNA sense strand
aagcuuaaucagagaccca

SEQ ID NO: 2545012 - RNA, 19 nt, Homo sapiens
  misc_RNA (1)...(19): siRNA sense strand
agaugugauuagagggaau

SEQ ID NO: 2545013 - RNA, 19 nt, Homo sapiens
  misc_RNA (1)...(19): siRNA sense strand
uccacaaagaagaggaaga

SEQ ID NO: 2545014 - RNA, 19 nt, Homo sapiens
  misc_RNA (1)...(19): siRNA sense strand
uugaaagcaugguggagca

SEQ ID NO: 2545015 - RNA, 19 nt, Homo sapiens
  misc_RNA (1)...(19): siRNA sense strand
uagugagggacuuggaaaa

SEQ ID NO: 2545016 - RNA, 19 nt, Homo sapiens
  misc_RNA (1)...(19): siRNA sense strand
cagucaaggugguggguga

SEQ ID NO: 2545017 - RNA, 19 nt, Homo sapiens
  misc_RNA (1)...(19): siRNA sense strand
gugaaagagcugaaggaga

SEQ ID NO: 2545018 - RNA, 19 nt, Homo sapiens
  misc_RNA (1)...(19): siRNA sense strand
ugaaagagcugaaggagac

SEQ ID NO: 2545019 - RNA, 19 nt, Homo sapiens
  misc_RNA (1)...(19): siRNA sense strand
ugacaaauagguugcccaa

SEQ ID NO: 2545020 - RNA, 19 nt, Homo sapiens
  misc_RNA (1)...(19): siRNA sense strand
ucaaggaacagcugggcau

SEQ ID NO: 2545021 - RNA, 19 nt, Homo sapiens
  misc_RNA (1)...(19): siRNA sense strand
caagaaugaaggugccaca

SEQ ID NO: 2545022 - RNA, 19 nt, Homo sapiens
  misc_RNA (1)...(19): siRNA sense strand
augagaagauccuggugga

SEQ ID NO: 2545023 - RNA, 19 nt, Homo sapiens
  misc_RNA (1)...(19): siRNA sense strand
aguugaagcuacagcagaa

SEQ ID NO: 2545024 - RNA, 19 nt, Homo sapiens
  misc_RNA (1)...(19): siRNA sense strand
aggacgagaagcugauaaa

SEQ ID NO: 2545025 - RNA, 19 nt, Homo sapiens
  misc_RNA (1)...(19): siRNA sense strand
ggugcaaggaggacgagaa

SEQ ID NO: 2545026 - RNA, 19 nt, Homo sapiens
  misc_RNA (1)...(19): siRNA sense strand
ucuuugugguccuggguua

SEQ ID NO: 2545027 - RNA, 19 nt, Homo sapiens
  misc_RNA (1)...(19): siRNA sense strand
ggcaacaaugaaagugaaa

SEQ ID NO: 2545028 - RNA, 19 nt, Homo sapiens
  misc_RNA (1)...(19): siRNA sense strand
gauagaagauggcuggcau

SEQ ID NO: 2545029 - RNA, 19 nt, Homo sapiens
  misc_RNA (1)...(19): siRNA sense strand
aggagguggcuuugaacaa

SEQ ID NO: 2545030 - RNA, 19 nt, Homo sapiens
  misc_RNA (1)...(19): siRNA sense strand
aguauuuggaugaagcaua

SEQ ID NO: 2545031 - RNA, 19 nt, Homo sapiens
  misc_RNA (1)...(19): siRNA sense strand
agcaagaauuugaacucua

SEQ ID NO: 2545032 - RNA, 19 nt, Homo sapiens
  misc_RNA (1)...(19): siRNA sense strand
accagugaauggaggcuaa

SEQ ID NO: 2545033 - RNA, 19 nt, Homo sapiens
  misc_RNA (1)...(19): siRNA sense strand
ggcuaagcuaugucaauaa

SEQ ID NO: 2545034 - RNA, 19 nt, Homo sapiens
  misc_RNA (1)...(19): siRNA sense strand
gagccaagaagcaggacca

SEQ ID NO: 2545035 - RNA, 19 nt, Homo sapiens
  misc_RNA (1)...(19): siRNA sense strand
gugaaagauguaaguugaa

SEQ ID NO: 2545036 - RNA, 19 nt, Homo sapiens
  misc_RNA (1)...(19): siRNA sense strand
uggaggaaugcuugaauau

SEQ ID NO: 2545037 - RNA, 19 nt, Homo sapiens
  misc_RNA (1)...(19): siRNA sense strand
gguacaaacgggaggaggu

SEQ ID NO: 2545038 - RNA, 19 nt, Homo sapiens
  misc_RNA (1)...(19): siRNA sense strand
guuugaagugauagaagau

SEQ ID NO: 2545039 - RNA, 19 nt, Homo sapiens
  misc_RNA (1)...(19): siRNA sense strand
uggaugaagcauaugaaga

SEQ ID NO: 2545040 - RNA, 19 nt, Homo sapiens
  misc_RNA (1)...(19): siRNA sense strand
gcuaugucaauaaggaauu

SEQ ID NO: 2545041 - RNA, 19 nt, Homo sapiens
  misc_RNA (1)...(19): siRNA sense strand
ccucagggcuggaaagcgu

SEQ ID NO: 2545042 - RNA, 19 nt, Homo sapiens
  misc_RNA (1)...(19): siRNA sense strand
caauauugauucacggaac

SEQ ID NO: 2545043 - RNA, 19 nt, Homo sapiens
  misc_RNA (1)...(19): siRNA sense strand
auucaaacaucgacgccau

SEQ ID NO: 2545044 - RNA, 19 nt, Homo sapiens
  misc_RNA (1)...(19): siRNA sense strand
uccuauguuugaagugaua

SEQ ID NO: 2545045 - RNA, 19 nt, Homo sapiens
  misc_RNA (1)...(19): siRNA sense strand
uuggaacauuucugggcaa

SEQ ID NO: 2545046 - RNA, 19 nt, Homo sapiens
  misc_RNA (1)...(19): siRNA sense strand
cccagugagcugaguaaau

SEQ ID NO: 2545047 - RNA, 19 nt, Homo sapiens
  misc_RNA (1)...(19): siRNA sense strand
cuuaaucaaacuuguggaa

SEQ ID NO: 2545048 - RNA, 19 nt, Homo sapiens
  misc_RNA (1)...(19): siRNA sense strand
agauguaaguugaagcuac

SEQ ID NO: 2545049 - RNA, 19 nt, Homo sapiens
  misc_RNA (1)...(19): siRNA sense strand
ucacggaacagaaggaacu

SEQ ID NO: 2545050 - RNA, 19 nt, Homo sapiens
  misc_RNA (1)...(19): siRNA sense strand
acaccaagcagaaguggga

SEQ ID NO: 2545051 - RNA, 19 nt, Homo sapiens
  misc_RNA (1)...(19): siRNA sense strand
aauauugauucacggaaca

SEQ ID NO: 2545052 - RNA, 19 nt, Homo sapiens
  misc_RNA (1)...(19): siRNA sense strand
ggaaauaacuggaaggaag

SEQ ID NO: 2545053 - RNA, 19 nt, Homo sapiens
  misc_RNA (1)...(19): siRNA sense strand
aggcagagacccuggccaa

SEQ ID NO: 2545054 - RNA, 19 nt, Homo sapiens
  misc_RNA (1)...(19): siRNA sense strand
agacagagaggcuagggaa

SEQ ID NO: 2545055 - RNA, 19 nt, Homo sapiens
  misc_RNA (1)...(19): siRNA sense strand
cuggccaaguuccgagaaa

SEQ ID NO: 2545056 - RNA, 19 nt, Homo sapiens
  misc_RNA (1)...(19): siRNA sense strand
agaaauaugauaaggagcu

SEQ ID NO: 2545057 - RNA, 19 nt, Homo sapiens
  misc_RNA (1)...(19): siRNA sense strand
ccaaacaggcagagacccu

SEQ ID NO: 2545058 - RNA, 19 nt, Homo sapiens
  misc_RNA (1)...(19): siRNA sense strand
gaggacacucgcaggaaaa

SEQ ID NO: 2545059 - RNA, 19 nt, Homo sapiens
  misc_RNA (1)...(19): siRNA sense strand
ugcagaagucggaggcuuu

SEQ ID NO: 2545060 - RNA, 19 nt, Homo sapiens
  misc_RNA (1)...(19): siRNA sense strand
cugacgagggcaugcagaa

SEQ ID NO: 2545061 - RNA, 19 nt, Homo sapiens
  misc_RNA (1)...(19): siRNA sense strand
aggaccugcucaagaccaa

SEQ ID NO: 2545062 - RNA, 19 nt, Homo sapiens
  misc_RNA (1)...(19): siRNA sense strand
gggcaggggagaugacaga

SEQ ID NO: 2545063 - RNA, 19 nt, Homo sapiens
  misc_RNA (1)...(19): siRNA sense strand
ccacauggugcccgaggau

SEQ ID NO: 2545064 - RNA, 19 nt, Homo sapiens
  misc_RNA (1)...(19): siRNA sense strand
caucaaagucugugagcug

SEQ ID NO: 2545065 - RNA, 19 nt, Homo sapiens
  misc_RNA (1)...(19): siRNA sense strand
agauugugauucugggaga

SEQ ID NO: 2545066 - RNA, 19 nt, Homo sapiens
  misc_RNA (1)...(19): siRNA sense strand
gcgucuauguccugcgcuu

SEQ ID NO: 2545067 - RNA, 19 nt, Homo sapiens
  misc_RNA (1)...(19): siRNA sense strand
agcaacaagaccuggacaa

SEQ ID NO: 2545068 - RNA, 19 nt, Homo sapiens
  misc_RNA (1)...(19): siRNA sense strand
cugcagagucucaaggcga

SEQ ID NO: 2545069 - RNA, 19 nt, Homo sapiens
  misc_RNA (1)...(19): siRNA sense strand
gccugaaacaccuguggaa

SEQ ID NO: 2545070 - RNA, 19 nt, Homo sapiens
  misc_RNA (1)...(19): siRNA sense strand
acgcaggaagauugugauu

SEQ ID NO: 2545071 - RNA, 19 nt, Homo sapiens
  misc_RNA (1)...(19): siRNA sense strand
ccuccaagcaggauaugau

SEQ ID NO: 2545072 - RNA, 19 nt, Homo sapiens
  misc_RNA (1)...(19): siRNA sense strand
ggacaucggcuuugggguu

SEQ ID NO: 2545073 - RNA, 19 nt, Homo sapiens
  misc_RNA (1)...(19): siRNA sense strand
ggguuuuccugaagaccaa

SEQ ID NO: 2545074 - RNA, 19 nt, Homo sapiens
  misc_RNA (1)...(19): siRNA sense strand
uggacaaguucaaggccaa

SEQ ID NO: 2545075 - RNA, 19 nt, Homo sapiens
  misc_RNA (1)...(19): siRNA sense strand
guuucgagggcgaggguga

SEQ ID NO: 2545076 - RNA, 19 nt, Homo sapiens
  misc_RNA (1)...(19): siRNA sense strand
acgaaguggacaaguucaa

SEQ ID NO: 2545077 - RNA, 19 nt, Homo sapiens
  misc_RNA (1)...(19): siRNA sense strand
ggaaagccguggagagcug

SEQ ID NO: 2545078 - RNA, 19 nt, Homo sapiens
  misc_RNA (1)...(19): siRNA sense strand
gcacaguguacaaggcgga

SEQ ID NO: 2545079 - RNA, 19 nt, Homo sapiens
  misc_RNA (1)...(19): siRNA sense strand
ccucagccacagagcggua

SEQ ID NO: 2545080 - RNA, 19 nt, Homo sapiens
  misc_RNA (1)...(19): siRNA sense strand
guacaaggcggauguggca

SEQ ID NO: 2545081 - RNA, 19 nt, Homo sapiens
  misc_RNA (1)...(19): siRNA sense strand
aguggaagucuguggucau

SEQ ID NO: 2545082 - RNA, 19 nt, Homo sapiens
  misc_RNA (1)...(19): siRNA sense strand
guguaugugcccugcguga

SEQ ID NO: 2545083 - RNA, 19 nt, Homo sapiens
  misc_RNA (1)...(19): siRNA sense strand
ucaaagaccaggaagccaa

SEQ ID NO: 2545084 - RNA, 19 nt, Homo sapiens
  misc_RNA (1)...(19): siRNA sense strand
ccguauuaguguuugacau

SEQ ID NO: 2545085 - RNA, 19 nt, Homo sapiens
  misc_RNA (1)...(19): siRNA sense strand
ggcaucuggcaaagggaaa

SEQ ID NO: 2545086 - RNA, 19 nt, Homo sapiens
  misc_RNA (1)...(19): siRNA sense strand
aggucacagcugaggaauu

SEQ ID NO: 2545087 - RNA, 19 nt, Homo sapiens
  misc_RNA (1)...(19): siRNA sense strand
aaauugacaaggauggcaa

SEQ ID NO: 2545088 - RNA, 19 nt, Homo sapiens
  misc_RNA (1)...(19): siRNA sense strand
agaaacggacagugaucau

SEQ ID NO: 2545089 - RNA, 19 nt, Homo sapiens
  misc_RNA (1)...(19): siRNA sense strand
cgagaaacggacagugauc

SEQ ID NO: 2545090 - RNA, 19 nt, Homo sapiens
  misc_RNA (1)...(19): siRNA sense strand
ucaccaaccaggaccggaa

SEQ ID NO: 2545091 - RNA, 19 nt, Homo sapiens
  misc_RNA (1)...(19): siRNA sense strand
ccggaauggagaugggaag

SEQ ID NO: 2545092 - RNA, 19 nt, Homo sapiens
  misc_RNA (1)...(19): siRNA sense strand
agaggaaggaagagggaau

SEQ ID NO: 2545093 - RNA, 19 nt, Homo sapiens
  misc_RNA (1)...(19): siRNA sense strand
agaggauggagaugggaaa

SEQ ID NO: 2545094 - RNA, 19 nt, Homo sapiens
  misc_RNA (1)...(19): siRNA sense strand
ucaaagaccaggaagccaa

SEQ ID NO: 2545095 - RNA, 19 nt, Homo sapiens
  misc_RNA (1)...(19): siRNA sense strand
ccguauuaguguuugacau

SEQ ID NO: 2545096 - RNA, 19 nt, Homo sapiens
  misc_RNA (1)...(19): siRNA sense strand
ggcaucuggcaaagggaaa

SEQ ID NO: 2545097 - RNA, 19 nt, Homo sapiens
  misc_RNA (1)...(19): siRNA sense strand
gagaggauggagaugggaa

SEQ ID NO: 2545098 - RNA, 19 nt, Homo sapiens
  misc_RNA (1)...(19): siRNA sense strand
ccacguggaauuuaggcaa

SEQ ID NO: 2545099 - RNA, 19 nt, Homo sapiens
  misc_RNA (1)...(19): siRNA sense strand
cuuguugggaugugcguaa

SEQ ID NO: 2545100 - RNA, 19 nt, Homo sapiens
  misc_RNA (1)...(19): siRNA sense strand
cugaguaagaagggagauu

SEQ ID NO: 2545101 - RNA, 19 nt, Homo sapiens
  misc_RNA (1)...(19): siRNA sense strand
aggucacagccgaggaauu

SEQ ID NO: 2545102 - RNA, 19 nt, Homo sapiens
  misc_RNA (1)...(19): siRNA sense strand
gguguuugcauuggagaaa

SEQ ID NO: 2545103 - RNA, 19 nt, Homo sapiens
  misc_RNA (1)...(19): siRNA sense strand
cguacauugggcagggcua

SEQ ID NO: 2545104 - RNA, 19 nt, Homo sapiens
  misc_RNA (1)...(19): siRNA sense strand
agggagauuaccucaaaua

SEQ ID NO: 2545105 - RNA, 19 nt, Homo sapiens
  misc_RNA (1)...(19): siRNA sense strand
ucugauggauauuuggaau

SEQ ID NO: 2545106 - RNA, 19 nt, Homo sapiens
  misc_RNA (1)...(19): siRNA sense strand
cugauggauauuuggaauu

SEQ ID NO: 2545107 - RNA, 19 nt, Homo sapiens
  misc_RNA (1)...(19): siRNA sense strand
ggagaggaaggaagaggga

SEQ ID NO: 2545108 - RNA, 19 nt, Homo sapiens
  misc_RNA (1)...(19): siRNA sense strand
ccuauggagaggauggaga

SEQ ID NO: 2545109 - RNA, 19 nt, Homo sapiens
  misc_RNA (1)...(19): siRNA sense strand
aaauugacaaggauggcaa

SEQ ID NO: 2545110 - RNA, 19 nt, Homo sapiens
  misc_RNA (1)...(19): siRNA sense strand
cagcauuuccauugagaac

SEQ ID NO: 2545111 - RNA, 19 nt, Homo sapiens
  misc_RNA (1)...(19): siRNA sense strand
uggagaugggaaagacauu

SEQ ID NO: 2545112 - RNA, 19 nt, Homo sapiens
  misc_RNA (1)...(19): siRNA sense strand
ugucugauuuugugaggua

SEQ ID NO: 2545113 - RNA, 19 nt, Homo sapiens
  misc_RNA (1)...(19): siRNA sense strand
gggaauuggcuggcugauu

SEQ ID NO: 2545114 - RNA, 19 nt, Homo sapiens
  misc_RNA (1)...(19): siRNA sense strand
gaaaacugugagcggauaa

SEQ ID NO: 2545115 - RNA, 19 nt, Homo sapiens
  misc_RNA (1)...(19): siRNA sense strand
cgagaaacggacagugauc

SEQ ID NO: 2545116 - RNA, 19 nt, Homo sapiens
  misc_RNA (1)...(19): siRNA sense strand
agaaacggacagugaucau

SEQ ID NO: 2545117 - RNA, 19 nt, Homo sapiens
  misc_RNA (1)...(19): siRNA sense strand
ucaccaaccaggaccggaa

SEQ ID NO: 2545118 - RNA, 19 nt, Homo sapiens
  misc_RNA (1)...(19): siRNA sense strand
ggaaaaggacagcugauca

SEQ ID NO: 2545119 - RNA, 19 nt, Homo sapiens
  misc_RNA (1)...(19): siRNA sense strand
uggaauggauaaagggcug

SEQ ID NO: 2545120 - RNA, 19 nt, Homo sapiens
  misc_RNA (1)...(19): siRNA sense strand
ccggaauggagaugggaag

SEQ ID NO: 2545121 - RNA, 19 nt, Homo sapiens
  misc_RNA (1)...(19): siRNA sense strand
cgaucaaagagaaggacaa

SEQ ID NO: 2545122 - RNA, 19 nt, Homo sapiens
  misc_RNA (1)...(19): siRNA sense strand
ggaaggaggcugagaggca

SEQ ID NO: 2545123 - RNA, 19 nt, Homo sapiens
  misc_RNA (1)...(19): siRNA sense strand
uggcauacauugagcgcau

SEQ ID NO: 2545124 - RNA, 19 nt, Homo sapiens
  misc_RNA (1)...(19): siRNA sense strand
gcagauugcugaagggaug

SEQ ID NO: 2545125 - RNA, 19 nt, Homo sapiens
  misc_RNA (1)...(19): siRNA sense strand
ggucuaugccagaggcuga

SEQ ID NO: 2545126 - RNA, 19 nt, Homo sapiens
  misc_RNA (1)...(19): siRNA sense strand
gggagaagcuacagguccu

SEQ ID NO: 2545127 - RNA, 19 nt, Homo sapiens
  misc_RNA (1)...(19): siRNA sense strand
aguacgagcugcagcccua

SEQ ID NO: 2545128 - RNA, 19 nt, Homo sapiens
  misc_RNA (1)...(19): siRNA sense strand
aagagaaggacaagggcca

SEQ ID NO: 2545129 - RNA, 19 nt, Homo sapiens
  misc_RNA (1)...(19): siRNA sense strand
cuuaucagagagagugaaa

SEQ ID NO: 2545130 - RNA, 19 nt, Homo sapiens
  misc_RNA (1)...(19): siRNA sense strand
ucacaggaagagaaggcua

SEQ ID NO: 2545131 - RNA, 19 nt, Homo sapiens
  misc_RNA (1)...(19): siRNA sense strand
uugcugaagggauggcaua

SEQ ID NO: 2545132 - RNA, 19 nt, Homo sapiens
  misc_RNA (1)...(19): siRNA sense strand
guacauggccagaggaugc

SEQ ID NO: 2545133 - RNA, 19 nt, Homo sapiens
  misc_RNA (1)...(19): siRNA sense strand
gaguacauggccagaggau

SEQ ID NO: 2545134 - RNA, 19 nt, Homo sapiens
  misc_RNA (1)...(19): siRNA sense strand
caacauacauuucgcguca

SEQ ID NO: 2545135 - RNA, 19 nt, Homo sapiens
  misc_RNA (1)...(19): siRNA sense strand
uccucaaccugcaggguaa

SEQ ID NO: 2545136 - RNA, 19 nt, Homo sapiens
  misc_RNA (1)...(19): siRNA sense strand
gcugcaggccagugauaau

SEQ ID NO: 2545137 - RNA, 19 nt, Homo sapiens
  misc_RNA (1)...(19): siRNA sense strand
gagaauaaauggugccugc

SEQ ID NO: 2545138 - RNA, 19 nt, Homo sapiens
  misc_RNA (1)...(19): siRNA sense strand
ccaaaaggcuagagcgaga

SEQ ID NO: 2545139 - RNA, 19 nt, Homo sapiens
  misc_RNA (1)...(19): siRNA sense strand
caacauacauuucgcguca

SEQ ID NO: 2545140 - RNA, 19 nt, Homo sapiens
  misc_RNA (1)...(19): siRNA sense strand
uccucaaccugcaggguaa

SEQ ID NO: 2545141 - RNA, 19 nt, Homo sapiens
  misc_RNA (1)...(19): siRNA sense strand
cgucagaagagcaggcgga

SEQ ID NO: 2545142 - RNA, 19 nt, Homo sapiens
  misc_RNA (1)...(19): siRNA sense strand
gcugcaggccagugauaau

SEQ ID NO: 2545143 - RNA, 19 nt, Homo sapiens
  misc_RNA (1)...(19): siRNA sense strand
uggagguggaugagcggaa

SEQ ID NO: 2545144 - RNA, 19 nt, Homo sapiens
  misc_RNA (1)...(19): siRNA sense strand
aagagcaggcggaggccaa

SEQ ID NO: 2545145 - RNA, 19 nt, Homo sapiens
  misc_RNA (1)...(19): siRNA sense strand
ggccaaaaggcuagagcga

SEQ ID NO: 2545146 - RNA, 19 nt, Homo sapiens
  misc_RNA (1)...(19): siRNA sense strand
gagcgagagcagaagcuga

SEQ ID NO: 2545147 - RNA, 19 nt, Homo sapiens
  misc_RNA (1)...(19): siRNA sense strand
gagaauaaauggugccugc

SEQ ID NO: 2545148 - RNA, 19 nt, Homo sapiens
  misc_RNA (1)...(19): siRNA sense strand
gaacugggcuuccuggaga

SEQ ID NO: 2545149 - RNA, 19 nt, Homo sapiens
  misc_RNA (1)...(19): siRNA sense strand
aggagaagguggaggcaga

SEQ ID NO: 2545150 - RNA, 19 nt, Homo sapiens
  misc_RNA (1)...(19): siRNA sense strand
gaggaaggauccagagcca

SEQ ID NO: 2545151 - RNA, 19 nt, Homo sapiens
  misc_RNA (1)...(19): siRNA sense strand
ggaagaguguucucggcaa

SEQ ID NO: 2545152 - RNA, 19 nt, Homo sapiens
  misc_RNA (1)...(19): siRNA sense strand
gaucauuggugaagggcgu

SEQ ID NO: 2545153 - RNA, 19 nt, Homo sapiens
  misc_RNA (1)...(19): siRNA sense strand
ucaaagacauguaugccaa

SEQ ID NO: 2545154 - RNA, 19 nt, Homo sapiens
  misc_RNA (1)...(19): siRNA sense strand
ggaaggauccagagccaga

SEQ ID NO: 2545155 - RNA, 19 nt, Homo sapiens
  misc_RNA (1)...(19): siRNA sense strand
aggaagagcaggagaaggu

SEQ ID NO: 2545156 - RNA, 19 nt, Homo sapiens
  misc_RNA (1)...(19): siRNA sense strand
uggagaaacauaugaggau

SEQ ID NO: 2545157 - RNA, 19 nt, Homo sapiens
  misc_RNA (1)...(19): siRNA sense strand
cugcgaaagagggaagaaa

SEQ ID NO: 2545158 - RNA, 19 nt, Homo sapiens
  misc_RNA (1)...(19): siRNA sense strand
gggucagaucauuggugaa

SEQ ID NO: 2545159 - RNA, 19 nt, Homo sapiens
  misc_RNA (1)...(19): siRNA sense strand
cugcagaugagcuguggaa

SEQ ID NO: 2545160 - RNA, 19 nt, Homo sapiens
  misc_RNA (1)...(19): siRNA sense strand
gaagcaaggaagagcagga

SEQ ID NO: 2545161 - RNA, 19 nt, Homo sapiens
  misc_RNA (1)...(19): siRNA sense strand
cccaaagaagcaaggaaga

SEQ ID NO: 2545162 - RNA, 19 nt, Homo sapiens
  misc_RNA (1)...(19): siRNA sense strand
agaugaagguuaaacggga

SEQ ID NO: 2545163 - RNA, 19 nt, Homo sapiens
  misc_RNA (1)...(19): siRNA sense strand
accgaaagaagaagaugaa

SEQ ID NO: 2545164 - RNA, 19 nt, Homo sapiens
  misc_RNA (1)...(19): siRNA sense strand
acaugauccagcagagaga

SEQ ID NO: 2545165 - RNA, 19 nt, Homo sapiens
  misc_RNA (1)...(19): siRNA sense strand
cgucaaacuggacugggaa

SEQ ID NO: 2545166 - RNA, 19 nt, Homo sapiens
  misc_RNA (1)...(19): siRNA sense strand
gggaagaugugaagacugc

SEQ ID NO: 2545167 - RNA, 19 nt, Homo sapiens
  misc_RNA (1)...(19): siRNA sense strand
cugcagacacaaugcugua

SEQ ID NO: 2545168 - RNA, 19 nt, Homo sapiens
  misc_RNA (1)...(19): siRNA sense strand
cgaaagaagaagaugaagg

SEQ ID NO: 2545169 - RNA, 19 nt, Homo sapiens
  misc_RNA (1)...(19): siRNA sense strand
ggucuaauuugaagagagc

SEQ ID NO: 2545170 - RNA, 19 nt, Homo sapiens
  misc_RNA (1)...(19): siRNA sense strand
ugaagacugcacagggaau

SEQ ID NO: 2545171 - RNA, 19 nt, Homo sapiens
  misc_RNA (1)...(19): siRNA sense strand
agauuuaaaaggacgcaua

SEQ ID NO: 2545172 - RNA, 19 nt, Homo sapiens
  misc_RNA (1)...(19): siRNA sense strand
guggaaauccgggaggaau

SEQ ID NO: 2545173 - RNA, 19 nt, Homo sapiens
  misc_RNA (1)...(19): siRNA sense strand
auccagagccagaagauga

SEQ ID NO: 2545174 - RNA, 19 nt, Homo sapiens
  misc_RNA (1)...(19): siRNA sense strand
guuaaacgggagcgaggau

SEQ ID NO: 2545175 - RNA, 19 nt, Homo sapiens
  misc_RNA (1)...(19): siRNA sense strand
cugagaugcaggagaagaa

SEQ ID NO: 2545176 - RNA, 19 nt, Homo sapiens
  misc_RNA (1)...(19): siRNA sense strand
gcaaagaacucaacagacc

SEQ ID NO: 2545177 - RNA, 19 nt, Homo sapiens
  misc_RNA (1)...(19): siRNA sense strand
cuuccaaggccaacgaaau

SEQ ID NO: 2545178 - RNA, 19 nt, Homo sapiens
  misc_RNA (1)...(19): siRNA sense strand
cggcaacggcauugagaac

SEQ ID NO: 2545179 - RNA, 19 nt, Homo sapiens
  misc_RNA (1)...(19): siRNA sense strand
agaagaagguggucagccu

SEQ ID NO: 2545180 - RNA, 19 nt, Homo sapiens
  misc_RNA (1)...(19): siRNA sense strand
acacuaagcucccugccaa

SEQ ID NO: 2545181 - RNA, 19 nt, Homo sapiens
  misc_RNA (1)...(19): siRNA sense strand
ccguggucgucaaagaaau

SEQ ID NO: 2545182 - RNA, 19 nt, Homo sapiens
  misc_RNA (1)...(19): siRNA sense strand
cuccacagccacagcuaaa

SEQ ID NO: 2545183 - RNA, 19 nt, Homo sapiens
  misc_RNA (1)...(19): siRNA sense strand
ggagcagaagauacaacaa

SEQ ID NO: 2545184 - RNA, 19 nt, Homo sapiens
  misc_RNA (1)...(19): siRNA sense strand
ccagagaccaugagcucca

SEQ ID NO: 2545185 - RNA, 19 nt, Homo sapiens
  misc_RNA (1)...(19): siRNA sense strand
cugccaaggauguguacga

SEQ ID NO: 2545186 - RNA, 19 nt, Homo sapiens
  misc_RNA (1)...(19): siRNA sense strand
gcugaaggacaaaugggau

SEQ ID NO: 2545187 - RNA, 19 nt, Homo sapiens
  misc_RNA (1)...(19): siRNA sense strand
gcuauaagguggagggcuu

SEQ ID NO: 2545188 - RNA, 19 nt, Homo sapiens
  misc_RNA (1)...(19): siRNA sense strand
aggaagaaauuguugccaa

SEQ ID NO: 2545189 - RNA, 19 nt, Homo sapiens
  misc_RNA (1)...(19): siRNA sense strand
aggaggaggaggaggaaga

SEQ ID NO: 2545190 - RNA, 19 nt, Homo sapiens
  misc_RNA (1)...(19): siRNA sense strand
ccaagaaguacaagggcca

SEQ ID NO: 2545191 - RNA, 19 nt, Homo sapiens
  misc_RNA (1)...(19): siRNA sense strand
uguaaugcagccugagaaa

SEQ ID NO: 2545192 - RNA, 19 nt, Homo sapiens
  misc_RNA (1)...(19): siRNA sense strand
augaagaggaggaggagga

SEQ ID NO: 2545193 - RNA, 19 nt, Homo sapiens
  misc_RNA (1)...(19): siRNA sense strand
gagcaaaguccuagaggug

SEQ ID NO: 2545194 - RNA, 19 nt, Homo sapiens
  misc_RNA (1)...(19): siRNA sense strand
caaacgaugcuaagcgcua

SEQ ID NO: 2545195 - RNA, 19 nt, Homo sapiens
  misc_RNA (1)...(19): siRNA sense strand
ccgcuaacaaccugagaga

SEQ ID NO: 2545196 - RNA, 19 nt, Homo sapiens
  misc_RNA (1)...(19): siRNA sense strand
ggaagaaauuguugccaag

SEQ ID NO: 2545197 - RNA, 19 nt, Homo sapiens
  misc_RNA (1)...(19): siRNA sense strand
agcuagagcccguguacaa

SEQ ID NO: 2545198 - RNA, 19 nt, Homo sapiens
  misc_RNA (1)...(19): siRNA sense strand
aggaugaagaggaggagga

SEQ ID NO: 2545199 - RNA, 19 nt, Homo sapiens
  misc_RNA (1)...(19): siRNA sense strand
gcuccagaacccaggaaga

SEQ ID NO: 2545200 - RNA, 19 nt, Homo sapiens
  misc_RNA (1)...(19): siRNA sense strand
ccgccaaggagcucagcaa

SEQ ID NO: 2545201 - RNA, 19 nt, Homo sapiens
  misc_RNA (1)...(19): siRNA sense strand
cagaaacagaccuggccaa

SEQ ID NO: 2545202 - RNA, 19 nt, Homo sapiens
  misc_RNA (1)...(19): siRNA sense strand
agccagugcccaagaacaa

SEQ ID NO: 2545203 - RNA, 19 nt, Homo sapiens
  misc_RNA (1)...(19): siRNA sense strand
aggaggaagaugaugauga

SEQ ID NO: 2545204 - RNA, 19 nt, Homo sapiens
  misc_RNA (1)...(19): siRNA sense strand
auuugaggguggagacaga

SEQ ID NO: 2545205 - RNA, 19 nt, Homo sapiens
  misc_RNA (1)...(19): siRNA sense strand
aggaggaggaagaugauga

SEQ ID NO: 2545206 - RNA, 19 nt, Homo sapiens
  misc_RNA (1)...(19): siRNA sense strand
gguuugaugucucuggcua

SEQ ID NO: 2545207 - RNA, 19 nt, Homo sapiens
  misc_RNA (1)...(19): siRNA sense strand
aagaggaggaggaggagga

SEQ ID NO: 2545208 - RNA, 19 nt, Homo sapiens
  misc_RNA (1)...(19): siRNA sense strand
uugcggacgaagaggacua

SEQ ID NO: 2545209 - RNA, 19 nt, Homo sapiens
  misc_RNA (1)...(19): siRNA sense strand
ccauugaggaugaagagga

SEQ ID NO: 2545210 - RNA, 19 nt, Homo sapiens
  misc_RNA (1)...(19): siRNA sense strand
ggaaguuaaggaagaaaau

SEQ ID NO: 2545211 - RNA, 19 nt, Homo sapiens
  misc_RNA (1)...(19): siRNA sense strand
aggaagaugaugaugagga

SEQ ID NO: 2545212 - RNA, 19 nt, Homo sapiens
  misc_RNA (1)...(19): siRNA sense strand
caguuaaauuugagggugg

SEQ ID NO: 2545213 - RNA, 19 nt, Homo sapiens
  misc_RNA (1)...(19): siRNA sense strand
uggaaguuaaggaagaaaa

SEQ ID NO: 2545214 - RNA, 19 nt, Homo sapiens
  misc_RNA (1)...(19): siRNA sense strand
ugagcaggaccaaggaaga

SEQ ID NO: 2545215 - RNA, 19 nt, Homo sapiens
  misc_RNA (1)...(19): siRNA sense strand
cugcagucuuugugggaca

SEQ ID NO: 2545216 - RNA, 19 nt, Homo sapiens
  misc_RNA (1)...(19): siRNA sense strand
ugaagugugucgugcggaa

SEQ ID NO: 2545217 - RNA, 19 nt, Homo sapiens
  misc_RNA (1)...(19): siRNA sense strand
cgauuuaacaagaacuaca

SEQ ID NO: 2545218 - RNA, 19 nt, Homo sapiens
  misc_RNA (1)...(19): siRNA sense strand
aguauuaugcggaguguca

SEQ ID NO: 2545219 - RNA, 19 nt, Homo sapiens
  misc_RNA (1)...(19): siRNA sense strand
acuuaggagggcaggaaga

SEQ ID NO: 2545220 - RNA, 19 nt, Homo sapiens
  misc_RNA (1)...(19): siRNA sense strand
ucucaaucccugacaucaa

SEQ ID NO: 2545221 - RNA, 19 nt, Homo sapiens
  misc_RNA (1)...(19): siRNA sense strand
aguacauguuucagaagga

SEQ ID NO: 2545222 - RNA, 19 nt, Homo sapiens
  misc_RNA (1)...(19): siRNA sense strand
ccaacaagcaggaugugga

SEQ ID NO: 2545223 - RNA, 19 nt, Homo sapiens
  misc_RNA (1)...(19): siRNA sense strand
ggacagaugccgaucgaga

SEQ ID NO: 2545224 - RNA, 19 nt, Homo sapiens
  misc_RNA (1)...(19): siRNA sense strand
augcgaaacccaaggagaa

SEQ ID NO: 2545225 - RNA, 19 nt, Homo sapiens
  misc_RNA (1)...(19): siRNA sense strand
ccaucuggagggagacaaa

SEQ ID NO: 2545226 - RNA, 19 nt, Homo sapiens
  misc_RNA (1)...(19): siRNA sense strand
agacgaucgaggagagaga

SEQ ID NO: 2545227 - RNA, 19 nt, Homo sapiens
  misc_RNA (1)...(19): siRNA sense strand
gcaacuucucuguggucua

SEQ ID NO: 2545228 - RNA, 19 nt, Homo sapiens
  misc_RNA (1)...(19): siRNA sense strand
ucaaauuugcugaggagga

SEQ ID NO: 2545229 - RNA, 19 nt, Homo sapiens
  misc_RNA (1)...(19): siRNA sense strand
gcugauaagggaagccaca

SEQ ID NO: 2545230 - RNA, 19 nt, Homo sapiens
  misc_RNA (1)...(19): siRNA sense strand
cugcccaucuggagggaga

SEQ ID NO: 2545231 - RNA, 19 nt, Homo sapiens
  misc_RNA (1)...(19): siRNA sense strand
ccuacauacgggagaacuu

SEQ ID NO: 2545232 - RNA, 19 nt, Homo sapiens
  misc_RNA (1)...(19): siRNA sense strand
acauccagcaggaggagua

SEQ ID NO: 2545233 - RNA, 19 nt, Homo sapiens
  misc_RNA (1)...(19): siRNA sense strand
ccaaagaccgggaugggca

SEQ ID NO: 2545234 - RNA, 19 nt, Homo sapiens
  misc_RNA (1)...(19): siRNA sense strand
aaagagaucuccaugguca

SEQ ID NO: 2545235 - RNA, 19 nt, Homo sapiens
  misc_RNA (1)...(19): siRNA sense strand
ccucugaagccauggagca

SEQ ID NO: 2545236 - RNA, 19 nt, Homo sapiens
  misc_RNA (1)...(19): siRNA sense strand
aagggaagccacaaggaga

SEQ ID NO: 2545237 - RNA, 19 nt, Homo sapiens
  misc_RNA (1)...(19): siRNA sense strand
ggacagaugccgaucgaga

SEQ ID NO: 2545238 - RNA, 19 nt, Homo sapiens
  misc_RNA (1)...(19): siRNA sense strand
augcgaaacccaaggagaa

SEQ ID NO: 2545239 - RNA, 19 nt, Homo sapiens
  misc_RNA (1)...(19): siRNA sense strand
ccaucuggagggagacaaa

SEQ ID NO: 2545240 - RNA, 19 nt, Homo sapiens
  misc_RNA (1)...(19): siRNA sense strand
agacgaucgaggagagaga

SEQ ID NO: 2545241 - RNA, 19 nt, Homo sapiens
  misc_RNA (1)...(19): siRNA sense strand
gcaacuucucuguggucua

SEQ ID NO: 2545242 - RNA, 19 nt, Homo sapiens
  misc_RNA (1)...(19): siRNA sense strand
ucaaauuugcugaggagga

SEQ ID NO: 2545243 - RNA, 19 nt, Homo sapiens
  misc_RNA (1)...(19): siRNA sense strand
gcugauaagggaagccaca

SEQ ID NO: 2545244 - RNA, 19 nt, Homo sapiens
  misc_RNA (1)...(19): siRNA sense strand
cugcccaucuggagggaga

SEQ ID NO: 2545245 - RNA, 19 nt, Homo sapiens
  misc_RNA (1)...(19): siRNA sense strand
ccuacauacgggagaacuu

SEQ ID NO: 2545246 - RNA, 19 nt, Homo sapiens
  misc_RNA (1)...(19): siRNA sense strand
acauccagcaggaggagua

SEQ ID NO: 2545247 - RNA, 19 nt, Homo sapiens
  misc_RNA (1)...(19): siRNA sense strand
ccaaagaccgggaugggca

SEQ ID NO: 2545248 - RNA, 19 nt, Homo sapiens
  misc_RNA (1)...(19): siRNA sense strand
aaagagaucuccaugguca

SEQ ID NO: 2545249 - RNA, 19 nt, Homo sapiens
  misc_RNA (1)...(19): siRNA sense strand
ccucugaagccauggagca

SEQ ID NO: 2545250 - RNA, 19 nt, Homo sapiens
  misc_RNA (1)...(19): siRNA sense strand
aagggaagccacaaggaga

SEQ ID NO: 2545251 - RNA, 19 nt, Homo sapiens
  misc_RNA (1)...(19): siRNA sense strand
gcaucaaacucucuggcua

SEQ ID NO: 2545252 - RNA, 19 nt, Homo sapiens
  misc_RNA (1)...(19): siRNA sense strand
agaaacuuauggagcgcaa

SEQ ID NO: 2545253 - RNA, 19 nt, Homo sapiens
  misc_RNA (1)...(19): siRNA sense strand
cagagaucguguuggacau

SEQ ID NO: 2545254 - RNA, 19 nt, Homo sapiens
  misc_RNA (1)...(19): siRNA sense strand
acucaguccaucagaggaa

SEQ ID NO: 2545255 - RNA, 19 nt, Homo sapiens
  misc_RNA (1)...(19): siRNA sense strand
gggcgauggagauggagau

SEQ ID NO: 2545256 - RNA, 19 nt, Homo sapiens
  misc_RNA (1)...(19): siRNA sense strand
ccagagaucguguuggaca

SEQ ID NO: 2545257 - RNA, 19 nt, Homo sapiens
  misc_RNA (1)...(19): siRNA sense strand
aacagauggagaagauaua

SEQ ID NO: 2545258 - RNA, 19 nt, Homo sapiens
  misc_RNA (1)...(19): siRNA sense strand
ccaugaagaaaguacuaga

SEQ ID NO: 2545259 - RNA, 19 nt, Homo sapiens
  misc_RNA (1)...(19): siRNA sense strand
gugaauuagagcagcagca

SEQ ID NO: 2545260 - RNA, 19 nt, Homo sapiens
  misc_RNA (1)...(19): siRNA sense strand
aauuagagcagcagcaagu

SEQ ID NO: 2545261 - RNA, 19 nt, Homo sapiens
  misc_RNA (1)...(19): siRNA sense strand
agauauuguccgcacagaa

SEQ ID NO: 2545262 - RNA, 19 nt, Homo sapiens
  misc_RNA (1)...(19): siRNA sense strand
cuauuaugucuuuguguga

SEQ ID NO: 2545263 - RNA, 19 nt, Homo sapiens
  misc_RNA (1)...(19): siRNA sense strand
gcaucaaacucucuggcua

SEQ ID NO: 2545264 - RNA, 19 nt, Homo sapiens
  misc_RNA (1)...(19): siRNA sense strand
agaaacuuauggagcgcaa

SEQ ID NO: 2545265 - RNA, 19 nt, Homo sapiens
  misc_RNA (1)...(19): siRNA sense strand
cagagaucguguuggacau

SEQ ID NO: 2545266 - RNA, 19 nt, Homo sapiens
  misc_RNA (1)...(19): siRNA sense strand
acucaguccaucagaggaa

SEQ ID NO: 2545267 - RNA, 19 nt, Homo sapiens
  misc_RNA (1)...(19): siRNA sense strand
gggcgauggagauggagau

SEQ ID NO: 2545268 - RNA, 19 nt, Homo sapiens
  misc_RNA (1)...(19): siRNA sense strand
ccagagaucguguuggaca

SEQ ID NO: 2545269 - RNA, 19 nt, Homo sapiens
  misc_RNA (1)...(19): siRNA sense strand
aacagauggagaagauaua

SEQ ID NO: 2545270 - RNA, 19 nt, Homo sapiens
  misc_RNA (1)...(19): siRNA sense strand
ccaugaagaaaguacuaga

SEQ ID NO: 2545271 - RNA, 19 nt, Homo sapiens
  misc_RNA (1)...(19): siRNA sense strand
gugaauuagagcagcagca

SEQ ID NO: 2545272 - RNA, 19 nt, Homo sapiens
  misc_RNA (1)...(19): siRNA sense strand
aauuagagcagcagcaagu

SEQ ID NO: 2545273 - RNA, 19 nt, Homo sapiens
  misc_RNA (1)...(19): siRNA sense strand
agauauuguccgcacagaa

SEQ ID NO: 2545274 - RNA, 19 nt, Homo sapiens
  misc_RNA (1)...(19): siRNA sense strand
gcaucaaacucucuggcua

SEQ ID NO: 2545275 - RNA, 19 nt, Homo sapiens
  misc_RNA (1)...(19): siRNA sense strand
agaaacuuauggagcgcaa

SEQ ID NO: 2545276 - RNA, 19 nt, Homo sapiens
  misc_RNA (1)...(19): siRNA sense strand
cagagaucguguuggacau

SEQ ID NO: 2545277 - RNA, 19 nt, Homo sapiens
  misc_RNA (1)...(19): siRNA sense strand
acucaguccaucagaggaa

SEQ ID NO: 2545278 - RNA, 19 nt, Homo sapiens
  misc_RNA (1)...(19): siRNA sense strand
gggcgauggagauggagau

SEQ ID NO: 2545279 - RNA, 19 nt, Homo sapiens
  misc_RNA (1)...(19): siRNA sense strand
ccagagaucguguuggaca

SEQ ID NO: 2545280 - RNA, 19 nt, Homo sapiens
  misc_RNA (1)...(19): siRNA sense strand
aacagauggagaagauaua

SEQ ID NO: 2545281 - RNA, 19 nt, Homo sapiens
  misc_RNA (1)...(19): siRNA sense strand
ccaugaagaaaguacuaga

SEQ ID NO: 2545282 - RNA, 19 nt, Homo sapiens
  misc_RNA (1)...(19): siRNA sense strand
gugaauuagagcagcagca

SEQ ID NO: 2545283 - RNA, 19 nt, Homo sapiens
  misc_RNA (1)...(19): siRNA sense strand
aauuagagcagcagcaagu

SEQ ID NO: 2545284 - RNA, 19 nt, Homo sapiens
  misc_RNA (1)...(19): siRNA sense strand
agauauuguccgcacagaa

SEQ ID NO: 2545285 - RNA, 19 nt, Homo sapiens
  misc_RNA (1)...(19): siRNA sense strand
gcaucaaacucucuggcua

SEQ ID NO: 2545286 - RNA, 19 nt, Homo sapiens
  misc_RNA (1)...(19): siRNA sense strand
agaaacuuauggagcgcaa

SEQ ID NO: 2545287 - RNA, 19 nt, Homo sapiens
  misc_RNA (1)...(19): siRNA sense strand
cagagaucguguuggacau

SEQ ID NO: 2545288 - RNA, 19 nt, Homo sapiens
  misc_RNA (1)...(19): siRNA sense strand
acucaguccaucagaggaa

SEQ ID NO: 2545289 - RNA, 19 nt, Homo sapiens
  misc_RNA (1)...(19): siRNA sense strand
gggcgauggagauggagau

SEQ ID NO: 2545290 - RNA, 19 nt, Homo sapiens
  misc_RNA (1)...(19): siRNA sense strand
ccagagaucguguuggaca

SEQ ID NO: 2545291 - RNA, 19 nt, Homo sapiens
  misc_RNA (1)...(19): siRNA sense strand
aacagauggagaagauaua

SEQ ID NO: 2545292 - RNA, 19 nt, Homo sapiens
  misc_RNA (1)...(19): siRNA sense strand
ccaugaagaaaguacuaga

SEQ ID NO: 2545293 - RNA, 19 nt, Homo sapiens
  misc_RNA (1)...(19): siRNA sense strand
gugaauuagagcagcagca

SEQ ID NO: 2545294 - RNA, 19 nt, Homo sapiens
  misc_RNA (1)...(19): siRNA sense strand
aauuagagcagcagcaagu

SEQ ID NO: 2545295 - RNA, 19 nt, Homo sapiens
  misc_RNA (1)...(19): siRNA sense strand
agauauuguccgcacagaa

SEQ ID NO: 2545296 - RNA, 19 nt, Homo sapiens
  misc_RNA (1)...(19): siRNA sense strand
gcaauaacauucugggcaa

SEQ ID NO: 2545297 - RNA, 19 nt, Homo sapiens
  misc_RNA (1)...(19): siRNA sense strand
gagcagaauuggagaggca

SEQ ID NO: 2545298 - RNA, 19 nt, Homo sapiens
  misc_RNA (1)...(19): siRNA sense strand
aggaagagcaagagcaaaa

SEQ ID NO: 2545299 - RNA, 19 nt, Homo sapiens
  misc_RNA (1)...(19): siRNA sense strand
gggccaaacaggaggcaga

SEQ ID NO: 2545300 - RNA, 19 nt, Homo sapiens
  misc_RNA (1)...(19): siRNA sense strand
gcagagauagagcgggaaa

SEQ ID NO: 2545301 - RNA, 19 nt, Homo sapiens
  misc_RNA (1)...(19): siRNA sense strand
aggcaguaacagagaagaa

SEQ ID NO: 2545302 - RNA, 19 nt, Homo sapiens
  misc_RNA (1)...(19): siRNA sense strand
cuugagaagucuaagagaa

SEQ ID NO: 2545303 - RNA, 19 nt, Homo sapiens
  misc_RNA (1)...(19): siRNA sense strand
aggcagagauagagcggga

SEQ ID NO: 2545304 - RNA, 19 nt, Homo sapiens
  misc_RNA (1)...(19): siRNA sense strand
agaagagagagaagaaauu

SEQ ID NO: 2545305 - RNA, 19 nt, Homo sapiens
  misc_RNA (1)...(19): siRNA sense strand
gcaaguuaccagagugaga

SEQ ID NO: 2545306 - RNA, 19 nt, Homo sapiens
  misc_RNA (1)...(19): siRNA sense strand
ugaacagauuggauugaaa

SEQ ID NO: 2545307 - RNA, 19 nt, Homo sapiens
  misc_RNA (1)...(19): siRNA sense strand
gcaacuuauccuucagaaa

SEQ ID NO: 2545308 - RNA, 19 nt, Homo sapiens
  misc_RNA (1)...(19): siRNA sense strand
caggaaaugaggaagagaa

SEQ ID NO: 2545309 - RNA, 19 nt, Homo sapiens
  misc_RNA (1)...(19): siRNA sense strand
caacaaaaguagacagcca

SEQ ID NO: 2545310 - RNA, 19 nt, Homo sapiens
  misc_RNA (1)...(19): siRNA sense strand
aagaagagagagaagaaau

SEQ ID NO: 2545311 - RNA, 19 nt, Homo sapiens
  misc_RNA (1)...(19): siRNA sense strand
gggaaacaucagucagaau

SEQ ID NO: 2545312 - RNA, 19 nt, Homo sapiens
  misc_RNA (1)...(19): siRNA sense strand
gaagaaaagcacaaagcaa

SEQ ID NO: 2545313 - RNA, 19 nt, Homo sapiens
  misc_RNA (1)...(19): siRNA sense strand
gagacugacaggagaguga

SEQ ID NO: 2545314 - RNA, 19 nt, Homo sapiens
  misc_RNA (1)...(19): siRNA sense strand
ccguguaacaacugaaauu

SEQ ID NO: 2545315 - RNA, 19 nt, Homo sapiens
  misc_RNA (1)...(19): siRNA sense strand
gcgcagaagauguucaaaa

SEQ ID NO: 2545316 - RNA, 19 nt, Homo sapiens
  misc_RNA (1)...(19): siRNA sense strand
gguagcagcaacagaagaa

SEQ ID NO: 2545317 - RNA, 19 nt, Homo sapiens
  misc_RNA (1)...(19): siRNA sense strand
caguaacagagaagaauuu

SEQ ID NO: 2545318 - RNA, 19 nt, Homo sapiens
  misc_RNA (1)...(19): siRNA sense strand
uuugaaagcguuugagaau

SEQ ID NO: 2545319 - RNA, 19 nt, Homo sapiens
  misc_RNA (1)...(19): siRNA sense strand
ggcuaaggcucaagaaacu

SEQ ID NO: 2545320 - RNA, 19 nt, Homo sapiens
  misc_RNA (1)...(19): siRNA sense strand
ggaaagaagccgcaggauc

SEQ ID NO: 2545321 - RNA, 19 nt, Homo sapiens
  misc_RNA (1)...(19): siRNA sense strand
auggaaagaucgucgaaaa

SEQ ID NO: 2545322 - RNA, 19 nt, Homo sapiens
  misc_RNA (1)...(19): siRNA sense strand
gagacagccacaagaggaa

SEQ ID NO: 2545323 - RNA, 19 nt, Homo sapiens
  misc_RNA (1)...(19): siRNA sense strand
gagaagaggagaggagaca

SEQ ID NO: 2545324 - RNA, 19 nt, Homo sapiens
  misc_RNA (1)...(19): siRNA sense strand
gaggagaugcagaaaauaa

SEQ ID NO: 2545325 - RNA, 19 nt, Homo sapiens
  misc_RNA (1)...(19): siRNA sense strand
cagaaauucccaaagaaga

SEQ ID NO: 2545326 - RNA, 19 nt, Homo sapiens
  misc_RNA (1)...(19): siRNA sense strand
agaaauucccaaagaagau

SEQ ID NO: 2545327 - RNA, 19 nt, Homo sapiens
  misc_RNA (1)...(19): siRNA sense strand
ggaggcagagagagagaau

SEQ ID NO: 2545328 - RNA, 19 nt, Homo sapiens
  misc_RNA (1)...(19): siRNA sense strand
auugagagagagaggaaau

SEQ ID NO: 2545329 - RNA, 19 nt, Homo sapiens
  misc_RNA (1)...(19): siRNA sense strand
caauaacauucugggcaaa

SEQ ID NO: 2545330 - RNA, 19 nt, Homo sapiens
  misc_RNA (1)...(19): siRNA sense strand
cagaagaagaugugacaag

SEQ ID NO: 2545331 - RNA, 19 nt, Homo sapiens
  misc_RNA (1)...(19): siRNA sense strand
caggagaaacugagggaag

SEQ ID NO: 2545332 - RNA, 19 nt, Homo sapiens
  misc_RNA (1)...(19): siRNA sense strand
ucaggaagagcaagagcaa

SEQ ID NO: 2545333 - RNA, 19 nt, Homo sapiens
  misc_RNA (1)...(19): siRNA sense strand
aggagaaacugagggaaga

SEQ ID NO: 2545334 - RNA, 19 nt, Homo sapiens
  misc_RNA (1)...(19): siRNA sense strand
caagaaagaacaaguacca

SEQ ID NO: 2545335 - RNA, 19 nt, Homo sapiens
  misc_RNA (1)...(19): siRNA sense strand
cuugaaagcuugugaacag

SEQ ID NO: 2545336 - RNA, 19 nt, Homo sapiens
  misc_RNA (1)...(19): siRNA sense strand
gcgugaagguuuugaaagu

SEQ ID NO: 2545337 - RNA, 19 nt, Homo sapiens
  misc_RNA (1)...(19): siRNA sense strand
aaaagaagagagagaagaa

SEQ ID NO: 2545338 - RNA, 19 nt, Homo sapiens
  misc_RNA (1)...(19): siRNA sense strand
gaaaugaggaagagaacac

SEQ ID NO: 2545339 - RNA, 19 nt, Homo sapiens
  misc_RNA (1)...(19): siRNA sense strand
ccgucaagaaggagaaugu

SEQ ID NO: 2545340 - RNA, 19 nt, Homo sapiens
  misc_RNA (1)...(19): siRNA sense strand
gaaagagguagcagcaaca

SEQ ID NO: 2545341 - RNA, 19 nt, Homo sapiens
  misc_RNA (1)...(19): siRNA sense strand
aucaagaggaggagcggaa

SEQ ID NO: 2545342 - RNA, 19 nt, Homo sapiens
  misc_RNA (1)...(19): siRNA sense strand
caaacaggaggcagagaga

SEQ ID NO: 2545343 - RNA, 19 nt, Homo sapiens
  misc_RNA (1)...(19): siRNA sense strand
uccugaacguggagaauuu

SEQ ID NO: 2545344 - RNA, 19 nt, Homo sapiens
  misc_RNA (1)...(19): siRNA sense strand
gcaccauaagagagaagau

SEQ ID NO: 2545345 - RNA, 19 nt, Homo sapiens
  misc_RNA (1)...(19): siRNA sense strand
acgaggagaugcagaaaau

SEQ ID NO: 2545346 - RNA, 19 nt, Homo sapiens
  misc_RNA (1)...(19): siRNA sense strand
agaaggaacccgagcagga

SEQ ID NO: 2545347 - RNA, 19 nt, Homo sapiens
  misc_RNA (1)...(19): siRNA sense strand
uuauugagagagagaggaa

SEQ ID NO: 2545348 - RNA, 19 nt, Homo sapiens
  misc_RNA (1)...(19): siRNA sense strand
auucaaaucuggacggcca

SEQ ID NO: 2545349 - RNA, 19 nt, Homo sapiens
  misc_RNA (1)...(19): siRNA sense strand
caugaggauaacagaagaa

SEQ ID NO: 2545350 - RNA, 19 nt, Homo sapiens
  misc_RNA (1)...(19): siRNA sense strand
aggcugaggcugaggagca

SEQ ID NO: 2545351 - RNA, 19 nt, Homo sapiens
  misc_RNA (1)...(19): siRNA sense strand
ugagaaucuuuuaggacaa

SEQ ID NO: 2545352 - RNA, 19 nt, Homo sapiens
  misc_RNA (1)...(19): siRNA sense strand
aacaggaggcagagagaga

SEQ ID NO: 2545353 - RNA, 19 nt, Homo sapiens
  misc_RNA (1)...(19): siRNA sense strand
gaucagaaauggcaggaug

SEQ ID NO: 2545354 - RNA, 19 nt, Homo sapiens
  misc_RNA (1)...(19): siRNA sense strand
ccagaaagagguagcagca

SEQ ID NO: 2545355 - RNA, 19 nt, Homo sapiens
  misc_RNA (1)...(19): siRNA sense strand
aggcagagagagagaauuc

SEQ ID NO: 2545356 - RNA, 19 nt, Homo sapiens
  misc_RNA (1)...(19): siRNA sense strand
gcauaugcuccuacugcaa

SEQ ID NO: 2545357 - RNA, 19 nt, Homo sapiens
  misc_RNA (1)...(19): siRNA sense strand
aacagaagaaguugggcaa

SEQ ID NO: 2545358 - RNA, 19 nt, Homo sapiens
  misc_RNA (1)...(19): siRNA sense strand
guuacgaggagaugcagaa

SEQ ID NO: 2545359 - RNA, 19 nt, Homo sapiens
  misc_RNA (1)...(19): siRNA sense strand
gagagagaagaaauugaaa

SEQ ID NO: 2545360 - RNA, 19 nt, Homo sapiens
  misc_RNA (1)...(19): siRNA sense strand
aggaaaugcugcaggacag

SEQ ID NO: 2545361 - RNA, 19 nt, Homo sapiens
  misc_RNA (1)...(19): siRNA sense strand
uugaagacauuaagagaac

SEQ ID NO: 2545362 - RNA, 19 nt, Homo sapiens
  misc_RNA (1)...(19): siRNA sense strand
ccgcaacaagagugggaaa

SEQ ID NO: 2545363 - RNA, 19 nt, Homo sapiens
  misc_RNA (1)...(19): siRNA sense strand
gaaaagaaccuucgggaga

SEQ ID NO: 2545364 - RNA, 19 nt, Homo sapiens
  misc_RNA (1)...(19): siRNA sense strand
uugcugaacuugaaggaga

SEQ ID NO: 2545365 - RNA, 19 nt, Homo sapiens
  misc_RNA (1)...(19): siRNA sense strand
ucaagaaggugcuggcgau

SEQ ID NO: 2545366 - RNA, 19 nt, Homo sapiens
  misc_RNA (1)...(19): siRNA sense strand
ccgaaacgcuugagcugga

SEQ ID NO: 2545367 - RNA, 19 nt, Homo sapiens
  misc_RNA (1)...(19): siRNA sense strand
gcgcaagauguuuggcuga

SEQ ID NO: 2545368 - RNA, 19 nt, Homo sapiens
  misc_RNA (1)...(19): siRNA sense strand
gaucguaauccguggccau

SEQ ID NO: 2545369 - RNA, 19 nt, Homo sapiens
  misc_RNA (1)...(19): siRNA sense strand
gagcuggagacuagcgaga

SEQ ID NO: 2545370 - RNA, 19 nt, Homo sapiens
  misc_RNA (1)...(19): siRNA sense strand
gggccauggagggaggaaa

SEQ ID NO: 2545371 - RNA, 19 nt, Homo sapiens
  misc_RNA (1)...(19): siRNA sense strand
gaacuguccuucaugccaa

SEQ ID NO: 2545372 - RNA, 19 nt, Homo sapiens
  misc_RNA (1)...(19): siRNA sense strand
gagacuagcgagaaggaag

SEQ ID NO: 2545373 - RNA, 19 nt, Homo sapiens
  misc_RNA (1)...(19): siRNA sense strand
gcacagaacuauuucgagc

SEQ ID NO: 2545374 - RNA, 19 nt, Homo sapiens
  misc_RNA (1)...(19): siRNA sense strand
uggacugggcagagggaaa

SEQ ID NO: 2545375 - RNA, 19 nt, Homo sapiens
  misc_RNA (1)...(19): siRNA sense strand
aggaaagaucucuggacaa

SEQ ID NO: 2545376 - RNA, 19 nt, Homo sapiens
  misc_RNA (1)...(19): siRNA sense strand
agaaagcauaugaaggaaa

SEQ ID NO: 2545377 - RNA, 19 nt, Homo sapiens
  misc_RNA (1)...(19): siRNA sense strand
ccuuauugcauuaggaaaa

SEQ ID NO: 2545378 - RNA, 19 nt, Homo sapiens
  misc_RNA (1)...(19): siRNA sense strand
ggaaauaacccaaugccuu

SEQ ID NO: 2545379 - RNA, 19 nt, Homo sapiens
  misc_RNA (1)...(19): siRNA sense strand
agcuaaacccauacagaaa

SEQ ID NO: 2545380 - RNA, 19 nt, Homo sapiens
  misc_RNA (1)...(19): siRNA sense strand
ggaagauaauggaguggca

SEQ ID NO: 2545381 - RNA, 19 nt, Homo sapiens
  misc_RNA (1)...(19): siRNA sense strand
ucuuauuugcaaugggaaa

SEQ ID NO: 2545382 - RNA, 19 nt, Homo sapiens
  misc_RNA (1)...(19): siRNA sense strand
ggaaacuuauggaaggaca

SEQ ID NO: 2545383 - RNA, 19 nt, Homo sapiens
  misc_RNA (1)...(19): siRNA sense strand
aagaauugaaugacgcaua

SEQ ID NO: 2545384 - RNA, 19 nt, Homo sapiens
  misc_RNA (1)...(19): siRNA sense strand
agagaagaucgaagacauu

SEQ ID NO: 2545385 - RNA, 19 nt, Homo sapiens
  misc_RNA (1)...(19): siRNA sense strand
uggaauuucaacagaagaa

SEQ ID NO: 2545386 - RNA, 19 nt, Homo sapiens
  misc_RNA (1)...(19): siRNA sense strand
cagaauuauuuaaggcagu

SEQ ID NO: 2545387 - RNA, 19 nt, Homo sapiens
  misc_RNA (1)...(19): siRNA sense strand
ggauugacgaggaauacaa

SEQ ID NO: 2545388 - RNA, 19 nt, Homo sapiens
  misc_RNA (1)...(19): siRNA sense strand
cauggauggcuuugagcaa

SEQ ID NO: 2545389 - RNA, 19 nt, Homo sapiens
  misc_RNA (1)...(19): siRNA sense strand
uguaagagcaagugugguu

SEQ ID NO: 2545390 - RNA, 19 nt, Homo sapiens
  misc_RNA (1)...(19): siRNA sense strand
augugaagcugauagggaa

SEQ ID NO: 2545391 - RNA, 19 nt, Homo sapiens
  misc_RNA (1)...(19): siRNA sense strand
augaagaaacucagaagau

SEQ ID NO: 2545392 - RNA, 19 nt, Homo sapiens
  misc_RNA (1)...(19): siRNA sense strand
gcgugauguggguggguau

SEQ ID NO: 2545393 - RNA, 19 nt, Homo sapiens
  misc_RNA (1)...(19): siRNA sense strand
cuuggauugacgaggaaua

SEQ ID NO: 2545394 - RNA, 19 nt, Homo sapiens
  misc_RNA (1)...(19): siRNA sense strand
aaggaagaguuuuggaaau

SEQ ID NO: 2545395 - RNA, 19 nt, Homo sapiens
  misc_RNA (1)...(19): siRNA sense strand
gcagagggaauuuggacau

SEQ ID NO: 2545396 - RNA, 19 nt, Homo sapiens
  misc_RNA (1)...(19): siRNA sense strand
ccucaaugucugugaaaug

SEQ ID NO: 2545397 - RNA, 19 nt, Homo sapiens
  misc_RNA (1)...(19): siRNA sense strand
gaaaacuggcuaugcaaaa

SEQ ID NO: 2545398 - RNA, 19 nt, Homo sapiens
  misc_RNA (1)...(19): siRNA sense strand
aagagcugauacugggaaa

SEQ ID NO: 2545399 - RNA, 19 nt, Homo sapiens
  misc_RNA (1)...(19): siRNA sense strand
cugcaaacguguccgauca

SEQ ID NO: 2545400 - RNA, 19 nt, Homo sapiens
  misc_RNA (1)...(19): siRNA sense strand
acuugggcauaaugaaaua

SEQ ID NO: 2545401 - RNA, 19 nt, Homo sapiens
  misc_RNA (1)...(19): siRNA sense strand
agagaugagaaauaagcua

SEQ ID NO: 2545402 - RNA, 19 nt, Homo sapiens
  misc_RNA (1)...(19): siRNA sense strand
agaaauaagcuaaacccau

SEQ ID NO: 2545403 - RNA, 19 nt, Homo sapiens
  misc_RNA (1)...(19): siRNA sense strand
uggaagguccugauggaau

SEQ ID NO: 2545404 - RNA, 19 nt, Homo sapiens
  misc_RNA (1)...(19): siRNA sense strand
gcaagauagaagagcugau

SEQ ID NO: 2545405 - RNA, 19 nt, Homo sapiens
  misc_RNA (1)...(19): siRNA sense strand
cuacagaucaauaggaaag

SEQ ID NO: 2545406 - RNA, 19 nt, Homo sapiens
  misc_RNA (1)...(19): siRNA sense strand
cccugaaacuugggcauaa

SEQ ID NO: 2545407 - RNA, 19 nt, Homo sapiens
  misc_RNA (1)...(19): siRNA sense strand
aagcaggaagucagaguuu

SEQ ID NO: 2545408 - RNA, 19 nt, Homo sapiens
  misc_RNA (1)...(19): siRNA sense strand
agauagaagagcugauacu

SEQ ID NO: 2545409 - RNA, 19 nt, Homo sapiens
  misc_RNA (1)...(19): siRNA sense strand
uaggaaagaucucuggaca

SEQ ID NO: 2545410 - RNA, 19 nt, Homo sapiens
  misc_RNA (1)...(19): siRNA sense strand
cucauaugggagaaggaaa

SEQ ID NO: 2545411 - RNA, 19 nt, Homo sapiens
  misc_RNA (1)...(19): siRNA sense strand
aggaagaguuuuggaaauu

SEQ ID NO: 2545412 - RNA, 19 nt, Homo sapiens
  misc_RNA (1)...(19): siRNA sense strand
guuuggaauuucaacagaa

SEQ ID NO: 2545413 - RNA, 19 nt, Homo sapiens
  misc_RNA (1)...(19): siRNA sense strand
caaaagaccuaaagcagga

SEQ ID NO: 2545414 - RNA, 19 nt, Homo sapiens
  misc_RNA (1)...(19): siRNA sense strand
cagugaaguuugugaagac

SEQ ID NO: 2545415 - RNA, 19 nt, Homo sapiens
  misc_RNA (1)...(19): siRNA sense strand
ggacaaacauuacccagga

SEQ ID NO: 2545416 - RNA, 19 nt, Homo sapiens
  misc_RNA (1)...(19): siRNA sense strand
ucuacagaucaauaggaaa

SEQ ID NO: 2545417 - RNA, 19 nt, Homo sapiens
  misc_RNA (1)...(19): siRNA sense strand
gaaggagcucagaaaggaa

SEQ ID NO: 2545418 - RNA, 19 nt, Homo sapiens
  misc_RNA (1)...(19): siRNA sense strand
gcauaaugaaauaggagac

SEQ ID NO: 2545419 - RNA, 19 nt, Homo sapiens
  misc_RNA (1)...(19): siRNA sense strand
cuggagaggcugauguuga

SEQ ID NO: 2545420 - RNA, 19 nt, Homo sapiens
  misc_RNA (1)...(19): siRNA sense strand
aagcuaaacccauacagaa

SEQ ID NO: 2545421 - RNA, 19 nt, Homo sapiens
  misc_RNA (1)...(19): siRNA sense strand
cagaaagcauaugaaggaa

SEQ ID NO: 2545422 - RNA, 19 nt, Homo sapiens
  misc_RNA (1)...(19): siRNA sense strand
ccuggaagguccugaugga

SEQ ID NO: 2545423 - RNA, 19 nt, Homo sapiens
  misc_RNA (1)...(19): siRNA sense strand
agaccuaaagcaggaaaua

SEQ ID NO: 2545424 - RNA, 19 nt, Homo sapiens
  misc_RNA (1)...(19): siRNA sense strand
cauaaagcucuuaggauuc

SEQ ID NO: 2545425 - RNA, 19 nt, Homo sapiens
  misc_RNA (1)...(19): siRNA sense strand
acaagaacuuccagauuuu

SEQ ID NO: 2545426 - RNA, 19 nt, Homo sapiens
  misc_RNA (1)...(19): siRNA sense strand
ccugaagcauugucaacau

SEQ ID NO: 2545427 - RNA, 19 nt, Homo sapiens
  misc_RNA (1)...(19): siRNA sense strand
uuucccagccagagagaau

SEQ ID NO: 2545428 - RNA, 19 nt, Homo sapiens
  misc_RNA (1)...(19): siRNA sense strand
ucgcauguguguggagaau

SEQ ID NO: 2545429 - RNA, 19 nt, Homo sapiens
  misc_RNA (1)...(19): siRNA sense strand
acaaacauuacccaggaaa

SEQ ID NO: 2545430 - RNA, 19 nt, Homo sapiens
  misc_RNA (1)...(19): siRNA sense strand
ucauaugggagaaggaaac

SEQ ID NO: 2545431 - RNA, 19 nt, Homo sapiens
  misc_RNA (1)...(19): siRNA sense strand
gugcauaauuggugguguc

SEQ ID NO: 2545432 - RNA, 19 nt, Homo sapiens
  misc_RNA (1)...(19): siRNA sense strand
aaacaaaaucacaacggaa

SEQ ID NO: 2545433 - RNA, 19 nt, Homo sapiens
  misc_RNA (1)...(19): siRNA sense strand
cugucagggcugugcucaa

SEQ ID NO: 2545434 - RNA, 19 nt, Homo sapiens
  misc_RNA (1)...(19): siRNA sense strand
gugcauaauuggugguguc

SEQ ID NO: 2545435 - RNA, 19 nt, Homo sapiens
  misc_RNA (1)...(19): siRNA sense strand
aaacaaaaucacaacggaa

SEQ ID NO: 2545436 - RNA, 19 nt, Homo sapiens
  misc_RNA (1)...(19): siRNA sense strand
cugucagggcugugcucaa

SEQ ID NO: 2545437 - RNA, 19 nt, Homo sapiens
  misc_RNA (1)...(19): siRNA sense strand
gguccaaagaaucggcaaa

SEQ ID NO: 2545438 - RNA, 19 nt, Homo sapiens
  misc_RNA (1)...(19): siRNA sense strand
uggaagacggagaggaaac

SEQ ID NO: 2545439 - RNA, 19 nt, Homo sapiens
  misc_RNA (1)...(19): siRNA sense strand
augucaagcugaaaacaaa

SEQ ID NO: 2545440 - RNA, 19 nt, Homo sapiens
  misc_RNA (1)...(19): siRNA sense strand
ccgacguggaagacggaga

SEQ ID NO: 2545441 - RNA, 19 nt, Homo sapiens
  misc_RNA (1)...(19): siRNA sense strand
uggaagacggagaggaaac

SEQ ID NO: 2545442 - RNA, 19 nt, Homo sapiens
  misc_RNA (1)...(19): siRNA sense strand
ccgacguggaagacggaga

SEQ ID NO: 2545443 - RNA, 19 nt, Homo sapiens
  misc_RNA (1)...(19): siRNA sense strand
uggaagacggagaggaaac

SEQ ID NO: 2545444 - RNA, 19 nt, Homo sapiens
  misc_RNA (1)...(19): siRNA sense strand
augucaagcugaaaacaaa

SEQ ID NO: 2545445 - RNA, 19 nt, Homo sapiens
  misc_RNA (1)...(19): siRNA sense strand
ccgacguggaagacggaga

SEQ ID NO: 2545446 - RNA, 19 nt, Homo sapiens
  misc_RNA (1)...(19): siRNA sense strand
aagaauaugaagaggcaca

SEQ ID NO: 2545447 - RNA, 19 nt, Homo sapiens
  misc_RNA (1)...(19): siRNA sense strand
guaugaugaaccagggcaa

SEQ ID NO: 2545448 - RNA, 19 nt, Homo sapiens
  misc_RNA (1)...(19): siRNA sense strand
agaagaauaugaagaggca

SEQ ID NO: 2545449 - RNA, 19 nt, Homo sapiens
  misc_RNA (1)...(19): siRNA sense strand
augaagaggcacaaggaga

SEQ ID NO: 2545450 - RNA, 19 nt, Homo sapiens
  misc_RNA (1)...(19): siRNA sense strand
augaagaagacuauggcau

SEQ ID NO: 2545451 - RNA, 19 nt, Homo sapiens
  misc_RNA (1)...(19): siRNA sense strand
ccagacaugacuugggaca

SEQ ID NO: 2545452 - RNA, 19 nt, Homo sapiens
  misc_RNA (1)...(19): siRNA sense strand
ccgcuggagcuuuguggaa

SEQ ID NO: 2545453 - RNA, 19 nt, Homo sapiens
  misc_RNA (1)...(19): siRNA sense strand
gauagagagaacugaacga

SEQ ID NO: 2545454 - RNA, 19 nt, Homo sapiens
  misc_RNA (1)...(19): siRNA sense strand
ucuaaauaacucagaccau

SEQ ID NO: 2545455 - RNA, 19 nt, Homo sapiens
  misc_RNA (1)...(19): siRNA sense strand
aaauaaaggacuucccuga

SEQ ID NO: 2545456 - RNA, 19 nt, Homo sapiens
  misc_RNA (1)...(19): siRNA sense strand
ugauguauggacaggaaga

SEQ ID NO: 2545457 - RNA, 19 nt, Homo sapiens
  misc_RNA (1)...(19): siRNA sense strand
agcugaaaccagaagaaga

SEQ ID NO: 2545458 - RNA, 19 nt, Homo sapiens
  misc_RNA (1)...(19): siRNA sense strand
uagagagaacugaacgaau

SEQ ID NO: 2545459 - RNA, 19 nt, Homo sapiens
  misc_RNA (1)...(19): siRNA sense strand
cccuauggaagcuggagaa

SEQ ID NO: 2545460 - RNA, 19 nt, Homo sapiens
  misc_RNA (1)...(19): siRNA sense strand
cguggaaccuggagcggau

SEQ ID NO: 2545461 - RNA, 19 nt, Homo sapiens
  misc_RNA (1)...(19): siRNA sense strand
ccuacgugguggugcugaa

SEQ ID NO: 2545462 - RNA, 19 nt, Homo sapiens
  misc_RNA (1)...(19): siRNA sense strand
agaaugugcccgaggagga

SEQ ID NO: 2545463 - RNA, 19 nt, Homo sapiens
  misc_RNA (1)...(19): siRNA sense strand
ccuggaguuuauucggaaa

SEQ ID NO: 2545464 - RNA, 19 nt, Homo sapiens
  misc_RNA (1)...(19): siRNA sense strand
aagucaaggagcauggaau

SEQ ID NO: 2545465 - RNA, 19 nt, Homo sapiens
  misc_RNA (1)...(19): siRNA sense strand
aaugcaaagucaaggagca

SEQ ID NO: 2545466 - RNA, 19 nt, Homo sapiens
  misc_RNA (1)...(19): siRNA sense strand
agaucgaggcggagaacca

SEQ ID NO: 2545467 - RNA, 19 nt, Homo sapiens
  misc_RNA (1)...(19): siRNA sense strand
ucucaaugucaccaagaaa

SEQ ID NO: 2545468 - RNA, 19 nt, Homo sapiens
  misc_RNA (1)...(19): siRNA sense strand
uggaaugaauggagagacu

SEQ ID NO: 2545469 - RNA, 19 nt, Homo sapiens
  misc_RNA (1)...(19): siRNA sense strand
gggacggagugguggacau

SEQ ID NO: 2545470 - RNA, 19 nt, Homo sapiens
  misc_RNA (1)...(19): siRNA sense strand
ccuuaaagaccaugagaag

SEQ ID NO: 2545471 - RNA, 19 nt, Homo sapiens
  misc_RNA (1)...(19): siRNA sense strand
ggacaaugguggaggcagc

SEQ ID NO: 2545472 - RNA, 19 nt, Homo sapiens
  misc_RNA (1)...(19): siRNA sense strand
ggacuggaaugaauggaga

SEQ ID NO: 2545473 - RNA, 19 nt, Homo sapiens
  misc_RNA (1)...(19): siRNA sense strand
gcuguuaaauucugggcau

SEQ ID NO: 2545474 - RNA, 19 nt, Homo sapiens
  misc_RNA (1)...(19): siRNA sense strand
ggaaaugguacaaacguca

SEQ ID NO: 2545475 - RNA, 19 nt, Homo sapiens
  misc_RNA (1)...(19): siRNA sense strand
cauugauguugaugggaca

SEQ ID NO: 2545476 - RNA, 19 nt, Homo sapiens
  misc_RNA (1)...(19): siRNA sense strand
uguuacagacauugaggaa

SEQ ID NO: 2545477 - RNA, 19 nt, Homo sapiens
  misc_RNA (1)...(19): siRNA sense strand
cuguuaaauucugggcaua

SEQ ID NO: 2545478 - RNA, 19 nt, Homo sapiens
  misc_RNA (1)...(19): siRNA sense strand
gguaaaagaaggagguauc

SEQ ID NO: 2545479 - RNA, 19 nt, Homo sapiens
  misc_RNA (1)...(19): siRNA sense strand
agaaggaauaccaggacuu

SEQ ID NO: 2545480 - RNA, 19 nt, Homo sapiens
  misc_RNA (1)...(19): siRNA sense strand
cuuaacuauuccagaugaa

SEQ ID NO: 2545481 - RNA, 19 nt, Homo sapiens
  misc_RNA (1)...(19): siRNA sense strand
gguacaaacgucaucaaaa

SEQ ID NO: 2545482 - RNA, 19 nt, Homo sapiens
  misc_RNA (1)...(19): siRNA sense strand
aguccuauuggcuggauaa

SEQ ID NO: 2545483 - RNA, 19 nt, Homo sapiens
  misc_RNA (1)...(19): siRNA sense strand
ugaaguaccuuaaagacca

SEQ ID NO: 2545484 - RNA, 19 nt, Homo sapiens
  misc_RNA (1)...(19): siRNA sense strand
cuacuggagaugucaacaa

SEQ ID NO: 2545485 - RNA, 19 nt, Homo sapiens
  misc_RNA (1)...(19): siRNA sense strand
gcuuucgacagaugguaaa

SEQ ID NO: 2545486 - RNA, 19 nt, Homo sapiens
  misc_RNA (1)...(19): siRNA sense strand
ucgacgaauuauuuccaaa

SEQ ID NO: 2545487 - RNA, 19 nt, Homo sapiens
  misc_RNA (1)...(19): siRNA sense strand
aaaucaugaugcagguuca

SEQ ID NO: 2545488 - RNA, 19 nt, Homo sapiens
  misc_RNA (1)...(19): siRNA sense strand
caaagaaggaauaccagga

SEQ ID NO: 2545489 - RNA, 19 nt, Homo sapiens
  misc_RNA (1)...(19): siRNA sense strand
ggaauugacauaggggaua

SEQ ID NO: 2545490 - RNA, 19 nt, Homo sapiens
  misc_RNA (1)...(19): siRNA sense strand
acuuacugaagaaggacaa

SEQ ID NO: 2545491 - RNA, 19 nt, Homo sapiens
  misc_RNA (1)...(19): siRNA sense strand
aggaauugacauaggggau

SEQ ID NO: 2545492 - RNA, 19 nt, Homo sapiens
  misc_RNA (1)...(19): siRNA sense strand
ccaauggagguuaugaaaa

SEQ ID NO: 2545493 - RNA, 19 nt, Homo sapiens
  misc_RNA (1)...(19): siRNA sense strand
gggaaaugguacaaacguc

SEQ ID NO: 2545494 - RNA, 19 nt, Homo sapiens
  misc_RNA (1)...(19): siRNA sense strand
ggaauauaugauugugcca

SEQ ID NO: 2545495 - RNA, 19 nt, Homo sapiens
  misc_RNA (1)...(19): siRNA sense strand
gggucuacguggagcucaa

SEQ ID NO: 2545496 - RNA, 19 nt, Homo sapiens
  misc_RNA (1)...(19): siRNA sense strand
gggaagaggugaguggcua

SEQ ID NO: 2545497 - RNA, 19 nt, Homo sapiens
  misc_RNA (1)...(19): siRNA sense strand
gcgucaagaucgaggaggu

SEQ ID NO: 2545498 - RNA, 19 nt, Homo sapiens
  misc_RNA (1)...(19): siRNA sense strand
ccuacugggacaugagcaa

SEQ ID NO: 2545499 - RNA, 19 nt, Homo sapiens
  misc_RNA (1)...(19): siRNA sense strand
ccagaaagugggugggaag

SEQ ID NO: 2545500 - RNA, 19 nt, Homo sapiens
  misc_RNA (1)...(19): siRNA sense strand
uggacaagcucauccgcaa

SEQ ID NO: 2545501 - RNA, 19 nt, Homo sapiens
  misc_RNA (1)...(19): siRNA sense strand
gaagagacccucauggaca

SEQ ID NO: 2545502 - RNA, 19 nt, Homo sapiens
  misc_RNA (1)...(19): siRNA sense strand
agaugaaguacuuugagaa

SEQ ID NO: 2545503 - RNA, 19 nt, Homo sapiens
  misc_RNA (1)...(19): siRNA sense strand
gagagguguuuguggccau

SEQ ID NO: 2545504 - RNA, 19 nt, Homo sapiens
  misc_RNA (1)...(19): siRNA sense strand
acgugaaaguggacaccau

SEQ ID NO: 2545505 - RNA, 19 nt, Homo sapiens
  misc_RNA (1)...(19): siRNA sense strand
uugagaagagcgagggcau

SEQ ID NO: 2545506 - RNA, 19 nt, Homo sapiens
  misc_RNA (1)...(19): siRNA sense strand
agaagaagauccugagcag

SEQ ID NO: 2545507 - RNA, 19 nt, Homo sapiens
  misc_RNA (1)...(19): siRNA sense strand
gggaguuugccaaggagau

SEQ ID NO: 2545508 - RNA, 19 nt, Homo sapiens
  misc_RNA (1)...(19): siRNA sense strand
ucauccagcuggugggcau

SEQ ID NO: 2545509 - RNA, 19 nt, Homo sapiens
  misc_RNA (1)...(19): siRNA sense strand
gagcgacccuacugggaca

SEQ ID NO: 2545510 - RNA, 19 nt, Homo sapiens
  misc_RNA (1)...(19): siRNA sense strand
augccguggagcaggauua

SEQ ID NO: 2545511 - RNA, 19 nt, Homo sapiens
  misc_RNA (1)...(19): siRNA sense strand
ggaagugugccguggucga

SEQ ID NO: 2545512 - RNA, 19 nt, Homo sapiens
  misc_RNA (1)...(19): siRNA sense strand
gagucaagccagaacaacu

SEQ ID NO: 2545513 - RNA, 19 nt, Homo sapiens
  misc_RNA (1)...(19): siRNA sense strand
gauucggaguacacggaga

SEQ ID NO: 2545514 - RNA, 19 nt, Homo sapiens
  misc_RNA (1)...(19): siRNA sense strand
ucaacggugucucgggcaa

SEQ ID NO: 2545515 - RNA, 19 nt, Homo sapiens
  misc_RNA (1)...(19): siRNA sense strand
gggaguggauggugccugu

SEQ ID NO: 2545516 - RNA, 19 nt, Homo sapiens
  misc_RNA (1)...(19): siRNA sense strand
agacgcugaaggugggcua

SEQ ID NO: 2545517 - RNA, 19 nt, Homo sapiens
  misc_RNA (1)...(19): siRNA sense strand
aggucaugacagugaauua

SEQ ID NO: 2545518 - RNA, 19 nt, Homo sapiens
  misc_RNA (1)...(19): siRNA sense strand
auguggagaccaagagcaa

SEQ ID NO: 2545519 - RNA, 19 nt, Homo sapiens
  misc_RNA (1)...(19): siRNA sense strand
accaagagcaauaaggaga

SEQ ID NO: 2545520 - RNA, 19 nt, Homo sapiens
  misc_RNA (1)...(19): siRNA sense strand
aggagaucauggagcacau

SEQ ID NO: 2545521 - RNA, 19 nt, Homo sapiens
  misc_RNA (1)...(19): siRNA sense strand
aagccgaugcccaggacua

SEQ ID NO: 2545522 - RNA, 19 nt, Homo sapiens
  misc_RNA (1)...(19): siRNA sense strand
auaaggagaucauggagca

SEQ ID NO: 2545523 - RNA, 19 nt, Homo sapiens
  misc_RNA (1)...(19): siRNA sense strand
gccaagaaccggaggcaga

SEQ ID NO: 2545524 - RNA, 19 nt, Homo sapiens
  misc_RNA (1)...(19): siRNA sense strand
cuacagaaggcgaggagga

SEQ ID NO: 2545525 - RNA, 19 nt, Homo sapiens
  misc_RNA (1)...(19): siRNA sense strand
guauugaagcugaagaaaa

SEQ ID NO: 2545526 - RNA, 19 nt, Homo sapiens
  misc_RNA (1)...(19): siRNA sense strand
gugaagagacugcaggaga

SEQ ID NO: 2545527 - RNA, 19 nt, Homo sapiens
  misc_RNA (1)...(19): siRNA sense strand
aggaaauagaacugagagu

SEQ ID NO: 2545528 - RNA, 19 nt, Homo sapiens
  misc_RNA (1)...(19): siRNA sense strand
cuguauugaagcugaagaa

SEQ ID NO: 2545529 - RNA, 19 nt, Homo sapiens
  misc_RNA (1)...(19): siRNA sense strand
gggagaugauucaagcaca

SEQ ID NO: 2545530 - RNA, 19 nt, Homo sapiens
  misc_RNA (1)...(19): siRNA sense strand
acaagcaaauggaagguga

SEQ ID NO: 2545531 - RNA, 19 nt, Homo sapiens
  misc_RNA (1)...(19): siRNA sense strand
gaagaagacuacagcugca

SEQ ID NO: 2545532 - RNA, 19 nt, Homo sapiens
  misc_RNA (1)...(19): siRNA sense strand
aaauggaaggugacaggaa

SEQ ID NO: 2545533 - RNA, 19 nt, Homo sapiens
  misc_RNA (1)...(19): siRNA sense strand
uggaaaaggagcugguaga

SEQ ID NO: 2545534 - RNA, 19 nt, Homo sapiens
  misc_RNA (1)...(19): siRNA sense strand
cugaagcagagcuggaaau

SEQ ID NO: 2545535 - RNA, 19 nt, Homo sapiens
  misc_RNA (1)...(19): siRNA sense strand
gaaauguuaaagauggcaa

SEQ ID NO: 2545536 - RNA, 19 nt, Homo sapiens
  misc_RNA (1)...(19): siRNA sense strand
agacuguauugaagcugaa

SEQ ID NO: 2545537 - RNA, 19 nt, Homo sapiens
  misc_RNA (1)...(19): siRNA sense strand
uggacauguuacaggagau

SEQ ID NO: 2545538 - RNA, 19 nt, Homo sapiens
  misc_RNA (1)...(19): siRNA sense strand
cuagagugucggagggaac

SEQ ID NO: 2545539 - RNA, 19 nt, Homo sapiens
  misc_RNA (1)...(19): siRNA sense strand
ucauuaagggacauggaga

SEQ ID NO: 2545540 - RNA, 19 nt, Homo sapiens
  misc_RNA (1)...(19): siRNA sense strand
ggugcauguuauugagaag

SEQ ID NO: 2545541 - RNA, 19 nt, Homo sapiens
  misc_RNA (1)...(19): siRNA sense strand
gccaagaaccggaggcaga

SEQ ID NO: 2545542 - RNA, 19 nt, Homo sapiens
  misc_RNA (1)...(19): siRNA sense strand
cuacagaaggcgaggagga

SEQ ID NO: 2545543 - RNA, 19 nt, Homo sapiens
  misc_RNA (1)...(19): siRNA sense strand
gugaagagacugcaggaga

SEQ ID NO: 2545544 - RNA, 19 nt, Homo sapiens
  misc_RNA (1)...(19): siRNA sense strand
aggaaauagaacugagagu

SEQ ID NO: 2545545 - RNA, 19 nt, Homo sapiens
  misc_RNA (1)...(19): siRNA sense strand
gggagaugauucaagcaca

SEQ ID NO: 2545546 - RNA, 19 nt, Homo sapiens
  misc_RNA (1)...(19): siRNA sense strand
gaagaagacuacagcugca

SEQ ID NO: 2545547 - RNA, 19 nt, Homo sapiens
  misc_RNA (1)...(19): siRNA sense strand
uggaaaaggagcugguaga

SEQ ID NO: 2545548 - RNA, 19 nt, Homo sapiens
  misc_RNA (1)...(19): siRNA sense strand
cugaagcagagcuggaaau

SEQ ID NO: 2545549 - RNA, 19 nt, Homo sapiens
  misc_RNA (1)...(19): siRNA sense strand
gaaauguuaaagauggcaa

SEQ ID NO: 2545550 - RNA, 19 nt, Homo sapiens
  misc_RNA (1)...(19): siRNA sense strand
uggacauguuacaggagau

SEQ ID NO: 2545551 - RNA, 19 nt, Homo sapiens
  misc_RNA (1)...(19): siRNA sense strand
cuagagugucggagggaac

SEQ ID NO: 2545552 - RNA, 19 nt, Homo sapiens
  misc_RNA (1)...(19): siRNA sense strand
ucauuaagggacauggaga

SEQ ID NO: 2545553 - RNA, 19 nt, Homo sapiens
  misc_RNA (1)...(19): siRNA sense strand
ggugcauguuauugagaag

SEQ ID NO: 2545554 - RNA, 19 nt, Homo sapiens
  misc_RNA (1)...(19): siRNA sense strand
gccaagaaccggaggcaga

SEQ ID NO: 2545555 - RNA, 19 nt, Homo sapiens
  misc_RNA (1)...(19): siRNA sense strand
cuacagaaggcgaggagga

SEQ ID NO: 2545556 - RNA, 19 nt, Homo sapiens
  misc_RNA (1)...(19): siRNA sense strand
gugaagagacugcaggaga

SEQ ID NO: 2545557 - RNA, 19 nt, Homo sapiens
  misc_RNA (1)...(19): siRNA sense strand
aggaaauagaacugagagu

SEQ ID NO: 2545558 - RNA, 19 nt, Homo sapiens
  misc_RNA (1)...(19): siRNA sense strand
gggagaugauucaagcaca

SEQ ID NO: 2545559 - RNA, 19 nt, Homo sapiens
  misc_RNA (1)...(19): siRNA sense strand
acaagcaaauggaagguga

SEQ ID NO: 2545560 - RNA, 19 nt, Homo sapiens
  misc_RNA (1)...(19): siRNA sense strand
gaagaagacuacagcugca

SEQ ID NO: 2545561 - RNA, 19 nt, Homo sapiens
  misc_RNA (1)...(19): siRNA sense strand
aaauggaaggugacaggaa

SEQ ID NO: 2545562 - RNA, 19 nt, Homo sapiens
  misc_RNA (1)...(19): siRNA sense strand
uggaaaaggagcugguaga

SEQ ID NO: 2545563 - RNA, 19 nt, Homo sapiens
  misc_RNA (1)...(19): siRNA sense strand
cugaagcagagcuggaaau

SEQ ID NO: 2545564 - RNA, 19 nt, Homo sapiens
  misc_RNA (1)...(19): siRNA sense strand
gaaauguuaaagauggcaa

SEQ ID NO: 2545565 - RNA, 19 nt, Homo sapiens
  misc_RNA (1)...(19): siRNA sense strand
uggacauguuacaggagau

SEQ ID NO: 2545566 - RNA, 19 nt, Homo sapiens
  misc_RNA (1)...(19): siRNA sense strand
cuagagugucggagggaac

SEQ ID NO: 2545567 - RNA, 19 nt, Homo sapiens
  misc_RNA (1)...(19): siRNA sense strand
ucauuaagggacauggaga

SEQ ID NO: 2545568 - RNA, 19 nt, Homo sapiens
  misc_RNA (1)...(19): siRNA sense strand
ggugcauguuauugagaag

SEQ ID NO: 2545569 - RNA, 19 nt, Homo sapiens
  misc_RNA (1)...(19): siRNA sense strand
gccaagaaccggaggcaga

SEQ ID NO: 2545570 - RNA, 19 nt, Homo sapiens
  misc_RNA (1)...(19): siRNA sense strand
cuacagaaggcgaggagga

SEQ ID NO: 2545571 - RNA, 19 nt, Homo sapiens
  misc_RNA (1)...(19): siRNA sense strand
gugaagagacugcaggaga

SEQ ID NO: 2545572 - RNA, 19 nt, Homo sapiens
  misc_RNA (1)...(19): siRNA sense strand
aggaaauagaacugagagu

SEQ ID NO: 2545573 - RNA, 19 nt, Homo sapiens
  misc_RNA (1)...(19): siRNA sense strand
gggagaugauucaagcaca

SEQ ID NO: 2545574 - RNA, 19 nt, Homo sapiens
  misc_RNA (1)...(19): siRNA sense strand
acaagcaaauggaagguga

SEQ ID NO: 2545575 - RNA, 19 nt, Homo sapiens
  misc_RNA (1)...(19): siRNA sense strand
gaagaagacuacagcugca

SEQ ID NO: 2545576 - RNA, 19 nt, Homo sapiens
  misc_RNA (1)...(19): siRNA sense strand
aaauggaaggugacaggaa

SEQ ID NO: 2545577 - RNA, 19 nt, Homo sapiens
  misc_RNA (1)...(19): siRNA sense strand
uggaaaaggagcugguaga

SEQ ID NO: 2545578 - RNA, 19 nt, Homo sapiens
  misc_RNA (1)...(19): siRNA sense strand
cugaagcagagcuggaaau

SEQ ID NO: 2545579 - RNA, 19 nt, Homo sapiens
  misc_RNA (1)...(19): siRNA sense strand
gaaauguuaaagauggcaa

SEQ ID NO: 2545580 - RNA, 19 nt, Homo sapiens
  misc_RNA (1)...(19): siRNA sense strand
uggacauguuacaggagau

SEQ ID NO: 2545581 - RNA, 19 nt, Homo sapiens
  misc_RNA (1)...(19): siRNA sense strand
cuagagugucggagggaac

SEQ ID NO: 2545582 - RNA, 19 nt, Homo sapiens
  misc_RNA (1)...(19): siRNA sense strand
ucauuaagggacauggaga

SEQ ID NO: 2545583 - RNA, 19 nt, Homo sapiens
  misc_RNA (1)...(19): siRNA sense strand
ggugcauguuauugagaag

SEQ ID NO: 2545584 - RNA, 19 nt, Homo sapiens
  misc_RNA (1)...(19): siRNA sense strand
gccaagaaccggaggcaga

SEQ ID NO: 2545585 - RNA, 19 nt, Homo sapiens
  misc_RNA (1)...(19): siRNA sense strand
cuacagaaggcgaggagga

SEQ ID NO: 2545586 - RNA, 19 nt, Homo sapiens
  misc_RNA (1)...(19): siRNA sense strand
gugaagagacugcaggaga

SEQ ID NO: 2545587 - RNA, 19 nt, Homo sapiens
  misc_RNA (1)...(19): siRNA sense strand
aggaaauagaacugagagu

SEQ ID NO: 2545588 - RNA, 19 nt, Homo sapiens
  misc_RNA (1)...(19): siRNA sense strand
gggagaugauucaagcaca

SEQ ID NO: 2545589 - RNA, 19 nt, Homo sapiens
  misc_RNA (1)...(19): siRNA sense strand
acaagcaaauggaagguga

SEQ ID NO: 2545590 - RNA, 19 nt, Homo sapiens
  misc_RNA (1)...(19): siRNA sense strand
gaagaagacuacagcugca

SEQ ID NO: 2545591 - RNA, 19 nt, Homo sapiens
  misc_RNA (1)...(19): siRNA sense strand
aaauggaaggugacaggaa

SEQ ID NO: 2545592 - RNA, 19 nt, Homo sapiens
  misc_RNA (1)...(19): siRNA sense strand
uggaaaaggagcugguaga

SEQ ID NO: 2545593 - RNA, 19 nt, Homo sapiens
  misc_RNA (1)...(19): siRNA sense strand
cugaagcagagcuggaaau

SEQ ID NO: 2545594 - RNA, 19 nt, Homo sapiens
  misc_RNA (1)...(19): siRNA sense strand
gaaauguuaaagauggcaa

SEQ ID NO: 2545595 - RNA, 19 nt, Homo sapiens
  misc_RNA (1)...(19): siRNA sense strand
uggacauguuacaggagau

SEQ ID NO: 2545596 - RNA, 19 nt, Homo sapiens
  misc_RNA (1)...(19): siRNA sense strand
cuagagugucggagggaac

SEQ ID NO: 2545597 - RNA, 19 nt, Homo sapiens
  misc_RNA (1)...(19): siRNA sense strand
ucauuaagggacauggaga

SEQ ID NO: 2545598 - RNA, 19 nt, Homo sapiens
  misc_RNA (1)...(19): siRNA sense strand
ggugcauguuauugagaag

SEQ ID NO: 2545599 - RNA, 19 nt, Homo sapiens
  misc_RNA (1)...(19): siRNA sense strand
agagaaaggaggaaagaaa

SEQ ID NO: 2545600 - RNA, 19 nt, Homo sapiens
  misc_RNA (1)...(19): siRNA sense strand
agaacaagaaacagggcaa

SEQ ID NO: 2545601 - RNA, 19 nt, Homo sapiens
  misc_RNA (1)...(19): siRNA sense strand
gggcagcagcaaagggcaa

SEQ ID NO: 2545602 - RNA, 19 nt, Homo sapiens
  misc_RNA (1)...(19): siRNA sense strand
agugagaagacguggagua

SEQ ID NO: 2545603 - RNA, 19 nt, Homo sapiens
  misc_RNA (1)...(19): siRNA sense strand
cagcugaugaagagggaga

SEQ ID NO: 2545604 - RNA, 19 nt, Homo sapiens
  misc_RNA (1)...(19): siRNA sense strand
cggaagauggacagcauau

SEQ ID NO: 2545605 - RNA, 19 nt, Homo sapiens
  misc_RNA (1)...(19): siRNA sense strand
agucuaaacccaagagcga

SEQ ID NO: 2545606 - RNA, 19 nt, Homo sapiens
  misc_RNA (1)...(19): siRNA sense strand
cugaagagaaaggaggaaa

SEQ ID NO: 2545607 - RNA, 19 nt, Homo sapiens
  misc_RNA (1)...(19): siRNA sense strand
gagaaaggaggaaagaaaa

SEQ ID NO: 2545608 - RNA, 19 nt, Homo sapiens
  misc_RNA (1)...(19): siRNA sense strand
cuuugaaggcaguggacau

SEQ ID NO: 2545609 - RNA, 19 nt, Homo sapiens
  misc_RNA (1)...(19): siRNA sense strand
uugagauagaggagaacaa

SEQ ID NO: 2545610 - RNA, 19 nt, Homo sapiens
  misc_RNA (1)...(19): siRNA sense strand
ggacaugguagcuggggaa

SEQ ID NO: 2545611 - RNA, 19 nt, Homo sapiens
  misc_RNA (1)...(19): siRNA sense strand
cuccaaagaaagaugagaa

SEQ ID NO: 2545612 - RNA, 19 nt, Homo sapiens
  misc_RNA (1)...(19): siRNA sense strand
gcugaugaagagggagaaa

SEQ ID NO: 2545613 - RNA, 19 nt, Homo sapiens
  misc_RNA (1)...(19): siRNA sense strand
gggauuggccggaagcaga

SEQ ID NO: 2545614 - RNA, 19 nt, Homo sapiens
  misc_RNA (1)...(19): siRNA sense strand
gaaaguagcacuagagcag

SEQ ID NO: 2545615 - RNA, 19 nt, Homo sapiens
  misc_RNA (1)...(19): siRNA sense strand
aggaaacgucagcgccaaa

SEQ ID NO: 2545616 - RNA, 19 nt, Homo sapiens
  misc_RNA (1)...(19): siRNA sense strand
uggaguuagcagaugacaa

SEQ ID NO: 2545617 - RNA, 19 nt, Homo sapiens
  misc_RNA (1)...(19): siRNA sense strand
ccucagucguccacaccaa

SEQ ID NO: 2545618 - RNA, 19 nt, Homo sapiens
  misc_RNA (1)...(19): siRNA sense strand
aggagaaaguagcacuaga

SEQ ID NO: 2545619 - RNA, 19 nt, Homo sapiens
  misc_RNA (1)...(19): siRNA sense strand
gagauagaggagaacaaga

SEQ ID NO: 2545620 - RNA, 19 nt, Homo sapiens
  misc_RNA (1)...(19): siRNA sense strand
caagaguguuguugccaca

SEQ ID NO: 2545621 - RNA, 19 nt, Homo sapiens
  misc_RNA (1)...(19): siRNA sense strand
ccuaagaagaucaaccuga

SEQ ID NO: 2545622 - RNA, 19 nt, Homo sapiens
  misc_RNA (1)...(19): siRNA sense strand
gcaaguacccagaagucca

SEQ ID NO: 2545623 - RNA, 19 nt, Homo sapiens
  misc_RNA (1)...(19): siRNA sense strand
acugggacuuuguggaaca

SEQ ID NO: 2545624 - RNA, 19 nt, Homo sapiens
  misc_RNA (1)...(19): siRNA sense strand
ugguggagauugcuggcua

SEQ ID NO: 2545625 - RNA, 19 nt, Homo sapiens
  misc_RNA (1)...(19): siRNA sense strand
uggaaaagcaaaagcagau

SEQ ID NO: 2545626 - RNA, 19 nt, Homo sapiens
  misc_RNA (1)...(19): siRNA sense strand
aggaacaaguggggacaua

SEQ ID NO: 2545627 - RNA, 19 nt, Homo sapiens
  misc_RNA (1)...(19): siRNA sense strand
caagauaacccguugugga

SEQ ID NO: 2545628 - RNA, 19 nt, Homo sapiens
  misc_RNA (1)...(19): siRNA sense strand
aacccaagagcgauggaaa

SEQ ID NO: 2545629 - RNA, 19 nt, Homo sapiens
  misc_RNA (1)...(19): siRNA sense strand
aggaggaagcagugucuga

SEQ ID NO: 2545630 - RNA, 19 nt, Homo sapiens
  misc_RNA (1)...(19): siRNA sense strand
uagaagaggaggaagcagu

SEQ ID NO: 2545631 - RNA, 19 nt, Homo sapiens
  misc_RNA (1)...(19): siRNA sense strand
ggcucaacgggcagaguuu

SEQ ID NO: 2545632 - RNA, 19 nt, Homo sapiens
  misc_RNA (1)...(19): siRNA sense strand
gagaugaacagcacagcca

SEQ ID NO: 2545633 - RNA, 19 nt, Homo sapiens
  misc_RNA (1)...(19): siRNA sense strand
cguugggagucuggaagaa

SEQ ID NO: 2545634 - RNA, 19 nt, Homo sapiens
  misc_RNA (1)...(19): siRNA sense strand
gaagagaaaggaggaaaga

SEQ ID NO: 2545635 - RNA, 19 nt, Homo sapiens
  misc_RNA (1)...(19): siRNA sense strand
cgaugaagaaaccacggaa

SEQ ID NO: 2545636 - RNA, 19 nt, Homo sapiens
  misc_RNA (1)...(19): siRNA sense strand
gcccagaugcugaggguug

SEQ ID NO: 2545637 - RNA, 19 nt, Homo sapiens
  misc_RNA (1)...(19): siRNA sense strand
ugaagagaaaggaggaaag

SEQ ID NO: 2545638 - RNA, 19 nt, Homo sapiens
  misc_RNA (1)...(19): siRNA sense strand
cagcagaaguccagguucc

SEQ ID NO: 2545639 - RNA, 19 nt, Homo sapiens
  misc_RNA (1)...(19): siRNA sense strand
cagaaaagagaaagaagaa

SEQ ID NO: 2545640 - RNA, 19 nt, Homo sapiens
  misc_RNA (1)...(19): siRNA sense strand
ugaagaagcagaacggcaa

SEQ ID NO: 2545641 - RNA, 19 nt, Homo sapiens
  misc_RNA (1)...(19): siRNA sense strand
gcaaccgagcacugagaaa

SEQ ID NO: 2545642 - RNA, 19 nt, Homo sapiens
  misc_RNA (1)...(19): siRNA sense strand
cuguaguggagaaggaaau

SEQ ID NO: 2545643 - RNA, 19 nt, Homo sapiens
  misc_RNA (1)...(19): siRNA sense strand
ccgccagcaugaaggacaa

SEQ ID NO: 2545644 - RNA, 19 nt, Homo sapiens
  misc_RNA (1)...(19): siRNA sense strand
cggcagaacauguggugca

SEQ ID NO: 2545645 - RNA, 19 nt, Homo sapiens
  misc_RNA (1)...(19): siRNA sense strand
acaagaaacaguugaacca

SEQ ID NO: 2545646 - RNA, 19 nt, Homo sapiens
  misc_RNA (1)...(19): siRNA sense strand
gcgugaaagaaauccuaaa

SEQ ID NO: 2545647 - RNA, 19 nt, Homo sapiens
  misc_RNA (1)...(19): siRNA sense strand
agaucaaguacgaaugcaa

SEQ ID NO: 2545648 - RNA, 19 nt, Homo sapiens
  misc_RNA (1)...(19): siRNA sense strand
uguaaaggucaaacaagaa

SEQ ID NO: 2545649 - RNA, 19 nt, Homo sapiens
  misc_RNA (1)...(19): siRNA sense strand
ugucagaacgggaugaaca

SEQ ID NO: 2545650 - RNA, 19 nt, Homo sapiens
  misc_RNA (1)...(19): siRNA sense strand
aagagagaguacagcguga

SEQ ID NO: 2545651 - RNA, 19 nt, Homo sapiens
  misc_RNA (1)...(19): siRNA sense strand
gcaaagaaacauggggaau

SEQ ID NO: 2545652 - RNA, 19 nt, Homo sapiens
  misc_RNA (1)...(19): siRNA sense strand
ggcaagaucaaguacgaau

SEQ ID NO: 2545653 - RNA, 19 nt, Homo sapiens
  misc_RNA (1)...(19): siRNA sense strand
cacaagagauuuagcagca

SEQ ID NO: 2545654 - RNA, 19 nt, Homo sapiens
  misc_RNA (1)...(19): siRNA sense strand
agaaugucccaaagagaga

SEQ ID NO: 2545655 - RNA, 19 nt, Homo sapiens
  misc_RNA (1)...(19): siRNA sense strand
ucacagcagcccugggaau

SEQ ID NO: 2545656 - RNA, 19 nt, Homo sapiens
  misc_RNA (1)...(19): siRNA sense strand
aaagaaacaugaccggcua

SEQ ID NO: 2545657 - RNA, 19 nt, Homo sapiens
  misc_RNA (1)...(19): siRNA sense strand
aguacagcgugaaagaaau

SEQ ID NO: 2545658 - RNA, 19 nt, Homo sapiens
  misc_RNA (1)...(19): siRNA sense strand
cugaagaagcagaacggca

SEQ ID NO: 2545659 - RNA, 19 nt, Homo sapiens
  misc_RNA (1)...(19): siRNA sense strand
aaagaaugucccaaagaga

SEQ ID NO: 2545660 - RNA, 19 nt, Homo sapiens
  misc_RNA (1)...(19): siRNA sense strand
gcgacgaagccaugaaucu

SEQ ID NO: 2545661 - RNA, 19 nt, Homo sapiens
  misc_RNA (1)...(19): siRNA sense strand
cagaaaaggaccucgauga

SEQ ID NO: 2545662 - RNA, 19 nt, Homo sapiens
  misc_RNA (1)...(19): siRNA sense strand
augaugaaucucacacaaa

SEQ ID NO: 2545663 - RNA, 19 nt, Homo sapiens
  misc_RNA (1)...(19): siRNA sense strand
ccagcaaucucaagaccca

SEQ ID NO: 2545664 - RNA, 19 nt, Homo sapiens
  misc_RNA (1)...(19): siRNA sense strand
gacccgaaucaaugaagaa

SEQ ID NO: 2545665 - RNA, 19 nt, Homo sapiens
  misc_RNA (1)...(19): siRNA sense strand
ccucgaugacuuuagaaga

SEQ ID NO: 2545666 - RNA, 19 nt, Homo sapiens
  misc_RNA (1)...(19): siRNA sense strand
gcgccaagacuuucggcca

SEQ ID NO: 2545667 - RNA, 19 nt, Homo sapiens
  misc_RNA (1)...(19): siRNA sense strand
aggucugccacaagagauu

SEQ ID NO: 2545668 - RNA, 19 nt, Homo sapiens
  misc_RNA (1)...(19): siRNA sense strand
ucagaaaagagaaagaaga

SEQ ID NO: 2545669 - RNA, 19 nt, Homo sapiens
  misc_RNA (1)...(19): siRNA sense strand
gaaucaaugaagaaaucga

SEQ ID NO: 2545670 - RNA, 19 nt, Homo sapiens
  misc_RNA (1)...(19): siRNA sense strand
cagaaaagagaaagaagaa

SEQ ID NO: 2545671 - RNA, 19 nt, Homo sapiens
  misc_RNA (1)...(19): siRNA sense strand
ugaagaagcagaacggcaa

SEQ ID NO: 2545672 - RNA, 19 nt, Homo sapiens
  misc_RNA (1)...(19): siRNA sense strand
gcaaccgagcacugagaaa

SEQ ID NO: 2545673 - RNA, 19 nt, Homo sapiens
  misc_RNA (1)...(19): siRNA sense strand
cuguaguggagaaggaaau

SEQ ID NO: 2545674 - RNA, 19 nt, Homo sapiens
  misc_RNA (1)...(19): siRNA sense strand
ccgccagcaugaaggacaa

SEQ ID NO: 2545675 - RNA, 19 nt, Homo sapiens
  misc_RNA (1)...(19): siRNA sense strand
cggcagaacauguggugca

SEQ ID NO: 2545676 - RNA, 19 nt, Homo sapiens
  misc_RNA (1)...(19): siRNA sense strand
acaagaaacaguugaacca

SEQ ID NO: 2545677 - RNA, 19 nt, Homo sapiens
  misc_RNA (1)...(19): siRNA sense strand
gcgugaaagaaauccuaaa

SEQ ID NO: 2545678 - RNA, 19 nt, Homo sapiens
  misc_RNA (1)...(19): siRNA sense strand
agaucaaguacgaaugcaa

SEQ ID NO: 2545679 - RNA, 19 nt, Homo sapiens
  misc_RNA (1)...(19): siRNA sense strand
uguaaaggucaaacaagaa

SEQ ID NO: 2545680 - RNA, 19 nt, Homo sapiens
  misc_RNA (1)...(19): siRNA sense strand
ugucagaacgggaugaaca

SEQ ID NO: 2545681 - RNA, 19 nt, Homo sapiens
  misc_RNA (1)...(19): siRNA sense strand
aagagagaguacagcguga

SEQ ID NO: 2545682 - RNA, 19 nt, Homo sapiens
  misc_RNA (1)...(19): siRNA sense strand
gcaaagaaacauggggaau

SEQ ID NO: 2545683 - RNA, 19 nt, Homo sapiens
  misc_RNA (1)...(19): siRNA sense strand
ggcaagaucaaguacgaau

SEQ ID NO: 2545684 - RNA, 19 nt, Homo sapiens
  misc_RNA (1)...(19): siRNA sense strand
cacaagagauuuagcagca

SEQ ID NO: 2545685 - RNA, 19 nt, Homo sapiens
  misc_RNA (1)...(19): siRNA sense strand
agaaugucccaaagagaga

SEQ ID NO: 2545686 - RNA, 19 nt, Homo sapiens
  misc_RNA (1)...(19): siRNA sense strand
ucacagcagcccugggaau

SEQ ID NO: 2545687 - RNA, 19 nt, Homo sapiens
  misc_RNA (1)...(19): siRNA sense strand
aaagaaacaugaccggcua

SEQ ID NO: 2545688 - RNA, 19 nt, Homo sapiens
  misc_RNA (1)...(19): siRNA sense strand
aguacagcgugaaagaaau

SEQ ID NO: 2545689 - RNA, 19 nt, Homo sapiens
  misc_RNA (1)...(19): siRNA sense strand
cugaagaagcagaacggca

SEQ ID NO: 2545690 - RNA, 19 nt, Homo sapiens
  misc_RNA (1)...(19): siRNA sense strand
aaagaaugucccaaagaga

SEQ ID NO: 2545691 - RNA, 19 nt, Homo sapiens
  misc_RNA (1)...(19): siRNA sense strand
gcgacgaagccaugaaucu

SEQ ID NO: 2545692 - RNA, 19 nt, Homo sapiens
  misc_RNA (1)...(19): siRNA sense strand
cagaaaaggaccucgauga

SEQ ID NO: 2545693 - RNA, 19 nt, Homo sapiens
  misc_RNA (1)...(19): siRNA sense strand
augaugaaucucacacaaa

SEQ ID NO: 2545694 - RNA, 19 nt, Homo sapiens
  misc_RNA (1)...(19): siRNA sense strand
ccagcaaucucaagaccca

SEQ ID NO: 2545695 - RNA, 19 nt, Homo sapiens
  misc_RNA (1)...(19): siRNA sense strand
gacccgaaucaaugaagaa

SEQ ID NO: 2545696 - RNA, 19 nt, Homo sapiens
  misc_RNA (1)...(19): siRNA sense strand
ccucgaugacuuuagaaga

SEQ ID NO: 2545697 - RNA, 19 nt, Homo sapiens
  misc_RNA (1)...(19): siRNA sense strand
gcgccaagacuuucggcca

SEQ ID NO: 2545698 - RNA, 19 nt, Homo sapiens
  misc_RNA (1)...(19): siRNA sense strand
aggucugccacaagagauu

SEQ ID NO: 2545699 - RNA, 19 nt, Homo sapiens
  misc_RNA (1)...(19): siRNA sense strand
ucagaaaagagaaagaaga

SEQ ID NO: 2545700 - RNA, 19 nt, Homo sapiens
  misc_RNA (1)...(19): siRNA sense strand
gaaucaaugaagaaaucga

SEQ ID NO: 2545701 - RNA, 19 nt, Homo sapiens
  misc_RNA (1)...(19): siRNA sense strand
aaucacaagaugagagaau

SEQ ID NO: 2545702 - RNA, 19 nt, Homo sapiens
  misc_RNA (1)...(19): siRNA sense strand
ggguaauccaccagagaca

SEQ ID NO: 2545703 - RNA, 19 nt, Homo sapiens
  misc_RNA (1)...(19): siRNA sense strand
uggacacagcccagagaaa

SEQ ID NO: 2545704 - RNA, 19 nt, Homo sapiens
  misc_RNA (1)...(19): siRNA sense strand
gcuuaugaacccugcaaau

SEQ ID NO: 2545705 - RNA, 19 nt, Homo sapiens
  misc_RNA (1)...(19): siRNA sense strand
ccagaagagcucagggcga

SEQ ID NO: 2545706 - RNA, 19 nt, Homo sapiens
  misc_RNA (1)...(19): siRNA sense strand
ugcaaaugaugguggccaa

SEQ ID NO: 2545707 - RNA, 19 nt, Homo sapiens
  misc_RNA (1)...(19): siRNA sense strand
ucaugauggaggagauauu

SEQ ID NO: 2545708 - RNA, 19 nt, Homo sapiens
  misc_RNA (1)...(19): siRNA sense strand
ugaauaaagcggagaggcu

SEQ ID NO: 2545709 - RNA, 19 nt, Homo sapiens
  misc_RNA (1)...(19): siRNA sense strand
caaaauggagaguggagaa

SEQ ID NO: 2545710 - RNA, 19 nt, Homo sapiens
  misc_RNA (1)...(19): siRNA sense strand
ggacaagguugaacgcugu

SEQ ID NO: 2545711 - RNA, 19 nt, Homo sapiens
  misc_RNA (1)...(19): siRNA sense strand
cgucaugauggaggagaua

SEQ ID NO: 2545712 - RNA, 19 nt, Homo sapiens
  misc_RNA (1)...(19): siRNA sense strand
caguggaauacuuaagcaa

SEQ ID NO: 2545713 - RNA, 19 nt, Homo sapiens
  misc_RNA (1)...(19): siRNA sense strand
cagaaggaugaaugauauu

SEQ ID NO: 2545714 - RNA, 19 nt, Homo sapiens
  misc_RNA (1)...(19): siRNA sense strand
acgucaugauggaggagau

SEQ ID NO: 2545715 - RNA, 19 nt, Homo sapiens
  misc_RNA (1)...(19): siRNA sense strand
uggcugugauguuggaaaa

SEQ ID NO: 2545716 - RNA, 19 nt, Homo sapiens
  misc_RNA (1)...(19): siRNA sense strand
acacaguggagcaaccaaa

SEQ ID NO: 2545717 - RNA, 19 nt, Homo sapiens
  misc_RNA (1)...(19): siRNA sense strand
uggagcaaccaaaggagaa

SEQ ID NO: 2545718 - RNA, 19 nt, Homo sapiens
  misc_RNA (1)...(19): siRNA sense strand
aaguggugguggacaggaa

SEQ ID NO: 2545719 - RNA, 19 nt, Homo sapiens
  misc_RNA (1)...(19): siRNA sense strand
aacuuuacacaguggaaua

SEQ ID NO: 2545720 - RNA, 19 nt, Homo sapiens
  misc_RNA (1)...(19): siRNA sense strand
cagaagagcucagggcgau

SEQ ID NO: 2545721 - RNA, 19 nt, Homo sapiens
  misc_RNA (1)...(19): siRNA sense strand
gggacaagguugaacgcug

SEQ ID NO: 2545722 - RNA, 19 nt, Homo sapiens
  misc_RNA (1)...(19): siRNA sense strand
aauaaagcggagaggcuga

SEQ ID NO: 2545723 - RNA, 19 nt, Homo sapiens
  misc_RNA (1)...(19): siRNA sense strand
gggaacaugucaagccacu

SEQ ID NO: 2545724 - RNA, 19 nt, Homo sapiens
  misc_RNA (1)...(19): siRNA sense strand
ugguguuaucccuaagaaa

SEQ ID NO: 2545725 - RNA, 19 nt, Homo sapiens
  misc_RNA (1)...(19): siRNA sense strand
gaacaugaauaaagcggag

SEQ ID NO: 2545726 - RNA, 19 nt, Homo sapiens
  misc_RNA (1)...(19): siRNA sense strand
ucacaagaugagagaauuc

SEQ ID NO: 2545727 - RNA, 19 nt, Homo sapiens
  misc_RNA (1)...(19): siRNA sense strand
cugaagaggugcuagcugu

SEQ ID NO: 2545728 - RNA, 19 nt, Homo sapiens
  misc_RNA (1)...(19): siRNA sense strand
ucuacgaagugguggugga

SEQ ID NO: 2545729 - RNA, 19 nt, Homo sapiens
  misc_RNA (1)...(19): siRNA sense strand
acgaaguggugguggacag

SEQ ID NO: 2545730 - RNA, 19 nt, Homo sapiens
  misc_RNA (1)...(19): siRNA sense strand
gaaaggagccugaggaugg

SEQ ID NO: 2545731 - RNA, 19 nt, Homo sapiens
  misc_RNA (1)...(19): siRNA sense strand
acaugaaucucuaugacca

SEQ ID NO: 2545732 - RNA, 19 nt, Homo sapiens
  misc_RNA (1)...(19): siRNA sense strand
cagagaaggaugaucagga

SEQ ID NO: 2545733 - RNA, 19 nt, Homo sapiens
  misc_RNA (1)...(19): siRNA sense strand
ucaaagauggagaggcugu

SEQ ID NO: 2545734 - RNA, 19 nt, Homo sapiens
  misc_RNA (1)...(19): siRNA sense strand
auggagaggcugugugguu

SEQ ID NO: 2545735 - RNA, 19 nt, Homo sapiens
  misc_RNA (1)...(19): siRNA sense strand
gcaugacagaugagugguu

SEQ ID NO: 2545736 - RNA, 19 nt, Homo sapiens
  misc_RNA (1)...(19): siRNA sense strand
gggucaacauggaggaucu

SEQ ID NO: 2545737 - RNA, 19 nt, Homo sapiens
  misc_RNA (1)...(19): siRNA sense strand
augcacaauucgaggccua

SEQ ID NO: 2545738 - RNA, 19 nt, Homo sapiens
  misc_RNA (1)...(19): siRNA sense strand
gagaugggcuucaaggaca

SEQ ID NO: 2545739 - RNA, 19 nt, Homo sapiens
  misc_RNA (1)...(19): siRNA sense strand
gagaaagagcugcacgaga

SEQ ID NO: 2545740 - RNA, 19 nt, Homo sapiens
  misc_RNA (1)...(19): siRNA sense strand
cugaagagagacaaagaga

SEQ ID NO: 2545741 - RNA, 19 nt, Homo sapiens
  misc_RNA (1)...(19): siRNA sense strand
gagagacagguuugggcaa

SEQ ID NO: 2545742 - RNA, 19 nt, Homo sapiens
  misc_RNA (1)...(19): siRNA sense strand
gaggacagcuacaagccua

SEQ ID NO: 2545743 - RNA, 19 nt, Homo sapiens
  misc_RNA (1)...(19): siRNA sense strand
agucgguggcagagaucaa

SEQ ID NO: 2545744 - RNA, 19 nt, Homo sapiens
  misc_RNA (1)...(19): siRNA sense strand
agaaacuggaggauaagaa

SEQ ID NO: 2545745 - RNA, 19 nt, Homo sapiens
  misc_RNA (1)...(19): siRNA sense strand
acaccgacccugacagcaa

SEQ ID NO: 2545746 - RNA, 19 nt, Homo sapiens
  misc_RNA (1)...(19): siRNA sense strand
agaagaagaaacuggagga

SEQ ID NO: 2545747 - RNA, 19 nt, Homo sapiens
  misc_RNA (1)...(19): siRNA sense strand
uggcagagaucaauggaac

SEQ ID NO: 2545748 - RNA, 19 nt, Homo sapiens
  misc_RNA (1)...(19): siRNA sense strand
ugaauaaguccgucagcca

SEQ ID NO: 2545749 - RNA, 19 nt, Homo sapiens
  misc_RNA (1)...(19): siRNA sense strand
cagagaaagagcugcacga

SEQ ID NO: 2545750 - RNA, 19 nt, Homo sapiens
  misc_RNA (1)...(19): siRNA sense strand
cuggaggauaagaagaaau

SEQ ID NO: 2545751 - RNA, 19 nt, Homo sapiens
  misc_RNA (1)...(19): siRNA sense strand
uggaauucaucgaugcaca

SEQ ID NO: 2545752 - RNA, 19 nt, Homo sapiens
  misc_RNA (1)...(19): siRNA sense strand
ucgaagagugagcuaacaa

SEQ ID NO: 2545753 - RNA, 19 nt, Homo sapiens
  misc_RNA (1)...(19): siRNA sense strand
cgauauagcucgccaggug

SEQ ID NO: 2545754 - RNA, 19 nt, Homo sapiens
  misc_RNA (1)...(19): siRNA sense strand
ugaagaaacugcaccagga

SEQ ID NO: 2545755 - RNA, 19 nt, Homo sapiens
  misc_RNA (1)...(19): siRNA sense strand
augaugagucgguggcaga

SEQ ID NO: 2545756 - RNA, 19 nt, Homo sapiens
  misc_RNA (1)...(19): siRNA sense strand
aggagacauaugaggccaa

SEQ ID NO: 2545757 - RNA, 19 nt, Homo sapiens
  misc_RNA (1)...(19): siRNA sense strand
cauaugaggccaaaaggaa

SEQ ID NO: 2545758 - RNA, 19 nt, Homo sapiens
  misc_RNA (1)...(19): siRNA sense strand
ucaaagagaaagaagcgga

SEQ ID NO: 2545759 - RNA, 19 nt, Homo sapiens
  misc_RNA (1)...(19): siRNA sense strand
cguuagcacaguuggcuuu

SEQ ID NO: 2545760 - RNA, 19 nt, Homo sapiens
  misc_RNA (1)...(19): siRNA sense strand
gagcuaacaaaguucaaaa

SEQ ID NO: 2545761 - RNA, 19 nt, Homo sapiens
  misc_RNA (1)...(19): siRNA sense strand
acgagaaguuugaccgucu

SEQ ID NO: 2545762 - RNA, 19 nt, Homo sapiens
  misc_RNA (1)...(19): siRNA sense strand
agaaacugcaccaggacga

SEQ ID NO: 2545763 - RNA, 19 nt, Homo sapiens
  misc_RNA (1)...(19): siRNA sense strand
agagacaaagagaagaaaa

SEQ ID NO: 2545764 - RNA, 19 nt, Homo sapiens
  misc_RNA (1)...(19): siRNA sense strand
aggacgagaagaagaaacu

SEQ ID NO: 2545765 - RNA, 19 nt, Homo sapiens
  misc_RNA (1)...(19): siRNA sense strand
gggucaacauggaggaucu

SEQ ID NO: 2545766 - RNA, 19 nt, Homo sapiens
  misc_RNA (1)...(19): siRNA sense strand
augcacaauucgaggccua

SEQ ID NO: 2545767 - RNA, 19 nt, Homo sapiens
  misc_RNA (1)...(19): siRNA sense strand
gagaugggcuucaaggaca

SEQ ID NO: 2545768 - RNA, 19 nt, Homo sapiens
  misc_RNA (1)...(19): siRNA sense strand
gagaaagagcugcacgaga

SEQ ID NO: 2545769 - RNA, 19 nt, Homo sapiens
  misc_RNA (1)...(19): siRNA sense strand
cugaagagagacaaagaga

SEQ ID NO: 2545770 - RNA, 19 nt, Homo sapiens
  misc_RNA (1)...(19): siRNA sense strand
gagagacagguuugggcaa

SEQ ID NO: 2545771 - RNA, 19 nt, Homo sapiens
  misc_RNA (1)...(19): siRNA sense strand
gaggacagcuacaagccua

SEQ ID NO: 2545772 - RNA, 19 nt, Homo sapiens
  misc_RNA (1)...(19): siRNA sense strand
agucgguggcagagaucaa

SEQ ID NO: 2545773 - RNA, 19 nt, Homo sapiens
  misc_RNA (1)...(19): siRNA sense strand
agaaacuggaggauaagaa

SEQ ID NO: 2545774 - RNA, 19 nt, Homo sapiens
  misc_RNA (1)...(19): siRNA sense strand
acaccgacccugacagcaa

SEQ ID NO: 2545775 - RNA, 19 nt, Homo sapiens
  misc_RNA (1)...(19): siRNA sense strand
agaagaagaaacuggagga

SEQ ID NO: 2545776 - RNA, 19 nt, Homo sapiens
  misc_RNA (1)...(19): siRNA sense strand
uggcagagaucaauggaac

SEQ ID NO: 2545777 - RNA, 19 nt, Homo sapiens
  misc_RNA (1)...(19): siRNA sense strand
ugaauaaguccgucagcca

SEQ ID NO: 2545778 - RNA, 19 nt, Homo sapiens
  misc_RNA (1)...(19): siRNA sense strand
cagagaaagagcugcacga

SEQ ID NO: 2545779 - RNA, 19 nt, Homo sapiens
  misc_RNA (1)...(19): siRNA sense strand
cuggaggauaagaagaaau

SEQ ID NO: 2545780 - RNA, 19 nt, Homo sapiens
  misc_RNA (1)...(19): siRNA sense strand
uggaauucaucgaugcaca

SEQ ID NO: 2545781 - RNA, 19 nt, Homo sapiens
  misc_RNA (1)...(19): siRNA sense strand
ucgaagagugagcuaacaa

SEQ ID NO: 2545782 - RNA, 19 nt, Homo sapiens
  misc_RNA (1)...(19): siRNA sense strand
cgauauagcucgccaggug

SEQ ID NO: 2545783 - RNA, 19 nt, Homo sapiens
  misc_RNA (1)...(19): siRNA sense strand
ugaagaaacugcaccagga

SEQ ID NO: 2545784 - RNA, 19 nt, Homo sapiens
  misc_RNA (1)...(19): siRNA sense strand
augaugagucgguggcaga

SEQ ID NO: 2545785 - RNA, 19 nt, Homo sapiens
  misc_RNA (1)...(19): siRNA sense strand
aggagacauaugaggccaa

SEQ ID NO: 2545786 - RNA, 19 nt, Homo sapiens
  misc_RNA (1)...(19): siRNA sense strand
cauaugaggccaaaaggaa

SEQ ID NO: 2545787 - RNA, 19 nt, Homo sapiens
  misc_RNA (1)...(19): siRNA sense strand
ucaaagagaaagaagcgga

SEQ ID NO: 2545788 - RNA, 19 nt, Homo sapiens
  misc_RNA (1)...(19): siRNA sense strand
cguuagcacaguuggcuuu

SEQ ID NO: 2545789 - RNA, 19 nt, Homo sapiens
  misc_RNA (1)...(19): siRNA sense strand
gagcuaacaaaguucaaaa

SEQ ID NO: 2545790 - RNA, 19 nt, Homo sapiens
  misc_RNA (1)...(19): siRNA sense strand
acgagaaguuugaccgucu

SEQ ID NO: 2545791 - RNA, 19 nt, Homo sapiens
  misc_RNA (1)...(19): siRNA sense strand
agaaacugcaccaggacga

SEQ ID NO: 2545792 - RNA, 19 nt, Homo sapiens
  misc_RNA (1)...(19): siRNA sense strand
agagacaaagagaagaaaa

SEQ ID NO: 2545793 - RNA, 19 nt, Homo sapiens
  misc_RNA (1)...(19): siRNA sense strand
aggacgagaagaagaaacu

SEQ ID NO: 2545794 - RNA, 19 nt, Homo sapiens
  misc_RNA (1)...(19): siRNA sense strand
gggucaacauggaggaucu

SEQ ID NO: 2545795 - RNA, 19 nt, Homo sapiens
  misc_RNA (1)...(19): siRNA sense strand
augcacaauucgaggccua

SEQ ID NO: 2545796 - RNA, 19 nt, Homo sapiens
  misc_RNA (1)...(19): siRNA sense strand
gagaugggcuucaaggaca

SEQ ID NO: 2545797 - RNA, 19 nt, Homo sapiens
  misc_RNA (1)...(19): siRNA sense strand
gagaaagagcugcacgaga

SEQ ID NO: 2545798 - RNA, 19 nt, Homo sapiens
  misc_RNA (1)...(19): siRNA sense strand
cugaagagagacaaagaga

SEQ ID NO: 2545799 - RNA, 19 nt, Homo sapiens
  misc_RNA (1)...(19): siRNA sense strand
gagagacagguuugggcaa

SEQ ID NO: 2545800 - RNA, 19 nt, Homo sapiens
  misc_RNA (1)...(19): siRNA sense strand
gaggacagcuacaagccua

SEQ ID NO: 2545801 - RNA, 19 nt, Homo sapiens
  misc_RNA (1)...(19): siRNA sense strand
agucgguggcagagaucaa

SEQ ID NO: 2545802 - RNA, 19 nt, Homo sapiens
  misc_RNA (1)...(19): siRNA sense strand
agaaacuggaggauaagaa

SEQ ID NO: 2545803 - RNA, 19 nt, Homo sapiens
  misc_RNA (1)...(19): siRNA sense strand
acaccgacccugacagcaa

SEQ ID NO: 2545804 - RNA, 19 nt, Homo sapiens
  misc_RNA (1)...(19): siRNA sense strand
agaagaagaaacuggagga

SEQ ID NO: 2545805 - RNA, 19 nt, Homo sapiens
  misc_RNA (1)...(19): siRNA sense strand
uggcagagaucaauggaac

SEQ ID NO: 2545806 - RNA, 19 nt, Homo sapiens
  misc_RNA (1)...(19): siRNA sense strand
ugaauaaguccgucagcca

SEQ ID NO: 2545807 - RNA, 19 nt, Homo sapiens
  misc_RNA (1)...(19): siRNA sense strand
cagagaaagagcugcacga

SEQ ID NO: 2545808 - RNA, 19 nt, Homo sapiens
  misc_RNA (1)...(19): siRNA sense strand
cuggaggauaagaagaaau

SEQ ID NO: 2545809 - RNA, 19 nt, Homo sapiens
  misc_RNA (1)...(19): siRNA sense strand
uggaauucaucgaugcaca

SEQ ID NO: 2545810 - RNA, 19 nt, Homo sapiens
  misc_RNA (1)...(19): siRNA sense strand
ucgaagagugagcuaacaa

SEQ ID NO: 2545811 - RNA, 19 nt, Homo sapiens
  misc_RNA (1)...(19): siRNA sense strand
cgauauagcucgccaggug

SEQ ID NO: 2545812 - RNA, 19 nt, Homo sapiens
  misc_RNA (1)...(19): siRNA sense strand
ugaagaaacugcaccagga

SEQ ID NO: 2545813 - RNA, 19 nt, Homo sapiens
  misc_RNA (1)...(19): siRNA sense strand
augaugagucgguggcaga

SEQ ID NO: 2545814 - RNA, 19 nt, Homo sapiens
  misc_RNA (1)...(19): siRNA sense strand
aggagacauaugaggccaa

SEQ ID NO: 2545815 - RNA, 19 nt, Homo sapiens
  misc_RNA (1)...(19): siRNA sense strand
cauaugaggccaaaaggaa

SEQ ID NO: 2545816 - RNA, 19 nt, Homo sapiens
  misc_RNA (1)...(19): siRNA sense strand
ucaaagagaaagaagcgga

SEQ ID NO: 2545817 - RNA, 19 nt, Homo sapiens
  misc_RNA (1)...(19): siRNA sense strand
cguuagcacaguuggcuuu

SEQ ID NO: 2545818 - RNA, 19 nt, Homo sapiens
  misc_RNA (1)...(19): siRNA sense strand
gagcuaacaaaguucaaaa

SEQ ID NO: 2545819 - RNA, 19 nt, Homo sapiens
  misc_RNA (1)...(19): siRNA sense strand
acgagaaguuugaccgucu

SEQ ID NO: 2545820 - RNA, 19 nt, Homo sapiens
  misc_RNA (1)...(19): siRNA sense strand
agaaacugcaccaggacga

SEQ ID NO: 2545821 - RNA, 19 nt, Homo sapiens
  misc_RNA (1)...(19): siRNA sense strand
agagacaaagagaagaaaa

SEQ ID NO: 2545822 - RNA, 19 nt, Homo sapiens
  misc_RNA (1)...(19): siRNA sense strand
aggacgagaagaagaaacu

SEQ ID NO: 2545823 - RNA, 19 nt, Homo sapiens
  misc_RNA (1)...(19): siRNA sense strand
gggucaacauggaggaucu

SEQ ID NO: 2545824 - RNA, 19 nt, Homo sapiens
  misc_RNA (1)...(19): siRNA sense strand
augcacaauucgaggccua

SEQ ID NO: 2545825 - RNA, 19 nt, Homo sapiens
  misc_RNA (1)...(19): siRNA sense strand
gagaugggcuucaaggaca

SEQ ID NO: 2545826 - RNA, 19 nt, Homo sapiens
  misc_RNA (1)...(19): siRNA sense strand
gagaaagagcugcacgaga

SEQ ID NO: 2545827 - RNA, 19 nt, Homo sapiens
  misc_RNA (1)...(19): siRNA sense strand
cugaagagagacaaagaga

SEQ ID NO: 2545828 - RNA, 19 nt, Homo sapiens
  misc_RNA (1)...(19): siRNA sense strand
gagagacagguuugggcaa

SEQ ID NO: 2545829 - RNA, 19 nt, Homo sapiens
  misc_RNA (1)...(19): siRNA sense strand
gaggacagcuacaagccua

SEQ ID NO: 2545830 - RNA, 19 nt, Homo sapiens
  misc_RNA (1)...(19): siRNA sense strand
agucgguggcagagaucaa

SEQ ID NO: 2545831 - RNA, 19 nt, Homo sapiens
  misc_RNA (1)...(19): siRNA sense strand
agaaacuggaggauaagaa

SEQ ID NO: 2545832 - RNA, 19 nt, Homo sapiens
  misc_RNA (1)...(19): siRNA sense strand
acaccgacccugacagcaa

SEQ ID NO: 2545833 - RNA, 19 nt, Homo sapiens
  misc_RNA (1)...(19): siRNA sense strand
agaagaagaaacuggagga

SEQ ID NO: 2545834 - RNA, 19 nt, Homo sapiens
  misc_RNA (1)...(19): siRNA sense strand
uggcagagaucaauggaac

SEQ ID NO: 2545835 - RNA, 19 nt, Homo sapiens
  misc_RNA (1)...(19): siRNA sense strand
ugaauaaguccgucagcca

SEQ ID NO: 2545836 - RNA, 19 nt, Homo sapiens
  misc_RNA (1)...(19): siRNA sense strand
cagagaaagagcugcacga

SEQ ID NO: 2545837 - RNA, 19 nt, Homo sapiens
  misc_RNA (1)...(19): siRNA sense strand
cuggaggauaagaagaaau

SEQ ID NO: 2545838 - RNA, 19 nt, Homo sapiens
  misc_RNA (1)...(19): siRNA sense strand
uggaauucaucgaugcaca

SEQ ID NO: 2545839 - RNA, 19 nt, Homo sapiens
  misc_RNA (1)...(19): siRNA sense strand
ucgaagagugagcuaacaa

SEQ ID NO: 2545840 - RNA, 19 nt, Homo sapiens
  misc_RNA (1)...(19): siRNA sense strand
cgauauagcucgccaggug

SEQ ID NO: 2545841 - RNA, 19 nt, Homo sapiens
  misc_RNA (1)...(19): siRNA sense strand
ugaagaaacugcaccagga

SEQ ID NO: 2545842 - RNA, 19 nt, Homo sapiens
  misc_RNA (1)...(19): siRNA sense strand
augaugagucgguggcaga

SEQ ID NO: 2545843 - RNA, 19 nt, Homo sapiens
  misc_RNA (1)...(19): siRNA sense strand
aggagacauaugaggccaa

SEQ ID NO: 2545844 - RNA, 19 nt, Homo sapiens
  misc_RNA (1)...(19): siRNA sense strand
cauaugaggccaaaaggaa

SEQ ID NO: 2545845 - RNA, 19 nt, Homo sapiens
  misc_RNA (1)...(19): siRNA sense strand
ucaaagagaaagaagcgga

SEQ ID NO: 2545846 - RNA, 19 nt, Homo sapiens
  misc_RNA (1)...(19): siRNA sense strand
cguuagcacaguuggcuuu

SEQ ID NO: 2545847 - RNA, 19 nt, Homo sapiens
  misc_RNA (1)...(19): siRNA sense strand
gagcuaacaaaguucaaaa

SEQ ID NO: 2545848 - RNA, 19 nt, Homo sapiens
  misc_RNA (1)...(19): siRNA sense strand
acgagaaguuugaccgucu

SEQ ID NO: 2545849 - RNA, 19 nt, Homo sapiens
  misc_RNA (1)...(19): siRNA sense strand
agaaacugcaccaggacga

SEQ ID NO: 2545850 - RNA, 19 nt, Homo sapiens
  misc_RNA (1)...(19): siRNA sense strand
agagacaaagagaagaaaa

SEQ ID NO: 2545851 - RNA, 19 nt, Homo sapiens
  misc_RNA (1)...(19): siRNA sense strand
aggacgagaagaagaaacu

SEQ ID NO: 2545852 - RNA, 19 nt, Homo sapiens
  misc_RNA (1)...(19): siRNA sense strand
gcuucgagacagagugaua

SEQ ID NO: 2545853 - RNA, 19 nt, Homo sapiens
  misc_RNA (1)...(19): siRNA sense strand
cgucaauggaguacacaaa

SEQ ID NO: 2545854 - RNA, 19 nt, Homo sapiens
  misc_RNA (1)...(19): siRNA sense strand
augcacacaucaagagaaa

SEQ ID NO: 2545855 - RNA, 19 nt, Homo sapiens
  misc_RNA (1)...(19): siRNA sense strand
ucaaaagcccggagagaua

SEQ ID NO: 2545856 - RNA, 19 nt, Homo sapiens
  misc_RNA (1)...(19): siRNA sense strand
gggaaacagacgaugacaa

SEQ ID NO: 2545857 - RNA, 19 nt, Homo sapiens
  misc_RNA (1)...(19): siRNA sense strand
acggacaacacaagagaaa

SEQ ID NO: 2545858 - RNA, 19 nt, Homo sapiens
  misc_RNA (1)...(19): siRNA sense strand
aagaagaugaagaggaaca

SEQ ID NO: 2545859 - RNA, 19 nt, Homo sapiens
  misc_RNA (1)...(19): siRNA sense strand
ggaugaacaagaagaugaa

SEQ ID NO: 2545860 - RNA, 19 nt, Homo sapiens
  misc_RNA (1)...(19): siRNA sense strand
acaguaaagacaagaagaa

SEQ ID NO: 2545861 - RNA, 19 nt, Homo sapiens
  misc_RNA (1)...(19): siRNA sense strand
caguaaagacaagaagaaa

SEQ ID NO: 2545862 - RNA, 19 nt, Homo sapiens
  misc_RNA (1)...(19): siRNA sense strand
gcaauaacgucaauggagu

SEQ ID NO: 2545863 - RNA, 19 nt, Homo sapiens
  misc_RNA (1)...(19): siRNA sense strand
ggauuaaccuggcugguga

SEQ ID NO: 2545864 - RNA, 19 nt, Homo sapiens
  misc_RNA (1)...(19): siRNA sense strand
cccuaaauacaguggaauu

SEQ ID NO: 2545865 - RNA, 19 nt, Homo sapiens
  misc_RNA (1)...(19): siRNA sense strand
guaaagaagaaggaguuaa

SEQ ID NO: 2545866 - RNA, 19 nt, Homo sapiens
  misc_RNA (1)...(19): siRNA sense strand
cagcaaaugcacacaucaa

SEQ ID NO: 2545867 - RNA, 19 nt, Homo sapiens
  misc_RNA (1)...(19): siRNA sense strand
ccgaagaggaagcggaacu

SEQ ID NO: 2545868 - RNA, 19 nt, Homo sapiens
  misc_RNA (1)...(19): siRNA sense strand
acccagaggagaagggcua

SEQ ID NO: 2545869 - RNA, 19 nt, Homo sapiens
  misc_RNA (1)...(19): siRNA sense strand
caauaacgucaauggagua

SEQ ID NO: 2545870 - RNA, 19 nt, Homo sapiens
  misc_RNA (1)...(19): siRNA sense strand
gguuugugguggcgauaau

SEQ ID NO: 2545871 - RNA, 19 nt, Homo sapiens
  misc_RNA (1)...(19): siRNA sense strand
aagaagaaaaccagagcaa

SEQ ID NO: 2545872 - RNA, 19 nt, Homo sapiens
  misc_RNA (1)...(19): siRNA sense strand
uggucaaaguguagucgaa

SEQ ID NO: 2545873 - RNA, 19 nt, Homo sapiens
  misc_RNA (1)...(19): siRNA sense strand
aaggugaauucuugcuaaa

SEQ ID NO: 2545874 - RNA, 19 nt, Homo sapiens
  misc_RNA (1)...(19): siRNA sense strand
cgagacugccguagaaaga

SEQ ID NO: 2545875 - RNA, 19 nt, Homo sapiens
  misc_RNA (1)...(19): siRNA sense strand
uuagagacccugagcgaau

SEQ ID NO: 2545876 - RNA, 19 nt, Homo sapiens
  misc_RNA (1)...(19): siRNA sense strand
auguaaagaagaaggaguu

SEQ ID NO: 2545877 - RNA, 19 nt, Homo sapiens
  misc_RNA (1)...(19): siRNA sense strand
ccgaaaugauguacuggau

SEQ ID NO: 2545878 - RNA, 19 nt, Homo sapiens
  misc_RNA (1)...(19): siRNA sense strand
cggcuuagcaacagaggca

SEQ ID NO: 2545879 - RNA, 19 nt, Homo sapiens
  misc_RNA (1)...(19): siRNA sense strand
gggaaauucgcauugggaa

SEQ ID NO: 2545880 - RNA, 19 nt, Homo sapiens
  misc_RNA (1)...(19): siRNA sense strand
gcuuacuguuucugaucaa

SEQ ID NO: 2545881 - RNA, 19 nt, Homo sapiens
  misc_RNA (1)...(19): siRNA sense strand
gcuuagcaacagaggcauu

SEQ ID NO: 2545882 - RNA, 19 nt, Homo sapiens
  misc_RNA (1)...(19): siRNA sense strand
auucagaggugcagugagu

SEQ ID NO: 2545883 - RNA, 19 nt, Homo sapiens
  misc_RNA (1)...(19): siRNA sense strand
uggaugaacaagaagauga

SEQ ID NO: 2545884 - RNA, 19 nt, Homo sapiens
  misc_RNA (1)...(19): siRNA sense strand
ggucaaaguguagucgaaa

SEQ ID NO: 2545885 - RNA, 19 nt, Homo sapiens
  misc_RNA (1)...(19): siRNA sense strand
agaagaaggaguuaagagu

SEQ ID NO: 2545886 - RNA, 19 nt, Homo sapiens
  misc_RNA (1)...(19): siRNA sense strand
agacagagugauagaugga

SEQ ID NO: 2545887 - RNA, 19 nt, Homo sapiens
  misc_RNA (1)...(19): siRNA sense strand
gguaauaagacggacaaca

SEQ ID NO: 2545888 - RNA, 19 nt, Homo sapiens
  misc_RNA (1)...(19): siRNA sense strand
acacaaaggcugccggacu

SEQ ID NO: 2545889 - RNA, 19 nt, Homo sapiens
  misc_RNA (1)...(19): siRNA sense strand
cguagaaagaauuaacuca

SEQ ID NO: 2545890 - RNA, 19 nt, Homo sapiens
  misc_RNA (1)...(19): siRNA sense strand
cuaucagcuucgagacaga

SEQ ID NO: 2545891 - RNA, 19 nt, Homo sapiens
  misc_RNA (1)...(19): siRNA sense strand
uggcagcauucgaagaaca

SEQ ID NO: 2545892 - RNA, 19 nt, Homo sapiens
  misc_RNA (1)...(19): siRNA sense strand
ugaaauuauuagagacccu

SEQ ID NO: 2545893 - RNA, 19 nt, Homo sapiens
  misc_RNA (1)...(19): siRNA sense strand
agguuuugucggugggaaa

SEQ ID NO: 2545894 - RNA, 19 nt, Homo sapiens
  misc_RNA (1)...(19): siRNA sense strand
aagauaaaccucagcaguu

SEQ ID NO: 2545895 - RNA, 19 nt, Homo sapiens
  misc_RNA (1)...(19): siRNA sense strand
uguaaagaagaaggaguua

SEQ ID NO: 2545896 - RNA, 19 nt, Homo sapiens
  misc_RNA (1)...(19): siRNA sense strand
gcacccgaggcaagugaaa

SEQ ID NO: 2545897 - RNA, 19 nt, Homo sapiens
  misc_RNA (1)...(19): siRNA sense strand
gucaaaguguagucgaaaa

SEQ ID NO: 2545898 - RNA, 19 nt, Homo sapiens
  misc_RNA (1)...(19): siRNA sense strand
gcacaguuucucaggggaa

SEQ ID NO: 2545899 - RNA, 19 nt, Homo sapiens
  misc_RNA (1)...(19): siRNA sense strand
agacugccguagaaagaau

SEQ ID NO: 2545900 - RNA, 19 nt, Homo sapiens
  misc_RNA (1)...(19): siRNA sense strand
ugucaauacccgaaaugau

SEQ ID NO: 2545901 - RNA, 19 nt, Homo sapiens
  misc_RNA (1)...(19): siRNA sense strand
augaacaagaagaugaaga

SEQ ID NO: 2545902 - RNA, 19 nt, Homo sapiens
  misc_RNA (1)...(19): siRNA sense strand
aagaugaagaggaacaaaa

SEQ ID NO: 2545903 - RNA, 19 nt, Homo sapiens
  misc_RNA (1)...(19): siRNA sense strand
aaacagcggcuuagcaaca

SEQ ID NO: 2545904 - RNA, 19 nt, Homo sapiens
  misc_RNA (1)...(19): siRNA sense strand
acagauggauccuggggaa

SEQ ID NO: 2545905 - RNA, 19 nt, Homo sapiens
  misc_RNA (1)...(19): siRNA sense strand
gucccuaaauacaguggaa

SEQ ID NO: 2545906 - RNA, 19 nt, Homo sapiens
  misc_RNA (1)...(19): siRNA sense strand
uauuagagacccugagcga

SEQ ID NO: 2545907 - RNA, 19 nt, Homo sapiens
  misc_RNA (1)...(19): siRNA sense strand
aagaggaagcggaacucaa

SEQ ID NO: 2545908 - RNA, 19 nt, Homo sapiens
  misc_RNA (1)...(19): siRNA sense strand
gugcaacagaccagaacca

SEQ ID NO: 2545909 - RNA, 19 nt, Homo sapiens
  misc_RNA (1)...(19): siRNA sense strand
agccaugucucaagcagaa

SEQ ID NO: 2545910 - RNA, 19 nt, Homo sapiens
  misc_RNA (1)...(19): siRNA sense strand
gcgagacuuccgagaugaa

SEQ ID NO: 2545911 - RNA, 19 nt, Homo sapiens
  misc_RNA (1)...(19): siRNA sense strand
auagcaggcuggaugggaa

SEQ ID NO: 2545912 - RNA, 19 nt, Homo sapiens
  misc_RNA (1)...(19): siRNA sense strand
gaaaauggggagaaaggau

SEQ ID NO: 2545913 - RNA, 19 nt, Homo sapiens
  misc_RNA (1)...(19): siRNA sense strand
aagucuuggugguggcaga

SEQ ID NO: 2545914 - RNA, 19 nt, Homo sapiens
  misc_RNA (1)...(19): siRNA sense strand
uggaaagcacugcaaguau

SEQ ID NO: 2545915 - RNA, 19 nt, Homo sapiens
  misc_RNA (1)...(19): siRNA sense strand
gcuucgagacagagugaua

SEQ ID NO: 2545916 - RNA, 19 nt, Homo sapiens
  misc_RNA (1)...(19): siRNA sense strand
cgucaauggaguacacaaa

SEQ ID NO: 2545917 - RNA, 19 nt, Homo sapiens
  misc_RNA (1)...(19): siRNA sense strand
augcacacaucaagagaaa

SEQ ID NO: 2545918 - RNA, 19 nt, Homo sapiens
  misc_RNA (1)...(19): siRNA sense strand
ucaaaagcccggagagaua

SEQ ID NO: 2545919 - RNA, 19 nt, Homo sapiens
  misc_RNA (1)...(19): siRNA sense strand
gggaaacagacgaugacaa

SEQ ID NO: 2545920 - RNA, 19 nt, Homo sapiens
  misc_RNA (1)...(19): siRNA sense strand
acggacaacacaagagaaa

SEQ ID NO: 2545921 - RNA, 19 nt, Homo sapiens
  misc_RNA (1)...(19): siRNA sense strand
aagaagaugaagaggaaca

SEQ ID NO: 2545922 - RNA, 19 nt, Homo sapiens
  misc_RNA (1)...(19): siRNA sense strand
ggaugaacaagaagaugaa

SEQ ID NO: 2545923 - RNA, 19 nt, Homo sapiens
  misc_RNA (1)...(19): siRNA sense strand
acaguaaagacaagaagaa

SEQ ID NO: 2545924 - RNA, 19 nt, Homo sapiens
  misc_RNA (1)...(19): siRNA sense strand
caguaaagacaagaagaaa

SEQ ID NO: 2545925 - RNA, 19 nt, Homo sapiens
  misc_RNA (1)...(19): siRNA sense strand
gcaauaacgucaauggagu

SEQ ID NO: 2545926 - RNA, 19 nt, Homo sapiens
  misc_RNA (1)...(19): siRNA sense strand
ggauuaaccuggcugguga

SEQ ID NO: 2545927 - RNA, 19 nt, Homo sapiens
  misc_RNA (1)...(19): siRNA sense strand
cccuaaauacaguggaauu

SEQ ID NO: 2545928 - RNA, 19 nt, Homo sapiens
  misc_RNA (1)...(19): siRNA sense strand
guaaagaagaaggaguuaa

SEQ ID NO: 2545929 - RNA, 19 nt, Homo sapiens
  misc_RNA (1)...(19): siRNA sense strand
cagcaaaugcacacaucaa

SEQ ID NO: 2545930 - RNA, 19 nt, Homo sapiens
  misc_RNA (1)...(19): siRNA sense strand
ccgaagaggaagcggaacu

SEQ ID NO: 2545931 - RNA, 19 nt, Homo sapiens
  misc_RNA (1)...(19): siRNA sense strand
acccagaggagaagggcua

SEQ ID NO: 2545932 - RNA, 19 nt, Homo sapiens
  misc_RNA (1)...(19): siRNA sense strand
caauaacgucaauggagua

SEQ ID NO: 2545933 - RNA, 19 nt, Homo sapiens
  misc_RNA (1)...(19): siRNA sense strand
gguuugugguggcgauaau

SEQ ID NO: 2545934 - RNA, 19 nt, Homo sapiens
  misc_RNA (1)...(19): siRNA sense strand
aagaagaaaaccagagcaa

SEQ ID NO: 2545935 - RNA, 19 nt, Homo sapiens
  misc_RNA (1)...(19): siRNA sense strand
uggucaaaguguagucgaa

SEQ ID NO: 2545936 - RNA, 19 nt, Homo sapiens
  misc_RNA (1)...(19): siRNA sense strand
aaggugaauucuugcuaaa

SEQ ID NO: 2545937 - RNA, 19 nt, Homo sapiens
  misc_RNA (1)...(19): siRNA sense strand
cgagacugccguagaaaga

SEQ ID NO: 2545938 - RNA, 19 nt, Homo sapiens
  misc_RNA (1)...(19): siRNA sense strand
uuagagacccugagcgaau

SEQ ID NO: 2545939 - RNA, 19 nt, Homo sapiens
  misc_RNA (1)...(19): siRNA sense strand
auguaaagaagaaggaguu

SEQ ID NO: 2545940 - RNA, 19 nt, Homo sapiens
  misc_RNA (1)...(19): siRNA sense strand
ccgaaaugauguacuggau

SEQ ID NO: 2545941 - RNA, 19 nt, Homo sapiens
  misc_RNA (1)...(19): siRNA sense strand
cggcuuagcaacagaggca

SEQ ID NO: 2545942 - RNA, 19 nt, Homo sapiens
  misc_RNA (1)...(19): siRNA sense strand
gggaaauucgcauugggaa

SEQ ID NO: 2545943 - RNA, 19 nt, Homo sapiens
  misc_RNA (1)...(19): siRNA sense strand
gcuuacuguuucugaucaa

SEQ ID NO: 2545944 - RNA, 19 nt, Homo sapiens
  misc_RNA (1)...(19): siRNA sense strand
gcuuagcaacagaggcauu

SEQ ID NO: 2545945 - RNA, 19 nt, Homo sapiens
  misc_RNA (1)...(19): siRNA sense strand
auucagaggugcagugagu

SEQ ID NO: 2545946 - RNA, 19 nt, Homo sapiens
  misc_RNA (1)...(19): siRNA sense strand
uggaugaacaagaagauga

SEQ ID NO: 2545947 - RNA, 19 nt, Homo sapiens
  misc_RNA (1)...(19): siRNA sense strand
ggucaaaguguagucgaaa

SEQ ID NO: 2545948 - RNA, 19 nt, Homo sapiens
  misc_RNA (1)...(19): siRNA sense strand
agaagaaggaguuaagagu

SEQ ID NO: 2545949 - RNA, 19 nt, Homo sapiens
  misc_RNA (1)...(19): siRNA sense strand
agacagagugauagaugga

SEQ ID NO: 2545950 - RNA, 19 nt, Homo sapiens
  misc_RNA (1)...(19): siRNA sense strand
gguaauaagacggacaaca

SEQ ID NO: 2545951 - RNA, 19 nt, Homo sapiens
  misc_RNA (1)...(19): siRNA sense strand
acacaaaggcugccggacu

SEQ ID NO: 2545952 - RNA, 19 nt, Homo sapiens
  misc_RNA (1)...(19): siRNA sense strand
cguagaaagaauuaacuca

SEQ ID NO: 2545953 - RNA, 19 nt, Homo sapiens
  misc_RNA (1)...(19): siRNA sense strand
cuaucagcuucgagacaga

SEQ ID NO: 2545954 - RNA, 19 nt, Homo sapiens
  misc_RNA (1)...(19): siRNA sense strand
uggcagcauucgaagaaca

SEQ ID NO: 2545955 - RNA, 19 nt, Homo sapiens
  misc_RNA (1)...(19): siRNA sense strand
ugaaauuauuagagacccu

SEQ ID NO: 2545956 - RNA, 19 nt, Homo sapiens
  misc_RNA (1)...(19): siRNA sense strand
agguuuugucggugggaaa

SEQ ID NO: 2545957 - RNA, 19 nt, Homo sapiens
  misc_RNA (1)...(19): siRNA sense strand
aagauaaaccucagcaguu

SEQ ID NO: 2545958 - RNA, 19 nt, Homo sapiens
  misc_RNA (1)...(19): siRNA sense strand
uguaaagaagaaggaguua

SEQ ID NO: 2545959 - RNA, 19 nt, Homo sapiens
  misc_RNA (1)...(19): siRNA sense strand
gcacccgaggcaagugaaa

SEQ ID NO: 2545960 - RNA, 19 nt, Homo sapiens
  misc_RNA (1)...(19): siRNA sense strand
gucaaaguguagucgaaaa

SEQ ID NO: 2545961 - RNA, 19 nt, Homo sapiens
  misc_RNA (1)...(19): siRNA sense strand
gcacaguuucucaggggaa

SEQ ID NO: 2545962 - RNA, 19 nt, Homo sapiens
  misc_RNA (1)...(19): siRNA sense strand
agacugccguagaaagaau

SEQ ID NO: 2545963 - RNA, 19 nt, Homo sapiens
  misc_RNA (1)...(19): siRNA sense strand
ugucaauacccgaaaugau

SEQ ID NO: 2545964 - RNA, 19 nt, Homo sapiens
  misc_RNA (1)...(19): siRNA sense strand
augaacaagaagaugaaga

SEQ ID NO: 2545965 - RNA, 19 nt, Homo sapiens
  misc_RNA (1)...(19): siRNA sense strand
aagaugaagaggaacaaaa

SEQ ID NO: 2545966 - RNA, 19 nt, Homo sapiens
  misc_RNA (1)...(19): siRNA sense strand
aaacagcggcuuagcaaca

SEQ ID NO: 2545967 - RNA, 19 nt, Homo sapiens
  misc_RNA (1)...(19): siRNA sense strand
acagauggauccuggggaa

SEQ ID NO: 2545968 - RNA, 19 nt, Homo sapiens
  misc_RNA (1)...(19): siRNA sense strand
gucccuaaauacaguggaa

SEQ ID NO: 2545969 - RNA, 19 nt, Homo sapiens
  misc_RNA (1)...(19): siRNA sense strand
uauuagagacccugagcga

SEQ ID NO: 2545970 - RNA, 19 nt, Homo sapiens
  misc_RNA (1)...(19): siRNA sense strand
aagaggaagcggaacucaa

SEQ ID NO: 2545971 - RNA, 19 nt, Homo sapiens
  misc_RNA (1)...(19): siRNA sense strand
gugcaacagaccagaacca

SEQ ID NO: 2545972 - RNA, 19 nt, Homo sapiens
  misc_RNA (1)...(19): siRNA sense strand
agccaugucucaagcagaa

SEQ ID NO: 2545973 - RNA, 19 nt, Homo sapiens
  misc_RNA (1)...(19): siRNA sense strand
gcgagacuuccgagaugaa

SEQ ID NO: 2545974 - RNA, 19 nt, Homo sapiens
  misc_RNA (1)...(19): siRNA sense strand
auagcaggcuggaugggaa

SEQ ID NO: 2545975 - RNA, 19 nt, Homo sapiens
  misc_RNA (1)...(19): siRNA sense strand
gaaaauggggagaaaggau

SEQ ID NO: 2545976 - RNA, 19 nt, Homo sapiens
  misc_RNA (1)...(19): siRNA sense strand
aagucuuggugguggcaga

SEQ ID NO: 2545977 - RNA, 19 nt, Homo sapiens
  misc_RNA (1)...(19): siRNA sense strand
uggaaagcacugcaaguau

SEQ ID NO: 2545978 - RNA, 19 nt, Homo sapiens
  misc_RNA (1)...(19): siRNA sense strand
gcuucgagacagagugaua

SEQ ID NO: 2545979 - RNA, 19 nt, Homo sapiens
  misc_RNA (1)...(19): siRNA sense strand
cgucaauggaguacacaaa

SEQ ID NO: 2545980 - RNA, 19 nt, Homo sapiens
  misc_RNA (1)...(19): siRNA sense strand
augcacacaucaagagaaa

SEQ ID NO: 2545981 - RNA, 19 nt, Homo sapiens
  misc_RNA (1)...(19): siRNA sense strand
ucaaaagcccggagagaua

SEQ ID NO: 2545982 - RNA, 19 nt, Homo sapiens
  misc_RNA (1)...(19): siRNA sense strand
gggaaacagacgaugacaa

SEQ ID NO: 2545983 - RNA, 19 nt, Homo sapiens
  misc_RNA (1)...(19): siRNA sense strand
acggacaacacaagagaaa

SEQ ID NO: 2545984 - RNA, 19 nt, Homo sapiens
  misc_RNA (1)...(19): siRNA sense strand
aagaagaugaagaggaaca

SEQ ID NO: 2545985 - RNA, 19 nt, Homo sapiens
  misc_RNA (1)...(19): siRNA sense strand
ggaugaacaagaagaugaa

SEQ ID NO: 2545986 - RNA, 19 nt, Homo sapiens
  misc_RNA (1)...(19): siRNA sense strand
acaguaaagacaagaagaa

SEQ ID NO: 2545987 - RNA, 19 nt, Homo sapiens
  misc_RNA (1)...(19): siRNA sense strand
caguaaagacaagaagaaa

SEQ ID NO: 2545988 - RNA, 19 nt, Homo sapiens
  misc_RNA (1)...(19): siRNA sense strand
gcaauaacgucaauggagu

SEQ ID NO: 2545989 - RNA, 19 nt, Homo sapiens
  misc_RNA (1)...(19): siRNA sense strand
ggauuaaccuggcugguga

SEQ ID NO: 2545990 - RNA, 19 nt, Homo sapiens
  misc_RNA (1)...(19): siRNA sense strand
cccuaaauacaguggaauu

SEQ ID NO: 2545991 - RNA, 19 nt, Homo sapiens
  misc_RNA (1)...(19): siRNA sense strand
guaaagaagaaggaguuaa

SEQ ID NO: 2545992 - RNA, 19 nt, Homo sapiens
  misc_RNA (1)...(19): siRNA sense strand
cagcaaaugcacacaucaa

SEQ ID NO: 2545993 - RNA, 19 nt, Homo sapiens
  misc_RNA (1)...(19): siRNA sense strand
ccgaagaggaagcggaacu

SEQ ID NO: 2545994 - RNA, 19 nt, Homo sapiens
  misc_RNA (1)...(19): siRNA sense strand
acccagaggagaagggcua

SEQ ID NO: 2545995 - RNA, 19 nt, Homo sapiens
  misc_RNA (1)...(19): siRNA sense strand
caauaacgucaauggagua

SEQ ID NO: 2545996 - RNA, 19 nt, Homo sapiens
  misc_RNA (1)...(19): siRNA sense strand
gguuugugguggcgauaau

SEQ ID NO: 2545997 - RNA, 19 nt, Homo sapiens
  misc_RNA (1)...(19): siRNA sense strand
aagaagaaaaccagagcaa

SEQ ID NO: 2545998 - RNA, 19 nt, Homo sapiens
  misc_RNA (1)...(19): siRNA sense strand
uggucaaaguguagucgaa

SEQ ID NO: 2545999 - RNA, 19 nt, Homo sapiens
  misc_RNA (1)...(19): siRNA sense strand
aaggugaauucuugcuaaa

SEQ ID NO: 2546000 - RNA, 19 nt, Homo sapiens
  misc_RNA (1)...(19): siRNA sense strand
cgagacugccguagaaaga

SEQ ID NO: 2546001 - RNA, 19 nt, Homo sapiens
  misc_RNA (1)...(19): siRNA sense strand
uuagagacccugagcgaau

SEQ ID NO: 2546002 - RNA, 19 nt, Homo sapiens
  misc_RNA (1)...(19): siRNA sense strand
auguaaagaagaaggaguu

SEQ ID NO: 2546003 - RNA, 19 nt, Homo sapiens
  misc_RNA (1)...(19): siRNA sense strand
ccgaaaugauguacuggau

SEQ ID NO: 2546004 - RNA, 19 nt, Homo sapiens
  misc_RNA (1)...(19): siRNA sense strand
cggcuuagcaacagaggca

SEQ ID NO: 2546005 - RNA, 19 nt, Homo sapiens
  misc_RNA (1)...(19): siRNA sense strand
gggaaauucgcauugggaa

SEQ ID NO: 2546006 - RNA, 19 nt, Homo sapiens
  misc_RNA (1)...(19): siRNA sense strand
gcuuacuguuucugaucaa

SEQ ID NO: 2546007 - RNA, 19 nt, Homo sapiens
  misc_RNA (1)...(19): siRNA sense strand
gcuuagcaacagaggcauu

SEQ ID NO: 2546008 - RNA, 19 nt, Homo sapiens
  misc_RNA (1)...(19): siRNA sense strand
auucagaggugcagugagu

SEQ ID NO: 2546009 - RNA, 19 nt, Homo sapiens
  misc_RNA (1)...(19): siRNA sense strand
uggaugaacaagaagauga

SEQ ID NO: 2546010 - RNA, 19 nt, Homo sapiens
  misc_RNA (1)...(19): siRNA sense strand
ggucaaaguguagucgaaa

SEQ ID NO: 2546011 - RNA, 19 nt, Homo sapiens
  misc_RNA (1)...(19): siRNA sense strand
agaagaaggaguuaagagu

SEQ ID NO: 2546012 - RNA, 19 nt, Homo sapiens
  misc_RNA (1)...(19): siRNA sense strand
agacagagugauagaugga

SEQ ID NO: 2546013 - RNA, 19 nt, Homo sapiens
  misc_RNA (1)...(19): siRNA sense strand
gguaauaagacggacaaca

SEQ ID NO: 2546014 - RNA, 19 nt, Homo sapiens
  misc_RNA (1)...(19): siRNA sense strand
acacaaaggcugccggacu

SEQ ID NO: 2546015 - RNA, 19 nt, Homo sapiens
  misc_RNA (1)...(19): siRNA sense strand
cguagaaagaauuaacuca

SEQ ID NO: 2546016 - RNA, 19 nt, Homo sapiens
  misc_RNA (1)...(19): siRNA sense strand
cuaucagcuucgagacaga

SEQ ID NO: 2546017 - RNA, 19 nt, Homo sapiens
  misc_RNA (1)...(19): siRNA sense strand
uggcagcauucgaagaaca

SEQ ID NO: 2546018 - RNA, 19 nt, Homo sapiens
  misc_RNA (1)...(19): siRNA sense strand
ugaaauuauuagagacccu

SEQ ID NO: 2546019 - RNA, 19 nt, Homo sapiens
  misc_RNA (1)...(19): siRNA sense strand
agguuuugucggugggaaa

SEQ ID NO: 2546020 - RNA, 19 nt, Homo sapiens
  misc_RNA (1)...(19): siRNA sense strand
aagauaaaccucagcaguu

SEQ ID NO: 2546021 - RNA, 19 nt, Homo sapiens
  misc_RNA (1)...(19): siRNA sense strand
uguaaagaagaaggaguua

SEQ ID NO: 2546022 - RNA, 19 nt, Homo sapiens
  misc_RNA (1)...(19): siRNA sense strand
gcacccgaggcaagugaaa

SEQ ID NO: 2546023 - RNA, 19 nt, Homo sapiens
  misc_RNA (1)...(19): siRNA sense strand
gucaaaguguagucgaaaa

SEQ ID NO: 2546024 - RNA, 19 nt, Homo sapiens
  misc_RNA (1)...(19): siRNA sense strand
gcacaguuucucaggggaa

SEQ ID NO: 2546025 - RNA, 19 nt, Homo sapiens
  misc_RNA (1)...(19): siRNA sense strand
agacugccguagaaagaau

SEQ ID NO: 2546026 - RNA, 19 nt, Homo sapiens
  misc_RNA (1)...(19): siRNA sense strand
ugucaauacccgaaaugau

SEQ ID NO: 2546027 - RNA, 19 nt, Homo sapiens
  misc_RNA (1)...(19): siRNA sense strand
augaacaagaagaugaaga

SEQ ID NO: 2546028 - RNA, 19 nt, Homo sapiens
  misc_RNA (1)...(19): siRNA sense strand
aagaugaagaggaacaaaa

SEQ ID NO: 2546029 - RNA, 19 nt, Homo sapiens
  misc_RNA (1)...(19): siRNA sense strand
aaacagcggcuuagcaaca

SEQ ID NO: 2546030 - RNA, 19 nt, Homo sapiens
  misc_RNA (1)...(19): siRNA sense strand
acagauggauccuggggaa

SEQ ID NO: 2546031 - RNA, 19 nt, Homo sapiens
  misc_RNA (1)...(19): siRNA sense strand
gucccuaaauacaguggaa

SEQ ID NO: 2546032 - RNA, 19 nt, Homo sapiens
  misc_RNA (1)...(19): siRNA sense strand
uauuagagacccugagcga

SEQ ID NO: 2546033 - RNA, 19 nt, Homo sapiens
  misc_RNA (1)...(19): siRNA sense strand
aagaggaagcggaacucaa

SEQ ID NO: 2546034 - RNA, 19 nt, Homo sapiens
  misc_RNA (1)...(19): siRNA sense strand
gugcaacagaccagaacca

SEQ ID NO: 2546035 - RNA, 19 nt, Homo sapiens
  misc_RNA (1)...(19): siRNA sense strand
agccaugucucaagcagaa

SEQ ID NO: 2546036 - RNA, 19 nt, Homo sapiens
  misc_RNA (1)...(19): siRNA sense strand
gcgagacuuccgagaugaa

SEQ ID NO: 2546037 - RNA, 19 nt, Homo sapiens
  misc_RNA (1)...(19): siRNA sense strand
auagcaggcuggaugggaa

SEQ ID NO: 2546038 - RNA, 19 nt, Homo sapiens
  misc_RNA (1)...(19): siRNA sense strand
gaaaauggggagaaaggau

SEQ ID NO: 2546039 - RNA, 19 nt, Homo sapiens
  misc_RNA (1)...(19): siRNA sense strand
aagucuuggugguggcaga

SEQ ID NO: 2546040 - RNA, 19 nt, Homo sapiens
  misc_RNA (1)...(19): siRNA sense strand
uggaaagcacugcaaguau

SEQ ID NO: 2546041 - RNA, 19 nt, Homo sapiens
  misc_RNA (1)...(19): siRNA sense strand
cggugaagaaggugaucaa

SEQ ID NO: 2546042 - RNA, 19 nt, Homo sapiens
  misc_RNA (1)...(19): siRNA sense strand
ccgucaaggagguguucaa

SEQ ID NO: 2546043 - RNA, 19 nt, Homo sapiens
  misc_RNA (1)...(19): siRNA sense strand
ggguauaugacucggcaca

SEQ ID NO: 2546044 - RNA, 19 nt, Homo sapiens
  misc_RNA (1)...(19): siRNA sense strand
aggagaagcuggagcaggu

SEQ ID NO: 2546045 - RNA, 19 nt, Homo sapiens
  misc_RNA (1)...(19): siRNA sense strand
gagccaagucucagcggau

SEQ ID NO: 2546046 - RNA, 19 nt, Homo sapiens
  misc_RNA (1)...(19): siRNA sense strand
ugaccaugcuuccgggaga

SEQ ID NO: 2546047 - RNA, 19 nt, Homo sapiens
  misc_RNA (1)...(19): siRNA sense strand
ggugagagcuauagugcag

SEQ ID NO: 2546048 - RNA, 19 nt, Homo sapiens
  misc_RNA (1)...(19): siRNA sense strand
gauaugcggcugaggcgua

SEQ ID NO: 2546049 - RNA, 19 nt, Homo sapiens
  misc_RNA (1)...(19): siRNA sense strand
aggccaacaucaugaaacu

SEQ ID NO: 2546050 - RNA, 19 nt, Homo sapiens
  misc_RNA (1)...(19): siRNA sense strand
ccugcagugcugugaggaa

SEQ ID NO: 2546051 - RNA, 19 nt, Homo sapiens
  misc_RNA (1)...(19): siRNA sense strand
caggcagugggcaggaaua

SEQ ID NO: 2546052 - RNA, 19 nt, Homo sapiens
  misc_RNA (1)...(19): siRNA sense strand
cugagugaggugcagaaua

SEQ ID NO: 2546053 - RNA, 19 nt, Homo sapiens
  misc_RNA (1)...(19): siRNA sense strand
aggagaacaaaguggccau

SEQ ID NO: 2546054 - RNA, 19 nt, Homo sapiens
  misc_RNA (1)...(19): siRNA sense strand
gcacaacaaucuagaccug

SEQ ID NO: 2546055 - RNA, 19 nt, Homo sapiens
  misc_RNA (1)...(19): siRNA sense strand
gugcaaggggugugauuga

SEQ ID NO: 2546056 - RNA, 19 nt, Homo sapiens
  misc_RNA (1)...(19): siRNA sense strand
cggugaagaaggugaucaa

SEQ ID NO: 2546057 - RNA, 19 nt, Homo sapiens
  misc_RNA (1)...(19): siRNA sense strand
ccgucaaggagguguucaa

SEQ ID NO: 2546058 - RNA, 19 nt, Homo sapiens
  misc_RNA (1)...(19): siRNA sense strand
ggguauaugacucggcaca

SEQ ID NO: 2546059 - RNA, 19 nt, Homo sapiens
  misc_RNA (1)...(19): siRNA sense strand
aggagaagcuggagcaggu

SEQ ID NO: 2546060 - RNA, 19 nt, Homo sapiens
  misc_RNA (1)...(19): siRNA sense strand
gagccaagucucagcggau

SEQ ID NO: 2546061 - RNA, 19 nt, Homo sapiens
  misc_RNA (1)...(19): siRNA sense strand
ugaccaugcuuccgggaga

SEQ ID NO: 2546062 - RNA, 19 nt, Homo sapiens
  misc_RNA (1)...(19): siRNA sense strand
ggugagagcuauagugcag

SEQ ID NO: 2546063 - RNA, 19 nt, Homo sapiens
  misc_RNA (1)...(19): siRNA sense strand
gauaugcggcugaggcgua

SEQ ID NO: 2546064 - RNA, 19 nt, Homo sapiens
  misc_RNA (1)...(19): siRNA sense strand
aggccaacaucaugaaacu

SEQ ID NO: 2546065 - RNA, 19 nt, Homo sapiens
  misc_RNA (1)...(19): siRNA sense strand
ccugcagugcugugaggaa

SEQ ID NO: 2546066 - RNA, 19 nt, Homo sapiens
  misc_RNA (1)...(19): siRNA sense strand
caggcagugggcaggaaua

SEQ ID NO: 2546067 - RNA, 19 nt, Homo sapiens
  misc_RNA (1)...(19): siRNA sense strand
cugagugaggugcagaaua

SEQ ID NO: 2546068 - RNA, 19 nt, Homo sapiens
  misc_RNA (1)...(19): siRNA sense strand
aggagaacaaaguggccau

SEQ ID NO: 2546069 - RNA, 19 nt, Homo sapiens
  misc_RNA (1)...(19): siRNA sense strand
gcacaacaaucuagaccug

SEQ ID NO: 2546070 - RNA, 19 nt, Homo sapiens
  misc_RNA (1)...(19): siRNA sense strand
gugcaaggggugugauuga

SEQ ID NO: 2546071 - RNA, 19 nt, Homo sapiens
  misc_RNA (1)...(19): siRNA sense strand
cggugaagaaggugaucaa

SEQ ID NO: 2546072 - RNA, 19 nt, Homo sapiens
  misc_RNA (1)...(19): siRNA sense strand
gagccaagucucagcggau

SEQ ID NO: 2546073 - RNA, 19 nt, Homo sapiens
  misc_RNA (1)...(19): siRNA sense strand
ggugagagcuauagugcag

SEQ ID NO: 2546074 - RNA, 19 nt, Homo sapiens
  misc_RNA (1)...(19): siRNA sense strand
aggccaacaucaugaaacu

SEQ ID NO: 2546075 - RNA, 19 nt, Homo sapiens
  misc_RNA (1)...(19): siRNA sense strand
ccugcagugcugugaggaa

SEQ ID NO: 2546076 - RNA, 19 nt, Homo sapiens
  misc_RNA (1)...(19): siRNA sense strand
caggcagugggcaggaaua

SEQ ID NO: 2546077 - RNA, 19 nt, Homo sapiens
  misc_RNA (1)...(19): siRNA sense strand
gugcaaggggugugauuga

SEQ ID NO: 2546078 - RNA, 19 nt, Homo sapiens
  misc_RNA (1)...(19): siRNA sense strand
agacuaauguuaugggaca

SEQ ID NO: 2546079 - RNA, 19 nt, Homo sapiens
  misc_RNA (1)...(19): siRNA sense strand
cagugaaagaagaucuaaa

SEQ ID NO: 2546080 - RNA, 19 nt, Homo sapiens
  misc_RNA (1)...(19): siRNA sense strand
agagaaaguaguagccgaa

SEQ ID NO: 2546081 - RNA, 19 nt, Homo sapiens
  misc_RNA (1)...(19): siRNA sense strand
gagagaaaguaguagccga

SEQ ID NO: 2546082 - RNA, 19 nt, Homo sapiens
  misc_RNA (1)...(19): siRNA sense strand
agccgaagugggagauaua

SEQ ID NO: 2546083 - RNA, 19 nt, Homo sapiens
  misc_RNA (1)...(19): siRNA sense strand
agauggugguuguagggaa

SEQ ID NO: 2546084 - RNA, 19 nt, Homo sapiens
  misc_RNA (1)...(19): siRNA sense strand
guauaaagaaugaggaagc

SEQ ID NO: 2546085 - RNA, 19 nt, Homo sapiens
  misc_RNA (1)...(19): siRNA sense strand
gcgauauugcaaaggcauu

SEQ ID NO: 2546086 - RNA, 19 nt, Homo sapiens
  misc_RNA (1)...(19): siRNA sense strand
acagaacaucagugaaaga

SEQ ID NO: 2546087 - RNA, 19 nt, Homo sapiens
  misc_RNA (1)...(19): siRNA sense strand
acaacaaauagcugaggau

SEQ ID NO: 2546088 - RNA, 19 nt, Homo sapiens
  misc_RNA (1)...(19): siRNA sense strand
agcugaggauccagaacua

SEQ ID NO: 2546089 - RNA, 19 nt, Homo sapiens
  misc_RNA (1)...(19): siRNA sense strand
ccaacaaacaaaggaccaa

SEQ ID NO: 2546090 - RNA, 19 nt, Homo sapiens
  misc_RNA (1)...(19): siRNA sense strand
gguuguagggaauggagca

SEQ ID NO: 2546091 - RNA, 19 nt, Homo sapiens
  misc_RNA (1)...(19): siRNA sense strand
aguaguagccgaaguggga

SEQ ID NO: 2546092 - RNA, 19 nt, Homo sapiens
  misc_RNA (1)...(19): siRNA sense strand
cauucaaguaguaacaaga

SEQ ID NO: 2546093 - RNA, 19 nt, Homo sapiens
  misc_RNA (1)...(19): siRNA sense strand
augcaauuacaaaggccua

SEQ ID NO: 2546094 - RNA, 19 nt, Homo sapiens
  misc_RNA (1)...(19): siRNA sense strand
uggaggaagauauggaagu

SEQ ID NO: 2546095 - RNA, 19 nt, Homo sapiens
  misc_RNA (1)...(19): siRNA sense strand
acgcauucaaguaguaaca

SEQ ID NO: 2546096 - RNA, 19 nt, Homo sapiens
  misc_RNA (1)...(19): siRNA sense strand
agacuaauguuaugggaca

SEQ ID NO: 2546097 - RNA, 19 nt, Homo sapiens
  misc_RNA (1)...(19): siRNA sense strand
cagugaaagaagaucuaaa

SEQ ID NO: 2546098 - RNA, 19 nt, Homo sapiens
  misc_RNA (1)...(19): siRNA sense strand
agagaaaguaguagccgaa

SEQ ID NO: 2546099 - RNA, 19 nt, Homo sapiens
  misc_RNA (1)...(19): siRNA sense strand
gagagaaaguaguagccga

SEQ ID NO: 2546100 - RNA, 19 nt, Homo sapiens
  misc_RNA (1)...(19): siRNA sense strand
agccgaagugggagauaua

SEQ ID NO: 2546101 - RNA, 19 nt, Homo sapiens
  misc_RNA (1)...(19): siRNA sense strand
agauggugguuguagggaa

SEQ ID NO: 2546102 - RNA, 19 nt, Homo sapiens
  misc_RNA (1)...(19): siRNA sense strand
guauaaagaaugaggaagc

SEQ ID NO: 2546103 - RNA, 19 nt, Homo sapiens
  misc_RNA (1)...(19): siRNA sense strand
gcgauauugcaaaggcauu

SEQ ID NO: 2546104 - RNA, 19 nt, Homo sapiens
  misc_RNA (1)...(19): siRNA sense strand
acagaacaucagugaaaga

SEQ ID NO: 2546105 - RNA, 19 nt, Homo sapiens
  misc_RNA (1)...(19): siRNA sense strand
acaacaaauagcugaggau

SEQ ID NO: 2546106 - RNA, 19 nt, Homo sapiens
  misc_RNA (1)...(19): siRNA sense strand
agcugaggauccagaacua

SEQ ID NO: 2546107 - RNA, 19 nt, Homo sapiens
  misc_RNA (1)...(19): siRNA sense strand
ccaacaaacaaaggaccaa

SEQ ID NO: 2546108 - RNA, 19 nt, Homo sapiens
  misc_RNA (1)...(19): siRNA sense strand
gguuguagggaauggagca

SEQ ID NO: 2546109 - RNA, 19 nt, Homo sapiens
  misc_RNA (1)...(19): siRNA sense strand
aguaguagccgaaguggga

SEQ ID NO: 2546110 - RNA, 19 nt, Homo sapiens
  misc_RNA (1)...(19): siRNA sense strand
cauucaaguaguaacaaga

SEQ ID NO: 2546111 - RNA, 19 nt, Homo sapiens
  misc_RNA (1)...(19): siRNA sense strand
augcaauuacaaaggccua

SEQ ID NO: 2546112 - RNA, 19 nt, Homo sapiens
  misc_RNA (1)...(19): siRNA sense strand
uggaggaagauauggaagu

SEQ ID NO: 2546113 - RNA, 19 nt, Homo sapiens
  misc_RNA (1)...(19): siRNA sense strand
acgcauucaaguaguaaca

SEQ ID NO: 2546114 - RNA, 19 nt, Homo sapiens
  misc_RNA (1)...(19): siRNA sense strand
acuaaagggaucugaaaca

SEQ ID NO: 2546115 - RNA, 19 nt, Homo sapiens
  misc_RNA (1)...(19): siRNA sense strand
gucuagaagaagaacucaa

SEQ ID NO: 2546116 - RNA, 19 nt, Homo sapiens
  misc_RNA (1)...(19): siRNA sense strand
cucuggaggaagugcuaaa

SEQ ID NO: 2546117 - RNA, 19 nt, Homo sapiens
  misc_RNA (1)...(19): siRNA sense strand
uggaagaagaggaggccaa

SEQ ID NO: 2546118 - RNA, 19 nt, Homo sapiens
  misc_RNA (1)...(19): siRNA sense strand
cagcaggggaugaggauga

SEQ ID NO: 2546119 - RNA, 19 nt, Homo sapiens
  misc_RNA (1)...(19): siRNA sense strand
cuacauacucuuugccaca

SEQ ID NO: 2546120 - RNA, 19 nt, Homo sapiens
  misc_RNA (1)...(19): siRNA sense strand
gaaagccaguauuggguga

SEQ ID NO: 2546121 - RNA, 19 nt, Homo sapiens
  misc_RNA (1)...(19): siRNA sense strand
cgguggacaaacugaucaa

SEQ ID NO: 2546122 - RNA, 19 nt, Homo sapiens
  misc_RNA (1)...(19): siRNA sense strand
uggaagaagaggaggccaa

SEQ ID NO: 2546123 - RNA, 19 nt, Homo sapiens
  misc_RNA (1)...(19): siRNA sense strand
cagcaggggaugaggauga

SEQ ID NO: 2546124 - RNA, 19 nt, Homo sapiens
  misc_RNA (1)...(19): siRNA sense strand
cuacauacucuuugccaca

SEQ ID NO: 2546125 - RNA, 19 nt, Homo sapiens
  misc_RNA (1)...(19): siRNA sense strand
gaaagccaguauuggguga

SEQ ID NO: 2546126 - RNA, 19 nt, Homo sapiens
  misc_RNA (1)...(19): siRNA sense strand
cgguggacaaacugaucaa

SEQ ID NO: 2546127 - RNA, 19 nt, Homo sapiens
  misc_RNA (1)...(19): siRNA sense strand
uggaagaagaggaggccaa

SEQ ID NO: 2546128 - RNA, 19 nt, Homo sapiens
  misc_RNA (1)...(19): siRNA sense strand
cagcaggggaugaggauga

SEQ ID NO: 2546129 - RNA, 19 nt, Homo sapiens
  misc_RNA (1)...(19): siRNA sense strand
cuacauacucuuugccaca

SEQ ID NO: 2546130 - RNA, 19 nt, Homo sapiens
  misc_RNA (1)...(19): siRNA sense strand
gaaagccaguauuggguga

SEQ ID NO: 2546131 - RNA, 19 nt, Homo sapiens
  misc_RNA (1)...(19): siRNA sense strand
cgguggacaaacugaucaa

SEQ ID NO: 2546132 - RNA, 19 nt, Homo sapiens
  misc_RNA (1)...(19): siRNA sense strand
uggaagaagaggaggccaa

SEQ ID NO: 2546133 - RNA, 19 nt, Homo sapiens
  misc_RNA (1)...(19): siRNA sense strand
gaaagccaguauuggguga

SEQ ID NO: 2546134 - RNA, 19 nt, Homo sapiens
  misc_RNA (1)...(19): siRNA sense strand
cagcaggggaugaggauga

SEQ ID NO: 2546135 - RNA, 19 nt, Homo sapiens
  misc_RNA (1)...(19): siRNA sense strand
cuacauacucuuugccaca

SEQ ID NO: 2546136 - RNA, 19 nt, Homo sapiens
  misc_RNA (1)...(19): siRNA sense strand
gaaagccaguauuggguga

SEQ ID NO: 2546137 - RNA, 19 nt, Homo sapiens
  misc_RNA (1)...(19): siRNA sense strand
cgguggacaaacugaucaa

SEQ ID NO: 2546138 - RNA, 19 nt, Homo sapiens
  misc_RNA (1)...(19): siRNA sense strand
uggaagaagaggaggccaa

SEQ ID NO: 2546139 - RNA, 19 nt, Homo sapiens
  misc_RNA (1)...(19): siRNA sense strand
cagcaggggaugaggauga

SEQ ID NO: 2546140 - RNA, 19 nt, Homo sapiens
  misc_RNA (1)...(19): siRNA sense strand
cuacauacucuuugccaca

SEQ ID NO: 2546141 - RNA, 19 nt, Homo sapiens
  misc_RNA (1)...(19): siRNA sense strand
gaaagccaguauuggguga

SEQ ID NO: 2546142 - RNA, 19 nt, Homo sapiens
  misc_RNA (1)...(19): siRNA sense strand
cgguggacaaacugaucaa

SEQ ID NO: 2546143 - RNA, 19 nt, Homo sapiens
  misc_RNA (1)...(19): siRNA sense strand
aggaagagaaggagaagau

SEQ ID NO: 2546144 - RNA, 19 nt, Homo sapiens
  misc_RNA (1)...(19): siRNA sense strand
aggcaagaguggagcaacu

SEQ ID NO: 2546145 - RNA, 19 nt, Homo sapiens
  misc_RNA (1)...(19): siRNA sense strand
gaacaaagaauuagagcag

SEQ ID NO: 2546146 - RNA, 19 nt, Homo sapiens
  misc_RNA (1)...(19): siRNA sense strand
gaaugaugugcuagagaau

SEQ ID NO: 2546147 - RNA, 19 nt, Homo sapiens
  misc_RNA (1)...(19): siRNA sense strand
agaccaaggaagagaagga

SEQ ID NO: 2546148 - RNA, 19 nt, Homo sapiens
  misc_RNA (1)...(19): siRNA sense strand
uuacagauguuuaagguga

SEQ ID NO: 2546149 - RNA, 19 nt, Homo sapiens
  misc_RNA (1)...(19): siRNA sense strand
aagaauuagagcagaccaa

SEQ ID NO: 2546150 - RNA, 19 nt, Homo sapiens
  misc_RNA (1)...(19): siRNA sense strand
ccugagggccaauggacaa

SEQ ID NO: 2546151 - RNA, 19 nt, Homo sapiens
  misc_RNA (1)...(19): siRNA sense strand
aagaagacugggagacaau

SEQ ID NO: 2546152 - RNA, 19 nt, Homo sapiens
  misc_RNA (1)...(19): siRNA sense strand
ccaaagucacagagguuca

SEQ ID NO: 2546153 - RNA, 19 nt, Homo sapiens
  misc_RNA (1)...(19): siRNA sense strand
aggagaaugcggaguauga

SEQ ID NO: 2546154 - RNA, 19 nt, Homo sapiens
  misc_RNA (1)...(19): siRNA sense strand
cgaggugacuguaggacga

SEQ ID NO: 2546155 - RNA, 19 nt, Homo sapiens
  misc_RNA (1)...(19): siRNA sense strand
gagaaaaggaccugaagca

SEQ ID NO: 2546156 - RNA, 19 nt, Homo sapiens
  misc_RNA (1)...(19): siRNA sense strand
acaaagaauuagagcagac

SEQ ID NO: 2546157 - RNA, 19 nt, Homo sapiens
  misc_RNA (1)...(19): siRNA sense strand
aggagaagaugcaagcaca

SEQ ID NO: 2546158 - RNA, 19 nt, Homo sapiens
  misc_RNA (1)...(19): siRNA sense strand
ucauucaagccaagaacaa

SEQ ID NO: 2546159 - RNA, 19 nt, Homo sapiens
  misc_RNA (1)...(19): siRNA sense strand
ugaagaagacugggagaca

SEQ ID NO: 2546160 - RNA, 19 nt, Homo sapiens
  misc_RNA (1)...(19): siRNA sense strand
aggaagaggaacagcaucu

SEQ ID NO: 2546161 - RNA, 19 nt, Homo sapiens
  misc_RNA (1)...(19): siRNA sense strand
aagccaagaacaaagaauu

SEQ ID NO: 2546162 - RNA, 19 nt, Homo sapiens
  misc_RNA (1)...(19): siRNA sense strand
ucuucaggguuuggagaua

SEQ ID NO: 2546163 - RNA, 19 nt, Homo sapiens
  misc_RNA (1)...(19): siRNA sense strand
aagcaaucauucaagccaa

SEQ ID NO: 2546164 - RNA, 19 nt, Homo sapiens
  misc_RNA (1)...(19): siRNA sense strand
cuaaaugguguuuggcuga

SEQ ID NO: 2546165 - RNA, 19 nt, Homo sapiens
  misc_RNA (1)...(19): siRNA sense strand
agcaggaacuucaggacuu

SEQ ID NO: 2546166 - RNA, 19 nt, Homo sapiens
  misc_RNA (1)...(19): siRNA sense strand
gcagaauccugagggccaa

SEQ ID NO: 2546167 - RNA, 19 nt, Homo sapiens
  misc_RNA (1)...(19): siRNA sense strand
caguacacccucugacaau

SEQ ID NO: 2546168 - RNA, 19 nt, Homo sapiens
  misc_RNA (1)...(19): siRNA sense strand
cucaaagaaaguugugcaa

SEQ ID NO: 2546169 - RNA, 19 nt, Homo sapiens
  misc_RNA (1)...(19): siRNA sense strand
agagaagcuuacagauguu

SEQ ID NO: 2546170 - RNA, 19 nt, Homo sapiens
  misc_RNA (1)...(19): siRNA sense strand
auggacaacaagagucuaa

SEQ ID NO: 2546171 - RNA, 19 nt, Homo sapiens
  misc_RNA (1)...(19): siRNA sense strand
gccucaaacucuucagcau

SEQ ID NO: 2546172 - RNA, 19 nt, Homo sapiens
  misc_RNA (1)...(19): siRNA sense strand
uggagauagcccaaggaga

SEQ ID NO: 2546173 - RNA, 19 nt, Homo sapiens
  misc_RNA (1)...(19): siRNA sense strand
aagagaaggagaagaugca

SEQ ID NO: 2546174 - RNA, 19 nt, Homo sapiens
  misc_RNA (1)...(19): siRNA sense strand
agaacaaagaauuagagca

SEQ ID NO: 2546175 - RNA, 19 nt, Homo sapiens
  misc_RNA (1)...(19): siRNA sense strand
acugaagaagacugggaga

SEQ ID NO: 2546176 - RNA, 19 nt, Homo sapiens
  misc_RNA (1)...(19): siRNA sense strand
aggaagagaaggagaagau

SEQ ID NO: 2546177 - RNA, 19 nt, Homo sapiens
  misc_RNA (1)...(19): siRNA sense strand
aggcaagaguggagcaacu

SEQ ID NO: 2546178 - RNA, 19 nt, Homo sapiens
  misc_RNA (1)...(19): siRNA sense strand
gaacaaagaauuagagcag

SEQ ID NO: 2546179 - RNA, 19 nt, Homo sapiens
  misc_RNA (1)...(19): siRNA sense strand
gaaugaugugcuagagaau

SEQ ID NO: 2546180 - RNA, 19 nt, Homo sapiens
  misc_RNA (1)...(19): siRNA sense strand
agaccaaggaagagaagga

SEQ ID NO: 2546181 - RNA, 19 nt, Homo sapiens
  misc_RNA (1)...(19): siRNA sense strand
uuacagauguuuaagguga

SEQ ID NO: 2546182 - RNA, 19 nt, Homo sapiens
  misc_RNA (1)...(19): siRNA sense strand
aagaauuagagcagaccaa

SEQ ID NO: 2546183 - RNA, 19 nt, Homo sapiens
  misc_RNA (1)...(19): siRNA sense strand
ccugagggccaauggacaa

SEQ ID NO: 2546184 - RNA, 19 nt, Homo sapiens
  misc_RNA (1)...(19): siRNA sense strand
aagaagacugggagacaau

SEQ ID NO: 2546185 - RNA, 19 nt, Homo sapiens
  misc_RNA (1)...(19): siRNA sense strand
ccaaagucacagagguuca

SEQ ID NO: 2546186 - RNA, 19 nt, Homo sapiens
  misc_RNA (1)...(19): siRNA sense strand
aggagaaugcggaguauga

SEQ ID NO: 2546187 - RNA, 19 nt, Homo sapiens
  misc_RNA (1)...(19): siRNA sense strand
cgaggugacuguaggacga

SEQ ID NO: 2546188 - RNA, 19 nt, Homo sapiens
  misc_RNA (1)...(19): siRNA sense strand
gagaaaaggaccugaagca

SEQ ID NO: 2546189 - RNA, 19 nt, Homo sapiens
  misc_RNA (1)...(19): siRNA sense strand
acaaagaauuagagcagac

SEQ ID NO: 2546190 - RNA, 19 nt, Homo sapiens
  misc_RNA (1)...(19): siRNA sense strand
aggagaagaugcaagcaca

SEQ ID NO: 2546191 - RNA, 19 nt, Homo sapiens
  misc_RNA (1)...(19): siRNA sense strand
ucauucaagccaagaacaa

SEQ ID NO: 2546192 - RNA, 19 nt, Homo sapiens
  misc_RNA (1)...(19): siRNA sense strand
ugaagaagacugggagaca

SEQ ID NO: 2546193 - RNA, 19 nt, Homo sapiens
  misc_RNA (1)...(19): siRNA sense strand
aggaagaggaacagcaucu

SEQ ID NO: 2546194 - RNA, 19 nt, Homo sapiens
  misc_RNA (1)...(19): siRNA sense strand
aagccaagaacaaagaauu

SEQ ID NO: 2546195 - RNA, 19 nt, Homo sapiens
  misc_RNA (1)...(19): siRNA sense strand
ucuucaggguuuggagaua

SEQ ID NO: 2546196 - RNA, 19 nt, Homo sapiens
  misc_RNA (1)...(19): siRNA sense strand
aagcaaucauucaagccaa

SEQ ID NO: 2546197 - RNA, 19 nt, Homo sapiens
  misc_RNA (1)...(19): siRNA sense strand
cuaaaugguguuuggcuga

SEQ ID NO: 2546198 - RNA, 19 nt, Homo sapiens
  misc_RNA (1)...(19): siRNA sense strand
agcaggaacuucaggacuu

SEQ ID NO: 2546199 - RNA, 19 nt, Homo sapiens
  misc_RNA (1)...(19): siRNA sense strand
gcagaauccugagggccaa

SEQ ID NO: 2546200 - RNA, 19 nt, Homo sapiens
  misc_RNA (1)...(19): siRNA sense strand
caguacacccucugacaau

SEQ ID NO: 2546201 - RNA, 19 nt, Homo sapiens
  misc_RNA (1)...(19): siRNA sense strand
cucaaagaaaguugugcaa

SEQ ID NO: 2546202 - RNA, 19 nt, Homo sapiens
  misc_RNA (1)...(19): siRNA sense strand
agagaagcuuacagauguu

SEQ ID NO: 2546203 - RNA, 19 nt, Homo sapiens
  misc_RNA (1)...(19): siRNA sense strand
auggacaacaagagucuaa

SEQ ID NO: 2546204 - RNA, 19 nt, Homo sapiens
  misc_RNA (1)...(19): siRNA sense strand
gccucaaacucuucagcau

SEQ ID NO: 2546205 - RNA, 19 nt, Homo sapiens
  misc_RNA (1)...(19): siRNA sense strand
uggagauagcccaaggaga

SEQ ID NO: 2546206 - RNA, 19 nt, Homo sapiens
  misc_RNA (1)...(19): siRNA sense strand
aagagaaggagaagaugca

SEQ ID NO: 2546207 - RNA, 19 nt, Homo sapiens
  misc_RNA (1)...(19): siRNA sense strand
agaacaaagaauuagagca

SEQ ID NO: 2546208 - RNA, 19 nt, Homo sapiens
  misc_RNA (1)...(19): siRNA sense strand
acugaagaagacugggaga

SEQ ID NO: 2546209 - RNA, 19 nt, Homo sapiens
  misc_RNA (1)...(19): siRNA sense strand
agucggagaacgcggagaa

SEQ ID NO: 2546210 - RNA, 19 nt, Homo sapiens
  misc_RNA (1)...(19): siRNA sense strand
cggagaagagggaagagga

SEQ ID NO: 2546211 - RNA, 19 nt, Homo sapiens
  misc_RNA (1)...(19): siRNA sense strand
aggagaaaguggaggucug

SEQ ID NO: 2546212 - RNA, 19 nt, Homo sapiens
  misc_RNA (1)...(19): siRNA sense strand
cggcagaagcgguccucau

SEQ ID NO: 2546213 - RNA, 19 nt, Homo sapiens
  misc_RNA (1)...(19): siRNA sense strand
gccaaauggaggcggcaga

SEQ ID NO: 2546214 - RNA, 19 nt, Homo sapiens
  misc_RNA (1)...(19): siRNA sense strand
gaggaagguaaaagcgauu

SEQ ID NO: 2546215 - RNA, 19 nt, Homo sapiens
  misc_RNA (1)...(19): siRNA sense strand
gguaaaagcgauuuggacu

SEQ ID NO: 2546216 - RNA, 19 nt, Homo sapiens
  misc_RNA (1)...(19): siRNA sense strand
ggaaagugcaccuccgcga

SEQ ID NO: 2546217 - RNA, 19 nt, Homo sapiens
  misc_RNA (1)...(19): siRNA sense strand
gcgaggagaaaguggaggu

SEQ ID NO: 2546218 - RNA, 19 nt, Homo sapiens
  misc_RNA (1)...(19): siRNA sense strand
cuguaaacccagagucaaa

SEQ ID NO: 2546219 - RNA, 19 nt, Homo sapiens
  misc_RNA (1)...(19): siRNA sense strand
uugcagaagauauggguaa

SEQ ID NO: 2546220 - RNA, 19 nt, Homo sapiens
  misc_RNA (1)...(19): siRNA sense strand
cugaauaugagaugcguaa

SEQ ID NO: 2546221 - RNA, 19 nt, Homo sapiens
  misc_RNA (1)...(19): siRNA sense strand
ugacuaacuuacugagaca

SEQ ID NO: 2546222 - RNA, 19 nt, Homo sapiens
  misc_RNA (1)...(19): siRNA sense strand
cugaaauugaugcaagaaa

SEQ ID NO: 2546223 - RNA, 19 nt, Homo sapiens
  misc_RNA (1)...(19): siRNA sense strand
guauauaaugaucgagaca

SEQ ID NO: 2546224 - RNA, 19 nt, Homo sapiens
  misc_RNA (1)...(19): siRNA sense strand
uggaaauacaucagagcuu

SEQ ID NO: 2546225 - RNA, 19 nt, Homo sapiens
  misc_RNA (1)...(19): siRNA sense strand
cauuaacacaugagaccaa

SEQ ID NO: 2546226 - RNA, 19 nt, Homo sapiens
  misc_RNA (1)...(19): siRNA sense strand
uuggauauguguaggaaaa

SEQ ID NO: 2546227 - RNA, 19 nt, Homo sapiens
  misc_RNA (1)...(19): siRNA sense strand
ggaagauacuguagaggac

SEQ ID NO: 2546228 - RNA, 19 nt, Homo sapiens
  misc_RNA (1)...(19): siRNA sense strand
aggacaagcaggaagugaa

SEQ ID NO: 2546229 - RNA, 19 nt, Homo sapiens
  misc_RNA (1)...(19): siRNA sense strand
cggagauaauaauguguga

SEQ ID NO: 2546230 - RNA, 19 nt, Homo sapiens
  misc_RNA (1)...(19): siRNA sense strand
aagauacuguagaggacaa

SEQ ID NO: 2546231 - RNA, 19 nt, Homo sapiens
  misc_RNA (1)...(19): siRNA sense strand
auauaaugaucgagacagu

SEQ ID NO: 2546232 - RNA, 19 nt, Homo sapiens
  misc_RNA (1)...(19): siRNA sense strand
gcgacaucccagagagcuu

SEQ ID NO: 2546233 - RNA, 19 nt, Homo sapiens
  misc_RNA (1)...(19): siRNA sense strand
agcuauacauggugccuua

SEQ ID NO: 2546234 - RNA, 19 nt, Homo sapiens
  misc_RNA (1)...(19): siRNA sense strand
cugaaucucuugugcggaa

SEQ ID NO: 2546235 - RNA, 19 nt, Homo sapiens
  misc_RNA (1)...(19): siRNA sense strand
gagcagaagcuuuugaaau

SEQ ID NO: 2546236 - RNA, 19 nt, Homo sapiens
  misc_RNA (1)...(19): siRNA sense strand
aaauaaaggcacaccugaa

SEQ ID NO: 2546237 - RNA, 19 nt, Homo sapiens
  misc_RNA (1)...(19): siRNA sense strand
aggaagugaauguugggaa

SEQ ID NO: 2546238 - RNA, 19 nt, Homo sapiens
  misc_RNA (1)...(19): siRNA sense strand
gagacagucaagauagcaa

SEQ ID NO: 2546239 - RNA, 19 nt, Homo sapiens
  misc_RNA (1)...(19): siRNA sense strand
caagauagcaagaagguag

SEQ ID NO: 2546240 - RNA, 19 nt, Homo sapiens
  misc_RNA (1)...(19): siRNA sense strand
aggauuugcagcugaguuu

SEQ ID NO: 2546241 - RNA, 19 nt, Homo sapiens
  misc_RNA (1)...(19): siRNA sense strand
aggcacaccugaagaaacu

SEQ ID NO: 2546242 - RNA, 19 nt, Homo sapiens
  misc_RNA (1)...(19): siRNA sense strand
uaguagaaguaaugugcca

SEQ ID NO: 2546243 - RNA, 19 nt, Homo sapiens
  misc_RNA (1)...(19): siRNA sense strand
gugauuuccugcaggcuau

SEQ ID NO: 2546244 - RNA, 19 nt, Homo sapiens
  misc_RNA (1)...(19): siRNA sense strand
aggacaugguuaugaaaau

SEQ ID NO: 2546245 - RNA, 19 nt, Homo sapiens
  misc_RNA (1)...(19): siRNA sense strand
aauacagggaacagaauau

SEQ ID NO: 2546246 - RNA, 19 nt, Homo sapiens
  misc_RNA (1)...(19): siRNA sense strand
agagauucgaaguaguuua

SEQ ID NO: 2546247 - RNA, 19 nt, Homo sapiens
  misc_RNA (1)...(19): siRNA sense strand
acaaaccaccggagauaau

SEQ ID NO: 2546248 - RNA, 19 nt, Homo sapiens
  misc_RNA (1)...(19): siRNA sense strand
ugguggauguguacgaauu

SEQ ID NO: 2546249 - RNA, 19 nt, Homo sapiens
  misc_RNA (1)...(19): siRNA sense strand
cuguagaggacaagcagga

SEQ ID NO: 2546250 - RNA, 19 nt, Homo sapiens
  misc_RNA (1)...(19): siRNA sense strand
auguguacgaauugacuaa

SEQ ID NO: 2546251 - RNA, 19 nt, Homo sapiens
  misc_RNA (1)...(19): siRNA sense strand
cuggauuggcaaauggaau

SEQ ID NO: 2546252 - RNA, 19 nt, Homo sapiens
  misc_RNA (1)...(19): siRNA sense strand
gggccaaggcucaugaacu

SEQ ID NO: 2546253 - RNA, 19 nt, Homo sapiens
  misc_RNA (1)...(19): siRNA sense strand
aguagagacaacugaugaa

SEQ ID NO: 2546254 - RNA, 19 nt, Homo sapiens
  misc_RNA (1)...(19): siRNA sense strand
cugaagaaacuggcagcua

SEQ ID NO: 2546255 - RNA, 19 nt, Homo sapiens
  misc_RNA (1)...(19): siRNA sense strand
ugcugaaguuaauggguga

SEQ ID NO: 2546256 - RNA, 19 nt, Homo sapiens
  misc_RNA (1)...(19): siRNA sense strand
uggucauccugauaauaaa

SEQ ID NO: 2546257 - RNA, 19 nt, Homo sapiens
  misc_RNA (1)...(19): siRNA sense strand
ccauucacauccugguaau

SEQ ID NO: 2546258 - RNA, 19 nt, Homo sapiens
  misc_RNA (1)...(19): siRNA sense strand
cuuauguggauuuggaaca

SEQ ID NO: 2546259 - RNA, 19 nt, Homo sapiens
  misc_RNA (1)...(19): siRNA sense strand
uccugauaauaaagagcaa

SEQ ID NO: 2546260 - RNA, 19 nt, Homo sapiens
  misc_RNA (1)...(19): siRNA sense strand
ucacuguguuacuggauga

SEQ ID NO: 2546261 - RNA, 19 nt, Homo sapiens
  misc_RNA (1)...(19): siRNA sense strand
augaaguugcagaagauau

SEQ ID NO: 2546262 - RNA, 19 nt, Homo sapiens
  misc_RNA (1)...(19): siRNA sense strand
agaugcaaauaaaggcaca

SEQ ID NO: 2546263 - RNA, 19 nt, Homo sapiens
  misc_RNA (1)...(19): siRNA sense strand
guugcaaaucuguguugaa

SEQ ID NO: 2546264 - RNA, 19 nt, Homo sapiens
  misc_RNA (1)...(19): siRNA sense strand
auagcaagaagguagaaau

SEQ ID NO: 2546265 - RNA, 19 nt, Homo sapiens
  misc_RNA (1)...(19): siRNA sense strand
ccaauacagggaacagaau

SEQ ID NO: 2546266 - RNA, 19 nt, Homo sapiens
  misc_RNA (1)...(19): siRNA sense strand
caggaggagcagggcauua

SEQ ID NO: 2546267 - RNA, 19 nt, Homo sapiens
  misc_RNA (1)...(19): siRNA sense strand
ggcuggacaguuugugaaa

SEQ ID NO: 2546268 - RNA, 19 nt, Homo sapiens
  misc_RNA (1)...(19): siRNA sense strand
guuggaucuuacugaauau

SEQ ID NO: 2546269 - RNA, 19 nt, Homo sapiens
  misc_RNA (1)...(19): siRNA sense strand
uaauaaugugugaugccua

SEQ ID NO: 2546270 - RNA, 19 nt, Homo sapiens
  misc_RNA (1)...(19): siRNA sense strand
acaagggaguauauggguu

SEQ ID NO: 2546271 - RNA, 19 nt, Homo sapiens
  misc_RNA (1)...(19): siRNA sense strand
cggaaucuacagugggcca

SEQ ID NO: 2546272 - RNA, 19 nt, Homo sapiens
  misc_RNA (1)...(19): siRNA sense strand
uaucaaaggaucuucccaa

SEQ ID NO: 2546273 - RNA, 19 nt, Homo sapiens
  misc_RNA (1)...(19): siRNA sense strand
gggaaaccucucauugcua

SEQ ID NO: 2546274 - RNA, 19 nt, Homo sapiens
  misc_RNA (1)...(19): siRNA sense strand
cuguaaacccagagucaaa

SEQ ID NO: 2546275 - RNA, 19 nt, Homo sapiens
  misc_RNA (1)...(19): siRNA sense strand
uugcagaagauauggguaa

SEQ ID NO: 2546276 - RNA, 19 nt, Homo sapiens
  misc_RNA (1)...(19): siRNA sense strand
cugaauaugagaugcguaa

SEQ ID NO: 2546277 - RNA, 19 nt, Homo sapiens
  misc_RNA (1)...(19): siRNA sense strand
ugacuaacuuacugagaca

SEQ ID NO: 2546278 - RNA, 19 nt, Homo sapiens
  misc_RNA (1)...(19): siRNA sense strand
cugaaauugaugcaagaaa

SEQ ID NO: 2546279 - RNA, 19 nt, Homo sapiens
  misc_RNA (1)...(19): siRNA sense strand
guauauaaugaucgagaca

SEQ ID NO: 2546280 - RNA, 19 nt, Homo sapiens
  misc_RNA (1)...(19): siRNA sense strand
uggaaauacaucagagcuu

SEQ ID NO: 2546281 - RNA, 19 nt, Homo sapiens
  misc_RNA (1)...(19): siRNA sense strand
cauuaacacaugagaccaa

SEQ ID NO: 2546282 - RNA, 19 nt, Homo sapiens
  misc_RNA (1)...(19): siRNA sense strand
uuggauauguguaggaaaa

SEQ ID NO: 2546283 - RNA, 19 nt, Homo sapiens
  misc_RNA (1)...(19): siRNA sense strand
ggaagauacuguagaggac

SEQ ID NO: 2546284 - RNA, 19 nt, Homo sapiens
  misc_RNA (1)...(19): siRNA sense strand
aggacaagcaggaagugaa

SEQ ID NO: 2546285 - RNA, 19 nt, Homo sapiens
  misc_RNA (1)...(19): siRNA sense strand
cggagauaauaauguguga

SEQ ID NO: 2546286 - RNA, 19 nt, Homo sapiens
  misc_RNA (1)...(19): siRNA sense strand
aagauacuguagaggacaa

SEQ ID NO: 2546287 - RNA, 19 nt, Homo sapiens
  misc_RNA (1)...(19): siRNA sense strand
auauaaugaucgagacagu

SEQ ID NO: 2546288 - RNA, 19 nt, Homo sapiens
  misc_RNA (1)...(19): siRNA sense strand
gcgacaucccagagagcuu

SEQ ID NO: 2546289 - RNA, 19 nt, Homo sapiens
  misc_RNA (1)...(19): siRNA sense strand
agcuauacauggugccuua

SEQ ID NO: 2546290 - RNA, 19 nt, Homo sapiens
  misc_RNA (1)...(19): siRNA sense strand
cugaaucucuugugcggaa

SEQ ID NO: 2546291 - RNA, 19 nt, Homo sapiens
  misc_RNA (1)...(19): siRNA sense strand
gagcagaagcuuuugaaau

SEQ ID NO: 2546292 - RNA, 19 nt, Homo sapiens
  misc_RNA (1)...(19): siRNA sense strand
aaauaaaggcacaccugaa

SEQ ID NO: 2546293 - RNA, 19 nt, Homo sapiens
  misc_RNA (1)...(19): siRNA sense strand
aggaagugaauguugggaa

SEQ ID NO: 2546294 - RNA, 19 nt, Homo sapiens
  misc_RNA (1)...(19): siRNA sense strand
gagacagucaagauagcaa

SEQ ID NO: 2546295 - RNA, 19 nt, Homo sapiens
  misc_RNA (1)...(19): siRNA sense strand
caagauagcaagaagguag

SEQ ID NO: 2546296 - RNA, 19 nt, Homo sapiens
  misc_RNA (1)...(19): siRNA sense strand
aggauuugcagcugaguuu

SEQ ID NO: 2546297 - RNA, 19 nt, Homo sapiens
  misc_RNA (1)...(19): siRNA sense strand
aggcacaccugaagaaacu

SEQ ID NO: 2546298 - RNA, 19 nt, Homo sapiens
  misc_RNA (1)...(19): siRNA sense strand
uaguagaaguaaugugcca

SEQ ID NO: 2546299 - RNA, 19 nt, Homo sapiens
  misc_RNA (1)...(19): siRNA sense strand
gugauuuccugcaggcuau

SEQ ID NO: 2546300 - RNA, 19 nt, Homo sapiens
  misc_RNA (1)...(19): siRNA sense strand
aggacaugguuaugaaaau

SEQ ID NO: 2546301 - RNA, 19 nt, Homo sapiens
  misc_RNA (1)...(19): siRNA sense strand
aauacagggaacagaauau

SEQ ID NO: 2546302 - RNA, 19 nt, Homo sapiens
  misc_RNA (1)...(19): siRNA sense strand
agagauucgaaguaguuua

SEQ ID NO: 2546303 - RNA, 19 nt, Homo sapiens
  misc_RNA (1)...(19): siRNA sense strand
acaaaccaccggagauaau

SEQ ID NO: 2546304 - RNA, 19 nt, Homo sapiens
  misc_RNA (1)...(19): siRNA sense strand
ugguggauguguacgaauu

SEQ ID NO: 2546305 - RNA, 19 nt, Homo sapiens
  misc_RNA (1)...(19): siRNA sense strand
cuguagaggacaagcagga

SEQ ID NO: 2546306 - RNA, 19 nt, Homo sapiens
  misc_RNA (1)...(19): siRNA sense strand
auguguacgaauugacuaa

SEQ ID NO: 2546307 - RNA, 19 nt, Homo sapiens
  misc_RNA (1)...(19): siRNA sense strand
cuggauuggcaaauggaau

SEQ ID NO: 2546308 - RNA, 19 nt, Homo sapiens
  misc_RNA (1)...(19): siRNA sense strand
gggccaaggcucaugaacu

SEQ ID NO: 2546309 - RNA, 19 nt, Homo sapiens
  misc_RNA (1)...(19): siRNA sense strand
aguagagacaacugaugaa

SEQ ID NO: 2546310 - RNA, 19 nt, Homo sapiens
  misc_RNA (1)...(19): siRNA sense strand
cugaagaaacuggcagcua

SEQ ID NO: 2546311 - RNA, 19 nt, Homo sapiens
  misc_RNA (1)...(19): siRNA sense strand
ugcugaaguuaauggguga

SEQ ID NO: 2546312 - RNA, 19 nt, Homo sapiens
  misc_RNA (1)...(19): siRNA sense strand
uggucauccugauaauaaa

SEQ ID NO: 2546313 - RNA, 19 nt, Homo sapiens
  misc_RNA (1)...(19): siRNA sense strand
ccauucacauccugguaau

SEQ ID NO: 2546314 - RNA, 19 nt, Homo sapiens
  misc_RNA (1)...(19): siRNA sense strand
cuuauguggauuuggaaca

SEQ ID NO: 2546315 - RNA, 19 nt, Homo sapiens
  misc_RNA (1)...(19): siRNA sense strand
uccugauaauaaagagcaa

SEQ ID NO: 2546316 - RNA, 19 nt, Homo sapiens
  misc_RNA (1)...(19): siRNA sense strand
ucacuguguuacuggauga

SEQ ID NO: 2546317 - RNA, 19 nt, Homo sapiens
  misc_RNA (1)...(19): siRNA sense strand
augaaguugcagaagauau

SEQ ID NO: 2546318 - RNA, 19 nt, Homo sapiens
  misc_RNA (1)...(19): siRNA sense strand
agaugcaaauaaaggcaca

SEQ ID NO: 2546319 - RNA, 19 nt, Homo sapiens
  misc_RNA (1)...(19): siRNA sense strand
guugcaaaucuguguugaa

SEQ ID NO: 2546320 - RNA, 19 nt, Homo sapiens
  misc_RNA (1)...(19): siRNA sense strand
auagcaagaagguagaaau

SEQ ID NO: 2546321 - RNA, 19 nt, Homo sapiens
  misc_RNA (1)...(19): siRNA sense strand
ccaauacagggaacagaau

SEQ ID NO: 2546322 - RNA, 19 nt, Homo sapiens
  misc_RNA (1)...(19): siRNA sense strand
caggaggagcagggcauua

SEQ ID NO: 2546323 - RNA, 19 nt, Homo sapiens
  misc_RNA (1)...(19): siRNA sense strand
ggcuggacaguuugugaaa

SEQ ID NO: 2546324 - RNA, 19 nt, Homo sapiens
  misc_RNA (1)...(19): siRNA sense strand
guuggaucuuacugaauau

SEQ ID NO: 2546325 - RNA, 19 nt, Homo sapiens
  misc_RNA (1)...(19): siRNA sense strand
uaauaaugugugaugccua

SEQ ID NO: 2546326 - RNA, 19 nt, Homo sapiens
  misc_RNA (1)...(19): siRNA sense strand
acaagggaguauauggguu

SEQ ID NO: 2546327 - RNA, 19 nt, Homo sapiens
  misc_RNA (1)...(19): siRNA sense strand
cggaaucuacagugggcca

SEQ ID NO: 2546328 - RNA, 19 nt, Homo sapiens
  misc_RNA (1)...(19): siRNA sense strand
uaucaaaggaucuucccaa

SEQ ID NO: 2546329 - RNA, 19 nt, Homo sapiens
  misc_RNA (1)...(19): siRNA sense strand
gggaaaccucucauugcua

SEQ ID NO: 2546330 - RNA, 19 nt, Homo sapiens
  misc_RNA (1)...(19): siRNA sense strand
uggcaaaugauguggauaa

SEQ ID NO: 2546331 - RNA, 19 nt, Homo sapiens
  misc_RNA (1)...(19): siRNA sense strand
uguugaaauucgacagaaa

SEQ ID NO: 2546332 - RNA, 19 nt, Homo sapiens
  misc_RNA (1)...(19): siRNA sense strand
gcauggagguuguggccua

SEQ ID NO: 2546333 - RNA, 19 nt, Homo sapiens
  misc_RNA (1)...(19): siRNA sense strand
agagggaguuggagagcaa

SEQ ID NO: 2546334 - RNA, 19 nt, Homo sapiens
  misc_RNA (1)...(19): siRNA sense strand
guguauacgugcaguggaa

SEQ ID NO: 2546335 - RNA, 19 nt, Homo sapiens
  misc_RNA (1)...(19): siRNA sense strand
agaagaagcuagaacgaca

SEQ ID NO: 2546336 - RNA, 19 nt, Homo sapiens
  misc_RNA (1)...(19): siRNA sense strand
ugaacaugacagagauaaa

SEQ ID NO: 2546337 - RNA, 19 nt, Homo sapiens
  misc_RNA (1)...(19): siRNA sense strand
ggaaauaaaagaagcagaa

SEQ ID NO: 2546338 - RNA, 19 nt, Homo sapiens
  misc_RNA (1)...(19): siRNA sense strand
ccagugaauguaagaguaa

SEQ ID NO: 2546339 - RNA, 19 nt, Homo sapiens
  misc_RNA (1)...(19): siRNA sense strand
ggaaggaguacgagaucuu

SEQ ID NO: 2546340 - RNA, 19 nt, Homo sapiens
  misc_RNA (1)...(19): siRNA sense strand
cuuaagagaaugugcgaga

SEQ ID NO: 2546341 - RNA, 19 nt, Homo sapiens
  misc_RNA (1)...(19): siRNA sense strand
gugcaauggcaacagaaua

SEQ ID NO: 2546342 - RNA, 19 nt, Homo sapiens
  misc_RNA (1)...(19): siRNA sense strand
auaaacaggcguuggaaau

SEQ ID NO: 2546343 - RNA, 19 nt, Homo sapiens
  misc_RNA (1)...(19): siRNA sense strand
ugauguggauaaagagcua

SEQ ID NO: 2546344 - RNA, 19 nt, Homo sapiens
  misc_RNA (1)...(19): siRNA sense strand
augcagaacaacuguauaa

SEQ ID NO: 2546345 - RNA, 19 nt, Homo sapiens
  misc_RNA (1)...(19): siRNA sense strand
cugcagaaggaguauauaa

SEQ ID NO: 2546346 - RNA, 19 nt, Homo sapiens
  misc_RNA (1)...(19): siRNA sense strand
cgguggaggugaagcccaa

SEQ ID NO: 2546347 - RNA, 19 nt, Homo sapiens
  misc_RNA (1)...(19): siRNA sense strand
ugaguugggauuugagaaa

SEQ ID NO: 2546348 - RNA, 19 nt, Homo sapiens
  misc_RNA (1)...(19): siRNA sense strand
ggcaaaugauguggauaaa

SEQ ID NO: 2546349 - RNA, 19 nt, Homo sapiens
  misc_RNA (1)...(19): siRNA sense strand
gggaagugaucgaggacac

SEQ ID NO: 2546350 - RNA, 19 nt, Homo sapiens
  misc_RNA (1)...(19): siRNA sense strand
ggauuugggcagugaggau

SEQ ID NO: 2546351 - RNA, 19 nt, Homo sapiens
  misc_RNA (1)...(19): siRNA sense strand
ugaguaaagagcaggagaa

SEQ ID NO: 2546352 - RNA, 19 nt, Homo sapiens
  misc_RNA (1)...(19): siRNA sense strand
ggacagagugacuuggaga

SEQ ID NO: 2546353 - RNA, 19 nt, Homo sapiens
  misc_RNA (1)...(19): siRNA sense strand
ggagcgaguucuaggacca

SEQ ID NO: 2546354 - RNA, 19 nt, Homo sapiens
  misc_RNA (1)...(19): siRNA sense strand
ggagaagaagcuagaacga

SEQ ID NO: 2546355 - RNA, 19 nt, Homo sapiens
  misc_RNA (1)...(19): siRNA sense strand
uuggagaagugcagaugaa

SEQ ID NO: 2546356 - RNA, 19 nt, Homo sapiens
  misc_RNA (1)...(19): siRNA sense strand
agagaaugugcgagacaau

SEQ ID NO: 2546357 - RNA, 19 nt, Homo sapiens
  misc_RNA (1)...(19): siRNA sense strand
cugaagcguuccuuagaaa

SEQ ID NO: 2546358 - RNA, 19 nt, Homo sapiens
  misc_RNA (1)...(19): siRNA sense strand
ucagcaaggacaaagguaa

SEQ ID NO: 2546359 - RNA, 19 nt, Homo sapiens
  misc_RNA (1)...(19): siRNA sense strand
acaugaugaacaagagcaa

SEQ ID NO: 2546360 - RNA, 19 nt, Homo sapiens
  misc_RNA (1)...(19): siRNA sense strand
cauugaagcaguaugagaa

SEQ ID NO: 2546361 - RNA, 19 nt, Homo sapiens
  misc_RNA (1)...(19): siRNA sense strand
uuuagagauucgagaaaca

SEQ ID NO: 2546362 - RNA, 19 nt, Homo sapiens
  misc_RNA (1)...(19): siRNA sense strand
acaaaagggcaauggaaau

SEQ ID NO: 2546363 - RNA, 19 nt, Homo sapiens
  misc_RNA (1)...(19): siRNA sense strand
gagcaaacuucagaggcua

SEQ ID NO: 2546364 - RNA, 19 nt, Homo sapiens
  misc_RNA (1)...(19): siRNA sense strand
augaugaacaagagcaaau

SEQ ID NO: 2546365 - RNA, 19 nt, Homo sapiens
  misc_RNA (1)...(19): siRNA sense strand
ccuuaaugaucuaguggca

SEQ ID NO: 2546366 - RNA, 19 nt, Homo sapiens
  misc_RNA (1)...(19): siRNA sense strand
guaugauaaagcagaagaa

SEQ ID NO: 2546367 - RNA, 19 nt, Homo sapiens
  misc_RNA (1)...(19): siRNA sense strand
aaucaauaccucacuguaa

SEQ ID NO: 2546368 - RNA, 19 nt, Homo sapiens
  misc_RNA (1)...(19): siRNA sense strand
ugucaauguuagucacaau

SEQ ID NO: 2546369 - RNA, 19 nt, Homo sapiens
  misc_RNA (1)...(19): siRNA sense strand
ggcuacaggcucaggguau

SEQ ID NO: 2546370 - RNA, 19 nt, Homo sapiens
  misc_RNA (1)...(19): siRNA sense strand
ggugauguucugugggaca

SEQ ID NO: 2546371 - RNA, 19 nt, Homo sapiens
  misc_RNA (1)...(19): siRNA sense strand
gggacauacaugaugaaca

SEQ ID NO: 2546372 - RNA, 19 nt, Homo sapiens
  misc_RNA (1)...(19): siRNA sense strand
cauuugaacaugacagaga

SEQ ID NO: 2546373 - RNA, 19 nt, Homo sapiens
  misc_RNA (1)...(19): siRNA sense strand
ucuuuagagauucgagaaa

SEQ ID NO: 2546374 - RNA, 19 nt, Homo sapiens
  misc_RNA (1)...(19): siRNA sense strand
uauaaacaggcguuggaaa

SEQ ID NO: 2546375 - RNA, 19 nt, Homo sapiens
  misc_RNA (1)...(19): siRNA sense strand
aauagagaugacugggaua

SEQ ID NO: 2546376 - RNA, 19 nt, Homo sapiens
  misc_RNA (1)...(19): siRNA sense strand
ugugcgagacaaugggaua

SEQ ID NO: 2546377 - RNA, 19 nt, Homo sapiens
  misc_RNA (1)...(19): siRNA sense strand
aaacagugagauuggagua

SEQ ID NO: 2546378 - RNA, 19 nt, Homo sapiens
  misc_RNA (1)...(19): siRNA sense strand
augaauuggcuguugaaau

SEQ ID NO: 2546379 - RNA, 19 nt, Homo sapiens
  misc_RNA (1)...(19): siRNA sense strand
gaauuauacaaaagggcaa

SEQ ID NO: 2546380 - RNA, 19 nt, Homo sapiens
  misc_RNA (1)...(19): siRNA sense strand
cuuaaggacuauucaccua

SEQ ID NO: 2546381 - RNA, 19 nt, Homo sapiens
  misc_RNA (1)...(19): siRNA sense strand
cuugggaaacagugagauu

SEQ ID NO: 2546382 - RNA, 19 nt, Homo sapiens
  misc_RNA (1)...(19): siRNA sense strand
caacuuuguaccagaaaca

SEQ ID NO: 2546383 - RNA, 19 nt, Homo sapiens
  misc_RNA (1)...(19): siRNA sense strand
auuggaagacugugaagaa

SEQ ID NO: 2546384 - RNA, 19 nt, Homo sapiens
  misc_RNA (1)...(19): siRNA sense strand
ccagcaaagccaagaucau

SEQ ID NO: 2546385 - RNA, 19 nt, Homo sapiens
  misc_RNA (1)...(19): siRNA sense strand
gauucgagaaacagcuuua

SEQ ID NO: 2546386 - RNA, 19 nt, Homo sapiens
  misc_RNA (1)...(19): siRNA sense strand
gcaaauguuaauagagaug

SEQ ID NO: 2546387 - RNA, 19 nt, Homo sapiens
  misc_RNA (1)...(19): siRNA sense strand
ucaccuaaacuuaagagaa

SEQ ID NO: 2546388 - RNA, 19 nt, Homo sapiens
  misc_RNA (1)...(19): siRNA sense strand
acuuggagacuaaggauuu

SEQ ID NO: 2546389 - RNA, 19 nt, Homo sapiens
  misc_RNA (1)...(19): siRNA sense strand
acaguaugauaaagcagaa

SEQ ID NO: 2546390 - RNA, 19 nt, Homo sapiens
  misc_RNA (1)...(19): siRNA sense strand
gcuggaacccaaugugaau

SEQ ID NO: 2546391 - RNA, 19 nt, Homo sapiens
  misc_RNA (1)...(19): siRNA sense strand
ggauucaauuacaacagaa

SEQ ID NO: 2546392 - RNA, 19 nt, Homo sapiens
  misc_RNA (1)...(19): siRNA sense strand
caucugcaggcuugggaaa

SEQ ID NO: 2546393 - RNA, 19 nt, Homo sapiens
  misc_RNA (1)...(19): siRNA sense strand
gcgaaggcgaggacaacau

SEQ ID NO: 2546394 - RNA, 19 nt, Homo sapiens
  misc_RNA (1)...(19): siRNA sense strand
gggcuuuacaguuagaaga

SEQ ID NO: 2546395 - RNA, 19 nt, Homo sapiens
  misc_RNA (1)...(19): siRNA sense strand
uggcauauacggugaagca

SEQ ID NO: 2546396 - RNA, 19 nt, Homo sapiens
  misc_RNA (1)...(19): siRNA sense strand
cuaugaaggaggagauuuu

SEQ ID NO: 2546397 - RNA, 19 nt, Homo sapiens
  misc_RNA (1)...(19): siRNA sense strand
ugcagaaggaguauauaaa

SEQ ID NO: 2546398 - RNA, 19 nt, Homo sapiens
  misc_RNA (1)...(19): siRNA sense strand
uggcagugcugaagggccu

SEQ ID NO: 2546399 - RNA, 19 nt, Homo sapiens
  misc_RNA (1)...(19): siRNA sense strand
acacauuucucaugggcuu

SEQ ID NO: 2546400 - RNA, 19 nt, Homo sapiens
  misc_RNA (1)...(19): siRNA sense strand
uggaggagccagggcgaaa

SEQ ID NO: 2546401 - RNA, 19 nt, Homo sapiens
  misc_RNA (1)...(19): siRNA sense strand
gugccuacaguguggaaga

SEQ ID NO: 2546402 - RNA, 19 nt, Homo sapiens
  misc_RNA (1)...(19): siRNA sense strand
ccuuaauggugaugauggu

SEQ ID NO: 2546403 - RNA, 19 nt, Homo sapiens
  misc_RNA (1)...(19): siRNA sense strand
ugugggaacucuaugguca

SEQ ID NO: 2546404 - RNA, 19 nt, Homo sapiens
  misc_RNA (1)...(19): siRNA sense strand
agaugaagacggccaccaa

SEQ ID NO: 2546405 - RNA, 19 nt, Homo sapiens
  misc_RNA (1)...(19): siRNA sense strand
uggugaugaugguggugau

SEQ ID NO: 2546406 - RNA, 19 nt, Homo sapiens
  misc_RNA (1)...(19): siRNA sense strand
acuuaaagacagagaaaca

SEQ ID NO: 2546407 - RNA, 19 nt, Homo sapiens
  misc_RNA (1)...(19): siRNA sense strand
aagaaaagaagaagggaaa

SEQ ID NO: 2546408 - RNA, 19 nt, Homo sapiens
  misc_RNA (1)...(19): siRNA sense strand
ugacauuaaggaugggaaa

SEQ ID NO: 2546409 - RNA, 19 nt, Homo sapiens
  misc_RNA (1)...(19): siRNA sense strand
aggaauugugggugcauua

SEQ ID NO: 2546410 - RNA, 19 nt, Homo sapiens
  misc_RNA (1)...(19): siRNA sense strand
caaugaagaagaagcaaaa

SEQ ID NO: 2546411 - RNA, 19 nt, Homo sapiens
  misc_RNA (1)...(19): siRNA sense strand
gggaaacuauugugggaac

SEQ ID NO: 2546412 - RNA, 19 nt, Homo sapiens
  misc_RNA (1)...(19): siRNA sense strand
gaagaagggaaaagcuaaa

SEQ ID NO: 2546413 - RNA, 19 nt, Homo sapiens
  misc_RNA (1)...(19): siRNA sense strand
aaagaaaagaagaagggaa

SEQ ID NO: 2546414 - RNA, 19 nt, Homo sapiens
  misc_RNA (1)...(19): siRNA sense strand
agaucaaauuagagagggu

SEQ ID NO: 2546415 - RNA, 19 nt, Homo sapiens
  misc_RNA (1)...(19): siRNA sense strand
cggaacuguauguggucaa

SEQ ID NO: 2546416 - RNA, 19 nt, Homo sapiens
  misc_RNA (1)...(19): siRNA sense strand
gggccgucgacaaaggaaa

SEQ ID NO: 2546417 - RNA, 19 nt, Homo sapiens
  misc_RNA (1)...(19): siRNA sense strand
augaagaugaugaagaaga

SEQ ID NO: 2546418 - RNA, 19 nt, Homo sapiens
  misc_RNA (1)...(19): siRNA sense strand
ugugggaacaagagcuaua

SEQ ID NO: 2546419 - RNA, 19 nt, Homo sapiens
  misc_RNA (1)...(19): siRNA sense strand
cggcaagaaaugugugacu

SEQ ID NO: 2546420 - RNA, 19 nt, Homo sapiens
  misc_RNA (1)...(19): siRNA sense strand
aagaugaagaugaugaaga

SEQ ID NO: 2546421 - RNA, 19 nt, Homo sapiens
  misc_RNA (1)...(19): siRNA sense strand
agacagagaaacaucaaaa

SEQ ID NO: 2546422 - RNA, 19 nt, Homo sapiens
  misc_RNA (1)...(19): siRNA sense strand
augaagaugaagaugaaga

SEQ ID NO: 2546423 - RNA, 19 nt, Homo sapiens
  misc_RNA (1)...(19): siRNA sense strand
agagauuaaccaaggcaga

SEQ ID NO: 2546424 - RNA, 19 nt, Homo sapiens
  misc_RNA (1)...(19): siRNA sense strand
cauuaauggaagugaugca

SEQ ID NO: 2546425 - RNA, 19 nt, Homo sapiens
  misc_RNA (1)...(19): siRNA sense strand
augaagaugaagaugauga

SEQ ID NO: 2546426 - RNA, 19 nt, Homo sapiens
  misc_RNA (1)...(19): siRNA sense strand
guggaaucucagaggcaca

SEQ ID NO: 2546427 - RNA, 19 nt, Homo sapiens
  misc_RNA (1)...(19): siRNA sense strand
agauuaaccaaggcagaua

SEQ ID NO: 2546428 - RNA, 19 nt, Homo sapiens
  misc_RNA (1)...(19): siRNA sense strand
cagaaaaggagcaaagcca

SEQ ID NO: 2546429 - RNA, 19 nt, Homo sapiens
  misc_RNA (1)...(19): siRNA sense strand
aagaagaagggaaaagcua

SEQ ID NO: 2546430 - RNA, 19 nt, Homo sapiens
  misc_RNA (1)...(19): siRNA sense strand
ugaauaauuuggauccaga

SEQ ID NO: 2546431 - RNA, 19 nt, Homo sapiens
  misc_RNA (1)...(19): siRNA sense strand
agaagaagggaaaagcuaa

SEQ ID NO: 2546432 - RNA, 19 nt, Homo sapiens
  misc_RNA (1)...(19): siRNA sense strand
ggacauguugguugggauc

SEQ ID NO: 2546433 - RNA, 19 nt, Homo sapiens
  misc_RNA (1)...(19): siRNA sense strand
ucaaagaagugcaguggug

SEQ ID NO: 2546434 - RNA, 19 nt, Homo sapiens
  misc_RNA (1)...(19): siRNA sense strand
acgacaggguauccaacua

SEQ ID NO: 2546435 - RNA, 19 nt, Homo sapiens
  misc_RNA (1)...(19): siRNA sense strand
ugaagaugaagaugaagau

SEQ ID NO: 2546436 - RNA, 19 nt, Homo sapiens
  misc_RNA (1)...(19): siRNA sense strand
caggcuuugaucugaauaa

SEQ ID NO: 2546437 - RNA, 19 nt, Homo sapiens
  misc_RNA (1)...(19): siRNA sense strand
gggauuagauggagcagga

SEQ ID NO: 2546438 - RNA, 19 nt, Homo sapiens
  misc_RNA (1)...(19): siRNA sense strand
acagauuacaagugggaga

SEQ ID NO: 2546439 - RNA, 19 nt, Homo sapiens
  misc_RNA (1)...(19): siRNA sense strand
auguagagacggugacgua

SEQ ID NO: 2546440 - RNA, 19 nt, Homo sapiens
  misc_RNA (1)...(19): siRNA sense strand
auaaacaggacauggaaca

SEQ ID NO: 2546441 - RNA, 19 nt, Homo sapiens
  misc_RNA (1)...(19): siRNA sense strand
uugccauguuggaggaaga

SEQ ID NO: 2546442 - RNA, 19 nt, Homo sapiens
  misc_RNA (1)...(19): siRNA sense strand
aggccauacuggagauguu

SEQ ID NO: 2546443 - RNA, 19 nt, Homo sapiens
  misc_RNA (1)...(19): siRNA sense strand
ccauguuggaggaagaaga

SEQ ID NO: 2546444 - RNA, 19 nt, Homo sapiens
  misc_RNA (1)...(19): siRNA sense strand
cuguuuggaacucgggaaa

SEQ ID NO: 2546445 - RNA, 19 nt, Homo sapiens
  misc_RNA (1)...(19): siRNA sense strand
cgaaaauggcagauauuca

SEQ ID NO: 2546446 - RNA, 19 nt, Homo sapiens
  misc_RNA (1)...(19): siRNA sense strand
cagacaaguaucaggccau

SEQ ID NO: 2546447 - RNA, 19 nt, Homo sapiens
  misc_RNA (1)...(19): siRNA sense strand
aaucagaguuaguugccau

SEQ ID NO: 2546448 - RNA, 19 nt, Homo sapiens
  misc_RNA (1)...(19): siRNA sense strand
uugcaaauaaacaggacau

SEQ ID NO: 2546449 - RNA, 19 nt, Homo sapiens
  misc_RNA (1)...(19): siRNA sense strand
guacagauuacaaguggga

SEQ ID NO: 2546450 - RNA, 19 nt, Homo sapiens
  misc_RNA (1)...(19): siRNA sense strand
gauuuaauguagagacggu

SEQ ID NO: 2546451 - RNA, 19 nt, Homo sapiens
  misc_RNA (1)...(19): siRNA sense strand
auuagauggagcaggaaaa

SEQ ID NO: 2546452 - RNA, 19 nt, Homo sapiens
  misc_RNA (1)...(19): siRNA sense strand
auuacaagugggagaaguu

SEQ ID NO: 2546453 - RNA, 19 nt, Homo sapiens
  misc_RNA (1)...(19): siRNA sense strand
agucugggauuuaggagga

SEQ ID NO: 2546454 - RNA, 19 nt, Homo sapiens
  misc_RNA (1)...(19): siRNA sense strand
uggaaugguuaguugaaac

SEQ ID NO: 2546455 - RNA, 19 nt, Homo sapiens
  misc_RNA (1)...(19): siRNA sense strand
acgaaaugaugaaggaaaa

SEQ ID NO: 2546456 - RNA, 19 nt, Homo sapiens
  misc_RNA (1)...(19): siRNA sense strand
aggaaacgaagaagagaua

SEQ ID NO: 2546457 - RNA, 19 nt, Homo sapiens
  misc_RNA (1)...(19): siRNA sense strand
gguaauaagcugcagucaa

SEQ ID NO: 2546458 - RNA, 19 nt, Homo sapiens
  misc_RNA (1)...(19): siRNA sense strand
acauuuagaaggacagaaa

SEQ ID NO: 2546459 - RNA, 19 nt, Homo sapiens
  misc_RNA (1)...(19): siRNA sense strand
ggagaauggaggaagaaca

SEQ ID NO: 2546460 - RNA, 19 nt, Homo sapiens
  misc_RNA (1)...(19): siRNA sense strand
gagugggaguauuggcaaa

SEQ ID NO: 2546461 - RNA, 19 nt, Homo sapiens
  misc_RNA (1)...(19): siRNA sense strand
gagaaaaugaggaagcaaa

SEQ ID NO: 2546462 - RNA, 19 nt, Homo sapiens
  misc_RNA (1)...(19): siRNA sense strand
gaacaagaacaaagaggga

SEQ ID NO: 2546463 - RNA, 19 nt, Homo sapiens
  misc_RNA (1)...(19): siRNA sense strand
ugucugaacaugagaagaa

SEQ ID NO: 2546464 - RNA, 19 nt, Homo sapiens
  misc_RNA (1)...(19): siRNA sense strand
acaagaacaaagagggaga

SEQ ID NO: 2546465 - RNA, 19 nt, Homo sapiens
  misc_RNA (1)...(19): siRNA sense strand
gaagagaacaugagggaag

SEQ ID NO: 2546466 - RNA, 19 nt, Homo sapiens
  misc_RNA (1)...(19): siRNA sense strand
gagaagagaacaugaggga

SEQ ID NO: 2546467 - RNA, 19 nt, Homo sapiens
  misc_RNA (1)...(19): siRNA sense strand
acacaaaguucuaggcaug

SEQ ID NO: 2546468 - RNA, 19 nt, Homo sapiens
  misc_RNA (1)...(19): siRNA sense strand
augagaagaacaagaacaa

SEQ ID NO: 2546469 - RNA, 19 nt, Homo sapiens
  misc_RNA (1)...(19): siRNA sense strand
ugguuaaguuacacacaaa

SEQ ID NO: 2546470 - RNA, 19 nt, Homo sapiens
  misc_RNA (1)...(19): siRNA sense strand
uuauaagcccugagaagua

SEQ ID NO: 2546471 - RNA, 19 nt, Homo sapiens
  misc_RNA (1)...(19): siRNA sense strand
gcuaagugguuccaggcua

SEQ ID NO: 2546472 - RNA, 19 nt, Homo sapiens
  misc_RNA (1)...(19): siRNA sense strand
gggccaugauuauguggaa

SEQ ID NO: 2546473 - RNA, 19 nt, Homo sapiens
  misc_RNA (1)...(19): siRNA sense strand
gagcguuggagaauggaaa

SEQ ID NO: 2546474 - RNA, 19 nt, Homo sapiens
  misc_RNA (1)...(19): siRNA sense strand
augcauuucuucagggauu

SEQ ID NO: 2546475 - RNA, 19 nt, Homo sapiens
  misc_RNA (1)...(19): siRNA sense strand
gagaagaagaggagcguug

SEQ ID NO: 2546476 - RNA, 19 nt, Homo sapiens
  misc_RNA (1)...(19): siRNA sense strand
guuccaggcuagagcuaau

SEQ ID NO: 2546477 - RNA, 19 nt, Homo sapiens
  misc_RNA (1)...(19): siRNA sense strand
ccacagacuuauaaagaac

SEQ ID NO: 2546478 - RNA, 19 nt, Homo sapiens
  misc_RNA (1)...(19): siRNA sense strand
ggucuuacgacuacaggaa

SEQ ID NO: 2546479 - RNA, 19 nt, Homo sapiens
  misc_RNA (1)...(19): siRNA sense strand
guuacaggcaguucagaaa

SEQ ID NO: 2546480 - RNA, 19 nt, Homo sapiens
  misc_RNA (1)...(19): siRNA sense strand
gaaacgaagaagagauagu

SEQ ID NO: 2546481 - RNA, 19 nt, Homo sapiens
  misc_RNA (1)...(19): siRNA sense strand
gauuugaagcugaggggaa

SEQ ID NO: 2546482 - RNA, 19 nt, Homo sapiens
  misc_RNA (1)...(19): siRNA sense strand
cugaacaugagaagaacaa

SEQ ID NO: 2546483 - RNA, 19 nt, Homo sapiens
  misc_RNA (1)...(19): siRNA sense strand
gauaagaaagagggaggua

SEQ ID NO: 2546484 - RNA, 19 nt, Homo sapiens
  misc_RNA (1)...(19): siRNA sense strand
gccuaguauucgagcaaga

SEQ ID NO: 2546485 - RNA, 19 nt, Homo sapiens
  misc_RNA (1)...(19): siRNA sense strand
agggagaugauaagaaaga

SEQ ID NO: 2546486 - RNA, 19 nt, Homo sapiens
  misc_RNA (1)...(19): siRNA sense strand
cuggcgaagacgagaagaa

SEQ ID NO: 2546487 - RNA, 19 nt, Homo sapiens
  misc_RNA (1)...(19): siRNA sense strand
uggaguuacuaguagagaa

SEQ ID NO: 2546488 - RNA, 19 nt, Homo sapiens
  misc_RNA (1)...(19): siRNA sense strand
acacaaaacuaccaggauu

SEQ ID NO: 2546489 - RNA, 19 nt, Homo sapiens
  misc_RNA (1)...(19): siRNA sense strand
gaauggaggaagaacaaca

SEQ ID NO: 2546490 - RNA, 19 nt, Homo sapiens
  misc_RNA (1)...(19): siRNA sense strand
gguuauacucagaggcaac

SEQ ID NO: 2546491 - RNA, 19 nt, Homo sapiens
  misc_RNA (1)...(19): siRNA sense strand
uuagaaggacagaaacaua

SEQ ID NO: 2546492 - RNA, 19 nt, Homo sapiens
  misc_RNA (1)...(19): siRNA sense strand
guacaggagcagaugcgua

SEQ ID NO: 2546493 - RNA, 19 nt, Homo sapiens
  misc_RNA (1)...(19): siRNA sense strand
uacgaaaugaugaaggaaa

SEQ ID NO: 2546494 - RNA, 19 nt, Homo sapiens
  misc_RNA (1)...(19): siRNA sense strand
caggaaacgaagaagagau

SEQ ID NO: 2546495 - RNA, 19 nt, Homo sapiens
  misc_RNA (1)...(19): siRNA sense strand
aagaacauuuagaaggaca

SEQ ID NO: 2546496 - RNA, 19 nt, Homo sapiens
  misc_RNA (1)...(19): siRNA sense strand
auuuagaaggacagaaaca

SEQ ID NO: 2546497 - RNA, 19 nt, Homo sapiens
  misc_RNA (1)...(19): siRNA sense strand
caugagggaaggagaugua

SEQ ID NO: 2546498 - RNA, 19 nt, Homo sapiens
  misc_RNA (1)...(19): siRNA sense strand
aagaagagaaaaugaggaa

SEQ ID NO: 2546499 - RNA, 19 nt, Homo sapiens
  misc_RNA (1)...(19): siRNA sense strand
caugagaagaacaagaaca

SEQ ID NO: 2546500 - RNA, 19 nt, Homo sapiens
  misc_RNA (1)...(19): siRNA sense strand
ggagguaaagacagagcuu

SEQ ID NO: 2546501 - RNA, 19 nt, Homo sapiens
  misc_RNA (1)...(19): siRNA sense strand
agauagugauggaguugau

SEQ ID NO: 2546502 - RNA, 19 nt, Homo sapiens
  misc_RNA (1)...(19): siRNA sense strand
guuaugaagaggacaugua

SEQ ID NO: 2546503 - RNA, 19 nt, Homo sapiens
  misc_RNA (1)...(19): siRNA sense strand
ccucggguauggugaaaga

SEQ ID NO: 2546504 - RNA, 19 nt, Homo sapiens
  misc_RNA (1)...(19): siRNA sense strand
cuucuggauccuugugaaa

SEQ ID NO: 2546505 - RNA, 19 nt, Homo sapiens
  misc_RNA (1)...(19): siRNA sense strand
acacacaaaacuugguaaa

SEQ ID NO: 2546506 - RNA, 19 nt, Homo sapiens
  misc_RNA (1)...(19): siRNA sense strand
ugaggaagcaaaugcagaa

SEQ ID NO: 2546507 - RNA, 19 nt, Homo sapiens
  misc_RNA (1)...(19): siRNA sense strand
auaagaaagagggagguaa

SEQ ID NO: 2546508 - RNA, 19 nt, Homo sapiens
  misc_RNA (1)...(19): siRNA sense strand
uguuauaagcccugagaag

SEQ ID NO: 2546509 - RNA, 19 nt, Homo sapiens
  misc_RNA (1)...(19): siRNA sense strand
aagagauagugauggaguu

SEQ ID NO: 2546510 - RNA, 19 nt, Homo sapiens
  misc_RNA (1)...(19): siRNA sense strand
acacacagcaacugacuau

SEQ ID NO: 2546511 - RNA, 19 nt, Homo sapiens
  misc_RNA (1)...(19): siRNA sense strand
auguggaagagguacgaaa

SEQ ID NO: 2546512 - RNA, 19 nt, Homo sapiens
  misc_RNA (1)...(19): siRNA sense strand
aggcaagagcccagaaauu

SEQ ID NO: 2546513 - RNA, 19 nt, Homo sapiens
  misc_RNA (1)...(19): siRNA sense strand
gcugaaacguccaaggaga

SEQ ID NO: 2546514 - RNA, 19 nt, Homo sapiens
  misc_RNA (1)...(19): siRNA sense strand
ggaaagaugacuuagguga

SEQ ID NO: 2546515 - RNA, 19 nt, Homo sapiens
  misc_RNA (1)...(19): siRNA sense strand
agaaagaagcaaauggaga

SEQ ID NO: 2546516 - RNA, 19 nt, Homo sapiens
  misc_RNA (1)...(19): siRNA sense strand
gcaaagggcaagaacggaa

SEQ ID NO: 2546517 - RNA, 19 nt, Homo sapiens
  misc_RNA (1)...(19): siRNA sense strand
gcguuaaacaacaaggcaa

SEQ ID NO: 2546518 - RNA, 19 nt, Homo sapiens
  misc_RNA (1)...(19): siRNA sense strand
acacugaggaagagcacaa

SEQ ID NO: 2546519 - RNA, 19 nt, Homo sapiens
  misc_RNA (1)...(19): siRNA sense strand
aagauaaaguggagcagga

SEQ ID NO: 2546520 - RNA, 19 nt, Homo sapiens
  misc_RNA (1)...(19): siRNA sense strand
uaccaagaagugugagaaa

SEQ ID NO: 2546521 - RNA, 19 nt, Homo sapiens
  misc_RNA (1)...(19): siRNA sense strand
uagcagaacaggaggcuca

SEQ ID NO: 2546522 - RNA, 19 nt, Homo sapiens
  misc_RNA (1)...(19): siRNA sense strand
ggguaaaaccggagcagga

SEQ ID NO: 2546523 - RNA, 19 nt, Homo sapiens
  misc_RNA (1)...(19): siRNA sense strand
auaaaguggagcaggaaaa

SEQ ID NO: 2546524 - RNA, 19 nt, Homo sapiens
  misc_RNA (1)...(19): siRNA sense strand
gcguggugagggagaacaa

SEQ ID NO: 2546525 - RNA, 19 nt, Homo sapiens
  misc_RNA (1)...(19): siRNA sense strand
gagcaggaaaagagaaaga

SEQ ID NO: 2546526 - RNA, 19 nt, Homo sapiens
  misc_RNA (1)...(19): siRNA sense strand
gcggauaagagaggaguau

SEQ ID NO: 2546527 - RNA, 19 nt, Homo sapiens
  misc_RNA (1)...(19): siRNA sense strand
guaaggcagcaaagggcaa

SEQ ID NO: 2546528 - RNA, 19 nt, Homo sapiens
  misc_RNA (1)...(19): siRNA sense strand
gggcaagaacggaagugga

SEQ ID NO: 2546529 - RNA, 19 nt, Homo sapiens
  misc_RNA (1)...(19): siRNA sense strand
aggaguaugaagagaaaau

SEQ ID NO: 2546530 - RNA, 19 nt, Homo sapiens
  misc_RNA (1)...(19): siRNA sense strand
caacaggcgcugagcagga

SEQ ID NO: 2546531 - RNA, 19 nt, Homo sapiens
  misc_RNA (1)...(19): siRNA sense strand
cugaaacguccaaggagau

SEQ ID NO: 2546532 - RNA, 19 nt, Homo sapiens
  misc_RNA (1)...(19): siRNA sense strand
cguuaaacaacaaggcaac

SEQ ID NO: 2546533 - RNA, 19 nt, Homo sapiens
  misc_RNA (1)...(19): siRNA sense strand
uggagcaggaaaagagaaa

SEQ ID NO: 2546534 - RNA, 19 nt, Homo sapiens
  misc_RNA (1)...(19): siRNA sense strand
cugaaaauguuuggagaga

SEQ ID NO: 2546535 - RNA, 19 nt, Homo sapiens
  misc_RNA (1)...(19): siRNA sense strand
ucucauauucacccggaaa

SEQ ID NO: 2546536 - RNA, 19 nt, Homo sapiens
  misc_RNA (1)...(19): siRNA sense strand
uggaagauaaaguggagca

SEQ ID NO: 2546537 - RNA, 19 nt, Homo sapiens
  misc_RNA (1)...(19): siRNA sense strand
accaaagggcggaggagga

SEQ ID NO: 2546538 - RNA, 19 nt, Homo sapiens
  misc_RNA (1)...(19): siRNA sense strand
gaggaagagcacaaagcca

SEQ ID NO: 2546539 - RNA, 19 nt, Homo sapiens
  misc_RNA (1)...(19): siRNA sense strand
cggaggaggagauccagaa

SEQ ID NO: 2546540 - RNA, 19 nt, Homo sapiens
  misc_RNA (1)...(19): siRNA sense strand
gggaagcuccagaagacau

SEQ ID NO: 2546541 - RNA, 19 nt, Homo sapiens
  misc_RNA (1)...(19): siRNA sense strand
cagcaaaauccauuaccaa

SEQ ID NO: 2546542 - RNA, 19 nt, Homo sapiens
  misc_RNA (1)...(19): siRNA sense strand
ggaagagcacaaagccaca

SEQ ID NO: 2546543 - RNA, 19 nt, Homo sapiens
  misc_RNA (1)...(19): siRNA sense strand
gccguuacacugaggaaga

SEQ ID NO: 2546544 - RNA, 19 nt, Homo sapiens
  misc_RNA (1)...(19): siRNA sense strand
gggccguuacacugaggaa

SEQ ID NO: 2546545 - RNA, 19 nt, Homo sapiens
  misc_RNA (1)...(19): siRNA sense strand
acaaagccacagagaagau

SEQ ID NO: 2546546 - RNA, 19 nt, Homo sapiens
  misc_RNA (1)...(19): siRNA sense strand
auguuuggagagagggcua

SEQ ID NO: 2546547 - RNA, 19 nt, Homo sapiens
  misc_RNA (1)...(19): siRNA sense strand
agagagagaaagcgcggau

SEQ ID NO: 2546548 - RNA, 19 nt, Homo sapiens
  misc_RNA (1)...(19): siRNA sense strand
aggaaaagagaaagaagca

SEQ ID NO: 2546549 - RNA, 19 nt, Homo sapiens
  misc_RNA (1)...(19): siRNA sense strand
aagcaaauggagaagaaac

SEQ ID NO: 2546550 - RNA, 19 nt, Homo sapiens
  misc_RNA (1)...(19): siRNA sense strand
agcaaauggagaagaaacu

SEQ ID NO: 2546551 - RNA, 19 nt, Homo sapiens
  misc_RNA (1)...(19): siRNA sense strand
agggaagaggagagagaaa

SEQ ID NO: 2546552 - RNA, 19 nt, Homo sapiens
  misc_RNA (1)...(19): siRNA sense strand
gaggagagagaaagagcaa

SEQ ID NO: 2546553 - RNA, 19 nt, Homo sapiens
  misc_RNA (1)...(19): siRNA sense strand
gcggagacuacaagaagaa

SEQ ID NO: 2546554 - RNA, 19 nt, Homo sapiens
  misc_RNA (1)...(19): siRNA sense strand
guaaaguguguauggacaa

SEQ ID NO: 2546555 - RNA, 19 nt, Homo sapiens
  misc_RNA (1)...(19): siRNA sense strand
acucaaugcagaagaugaa

SEQ ID NO: 2546556 - RNA, 19 nt, Homo sapiens
  misc_RNA (1)...(19): siRNA sense strand
ggagagagaaagagcaacu

SEQ ID NO: 2546557 - RNA, 19 nt, Homo sapiens
  misc_RNA (1)...(19): siRNA sense strand
gauaagaauuaaaggacag

SEQ ID NO: 2546558 - RNA, 19 nt, Homo sapiens
  misc_RNA (1)...(19): siRNA sense strand
gaauuaaaggacaggaguu

SEQ ID NO: 2546559 - RNA, 19 nt, Homo sapiens
  misc_RNA (1)...(19): siRNA sense strand
uguaaaguguguauggaca

SEQ ID NO: 2546560 - RNA, 19 nt, Homo sapiens
  misc_RNA (1)...(19): siRNA sense strand
uaagggaagaggagagaga

SEQ ID NO: 2546561 - RNA, 19 nt, Homo sapiens
  misc_RNA (1)...(19): siRNA sense strand
cuacaagaagaaagaacau

SEQ ID NO: 2546562 - RNA, 19 nt, Homo sapiens
  misc_RNA (1)...(19): siRNA sense strand
auugggaaccgaaggauaa

SEQ ID NO: 2546563 - RNA, 19 nt, Homo sapiens
  misc_RNA (1)...(19): siRNA sense strand
aacagacaguucagagaaa

SEQ ID NO: 2546564 - RNA, 19 nt, Homo sapiens
  misc_RNA (1)...(19): siRNA sense strand
guuuauuccuuguggucau

SEQ ID NO: 2546565 - RNA, 19 nt, Homo sapiens
  misc_RNA (1)...(19): siRNA sense strand
agaugaaaaugcagaguca

SEQ ID NO: 2546566 - RNA, 19 nt, Homo sapiens
  misc_RNA (1)...(19): siRNA sense strand
agaagaugaaauaagggaa

SEQ ID NO: 2546567 - RNA, 19 nt, Homo sapiens
  misc_RNA (1)...(19): siRNA sense strand
gugcaaugaauaacgaaaa

SEQ ID NO: 2546568 - RNA, 19 nt, Homo sapiens
  misc_RNA (1)...(19): siRNA sense strand
aggugugaguacuugauaa

SEQ ID NO: 2546569 - RNA, 19 nt, Homo sapiens
  misc_RNA (1)...(19): siRNA sense strand
acacguuugaacugaaaua

SEQ ID NO: 2546570 - RNA, 19 nt, Homo sapiens
  misc_RNA (1)...(19): siRNA sense strand
uguaaacuccagagcaaau

SEQ ID NO: 2546571 - RNA, 19 nt, Homo sapiens
  misc_RNA (1)...(19): siRNA sense strand
acuucaagauacacaguuu

SEQ ID NO: 2546572 - RNA, 19 nt, Homo sapiens
  misc_RNA (1)...(19): siRNA sense strand
aauugggaaccgaaggaua

SEQ ID NO: 2546573 - RNA, 19 nt, Homo sapiens
  misc_RNA (1)...(19): siRNA sense strand
aagcaagagaacugauuga

SEQ ID NO: 2546574 - RNA, 19 nt, Homo sapiens
  misc_RNA (1)...(19): siRNA sense strand
agacagcccaggagaugaa

SEQ ID NO: 2546575 - RNA, 19 nt, Homo sapiens
  misc_RNA (1)...(19): siRNA sense strand
cagccacuguauucagaaa

SEQ ID NO: 2546576 - RNA, 19 nt, Homo sapiens
  misc_RNA (1)...(19): siRNA sense strand
agacuuacucaaugcagaa

SEQ ID NO: 2546577 - RNA, 19 nt, Homo sapiens
  misc_RNA (1)...(19): siRNA sense strand
gucuaaauuccguuaacaa

SEQ ID NO: 2546578 - RNA, 19 nt, Homo sapiens
  misc_RNA (1)...(19): siRNA sense strand
ucaucuaguaguaugcaaa

SEQ ID NO: 2546579 - RNA, 19 nt, Homo sapiens
  misc_RNA (1)...(19): siRNA sense strand
gaagaugaaauaagggaag

SEQ ID NO: 2546580 - RNA, 19 nt, Homo sapiens
  misc_RNA (1)...(19): siRNA sense strand
aaagagcaacugaggaaaa

SEQ ID NO: 2546581 - RNA, 19 nt, Homo sapiens
  misc_RNA (1)...(19): siRNA sense strand
ggagaugauccauggguuc

SEQ ID NO: 2546582 - RNA, 19 nt, Homo sapiens
  misc_RNA (1)...(19): siRNA sense strand
aggaaauauugcagccacu

SEQ ID NO: 2546583 - RNA, 19 nt, Homo sapiens
  misc_RNA (1)...(19): siRNA sense strand
acuacaagaagaaagaaca

SEQ ID NO: 2546584 - RNA, 19 nt, Homo sapiens
  misc_RNA (1)...(19): siRNA sense strand
ugaaauaagggaagaggag

SEQ ID NO: 2546585 - RNA, 19 nt, Homo sapiens
  misc_RNA (1)...(19): siRNA sense strand
ugaucuuguguuagacuua

SEQ ID NO: 2546586 - RNA, 19 nt, Homo sapiens
  misc_RNA (1)...(19): siRNA sense strand
cagaucuaccaguggaaga

SEQ ID NO: 2546587 - RNA, 19 nt, Homo sapiens
  misc_RNA (1)...(19): siRNA sense strand
ccggaagaauagaauggca

SEQ ID NO: 2546588 - RNA, 19 nt, Homo sapiens
  misc_RNA (1)...(19): siRNA sense strand
agaacugauugauacgauu

SEQ ID NO: 2546589 - RNA, 19 nt, Homo sapiens
  misc_RNA (1)...(19): siRNA sense strand
aggaguacaaucaagggua

SEQ ID NO: 2546590 - RNA, 19 nt, Homo sapiens
  misc_RNA (1)...(19): siRNA sense strand
ugugcaaugaauaacgaaa

SEQ ID NO: 2546591 - RNA, 19 nt, Homo sapiens
  misc_RNA (1)...(19): siRNA sense strand
cuacauaggaccuggagac

SEQ ID NO: 2546592 - RNA, 19 nt, Homo sapiens
  misc_RNA (1)...(19): siRNA sense strand
cguuugaacugaaauacga

SEQ ID NO: 2546593 - RNA, 19 nt, Homo sapiens
  misc_RNA (1)...(19): siRNA sense strand
ccgucaaguucaagccagu

SEQ ID NO: 2546594 - RNA, 19 nt, Homo sapiens
  misc_RNA (1)...(19): siRNA sense strand
cagaagaugaaauaaggga

SEQ ID NO: 2546595 - RNA, 19 nt, Homo sapiens
  misc_RNA (1)...(19): siRNA sense strand
guaacaaauuccacacacu

SEQ ID NO: 2546596 - RNA, 19 nt, Homo sapiens
  misc_RNA (1)...(19): siRNA sense strand
cgaaaaugccagauuacuu

SEQ ID NO: 2546597 - RNA, 19 nt, Homo sapiens
  misc_RNA (1)...(19): siRNA sense strand
cuucaagacacuucaagau

SEQ ID NO: 2546598 - RNA, 19 nt, Homo sapiens
  misc_RNA (1)...(19): siRNA sense strand
guaacagugaugaugucaa

SEQ ID NO: 2546599 - RNA, 19 nt, Homo sapiens
  misc_RNA (1)...(19): siRNA sense strand
agggaagaggagagagaaa

SEQ ID NO: 2546600 - RNA, 19 nt, Homo sapiens
  misc_RNA (1)...(19): siRNA sense strand
gaggagagagaaagagcaa

SEQ ID NO: 2546601 - RNA, 19 nt, Homo sapiens
  misc_RNA (1)...(19): siRNA sense strand
gcggagacuacaagaagaa

SEQ ID NO: 2546602 - RNA, 19 nt, Homo sapiens
  misc_RNA (1)...(19): siRNA sense strand
guaaaguguguauggacaa

SEQ ID NO: 2546603 - RNA, 19 nt, Homo sapiens
  misc_RNA (1)...(19): siRNA sense strand
acucaaugcagaagaugaa

SEQ ID NO: 2546604 - RNA, 19 nt, Homo sapiens
  misc_RNA (1)...(19): siRNA sense strand
ggagagagaaagagcaacu

SEQ ID NO: 2546605 - RNA, 19 nt, Homo sapiens
  misc_RNA (1)...(19): siRNA sense strand
gauaagaauuaaaggacag

SEQ ID NO: 2546606 - RNA, 19 nt, Homo sapiens
  misc_RNA (1)...(19): siRNA sense strand
gaauuaaaggacaggaguu

SEQ ID NO: 2546607 - RNA, 19 nt, Homo sapiens
  misc_RNA (1)...(19): siRNA sense strand
uguaaaguguguauggaca

SEQ ID NO: 2546608 - RNA, 19 nt, Homo sapiens
  misc_RNA (1)...(19): siRNA sense strand
uaagggaagaggagagaga

SEQ ID NO: 2546609 - RNA, 19 nt, Homo sapiens
  misc_RNA (1)...(19): siRNA sense strand
cuacaagaagaaagaacau

SEQ ID NO: 2546610 - RNA, 19 nt, Homo sapiens
  misc_RNA (1)...(19): siRNA sense strand
auugggaaccgaaggauaa

SEQ ID NO: 2546611 - RNA, 19 nt, Homo sapiens
  misc_RNA (1)...(19): siRNA sense strand
aacagacaguucagagaaa

SEQ ID NO: 2546612 - RNA, 19 nt, Homo sapiens
  misc_RNA (1)...(19): siRNA sense strand
guuuauuccuuguggucau

SEQ ID NO: 2546613 - RNA, 19 nt, Homo sapiens
  misc_RNA (1)...(19): siRNA sense strand
agaugaaaaugcagaguca

SEQ ID NO: 2546614 - RNA, 19 nt, Homo sapiens
  misc_RNA (1)...(19): siRNA sense strand
agaagaugaaauaagggaa

SEQ ID NO: 2546615 - RNA, 19 nt, Homo sapiens
  misc_RNA (1)...(19): siRNA sense strand
gugcaaugaauaacgaaaa

SEQ ID NO: 2546616 - RNA, 19 nt, Homo sapiens
  misc_RNA (1)...(19): siRNA sense strand
aggugugaguacuugauaa

SEQ ID NO: 2546617 - RNA, 19 nt, Homo sapiens
  misc_RNA (1)...(19): siRNA sense strand
acacguuugaacugaaaua

SEQ ID NO: 2546618 - RNA, 19 nt, Homo sapiens
  misc_RNA (1)...(19): siRNA sense strand
uguaaacuccagagcaaau

SEQ ID NO: 2546619 - RNA, 19 nt, Homo sapiens
  misc_RNA (1)...(19): siRNA sense strand
acuucaagauacacaguuu

SEQ ID NO: 2546620 - RNA, 19 nt, Homo sapiens
  misc_RNA (1)...(19): siRNA sense strand
aauugggaaccgaaggaua

SEQ ID NO: 2546621 - RNA, 19 nt, Homo sapiens
  misc_RNA (1)...(19): siRNA sense strand
aagcaagagaacugauuga

SEQ ID NO: 2546622 - RNA, 19 nt, Homo sapiens
  misc_RNA (1)...(19): siRNA sense strand
agacagcccaggagaugaa

SEQ ID NO: 2546623 - RNA, 19 nt, Homo sapiens
  misc_RNA (1)...(19): siRNA sense strand
cagccacuguauucagaaa

SEQ ID NO: 2546624 - RNA, 19 nt, Homo sapiens
  misc_RNA (1)...(19): siRNA sense strand
agacuuacucaaugcagaa

SEQ ID NO: 2546625 - RNA, 19 nt, Homo sapiens
  misc_RNA (1)...(19): siRNA sense strand
gucuaaauuccguuaacaa

SEQ ID NO: 2546626 - RNA, 19 nt, Homo sapiens
  misc_RNA (1)...(19): siRNA sense strand
ucaucuaguaguaugcaaa

SEQ ID NO: 2546627 - RNA, 19 nt, Homo sapiens
  misc_RNA (1)...(19): siRNA sense strand
gaagaugaaauaagggaag

SEQ ID NO: 2546628 - RNA, 19 nt, Homo sapiens
  misc_RNA (1)...(19): siRNA sense strand
aaagagcaacugaggaaaa

SEQ ID NO: 2546629 - RNA, 19 nt, Homo sapiens
  misc_RNA (1)...(19): siRNA sense strand
ggagaugauccauggguuc

SEQ ID NO: 2546630 - RNA, 19 nt, Homo sapiens
  misc_RNA (1)...(19): siRNA sense strand
aggaaauauugcagccacu

SEQ ID NO: 2546631 - RNA, 19 nt, Homo sapiens
  misc_RNA (1)...(19): siRNA sense strand
acuacaagaagaaagaaca

SEQ ID NO: 2546632 - RNA, 19 nt, Homo sapiens
  misc_RNA (1)...(19): siRNA sense strand
ugaaauaagggaagaggag

SEQ ID NO: 2546633 - RNA, 19 nt, Homo sapiens
  misc_RNA (1)...(19): siRNA sense strand
ugaucuuguguuagacuua

SEQ ID NO: 2546634 - RNA, 19 nt, Homo sapiens
  misc_RNA (1)...(19): siRNA sense strand
cagaucuaccaguggaaga

SEQ ID NO: 2546635 - RNA, 19 nt, Homo sapiens
  misc_RNA (1)...(19): siRNA sense strand
ccggaagaauagaauggca

SEQ ID NO: 2546636 - RNA, 19 nt, Homo sapiens
  misc_RNA (1)...(19): siRNA sense strand
agaacugauugauacgauu

SEQ ID NO: 2546637 - RNA, 19 nt, Homo sapiens
  misc_RNA (1)...(19): siRNA sense strand
aggaguacaaucaagggua

SEQ ID NO: 2546638 - RNA, 19 nt, Homo sapiens
  misc_RNA (1)...(19): siRNA sense strand
ugugcaaugaauaacgaaa

SEQ ID NO: 2546639 - RNA, 19 nt, Homo sapiens
  misc_RNA (1)...(19): siRNA sense strand
cuacauaggaccuggagac

SEQ ID NO: 2546640 - RNA, 19 nt, Homo sapiens
  misc_RNA (1)...(19): siRNA sense strand
cguuugaacugaaauacga

SEQ ID NO: 2546641 - RNA, 19 nt, Homo sapiens
  misc_RNA (1)...(19): siRNA sense strand
ccgucaaguucaagccagu

SEQ ID NO: 2546642 - RNA, 19 nt, Homo sapiens
  misc_RNA (1)...(19): siRNA sense strand
cagaagaugaaauaaggga

SEQ ID NO: 2546643 - RNA, 19 nt, Homo sapiens
  misc_RNA (1)...(19): siRNA sense strand
guaacaaauuccacacacu

SEQ ID NO: 2546644 - RNA, 19 nt, Homo sapiens
  misc_RNA (1)...(19): siRNA sense strand
cgaaaaugccagauuacuu

SEQ ID NO: 2546645 - RNA, 19 nt, Homo sapiens
  misc_RNA (1)...(19): siRNA sense strand
cuucaagacacuucaagau

SEQ ID NO: 2546646 - RNA, 19 nt, Homo sapiens
  misc_RNA (1)...(19): siRNA sense strand
guaacagugaugaugucaa

SEQ ID NO: 2546647 - RNA, 19 nt, Homo sapiens
  misc_RNA (1)...(19): siRNA sense strand
ggaauuuguaugagagcau

SEQ ID NO: 2546648 - RNA, 19 nt, Homo sapiens
  misc_RNA (1)...(19): siRNA sense strand
uuauaaaggagaaggccua

SEQ ID NO: 2546649 - RNA, 19 nt, Homo sapiens
  misc_RNA (1)...(19): siRNA sense strand
agccaugggaagaaagaaa

SEQ ID NO: 2546650 - RNA, 19 nt, Homo sapiens
  misc_RNA (1)...(19): siRNA sense strand
auuagaagagagagaagaa

SEQ ID NO: 2546651 - RNA, 19 nt, Homo sapiens
  misc_RNA (1)...(19): siRNA sense strand
aggagaaggaggaguggau

SEQ ID NO: 2546652 - RNA, 19 nt, Homo sapiens
  misc_RNA (1)...(19): siRNA sense strand
gauaaggagcccaggggaa

SEQ ID NO: 2546653 - RNA, 19 nt, Homo sapiens
  misc_RNA (1)...(19): siRNA sense strand
agaagagagagaagaacuu

SEQ ID NO: 2546654 - RNA, 19 nt, Homo sapiens
  misc_RNA (1)...(19): siRNA sense strand
cuuccguagaggagagcaa

SEQ ID NO: 2546655 - RNA, 19 nt, Homo sapiens
  misc_RNA (1)...(19): siRNA sense strand
gaaucaucccguuggaaaa

SEQ ID NO: 2546656 - RNA, 19 nt, Homo sapiens
  misc_RNA (1)...(19): siRNA sense strand
ggaacaaacagauagccau

SEQ ID NO: 2546657 - RNA, 19 nt, Homo sapiens
  misc_RNA (1)...(19): siRNA sense strand
gcaucagggagguggagga

SEQ ID NO: 2546658 - RNA, 19 nt, Homo sapiens
  misc_RNA (1)...(19): siRNA sense strand
acucagaggaacaaacaga

SEQ ID NO: 2546659 - RNA, 19 nt, Homo sapiens
  misc_RNA (1)...(19): siRNA sense strand
ccaugggaagaaagaaauu

SEQ ID NO: 2546660 - RNA, 19 nt, Homo sapiens
  misc_RNA (1)...(19): siRNA sense strand
gugacaagcccacggcaga

SEQ ID NO: 2546661 - RNA, 19 nt, Homo sapiens
  misc_RNA (1)...(19): siRNA sense strand
cgcagaagauugaucgcau

SEQ ID NO: 2546662 - RNA, 19 nt, Homo sapiens
  misc_RNA (1)...(19): siRNA sense strand
cauuuaagaucccggagga

SEQ ID NO: 2546663 - RNA, 19 nt, Homo sapiens
  misc_RNA (1)...(19): siRNA sense strand
augaaauugcagaggugau

SEQ ID NO: 2546664 - RNA, 19 nt, Homo sapiens
  misc_RNA (1)...(19): siRNA sense strand
aaacagauagccaugggaa

SEQ ID NO: 2546665 - RNA, 19 nt, Homo sapiens
  misc_RNA (1)...(19): siRNA sense strand
aggaacaaacagauagcca

SEQ ID NO: 2546666 - RNA, 19 nt, Homo sapiens
  misc_RNA (1)...(19): siRNA sense strand
uagaagagagagaagaacu

SEQ ID NO: 2546667 - RNA, 19 nt, Homo sapiens
  misc_RNA (1)...(19): siRNA sense strand
cuaccugggugaaagggau

SEQ ID NO: 2546668 - RNA, 19 nt, Homo sapiens
  misc_RNA (1)...(19): siRNA sense strand
gaacaaacagauagccaug

SEQ ID NO: 2546669 - RNA, 19 nt, Homo sapiens
  misc_RNA (1)...(19): siRNA sense strand
gcaagaacaucguugggua

SEQ ID NO: 2546670 - RNA, 19 nt, Homo sapiens
  misc_RNA (1)...(19): siRNA sense strand
augaagaugaugaggauuu

SEQ ID NO: 2546671 - RNA, 19 nt, Homo sapiens
  misc_RNA (1)...(19): siRNA sense strand
gcuucaaggcuaugacaau

SEQ ID NO: 2546672 - RNA, 19 nt, Homo sapiens
  misc_RNA (1)...(19): siRNA sense strand
aggauuuaacggugaacaa

SEQ ID NO: 2546673 - RNA, 19 nt, Homo sapiens
  misc_RNA (1)...(19): siRNA sense strand
auucauugcuucaaggcua

SEQ ID NO: 2546674 - RNA, 19 nt, Homo sapiens
  misc_RNA (1)...(19): siRNA sense strand
caauaaagaugcagugccu

SEQ ID NO: 2546675 - RNA, 19 nt, Homo sapiens
  misc_RNA (1)...(19): siRNA sense strand
caguaauaugguuggaaaa

SEQ ID NO: 2546676 - RNA, 19 nt, Homo sapiens
  misc_RNA (1)...(19): siRNA sense strand
aggcagaugaugaagauga

SEQ ID NO: 2546677 - RNA, 19 nt, Homo sapiens
  misc_RNA (1)...(19): siRNA sense strand
cuucagaaacucaagaaaa

SEQ ID NO: 2546678 - RNA, 19 nt, Homo sapiens
  misc_RNA (1)...(19): siRNA sense strand
uacuaaagacagaaagcua

SEQ ID NO: 2546679 - RNA, 19 nt, Homo sapiens
  misc_RNA (1)...(19): siRNA sense strand
aagaagaugauuaugggua

SEQ ID NO: 2546680 - RNA, 19 nt, Homo sapiens
  misc_RNA (1)...(19): siRNA sense strand
ugggaaacuguguugauaa

SEQ ID NO: 2546681 - RNA, 19 nt, Homo sapiens
  misc_RNA (1)...(19): siRNA sense strand
augacaacccugaguacaa

SEQ ID NO: 2546682 - RNA, 19 nt, Homo sapiens
  misc_RNA (1)...(19): siRNA sense strand
cuguauacucuaagauuga

SEQ ID NO: 2546683 - RNA, 19 nt, Homo sapiens
  misc_RNA (1)...(19): siRNA sense strand
gaugaggauuuaacgguga

SEQ ID NO: 2546684 - RNA, 19 nt, Homo sapiens
  misc_RNA (1)...(19): siRNA sense strand
ugacccugcauuugggaaa

SEQ ID NO: 2546685 - RNA, 19 nt, Homo sapiens
  misc_RNA (1)...(19): siRNA sense strand
uugauaaggcagaugauga

SEQ ID NO: 2546686 - RNA, 19 nt, Homo sapiens
  misc_RNA (1)...(19): siRNA sense strand
uuggagggaaggaaggaua

SEQ ID NO: 2546687 - RNA, 19 nt, Homo sapiens
  misc_RNA (1)...(19): siRNA sense strand
gaaauugaguauaagugga

SEQ ID NO: 2546688 - RNA, 19 nt, Homo sapiens
  misc_RNA (1)...(19): siRNA sense strand
augaaagugcuuaugcuua

SEQ ID NO: 2546689 - RNA, 19 nt, Homo sapiens
  misc_RNA (1)...(19): siRNA sense strand
ugagcagaagaaugggaua

SEQ ID NO: 2546690 - RNA, 19 nt, Homo sapiens
  misc_RNA (1)...(19): siRNA sense strand
gauuuaacggugaacaaaa

SEQ ID NO: 2546691 - RNA, 19 nt, Homo sapiens
  misc_RNA (1)...(19): siRNA sense strand
ucugaugcucacuggauaa

SEQ ID NO: 2546692 - RNA, 19 nt, Homo sapiens
  misc_RNA (1)...(19): siRNA sense strand
ggauuauguuaucaugaca

SEQ ID NO: 2546693 - RNA, 19 nt, Homo sapiens
  misc_RNA (1)...(19): siRNA sense strand
ggcagaugaugaagaugau

SEQ ID NO: 2546694 - RNA, 19 nt, Homo sapiens
  misc_RNA (1)...(19): siRNA sense strand
guaccaugaaagugcuuau

SEQ ID NO: 2546695 - RNA, 19 nt, Homo sapiens
  misc_RNA (1)...(19): siRNA sense strand
aggagauaucacacaaauu

SEQ ID NO: 2546696 - RNA, 19 nt, Homo sapiens
  misc_RNA (1)...(19): siRNA sense strand
uguaaacagcauuggacca

SEQ ID NO: 2546697 - RNA, 19 nt, Homo sapiens
  misc_RNA (1)...(19): siRNA sense strand
gcuuaugcuuaacaguaau

SEQ ID NO: 2546698 - RNA, 19 nt, Homo sapiens
  misc_RNA (1)...(19): siRNA sense strand
gcaugagcgagaauggcua

SEQ ID NO: 2546699 - RNA, 19 nt, Homo sapiens
  misc_RNA (1)...(19): siRNA sense strand
gagacuggaucgauggugu

SEQ ID NO: 2546700 - RNA, 19 nt, Homo sapiens
  misc_RNA (1)...(19): siRNA sense strand
cagcagcaugagcgagaau

SEQ ID NO: 2546701 - RNA, 19 nt, Homo sapiens
  misc_RNA (1)...(19): siRNA sense strand
gagagaaauucgagcgaga

SEQ ID NO: 2546702 - RNA, 19 nt, Homo sapiens
  misc_RNA (1)...(19): siRNA sense strand
caaauaagcccaaggguca

SEQ ID NO: 2546703 - RNA, 19 nt, Homo sapiens
  misc_RNA (1)...(19): siRNA sense strand
ggucagaauucuuuggcuu

SEQ ID NO: 2546704 - RNA, 19 nt, Homo sapiens
  misc_RNA (1)...(19): siRNA sense strand
gaguaaaagaagaugagaa

SEQ ID NO: 2546705 - RNA, 19 nt, Homo sapiens
  misc_RNA (1)...(19): siRNA sense strand
auggaagacagcaaagaaa

SEQ ID NO: 2546706 - RNA, 19 nt, Homo sapiens
  misc_RNA (1)...(19): siRNA sense strand
cgagaaagauggaagacag

SEQ ID NO: 2546707 - RNA, 19 nt, Homo sapiens
  misc_RNA (1)...(19): siRNA sense strand
augaguuuguggaggacua

SEQ ID NO: 2546708 - RNA, 19 nt, Homo sapiens
  misc_RNA (1)...(19): siRNA sense strand
acgaugaguuuguggagga

SEQ ID NO: 2546709 - RNA, 19 nt, Homo sapiens
  misc_RNA (1)...(19): siRNA sense strand
aaaguuuagccaagagaau

SEQ ID NO: 2546710 - RNA, 19 nt, Homo sapiens
  misc_RNA (1)...(19): siRNA sense strand
gcaaauaagcccaaggguc

SEQ ID NO: 2546711 - RNA, 19 nt, Homo sapiens
  misc_RNA (1)...(19): siRNA sense strand
gcgagaaagauggaagaca

SEQ ID NO: 2546712 - RNA, 19 nt, Homo sapiens
  misc_RNA (1)...(19): siRNA sense strand
cugcaauuagagacaacua

SEQ ID NO: 2546713 - RNA, 19 nt, Homo sapiens
  misc_RNA (1)...(19): siRNA sense strand
gcuaauguugacaagguau

SEQ ID NO: 2546714 - RNA, 19 nt, Homo sapiens
  misc_RNA (1)...(19): siRNA sense strand
aguuuagccaagagaauca

SEQ ID NO: 2546715 - RNA, 19 nt, Homo sapiens
  misc_RNA (1)...(19): siRNA sense strand
uggaagacagcaaagaaaa

SEQ ID NO: 2546716 - RNA, 19 nt, Homo sapiens
  misc_RNA (1)...(19): siRNA sense strand
ucggaagaagguagugcua

SEQ ID NO: 2546717 - RNA, 19 nt, Homo sapiens
  misc_RNA (1)...(19): siRNA sense strand
cugaaguaguggaguguga

SEQ ID NO: 2546718 - RNA, 19 nt, Homo sapiens
  misc_RNA (1)...(19): siRNA sense strand
cgaauagacuuaauggaca

SEQ ID NO: 2546719 - RNA, 19 nt, Homo sapiens
  misc_RNA (1)...(19): siRNA sense strand
cgaagcaacaagugggauu

SEQ ID NO: 2546720 - RNA, 19 nt, Homo sapiens
  misc_RNA (1)...(19): siRNA sense strand
ucgcaacagugaugggcaa

SEQ ID NO: 2546721 - RNA, 19 nt, Homo sapiens
  misc_RNA (1)...(19): siRNA sense strand
uuaugcaauuggaggguua

SEQ ID NO: 2546722 - RNA, 19 nt, Homo sapiens
  misc_RNA (1)...(19): siRNA sense strand
cacaaagaggcgaggaauu

SEQ ID NO: 2546723 - RNA, 19 nt, Homo sapiens
  misc_RNA (1)...(19): siRNA sense strand
cugauugagauuagagauu

SEQ ID NO: 2546724 - RNA, 19 nt, Homo sapiens
  misc_RNA (1)...(19): siRNA sense strand
ggauaaguggauagaaguu

SEQ ID NO: 2546725 - RNA, 19 nt, Homo sapiens
  misc_RNA (1)...(19): siRNA sense strand
agguaaaguguaugcagua

SEQ ID NO: 2546726 - RNA, 19 nt, Homo sapiens
  misc_RNA (1)...(19): siRNA sense strand
ccagaaaugaauagucgaa

SEQ ID NO: 2546727 - RNA, 19 nt, Homo sapiens
  misc_RNA (1)...(19): siRNA sense strand
ggguguaaucucuguggaa

SEQ ID NO: 2546728 - RNA, 19 nt, Homo sapiens
  misc_RNA (1)...(19): siRNA sense strand
gaaucugaucaguggagua

SEQ ID NO: 2546729 - RNA, 19 nt, Homo sapiens
  misc_RNA (1)...(19): siRNA sense strand
agguggacaugauggaaau

SEQ ID NO: 2546730 - RNA, 19 nt, Homo sapiens
  misc_RNA (1)...(19): siRNA sense strand
aagcaaacgcugauugaga

SEQ ID NO: 2546731 - RNA, 19 nt, Homo sapiens
  misc_RNA (1)...(19): siRNA sense strand
agaaagucacaaucgaaua

SEQ ID NO: 2546732 - RNA, 19 nt, Homo sapiens
  misc_RNA (1)...(19): siRNA sense strand
uagugauggugauggagaa

SEQ ID NO: 2546733 - RNA, 19 nt, Homo sapiens
  misc_RNA (1)...(19): siRNA sense strand
gcuucagauucuaugagua

SEQ ID NO: 2546734 - RNA, 19 nt, Homo sapiens
  misc_RNA (1)...(19): siRNA sense strand
ccagagguggagugggaau

SEQ ID NO: 2546735 - RNA, 19 nt, Homo sapiens
  misc_RNA (1)...(19): siRNA sense strand
cuggauaaguggauagaag

SEQ ID NO: 2546736 - RNA, 19 nt, Homo sapiens
  misc_RNA (1)...(19): siRNA sense strand
aaguuaaagaaauggguca

SEQ ID NO: 2546737 - RNA, 19 nt, Homo sapiens
  misc_RNA (1)...(19): siRNA sense strand
cuucaaugauguggagaga

SEQ ID NO: 2546738 - RNA, 19 nt, Homo sapiens
  misc_RNA (1)...(19): siRNA sense strand
agaacagauugucaagcaa

SEQ ID NO: 2546739 - RNA, 19 nt, Homo sapiens
  misc_RNA (1)...(19): siRNA sense strand
aaugaauagucgaaggcga

SEQ ID NO: 2546740 - RNA, 19 nt, Homo sapiens
  misc_RNA (1)...(19): siRNA sense strand
ugauggugauggagaagau

SEQ ID NO: 2546741 - RNA, 19 nt, Homo sapiens
  misc_RNA (1)...(19): siRNA sense strand
uggacaugauggaaaugaa

SEQ ID NO: 2546742 - RNA, 19 nt, Homo sapiens
  misc_RNA (1)...(19): siRNA sense strand
cuugaguagcagagcagua

SEQ ID NO: 2546743 - RNA, 19 nt, Homo sapiens
  misc_RNA (1)...(19): siRNA sense strand
gcaaacgcugauugagauu

SEQ ID NO: 2546744 - RNA, 19 nt, Homo sapiens
  misc_RNA (1)...(19): siRNA sense strand
augaaaagcaggucuauaa

SEQ ID NO: 2546745 - RNA, 19 nt, Homo sapiens
  misc_RNA (1)...(19): siRNA sense strand
cagcaaauaaagaacagau

SEQ ID NO: 2546746 - RNA, 19 nt, Homo sapiens
  misc_RNA (1)...(19): siRNA sense strand
cagaaagucacaaucgaau

SEQ ID NO: 2546747 - RNA, 19 nt, Homo sapiens
  misc_RNA (1)...(19): siRNA sense strand
cuggaugaagcaagaaauu

SEQ ID NO: 2546748 - RNA, 19 nt, Homo sapiens
  misc_RNA (1)...(19): siRNA sense strand
ggucauaauggcaaugcau

SEQ ID NO: 2546749 - RNA, 19 nt, Homo sapiens
  misc_RNA (1)...(19): siRNA sense strand
agcaaaugaagcuuggaaa

SEQ ID NO: 2546750 - RNA, 19 nt, Homo sapiens
  misc_RNA (1)...(19): siRNA sense strand
uuauggguguuguggcaaa

SEQ ID NO: 2546751 - RNA, 19 nt, Homo sapiens
  misc_RNA (1)...(19): siRNA sense strand
uaguaaacaagcuaggaau

SEQ ID NO: 2546752 - RNA, 19 nt, Homo sapiens
  misc_RNA (1)...(19): siRNA sense strand
gcaucaaugaacacaaaga

SEQ ID NO: 2546753 - RNA, 19 nt, Homo sapiens
  misc_RNA (1)...(19): siRNA sense strand
aaauacaguagaagcguuu

SEQ ID NO: 2546754 - RNA, 19 nt, Homo sapiens
  misc_RNA (1)...(19): siRNA sense strand
caguaagagccuuugcaga

SEQ ID NO: 2546755 - RNA, 19 nt, Homo sapiens
  misc_RNA (1)...(19): siRNA sense strand
caaaagaacagauugucaa

SEQ ID NO: 2546756 - RNA, 19 nt, Homo sapiens
  misc_RNA (1)...(19): siRNA sense strand
gcuaggaaucacauuacaa

SEQ ID NO: 2546757 - RNA, 19 nt, Homo sapiens
  misc_RNA (1)...(19): siRNA sense strand
ugaguucaguugagcggua

SEQ ID NO: 2546758 - RNA, 19 nt, Homo sapiens
  misc_RNA (1)...(19): siRNA sense strand
cguuugauccagugcugaa

SEQ ID NO: 2546759 - RNA, 19 nt, Homo sapiens
  misc_RNA (1)...(19): siRNA sense strand
caagguuggcucaaagcua

SEQ ID NO: 2546760 - RNA, 19 nt, Homo sapiens
  misc_RNA (1)...(19): siRNA sense strand
uuggaggguuagaugacaa

SEQ ID NO: 2546761 - RNA, 19 nt, Homo sapiens
  misc_RNA (1)...(19): siRNA sense strand
aauucgagauguaggucau

SEQ ID NO: 2546762 - RNA, 19 nt, Homo sapiens
  misc_RNA (1)...(19): siRNA sense strand
gcaaaagaacagauuguca

SEQ ID NO: 2546763 - RNA, 19 nt, Homo sapiens
  misc_RNA (1)...(19): siRNA sense strand
cauuuagggaguauggaga

SEQ ID NO: 2546764 - RNA, 19 nt, Homo sapiens
  misc_RNA (1)...(19): siRNA sense strand
caaauaaagaacagauccu

SEQ ID NO: 2546765 - RNA, 19 nt, Homo sapiens
  misc_RNA (1)...(19): siRNA sense strand
auaaagaacagauccucaa

SEQ ID NO: 2546766 - RNA, 19 nt, Homo sapiens
  misc_RNA (1)...(19): siRNA sense strand
ccucaauuagugaugguga

SEQ ID NO: 2546767 - RNA, 19 nt, Homo sapiens
  misc_RNA (1)...(19): siRNA sense strand
aacacaaagaggcgaggaa

SEQ ID NO: 2546768 - RNA, 19 nt, Homo sapiens
  misc_RNA (1)...(19): siRNA sense strand
aauuagugauggugaugga

SEQ ID NO: 2546769 - RNA, 19 nt, Homo sapiens
  misc_RNA (1)...(19): siRNA sense strand
auacguaguuggugguuuu

SEQ ID NO: 2546770 - RNA, 19 nt, Homo sapiens
  misc_RNA (1)...(19): siRNA sense strand
ggugggagcuuguuggauc

SEQ ID NO: 2546771 - RNA, 19 nt, Homo sapiens
  misc_RNA (1)...(19): siRNA sense strand
gaaucaaguggaaccggaa

SEQ ID NO: 2546772 - RNA, 19 nt, Homo sapiens
  misc_RNA (1)...(19): siRNA sense strand
acagguacuacgaggccaa

SEQ ID NO: 2546773 - RNA, 19 nt, Homo sapiens
  misc_RNA (1)...(19): siRNA sense strand
acaagaaccugaagcgcca

SEQ ID NO: 2546774 - RNA, 19 nt, Homo sapiens
  misc_RNA (1)...(19): siRNA sense strand
gcagauaaaugccgaccca

SEQ ID NO: 2546775 - RNA, 19 nt, Homo sapiens
  misc_RNA (1)...(19): siRNA sense strand
ggaagagaaucguggccgu

SEQ ID NO: 2546776 - RNA, 19 nt, Homo sapiens
  misc_RNA (1)...(19): siRNA sense strand
agauaaaugccgacccaca

SEQ ID NO: 2546777 - RNA, 19 nt, Homo sapiens
  misc_RNA (1)...(19): siRNA sense strand
ccgugucggccaagaagaa

SEQ ID NO: 2546778 - RNA, 19 nt, Homo sapiens
  misc_RNA (1)...(19): siRNA sense strand
cggccguacagaacagcaa

SEQ ID NO: 2546779 - RNA, 19 nt, Homo sapiens
  misc_RNA (1)...(19): siRNA sense strand
cagaacagcaagaacgcca

SEQ ID NO: 2546780 - RNA, 19 nt, Homo sapiens
  misc_RNA (1)...(19): siRNA sense strand
agagcggccaggaggacaa

SEQ ID NO: 2546781 - RNA, 19 nt, Homo sapiens
  misc_RNA (1)...(19): siRNA sense strand
agcaagaacgccaaggaca

SEQ ID NO: 2546782 - RNA, 19 nt, Homo sapiens
  misc_RNA (1)...(19): siRNA sense strand
guggguaagcugaaggaca

SEQ ID NO: 2546783 - RNA, 19 nt, Homo sapiens
  misc_RNA (1)...(19): siRNA sense strand
gagacuagcccgcuggaga

SEQ ID NO: 2546784 - RNA, 19 nt, Homo sapiens
  misc_RNA (1)...(19): siRNA sense strand
ccuggaggacacagagcua

SEQ ID NO: 2546785 - RNA, 19 nt, Homo sapiens
  misc_RNA (1)...(19): siRNA sense strand
acauggaaugcgugcgcua

SEQ ID NO: 2546786 - RNA, 19 nt, Homo sapiens
  misc_RNA (1)...(19): siRNA sense strand
agaaauuacuugagcagug

SEQ ID NO: 2546787 - RNA, 19 nt, Homo sapiens
  misc_RNA (1)...(19): siRNA sense strand
augaagggccacauggaau

SEQ ID NO: 2546788 - RNA, 19 nt, Homo sapiens
  misc_RNA (1)...(19): siRNA sense strand
ggcaagaccaagaugcaga

SEQ ID NO: 2546789 - RNA, 19 nt, Homo sapiens
  misc_RNA (1)...(19): siRNA sense strand
gcagaaauuacuugagcag

SEQ ID NO: 2546790 - RNA, 19 nt, Homo sapiens
  misc_RNA (1)...(19): siRNA sense strand
gcagagaguacaagcccua

SEQ ID NO: 2546791 - RNA, 19 nt, Homo sapiens
  misc_RNA (1)...(19): siRNA sense strand
augaagacgcuuugauaga

SEQ ID NO: 2546792 - RNA, 19 nt, Homo sapiens
  misc_RNA (1)...(19): siRNA sense strand
aauucugaguggugauaau

SEQ ID NO: 2546793 - RNA, 19 nt, Homo sapiens
  misc_RNA (1)...(19): siRNA sense strand
cugcagaagaaguuugaga

SEQ ID NO: 2546794 - RNA, 19 nt, Homo sapiens
  misc_RNA (1)...(19): siRNA sense strand
agaaacgccaagagaccaa

SEQ ID NO: 2546795 - RNA, 19 nt, Homo sapiens
  misc_RNA (1)...(19): siRNA sense strand
ggugauugucguaggucuu

SEQ ID NO: 2546796 - RNA, 19 nt, Homo sapiens
  misc_RNA (1)...(19): siRNA sense strand
agaaguuugagaagaaaga

SEQ ID NO: 2546797 - RNA, 19 nt, Homo sapiens
  misc_RNA (1)...(19): siRNA sense strand
cuuugauagaugagguaga

SEQ ID NO: 2546798 - RNA, 19 nt, Homo sapiens
  misc_RNA (1)...(19): siRNA sense strand
cgagggugaagaugaggaa

SEQ ID NO: 2546799 - RNA, 19 nt, Homo sapiens
  misc_RNA (1)...(19): siRNA sense strand
ggaaaguguaagcgccuca

SEQ ID NO: 2546800 - RNA, 19 nt, Homo sapiens
  misc_RNA (1)...(19): siRNA sense strand
gugauaaugcgcugccgaa

SEQ ID NO: 2546801 - RNA, 19 nt, Homo sapiens
  misc_RNA (1)...(19): siRNA sense strand
uagaugagguagagagagc

SEQ ID NO: 2546802 - RNA, 19 nt, Homo sapiens
  misc_RNA (1)...(19): siRNA sense strand
gaagaggaggucugggagu

SEQ ID NO: 2546803 - RNA, 19 nt, Homo sapiens
  misc_RNA (1)...(19): siRNA sense strand
auugagacugagagcuuaa

SEQ ID NO: 2546804 - RNA, 19 nt, Homo sapiens
  misc_RNA (1)...(19): siRNA sense strand
ccaacggccaagaugagaa

SEQ ID NO: 2546805 - RNA, 19 nt, Homo sapiens
  misc_RNA (1)...(19): siRNA sense strand
ccaacggccaagaugagaa

SEQ ID NO: 2546806 - RNA, 19 nt, Homo sapiens
  misc_RNA (1)...(19): siRNA sense strand
cugccgagggugaagauga

SEQ ID NO: 2546807 - RNA, 19 nt, Homo sapiens
  misc_RNA (1)...(19): siRNA sense strand
gaugagguagagagagcau

SEQ ID NO: 2546808 - RNA, 19 nt, Homo sapiens
  misc_RNA (1)...(19): siRNA sense strand
gcacaauuacuuugggcuu

SEQ ID NO: 2546809 - RNA, 19 nt, Homo sapiens
  misc_RNA (1)...(19): siRNA sense strand
cgucugagcuccauggaca

SEQ ID NO: 2546810 - RNA, 19 nt, Homo sapiens
  misc_RNA (1)...(19): siRNA sense strand
cagaggagcaguuggccaa

SEQ ID NO: 2546811 - RNA, 19 nt, Homo sapiens
  misc_RNA (1)...(19): siRNA sense strand
ccaaaaguuuacagaggau

SEQ ID NO: 2546812 - RNA, 19 nt, Homo sapiens
  misc_RNA (1)...(19): siRNA sense strand
ggacuaugacugugaccga

SEQ ID NO: 2546813 - RNA, 19 nt, Homo sapiens
  misc_RNA (1)...(19): siRNA sense strand
agacaggagcugagaggcu

SEQ ID NO: 2546814 - RNA, 19 nt, Homo sapiens
  misc_RNA (1)...(19): siRNA sense strand
gcuggagaucagugggcau

SEQ ID NO: 2546815 - RNA, 19 nt, Homo sapiens
  misc_RNA (1)...(19): siRNA sense strand
agcaguuggccaagggcaa

SEQ ID NO: 2546816 - RNA, 19 nt, Homo sapiens
  misc_RNA (1)...(19): siRNA sense strand
cgugaaggccagagaaguc

SEQ ID NO: 2546817 - RNA, 19 nt, Homo sapiens
  misc_RNA (1)...(19): siRNA sense strand
ccaagggcaacaagagcau

SEQ ID NO: 2546818 - RNA, 19 nt, Homo sapiens
  misc_RNA (1)...(19): siRNA sense strand
aggcauaugcagaugacaa

SEQ ID NO: 2546819 - RNA, 19 nt, Homo sapiens
  misc_RNA (1)...(19): siRNA sense strand
ugaaggaacuacagcgaca

SEQ ID NO: 2546820 - RNA, 19 nt, Homo sapiens
  misc_RNA (1)...(19): siRNA sense strand
cgagcaaagacauggguga

SEQ ID NO: 2546821 - RNA, 19 nt, Homo sapiens
  misc_RNA (1)...(19): siRNA sense strand
gggagaaucugcaguggga

SEQ ID NO: 2546822 - RNA, 19 nt, Homo sapiens
  misc_RNA (1)...(19): siRNA sense strand
cagcagaacaagagccagu

SEQ ID NO: 2546823 - RNA, 19 nt, Homo sapiens
  misc_RNA (1)...(19): siRNA sense strand
ggugaaggaacuacagcga

SEQ ID NO: 2546824 - RNA, 19 nt, Homo sapiens
  misc_RNA (1)...(19): siRNA sense strand
augaacagucccagcagaa

SEQ ID NO: 2546825 - RNA, 19 nt, Homo sapiens
  misc_RNA (1)...(19): siRNA sense strand
ccaacaaacguauggugga

SEQ ID NO: 2546826 - RNA, 19 nt, Homo sapiens
  misc_RNA (1)...(19): siRNA sense strand
gcuuauuguucauggagac

SEQ ID NO: 2546827 - RNA, 19 nt, Homo sapiens
  misc_RNA (1)...(19): siRNA sense strand
ucaaggacgacaagggcaa

SEQ ID NO: 2546828 - RNA, 19 nt, Homo sapiens
  misc_RNA (1)...(19): siRNA sense strand
aggaagugaaguuguacaa

SEQ ID NO: 2546829 - RNA, 19 nt, Homo sapiens
  misc_RNA (1)...(19): siRNA sense strand
cugcgagagcugauggaga

SEQ ID NO: 2546830 - RNA, 19 nt, Homo sapiens
  misc_RNA (1)...(19): siRNA sense strand
uugcgguggugaagacaau

SEQ ID NO: 2546831 - RNA, 19 nt, Homo sapiens
  misc_RNA (1)...(19): siRNA sense strand
ucaaggacgacaagggcaa

SEQ ID NO: 2546832 - RNA, 19 nt, Homo sapiens
  misc_RNA (1)...(19): siRNA sense strand
aggaagugaaguuguacaa

SEQ ID NO: 2546833 - RNA, 19 nt, Homo sapiens
  misc_RNA (1)...(19): siRNA sense strand
cugcgagagcugauggaga

SEQ ID NO: 2546834 - RNA, 19 nt, Homo sapiens
  misc_RNA (1)...(19): siRNA sense strand
uugcgguggugaagacaau

SEQ ID NO: 2546835 - RNA, 19 nt, Homo sapiens
  misc_RNA (1)...(19): siRNA sense strand
gcaucugcuacgugggcaa

SEQ ID NO: 2546836 - RNA, 19 nt, Homo sapiens
  misc_RNA (1)...(19): siRNA sense strand
gagcagcacuaccgcgaga

SEQ ID NO: 2546837 - RNA, 19 nt, Homo sapiens
  misc_RNA (1)...(19): siRNA sense strand
gagcagaagauaaugguga

SEQ ID NO: 2546838 - RNA, 19 nt, Homo sapiens
  misc_RNA (1)...(19): siRNA sense strand
aagucuacacagugaauua

SEQ ID NO: 2546839 - RNA, 19 nt, Homo sapiens
  misc_RNA (1)...(19): siRNA sense strand
aaaugguaguggagcagaa

SEQ ID NO: 2546840 - RNA, 19 nt, Homo sapiens
  misc_RNA (1)...(19): siRNA sense strand
aggcaagaaacaacagauu

SEQ ID NO: 2546841 - RNA, 19 nt, Homo sapiens
  misc_RNA (1)...(19): siRNA sense strand
ugaaaaugguaguggagca

SEQ ID NO: 2546842 - RNA, 19 nt, Homo sapiens
  misc_RNA (1)...(19): siRNA sense strand
aggcaauaacagauggcuu

SEQ ID NO: 2546843 - RNA, 19 nt, Homo sapiens
  misc_RNA (1)...(19): siRNA sense strand
agaaguggcaacaaagaau

SEQ ID NO: 2546844 - RNA, 19 nt, Homo sapiens
  misc_RNA (1)...(19): siRNA sense strand
ugaacaaacccauggaacu

SEQ ID NO: 2546845 - RNA, 19 nt, Homo sapiens
  misc_RNA (1)...(19): siRNA sense strand
agaagauaauggugacagu

SEQ ID NO: 2546846 - RNA, 19 nt, Homo sapiens
  misc_RNA (1)...(19): siRNA sense strand
gugaaucaaaccagaugaa

SEQ ID NO: 2546847 - RNA, 19 nt, Homo sapiens
  misc_RNA (1)...(19): siRNA sense strand
auggauggugcuagugaaa

SEQ ID NO: 2546848 - RNA, 19 nt, Homo sapiens
  misc_RNA (1)...(19): siRNA sense strand
aauacuggaaagugaacaa

SEQ ID NO: 2546849 - RNA, 19 nt, Homo sapiens
  misc_RNA (1)...(19): siRNA sense strand
aguaauggauggugcuagu

SEQ ID NO: 2546850 - RNA, 19 nt, Homo sapiens
  misc_RNA (1)...(19): siRNA sense strand
uaguggagcagaagauaau

SEQ ID NO: 2546851 - RNA, 19 nt, Homo sapiens
  misc_RNA (1)...(19): siRNA sense strand
cuuuggaauuggucaguga

SEQ ID NO: 2546852 - RNA, 19 nt, Homo sapiens
  misc_RNA (1)...(19): siRNA sense strand
uguccuaccugucggaaaa

SEQ ID NO: 2546853 - RNA, 19 nt, Homo sapiens
  misc_RNA (1)...(19): siRNA sense strand
cacuaaggccagacccaaa

SEQ ID NO: 2546854 - RNA, 19 nt, Homo sapiens
  misc_RNA (1)...(19): siRNA sense strand
ugauacagccagugagaag

SEQ ID NO: 2546855 - RNA, 19 nt, Homo sapiens
  misc_RNA (1)...(19): siRNA sense strand
aacagauggcuuagaaauu

SEQ ID NO: 2546856 - RNA, 19 nt, Homo sapiens
  misc_RNA (1)...(19): siRNA sense strand
cagucacagcauugaggaa

SEQ ID NO: 2546857 - RNA, 19 nt, Homo sapiens
  misc_RNA (1)...(19): siRNA sense strand
agauaauggugacaguuca

SEQ ID NO: 2546858 - RNA, 19 nt, Homo sapiens
  misc_RNA (1)...(19): siRNA sense strand
acuucgaagcaaaggugaa

SEQ ID NO: 2546859 - RNA, 19 nt, Homo sapiens
  misc_RNA (1)...(19): siRNA sense strand
agugagaaauacuggaaag

SEQ ID NO: 2546860 - RNA, 19 nt, Homo sapiens
  misc_RNA (1)...(19): siRNA sense strand
aauuggucagugagaaaua

SEQ ID NO: 2546861 - RNA, 19 nt, Homo sapiens
  misc_RNA (1)...(19): siRNA sense strand
gaguauuagccaggaucaa

SEQ ID NO: 2546862 - RNA, 19 nt, Homo sapiens
  misc_RNA (1)...(19): siRNA sense strand
ugguaguggagcagaagau

SEQ ID NO: 2546863 - RNA, 19 nt, Homo sapiens
  misc_RNA (1)...(19): siRNA sense strand
acucaaccauuaagcaaaa

SEQ ID NO: 2546864 - RNA, 19 nt, Homo sapiens
  misc_RNA (1)...(19): siRNA sense strand
uccaagucgugaugaguau

SEQ ID NO: 2546865 - RNA, 19 nt, Homo sapiens
  misc_RNA (1)...(19): siRNA sense strand
gacugaagauacaggccau

SEQ ID NO: 2546866 - RNA, 19 nt, Homo sapiens
  misc_RNA (1)...(19): siRNA sense strand
aguaacaaacggaccaaaa

SEQ ID NO: 2546867 - RNA, 19 nt, Homo sapiens
  misc_RNA (1)...(19): siRNA sense strand
ccuacaaaggagcacaaau

SEQ ID NO: 2546868 - RNA, 19 nt, Homo sapiens
  misc_RNA (1)...(19): siRNA sense strand
caucccacacuuauggaaa

SEQ ID NO: 2546869 - RNA, 19 nt, Homo sapiens
  misc_RNA (1)...(19): siRNA sense strand
ucgaagcaaaggugaauca

SEQ ID NO: 2546870 - RNA, 19 nt, Homo sapiens
  misc_RNA (1)...(19): siRNA sense strand
ggaaagugaacaaacccau

SEQ ID NO: 2546871 - RNA, 19 nt, Homo sapiens
  misc_RNA (1)...(19): siRNA sense strand
auucagaagaggaguguaa

SEQ ID NO: 2546872 - RNA, 19 nt, Homo sapiens
  misc_RNA (1)...(19): siRNA sense strand
agugaaaacuacaggaauu

SEQ ID NO: 2546873 - RNA, 19 nt, Homo sapiens
  misc_RNA (1)...(19): siRNA sense strand
guaagaugaucgaccgcaa

SEQ ID NO: 2546874 - RNA, 19 nt, Homo sapiens
  misc_RNA (1)...(19): siRNA sense strand
aauacaaagcaguggucua

SEQ ID NO: 2546875 - RNA, 19 nt, Homo sapiens
  misc_RNA (1)...(19): siRNA sense strand
aagaaaggacacaaaggaa

SEQ ID NO: 2546876 - RNA, 19 nt, Homo sapiens
  misc_RNA (1)...(19): siRNA sense strand
cugaagaugaagaaaugaa

SEQ ID NO: 2546877 - RNA, 19 nt, Homo sapiens
  misc_RNA (1)...(19): siRNA sense strand
cuggaguuauaaagagauu

SEQ ID NO: 2546878 - RNA, 19 nt, Homo sapiens
  misc_RNA (1)...(19): siRNA sense strand
uagcugaagaugaagaaau

SEQ ID NO: 2546879 - RNA, 19 nt, Homo sapiens
  misc_RNA (1)...(19): siRNA sense strand
augaagaggcagcugcaua

SEQ ID NO: 2546880 - RNA, 19 nt, Homo sapiens
  misc_RNA (1)...(19): siRNA sense strand
gcuuaaugauucugcagca

SEQ ID NO: 2546881 - RNA, 19 nt, Homo sapiens
  misc_RNA (1)...(19): siRNA sense strand
agaaaugaaccgaaugcau

SEQ ID NO: 2546882 - RNA, 19 nt, Homo sapiens
  misc_RNA (1)...(19): siRNA sense strand
cugcagaacuugcuggagu

SEQ ID NO: 2546883 - RNA, 19 nt, Homo sapiens
  misc_RNA (1)...(19): siRNA sense strand
acagaauagcucaaccaaa

SEQ ID NO: 2546884 - RNA, 19 nt, Homo sapiens
  misc_RNA (1)...(19): siRNA sense strand
gguaaaaguacaauuguga

SEQ ID NO: 2546885 - RNA, 19 nt, Homo sapiens
  misc_RNA (1)...(19): siRNA sense strand
gagcggaagaaguggauuc

SEQ ID NO: 2546886 - RNA, 19 nt, Homo sapiens
  misc_RNA (1)...(19): siRNA sense strand
acuauaugcuauccagaau

SEQ ID NO: 2546887 - RNA, 19 nt, Homo sapiens
  misc_RNA (1)...(19): siRNA sense strand
aaacacauaugaagaggca

SEQ ID NO: 2546888 - RNA, 19 nt, Homo sapiens
  misc_RNA (1)...(19): siRNA sense strand
cccgagaguaccagcuuaa

SEQ ID NO: 2546889 - RNA, 19 nt, Homo sapiens
  misc_RNA (1)...(19): siRNA sense strand
gcgguggagcggaguaaga

SEQ ID NO: 2546890 - RNA, 19 nt, Homo sapiens
  misc_RNA (1)...(19): siRNA sense strand
acgccaacucuuugugcua

SEQ ID NO: 2546891 - RNA, 19 nt, Homo sapiens
  misc_RNA (1)...(19): siRNA sense strand
caauugugaagcagaugaa

SEQ ID NO: 2546892 - RNA, 19 nt, Homo sapiens
  misc_RNA (1)...(19): siRNA sense strand
gaugaagaaaugaaccgaa

SEQ ID NO: 2546893 - RNA, 19 nt, Homo sapiens
  misc_RNA (1)...(19): siRNA sense strand
aggacacaaaggaaauaua

SEQ ID NO: 2546894 - RNA, 19 nt, Homo sapiens
  misc_RNA (1)...(19): siRNA sense strand
caaaggaaauauacaccca

SEQ ID NO: 2546895 - RNA, 19 nt, Homo sapiens
  misc_RNA (1)...(19): siRNA sense strand
cuauaugcuauccagaaua

SEQ ID NO: 2546896 - RNA, 19 nt, Homo sapiens
  misc_RNA (1)...(19): siRNA sense strand
augcaggaucaaacacaua

SEQ ID NO: 2546897 - RNA, 19 nt, Homo sapiens
  misc_RNA (1)...(19): siRNA sense strand
ugaagauagacuuugguga

SEQ ID NO: 2546898 - RNA, 19 nt, Homo sapiens
  misc_RNA (1)...(19): siRNA sense strand
agaacuagagugaaaacua

SEQ ID NO: 2546899 - RNA, 19 nt, Homo sapiens
  misc_RNA (1)...(19): siRNA sense strand
ucaugugauccgagaggua

SEQ ID NO: 2546900 - RNA, 19 nt, Homo sapiens
  misc_RNA (1)...(19): siRNA sense strand
uggauaacucauuggccaa

SEQ ID NO: 2546901 - RNA, 19 nt, Homo sapiens
  misc_RNA (1)...(19): siRNA sense strand
uggugaagauguugccuuu

SEQ ID NO: 2546902 - RNA, 19 nt, Homo sapiens
  misc_RNA (1)...(19): siRNA sense strand
cugcaguaauauuugguga

SEQ ID NO: 2546903 - RNA, 19 nt, Homo sapiens
  misc_RNA (1)...(19): siRNA sense strand
caggaaucaaggugguuau

SEQ ID NO: 2546904 - RNA, 19 nt, Homo sapiens
  misc_RNA (1)...(19): siRNA sense strand
uuacagggcagcagcggaa

SEQ ID NO: 2546905 - RNA, 19 nt, Homo sapiens
  misc_RNA (1)...(19): siRNA sense strand
gucauugaucugaggacua

SEQ ID NO: 2546906 - RNA, 19 nt, Homo sapiens
  misc_RNA (1)...(19): siRNA sense strand
agucauacaggaagggagu

SEQ ID NO: 2546907 - RNA, 19 nt, Homo sapiens
  misc_RNA (1)...(19): siRNA sense strand
gcucuacaguucaggagga

SEQ ID NO: 2546908 - RNA, 19 nt, Homo sapiens
  misc_RNA (1)...(19): siRNA sense strand
gcgagacaaauauggaaaa

SEQ ID NO: 2546909 - RNA, 19 nt, Homo sapiens
  misc_RNA (1)...(19): siRNA sense strand
uuuguaagucugugaucaa

SEQ ID NO: 2546910 - RNA, 19 nt, Homo sapiens
  misc_RNA (1)...(19): siRNA sense strand
caguaauauuuggugaaga

SEQ ID NO: 2546911 - RNA, 19 nt, Homo sapiens
  misc_RNA (1)...(19): siRNA sense strand
cggaaauucaguuugcaga

SEQ ID NO: 2546912 - RNA, 19 nt, Homo sapiens
  misc_RNA (1)...(19): siRNA sense strand
gagguagcuuccauggcaa

SEQ ID NO: 2546913 - RNA, 19 nt, Homo sapiens
  misc_RNA (1)...(19): siRNA sense strand
aucaagaguaugugguuau

SEQ ID NO: 2546914 - RNA, 19 nt, Homo sapiens
  misc_RNA (1)...(19): siRNA sense strand
ucaugugauccgagaggua

SEQ ID NO: 2546915 - RNA, 19 nt, Homo sapiens
  misc_RNA (1)...(19): siRNA sense strand
uggauaacucauuggccaa

SEQ ID NO: 2546916 - RNA, 19 nt, Homo sapiens
  misc_RNA (1)...(19): siRNA sense strand
uggugaagauguugccuuu

SEQ ID NO: 2546917 - RNA, 19 nt, Homo sapiens
  misc_RNA (1)...(19): siRNA sense strand
cugcaguaauauuugguga

SEQ ID NO: 2546918 - RNA, 19 nt, Homo sapiens
  misc_RNA (1)...(19): siRNA sense strand
caggaaucaaggugguuau

SEQ ID NO: 2546919 - RNA, 19 nt, Homo sapiens
  misc_RNA (1)...(19): siRNA sense strand
uuacagggcagcagcggaa

SEQ ID NO: 2546920 - RNA, 19 nt, Homo sapiens
  misc_RNA (1)...(19): siRNA sense strand
gucauugaucugaggacua

SEQ ID NO: 2546921 - RNA, 19 nt, Homo sapiens
  misc_RNA (1)...(19): siRNA sense strand
agucauacaggaagggagu

SEQ ID NO: 2546922 - RNA, 19 nt, Homo sapiens
  misc_RNA (1)...(19): siRNA sense strand
gcucuacaguucaggagga

SEQ ID NO: 2546923 - RNA, 19 nt, Homo sapiens
  misc_RNA (1)...(19): siRNA sense strand
gcgagacaaauauggaaaa

SEQ ID NO: 2546924 - RNA, 19 nt, Homo sapiens
  misc_RNA (1)...(19): siRNA sense strand
uuuguaagucugugaucaa

SEQ ID NO: 2546925 - RNA, 19 nt, Homo sapiens
  misc_RNA (1)...(19): siRNA sense strand
caguaauauuuggugaaga

SEQ ID NO: 2546926 - RNA, 19 nt, Homo sapiens
  misc_RNA (1)...(19): siRNA sense strand
cggaaauucaguuugcaga

SEQ ID NO: 2546927 - RNA, 19 nt, Homo sapiens
  misc_RNA (1)...(19): siRNA sense strand
gagguagcuuccauggcaa

SEQ ID NO: 2546928 - RNA, 19 nt, Homo sapiens
  misc_RNA (1)...(19): siRNA sense strand
aucaagaguaugugguuau

SEQ ID NO: 2546929 - RNA, 19 nt, Homo sapiens
  misc_RNA (1)...(19): siRNA sense strand
guguaugaacugagaaaua

SEQ ID NO: 2546930 - RNA, 19 nt, Homo sapiens
  misc_RNA (1)...(19): siRNA sense strand
augaagagguagaggaaga

SEQ ID NO: 2546931 - RNA, 19 nt, Homo sapiens
  misc_RNA (1)...(19): siRNA sense strand
agaaaguaacucagagaaa

SEQ ID NO: 2546932 - RNA, 19 nt, Homo sapiens
  misc_RNA (1)...(19): siRNA sense strand
agaacaagaucgaggaaca

SEQ ID NO: 2546933 - RNA, 19 nt, Homo sapiens
  misc_RNA (1)...(19): siRNA sense strand
ccaaauggguuauacgaaa

SEQ ID NO: 2546934 - RNA, 19 nt, Homo sapiens
  misc_RNA (1)...(19): siRNA sense strand
cuaagaaggaggaggaaga

SEQ ID NO: 2546935 - RNA, 19 nt, Homo sapiens
  misc_RNA (1)...(19): siRNA sense strand
gggaaaaggaaaagaaaga

SEQ ID NO: 2546936 - RNA, 19 nt, Homo sapiens
  misc_RNA (1)...(19): siRNA sense strand
gauaauacucacagagaca

SEQ ID NO: 2546937 - RNA, 19 nt, Homo sapiens
  misc_RNA (1)...(19): siRNA sense strand
ggagauggcaaaagagaaa

SEQ ID NO: 2546938 - RNA, 19 nt, Homo sapiens
  misc_RNA (1)...(19): siRNA sense strand
acauaaggguccaguguau

SEQ ID NO: 2546939 - RNA, 19 nt, Homo sapiens
  misc_RNA (1)...(19): siRNA sense strand
cugaagaagcugagaaagu

SEQ ID NO: 2546940 - RNA, 19 nt, Homo sapiens
  misc_RNA (1)...(19): siRNA sense strand
aggauauacuggugcaaau

SEQ ID NO: 2546941 - RNA, 19 nt, Homo sapiens
  misc_RNA (1)...(19): siRNA sense strand
gaaaaggacuagacuguua

SEQ ID NO: 2546942 - RNA, 19 nt, Homo sapiens
  misc_RNA (1)...(19): siRNA sense strand
ggacuagacuguuaugauu

SEQ ID NO: 2546943 - RNA, 19 nt, Homo sapiens
  misc_RNA (1)...(19): siRNA sense strand
guauaaagugacauggaau

SEQ ID NO: 2546944 - RNA, 19 nt, Homo sapiens
  misc_RNA (1)...(19): siRNA sense strand
acaugaagagguagaggaa

SEQ ID NO: 2546945 - RNA, 19 nt, Homo sapiens
  misc_RNA (1)...(19): siRNA sense strand
guuucuaagucaaguguau

SEQ ID NO: 2546946 - RNA, 19 nt, Homo sapiens
  misc_RNA (1)...(19): siRNA sense strand
caaaagaagaccuggagaa

SEQ ID NO: 2546947 - RNA, 19 nt, Homo sapiens
  misc_RNA (1)...(19): siRNA sense strand
gagucaaguaguaaagcaa

SEQ ID NO: 2546948 - RNA, 19 nt, Homo sapiens
  misc_RNA (1)...(19): siRNA sense strand
gaacaacaggagauggcaa

SEQ ID NO: 2546949 - RNA, 19 nt, Homo sapiens
  misc_RNA (1)...(19): siRNA sense strand
gguuauacgaaaaggacua

SEQ ID NO: 2546950 - RNA, 19 nt, Homo sapiens
  misc_RNA (1)...(19): siRNA sense strand
aggaggaggaagaagaaau

SEQ ID NO: 2546951 - RNA, 19 nt, Homo sapiens
  misc_RNA (1)...(19): siRNA sense strand
cuguguaugaacugagaaa

SEQ ID NO: 2546952 - RNA, 19 nt, Homo sapiens
  misc_RNA (1)...(19): siRNA sense strand
uagcagaagaccuggaaga

SEQ ID NO: 2546953 - RNA, 19 nt, Homo sapiens
  misc_RNA (1)...(19): siRNA sense strand
aggaagaaucuaagaagga

SEQ ID NO: 2546954 - RNA, 19 nt, Homo sapiens
  misc_RNA (1)...(19): siRNA sense strand
agaagaaauacaugcagaa

SEQ ID NO: 2546955 - RNA, 19 nt, Homo sapiens
  misc_RNA (1)...(19): siRNA sense strand
ggguguuauuauauggcaa

SEQ ID NO: 2546956 - RNA, 19 nt, Homo sapiens
  misc_RNA (1)...(19): siRNA sense strand
gaacaagaucgaggaacaa

SEQ ID NO: 2546957 - RNA, 19 nt, Homo sapiens
  misc_RNA (1)...(19): siRNA sense strand
agaaauaugccuacuguuu

SEQ ID NO: 2546958 - RNA, 19 nt, Homo sapiens
  misc_RNA (1)...(19): siRNA sense strand
gucaaguaguaaagcaaau

SEQ ID NO: 2546959 - RNA, 19 nt, Homo sapiens
  misc_RNA (1)...(19): siRNA sense strand
ggugcaaaucaaagcagaa

SEQ ID NO: 2546960 - RNA, 19 nt, Homo sapiens
  misc_RNA (1)...(19): siRNA sense strand
acucagagaaacaagaauu

SEQ ID NO: 2546961 - RNA, 19 nt, Homo sapiens
  misc_RNA (1)...(19): siRNA sense strand
guagaaacagauuaggcaa

SEQ ID NO: 2546962 - RNA, 19 nt, Homo sapiens
  misc_RNA (1)...(19): siRNA sense strand
guugaaaggaugaugcaga

SEQ ID NO: 2546963 - RNA, 19 nt, Homo sapiens
  misc_RNA (1)...(19): siRNA sense strand
agucaaaccaaucagcaua

SEQ ID NO: 2546964 - RNA, 19 nt, Homo sapiens
  misc_RNA (1)...(19): siRNA sense strand
uuauauggcaacaggagaa

SEQ ID NO: 2546965 - RNA, 19 nt, Homo sapiens
  misc_RNA (1)...(19): siRNA sense strand
aagaagaaauacaugcaga

SEQ ID NO: 2546966 - RNA, 19 nt, Homo sapiens
  misc_RNA (1)...(19): siRNA sense strand
aaaguaacucagagaaaca

SEQ ID NO: 2546967 - RNA, 19 nt, Homo sapiens
  misc_RNA (1)...(19): siRNA sense strand
guuaugauuugaugcgauu

SEQ ID NO: 2546968 - RNA, 19 nt, Homo sapiens
  misc_RNA (1)...(19): siRNA sense strand
gguccaguguauaaaguga

SEQ ID NO: 2546969 - RNA, 19 nt, Homo sapiens
  misc_RNA (1)...(19): siRNA sense strand
caaauggguuauacgaaaa

SEQ ID NO: 2546970 - RNA, 19 nt, Homo sapiens
  misc_RNA (1)...(19): siRNA sense strand
cuggagaagaauauagaga

SEQ ID NO: 2546971 - RNA, 19 nt, Homo sapiens
  misc_RNA (1)...(19): siRNA sense strand
gaacuacagcugccaguaa

SEQ ID NO: 2546972 - RNA, 19 nt, Homo sapiens
  misc_RNA (1)...(19): siRNA sense strand
uagaaacagauuaggcaau

SEQ ID NO: 2546973 - RNA, 19 nt, Homo sapiens
  misc_RNA (1)...(19): siRNA sense strand
uauaaagacaacacaggua

SEQ ID NO: 2546974 - RNA, 19 nt, Homo sapiens
  misc_RNA (1)...(19): siRNA sense strand
gguaggagacagugaugga

SEQ ID NO: 2546975 - RNA, 19 nt, Homo sapiens
  misc_RNA (1)...(19): siRNA sense strand
gaacugagaaauaugccua

SEQ ID NO: 2546976 - RNA, 19 nt, Homo sapiens
  misc_RNA (1)...(19): siRNA sense strand
cauaaauggaacugauguu

SEQ ID NO: 2546977 - RNA, 19 nt, Homo sapiens
  misc_RNA (1)...(19): siRNA sense strand
aaucuaagaaggaggagga

SEQ ID NO: 2546978 - RNA, 19 nt, Homo sapiens
  misc_RNA (1)...(19): siRNA sense strand
ccacuuacugguacagcaa

SEQ ID NO: 2546979 - RNA, 19 nt, Homo sapiens
  misc_RNA (1)...(19): siRNA sense strand
gcaccaaagaauaaagaug

SEQ ID NO: 2546980 - RNA, 19 nt, Homo sapiens
  misc_RNA (1)...(19): siRNA sense strand
ugcaaaacaugaagaggua

SEQ ID NO: 2546981 - RNA, 19 nt, Homo sapiens
  misc_RNA (1)...(19): siRNA sense strand
aagaaauacaugcagaaga

SEQ ID NO: 2546982 - RNA, 19 nt, Homo sapiens
  misc_RNA (1)...(19): siRNA sense strand
acaaauuucaucaggacuu

SEQ ID NO: 2546983 - RNA, 19 nt, Homo sapiens
  misc_RNA (1)...(19): siRNA sense strand
agucauggucucuguagaa

SEQ ID NO: 2546984 - RNA, 19 nt, Homo sapiens
  misc_RNA (1)...(19): siRNA sense strand
cucagagaaacaagaauua

SEQ ID NO: 2546985 - RNA, 19 nt, Homo sapiens
  misc_RNA (1)...(19): siRNA sense strand
aggaggaagaagaaauaca

SEQ ID NO: 2546986 - RNA, 19 nt, Homo sapiens
  misc_RNA (1)...(19): siRNA sense strand
guggauagaacaagaucga

SEQ ID NO: 2546987 - RNA, 19 nt, Homo sapiens
  misc_RNA (1)...(19): siRNA sense strand
ggaaucaaguucacaacca

SEQ ID NO: 2546988 - RNA, 19 nt, Homo sapiens
  misc_RNA (1)...(19): siRNA sense strand
aagugaaucaauagcagaa

SEQ ID NO: 2546989 - RNA, 19 nt, Homo sapiens
  misc_RNA (1)...(19): siRNA sense strand
auggagcaccaaagaauaa

SEQ ID NO: 2546990 - RNA, 19 nt, Homo sapiens
  misc_RNA (1)...(19): siRNA sense strand
ccaccaaggcccuggaaaa

SEQ ID NO: 2546991 - RNA, 19 nt, Homo sapiens
  misc_RNA (1)...(19): siRNA sense strand
gaaccaacuuccugcgcua

SEQ ID NO: 2546992 - RNA, 19 nt, Homo sapiens
  misc_RNA (1)...(19): siRNA sense strand
gcuugggugaagaggaaua

SEQ ID NO: 2546993 - RNA, 19 nt, Homo sapiens
  misc_RNA (1)...(19): siRNA sense strand
cgaucaaccuguacgccaa

SEQ ID NO: 2546994 - RNA, 19 nt, Homo sapiens
  misc_RNA (1)...(19): siRNA sense strand
caggagaauaagaagaaga

SEQ ID NO: 2546995 - RNA, 19 nt, Homo sapiens
  misc_RNA (1)...(19): siRNA sense strand
acaagaaagucacggagga

SEQ ID NO: 2546996 - RNA, 19 nt, Homo sapiens
  misc_RNA (1)...(19): siRNA sense strand
ccaacaacauggacggcca

SEQ ID NO: 2546997 - RNA, 19 nt, Homo sapiens
  misc_RNA (1)...(19): siRNA sense strand
agaagaagacuguggugga

SEQ ID NO: 2546998 - RNA, 19 nt, Homo sapiens
  misc_RNA (1)...(19): siRNA sense strand
gagaauaagaagaagacug

SEQ ID NO: 2546999 - RNA, 19 nt, Homo sapiens
  misc_RNA (1)...(19): siRNA sense strand
agaaagucacggaggagga

SEQ ID NO: 2547000 - RNA, 19 nt, Homo sapiens
  misc_RNA (1)...(19): siRNA sense strand
ggacagucucuaaggccau

SEQ ID NO: 2547001 - RNA, 19 nt, Homo sapiens
  misc_RNA (1)...(19): siRNA sense strand
ucguggaaggcgucaauaa

SEQ ID NO: 2547002 - RNA, 19 nt, Homo sapiens
  misc_RNA (1)...(19): siRNA sense strand
aggccaagaacuucaagaa

SEQ ID NO: 2547003 - RNA, 19 nt, Homo sapiens
  misc_RNA (1)...(19): siRNA sense strand
gcacagagccaaugccaag

SEQ ID NO: 2547004 - RNA, 19 nt, Homo sapiens
  misc_RNA (1)...(19): siRNA sense strand
gugccaagaccuacgccua

SEQ ID NO: 2547005 - RNA, 19 nt, Homo sapiens
  misc_RNA (1)...(19): siRNA sense strand
cccugaaggccaagaacuu

SEQ ID NO: 2547006 - RNA, 19 nt, Homo sapiens
  misc_RNA (1)...(19): siRNA sense strand
guacacagaagguggguuc

SEQ ID NO: 2547007 - RNA, 19 nt, Homo sapiens
  misc_RNA (1)...(19): siRNA sense strand
uggacaucuucaagggcau

SEQ ID NO: 2547008 - RNA, 19 nt, Homo sapiens
  misc_RNA (1)...(19): siRNA sense strand
uguaugacggcgaggagau

SEQ ID NO: 2547009 - RNA, 19 nt, Homo sapiens
  misc_RNA (1)...(19): siRNA sense strand
ggaaggaguaugagggaga

SEQ ID NO: 2547010 - RNA, 19 nt, Homo sapiens
  misc_RNA (1)...(19): siRNA sense strand
gugcauggcuguugccgua

SEQ ID NO: 2547011 - RNA, 19 nt, Homo sapiens
  misc_RNA (1)...(19): siRNA sense strand
agcgaaagcaugagcggaa

SEQ ID NO: 2547012 - RNA, 19 nt, Homo sapiens
  misc_RNA (1)...(19): siRNA sense strand
augugaacgccaaggacaa

SEQ ID NO: 2547013 - RNA, 19 nt, Homo sapiens
  misc_RNA (1)...(19): siRNA sense strand
gggcacaguacgagcagga

SEQ ID NO: 2547014 - RNA, 19 nt, Homo sapiens
  misc_RNA (1)...(19): siRNA sense strand
gugccaaugugaacgccaa

SEQ ID NO: 2547015 - RNA, 19 nt, Homo sapiens
  misc_RNA (1)...(19): siRNA sense strand
ggacggacucacagcccua

SEQ ID NO: 2547016 - RNA, 19 nt, Homo sapiens
  misc_RNA (1)...(19): siRNA sense strand
gcggagugcagcugaggau

SEQ ID NO: 2547017 - RNA, 19 nt, Homo sapiens
  misc_RNA (1)...(19): siRNA sense strand
aguaugagggagaggccau

SEQ ID NO: 2547018 - RNA, 19 nt, Homo sapiens
  misc_RNA (1)...(19): siRNA sense strand
cugucaacucggaugggaa

SEQ ID NO: 2547019 - RNA, 19 nt, Homo sapiens
  misc_RNA (1)...(19): siRNA sense strand
ggacagaugcagauggcag

SEQ ID NO: 2547020 - RNA, 19 nt, Homo sapiens
  misc_RNA (1)...(19): siRNA sense strand
uggacaugccuguugagaa

SEQ ID NO: 2547021 - RNA, 19 nt, Homo sapiens
  misc_RNA (1)...(19): siRNA sense strand
ggagcagcuacaaggaaca

SEQ ID NO: 2547022 - RNA, 19 nt, Homo sapiens
  misc_RNA (1)...(19): siRNA sense strand
gaugcagauggcagagcua

SEQ ID NO: 2547023 - RNA, 19 nt, Homo sapiens
  misc_RNA (1)...(19): siRNA sense strand
aggcagaacuucaccguac

SEQ ID NO: 2547024 - RNA, 19 nt, Homo sapiens
  misc_RNA (1)...(19): siRNA sense strand
ggauagaugcccagggugc

SEQ ID NO: 2547025 - RNA, 19 nt, Homo sapiens
  misc_RNA (1)...(19): siRNA sense strand
acgccgaggaaguacgcua

SEQ ID NO: 2547026 - RNA, 19 nt, Homo sapiens
  misc_RNA (1)...(19): siRNA sense strand
uggcagagcuauugguguc

SEQ ID NO: 2547027 - RNA, 19 nt, Homo sapiens
  misc_RNA (1)...(19): siRNA sense strand
uggagaagcccgugcuacu

SEQ ID NO: 2547028 - RNA, 19 nt, Homo sapiens
  misc_RNA (1)...(19): siRNA sense strand
agaagaagaccaaggagga

SEQ ID NO: 2547029 - RNA, 19 nt, Homo sapiens
  misc_RNA (1)...(19): siRNA sense strand
gagaugaaauuguggaccu

SEQ ID NO: 2547030 - RNA, 19 nt, Homo sapiens
  misc_RNA (1)...(19): siRNA sense strand
aagaaagcgucguggugga

SEQ ID NO: 2547031 - RNA, 19 nt, Homo sapiens
  misc_RNA (1)...(19): siRNA sense strand
agacaagcucagaagcgaa

SEQ ID NO: 2547032 - RNA, 19 nt, Homo sapiens
  misc_RNA (1)...(19): siRNA sense strand
ugacgaaagaagaagacca

SEQ ID NO: 2547033 - RNA, 19 nt, Homo sapiens
  misc_RNA (1)...(19): siRNA sense strand
ugcccaacuuguaggaaaa

SEQ ID NO: 2547034 - RNA, 19 nt, Homo sapiens
  misc_RNA (1)...(19): siRNA sense strand
uguugugauuguugacgaa

SEQ ID NO: 2547035 - RNA, 19 nt, Homo sapiens
  misc_RNA (1)...(19): siRNA sense strand
agaucaaccacaaacggua

SEQ ID NO: 2547036 - RNA, 19 nt, Homo sapiens
  misc_RNA (1)...(19): siRNA sense strand
gagaauggcugccgcgaga

SEQ ID NO: 2547037 - RNA, 19 nt, Homo sapiens
  misc_RNA (1)...(19): siRNA sense strand
gccaagagugugaggacau

SEQ ID NO: 2547038 - RNA, 19 nt, Homo sapiens
  misc_RNA (1)...(19): siRNA sense strand
gcaagcaauuuguggagca

SEQ ID NO: 2547039 - RNA, 19 nt, Homo sapiens
  misc_RNA (1)...(19): siRNA sense strand
gugccaaagccuggagcaa

SEQ ID NO: 2547040 - RNA, 19 nt, Homo sapiens
  misc_RNA (1)...(19): siRNA sense strand
agggaaaagugcaagcaau

SEQ ID NO: 2547041 - RNA, 19 nt, Homo sapiens
  misc_RNA (1)...(19): siRNA sense strand
aggccauaccacaggcaau

SEQ ID NO: 2547042 - RNA, 19 nt, Homo sapiens
  misc_RNA (1)...(19): siRNA sense strand
agccagagccagagcagga

SEQ ID NO: 2547043 - RNA, 19 nt, Homo sapiens
  misc_RNA (1)...(19): siRNA sense strand
ucgacuacuuccagaacca

SEQ ID NO: 2547044 - RNA, 19 nt, Homo sapiens
  misc_RNA (1)...(19): siRNA sense strand
gagaauggcugccgcgaga

SEQ ID NO: 2547045 - RNA, 19 nt, Homo sapiens
  misc_RNA (1)...(19): siRNA sense strand
gccaagagugugaggacau

SEQ ID NO: 2547046 - RNA, 19 nt, Homo sapiens
  misc_RNA (1)...(19): siRNA sense strand
gcaagcaauuuguggagca

SEQ ID NO: 2547047 - RNA, 19 nt, Homo sapiens
  misc_RNA (1)...(19): siRNA sense strand
gugccaaagccuggagcaa

SEQ ID NO: 2547048 - RNA, 19 nt, Homo sapiens
  misc_RNA (1)...(19): siRNA sense strand
agggaaaagugcaagcaau

SEQ ID NO: 2547049 - RNA, 19 nt, Homo sapiens
  misc_RNA (1)...(19): siRNA sense strand
aggccauaccacaggcaau

SEQ ID NO: 2547050 - RNA, 19 nt, Homo sapiens
  misc_RNA (1)...(19): siRNA sense strand
agccagagccagagcagga

SEQ ID NO: 2547051 - RNA, 19 nt, Homo sapiens
  misc_RNA (1)...(19): siRNA sense strand
ucgacuacuuccagaacca

SEQ ID NO: 2547052 - RNA, 19 nt, Homo sapiens
  misc_RNA (1)...(19): siRNA sense strand
agaugguggcagugaagaa

SEQ ID NO: 2547053 - RNA, 19 nt, Homo sapiens
  misc_RNA (1)...(19): siRNA sense strand
ugaugaagauuaucggcuu

SEQ ID NO: 2547054 - RNA, 19 nt, Homo sapiens
  misc_RNA (1)...(19): siRNA sense strand
gaaucagucuagaucgaga

SEQ ID NO: 2547055 - RNA, 19 nt, Homo sapiens
  misc_RNA (1)...(19): siRNA sense strand
gagaucagaugguggcagu

SEQ ID NO: 2547056 - RNA, 19 nt, Homo sapiens
  misc_RNA (1)...(19): siRNA sense strand
caugaaaaugagagaagau

SEQ ID NO: 2547057 - RNA, 19 nt, Homo sapiens
  misc_RNA (1)...(19): siRNA sense strand
agagaagauggcagcaaga

SEQ ID NO: 2547058 - RNA, 19 nt, Homo sapiens
  misc_RNA (1)...(19): siRNA sense strand
gugaagaaaccuuaccuca

SEQ ID NO: 2547059 - RNA, 19 nt, Homo sapiens
  misc_RNA (1)...(19): siRNA sense strand
gcgcacaggaaaugcaacu

SEQ ID NO: 2547060 - RNA, 19 nt, Homo sapiens
  misc_RNA (1)...(19): siRNA sense strand
agaugguggcagugaagaa

SEQ ID NO: 2547061 - RNA, 19 nt, Homo sapiens
  misc_RNA (1)...(19): siRNA sense strand
ugaugaagauuaucggcuu

SEQ ID NO: 2547062 - RNA, 19 nt, Homo sapiens
  misc_RNA (1)...(19): siRNA sense strand
gaaucagucuagaucgaga

SEQ ID NO: 2547063 - RNA, 19 nt, Homo sapiens
  misc_RNA (1)...(19): siRNA sense strand
gagaucagaugguggcagu

SEQ ID NO: 2547064 - RNA, 19 nt, Homo sapiens
  misc_RNA (1)...(19): siRNA sense strand
caugaaaaugagagaagau

SEQ ID NO: 2547065 - RNA, 19 nt, Homo sapiens
  misc_RNA (1)...(19): siRNA sense strand
agagaagauggcagcaaga

SEQ ID NO: 2547066 - RNA, 19 nt, Homo sapiens
  misc_RNA (1)...(19): siRNA sense strand
gugaagaaaccuuaccuca

SEQ ID NO: 2547067 - RNA, 19 nt, Homo sapiens
  misc_RNA (1)...(19): siRNA sense strand
gcgcacaggaaaugcaacu

SEQ ID NO: 2547068 - RNA, 19 nt, Homo sapiens
  misc_RNA (1)...(19): siRNA sense strand
agaugguggcagugaagaa

SEQ ID NO: 2547069 - RNA, 19 nt, Homo sapiens
  misc_RNA (1)...(19): siRNA sense strand
ugaugaagauuaucggcuu

SEQ ID NO: 2547070 - RNA, 19 nt, Homo sapiens
  misc_RNA (1)...(19): siRNA sense strand
gaaucagucuagaucgaga

SEQ ID NO: 2547071 - RNA, 19 nt, Homo sapiens
  misc_RNA (1)...(19): siRNA sense strand
gagaucagaugguggcagu

SEQ ID NO: 2547072 - RNA, 19 nt, Homo sapiens
  misc_RNA (1)...(19): siRNA sense strand
caugaaaaugagagaagau

SEQ ID NO: 2547073 - RNA, 19 nt, Homo sapiens
  misc_RNA (1)...(19): siRNA sense strand
agagaagauggcagcaaga

SEQ ID NO: 2547074 - RNA, 19 nt, Homo sapiens
  misc_RNA (1)...(19): siRNA sense strand
gugaagaaaccuuaccuca

SEQ ID NO: 2547075 - RNA, 19 nt, Homo sapiens
  misc_RNA (1)...(19): siRNA sense strand
gcgcacaggaaaugcaacu

SEQ ID NO: 2547076 - RNA, 19 nt, Homo sapiens
  misc_RNA (1)...(19): siRNA sense strand
agaugguggcagugaagaa

SEQ ID NO: 2547077 - RNA, 19 nt, Homo sapiens
  misc_RNA (1)...(19): siRNA sense strand
ugaugaagauuaucggcuu

SEQ ID NO: 2547078 - RNA, 19 nt, Homo sapiens
  misc_RNA (1)...(19): siRNA sense strand
gaaucagucuagaucgaga

SEQ ID NO: 2547079 - RNA, 19 nt, Homo sapiens
  misc_RNA (1)...(19): siRNA sense strand
gagaucagaugguggcagu

SEQ ID NO: 2547080 - RNA, 19 nt, Homo sapiens
  misc_RNA (1)...(19): siRNA sense strand
caugaaaaugagagaagau

SEQ ID NO: 2547081 - RNA, 19 nt, Homo sapiens
  misc_RNA (1)...(19): siRNA sense strand
agagaagauggcagcaaga

SEQ ID NO: 2547082 - RNA, 19 nt, Homo sapiens
  misc_RNA (1)...(19): siRNA sense strand
gugaagaaaccuuaccuca

SEQ ID NO: 2547083 - RNA, 19 nt, Homo sapiens
  misc_RNA (1)...(19): siRNA sense strand
gcgcacaggaaaugcaacu

SEQ ID NO: 2547084 - RNA, 19 nt, Homo sapiens
  misc_RNA (1)...(19): siRNA sense strand
agguggagcuggaggccaa

SEQ ID NO: 2547085 - RNA, 19 nt, Homo sapiens
  misc_RNA (1)...(19): siRNA sense strand
cggaauacccggaaugaga

SEQ ID NO: 2547086 - RNA, 19 nt, Homo sapiens
  misc_RNA (1)...(19): siRNA sense strand
aggaugugguggaggacuu

SEQ ID NO: 2547087 - RNA, 19 nt, Homo sapiens
  misc_RNA (1)...(19): siRNA sense strand
gcaucaucgcugaggucaa

SEQ ID NO: 2547088 - RNA, 19 nt, Homo sapiens
  misc_RNA (1)...(19): siRNA sense strand
gagugggagccgugaauau

SEQ ID NO: 2547089 - RNA, 19 nt, Homo sapiens
  misc_RNA (1)...(19): siRNA sense strand
aguuuguggugcugaagaa

SEQ ID NO: 2547090 - RNA, 19 nt, Homo sapiens
  misc_RNA (1)...(19): siRNA sense strand
ugacagagcugcaguccca

SEQ ID NO: 2547091 - RNA, 19 nt, Homo sapiens
  misc_RNA (1)...(19): siRNA sense strand
aguaugaggagauggccaa

SEQ ID NO: 2547092 - RNA, 19 nt, Homo sapiens
  misc_RNA (1)...(19): siRNA sense strand
uagcaguggcgguggcauu

SEQ ID NO: 2547093 - RNA, 19 nt, Homo sapiens
  misc_RNA (1)...(19): siRNA sense strand
agaucaagacccucaacaa

SEQ ID NO: 2547094 - RNA, 19 nt, Homo sapiens
  misc_RNA (1)...(19): siRNA sense strand
cagaacaagcugcuggaga

SEQ ID NO: 2547095 - RNA, 19 nt, Homo sapiens
  misc_RNA (1)...(19): siRNA sense strand
ugaauaucucugugaugaa

SEQ ID NO: 2547096 - RNA, 19 nt, Homo sapiens
  misc_RNA (1)...(19): siRNA sense strand
agaccaaguuugagacccu

SEQ ID NO: 2547097 - RNA, 19 nt, Homo sapiens
  misc_RNA (1)...(19): siRNA sense strand
ucgacaacaucaagaacca

SEQ ID NO: 2547098 - RNA, 19 nt, Homo sapiens
  misc_RNA (1)...(19): siRNA sense strand
agaacaagcugcuggagac

SEQ ID NO: 2547099 - RNA, 19 nt, Homo sapiens
  misc_RNA (1)...(19): siRNA sense strand
ugagcaagguggagcugga

SEQ ID NO: 2547100 - RNA, 19 nt, Homo sapiens
  misc_RNA (1)...(19): siRNA sense strand
ccgguuggcuggagaugga

SEQ ID NO: 2547101 - RNA, 19 nt, Homo sapiens
  misc_RNA (1)...(19): siRNA sense strand
gugccaagcaggaggagcu

SEQ ID NO: 2547102 - RNA, 19 nt, Homo sapiens
  misc_RNA (1)...(19): siRNA sense strand
ggcuggagauggaguggga

SEQ ID NO: 2547103 - RNA, 19 nt, Homo sapiens
  misc_RNA (1)...(19): siRNA sense strand
ugguggaggacuucaagaa

SEQ ID NO: 2547104 - RNA, 19 nt, Homo sapiens
  misc_RNA (1)...(19): siRNA sense strand
agaaugaguuuguggugcu

SEQ ID NO: 2547105 - RNA, 19 nt, Homo sapiens
  misc_RNA (1)...(19): siRNA sense strand
acaagaagaaggagaagaa

SEQ ID NO: 2547106 - RNA, 19 nt, Homo sapiens
  misc_RNA (1)...(19): siRNA sense strand
gagaaguagaagaggaaca

SEQ ID NO: 2547107 - RNA, 19 nt, Homo sapiens
  misc_RNA (1)...(19): siRNA sense strand
aaauauaagugaaggggaa

SEQ ID NO: 2547108 - RNA, 19 nt, Homo sapiens
  misc_RNA (1)...(19): siRNA sense strand
aggaagaugaagaggaaga

SEQ ID NO: 2547109 - RNA, 19 nt, Homo sapiens
  misc_RNA (1)...(19): siRNA sense strand
aggagaaguagaagaggaa

SEQ ID NO: 2547110 - RNA, 19 nt, Homo sapiens
  misc_RNA (1)...(19): siRNA sense strand
aggaagaggaagaugaaga

SEQ ID NO: 2547111 - RNA, 19 nt, Homo sapiens
  misc_RNA (1)...(19): siRNA sense strand
cggaauaugaagcaacaaa

SEQ ID NO: 2547112 - RNA, 19 nt, Homo sapiens
  misc_RNA (1)...(19): siRNA sense strand
acaacaagaagaaggagaa

SEQ ID NO: 2547113 - RNA, 19 nt, Homo sapiens
  misc_RNA (1)...(19): siRNA sense strand
agugauaagucaugacaga

SEQ ID NO: 2547114 - RNA, 19 nt, Homo sapiens
  misc_RNA (1)...(19): siRNA sense strand
cugaggaggaagaggaaga

SEQ ID NO: 2547115 - RNA, 19 nt, Homo sapiens
  misc_RNA (1)...(19): siRNA sense strand
agaagaaggagaagaagau

SEQ ID NO: 2547116 - RNA, 19 nt, Homo sapiens
  misc_RNA (1)...(19): siRNA sense strand
ugauguggauguagaggaa

SEQ ID NO: 2547117 - RNA, 19 nt, Homo sapiens
  misc_RNA (1)...(19): siRNA sense strand
aggagugaucaguggauua

SEQ ID NO: 2547118 - RNA, 19 nt, Homo sapiens
  misc_RNA (1)...(19): siRNA sense strand
agagguaggcagaaugaaa

SEQ ID NO: 2547119 - RNA, 19 nt, Homo sapiens
  misc_RNA (1)...(19): siRNA sense strand
gugcuaagaggcugguaua

SEQ ID NO: 2547120 - RNA, 19 nt, Homo sapiens
  misc_RNA (1)...(19): siRNA sense strand
cuucaacaauguaagcaaa

SEQ ID NO: 2547121 - RNA, 19 nt, Homo sapiens
  misc_RNA (1)...(19): siRNA sense strand
gaaauuaacugcaucccaa

SEQ ID NO: 2547122 - RNA, 19 nt, Homo sapiens
  misc_RNA (1)...(19): siRNA sense strand
ccuggaauaugaugagaau

SEQ ID NO: 2547123 - RNA, 19 nt, Homo sapiens
  misc_RNA (1)...(19): siRNA sense strand
augaagaggaagaagguga

SEQ ID NO: 2547124 - RNA, 19 nt, Homo sapiens
  misc_RNA (1)...(19): siRNA sense strand
acaaauuuccagugaugaa

SEQ ID NO: 2547125 - RNA, 19 nt, Homo sapiens
  misc_RNA (1)...(19): siRNA sense strand
ugaugaaggagaaguagaa

SEQ ID NO: 2547126 - RNA, 19 nt, Homo sapiens
  misc_RNA (1)...(19): siRNA sense strand
agaaggagaagaagaugaa

SEQ ID NO: 2547127 - RNA, 19 nt, Homo sapiens
  misc_RNA (1)...(19): siRNA sense strand
gguuaagcuauuugcaauu

SEQ ID NO: 2547128 - RNA, 19 nt, Homo sapiens
  misc_RNA (1)...(19): siRNA sense strand
uagaggaagaagaggauga

SEQ ID NO: 2547129 - RNA, 19 nt, Homo sapiens
  misc_RNA (1)...(19): siRNA sense strand
ggaacaacaagaagaagga

SEQ ID NO: 2547130 - RNA, 19 nt, Homo sapiens
  misc_RNA (1)...(19): siRNA sense strand
ugaagaaggugaaggggau

SEQ ID NO: 2547131 - RNA, 19 nt, Homo sapiens
  misc_RNA (1)...(19): siRNA sense strand
ggguaacagcuuuagaaga

SEQ ID NO: 2547132 - RNA, 19 nt, Homo sapiens
  misc_RNA (1)...(19): siRNA sense strand
uggaauaugaugagaauac

SEQ ID NO: 2547133 - RNA, 19 nt, Homo sapiens
  misc_RNA (1)...(19): siRNA sense strand
auguggauguagaggaaga

SEQ ID NO: 2547134 - RNA, 19 nt, Homo sapiens
  misc_RNA (1)...(19): siRNA sense strand
gguugggaagccuggaaua

SEQ ID NO: 2547135 - RNA, 19 nt, Homo sapiens
  misc_RNA (1)...(19): siRNA sense strand
ggauagagugauaagucau

SEQ ID NO: 2547136 - RNA, 19 nt, Homo sapiens
  misc_RNA (1)...(19): siRNA sense strand
agaugaagaugauguggau

SEQ ID NO: 2547137 - RNA, 19 nt, Homo sapiens
  misc_RNA (1)...(19): siRNA sense strand
gugaaggggaugaugguua

SEQ ID NO: 2547138 - RNA, 19 nt, Homo sapiens
  misc_RNA (1)...(19): siRNA sense strand
agaagauagaggugcaaaa

SEQ ID NO: 2547139 - RNA, 19 nt, Homo sapiens
  misc_RNA (1)...(19): siRNA sense strand
agaggaacaacaagaagaa

SEQ ID NO: 2547140 - RNA, 19 nt, Homo sapiens
  misc_RNA (1)...(19): siRNA sense strand
aggugaagaggaugaagaa

SEQ ID NO: 2547141 - RNA, 19 nt, Homo sapiens
  misc_RNA (1)...(19): siRNA sense strand
ggaauaugaagcaacaaau

SEQ ID NO: 2547142 - RNA, 19 nt, Homo sapiens
  misc_RNA (1)...(19): siRNA sense strand
gggagaaagaagaucaguu

SEQ ID NO: 2547143 - RNA, 19 nt, Homo sapiens
  misc_RNA (1)...(19): siRNA sense strand
aaggagaaguagaagagga

SEQ ID NO: 2547144 - RNA, 19 nt, Homo sapiens
  misc_RNA (1)...(19): siRNA sense strand
aggaagaagaggaugagga

SEQ ID NO: 2547145 - RNA, 19 nt, Homo sapiens
  misc_RNA (1)...(19): siRNA sense strand
aggaggaagaggaagauga

SEQ ID NO: 2547146 - RNA, 19 nt, Homo sapiens
  misc_RNA (1)...(19): siRNA sense strand
aagaaggugaagaggauga

SEQ ID NO: 2547147 - RNA, 19 nt, Homo sapiens
  misc_RNA (1)...(19): siRNA sense strand
uagagaagauagaggugca

SEQ ID NO: 2547148 - RNA, 19 nt, Homo sapiens
  misc_RNA (1)...(19): siRNA sense strand
gcuacaagcaggagugauc

SEQ ID NO: 2547149 - RNA, 19 nt, Homo sapiens
  misc_RNA (1)...(19): siRNA sense strand
uuguacagccagugaagaa

SEQ ID NO: 2547150 - RNA, 19 nt, Homo sapiens
  misc_RNA (1)...(19): siRNA sense strand
gaguauguuaagcagaaua

SEQ ID NO: 2547151 - RNA, 19 nt, Homo sapiens
  misc_RNA (1)...(19): siRNA sense strand
ugauaagucaugacagaga

SEQ ID NO: 2547152 - RNA, 19 nt, Homo sapiens
  misc_RNA (1)...(19): siRNA sense strand
aaguagaagaggaacaaca

SEQ ID NO: 2547153 - RNA, 19 nt, Homo sapiens
  misc_RNA (1)...(19): siRNA sense strand
aagaaggagaagaagauga

SEQ ID NO: 2547154 - RNA, 19 nt, Homo sapiens
  misc_RNA (1)...(19): siRNA sense strand
aaggagaagaagaugaaga

SEQ ID NO: 2547155 - RNA, 19 nt, Homo sapiens
  misc_RNA (1)...(19): siRNA sense strand
aggagaagaagaugaagau

SEQ ID NO: 2547156 - RNA, 19 nt, Homo sapiens
  misc_RNA (1)...(19): siRNA sense strand
aggaagaaggugaagagga

SEQ ID NO: 2547157 - RNA, 19 nt, Homo sapiens
  misc_RNA (1)...(19): siRNA sense strand
aagucuugucagagauuaa

SEQ ID NO: 2547158 - RNA, 19 nt, Homo sapiens
  misc_RNA (1)...(19): siRNA sense strand
ggaucaguggauagaguga

SEQ ID NO: 2547159 - RNA, 19 nt, Homo sapiens
  misc_RNA (1)...(19): siRNA sense strand
guuaagcagaauaucgaua

SEQ ID NO: 2547160 - RNA, 19 nt, Homo sapiens
  misc_RNA (1)...(19): siRNA sense strand
acaauagagcauauggaga

SEQ ID NO: 2547161 - RNA, 19 nt, Homo sapiens
  misc_RNA (1)...(19): siRNA sense strand
aguagaagaggaacaacaa

SEQ ID NO: 2547162 - RNA, 19 nt, Homo sapiens
  misc_RNA (1)...(19): siRNA sense strand
ugacuuggaacgugaaaca

SEQ ID NO: 2547163 - RNA, 19 nt, Homo sapiens
  misc_RNA (1)...(19): siRNA sense strand
gguuguuacugcugguuca

SEQ ID NO: 2547164 - RNA, 19 nt, Homo sapiens
  misc_RNA (1)...(19): siRNA sense strand
uugaguauguuaagcagaa

SEQ ID NO: 2547165 - RNA, 19 nt, Homo sapiens
  misc_RNA (1)...(19): siRNA sense strand
ugaagaggaagaaggugaa

SEQ ID NO: 2547166 - RNA, 19 nt, Homo sapiens
  misc_RNA (1)...(19): siRNA sense strand
cagugaugaagauggaauu

SEQ ID NO: 2547167 - RNA, 19 nt, Homo sapiens
  misc_RNA (1)...(19): siRNA sense strand
ggggaaauagaaaggcuua

SEQ ID NO: 2547168 - RNA, 19 nt, Homo sapiens
  misc_RNA (1)...(19): siRNA sense strand
agguggauccuuugaguuu

SEQ ID NO: 2547169 - RNA, 19 nt, Homo sapiens
  misc_RNA (1)...(19): siRNA sense strand
gagcauauggagagacauc

SEQ ID NO: 2547170 - RNA, 19 nt, Homo sapiens
  misc_RNA (1)...(19): siRNA sense strand
acaagaagaaggagaagaa

SEQ ID NO: 2547171 - RNA, 19 nt, Homo sapiens
  misc_RNA (1)...(19): siRNA sense strand
gagaaguagaagaggaaca

SEQ ID NO: 2547172 - RNA, 19 nt, Homo sapiens
  misc_RNA (1)...(19): siRNA sense strand
aaauauaagugaaggggaa

SEQ ID NO: 2547173 - RNA, 19 nt, Homo sapiens
  misc_RNA (1)...(19): siRNA sense strand
aggaagaugaagaggaaga

SEQ ID NO: 2547174 - RNA, 19 nt, Homo sapiens
  misc_RNA (1)...(19): siRNA sense strand
aggagaaguagaagaggaa

SEQ ID NO: 2547175 - RNA, 19 nt, Homo sapiens
  misc_RNA (1)...(19): siRNA sense strand
aggaagaggaagaugaaga

SEQ ID NO: 2547176 - RNA, 19 nt, Homo sapiens
  misc_RNA (1)...(19): siRNA sense strand
cggaauaugaagcaacaaa

SEQ ID NO: 2547177 - RNA, 19 nt, Homo sapiens
  misc_RNA (1)...(19): siRNA sense strand
acaacaagaagaaggagaa

SEQ ID NO: 2547178 - RNA, 19 nt, Homo sapiens
  misc_RNA (1)...(19): siRNA sense strand
agugauaagucaugacaga

SEQ ID NO: 2547179 - RNA, 19 nt, Homo sapiens
  misc_RNA (1)...(19): siRNA sense strand
cugaggaggaagaggaaga

SEQ ID NO: 2547180 - RNA, 19 nt, Homo sapiens
  misc_RNA (1)...(19): siRNA sense strand
agaagaaggagaagaagau

SEQ ID NO: 2547181 - RNA, 19 nt, Homo sapiens
  misc_RNA (1)...(19): siRNA sense strand
ugauguggauguagaggaa

SEQ ID NO: 2547182 - RNA, 19 nt, Homo sapiens
  misc_RNA (1)...(19): siRNA sense strand
aggagugaucaguggauua

SEQ ID NO: 2547183 - RNA, 19 nt, Homo sapiens
  misc_RNA (1)...(19): siRNA sense strand
agagguaggcagaaugaaa

SEQ ID NO: 2547184 - RNA, 19 nt, Homo sapiens
  misc_RNA (1)...(19): siRNA sense strand
gugcuaagaggcugguaua

SEQ ID NO: 2547185 - RNA, 19 nt, Homo sapiens
  misc_RNA (1)...(19): siRNA sense strand
cuucaacaauguaagcaaa

SEQ ID NO: 2547186 - RNA, 19 nt, Homo sapiens
  misc_RNA (1)...(19): siRNA sense strand
gaaauuaacugcaucccaa

SEQ ID NO: 2547187 - RNA, 19 nt, Homo sapiens
  misc_RNA (1)...(19): siRNA sense strand
ccuggaauaugaugagaau

SEQ ID NO: 2547188 - RNA, 19 nt, Homo sapiens
  misc_RNA (1)...(19): siRNA sense strand
augaagaggaagaagguga

SEQ ID NO: 2547189 - RNA, 19 nt, Homo sapiens
  misc_RNA (1)...(19): siRNA sense strand
acaaauuuccagugaugaa

SEQ ID NO: 2547190 - RNA, 19 nt, Homo sapiens
  misc_RNA (1)...(19): siRNA sense strand
ugaugaaggagaaguagaa

SEQ ID NO: 2547191 - RNA, 19 nt, Homo sapiens
  misc_RNA (1)...(19): siRNA sense strand
agaaggagaagaagaugaa

SEQ ID NO: 2547192 - RNA, 19 nt, Homo sapiens
  misc_RNA (1)...(19): siRNA sense strand
gguuaagcuauuugcaauu

SEQ ID NO: 2547193 - RNA, 19 nt, Homo sapiens
  misc_RNA (1)...(19): siRNA sense strand
uagaggaagaagaggauga

SEQ ID NO: 2547194 - RNA, 19 nt, Homo sapiens
  misc_RNA (1)...(19): siRNA sense strand
ggaacaacaagaagaagga

SEQ ID NO: 2547195 - RNA, 19 nt, Homo sapiens
  misc_RNA (1)...(19): siRNA sense strand
ugaagaaggugaaggggau

SEQ ID NO: 2547196 - RNA, 19 nt, Homo sapiens
  misc_RNA (1)...(19): siRNA sense strand
ggguaacagcuuuagaaga

SEQ ID NO: 2547197 - RNA, 19 nt, Homo sapiens
  misc_RNA (1)...(19): siRNA sense strand
uggaauaugaugagaauac

SEQ ID NO: 2547198 - RNA, 19 nt, Homo sapiens
  misc_RNA (1)...(19): siRNA sense strand
auguggauguagaggaaga

SEQ ID NO: 2547199 - RNA, 19 nt, Homo sapiens
  misc_RNA (1)...(19): siRNA sense strand
gguugggaagccuggaaua

SEQ ID NO: 2547200 - RNA, 19 nt, Homo sapiens
  misc_RNA (1)...(19): siRNA sense strand
ggauagagugauaagucau

SEQ ID NO: 2547201 - RNA, 19 nt, Homo sapiens
  misc_RNA (1)...(19): siRNA sense strand
agaugaagaugauguggau

SEQ ID NO: 2547202 - RNA, 19 nt, Homo sapiens
  misc_RNA (1)...(19): siRNA sense strand
gugaaggggaugaugguua

SEQ ID NO: 2547203 - RNA, 19 nt, Homo sapiens
  misc_RNA (1)...(19): siRNA sense strand
agaagauagaggugcaaaa

SEQ ID NO: 2547204 - RNA, 19 nt, Homo sapiens
  misc_RNA (1)...(19): siRNA sense strand
agaggaacaacaagaagaa

SEQ ID NO: 2547205 - RNA, 19 nt, Homo sapiens
  misc_RNA (1)...(19): siRNA sense strand
aggugaagaggaugaagaa

SEQ ID NO: 2547206 - RNA, 19 nt, Homo sapiens
  misc_RNA (1)...(19): siRNA sense strand
ggaauaugaagcaacaaau

SEQ ID NO: 2547207 - RNA, 19 nt, Homo sapiens
  misc_RNA (1)...(19): siRNA sense strand
gggagaaagaagaucaguu

SEQ ID NO: 2547208 - RNA, 19 nt, Homo sapiens
  misc_RNA (1)...(19): siRNA sense strand
aaggagaaguagaagagga

SEQ ID NO: 2547209 - RNA, 19 nt, Homo sapiens
  misc_RNA (1)...(19): siRNA sense strand
aggaagaagaggaugagga

SEQ ID NO: 2547210 - RNA, 19 nt, Homo sapiens
  misc_RNA (1)...(19): siRNA sense strand
aggaggaagaggaagauga

SEQ ID NO: 2547211 - RNA, 19 nt, Homo sapiens
  misc_RNA (1)...(19): siRNA sense strand
aagaaggugaagaggauga

SEQ ID NO: 2547212 - RNA, 19 nt, Homo sapiens
  misc_RNA (1)...(19): siRNA sense strand
uagagaagauagaggugca

SEQ ID NO: 2547213 - RNA, 19 nt, Homo sapiens
  misc_RNA (1)...(19): siRNA sense strand
gcuacaagcaggagugauc

SEQ ID NO: 2547214 - RNA, 19 nt, Homo sapiens
  misc_RNA (1)...(19): siRNA sense strand
uuguacagccagugaagaa

SEQ ID NO: 2547215 - RNA, 19 nt, Homo sapiens
  misc_RNA (1)...(19): siRNA sense strand
gaguauguuaagcagaaua

SEQ ID NO: 2547216 - RNA, 19 nt, Homo sapiens
  misc_RNA (1)...(19): siRNA sense strand
ugauaagucaugacagaga

SEQ ID NO: 2547217 - RNA, 19 nt, Homo sapiens
  misc_RNA (1)...(19): siRNA sense strand
aaguagaagaggaacaaca

SEQ ID NO: 2547218 - RNA, 19 nt, Homo sapiens
  misc_RNA (1)...(19): siRNA sense strand
aagaaggagaagaagauga

SEQ ID NO: 2547219 - RNA, 19 nt, Homo sapiens
  misc_RNA (1)...(19): siRNA sense strand
aaggagaagaagaugaaga

SEQ ID NO: 2547220 - RNA, 19 nt, Homo sapiens
  misc_RNA (1)...(19): siRNA sense strand
aggagaagaagaugaagau

SEQ ID NO: 2547221 - RNA, 19 nt, Homo sapiens
  misc_RNA (1)...(19): siRNA sense strand
aggaagaaggugaagagga

SEQ ID NO: 2547222 - RNA, 19 nt, Homo sapiens
  misc_RNA (1)...(19): siRNA sense strand
aagucuugucagagauuaa

SEQ ID NO: 2547223 - RNA, 19 nt, Homo sapiens
  misc_RNA (1)...(19): siRNA sense strand
ggaucaguggauagaguga

SEQ ID NO: 2547224 - RNA, 19 nt, Homo sapiens
  misc_RNA (1)...(19): siRNA sense strand
guuaagcagaauaucgaua

SEQ ID NO: 2547225 - RNA, 19 nt, Homo sapiens
  misc_RNA (1)...(19): siRNA sense strand
acaauagagcauauggaga

SEQ ID NO: 2547226 - RNA, 19 nt, Homo sapiens
  misc_RNA (1)...(19): siRNA sense strand
aguagaagaggaacaacaa

SEQ ID NO: 2547227 - RNA, 19 nt, Homo sapiens
  misc_RNA (1)...(19): siRNA sense strand
ugacuuggaacgugaaaca

SEQ ID NO: 2547228 - RNA, 19 nt, Homo sapiens
  misc_RNA (1)...(19): siRNA sense strand
gguuguuacugcugguuca

SEQ ID NO: 2547229 - RNA, 19 nt, Homo sapiens
  misc_RNA (1)...(19): siRNA sense strand
uugaguauguuaagcagaa

SEQ ID NO: 2547230 - RNA, 19 nt, Homo sapiens
  misc_RNA (1)...(19): siRNA sense strand
ugaagaggaagaaggugaa

SEQ ID NO: 2547231 - RNA, 19 nt, Homo sapiens
  misc_RNA (1)...(19): siRNA sense strand
cagugaugaagauggaauu

SEQ ID NO: 2547232 - RNA, 19 nt, Homo sapiens
  misc_RNA (1)...(19): siRNA sense strand
ggggaaauagaaaggcuua

SEQ ID NO: 2547233 - RNA, 19 nt, Homo sapiens
  misc_RNA (1)...(19): siRNA sense strand
agguggauccuuugaguuu

SEQ ID NO: 2547234 - RNA, 19 nt, Homo sapiens
  misc_RNA (1)...(19): siRNA sense strand
gagcauauggagagacauc

SEQ ID NO: 2547235 - RNA, 19 nt, Homo sapiens
  misc_RNA (1)...(19): siRNA sense strand
aggcauucuucaugagcau

SEQ ID NO: 2547236 - RNA, 19 nt, Homo sapiens
  misc_RNA (1)...(19): siRNA sense strand
ggaagagauuguuagccuu

SEQ ID NO: 2547237 - RNA, 19 nt, Homo sapiens
  misc_RNA (1)...(19): siRNA sense strand
aggaagagauuguuagccu

SEQ ID NO: 2547238 - RNA, 19 nt, Homo sapiens
  misc_RNA (1)...(19): siRNA sense strand
ggaagaaucccuuaggaag

SEQ ID NO: 2547239 - RNA, 19 nt, Homo sapiens
  misc_RNA (1)...(19): siRNA sense strand
ugucauuuccagagguuca

SEQ ID NO: 2547240 - RNA, 19 nt, Homo sapiens
  misc_RNA (1)...(19): siRNA sense strand
cuucaugagcauagacagu

SEQ ID NO: 2547241 - RNA, 19 nt, Homo sapiens
  misc_RNA (1)...(19): siRNA sense strand
acaaacagcuuucagcaca

SEQ ID NO: 2547242 - RNA, 19 nt, Homo sapiens
  misc_RNA (1)...(19): siRNA sense strand
ggucaguaguggaaggaga

SEQ ID NO: 2547243 - RNA, 19 nt, Homo sapiens
  misc_RNA (1)...(19): siRNA sense strand
gugucaaccuagauggaaa

SEQ ID NO: 2547244 - RNA, 19 nt, Homo sapiens
  misc_RNA (1)...(19): siRNA sense strand
aagaauauacagaggagaa

SEQ ID NO: 2547245 - RNA, 19 nt, Homo sapiens
  misc_RNA (1)...(19): siRNA sense strand
ggaucaagcagauggaaaa

SEQ ID NO: 2547246 - RNA, 19 nt, Homo sapiens
  misc_RNA (1)...(19): siRNA sense strand
gguuaaaggaucaagcaga

SEQ ID NO: 2547247 - RNA, 19 nt, Homo sapiens
  misc_RNA (1)...(19): siRNA sense strand
gugaauggugucagagaau

SEQ ID NO: 2547248 - RNA, 19 nt, Homo sapiens
  misc_RNA (1)...(19): siRNA sense strand
acaacuugaugcaggaaau

SEQ ID NO: 2547249 - RNA, 19 nt, Homo sapiens
  misc_RNA (1)...(19): siRNA sense strand
aggaucaagcagauggaaa

SEQ ID NO: 2547250 - RNA, 19 nt, Homo sapiens
  misc_RNA (1)...(19): siRNA sense strand
acaucggaauggagaaauu

SEQ ID NO: 2547251 - RNA, 19 nt, Homo sapiens
  misc_RNA (1)...(19): siRNA sense strand
cagaacaaguuaaaggcuu

SEQ ID NO: 2547252 - RNA, 19 nt, Homo sapiens
  misc_RNA (1)...(19): siRNA sense strand
agaaaaggguccaugacaa

SEQ ID NO: 2547253 - RNA, 19 nt, Homo sapiens
  misc_RNA (1)...(19): siRNA sense strand
cuagaaagguuaaaggauc

SEQ ID NO: 2547254 - RNA, 19 nt, Homo sapiens
  misc_RNA (1)...(19): siRNA sense strand
ugagauuucaagaggacaa

SEQ ID NO: 2547255 - RNA, 19 nt, Homo sapiens
  misc_RNA (1)...(19): siRNA sense strand
cugagaacuuguuuagcaa

SEQ ID NO: 2547256 - RNA, 19 nt, Homo sapiens
  misc_RNA (1)...(19): siRNA sense strand
ccgaaacagaacaaguuaa

SEQ ID NO: 2547257 - RNA, 19 nt, Homo sapiens
  misc_RNA (1)...(19): siRNA sense strand
gccaagugacauugagauu

SEQ ID NO: 2547258 - RNA, 19 nt, Homo sapiens
  misc_RNA (1)...(19): siRNA sense strand
ccgagauuauagaugaaau

SEQ ID NO: 2547259 - RNA, 19 nt, Homo sapiens
  misc_RNA (1)...(19): siRNA sense strand
gcuagaaagguuaaaggau

SEQ ID NO: 2547260 - RNA, 19 nt, Homo sapiens
  misc_RNA (1)...(19): siRNA sense strand
agauguggauggaguaaca

SEQ ID NO: 2547261 - RNA, 19 nt, Homo sapiens
  misc_RNA (1)...(19): siRNA sense strand
ugguguuccucuuaagaaa

SEQ ID NO: 2547262 - RNA, 19 nt, Homo sapiens
  misc_RNA (1)...(19): siRNA sense strand
gggcagggaaacacagaga

SEQ ID NO: 2547263 - RNA, 19 nt, Homo sapiens
  misc_RNA (1)...(19): siRNA sense strand
cgucuuaguugcugggauc

SEQ ID NO: 2547264 - RNA, 19 nt, Homo sapiens
  misc_RNA (1)...(19): siRNA sense strand
agugaauggugucagagaa

SEQ ID NO: 2547265 - RNA, 19 nt, Homo sapiens
  misc_RNA (1)...(19): siRNA sense strand
uaaccaucgggcagggaaa

SEQ ID NO: 2547266 - RNA, 19 nt, Homo sapiens
  misc_RNA (1)...(19): siRNA sense strand
ccugaaacugguuggugaa

SEQ ID NO: 2547267 - RNA, 19 nt, Homo sapiens
  misc_RNA (1)...(19): siRNA sense strand
ugacaucggaauggagaaa

SEQ ID NO: 2547268 - RNA, 19 nt, Homo sapiens
  misc_RNA (1)...(19): siRNA sense strand
ugaagauaccagaguacau

SEQ ID NO: 2547269 - RNA, 19 nt, Homo sapiens
  misc_RNA (1)...(19): siRNA sense strand
gguuggugaagaaggauuu

SEQ ID NO: 2547270 - RNA, 19 nt, Homo sapiens
  misc_RNA (1)...(19): siRNA sense strand
ucaacaggguuuuggaaau

SEQ ID NO: 2547271 - RNA, 19 nt, Homo sapiens
  misc_RNA (1)...(19): siRNA sense strand
gguccaugacaaugagcau

SEQ ID NO: 2547272 - RNA, 19 nt, Homo sapiens
  misc_RNA (1)...(19): siRNA sense strand
ugauaaaauugcccugaaa

SEQ ID NO: 2547273 - RNA, 19 nt, Homo sapiens
  misc_RNA (1)...(19): siRNA sense strand
gaaaaggaucgguggacuu

SEQ ID NO: 2547274 - RNA, 19 nt, Homo sapiens
  misc_RNA (1)...(19): siRNA sense strand
aaaccaaaccugaugcaga

SEQ ID NO: 2547275 - RNA, 19 nt, Homo sapiens
  misc_RNA (1)...(19): siRNA sense strand
cccugaaacugguugguga

SEQ ID NO: 2547276 - RNA, 19 nt, Homo sapiens
  misc_RNA (1)...(19): siRNA sense strand
ggaauaaauaagacugauc

SEQ ID NO: 2547277 - RNA, 19 nt, Homo sapiens
  misc_RNA (1)...(19): siRNA sense strand
aagccaaaauagaucguua

SEQ ID NO: 2547278 - RNA, 19 nt, Homo sapiens
  misc_RNA (1)...(19): siRNA sense strand
gaaagaauauacagaggag

SEQ ID NO: 2547279 - RNA, 19 nt, Homo sapiens
  misc_RNA (1)...(19): siRNA sense strand
acauagaucuugauaccga

SEQ ID NO: 2547280 - RNA, 19 nt, Homo sapiens
  misc_RNA (1)...(19): siRNA sense strand
guggauaugcccaggucau

SEQ ID NO: 2547281 - RNA, 19 nt, Homo sapiens
  misc_RNA (1)...(19): siRNA sense strand
gcaggaaaucaaccagaau

SEQ ID NO: 2547282 - RNA, 19 nt, Homo sapiens
  misc_RNA (1)...(19): siRNA sense strand
aggaagaugaugugauucu

SEQ ID NO: 2547283 - RNA, 19 nt, Homo sapiens
  misc_RNA (1)...(19): siRNA sense strand
acauccagcugguggcaga

SEQ ID NO: 2547284 - RNA, 19 nt, Homo sapiens
  misc_RNA (1)...(19): siRNA sense strand
aagcaaagccaaaguacgu

SEQ ID NO: 2547285 - RNA, 19 nt, Homo sapiens
  misc_RNA (1)...(19): siRNA sense strand
agaggaagugaguaaauuu

SEQ ID NO: 2547286 - RNA, 19 nt, Homo sapiens
  misc_RNA (1)...(19): siRNA sense strand
uggauugcuugcagaugaa

SEQ ID NO: 2547287 - RNA, 19 nt, Homo sapiens
  misc_RNA (1)...(19): siRNA sense strand
gucuauggagccaaagaua

SEQ ID NO: 2547288 - RNA, 19 nt, Homo sapiens
  misc_RNA (1)...(19): siRNA sense strand
agccgagauuauagaugaa

SEQ ID NO: 2547289 - RNA, 19 nt, Homo sapiens
  misc_RNA (1)...(19): siRNA sense strand
auggaguaacagacauaaa

SEQ ID NO: 2547290 - RNA, 19 nt, Homo sapiens
  misc_RNA (1)...(19): siRNA sense strand
cuacaaugccuguuccaga

SEQ ID NO: 2547291 - RNA, 19 nt, Homo sapiens
  misc_RNA (1)...(19): siRNA sense strand
gaacauggucaguagugga

SEQ ID NO: 2547292 - RNA, 19 nt, Homo sapiens
  misc_RNA (1)...(19): siRNA sense strand
accuaagccagaagagauu

SEQ ID NO: 2547293 - RNA, 19 nt, Homo sapiens
  misc_RNA (1)...(19): siRNA sense strand
ggagaagggaagagcacag

SEQ ID NO: 2547294 - RNA, 19 nt, Homo sapiens
  misc_RNA (1)...(19): siRNA sense strand
aaguuaaaggcuuguucua

SEQ ID NO: 2547295 - RNA, 19 nt, Homo sapiens
  misc_RNA (1)...(19): siRNA sense strand
cgaggauucuucaugaaaa

SEQ ID NO: 2547296 - RNA, 19 nt, Homo sapiens
  misc_RNA (1)...(19): siRNA sense strand
agccaaagauauugaacuc

SEQ ID NO: 2547297 - RNA, 19 nt, Homo sapiens
  misc_RNA (1)...(19): siRNA sense strand
uguuucaccuguugccaaa

SEQ ID NO: 2547298 - RNA, 19 nt, Homo sapiens
  misc_RNA (1)...(19): siRNA sense strand
aaugccuguuccagagaaa

SEQ ID NO: 2547299 - RNA, 19 nt, Homo sapiens
  misc_RNA (1)...(19): siRNA sense strand
caccuaagccagaagagau

SEQ ID NO: 2547300 - RNA, 19 nt, Homo sapiens
  misc_RNA (1)...(19): siRNA sense strand
ugggaauaaauaagacuga

SEQ ID NO: 2547301 - RNA, 19 nt, Homo sapiens
  misc_RNA (1)...(19): siRNA sense strand
gcagggaaacacagagaag

SEQ ID NO: 2547302 - RNA, 19 nt, Homo sapiens
  misc_RNA (1)...(19): siRNA sense strand
gaaacacagagaagggcca

SEQ ID NO: 2547303 - RNA, 19 nt, Homo sapiens
  misc_RNA (1)...(19): siRNA sense strand
agacacaugugaagggaau

SEQ ID NO: 2547304 - RNA, 19 nt, Homo sapiens
  misc_RNA (1)...(19): siRNA sense strand
ggagagagcagcaagggaa

SEQ ID NO: 2547305 - RNA, 19 nt, Homo sapiens
  misc_RNA (1)...(19): siRNA sense strand
ccgcagucaagaagggaaa

SEQ ID NO: 2547306 - RNA, 19 nt, Homo sapiens
  misc_RNA (1)...(19): siRNA sense strand
auggaaagauaaaggaaca

SEQ ID NO: 2547307 - RNA, 19 nt, Homo sapiens
  misc_RNA (1)...(19): siRNA sense strand
agccauagauauagcacaa

SEQ ID NO: 2547308 - RNA, 19 nt, Homo sapiens
  misc_RNA (1)...(19): siRNA sense strand
ccaacaaagauaagcaaga

SEQ ID NO: 2547309 - RNA, 19 nt, Homo sapiens
  misc_RNA (1)...(19): siRNA sense strand
aggaaagacaguagcauuu

SEQ ID NO: 2547310 - RNA, 19 nt, Homo sapiens
  misc_RNA (1)...(19): siRNA sense strand
augcugaacuaauggcaaa

SEQ ID NO: 2547311 - RNA, 19 nt, Homo sapiens
  misc_RNA (1)...(19): siRNA sense strand
gauaaagccaggacgggaa

SEQ ID NO: 2547312 - RNA, 19 nt, Homo sapiens
  misc_RNA (1)...(19): siRNA sense strand
ugauagugguucugcacaa

SEQ ID NO: 2547313 - RNA, 19 nt, Homo sapiens
  misc_RNA (1)...(19): siRNA sense strand
gcacaaauucaaggagcaa

SEQ ID NO: 2547314 - RNA, 19 nt, Homo sapiens
  misc_RNA (1)...(19): siRNA sense strand
ccgcaaaugcagcaaauau

SEQ ID NO: 2547315 - RNA, 19 nt, Homo sapiens
  misc_RNA (1)...(19): siRNA sense strand
ccuucaaagccauguuaua

SEQ ID NO: 2547316 - RNA, 19 nt, Homo sapiens
  misc_RNA (1)...(19): siRNA sense strand
cgauaaugacagugagaag

SEQ ID NO: 2547317 - RNA, 19 nt, Homo sapiens
  misc_RNA (1)...(19): siRNA sense strand
ggaacaaggaacucaucaa

SEQ ID NO: 2547318 - RNA, 19 nt, Homo sapiens
  misc_RNA (1)...(19): siRNA sense strand
gauaaaggaacaaggaacu

SEQ ID NO: 2547319 - RNA, 19 nt, Homo sapiens
  misc_RNA (1)...(19): siRNA sense strand
auggaaugcuggcggagaa

SEQ ID NO: 2547320 - RNA, 19 nt, Homo sapiens
  misc_RNA (1)...(19): siRNA sense strand
cugaagcuuuggagaauau

SEQ ID NO: 2547321 - RNA, 19 nt, Homo sapiens
  misc_RNA (1)...(19): siRNA sense strand
cagaaauaccucgaagaaa

SEQ ID NO: 2547322 - RNA, 19 nt, Homo sapiens
  misc_RNA (1)...(19): siRNA sense strand
guuauuucaugcagggauu

SEQ ID NO: 2547323 - RNA, 19 nt, Homo sapiens
  misc_RNA (1)...(19): siRNA sense strand
gguuugaugaaaaggaaaa

SEQ ID NO: 2547324 - RNA, 19 nt, Homo sapiens
  misc_RNA (1)...(19): siRNA sense strand
cuguuugccuuguuggaaa

SEQ ID NO: 2547325 - RNA, 19 nt, Homo sapiens
  misc_RNA (1)...(19): siRNA sense strand
gugucauuaacaagggaaa

SEQ ID NO: 2547326 - RNA, 19 nt, Homo sapiens
  misc_RNA (1)...(19): siRNA sense strand
augaacagauggagucaau

SEQ ID NO: 2547327 - RNA, 19 nt, Homo sapiens
  misc_RNA (1)...(19): siRNA sense strand
cagacucaacacagaaaua

SEQ ID NO: 2547328 - RNA, 19 nt, Homo sapiens
  misc_RNA (1)...(19): siRNA sense strand
agauaaaggaacaaggaac

SEQ ID NO: 2547329 - RNA, 19 nt, Homo sapiens
  misc_RNA (1)...(19): siRNA sense strand
ucaaaugaguggagggcag

SEQ ID NO: 2547330 - RNA, 19 nt, Homo sapiens
  misc_RNA (1)...(19): siRNA sense strand
cagaaacagaggaucgcaa

SEQ ID NO: 2547331 - RNA, 19 nt, Homo sapiens
  misc_RNA (1)...(19): siRNA sense strand
gugacaggaaugauugaaa

SEQ ID NO: 2547332 - RNA, 19 nt, Homo sapiens
  misc_RNA (1)...(19): siRNA sense strand
gauuaagacacuuggccuu

SEQ ID NO: 2547333 - RNA, 19 nt, Homo sapiens
  misc_RNA (1)...(19): siRNA sense strand
acaaauucaaggagcaaca

SEQ ID NO: 2547334 - RNA, 19 nt, Homo sapiens
  misc_RNA (1)...(19): siRNA sense strand
ucagcaugcccuugauaaa

SEQ ID NO: 2547335 - RNA, 19 nt, Homo sapiens
  misc_RNA (1)...(19): siRNA sense strand
caauggaaagauaaaggaa

SEQ ID NO: 2547336 - RNA, 19 nt, Homo sapiens
  misc_RNA (1)...(19): siRNA sense strand
gacaacaauauuagccaua

SEQ ID NO: 2547337 - RNA, 19 nt, Homo sapiens
  misc_RNA (1)...(19): siRNA sense strand
cugcacaauggaaagauaa

SEQ ID NO: 2547338 - RNA, 19 nt, Homo sapiens
  misc_RNA (1)...(19): siRNA sense strand
gagcagcaagggaagcaaa

SEQ ID NO: 2547339 - RNA, 19 nt, Homo sapiens
  misc_RNA (1)...(19): siRNA sense strand
auacauugguaggggaaaa

SEQ ID NO: 2547340 - RNA, 19 nt, Homo sapiens
  misc_RNA (1)...(19): siRNA sense strand
cugaauauuccaaagccaa

SEQ ID NO: 2547341 - RNA, 19 nt, Homo sapiens
  misc_RNA (1)...(19): siRNA sense strand
ugaauauuccaaagccaaa

SEQ ID NO: 2547342 - RNA, 19 nt, Homo sapiens
  misc_RNA (1)...(19): siRNA sense strand
agaucaaagaagccgcaaa

SEQ ID NO: 2547343 - RNA, 19 nt, Homo sapiens
  misc_RNA (1)...(19): siRNA sense strand
ugccauuagaugagaucaa

SEQ ID NO: 2547344 - RNA, 19 nt, Homo sapiens
  misc_RNA (1)...(19): siRNA sense strand
augaagagauggagagagc

SEQ ID NO: 2547345 - RNA, 19 nt, Homo sapiens
  misc_RNA (1)...(19): siRNA sense strand
cuacugaaagaaagaccaa

SEQ ID NO: 2547346 - RNA, 19 nt, Homo sapiens
  misc_RNA (1)...(19): siRNA sense strand
aagagaugcuucagacuca

SEQ ID NO: 2547347 - RNA, 19 nt, Homo sapiens
  misc_RNA (1)...(19): siRNA sense strand
ggacaugccuaguggucac

SEQ ID NO: 2547348 - RNA, 19 nt, Homo sapiens
  misc_RNA (1)...(19): siRNA sense strand
caaagauaagcaagaacuu

SEQ ID NO: 2547349 - RNA, 19 nt, Homo sapiens
  misc_RNA (1)...(19): siRNA sense strand
gggcagaaacagaggaucg

SEQ ID NO: 2547350 - RNA, 19 nt, Homo sapiens
  misc_RNA (1)...(19): siRNA sense strand
cggccagaaacaaagacua

SEQ ID NO: 2547351 - RNA, 19 nt, Homo sapiens
  misc_RNA (1)...(19): siRNA sense strand
cggcagagcaggggaaauu

SEQ ID NO: 2547352 - RNA, 19 nt, Homo sapiens
  misc_RNA (1)...(19): siRNA sense strand
ggaauuuagaguuucgaga

SEQ ID NO: 2547353 - RNA, 19 nt, Homo sapiens
  misc_RNA (1)...(19): siRNA sense strand
gugagaaggugguucagca

SEQ ID NO: 2547354 - RNA, 19 nt, Homo sapiens
  misc_RNA (1)...(19): siRNA sense strand
ggggaaauuuuaacgauga

SEQ ID NO: 2547355 - RNA, 19 nt, Homo sapiens
  misc_RNA (1)...(19): siRNA sense strand
ccugaauauuccaaagcca

SEQ ID NO: 2547356 - RNA, 19 nt, Homo sapiens
  misc_RNA (1)...(19): siRNA sense strand
cguacuauagugucauuaa

SEQ ID NO: 2547357 - RNA, 19 nt, Homo sapiens
  misc_RNA (1)...(19): siRNA sense strand
cauuagaugagaucaaaga

SEQ ID NO: 2547358 - RNA, 19 nt, Homo sapiens
  misc_RNA (1)...(19): siRNA sense strand
caucaagagcuccugagaa

SEQ ID NO: 2547359 - RNA, 19 nt, Homo sapiens
  misc_RNA (1)...(19): siRNA sense strand
gaaacagaggaucgcaauu

SEQ ID NO: 2547360 - RNA, 19 nt, Homo sapiens
  misc_RNA (1)...(19): siRNA sense strand
caaguauggacgagaugau

SEQ ID NO: 2547361 - RNA, 19 nt, Homo sapiens
  misc_RNA (1)...(19): siRNA sense strand
acgaugagauuaagacacu

SEQ ID NO: 2547362 - RNA, 19 nt, Homo sapiens
  misc_RNA (1)...(19): siRNA sense strand
cguuuuggcuccugaauau

SEQ ID NO: 2547363 - RNA, 19 nt, Homo sapiens
  misc_RNA (1)...(19): siRNA sense strand
acugaaaggagcacagcuu

SEQ ID NO: 2547364 - RNA, 19 nt, Homo sapiens
  misc_RNA (1)...(19): siRNA sense strand
ucugcacaauggaaagaua

SEQ ID NO: 2547365 - RNA, 19 nt, Homo sapiens
  misc_RNA (1)...(19): siRNA sense strand
uugacaaggcugaggaauc

SEQ ID NO: 2547366 - RNA, 19 nt, Homo sapiens
  misc_RNA (1)...(19): siRNA sense strand
gagaacaacuaguggacca

SEQ ID NO: 2547367 - RNA, 19 nt, Homo sapiens
  misc_RNA (1)...(19): siRNA sense strand
cauuaagaguggagagauc

SEQ ID NO: 2547368 - RNA, 19 nt, Homo sapiens
  misc_RNA (1)...(19): siRNA sense strand
aguuaaaguaccaccaaua

SEQ ID NO: 2547369 - RNA, 19 nt, Homo sapiens
  misc_RNA (1)...(19): siRNA sense strand
aaauaguaacagugggaau

SEQ ID NO: 2547370 - RNA, 19 nt, Homo sapiens
  misc_RNA (1)...(19): siRNA sense strand
aggagaaagagaagcaaau

SEQ ID NO: 2547371 - RNA, 19 nt, Homo sapiens
  misc_RNA (1)...(19): siRNA sense strand
caaaggaggacgagagaac

SEQ ID NO: 2547372 - RNA, 19 nt, Homo sapiens
  misc_RNA (1)...(19): siRNA sense strand
caggagaaagagaagcaaa

SEQ ID NO: 2547373 - RNA, 19 nt, Homo sapiens
  misc_RNA (1)...(19): siRNA sense strand
acucaaacuuggacaacau

SEQ ID NO: 2547374 - RNA, 19 nt, Homo sapiens
  misc_RNA (1)...(19): siRNA sense strand
gcguugggaaggaggacua

SEQ ID NO: 2547375 - RNA, 19 nt, Homo sapiens
  misc_RNA (1)...(19): siRNA sense strand
aggcagagcagcagagugu

SEQ ID NO: 2547376 - RNA, 19 nt, Homo sapiens
  misc_RNA (1)...(19): siRNA sense strand
ggaacuggaugcagccgaa

SEQ ID NO: 2547377 - RNA, 19 nt, Homo sapiens
  misc_RNA (1)...(19): siRNA sense strand
ccucugaacgaaaggaaaa

SEQ ID NO: 2547378 - RNA, 19 nt, Homo sapiens
  misc_RNA (1)...(19): siRNA sense strand
aaggaggacgagagaacaa

SEQ ID NO: 2547379 - RNA, 19 nt, Homo sapiens
  misc_RNA (1)...(19): siRNA sense strand
ucgcaagcuucaggagaaa

SEQ ID NO: 2547380 - RNA, 19 nt, Homo sapiens
  misc_RNA (1)...(19): siRNA sense strand
agcagaagcucguggaagu

SEQ ID NO: 2547381 - RNA, 19 nt, Homo sapiens
  misc_RNA (1)...(19): siRNA sense strand
agaaacauuugcagagcca

SEQ ID NO: 2547382 - RNA, 19 nt, Homo sapiens
  misc_RNA (1)...(19): siRNA sense strand
aauuauaggcguugggaag

SEQ ID NO: 2547383 - RNA, 19 nt, Homo sapiens
  misc_RNA (1)...(19): siRNA sense strand
ggauggaacuuuacccuca

SEQ ID NO: 2547384 - RNA, 19 nt, Homo sapiens
  misc_RNA (1)...(19): siRNA sense strand
uggacaacauggagugguu

SEQ ID NO: 2547385 - RNA, 19 nt, Homo sapiens
  misc_RNA (1)...(19): siRNA sense strand
ccaagugagccaaaaguua

SEQ ID NO: 2547386 - RNA, 19 nt, Homo sapiens
  misc_RNA (1)...(19): siRNA sense strand
acuuaaagguaucagaacu

SEQ ID NO: 2547387 - RNA, 19 nt, Homo sapiens
  misc_RNA (1)...(19): siRNA sense strand
cgaaaaggaucgcaagcuu

SEQ ID NO: 2547388 - RNA, 19 nt, Homo sapiens
  misc_RNA (1)...(19): siRNA sense strand
ucaacaagucagaaagguu

SEQ ID NO: 2547389 - RNA, 19 nt, Homo sapiens
  misc_RNA (1)...(19): siRNA sense strand
gaucccaaaccacggguaa

SEQ ID NO: 2547390 - RNA, 19 nt, Homo sapiens
  misc_RNA (1)...(19): siRNA sense strand
aucagaagggugagaagaa

SEQ ID NO: 2547391 - RNA, 19 nt, Homo sapiens
  misc_RNA (1)...(19): siRNA sense strand
guccagucgccaagacaaa

SEQ ID NO: 2547392 - RNA, 19 nt, Homo sapiens
  misc_RNA (1)...(19): siRNA sense strand
caacaaaggaggacgagag

SEQ ID NO: 2547393 - RNA, 19 nt, Homo sapiens
  misc_RNA (1)...(19): siRNA sense strand
caauuauaggcguugggaa

SEQ ID NO: 2547394 - RNA, 19 nt, Homo sapiens
  misc_RNA (1)...(19): siRNA sense strand
gguaaagaaguuaaaguac

SEQ ID NO: 2547395 - RNA, 19 nt, Homo sapiens
  misc_RNA (1)...(19): siRNA sense strand
ccuaacacaccaagacaga

SEQ ID NO: 2547396 - RNA, 19 nt, Homo sapiens
  misc_RNA (1)...(19): siRNA sense strand
gcaccaaaccggaccucau

SEQ ID NO: 2547397 - RNA, 19 nt, Homo sapiens
  misc_RNA (1)...(19): siRNA sense strand
caaacauggcagacacuuu

SEQ ID NO: 2547398 - RNA, 19 nt, Homo sapiens
  misc_RNA (1)...(19): siRNA sense strand
ggcuguaguuaucaagcaa

SEQ ID NO: 2547399 - RNA, 19 nt, Homo sapiens
  misc_RNA (1)...(19): siRNA sense strand
cuguaguuaucaagcaaga

SEQ ID NO: 2547400 - RNA, 19 nt, Homo sapiens
  misc_RNA (1)...(19): siRNA sense strand
gacaaacaccguagcaaaa

SEQ ID NO: 2547401 - RNA, 19 nt, Homo sapiens
  misc_RNA (1)...(19): siRNA sense strand
gcuaugaggaggccaucaa

SEQ ID NO: 2547402 - RNA, 19 nt, Homo sapiens
  misc_RNA (1)...(19): siRNA sense strand
gcuuagagaaccaacuaga

SEQ ID NO: 2547403 - RNA, 19 nt, Homo sapiens
  misc_RNA (1)...(19): siRNA sense strand
acucagaugaaguugaaaa

SEQ ID NO: 2547404 - RNA, 19 nt, Homo sapiens
  misc_RNA (1)...(19): siRNA sense strand
ugucaaaccuggaacugga

SEQ ID NO: 2547405 - RNA, 19 nt, Homo sapiens
  misc_RNA (1)...(19): siRNA sense strand
agaaagagaagcaaaucga

SEQ ID NO: 2547406 - RNA, 19 nt, Homo sapiens
  misc_RNA (1)...(19): siRNA sense strand
aagagaagcaaaucgaaga

SEQ ID NO: 2547407 - RNA, 19 nt, Homo sapiens
  misc_RNA (1)...(19): siRNA sense strand
ugaagaggaaacuggaaca

SEQ ID NO: 2547408 - RNA, 19 nt, Homo sapiens
  misc_RNA (1)...(19): siRNA sense strand
caaaaugagaccagugaca

SEQ ID NO: 2547409 - RNA, 19 nt, Homo sapiens
  misc_RNA (1)...(19): siRNA sense strand
cugcaacaaaggaggacga

SEQ ID NO: 2547410 - RNA, 19 nt, Homo sapiens
  misc_RNA (1)...(19): siRNA sense strand
agagugaagcuguggcuca

SEQ ID NO: 2547411 - RNA, 19 nt, Homo sapiens
  misc_RNA (1)...(19): siRNA sense strand
cagccauugucaccaguaa

SEQ ID NO: 2547412 - RNA, 19 nt, Homo sapiens
  misc_RNA (1)...(19): siRNA sense strand
cuucacaguucuugaguuc

SEQ ID NO: 2547413 - RNA, 19 nt, Homo sapiens
  misc_RNA (1)...(19): siRNA sense strand
caacuguaccucagacaca

SEQ ID NO: 2547414 - RNA, 19 nt, Homo sapiens
  misc_RNA (1)...(19): siRNA sense strand
gcacauuuuagaagaaaca

SEQ ID NO: 2547415 - RNA, 19 nt, Homo sapiens
  misc_RNA (1)...(19): siRNA sense strand
acacuuucaccgagauuau

SEQ ID NO: 2547416 - RNA, 19 nt, Homo sapiens
  misc_RNA (1)...(19): siRNA sense strand
gagccaaaaguuagugaau

SEQ ID NO: 2547417 - RNA, 19 nt, Homo sapiens
  misc_RNA (1)...(19): siRNA sense strand
ccacggguaaagaaguuaa

SEQ ID NO: 2547418 - RNA, 19 nt, Homo sapiens
  misc_RNA (1)...(19): siRNA sense strand
ugaaaagauugcucaaaga

SEQ ID NO: 2547419 - RNA, 19 nt, Homo sapiens
  misc_RNA (1)...(19): siRNA sense strand
cagcagaagcagcacuaca

SEQ ID NO: 2547420 - RNA, 19 nt, Homo sapiens
  misc_RNA (1)...(19): siRNA sense strand
ucguggaagugcugaaaau

SEQ ID NO: 2547421 - RNA, 19 nt, Homo sapiens
  misc_RNA (1)...(19): siRNA sense strand
cugucaagucagaucagaa

SEQ ID NO: 2547422 - RNA, 19 nt, Homo sapiens
  misc_RNA (1)...(19): siRNA sense strand
agaagcaauuauaggcguu

SEQ ID NO: 2547423 - RNA, 19 nt, Homo sapiens
  misc_RNA (1)...(19): siRNA sense strand
gagaagaaugagccgcaga

SEQ ID NO: 2547424 - RNA, 19 nt, Homo sapiens
  misc_RNA (1)...(19): siRNA sense strand
uagaagaaacauuugcaga

SEQ ID NO: 2547425 - RNA, 19 nt, Homo sapiens
  misc_RNA (1)...(19): siRNA sense strand
caguguuaaagaagcaauu

SEQ ID NO: 2547426 - RNA, 19 nt, Homo sapiens
  misc_RNA (1)...(19): siRNA sense strand
agguaaagguagugguauu

SEQ ID NO: 2547427 - RNA, 19 nt, Homo sapiens
  misc_RNA (1)...(19): siRNA sense strand
caauagaagacaugggauu

SEQ ID NO: 2547428 - RNA, 19 nt, Homo sapiens
  misc_RNA (1)...(19): siRNA sense strand
gggaauugcuauuggcaca

SEQ ID NO: 2547429 - RNA, 19 nt, Homo sapiens
  misc_RNA (1)...(19): siRNA sense strand
aagacaaggaggaaggaaa

SEQ ID NO: 2547430 - RNA, 19 nt, Homo sapiens
  misc_RNA (1)...(19): siRNA sense strand
agaaauaagacaauggaga

SEQ ID NO: 2547431 - RNA, 19 nt, Homo sapiens
  misc_RNA (1)...(19): siRNA sense strand
ggguagcaauggugggaga

SEQ ID NO: 2547432 - RNA, 19 nt, Homo sapiens
  misc_RNA (1)...(19): siRNA sense strand
agacaaacucaguggcuau

SEQ ID NO: 2547433 - RNA, 19 nt, Homo sapiens
  misc_RNA (1)...(19): siRNA sense strand
ccaacaaagcacauauuaa

SEQ ID NO: 2547434 - RNA, 19 nt, Homo sapiens
  misc_RNA (1)...(19): siRNA sense strand
agguagugguauuugauaa

SEQ ID NO: 2547435 - RNA, 19 nt, Homo sapiens
  misc_RNA (1)...(19): siRNA sense strand
aauaaaagguggagagcca

SEQ ID NO: 2547436 - RNA, 19 nt, Homo sapiens
  misc_RNA (1)...(19): siRNA sense strand
agaugaaaguggaagggau

SEQ ID NO: 2547437 - RNA, 19 nt, Homo sapiens
  misc_RNA (1)...(19): siRNA sense strand
ugauaaacauugauggcau

SEQ ID NO: 2547438 - RNA, 19 nt, Homo sapiens
  misc_RNA (1)...(19): siRNA sense strand
uagcaaacauugaacggaa

SEQ ID NO: 2547439 - RNA, 19 nt, Homo sapiens
  misc_RNA (1)...(19): siRNA sense strand
cuccagaaucccugagaaa

SEQ ID NO: 2547440 - RNA, 19 nt, Homo sapiens
  misc_RNA (1)...(19): siRNA sense strand
gucaagaggauucggauaa

SEQ ID NO: 2547441 - RNA, 19 nt, Homo sapiens
  misc_RNA (1)...(19): siRNA sense strand
gugaagaacaaguggaugu

SEQ ID NO: 2547442 - RNA, 19 nt, Homo sapiens
  misc_RNA (1)...(19): siRNA sense strand
aggcagaaguaagguauaa

SEQ ID NO: 2547443 - RNA, 19 nt, Homo sapiens
  misc_RNA (1)...(19): siRNA sense strand
uugucaaacuuguggaaga

SEQ ID NO: 2547444 - RNA, 19 nt, Homo sapiens
  misc_RNA (1)...(19): siRNA sense strand
acuggaauauagaggacaa

SEQ ID NO: 2547445 - RNA, 19 nt, Homo sapiens
  misc_RNA (1)...(19): siRNA sense strand
agucaagaggauucggaua

SEQ ID NO: 2547446 - RNA, 19 nt, Homo sapiens
  misc_RNA (1)...(19): siRNA sense strand
auuauugguccuagagaua

SEQ ID NO: 2547447 - RNA, 19 nt, Homo sapiens
  misc_RNA (1)...(19): siRNA sense strand
ccagaaacguugagaggag

SEQ ID NO: 2547448 - RNA, 19 nt, Homo sapiens
  misc_RNA (1)...(19): siRNA sense strand
agugaaugccaaucagaua

SEQ ID NO: 2547449 - RNA, 19 nt, Homo sapiens
  misc_RNA (1)...(19): siRNA sense strand
ccucaaauugggagcuauu

SEQ ID NO: 2547450 - RNA, 19 nt, Homo sapiens
  misc_RNA (1)...(19): siRNA sense strand
aguaaagguucuaacugaa

SEQ ID NO: 2547451 - RNA, 19 nt, Homo sapiens
  misc_RNA (1)...(19): siRNA sense strand
ccauuucuguugaggguau

SEQ ID NO: 2547452 - RNA, 19 nt, Homo sapiens
  misc_RNA (1)...(19): siRNA sense strand
agguaucacuggaagaaaa

SEQ ID NO: 2547453 - RNA, 19 nt, Homo sapiens
  misc_RNA (1)...(19): siRNA sense strand
acauauagcaaagggcaaa

SEQ ID NO: 2547454 - RNA, 19 nt, Homo sapiens
  misc_RNA (1)...(19): siRNA sense strand
guggagagccauuggagau

SEQ ID NO: 2547455 - RNA, 19 nt, Homo sapiens
  misc_RNA (1)...(19): siRNA sense strand
aggcacagauguagccauu

SEQ ID NO: 2547456 - RNA, 19 nt, Homo sapiens
  misc_RNA (1)...(19): siRNA sense strand
agaccaagggugugacaga

SEQ ID NO: 2547457 - RNA, 19 nt, Homo sapiens
  misc_RNA (1)...(19): siRNA sense strand
gauagaaaaugcugaugaa

SEQ ID NO: 2547458 - RNA, 19 nt, Homo sapiens
  misc_RNA (1)...(19): siRNA sense strand
acuacaagcuacagaagca

SEQ ID NO: 2547459 - RNA, 19 nt, Homo sapiens
  misc_RNA (1)...(19): siRNA sense strand
aguaguuccaggaggcaaa

SEQ ID NO: 2547460 - RNA, 19 nt, Homo sapiens
  misc_RNA (1)...(19): siRNA sense strand
aggaacagccauaaccaaa

SEQ ID NO: 2547461 - RNA, 19 nt, Homo sapiens
  misc_RNA (1)...(19): siRNA sense strand
agugaagccugaagcagaa

SEQ ID NO: 2547462 - RNA, 19 nt, Homo sapiens
  misc_RNA (1)...(19): siRNA sense strand
cugccauugugaaguauaa

SEQ ID NO: 2547463 - RNA, 19 nt, Homo sapiens
  misc_RNA (1)...(19): siRNA sense strand
gcucagccuucaucggaaa

SEQ ID NO: 2547464 - RNA, 19 nt, Homo sapiens
  misc_RNA (1)...(19): siRNA sense strand
uauaaagcacugaagcaua

SEQ ID NO: 2547465 - RNA, 19 nt, Homo sapiens
  misc_RNA (1)...(19): siRNA sense strand
ccuccucagugaagaacaa

SEQ ID NO: 2547466 - RNA, 19 nt, Homo sapiens
  misc_RNA (1)...(19): siRNA sense strand
cagugaagccugaagcaga

SEQ ID NO: 2547467 - RNA, 19 nt, Homo sapiens
  misc_RNA (1)...(19): siRNA sense strand
gugaagucgugcugaagau

SEQ ID NO: 2547468 - RNA, 19 nt, Homo sapiens
  misc_RNA (1)...(19): siRNA sense strand
guaaaucaugugugucaaa

SEQ ID NO: 2547469 - RNA, 19 nt, Homo sapiens
  misc_RNA (1)...(19): siRNA sense strand
cgaaugagccguugguagu

SEQ ID NO: 2547470 - RNA, 19 nt, Homo sapiens
  misc_RNA (1)...(19): siRNA sense strand
ggauguggaacuuguacaa

SEQ ID NO: 2547471 - RNA, 19 nt, Homo sapiens
  misc_RNA (1)...(19): siRNA sense strand
gcacaaacaucaaaggcuc

SEQ ID NO: 2547472 - RNA, 19 nt, Homo sapiens
  misc_RNA (1)...(19): siRNA sense strand
caagaaacugugauaaaca

SEQ ID NO: 2547473 - RNA, 19 nt, Homo sapiens
  misc_RNA (1)...(19): siRNA sense strand
acuucuacauucaggcuua

SEQ ID NO: 2547474 - RNA, 19 nt, Homo sapiens
  misc_RNA (1)...(19): siRNA sense strand
gagauggcucauaagguaa

SEQ ID NO: 2547475 - RNA, 19 nt, Homo sapiens
  misc_RNA (1)...(19): siRNA sense strand
gugaaugccaaucagauaa

SEQ ID NO: 2547476 - RNA, 19 nt, Homo sapiens
  misc_RNA (1)...(19): siRNA sense strand
cagcaaauauggacguacu

SEQ ID NO: 2547477 - RNA, 19 nt, Homo sapiens
  misc_RNA (1)...(19): siRNA sense strand
aagaaggaucggucagcaa

SEQ ID NO: 2547478 - RNA, 19 nt, Homo sapiens
  misc_RNA (1)...(19): siRNA sense strand
uugaaauuguggaaaccua

SEQ ID NO: 2547479 - RNA, 19 nt, Homo sapiens
  misc_RNA (1)...(19): siRNA sense strand
gcuugcuacauaagaauaa

SEQ ID NO: 2547480 - RNA, 19 nt, Homo sapiens
  misc_RNA (1)...(19): siRNA sense strand
agaugaugacacugcauua

SEQ ID NO: 2547481 - RNA, 19 nt, Homo sapiens
  misc_RNA (1)...(19): siRNA sense strand
gaauuuaaggcgggaagaa

SEQ ID NO: 2547482 - RNA, 19 nt, Homo sapiens
  misc_RNA (1)...(19): siRNA sense strand
agaaaaugcugaugaagga

SEQ ID NO: 2547483 - RNA, 19 nt, Homo sapiens
  misc_RNA (1)...(19): siRNA sense strand
agaaauuauugguccuaga

SEQ ID NO: 2547484 - RNA, 19 nt, Homo sapiens
  misc_RNA (1)...(19): siRNA sense strand
uggcacaggcacagaugua

SEQ ID NO: 2547485 - RNA, 19 nt, Homo sapiens
  misc_RNA (1)...(19): siRNA sense strand
gcugaagaugaaaguggaa

SEQ ID NO: 2547486 - RNA, 19 nt, Homo sapiens
  misc_RNA (1)...(19): siRNA sense strand
caaggaggaaggaaagaau

SEQ ID NO: 2547487 - RNA, 19 nt, Homo sapiens
  misc_RNA (1)...(19): siRNA sense strand
agaacaaguggauguggaa

SEQ ID NO: 2547488 - RNA, 19 nt, Homo sapiens
  misc_RNA (1)...(19): siRNA sense strand
cuggugaagucgugcugaa

SEQ ID NO: 2547489 - RNA, 19 nt, Homo sapiens
  misc_RNA (1)...(19): siRNA sense strand
ggaaaguccuggaaggcaa

SEQ ID NO: 2547490 - RNA, 19 nt, Homo sapiens
  misc_RNA (1)...(19): siRNA sense strand
caggaaaggcagagaucaa

SEQ ID NO: 2547491 - RNA, 19 nt, Homo sapiens
  misc_RNA (1)...(19): siRNA sense strand
cuauagaagacaugggauu

SEQ ID NO: 2547492 - RNA, 19 nt, Homo sapiens
  misc_RNA (1)...(19): siRNA sense strand
cggaagacagccagagcua

SEQ ID NO: 2547493 - RNA, 19 nt, Homo sapiens
  misc_RNA (1)...(19): siRNA sense strand
uguaauuagcccagaagaa

SEQ ID NO: 2547494 - RNA, 19 nt, Homo sapiens
  misc_RNA (1)...(19): siRNA sense strand
uugugaaacugguggaaga

SEQ ID NO: 2547495 - RNA, 19 nt, Homo sapiens
  misc_RNA (1)...(19): siRNA sense strand
ccggaaacugcaaggagua

SEQ ID NO: 2547496 - RNA, 19 nt, Homo sapiens
  misc_RNA (1)...(19): siRNA sense strand
aggaguagugagagucaaa

SEQ ID NO: 2547497 - RNA, 19 nt, Homo sapiens
  misc_RNA (1)...(19): siRNA sense strand
uggaaauaaagcaguggaa

SEQ ID NO: 2547498 - RNA, 19 nt, Homo sapiens
  misc_RNA (1)...(19): siRNA sense strand
agaauaaagggaagaaagu

SEQ ID NO: 2547499 - RNA, 19 nt, Homo sapiens
  misc_RNA (1)...(19): siRNA sense strand
ggcuggaacacuuggcaaa

SEQ ID NO: 2547500 - RNA, 19 nt, Homo sapiens
  misc_RNA (1)...(19): siRNA sense strand
ccagcauugcagaaggaaa

SEQ ID NO: 2547501 - RNA, 19 nt, Homo sapiens
  misc_RNA (1)...(19): siRNA sense strand
cgagaugaaaggacagaca

SEQ ID NO: 2547502 - RNA, 19 nt, Homo sapiens
  misc_RNA (1)...(19): siRNA sense strand
gggaugaggagcaguacau

SEQ ID NO: 2547503 - RNA, 19 nt, Homo sapiens
  misc_RNA (1)...(19): siRNA sense strand
uuacaaagcacuaacccaa

SEQ ID NO: 2547504 - RNA, 19 nt, Homo sapiens
  misc_RNA (1)...(19): siRNA sense strand
ggagaggagcccugugaca

SEQ ID NO: 2547505 - RNA, 19 nt, Homo sapiens
  misc_RNA (1)...(19): siRNA sense strand
ccucagggaccauguaaau

SEQ ID NO: 2547506 - RNA, 19 nt, Homo sapiens
  misc_RNA (1)...(19): siRNA sense strand
ccagaauaaagggaagaaa

SEQ ID NO: 2547507 - RNA, 19 nt, Homo sapiens
  misc_RNA (1)...(19): siRNA sense strand
cagucaggaucuugggcau

SEQ ID NO: 2547508 - RNA, 19 nt, Homo sapiens
  misc_RNA (1)...(19): siRNA sense strand
gggaaccagcaaugaagaa

SEQ ID NO: 2547509 - RNA, 19 nt, Homo sapiens
  misc_RNA (1)...(19): siRNA sense strand
gcagagggcuaucgaggca

SEQ ID NO: 2547510 - RNA, 19 nt, Homo sapiens
  misc_RNA (1)...(19): siRNA sense strand
aaaccacagugcugggaau

SEQ ID NO: 2547511 - RNA, 19 nt, Homo sapiens
  misc_RNA (1)...(19): siRNA sense strand
ccagcaaagcccuuguuaa

SEQ ID NO: 2547512 - RNA, 19 nt, Homo sapiens
  misc_RNA (1)...(19): siRNA sense strand
cccaggaggcuguggucaa

SEQ ID NO: 2547513 - RNA, 19 nt, Homo sapiens
  misc_RNA (1)...(19): siRNA sense strand
uagaaaggaaucugcagaa

SEQ ID NO: 2547514 - RNA, 19 nt, Homo sapiens
  misc_RNA (1)...(19): siRNA sense strand
cagaauaaagggaagaaag

SEQ ID NO: 2547515 - RNA, 19 nt, Homo sapiens
  misc_RNA (1)...(19): siRNA sense strand
gcaaacuacagaugguaca

SEQ ID NO: 2547516 - RNA, 19 nt, Homo sapiens
  misc_RNA (1)...(19): siRNA sense strand
uggaaggggugcagcaaau

SEQ ID NO: 2547517 - RNA, 19 nt, Homo sapiens
  misc_RNA (1)...(19): siRNA sense strand
gagcaguggcaccgcagaa

SEQ ID NO: 2547518 - RNA, 19 nt, Homo sapiens
  misc_RNA (1)...(19): siRNA sense strand
cuaugaagguggucuggau

SEQ ID NO: 2547519 - RNA, 19 nt, Homo sapiens
  misc_RNA (1)...(19): siRNA sense strand
cauuguaagucuugcgucu

SEQ ID NO: 2547520 - RNA, 19 nt, Homo sapiens
  misc_RNA (1)...(19): siRNA sense strand
acuucuacguucaggccua

SEQ ID NO: 2547521 - RNA, 19 nt, Homo sapiens
  misc_RNA (1)...(19): siRNA sense strand
gaugacagguggcgggacu

SEQ ID NO: 2547522 - RNA, 19 nt, Homo sapiens
  misc_RNA (1)...(19): siRNA sense strand
cagcauugcagaaggaaag

SEQ ID NO: 2547523 - RNA, 19 nt, Homo sapiens
  misc_RNA (1)...(19): siRNA sense strand
agauggcgcacaagauaaa

SEQ ID NO: 2547524 - RNA, 19 nt, Homo sapiens
  misc_RNA (1)...(19): siRNA sense strand
uaaagaggaacuuggaaca

SEQ ID NO: 2547525 - RNA, 19 nt, Homo sapiens
  misc_RNA (1)...(19): siRNA sense strand
ugcaaggaguagugagagu

SEQ ID NO: 2547526 - RNA, 19 nt, Homo sapiens
  misc_RNA (1)...(19): siRNA sense strand
ugauggagccgaagggagu

SEQ ID NO: 2547527 - RNA, 19 nt, Homo sapiens
  misc_RNA (1)...(19): siRNA sense strand
gcuccagaauaaagggaag

SEQ ID NO: 2547528 - RNA, 19 nt, Homo sapiens
  misc_RNA (1)...(19): siRNA sense strand
guaaagaggaacuuggaac

SEQ ID NO: 2547529 - RNA, 19 nt, Homo sapiens
  misc_RNA (1)...(19): siRNA sense strand
gcacggacuuccaggcagu

SEQ ID NO: 2547530 - RNA, 19 nt, Homo sapiens
  misc_RNA (1)...(19): siRNA sense strand
ugaccgguuuaguggauau

SEQ ID NO: 2547531 - RNA, 19 nt, Homo sapiens
  misc_RNA (1)...(19): siRNA sense strand
gguaugaggcacaggcgca

SEQ ID NO: 2547532 - RNA, 19 nt, Homo sapiens
  misc_RNA (1)...(19): siRNA sense strand
acgcaggcuccgauggcaa

SEQ ID NO: 2547533 - RNA, 19 nt, Homo sapiens
  misc_RNA (1)...(19): siRNA sense strand
ccaaauacuguaaagagga

SEQ ID NO: 2547534 - RNA, 19 nt, Homo sapiens
  misc_RNA (1)...(19): siRNA sense strand
ucagcaacguggaaggcau

SEQ ID NO: 2547535 - RNA, 19 nt, Homo sapiens
  misc_RNA (1)...(19): siRNA sense strand
agccgaagggagugggaca

SEQ ID NO: 2547536 - RNA, 19 nt, Homo sapiens
  misc_RNA (1)...(19): siRNA sense strand
gaguuuugcuuuugacaau

SEQ ID NO: 2547537 - RNA, 19 nt, Homo sapiens
  misc_RNA (1)...(19): siRNA sense strand
acugcaaggaguagugaga

SEQ ID NO: 2547538 - RNA, 19 nt, Homo sapiens
  misc_RNA (1)...(19): siRNA sense strand
gggacagaucacaggucuu

SEQ ID NO: 2547539 - RNA, 19 nt, Homo sapiens
  misc_RNA (1)...(19): siRNA sense strand
gcucagaugucaaaggcac

SEQ ID NO: 2547540 - RNA, 19 nt, Homo sapiens
  misc_RNA (1)...(19): siRNA sense strand
uggagagguaugaggcaca

SEQ ID NO: 2547541 - RNA, 19 nt, Homo sapiens
  misc_RNA (1)...(19): siRNA sense strand
ccgaagaccucagggacca

SEQ ID NO: 2547542 - RNA, 19 nt, Homo sapiens
  misc_RNA (1)...(19): siRNA sense strand
aaguguccuuggagaacaa

SEQ ID NO: 2547543 - RNA, 19 nt, Homo sapiens
  misc_RNA (1)...(19): siRNA sense strand
gggaauuccauggugcaaa

SEQ ID NO: 2547544 - RNA, 19 nt, Homo sapiens
  misc_RNA (1)...(19): siRNA sense strand
cugagaaggcggagaggag

SEQ ID NO: 2547545 - RNA, 19 nt, Homo sapiens
  misc_RNA (1)...(19): siRNA sense strand
gcugaggcgcaacgguuua

SEQ ID NO: 2547546 - RNA, 19 nt, Homo sapiens
  misc_RNA (1)...(19): siRNA sense strand
guucaaaguauucaagugu

SEQ ID NO: 2547547 - RNA, 19 nt, Homo sapiens
  misc_RNA (1)...(19): siRNA sense strand
gaagaggcucagaugucaa

SEQ ID NO: 2547548 - RNA, 19 nt, Homo sapiens
  misc_RNA (1)...(19): siRNA sense strand
agaaggggccagucggaaa

SEQ ID NO: 2547549 - RNA, 19 nt, Homo sapiens
  misc_RNA (1)...(19): siRNA sense strand
aggcagcagucauggagga

SEQ ID NO: 2547550 - RNA, 19 nt, Homo sapiens
  misc_RNA (1)...(19): siRNA sense strand
auaaagcaguggaagaagu

SEQ ID NO: 2547551 - RNA, 19 nt, Homo sapiens
  misc_RNA (1)...(19): siRNA sense strand
caguuuggucagagaauaa

SEQ ID NO: 2547552 - RNA, 19 nt, Homo sapiens
  misc_RNA (1)...(19): siRNA sense strand
agauugugguuuaggaaau

SEQ ID NO: 2547553 - RNA, 19 nt, Homo sapiens
  misc_RNA (1)...(19): siRNA sense strand
agaagauaccacagagcaa

SEQ ID NO: 2547554 - RNA, 19 nt, Homo sapiens
  misc_RNA (1)...(19): siRNA sense strand
gagaaggacgaguggaaca

SEQ ID NO: 2547555 - RNA, 19 nt, Homo sapiens
  misc_RNA (1)...(19): siRNA sense strand
gugccauaccagaggcuaa

SEQ ID NO: 2547556 - RNA, 19 nt, Homo sapiens
  misc_RNA (1)...(19): siRNA sense strand
gcucuuagcaggaaggaca

SEQ ID NO: 2547557 - RNA, 19 nt, Homo sapiens
  misc_RNA (1)...(19): siRNA sense strand
ucgagaaggacgaguggaa

SEQ ID NO: 2547558 - RNA, 19 nt, Homo sapiens
  misc_RNA (1)...(19): siRNA sense strand
acugaaauggagauagaaa

SEQ ID NO: 2547559 - RNA, 19 nt, Homo sapiens
  misc_RNA (1)...(19): siRNA sense strand
ggagauagaaaaugaacaa

SEQ ID NO: 2547560 - RNA, 19 nt, Homo sapiens
  misc_RNA (1)...(19): siRNA sense strand
ugaaaugcucacagaacaa

SEQ ID NO: 2547561 - RNA, 19 nt, Homo sapiens
  misc_RNA (1)...(19): siRNA sense strand
ugauaaaacuugugugcca

SEQ ID NO: 2547562 - RNA, 19 nt, Homo sapiens
  misc_RNA (1)...(19): siRNA sense strand
agucaaacaggcugaaaca

SEQ ID NO: 2547563 - RNA, 19 nt, Homo sapiens
  misc_RNA (1)...(19): siRNA sense strand
cgaagaagcuggugcacug

SEQ ID NO: 2547564 - RNA, 19 nt, Homo sapiens
  misc_RNA (1)...(19): siRNA sense strand
agcgaaugcuaaugaaauu

SEQ ID NO: 2547565 - RNA, 19 nt, Homo sapiens
  misc_RNA (1)...(19): siRNA sense strand
aggcuaacucggagacuuu

SEQ ID NO: 2547566 - RNA, 19 nt, Homo sapiens
  misc_RNA (1)...(19): siRNA sense strand
cugaaauggagauagaaaa

SEQ ID NO: 2547567 - RNA, 19 nt, Homo sapiens
  misc_RNA (1)...(19): siRNA sense strand
uaaaggaauaccaggaaaa

SEQ ID NO: 2547568 - RNA, 19 nt, Homo sapiens
  misc_RNA (1)...(19): siRNA sense strand
guagaaaagcgaaugcuaa

SEQ ID NO: 2547569 - RNA, 19 nt, Homo sapiens
  misc_RNA (1)...(19): siRNA sense strand
ccugaugaauauaaaggau

SEQ ID NO: 2547570 - RNA, 19 nt, Homo sapiens
  misc_RNA (1)...(19): siRNA sense strand
acauuauccuugauggaga

SEQ ID NO: 2547571 - RNA, 19 nt, Homo sapiens
  misc_RNA (1)...(19): siRNA sense strand
aaaucaugcucuugugaca

SEQ ID NO: 2547572 - RNA, 19 nt, Homo sapiens
  misc_RNA (1)...(19): siRNA sense strand
uauuaaagaaggcaggaga

SEQ ID NO: 2547573 - RNA, 19 nt, Homo sapiens
  misc_RNA (1)...(19): siRNA sense strand
gucgauaugcagaguuuaa

SEQ ID NO: 2547574 - RNA, 19 nt, Homo sapiens
  misc_RNA (1)...(19): siRNA sense strand
accaaauccugaagacauu

SEQ ID NO: 2547575 - RNA, 19 nt, Homo sapiens
  misc_RNA (1)...(19): siRNA sense strand
uuuauauggccaaggagaa

SEQ ID NO: 2547576 - RNA, 19 nt, Homo sapiens
  misc_RNA (1)...(19): siRNA sense strand
cagauugugguuuaggaaa

SEQ ID NO: 2547577 - RNA, 19 nt, Homo sapiens
  misc_RNA (1)...(19): siRNA sense strand
caccaaauccugaagacau

SEQ ID NO: 2547578 - RNA, 19 nt, Homo sapiens
  misc_RNA (1)...(19): siRNA sense strand
uguucgggucauugaguua

SEQ ID NO: 2547579 - RNA, 19 nt, Homo sapiens
  misc_RNA (1)...(19): siRNA sense strand
cagcaagagaagauuuaga

SEQ ID NO: 2547580 - RNA, 19 nt, Homo sapiens
  misc_RNA (1)...(19): siRNA sense strand
agaaguggccggagaguuc

SEQ ID NO: 2547581 - RNA, 19 nt, Homo sapiens
  misc_RNA (1)...(19): siRNA sense strand
gaguuugaugugaucguaa

SEQ ID NO: 2547582 - RNA, 19 nt, Homo sapiens
  misc_RNA (1)...(19): siRNA sense strand
aaauggugcugaagugaca

SEQ ID NO: 2547583 - RNA, 19 nt, Homo sapiens
  misc_RNA (1)...(19): siRNA sense strand
aggcaggagauuuaauauu

SEQ ID NO: 2547584 - RNA, 19 nt, Homo sapiens
  misc_RNA (1)...(19): siRNA sense strand
cagaugucuuuaauagcaa

SEQ ID NO: 2547585 - RNA, 19 nt, Homo sapiens
  misc_RNA (1)...(19): siRNA sense strand
ugcaaugacaucagagaca

SEQ ID NO: 2547586 - RNA, 19 nt, Homo sapiens
  misc_RNA (1)...(19): siRNA sense strand
ggauaugaagagaucacau

SEQ ID NO: 2547587 - RNA, 19 nt, Homo sapiens
  misc_RNA (1)...(19): siRNA sense strand
aagcgaaugcuaaugaaau

SEQ ID NO: 2547588 - RNA, 19 nt, Homo sapiens
  misc_RNA (1)...(19): siRNA sense strand
cuuuauauggccaaggaga

SEQ ID NO: 2547589 - RNA, 19 nt, Homo sapiens
  misc_RNA (1)...(19): siRNA sense strand
agacauuauccuugaugga

SEQ ID NO: 2547590 - RNA, 19 nt, Homo sapiens
  misc_RNA (1)...(19): siRNA sense strand
guaucaaagcugcuguauu

SEQ ID NO: 2547591 - RNA, 19 nt, Homo sapiens
  misc_RNA (1)...(19): siRNA sense strand
gguagaaaagcgaaugcua

SEQ ID NO: 2547592 - RNA, 19 nt, Homo sapiens
  misc_RNA (1)...(19): siRNA sense strand
aaacagauucagaucaaca

SEQ ID NO: 2547593 - RNA, 19 nt, Homo sapiens
  misc_RNA (1)...(19): siRNA sense strand
aggcagaucuccagggcag

SEQ ID NO: 2547594 - RNA, 19 nt, Homo sapiens
  misc_RNA (1)...(19): siRNA sense strand
augagagauucgucagaca

SEQ ID NO: 2547595 - RNA, 19 nt, Homo sapiens
  misc_RNA (1)...(19): siRNA sense strand
ccagauugugguuuaggaa

SEQ ID NO: 2547596 - RNA, 19 nt, Homo sapiens
  misc_RNA (1)...(19): siRNA sense strand
ccaggaaaacagugacauu

SEQ ID NO: 2547597 - RNA, 19 nt, Homo sapiens
  misc_RNA (1)...(19): siRNA sense strand
uuaaagaaggcaggagauu

SEQ ID NO: 2547598 - RNA, 19 nt, Homo sapiens
  misc_RNA (1)...(19): siRNA sense strand
guuacuuuccugagaacau

SEQ ID NO: 2547599 - RNA, 19 nt, Homo sapiens
  misc_RNA (1)...(19): siRNA sense strand
guagaaaagccaagaauuc

SEQ ID NO: 2547600 - RNA, 19 nt, Homo sapiens
  misc_RNA (1)...(19): siRNA sense strand
ugacauuguaagugacagu

SEQ ID NO: 2547601 - RNA, 19 nt, Homo sapiens
  misc_RNA (1)...(19): siRNA sense strand
auagauggucucaaagcua

SEQ ID NO: 2547602 - RNA, 19 nt, Homo sapiens
  misc_RNA (1)...(19): siRNA sense strand
aguaaauggugcugaagug

SEQ ID NO: 2547603 - RNA, 19 nt, Homo sapiens
  misc_RNA (1)...(19): siRNA sense strand
ucguaauagggacggguuu

SEQ ID NO: 2547604 - RNA, 19 nt, Homo sapiens
  misc_RNA (1)...(19): siRNA sense strand
ggaagaacgcggugggcuu

SEQ ID NO: 2547605 - RNA, 19 nt, Homo sapiens
  misc_RNA (1)...(19): siRNA sense strand
cacaagaggacaucgggaa

SEQ ID NO: 2547606 - RNA, 19 nt, Homo sapiens
  misc_RNA (1)...(19): siRNA sense strand
ggaagaagaagcagagagc

SEQ ID NO: 2547607 - RNA, 19 nt, Homo sapiens
  misc_RNA (1)...(19): siRNA sense strand
gguucucgucagugggauu

SEQ ID NO: 2547608 - RNA, 19 nt, Homo sapiens
  misc_RNA (1)...(19): siRNA sense strand
ugguaaaggaagaacuuaa

SEQ ID NO: 2547609 - RNA, 19 nt, Homo sapiens
  misc_RNA (1)...(19): siRNA sense strand
ugauaaacuaagagcagaa

SEQ ID NO: 2547610 - RNA, 19 nt, Homo sapiens
  misc_RNA (1)...(19): siRNA sense strand
guuauaagucacucagaaa

SEQ ID NO: 2547611 - RNA, 19 nt, Homo sapiens
  misc_RNA (1)...(19): siRNA sense strand
ggaccaggaaccagaggaa

SEQ ID NO: 2547612 - RNA, 19 nt, Homo sapiens
  misc_RNA (1)...(19): siRNA sense strand
gcuuauugacacagaauuu

SEQ ID NO: 2547613 - RNA, 19 nt, Homo sapiens
  misc_RNA (1)...(19): siRNA sense strand
ggaucuaaacauugcaaau

SEQ ID NO: 2547614 - RNA, 19 nt, Homo sapiens
  misc_RNA (1)...(19): siRNA sense strand
agagcaagucagaugauaa

SEQ ID NO: 2547615 - RNA, 19 nt, Homo sapiens
  misc_RNA (1)...(19): siRNA sense strand
caacaugaaugcagccaga

SEQ ID NO: 2547616 - RNA, 19 nt, Homo sapiens
  misc_RNA (1)...(19): siRNA sense strand
agaacagaaacaaggacaa

SEQ ID NO: 2547617 - RNA, 19 nt, Homo sapiens
  misc_RNA (1)...(19): siRNA sense strand
aaacaguugaugagaaaga

SEQ ID NO: 2547618 - RNA, 19 nt, Homo sapiens
  misc_RNA (1)...(19): siRNA sense strand
agaaagaggagaaaagcaa

SEQ ID NO: 2547619 - RNA, 19 nt, Homo sapiens
  misc_RNA (1)...(19): siRNA sense strand
ggaaaugauacaugggucu

SEQ ID NO: 2547620 - RNA, 19 nt, Homo sapiens
  misc_RNA (1)...(19): siRNA sense strand
ggagauuauauuugcaaga

SEQ ID NO: 2547621 - RNA, 19 nt, Homo sapiens
  misc_RNA (1)...(19): siRNA sense strand
gguuauugccagagcaugu

SEQ ID NO: 2547622 - RNA, 19 nt, Homo sapiens
  misc_RNA (1)...(19): siRNA sense strand
gaggagaaaagcaaagaua

SEQ ID NO: 2547623 - RNA, 19 nt, Homo sapiens
  misc_RNA (1)...(19): siRNA sense strand
aggaagaacuuaaacucau

SEQ ID NO: 2547624 - RNA, 19 nt, Homo sapiens
  misc_RNA (1)...(19): siRNA sense strand
gauauggaaaagaggguua

SEQ ID NO: 2547625 - RNA, 19 nt, Homo sapiens
  misc_RNA (1)...(19): siRNA sense strand
ggauaucggacgagagaug

SEQ ID NO: 2547626 - RNA, 19 nt, Homo sapiens
  misc_RNA (1)...(19): siRNA sense strand
cagaaagggaggaccauca

SEQ ID NO: 2547627 - RNA, 19 nt, Homo sapiens
  misc_RNA (1)...(19): siRNA sense strand
cgggaaacacauauuacaa

SEQ ID NO: 2547628 - RNA, 19 nt, Homo sapiens
  misc_RNA (1)...(19): siRNA sense strand
gagaacagaaacaaggaca

SEQ ID NO: 2547629 - RNA, 19 nt, Homo sapiens
  misc_RNA (1)...(19): siRNA sense strand
guaagcaaagauauggaaa

SEQ ID NO: 2547630 - RNA, 19 nt, Homo sapiens
  misc_RNA (1)...(19): siRNA sense strand
ggaaaagaggguuauuaaa

SEQ ID NO: 2547631 - RNA, 19 nt, Homo sapiens
  misc_RNA (1)...(19): siRNA sense strand
aguuauaagucacucagaa

SEQ ID NO: 2547632 - RNA, 19 nt, Homo sapiens
  misc_RNA (1)...(19): siRNA sense strand
acucagaaagggaggacca

SEQ ID NO: 2547633 - RNA, 19 nt, Homo sapiens
  misc_RNA (1)...(19): siRNA sense strand
aagaacaccacaagaaaga

SEQ ID NO: 2547634 - RNA, 19 nt, Homo sapiens
  misc_RNA (1)...(19): siRNA sense strand
aggacaaacuauccaaaca

SEQ ID NO: 2547635 - RNA, 19 nt, Homo sapiens
  misc_RNA (1)...(19): siRNA sense strand
gaauuuggccguuuggcua

SEQ ID NO: 2547636 - RNA, 19 nt, Homo sapiens
  misc_RNA (1)...(19): siRNA sense strand
cauuaucaaggaaggcaaa

SEQ ID NO: 2547637 - RNA, 19 nt, Homo sapiens
  misc_RNA (1)...(19): siRNA sense strand
guuauguacaacuggacaa

SEQ ID NO: 2547638 - RNA, 19 nt, Homo sapiens
  misc_RNA (1)...(19): siRNA sense strand
cagaauuucaagcaagaau

SEQ ID NO: 2547639 - RNA, 19 nt, Homo sapiens
  misc_RNA (1)...(19): siRNA sense strand
uggaaaagaggguuauuaa

SEQ ID NO: 2547640 - RNA, 19 nt, Homo sapiens
  misc_RNA (1)...(19): siRNA sense strand
accaggaaccagaggaaaa

SEQ ID NO: 2547641 - RNA, 19 nt, Homo sapiens
  misc_RNA (1)...(19): siRNA sense strand
gagcagaauuucaagcaag

SEQ ID NO: 2547642 - RNA, 19 nt, Homo sapiens
  misc_RNA (1)...(19): siRNA sense strand
caguagaccuccugcaaac

SEQ ID NO: 2547643 - RNA, 19 nt, Homo sapiens
  misc_RNA (1)...(19): siRNA sense strand
ccagauauugaaaaggaaa

SEQ ID NO: 2547644 - RNA, 19 nt, Homo sapiens
  misc_RNA (1)...(19): siRNA sense strand
ggagaaaagcaaagauaag

SEQ ID NO: 2547645 - RNA, 19 nt, Homo sapiens
  misc_RNA (1)...(19): siRNA sense strand
gcaauaaggaccaggaacc

SEQ ID NO: 2547646 - RNA, 19 nt, Homo sapiens
  misc_RNA (1)...(19): siRNA sense strand
aggagaaaagcaaagauaa

SEQ ID NO: 2547647 - RNA, 19 nt, Homo sapiens
  misc_RNA (1)...(19): siRNA sense strand
auaagaaagaacaccacaa

SEQ ID NO: 2547648 - RNA, 19 nt, Homo sapiens
  misc_RNA (1)...(19): siRNA sense strand
aaaacgacccagagaagaa

SEQ ID NO: 2547649 - RNA, 19 nt, Homo sapiens
  misc_RNA (1)...(19): siRNA sense strand
cuuccagagaacagaaaca

SEQ ID NO: 2547650 - RNA, 19 nt, Homo sapiens
  misc_RNA (1)...(19): siRNA sense strand
cggccaauauuaaaaguau

SEQ ID NO: 2547651 - RNA, 19 nt, Homo sapiens
  misc_RNA (1)...(19): siRNA sense strand
acauuaucaaggaaggcaa

SEQ ID NO: 2547652 - RNA, 19 nt, Homo sapiens
  misc_RNA (1)...(19): siRNA sense strand
aguuugugguauugagcga

SEQ ID NO: 2547653 - RNA, 19 nt, Homo sapiens
  misc_RNA (1)...(19): siRNA sense strand
cugaguacccagaugccaa

SEQ ID NO: 2547654 - RNA, 19 nt, Homo sapiens
  misc_RNA (1)...(19): siRNA sense strand
gcugguaaaggaagaacuu

SEQ ID NO: 2547655 - RNA, 19 nt, Homo sapiens
  misc_RNA (1)...(19): siRNA sense strand
aaaaggacaaagagaagaa

SEQ ID NO: 2547656 - RNA, 19 nt, Homo sapiens
  misc_RNA (1)...(19): siRNA sense strand
ugugauuguaccagauauu

SEQ ID NO: 2547657 - RNA, 19 nt, Homo sapiens
  misc_RNA (1)...(19): siRNA sense strand
agaaacaaggacaaacuau

SEQ ID NO: 2547658 - RNA, 19 nt, Homo sapiens
  misc_RNA (1)...(19): siRNA sense strand
agcagaauuucaagcaaga

SEQ ID NO: 2547659 - RNA, 19 nt, Homo sapiens
  misc_RNA (1)...(19): siRNA sense strand
gaggguuauuaaaugguuu

SEQ ID NO: 2547660 - RNA, 19 nt, Homo sapiens
  misc_RNA (1)...(19): siRNA sense strand
aagaagagcaagucagaug

SEQ ID NO: 2547661 - RNA, 19 nt, Homo sapiens
  misc_RNA (1)...(19): siRNA sense strand
cugaaagggcacagaaauu

SEQ ID NO: 2547662 - RNA, 19 nt, Homo sapiens
  misc_RNA (1)...(19): siRNA sense strand
cgggaagggucaagaggga

SEQ ID NO: 2547663 - RNA, 19 nt, Homo sapiens
  misc_RNA (1)...(19): siRNA sense strand
ugacuguggagcagagaaa

SEQ ID NO: 2547664 - RNA, 19 nt, Homo sapiens
  misc_RNA (1)...(19): siRNA sense strand
cugcaagagcugcuggaaa

SEQ ID NO: 2547665 - RNA, 19 nt, Homo sapiens
  misc_RNA (1)...(19): siRNA sense strand
cugucaagaauuauggaaa

SEQ ID NO: 2547666 - RNA, 19 nt, Homo sapiens
  misc_RNA (1)...(19): siRNA sense strand
guucagaugcagagagagu

SEQ ID NO: 2547667 - RNA, 19 nt, Homo sapiens
  misc_RNA (1)...(19): siRNA sense strand
aguuaugaccacucagaaa

SEQ ID NO: 2547668 - RNA, 19 nt, Homo sapiens
  misc_RNA (1)...(19): siRNA sense strand
gcgagagagaggagcuauu

SEQ ID NO: 2547669 - RNA, 19 nt, Homo sapiens
  misc_RNA (1)...(19): siRNA sense strand
gccuggagcucaaggguca

SEQ ID NO: 2547670 - RNA, 19 nt, Homo sapiens
  misc_RNA (1)...(19): siRNA sense strand
uugauguacugcagagaau

SEQ ID NO: 2547671 - RNA, 19 nt, Homo sapiens
  misc_RNA (1)...(19): siRNA sense strand
uguuuagagaagaggaaga

SEQ ID NO: 2547672 - RNA, 19 nt, Homo sapiens
  misc_RNA (1)...(19): siRNA sense strand
uuagagaagaggaagauau

SEQ ID NO: 2547673 - RNA, 19 nt, Homo sapiens
  misc_RNA (1)...(19): siRNA sense strand
gccaagugccagacgaaau

SEQ ID NO: 2547674 - RNA, 19 nt, Homo sapiens
  misc_RNA (1)...(19): siRNA sense strand
gggaagaaaacaucaggaa

SEQ ID NO: 2547675 - RNA, 19 nt, Homo sapiens
  misc_RNA (1)...(19): siRNA sense strand
ccgcacaggaaaugaggau

SEQ ID NO: 2547676 - RNA, 19 nt, Homo sapiens
  misc_RNA (1)...(19): siRNA sense strand
ggauacaagcacaguuuca

SEQ ID NO: 2547677 - RNA, 19 nt, Homo sapiens
  misc_RNA (1)...(19): siRNA sense strand
caucaugguguuugagcau

SEQ ID NO: 2547678 - RNA, 19 nt, Homo sapiens
  misc_RNA (1)...(19): siRNA sense strand
accuguaggacgagggauu

SEQ ID NO: 2547679 - RNA, 19 nt, Homo sapiens
  misc_RNA (1)...(19): siRNA sense strand
cugccagccuucagagaca

SEQ ID NO: 2547680 - RNA, 19 nt, Homo sapiens
  misc_RNA (1)...(19): siRNA sense strand
uaaagaagcuggacugcga

SEQ ID NO: 2547681 - RNA, 19 nt, Homo sapiens
  misc_RNA (1)...(19): siRNA sense strand
cuguucagaugcagagaga

SEQ ID NO: 2547682 - RNA, 19 nt, Homo sapiens
  misc_RNA (1)...(19): siRNA sense strand
ccaccaaagcucaaggagu

SEQ ID NO: 2547683 - RNA, 19 nt, Homo sapiens
  misc_RNA (1)...(19): siRNA sense strand
ccugaaagggcacagaaau

SEQ ID NO: 2547684 - RNA, 19 nt, Homo sapiens
  misc_RNA (1)...(19): siRNA sense strand
cagcaaagugauugacugu

SEQ ID NO: 2547685 - RNA, 19 nt, Homo sapiens
  misc_RNA (1)...(19): siRNA sense strand
agguguugaaagaggaaga

SEQ ID NO: 2547686 - RNA, 19 nt, Homo sapiens
  misc_RNA (1)...(19): siRNA sense strand
gaagaacuguggagccuga

SEQ ID NO: 2547687 - RNA, 19 nt, Homo sapiens
  misc_RNA (1)...(19): siRNA sense strand
gagaagaacuguggagccu

SEQ ID NO: 2547688 - RNA, 19 nt, Homo sapiens
  misc_RNA (1)...(19): siRNA sense strand
gguuacaccuggagcugga

SEQ ID NO: 2547689 - RNA, 19 nt, Homo sapiens
  misc_RNA (1)...(19): siRNA sense strand
gagcagagaaagaagcugu

SEQ ID NO: 2547690 - RNA, 19 nt, Homo sapiens
  misc_RNA (1)...(19): siRNA sense strand
cgacaugcaugcuguggga

SEQ ID NO: 2547691 - RNA, 19 nt, Homo sapiens
  misc_RNA (1)...(19): siRNA sense strand
cagaggaguugguuggcca

SEQ ID NO: 2547692 - RNA, 19 nt, Homo sapiens
  misc_RNA (1)...(19): siRNA sense strand
gggcgauccaugagcacuu

SEQ ID NO: 2547693 - RNA, 19 nt, Homo sapiens
  misc_RNA (1)...(19): siRNA sense strand
ggacagaucugcacggcuc

SEQ ID NO: 2547694 - RNA, 19 nt, Homo sapiens
  misc_RNA (1)...(19): siRNA sense strand
guuugauggcccaggcauu

SEQ ID NO: 2547695 - RNA, 19 nt, Homo sapiens
  misc_RNA (1)...(19): siRNA sense strand
ucaacaagucagggaagaa

SEQ ID NO: 2547696 - RNA, 19 nt, Homo sapiens
  misc_RNA (1)...(19): siRNA sense strand
acaucaggaagcagcuaaa

SEQ ID NO: 2547697 - RNA, 19 nt, Homo sapiens
  misc_RNA (1)...(19): siRNA sense strand
gcaccacagaccugccaaa

SEQ ID NO: 2547698 - RNA, 19 nt, Homo sapiens
  misc_RNA (1)...(19): siRNA sense strand
cgcuuuggcugcuggagua

SEQ ID NO: 2547699 - RNA, 19 nt, Homo sapiens
  misc_RNA (1)...(19): siRNA sense strand
gugacaguucugaggccua

SEQ ID NO: 2547700 - RNA, 19 nt, Homo sapiens
  misc_RNA (1)...(19): siRNA sense strand
cgagauacuuugugcagcu

SEQ ID NO: 2547701 - RNA, 19 nt, Homo sapiens
  misc_RNA (1)...(19): siRNA sense strand
cacagaaauuaaaggaauc

SEQ ID NO: 2547702 - RNA, 19 nt, Homo sapiens
  misc_RNA (1)...(19): siRNA sense strand
ccucgaguguuuagagaag

SEQ ID NO: 2547703 - RNA, 19 nt, Homo sapiens
  misc_RNA (1)...(19): siRNA sense strand
aguguuuagagaagaggaa

SEQ ID NO: 2547704 - RNA, 19 nt, Homo sapiens
  misc_RNA (1)...(19): siRNA sense strand
ccaucagggaagaggccuu

SEQ ID NO: 2547705 - RNA, 19 nt, Homo sapiens
  misc_RNA (1)...(19): siRNA sense strand
gggaacugcagaagcuaca

SEQ ID NO: 2547706 - RNA, 19 nt, Homo sapiens
  misc_RNA (1)...(19): siRNA sense strand
aagacuggguggcgcguuu

SEQ ID NO: 2547707 - RNA, 19 nt, Homo sapiens
  misc_RNA (1)...(19): siRNA sense strand
cugaagagaagccagaaga

SEQ ID NO: 2547708 - RNA, 19 nt, Homo sapiens
  misc_RNA (1)...(19): siRNA sense strand
gagugagggcagaacccaa

SEQ ID NO: 2547709 - RNA, 19 nt, Homo sapiens
  misc_RNA (1)...(19): siRNA sense strand
cggcacagguggcagugau

SEQ ID NO: 2547710 - RNA, 19 nt, Homo sapiens
  misc_RNA (1)...(19): siRNA sense strand
cugcuuaucuccaggccuu

SEQ ID NO: 2547711 - RNA, 19 nt, Homo sapiens
  misc_RNA (1)...(19): siRNA sense strand
agcucaagggucagggcaa

SEQ ID NO: 2547712 - RNA, 19 nt, Homo sapiens
  misc_RNA (1)...(19): siRNA sense strand
acuguggagcagagaaaga

SEQ ID NO: 2547713 - RNA, 19 nt, Homo sapiens
  misc_RNA (1)...(19): siRNA sense strand
gcagcagcuuccaggcaga

SEQ ID NO: 2547714 - RNA, 19 nt, Homo sapiens
  misc_RNA (1)...(19): siRNA sense strand
ggcacagaaauuaaaggaa

SEQ ID NO: 2547715 - RNA, 19 nt, Homo sapiens
  misc_RNA (1)...(19): siRNA sense strand
gggcacagaaauuaaagga

SEQ ID NO: 2547716 - RNA, 19 nt, Homo sapiens
  misc_RNA (1)...(19): siRNA sense strand
ucaacucugagaugagaaa

SEQ ID NO: 2547717 - RNA, 19 nt, Homo sapiens
  misc_RNA (1)...(19): siRNA sense strand
gcucaaggaguuaugacca

SEQ ID NO: 2547718 - RNA, 19 nt, Homo sapiens
  misc_RNA (1)...(19): siRNA sense strand
cuucagagacagagggagc

SEQ ID NO: 2547719 - RNA, 19 nt, Homo sapiens
  misc_RNA (1)...(19): siRNA sense strand
agagaggagcuauugguuu

SEQ ID NO: 2547720 - RNA, 19 nt, Homo sapiens
  misc_RNA (1)...(19): siRNA sense strand
auuuauuggcacacaguau

SEQ ID NO: 2547721 - RNA, 19 nt, Homo sapiens
  misc_RNA (1)...(19): siRNA sense strand
cgucauggaggccagcaua

SEQ ID NO: 2547722 - RNA, 19 nt, Homo sapiens
  misc_RNA (1)...(19): siRNA sense strand
cuauaaagcugacaggagu

SEQ ID NO: 2547723 - RNA, 19 nt, Homo sapiens
  misc_RNA (1)...(19): siRNA sense strand
ccagaucacaagugggaga

SEQ ID NO: 2547724 - RNA, 19 nt, Homo sapiens
  misc_RNA (1)...(19): siRNA sense strand
ugguauaccucaaagggau

SEQ ID NO: 2547725 - RNA, 19 nt, Homo sapiens
  misc_RNA (1)...(19): siRNA sense strand
ccugauacuuacuggaacu

SEQ ID NO: 2547726 - RNA, 19 nt, Homo sapiens
  misc_RNA (1)...(19): siRNA sense strand
uggcgggugcaaugggaaa

SEQ ID NO: 2547727 - RNA, 19 nt, Homo sapiens
  misc_RNA (1)...(19): siRNA sense strand
ggaagaggaacauccgcua

SEQ ID NO: 2547728 - RNA, 19 nt, Homo sapiens
  misc_RNA (1)...(19): siRNA sense strand
gcuucaugcgcgacaacua

SEQ ID NO: 2547729 - RNA, 19 nt, Homo sapiens
  misc_RNA (1)...(19): siRNA sense strand
gggaacagcucuccggaag

SEQ ID NO: 2547730 - RNA, 19 nt, Homo sapiens
  misc_RNA (1)...(19): siRNA sense strand
caguaaguuugggaggcaa

SEQ ID NO: 2547731 - RNA, 19 nt, Homo sapiens
  misc_RNA (1)...(19): siRNA sense strand
cagaaaauggagucuuaaa

SEQ ID NO: 2547732 - RNA, 19 nt, Homo sapiens
  misc_RNA (1)...(19): siRNA sense strand
acaacaucuguaugguaua

SEQ ID NO: 2547733 - RNA, 19 nt, Homo sapiens
  misc_RNA (1)...(19): siRNA sense strand
ccucaaagggaucggcugu

SEQ ID NO: 2547734 - RNA, 19 nt, Homo sapiens
  misc_RNA (1)...(19): siRNA sense strand
cggaggaguacgcggacuu

SEQ ID NO: 2547735 - RNA, 19 nt, Homo sapiens
  misc_RNA (1)...(19): siRNA sense strand
acuggaugucggaggagua

SEQ ID NO: 2547736 - RNA, 19 nt, Homo sapiens
  misc_RNA (1)...(19): siRNA sense strand
acuggauggaggaggaaua

SEQ ID NO: 2547737 - RNA, 19 nt, Homo sapiens
  misc_RNA (1)...(19): siRNA sense strand
ggacagggauugccgcaga

SEQ ID NO: 2547738 - RNA, 19 nt, Homo sapiens
  misc_RNA (1)...(19): siRNA sense strand
agguguacccacaggcaga

SEQ ID NO: 2547739 - RNA, 19 nt, Homo sapiens
  misc_RNA (1)...(19): siRNA sense strand
gggcacuggauuucugcaa

SEQ ID NO: 2547740 - RNA, 19 nt, Homo sapiens
  misc_RNA (1)...(19): siRNA sense strand
gcgaggagauugaggucca

SEQ ID NO: 2547741 - RNA, 19 nt, Homo sapiens
  misc_RNA (1)...(19): siRNA sense strand
ugauguacacagugggcua

SEQ ID NO: 2547742 - RNA, 19 nt, Homo sapiens
  misc_RNA (1)...(19): siRNA sense strand
gcgccugggcaaagugcua

SEQ ID NO: 2547743 - RNA, 19 nt, Homo sapiens
  misc_RNA (1)...(19): siRNA sense strand
gcaaagugcuaugggagga

SEQ ID NO: 2547744 - RNA, 19 nt, Homo sapiens
  misc_RNA (1)...(19): siRNA sense strand
aggagguggccaagaugua

SEQ ID NO: 2547745 - RNA, 19 nt, Homo sapiens
  misc_RNA (1)...(19): siRNA sense strand
ugcuaugggaggagcggaa

SEQ ID NO: 2547746 - RNA, 19 nt, Homo sapiens
  misc_RNA (1)...(19): siRNA sense strand
uccagaaggagguggccaa

SEQ ID NO: 2547747 - RNA, 19 nt, Homo sapiens
  misc_RNA (1)...(19): siRNA sense strand
agauggauggcgaggagau

SEQ ID NO: 2547748 - RNA, 19 nt, Homo sapiens
  misc_RNA (1)...(19): siRNA sense strand
gaacaaaugagcagcagca

SEQ ID NO: 2547749 - RNA, 19 nt, Homo sapiens
  misc_RNA (1)...(19): siRNA sense strand
ucugagagcucuucgggaa

SEQ ID NO: 2547750 - RNA, 19 nt, Homo sapiens
  misc_RNA (1)...(19): siRNA sense strand
ggugaauaugugcuggaaa

SEQ ID NO: 2547751 - RNA, 19 nt, Homo sapiens
  misc_RNA (1)...(19): siRNA sense strand
ggacaauggcccagccucu

SEQ ID NO: 2547752 - RNA, 19 nt, Homo sapiens
  misc_RNA (1)...(19): siRNA sense strand
aaacaagagcugagggcag

SEQ ID NO: 2547753 - RNA, 19 nt, Homo sapiens
  misc_RNA (1)...(19): siRNA sense strand
ucaaguuggcaaaggagau

SEQ ID NO: 2547754 - RNA, 19 nt, Homo sapiens
  misc_RNA (1)...(19): siRNA sense strand
ugacuguguucaaggggaa

SEQ ID NO: 2547755 - RNA, 19 nt, Homo sapiens
  misc_RNA (1)...(19): siRNA sense strand
cagaaaaugaacagcaaaa

SEQ ID NO: 2547756 - RNA, 19 nt, Homo sapiens
  misc_RNA (1)...(19): siRNA sense strand
aggaggauaacgagcugaa

SEQ ID NO: 2547757 - RNA, 19 nt, Homo sapiens
  misc_RNA (1)...(19): siRNA sense strand
uggugauugugaaggacau

SEQ ID NO: 2547758 - RNA, 19 nt, Homo sapiens
  misc_RNA (1)...(19): siRNA sense strand
cccgcagcgaggaggauaa

SEQ ID NO: 2547759 - RNA, 19 nt, Homo sapiens
  misc_RNA (1)...(19): siRNA sense strand
gauccaaagacucgggaag

SEQ ID NO: 2547760 - RNA, 19 nt, Homo sapiens
  misc_RNA (1)...(19): siRNA sense strand
gcuuaaaccaagaggacau

SEQ ID NO: 2547761 - RNA, 19 nt, Homo sapiens
  misc_RNA (1)...(19): siRNA sense strand
acucauugaaaguggauaa

SEQ ID NO: 2547762 - RNA, 19 nt, Homo sapiens
  misc_RNA (1)...(19): siRNA sense strand
aagcagugaccaugagaaa

SEQ ID NO: 2547763 - RNA, 19 nt, Homo sapiens
  misc_RNA (1)...(19): siRNA sense strand
gaaaauuagaggaggugaa

SEQ ID NO: 2547764 - RNA, 19 nt, Homo sapiens
  misc_RNA (1)...(19): siRNA sense strand
uuucaaugccaaugacaua

SEQ ID NO: 2547765 - RNA, 19 nt, Homo sapiens
  misc_RNA (1)...(19): siRNA sense strand
ccucaaggaaggaaaauua

SEQ ID NO: 2547766 - RNA, 19 nt, Homo sapiens
  misc_RNA (1)...(19): siRNA sense strand
acaacgaaacucuggaaau

SEQ ID NO: 2547767 - RNA, 19 nt, Homo sapiens
  misc_RNA (1)...(19): siRNA sense strand
gcuagauauugaugagcca

SEQ ID NO: 2547768 - RNA, 19 nt, Homo sapiens
  misc_RNA (1)...(19): siRNA sense strand
caagaauggacucaagaau

SEQ ID NO: 2547769 - RNA, 19 nt, Homo sapiens
  misc_RNA (1)...(19): siRNA sense strand
ccuuauuguaucaagcuaa

SEQ ID NO: 2547770 - RNA, 19 nt, Homo sapiens
  misc_RNA (1)...(19): siRNA sense strand
cuuuggaauauuugggcua

SEQ ID NO: 2547771 - RNA, 19 nt, Homo sapiens
  misc_RNA (1)...(19): siRNA sense strand
uguuauccaagcagagaaa

SEQ ID NO: 2547772 - RNA, 19 nt, Homo sapiens
  misc_RNA (1)...(19): siRNA sense strand
gguuaaaaggggaagcaga

SEQ ID NO: 2547773 - RNA, 19 nt, Homo sapiens
  misc_RNA (1)...(19): siRNA sense strand
acucagcagcccaguguua

SEQ ID NO: 2547774 - RNA, 19 nt, Homo sapiens
  misc_RNA (1)...(19): siRNA sense strand
cagaaggaacacucaagaa

SEQ ID NO: 2547775 - RNA, 19 nt, Homo sapiens
  misc_RNA (1)...(19): siRNA sense strand
cugacauucuggagacuga

SEQ ID NO: 2547776 - RNA, 19 nt, Homo sapiens
  misc_RNA (1)...(19): siRNA sense strand
agacagacuucuaagcagu

SEQ ID NO: 2547777 - RNA, 19 nt, Homo sapiens
  misc_RNA (1)...(19): siRNA sense strand
auccaggccuaaagacaaa

SEQ ID NO: 2547778 - RNA, 19 nt, Homo sapiens
  misc_RNA (1)...(19): siRNA sense strand
cagugaugcuauuuguauu

SEQ ID NO: 2547779 - RNA, 19 nt, Homo sapiens
  misc_RNA (1)...(19): siRNA sense strand
gggcuaacagugaugcuau

SEQ ID NO: 2547780 - RNA, 19 nt, Homo sapiens
  misc_RNA (1)...(19): siRNA sense strand
ggcuaacagugaugcuauu

SEQ ID NO: 2547781 - RNA, 19 nt, Homo sapiens
  misc_RNA (1)...(19): siRNA sense strand
gugacaugcacccggaaau

SEQ ID NO: 2547782 - RNA, 19 nt, Homo sapiens
  misc_RNA (1)...(19): siRNA sense strand
aaguguuaauccaggccua

SEQ ID NO: 2547783 - RNA, 19 nt, Homo sapiens
  misc_RNA (1)...(19): siRNA sense strand
caauggugguacaguggau

SEQ ID NO: 2547784 - RNA, 19 nt, Homo sapiens
  misc_RNA (1)...(19): siRNA sense strand
augaaauagugcaaccaga

SEQ ID NO: 2547785 - RNA, 19 nt, Homo sapiens
  misc_RNA (1)...(19): siRNA sense strand
augaaaagacugaggaauc

SEQ ID NO: 2547786 - RNA, 19 nt, Homo sapiens
  misc_RNA (1)...(19): siRNA sense strand
agacugauuucaaugccaa

SEQ ID NO: 2547787 - RNA, 19 nt, Homo sapiens
  misc_RNA (1)...(19): siRNA sense strand
guuaaaaggggaagcagau

SEQ ID NO: 2547788 - RNA, 19 nt, Homo sapiens
  misc_RNA (1)...(19): siRNA sense strand
uguugaugaaauagugcaa

SEQ ID NO: 2547789 - RNA, 19 nt, Homo sapiens
  misc_RNA (1)...(19): siRNA sense strand
uugaugagccagaugaaaa

SEQ ID NO: 2547790 - RNA, 19 nt, Homo sapiens
  misc_RNA (1)...(19): siRNA sense strand
ccucauacucaaugcgacu

SEQ ID NO: 2547791 - RNA, 19 nt, Homo sapiens
  misc_RNA (1)...(19): siRNA sense strand
uggauaaggaauaugaagu

SEQ ID NO: 2547792 - RNA, 19 nt, Homo sapiens
  misc_RNA (1)...(19): siRNA sense strand
agugaugacucuuggguug

SEQ ID NO: 2547793 - RNA, 19 nt, Homo sapiens
  misc_RNA (1)...(19): siRNA sense strand
aauccaggccuaaagacaa

SEQ ID NO: 2547794 - RNA, 19 nt, Homo sapiens
  misc_RNA (1)...(19): siRNA sense strand
auugaaaguggauaaggaa

SEQ ID NO: 2547795 - RNA, 19 nt, Homo sapiens
  misc_RNA (1)...(19): siRNA sense strand
uugaaaguggauaaggaau

SEQ ID NO: 2547796 - RNA, 19 nt, Homo sapiens
  misc_RNA (1)...(19): siRNA sense strand
guuccaguuccaaagauua

SEQ ID NO: 2547797 - RNA, 19 nt, Homo sapiens
  misc_RNA (1)...(19): siRNA sense strand
uauccaagugagaugggaa

SEQ ID NO: 2547798 - RNA, 19 nt, Homo sapiens
  misc_RNA (1)...(19): siRNA sense strand
ggauuaaaaugcugauucu

SEQ ID NO: 2547799 - RNA, 19 nt, Homo sapiens
  misc_RNA (1)...(19): siRNA sense strand
gaccagaagaaucaaaaua

SEQ ID NO: 2547800 - RNA, 19 nt, Homo sapiens
  misc_RNA (1)...(19): siRNA sense strand
auuuacaucaccacagaaa

SEQ ID NO: 2547801 - RNA, 19 nt, Homo sapiens
  misc_RNA (1)...(19): siRNA sense strand
uggaaauuauggcgaguuc

SEQ ID NO: 2547802 - RNA, 19 nt, Homo sapiens
  misc_RNA (1)...(19): siRNA sense strand
ccauauucagcuaagcaau

SEQ ID NO: 2547803 - RNA, 19 nt, Homo sapiens
  misc_RNA (1)...(19): siRNA sense strand
caugagaagaagaggaagu

SEQ ID NO: 2547804 - RNA, 19 nt, Homo sapiens
  misc_RNA (1)...(19): siRNA sense strand
aggacaucgaggagaucaa

SEQ ID NO: 2547805 - RNA, 19 nt, Homo sapiens
  misc_RNA (1)...(19): siRNA sense strand
agacaugagaagaagagga

SEQ ID NO: 2547806 - RNA, 19 nt, Homo sapiens
  misc_RNA (1)...(19): siRNA sense strand
aagagugaauuuaaggaca

SEQ ID NO: 2547807 - RNA, 19 nt, Homo sapiens
  misc_RNA (1)...(19): siRNA sense strand
ggggagauaaagagugaau

SEQ ID NO: 2547808 - RNA, 19 nt, Homo sapiens
  misc_RNA (1)...(19): siRNA sense strand
caaaggagguguggggaga

SEQ ID NO: 2547809 - RNA, 19 nt, Homo sapiens
  misc_RNA (1)...(19): siRNA sense strand
guacaaggccaucagggaa

SEQ ID NO: 2547810 - RNA, 19 nt, Homo sapiens
  misc_RNA (1)...(19): siRNA sense strand
ccauaucgcugaagggugu

SEQ ID NO: 2547811 - RNA, 19 nt, Homo sapiens
  misc_RNA (1)...(19): siRNA sense strand
cgaaaaugaaagaauguca

SEQ ID NO: 2547812 - RNA, 19 nt, Homo sapiens
  misc_RNA (1)...(19): siRNA sense strand
cagaagaugaauaugaacu

SEQ ID NO: 2547813 - RNA, 19 nt, Homo sapiens
  misc_RNA (1)...(19): siRNA sense strand
ugggaggaacugagacuga

SEQ ID NO: 2547814 - RNA, 19 nt, Homo sapiens
  misc_RNA (1)...(19): siRNA sense strand
aagaguacuaugagaaugu

SEQ ID NO: 2547815 - RNA, 19 nt, Homo sapiens
  misc_RNA (1)...(19): siRNA sense strand
agagaaaacaugugagaaa

SEQ ID NO: 2547816 - RNA, 19 nt, Homo sapiens
  misc_RNA (1)...(19): siRNA sense strand
caagauaacuggagagccu

SEQ ID NO: 2547817 - RNA, 19 nt, Homo sapiens
  misc_RNA (1)...(19): siRNA sense strand
cguugagagucuuaguaaa

SEQ ID NO: 2547818 - RNA, 19 nt, Homo sapiens
  misc_RNA (1)...(19): siRNA sense strand
gagaaggauggguggaaca

SEQ ID NO: 2547819 - RNA, 19 nt, Homo sapiens
  misc_RNA (1)...(19): siRNA sense strand
ggacaaaugugcuuccaga

SEQ ID NO: 2547820 - RNA, 19 nt, Homo sapiens
  misc_RNA (1)...(19): siRNA sense strand
gucagcaaccagagggaaa

SEQ ID NO: 2547821 - RNA, 19 nt, Homo sapiens
  misc_RNA (1)...(19): siRNA sense strand
aggaaugaccagcaacaaa

SEQ ID NO: 2547822 - RNA, 19 nt, Homo sapiens
  misc_RNA (1)...(19): siRNA sense strand
gggacaagauaacuggaga

SEQ ID NO: 2547823 - RNA, 19 nt, Homo sapiens
  misc_RNA (1)...(19): siRNA sense strand
gauaaacaacucugcgaau

SEQ ID NO: 2547824 - RNA, 19 nt, Homo sapiens
  misc_RNA (1)...(19): siRNA sense strand
guugagagucuuaguaaaa

SEQ ID NO: 2547825 - RNA, 19 nt, Homo sapiens
  misc_RNA (1)...(19): siRNA sense strand
ccucagaagaaauugaaaa

SEQ ID NO: 2547826 - RNA, 19 nt, Homo sapiens
  misc_RNA (1)...(19): siRNA sense strand
aagucaauggguuggguua

SEQ ID NO: 2547827 - RNA, 19 nt, Homo sapiens
  misc_RNA (1)...(19): siRNA sense strand
gugaugaagucaauggguu

SEQ ID NO: 2547828 - RNA, 19 nt, Homo sapiens
  misc_RNA (1)...(19): siRNA sense strand
ggauaaacaacucugcgaa

SEQ ID NO: 2547829 - RNA, 19 nt, Homo sapiens
  misc_RNA (1)...(19): siRNA sense strand
cguuauucuacauggaaga

SEQ ID NO: 2547830 - RNA, 19 nt, Homo sapiens
  misc_RNA (1)...(19): siRNA sense strand
ccacuguagucugggacaa

SEQ ID NO: 2547831 - RNA, 19 nt, Homo sapiens
  misc_RNA (1)...(19): siRNA sense strand
ccaaauguccggaguucuu

SEQ ID NO: 2547832 - RNA, 19 nt, Homo sapiens
  misc_RNA (1)...(19): siRNA sense strand
aggaaagugaaauucguua

SEQ ID NO: 2547833 - RNA, 19 nt, Homo sapiens
  misc_RNA (1)...(19): siRNA sense strand
ccguugagagucuuaguaa

SEQ ID NO: 2547834 - RNA, 19 nt, Homo sapiens
  misc_RNA (1)...(19): siRNA sense strand
agauuaaugcggaggaaag

SEQ ID NO: 2547835 - RNA, 19 nt, Homo sapiens
  misc_RNA (1)...(19): siRNA sense strand
uaaacaacucugcgaauuu

SEQ ID NO: 2547836 - RNA, 19 nt, Homo sapiens
  misc_RNA (1)...(19): siRNA sense strand
cagauuaaugcggaggaaa

SEQ ID NO: 2547837 - RNA, 19 nt, Homo sapiens
  misc_RNA (1)...(19): siRNA sense strand
uccuugacaaugugagaaa

SEQ ID NO: 2547838 - RNA, 19 nt, Homo sapiens
  misc_RNA (1)...(19): siRNA sense strand
cuuacaaacuuggcagaga

SEQ ID NO: 2547839 - RNA, 19 nt, Homo sapiens
  misc_RNA (1)...(19): siRNA sense strand
cugcugcauuggugggaca

SEQ ID NO: 2547840 - RNA, 19 nt, Homo sapiens
  misc_RNA (1)...(19): siRNA sense strand
uguauauaccaguagugaa

SEQ ID NO: 2547841 - RNA, 19 nt, Homo sapiens
  misc_RNA (1)...(19): siRNA sense strand
gaucuaagaacccagucua

SEQ ID NO: 2547842 - RNA, 19 nt, Homo sapiens
  misc_RNA (1)...(19): siRNA sense strand
gggauaaacaacucugcga

SEQ ID NO: 2547843 - RNA, 19 nt, Homo sapiens
  misc_RNA (1)...(19): siRNA sense strand
aagagaaggauggguggaa

SEQ ID NO: 2547844 - RNA, 19 nt, Homo sapiens
  misc_RNA (1)...(19): siRNA sense strand
agagaaaacaugugagaaa

SEQ ID NO: 2547845 - RNA, 19 nt, Homo sapiens
  misc_RNA (1)...(19): siRNA sense strand
caagauaacuggagagccu

SEQ ID NO: 2547846 - RNA, 19 nt, Homo sapiens
  misc_RNA (1)...(19): siRNA sense strand
cguugagagucuuaguaaa

SEQ ID NO: 2547847 - RNA, 19 nt, Homo sapiens
  misc_RNA (1)...(19): siRNA sense strand
gagaaggauggguggaaca

SEQ ID NO: 2547848 - RNA, 19 nt, Homo sapiens
  misc_RNA (1)...(19): siRNA sense strand
ggacaaaugugcuuccaga

SEQ ID NO: 2547849 - RNA, 19 nt, Homo sapiens
  misc_RNA (1)...(19): siRNA sense strand
gucagcaaccagagggaaa

SEQ ID NO: 2547850 - RNA, 19 nt, Homo sapiens
  misc_RNA (1)...(19): siRNA sense strand
aggaaugaccagcaacaaa

SEQ ID NO: 2547851 - RNA, 19 nt, Homo sapiens
  misc_RNA (1)...(19): siRNA sense strand
gggacaagauaacuggaga

SEQ ID NO: 2547852 - RNA, 19 nt, Homo sapiens
  misc_RNA (1)...(19): siRNA sense strand
gauaaacaacucugcgaau

SEQ ID NO: 2547853 - RNA, 19 nt, Homo sapiens
  misc_RNA (1)...(19): siRNA sense strand
guugagagucuuaguaaaa

SEQ ID NO: 2547854 - RNA, 19 nt, Homo sapiens
  misc_RNA (1)...(19): siRNA sense strand
ccucagaagaaauugaaaa

SEQ ID NO: 2547855 - RNA, 19 nt, Homo sapiens
  misc_RNA (1)...(19): siRNA sense strand
aagucaauggguuggguua

SEQ ID NO: 2547856 - RNA, 19 nt, Homo sapiens
  misc_RNA (1)...(19): siRNA sense strand
gugaugaagucaauggguu

SEQ ID NO: 2547857 - RNA, 19 nt, Homo sapiens
  misc_RNA (1)...(19): siRNA sense strand
ggauaaacaacucugcgaa

SEQ ID NO: 2547858 - RNA, 19 nt, Homo sapiens
  misc_RNA (1)...(19): siRNA sense strand
cguuauucuacauggaaga

SEQ ID NO: 2547859 - RNA, 19 nt, Homo sapiens
  misc_RNA (1)...(19): siRNA sense strand
ccacuguagucugggacaa

SEQ ID NO: 2547860 - RNA, 19 nt, Homo sapiens
  misc_RNA (1)...(19): siRNA sense strand
ccaaauguccggaguucuu

SEQ ID NO: 2547861 - RNA, 19 nt, Homo sapiens
  misc_RNA (1)...(19): siRNA sense strand
aggaaagugaaauucguua

SEQ ID NO: 2547862 - RNA, 19 nt, Homo sapiens
  misc_RNA (1)...(19): siRNA sense strand
ccguugagagucuuaguaa

SEQ ID NO: 2547863 - RNA, 19 nt, Homo sapiens
  misc_RNA (1)...(19): siRNA sense strand
agauuaaugcggaggaaag

SEQ ID NO: 2547864 - RNA, 19 nt, Homo sapiens
  misc_RNA (1)...(19): siRNA sense strand
uaaacaacucugcgaauuu

SEQ ID NO: 2547865 - RNA, 19 nt, Homo sapiens
  misc_RNA (1)...(19): siRNA sense strand
cagauuaaugcggaggaaa

SEQ ID NO: 2547866 - RNA, 19 nt, Homo sapiens
  misc_RNA (1)...(19): siRNA sense strand
uccuugacaaugugagaaa

SEQ ID NO: 2547867 - RNA, 19 nt, Homo sapiens
  misc_RNA (1)...(19): siRNA sense strand
cuuacaaacuuggcagaga

SEQ ID NO: 2547868 - RNA, 19 nt, Homo sapiens
  misc_RNA (1)...(19): siRNA sense strand
cugcugcauuggugggaca

SEQ ID NO: 2547869 - RNA, 19 nt, Homo sapiens
  misc_RNA (1)...(19): siRNA sense strand
uguauauaccaguagugaa

SEQ ID NO: 2547870 - RNA, 19 nt, Homo sapiens
  misc_RNA (1)...(19): siRNA sense strand
gaucuaagaacccagucua

SEQ ID NO: 2547871 - RNA, 19 nt, Homo sapiens
  misc_RNA (1)...(19): siRNA sense strand
gggauaaacaacucugcga

SEQ ID NO: 2547872 - RNA, 19 nt, Homo sapiens
  misc_RNA (1)...(19): siRNA sense strand
aagagaaggauggguggaa

SEQ ID NO: 2547873 - RNA, 19 nt, Homo sapiens
  misc_RNA (1)...(19): siRNA sense strand
acuggaaagcuuuggauau

SEQ ID NO: 2547874 - RNA, 19 nt, Homo sapiens
  misc_RNA (1)...(19): siRNA sense strand
ggccaagaagaucgacaaa

SEQ ID NO: 2547875 - RNA, 19 nt, Homo sapiens
  misc_RNA (1)...(19): siRNA sense strand
ggaugaagcuggagaaggc

SEQ ID NO: 2547876 - RNA, 19 nt, Homo sapiens
  misc_RNA (1)...(19): siRNA sense strand
ccccagaggagaugcgaaa

SEQ ID NO: 2547877 - RNA, 19 nt, Homo sapiens
  misc_RNA (1)...(19): siRNA sense strand
caacaaauugcuaaggauc

SEQ ID NO: 2547878 - RNA, 19 nt, Homo sapiens
  misc_RNA (1)...(19): siRNA sense strand
gcuaaggaucucccggaau

SEQ ID NO: 2547879 - RNA, 19 nt, Homo sapiens
  misc_RNA (1)...(19): siRNA sense strand
caguuuaucuugaaggaag

SEQ ID NO: 2547880 - RNA, 19 nt, Homo sapiens
  misc_RNA (1)...(19): siRNA sense strand
ggagacaucacaaggagga

SEQ ID NO: 2547881 - RNA, 19 nt, Homo sapiens
  misc_RNA (1)...(19): siRNA sense strand
aggaggaagcggagacauc

SEQ ID NO: 2547882 - RNA, 19 nt, Homo sapiens
  misc_RNA (1)...(19): siRNA sense strand
cugagacaaccauggacua

SEQ ID NO: 2547883 - RNA, 19 nt, Homo sapiens
  misc_RNA (1)...(19): siRNA sense strand
accauggacuauaggguca

SEQ ID NO: 2547884 - RNA, 19 nt, Homo sapiens
  misc_RNA (1)...(19): siRNA sense strand
gcuuuaacuucucugccua

SEQ ID NO: 2547885 - RNA, 19 nt, Homo sapiens
  misc_RNA (1)...(19): siRNA sense strand
gagcaguauaggaugguaa

SEQ ID NO: 2547886 - RNA, 19 nt, Homo sapiens
  misc_RNA (1)...(19): siRNA sense strand
gcgcaaaauggaugauaaa

SEQ ID NO: 2547887 - RNA, 19 nt, Homo sapiens
  misc_RNA (1)...(19): siRNA sense strand
aggaaguggcugugcgcua

SEQ ID NO: 2547888 - RNA, 19 nt, Homo sapiens
  misc_RNA (1)...(19): siRNA sense strand
ggacaaacugguaggagca

SEQ ID NO: 2547889 - RNA, 19 nt, Homo sapiens
  misc_RNA (1)...(19): siRNA sense strand
acauggagguagugagcuu

SEQ ID NO: 2547890 - RNA, 19 nt, Homo sapiens
  misc_RNA (1)...(19): siRNA sense strand
cauuacagaaggaaacaaa

SEQ ID NO: 2547891 - RNA, 19 nt, Homo sapiens
  misc_RNA (1)...(19): siRNA sense strand
gcaaaauggaugauaaaga

SEQ ID NO: 2547892 - RNA, 19 nt, Homo sapiens
  misc_RNA (1)...(19): siRNA sense strand
uugaagcagaggugaaaua

SEQ ID NO: 2547893 - RNA, 19 nt, Homo sapiens
  misc_RNA (1)...(19): siRNA sense strand
ggaccguaguuguggagga

SEQ ID NO: 2547894 - RNA, 19 nt, Homo sapiens
  misc_RNA (1)...(19): siRNA sense strand
aaguagaacaguugggcuu

SEQ ID NO: 2547895 - RNA, 19 nt, Homo sapiens
  misc_RNA (1)...(19): siRNA sense strand
gcagguggaaaguggacaa

SEQ ID NO: 2547896 - RNA, 19 nt, Homo sapiens
  misc_RNA (1)...(19): siRNA sense strand
ccauaaaugcugcugucaa

SEQ ID NO: 2547897 - RNA, 19 nt, Homo sapiens
  misc_RNA (1)...(19): siRNA sense strand
auauugaagcagaggugaa

SEQ ID NO: 2547898 - RNA, 19 nt, Homo sapiens
  misc_RNA (1)...(19): siRNA sense strand
cagcaaaucaagagcccuu

SEQ ID NO: 2547899 - RNA, 19 nt, Homo sapiens
  misc_RNA (1)...(19): siRNA sense strand
caaacugguaggagcaauu

SEQ ID NO: 2547900 - RNA, 19 nt, Homo sapiens
  misc_RNA (1)...(19): siRNA sense strand
gcucauuacagaaggaaac

SEQ ID NO: 2547901 - RNA, 19 nt, Homo sapiens
  misc_RNA (1)...(19): siRNA sense strand
aguuggauauugagcagua

SEQ ID NO: 2547902 - RNA, 19 nt, Homo sapiens
  misc_RNA (1)...(19): siRNA sense strand
ccaucaugaaguuggauau

SEQ ID NO: 2547903 - RNA, 19 nt, Homo sapiens
  misc_RNA (1)...(19): siRNA sense strand
uggcagaagauaccauaaa

SEQ ID NO: 2547904 - RNA, 19 nt, Homo sapiens
  misc_RNA (1)...(19): siRNA sense strand
agguauaagaagagauuuc

SEQ ID NO: 2547905 - RNA, 19 nt, Homo sapiens
  misc_RNA (1)...(19): siRNA sense strand
auuauaagaagcaggaaca

SEQ ID NO: 2547906 - RNA, 19 nt, Homo sapiens
  misc_RNA (1)...(19): siRNA sense strand
gaguacaucuugugucaga

SEQ ID NO: 2547907 - RNA, 19 nt, Homo sapiens
  misc_RNA (1)...(19): siRNA sense strand
gccuauuguuggaguacau

SEQ ID NO: 2547908 - RNA, 19 nt, Homo sapiens
  misc_RNA (1)...(19): siRNA sense strand
guuuacaagugguggcagu

SEQ ID NO: 2547909 - RNA, 19 nt, Homo sapiens
  misc_RNA (1)...(19): siRNA sense strand
gaauuugacgugagagcca

SEQ ID NO: 2547910 - RNA, 19 nt, Homo sapiens
  misc_RNA (1)...(19): siRNA sense strand
ggcaagugugacuggcaaa

SEQ ID NO: 2547911 - RNA, 19 nt, Homo sapiens
  misc_RNA (1)...(19): siRNA sense strand
ccuuguuauuggaggagga

SEQ ID NO: 2547912 - RNA, 19 nt, Homo sapiens
  misc_RNA (1)...(19): siRNA sense strand
ccuuguagaaagagaugau

SEQ ID NO: 2547913 - RNA, 19 nt, Homo sapiens
  misc_RNA (1)...(19): siRNA sense strand
uguccaggcagcagaggaa

SEQ ID NO: 2547914 - RNA, 19 nt, Homo sapiens
  misc_RNA (1)...(19): siRNA sense strand
gagccaaauguguuaucaa

SEQ ID NO: 2547915 - RNA, 19 nt, Homo sapiens
  misc_RNA (1)...(19): siRNA sense strand
aguuauguccucagcaaau

SEQ ID NO: 2547916 - RNA, 19 nt, Homo sapiens
  misc_RNA (1)...(19): siRNA sense strand
uggacaacuuaucggucua

SEQ ID NO: 2547917 - RNA, 19 nt, Homo sapiens
  misc_RNA (1)...(19): siRNA sense strand
uggaguacaucuuguguca

SEQ ID NO: 2547918 - RNA, 19 nt, Homo sapiens
  misc_RNA (1)...(19): siRNA sense strand
aggugaaauaugggauuaa

SEQ ID NO: 2547919 - RNA, 19 nt, Homo sapiens
  misc_RNA (1)...(19): siRNA sense strand
uguuauuggaggaggagca

SEQ ID NO: 2547920 - RNA, 19 nt, Homo sapiens
  misc_RNA (1)...(19): siRNA sense strand
ucacggacucugugcgcaa

SEQ ID NO: 2547921 - RNA, 19 nt, Homo sapiens
  misc_RNA (1)...(19): siRNA sense strand
ccguaguuguggaggauug

SEQ ID NO: 2547922 - RNA, 19 nt, Homo sapiens
  misc_RNA (1)...(19): siRNA sense strand
gauuauaagaagcaggaac

SEQ ID NO: 2547923 - RNA, 19 nt, Homo sapiens
  misc_RNA (1)...(19): siRNA sense strand
acagguauaagaagagauu

SEQ ID NO: 2547924 - RNA, 19 nt, Homo sapiens
  misc_RNA (1)...(19): siRNA sense strand
aggaggagcaacaggaagu

SEQ ID NO: 2547925 - RNA, 19 nt, Homo sapiens
  misc_RNA (1)...(19): siRNA sense strand
gguaaagauuggagcccca

SEQ ID NO: 2547926 - RNA, 19 nt, Homo sapiens
  misc_RNA (1)...(19): siRNA sense strand
acauuaggcuugugcagga

SEQ ID NO: 2547927 - RNA, 19 nt, Homo sapiens
  misc_RNA (1)...(19): siRNA sense strand
uggcaagugugacuggcaa

SEQ ID NO: 2547928 - RNA, 19 nt, Homo sapiens
  misc_RNA (1)...(19): siRNA sense strand
gggaugauuauaagaagca

SEQ ID NO: 2547929 - RNA, 19 nt, Homo sapiens
  misc_RNA (1)...(19): siRNA sense strand
uauuggaggaggagcaaca

SEQ ID NO: 2547930 - RNA, 19 nt, Homo sapiens
  misc_RNA (1)...(19): siRNA sense strand
ccuuauuacuauagcaggu

SEQ ID NO: 2547931 - RNA, 19 nt, Homo sapiens
  misc_RNA (1)...(19): siRNA sense strand
auugacagguauaagaaga

SEQ ID NO: 2547932 - RNA, 19 nt, Homo sapiens
  misc_RNA (1)...(19): siRNA sense strand
gguuauuacagcccagaga

SEQ ID NO: 2547933 - RNA, 19 nt, Homo sapiens
  misc_RNA (1)...(19): siRNA sense strand
aaauaugggauuaaggagu

SEQ ID NO: 2547934 - RNA, 19 nt, Homo sapiens
  misc_RNA (1)...(19): siRNA sense strand
gccaagugcugguguccau

SEQ ID NO: 2547935 - RNA, 19 nt, Homo sapiens
  misc_RNA (1)...(19): siRNA sense strand
cagugaugggcgaguuauu

SEQ ID NO: 2547936 - RNA, 19 nt, Homo sapiens
  misc_RNA (1)...(19): siRNA sense strand
guuugaugcagaccagaaa

SEQ ID NO: 2547937 - RNA, 19 nt, Homo sapiens
  misc_RNA (1)...(19): siRNA sense strand
ucccaaugcuccagaagga

SEQ ID NO: 2547938 - RNA, 19 nt, Homo sapiens
  misc_RNA (1)...(19): siRNA sense strand
ggucuauggcagaagauac

SEQ ID NO: 2547939 - RNA, 19 nt, Homo sapiens
  misc_RNA (1)...(19): siRNA sense strand
agaggugaaauaugggauu

SEQ ID NO: 2547940 - RNA, 19 nt, Homo sapiens
  misc_RNA (1)...(19): siRNA sense strand
acagaaggaaacaaaugaa

SEQ ID NO: 2547941 - RNA, 19 nt, Homo sapiens
  misc_RNA (1)...(19): siRNA sense strand
cuacuaugacggacaacau

SEQ ID NO: 2547942 - RNA, 19 nt, Homo sapiens
  misc_RNA (1)...(19): siRNA sense strand
cugcagauacucagucuau

SEQ ID NO: 2547943 - RNA, 19 nt, Homo sapiens
  misc_RNA (1)...(19): siRNA sense strand
uugaaagcgagguggcaca

SEQ ID NO: 2547944 - RNA, 19 nt, Homo sapiens
  misc_RNA (1)...(19): siRNA sense strand
cuggcagcauggaguggaa

SEQ ID NO: 2547945 - RNA, 19 nt, Homo sapiens
  misc_RNA (1)...(19): siRNA sense strand
caucaaagagcuaggaaaa

SEQ ID NO: 2547946 - RNA, 19 nt, Homo sapiens
  misc_RNA (1)...(19): siRNA sense strand
acuuaaagcuuuuggaaga

SEQ ID NO: 2547947 - RNA, 19 nt, Homo sapiens
  misc_RNA (1)...(19): siRNA sense strand
ccuaugugcuggaaggaau

SEQ ID NO: 2547948 - RNA, 19 nt, Homo sapiens
  misc_RNA (1)...(19): siRNA sense strand
ugaaaugggcaaaggcaau

SEQ ID NO: 2547949 - RNA, 19 nt, Homo sapiens
  misc_RNA (1)...(19): siRNA sense strand
gugaaaugggcaaaggcaa

SEQ ID NO: 2547950 - RNA, 19 nt, Homo sapiens
  misc_RNA (1)...(19): siRNA sense strand
ugggagagacagaaacaaa

SEQ ID NO: 2547951 - RNA, 19 nt, Homo sapiens
  misc_RNA (1)...(19): siRNA sense strand
acaucaaagagcuaggaaa

SEQ ID NO: 2547952 - RNA, 19 nt, Homo sapiens
  misc_RNA (1)...(19): siRNA sense strand
auuaaugagcagagaauga

SEQ ID NO: 2547953 - RNA, 19 nt, Homo sapiens
  misc_RNA (1)...(19): siRNA sense strand
gaaggaaacuccagccaga

SEQ ID NO: 2547954 - RNA, 19 nt, Homo sapiens
  misc_RNA (1)...(19): siRNA sense strand
cagcaugagaccagaugua

SEQ ID NO: 2547955 - RNA, 19 nt, Homo sapiens
  misc_RNA (1)...(19): siRNA sense strand
agugauugcagcagugaaa

SEQ ID NO: 2547956 - RNA, 19 nt, Homo sapiens
  misc_RNA (1)...(19): siRNA sense strand
ucugaagagccaagagcua

SEQ ID NO: 2547957 - RNA, 19 nt, Homo sapiens
  misc_RNA (1)...(19): siRNA sense strand
ugggaaaugaccugggauu

SEQ ID NO: 2547958 - RNA, 19 nt, Homo sapiens
  misc_RNA (1)...(19): siRNA sense strand
gaaugagaguccuuggaga

SEQ ID NO: 2547959 - RNA, 19 nt, Homo sapiens
  misc_RNA (1)...(19): siRNA sense strand
ccuaagaggaggagcuacu

SEQ ID NO: 2547960 - RNA, 19 nt, Homo sapiens
  misc_RNA (1)...(19): siRNA sense strand
acaagaaaccucugaaaau

SEQ ID NO: 2547961 - RNA, 19 nt, Homo sapiens
  misc_RNA (1)...(19): siRNA sense strand
uggaagaaagcauugcaaa

SEQ ID NO: 2547962 - RNA, 19 nt, Homo sapiens
  misc_RNA (1)...(19): siRNA sense strand
aagcuuuccuggagcaaau

SEQ ID NO: 2547963 - RNA, 19 nt, Homo sapiens
  misc_RNA (1)...(19): siRNA sense strand
cagcaugccgcuaucgaaa

SEQ ID NO: 2547964 - RNA, 19 nt, Homo sapiens
  misc_RNA (1)...(19): siRNA sense strand
uugucaagagggaaggaaa

SEQ ID NO: 2547965 - RNA, 19 nt, Homo sapiens
  misc_RNA (1)...(19): siRNA sense strand
gcaugaagugguugaaaau

SEQ ID NO: 2547966 - RNA, 19 nt, Homo sapiens
  misc_RNA (1)...(19): siRNA sense strand
cuucaaaagagcaguggaa

SEQ ID NO: 2547967 - RNA, 19 nt, Homo sapiens
  misc_RNA (1)...(19): siRNA sense strand
gacucaacuuggaggauca

SEQ ID NO: 2547968 - RNA, 19 nt, Homo sapiens
  misc_RNA (1)...(19): siRNA sense strand
uggagaucauauagacaau

SEQ ID NO: 2547969 - RNA, 19 nt, Homo sapiens
  misc_RNA (1)...(19): siRNA sense strand
cagcaggaucagaagccua

SEQ ID NO: 2547970 - RNA, 19 nt, Homo sapiens
  misc_RNA (1)...(19): siRNA sense strand
ugucacuguuggagguuau

SEQ ID NO: 2547971 - RNA, 19 nt, Homo sapiens
  misc_RNA (1)...(19): siRNA sense strand
ccgagauguuagcugaaau

SEQ ID NO: 2547972 - RNA, 19 nt, Homo sapiens
  misc_RNA (1)...(19): siRNA sense strand
caguggaaggacagcacaa

SEQ ID NO: 2547973 - RNA, 19 nt, Homo sapiens
  misc_RNA (1)...(19): siRNA sense strand
cugcaguacuccuggaugu

SEQ ID NO: 2547974 - RNA, 19 nt, Homo sapiens
  misc_RNA (1)...(19): siRNA sense strand
cgggagaagacgauucauu

SEQ ID NO: 2547975 - RNA, 19 nt, Homo sapiens
  misc_RNA (1)...(19): siRNA sense strand
ccaagagcuauuugaugaa

SEQ ID NO: 2547976 - RNA, 19 nt, Homo sapiens
  misc_RNA (1)...(19): siRNA sense strand
gggagagacagaaacaaaa

SEQ ID NO: 2547977 - RNA, 19 nt, Homo sapiens
  misc_RNA (1)...(19): siRNA sense strand
gaaacaaaagugaugggaa

SEQ ID NO: 2547978 - RNA, 19 nt, Homo sapiens
  misc_RNA (1)...(19): siRNA sense strand
aaagagcaguggaaggaca

SEQ ID NO: 2547979 - RNA, 19 nt, Homo sapiens
  misc_RNA (1)...(19): siRNA sense strand
guggagaucauauagacaa

SEQ ID NO: 2547980 - RNA, 19 nt, Homo sapiens
  misc_RNA (1)...(19): siRNA sense strand
gcagcagugaaaugggcaa

SEQ ID NO: 2547981 - RNA, 19 nt, Homo sapiens
  misc_RNA (1)...(19): siRNA sense strand
aaugagaguccuuggagau

SEQ ID NO: 2547982 - RNA, 19 nt, Homo sapiens
  misc_RNA (1)...(19): siRNA sense strand
ggagcuacugugaagguuu

SEQ ID NO: 2547983 - RNA, 19 nt, Homo sapiens
  misc_RNA (1)...(19): siRNA sense strand
uguauaugggagagacaga

SEQ ID NO: 2547984 - RNA, 19 nt, Homo sapiens
  misc_RNA (1)...(19): siRNA sense strand
cagguaaagagacgaauga

SEQ ID NO: 2547985 - RNA, 19 nt, Homo sapiens
  misc_RNA (1)...(19): siRNA sense strand
gguuuuaucaacugacaaa

SEQ ID NO: 2547986 - RNA, 19 nt, Homo sapiens
  misc_RNA (1)...(19): siRNA sense strand
ggauaagaccaugaguauu

SEQ ID NO: 2547987 - RNA, 19 nt, Homo sapiens
  misc_RNA (1)...(19): siRNA sense strand
uauaugggagagacagaaa

SEQ ID NO: 2547988 - RNA, 19 nt, Homo sapiens
  misc_RNA (1)...(19): siRNA sense strand
uggaaggaaacucgaauga

SEQ ID NO: 2547989 - RNA, 19 nt, Homo sapiens
  misc_RNA (1)...(19): siRNA sense strand
ggauaauggagaucugguu

SEQ ID NO: 2547990 - RNA, 19 nt, Homo sapiens
  misc_RNA (1)...(19): siRNA sense strand
cagcagugaaaugggcaaa

SEQ ID NO: 2547991 - RNA, 19 nt, Homo sapiens
  misc_RNA (1)...(19): siRNA sense strand
ugaagagccaagagcuauu

SEQ ID NO: 2547992 - RNA, 19 nt, Homo sapiens
  misc_RNA (1)...(19): siRNA sense strand
cuauaaaacccuaagagga

SEQ ID NO: 2547993 - RNA, 19 nt, Homo sapiens
  misc_RNA (1)...(19): siRNA sense strand
caaaaggcucaguaagcaa

SEQ ID NO: 2547994 - RNA, 19 nt, Homo sapiens
  misc_RNA (1)...(19): siRNA sense strand
ucucaaugggacuguauau

SEQ ID NO: 2547995 - RNA, 19 nt, Homo sapiens
  misc_RNA (1)...(19): siRNA sense strand
agucuuaacuuguggaagc

SEQ ID NO: 2547996 - RNA, 19 nt, Homo sapiens
  misc_RNA (1)...(19): siRNA sense strand
ggacuguauaugggagaga

SEQ ID NO: 2547997 - RNA, 19 nt, Homo sapiens
  misc_RNA (1)...(19): siRNA sense strand
acucgaaugaggacugcaa

SEQ ID NO: 2547998 - RNA, 19 nt, Homo sapiens
  misc_RNA (1)...(19): siRNA sense strand
ugucaagagggaaggaaac

SEQ ID NO: 2547999 - RNA, 19 nt, Homo sapiens
  misc_RNA (1)...(19): siRNA sense strand
ugcaugaagugguugaaaa

SEQ ID NO: 2548000 - RNA, 19 nt, Homo sapiens
  misc_RNA (1)...(19): siRNA sense strand
uuggauaagaccaugagua

SEQ ID NO: 2548001 - RNA, 19 nt, Homo sapiens
  misc_RNA (1)...(19): siRNA sense strand
gcucugggguggagaucau

SEQ ID NO: 2548002 - RNA, 19 nt, Homo sapiens
  misc_RNA (1)...(19): siRNA sense strand
gguggagaucauauagaca

SEQ ID NO: 2548003 - RNA, 19 nt, Homo sapiens
  misc_RNA (1)...(19): siRNA sense strand
ucuaauaggcugugaggaa

SEQ ID NO: 2548004 - RNA, 19 nt, Homo sapiens
  misc_RNA (1)...(19): siRNA sense strand
ccugaaauacugagagcaa

SEQ ID NO: 2548005 - RNA, 19 nt, Homo sapiens
  misc_RNA (1)...(19): siRNA sense strand
aagaauacuuugagagcuu

SEQ ID NO: 2548006 - RNA, 19 nt, Homo sapiens
  misc_RNA (1)...(19): siRNA sense strand
acacaaggaucuaggcgaa

SEQ ID NO: 2548007 - RNA, 19 nt, Homo sapiens
  misc_RNA (1)...(19): siRNA sense strand
gcucgaaagcggaagagaa

SEQ ID NO: 2548008 - RNA, 19 nt, Homo sapiens
  misc_RNA (1)...(19): siRNA sense strand
aggaagaggagcaggaaaa

SEQ ID NO: 2548009 - RNA, 19 nt, Homo sapiens
  misc_RNA (1)...(19): siRNA sense strand
aggaagagguacugcaaca

SEQ ID NO: 2548010 - RNA, 19 nt, Homo sapiens
  misc_RNA (1)...(19): siRNA sense strand
ccuggaauaccuagagaaa

SEQ ID NO: 2548011 - RNA, 19 nt, Homo sapiens
  misc_RNA (1)...(19): siRNA sense strand
guugacaccaggagagaaa

SEQ ID NO: 2548012 - RNA, 19 nt, Homo sapiens
  misc_RNA (1)...(19): siRNA sense strand
cagaagaauacgaguugaa

SEQ ID NO: 2548013 - RNA, 19 nt, Homo sapiens
  misc_RNA (1)...(19): siRNA sense strand
cagaauaaugucaggugaa

SEQ ID NO: 2548014 - RNA, 19 nt, Homo sapiens
  misc_RNA (1)...(19): siRNA sense strand
agagaauggugacuggaaa

SEQ ID NO: 2548015 - RNA, 19 nt, Homo sapiens
  misc_RNA (1)...(19): siRNA sense strand
cagaagaggaagaagagau

SEQ ID NO: 2548016 - RNA, 19 nt, Homo sapiens
  misc_RNA (1)...(19): siRNA sense strand
aagaggaaguacagccuaa

SEQ ID NO: 2548017 - RNA, 19 nt, Homo sapiens
  misc_RNA (1)...(19): siRNA sense strand
ccucugagaacuacaguaa

SEQ ID NO: 2548018 - RNA, 19 nt, Homo sapiens
  misc_RNA (1)...(19): siRNA sense strand
gagaauggugacuggaaau

SEQ ID NO: 2548019 - RNA, 19 nt, Homo sapiens
  misc_RNA (1)...(19): siRNA sense strand
aauugagagugaagaggaa

SEQ ID NO: 2548020 - RNA, 19 nt, Homo sapiens
  misc_RNA (1)...(19): siRNA sense strand
gggcuauaauguaugaaga

SEQ ID NO: 2548021 - RNA, 19 nt, Homo sapiens
  misc_RNA (1)...(19): siRNA sense strand
gaggaagaggagcaggaaa

SEQ ID NO: 2548022 - RNA, 19 nt, Homo sapiens
  misc_RNA (1)...(19): siRNA sense strand
gagaauuugagaagaugaa

SEQ ID NO: 2548023 - RNA, 19 nt, Homo sapiens
  misc_RNA (1)...(19): siRNA sense strand
uagcaaaugcaguuguuaa

SEQ ID NO: 2548024 - RNA, 19 nt, Homo sapiens
  misc_RNA (1)...(19): siRNA sense strand
gugcaaagccugaaauacu

SEQ ID NO: 2548025 - RNA, 19 nt, Homo sapiens
  misc_RNA (1)...(19): siRNA sense strand
cugucaaaguugcucgaaa

SEQ ID NO: 2548026 - RNA, 19 nt, Homo sapiens
  misc_RNA (1)...(19): siRNA sense strand
ccaacaaggggcuggguua

SEQ ID NO: 2548027 - RNA, 19 nt, Homo sapiens
  misc_RNA (1)...(19): siRNA sense strand
aauuuaagccagacacuaa

SEQ ID NO: 2548028 - RNA, 19 nt, Homo sapiens
  misc_RNA (1)...(19): siRNA sense strand
ggcuauaauguaugaagaa

SEQ ID NO: 2548029 - RNA, 19 nt, Homo sapiens
  misc_RNA (1)...(19): siRNA sense strand
ggauacagccuuugaccau

SEQ ID NO: 2548030 - RNA, 19 nt, Homo sapiens
  misc_RNA (1)...(19): siRNA sense strand
agaauuggcuguaggacca

SEQ ID NO: 2548031 - RNA, 19 nt, Homo sapiens
  misc_RNA (1)...(19): siRNA sense strand
gaagaauacgaguugaaau

SEQ ID NO: 2548032 - RNA, 19 nt, Homo sapiens
  misc_RNA (1)...(19): siRNA sense strand
uagaauggcuuaaggagga

SEQ ID NO: 2548033 - RNA, 19 nt, Homo sapiens
  misc_RNA (1)...(19): siRNA sense strand
ggaagaauauuuuagggaa

SEQ ID NO: 2548034 - RNA, 19 nt, Homo sapiens
  misc_RNA (1)...(19): siRNA sense strand
cauuaaacaacuuggagau

SEQ ID NO: 2548035 - RNA, 19 nt, Homo sapiens
  misc_RNA (1)...(19): siRNA sense strand
ggaccaaaacuauugaaaa

SEQ ID NO: 2548036 - RNA, 19 nt, Homo sapiens
  misc_RNA (1)...(19): siRNA sense strand
augaggaagugguggcaga

SEQ ID NO: 2548037 - RNA, 19 nt, Homo sapiens
  misc_RNA (1)...(19): siRNA sense strand
ggugcuagaugcagugaca

SEQ ID NO: 2548038 - RNA, 19 nt, Homo sapiens
  misc_RNA (1)...(19): siRNA sense strand
guguaaaauuauagggauc

SEQ ID NO: 2548039 - RNA, 19 nt, Homo sapiens
  misc_RNA (1)...(19): siRNA sense strand
uggccauacucgugcauau

SEQ ID NO: 2548040 - RNA, 19 nt, Homo sapiens
  misc_RNA (1)...(19): siRNA sense strand
caucagaaaccaagaauac

SEQ ID NO: 2548041 - RNA, 19 nt, Homo sapiens
  misc_RNA (1)...(19): siRNA sense strand
uggaaggauucaaaguaau

SEQ ID NO: 2548042 - RNA, 19 nt, Homo sapiens
  misc_RNA (1)...(19): siRNA sense strand
uuauagggaucauggaaga

SEQ ID NO: 2548043 - RNA, 19 nt, Homo sapiens
  misc_RNA (1)...(19): siRNA sense strand
agaaacagcgcaacagaau

SEQ ID NO: 2548044 - RNA, 19 nt, Homo sapiens
  misc_RNA (1)...(19): siRNA sense strand
ggaaaauggcaaagccuau

SEQ ID NO: 2548045 - RNA, 19 nt, Homo sapiens
  misc_RNA (1)...(19): siRNA sense strand
cucgaaagcggaagagaau

SEQ ID NO: 2548046 - RNA, 19 nt, Homo sapiens
  misc_RNA (1)...(19): siRNA sense strand
acauacagcaagaagaaga

SEQ ID NO: 2548047 - RNA, 19 nt, Homo sapiens
  misc_RNA (1)...(19): siRNA sense strand
gcucgaaagacuggacuua

SEQ ID NO: 2548048 - RNA, 19 nt, Homo sapiens
  misc_RNA (1)...(19): siRNA sense strand
gcuuguuacuggaccaaau

SEQ ID NO: 2548049 - RNA, 19 nt, Homo sapiens
  misc_RNA (1)...(19): siRNA sense strand
accaauugauagaguguuu

SEQ ID NO: 2548050 - RNA, 19 nt, Homo sapiens
  misc_RNA (1)...(19): siRNA sense strand
ucaaaagggacauagaaaa

SEQ ID NO: 2548051 - RNA, 19 nt, Homo sapiens
  misc_RNA (1)...(19): siRNA sense strand
ugguauucaugaaaggcaa

SEQ ID NO: 2548052 - RNA, 19 nt, Homo sapiens
  misc_RNA (1)...(19): siRNA sense strand
cuugcugacauaagagaaa

SEQ ID NO: 2548053 - RNA, 19 nt, Homo sapiens
  misc_RNA (1)...(19): siRNA sense strand
agcaaaugcaguuguuaaa

SEQ ID NO: 2548054 - RNA, 19 nt, Homo sapiens
  misc_RNA (1)...(19): siRNA sense strand
aggaaaucucucaaaggaa

SEQ ID NO: 2548055 - RNA, 19 nt, Homo sapiens
  misc_RNA (1)...(19): siRNA sense strand
uugaaaagaaguuggcuaa

SEQ ID NO: 2548056 - RNA, 19 nt, Homo sapiens
  misc_RNA (1)...(19): siRNA sense strand
gcuuaaaggaucacgccau

SEQ ID NO: 2548057 - RNA, 19 nt, Homo sapiens
  misc_RNA (1)...(19): siRNA sense strand
gcugaagugugcaggcuca

SEQ ID NO: 2548058 - RNA, 19 nt, Homo sapiens
  misc_RNA (1)...(19): siRNA sense strand
ugaauuaggaagagguacu

SEQ ID NO: 2548059 - RNA, 19 nt, Homo sapiens
  misc_RNA (1)...(19): siRNA sense strand
agccagaagaggaagaaga

SEQ ID NO: 2548060 - RNA, 19 nt, Homo sapiens
  misc_RNA (1)...(19): siRNA sense strand
cuuaaaaggaaaagcucua

SEQ ID NO: 2548061 - RNA, 19 nt, Homo sapiens
  misc_RNA (1)...(19): siRNA sense strand
ucuaugugccugaggauuu

SEQ ID NO: 2548062 - RNA, 19 nt, Homo sapiens
  misc_RNA (1)...(19): siRNA sense strand
cuccgaaguuguagagcuu

SEQ ID NO: 2548063 - RNA, 19 nt, Homo sapiens
  misc_RNA (1)...(19): siRNA sense strand
gcugaagaacggagggaug

SEQ ID NO: 2548064 - RNA, 19 nt, Homo sapiens
  misc_RNA (1)...(19): siRNA sense strand
uggcaugcaugguagaaaa

SEQ ID NO: 2548065 - RNA, 19 nt, Homo sapiens
  misc_RNA (1)...(19): siRNA sense strand
cauagaaaagcaagagaau

SEQ ID NO: 2548066 - RNA, 19 nt, Homo sapiens
  misc_RNA (1)...(19): siRNA sense strand
aagcaagagaauuugagaa

SEQ ID NO: 2548067 - RNA, 19 nt, Homo sapiens
  misc_RNA (1)...(19): siRNA sense strand
uggaaauggcucucuuaaa

SEQ ID NO: 2548068 - RNA, 19 nt, Homo sapiens
  misc_RNA (1)...(19): siRNA sense strand
uggaaaagcagaagacaga

SEQ ID NO: 2548069 - RNA, 19 nt, Homo sapiens
  misc_RNA (1)...(19): siRNA sense strand
gcacauagcuauccgccca

SEQ ID NO: 2548070 - RNA, 19 nt, Homo sapiens
  misc_RNA (1)...(19): siRNA sense strand
aggaaguggugcagagggu

SEQ ID NO: 2548071 - RNA, 19 nt, Homo sapiens
  misc_RNA (1)...(19): siRNA sense strand
ggagacaggguuuggcuga

SEQ ID NO: 2548072 - RNA, 19 nt, Homo sapiens
  misc_RNA (1)...(19): siRNA sense strand
agagagaaauaaagcugga

SEQ ID NO: 2548073 - RNA, 19 nt, Homo sapiens
  misc_RNA (1)...(19): siRNA sense strand
gaauaagguaucugcacca

SEQ ID NO: 2548074 - RNA, 19 nt, Homo sapiens
  misc_RNA (1)...(19): siRNA sense strand
aggguuuggcugaagaaau

SEQ ID NO: 2548075 - RNA, 19 nt, Homo sapiens
  misc_RNA (1)...(19): siRNA sense strand
cgugcugguucgauccaaa

SEQ ID NO: 2548076 - RNA, 19 nt, Homo sapiens
  misc_RNA (1)...(19): siRNA sense strand
cgucuguggcugaggccuu

SEQ ID NO: 2548077 - RNA, 19 nt, Homo sapiens
  misc_RNA (1)...(19): siRNA sense strand
ccucgcucagagagaaaua

SEQ ID NO: 2548078 - RNA, 19 nt, Homo sapiens
  misc_RNA (1)...(19): siRNA sense strand
caacaucugcgguggagga

SEQ ID NO: 2548079 - RNA, 19 nt, Homo sapiens
  misc_RNA (1)...(19): siRNA sense strand
agggaaagucaguggagga

SEQ ID NO: 2548080 - RNA, 19 nt, Homo sapiens
  misc_RNA (1)...(19): siRNA sense strand
cgugauggagggaaaguca

SEQ ID NO: 2548081 - RNA, 19 nt, Homo sapiens
  misc_RNA (1)...(19): siRNA sense strand
gaaagucaguggaggagcu

SEQ ID NO: 2548082 - RNA, 19 nt, Homo sapiens
  misc_RNA (1)...(19): siRNA sense strand
acuucaacaaggacggcua

SEQ ID NO: 2548083 - RNA, 19 nt, Homo sapiens
  misc_RNA (1)...(19): siRNA sense strand
aggggaagguggaacagaa

SEQ ID NO: 2548084 - RNA, 19 nt, Homo sapiens
  misc_RNA (1)...(19): siRNA sense strand
gguuaugaauacagugaaa

SEQ ID NO: 2548085 - RNA, 19 nt, Homo sapiens
  misc_RNA (1)...(19): siRNA sense strand
ccaagaagaaauacagaaa

SEQ ID NO: 2548086 - RNA, 19 nt, Homo sapiens
  misc_RNA (1)...(19): siRNA sense strand
gcuacaagauugaaggaga

SEQ ID NO: 2548087 - RNA, 19 nt, Homo sapiens
  misc_RNA (1)...(19): siRNA sense strand
caguugaauuuguguguaa

SEQ ID NO: 2548088 - RNA, 19 nt, Homo sapiens
  misc_RNA (1)...(19): siRNA sense strand
cccaauauguaaagagcaa

SEQ ID NO: 2548089 - RNA, 19 nt, Homo sapiens
  misc_RNA (1)...(19): siRNA sense strand
cgaaagaagaauauggaca

SEQ ID NO: 2548090 - RNA, 19 nt, Homo sapiens
  misc_RNA (1)...(19): siRNA sense strand
aggaaaagaaggauggaua

SEQ ID NO: 2548091 - RNA, 19 nt, Homo sapiens
  misc_RNA (1)...(19): siRNA sense strand
gcauuaagguggacagcca

SEQ ID NO: 2548092 - RNA, 19 nt, Homo sapiens
  misc_RNA (1)...(19): siRNA sense strand
gauugaaggagaugaagaa

SEQ ID NO: 2548093 - RNA, 19 nt, Homo sapiens
  misc_RNA (1)...(19): siRNA sense strand
cuacaagauugaaggagau

SEQ ID NO: 2548094 - RNA, 19 nt, Homo sapiens
  misc_RNA (1)...(19): siRNA sense strand
guauaaaguuggagaggug

SEQ ID NO: 2548095 - RNA, 19 nt, Homo sapiens
  misc_RNA (1)...(19): siRNA sense strand
ugggaaagauggaugguca

SEQ ID NO: 2548096 - RNA, 19 nt, Homo sapiens
  misc_RNA (1)...(19): siRNA sense strand
acaagaaaguuaugcacau

SEQ ID NO: 2548097 - RNA, 19 nt, Homo sapiens
  misc_RNA (1)...(19): siRNA sense strand
caagauugaaggagaugaa

SEQ ID NO: 2548098 - RNA, 19 nt, Homo sapiens
  misc_RNA (1)...(19): siRNA sense strand
ggaguaaagagaaaccaaa

SEQ ID NO: 2548099 - RNA, 19 nt, Homo sapiens
  misc_RNA (1)...(19): siRNA sense strand
guguguggcaauagauaaa

SEQ ID NO: 2548100 - RNA, 19 nt, Homo sapiens
  misc_RNA (1)...(19): siRNA sense strand
ggagaguaccuguggagau

SEQ ID NO: 2548101 - RNA, 19 nt, Homo sapiens
  misc_RNA (1)...(19): siRNA sense strand
caggauaucugaagaaaau

SEQ ID NO: 2548102 - RNA, 19 nt, Homo sapiens
  misc_RNA (1)...(19): siRNA sense strand
cauuaauagcagauggaca

SEQ ID NO: 2548103 - RNA, 19 nt, Homo sapiens
  misc_RNA (1)...(19): siRNA sense strand
aggccaacaugcagagaca

SEQ ID NO: 2548104 - RNA, 19 nt, Homo sapiens
  misc_RNA (1)...(19): siRNA sense strand
cuauggagauucaguggaa

SEQ ID NO: 2548105 - RNA, 19 nt, Homo sapiens
  misc_RNA (1)...(19): siRNA sense strand
gauauagaucucuuggaaa

SEQ ID NO: 2548106 - RNA, 19 nt, Homo sapiens
  misc_RNA (1)...(19): siRNA sense strand
ugaaagagaaugcgaacuu

SEQ ID NO: 2548107 - RNA, 19 nt, Homo sapiens
  misc_RNA (1)...(19): siRNA sense strand
ucaggaaggagaagaaauu

SEQ ID NO: 2548108 - RNA, 19 nt, Homo sapiens
  misc_RNA (1)...(19): siRNA sense strand
ccuuauuacuauggagauu

SEQ ID NO: 2548109 - RNA, 19 nt, Homo sapiens
  misc_RNA (1)...(19): siRNA sense strand
cuuaagaagugcaaaucau

SEQ ID NO: 2548110 - RNA, 19 nt, Homo sapiens
  misc_RNA (1)...(19): siRNA sense strand
aaccaaaguguguggaaau

SEQ ID NO: 2548111 - RNA, 19 nt, Homo sapiens
  misc_RNA (1)...(19): siRNA sense strand
aggucuauaucaugagaau

SEQ ID NO: 2548112 - RNA, 19 nt, Homo sapiens
  misc_RNA (1)...(19): siRNA sense strand
gcucagaaucauuuacaau

SEQ ID NO: 2548113 - RNA, 19 nt, Homo sapiens
  misc_RNA (1)...(19): siRNA sense strand
ggaaccaccucaaugcaaa

SEQ ID NO: 2548114 - RNA, 19 nt, Homo sapiens
  misc_RNA (1)...(19): siRNA sense strand
cauaaauggaagaugggau

SEQ ID NO: 2548115 - RNA, 19 nt, Homo sapiens
  misc_RNA (1)...(19): siRNA sense strand
aaaccaaaguguguggaaa

SEQ ID NO: 2548116 - RNA, 19 nt, Homo sapiens
  misc_RNA (1)...(19): siRNA sense strand
caacuuuaccaguguguau

SEQ ID NO: 2548117 - RNA, 19 nt, Homo sapiens
  misc_RNA (1)...(19): siRNA sense strand
gcucaauggcacaaauaca

SEQ ID NO: 2548118 - RNA, 19 nt, Homo sapiens
  misc_RNA (1)...(19): siRNA sense strand
agugacagcaccagagaau

SEQ ID NO: 2548119 - RNA, 19 nt, Homo sapiens
  misc_RNA (1)...(19): siRNA sense strand
caaacuaggauauguaaca

SEQ ID NO: 2548120 - RNA, 19 nt, Homo sapiens
  misc_RNA (1)...(19): siRNA sense strand
ggugaaacaucaggaucaa

SEQ ID NO: 2548121 - RNA, 19 nt, Homo sapiens
  misc_RNA (1)...(19): siRNA sense strand
cccgagaaauuauggaaaa

SEQ ID NO: 2548122 - RNA, 19 nt, Homo sapiens
  misc_RNA (1)...(19): siRNA sense strand
caguacgguuuguauguaa

SEQ ID NO: 2548123 - RNA, 19 nt, Homo sapiens
  misc_RNA (1)...(19): siRNA sense strand
agauauugagaauggguuu

SEQ ID NO: 2548124 - RNA, 19 nt, Homo sapiens
  misc_RNA (1)...(19): siRNA sense strand
guugauggagaguggacaa

SEQ ID NO: 2548125 - RNA, 19 nt, Homo sapiens
  misc_RNA (1)...(19): siRNA sense strand
uggugaaacaucaggauca

SEQ ID NO: 2548126 - RNA, 19 nt, Homo sapiens
  misc_RNA (1)...(19): siRNA sense strand
aggugaaucaguugaauuu

SEQ ID NO: 2548127 - RNA, 19 nt, Homo sapiens
  misc_RNA (1)...(19): siRNA sense strand
uggacaagcaguacgguuu

SEQ ID NO: 2548128 - RNA, 19 nt, Homo sapiens
  misc_RNA (1)...(19): siRNA sense strand
caaugggaauguuaaggaa

SEQ ID NO: 2548129 - RNA, 19 nt, Homo sapiens
  misc_RNA (1)...(19): siRNA sense strand
uugaaggagaugaagaaau

SEQ ID NO: 2548130 - RNA, 19 nt, Homo sapiens
  misc_RNA (1)...(19): siRNA sense strand
uguggaaauuucaugcaaa

SEQ ID NO: 2548131 - RNA, 19 nt, Homo sapiens
  misc_RNA (1)...(19): siRNA sense strand
guaaauauccaucugguga

SEQ ID NO: 2548132 - RNA, 19 nt, Homo sapiens
  misc_RNA (1)...(19): siRNA sense strand
uaugaaugccagaacuaaa

SEQ ID NO: 2548133 - RNA, 19 nt, Homo sapiens
  misc_RNA (1)...(19): siRNA sense strand
aggcagaauuucaaguaaa

SEQ ID NO: 2548134 - RNA, 19 nt, Homo sapiens
  misc_RNA (1)...(19): siRNA sense strand
acaagaaaguagugagagu

SEQ ID NO: 2548135 - RNA, 19 nt, Homo sapiens
  misc_RNA (1)...(19): siRNA sense strand
aaaagaagguagaggaaga

SEQ ID NO: 2548136 - RNA, 19 nt, Homo sapiens
  misc_RNA (1)...(19): siRNA sense strand
aaucagaagacauggacaa

SEQ ID NO: 2548137 - RNA, 19 nt, Homo sapiens
  misc_RNA (1)...(19): siRNA sense strand
aggaagaggugaauggcau

SEQ ID NO: 2548138 - RNA, 19 nt, Homo sapiens
  misc_RNA (1)...(19): siRNA sense strand
acauuaaagacaaggaaga

SEQ ID NO: 2548139 - RNA, 19 nt, Homo sapiens
  misc_RNA (1)...(19): siRNA sense strand
aagaagaauaugaggcaga

SEQ ID NO: 2548140 - RNA, 19 nt, Homo sapiens
  misc_RNA (1)...(19): siRNA sense strand
aaagcagaauggaaggaaa

SEQ ID NO: 2548141 - RNA, 19 nt, Homo sapiens
  misc_RNA (1)...(19): siRNA sense strand
aagacaaggaagaggugaa

SEQ ID NO: 2548142 - RNA, 19 nt, Homo sapiens
  misc_RNA (1)...(19): siRNA sense strand
cugcagaacagaacagcaa

SEQ ID NO: 2548143 - RNA, 19 nt, Homo sapiens
  misc_RNA (1)...(19): siRNA sense strand
ggaagaagaauaugaggca

SEQ ID NO: 2548144 - RNA, 19 nt, Homo sapiens
  misc_RNA (1)...(19): siRNA sense strand
ucacugaacuacaggccaa

SEQ ID NO: 2548145 - RNA, 19 nt, Homo sapiens
  misc_RNA (1)...(19): siRNA sense strand
cagccaaaggagacauuaa

SEQ ID NO: 2548146 - RNA, 19 nt, Homo sapiens
  misc_RNA (1)...(19): siRNA sense strand
aaacaagaaaguagugaga

SEQ ID NO: 2548147 - RNA, 19 nt, Homo sapiens
  misc_RNA (1)...(19): siRNA sense strand
aggaagaagagcaaguaau

SEQ ID NO: 2548148 - RNA, 19 nt, Homo sapiens
  misc_RNA (1)...(19): siRNA sense strand
uuacagaaaugcaggcaca

SEQ ID NO: 2548149 - RNA, 19 nt, Homo sapiens
  misc_RNA (1)...(19): siRNA sense strand
ucacaauggaugaugaaga

SEQ ID NO: 2548150 - RNA, 19 nt, Homo sapiens
  misc_RNA (1)...(19): siRNA sense strand
auaucuagcaguauggaaa

SEQ ID NO: 2548151 - RNA, 19 nt, Homo sapiens
  misc_RNA (1)...(19): siRNA sense strand
aagaaaguagugagaguuu

SEQ ID NO: 2548152 - RNA, 19 nt, Homo sapiens
  misc_RNA (1)...(19): siRNA sense strand
uggacaauguacagucuaa

SEQ ID NO: 2548153 - RNA, 19 nt, Homo sapiens
  misc_RNA (1)...(19): siRNA sense strand
guacaagccacaaggacuu

SEQ ID NO: 2548154 - RNA, 19 nt, Homo sapiens
  misc_RNA (1)...(19): siRNA sense strand
agguagaggaagauauuau

SEQ ID NO: 2548155 - RNA, 19 nt, Homo sapiens
  misc_RNA (1)...(19): siRNA sense strand
gugaaaagaaugaagauga

SEQ ID NO: 2548156 - RNA, 19 nt, Homo sapiens
  misc_RNA (1)...(19): siRNA sense strand
gucuaaacgucgucgauau

SEQ ID NO: 2548157 - RNA, 19 nt, Homo sapiens
  misc_RNA (1)...(19): siRNA sense strand
ugaaaacacgaguggaaaa

SEQ ID NO: 2548158 - RNA, 19 nt, Homo sapiens
  misc_RNA (1)...(19): siRNA sense strand
caguauggaaauugaccaa

SEQ ID NO: 2548159 - RNA, 19 nt, Homo sapiens
  misc_RNA (1)...(19): siRNA sense strand
agaugaaacuucugcagau

SEQ ID NO: 2548160 - RNA, 19 nt, Homo sapiens
  misc_RNA (1)...(19): siRNA sense strand
gaggaagaagagcaaguaa

SEQ ID NO: 2548161 - RNA, 19 nt, Homo sapiens
  misc_RNA (1)...(19): siRNA sense strand
ugucaguagucaaccuaaa

SEQ ID NO: 2548162 - RNA, 19 nt, Homo sapiens
  misc_RNA (1)...(19): siRNA sense strand
aagaagagcaaguaauaca

SEQ ID NO: 2548163 - RNA, 19 nt, Homo sapiens
  misc_RNA (1)...(19): siRNA sense strand
gaauugaaaaccagacaaa

SEQ ID NO: 2548164 - RNA, 19 nt, Homo sapiens
  misc_RNA (1)...(19): siRNA sense strand
agaaccaaguagcaauaaa

SEQ ID NO: 2548165 - RNA, 19 nt, Homo sapiens
  misc_RNA (1)...(19): siRNA sense strand
agugagugaucgucagcaa

SEQ ID NO: 2548166 - RNA, 19 nt, Homo sapiens
  misc_RNA (1)...(19): siRNA sense strand
gagcaaauucagaguaaag

SEQ ID NO: 2548167 - RNA, 19 nt, Homo sapiens
  misc_RNA (1)...(19): siRNA sense strand
ugaccaaggugaaaagaau

SEQ ID NO: 2548168 - RNA, 19 nt, Homo sapiens
  misc_RNA (1)...(19): siRNA sense strand
gccaagauagccagguuaa

SEQ ID NO: 2548169 - RNA, 19 nt, Homo sapiens
  misc_RNA (1)...(19): siRNA sense strand
ugaaaagaagguagaggaa

SEQ ID NO: 2548170 - RNA, 19 nt, Homo sapiens
  misc_RNA (1)...(19): siRNA sense strand
gaagauaacaaaagugaga

SEQ ID NO: 2548171 - RNA, 19 nt, Homo sapiens
  misc_RNA (1)...(19): siRNA sense strand
cuauggagacagaugaaau

SEQ ID NO: 2548172 - RNA, 19 nt, Homo sapiens
  misc_RNA (1)...(19): siRNA sense strand
agaauaugaggcagaauuu

SEQ ID NO: 2548173 - RNA, 19 nt, Homo sapiens
  misc_RNA (1)...(19): siRNA sense strand
caguacgagccaaggauau

SEQ ID NO: 2548174 - RNA, 19 nt, Homo sapiens
  misc_RNA (1)...(19): siRNA sense strand
uuuagaagaaccucagaaa

SEQ ID NO: 2548175 - RNA, 19 nt, Homo sapiens
  misc_RNA (1)...(19): siRNA sense strand
aagaauaugaggcagaauu

SEQ ID NO: 2548176 - RNA, 19 nt, Homo sapiens
  misc_RNA (1)...(19): siRNA sense strand
ugauaagacuuuggcagaa

SEQ ID NO: 2548177 - RNA, 19 nt, Homo sapiens
  misc_RNA (1)...(19): siRNA sense strand
aagcaguguacaaggucaa

SEQ ID NO: 2548178 - RNA, 19 nt, Homo sapiens
  misc_RNA (1)...(19): siRNA sense strand
agaagguagaggaagauau

SEQ ID NO: 2548179 - RNA, 19 nt, Homo sapiens
  misc_RNA (1)...(19): siRNA sense strand
aauacagacucuauggaga

SEQ ID NO: 2548180 - RNA, 19 nt, Homo sapiens
  misc_RNA (1)...(19): siRNA sense strand
gaaacagaugauacaacua

SEQ ID NO: 2548181 - RNA, 19 nt, Homo sapiens
  misc_RNA (1)...(19): siRNA sense strand
aagaagaacuguugaaaac

SEQ ID NO: 2548182 - RNA, 19 nt, Homo sapiens
  misc_RNA (1)...(19): siRNA sense strand
ucuagaaacagaugauaca

SEQ ID NO: 2548183 - RNA, 19 nt, Homo sapiens
  misc_RNA (1)...(19): siRNA sense strand
ucuaaacgucgucgauaua

SEQ ID NO: 2548184 - RNA, 19 nt, Homo sapiens
  misc_RNA (1)...(19): siRNA sense strand
ucaggugccuaguggaaau

SEQ ID NO: 2548185 - RNA, 19 nt, Homo sapiens
  misc_RNA (1)...(19): siRNA sense strand
cugcagaucuuguagaaac

SEQ ID NO: 2548186 - RNA, 19 nt, Homo sapiens
  misc_RNA (1)...(19): siRNA sense strand
gguccuauacagaugaaaa

SEQ ID NO: 2548187 - RNA, 19 nt, Homo sapiens
  misc_RNA (1)...(19): siRNA sense strand
uuccaaucgaugagacaaa

SEQ ID NO: 2548188 - RNA, 19 nt, Homo sapiens
  misc_RNA (1)...(19): siRNA sense strand
aagaugagucugaaguuau

SEQ ID NO: 2548189 - RNA, 19 nt, Homo sapiens
  misc_RNA (1)...(19): siRNA sense strand
aaacgaugagagugaguga

SEQ ID NO: 2548190 - RNA, 19 nt, Homo sapiens
  misc_RNA (1)...(19): siRNA sense strand
aaugaugucaacagcaaua

SEQ ID NO: 2548191 - RNA, 19 nt, Homo sapiens
  misc_RNA (1)...(19): siRNA sense strand
acucaggugccuaguggaa

SEQ ID NO: 2548192 - RNA, 19 nt, Homo sapiens
  misc_RNA (1)...(19): siRNA sense strand
acgaaaacguucuaaauca

SEQ ID NO: 2548193 - RNA, 19 nt, Homo sapiens
  misc_RNA (1)...(19): siRNA sense strand
ggccaagauagccagguua

SEQ ID NO: 2548194 - RNA, 19 nt, Homo sapiens
  misc_RNA (1)...(19): siRNA sense strand
ucgauauauggaagaagaa

SEQ ID NO: 2548195 - RNA, 19 nt, Homo sapiens
  misc_RNA (1)...(19): siRNA sense strand
agugguugcuggaagaaaa

SEQ ID NO: 2548196 - RNA, 19 nt, Homo sapiens
  misc_RNA (1)...(19): siRNA sense strand
guuccauagaggagaguuu

SEQ ID NO: 2548197 - RNA, 19 nt, Homo sapiens
  misc_RNA (1)...(19): siRNA sense strand
gggugaaaauuguggaagu

SEQ ID NO: 2548198 - RNA, 19 nt, Homo sapiens
  misc_RNA (1)...(19): siRNA sense strand
cugaagucuugaagggcau

SEQ ID NO: 2548199 - RNA, 19 nt, Homo sapiens
  misc_RNA (1)...(19): siRNA sense strand
gagccaaggaaguagucau

SEQ ID NO: 2548200 - RNA, 19 nt, Homo sapiens
  misc_RNA (1)...(19): siRNA sense strand
ccaaaguggcucaggcuac

SEQ ID NO: 2548201 - RNA, 19 nt, Homo sapiens
  misc_RNA (1)...(19): siRNA sense strand
uaccaaagcgggugaaaau

SEQ ID NO: 2548202 - RNA, 19 nt, Homo sapiens
  misc_RNA (1)...(19): siRNA sense strand
agucauggcacuaggaaua

SEQ ID NO: 2548203 - RNA, 19 nt, Homo sapiens
  misc_RNA (1)...(19): siRNA sense strand
aggacaugcugcugaaaua

SEQ ID NO: 2548204 - RNA, 19 nt, Homo sapiens
  misc_RNA (1)...(19): siRNA sense strand
cagaagauuuagagcaaaa

SEQ ID NO: 2548205 - RNA, 19 nt, Homo sapiens
  misc_RNA (1)...(19): siRNA sense strand
ggucagaagagaaaagaaa

SEQ ID NO: 2548206 - RNA, 19 nt, Homo sapiens
  misc_RNA (1)...(19): siRNA sense strand
cugacaaaguugacaguau

SEQ ID NO: 2548207 - RNA, 19 nt, Homo sapiens
  misc_RNA (1)...(19): siRNA sense strand
aagaugaguccuugggaua

SEQ ID NO: 2548208 - RNA, 19 nt, Homo sapiens
  misc_RNA (1)...(19): siRNA sense strand
aaauacaggcgauggaaua

SEQ ID NO: 2548209 - RNA, 19 nt, Homo sapiens
  misc_RNA (1)...(19): siRNA sense strand
agggagaagaagaaauaaa

SEQ ID NO: 2548210 - RNA, 19 nt, Homo sapiens
  misc_RNA (1)...(19): siRNA sense strand
augcaaagccagaagauuu

SEQ ID NO: 2548211 - RNA, 19 nt, Homo sapiens
  misc_RNA (1)...(19): siRNA sense strand
cagcaugauucaaagacua

SEQ ID NO: 2548212 - RNA, 19 nt, Homo sapiens
  misc_RNA (1)...(19): siRNA sense strand
cugcaaagggagaagaaga

SEQ ID NO: 2548213 - RNA, 19 nt, Homo sapiens
  misc_RNA (1)...(19): siRNA sense strand
gcauauacaccaagcaaaa

SEQ ID NO: 2548214 - RNA, 19 nt, Homo sapiens
  misc_RNA (1)...(19): siRNA sense strand
aaaucaaggucgaaggaca

SEQ ID NO: 2548215 - RNA, 19 nt, Homo sapiens
  misc_RNA (1)...(19): siRNA sense strand
aagaauuguggcaggaaua

SEQ ID NO: 2548216 - RNA, 19 nt, Homo sapiens
  misc_RNA (1)...(19): siRNA sense strand
gcauaauacacgaacauuu

SEQ ID NO: 2548217 - RNA, 19 nt, Homo sapiens
  misc_RNA (1)...(19): siRNA sense strand
aggaagaugaagacacaaa

SEQ ID NO: 2548218 - RNA, 19 nt, Homo sapiens
  misc_RNA (1)...(19): siRNA sense strand
caaggaagcugaaugggaa

SEQ ID NO: 2548219 - RNA, 19 nt, Homo sapiens
  misc_RNA (1)...(19): siRNA sense strand
aauugaagguguacggcaa

SEQ ID NO: 2548220 - RNA, 19 nt, Homo sapiens
  misc_RNA (1)...(19): siRNA sense strand
agagauuggcugugggaga

SEQ ID NO: 2548221 - RNA, 19 nt, Homo sapiens
  misc_RNA (1)...(19): siRNA sense strand
caucaagcccugaaaggaa

SEQ ID NO: 2548222 - RNA, 19 nt, Homo sapiens
  misc_RNA (1)...(19): siRNA sense strand
guccgaaaguugacugaaa

SEQ ID NO: 2548223 - RNA, 19 nt, Homo sapiens
  misc_RNA (1)...(19): siRNA sense strand
agcuggaaguugugauaaa

SEQ ID NO: 2548224 - RNA, 19 nt, Homo sapiens
  misc_RNA (1)...(19): siRNA sense strand
gauugaaggccaaggacau

SEQ ID NO: 2548225 - RNA, 19 nt, Homo sapiens
  misc_RNA (1)...(19): siRNA sense strand
uggacaaauugaaggugua

SEQ ID NO: 2548226 - RNA, 19 nt, Homo sapiens
  misc_RNA (1)...(19): siRNA sense strand
gcaaaagaaaacauggaaa

SEQ ID NO: 2548227 - RNA, 19 nt, Homo sapiens
  misc_RNA (1)...(19): siRNA sense strand
ugguugauguugaugguaa

SEQ ID NO: 2548228 - RNA, 19 nt, Homo sapiens
  misc_RNA (1)...(19): siRNA sense strand
gaagaagaagagagagcau

SEQ ID NO: 2548229 - RNA, 19 nt, Homo sapiens
  misc_RNA (1)...(19): siRNA sense strand
ggacaauggagauacagaa

SEQ ID NO: 2548230 - RNA, 19 nt, Homo sapiens
  misc_RNA (1)...(19): siRNA sense strand
cugcuaaauucgugacuga

SEQ ID NO: 2548231 - RNA, 19 nt, Homo sapiens
  misc_RNA (1)...(19): siRNA sense strand
cuuuagaggcugggaauua

SEQ ID NO: 2548232 - RNA, 19 nt, Homo sapiens
  misc_RNA (1)...(19): siRNA sense strand
acuagagaauucugugaaa

SEQ ID NO: 2548233 - RNA, 19 nt, Homo sapiens
  misc_RNA (1)...(19): siRNA sense strand
uuacaggucagaagagaaa

SEQ ID NO: 2548234 - RNA, 19 nt, Homo sapiens
  misc_RNA (1)...(19): siRNA sense strand
gucaaaguguuaaggagaa

SEQ ID NO: 2548235 - RNA, 19 nt, Homo sapiens
  misc_RNA (1)...(19): siRNA sense strand
gaagagaguggaagagcau

SEQ ID NO: 2548236 - RNA, 19 nt, Homo sapiens
  misc_RNA (1)...(19): siRNA sense strand
ggaagauuuguuacagaaa

SEQ ID NO: 2548237 - RNA, 19 nt, Homo sapiens
  misc_RNA (1)...(19): siRNA sense strand
ccugagacguucuggugaa

SEQ ID NO: 2548238 - RNA, 19 nt, Homo sapiens
  misc_RNA (1)...(19): siRNA sense strand
gagcauaauacacgaacau

SEQ ID NO: 2548239 - RNA, 19 nt, Homo sapiens
  misc_RNA (1)...(19): siRNA sense strand
uggaagcccuauugugaaa

SEQ ID NO: 2548240 - RNA, 19 nt, Homo sapiens
  misc_RNA (1)...(19): siRNA sense strand
ugucaaaguguuaaggaga

SEQ ID NO: 2548241 - RNA, 19 nt, Homo sapiens
  misc_RNA (1)...(19): siRNA sense strand
ccacaugagaacuagaaau

SEQ ID NO: 2548242 - RNA, 19 nt, Homo sapiens
  misc_RNA (1)...(19): siRNA sense strand
ggaguuucauacugacaaa

SEQ ID NO: 2548243 - RNA, 19 nt, Homo sapiens
  misc_RNA (1)...(19): siRNA sense strand
aaacgaagagaguggaaga

SEQ ID NO: 2548244 - RNA, 19 nt, Homo sapiens
  misc_RNA (1)...(19): siRNA sense strand
ccucagaagagauagaaaa

SEQ ID NO: 2548245 - RNA, 19 nt, Homo sapiens
  misc_RNA (1)...(19): siRNA sense strand
uaaaguaugaagugggauu

SEQ ID NO: 2548246 - RNA, 19 nt, Homo sapiens
  misc_RNA (1)...(19): siRNA sense strand
aggaagaagaguuugaaga

SEQ ID NO: 2548247 - RNA, 19 nt, Homo sapiens
  misc_RNA (1)...(19): siRNA sense strand
cgaagagaguggaagagca

SEQ ID NO: 2548248 - RNA, 19 nt, Homo sapiens
  misc_RNA (1)...(19): siRNA sense strand
ucaacauggauuacagaua

SEQ ID NO: 2548249 - RNA, 19 nt, Homo sapiens
  misc_RNA (1)...(19): siRNA sense strand
agauauugccucagcauuu

SEQ ID NO: 2548250 - RNA, 19 nt, Homo sapiens
  misc_RNA (1)...(19): siRNA sense strand
cuauagaugaggaagaaga

SEQ ID NO: 2548251 - RNA, 19 nt, Homo sapiens
  misc_RNA (1)...(19): siRNA sense strand
gcacagacucucauggaca

SEQ ID NO: 2548252 - RNA, 19 nt, Homo sapiens
  misc_RNA (1)...(19): siRNA sense strand
gcaguggcucaaagagaua

SEQ ID NO: 2548253 - RNA, 19 nt, Homo sapiens
  misc_RNA (1)...(19): siRNA sense strand
uaucagaauuggaguuuca

SEQ ID NO: 2548254 - RNA, 19 nt, Homo sapiens
  misc_RNA (1)...(19): siRNA sense strand
agcaaaagaucaaggauuu

SEQ ID NO: 2548255 - RNA, 19 nt, Homo sapiens
  misc_RNA (1)...(19): siRNA sense strand
ccugaugggucaugaagau

SEQ ID NO: 2548256 - RNA, 19 nt, Homo sapiens
  misc_RNA (1)...(19): siRNA sense strand
aggcaagaagaauggagaa

SEQ ID NO: 2548257 - RNA, 19 nt, Homo sapiens
  misc_RNA (1)...(19): siRNA sense strand
accaauaucaccaaagaaa

SEQ ID NO: 2548258 - RNA, 19 nt, Homo sapiens
  misc_RNA (1)...(19): siRNA sense strand
uguauuuccugaagaacua

SEQ ID NO: 2548259 - RNA, 19 nt, Homo sapiens
  misc_RNA (1)...(19): siRNA sense strand
agaaacagugugaagaauu

SEQ ID NO: 2548260 - RNA, 19 nt, Homo sapiens
  misc_RNA (1)...(19): siRNA sense strand
gguagaucuccuugaauau

SEQ ID NO: 2548261 - RNA, 19 nt, Homo sapiens
  misc_RNA (1)...(19): siRNA sense strand
ggagaacugcaaagggaga

SEQ ID NO: 2548262 - RNA, 19 nt, Homo sapiens
  misc_RNA (1)...(19): siRNA sense strand
caaagggagaagaagaaau

SEQ ID NO: 2548263 - RNA, 19 nt, Homo sapiens
  misc_RNA (1)...(19): siRNA sense strand
gacaauggagauacagaaa

SEQ ID NO: 2548264 - RNA, 19 nt, Homo sapiens
  misc_RNA (1)...(19): siRNA sense strand
guugaugacacuagauauu

SEQ ID NO: 2548265 - RNA, 19 nt, Homo sapiens
  misc_RNA (1)...(19): siRNA sense strand
cugaggaugaagagaaaga

SEQ ID NO: 2548266 - RNA, 19 nt, Homo sapiens
  misc_RNA (1)...(19): siRNA sense strand
aggaagauuuguuacagaa

SEQ ID NO: 2548267 - RNA, 19 nt, Homo sapiens
  misc_RNA (1)...(19): siRNA sense strand
uggaagaccaccugaguca

SEQ ID NO: 2548268 - RNA, 19 nt, Homo sapiens
  misc_RNA (1)...(19): siRNA sense strand
caauuuaaacgaagagagu

SEQ ID NO: 2548269 - RNA, 19 nt, Homo sapiens
  misc_RNA (1)...(19): siRNA sense strand
gagcaaggagauuguaaga

SEQ ID NO: 2548270 - RNA, 19 nt, Homo sapiens
  misc_RNA (1)...(19): siRNA sense strand
gaucacagcugcagcccaa

SEQ ID NO: 2548271 - RNA, 19 nt, Homo sapiens
  misc_RNA (1)...(19): siRNA sense strand
ggacaaacaucccgccaca

SEQ ID NO: 2548272 - RNA, 19 nt, Homo sapiens
  misc_RNA (1)...(19): siRNA sense strand
agaaggagagggaggaaca

SEQ ID NO: 2548273 - RNA, 19 nt, Homo sapiens
  misc_RNA (1)...(19): siRNA sense strand
cugagaagcagguggcaga

SEQ ID NO: 2548274 - RNA, 19 nt, Homo sapiens
  misc_RNA (1)...(19): siRNA sense strand
gggucaaagaacuaaagaa

SEQ ID NO: 2548275 - RNA, 19 nt, Homo sapiens
  misc_RNA (1)...(19): siRNA sense strand
gccacaaagcaaaggaaca

SEQ ID NO: 2548276 - RNA, 19 nt, Homo sapiens
  misc_RNA (1)...(19): siRNA sense strand
ggacuggagcagagagaac

SEQ ID NO: 2548277 - RNA, 19 nt, Homo sapiens
  misc_RNA (1)...(19): siRNA sense strand
gagcccaaguagaggaacu

SEQ ID NO: 2548278 - RNA, 19 nt, Homo sapiens
  misc_RNA (1)...(19): siRNA sense strand
gcucuggacauguggccaa

SEQ ID NO: 2548279 - RNA, 19 nt, Homo sapiens
  misc_RNA (1)...(19): siRNA sense strand
agaacuaaagaaaggcauu

SEQ ID NO: 2548280 - RNA, 19 nt, Homo sapiens
  misc_RNA (1)...(19): siRNA sense strand
ccaccaagugcaagaaagu

SEQ ID NO: 2548281 - RNA, 19 nt, Homo sapiens
  misc_RNA (1)...(19): siRNA sense strand
acacauggguagugagcag

SEQ ID NO: 2548282 - RNA, 19 nt, Homo sapiens
  misc_RNA (1)...(19): siRNA sense strand
ccucugaagcuuggacaaa

SEQ ID NO: 2548283 - RNA, 19 nt, Homo sapiens
  misc_RNA (1)...(19): siRNA sense strand
aaguguauccagagucuaa

SEQ ID NO: 2548284 - RNA, 19 nt, Homo sapiens
  misc_RNA (1)...(19): siRNA sense strand
cagcagggaggcagaccua

SEQ ID NO: 2548285 - RNA, 19 nt, Homo sapiens
  misc_RNA (1)...(19): siRNA sense strand
gagcagagagacuguacuu

SEQ ID NO: 2548286 - RNA, 19 nt, Homo sapiens
  misc_RNA (1)...(19): siRNA sense strand
ucacacaucuuuagucaga

SEQ ID NO: 2548287 - RNA, 19 nt, Homo sapiens
  misc_RNA (1)...(19): siRNA sense strand
ucugaagcuuggacaaaca

SEQ ID NO: 2548288 - RNA, 19 nt, Homo sapiens
  misc_RNA (1)...(19): siRNA sense strand
ccacagaagagcagcacuc

SEQ ID NO: 2548289 - RNA, 19 nt, Homo sapiens
  misc_RNA (1)...(19): siRNA sense strand
ggugaccagcacugugaaa

SEQ ID NO: 2548290 - RNA, 19 nt, Homo sapiens
  misc_RNA (1)...(19): siRNA sense strand
aggagaaggccuagugcgu

SEQ ID NO: 2548291 - RNA, 19 nt, Homo sapiens
  misc_RNA (1)...(19): siRNA sense strand
caucagaaggagagggagg

SEQ ID NO: 2548292 - RNA, 19 nt, Homo sapiens
  misc_RNA (1)...(19): siRNA sense strand
caaaggaacacccuggaga

SEQ ID NO: 2548293 - RNA, 19 nt, Homo sapiens
  misc_RNA (1)...(19): siRNA sense strand
guggacuggagcagagaga

SEQ ID NO: 2548294 - RNA, 19 nt, Homo sapiens
  misc_RNA (1)...(19): siRNA sense strand
cagaaaggaugccucccaa

SEQ ID NO: 2548295 - RNA, 19 nt, Homo sapiens
  misc_RNA (1)...(19): siRNA sense strand
aggagacgcugaugagcca

SEQ ID NO: 2548296 - RNA, 19 nt, Homo sapiens
  misc_RNA (1)...(19): siRNA sense strand
ggaaaguggugauggguca

SEQ ID NO: 2548297 - RNA, 19 nt, Homo sapiens
  misc_RNA (1)...(19): siRNA sense strand
aagaagacuaagagugaaa

SEQ ID NO: 2548298 - RNA, 19 nt, Homo sapiens
  misc_RNA (1)...(19): siRNA sense strand
gguuaaagcaucaagaaaa

SEQ ID NO: 2548299 - RNA, 19 nt, Homo sapiens
  misc_RNA (1)...(19): siRNA sense strand
aggaaaagucagauagaaa

SEQ ID NO: 2548300 - RNA, 19 nt, Homo sapiens
  misc_RNA (1)...(19): siRNA sense strand
cgguuaaagcaucaagaaa

SEQ ID NO: 2548301 - RNA, 19 nt, Homo sapiens
  misc_RNA (1)...(19): siRNA sense strand
uuaucauaguggaaggaaa

SEQ ID NO: 2548302 - RNA, 19 nt, Homo sapiens
  misc_RNA (1)...(19): siRNA sense strand
cugaagaagaugagcuaga

SEQ ID NO: 2548303 - RNA, 19 nt, Homo sapiens
  misc_RNA (1)...(19): siRNA sense strand
gcaagaagacuuuagccaa

SEQ ID NO: 2548304 - RNA, 19 nt, Homo sapiens
  misc_RNA (1)...(19): siRNA sense strand
uuguaguauuugugggcaa

SEQ ID NO: 2548305 - RNA, 19 nt, Homo sapiens
  misc_RNA (1)...(19): siRNA sense strand
aagaugagcuagaggagga

SEQ ID NO: 2548306 - RNA, 19 nt, Homo sapiens
  misc_RNA (1)...(19): siRNA sense strand
uaucauaguggaaggaaaa

SEQ ID NO: 2548307 - RNA, 19 nt, Homo sapiens
  misc_RNA (1)...(19): siRNA sense strand
ggaaaaucaguacgagaaa

SEQ ID NO: 2548308 - RNA, 19 nt, Homo sapiens
  misc_RNA (1)...(19): siRNA sense strand
uggugauucuguaggaaau

SEQ ID NO: 2548309 - RNA, 19 nt, Homo sapiens
  misc_RNA (1)...(19): siRNA sense strand
ggaaagagaaaauggacuu

SEQ ID NO: 2548310 - RNA, 19 nt, Homo sapiens
  misc_RNA (1)...(19): siRNA sense strand
gugcaaauucuguaguaga

SEQ ID NO: 2548311 - RNA, 19 nt, Homo sapiens
  misc_RNA (1)...(19): siRNA sense strand
agaaaauggacuugcuuua

SEQ ID NO: 2548312 - RNA, 19 nt, Homo sapiens
  misc_RNA (1)...(19): siRNA sense strand
gauaaggaaaagucagaua

SEQ ID NO: 2548313 - RNA, 19 nt, Homo sapiens
  misc_RNA (1)...(19): siRNA sense strand
gugcgaugaauguggaaaa

SEQ ID NO: 2548314 - RNA, 19 nt, Homo sapiens
  misc_RNA (1)...(19): siRNA sense strand
uaaugaugcagaagaagaa

SEQ ID NO: 2548315 - RNA, 19 nt, Homo sapiens
  misc_RNA (1)...(19): siRNA sense strand
uaagagugaaaguuggaaa

SEQ ID NO: 2548316 - RNA, 19 nt, Homo sapiens
  misc_RNA (1)...(19): siRNA sense strand
guuuaacgacacuggaaau

SEQ ID NO: 2548317 - RNA, 19 nt, Homo sapiens
  misc_RNA (1)...(19): siRNA sense strand
ggacccuggaagugaauau

SEQ ID NO: 2548318 - RNA, 19 nt, Homo sapiens
  misc_RNA (1)...(19): siRNA sense strand
cgacacuggaaauuugaaa

SEQ ID NO: 2548319 - RNA, 19 nt, Homo sapiens
  misc_RNA (1)...(19): siRNA sense strand
acucugacauugaagaaca

SEQ ID NO: 2548320 - RNA, 19 nt, Homo sapiens
  misc_RNA (1)...(19): siRNA sense strand
cauuugaccgaauaggaaa

SEQ ID NO: 2548321 - RNA, 19 nt, Homo sapiens
  misc_RNA (1)...(19): siRNA sense strand
uuauagaugcagugaaguu

SEQ ID NO: 2548322 - RNA, 19 nt, Homo sapiens
  misc_RNA (1)...(19): siRNA sense strand
cagaauuucauaagaagga

SEQ ID NO: 2548323 - RNA, 19 nt, Homo sapiens
  misc_RNA (1)...(19): siRNA sense strand
aagagugaaaguuggaaau

SEQ ID NO: 2548324 - RNA, 19 nt, Homo sapiens
  misc_RNA (1)...(19): siRNA sense strand
augcagugaaguuguuaaa

SEQ ID NO: 2548325 - RNA, 19 nt, Homo sapiens
  misc_RNA (1)...(19): siRNA sense strand
aggagaugucagaugagua

SEQ ID NO: 2548326 - RNA, 19 nt, Homo sapiens
  misc_RNA (1)...(19): siRNA sense strand
cauugaagaacaaagugaa

SEQ ID NO: 2548327 - RNA, 19 nt, Homo sapiens
  misc_RNA (1)...(19): siRNA sense strand
cuggugauucuguaggaaa

SEQ ID NO: 2548328 - RNA, 19 nt, Homo sapiens
  misc_RNA (1)...(19): siRNA sense strand
ggaaaauaugagagccaca

SEQ ID NO: 2548329 - RNA, 19 nt, Homo sapiens
  misc_RNA (1)...(19): siRNA sense strand
cugaaaaugcacaagaauu

SEQ ID NO: 2548330 - RNA, 19 nt, Homo sapiens
  misc_RNA (1)...(19): siRNA sense strand
agaacaaagugaaaaggau

SEQ ID NO: 2548331 - RNA, 19 nt, Homo sapiens
  misc_RNA (1)...(19): siRNA sense strand
caagaagacuuuagccaag

SEQ ID NO: 2548332 - RNA, 19 nt, Homo sapiens
  misc_RNA (1)...(19): siRNA sense strand
auaaugaugcagaagaaga

SEQ ID NO: 2548333 - RNA, 19 nt, Homo sapiens
  misc_RNA (1)...(19): siRNA sense strand
aguuuaacgacacuggaaa

SEQ ID NO: 2548334 - RNA, 19 nt, Homo sapiens
  misc_RNA (1)...(19): siRNA sense strand
cuggaaauuugaaacguca

SEQ ID NO: 2548335 - RNA, 19 nt, Homo sapiens
  misc_RNA (1)...(19): siRNA sense strand
gaugauaggcagaagcaac

SEQ ID NO: 2548336 - RNA, 19 nt, Homo sapiens
  misc_RNA (1)...(19): siRNA sense strand
acauugaagaacaaaguga

SEQ ID NO: 2548337 - RNA, 19 nt, Homo sapiens
  misc_RNA (1)...(19): siRNA sense strand
ggaaaagaauuuagugcac

SEQ ID NO: 2548338 - RNA, 19 nt, Homo sapiens
  misc_RNA (1)...(19): siRNA sense strand
gguuaacuccaguggucau

SEQ ID NO: 2548339 - RNA, 19 nt, Homo sapiens
  misc_RNA (1)...(19): siRNA sense strand
guaauaaacuucaugcaag

SEQ ID NO: 2548340 - RNA, 19 nt, Homo sapiens
  misc_RNA (1)...(19): siRNA sense strand
uggaaaaucaguacgagaa

SEQ ID NO: 2548341 - RNA, 19 nt, Homo sapiens
  misc_RNA (1)...(19): siRNA sense strand
uuagagaaucauuuggcua

SEQ ID NO: 2548342 - RNA, 19 nt, Homo sapiens
  misc_RNA (1)...(19): siRNA sense strand
uuaaaugaugauaggcaga

SEQ ID NO: 2548343 - RNA, 19 nt, Homo sapiens
  misc_RNA (1)...(19): siRNA sense strand
agagaaucauuuggcuaaa

SEQ ID NO: 2548344 - RNA, 19 nt, Homo sapiens
  misc_RNA (1)...(19): siRNA sense strand
gugaugggucagacaauuu

SEQ ID NO: 2548345 - RNA, 19 nt, Homo sapiens
  misc_RNA (1)...(19): siRNA sense strand
caugcaagcaagaagacuu

SEQ ID NO: 2548346 - RNA, 19 nt, Homo sapiens
  misc_RNA (1)...(19): siRNA sense strand
ugcugaagaagaugagcua

SEQ ID NO: 2548347 - RNA, 19 nt, Homo sapiens
  misc_RNA (1)...(19): siRNA sense strand
acauuugaccgaauaggaa

SEQ ID NO: 2548348 - RNA, 19 nt, Homo sapiens
  misc_RNA (1)...(19): siRNA sense strand
acucaugguggaaagagaa

SEQ ID NO: 2548349 - RNA, 19 nt, Homo sapiens
  misc_RNA (1)...(19): siRNA sense strand
guacucugacauugaagaa

SEQ ID NO: 2548350 - RNA, 19 nt, Homo sapiens
  misc_RNA (1)...(19): siRNA sense strand
auucagaacagcaacaaaa

SEQ ID NO: 2548351 - RNA, 19 nt, Homo sapiens
  misc_RNA (1)...(19): siRNA sense strand
guucacagaaagaagcaca

SEQ ID NO: 2548352 - RNA, 19 nt, Homo sapiens
  misc_RNA (1)...(19): siRNA sense strand
uucauaagaaggagcacaa

SEQ ID NO: 2548353 - RNA, 19 nt, Homo sapiens
  misc_RNA (1)...(19): siRNA sense strand
agccaagcauguuaagaga

SEQ ID NO: 2548354 - RNA, 19 nt, Homo sapiens
  misc_RNA (1)...(19): siRNA sense strand
guguaccuauugugaagaa

SEQ ID NO: 2548355 - RNA, 19 nt, Homo sapiens
  misc_RNA (1)...(19): siRNA sense strand
aggagaaagguuacuucaa

SEQ ID NO: 2548356 - RNA, 19 nt, Homo sapiens
  misc_RNA (1)...(19): siRNA sense strand
ugauaaaacauuugaccga

SEQ ID NO: 2548357 - RNA, 19 nt, Homo sapiens
  misc_RNA (1)...(19): siRNA sense strand
guaccuauugugaagaaca

SEQ ID NO: 2548358 - RNA, 19 nt, Homo sapiens
  misc_RNA (1)...(19): siRNA sense strand
agaauguacucauggugga

SEQ ID NO: 2548359 - RNA, 19 nt, Homo sapiens
  misc_RNA (1)...(19): siRNA sense strand
agaaagaagcugagauguu

SEQ ID NO: 2548360 - RNA, 19 nt, Homo sapiens
  misc_RNA (1)...(19): siRNA sense strand
ggagaaagaagcugagaug

SEQ ID NO: 2548361 - RNA, 19 nt, Homo sapiens
  misc_RNA (1)...(19): siRNA sense strand
ggaaggagaaagaagcuga

SEQ ID NO: 2548362 - RNA, 19 nt, Homo sapiens
  misc_RNA (1)...(19): siRNA sense strand
uggaagaagaggaggccca

SEQ ID NO: 2548363 - RNA, 19 nt, Homo sapiens
  misc_RNA (1)...(19): siRNA sense strand
gcuucaacggugaggacau

SEQ ID NO: 2548364 - RNA, 19 nt, Homo sapiens
  misc_RNA (1)...(19): siRNA sense strand
ggacaauggugggagcuca

SEQ ID NO: 2548365 - RNA, 19 nt, Homo sapiens
  misc_RNA (1)...(19): siRNA sense strand
ggcaggugauggugcggaa

SEQ ID NO: 2548366 - RNA, 19 nt, Homo sapiens
  misc_RNA (1)...(19): siRNA sense strand
ccgacggcuucgaggacau

SEQ ID NO: 2548367 - RNA, 19 nt, Homo sapiens
  misc_RNA (1)...(19): siRNA sense strand
uggucuaccuggagaagca

SEQ ID NO: 2548368 - RNA, 19 nt, Homo sapiens
  misc_RNA (1)...(19): siRNA sense strand
gaguggaagcggcagguga

SEQ ID NO: 2548369 - RNA, 19 nt, Homo sapiens
  misc_RNA (1)...(19): siRNA sense strand
acacagaggaggccagcga

SEQ ID NO: 2548370 - RNA, 19 nt, Homo sapiens
  misc_RNA (1)...(19): siRNA sense strand
cagauggagugcugccaga

SEQ ID NO: 2548371 - RNA, 19 nt, Homo sapiens
  misc_RNA (1)...(19): siRNA sense strand
ggaggauggaagaagagga

SEQ ID NO: 2548372 - RNA, 19 nt, Homo sapiens
  misc_RNA (1)...(19): siRNA sense strand
aggucaaaacugaagaaaa

SEQ ID NO: 2548373 - RNA, 19 nt, Homo sapiens
  misc_RNA (1)...(19): siRNA sense strand
uggcaagagagaaagugaa

SEQ ID NO: 2548374 - RNA, 19 nt, Homo sapiens
  misc_RNA (1)...(19): siRNA sense strand
gagaaagugaauacgcuga

SEQ ID NO: 2548375 - RNA, 19 nt, Homo sapiens
  misc_RNA (1)...(19): siRNA sense strand
gggaaagagaacagaggaa

SEQ ID NO: 2548376 - RNA, 19 nt, Homo sapiens
  misc_RNA (1)...(19): siRNA sense strand
acucagugccucagggaga

SEQ ID NO: 2548377 - RNA, 19 nt, Homo sapiens
  misc_RNA (1)...(19): siRNA sense strand
cuucuacaucaaagggaaa

SEQ ID NO: 2548378 - RNA, 19 nt, Homo sapiens
  misc_RNA (1)...(19): siRNA sense strand
gaggaaggccgguuaucaa

SEQ ID NO: 2548379 - RNA, 19 nt, Homo sapiens
  misc_RNA (1)...(19): siRNA sense strand
ccuuugugcaggugaggaa

SEQ ID NO: 2548380 - RNA, 19 nt, Homo sapiens
  misc_RNA (1)...(19): siRNA sense strand
augcagacuucuacaucaa

SEQ ID NO: 2548381 - RNA, 19 nt, Homo sapiens
  misc_RNA (1)...(19): siRNA sense strand
gggcugggcuccaaagcuu

SEQ ID NO: 2548382 - RNA, 19 nt, Homo sapiens
  misc_RNA (1)...(19): siRNA sense strand
acuucuacaucaaagggaa

SEQ ID NO: 2548383 - RNA, 19 nt, Homo sapiens
  misc_RNA (1)...(19): siRNA sense strand
gggcaaaucugaaaccaug

SEQ ID NO: 2548384 - RNA, 19 nt, Homo sapiens
  misc_RNA (1)...(19): siRNA sense strand
gcggauggcugcucacuca

SEQ ID NO: 2548385 - RNA, 19 nt, Homo sapiens
  misc_RNA (1)...(19): siRNA sense strand
gaaacaagccagacucagu

SEQ ID NO: 2548386 - RNA, 19 nt, Homo sapiens
  misc_RNA (1)...(19): siRNA sense strand
acgccaacaccaacaggaa

SEQ ID NO: 2548387 - RNA, 19 nt, Homo sapiens
  misc_RNA (1)...(19): siRNA sense strand
gcugaacaaacgagaacau

SEQ ID NO: 2548388 - RNA, 19 nt, Homo sapiens
  misc_RNA (1)...(19): siRNA sense strand
gcagagaauuaaagaguua

SEQ ID NO: 2548389 - RNA, 19 nt, Homo sapiens
  misc_RNA (1)...(19): siRNA sense strand
uaaaggaacuggaggaaaa

SEQ ID NO: 2548390 - RNA, 19 nt, Homo sapiens
  misc_RNA (1)...(19): siRNA sense strand
gcucagaagagacaaauaa

SEQ ID NO: 2548391 - RNA, 19 nt, Homo sapiens
  misc_RNA (1)...(19): siRNA sense strand
ggaaacaggccuuggacca

SEQ ID NO: 2548392 - RNA, 19 nt, Homo sapiens
  misc_RNA (1)...(19): siRNA sense strand
ucaguaagcagaagggcua

SEQ ID NO: 2548393 - RNA, 19 nt, Homo sapiens
  misc_RNA (1)...(19): siRNA sense strand
gaagagacaaauaaaggaa

SEQ ID NO: 2548394 - RNA, 19 nt, Homo sapiens
  misc_RNA (1)...(19): siRNA sense strand
gagcuugaggagagggaga

SEQ ID NO: 2548395 - RNA, 19 nt, Homo sapiens
  misc_RNA (1)...(19): siRNA sense strand
aaauaaaggaacuggagga

SEQ ID NO: 2548396 - RNA, 19 nt, Homo sapiens
  misc_RNA (1)...(19): siRNA sense strand
aagaaagaauagaagcuca

SEQ ID NO: 2548397 - RNA, 19 nt, Homo sapiens
  misc_RNA (1)...(19): siRNA sense strand
ugucagaggaggagcgcga

SEQ ID NO: 2548398 - RNA, 19 nt, Homo sapiens
  misc_RNA (1)...(19): siRNA sense strand
cagcagagaauuaaagagu

SEQ ID NO: 2548399 - RNA, 19 nt, Homo sapiens
  misc_RNA (1)...(19): siRNA sense strand
ucaaacaaauggagacgga

SEQ ID NO: 2548400 - RNA, 19 nt, Homo sapiens
  misc_RNA (1)...(19): siRNA sense strand
gaagcucagaagagacaaa

SEQ ID NO: 2548401 - RNA, 19 nt, Homo sapiens
  misc_RNA (1)...(19): siRNA sense strand
guggaaaagaucaaacaaa

SEQ ID NO: 2548402 - RNA, 19 nt, Homo sapiens
  misc_RNA (1)...(19): siRNA sense strand
uggacgaggagcuggacua

SEQ ID NO: 2548403 - RNA, 19 nt, Homo sapiens
  misc_RNA (1)...(19): siRNA sense strand
uugaggagagggagaggaa

SEQ ID NO: 2548404 - RNA, 19 nt, Homo sapiens
  misc_RNA (1)...(19): siRNA sense strand
ugguggaucuggagagcga

SEQ ID NO: 2548405 - RNA, 19 nt, Homo sapiens
  misc_RNA (1)...(19): siRNA sense strand
gaauagaagcucagaagag

SEQ ID NO: 2548406 - RNA, 19 nt, Homo sapiens
  misc_RNA (1)...(19): siRNA sense strand
agagacaaauaaaggaacu

SEQ ID NO: 2548407 - RNA, 19 nt, Homo sapiens
  misc_RNA (1)...(19): siRNA sense strand
agaagaaagaauagaagcu

SEQ ID NO: 2548408 - RNA, 19 nt, Homo sapiens
  misc_RNA (1)...(19): siRNA sense strand
ugaugaagaagcuggacau

SEQ ID NO: 2548409 - RNA, 19 nt, Homo sapiens
  misc_RNA (1)...(19): siRNA sense strand
cuggcucagcagagaauua

SEQ ID NO: 2548410 - RNA, 19 nt, Homo sapiens
  misc_RNA (1)...(19): siRNA sense strand
auaaaggaacuggaggaaa

SEQ ID NO: 2548411 - RNA, 19 nt, Homo sapiens
  misc_RNA (1)...(19): siRNA sense strand
aauaaaggaacuggaggaa

SEQ ID NO: 2548412 - RNA, 19 nt, Homo sapiens
  misc_RNA (1)...(19): siRNA sense strand
gggcaggauaugaagugga

SEQ ID NO: 2548413 - RNA, 19 nt, Homo sapiens
  misc_RNA (1)...(19): siRNA sense strand
aauagaagcucagaagaga

SEQ ID NO: 2548414 - RNA, 19 nt, Homo sapiens
  misc_RNA (1)...(19): siRNA sense strand
aaacaaauggagacggaag

SEQ ID NO: 2548415 - RNA, 19 nt, Homo sapiens
  misc_RNA (1)...(19): siRNA sense strand
ggauuacaggcgugaacca

SEQ ID NO: 2548416 - RNA, 19 nt, Homo sapiens
  misc_RNA (1)...(19): siRNA sense strand
cugcagagcuacaguaaua

SEQ ID NO: 2548417 - RNA, 19 nt, Homo sapiens
  misc_RNA (1)...(19): siRNA sense strand
aggaagaagaggagacaga

SEQ ID NO: 2548418 - RNA, 19 nt, Homo sapiens
  misc_RNA (1)...(19): siRNA sense strand
aagaagaguuggaggagga

SEQ ID NO: 2548419 - RNA, 19 nt, Homo sapiens
  misc_RNA (1)...(19): siRNA sense strand
gggaggaggagaaggguga

SEQ ID NO: 2548420 - RNA, 19 nt, Homo sapiens
  misc_RNA (1)...(19): siRNA sense strand
aggaggaagaggaggaaga

SEQ ID NO: 2548421 - RNA, 19 nt, Homo sapiens
  misc_RNA (1)...(19): siRNA sense strand
ucuccaagaacgaggaaau

SEQ ID NO: 2548422 - RNA, 19 nt, Homo sapiens
  misc_RNA (1)...(19): siRNA sense strand
gggaggaugggaagggcaa

SEQ ID NO: 2548423 - RNA, 19 nt, Homo sapiens
  misc_RNA (1)...(19): siRNA sense strand
aagaggaggaguugggcaa

SEQ ID NO: 2548424 - RNA, 19 nt, Homo sapiens
  misc_RNA (1)...(19): siRNA sense strand
agauagaggagaaggagga

SEQ ID NO: 2548425 - RNA, 19 nt, Homo sapiens
  misc_RNA (1)...(19): siRNA sense strand
ggagcuggccuuugggaau

SEQ ID NO: 2548426 - RNA, 19 nt, Homo sapiens
  misc_RNA (1)...(19): siRNA sense strand
ccgacaugaaagugaagaa

SEQ ID NO: 2548427 - RNA, 19 nt, Homo sapiens
  misc_RNA (1)...(19): siRNA sense strand
agaaggaggaggagaggga

SEQ ID NO: 2548428 - RNA, 19 nt, Homo sapiens
  misc_RNA (1)...(19): siRNA sense strand
agcagaugguggaguuaaa

SEQ ID NO: 2548429 - RNA, 19 nt, Homo sapiens
  misc_RNA (1)...(19): siRNA sense strand
uggaaugagcagucaacua

SEQ ID NO: 2548430 - RNA, 19 nt, Homo sapiens
  misc_RNA (1)...(19): siRNA sense strand
uggugaaggaggagcaaga

SEQ ID NO: 2548431 - RNA, 19 nt, Homo sapiens
  misc_RNA (1)...(19): siRNA sense strand
agaacaugauccagaacau

SEQ ID NO: 2548432 - RNA, 19 nt, Homo sapiens
  misc_RNA (1)...(19): siRNA sense strand
cggcacagcaugagccaga

SEQ ID NO: 2548433 - RNA, 19 nt, Homo sapiens
  misc_RNA (1)...(19): siRNA sense strand
aagaagaagaguuggagga

SEQ ID NO: 2548434 - RNA, 19 nt, Homo sapiens
  misc_RNA (1)...(19): siRNA sense strand
gcacgaggccacagcuauu

SEQ ID NO: 2548435 - RNA, 19 nt, Homo sapiens
  misc_RNA (1)...(19): siRNA sense strand
aagaguuggaggaggaaga

SEQ ID NO: 2548436 - RNA, 19 nt, Homo sapiens
  misc_RNA (1)...(19): siRNA sense strand
augagaaggaagagaaagu

SEQ ID NO: 2548437 - RNA, 19 nt, Homo sapiens
  misc_RNA (1)...(19): siRNA sense strand
aagacagaccagagcacua

SEQ ID NO: 2548438 - RNA, 19 nt, Homo sapiens
  misc_RNA (1)...(19): siRNA sense strand
agcaagaacaggacgagaa

SEQ ID NO: 2548439 - RNA, 19 nt, Homo sapiens
  misc_RNA (1)...(19): siRNA sense strand
cuaucgaggccaagaccua

SEQ ID NO: 2548440 - RNA, 19 nt, Homo sapiens
  misc_RNA (1)...(19): siRNA sense strand
gggagcugccaaagaggaa

SEQ ID NO: 2548441 - RNA, 19 nt, Homo sapiens
  misc_RNA (1)...(19): siRNA sense strand
cgguggagcucgaagccuu

SEQ ID NO: 2548442 - RNA, 19 nt, Homo sapiens
  misc_RNA (1)...(19): siRNA sense strand
aagaacaggacgagaagga

SEQ ID NO: 2548443 - RNA, 19 nt, Homo sapiens
  misc_RNA (1)...(19): siRNA sense strand
auaagguccugcagagcua

SEQ ID NO: 2548444 - RNA, 19 nt, Homo sapiens
  misc_RNA (1)...(19): siRNA sense strand
acaguuacuuggagcguga

SEQ ID NO: 2548445 - RNA, 19 nt, Homo sapiens
  misc_RNA (1)...(19): siRNA sense strand
aaagugaagaagagaacau

SEQ ID NO: 2548446 - RNA, 19 nt, Homo sapiens
  misc_RNA (1)...(19): siRNA sense strand
aggaagaagaagaguugga

SEQ ID NO: 2548447 - RNA, 19 nt, Homo sapiens
  misc_RNA (1)...(19): siRNA sense strand
acaguaauauugaggagga

SEQ ID NO: 2548448 - RNA, 19 nt, Homo sapiens
  misc_RNA (1)...(19): siRNA sense strand
cagcccaacgagagacuua

SEQ ID NO: 2548449 - RNA, 19 nt, Homo sapiens
  misc_RNA (1)...(19): siRNA sense strand
augaaagugaagaagagaa

SEQ ID NO: 2548450 - RNA, 19 nt, Homo sapiens
  misc_RNA (1)...(19): siRNA sense strand
ugggcaaggaggagauaga

SEQ ID NO: 2548451 - RNA, 19 nt, Homo sapiens
  misc_RNA (1)...(19): siRNA sense strand
ggaaugugcuggugaacag

SEQ ID NO: 2548452 - RNA, 19 nt, Homo sapiens
  misc_RNA (1)...(19): siRNA sense strand
agaagggugaagaggaaga

SEQ ID NO: 2548453 - RNA, 19 nt, Homo sapiens
  misc_RNA (1)...(19): siRNA sense strand
uggaggaggaagaggagga

SEQ ID NO: 2548454 - RNA, 19 nt, Homo sapiens
  misc_RNA (1)...(19): siRNA sense strand
aggagagggaugagaagga

SEQ ID NO: 2548455 - RNA, 19 nt, Homo sapiens
  misc_RNA (1)...(19): siRNA sense strand
gguugggaaagaaggaaga

SEQ ID NO: 2548456 - RNA, 19 nt, Homo sapiens
  misc_RNA (1)...(19): siRNA sense strand
aggagauagaggagaagga

SEQ ID NO: 2548457 - RNA, 19 nt, Homo sapiens
  misc_RNA (1)...(19): siRNA sense strand
gcuguauaaugguggcuca

SEQ ID NO: 2548458 - RNA, 19 nt, Homo sapiens
  misc_RNA (1)...(19): siRNA sense strand
ugaaagugaagaagagaac

SEQ ID NO: 2548459 - RNA, 19 nt, Homo sapiens
  misc_RNA (1)...(19): siRNA sense strand
aggaggagagggaugagaa

SEQ ID NO: 2548460 - RNA, 19 nt, Homo sapiens
  misc_RNA (1)...(19): siRNA sense strand
ucucugagcagcaucgaaa

SEQ ID NO: 2548461 - RNA, 19 nt, Homo sapiens
  misc_RNA (1)...(19): siRNA sense strand
gcccugaggccguugacaa

SEQ ID NO: 2548462 - RNA, 19 nt, Homo sapiens
  misc_RNA (1)...(19): siRNA sense strand
cagagcaagcagaguugaa

SEQ ID NO: 2548463 - RNA, 19 nt, Homo sapiens
  misc_RNA (1)...(19): siRNA sense strand
gcagcugggaggaugggaa

SEQ ID NO: 2548464 - RNA, 19 nt, Homo sapiens
  misc_RNA (1)...(19): siRNA sense strand
agggugaagaggaagaaga

SEQ ID NO: 2548465 - RNA, 19 nt, Homo sapiens
  misc_RNA (1)...(19): siRNA sense strand
aggagaagggugaagagga

SEQ ID NO: 2548466 - RNA, 19 nt, Homo sapiens
  misc_RNA (1)...(19): siRNA sense strand
gcaaggaggagauagagga

SEQ ID NO: 2548467 - RNA, 19 nt, Homo sapiens
  misc_RNA (1)...(19): siRNA sense strand
aggaagagaaagugagcug

SEQ ID NO: 2548468 - RNA, 19 nt, Homo sapiens
  misc_RNA (1)...(19): siRNA sense strand
aggcgcugcuggagaacau

SEQ ID NO: 2548469 - RNA, 19 nt, Homo sapiens
  misc_RNA (1)...(19): siRNA sense strand
gaagagaacaugcugcaca

SEQ ID NO: 2548470 - RNA, 19 nt, Homo sapiens
  misc_RNA (1)...(19): siRNA sense strand
agagggaugagaaggaaga

SEQ ID NO: 2548471 - RNA, 19 nt, Homo sapiens
  misc_RNA (1)...(19): siRNA sense strand
aggacgagaaggaggccau

SEQ ID NO: 2548472 - RNA, 19 nt, Homo sapiens
  misc_RNA (1)...(19): siRNA sense strand
acauaccugugcagagcaa

SEQ ID NO: 2548473 - RNA, 19 nt, Homo sapiens
  misc_RNA (1)...(19): siRNA sense strand
aggaguggaaggacgagaa

SEQ ID NO: 2548474 - RNA, 19 nt, Homo sapiens
  misc_RNA (1)...(19): siRNA sense strand
uagaggagaaggaggagga

SEQ ID NO: 2548475 - RNA, 19 nt, Homo sapiens
  misc_RNA (1)...(19): siRNA sense strand
cgaggaaguacaagacacu

SEQ ID NO: 2548476 - RNA, 19 nt, Homo sapiens
  misc_RNA (1)...(19): siRNA sense strand
aagaggaagaagaagaguu

SEQ ID NO: 2548477 - RNA, 19 nt, Homo sapiens
  misc_RNA (1)...(19): siRNA sense strand
cuccuuucccacagagaua

SEQ ID NO: 2548478 - RNA, 19 nt, Homo sapiens
  misc_RNA (1)...(19): siRNA sense strand
gaaaagagcaagagagaga

SEQ ID NO: 2548479 - RNA, 19 nt, Homo sapiens
  misc_RNA (1)...(19): siRNA sense strand
gcaaagaaccucaguccaa

SEQ ID NO: 2548480 - RNA, 19 nt, Homo sapiens
  misc_RNA (1)...(19): siRNA sense strand
gaggaaagccagagucuca

SEQ ID NO: 2548481 - RNA, 19 nt, Homo sapiens
  misc_RNA (1)...(19): siRNA sense strand
gaauggagguagaaagcca

SEQ ID NO: 2548482 - RNA, 19 nt, Homo sapiens
  misc_RNA (1)...(19): siRNA sense strand
gcacagaaaucacaaggau

SEQ ID NO: 2548483 - RNA, 19 nt, Homo sapiens
  misc_RNA (1)...(19): siRNA sense strand
agagaaagcuggaggagag

SEQ ID NO: 2548484 - RNA, 19 nt, Homo sapiens
  misc_RNA (1)...(19): siRNA sense strand
aggaaaagagcaagagaga

SEQ ID NO: 2548485 - RNA, 19 nt, Homo sapiens
  misc_RNA (1)...(19): siRNA sense strand
aggaaagggaggaggccga

SEQ ID NO: 2548486 - RNA, 19 nt, Homo sapiens
  misc_RNA (1)...(19): siRNA sense strand
augaagacgauaugccaaa

SEQ ID NO: 2548487 - RNA, 19 nt, Homo sapiens
  misc_RNA (1)...(19): siRNA sense strand
ccauaaacugccuggagau

SEQ ID NO: 2548488 - RNA, 19 nt, Homo sapiens
  misc_RNA (1)...(19): siRNA sense strand
gggacaugucagaggagga

SEQ ID NO: 2548489 - RNA, 19 nt, Homo sapiens
  misc_RNA (1)...(19): siRNA sense strand
acagaagcugagauggaaa

SEQ ID NO: 2548490 - RNA, 19 nt, Homo sapiens
  misc_RNA (1)...(19): siRNA sense strand
ugaagaagagacugguaau

SEQ ID NO: 2548491 - RNA, 19 nt, Homo sapiens
  misc_RNA (1)...(19): siRNA sense strand
auuccaagcaagaaaguau

SEQ ID NO: 2548492 - RNA, 19 nt, Homo sapiens
  misc_RNA (1)...(19): siRNA sense strand
uggaaaugaucauacucaa

SEQ ID NO: 2548493 - RNA, 19 nt, Homo sapiens
  misc_RNA (1)...(19): siRNA sense strand
aaacaagacuggggacaaa

SEQ ID NO: 2548494 - RNA, 19 nt, Homo sapiens
  misc_RNA (1)...(19): siRNA sense strand
ugucagaggaggaaaggga

SEQ ID NO: 2548495 - RNA, 19 nt, Homo sapiens
  misc_RNA (1)...(19): siRNA sense strand
uugaagaagagacugguaa

SEQ ID NO: 2548496 - RNA, 19 nt, Homo sapiens
  misc_RNA (1)...(19): siRNA sense strand
gaagaaagcaaugggcaga

SEQ ID NO: 2548497 - RNA, 19 nt, Homo sapiens
  misc_RNA (1)...(19): siRNA sense strand
ccaagagaucagagccaca

SEQ ID NO: 2548498 - RNA, 19 nt, Homo sapiens
  misc_RNA (1)...(19): siRNA sense strand
cauucagacuucagcucua

SEQ ID NO: 2548499 - RNA, 19 nt, Homo sapiens
  misc_RNA (1)...(19): siRNA sense strand
gcaagaaaguauucagcag

SEQ ID NO: 2548500 - RNA, 19 nt, Homo sapiens
  misc_RNA (1)...(19): siRNA sense strand
cgggaguauuuagaagaaa

SEQ ID NO: 2548501 - RNA, 19 nt, Homo sapiens
  misc_RNA (1)...(19): siRNA sense strand
uggaggagagagugugcaa

SEQ ID NO: 2548502 - RNA, 19 nt, Homo sapiens
  misc_RNA (1)...(19): siRNA sense strand
ccucugggguuuaugguaa

SEQ ID NO: 2548503 - RNA, 19 nt, Homo sapiens
  misc_RNA (1)...(19): siRNA sense strand
ucagauacuaccugggaca

SEQ ID NO: 2548504 - RNA, 19 nt, Homo sapiens
  misc_RNA (1)...(19): siRNA sense strand
ucacagaaaugcaggacag

SEQ ID NO: 2548505 - RNA, 19 nt, Homo sapiens
  misc_RNA (1)...(19): siRNA sense strand
acagaaaucacaaggaucu

SEQ ID NO: 2548506 - RNA, 19 nt, Homo sapiens
  misc_RNA (1)...(19): siRNA sense strand
cuggauagaagaaagcaau

SEQ ID NO: 2548507 - RNA, 19 nt, Homo sapiens
  misc_RNA (1)...(19): siRNA sense strand
ugaaagacuacaugagauc

SEQ ID NO: 2548508 - RNA, 19 nt, Homo sapiens
  misc_RNA (1)...(19): siRNA sense strand
gggagcuggcaaagugcaa

SEQ ID NO: 2548509 - RNA, 19 nt, Homo sapiens
  misc_RNA (1)...(19): siRNA sense strand
caggguggacagagcaaau

SEQ ID NO: 2548510 - RNA, 19 nt, Homo sapiens
  misc_RNA (1)...(19): siRNA sense strand
ccaaaguuuccgggaguau

SEQ ID NO: 2548511 - RNA, 19 nt, Homo sapiens
  misc_RNA (1)...(19): siRNA sense strand
ugugauggaggaagaguuu

SEQ ID NO: 2548512 - RNA, 19 nt, Homo sapiens
  misc_RNA (1)...(19): siRNA sense strand
gaaacaagacuggggacaa

SEQ ID NO: 2548513 - RNA, 19 nt, Homo sapiens
  misc_RNA (1)...(19): siRNA sense strand
gaaagcuggaggagagagu

SEQ ID NO: 2548514 - RNA, 19 nt, Homo sapiens
  misc_RNA (1)...(19): siRNA sense strand
gccugagggagcuggcaaa

SEQ ID NO: 2548515 - RNA, 19 nt, Homo sapiens
  misc_RNA (1)...(19): siRNA sense strand
cgagcaacugcaaacguua

SEQ ID NO: 2548516 - RNA, 19 nt, Homo sapiens
  misc_RNA (1)...(19): siRNA sense strand
gcuggaauuuugggagaua

SEQ ID NO: 2548517 - RNA, 19 nt, Homo sapiens
  misc_RNA (1)...(19): siRNA sense strand
ccucaguaucugugaugga

SEQ ID NO: 2548518 - RNA, 19 nt, Homo sapiens
  misc_RNA (1)...(19): siRNA sense strand
uggaauuucaguuaggaga

SEQ ID NO: 2548519 - RNA, 19 nt, Homo sapiens
  misc_RNA (1)...(19): siRNA sense strand
acuggauagaagaaagcaa

SEQ ID NO: 2548520 - RNA, 19 nt, Homo sapiens
  misc_RNA (1)...(19): siRNA sense strand
caaauuguccuguuggaga

SEQ ID NO: 2548521 - RNA, 19 nt, Homo sapiens
  misc_RNA (1)...(19): siRNA sense strand
gggccagauuccaaaagua

SEQ ID NO: 2548522 - RNA, 19 nt, Homo sapiens
  misc_RNA (1)...(19): siRNA sense strand
ugccaaaguuuccgggagu

SEQ ID NO: 2548523 - RNA, 19 nt, Homo sapiens
  misc_RNA (1)...(19): siRNA sense strand
caucaucagcuugggcaaa

SEQ ID NO: 2548524 - RNA, 19 nt, Homo sapiens
  misc_RNA (1)...(19): siRNA sense strand
gaaccucaguccaaagcuu

SEQ ID NO: 2548525 - RNA, 19 nt, Homo sapiens
  misc_RNA (1)...(19): siRNA sense strand
ggucugguacuuuggguca

SEQ ID NO: 2548526 - RNA, 19 nt, Homo sapiens
  misc_RNA (1)...(19): siRNA sense strand
cagaagcugagauggaaaa

SEQ ID NO: 2548527 - RNA, 19 nt, Homo sapiens
  misc_RNA (1)...(19): siRNA sense strand
gggcucagcaaaucagaga

SEQ ID NO: 2548528 - RNA, 19 nt, Homo sapiens
  misc_RNA (1)...(19): siRNA sense strand
agaagaaagcaaugggcag

SEQ ID NO: 2548529 - RNA, 19 nt, Homo sapiens
  misc_RNA (1)...(19): siRNA sense strand
gcaagaaguucaaacguga

SEQ ID NO: 2548530 - RNA, 19 nt, Homo sapiens
  misc_RNA (1)...(19): siRNA sense strand
aggaaguggcaguuauaua

SEQ ID NO: 2548531 - RNA, 19 nt, Homo sapiens
  misc_RNA (1)...(19): siRNA sense strand
uggugaaggaaaaggaaaa

SEQ ID NO: 2548532 - RNA, 19 nt, Homo sapiens
  misc_RNA (1)...(19): siRNA sense strand
uggaaauagccuaggacca

SEQ ID NO: 2548533 - RNA, 19 nt, Homo sapiens
  misc_RNA (1)...(19): siRNA sense strand
uggcauuguuguaggucuu

SEQ ID NO: 2548534 - RNA, 19 nt, Homo sapiens
  misc_RNA (1)...(19): siRNA sense strand
agccaauggugacuggaaa

SEQ ID NO: 2548535 - RNA, 19 nt, Homo sapiens
  misc_RNA (1)...(19): siRNA sense strand
aggucuuggaugugguuua

SEQ ID NO: 2548536 - RNA, 19 nt, Homo sapiens
  misc_RNA (1)...(19): siRNA sense strand
ugacgaucgccgaggccua

SEQ ID NO: 2548537 - RNA, 19 nt, Homo sapiens
  misc_RNA (1)...(19): siRNA sense strand
gcuggaugccuuuggugaa

SEQ ID NO: 2548538 - RNA, 19 nt, Homo sapiens
  misc_RNA (1)...(19): siRNA sense strand
agauguagcaagaaguuca

SEQ ID NO: 2548539 - RNA, 19 nt, Homo sapiens
  misc_RNA (1)...(19): siRNA sense strand
uagaauggcuggaugccuu

SEQ ID NO: 2548540 - RNA, 19 nt, Homo sapiens
  misc_RNA (1)...(19): siRNA sense strand
caaacgugaaagaagaaga

SEQ ID NO: 2548541 - RNA, 19 nt, Homo sapiens
  misc_RNA (1)...(19): siRNA sense strand
acgugaaagaagaagaguu

SEQ ID NO: 2548542 - RNA, 19 nt, Homo sapiens
  misc_RNA (1)...(19): siRNA sense strand
ccauaugugaccacgaaga

SEQ ID NO: 2548543 - RNA, 19 nt, Homo sapiens
  misc_RNA (1)...(19): siRNA sense strand
ggauacuggcugacuucaa

SEQ ID NO: 2548544 - RNA, 19 nt, Homo sapiens
  misc_RNA (1)...(19): siRNA sense strand
ggaagauguagcaagaagu

SEQ ID NO: 2548545 - RNA, 19 nt, Homo sapiens
  misc_RNA (1)...(19): siRNA sense strand
gguuuauuauacacugcaa

SEQ ID NO: 2548546 - RNA, 19 nt, Homo sapiens
  misc_RNA (1)...(19): siRNA sense strand
cuuugacaucggaggguuu

SEQ ID NO: 2548547 - RNA, 19 nt, Homo sapiens
  misc_RNA (1)...(19): siRNA sense strand
gaguaguagugaagggaaa

SEQ ID NO: 2548548 - RNA, 19 nt, Homo sapiens
  misc_RNA (1)...(19): siRNA sense strand
cagaaaagacuguaaauca

SEQ ID NO: 2548549 - RNA, 19 nt, Homo sapiens
  misc_RNA (1)...(19): siRNA sense strand
caggagggcuugaagacuu

SEQ ID NO: 2548550 - RNA, 19 nt, Homo sapiens
  misc_RNA (1)...(19): siRNA sense strand
ggaugcauuccaugauaaa

SEQ ID NO: 2548551 - RNA, 19 nt, Homo sapiens
  misc_RNA (1)...(19): siRNA sense strand
uugauuauuuccaggagua

SEQ ID NO: 2548552 - RNA, 19 nt, Homo sapiens
  misc_RNA (1)...(19): siRNA sense strand
cggaugcauuccaugauaa

SEQ ID NO: 2548553 - RNA, 19 nt, Homo sapiens
  misc_RNA (1)...(19): siRNA sense strand
ggaugaugcuuucuggcuu

SEQ ID NO: 2548554 - RNA, 19 nt, Homo sapiens
  misc_RNA (1)...(19): siRNA sense strand
caacagaaagagagccacu

SEQ ID NO: 2548555 - RNA, 19 nt, Homo sapiens
  misc_RNA (1)...(19): siRNA sense strand
ugucagaaggcauguguca

SEQ ID NO: 2548556 - RNA, 19 nt, Homo sapiens
  misc_RNA (1)...(19): siRNA sense strand
gcugauuuguguuauagaa

SEQ ID NO: 2548557 - RNA, 19 nt, Homo sapiens
  misc_RNA (1)...(19): siRNA sense strand
gaagaugaaccucugcuaa

SEQ ID NO: 2548558 - RNA, 19 nt, Homo sapiens
  misc_RNA (1)...(19): siRNA sense strand
aagaugaaccucugcuaau

SEQ ID NO: 2548559 - RNA, 19 nt, Homo sapiens
  misc_RNA (1)...(19): siRNA sense strand
ggaguaguagugaagggaa

SEQ ID NO: 2548560 - RNA, 19 nt, Homo sapiens
  misc_RNA (1)...(19): siRNA sense strand
cgagaauuugagacggaca

SEQ ID NO: 2548561 - RNA, 19 nt, Homo sapiens
  misc_RNA (1)...(19): siRNA sense strand
caacaggagggcuugaaga

SEQ ID NO: 2548562 - RNA, 19 nt, Homo sapiens
  misc_RNA (1)...(19): siRNA sense strand
ucaaagaaauuaaggaucg

SEQ ID NO: 2548563 - RNA, 19 nt, Homo sapiens
  misc_RNA (1)...(19): siRNA sense strand
ccugaaagaagaugaaccu

SEQ ID NO: 2548564 - RNA, 19 nt, Homo sapiens
  misc_RNA (1)...(19): siRNA sense strand
cugaaaugcaggugauuaa

SEQ ID NO: 2548565 - RNA, 19 nt, Homo sapiens
  misc_RNA (1)...(19): siRNA sense strand
accaauaucuagagagcaa

SEQ ID NO: 2548566 - RNA, 19 nt, Homo sapiens
  misc_RNA (1)...(19): siRNA sense strand
uaguaauggcugagcaaua

SEQ ID NO: 2548567 - RNA, 19 nt, Homo sapiens
  misc_RNA (1)...(19): siRNA sense strand
uggaagaaaucuaggcaga

SEQ ID NO: 2548568 - RNA, 19 nt, Homo sapiens
  misc_RNA (1)...(19): siRNA sense strand
ggacaaagacgcaaggagu

SEQ ID NO: 2548569 - RNA, 19 nt, Homo sapiens
  misc_RNA (1)...(19): siRNA sense strand
cuucaauauccaaggcaua

SEQ ID NO: 2548570 - RNA, 19 nt, Homo sapiens
  misc_RNA (1)...(19): siRNA sense strand
aagaauucguagagaacau

SEQ ID NO: 2548571 - RNA, 19 nt, Homo sapiens
  misc_RNA (1)...(19): siRNA sense strand
agacauuagcaaaggugua

SEQ ID NO: 2548572 - RNA, 19 nt, Homo sapiens
  misc_RNA (1)...(19): siRNA sense strand
aaaugaaagcaaaggccaa

SEQ ID NO: 2548573 - RNA, 19 nt, Homo sapiens
  misc_RNA (1)...(19): siRNA sense strand
ucuuauaguaguugcacaa

SEQ ID NO: 2548574 - RNA, 19 nt, Homo sapiens
  misc_RNA (1)...(19): siRNA sense strand
uggcaauagggaaaugaaa

SEQ ID NO: 2548575 - RNA, 19 nt, Homo sapiens
  misc_RNA (1)...(19): siRNA sense strand
cggggaaucugaagcaaaa

SEQ ID NO: 2548576 - RNA, 19 nt, Homo sapiens
  misc_RNA (1)...(19): siRNA sense strand
gccaaagcggcuauagaaa

SEQ ID NO: 2548577 - RNA, 19 nt, Homo sapiens
  misc_RNA (1)...(19): siRNA sense strand
acaaaccggaacagggaaa

SEQ ID NO: 2548578 - RNA, 19 nt, Homo sapiens
  misc_RNA (1)...(19): siRNA sense strand
cagaaucauuacauggcaa

SEQ ID NO: 2548579 - RNA, 19 nt, Homo sapiens
  misc_RNA (1)...(19): siRNA sense strand
gagaaaaugggcagaucua

SEQ ID NO: 2548580 - RNA, 19 nt, Homo sapiens
  misc_RNA (1)...(19): siRNA sense strand
cagcagucguggagugcga

SEQ ID NO: 2548581 - RNA, 19 nt, Homo sapiens
  misc_RNA (1)...(19): siRNA sense strand
uagaaacagaaauggacaa

SEQ ID NO: 2548582 - RNA, 19 nt, Homo sapiens
  misc_RNA (1)...(19): siRNA sense strand
ccaagaauucguagagaac

SEQ ID NO: 2548583 - RNA, 19 nt, Homo sapiens
  misc_RNA (1)...(19): siRNA sense strand
gcaacagugaacagaguga

SEQ ID NO: 2548584 - RNA, 19 nt, Homo sapiens
  misc_RNA (1)...(19): siRNA sense strand
ugaucaagagcgagcagua

SEQ ID NO: 2548585 - RNA, 19 nt, Homo sapiens
  misc_RNA (1)...(19): siRNA sense strand
cauagaauccaaagcaaca

SEQ ID NO: 2548586 - RNA, 19 nt, Homo sapiens
  misc_RNA (1)...(19): siRNA sense strand
gcacaaaccggaacaggga

SEQ ID NO: 2548587 - RNA, 19 nt, Homo sapiens
  misc_RNA (1)...(19): siRNA sense strand
uggacaaauagaagacauu

SEQ ID NO: 2548588 - RNA, 19 nt, Homo sapiens
  misc_RNA (1)...(19): siRNA sense strand
gcauaauaaggguagggau

SEQ ID NO: 2548589 - RNA, 19 nt, Homo sapiens
  misc_RNA (1)...(19): siRNA sense strand
ugacauuguuggagaagcu

SEQ ID NO: 2548590 - RNA, 19 nt, Homo sapiens
  misc_RNA (1)...(19): siRNA sense strand
acagagugaucaagagcga

SEQ ID NO: 2548591 - RNA, 19 nt, Homo sapiens
  misc_RNA (1)...(19): siRNA sense strand
uguaguaauggcugagcaa

SEQ ID NO: 2548592 - RNA, 19 nt, Homo sapiens
  misc_RNA (1)...(19): siRNA sense strand
cagugaacagagugaucaa

SEQ ID NO: 2548593 - RNA, 19 nt, Homo sapiens
  misc_RNA (1)...(19): siRNA sense strand
auauauggugguagaaaca

SEQ ID NO: 2548594 - RNA, 19 nt, Homo sapiens
  misc_RNA (1)...(19): siRNA sense strand
agaaacagaaauggacaaa

SEQ ID NO: 2548595 - RNA, 19 nt, Homo sapiens
  misc_RNA (1)...(19): siRNA sense strand
uauagaugaggcagauaaa

SEQ ID NO: 2548596 - RNA, 19 nt, Homo sapiens
  misc_RNA (1)...(19): siRNA sense strand
agugcaacuuggccagaua

SEQ ID NO: 2548597 - RNA, 19 nt, Homo sapiens
  misc_RNA (1)...(19): siRNA sense strand
aaagaggcacagagaaaca

SEQ ID NO: 2548598 - RNA, 19 nt, Homo sapiens
  misc_RNA (1)...(19): siRNA sense strand
auuaacuggagaaaggaaa

SEQ ID NO: 2548599 - RNA, 19 nt, Homo sapiens
  misc_RNA (1)...(19): siRNA sense strand
acaaagacgcaaggaguuu

SEQ ID NO: 2548600 - RNA, 19 nt, Homo sapiens
  misc_RNA (1)...(19): siRNA sense strand
uuggagaagcugagccauu

SEQ ID NO: 2548601 - RNA, 19 nt, Homo sapiens
  misc_RNA (1)...(19): siRNA sense strand
gauuaacuggagaaaggaa

SEQ ID NO: 2548602 - RNA, 19 nt, Homo sapiens
  misc_RNA (1)...(19): siRNA sense strand
cuugaaaaguggugaaaag

SEQ ID NO: 2548603 - RNA, 19 nt, Homo sapiens
  misc_RNA (1)...(19): siRNA sense strand
gguagggauuguaaagcca

SEQ ID NO: 2548604 - RNA, 19 nt, Homo sapiens
  misc_RNA (1)...(19): siRNA sense strand
acguauauguacacagagu

SEQ ID NO: 2548605 - RNA, 19 nt, Homo sapiens
  misc_RNA (1)...(19): siRNA sense strand
cgacaaacacuaaaauaca

SEQ ID NO: 2548606 - RNA, 19 nt, Homo sapiens
  misc_RNA (1)...(19): siRNA sense strand
cauauauggugguagaaac

SEQ ID NO: 2548607 - RNA, 19 nt, Homo sapiens
  misc_RNA (1)...(19): siRNA sense strand
guagaaacagaaauggaca

SEQ ID NO: 2548608 - RNA, 19 nt, Homo sapiens
  misc_RNA (1)...(19): siRNA sense strand
ugguuauagaugaggcaga

SEQ ID NO: 2548609 - RNA, 19 nt, Homo sapiens
  misc_RNA (1)...(19): siRNA sense strand
gccagauacuguacgucaa

SEQ ID NO: 2548610 - RNA, 19 nt, Homo sapiens
  misc_RNA (1)...(19): siRNA sense strand
agaaacacgaucaagaaaa

SEQ ID NO: 2548611 - RNA, 19 nt, Homo sapiens
  misc_RNA (1)...(19): siRNA sense strand
cuaucuaaugccuggguuu

SEQ ID NO: 2548612 - RNA, 19 nt, Homo sapiens
  misc_RNA (1)...(19): siRNA sense strand
ugucugaaaugcaggugau

SEQ ID NO: 2548613 - RNA, 19 nt, Homo sapiens
  misc_RNA (1)...(19): siRNA sense strand
aauagggaaaugaaagcaa

SEQ ID NO: 2548614 - RNA, 19 nt, Homo sapiens
  misc_RNA (1)...(19): siRNA sense strand
caauucaacuuguggagga

SEQ ID NO: 2548615 - RNA, 19 nt, Homo sapiens
  misc_RNA (1)...(19): siRNA sense strand
cuuguggaggagugagaaa

SEQ ID NO: 2548616 - RNA, 19 nt, Homo sapiens
  misc_RNA (1)...(19): siRNA sense strand
ccucaugguuggugcgaag

SEQ ID NO: 2548617 - RNA, 19 nt, Homo sapiens
  misc_RNA (1)...(19): siRNA sense strand
agaagacacucguggagga

SEQ ID NO: 2548618 - RNA, 19 nt, Homo sapiens
  misc_RNA (1)...(19): siRNA sense strand
cuggagcggcaaauggaaa

SEQ ID NO: 2548619 - RNA, 19 nt, Homo sapiens
  misc_RNA (1)...(19): siRNA sense strand
ccacagcuggagcggcaaa

SEQ ID NO: 2548620 - RNA, 19 nt, Homo sapiens
  misc_RNA (1)...(19): siRNA sense strand
ucaacaagaccguguggga

SEQ ID NO: 2548621 - RNA, 19 nt, Homo sapiens
  misc_RNA (1)...(19): siRNA sense strand
cgugaauguaguagggacu

SEQ ID NO: 2548622 - RNA, 19 nt, Homo sapiens
  misc_RNA (1)...(19): siRNA sense strand
uggagaagguguugggcag

SEQ ID NO: 2548623 - RNA, 19 nt, Homo sapiens
  misc_RNA (1)...(19): siRNA sense strand
aggagguggcggaggucuu

SEQ ID NO: 2548624 - RNA, 19 nt, Homo sapiens
  misc_RNA (1)...(19): siRNA sense strand
gcggcaagguguacggcaa

SEQ ID NO: 2548625 - RNA, 19 nt, Homo sapiens
  misc_RNA (1)...(19): siRNA sense strand
ggcaagaagggcagcgaca

SEQ ID NO: 2548626 - RNA, 19 nt, Homo sapiens
  misc_RNA (1)...(19): siRNA sense strand
gcugcaacguaguggguuc

SEQ ID NO: 2548627 - RNA, 19 nt, Homo sapiens
  misc_RNA (1)...(19): siRNA sense strand
gcuggaucgacgugcagaa

SEQ ID NO: 2548628 - RNA, 19 nt, Homo sapiens
  misc_RNA (1)...(19): siRNA sense strand
gcggcaagguguacggcaa

SEQ ID NO: 2548629 - RNA, 19 nt, Homo sapiens
  misc_RNA (1)...(19): siRNA sense strand
ggcaagaagggcagcgaca

SEQ ID NO: 2548630 - RNA, 19 nt, Homo sapiens
  misc_RNA (1)...(19): siRNA sense strand
gcugcaacguaguggguuc

SEQ ID NO: 2548631 - RNA, 19 nt, Homo sapiens
  misc_RNA (1)...(19): siRNA sense strand
gcuggaucgacgugcagaa

SEQ ID NO: 2548632 - RNA, 19 nt, Homo sapiens
  misc_RNA (1)...(19): siRNA sense strand
aggagaaaguggagagaca

SEQ ID NO: 2548633 - RNA, 19 nt, Homo sapiens
  misc_RNA (1)...(19): siRNA sense strand
uagaauggguagaagggaa

SEQ ID NO: 2548634 - RNA, 19 nt, Homo sapiens
  misc_RNA (1)...(19): siRNA sense strand
ccguaugugugcagggaau

SEQ ID NO: 2548635 - RNA, 19 nt, Homo sapiens
  misc_RNA (1)...(19): siRNA sense strand
ggguagaagggaacagaga

SEQ ID NO: 2548636 - RNA, 19 nt, Homo sapiens
  misc_RNA (1)...(19): siRNA sense strand
agacaggguguguggacaa

SEQ ID NO: 2548637 - RNA, 19 nt, Homo sapiens
  misc_RNA (1)...(19): siRNA sense strand
ucauuaagaaagaggccaa

SEQ ID NO: 2548638 - RNA, 19 nt, Homo sapiens
  misc_RNA (1)...(19): siRNA sense strand
ccucagacaauaugcgcua

SEQ ID NO: 2548639 - RNA, 19 nt, Homo sapiens
  misc_RNA (1)...(19): siRNA sense strand
ggacacacucagaggagga

SEQ ID NO: 2548640 - RNA, 19 nt, Homo sapiens
  misc_RNA (1)...(19): siRNA sense strand
gaacagaauuccagccaag

SEQ ID NO: 2548641 - RNA, 19 nt, Homo sapiens
  misc_RNA (1)...(19): siRNA sense strand
ccguaugucugcagggagu

SEQ ID NO: 2548642 - RNA, 19 nt, Homo sapiens
  misc_RNA (1)...(19): siRNA sense strand
ccgacagcucauuaagaaa

SEQ ID NO: 2548643 - RNA, 19 nt, Homo sapiens
  misc_RNA (1)...(19): siRNA sense strand
acucaggagagaagccuua

SEQ ID NO: 2548644 - RNA, 19 nt, Homo sapiens
  misc_RNA (1)...(19): siRNA sense strand
gugcagggaaugugggcga

SEQ ID NO: 2548645 - RNA, 19 nt, Homo sapiens
  misc_RNA (1)...(19): siRNA sense strand
gcgacgaaccuuggagaga

SEQ ID NO: 2548646 - RNA, 19 nt, Homo sapiens
  misc_RNA (1)...(19): siRNA sense strand
gggauguggcuguggccuu

SEQ ID NO: 2548647 - RNA, 19 nt, Homo sapiens
  misc_RNA (1)...(19): siRNA sense strand
guagaagggaacagagaag

SEQ ID NO: 2548648 - RNA, 19 nt, Homo sapiens
  misc_RNA (1)...(19): siRNA sense strand
ucuccauacaccagaggaa

SEQ ID NO: 2548649 - RNA, 19 nt, Homo sapiens
  misc_RNA (1)...(19): siRNA sense strand
gguuuuagccagaagguca

SEQ ID NO: 2548650 - RNA, 19 nt, Homo sapiens
  misc_RNA (1)...(19): siRNA sense strand
uugcauagacacaggagga

SEQ ID NO: 2548651 - RNA, 19 nt, Homo sapiens
  misc_RNA (1)...(19): siRNA sense strand
agaaggaguggaagcuauu

SEQ ID NO: 2548652 - RNA, 19 nt, Homo sapiens
  misc_RNA (1)...(19): siRNA sense strand
agaagggaacagagaagga

SEQ ID NO: 2548653 - RNA, 19 nt, Homo sapiens
  misc_RNA (1)...(19): siRNA sense strand
acacaauguugaagggagc

SEQ ID NO: 2548654 - RNA, 19 nt, Homo sapiens
  misc_RNA (1)...(19): siRNA sense strand
agacugggacuuagcaaaa

SEQ ID NO: 2548655 - RNA, 19 nt, Homo sapiens
  misc_RNA (1)...(19): siRNA sense strand
gggaacagagaaggaggaa

SEQ ID NO: 2548656 - RNA, 19 nt, Homo sapiens
  misc_RNA (1)...(19): siRNA sense strand
agucaagccuguucagcca

SEQ ID NO: 2548657 - RNA, 19 nt, Homo sapiens
  misc_RNA (1)...(19): siRNA sense strand
gggagaggcuuuugccaga

SEQ ID NO: 2548658 - RNA, 19 nt, Homo sapiens
  misc_RNA (1)...(19): siRNA sense strand
gggagaggcuuuugccaga

SEQ ID NO: 2548659 - RNA, 19 nt, Homo sapiens
  misc_RNA (1)...(19): siRNA sense strand
cuucaaaggaguugguaaa

SEQ ID NO: 2548660 - RNA, 19 nt, Homo sapiens
  misc_RNA (1)...(19): siRNA sense strand
cagaaguauggaaggauua

SEQ ID NO: 2548661 - RNA, 19 nt, Homo sapiens
  misc_RNA (1)...(19): siRNA sense strand
cguuaguuguugugaauga

SEQ ID NO: 2548662 - RNA, 19 nt, Homo sapiens
  misc_RNA (1)...(19): siRNA sense strand
cggaugacucagacaguua

SEQ ID NO: 2548663 - RNA, 19 nt, Homo sapiens
  misc_RNA (1)...(19): siRNA sense strand
ggguggaggauuagcagaa

SEQ ID NO: 2548664 - RNA, 19 nt, Homo sapiens
  misc_RNA (1)...(19): siRNA sense strand
gcauauaaccaaaggcgga

SEQ ID NO: 2548665 - RNA, 19 nt, Homo sapiens
  misc_RNA (1)...(19): siRNA sense strand
aggaggaguuucagcaaau

SEQ ID NO: 2548666 - RNA, 19 nt, Homo sapiens
  misc_RNA (1)...(19): siRNA sense strand
ugaagaaauaagaaggaga

SEQ ID NO: 2548667 - RNA, 19 nt, Homo sapiens
  misc_RNA (1)...(19): siRNA sense strand
acaugaagaaacagaagua

SEQ ID NO: 2548668 - RNA, 19 nt, Homo sapiens
  misc_RNA (1)...(19): siRNA sense strand
gguuggagcaggauggauu

SEQ ID NO: 2548669 - RNA, 19 nt, Homo sapiens
  misc_RNA (1)...(19): siRNA sense strand
agauaaaggauccggugua

SEQ ID NO: 2548670 - RNA, 19 nt, Homo sapiens
  misc_RNA (1)...(19): siRNA sense strand
ugcagaaagaggagcguua

SEQ ID NO: 2548671 - RNA, 19 nt, Homo sapiens
  misc_RNA (1)...(19): siRNA sense strand
agauguggaaggaaggaaa

SEQ ID NO: 2548672 - RNA, 19 nt, Homo sapiens
  misc_RNA (1)...(19): siRNA sense strand
aagaaggagagguggaaaa

SEQ ID NO: 2548673 - RNA, 19 nt, Homo sapiens
  misc_RNA (1)...(19): siRNA sense strand
cuucaggaauauauggcaa

SEQ ID NO: 2548674 - RNA, 19 nt, Homo sapiens
  misc_RNA (1)...(19): siRNA sense strand
cgugcaacgucuacagcaa

SEQ ID NO: 2548675 - RNA, 19 nt, Homo sapiens
  misc_RNA (1)...(19): siRNA sense strand
aggauuugcuggagcuauu

SEQ ID NO: 2548676 - RNA, 19 nt, Homo sapiens
  misc_RNA (1)...(19): siRNA sense strand
gcugaaggccagagggaac

SEQ ID NO: 2548677 - RNA, 19 nt, Homo sapiens
  misc_RNA (1)...(19): siRNA sense strand
gagcaggauggauuggaaa

SEQ ID NO: 2548678 - RNA, 19 nt, Homo sapiens
  misc_RNA (1)...(19): siRNA sense strand
uggaggugguccugggcaa

SEQ ID NO: 2548679 - RNA, 19 nt, Homo sapiens
  misc_RNA (1)...(19): siRNA sense strand
gaucugugacuuugagaau

SEQ ID NO: 2548680 - RNA, 19 nt, Homo sapiens
  misc_RNA (1)...(19): siRNA sense strand
guaccaaggcccugcaaaa

SEQ ID NO: 2548681 - RNA, 19 nt, Homo sapiens
  misc_RNA (1)...(19): siRNA sense strand
ggacaucagacaaagucaa

SEQ ID NO: 2548682 - RNA, 19 nt, Homo sapiens
  misc_RNA (1)...(19): siRNA sense strand
guggaaaagcaguggccaa

SEQ ID NO: 2548683 - RNA, 19 nt, Homo sapiens
  misc_RNA (1)...(19): siRNA sense strand
agugaugaagacugggaua

SEQ ID NO: 2548684 - RNA, 19 nt, Homo sapiens
  misc_RNA (1)...(19): siRNA sense strand
ccuaaaggauauugggccu

SEQ ID NO: 2548685 - RNA, 19 nt, Homo sapiens
  misc_RNA (1)...(19): siRNA sense strand
gcaauugaaggcaggaaaa

SEQ ID NO: 2548686 - RNA, 19 nt, Homo sapiens
  misc_RNA (1)...(19): siRNA sense strand
acuucaaaggaguugguaa

SEQ ID NO: 2548687 - RNA, 19 nt, Homo sapiens
  misc_RNA (1)...(19): siRNA sense strand
ugaugaagacugggauaua

SEQ ID NO: 2548688 - RNA, 19 nt, Homo sapiens
  misc_RNA (1)...(19): siRNA sense strand
cgucaaucaaggauccaaa

SEQ ID NO: 2548689 - RNA, 19 nt, Homo sapiens
  misc_RNA (1)...(19): siRNA sense strand
aaggcuaacuggaagaaga

SEQ ID NO: 2548690 - RNA, 19 nt, Homo sapiens
  misc_RNA (1)...(19): siRNA sense strand
agagcaguacuuagaguua

SEQ ID NO: 2548691 - RNA, 19 nt, Homo sapiens
  misc_RNA (1)...(19): siRNA sense strand
agcaguacuuagaguuaua

SEQ ID NO: 2548692 - RNA, 19 nt, Homo sapiens
  misc_RNA (1)...(19): siRNA sense strand
aggacaaacucuacaaacu

SEQ ID NO: 2548693 - RNA, 19 nt, Homo sapiens
  misc_RNA (1)...(19): siRNA sense strand
gaaauaagaaggagaggug

SEQ ID NO: 2548694 - RNA, 19 nt, Homo sapiens
  misc_RNA (1)...(19): siRNA sense strand
ccucagaguauccaagaau

SEQ ID NO: 2548695 - RNA, 19 nt, Homo sapiens
  misc_RNA (1)...(19): siRNA sense strand
cugaggcagucaaggcuaa

SEQ ID NO: 2548696 - RNA, 19 nt, Homo sapiens
  misc_RNA (1)...(19): siRNA sense strand
aguuaucauaggucagaaa

SEQ ID NO: 2548697 - RNA, 19 nt, Homo sapiens
  misc_RNA (1)...(19): siRNA sense strand
ggaacaucaugcugagcca

SEQ ID NO: 2548698 - RNA, 19 nt, Homo sapiens
  misc_RNA (1)...(19): siRNA sense strand
aauaagaaggagaggugga

SEQ ID NO: 2548699 - RNA, 19 nt, Homo sapiens
  misc_RNA (1)...(19): siRNA sense strand
aguuaugccugaagaucuu

SEQ ID NO: 2548700 - RNA, 19 nt, Homo sapiens
  misc_RNA (1)...(19): siRNA sense strand
aggauggauuggaaaauua

SEQ ID NO: 2548701 - RNA, 19 nt, Homo sapiens
  misc_RNA (1)...(19): siRNA sense strand
acuaugauucaguggaaga

SEQ ID NO: 2548702 - RNA, 19 nt, Homo sapiens
  misc_RNA (1)...(19): siRNA sense strand
uggaagaaggagagaaggu

SEQ ID NO: 2548703 - RNA, 19 nt, Homo sapiens
  misc_RNA (1)...(19): siRNA sense strand
guggaggauuagcagaaau

SEQ ID NO: 2548704 - RNA, 19 nt, Homo sapiens
  misc_RNA (1)...(19): siRNA sense strand
gagguggugaagaaaguaa

SEQ ID NO: 2548705 - RNA, 19 nt, Homo sapiens
  misc_RNA (1)...(19): siRNA sense strand
gcuccuuagcugcugauaa

SEQ ID NO: 2548706 - RNA, 19 nt, Homo sapiens
  misc_RNA (1)...(19): siRNA sense strand
accaguauauccaggacaa

SEQ ID NO: 2548707 - RNA, 19 nt, Homo sapiens
  misc_RNA (1)...(19): siRNA sense strand
ggaaggaaacagaauucau

SEQ ID NO: 2548708 - RNA, 19 nt, Homo sapiens
  misc_RNA (1)...(19): siRNA sense strand
auucaguggaagaaggaga

SEQ ID NO: 2548709 - RNA, 19 nt, Homo sapiens
  misc_RNA (1)...(19): siRNA sense strand
cccaaugacuccugaggca

SEQ ID NO: 2548710 - RNA, 19 nt, Homo sapiens
  misc_RNA (1)...(19): siRNA sense strand
uggaggauuagcagaaauu

SEQ ID NO: 2548711 - RNA, 19 nt, Homo sapiens
  misc_RNA (1)...(19): siRNA sense strand
cugagguggugaagaaagu

SEQ ID NO: 2548712 - RNA, 19 nt, Homo sapiens
  misc_RNA (1)...(19): siRNA sense strand
aggauugggccgagccuau

SEQ ID NO: 2548713 - RNA, 19 nt, Homo sapiens
  misc_RNA (1)...(19): siRNA sense strand
cgagaguugugaggagaau

SEQ ID NO: 2548714 - RNA, 19 nt, Homo sapiens
  misc_RNA (1)...(19): siRNA sense strand
aaggaggaguuucagcaaa

SEQ ID NO: 2548715 - RNA, 19 nt, Homo sapiens
  misc_RNA (1)...(19): siRNA sense strand
gcggaaauauuggggcuaa

SEQ ID NO: 2548716 - RNA, 19 nt, Homo sapiens
  misc_RNA (1)...(19): siRNA sense strand
caucaugcugagccagaaa

SEQ ID NO: 2548717 - RNA, 19 nt, Homo sapiens
  misc_RNA (1)...(19): siRNA sense strand
aaucauacuagucgugcaa

SEQ ID NO: 2548718 - RNA, 19 nt, Homo sapiens
  misc_RNA (1)...(19): siRNA sense strand
agcagaaauuccuggacuu

SEQ ID NO: 2548719 - RNA, 19 nt, Homo sapiens
  misc_RNA (1)...(19): siRNA sense strand
ccugcaaccaguuuggaaa

SEQ ID NO: 2548720 - RNA, 19 nt, Homo sapiens
  misc_RNA (1)...(19): siRNA sense strand
guguccagguaguggcuuu

SEQ ID NO: 2548721 - RNA, 19 nt, Homo sapiens
  misc_RNA (1)...(19): siRNA sense strand
ugagaaaggggaugugaau

SEQ ID NO: 2548722 - RNA, 19 nt, Homo sapiens
  misc_RNA (1)...(19): siRNA sense strand
aaaacaagaaccaggaaca

SEQ ID NO: 2548723 - RNA, 19 nt, Homo sapiens
  misc_RNA (1)...(19): siRNA sense strand
cugacgaacuggaccaaaa

SEQ ID NO: 2548724 - RNA, 19 nt, Homo sapiens
  misc_RNA (1)...(19): siRNA sense strand
ccagaucauuauaggccuu

SEQ ID NO: 2548725 - RNA, 19 nt, Homo sapiens
  misc_RNA (1)...(19): siRNA sense strand
gccaguuccugaaggguca

SEQ ID NO: 2548726 - RNA, 19 nt, Homo sapiens
  misc_RNA (1)...(19): siRNA sense strand
ccaucgacuacgugaacaa

SEQ ID NO: 2548727 - RNA, 19 nt, Homo sapiens
  misc_RNA (1)...(19): siRNA sense strand
cagugaagacgcugggcau

SEQ ID NO: 2548728 - RNA, 19 nt, Homo sapiens
  misc_RNA (1)...(19): siRNA sense strand
gcccaagaagagugugaau

SEQ ID NO: 2548729 - RNA, 19 nt, Homo sapiens
  misc_RNA (1)...(19): siRNA sense strand
agaagagugugaauggaga

SEQ ID NO: 2548730 - RNA, 19 nt, Homo sapiens
  misc_RNA (1)...(19): siRNA sense strand
cuggacagguacugggcca

SEQ ID NO: 2548731 - RNA, 19 nt, Homo sapiens
  misc_RNA (1)...(19): siRNA sense strand
acuccaacucucugcuuaa

SEQ ID NO: 2548732 - RNA, 19 nt, Homo sapiens
  misc_RNA (1)...(19): siRNA sense strand
cagcccaagaagaguguga

SEQ ID NO: 2548733 - RNA, 19 nt, Homo sapiens
  misc_RNA (1)...(19): siRNA sense strand
ucaacaaggacuuucaaaa

SEQ ID NO: 2548734 - RNA, 19 nt, Homo sapiens
  misc_RNA (1)...(19): siRNA sense strand
gggcaaaacaccagaacga

SEQ ID NO: 2548735 - RNA, 19 nt, Homo sapiens
  misc_RNA (1)...(19): siRNA sense strand
agauaauacagaaggccuu

SEQ ID NO: 2548736 - RNA, 19 nt, Homo sapiens
  misc_RNA (1)...(19): siRNA sense strand
aacaccagaacgagagaaa

SEQ ID NO: 2548737 - RNA, 19 nt, Homo sapiens
  misc_RNA (1)...(19): siRNA sense strand
caccagaacgagagaaacu

SEQ ID NO: 2548738 - RNA, 19 nt, Homo sapiens
  misc_RNA (1)...(19): siRNA sense strand
agggauggucuguggcuau

SEQ ID NO: 2548739 - RNA, 19 nt, Homo sapiens
  misc_RNA (1)...(19): siRNA sense strand
aguuacaaccauucgaaau

SEQ ID NO: 2548740 - RNA, 19 nt, Homo sapiens
  misc_RNA (1)...(19): siRNA sense strand
gcaaaacaccagaacgaga

SEQ ID NO: 2548741 - RNA, 19 nt, Homo sapiens
  misc_RNA (1)...(19): siRNA sense strand
caggugagcgugaggacca

SEQ ID NO: 2548742 - RNA, 19 nt, Homo sapiens
  misc_RNA (1)...(19): siRNA sense strand
ggucaguagggaagagcaa

SEQ ID NO: 2548743 - RNA, 19 nt, Homo sapiens
  misc_RNA (1)...(19): siRNA sense strand
agacaaagccacuggacga

SEQ ID NO: 2548744 - RNA, 19 nt, Homo sapiens
  misc_RNA (1)...(19): siRNA sense strand
cagaaaggucaguagggaa

SEQ ID NO: 2548745 - RNA, 19 nt, Homo sapiens
  misc_RNA (1)...(19): siRNA sense strand
agaaagagcuccagggccu

SEQ ID NO: 2548746 - RNA, 19 nt, Homo sapiens
  misc_RNA (1)...(19): siRNA sense strand
uugaagaggcugugcacaa

SEQ ID NO: 2548747 - RNA, 19 nt, Homo sapiens
  misc_RNA (1)...(19): siRNA sense strand
cagucaaggcacagggaga

SEQ ID NO: 2548748 - RNA, 19 nt, Homo sapiens
  misc_RNA (1)...(19): siRNA sense strand
aagaagaagggaagaguca

SEQ ID NO: 2548749 - RNA, 19 nt, Homo sapiens
  misc_RNA (1)...(19): siRNA sense strand
gaggugaugugcagggcua

SEQ ID NO: 2548750 - RNA, 19 nt, Homo sapiens
  misc_RNA (1)...(19): siRNA sense strand
gaguccaagcagagaagaa

SEQ ID NO: 2548751 - RNA, 19 nt, Homo sapiens
  misc_RNA (1)...(19): siRNA sense strand
gacagaaagaagaagggaa

SEQ ID NO: 2548752 - RNA, 19 nt, Homo sapiens
  misc_RNA (1)...(19): siRNA sense strand
gguggauguuugagacaca

SEQ ID NO: 2548753 - RNA, 19 nt, Homo sapiens
  misc_RNA (1)...(19): siRNA sense strand
ccacaagaucagugucaca

SEQ ID NO: 2548754 - RNA, 19 nt, Homo sapiens
  misc_RNA (1)...(19): siRNA sense strand
ggacgagcugacagggcaa

SEQ ID NO: 2548755 - RNA, 19 nt, Homo sapiens
  misc_RNA (1)...(19): siRNA sense strand
ggggaaagacagacagaca

SEQ ID NO: 2548756 - RNA, 19 nt, Homo sapiens
  misc_RNA (1)...(19): siRNA sense strand
gcgccauccaugaggucaa

SEQ ID NO: 2548757 - RNA, 19 nt, Homo sapiens
  misc_RNA (1)...(19): siRNA sense strand
gcaagaaggaagaacagga

SEQ ID NO: 2548758 - RNA, 19 nt, Homo sapiens
  misc_RNA (1)...(19): siRNA sense strand
ccaggaggucggaggucaa

SEQ ID NO: 2548759 - RNA, 19 nt, Homo sapiens
  misc_RNA (1)...(19): siRNA sense strand
ggacugggcuggugaugca

SEQ ID NO: 2548760 - RNA, 19 nt, Homo sapiens
  misc_RNA (1)...(19): siRNA sense strand
gcggagaugugcaggguac

SEQ ID NO: 2548761 - RNA, 19 nt, Homo sapiens
  misc_RNA (1)...(19): siRNA sense strand
cuggagggucacagacaaa

SEQ ID NO: 2548762 - RNA, 19 nt, Homo sapiens
  misc_RNA (1)...(19): siRNA sense strand
cccagagggaugagcuaaa

SEQ ID NO: 2548763 - RNA, 19 nt, Homo sapiens
  misc_RNA (1)...(19): siRNA sense strand
cuggaugcuuucagagaca

SEQ ID NO: 2548764 - RNA, 19 nt, Homo sapiens
  misc_RNA (1)...(19): siRNA sense strand
acagaaagaagaagggaag

SEQ ID NO: 2548765 - RNA, 19 nt, Homo sapiens
  misc_RNA (1)...(19): siRNA sense strand
cugcauagauaaaggagac

SEQ ID NO: 2548766 - RNA, 19 nt, Homo sapiens
  misc_RNA (1)...(19): siRNA sense strand
aagcagagaagaaggaacu

SEQ ID NO: 2548767 - RNA, 19 nt, Homo sapiens
  misc_RNA (1)...(19): siRNA sense strand
gugcagggcuacaggugga

SEQ ID NO: 2548768 - RNA, 19 nt, Homo sapiens
  misc_RNA (1)...(19): siRNA sense strand
acacagaaaagcaggaaga

SEQ ID NO: 2548769 - RNA, 19 nt, Homo sapiens
  misc_RNA (1)...(19): siRNA sense strand
caacauggccucagcacca

SEQ ID NO: 2548770 - RNA, 19 nt, Homo sapiens
  misc_RNA (1)...(19): siRNA sense strand
ggacgaagaggcuggagca

SEQ ID NO: 2548771 - RNA, 19 nt, Homo sapiens
  misc_RNA (1)...(19): siRNA sense strand
aaggaagccucuagagacu

SEQ ID NO: 2548772 - RNA, 19 nt, Homo sapiens
  misc_RNA (1)...(19): siRNA sense strand
gcacagaccaggagccaac

SEQ ID NO: 2548773 - RNA, 19 nt, Homo sapiens
  misc_RNA (1)...(19): siRNA sense strand
ccaaggaacuggaggccac

SEQ ID NO: 2548774 - RNA, 19 nt, Homo sapiens
  misc_RNA (1)...(19): siRNA sense strand
ggccagcugcauagauaaa

SEQ ID NO: 2548775 - RNA, 19 nt, Homo sapiens
  misc_RNA (1)...(19): siRNA sense strand
aggcagagccacccaggaa

SEQ ID NO: 2548776 - RNA, 19 nt, Homo sapiens
  misc_RNA (1)...(19): siRNA sense strand
ugguagaugagaaggacuu

SEQ ID NO: 2548777 - RNA, 19 nt, Homo sapiens
  misc_RNA (1)...(19): siRNA sense strand
gcggauggcaacagcugaa

SEQ ID NO: 2548778 - RNA, 19 nt, Homo sapiens
  misc_RNA (1)...(19): siRNA sense strand
ccaugagaaccgugacuga

SEQ ID NO: 2548779 - RNA, 19 nt, Homo sapiens
  misc_RNA (1)...(19): siRNA sense strand
aguaugaggagguggacca

SEQ ID NO: 2548780 - RNA, 19 nt, Homo sapiens
  misc_RNA (1)...(19): siRNA sense strand
uccaggagcugaaggguga

SEQ ID NO: 2548781 - RNA, 19 nt, Homo sapiens
  misc_RNA (1)...(19): siRNA sense strand
aggcaggcaagaaggaaga

SEQ ID NO: 2548782 - RNA, 19 nt, Homo sapiens
  misc_RNA (1)...(19): siRNA sense strand
cagggaaggcgauggcaga

SEQ ID NO: 2548783 - RNA, 19 nt, Homo sapiens
  misc_RNA (1)...(19): siRNA sense strand
ugacagaagcugagacggu

SEQ ID NO: 2548784 - RNA, 19 nt, Homo sapiens
  misc_RNA (1)...(19): siRNA sense strand
gcuggaucuuugagacaca

SEQ ID NO: 2548785 - RNA, 19 nt, Homo sapiens
  misc_RNA (1)...(19): siRNA sense strand
caggcaagaaggaagaaca

SEQ ID NO: 2548786 - RNA, 19 nt, Homo sapiens
  misc_RNA (1)...(19): siRNA sense strand
ugcaaagaaaccagaaaga

SEQ ID NO: 2548787 - RNA, 19 nt, Homo sapiens
  misc_RNA (1)...(19): siRNA sense strand
gguccaagugggucaccua

SEQ ID NO: 2548788 - RNA, 19 nt, Homo sapiens
  misc_RNA (1)...(19): siRNA sense strand
gggagcagcaggaacgaca

SEQ ID NO: 2548789 - RNA, 19 nt, Homo sapiens
  misc_RNA (1)...(19): siRNA sense strand
ugacaauucaggauggcau

SEQ ID NO: 2548790 - RNA, 19 nt, Homo sapiens
  misc_RNA (1)...(19): siRNA sense strand
cagagauccaggagcugaa

SEQ ID NO: 2548791 - RNA, 19 nt, Homo sapiens
  misc_RNA (1)...(19): siRNA sense strand
uggaagacggccugugaga

SEQ ID NO: 2548792 - RNA, 19 nt, Homo sapiens
  misc_RNA (1)...(19): siRNA sense strand
uggugaugcaggagacaga

SEQ ID NO: 2548793 - RNA, 19 nt, Homo sapiens
  misc_RNA (1)...(19): siRNA sense strand
aagccaagguugaaugcca

SEQ ID NO: 2548794 - RNA, 19 nt, Homo sapiens
  misc_RNA (1)...(19): siRNA sense strand
cgaagaggcuggagcagag

SEQ ID NO: 2548795 - RNA, 19 nt, Homo sapiens
  misc_RNA (1)...(19): siRNA sense strand
ggggcaaccuccuggaaga

SEQ ID NO: 2548796 - RNA, 19 nt, Homo sapiens
  misc_RNA (1)...(19): siRNA sense strand
agucaagucaagaucagaa

SEQ ID NO: 2548797 - RNA, 19 nt, Homo sapiens
  misc_RNA (1)...(19): siRNA sense strand
ggaagaaggacaucaccca

SEQ ID NO: 2548798 - RNA, 19 nt, Homo sapiens
  misc_RNA (1)...(19): siRNA sense strand
aggaaguggucccugguga

SEQ ID NO: 2548799 - RNA, 19 nt, Homo sapiens
  misc_RNA (1)...(19): siRNA sense strand
aagggaagagucagggaga

SEQ ID NO: 2548800 - RNA, 19 nt, Homo sapiens
  misc_RNA (1)...(19): siRNA sense strand
uugcucaacugaaggaaca

SEQ ID NO: 2548801 - RNA, 19 nt, Homo sapiens
  misc_RNA (1)...(19): siRNA sense strand
cagucaagaaccaagccaa

SEQ ID NO: 2548802 - RNA, 19 nt, Homo sapiens
  misc_RNA (1)...(19): siRNA sense strand
acuggaugccauuggagaa

SEQ ID NO: 2548803 - RNA, 19 nt, Homo sapiens
  misc_RNA (1)...(19): siRNA sense strand
ggaaguggucccuggugau

SEQ ID NO: 2548804 - RNA, 19 nt, Homo sapiens
  misc_RNA (1)...(19): siRNA sense strand
agaaaggucaguagggaag

SEQ ID NO: 2548805 - RNA, 19 nt, Homo sapiens
  misc_RNA (1)...(19): siRNA sense strand
ccucaguggagcaggccuu

SEQ ID NO: 2548806 - RNA, 19 nt, Homo sapiens
  misc_RNA (1)...(19): siRNA sense strand
aaagacagacagacagaca

SEQ ID NO: 2548807 - RNA, 19 nt, Homo sapiens
  misc_RNA (1)...(19): siRNA sense strand
caaagaaaccagaaagagc

SEQ ID NO: 2548808 - RNA, 19 nt, Homo sapiens
  misc_RNA (1)...(19): siRNA sense strand
ccaugggaguccaagcaga

SEQ ID NO: 2548809 - RNA, 19 nt, Homo sapiens
  misc_RNA (1)...(19): siRNA sense strand
ggcaacaggaugcaagaga

SEQ ID NO: 2548810 - RNA, 19 nt, Homo sapiens
  misc_RNA (1)...(19): siRNA sense strand
ggacagaaagggauggcag

SEQ ID NO: 2548811 - RNA, 19 nt, Homo sapiens
  misc_RNA (1)...(19): siRNA sense strand
ccuccaagcugcagagacc

SEQ ID NO: 2548812 - RNA, 19 nt, Homo sapiens
  misc_RNA (1)...(19): siRNA sense strand
acgugaaugccguggacaa

SEQ ID NO: 2548813 - RNA, 19 nt, Homo sapiens
  misc_RNA (1)...(19): siRNA sense strand
ucaaagacaaggaggggaa

SEQ ID NO: 2548814 - RNA, 19 nt, Homo sapiens
  misc_RNA (1)...(19): siRNA sense strand
gagcaacaguggacaggca

SEQ ID NO: 2548815 - RNA, 19 nt, Homo sapiens
  misc_RNA (1)...(19): siRNA sense strand
aguggaagaagcuggcaua

SEQ ID NO: 2548816 - RNA, 19 nt, Homo sapiens
  misc_RNA (1)...(19): siRNA sense strand
gggaguucacggaggcaca

SEQ ID NO: 2548817 - RNA, 19 nt, Homo sapiens
  misc_RNA (1)...(19): siRNA sense strand
ucauaaaagcugaucguuu

SEQ ID NO: 2548818 - RNA, 19 nt, Homo sapiens
  misc_RNA (1)...(19): siRNA sense strand
acagaugggagaaggacca

SEQ ID NO: 2548819 - RNA, 19 nt, Homo sapiens
  misc_RNA (1)...(19): siRNA sense strand
cguucauaauggaggaccu

SEQ ID NO: 2548820 - RNA, 19 nt, Homo sapiens
  misc_RNA (1)...(19): siRNA sense strand
agauccacugugagagcaa

SEQ ID NO: 2548821 - RNA, 19 nt, Homo sapiens
  misc_RNA (1)...(19): siRNA sense strand
cgagaaacuccgugcagca

SEQ ID NO: 2548822 - RNA, 19 nt, Homo sapiens
  misc_RNA (1)...(19): siRNA sense strand
ugggagaaagcguggauca

SEQ ID NO: 2548823 - RNA, 19 nt, Homo sapiens
  misc_RNA (1)...(19): siRNA sense strand
acgacuagcaguugacaca

SEQ ID NO: 2548824 - RNA, 19 nt, Homo sapiens
  misc_RNA (1)...(19): siRNA sense strand
ggcgaaagagccaacggaa

SEQ ID NO: 2548825 - RNA, 19 nt, Homo sapiens
  misc_RNA (1)...(19): siRNA sense strand
gcguuaucgaugaggaaau

SEQ ID NO: 2548826 - RNA, 19 nt, Homo sapiens
  misc_RNA (1)...(19): siRNA sense strand
aguccaggcugcagaaaau

SEQ ID NO: 2548827 - RNA, 19 nt, Homo sapiens
  misc_RNA (1)...(19): siRNA sense strand
agaacuucgcgcuggacaa

SEQ ID NO: 2548828 - RNA, 19 nt, Homo sapiens
  misc_RNA (1)...(19): siRNA sense strand
gaugaggaaaucaagaaaa

SEQ ID NO: 2548829 - RNA, 19 nt, Homo sapiens
  misc_RNA (1)...(19): siRNA sense strand
acgcgaagaagaagggcga

SEQ ID NO: 2548830 - RNA, 19 nt, Homo sapiens
  misc_RNA (1)...(19): siRNA sense strand
ucguggacgcgaagaagaa

SEQ ID NO: 2548831 - RNA, 19 nt, Homo sapiens
  misc_RNA (1)...(19): siRNA sense strand
uggcgaaggaguggaguuu

SEQ ID NO: 2548832 - RNA, 19 nt, Homo sapiens
  misc_RNA (1)...(19): siRNA sense strand
guguaguaaguguaagaaa

SEQ ID NO: 2548833 - RNA, 19 nt, Homo sapiens
  misc_RNA (1)...(19): siRNA sense strand
acuacacauacgagagaaa

SEQ ID NO: 2548834 - RNA, 19 nt, Homo sapiens
  misc_RNA (1)...(19): siRNA sense strand
augcaaggaauguggaaaa

SEQ ID NO: 2548835 - RNA, 19 nt, Homo sapiens
  misc_RNA (1)...(19): siRNA sense strand
ccguaugaauguaaggagu

SEQ ID NO: 2548836 - RNA, 19 nt, Homo sapiens
  misc_RNA (1)...(19): siRNA sense strand
aaugcaaggaauuuggaaa

SEQ ID NO: 2548837 - RNA, 19 nt, Homo sapiens
  misc_RNA (1)...(19): siRNA sense strand
cugauugaacauuggagaa

SEQ ID NO: 2548838 - RNA, 19 nt, Homo sapiens
  misc_RNA (1)...(19): siRNA sense strand
uuauagaucaccagcgaau

SEQ ID NO: 2548839 - RNA, 19 nt, Homo sapiens
  misc_RNA (1)...(19): siRNA sense strand
auguaaggaguguggaaga

SEQ ID NO: 2548840 - RNA, 19 nt, Homo sapiens
  misc_RNA (1)...(19): siRNA sense strand
cccuaugaaugcaaggaau

SEQ ID NO: 2548841 - RNA, 19 nt, Homo sapiens
  misc_RNA (1)...(19): siRNA sense strand
gggaaguccuuuagcugca

SEQ ID NO: 2548842 - RNA, 19 nt, Homo sapiens
  misc_RNA (1)...(19): siRNA sense strand
caauguaaggacugcaaaa

SEQ ID NO: 2548843 - RNA, 19 nt, Homo sapiens
  misc_RNA (1)...(19): siRNA sense strand
acucauaagagaacacaca

SEQ ID NO: 2548844 - RNA, 19 nt, Homo sapiens
  misc_RNA (1)...(19): siRNA sense strand
acucauaagagaacacaca

SEQ ID NO: 2548845 - RNA, 19 nt, Homo sapiens
  misc_RNA (1)...(19): siRNA sense strand
ccauaucaauguaaggacu

SEQ ID NO: 2548846 - RNA, 19 nt, Homo sapiens
  misc_RNA (1)...(19): siRNA sense strand
cguauaaaugcaaggaaug

SEQ ID NO: 2548847 - RNA, 19 nt, Homo sapiens
  misc_RNA (1)...(19): siRNA sense strand
cgaauucauaguggagaaa

SEQ ID NO: 2548848 - RNA, 19 nt, Homo sapiens
  misc_RNA (1)...(19): siRNA sense strand
ugauugaacauuggagaau

SEQ ID NO: 2548849 - RNA, 19 nt, Homo sapiens
  misc_RNA (1)...(19): siRNA sense strand
agaacacacaguggagaaa

SEQ ID NO: 2548850 - RNA, 19 nt, Homo sapiens
  misc_RNA (1)...(19): siRNA sense strand
cccuaugaguguaguaagu

SEQ ID NO: 2548851 - RNA, 19 nt, Homo sapiens
  misc_RNA (1)...(19): siRNA sense strand
gaacaugcccagagccaga

SEQ ID NO: 2548852 - RNA, 19 nt, Homo sapiens
  misc_RNA (1)...(19): siRNA sense strand
ccucauggcgugugcguga

SEQ ID NO: 2548853 - RNA, 19 nt, Homo sapiens
  misc_RNA (1)...(19): siRNA sense strand
gaaggcaggucgugggugu

SEQ ID NO: 2548854 - RNA, 19 nt, Homo sapiens
  misc_RNA (1)...(19): siRNA sense strand
uggaugaugcccaggaaca

SEQ ID NO: 2548855 - RNA, 19 nt, Homo sapiens
  misc_RNA (1)...(19): siRNA sense strand
aggaacaugcccagagcca

SEQ ID NO: 2548856 - RNA, 19 nt, Homo sapiens
  misc_RNA (1)...(19): siRNA sense strand
cuauguugguugugaacgu

SEQ ID NO: 2548857 - RNA, 19 nt, Homo sapiens
  misc_RNA (1)...(19): siRNA sense strand
agggaauaguugaaguaaa

SEQ ID NO: 2548858 - RNA, 19 nt, Homo sapiens
  misc_RNA (1)...(19): siRNA sense strand
gggaggaaagcgagcacaa

SEQ ID NO: 2548859 - RNA, 19 nt, Homo sapiens
  misc_RNA (1)...(19): siRNA sense strand
gcacauugucucagagcca

SEQ ID NO: 2548860 - RNA, 19 nt, Homo sapiens
  misc_RNA (1)...(19): siRNA sense strand
ugcagaaagaagacggaua

SEQ ID NO: 2548861 - RNA, 19 nt, Homo sapiens
  misc_RNA (1)...(19): siRNA sense strand
gguuuguuauacacagaaa

SEQ ID NO: 2548862 - RNA, 19 nt, Homo sapiens
  misc_RNA (1)...(19): siRNA sense strand
gcgauaaagucuucugcca

SEQ ID NO: 2548863 - RNA, 19 nt, Homo sapiens
  misc_RNA (1)...(19): siRNA sense strand
aaauacagauucagaggga

SEQ ID NO: 2548864 - RNA, 19 nt, Homo sapiens
  misc_RNA (1)...(19): siRNA sense strand
aagcauggaaauacagauu

SEQ ID NO: 2548865 - RNA, 19 nt, Homo sapiens
  misc_RNA (1)...(19): siRNA sense strand
agagggaauaguugaagua

SEQ ID NO: 2548866 - RNA, 19 nt, Homo sapiens
  misc_RNA (1)...(19): siRNA sense strand
ugugcauugccgaggauua

SEQ ID NO: 2548867 - RNA, 19 nt, Homo sapiens
  misc_RNA (1)...(19): siRNA sense strand
augccaacaaugugacuua

SEQ ID NO: 2548868 - RNA, 19 nt, Homo sapiens
  misc_RNA (1)...(19): siRNA sense strand
caugcacagccgaaggaaa

SEQ ID NO: 2548869 - RNA, 19 nt, Homo sapiens
  misc_RNA (1)...(19): siRNA sense strand
cagaaagaagacggauaaa

SEQ ID NO: 2548870 - RNA, 19 nt, Homo sapiens
  misc_RNA (1)...(19): siRNA sense strand
cggaacaugcacagccgaa

SEQ ID NO: 2548871 - RNA, 19 nt, Homo sapiens
  misc_RNA (1)...(19): siRNA sense strand
ugaugaacuguguuguaaa

SEQ ID NO: 2548872 - RNA, 19 nt, Homo sapiens
  misc_RNA (1)...(19): siRNA sense strand
cgcuuugauugaaaugaaa

SEQ ID NO: 2548873 - RNA, 19 nt, Homo sapiens
  misc_RNA (1)...(19): siRNA sense strand
cuugaagcauggaaauaca

SEQ ID NO: 2548874 - RNA, 19 nt, Homo sapiens
  misc_RNA (1)...(19): siRNA sense strand
auuccaaccuaaugauaca

SEQ ID NO: 2548875 - RNA, 19 nt, Homo sapiens
  misc_RNA (1)...(19): siRNA sense strand
cugccuugaccuuggguuu

SEQ ID NO: 2548876 - RNA, 19 nt, Homo sapiens
  misc_RNA (1)...(19): siRNA sense strand
ggacugcauuacaggggaa

SEQ ID NO: 2548877 - RNA, 19 nt, Homo sapiens
  misc_RNA (1)...(19): siRNA sense strand
aauggaaugugcagguaca

SEQ ID NO: 2548878 - RNA, 19 nt, Homo sapiens
  misc_RNA (1)...(19): siRNA sense strand
guaucagugcccaaagaau

SEQ ID NO: 2548879 - RNA, 19 nt, Homo sapiens
  misc_RNA (1)...(19): siRNA sense strand
gacaauguucauaugcaaa

SEQ ID NO: 2548880 - RNA, 19 nt, Homo sapiens
  misc_RNA (1)...(19): siRNA sense strand
ggaagaugaaguuggcugu

SEQ ID NO: 2548881 - RNA, 19 nt, Homo sapiens
  misc_RNA (1)...(19): siRNA sense strand
acuaucuuguggaguuaaa

SEQ ID NO: 2548882 - RNA, 19 nt, Homo sapiens
  misc_RNA (1)...(19): siRNA sense strand
ggaaacgaauugugggagg

SEQ ID NO: 2548883 - RNA, 19 nt, Homo sapiens
  misc_RNA (1)...(19): siRNA sense strand
acgaauugugggaggaaag

SEQ ID NO: 2548884 - RNA, 19 nt, Homo sapiens
  misc_RNA (1)...(19): siRNA sense strand
aagagaagaacuauggguu

SEQ ID NO: 2548885 - RNA, 19 nt, Homo sapiens
  misc_RNA (1)...(19): siRNA sense strand
ucagugugugaaugggaaa

SEQ ID NO: 2548886 - RNA, 19 nt, Homo sapiens
  misc_RNA (1)...(19): siRNA sense strand
agaaagaagacggauaaaa

SEQ ID NO: 2548887 - RNA, 19 nt, Homo sapiens
  misc_RNA (1)...(19): siRNA sense strand
gauucugacugcugcacau

SEQ ID NO: 2548888 - RNA, 19 nt, Homo sapiens
  misc_RNA (1)...(19): siRNA sense strand
ggauacaccccgaccuuaa

SEQ ID NO: 2548889 - RNA, 19 nt, Homo sapiens
  misc_RNA (1)...(19): siRNA sense strand
ggacaaaggcggaggaccu

SEQ ID NO: 2548890 - RNA, 19 nt, Homo sapiens
  misc_RNA (1)...(19): siRNA sense strand
auacaaagaaagaggucaa

SEQ ID NO: 2548891 - RNA, 19 nt, Homo sapiens
  misc_RNA (1)...(19): siRNA sense strand
gcaagaaauuucaugguga

SEQ ID NO: 2548892 - RNA, 19 nt, Homo sapiens
  misc_RNA (1)...(19): siRNA sense strand
augauaugguccugggaau

SEQ ID NO: 2548893 - RNA, 19 nt, Homo sapiens
  misc_RNA (1)...(19): siRNA sense strand
uggauuacccuaaggacua

SEQ ID NO: 2548894 - RNA, 19 nt, Homo sapiens
  misc_RNA (1)...(19): siRNA sense strand
guaccaaugacguggacuu

SEQ ID NO: 2548895 - RNA, 19 nt, Homo sapiens
  misc_RNA (1)...(19): siRNA sense strand
cuacuguggauuugggaau

SEQ ID NO: 2548896 - RNA, 19 nt, Homo sapiens
  misc_RNA (1)...(19): siRNA sense strand
guuaagcagacuugggaga

SEQ ID NO: 2548897 - RNA, 19 nt, Homo sapiens
  misc_RNA (1)...(19): siRNA sense strand
cagagaagccgucaggaga

SEQ ID NO: 2548898 - RNA, 19 nt, Homo sapiens
  misc_RNA (1)...(19): siRNA sense strand
agaaagaggucaagcaguc

SEQ ID NO: 2548899 - RNA, 19 nt, Homo sapiens
  misc_RNA (1)...(19): siRNA sense strand
aagcauuacaugaugaaga

SEQ ID NO: 2548900 - RNA, 19 nt, Homo sapiens
  misc_RNA (1)...(19): siRNA sense strand
gagaaaagugguauaucaa

SEQ ID NO: 2548901 - RNA, 19 nt, Homo sapiens
  misc_RNA (1)...(19): siRNA sense strand
acagaaugccuauuguuaa

SEQ ID NO: 2548902 - RNA, 19 nt, Homo sapiens
  misc_RNA (1)...(19): siRNA sense strand
ccauaucguuccacaaaca

SEQ ID NO: 2548903 - RNA, 19 nt, Homo sapiens
  misc_RNA (1)...(19): siRNA sense strand
agugguauaucaaggaaaa

SEQ ID NO: 2548904 - RNA, 19 nt, Homo sapiens
  misc_RNA (1)...(19): siRNA sense strand
agagacaagaauacagauu

SEQ ID NO: 2548905 - RNA, 19 nt, Homo sapiens
  misc_RNA (1)...(19): siRNA sense strand
ugggagagcgcuacggcua

SEQ ID NO: 2548906 - RNA, 19 nt, Homo sapiens
  misc_RNA (1)...(19): siRNA sense strand
gcuuuaguggcuugggaau

SEQ ID NO: 2548907 - RNA, 19 nt, Homo sapiens
  misc_RNA (1)...(19): siRNA sense strand
agauagaggucauugugga

SEQ ID NO: 2548908 - RNA, 19 nt, Homo sapiens
  misc_RNA (1)...(19): siRNA sense strand
caguaaaugucgaugcuac

SEQ ID NO: 2548909 - RNA, 19 nt, Homo sapiens
  misc_RNA (1)...(19): siRNA sense strand
acccagugacgaagacaaa

SEQ ID NO: 2548910 - RNA, 19 nt, Homo sapiens
  misc_RNA (1)...(19): siRNA sense strand
gacagaaugccuauuguua

SEQ ID NO: 2548911 - RNA, 19 nt, Homo sapiens
  misc_RNA (1)...(19): siRNA sense strand
aggucauuguggaaagaca

SEQ ID NO: 2548912 - RNA, 19 nt, Homo sapiens
  misc_RNA (1)...(19): siRNA sense strand
ggucauuguggaaagacau

SEQ ID NO: 2548913 - RNA, 19 nt, Homo sapiens
  misc_RNA (1)...(19): siRNA sense strand
aguaaaugucgaugcuaca

SEQ ID NO: 2548914 - RNA, 19 nt, Homo sapiens
  misc_RNA (1)...(19): siRNA sense strand
gaacaucgauccagugaag

SEQ ID NO: 2548915 - RNA, 19 nt, Homo sapiens
  misc_RNA (1)...(19): siRNA sense strand
guggaugaugauacauuaa

SEQ ID NO: 2548916 - RNA, 19 nt, Homo sapiens
  misc_RNA (1)...(19): siRNA sense strand
ggaaugugcuuuaguggcu

SEQ ID NO: 2548917 - RNA, 19 nt, Homo sapiens
  misc_RNA (1)...(19): siRNA sense strand
caggagacacagaaagguu

SEQ ID NO: 2548918 - RNA, 19 nt, Homo sapiens
  misc_RNA (1)...(19): siRNA sense strand
agagagcagagcaguuaaa

SEQ ID NO: 2548919 - RNA, 19 nt, Homo sapiens
  misc_RNA (1)...(19): siRNA sense strand
uuggaaacccucagaagau

SEQ ID NO: 2548920 - RNA, 19 nt, Homo sapiens
  misc_RNA (1)...(19): siRNA sense strand
aagccaggcaggagacaca

SEQ ID NO: 2548921 - RNA, 19 nt, Homo sapiens
  misc_RNA (1)...(19): siRNA sense strand
ugugaagaagagacaagaa

SEQ ID NO: 2548922 - RNA, 19 nt, Homo sapiens
  misc_RNA (1)...(19): siRNA sense strand
cuacaucacgggaggagga

SEQ ID NO: 2548923 - RNA, 19 nt, Homo sapiens
  misc_RNA (1)...(19): siRNA sense strand
aagugguauaucaaggaaa

SEQ ID NO: 2548924 - RNA, 19 nt, Homo sapiens
  misc_RNA (1)...(19): siRNA sense strand
caucacgggaggaggagga

SEQ ID NO: 2548925 - RNA, 19 nt, Homo sapiens
  misc_RNA (1)...(19): siRNA sense strand
aggaaaugacuucaaggaa

SEQ ID NO: 2548926 - RNA, 19 nt, Homo sapiens
  misc_RNA (1)...(19): siRNA sense strand
agaugcuacaagagaacua

SEQ ID NO: 2548927 - RNA, 19 nt, Homo sapiens
  misc_RNA (1)...(19): siRNA sense strand
uuaccaaacuggagcugga

SEQ ID NO: 2548928 - RNA, 19 nt, Homo sapiens
  misc_RNA (1)...(19): siRNA sense strand
ggagaugcuacaagagaac

SEQ ID NO: 2548929 - RNA, 19 nt, Homo sapiens
  misc_RNA (1)...(19): siRNA sense strand
gcaucauggaggagggcgu

SEQ ID NO: 2548930 - RNA, 19 nt, Homo sapiens
  misc_RNA (1)...(19): siRNA sense strand
cuggaagacaauugcauca

SEQ ID NO: 2548931 - RNA, 19 nt, Homo sapiens
  misc_RNA (1)...(19): siRNA sense strand
cuggaucugagcuggaaua

SEQ ID NO: 2548932 - RNA, 19 nt, Homo sapiens
  misc_RNA (1)...(19): siRNA sense strand
ccuggauaucgguggcaau

SEQ ID NO: 2548933 - RNA, 19 nt, Homo sapiens
  misc_RNA (1)...(19): siRNA sense strand
aggcagaagaggagagaaa

SEQ ID NO: 2548934 - RNA, 19 nt, Homo sapiens
  misc_RNA (1)...(19): siRNA sense strand
aaggaaaggauuuggaaua

SEQ ID NO: 2548935 - RNA, 19 nt, Homo sapiens
  misc_RNA (1)...(19): siRNA sense strand
gcuaaggagaugacagaaa

SEQ ID NO: 2548936 - RNA, 19 nt, Homo sapiens
  misc_RNA (1)...(19): siRNA sense strand
caagaauguguuagagaaa

SEQ ID NO: 2548937 - RNA, 19 nt, Homo sapiens
  misc_RNA (1)...(19): siRNA sense strand
gauuauaagccaggagaua

SEQ ID NO: 2548938 - RNA, 19 nt, Homo sapiens
  misc_RNA (1)...(19): siRNA sense strand
acucaagcgucaagaacua

SEQ ID NO: 2548939 - RNA, 19 nt, Homo sapiens
  misc_RNA (1)...(19): siRNA sense strand
agaagaaguuaguagaaga

SEQ ID NO: 2548940 - RNA, 19 nt, Homo sapiens
  misc_RNA (1)...(19): siRNA sense strand
ugacagaaacuauggagaa

SEQ ID NO: 2548941 - RNA, 19 nt, Homo sapiens
  misc_RNA (1)...(19): siRNA sense strand
aggccaauguggaggaaaa

SEQ ID NO: 2548942 - RNA, 19 nt, Homo sapiens
  misc_RNA (1)...(19): siRNA sense strand
ggaagaagaaagaccacaa

SEQ ID NO: 2548943 - RNA, 19 nt, Homo sapiens
  misc_RNA (1)...(19): siRNA sense strand
gcucaaagauuauaagcca

SEQ ID NO: 2548944 - RNA, 19 nt, Homo sapiens
  misc_RNA (1)...(19): siRNA sense strand
ccacaauacuuuuggaaga

SEQ ID NO: 2548945 - RNA, 19 nt, Homo sapiens
  misc_RNA (1)...(19): siRNA sense strand
agagaaauccagaguggua

SEQ ID NO: 2548946 - RNA, 19 nt, Homo sapiens
  misc_RNA (1)...(19): siRNA sense strand
gcaaaguugaugagcagaa

SEQ ID NO: 2548947 - RNA, 19 nt, Homo sapiens
  misc_RNA (1)...(19): siRNA sense strand
gcagcaaggccaaggaaga

SEQ ID NO: 2548948 - RNA, 19 nt, Homo sapiens
  misc_RNA (1)...(19): siRNA sense strand
gugaaauagcacaagcaua

SEQ ID NO: 2548949 - RNA, 19 nt, Homo sapiens
  misc_RNA (1)...(19): siRNA sense strand
ccacagagacauacaucaa

SEQ ID NO: 2548950 - RNA, 19 nt, Homo sapiens
  misc_RNA (1)...(19): siRNA sense strand
ucacagagcuggagcagga

SEQ ID NO: 2548951 - RNA, 19 nt, Homo sapiens
  misc_RNA (1)...(19): siRNA sense strand
gccugaaggaggagaacaa

SEQ ID NO: 2548952 - RNA, 19 nt, Homo sapiens
  misc_RNA (1)...(19): siRNA sense strand
caucguaaguggagagucu

SEQ ID NO: 2548953 - RNA, 19 nt, Homo sapiens
  misc_RNA (1)...(19): siRNA sense strand
gcaucggcauggagaacaa

SEQ ID NO: 2548954 - RNA, 19 nt, Homo sapiens
  misc_RNA (1)...(19): siRNA sense strand
acaaauuagaggugcagaa

SEQ ID NO: 2548955 - RNA, 19 nt, Homo sapiens
  misc_RNA (1)...(19): siRNA sense strand
cuuacgaaauccugacaua

SEQ ID NO: 2548956 - RNA, 19 nt, Homo sapiens
  misc_RNA (1)...(19): siRNA sense strand
cuaaguaugccaugcgaua

SEQ ID NO: 2548957 - RNA, 19 nt, Homo sapiens
  misc_RNA (1)...(19): siRNA sense strand
aggaugagcuggaccgcaa

SEQ ID NO: 2548958 - RNA, 19 nt, Homo sapiens
  misc_RNA (1)...(19): siRNA sense strand
gcgucaagaacuagaauca

SEQ ID NO: 2548959 - RNA, 19 nt, Homo sapiens
  misc_RNA (1)...(19): siRNA sense strand
gagcaaacucguucagaga

SEQ ID NO: 2548960 - RNA, 19 nt, Homo sapiens
  misc_RNA (1)...(19): siRNA sense strand
agaaggaggaugagcaaaa

SEQ ID NO: 2548961 - RNA, 19 nt, Homo sapiens
  misc_RNA (1)...(19): siRNA sense strand
uggccaagcgugagcuaaa

SEQ ID NO: 2548962 - RNA, 19 nt, Homo sapiens
  misc_RNA (1)...(19): siRNA sense strand
gcgcaaaguugaugagcag

SEQ ID NO: 2548963 - RNA, 19 nt, Homo sapiens
  misc_RNA (1)...(19): siRNA sense strand
aauuggagcaagaagaaua

SEQ ID NO: 2548964 - RNA, 19 nt, Homo sapiens
  misc_RNA (1)...(19): siRNA sense strand
agaaacugauacuggacaa

SEQ ID NO: 2548965 - RNA, 19 nt, Homo sapiens
  misc_RNA (1)...(19): siRNA sense strand
agaagaaagaccacaaauu

SEQ ID NO: 2548966 - RNA, 19 nt, Homo sapiens
  misc_RNA (1)...(19): siRNA sense strand
ugaucaagcagguggucaa

SEQ ID NO: 2548967 - RNA, 19 nt, Homo sapiens
  misc_RNA (1)...(19): siRNA sense strand
gcuaggaauuagugaaucu

SEQ ID NO: 2548968 - RNA, 19 nt, Homo sapiens
  misc_RNA (1)...(19): siRNA sense strand
ggccaaagagcacaagaaa

SEQ ID NO: 2548969 - RNA, 19 nt, Homo sapiens
  misc_RNA (1)...(19): siRNA sense strand
ccaucaccaugcagagaua

SEQ ID NO: 2548970 - RNA, 19 nt, Homo sapiens
  misc_RNA (1)...(19): siRNA sense strand
guuaguagaagaaacgaaa

SEQ ID NO: 2548971 - RNA, 19 nt, Homo sapiens
  misc_RNA (1)...(19): siRNA sense strand
caagaaggaggaugagcaa

SEQ ID NO: 2548972 - RNA, 19 nt, Homo sapiens
  misc_RNA (1)...(19): siRNA sense strand
aagugaagaggaagcgaaa

SEQ ID NO: 2548973 - RNA, 19 nt, Homo sapiens
  misc_RNA (1)...(19): siRNA sense strand
cuauaaaucccuaugaaca

SEQ ID NO: 2548974 - RNA, 19 nt, Homo sapiens
  misc_RNA (1)...(19): siRNA sense strand
aauacaagaaggaggauga

SEQ ID NO: 2548975 - RNA, 19 nt, Homo sapiens
  misc_RNA (1)...(19): siRNA sense strand
gcagaagaggagagaaacu

SEQ ID NO: 2548976 - RNA, 19 nt, Homo sapiens
  misc_RNA (1)...(19): siRNA sense strand
gcugagugacagaaagcaa

SEQ ID NO: 2548977 - RNA, 19 nt, Homo sapiens
  misc_RNA (1)...(19): siRNA sense strand
ggccaaggaagaagaaaga

SEQ ID NO: 2548978 - RNA, 19 nt, Homo sapiens
  misc_RNA (1)...(19): siRNA sense strand
gcugguuuaugaaggguua

SEQ ID NO: 2548979 - RNA, 19 nt, Homo sapiens
  misc_RNA (1)...(19): siRNA sense strand
ugggaaguauauugagauu

SEQ ID NO: 2548980 - RNA, 19 nt, Homo sapiens
  misc_RNA (1)...(19): siRNA sense strand
ggaugauggccaagcguga

SEQ ID NO: 2548981 - RNA, 19 nt, Homo sapiens
  misc_RNA (1)...(19): siRNA sense strand
cuuagaacgucuucaacua

SEQ ID NO: 2548982 - RNA, 19 nt, Homo sapiens
  misc_RNA (1)...(19): siRNA sense strand
gugaagaggaagcgaaagu

SEQ ID NO: 2548983 - RNA, 19 nt, Homo sapiens
  misc_RNA (1)...(19): siRNA sense strand
gauacaaacaagaaacaga

SEQ ID NO: 2548984 - RNA, 19 nt, Homo sapiens
  misc_RNA (1)...(19): siRNA sense strand
gaaacaguacaguggagaa

SEQ ID NO: 2548985 - RNA, 19 nt, Homo sapiens
  misc_RNA (1)...(19): siRNA sense strand
ccggaaagaccuggagcaa

SEQ ID NO: 2548986 - RNA, 19 nt, Homo sapiens
  misc_RNA (1)...(19): siRNA sense strand
agauaaaggugaaauagca

SEQ ID NO: 2548987 - RNA, 19 nt, Homo sapiens
  misc_RNA (1)...(19): siRNA sense strand
gauuaggaaaugcagauaa

SEQ ID NO: 2548988 - RNA, 19 nt, Homo sapiens
  misc_RNA (1)...(19): siRNA sense strand
cggaaagaccuggagcaaa

SEQ ID NO: 2548989 - RNA, 19 nt, Homo sapiens
  misc_RNA (1)...(19): siRNA sense strand
uugcagaaauggaagacau

SEQ ID NO: 2548990 - RNA, 19 nt, Homo sapiens
  misc_RNA (1)...(19): siRNA sense strand
agacauacaucaagcccau

SEQ ID NO: 2548991 - RNA, 19 nt, Homo sapiens
  misc_RNA (1)...(19): siRNA sense strand
augaugaccucaaggaaga

SEQ ID NO: 2548992 - RNA, 19 nt, Homo sapiens
  misc_RNA (1)...(19): siRNA sense strand
gaagaauggcugcgugaca

SEQ ID NO: 2548993 - RNA, 19 nt, Homo sapiens
  misc_RNA (1)...(19): siRNA sense strand
ccaaacacaucuaugccaa

SEQ ID NO: 2548994 - RNA, 19 nt, Homo sapiens
  misc_RNA (1)...(19): siRNA sense strand
aggaacaugcagaucgaua

SEQ ID NO: 2548995 - RNA, 19 nt, Homo sapiens
  misc_RNA (1)...(19): siRNA sense strand
augaugaaaggcugagaua

SEQ ID NO: 2548996 - RNA, 19 nt, Homo sapiens
  misc_RNA (1)...(19): siRNA sense strand
augcaaaggagauggcaca

SEQ ID NO: 2548997 - RNA, 19 nt, Homo sapiens
  misc_RNA (1)...(19): siRNA sense strand
uugaagaaucagagaaaga

SEQ ID NO: 2548998 - RNA, 19 nt, Homo sapiens
  misc_RNA (1)...(19): siRNA sense strand
cagagaaagaagaccuaaa

SEQ ID NO: 2548999 - RNA, 19 nt, Homo sapiens
  misc_RNA (1)...(19): siRNA sense strand
ggaguaaaucagugugaca

SEQ ID NO: 2549000 - RNA, 19 nt, Homo sapiens
  misc_RNA (1)...(19): siRNA sense strand
ugauaugcuaacugagaaa

SEQ ID NO: 2549001 - RNA, 19 nt, Homo sapiens
  misc_RNA (1)...(19): siRNA sense strand
ccauaagagcuauuaggaa

SEQ ID NO: 2549002 - RNA, 19 nt, Homo sapiens
  misc_RNA (1)...(19): siRNA sense strand
ccuucugggccaugaaaua

SEQ ID NO: 2549003 - RNA, 19 nt, Homo sapiens
  misc_RNA (1)...(19): siRNA sense strand
cugucuaacuggagaaaau

SEQ ID NO: 2549004 - RNA, 19 nt, Homo sapiens
  misc_RNA (1)...(19): siRNA sense strand
gcagaaaauuggaggccga

SEQ ID NO: 2549005 - RNA, 19 nt, Homo sapiens
  misc_RNA (1)...(19): siRNA sense strand
cugagaaagaugcccgaua

SEQ ID NO: 2549006 - RNA, 19 nt, Homo sapiens
  misc_RNA (1)...(19): siRNA sense strand
aggcaggggcauaaggaaa

SEQ ID NO: 2549007 - RNA, 19 nt, Homo sapiens
  misc_RNA (1)...(19): siRNA sense strand
ccuaaauaucacgaagaaa

SEQ ID NO: 2549008 - RNA, 19 nt, Homo sapiens
  misc_RNA (1)...(19): siRNA sense strand
gccauuuguccucgagaua

SEQ ID NO: 2549009 - RNA, 19 nt, Homo sapiens
  misc_RNA (1)...(19): siRNA sense strand
uaaauaaguaucagggacu

SEQ ID NO: 2549010 - RNA, 19 nt, Homo sapiens
  misc_RNA (1)...(19): siRNA sense strand
uaucagggacugggaguaa

SEQ ID NO: 2549011 - RNA, 19 nt, Homo sapiens
  misc_RNA (1)...(19): siRNA sense strand
guaccaaaaguaaggaaau

SEQ ID NO: 2549012 - RNA, 19 nt, Homo sapiens
  misc_RNA (1)...(19): siRNA sense strand
accuaaauaucacgaagaa

SEQ ID NO: 2549013 - RNA, 19 nt, Homo sapiens
  misc_RNA (1)...(19): siRNA sense strand
ggaaaugguggcaggcacu

SEQ ID NO: 2549014 - RNA, 19 nt, Homo sapiens
  misc_RNA (1)...(19): siRNA sense strand
guaaauaaguaucagggac

SEQ ID NO: 2549015 - RNA, 19 nt, Homo sapiens
  misc_RNA (1)...(19): siRNA sense strand
ucacgaagaaacagaaaau

SEQ ID NO: 2549016 - RNA, 19 nt, Homo sapiens
  misc_RNA (1)...(19): siRNA sense strand
ggguuauucaugugguuga

SEQ ID NO: 2549017 - RNA, 19 nt, Homo sapiens
  misc_RNA (1)...(19): siRNA sense strand
gggccaugaaauagcacau

SEQ ID NO: 2549018 - RNA, 19 nt, Homo sapiens
  misc_RNA (1)...(19): siRNA sense strand
gaguacuuggauagacuua

SEQ ID NO: 2549019 - RNA, 19 nt, Homo sapiens
  misc_RNA (1)...(19): siRNA sense strand
gaagaauaaauggaagcua

SEQ ID NO: 2549020 - RNA, 19 nt, Homo sapiens
  misc_RNA (1)...(19): siRNA sense strand
uaaagauguuccagggauc

SEQ ID NO: 2549021 - RNA, 19 nt, Homo sapiens
  misc_RNA (1)...(19): siRNA sense strand
ccaagaugccagaaugguu

SEQ ID NO: 2549022 - RNA, 19 nt, Homo sapiens
  misc_RNA (1)...(19): siRNA sense strand
aguaaggaaauuuggagga

SEQ ID NO: 2549023 - RNA, 19 nt, Homo sapiens
  misc_RNA (1)...(19): siRNA sense strand
ggaacuggaauaugaagca

SEQ ID NO: 2549024 - RNA, 19 nt, Homo sapiens
  misc_RNA (1)...(19): siRNA sense strand
agacauaagagccaguuca

SEQ ID NO: 2549025 - RNA, 19 nt, Homo sapiens
  misc_RNA (1)...(19): siRNA sense strand
cagugugacagguggaguu

SEQ ID NO: 2549026 - RNA, 19 nt, Homo sapiens
  misc_RNA (1)...(19): siRNA sense strand
cuaacaagaaggaaguagu

SEQ ID NO: 2549027 - RNA, 19 nt, Homo sapiens
  misc_RNA (1)...(19): siRNA sense strand
guucagacuuuuaucggaa

SEQ ID NO: 2549028 - RNA, 19 nt, Homo sapiens
  misc_RNA (1)...(19): siRNA sense strand
agaccauacagcagaaaau

SEQ ID NO: 2549029 - RNA, 19 nt, Homo sapiens
  misc_RNA (1)...(19): siRNA sense strand
aagaaucagagaaagaaga

SEQ ID NO: 2549030 - RNA, 19 nt, Homo sapiens
  misc_RNA (1)...(19): siRNA sense strand
ggagacagcucuugcccuu

SEQ ID NO: 2549031 - RNA, 19 nt, Homo sapiens
  misc_RNA (1)...(19): siRNA sense strand
ggaauaugacagaucacca

SEQ ID NO: 2549032 - RNA, 19 nt, Homo sapiens
  misc_RNA (1)...(19): siRNA sense strand
cugaaaugauguuuggaga

SEQ ID NO: 2549033 - RNA, 19 nt, Homo sapiens
  misc_RNA (1)...(19): siRNA sense strand
cguuaagauguguaaacaa

SEQ ID NO: 2549034 - RNA, 19 nt, Homo sapiens
  misc_RNA (1)...(19): siRNA sense strand
acaacagauuauaagggaa

SEQ ID NO: 2549035 - RNA, 19 nt, Homo sapiens
  misc_RNA (1)...(19): siRNA sense strand
acuccaaagagguuauuaa

SEQ ID NO: 2549036 - RNA, 19 nt, Homo sapiens
  misc_RNA (1)...(19): siRNA sense strand
aagccagagaacagauuaa

SEQ ID NO: 2549037 - RNA, 19 nt, Homo sapiens
  misc_RNA (1)...(19): siRNA sense strand
caacagauuauaagggaac

SEQ ID NO: 2549038 - RNA, 19 nt, Homo sapiens
  misc_RNA (1)...(19): siRNA sense strand
cagaaugaaugacacgaga

SEQ ID NO: 2549039 - RNA, 19 nt, Homo sapiens
  misc_RNA (1)...(19): siRNA sense strand
gagaauauacgucacgaga

SEQ ID NO: 2549040 - RNA, 19 nt, Homo sapiens
  misc_RNA (1)...(19): siRNA sense strand
uaaacaacuaccaaggaau

SEQ ID NO: 2549041 - RNA, 19 nt, Homo sapiens
  misc_RNA (1)...(19): siRNA sense strand
aaagcaggacggaggguga

SEQ ID NO: 2549042 - RNA, 19 nt, Homo sapiens
  misc_RNA (1)...(19): siRNA sense strand
agaccuacauguuacgaga

SEQ ID NO: 2549043 - RNA, 19 nt, Homo sapiens
  misc_RNA (1)...(19): siRNA sense strand
ccuacauguuacgagaaua

SEQ ID NO: 2549044 - RNA, 19 nt, Homo sapiens
  misc_RNA (1)...(19): siRNA sense strand
ccaucaaguacuacagcga

SEQ ID NO: 2549045 - RNA, 19 nt, Homo sapiens
  misc_RNA (1)...(19): siRNA sense strand
ggaaaggaaaggagggaga

SEQ ID NO: 2549046 - RNA, 19 nt, Homo sapiens
  misc_RNA (1)...(19): siRNA sense strand
aggcagacaagaagggaaa

SEQ ID NO: 2549047 - RNA, 19 nt, Homo sapiens
  misc_RNA (1)...(19): siRNA sense strand
ggaaguagcugaagccaca

SEQ ID NO: 2549048 - RNA, 19 nt, Homo sapiens
  misc_RNA (1)...(19): siRNA sense strand
gugaaugcuaugaggcaaa

SEQ ID NO: 2549049 - RNA, 19 nt, Homo sapiens
  misc_RNA (1)...(19): siRNA sense strand
ugguauaacuuuaguggau

SEQ ID NO: 2549050 - RNA, 19 nt, Homo sapiens
  misc_RNA (1)...(19): siRNA sense strand
agucagaaucccaguacaa

SEQ ID NO: 2549051 - RNA, 19 nt, Homo sapiens
  misc_RNA (1)...(19): siRNA sense strand
aauaauggacacugguaua

SEQ ID NO: 2549052 - RNA, 19 nt, Homo sapiens
  misc_RNA (1)...(19): siRNA sense strand
aaacaaaguaucacagaca

SEQ ID NO: 2549053 - RNA, 19 nt, Homo sapiens
  misc_RNA (1)...(19): siRNA sense strand
aaguaaggguacagcaaca

SEQ ID NO: 2549054 - RNA, 19 nt, Homo sapiens
  misc_RNA (1)...(19): siRNA sense strand
aagaaagcccggaaaggaa

SEQ ID NO: 2549055 - RNA, 19 nt, Homo sapiens
  misc_RNA (1)...(19): siRNA sense strand
gccaaauaaggcagugaaa

SEQ ID NO: 2549056 - RNA, 19 nt, Homo sapiens
  misc_RNA (1)...(19): siRNA sense strand
cuaagauagggaaaggaaa

SEQ ID NO: 2549057 - RNA, 19 nt, Homo sapiens
  misc_RNA (1)...(19): siRNA sense strand
ccaucaaagaccauaacaa

SEQ ID NO: 2549058 - RNA, 19 nt, Homo sapiens
  misc_RNA (1)...(19): siRNA sense strand
aggcagagcaggcagacaa

SEQ ID NO: 2549059 - RNA, 19 nt, Homo sapiens
  misc_RNA (1)...(19): siRNA sense strand
ccagaagccuuuaagccua

SEQ ID NO: 2549060 - RNA, 19 nt, Homo sapiens
  misc_RNA (1)...(19): siRNA sense strand
ccggaaaggaagacauuga

SEQ ID NO: 2549061 - RNA, 19 nt, Homo sapiens
  misc_RNA (1)...(19): siRNA sense strand
aagcaaagccagugguugu

SEQ ID NO: 2549062 - RNA, 19 nt, Homo sapiens
  misc_RNA (1)...(19): siRNA sense strand
ugaaguaaggguacagcaa

SEQ ID NO: 2549063 - RNA, 19 nt, Homo sapiens
  misc_RNA (1)...(19): siRNA sense strand
gagggaggccagaggugaa

SEQ ID NO: 2549064 - RNA, 19 nt, Homo sapiens
  misc_RNA (1)...(19): siRNA sense strand
caggaagucaacugauuaa

SEQ ID NO: 2549065 - RNA, 19 nt, Homo sapiens
  misc_RNA (1)...(19): siRNA sense strand
guacaaaaucacuguguuu

SEQ ID NO: 2549066 - RNA, 19 nt, Homo sapiens
  misc_RNA (1)...(19): siRNA sense strand
caugaaaaugaaaggcaaa

SEQ ID NO: 2549067 - RNA, 19 nt, Homo sapiens
  misc_RNA (1)...(19): siRNA sense strand
auguauuggcuguaagaau

SEQ ID NO: 2549068 - RNA, 19 nt, Homo sapiens
  misc_RNA (1)...(19): siRNA sense strand
guuacaacaauuuggaaca

SEQ ID NO: 2549069 - RNA, 19 nt, Homo sapiens
  misc_RNA (1)...(19): siRNA sense strand
aggaaaggagggagaaucu

SEQ ID NO: 2549070 - RNA, 19 nt, Homo sapiens
  misc_RNA (1)...(19): siRNA sense strand
uuuaaauaguggaggcgga

SEQ ID NO: 2549071 - RNA, 19 nt, Homo sapiens
  misc_RNA (1)...(19): siRNA sense strand
acggaugauacuugaggaa

SEQ ID NO: 2549072 - RNA, 19 nt, Homo sapiens
  misc_RNA (1)...(19): siRNA sense strand
acaugaaaaugaaaggcaa

SEQ ID NO: 2549073 - RNA, 19 nt, Homo sapiens
  misc_RNA (1)...(19): siRNA sense strand
ugaucgacgucauagcaaa

SEQ ID NO: 2549074 - RNA, 19 nt, Homo sapiens
  misc_RNA (1)...(19): siRNA sense strand
aaauaguggaggcggaaaa

SEQ ID NO: 2549075 - RNA, 19 nt, Homo sapiens
  misc_RNA (1)...(19): siRNA sense strand
cgucauagcaaagggugua

SEQ ID NO: 2549076 - RNA, 19 nt, Homo sapiens
  misc_RNA (1)...(19): siRNA sense strand
ccaacuucacaaauaguaa

SEQ ID NO: 2549077 - RNA, 19 nt, Homo sapiens
  misc_RNA (1)...(19): siRNA sense strand
cagaaauccagaagccuuu

SEQ ID NO: 2549078 - RNA, 19 nt, Homo sapiens
  misc_RNA (1)...(19): siRNA sense strand
cagagcaggcagacaagaa

SEQ ID NO: 2549079 - RNA, 19 nt, Homo sapiens
  misc_RNA (1)...(19): siRNA sense strand
ucaucaacucugcaggaaa

SEQ ID NO: 2549080 - RNA, 19 nt, Homo sapiens
  misc_RNA (1)...(19): siRNA sense strand
gagacagaacuggaagaaa

SEQ ID NO: 2549081 - RNA, 19 nt, Homo sapiens
  misc_RNA (1)...(19): siRNA sense strand
cacaauuacuaaagcagau

SEQ ID NO: 2549082 - RNA, 19 nt, Homo sapiens
  misc_RNA (1)...(19): siRNA sense strand
acaucacaguuuaagacaa

SEQ ID NO: 2549083 - RNA, 19 nt, Homo sapiens
  misc_RNA (1)...(19): siRNA sense strand
ccaaauaaggcagugaaau

SEQ ID NO: 2549084 - RNA, 19 nt, Homo sapiens
  misc_RNA (1)...(19): siRNA sense strand
ggguguaauugcaaacgau

SEQ ID NO: 2549085 - RNA, 19 nt, Homo sapiens
  misc_RNA (1)...(19): siRNA sense strand
augcaaauguauuggcugu

SEQ ID NO: 2549086 - RNA, 19 nt, Homo sapiens
  misc_RNA (1)...(19): siRNA sense strand
ggcagaugcagcugaagua

SEQ ID NO: 2549087 - RNA, 19 nt, Homo sapiens
  misc_RNA (1)...(19): siRNA sense strand
aaacagcagccaagacgaa

SEQ ID NO: 2549088 - RNA, 19 nt, Homo sapiens
  misc_RNA (1)...(19): siRNA sense strand
uucuaauaccacagugaaa

SEQ ID NO: 2549089 - RNA, 19 nt, Homo sapiens
  misc_RNA (1)...(19): siRNA sense strand
ccacaauuacuaaagcaga

SEQ ID NO: 2549090 - RNA, 19 nt, Homo sapiens
  misc_RNA (1)...(19): siRNA sense strand
cccuuaaaccagauggaca

SEQ ID NO: 2549091 - RNA, 19 nt, Homo sapiens
  misc_RNA (1)...(19): siRNA sense strand
ccucaauaugcaaauguau

SEQ ID NO: 2549092 - RNA, 19 nt, Homo sapiens
  misc_RNA (1)...(19): siRNA sense strand
agucauugcagguaggguu

SEQ ID NO: 2549093 - RNA, 19 nt, Homo sapiens
  misc_RNA (1)...(19): siRNA sense strand
acacagacaccaaauaaaa

SEQ ID NO: 2549094 - RNA, 19 nt, Homo sapiens
  misc_RNA (1)...(19): siRNA sense strand
ccagccaguuagucagaau

SEQ ID NO: 2549095 - RNA, 19 nt, Homo sapiens
  misc_RNA (1)...(19): siRNA sense strand
caggcagacaagaagggaa

SEQ ID NO: 2549096 - RNA, 19 nt, Homo sapiens
  misc_RNA (1)...(19): siRNA sense strand
uaacuaaggaaguagcuga

SEQ ID NO: 2549097 - RNA, 19 nt, Homo sapiens
  misc_RNA (1)...(19): siRNA sense strand
acagaaauccagaagccuu

SEQ ID NO: 2549098 - RNA, 19 nt, Homo sapiens
  misc_RNA (1)...(19): siRNA sense strand
uugcaaacgaucaggaugu

SEQ ID NO: 2549099 - RNA, 19 nt, Homo sapiens
  misc_RNA (1)...(19): siRNA sense strand
cgauguuugaugaguguca

SEQ ID NO: 2549100 - RNA, 19 nt, Homo sapiens
  misc_RNA (1)...(19): siRNA sense strand
cauugaugcauuuggcaga

SEQ ID NO: 2549101 - RNA, 19 nt, Homo sapiens
  misc_RNA (1)...(19): siRNA sense strand
ccagaggaaauaauggaca

SEQ ID NO: 2549102 - RNA, 19 nt, Homo sapiens
  misc_RNA (1)...(19): siRNA sense strand
gcuucaaaccgcugggaaa

SEQ ID NO: 2549103 - RNA, 19 nt, Homo sapiens
  misc_RNA (1)...(19): siRNA sense strand
gaguaaagguugauccaga

SEQ ID NO: 2549104 - RNA, 19 nt, Homo sapiens
  misc_RNA (1)...(19): siRNA sense strand
aagcaaggaaagagaagaa

SEQ ID NO: 2549105 - RNA, 19 nt, Homo sapiens
  misc_RNA (1)...(19): siRNA sense strand
gagaagagauggagagagc

SEQ ID NO: 2549106 - RNA, 19 nt, Homo sapiens
  misc_RNA (1)...(19): siRNA sense strand
ccaaaauguugcuugaaaa

SEQ ID NO: 2549107 - RNA, 19 nt, Homo sapiens
  misc_RNA (1)...(19): siRNA sense strand
uguaaauggaccuggagaa

SEQ ID NO: 2549108 - RNA, 19 nt, Homo sapiens
  misc_RNA (1)...(19): siRNA sense strand
uguuagaggaagagguuga

SEQ ID NO: 2549109 - RNA, 19 nt, Homo sapiens
  misc_RNA (1)...(19): siRNA sense strand
aaaucaagacagugccaaa

SEQ ID NO: 2549110 - RNA, 19 nt, Homo sapiens
  misc_RNA (1)...(19): siRNA sense strand
aggccaaacugguggagca

SEQ ID NO: 2549111 - RNA, 19 nt, Homo sapiens
  misc_RNA (1)...(19): siRNA sense strand
uggaagaacaugaacucaa

SEQ ID NO: 2549112 - RNA, 19 nt, Homo sapiens
  misc_RNA (1)...(19): siRNA sense strand
cauuaaaccaugugaugau

SEQ ID NO: 2549113 - RNA, 19 nt, Homo sapiens
  misc_RNA (1)...(19): siRNA sense strand
augcagagaaggcgaggaa

SEQ ID NO: 2549114 - RNA, 19 nt, Homo sapiens
  misc_RNA (1)...(19): siRNA sense strand
gaagagauggagagagcga

SEQ ID NO: 2549115 - RNA, 19 nt, Homo sapiens
  misc_RNA (1)...(19): siRNA sense strand
cgaggaaagccgaagagau

SEQ ID NO: 2549116 - RNA, 19 nt, Homo sapiens
  misc_RNA (1)...(19): siRNA sense strand
agaaugagcuuguccguca

SEQ ID NO: 2549117 - RNA, 19 nt, Homo sapiens
  misc_RNA (1)...(19): siRNA sense strand
aaucuguguuagaggaaga

SEQ ID NO: 2549118 - RNA, 19 nt, Homo sapiens
  misc_RNA (1)...(19): siRNA sense strand
ccgaggacgcugagcucua

SEQ ID NO: 2549119 - RNA, 19 nt, Homo sapiens
  misc_RNA (1)...(19): siRNA sense strand
cugaggaagaaauggaaga

SEQ ID NO: 2549120 - RNA, 19 nt, Homo sapiens
  misc_RNA (1)...(19): siRNA sense strand
gggacaaagcaaggaaaga

SEQ ID NO: 2549121 - RNA, 19 nt, Homo sapiens
  misc_RNA (1)...(19): siRNA sense strand
gggagagagaagagaugga

SEQ ID NO: 2549122 - RNA, 19 nt, Homo sapiens
  misc_RNA (1)...(19): siRNA sense strand
ggagagagcgagcacaaau

SEQ ID NO: 2549123 - RNA, 19 nt, Homo sapiens
  misc_RNA (1)...(19): siRNA sense strand
uggaggaggaagaagaaaa

SEQ ID NO: 2549124 - RNA, 19 nt, Homo sapiens
  misc_RNA (1)...(19): siRNA sense strand
agaugaggaggaugguaaa

SEQ ID NO: 2549125 - RNA, 19 nt, Homo sapiens
  misc_RNA (1)...(19): siRNA sense strand
ggauguaccuggcaaagau

SEQ ID NO: 2549126 - RNA, 19 nt, Homo sapiens
  misc_RNA (1)...(19): siRNA sense strand
cgagaaggaguuuggagau

SEQ ID NO: 2549127 - RNA, 19 nt, Homo sapiens
  misc_RNA (1)...(19): siRNA sense strand
cugcccagcaugugacaaa

SEQ ID NO: 2549128 - RNA, 19 nt, Homo sapiens
  misc_RNA (1)...(19): siRNA sense strand
augacaauucugaggaaga

SEQ ID NO: 2549129 - RNA, 19 nt, Homo sapiens
  misc_RNA (1)...(19): siRNA sense strand
acgagaaggaguuuggaga

SEQ ID NO: 2549130 - RNA, 19 nt, Homo sapiens
  misc_RNA (1)...(19): siRNA sense strand
auggagagagcgagcacaa

SEQ ID NO: 2549131 - RNA, 19 nt, Homo sapiens
  misc_RNA (1)...(19): siRNA sense strand
gcuugaaaacagacagaau

SEQ ID NO: 2549132 - RNA, 19 nt, Homo sapiens
  misc_RNA (1)...(19): siRNA sense strand
uggagaaggaguaaagguu

SEQ ID NO: 2549133 - RNA, 19 nt, Homo sapiens
  misc_RNA (1)...(19): siRNA sense strand
ucuaaaggccacaggucau

SEQ ID NO: 2549134 - RNA, 19 nt, Homo sapiens
  misc_RNA (1)...(19): siRNA sense strand
ggaagaauaugauacacga

SEQ ID NO: 2549135 - RNA, 19 nt, Homo sapiens
  misc_RNA (1)...(19): siRNA sense strand
uggaagaacagaaugcaga

SEQ ID NO: 2549136 - RNA, 19 nt, Homo sapiens
  misc_RNA (1)...(19): siRNA sense strand
ggaagaugcaccaaaacaa

SEQ ID NO: 2549137 - RNA, 19 nt, Homo sapiens
  misc_RNA (1)...(19): siRNA sense strand
ggaaaaugucagugucaca

SEQ ID NO: 2549138 - RNA, 19 nt, Homo sapiens
  misc_RNA (1)...(19): siRNA sense strand
acgagaagucaaagaagca

SEQ ID NO: 2549139 - RNA, 19 nt, Homo sapiens
  misc_RNA (1)...(19): siRNA sense strand
gagagagaagagauggaga

SEQ ID NO: 2549140 - RNA, 19 nt, Homo sapiens
  misc_RNA (1)...(19): siRNA sense strand
gccaaaauguugcuugaaa

SEQ ID NO: 2549141 - RNA, 19 nt, Homo sapiens
  misc_RNA (1)...(19): siRNA sense strand
agaacagaaugcagagaag

SEQ ID NO: 2549142 - RNA, 19 nt, Homo sapiens
  misc_RNA (1)...(19): siRNA sense strand
aaaugguggccuugcuaaa

SEQ ID NO: 2549143 - RNA, 19 nt, Homo sapiens
  misc_RNA (1)...(19): siRNA sense strand
augaaauggaagaacauga

SEQ ID NO: 2549144 - RNA, 19 nt, Homo sapiens
  misc_RNA (1)...(19): siRNA sense strand
gagugcaggcgcaucgaaa

SEQ ID NO: 2549145 - RNA, 19 nt, Homo sapiens
  misc_RNA (1)...(19): siRNA sense strand
gagauggaucggaugaaaa

SEQ ID NO: 2549146 - RNA, 19 nt, Homo sapiens
  misc_RNA (1)...(19): siRNA sense strand
aacaacagcuggaggagga

SEQ ID NO: 2549147 - RNA, 19 nt, Homo sapiens
  misc_RNA (1)...(19): siRNA sense strand
gagagaagagauggagaga

SEQ ID NO: 2549148 - RNA, 19 nt, Homo sapiens
  misc_RNA (1)...(19): siRNA sense strand
ucagauggcuuggggaaaa

SEQ ID NO: 2549149 - RNA, 19 nt, Homo sapiens
  misc_RNA (1)...(19): siRNA sense strand
ggaaagagaagaaugagcu

SEQ ID NO: 2549150 - RNA, 19 nt, Homo sapiens
  misc_RNA (1)...(19): siRNA sense strand
uggaaggaagaauaugaua

SEQ ID NO: 2549151 - RNA, 19 nt, Homo sapiens
  misc_RNA (1)...(19): siRNA sense strand
ggaggaggaagaagaaaau

SEQ ID NO: 2549152 - RNA, 19 nt, Homo sapiens
  misc_RNA (1)...(19): siRNA sense strand
gagaugaggcggcagcaga

SEQ ID NO: 2549153 - RNA, 19 nt, Homo sapiens
  misc_RNA (1)...(19): siRNA sense strand
agaaucacgagaagucaaa

SEQ ID NO: 2549154 - RNA, 19 nt, Homo sapiens
  misc_RNA (1)...(19): siRNA sense strand
aagccaugagugagaauaa

SEQ ID NO: 2549155 - RNA, 19 nt, Homo sapiens
  misc_RNA (1)...(19): siRNA sense strand
ccuggaagaaccugaaaca

SEQ ID NO: 2549156 - RNA, 19 nt, Homo sapiens
  misc_RNA (1)...(19): siRNA sense strand
cagcaccauugaagaguuu

SEQ ID NO: 2549157 - RNA, 19 nt, Homo sapiens
  misc_RNA (1)...(19): siRNA sense strand
ggcaagaagaacagaaccu

SEQ ID NO: 2549158 - RNA, 19 nt, Homo sapiens
  misc_RNA (1)...(19): siRNA sense strand
ugaggaaggccacgagcau

SEQ ID NO: 2549159 - RNA, 19 nt, Homo sapiens
  misc_RNA (1)...(19): siRNA sense strand
gcgcaguagcuggcaagaa

SEQ ID NO: 2549160 - RNA, 19 nt, Homo sapiens
  misc_RNA (1)...(19): siRNA sense strand
gcuaccuggcccugaggaa

SEQ ID NO: 2549161 - RNA, 19 nt, Homo sapiens
  misc_RNA (1)...(19): siRNA sense strand
cagacaauuaugagugcaa

SEQ ID NO: 2549162 - RNA, 19 nt, Homo sapiens
  misc_RNA (1)...(19): siRNA sense strand
gugaaaaggcagcagacaa

SEQ ID NO: 2549163 - RNA, 19 nt, Homo sapiens
  misc_RNA (1)...(19): siRNA sense strand
aaaugaaacugaugccaca

SEQ ID NO: 2549164 - RNA, 19 nt, Homo sapiens
  misc_RNA (1)...(19): siRNA sense strand
ugaaaaggcagcagacaau

SEQ ID NO: 2549165 - RNA, 19 nt, Homo sapiens
  misc_RNA (1)...(19): siRNA sense strand
cugcagagacuccgagcau

SEQ ID NO: 2549166 - RNA, 19 nt, Homo sapiens
  misc_RNA (1)...(19): siRNA sense strand
caccuauaaaucagacaaa

SEQ ID NO: 2549167 - RNA, 19 nt, Homo sapiens
  misc_RNA (1)...(19): siRNA sense strand
acgcuguaugucagugaua

SEQ ID NO: 2549168 - RNA, 19 nt, Homo sapiens
  misc_RNA (1)...(19): siRNA sense strand
ggaaaucaccgaaggguca

SEQ ID NO: 2549169 - RNA, 19 nt, Homo sapiens
  misc_RNA (1)...(19): siRNA sense strand
gaacaauccucaagcacag

SEQ ID NO: 2549170 - RNA, 19 nt, Homo sapiens
  misc_RNA (1)...(19): siRNA sense strand
ggucagaauuccucaggcu

SEQ ID NO: 2549171 - RNA, 19 nt, Homo sapiens
  misc_RNA (1)...(19): siRNA sense strand
acgacaggguauuugaaca

SEQ ID NO: 2549172 - RNA, 19 nt, Homo sapiens
  misc_RNA (1)...(19): siRNA sense strand
ccggauuccaauacaaauu

SEQ ID NO: 2549173 - RNA, 19 nt, Homo sapiens
  misc_RNA (1)...(19): siRNA sense strand
gcaaguggagggaggugga

SEQ ID NO: 2549174 - RNA, 19 nt, Homo sapiens
  misc_RNA (1)...(19): siRNA sense strand
cccuagaaugggugaggaa

SEQ ID NO: 2549175 - RNA, 19 nt, Homo sapiens
  misc_RNA (1)...(19): siRNA sense strand
gaaaggaucuucugcagga

SEQ ID NO: 2549176 - RNA, 19 nt, Homo sapiens
  misc_RNA (1)...(19): siRNA sense strand
ugggaagucagaugggauu

SEQ ID NO: 2549177 - RNA, 19 nt, Homo sapiens
  misc_RNA (1)...(19): siRNA sense strand
cuagaaugggugaggaaug

SEQ ID NO: 2549178 - RNA, 19 nt, Homo sapiens
  misc_RNA (1)...(19): siRNA sense strand
aggaucuucugcaggacaa

SEQ ID NO: 2549179 - RNA, 19 nt, Homo sapiens
  misc_RNA (1)...(19): siRNA sense strand
agaaaggacugcaggaacc

SEQ ID NO: 2549180 - RNA, 19 nt, Homo sapiens
  misc_RNA (1)...(19): siRNA sense strand
gggaagacggagagcacaa

SEQ ID NO: 2549181 - RNA, 19 nt, Homo sapiens
  misc_RNA (1)...(19): siRNA sense strand
acucagacaugguggacaa

SEQ ID NO: 2549182 - RNA, 19 nt, Homo sapiens
  misc_RNA (1)...(19): siRNA sense strand
gggucaaguucgaggagga

SEQ ID NO: 2549183 - RNA, 19 nt, Homo sapiens
  misc_RNA (1)...(19): siRNA sense strand
gggagaugguggaggagga

SEQ ID NO: 2549184 - RNA, 19 nt, Homo sapiens
  misc_RNA (1)...(19): siRNA sense strand
ccaagaaggccaaggagga

SEQ ID NO: 2549185 - RNA, 19 nt, Homo sapiens
  misc_RNA (1)...(19): siRNA sense strand
cccugaaggacgaggcaua

SEQ ID NO: 2549186 - RNA, 19 nt, Homo sapiens
  misc_RNA (1)...(19): siRNA sense strand
gcgcugaucuacaggguca

SEQ ID NO: 2549187 - RNA, 19 nt, Homo sapiens
  misc_RNA (1)...(19): siRNA sense strand
aguccaaggaggaggccaa

SEQ ID NO: 2549188 - RNA, 19 nt, Homo sapiens
  misc_RNA (1)...(19): siRNA sense strand
aauaugaccuggagagcau

SEQ ID NO: 2549189 - RNA, 19 nt, Homo sapiens
  misc_RNA (1)...(19): siRNA sense strand
uccagaaagcccugagaaa

SEQ ID NO: 2549190 - RNA, 19 nt, Homo sapiens
  misc_RNA (1)...(19): siRNA sense strand
agcuggagcaggaggaaua

SEQ ID NO: 2549191 - RNA, 19 nt, Homo sapiens
  misc_RNA (1)...(19): siRNA sense strand
ggagggagaugguggagga

SEQ ID NO: 2549192 - RNA, 19 nt, Homo sapiens
  misc_RNA (1)...(19): siRNA sense strand
guguguacuuuguggauga

SEQ ID NO: 2549193 - RNA, 19 nt, Homo sapiens
  misc_RNA (1)...(19): siRNA sense strand
gguggaugaugaagacaau

SEQ ID NO: 2549194 - RNA, 19 nt, Homo sapiens
  misc_RNA (1)...(19): siRNA sense strand
acuacuuggccauggguaa

SEQ ID NO: 2549195 - RNA, 19 nt, Homo sapiens
  misc_RNA (1)...(19): siRNA sense strand
ccagaaggucaaagaggau

SEQ ID NO: 2549196 - RNA, 19 nt, Homo sapiens
  misc_RNA (1)...(19): siRNA sense strand
augaagaagcuguggacca

SEQ ID NO: 2549197 - RNA, 19 nt, Homo sapiens
  misc_RNA (1)...(19): siRNA sense strand
cggaaggagaugagcgcca

SEQ ID NO: 2549198 - RNA, 19 nt, Homo sapiens
  misc_RNA (1)...(19): siRNA sense strand
caguauaccaacaagaaga

SEQ ID NO: 2549199 - RNA, 19 nt, Homo sapiens
  misc_RNA (1)...(19): siRNA sense strand
gcacaaagcugauccugca

SEQ ID NO: 2549200 - RNA, 19 nt, Homo sapiens
  misc_RNA (1)...(19): siRNA sense strand
ggauugagcagcaggucuu

SEQ ID NO: 2549201 - RNA, 19 nt, Homo sapiens
  misc_RNA (1)...(19): siRNA sense strand
ucuggaagcauuugggaau

SEQ ID NO: 2549202 - RNA, 19 nt, Homo sapiens
  misc_RNA (1)...(19): siRNA sense strand
cugugaugaccaagauuua

SEQ ID NO: 2549203 - RNA, 19 nt, Homo sapiens
  misc_RNA (1)...(19): siRNA sense strand
ggcaagaagacguacaaga

SEQ ID NO: 2549204 - RNA, 19 nt, Homo sapiens
  misc_RNA (1)...(19): siRNA sense strand
aguccacagugcagggcaa

SEQ ID NO: 2549205 - RNA, 19 nt, Homo sapiens
  misc_RNA (1)...(19): siRNA sense strand
auuuaugcccagaggagaa

SEQ ID NO: 2549206 - RNA, 19 nt, Homo sapiens
  misc_RNA (1)...(19): siRNA sense strand
ugguggagguggaggccau

SEQ ID NO: 2549207 - RNA, 19 nt, Homo sapiens
  misc_RNA (1)...(19): siRNA sense strand
ucaaguucgaggaggacaa

SEQ ID NO: 2549208 - RNA, 19 nt, Homo sapiens
  misc_RNA (1)...(19): siRNA sense strand
gagcgggagcugaaggaga

SEQ ID NO: 2549209 - RNA, 19 nt, Homo sapiens
  misc_RNA (1)...(19): siRNA sense strand
cagacaugguggacaagau

SEQ ID NO: 2549210 - RNA, 19 nt, Homo sapiens
  misc_RNA (1)...(19): siRNA sense strand
ccucccaggaugugaagaa

SEQ ID NO: 2549211 - RNA, 19 nt, Homo sapiens
  misc_RNA (1)...(19): siRNA sense strand
cagccuucuucgaggugaa

SEQ ID NO: 2549212 - RNA, 19 nt, Homo sapiens
  misc_RNA (1)...(19): siRNA sense strand
ggugugagaaggaggacga

SEQ ID NO: 2549213 - RNA, 19 nt, Homo sapiens
  misc_RNA (1)...(19): siRNA sense strand
ccggaagagaucuaaguau

SEQ ID NO: 2549214 - RNA, 19 nt, Homo sapiens
  misc_RNA (1)...(19): siRNA sense strand
ucaacaagcacgcagggaa

SEQ ID NO: 2549215 - RNA, 19 nt, Homo sapiens
  misc_RNA (1)...(19): siRNA sense strand
ggguggacagccaggagua

SEQ ID NO: 2549216 - RNA, 19 nt, Homo sapiens
  misc_RNA (1)...(19): siRNA sense strand
gcgagacgucacugggcua

SEQ ID NO: 2549217 - RNA, 19 nt, Homo sapiens
  misc_RNA (1)...(19): siRNA sense strand
uagaguuuguggagcggua

SEQ ID NO: 2549218 - RNA, 19 nt, Homo sapiens
  misc_RNA (1)...(19): siRNA sense strand
ccacacugauccagaggca

SEQ ID NO: 2549219 - RNA, 19 nt, Homo sapiens
  misc_RNA (1)...(19): siRNA sense strand
ggaaguggagcgggacaaa

SEQ ID NO: 2549220 - RNA, 19 nt, Homo sapiens
  misc_RNA (1)...(19): siRNA sense strand
cugacgaggaugaggagga

SEQ ID NO: 2549221 - RNA, 19 nt, Homo sapiens
  misc_RNA (1)...(19): siRNA sense strand
uggacaagauguuuggcuu

SEQ ID NO: 2549222 - RNA, 19 nt, Homo sapiens
  misc_RNA (1)...(19): siRNA sense strand
uuuaugagacccugggcaa

SEQ ID NO: 2549223 - RNA, 19 nt, Homo sapiens
  misc_RNA (1)...(19): siRNA sense strand
agaucaacgcagcaauuua

SEQ ID NO: 2549224 - RNA, 19 nt, Homo sapiens
  misc_RNA (1)...(19): siRNA sense strand
cccaaggcuuccuggagaa

SEQ ID NO: 2549225 - RNA, 19 nt, Homo sapiens
  misc_RNA (1)...(19): siRNA sense strand
ccgacaaccacaucaggua

SEQ ID NO: 2549226 - RNA, 19 nt, Homo sapiens
  misc_RNA (1)...(19): siRNA sense strand
agaacaaccaugagaccca

SEQ ID NO: 2549227 - RNA, 19 nt, Homo sapiens
  misc_RNA (1)...(19): siRNA sense strand
cuggagaagaaccgagaca

SEQ ID NO: 2549228 - RNA, 19 nt, Homo sapiens
  misc_RNA (1)...(19): siRNA sense strand
aggaagaacuacgggcuga

SEQ ID NO: 2549229 - RNA, 19 nt, Homo sapiens
  misc_RNA (1)...(19): siRNA sense strand
agcgggagcugaaggagaa

SEQ ID NO: 2549230 - RNA, 19 nt, Homo sapiens
  misc_RNA (1)...(19): siRNA sense strand
cggccaaggagcucugcaa

SEQ ID NO: 2549231 - RNA, 19 nt, Homo sapiens
  misc_RNA (1)...(19): siRNA sense strand
gcuacaagauggaugaccu

SEQ ID NO: 2549232 - RNA, 19 nt, Homo sapiens
  misc_RNA (1)...(19): siRNA sense strand
caucccugcuugaggugaa

SEQ ID NO: 2549233 - RNA, 19 nt, Homo sapiens
  misc_RNA (1)...(19): siRNA sense strand
ccgcagaacgcaacgcaca

SEQ ID NO: 2549234 - RNA, 19 nt, Homo sapiens
  misc_RNA (1)...(19): siRNA sense strand
uugacagacuggauaaaga

SEQ ID NO: 2549235 - RNA, 19 nt, Homo sapiens
  misc_RNA (1)...(19): siRNA sense strand
caacaagcacgcagggaag

SEQ ID NO: 2549236 - RNA, 19 nt, Homo sapiens
  misc_RNA (1)...(19): siRNA sense strand
ccacaucaccauugggaac

SEQ ID NO: 2549237 - RNA, 19 nt, Homo sapiens
  misc_RNA (1)...(19): siRNA sense strand
ccaagaucuuucugaagga

SEQ ID NO: 2549238 - RNA, 19 nt, Homo sapiens
  misc_RNA (1)...(19): siRNA sense strand
gagugauggcagugagaag

SEQ ID NO: 2549239 - RNA, 19 nt, Homo sapiens
  misc_RNA (1)...(19): siRNA sense strand
cccugaagacgcuggagaa

SEQ ID NO: 2549240 - RNA, 19 nt, Homo sapiens
  misc_RNA (1)...(19): siRNA sense strand
gggaacaggcacuggacgu

SEQ ID NO: 2549241 - RNA, 19 nt, Homo sapiens
  misc_RNA (1)...(19): siRNA sense strand
gugaagaacucucgcaggu

SEQ ID NO: 2549242 - RNA, 19 nt, Homo sapiens
  misc_RNA (1)...(19): siRNA sense strand
ccacgaugacuggcagaua

SEQ ID NO: 2549243 - RNA, 19 nt, Homo sapiens
  misc_RNA (1)...(19): siRNA sense strand
agucauccuccuucagaaa

SEQ ID NO: 2549244 - RNA, 19 nt, Homo sapiens
  misc_RNA (1)...(19): siRNA sense strand
gggacgagaucuacugcca

SEQ ID NO: 2549245 - RNA, 19 nt, Homo sapiens
  misc_RNA (1)...(19): siRNA sense strand
ucuuuggguuugagaacuu

SEQ ID NO: 2549246 - RNA, 19 nt, Homo sapiens
  misc_RNA (1)...(19): siRNA sense strand
aggacaacguggccaccaa

SEQ ID NO: 2549247 - RNA, 19 nt, Homo sapiens
  misc_RNA (1)...(19): siRNA sense strand
aggcauaugugcagauccu

SEQ ID NO: 2549248 - RNA, 19 nt, Homo sapiens
  misc_RNA (1)...(19): siRNA sense strand
ugguggaugaugaagacaa

SEQ ID NO: 2549249 - RNA, 19 nt, Homo sapiens
  misc_RNA (1)...(19): siRNA sense strand
ggacaagaucaacgcagca

SEQ ID NO: 2549250 - RNA, 19 nt, Homo sapiens
  misc_RNA (1)...(19): siRNA sense strand
uggacaugauugccaacaa

SEQ ID NO: 2549251 - RNA, 19 nt, Homo sapiens
  misc_RNA (1)...(19): siRNA sense strand
ccauguuacacaagcugaa

SEQ ID NO: 2549252 - RNA, 19 nt, Homo sapiens
  misc_RNA (1)...(19): siRNA sense strand
ccgacaagaucucucucaa

SEQ ID NO: 2549253 - RNA, 19 nt, Homo sapiens
  misc_RNA (1)...(19): siRNA sense strand
ucaagaagcuccugggcag

SEQ ID NO: 2549254 - RNA, 19 nt, Homo sapiens
  misc_RNA (1)...(19): siRNA sense strand
ggaaggaucccauggccga

SEQ ID NO: 2549255 - RNA, 19 nt, Homo sapiens
  misc_RNA (1)...(19): siRNA sense strand
gggaagaacuuacaaggua

SEQ ID NO: 2549256 - RNA, 19 nt, Homo sapiens
  misc_RNA (1)...(19): siRNA sense strand
ggaagaacuuacaagguau

SEQ ID NO: 2549257 - RNA, 19 nt, Homo sapiens
  misc_RNA (1)...(19): siRNA sense strand
ccauaacaaagcagguaaa

SEQ ID NO: 2549258 - RNA, 19 nt, Homo sapiens
  misc_RNA (1)...(19): siRNA sense strand
augaagaaacagauaggaa

SEQ ID NO: 2549259 - RNA, 19 nt, Homo sapiens
  misc_RNA (1)...(19): siRNA sense strand
uggcaaagaaauaagguca

SEQ ID NO: 2549260 - RNA, 19 nt, Homo sapiens
  misc_RNA (1)...(19): siRNA sense strand
uagaagaggaagacccaaa

SEQ ID NO: 2549261 - RNA, 19 nt, Homo sapiens
  misc_RNA (1)...(19): siRNA sense strand
ccaucuaaaucuugcugaa

SEQ ID NO: 2549262 - RNA, 19 nt, Homo sapiens
  misc_RNA (1)...(19): siRNA sense strand
ugucaaaacaaguggaaga

SEQ ID NO: 2549263 - RNA, 19 nt, Homo sapiens
  misc_RNA (1)...(19): siRNA sense strand
ccgggaaggcauuguuuaa

SEQ ID NO: 2549264 - RNA, 19 nt, Homo sapiens
  misc_RNA (1)...(19): siRNA sense strand
cugcauuggaggugacauu

SEQ ID NO: 2549265 - RNA, 19 nt, Homo sapiens
  misc_RNA (1)...(19): siRNA sense strand
cccaauuagagcagaggaa

SEQ ID NO: 2549266 - RNA, 19 nt, Homo sapiens
  misc_RNA (1)...(19): siRNA sense strand
aagacuguuuagagggcaa

SEQ ID NO: 2549267 - RNA, 19 nt, Homo sapiens
  misc_RNA (1)...(19): siRNA sense strand
guuuagagggcaagaucau

SEQ ID NO: 2549268 - RNA, 19 nt, Homo sapiens
  misc_RNA (1)...(19): siRNA sense strand
uagcaaggaagcuggauau

SEQ ID NO: 2549269 - RNA, 19 nt, Homo sapiens
  misc_RNA (1)...(19): siRNA sense strand
ggggaaauacaaagaucaa

SEQ ID NO: 2549270 - RNA, 19 nt, Homo sapiens
  misc_RNA (1)...(19): siRNA sense strand
uggacgaacccaaaggcaa

SEQ ID NO: 2549271 - RNA, 19 nt, Homo sapiens
  misc_RNA (1)...(19): siRNA sense strand
aguuagaugaagaagauga

SEQ ID NO: 2549272 - RNA, 19 nt, Homo sapiens
  misc_RNA (1)...(19): siRNA sense strand
ucaucaaacuucaugccaa

SEQ ID NO: 2549273 - RNA, 19 nt, Homo sapiens
  misc_RNA (1)...(19): siRNA sense strand
gaugauucccagaagauuu

SEQ ID NO: 2549274 - RNA, 19 nt, Homo sapiens
  misc_RNA (1)...(19): siRNA sense strand
cagccauucuggaaauaau

SEQ ID NO: 2549275 - RNA, 19 nt, Homo sapiens
  misc_RNA (1)...(19): siRNA sense strand
guuagaugaagaagaugaa

SEQ ID NO: 2549276 - RNA, 19 nt, Homo sapiens
  misc_RNA (1)...(19): siRNA sense strand
agauuugagacuagcauau

SEQ ID NO: 2549277 - RNA, 19 nt, Homo sapiens
  misc_RNA (1)...(19): siRNA sense strand
cuggagaguaggaggagga

SEQ ID NO: 2549278 - RNA, 19 nt, Homo sapiens
  misc_RNA (1)...(19): siRNA sense strand
caauuagagcagaggaaag

SEQ ID NO: 2549279 - RNA, 19 nt, Homo sapiens
  misc_RNA (1)...(19): siRNA sense strand
ggacgaacccaaaggcaac

SEQ ID NO: 2549280 - RNA, 19 nt, Homo sapiens
  misc_RNA (1)...(19): siRNA sense strand
uguacagcguugaugguau

SEQ ID NO: 2549281 - RNA, 19 nt, Homo sapiens
  misc_RNA (1)...(19): siRNA sense strand
caucaauguaggucuagaa

SEQ ID NO: 2549282 - RNA, 19 nt, Homo sapiens
  misc_RNA (1)...(19): siRNA sense strand
auaucuugguguugugcaa

SEQ ID NO: 2549283 - RNA, 19 nt, Homo sapiens
  misc_RNA (1)...(19): siRNA sense strand
caaauuuggaagaugcauu

SEQ ID NO: 2549284 - RNA, 19 nt, Homo sapiens
  misc_RNA (1)...(19): siRNA sense strand
uagaugaagaagaugaaga

SEQ ID NO: 2549285 - RNA, 19 nt, Homo sapiens
  misc_RNA (1)...(19): siRNA sense strand
cagugauggugaagggaug

SEQ ID NO: 2549286 - RNA, 19 nt, Homo sapiens
  misc_RNA (1)...(19): siRNA sense strand
gggagaaaagggaggcuga

SEQ ID NO: 2549287 - RNA, 19 nt, Homo sapiens
  misc_RNA (1)...(19): siRNA sense strand
cugcagccauucuggaaau

SEQ ID NO: 2549288 - RNA, 19 nt, Homo sapiens
  misc_RNA (1)...(19): siRNA sense strand
aagggaggcugaagagcuu

SEQ ID NO: 2549289 - RNA, 19 nt, Homo sapiens
  misc_RNA (1)...(19): siRNA sense strand
uggcaggagcccagcugaa

SEQ ID NO: 2549290 - RNA, 19 nt, Homo sapiens
  misc_RNA (1)...(19): siRNA sense strand
guggaagauuugagacuag

SEQ ID NO: 2549291 - RNA, 19 nt, Homo sapiens
  misc_RNA (1)...(19): siRNA sense strand
agagcagaggaaaggacaa

SEQ ID NO: 2549292 - RNA, 19 nt, Homo sapiens
  misc_RNA (1)...(19): siRNA sense strand
auaucagaaugaagagcuu

SEQ ID NO: 2549293 - RNA, 19 nt, Homo sapiens
  misc_RNA (1)...(19): siRNA sense strand
aaguacagcagaaagguau

SEQ ID NO: 2549294 - RNA, 19 nt, Homo sapiens
  misc_RNA (1)...(19): siRNA sense strand
auagcaaggaagcuggaua

SEQ ID NO: 2549295 - RNA, 19 nt, Homo sapiens
  misc_RNA (1)...(19): siRNA sense strand
cuauaguggacgaacccaa

SEQ ID NO: 2549296 - RNA, 19 nt, Homo sapiens
  misc_RNA (1)...(19): siRNA sense strand
gcccaaggaauaucagaau

SEQ ID NO: 2549297 - RNA, 19 nt, Homo sapiens
  misc_RNA (1)...(19): siRNA sense strand
ggauauguuugcagagcag

SEQ ID NO: 2549298 - RNA, 19 nt, Homo sapiens
  misc_RNA (1)...(19): siRNA sense strand
caucuuacaaucagaacuu

SEQ ID NO: 2549299 - RNA, 19 nt, Homo sapiens
  misc_RNA (1)...(19): siRNA sense strand
ccauuugaaaggaaacauu

SEQ ID NO: 2549300 - RNA, 19 nt, Homo sapiens
  misc_RNA (1)...(19): siRNA sense strand
gguuccaguuuccgcuaua

SEQ ID NO: 2549301 - RNA, 19 nt, Homo sapiens
  misc_RNA (1)...(19): siRNA sense strand
agguauguagcuagugaau

SEQ ID NO: 2549302 - RNA, 19 nt, Homo sapiens
  misc_RNA (1)...(19): siRNA sense strand
cccauaacaaagcagguaa

SEQ ID NO: 2549303 - RNA, 19 nt, Homo sapiens
  misc_RNA (1)...(19): siRNA sense strand
ggauuuggcucuaggaagg

SEQ ID NO: 2549304 - RNA, 19 nt, Homo sapiens
  misc_RNA (1)...(19): siRNA sense strand
aggacuagcgguaggagca

SEQ ID NO: 2549305 - RNA, 19 nt, Homo sapiens
  misc_RNA (1)...(19): siRNA sense strand
agggcaagaucaugcacuu

SEQ ID NO: 2549306 - RNA, 19 nt, Homo sapiens
  misc_RNA (1)...(19): siRNA sense strand
ucggaagagcccaaaucaa

SEQ ID NO: 2549307 - RNA, 19 nt, Homo sapiens
  misc_RNA (1)...(19): siRNA sense strand
ucuuuaacacugagcccaa

SEQ ID NO: 2549308 - RNA, 19 nt, Homo sapiens
  misc_RNA (1)...(19): siRNA sense strand
auuuagaccuuuagggccu

SEQ ID NO: 2549309 - RNA, 19 nt, Homo sapiens
  misc_RNA (1)...(19): siRNA sense strand
gaucaaaagucauccggga

SEQ ID NO: 2549310 - RNA, 19 nt, Homo sapiens
  misc_RNA (1)...(19): siRNA sense strand
aucagaacuuggagacuuu

SEQ ID NO: 2549311 - RNA, 19 nt, Homo sapiens
  misc_RNA (1)...(19): siRNA sense strand
ccaagaagaagaaggcuga

SEQ ID NO: 2549312 - RNA, 19 nt, Homo sapiens
  misc_RNA (1)...(19): siRNA sense strand
agaagaaggcugagggcac

SEQ ID NO: 2549313 - RNA, 19 nt, Homo sapiens
  misc_RNA (1)...(19): siRNA sense strand
cgagaagcaccguggcuga

SEQ ID NO: 2549314 - RNA, 19 nt, Homo sapiens
  misc_RNA (1)...(19): siRNA sense strand
ccguguucaccgaggaaga

SEQ ID NO: 2549315 - RNA, 19 nt, Homo sapiens
  misc_RNA (1)...(19): siRNA sense strand
ccaagggaaaggugcccaa

SEQ ID NO: 2549316 - RNA, 19 nt, Homo sapiens
  misc_RNA (1)...(19): siRNA sense strand
gcccagaaacugcggaacu

SEQ ID NO: 2549317 - RNA, 19 nt, Homo sapiens
  misc_RNA (1)...(19): siRNA sense strand
acgaguaccggaagcgaga

SEQ ID NO: 2549318 - RNA, 19 nt, Homo sapiens
  misc_RNA (1)...(19): siRNA sense strand
gggaagaaagccaggcaga

SEQ ID NO: 2549319 - RNA, 19 nt, Homo sapiens
  misc_RNA (1)...(19): siRNA sense strand
aauucauacuggcgagaaa

SEQ ID NO: 2549320 - RNA, 19 nt, Homo sapiens
  misc_RNA (1)...(19): siRNA sense strand
augcaaggaaugcgggaaa

SEQ ID NO: 2549321 - RNA, 19 nt, Homo sapiens
  misc_RNA (1)...(19): siRNA sense strand
auguaaggaauguggcaaa

SEQ ID NO: 2549322 - RNA, 19 nt, Homo sapiens
  misc_RNA (1)...(19): siRNA sense strand
auguaacaaaugugggaaa

SEQ ID NO: 2549323 - RNA, 19 nt, Homo sapiens
  misc_RNA (1)...(19): siRNA sense strand
auugcauguuggugagaaa

SEQ ID NO: 2549324 - RNA, 19 nt, Homo sapiens
  misc_RNA (1)...(19): siRNA sense strand
augcagagauaaagcccua

SEQ ID NO: 2549325 - RNA, 19 nt, Homo sapiens
  misc_RNA (1)...(19): siRNA sense strand
cccuaugaguguaaggaau

SEQ ID NO: 2549326 - RNA, 19 nt, Homo sapiens
  misc_RNA (1)...(19): siRNA sense strand
uuguuaagcaucagagaau

SEQ ID NO: 2549327 - RNA, 19 nt, Homo sapiens
  misc_RNA (1)...(19): siRNA sense strand
cccuaugaauguaaggaau

SEQ ID NO: 2549328 - RNA, 19 nt, Homo sapiens
  misc_RNA (1)...(19): siRNA sense strand
cccuaugaauguaaggaau

SEQ ID NO: 2549329 - RNA, 19 nt, Homo sapiens
  misc_RNA (1)...(19): siRNA sense strand
cuuuaguaauggacaucaa

SEQ ID NO: 2549330 - RNA, 19 nt, Homo sapiens
  misc_RNA (1)...(19): siRNA sense strand
agauaaagcccuacggaug

SEQ ID NO: 2549331 - RNA, 19 nt, Homo sapiens
  misc_RNA (1)...(19): siRNA sense strand
ucaccauacaucagagauu

SEQ ID NO: 2549332 - RNA, 19 nt, Homo sapiens
  misc_RNA (1)...(19): siRNA sense strand
uggacaacuuauuggacau

SEQ ID NO: 2549333 - RNA, 19 nt, Homo sapiens
  misc_RNA (1)...(19): siRNA sense strand
aaauguaagcaauguggaa

SEQ ID NO: 2549334 - RNA, 19 nt, Homo sapiens
  misc_RNA (1)...(19): siRNA sense strand
augcaaagaaugugggaag

SEQ ID NO: 2549335 - RNA, 19 nt, Homo sapiens
  misc_RNA (1)...(19): siRNA sense strand
gcucauaccuuguucagca

SEQ ID NO: 2549336 - RNA, 19 nt, Homo sapiens
  misc_RNA (1)...(19): siRNA sense strand
gcucauaccuuguucagca

SEQ ID NO: 2549337 - RNA, 19 nt, Homo sapiens
  misc_RNA (1)...(19): siRNA sense strand
cuuuacuguuuauggacaa

SEQ ID NO: 2549338 - RNA, 19 nt, Homo sapiens
  misc_RNA (1)...(19): siRNA sense strand
cagaaaauaaguagacaga

SEQ ID NO: 2549339 - RNA, 19 nt, Homo sapiens
  misc_RNA (1)...(19): siRNA sense strand
auguaaagaaugugggaag

SEQ ID NO: 2549340 - RNA, 19 nt, Homo sapiens
  misc_RNA (1)...(19): siRNA sense strand
ccuuacgaaugcaaagaau

SEQ ID NO: 2549341 - RNA, 19 nt, Homo sapiens
  misc_RNA (1)...(19): siRNA sense strand
gauccauacuggggagaaa

SEQ ID NO: 2549342 - RNA, 19 nt, Homo sapiens
  misc_RNA (1)...(19): siRNA sense strand
ggggaauguuggaaagcuu

SEQ ID NO: 2549343 - RNA, 19 nt, Homo sapiens
  misc_RNA (1)...(19): siRNA sense strand
aagcaauguggaaagacua

SEQ ID NO: 2549344 - RNA, 19 nt, Homo sapiens
  misc_RNA (1)...(19): siRNA sense strand
aagauuugcaguuggaaga

SEQ ID NO: 2549345 - RNA, 19 nt, Homo sapiens
  misc_RNA (1)...(19): siRNA sense strand
gagauaaagcccuacggau

SEQ ID NO: 2549346 - RNA, 19 nt, Homo sapiens
  misc_RNA (1)...(19): siRNA sense strand
agagauugcauguugguga

SEQ ID NO: 2549347 - RNA, 19 nt, Homo sapiens
  misc_RNA (1)...(19): siRNA sense strand
gaauguaaggaguguggga

SEQ ID NO: 2549348 - RNA, 19 nt, Homo sapiens
  misc_RNA (1)...(19): siRNA sense strand
cccuaugaauguaacaaau

SEQ ID NO: 2549349 - RNA, 19 nt, Homo sapiens
  misc_RNA (1)...(19): siRNA sense strand
ccuuaaagugcaucugaga

SEQ ID NO: 2549350 - RNA, 19 nt, Homo sapiens
  misc_RNA (1)...(19): siRNA sense strand
gaauguaacaaauguggga

SEQ ID NO: 2549351 - RNA, 19 nt, Homo sapiens
  misc_RNA (1)...(19): siRNA sense strand
cuaucaacuuacaguacau

SEQ ID NO: 2549352 - RNA, 19 nt, Homo sapiens
  misc_RNA (1)...(19): siRNA sense strand
gaauguaaggaguguggca

SEQ ID NO: 2549353 - RNA, 19 nt, Homo sapiens
  misc_RNA (1)...(19): siRNA sense strand
agaaacccuaugaguguaa

SEQ ID NO: 2549354 - RNA, 19 nt, Homo sapiens
  misc_RNA (1)...(19): siRNA sense strand
auacugauguaaagcccua

SEQ ID NO: 2549355 - RNA, 19 nt, Homo sapiens
  misc_RNA (1)...(19): siRNA sense strand
aguuggaagaugauacaau

SEQ ID NO: 2549356 - RNA, 19 nt, Homo sapiens
  misc_RNA (1)...(19): siRNA sense strand
ccauaugagugcggggaau

SEQ ID NO: 2549357 - RNA, 19 nt, Homo sapiens
  misc_RNA (1)...(19): siRNA sense strand
cccuaugaguguaaggagu

SEQ ID NO: 2549358 - RNA, 19 nt, Homo sapiens
  misc_RNA (1)...(19): siRNA sense strand
aagaaugugggaagaacuu

SEQ ID NO: 2549359 - RNA, 19 nt, Homo sapiens
  misc_RNA (1)...(19): siRNA sense strand
gcucuacaucagaaaauaa

SEQ ID NO: 2549360 - RNA, 19 nt, Homo sapiens
  misc_RNA (1)...(19): siRNA sense strand
uauucauacugggaagaaa

SEQ ID NO: 2549361 - RNA, 19 nt, Homo sapiens
  misc_RNA (1)...(19): siRNA sense strand
ggcgagaagcccuaugaau

SEQ ID NO: 2549362 - RNA, 19 nt, Homo sapiens
  misc_RNA (1)...(19): siRNA sense strand
ccuacaacaugguggacau

SEQ ID NO: 2549363 - RNA, 19 nt, Homo sapiens
  misc_RNA (1)...(19): siRNA sense strand
gguacaacguccuuggaga

SEQ ID NO: 2549364 - RNA, 19 nt, Homo sapiens
  misc_RNA (1)...(19): siRNA sense strand
gcccaaaagaucugcaaaa

SEQ ID NO: 2549365 - RNA, 19 nt, Homo sapiens
  misc_RNA (1)...(19): siRNA sense strand
ccucaggaugcuuggauau

SEQ ID NO: 2549366 - RNA, 19 nt, Homo sapiens
  misc_RNA (1)...(19): siRNA sense strand
agaauaaguuuccuggaga

SEQ ID NO: 2549367 - RNA, 19 nt, Homo sapiens
  misc_RNA (1)...(19): siRNA sense strand
aggcagaguacaucgagaa

SEQ ID NO: 2549368 - RNA, 19 nt, Homo sapiens
  misc_RNA (1)...(19): siRNA sense strand
gcagcuuuguugagagcga

SEQ ID NO: 2549369 - RNA, 19 nt, Homo sapiens
  misc_RNA (1)...(19): siRNA sense strand
aggccgaaucaauggaaga

SEQ ID NO: 2549370 - RNA, 19 nt, Homo sapiens
  misc_RNA (1)...(19): siRNA sense strand
acuucacguucaugguaaa

SEQ ID NO: 2549371 - RNA, 19 nt, Homo sapiens
  misc_RNA (1)...(19): siRNA sense strand
aagcuaacagccagggaga

SEQ ID NO: 2549372 - RNA, 19 nt, Homo sapiens
  misc_RNA (1)...(19): siRNA sense strand
auguugaugccuuguguaa

SEQ ID NO: 2549373 - RNA, 19 nt, Homo sapiens
  misc_RNA (1)...(19): siRNA sense strand
acaacaugguggacaucau

SEQ ID NO: 2549374 - RNA, 19 nt, Homo sapiens
  misc_RNA (1)...(19): siRNA sense strand
cuguuggaauuguuggcaa

SEQ ID NO: 2549375 - RNA, 19 nt, Homo sapiens
  misc_RNA (1)...(19): siRNA sense strand
cgaggaaagcuaacagcca

SEQ ID NO: 2549376 - RNA, 19 nt, Homo sapiens
  misc_RNA (1)...(19): siRNA sense strand
ccgucugguuccugagcuu

SEQ ID NO: 2549377 - RNA, 19 nt, Homo sapiens
  misc_RNA (1)...(19): siRNA sense strand
cuggcacagcacaggaaua

SEQ ID NO: 2549378 - RNA, 19 nt, Homo sapiens
  misc_RNA (1)...(19): siRNA sense strand
uguugaugagcgugaauuu

SEQ ID NO: 2549379 - RNA, 19 nt, Homo sapiens
  misc_RNA (1)...(19): siRNA sense strand
agucaggauuuuacaguuu

SEQ ID NO: 2549380 - RNA, 19 nt, Homo sapiens
  misc_RNA (1)...(19): siRNA sense strand
gaucaucuucaaagggcau

SEQ ID NO: 2549381 - RNA, 19 nt, Homo sapiens
  misc_RNA (1)...(19): siRNA sense strand
gggagcuggcagucaguaa

SEQ ID NO: 2549382 - RNA, 19 nt, Homo sapiens
  misc_RNA (1)...(19): siRNA sense strand
uugcacuuguggaaggaaa

SEQ ID NO: 2549383 - RNA, 19 nt, Homo sapiens
  misc_RNA (1)...(19): siRNA sense strand
ggaaagaaggggagggcug

SEQ ID NO: 2549384 - RNA, 19 nt, Homo sapiens
  misc_RNA (1)...(19): siRNA sense strand
ccuaauuguuggaggggaa

SEQ ID NO: 2549385 - RNA, 19 nt, Homo sapiens
  misc_RNA (1)...(19): siRNA sense strand
gcacaagcaggcagagauu

SEQ ID NO: 2549386 - RNA, 19 nt, Homo sapiens
  misc_RNA (1)...(19): siRNA sense strand
agacagagaugcagcggca

SEQ ID NO: 2549387 - RNA, 19 nt, Homo sapiens
  misc_RNA (1)...(19): siRNA sense strand
gggccaagcaggugaccau

SEQ ID NO: 2549388 - RNA, 19 nt, Homo sapiens
  misc_RNA (1)...(19): siRNA sense strand
gcugagaagcacagaaacu

SEQ ID NO: 2549389 - RNA, 19 nt, Homo sapiens
  misc_RNA (1)...(19): siRNA sense strand
gugagaagacagagaugca

SEQ ID NO: 2549390 - RNA, 19 nt, Homo sapiens
  misc_RNA (1)...(19): siRNA sense strand
cccaagagcaccagcaaca

SEQ ID NO: 2549391 - RNA, 19 nt, Homo sapiens
  misc_RNA (1)...(19): siRNA sense strand
gcgucaaggucugggacau

SEQ ID NO: 2549392 - RNA, 19 nt, Homo sapiens
  misc_RNA (1)...(19): siRNA sense strand
acagaaacuccgcagacua

SEQ ID NO: 2549393 - RNA, 19 nt, Homo sapiens
  misc_RNA (1)...(19): siRNA sense strand
aggaaauugcagcucguua

SEQ ID NO: 2549394 - RNA, 19 nt, Homo sapiens
  misc_RNA (1)...(19): siRNA sense strand
cugaaugccuggagaacac

SEQ ID NO: 2549395 - RNA, 19 nt, Homo sapiens
  misc_RNA (1)...(19): siRNA sense strand
ccaguauauuccaguccaa

SEQ ID NO: 2549396 - RNA, 19 nt, Homo sapiens
  misc_RNA (1)...(19): siRNA sense strand
cuccaaauccaaagaacuu

SEQ ID NO: 2549397 - RNA, 19 nt, Homo sapiens
  misc_RNA (1)...(19): siRNA sense strand
ccacaguuuaugaaguuau

SEQ ID NO: 2549398 - RNA, 19 nt, Homo sapiens
  misc_RNA (1)...(19): siRNA sense strand
gguugaauauagaaaugca

SEQ ID NO: 2549399 - RNA, 19 nt, Homo sapiens
  misc_RNA (1)...(19): siRNA sense strand
agcagaaaacugaagaaaa

SEQ ID NO: 2549400 - RNA, 19 nt, Homo sapiens
  misc_RNA (1)...(19): siRNA sense strand
gagauugucaagaggcuga

SEQ ID NO: 2549401 - RNA, 19 nt, Homo sapiens
  misc_RNA (1)...(19): siRNA sense strand
ucuccguggacgacaaaua

SEQ ID NO: 2549402 - RNA, 19 nt, Homo sapiens
  misc_RNA (1)...(19): siRNA sense strand
ggcaacaacuccaggccca

SEQ ID NO: 2549403 - RNA, 19 nt, Homo sapiens
  misc_RNA (1)...(19): siRNA sense strand
caccaaagagacagagacu

SEQ ID NO: 2549404 - RNA, 19 nt, Homo sapiens
  misc_RNA (1)...(19): siRNA sense strand
uuaaagaugagaagaagca

SEQ ID NO: 2549405 - RNA, 19 nt, Homo sapiens
  misc_RNA (1)...(19): siRNA sense strand
ucggauuaaggaagaguuu

SEQ ID NO: 2549406 - RNA, 19 nt, Homo sapiens
  misc_RNA (1)...(19): siRNA sense strand
cggcauuaugucauguauu

SEQ ID NO: 2549407 - RNA, 19 nt, Homo sapiens
  misc_RNA (1)...(19): siRNA sense strand
ccaaagagacagagacucc

SEQ ID NO: 2549408 - RNA, 19 nt, Homo sapiens
  misc_RNA (1)...(19): siRNA sense strand
gugagaaaagugaugacaa

SEQ ID NO: 2549409 - RNA, 19 nt, Homo sapiens
  misc_RNA (1)...(19): siRNA sense strand
uggaaaaccaccaggaguu

SEQ ID NO: 2549410 - RNA, 19 nt, Homo sapiens
  misc_RNA (1)...(19): siRNA sense strand
agagaauggccuagacaag

SEQ ID NO: 2549411 - RNA, 19 nt, Homo sapiens
  misc_RNA (1)...(19): siRNA sense strand
gcgcggugaccaucagcaa

SEQ ID NO: 2549412 - RNA, 19 nt, Homo sapiens
  misc_RNA (1)...(19): siRNA sense strand
uguccuauggguugaauau

SEQ ID NO: 2549413 - RNA, 19 nt, Homo sapiens
  misc_RNA (1)...(19): siRNA sense strand
aaugaucaccaaagagaca

SEQ ID NO: 2549414 - RNA, 19 nt, Homo sapiens
  misc_RNA (1)...(19): siRNA sense strand
agaacuuagccuuaaugaa

SEQ ID NO: 2549415 - RNA, 19 nt, Homo sapiens
  misc_RNA (1)...(19): siRNA sense strand
guguuagugagaagauaaa

SEQ ID NO: 2549416 - RNA, 19 nt, Homo sapiens
  misc_RNA (1)...(19): siRNA sense strand
aguguuagugagaagauaa

SEQ ID NO: 2549417 - RNA, 19 nt, Homo sapiens
  misc_RNA (1)...(19): siRNA sense strand
caggaguguuagugagaag

SEQ ID NO: 2549418 - RNA, 19 nt, Homo sapiens
  misc_RNA (1)...(19): siRNA sense strand
gccugagagaagaggauga

SEQ ID NO: 2549419 - RNA, 19 nt, Homo sapiens
  misc_RNA (1)...(19): siRNA sense strand
agguuauccaacagaagua

SEQ ID NO: 2549420 - RNA, 19 nt, Homo sapiens
  misc_RNA (1)...(19): siRNA sense strand
uuuaaugacagcagugaga

SEQ ID NO: 2549421 - RNA, 19 nt, Homo sapiens
  misc_RNA (1)...(19): siRNA sense strand
guguauucuucuugcaguu

SEQ ID NO: 2549422 - RNA, 19 nt, Homo sapiens
  misc_RNA (1)...(19): siRNA sense strand
ucuuugaggugguagcaca

SEQ ID NO: 2549423 - RNA, 19 nt, Homo sapiens
  misc_RNA (1)...(19): siRNA sense strand
cgaccauggcuguaguaaa

SEQ ID NO: 2549424 - RNA, 19 nt, Homo sapiens
  misc_RNA (1)...(19): siRNA sense strand
acgacuggauggaggagaa

SEQ ID NO: 2549425 - RNA, 19 nt, Homo sapiens
  misc_RNA (1)...(19): siRNA sense strand
gugugaacgccaaggcuua

SEQ ID NO: 2549426 - RNA, 19 nt, Homo sapiens
  misc_RNA (1)...(19): siRNA sense strand
cuuacuuggugguggauga

SEQ ID NO: 2549427 - RNA, 19 nt, Homo sapiens
  misc_RNA (1)...(19): siRNA sense strand
aggagaacccagagagcca

SEQ ID NO: 2549428 - RNA, 19 nt, Homo sapiens
  misc_RNA (1)...(19): siRNA sense strand
cuuccaaggaguuguuuaa

SEQ ID NO: 2549429 - RNA, 19 nt, Homo sapiens
  misc_RNA (1)...(19): siRNA sense strand
ggaaggagcugcuugcuga

SEQ ID NO: 2549430 - RNA, 19 nt, Homo sapiens
  misc_RNA (1)...(19): siRNA sense strand
ccuaaagguacgaguaagu

SEQ ID NO: 2549431 - RNA, 19 nt, Homo sapiens
  misc_RNA (1)...(19): siRNA sense strand
ucaggaaggaaguagcaaa

SEQ ID NO: 2549432 - RNA, 19 nt, Homo sapiens
  misc_RNA (1)...(19): siRNA sense strand
gcgugaaagaagaggccca

SEQ ID NO: 2549433 - RNA, 19 nt, Homo sapiens
  misc_RNA (1)...(19): siRNA sense strand
cuuucuacaaggagggcaa

SEQ ID NO: 2549434 - RNA, 19 nt, Homo sapiens
  misc_RNA (1)...(19): siRNA sense strand
caggaaggaaguagcaaaa

SEQ ID NO: 2549435 - RNA, 19 nt, Homo sapiens
  misc_RNA (1)...(19): siRNA sense strand
cuggaaggagcgugaaaga

SEQ ID NO: 2549436 - RNA, 19 nt, Homo sapiens
  misc_RNA (1)...(19): siRNA sense strand
ccgucguagcugaggucaa

SEQ ID NO: 2549437 - RNA, 19 nt, Homo sapiens
  misc_RNA (1)...(19): siRNA sense strand
gagcgaagcugacuggcau

SEQ ID NO: 2549438 - RNA, 19 nt, Homo sapiens
  misc_RNA (1)...(19): siRNA sense strand
uugcugaccuggagcgaga

SEQ ID NO: 2549439 - RNA, 19 nt, Homo sapiens
  misc_RNA (1)...(19): siRNA sense strand
cugcaggacuagagaggcu

SEQ ID NO: 2549440 - RNA, 19 nt, Homo sapiens
  misc_RNA (1)...(19): siRNA sense strand
cugcaaaggacacauggaa

SEQ ID NO: 2549441 - RNA, 19 nt, Homo sapiens
  misc_RNA (1)...(19): siRNA sense strand
ccuuaaggcucuuggacag

SEQ ID NO: 2549442 - RNA, 19 nt, Homo sapiens
  misc_RNA (1)...(19): siRNA sense strand
ggaugaaggcagagaugag

SEQ ID NO: 2549443 - RNA, 19 nt, Homo sapiens
  misc_RNA (1)...(19): siRNA sense strand
aagaagaggcccagaaccu

SEQ ID NO: 2549444 - RNA, 19 nt, Homo sapiens
  misc_RNA (1)...(19): siRNA sense strand
uggacaggaggcugauaaa

SEQ ID NO: 2549445 - RNA, 19 nt, Homo sapiens
  misc_RNA (1)...(19): siRNA sense strand
ggagcuggaacaugagaca

SEQ ID NO: 2549446 - RNA, 19 nt, Homo sapiens
  misc_RNA (1)...(19): siRNA sense strand
cuugcuaacccuaaaggua

SEQ ID NO: 2549447 - RNA, 19 nt, Homo sapiens
  misc_RNA (1)...(19): siRNA sense strand
acccuaaagguacgaguaa

SEQ ID NO: 2549448 - RNA, 19 nt, Homo sapiens
  misc_RNA (1)...(19): siRNA sense strand
cugaagaagguggccgaua

SEQ ID NO: 2549449 - RNA, 19 nt, Homo sapiens
  misc_RNA (1)...(19): siRNA sense strand
acaaggauucucagagcau

SEQ ID NO: 2549450 - RNA, 19 nt, Homo sapiens
  misc_RNA (1)...(19): siRNA sense strand
ugaagaaaccaguugccau

SEQ ID NO: 2549451 - RNA, 19 nt, Homo sapiens
  misc_RNA (1)...(19): siRNA sense strand
uugggaugggaguggauaa

SEQ ID NO: 2549452 - RNA, 19 nt, Homo sapiens
  misc_RNA (1)...(19): siRNA sense strand
ccacggaacugauggagac

SEQ ID NO: 2549453 - RNA, 19 nt, Homo sapiens
  misc_RNA (1)...(19): siRNA sense strand
augggaaccugaaggacuu

SEQ ID NO: 2549454 - RNA, 19 nt, Homo sapiens
  misc_RNA (1)...(19): siRNA sense strand
uggcuguaguaaaagguaa

SEQ ID NO: 2549455 - RNA, 19 nt, Homo sapiens
  misc_RNA (1)...(19): siRNA sense strand
uggaauauugccaagucua

SEQ ID NO: 2549456 - RNA, 19 nt, Homo sapiens
  misc_RNA (1)...(19): siRNA sense strand
aggaguuguuuaaaggcuu

SEQ ID NO: 2549457 - RNA, 19 nt, Homo sapiens
  misc_RNA (1)...(19): siRNA sense strand
auuguguacugcaggacua

SEQ ID NO: 2549458 - RNA, 19 nt, Homo sapiens
  misc_RNA (1)...(19): siRNA sense strand
agcuggaacaugagacauu

SEQ ID NO: 2549459 - RNA, 19 nt, Homo sapiens
  misc_RNA (1)...(19): siRNA sense strand
ccaugcaguuccuggguga

SEQ ID NO: 2549460 - RNA, 19 nt, Homo sapiens
  misc_RNA (1)...(19): siRNA sense strand
augaggaaacggugcggaa

SEQ ID NO: 2549461 - RNA, 19 nt, Homo sapiens
  misc_RNA (1)...(19): siRNA sense strand
aggcgaucauggagcugaa

SEQ ID NO: 2549462 - RNA, 19 nt, Homo sapiens
  misc_RNA (1)...(19): siRNA sense strand
ccauuguguaugagcugaa

SEQ ID NO: 2549463 - RNA, 19 nt, Homo sapiens
  misc_RNA (1)...(19): siRNA sense strand
ccaagauggaguuugacau

SEQ ID NO: 2549464 - RNA, 19 nt, Homo sapiens
  misc_RNA (1)...(19): siRNA sense strand
cauuaaacccagagaacuc

SEQ ID NO: 2549465 - RNA, 19 nt, Homo sapiens
  misc_RNA (1)...(19): siRNA sense strand
aagaaugcgcugaacggua

SEQ ID NO: 2549466 - RNA, 19 nt, Homo sapiens
  misc_RNA (1)...(19): siRNA sense strand
cagccgugcaggagcagaa

SEQ ID NO: 2549467 - RNA, 19 nt, Homo sapiens
  misc_RNA (1)...(19): siRNA sense strand
cggccaagaaugcgcugaa

SEQ ID NO: 2549468 - RNA, 19 nt, Homo sapiens
  misc_RNA (1)...(19): siRNA sense strand
uggccaagagcaagcuaau

SEQ ID NO: 2549469 - RNA, 19 nt, Homo sapiens
  misc_RNA (1)...(19): siRNA sense strand
gagcaguauaugaaggaca

SEQ ID NO: 2549470 - RNA, 19 nt, Homo sapiens
  misc_RNA (1)...(19): siRNA sense strand
ggcaaugacuuuaugggaa

SEQ ID NO: 2549471 - RNA, 19 nt, Homo sapiens
  misc_RNA (1)...(19): siRNA sense strand
ucguauucaaagugggaaa

SEQ ID NO: 2549472 - RNA, 19 nt, Homo sapiens
  misc_RNA (1)...(19): siRNA sense strand
ggaugaagguucugcggca

SEQ ID NO: 2549473 - RNA, 19 nt, Homo sapiens
  misc_RNA (1)...(19): siRNA sense strand
gggaaauggaguaaaacaa

SEQ ID NO: 2549474 - RNA, 19 nt, Homo sapiens
  misc_RNA (1)...(19): siRNA sense strand
acuuagaagacuugaugaa

SEQ ID NO: 2549475 - RNA, 19 nt, Homo sapiens
  misc_RNA (1)...(19): siRNA sense strand
caacaguacagguggucau

SEQ ID NO: 2549476 - RNA, 19 nt, Homo sapiens
  misc_RNA (1)...(19): siRNA sense strand
gggaugaagcauuucgaga

SEQ ID NO: 2549477 - RNA, 19 nt, Homo sapiens
  misc_RNA (1)...(19): siRNA sense strand
augcaaugucagcagauaa

SEQ ID NO: 2549478 - RNA, 19 nt, Homo sapiens
  misc_RNA (1)...(19): siRNA sense strand
uaagauggauccagaggga

SEQ ID NO: 2549479 - RNA, 19 nt, Homo sapiens
  misc_RNA (1)...(19): siRNA sense strand
gggauuugggccugaggau

SEQ ID NO: 2549480 - RNA, 19 nt, Homo sapiens
  misc_RNA (1)...(19): siRNA sense strand
cggaaguugcagaaggugu

SEQ ID NO: 2549481 - RNA, 19 nt, Homo sapiens
  misc_RNA (1)...(19): siRNA sense strand
gagacuacaagcuuggcaa

SEQ ID NO: 2549482 - RNA, 19 nt, Homo sapiens
  misc_RNA (1)...(19): siRNA sense strand
cgggaggauauaaguucua

SEQ ID NO: 2549483 - RNA, 19 nt, Homo sapiens
  misc_RNA (1)...(19): siRNA sense strand
gcaaauuguuggaugaugc

SEQ ID NO: 2549484 - RNA, 19 nt, Homo sapiens
  misc_RNA (1)...(19): siRNA sense strand
acaauuauggcgucggaga

SEQ ID NO: 2549485 - RNA, 19 nt, Homo sapiens
  misc_RNA (1)...(19): siRNA sense strand
augcugauaaccaguguaa

SEQ ID NO: 2549486 - RNA, 19 nt, Homo sapiens
  misc_RNA (1)...(19): siRNA sense strand
gguucugcggcaugaggaa

SEQ ID NO: 2549487 - RNA, 19 nt, Homo sapiens
  misc_RNA (1)...(19): siRNA sense strand
uaaucuacugggaaugaaa

SEQ ID NO: 2549488 - RNA, 19 nt, Homo sapiens
  misc_RNA (1)...(19): siRNA sense strand
ggaagcaaauuguuggaug

SEQ ID NO: 2549489 - RNA, 19 nt, Homo sapiens
  misc_RNA (1)...(19): siRNA sense strand
gaagaaggcugcaaagcug

SEQ ID NO: 2549490 - RNA, 19 nt, Homo sapiens
  misc_RNA (1)...(19): siRNA sense strand
agauggauccagagggaag

SEQ ID NO: 2549491 - RNA, 19 nt, Homo sapiens
  misc_RNA (1)...(19): siRNA sense strand
ccgauaaguuggcucgaga

SEQ ID NO: 2549492 - RNA, 19 nt, Homo sapiens
  misc_RNA (1)...(19): siRNA sense strand
ggaaggugcagaaggagca

SEQ ID NO: 2549493 - RNA, 19 nt, Homo sapiens
  misc_RNA (1)...(19): siRNA sense strand
ggagaucaggaaacggcaa

SEQ ID NO: 2549494 - RNA, 19 nt, Homo sapiens
  misc_RNA (1)...(19): siRNA sense strand
augaaaagcaucaaggaga

SEQ ID NO: 2549495 - RNA, 19 nt, Homo sapiens
  misc_RNA (1)...(19): siRNA sense strand
cuguggauauagaggggaa

SEQ ID NO: 2549496 - RNA, 19 nt, Homo sapiens
  misc_RNA (1)...(19): siRNA sense strand
cagaaggagcaggccgaua

SEQ ID NO: 2549497 - RNA, 19 nt, Homo sapiens
  misc_RNA (1)...(19): siRNA sense strand
cgguucaagacaauaacua

SEQ ID NO: 2549498 - RNA, 19 nt, Homo sapiens
  misc_RNA (1)...(19): siRNA sense strand
gagaauauucagaacugga

SEQ ID NO: 2549499 - RNA, 19 nt, Homo sapiens
  misc_RNA (1)...(19): siRNA sense strand
aggaaaaccgugaggcuaa

SEQ ID NO: 2549500 - RNA, 19 nt, Homo sapiens
  misc_RNA (1)...(19): siRNA sense strand
aggcuuuggaggagaacaa

SEQ ID NO: 2549501 - RNA, 19 nt, Homo sapiens
  misc_RNA (1)...(19): siRNA sense strand
agagggaacacgagcgaga

SEQ ID NO: 2549502 - RNA, 19 nt, Homo sapiens
  misc_RNA (1)...(19): siRNA sense strand
cugcagaggaaagaagaaa

SEQ ID NO: 2549503 - RNA, 19 nt, Homo sapiens
  misc_RNA (1)...(19): siRNA sense strand
agaacaacaacuucagcaa

SEQ ID NO: 2549504 - RNA, 19 nt, Homo sapiens
  misc_RNA (1)...(19): siRNA sense strand
aagugaagcaaaucaacaa

SEQ ID NO: 2549505 - RNA, 19 nt, Homo sapiens
  misc_RNA (1)...(19): siRNA sense strand
gcugcagaggaaagaagaa

SEQ ID NO: 2549506 - RNA, 19 nt, Homo sapiens
  misc_RNA (1)...(19): siRNA sense strand
aggcccaggugcugaaaca

SEQ ID NO: 2549507 - RNA, 19 nt, Homo sapiens
  misc_RNA (1)...(19): siRNA sense strand
agaagaaacuggaggcugc

SEQ ID NO: 2549508 - RNA, 19 nt, Homo sapiens
  misc_RNA (1)...(19): siRNA sense strand
cuuuggaggagaacaacaa

SEQ ID NO: 2549509 - RNA, 19 nt, Homo sapiens
  misc_RNA (1)...(19): siRNA sense strand
uggaagugaagcaaaucaa

SEQ ID NO: 2549510 - RNA, 19 nt, Homo sapiens
  misc_RNA (1)...(19): siRNA sense strand
agaggaaagaagaaagucu

SEQ ID NO: 2549511 - RNA, 19 nt, Homo sapiens
  misc_RNA (1)...(19): siRNA sense strand
uugaagacacguugggaaa

SEQ ID NO: 2549512 - RNA, 19 nt, Homo sapiens
  misc_RNA (1)...(19): siRNA sense strand
agagauggguauagaacau

SEQ ID NO: 2549513 - RNA, 19 nt, Homo sapiens
  misc_RNA (1)...(19): siRNA sense strand
aaugaaacucucugggaua

SEQ ID NO: 2549514 - RNA, 19 nt, Homo sapiens
  misc_RNA (1)...(19): siRNA sense strand
aauaauuggaggagucaaa

SEQ ID NO: 2549515 - RNA, 19 nt, Homo sapiens
  misc_RNA (1)...(19): siRNA sense strand
caucaaagauuuaucgcau

SEQ ID NO: 2549516 - RNA, 19 nt, Homo sapiens
  misc_RNA (1)...(19): siRNA sense strand
agucaaaguucauguggau

SEQ ID NO: 2549517 - RNA, 19 nt, Homo sapiens
  misc_RNA (1)...(19): siRNA sense strand
aguagaacccauucagaua

SEQ ID NO: 2549518 - RNA, 19 nt, Homo sapiens
  misc_RNA (1)...(19): siRNA sense strand
ggaaagaaaccccgagcua

SEQ ID NO: 2549519 - RNA, 19 nt, Homo sapiens
  misc_RNA (1)...(19): siRNA sense strand
cggcuaaaggaaauugaaa

SEQ ID NO: 2549520 - RNA, 19 nt, Homo sapiens
  misc_RNA (1)...(19): siRNA sense strand
auaaaaugcaugagaggaa

SEQ ID NO: 2549521 - RNA, 19 nt, Homo sapiens
  misc_RNA (1)...(19): siRNA sense strand
aggaauaauuggaggaguc

SEQ ID NO: 2549522 - RNA, 19 nt, Homo sapiens
  misc_RNA (1)...(19): siRNA sense strand
cacuaaaggaucaacguaa

SEQ ID NO: 2549523 - RNA, 19 nt, Homo sapiens
  misc_RNA (1)...(19): siRNA sense strand
cugggaaagaggaagcaaa

SEQ ID NO: 2549524 - RNA, 19 nt, Homo sapiens
  misc_RNA (1)...(19): siRNA sense strand
gcuguuacccagagaauca

SEQ ID NO: 2549525 - RNA, 19 nt, Homo sapiens
  misc_RNA (1)...(19): siRNA sense strand
ugggaaagaggaagcaaau

SEQ ID NO: 2549526 - RNA, 19 nt, Homo sapiens
  misc_RNA (1)...(19): siRNA sense strand
acuuauagcagaaagccaa

SEQ ID NO: 2549527 - RNA, 19 nt, Homo sapiens
  misc_RNA (1)...(19): siRNA sense strand
agcuagaauuucaagacaa

SEQ ID NO: 2549528 - RNA, 19 nt, Homo sapiens
  misc_RNA (1)...(19): siRNA sense strand
uagccagacacuugauaaa

SEQ ID NO: 2549529 - RNA, 19 nt, Homo sapiens
  misc_RNA (1)...(19): siRNA sense strand
gaucauuguugcugggaag

SEQ ID NO: 2549530 - RNA, 19 nt, Homo sapiens
  misc_RNA (1)...(19): siRNA sense strand
gaagugagcuggaaggucu

SEQ ID NO: 2549531 - RNA, 19 nt, Homo sapiens
  misc_RNA (1)...(19): siRNA sense strand
cagagucggcuaaaggaaa

SEQ ID NO: 2549532 - RNA, 19 nt, Homo sapiens
  misc_RNA (1)...(19): siRNA sense strand
gggaaagaggaagcaaaua

SEQ ID NO: 2549533 - RNA, 19 nt, Homo sapiens
  misc_RNA (1)...(19): siRNA sense strand
ggcuaaaggaaauugaaaa

SEQ ID NO: 2549534 - RNA, 19 nt, Homo sapiens
  misc_RNA (1)...(19): siRNA sense strand
guugaagacacguugggaa

SEQ ID NO: 2549535 - RNA, 19 nt, Homo sapiens
  misc_RNA (1)...(19): siRNA sense strand
ugaccauguaugagaugaa

SEQ ID NO: 2549536 - RNA, 19 nt, Homo sapiens
  misc_RNA (1)...(19): siRNA sense strand
aagacaaaguagaucuaga

SEQ ID NO: 2549537 - RNA, 19 nt, Homo sapiens
  misc_RNA (1)...(19): siRNA sense strand
ucgcaaaacuccuggcuga

SEQ ID NO: 2549538 - RNA, 19 nt, Homo sapiens
  misc_RNA (1)...(19): siRNA sense strand
ccuacgaaucagugacaca

SEQ ID NO: 2549539 - RNA, 19 nt, Homo sapiens
  misc_RNA (1)...(19): siRNA sense strand
gggaaauauugaccagcca

SEQ ID NO: 2549540 - RNA, 19 nt, Homo sapiens
  misc_RNA (1)...(19): siRNA sense strand
gggcuuuggcucuugcaua

SEQ ID NO: 2549541 - RNA, 19 nt, Homo sapiens
  misc_RNA (1)...(19): siRNA sense strand
ccuaugaggaauaugguca

SEQ ID NO: 2549542 - RNA, 19 nt, Homo sapiens
  misc_RNA (1)...(19): siRNA sense strand
ggaucauuguugcugggaa

SEQ ID NO: 2549543 - RNA, 19 nt, Homo sapiens
  misc_RNA (1)...(19): siRNA sense strand
aaguagaucuagacagacu

SEQ ID NO: 2549544 - RNA, 19 nt, Homo sapiens
  misc_RNA (1)...(19): siRNA sense strand
gcucuugcauacaggcgaa

SEQ ID NO: 2549545 - RNA, 19 nt, Homo sapiens
  misc_RNA (1)...(19): siRNA sense strand
uccuuuaccuuguggaaau

SEQ ID NO: 2549546 - RNA, 19 nt, Homo sapiens
  misc_RNA (1)...(19): siRNA sense strand
caguuauauuuguggaucu

SEQ ID NO: 2549547 - RNA, 19 nt, Homo sapiens
  misc_RNA (1)...(19): siRNA sense strand
aaauaacccugguagucaa

SEQ ID NO: 2549548 - RNA, 19 nt, Homo sapiens
  misc_RNA (1)...(19): siRNA sense strand
ggcuguucguggucaguua

SEQ ID NO: 2549549 - RNA, 19 nt, Homo sapiens
  misc_RNA (1)...(19): siRNA sense strand
cacaaucgcaacaggcaaa

SEQ ID NO: 2549550 - RNA, 19 nt, Homo sapiens
  misc_RNA (1)...(19): siRNA sense strand
aaucagggcccacuggaaa

SEQ ID NO: 2549551 - RNA, 19 nt, Homo sapiens
  misc_RNA (1)...(19): siRNA sense strand
ugguagaacaacuugauuu

SEQ ID NO: 2549552 - RNA, 19 nt, Homo sapiens
  misc_RNA (1)...(19): siRNA sense strand
gguacaugggaaacaggua

SEQ ID NO: 2549553 - RNA, 19 nt, Homo sapiens
  misc_RNA (1)...(19): siRNA sense strand
uggaaagaguuuaccgugu

SEQ ID NO: 2549554 - RNA, 19 nt, Homo sapiens
  misc_RNA (1)...(19): siRNA sense strand
cuuauuugcagcuggguau

SEQ ID NO: 2549555 - RNA, 19 nt, Homo sapiens
  misc_RNA (1)...(19): siRNA sense strand
aagccauccugcuggguau

SEQ ID NO: 2549556 - RNA, 19 nt, Homo sapiens
  misc_RNA (1)...(19): siRNA sense strand
cggcagaagugagcuggaa

SEQ ID NO: 2549557 - RNA, 19 nt, Homo sapiens
  misc_RNA (1)...(19): siRNA sense strand
acuacaagccagcugaaau

SEQ ID NO: 2549558 - RNA, 19 nt, Homo sapiens
  misc_RNA (1)...(19): siRNA sense strand
aauggaagauguuggcuga

SEQ ID NO: 2549559 - RNA, 19 nt, Homo sapiens
  misc_RNA (1)...(19): siRNA sense strand
cugcauuugcccuggauga

SEQ ID NO: 2549560 - RNA, 19 nt, Homo sapiens
  misc_RNA (1)...(19): siRNA sense strand
agagucggcuaaaggaaau

SEQ ID NO: 2549561 - RNA, 19 nt, Homo sapiens
  misc_RNA (1)...(19): siRNA sense strand
acaugcagcuauuugacaa

SEQ ID NO: 2549562 - RNA, 19 nt, Homo sapiens
  misc_RNA (1)...(19): siRNA sense strand
auuagugaauggaaggaca

SEQ ID NO: 2549563 - RNA, 19 nt, Homo sapiens
  misc_RNA (1)...(19): siRNA sense strand
agauauggccucagcagga

SEQ ID NO: 2549564 - RNA, 19 nt, Homo sapiens
  misc_RNA (1)...(19): siRNA sense strand
ggaaggucuuggagcgaag

SEQ ID NO: 2549565 - RNA, 19 nt, Homo sapiens
  misc_RNA (1)...(19): siRNA sense strand
augaaacucucugggauaa

SEQ ID NO: 2549566 - RNA, 19 nt, Homo sapiens
  misc_RNA (1)...(19): siRNA sense strand
agucaacauugcugcugua

SEQ ID NO: 2549567 - RNA, 19 nt, Homo sapiens
  misc_RNA (1)...(19): siRNA sense strand
cugaucacauugagagagu

SEQ ID NO: 2549568 - RNA, 19 nt, Homo sapiens
  misc_RNA (1)...(19): siRNA sense strand
cugcuauaacugaggauga

SEQ ID NO: 2549569 - RNA, 19 nt, Homo sapiens
  misc_RNA (1)...(19): siRNA sense strand
aucugaagcccgagaauau

SEQ ID NO: 2549570 - RNA, 19 nt, Homo sapiens
  misc_RNA (1)...(19): siRNA sense strand
uguuugaccugaugcggaa

SEQ ID NO: 2549571 - RNA, 19 nt, Homo sapiens
  misc_RNA (1)...(19): siRNA sense strand
cuuaaaugcuccauggaug

SEQ ID NO: 2549572 - RNA, 19 nt, Homo sapiens
  misc_RNA (1)...(19): siRNA sense strand
agaaaggggagcagcagaa

SEQ ID NO: 2549573 - RNA, 19 nt, Homo sapiens
  misc_RNA (1)...(19): siRNA sense strand
cuucgagaguuguguggga

SEQ ID NO: 2549574 - RNA, 19 nt, Homo sapiens
  misc_RNA (1)...(19): siRNA sense strand
agaaugcacuguugaggga

SEQ ID NO: 2549575 - RNA, 19 nt, Homo sapiens
  misc_RNA (1)...(19): siRNA sense strand
ggucagugcugguggccau

SEQ ID NO: 2549576 - RNA, 19 nt, Homo sapiens
  misc_RNA (1)...(19): siRNA sense strand
uggugggcuucgugggaaa

SEQ ID NO: 2549577 - RNA, 19 nt, Homo sapiens
  misc_RNA (1)...(19): siRNA sense strand
gcuuaugaccaauguaaaa

SEQ ID NO: 2549578 - RNA, 19 nt, Homo sapiens
  misc_RNA (1)...(19): siRNA sense strand
gcaucaugaagguguggaa

SEQ ID NO: 2549579 - RNA, 19 nt, Homo sapiens
  misc_RNA (1)...(19): siRNA sense strand
guagcuuggcuguggguau

SEQ ID NO: 2549580 - RNA, 19 nt, Homo sapiens
  misc_RNA (1)...(19): siRNA sense strand
uugaaagguguauggaaau

SEQ ID NO: 2549581 - RNA, 19 nt, Homo sapiens
  misc_RNA (1)...(19): siRNA sense strand
ccacuuugccggaggguac

SEQ ID NO: 2549582 - RNA, 19 nt, Homo sapiens
  misc_RNA (1)...(19): siRNA sense strand
caaucguugugguggccaa

SEQ ID NO: 2549583 - RNA, 19 nt, Homo sapiens
  misc_RNA (1)...(19): siRNA sense strand
gggaaggcuugaaaggugu

SEQ ID NO: 2549584 - RNA, 19 nt, Homo sapiens
  misc_RNA (1)...(19): siRNA sense strand
gcugaagaguuuaugucga

SEQ ID NO: 2549585 - RNA, 19 nt, Homo sapiens
  misc_RNA (1)...(19): siRNA sense strand
gguguauggaaauggauga

SEQ ID NO: 2549586 - RNA, 19 nt, Homo sapiens
  misc_RNA (1)...(19): siRNA sense strand
uggaaauggaugauaacca

SEQ ID NO: 2549587 - RNA, 19 nt, Homo sapiens
  misc_RNA (1)...(19): siRNA sense strand
aggaaacaccagcuggcaa

SEQ ID NO: 2549588 - RNA, 19 nt, Homo sapiens
  misc_RNA (1)...(19): siRNA sense strand
ccuucacaaugcuuggaaa

SEQ ID NO: 2549589 - RNA, 19 nt, Homo sapiens
  misc_RNA (1)...(19): siRNA sense strand
ucggaagaguucagggaag

SEQ ID NO: 2549590 - RNA, 19 nt, Homo sapiens
  misc_RNA (1)...(19): siRNA sense strand
ucucagagucucaggaaac

SEQ ID NO: 2549591 - RNA, 19 nt, Homo sapiens
  misc_RNA (1)...(19): siRNA sense strand
gucucagagucucaggaaa

SEQ ID NO: 2549592 - RNA, 19 nt, Homo sapiens
  misc_RNA (1)...(19): siRNA sense strand
ccgccaagaaggagagcua

SEQ ID NO: 2549593 - RNA, 19 nt, Homo sapiens
  misc_RNA (1)...(19): siRNA sense strand
aggugaagcuggugaacau

SEQ ID NO: 2549594 - RNA, 19 nt, Homo sapiens
  misc_RNA (1)...(19): siRNA sense strand
agaagaagcgggagcggaa

SEQ ID NO: 2549595 - RNA, 19 nt, Homo sapiens
  misc_RNA (1)...(19): siRNA sense strand
ccacaaagacccugcccaa

SEQ ID NO: 2549596 - RNA, 19 nt, Homo sapiens
  misc_RNA (1)...(19): siRNA sense strand
cggagauggagaagcauaa

SEQ ID NO: 2549597 - RNA, 19 nt, Homo sapiens
  misc_RNA (1)...(19): siRNA sense strand
gagaagaugcucaaggaga

SEQ ID NO: 2549598 - RNA, 19 nt, Homo sapiens
  misc_RNA (1)...(19): siRNA sense strand
uggccuggguggaggagaa

SEQ ID NO: 2549599 - RNA, 19 nt, Homo sapiens
  misc_RNA (1)...(19): siRNA sense strand
aggagaaggaggcggagaa

SEQ ID NO: 2549600 - RNA, 19 nt, Homo sapiens
  misc_RNA (1)...(19): siRNA sense strand
agaaggaggcggagaacga

SEQ ID NO: 2549601 - RNA, 19 nt, Homo sapiens
  misc_RNA (1)...(19): siRNA sense strand
cggaauacuucacggcaga

SEQ ID NO: 2549602 - RNA, 19 nt, Homo sapiens
  misc_RNA (1)...(19): siRNA sense strand
ggaucacaguggagaagau

SEQ ID NO: 2549603 - RNA, 19 nt, Homo sapiens
  misc_RNA (1)...(19): siRNA sense strand
agauggaggagcugagcaa

SEQ ID NO: 2549604 - RNA, 19 nt, Homo sapiens
  misc_RNA (1)...(19): siRNA sense strand
gggcauuugaagagacaca

SEQ ID NO: 2549605 - RNA, 19 nt, Homo sapiens
  misc_RNA (1)...(19): siRNA sense strand
gcgagaaggucgaggagug

SEQ ID NO: 2549606 - RNA, 19 nt, Homo sapiens
  misc_RNA (1)...(19): siRNA sense strand
aggaggaggcugagaagau

SEQ ID NO: 2549607 - RNA, 19 nt, Homo sapiens
  misc_RNA (1)...(19): siRNA sense strand
aggcggagauccaggccaa

SEQ ID NO: 2549608 - RNA, 19 nt, Homo sapiens
  misc_RNA (1)...(19): siRNA sense strand
ucggcaaguuccagggcaa

SEQ ID NO: 2549609 - RNA, 19 nt, Homo sapiens
  misc_RNA (1)...(19): siRNA sense strand
uggaugaggcugugcggaa

SEQ ID NO: 2549610 - RNA, 19 nt, Homo sapiens
  misc_RNA (1)...(19): siRNA sense strand
gcggagauggagaagcaua

SEQ ID NO: 2549611 - RNA, 19 nt, Homo sapiens
  misc_RNA (1)...(19): siRNA sense strand
uggaggagcaggagcagaa

SEQ ID NO: 2549612 - RNA, 19 nt, Homo sapiens
  misc_RNA (1)...(19): siRNA sense strand
ccaagaagcccaaggucca

SEQ ID NO: 2549613 - RNA, 19 nt, Homo sapiens
  misc_RNA (1)...(19): siRNA sense strand
agaagaaccugcuggacga

SEQ ID NO: 2549614 - RNA, 19 nt, Homo sapiens
  misc_RNA (1)...(19): siRNA sense strand
cuacaaugcccugaagaaa

SEQ ID NO: 2549615 - RNA, 19 nt, Homo sapiens
  misc_RNA (1)...(19): siRNA sense strand
ugaaggagaagaagaucaa

SEQ ID NO: 2549616 - RNA, 19 nt, Homo sapiens
  misc_RNA (1)...(19): siRNA sense strand
cugaacaagagcuggagaa

SEQ ID NO: 2549617 - RNA, 19 nt, Homo sapiens
  misc_RNA (1)...(19): siRNA sense strand
uggaggaggcugugcguau

SEQ ID NO: 2549618 - RNA, 19 nt, Homo sapiens
  misc_RNA (1)...(19): siRNA sense strand
gagcugaaggagaagaaga

SEQ ID NO: 2549619 - RNA, 19 nt, Homo sapiens
  misc_RNA (1)...(19): siRNA sense strand
gugccagagguuugcgaaa

SEQ ID NO: 2549620 - RNA, 19 nt, Homo sapiens
  misc_RNA (1)...(19): siRNA sense strand
gggccuuggcagagaagau

SEQ ID NO: 2549621 - RNA, 19 nt, Homo sapiens
  misc_RNA (1)...(19): siRNA sense strand
gcaaggucaccguggagaa

SEQ ID NO: 2549622 - RNA, 19 nt, Homo sapiens
  misc_RNA (1)...(19): siRNA sense strand
aggcaaaggcacaggcgga

SEQ ID NO: 2549623 - RNA, 19 nt, Homo sapiens
  misc_RNA (1)...(19): siRNA sense strand
aggaggaggaggugggcuu

SEQ ID NO: 2549624 - RNA, 19 nt, Homo sapiens
  misc_RNA (1)...(19): siRNA sense strand
aggacgagagccagcguaa

SEQ ID NO: 2549625 - RNA, 19 nt, Homo sapiens
  misc_RNA (1)...(19): siRNA sense strand
agaaggagcaggagcuaca

SEQ ID NO: 2549626 - RNA, 19 nt, Homo sapiens
  misc_RNA (1)...(19): siRNA sense strand
acgcggagauggagaagca

SEQ ID NO: 2549627 - RNA, 19 nt, Homo sapiens
  misc_RNA (1)...(19): siRNA sense strand
ggcaggagcuguugcguca

SEQ ID NO: 2549628 - RNA, 19 nt, Homo sapiens
  misc_RNA (1)...(19): siRNA sense strand
acacggagacgcuggagaa

SEQ ID NO: 2549629 - RNA, 19 nt, Homo sapiens
  misc_RNA (1)...(19): siRNA sense strand
agaccgaccaccagaagaa

SEQ ID NO: 2549630 - RNA, 19 nt, Homo sapiens
  misc_RNA (1)...(19): siRNA sense strand
aggaggagcugcuggcuga

SEQ ID NO: 2549631 - RNA, 19 nt, Homo sapiens
  misc_RNA (1)...(19): siRNA sense strand
agaagaagaucaaggagcu

SEQ ID NO: 2549632 - RNA, 19 nt, Homo sapiens
  misc_RNA (1)...(19): siRNA sense strand
auggagaagcauaagaaau

SEQ ID NO: 2549633 - RNA, 19 nt, Homo sapiens
  misc_RNA (1)...(19): siRNA sense strand
gaggagacaagaagggcau

SEQ ID NO: 2549634 - RNA, 19 nt, Homo sapiens
  misc_RNA (1)...(19): siRNA sense strand
ugucaguguacgaggccua

SEQ ID NO: 2549635 - RNA, 19 nt, Homo sapiens
  misc_RNA (1)...(19): siRNA sense strand
uggaggagaucgagcgcca

SEQ ID NO: 2549636 - RNA, 19 nt, Homo sapiens
  misc_RNA (1)...(19): siRNA sense strand
agaccaaccuggagaaccu

SEQ ID NO: 2549637 - RNA, 19 nt, Homo sapiens
  misc_RNA (1)...(19): siRNA sense strand
ugaaugagaaggaggagga

SEQ ID NO: 2549638 - RNA, 19 nt, Homo sapiens
  misc_RNA (1)...(19): siRNA sense strand
cugaaggagaagaagauca

SEQ ID NO: 2549639 - RNA, 19 nt, Homo sapiens
  misc_RNA (1)...(19): siRNA sense strand
cugagaagcagaaggagga

SEQ ID NO: 2549640 - RNA, 19 nt, Homo sapiens
  misc_RNA (1)...(19): siRNA sense strand
uggcagagaagaugcucaa

SEQ ID NO: 2549641 - RNA, 19 nt, Homo sapiens
  misc_RNA (1)...(19): siRNA sense strand
uggaacgggacuuggacaa

SEQ ID NO: 2549642 - RNA, 19 nt, Homo sapiens
  misc_RNA (1)...(19): siRNA sense strand
uggacaaggcggauagcau

SEQ ID NO: 2549643 - RNA, 19 nt, Homo sapiens
  misc_RNA (1)...(19): siRNA sense strand
augagaaggaggaggagga

SEQ ID NO: 2549644 - RNA, 19 nt, Homo sapiens
  misc_RNA (1)...(19): siRNA sense strand
acgagaaggaacagcugaa

SEQ ID NO: 2549645 - RNA, 19 nt, Homo sapiens
  misc_RNA (1)...(19): siRNA sense strand
cugaggagcgcgugcagaa

SEQ ID NO: 2549646 - RNA, 19 nt, Homo sapiens
  misc_RNA (1)...(19): siRNA sense strand
uggaggacaccaaggagaa

SEQ ID NO: 2549647 - RNA, 19 nt, Homo sapiens
  misc_RNA (1)...(19): siRNA sense strand
gcaucuaccuggaggacac

SEQ ID NO: 2549648 - RNA, 19 nt, Homo sapiens
  misc_RNA (1)...(19): siRNA sense strand
ccaugaagaaggagcugau

SEQ ID NO: 2549649 - RNA, 19 nt, Homo sapiens
  misc_RNA (1)...(19): siRNA sense strand
cggaggacaugacggccaa

SEQ ID NO: 2549650 - RNA, 19 nt, Homo sapiens
  misc_RNA (1)...(19): siRNA sense strand
cagccaaggaggccgacaa

SEQ ID NO: 2549651 - RNA, 19 nt, Homo sapiens
  misc_RNA (1)...(19): siRNA sense strand
agaacagguccaagggcau

SEQ ID NO: 2549652 - RNA, 19 nt, Homo sapiens
  misc_RNA (1)...(19): siRNA sense strand
aggcggagaucgcgcucaa

SEQ ID NO: 2549653 - RNA, 19 nt, Homo sapiens
  misc_RNA (1)...(19): siRNA sense strand
acgccaaggccuacaguga

SEQ ID NO: 2549654 - RNA, 19 nt, Homo sapiens
  misc_RNA (1)...(19): siRNA sense strand
gaagagacacagaucgaca

SEQ ID NO: 2549655 - RNA, 19 nt, Homo sapiens
  misc_RNA (1)...(19): siRNA sense strand
gcgacgacaccaagggcuu

SEQ ID NO: 2549656 - RNA, 19 nt, Homo sapiens
  misc_RNA (1)...(19): siRNA sense strand
ucuacaaugcccugaagaa

SEQ ID NO: 2549657 - RNA, 19 nt, Homo sapiens
  misc_RNA (1)...(19): siRNA sense strand
gcgacgacaccaagggcuu

SEQ ID NO: 2549658 - RNA, 19 nt, Homo sapiens
  misc_RNA (1)...(19): siRNA sense strand
agaaggaacagcugaacga

SEQ ID NO: 2549659 - RNA, 19 nt, Homo sapiens
  misc_RNA (1)...(19): siRNA sense strand
aggccgaggcugagaagca

SEQ ID NO: 2549660 - RNA, 19 nt, Homo sapiens
  misc_RNA (1)...(19): siRNA sense strand
agaucgcgcucaaggagaa

SEQ ID NO: 2549661 - RNA, 19 nt, Homo sapiens
  misc_RNA (1)...(19): siRNA sense strand
agaaggagcuugcgcagga

SEQ ID NO: 2549662 - RNA, 19 nt, Homo sapiens
  misc_RNA (1)...(19): siRNA sense strand
ccgagaaggucuuggcccu

SEQ ID NO: 2549663 - RNA, 19 nt, Homo sapiens
  misc_RNA (1)...(19): siRNA sense strand
ucaacgaggcugugaagga

SEQ ID NO: 2549664 - RNA, 19 nt, Homo sapiens
  misc_RNA (1)...(19): siRNA sense strand
uugagaagacagagaucau

SEQ ID NO: 2549665 - RNA, 19 nt, Homo sapiens
  misc_RNA (1)...(19): siRNA sense strand
ccgccaagaaggagagcua

SEQ ID NO: 2549666 - RNA, 19 nt, Homo sapiens
  misc_RNA (1)...(19): siRNA sense strand
aggugaagcuggugaacau

SEQ ID NO: 2549667 - RNA, 19 nt, Homo sapiens
  misc_RNA (1)...(19): siRNA sense strand
agaagaagcgggagcggaa

SEQ ID NO: 2549668 - RNA, 19 nt, Homo sapiens
  misc_RNA (1)...(19): siRNA sense strand
ccacaaagacccugcccaa

SEQ ID NO: 2549669 - RNA, 19 nt, Homo sapiens
  misc_RNA (1)...(19): siRNA sense strand
cggagauggagaagcauaa

SEQ ID NO: 2549670 - RNA, 19 nt, Homo sapiens
  misc_RNA (1)...(19): siRNA sense strand
gagaagaugcucaaggaga

SEQ ID NO: 2549671 - RNA, 19 nt, Homo sapiens
  misc_RNA (1)...(19): siRNA sense strand
uggccuggguggaggagaa

SEQ ID NO: 2549672 - RNA, 19 nt, Homo sapiens
  misc_RNA (1)...(19): siRNA sense strand
aggagaaggaggcggagaa

SEQ ID NO: 2549673 - RNA, 19 nt, Homo sapiens
  misc_RNA (1)...(19): siRNA sense strand
agaaggaggcggagaacga

SEQ ID NO: 2549674 - RNA, 19 nt, Homo sapiens
  misc_RNA (1)...(19): siRNA sense strand
cggaauacuucacggcaga

SEQ ID NO: 2549675 - RNA, 19 nt, Homo sapiens
  misc_RNA (1)...(19): siRNA sense strand
ggaucacaguggagaagau

SEQ ID NO: 2549676 - RNA, 19 nt, Homo sapiens
  misc_RNA (1)...(19): siRNA sense strand
agauggaggagcugagcaa

SEQ ID NO: 2549677 - RNA, 19 nt, Homo sapiens
  misc_RNA (1)...(19): siRNA sense strand
gggcauuugaagagacaca

SEQ ID NO: 2549678 - RNA, 19 nt, Homo sapiens
  misc_RNA (1)...(19): siRNA sense strand
gcgagaaggucgaggagug

SEQ ID NO: 2549679 - RNA, 19 nt, Homo sapiens
  misc_RNA (1)...(19): siRNA sense strand
aggaggaggcugagaagau

SEQ ID NO: 2549680 - RNA, 19 nt, Homo sapiens
  misc_RNA (1)...(19): siRNA sense strand
aggcggagauccaggccaa

SEQ ID NO: 2549681 - RNA, 19 nt, Homo sapiens
  misc_RNA (1)...(19): siRNA sense strand
ucggcaaguuccagggcaa

SEQ ID NO: 2549682 - RNA, 19 nt, Homo sapiens
  misc_RNA (1)...(19): siRNA sense strand
uggaugaggcugugcggaa

SEQ ID NO: 2549683 - RNA, 19 nt, Homo sapiens
  misc_RNA (1)...(19): siRNA sense strand
gcggagauggagaagcaua

SEQ ID NO: 2549684 - RNA, 19 nt, Homo sapiens
  misc_RNA (1)...(19): siRNA sense strand
uggaggagcaggagcagaa

SEQ ID NO: 2549685 - RNA, 19 nt, Homo sapiens
  misc_RNA (1)...(19): siRNA sense strand
ccaagaagcccaaggucca

SEQ ID NO: 2549686 - RNA, 19 nt, Homo sapiens
  misc_RNA (1)...(19): siRNA sense strand
agaagaaccugcuggacga

SEQ ID NO: 2549687 - RNA, 19 nt, Homo sapiens
  misc_RNA (1)...(19): siRNA sense strand
cuacaaugcccugaagaaa

SEQ ID NO: 2549688 - RNA, 19 nt, Homo sapiens
  misc_RNA (1)...(19): siRNA sense strand
ugaaggagaagaagaucaa

SEQ ID NO: 2549689 - RNA, 19 nt, Homo sapiens
  misc_RNA (1)...(19): siRNA sense strand
cugaacaagagcuggagaa

SEQ ID NO: 2549690 - RNA, 19 nt, Homo sapiens
  misc_RNA (1)...(19): siRNA sense strand
uggaggaggcugugcguau

SEQ ID NO: 2549691 - RNA, 19 nt, Homo sapiens
  misc_RNA (1)...(19): siRNA sense strand
gagcugaaggagaagaaga

SEQ ID NO: 2549692 - RNA, 19 nt, Homo sapiens
  misc_RNA (1)...(19): siRNA sense strand
gugccagagguuugcgaaa

SEQ ID NO: 2549693 - RNA, 19 nt, Homo sapiens
  misc_RNA (1)...(19): siRNA sense strand
gggccuuggcagagaagau

SEQ ID NO: 2549694 - RNA, 19 nt, Homo sapiens
  misc_RNA (1)...(19): siRNA sense strand
gcaaggucaccguggagaa

SEQ ID NO: 2549695 - RNA, 19 nt, Homo sapiens
  misc_RNA (1)...(19): siRNA sense strand
aggcaaaggcacaggcgga

SEQ ID NO: 2549696 - RNA, 19 nt, Homo sapiens
  misc_RNA (1)...(19): siRNA sense strand
aggaggaggaggugggcuu

SEQ ID NO: 2549697 - RNA, 19 nt, Homo sapiens
  misc_RNA (1)...(19): siRNA sense strand
aggacgagagccagcguaa

SEQ ID NO: 2549698 - RNA, 19 nt, Homo sapiens
  misc_RNA (1)...(19): siRNA sense strand
agaaggagcaggagcuaca

SEQ ID NO: 2549699 - RNA, 19 nt, Homo sapiens
  misc_RNA (1)...(19): siRNA sense strand
acgcggagauggagaagca

SEQ ID NO: 2549700 - RNA, 19 nt, Homo sapiens
  misc_RNA (1)...(19): siRNA sense strand
ggcaggagcuguugcguca

SEQ ID NO: 2549701 - RNA, 19 nt, Homo sapiens
  misc_RNA (1)...(19): siRNA sense strand
acacggagacgcuggagaa

SEQ ID NO: 2549702 - RNA, 19 nt, Homo sapiens
  misc_RNA (1)...(19): siRNA sense strand
agaccgaccaccagaagaa

SEQ ID NO: 2549703 - RNA, 19 nt, Homo sapiens
  misc_RNA (1)...(19): siRNA sense strand
aggaggagcugcuggcuga

SEQ ID NO: 2549704 - RNA, 19 nt, Homo sapiens
  misc_RNA (1)...(19): siRNA sense strand
agaagaagaucaaggagcu

SEQ ID NO: 2549705 - RNA, 19 nt, Homo sapiens
  misc_RNA (1)...(19): siRNA sense strand
auggagaagcauaagaaau

SEQ ID NO: 2549706 - RNA, 19 nt, Homo sapiens
  misc_RNA (1)...(19): siRNA sense strand
gaggagacaagaagggcau

SEQ ID NO: 2549707 - RNA, 19 nt, Homo sapiens
  misc_RNA (1)...(19): siRNA sense strand
ugucaguguacgaggccua

SEQ ID NO: 2549708 - RNA, 19 nt, Homo sapiens
  misc_RNA (1)...(19): siRNA sense strand
uggaggagaucgagcgcca

SEQ ID NO: 2549709 - RNA, 19 nt, Homo sapiens
  misc_RNA (1)...(19): siRNA sense strand
agaccaaccuggagaaccu

SEQ ID NO: 2549710 - RNA, 19 nt, Homo sapiens
  misc_RNA (1)...(19): siRNA sense strand
ugaaugagaaggaggagga

SEQ ID NO: 2549711 - RNA, 19 nt, Homo sapiens
  misc_RNA (1)...(19): siRNA sense strand
cugaaggagaagaagauca

SEQ ID NO: 2549712 - RNA, 19 nt, Homo sapiens
  misc_RNA (1)...(19): siRNA sense strand
cugagaagcagaaggagga

SEQ ID NO: 2549713 - RNA, 19 nt, Homo sapiens
  misc_RNA (1)...(19): siRNA sense strand
uggcagagaagaugcucaa

SEQ ID NO: 2549714 - RNA, 19 nt, Homo sapiens
  misc_RNA (1)...(19): siRNA sense strand
uggaacgggacuuggacaa

SEQ ID NO: 2549715 - RNA, 19 nt, Homo sapiens
  misc_RNA (1)...(19): siRNA sense strand
uggacaaggcggauagcau

SEQ ID NO: 2549716 - RNA, 19 nt, Homo sapiens
  misc_RNA (1)...(19): siRNA sense strand
augagaaggaggaggagga

SEQ ID NO: 2549717 - RNA, 19 nt, Homo sapiens
  misc_RNA (1)...(19): siRNA sense strand
acgagaaggaacagcugaa

SEQ ID NO: 2549718 - RNA, 19 nt, Homo sapiens
  misc_RNA (1)...(19): siRNA sense strand
cugaggagcgcgugcagaa

SEQ ID NO: 2549719 - RNA, 19 nt, Homo sapiens
  misc_RNA (1)...(19): siRNA sense strand
uggaggacaccaaggagaa

SEQ ID NO: 2549720 - RNA, 19 nt, Homo sapiens
  misc_RNA (1)...(19): siRNA sense strand
gcaucuaccuggaggacac

SEQ ID NO: 2549721 - RNA, 19 nt, Homo sapiens
  misc_RNA (1)...(19): siRNA sense strand
ccaugaagaaggagcugau

SEQ ID NO: 2549722 - RNA, 19 nt, Homo sapiens
  misc_RNA (1)...(19): siRNA sense strand
cggaggacaugacggccaa

SEQ ID NO: 2549723 - RNA, 19 nt, Homo sapiens
  misc_RNA (1)...(19): siRNA sense strand
cagccaaggaggccgacaa

SEQ ID NO: 2549724 - RNA, 19 nt, Homo sapiens
  misc_RNA (1)...(19): siRNA sense strand
agaacagguccaagggcau

SEQ ID NO: 2549725 - RNA, 19 nt, Homo sapiens
  misc_RNA (1)...(19): siRNA sense strand
aggcggagaucgcgcucaa

SEQ ID NO: 2549726 - RNA, 19 nt, Homo sapiens
  misc_RNA (1)...(19): siRNA sense strand
acgccaaggccuacaguga

SEQ ID NO: 2549727 - RNA, 19 nt, Homo sapiens
  misc_RNA (1)...(19): siRNA sense strand
gaagagacacagaucgaca

SEQ ID NO: 2549728 - RNA, 19 nt, Homo sapiens
  misc_RNA (1)...(19): siRNA sense strand
gcgacgacaccaagggcuu

SEQ ID NO: 2549729 - RNA, 19 nt, Homo sapiens
  misc_RNA (1)...(19): siRNA sense strand
ucuacaaugcccugaagaa

SEQ ID NO: 2549730 - RNA, 19 nt, Homo sapiens
  misc_RNA (1)...(19): siRNA sense strand
gcgacgacaccaagggcuu

SEQ ID NO: 2549731 - RNA, 19 nt, Homo sapiens
  misc_RNA (1)...(19): siRNA sense strand
agaaggaacagcugaacga

SEQ ID NO: 2549732 - RNA, 19 nt, Homo sapiens
  misc_RNA (1)...(19): siRNA sense strand
aggccgaggcugagaagca

SEQ ID NO: 2549733 - RNA, 19 nt, Homo sapiens
  misc_RNA (1)...(19): siRNA sense strand
agaucgcgcucaaggagaa

SEQ ID NO: 2549734 - RNA, 19 nt, Homo sapiens
  misc_RNA (1)...(19): siRNA sense strand
agaaggagcuugcgcagga

SEQ ID NO: 2549735 - RNA, 19 nt, Homo sapiens
  misc_RNA (1)...(19): siRNA sense strand
ccgagaaggucuuggcccu

SEQ ID NO: 2549736 - RNA, 19 nt, Homo sapiens
  misc_RNA (1)...(19): siRNA sense strand
ucaacgaggcugugaagga

SEQ ID NO: 2549737 - RNA, 19 nt, Homo sapiens
  misc_RNA (1)...(19): siRNA sense strand
uugagaagacagagaucau

SEQ ID NO: 2549738 - RNA, 19 nt, Homo sapiens
  misc_RNA (1)...(19): siRNA sense strand
ccgccaagaaggagagcua

SEQ ID NO: 2549739 - RNA, 19 nt, Homo sapiens
  misc_RNA (1)...(19): siRNA sense strand
aggugaagcuggugaacau

SEQ ID NO: 2549740 - RNA, 19 nt, Homo sapiens
  misc_RNA (1)...(19): siRNA sense strand
agaagaagcgggagcggaa

SEQ ID NO: 2549741 - RNA, 19 nt, Homo sapiens
  misc_RNA (1)...(19): siRNA sense strand
ccacaaagacccugcccaa

SEQ ID NO: 2549742 - RNA, 19 nt, Homo sapiens
  misc_RNA (1)...(19): siRNA sense strand
cggagauggagaagcauaa

SEQ ID NO: 2549743 - RNA, 19 nt, Homo sapiens
  misc_RNA (1)...(19): siRNA sense strand
gagaagaugcucaaggaga

SEQ ID NO: 2549744 - RNA, 19 nt, Homo sapiens
  misc_RNA (1)...(19): siRNA sense strand
uggccuggguggaggagaa

SEQ ID NO: 2549745 - RNA, 19 nt, Homo sapiens
  misc_RNA (1)...(19): siRNA sense strand
aggagaaggaggcggagaa

SEQ ID NO: 2549746 - RNA, 19 nt, Homo sapiens
  misc_RNA (1)...(19): siRNA sense strand
agaaggaggcggagaacga

SEQ ID NO: 2549747 - RNA, 19 nt, Homo sapiens
  misc_RNA (1)...(19): siRNA sense strand
cggaauacuucacggcaga

SEQ ID NO: 2549748 - RNA, 19 nt, Homo sapiens
  misc_RNA (1)...(19): siRNA sense strand
ggaucacaguggagaagau

SEQ ID NO: 2549749 - RNA, 19 nt, Homo sapiens
  misc_RNA (1)...(19): siRNA sense strand
agauggaggagcugagcaa

SEQ ID NO: 2549750 - RNA, 19 nt, Homo sapiens
  misc_RNA (1)...(19): siRNA sense strand
gggcauuugaagagacaca

SEQ ID NO: 2549751 - RNA, 19 nt, Homo sapiens
  misc_RNA (1)...(19): siRNA sense strand
gcgagaaggucgaggagug

SEQ ID NO: 2549752 - RNA, 19 nt, Homo sapiens
  misc_RNA (1)...(19): siRNA sense strand
aggaggaggcugagaagau

SEQ ID NO: 2549753 - RNA, 19 nt, Homo sapiens
  misc_RNA (1)...(19): siRNA sense strand
aggcggagauccaggccaa

SEQ ID NO: 2549754 - RNA, 19 nt, Homo sapiens
  misc_RNA (1)...(19): siRNA sense strand
ucggcaaguuccagggcaa

SEQ ID NO: 2549755 - RNA, 19 nt, Homo sapiens
  misc_RNA (1)...(19): siRNA sense strand
uggaugaggcugugcggaa

SEQ ID NO: 2549756 - RNA, 19 nt, Homo sapiens
  misc_RNA (1)...(19): siRNA sense strand
gcggagauggagaagcaua

SEQ ID NO: 2549757 - RNA, 19 nt, Homo sapiens
  misc_RNA (1)...(19): siRNA sense strand
uggaggagcaggagcagaa

SEQ ID NO: 2549758 - RNA, 19 nt, Homo sapiens
  misc_RNA (1)...(19): siRNA sense strand
ccaagaagcccaaggucca

SEQ ID NO: 2549759 - RNA, 19 nt, Homo sapiens
  misc_RNA (1)...(19): siRNA sense strand
agaagaaccugcuggacga

SEQ ID NO: 2549760 - RNA, 19 nt, Homo sapiens
  misc_RNA (1)...(19): siRNA sense strand
cuacaaugcccugaagaaa

SEQ ID NO: 2549761 - RNA, 19 nt, Homo sapiens
  misc_RNA (1)...(19): siRNA sense strand
ugaaggagaagaagaucaa

SEQ ID NO: 2549762 - RNA, 19 nt, Homo sapiens
  misc_RNA (1)...(19): siRNA sense strand
cugaacaagagcuggagaa

SEQ ID NO: 2549763 - RNA, 19 nt, Homo sapiens
  misc_RNA (1)...(19): siRNA sense strand
uggaggaggcugugcguau

SEQ ID NO: 2549764 - RNA, 19 nt, Homo sapiens
  misc_RNA (1)...(19): siRNA sense strand
gagcugaaggagaagaaga

SEQ ID NO: 2549765 - RNA, 19 nt, Homo sapiens
  misc_RNA (1)...(19): siRNA sense strand
gugccagagguuugcgaaa

SEQ ID NO: 2549766 - RNA, 19 nt, Homo sapiens
  misc_RNA (1)...(19): siRNA sense strand
gggccuuggcagagaagau

SEQ ID NO: 2549767 - RNA, 19 nt, Homo sapiens
  misc_RNA (1)...(19): siRNA sense strand
gcaaggucaccguggagaa

SEQ ID NO: 2549768 - RNA, 19 nt, Homo sapiens
  misc_RNA (1)...(19): siRNA sense strand
aggcaaaggcacaggcgga

SEQ ID NO: 2549769 - RNA, 19 nt, Homo sapiens
  misc_RNA (1)...(19): siRNA sense strand
aggaggaggaggugggcuu

SEQ ID NO: 2549770 - RNA, 19 nt, Homo sapiens
  misc_RNA (1)...(19): siRNA sense strand
aggacgagagccagcguaa

SEQ ID NO: 2549771 - RNA, 19 nt, Homo sapiens
  misc_RNA (1)...(19): siRNA sense strand
agaaggagcaggagcuaca

SEQ ID NO: 2549772 - RNA, 19 nt, Homo sapiens
  misc_RNA (1)...(19): siRNA sense strand
acgcggagauggagaagca

SEQ ID NO: 2549773 - RNA, 19 nt, Homo sapiens
  misc_RNA (1)...(19): siRNA sense strand
ggcaggagcuguugcguca

SEQ ID NO: 2549774 - RNA, 19 nt, Homo sapiens
  misc_RNA (1)...(19): siRNA sense strand
acacggagacgcuggagaa

SEQ ID NO: 2549775 - RNA, 19 nt, Homo sapiens
  misc_RNA (1)...(19): siRNA sense strand
agaccgaccaccagaagaa

SEQ ID NO: 2549776 - RNA, 19 nt, Homo sapiens
  misc_RNA (1)...(19): siRNA sense strand
aggaggagcugcuggcuga

SEQ ID NO: 2549777 - RNA, 19 nt, Homo sapiens
  misc_RNA (1)...(19): siRNA sense strand
agaagaagaucaaggagcu

SEQ ID NO: 2549778 - RNA, 19 nt, Homo sapiens
  misc_RNA (1)...(19): siRNA sense strand
auggagaagcauaagaaau

SEQ ID NO: 2549779 - RNA, 19 nt, Homo sapiens
  misc_RNA (1)...(19): siRNA sense strand
gaggagacaagaagggcau

SEQ ID NO: 2549780 - RNA, 19 nt, Homo sapiens
  misc_RNA (1)...(19): siRNA sense strand
ugucaguguacgaggccua

SEQ ID NO: 2549781 - RNA, 19 nt, Homo sapiens
  misc_RNA (1)...(19): siRNA sense strand
uggaggagaucgagcgcca

SEQ ID NO: 2549782 - RNA, 19 nt, Homo sapiens
  misc_RNA (1)...(19): siRNA sense strand
agaccaaccuggagaaccu

SEQ ID NO: 2549783 - RNA, 19 nt, Homo sapiens
  misc_RNA (1)...(19): siRNA sense strand
ugaaugagaaggaggagga

SEQ ID NO: 2549784 - RNA, 19 nt, Homo sapiens
  misc_RNA (1)...(19): siRNA sense strand
cugaaggagaagaagauca

SEQ ID NO: 2549785 - RNA, 19 nt, Homo sapiens
  misc_RNA (1)...(19): siRNA sense strand
cugagaagcagaaggagga

SEQ ID NO: 2549786 - RNA, 19 nt, Homo sapiens
  misc_RNA (1)...(19): siRNA sense strand
uggcagagaagaugcucaa

SEQ ID NO: 2549787 - RNA, 19 nt, Homo sapiens
  misc_RNA (1)...(19): siRNA sense strand
uggaacgggacuuggacaa

SEQ ID NO: 2549788 - RNA, 19 nt, Homo sapiens
  misc_RNA (1)...(19): siRNA sense strand
uggacaaggcggauagcau

SEQ ID NO: 2549789 - RNA, 19 nt, Homo sapiens
  misc_RNA (1)...(19): siRNA sense strand
augagaaggaggaggagga

SEQ ID NO: 2549790 - RNA, 19 nt, Homo sapiens
  misc_RNA (1)...(19): siRNA sense strand
acgagaaggaacagcugaa

SEQ ID NO: 2549791 - RNA, 19 nt, Homo sapiens
  misc_RNA (1)...(19): siRNA sense strand
cugaggagcgcgugcagaa

SEQ ID NO: 2549792 - RNA, 19 nt, Homo sapiens
  misc_RNA (1)...(19): siRNA sense strand
uggaggacaccaaggagaa

SEQ ID NO: 2549793 - RNA, 19 nt, Homo sapiens
  misc_RNA (1)...(19): siRNA sense strand
gcaucuaccuggaggacac

SEQ ID NO: 2549794 - RNA, 19 nt, Homo sapiens
  misc_RNA (1)...(19): siRNA sense strand
ccaugaagaaggagcugau

SEQ ID NO: 2549795 - RNA, 19 nt, Homo sapiens
  misc_RNA (1)...(19): siRNA sense strand
cggaggacaugacggccaa

SEQ ID NO: 2549796 - RNA, 19 nt, Homo sapiens
  misc_RNA (1)...(19): siRNA sense strand
cagccaaggaggccgacaa

SEQ ID NO: 2549797 - RNA, 19 nt, Homo sapiens
  misc_RNA (1)...(19): siRNA sense strand
agaacagguccaagggcau

SEQ ID NO: 2549798 - RNA, 19 nt, Homo sapiens
  misc_RNA (1)...(19): siRNA sense strand
aggcggagaucgcgcucaa

SEQ ID NO: 2549799 - RNA, 19 nt, Homo sapiens
  misc_RNA (1)...(19): siRNA sense strand
acgccaaggccuacaguga

SEQ ID NO: 2549800 - RNA, 19 nt, Homo sapiens
  misc_RNA (1)...(19): siRNA sense strand
gaagagacacagaucgaca

SEQ ID NO: 2549801 - RNA, 19 nt, Homo sapiens
  misc_RNA (1)...(19): siRNA sense strand
gcgacgacaccaagggcuu

SEQ ID NO: 2549802 - RNA, 19 nt, Homo sapiens
  misc_RNA (1)...(19): siRNA sense strand
ucuacaaugcccugaagaa

SEQ ID NO: 2549803 - RNA, 19 nt, Homo sapiens
  misc_RNA (1)...(19): siRNA sense strand
gcgacgacaccaagggcuu

SEQ ID NO: 2549804 - RNA, 19 nt, Homo sapiens
  misc_RNA (1)...(19): siRNA sense strand
agaaggaacagcugaacga

SEQ ID NO: 2549805 - RNA, 19 nt, Homo sapiens
  misc_RNA (1)...(19): siRNA sense strand
aggccgaggcugagaagca

SEQ ID NO: 2549806 - RNA, 19 nt, Homo sapiens
  misc_RNA (1)...(19): siRNA sense strand
agaucgcgcucaaggagaa

SEQ ID NO: 2549807 - RNA, 19 nt, Homo sapiens
  misc_RNA (1)...(19): siRNA sense strand
agaaggagcuugcgcagga

SEQ ID NO: 2549808 - RNA, 19 nt, Homo sapiens
  misc_RNA (1)...(19): siRNA sense strand
ccgagaaggucuuggcccu

SEQ ID NO: 2549809 - RNA, 19 nt, Homo sapiens
  misc_RNA (1)...(19): siRNA sense strand
ucaacgaggcugugaagga

SEQ ID NO: 2549810 - RNA, 19 nt, Homo sapiens
  misc_RNA (1)...(19): siRNA sense strand
uugagaagacagagaucau

SEQ ID NO: 2549811 - RNA, 19 nt, Homo sapiens
  misc_RNA (1)...(19): siRNA sense strand
ccgccaagaaggagagcua

SEQ ID NO: 2549812 - RNA, 19 nt, Homo sapiens
  misc_RNA (1)...(19): siRNA sense strand
aggugaagcuggugaacau

SEQ ID NO: 2549813 - RNA, 19 nt, Homo sapiens
  misc_RNA (1)...(19): siRNA sense strand
agaagaagcgggagcggaa

SEQ ID NO: 2549814 - RNA, 19 nt, Homo sapiens
  misc_RNA (1)...(19): siRNA sense strand
ccacaaagacccugcccaa

SEQ ID NO: 2549815 - RNA, 19 nt, Homo sapiens
  misc_RNA (1)...(19): siRNA sense strand
cggagauggagaagcauaa

SEQ ID NO: 2549816 - RNA, 19 nt, Homo sapiens
  misc_RNA (1)...(19): siRNA sense strand
gagaagaugcucaaggaga

SEQ ID NO: 2549817 - RNA, 19 nt, Homo sapiens
  misc_RNA (1)...(19): siRNA sense strand
uggccuggguggaggagaa

SEQ ID NO: 2549818 - RNA, 19 nt, Homo sapiens
  misc_RNA (1)...(19): siRNA sense strand
aggagaaggaggcggagaa

SEQ ID NO: 2549819 - RNA, 19 nt, Homo sapiens
  misc_RNA (1)...(19): siRNA sense strand
agaaggaggcggagaacga

SEQ ID NO: 2549820 - RNA, 19 nt, Homo sapiens
  misc_RNA (1)...(19): siRNA sense strand
cggaauacuucacggcaga

SEQ ID NO: 2549821 - RNA, 19 nt, Homo sapiens
  misc_RNA (1)...(19): siRNA sense strand
ggaucacaguggagaagau

SEQ ID NO: 2549822 - RNA, 19 nt, Homo sapiens
  misc_RNA (1)...(19): siRNA sense strand
agauggaggagcugagcaa

SEQ ID NO: 2549823 - RNA, 19 nt, Homo sapiens
  misc_RNA (1)...(19): siRNA sense strand
gggcauuugaagagacaca

SEQ ID NO: 2549824 - RNA, 19 nt, Homo sapiens
  misc_RNA (1)...(19): siRNA sense strand
gcgagaaggucgaggagug

SEQ ID NO: 2549825 - RNA, 19 nt, Homo sapiens
  misc_RNA (1)...(19): siRNA sense strand
aggaggaggcugagaagau

SEQ ID NO: 2549826 - RNA, 19 nt, Homo sapiens
  misc_RNA (1)...(19): siRNA sense strand
aggcggagauccaggccaa

SEQ ID NO: 2549827 - RNA, 19 nt, Homo sapiens
  misc_RNA (1)...(19): siRNA sense strand
ucggcaaguuccagggcaa

SEQ ID NO: 2549828 - RNA, 19 nt, Homo sapiens
  misc_RNA (1)...(19): siRNA sense strand
uggaugaggcugugcggaa

SEQ ID NO: 2549829 - RNA, 19 nt, Homo sapiens
  misc_RNA (1)...(19): siRNA sense strand
gcggagauggagaagcaua

SEQ ID NO: 2549830 - RNA, 19 nt, Homo sapiens
  misc_RNA (1)...(19): siRNA sense strand
uggaggagcaggagcagaa

SEQ ID NO: 2549831 - RNA, 19 nt, Homo sapiens
  misc_RNA (1)...(19): siRNA sense strand
ccaagaagcccaaggucca

SEQ ID NO: 2549832 - RNA, 19 nt, Homo sapiens
  misc_RNA (1)...(19): siRNA sense strand
agaagaaccugcuggacga

SEQ ID NO: 2549833 - RNA, 19 nt, Homo sapiens
  misc_RNA (1)...(19): siRNA sense strand
cuacaaugcccugaagaaa

SEQ ID NO: 2549834 - RNA, 19 nt, Homo sapiens
  misc_RNA (1)...(19): siRNA sense strand
ugaaggagaagaagaucaa

SEQ ID NO: 2549835 - RNA, 19 nt, Homo sapiens
  misc_RNA (1)...(19): siRNA sense strand
cugaacaagagcuggagaa

SEQ ID NO: 2549836 - RNA, 19 nt, Homo sapiens
  misc_RNA (1)...(19): siRNA sense strand
uggaggaggcugugcguau

SEQ ID NO: 2549837 - RNA, 19 nt, Homo sapiens
  misc_RNA (1)...(19): siRNA sense strand
gagcugaaggagaagaaga

SEQ ID NO: 2549838 - RNA, 19 nt, Homo sapiens
  misc_RNA (1)...(19): siRNA sense strand
gugccagagguuugcgaaa

SEQ ID NO: 2549839 - RNA, 19 nt, Homo sapiens
  misc_RNA (1)...(19): siRNA sense strand
gggccuuggcagagaagau

SEQ ID NO: 2549840 - RNA, 19 nt, Homo sapiens
  misc_RNA (1)...(19): siRNA sense strand
gcaaggucaccguggagaa

SEQ ID NO: 2549841 - RNA, 19 nt, Homo sapiens
  misc_RNA (1)...(19): siRNA sense strand
aggcaaaggcacaggcgga

SEQ ID NO: 2549842 - RNA, 19 nt, Homo sapiens
  misc_RNA (1)...(19): siRNA sense strand
aggaggaggaggugggcuu

SEQ ID NO: 2549843 - RNA, 19 nt, Homo sapiens
  misc_RNA (1)...(19): siRNA sense strand
aggacgagagccagcguaa

SEQ ID NO: 2549844 - RNA, 19 nt, Homo sapiens
  misc_RNA (1)...(19): siRNA sense strand
agaaggagcaggagcuaca

SEQ ID NO: 2549845 - RNA, 19 nt, Homo sapiens
  misc_RNA (1)...(19): siRNA sense strand
acgcggagauggagaagca

SEQ ID NO: 2549846 - RNA, 19 nt, Homo sapiens
  misc_RNA (1)...(19): siRNA sense strand
ggcaggagcuguugcguca

SEQ ID NO: 2549847 - RNA, 19 nt, Homo sapiens
  misc_RNA (1)...(19): siRNA sense strand
acacggagacgcuggagaa

SEQ ID NO: 2549848 - RNA, 19 nt, Homo sapiens
  misc_RNA (1)...(19): siRNA sense strand
agaccgaccaccagaagaa

SEQ ID NO: 2549849 - RNA, 19 nt, Homo sapiens
  misc_RNA (1)...(19): siRNA sense strand
aggaggagcugcuggcuga

SEQ ID NO: 2549850 - RNA, 19 nt, Homo sapiens
  misc_RNA (1)...(19): siRNA sense strand
agaagaagaucaaggagcu

SEQ ID NO: 2549851 - RNA, 19 nt, Homo sapiens
  misc_RNA (1)...(19): siRNA sense strand
auggagaagcauaagaaau

SEQ ID NO: 2549852 - RNA, 19 nt, Homo sapiens
  misc_RNA (1)...(19): siRNA sense strand
gaggagacaagaagggcau

SEQ ID NO: 2549853 - RNA, 19 nt, Homo sapiens
  misc_RNA (1)...(19): siRNA sense strand
ugucaguguacgaggccua

SEQ ID NO: 2549854 - RNA, 19 nt, Homo sapiens
  misc_RNA (1)...(19): siRNA sense strand
uggaggagaucgagcgcca

SEQ ID NO: 2549855 - RNA, 19 nt, Homo sapiens
  misc_RNA (1)...(19): siRNA sense strand
agaccaaccuggagaaccu

SEQ ID NO: 2549856 - RNA, 19 nt, Homo sapiens
  misc_RNA (1)...(19): siRNA sense strand
ugaaugagaaggaggagga

SEQ ID NO: 2549857 - RNA, 19 nt, Homo sapiens
  misc_RNA (1)...(19): siRNA sense strand
cugaaggagaagaagauca

SEQ ID NO: 2549858 - RNA, 19 nt, Homo sapiens
  misc_RNA (1)...(19): siRNA sense strand
cugagaagcagaaggagga

SEQ ID NO: 2549859 - RNA, 19 nt, Homo sapiens
  misc_RNA (1)...(19): siRNA sense strand
uggcagagaagaugcucaa

SEQ ID NO: 2549860 - RNA, 19 nt, Homo sapiens
  misc_RNA (1)...(19): siRNA sense strand
uggaacgggacuuggacaa

SEQ ID NO: 2549861 - RNA, 19 nt, Homo sapiens
  misc_RNA (1)...(19): siRNA sense strand
uggacaaggcggauagcau

SEQ ID NO: 2549862 - RNA, 19 nt, Homo sapiens
  misc_RNA (1)...(19): siRNA sense strand
augagaaggaggaggagga

SEQ ID NO: 2549863 - RNA, 19 nt, Homo sapiens
  misc_RNA (1)...(19): siRNA sense strand
acgagaaggaacagcugaa

SEQ ID NO: 2549864 - RNA, 19 nt, Homo sapiens
  misc_RNA (1)...(19): siRNA sense strand
cugaggagcgcgugcagaa

SEQ ID NO: 2549865 - RNA, 19 nt, Homo sapiens
  misc_RNA (1)...(19): siRNA sense strand
uggaggacaccaaggagaa

SEQ ID NO: 2549866 - RNA, 19 nt, Homo sapiens
  misc_RNA (1)...(19): siRNA sense strand
gcaucuaccuggaggacac

SEQ ID NO: 2549867 - RNA, 19 nt, Homo sapiens
  misc_RNA (1)...(19): siRNA sense strand
ccaugaagaaggagcugau

SEQ ID NO: 2549868 - RNA, 19 nt, Homo sapiens
  misc_RNA (1)...(19): siRNA sense strand
cggaggacaugacggccaa

SEQ ID NO: 2549869 - RNA, 19 nt, Homo sapiens
  misc_RNA (1)...(19): siRNA sense strand
cagccaaggaggccgacaa

SEQ ID NO: 2549870 - RNA, 19 nt, Homo sapiens
  misc_RNA (1)...(19): siRNA sense strand
agaacagguccaagggcau

SEQ ID NO: 2549871 - RNA, 19 nt, Homo sapiens
  misc_RNA (1)...(19): siRNA sense strand
aggcggagaucgcgcucaa

SEQ ID NO: 2549872 - RNA, 19 nt, Homo sapiens
  misc_RNA (1)...(19): siRNA sense strand
acgccaaggccuacaguga

SEQ ID NO: 2549873 - RNA, 19 nt, Homo sapiens
  misc_RNA (1)...(19): siRNA sense strand
gaagagacacagaucgaca

SEQ ID NO: 2549874 - RNA, 19 nt, Homo sapiens
  misc_RNA (1)...(19): siRNA sense strand
gcgacgacaccaagggcuu

SEQ ID NO: 2549875 - RNA, 19 nt, Homo sapiens
  misc_RNA (1)...(19): siRNA sense strand
ucuacaaugcccugaagaa

SEQ ID NO: 2549876 - RNA, 19 nt, Homo sapiens
  misc_RNA (1)...(19): siRNA sense strand
gcgacgacaccaagggcuu

SEQ ID NO: 2549877 - RNA, 19 nt, Homo sapiens
  misc_RNA (1)...(19): siRNA sense strand
agaaggaacagcugaacga

SEQ ID NO: 2549878 - RNA, 19 nt, Homo sapiens
  misc_RNA (1)...(19): siRNA sense strand
aggccgaggcugagaagca

SEQ ID NO: 2549879 - RNA, 19 nt, Homo sapiens
  misc_RNA (1)...(19): siRNA sense strand
agaucgcgcucaaggagaa

SEQ ID NO: 2549880 - RNA, 19 nt, Homo sapiens
  misc_RNA (1)...(19): siRNA sense strand
agaaggagcuugcgcagga

SEQ ID NO: 2549881 - RNA, 19 nt, Homo sapiens
  misc_RNA (1)...(19): siRNA sense strand
ccgagaaggucuuggcccu

SEQ ID NO: 2549882 - RNA, 19 nt, Homo sapiens
  misc_RNA (1)...(19): siRNA sense strand
ucaacgaggcugugaagga

SEQ ID NO: 2549883 - RNA, 19 nt, Homo sapiens
  misc_RNA (1)...(19): siRNA sense strand
uugagaagacagagaucau

SEQ ID NO: 2549884 - RNA, 19 nt, Homo sapiens
  misc_RNA (1)...(19): siRNA sense strand
ccgccaagaaggagagcua

SEQ ID NO: 2549885 - RNA, 19 nt, Homo sapiens
  misc_RNA (1)...(19): siRNA sense strand
aggugaagcuggugaacau

SEQ ID NO: 2549886 - RNA, 19 nt, Homo sapiens
  misc_RNA (1)...(19): siRNA sense strand
agaagaagcgggagcggaa

SEQ ID NO: 2549887 - RNA, 19 nt, Homo sapiens
  misc_RNA (1)...(19): siRNA sense strand
ccacaaagacccugcccaa

SEQ ID NO: 2549888 - RNA, 19 nt, Homo sapiens
  misc_RNA (1)...(19): siRNA sense strand
cggagauggagaagcauaa

SEQ ID NO: 2549889 - RNA, 19 nt, Homo sapiens
  misc_RNA (1)...(19): siRNA sense strand
gagaagaugcucaaggaga

SEQ ID NO: 2549890 - RNA, 19 nt, Homo sapiens
  misc_RNA (1)...(19): siRNA sense strand
uggccuggguggaggagaa

SEQ ID NO: 2549891 - RNA, 19 nt, Homo sapiens
  misc_RNA (1)...(19): siRNA sense strand
aggagaaggaggcggagaa

SEQ ID NO: 2549892 - RNA, 19 nt, Homo sapiens
  misc_RNA (1)...(19): siRNA sense strand
agaaggaggcggagaacga

SEQ ID NO: 2549893 - RNA, 19 nt, Homo sapiens
  misc_RNA (1)...(19): siRNA sense strand
cggaauacuucacggcaga

SEQ ID NO: 2549894 - RNA, 19 nt, Homo sapiens
  misc_RNA (1)...(19): siRNA sense strand
ggaucacaguggagaagau

SEQ ID NO: 2549895 - RNA, 19 nt, Homo sapiens
  misc_RNA (1)...(19): siRNA sense strand
agauggaggagcugagcaa

SEQ ID NO: 2549896 - RNA, 19 nt, Homo sapiens
  misc_RNA (1)...(19): siRNA sense strand
gggcauuugaagagacaca

SEQ ID NO: 2549897 - RNA, 19 nt, Homo sapiens
  misc_RNA (1)...(19): siRNA sense strand
gcgagaaggucgaggagug

SEQ ID NO: 2549898 - RNA, 19 nt, Homo sapiens
  misc_RNA (1)...(19): siRNA sense strand
aggaggaggcugagaagau

SEQ ID NO: 2549899 - RNA, 19 nt, Homo sapiens
  misc_RNA (1)...(19): siRNA sense strand
aggcggagauccaggccaa

SEQ ID NO: 2549900 - RNA, 19 nt, Homo sapiens
  misc_RNA (1)...(19): siRNA sense strand
ucggcaaguuccagggcaa

SEQ ID NO: 2549901 - RNA, 19 nt, Homo sapiens
  misc_RNA (1)...(19): siRNA sense strand
uggaugaggcugugcggaa

SEQ ID NO: 2549902 - RNA, 19 nt, Homo sapiens
  misc_RNA (1)...(19): siRNA sense strand
gcggagauggagaagcaua

SEQ ID NO: 2549903 - RNA, 19 nt, Homo sapiens
  misc_RNA (1)...(19): siRNA sense strand
uggaggagcaggagcagaa

SEQ ID NO: 2549904 - RNA, 19 nt, Homo sapiens
  misc_RNA (1)...(19): siRNA sense strand
ccaagaagcccaaggucca

SEQ ID NO: 2549905 - RNA, 19 nt, Homo sapiens
  misc_RNA (1)...(19): siRNA sense strand
agaagaaccugcuggacga

SEQ ID NO: 2549906 - RNA, 19 nt, Homo sapiens
  misc_RNA (1)...(19): siRNA sense strand
cuacaaugcccugaagaaa

SEQ ID NO: 2549907 - RNA, 19 nt, Homo sapiens
  misc_RNA (1)...(19): siRNA sense strand
ugaaggagaagaagaucaa

SEQ ID NO: 2549908 - RNA, 19 nt, Homo sapiens
  misc_RNA (1)...(19): siRNA sense strand
cugaacaagagcuggagaa

SEQ ID NO: 2549909 - RNA, 19 nt, Homo sapiens
  misc_RNA (1)...(19): siRNA sense strand
uggaggaggcugugcguau

SEQ ID NO: 2549910 - RNA, 19 nt, Homo sapiens
  misc_RNA (1)...(19): siRNA sense strand
gagcugaaggagaagaaga

SEQ ID NO: 2549911 - RNA, 19 nt, Homo sapiens
  misc_RNA (1)...(19): siRNA sense strand
gugccagagguuugcgaaa

SEQ ID NO: 2549912 - RNA, 19 nt, Homo sapiens
  misc_RNA (1)...(19): siRNA sense strand
gggccuuggcagagaagau

SEQ ID NO: 2549913 - RNA, 19 nt, Homo sapiens
  misc_RNA (1)...(19): siRNA sense strand
gcaaggucaccguggagaa

SEQ ID NO: 2549914 - RNA, 19 nt, Homo sapiens
  misc_RNA (1)...(19): siRNA sense strand
aggcaaaggcacaggcgga

SEQ ID NO: 2549915 - RNA, 19 nt, Homo sapiens
  misc_RNA (1)...(19): siRNA sense strand
aggaggaggaggugggcuu

SEQ ID NO: 2549916 - RNA, 19 nt, Homo sapiens
  misc_RNA (1)...(19): siRNA sense strand
aggacgagagccagcguaa

SEQ ID NO: 2549917 - RNA, 19 nt, Homo sapiens
  misc_RNA (1)...(19): siRNA sense strand
agaaggagcaggagcuaca

SEQ ID NO: 2549918 - RNA, 19 nt, Homo sapiens
  misc_RNA (1)...(19): siRNA sense strand
acgcggagauggagaagca

SEQ ID NO: 2549919 - RNA, 19 nt, Homo sapiens
  misc_RNA (1)...(19): siRNA sense strand
ggcaggagcuguugcguca

SEQ ID NO: 2549920 - RNA, 19 nt, Homo sapiens
  misc_RNA (1)...(19): siRNA sense strand
acacggagacgcuggagaa

SEQ ID NO: 2549921 - RNA, 19 nt, Homo sapiens
  misc_RNA (1)...(19): siRNA sense strand
agaccgaccaccagaagaa

SEQ ID NO: 2549922 - RNA, 19 nt, Homo sapiens
  misc_RNA (1)...(19): siRNA sense strand
aggaggagcugcuggcuga

SEQ ID NO: 2549923 - RNA, 19 nt, Homo sapiens
  misc_RNA (1)...(19): siRNA sense strand
agaagaagaucaaggagcu

SEQ ID NO: 2549924 - RNA, 19 nt, Homo sapiens
  misc_RNA (1)...(19): siRNA sense strand
auggagaagcauaagaaau

SEQ ID NO: 2549925 - RNA, 19 nt, Homo sapiens
  misc_RNA (1)...(19): siRNA sense strand
gaggagacaagaagggcau

SEQ ID NO: 2549926 - RNA, 19 nt, Homo sapiens
  misc_RNA (1)...(19): siRNA sense strand
ugucaguguacgaggccua

SEQ ID NO: 2549927 - RNA, 19 nt, Homo sapiens
  misc_RNA (1)...(19): siRNA sense strand
uggaggagaucgagcgcca

SEQ ID NO: 2549928 - RNA, 19 nt, Homo sapiens
  misc_RNA (1)...(19): siRNA sense strand
agaccaaccuggagaaccu

SEQ ID NO: 2549929 - RNA, 19 nt, Homo sapiens
  misc_RNA (1)...(19): siRNA sense strand
ugaaugagaaggaggagga

SEQ ID NO: 2549930 - RNA, 19 nt, Homo sapiens
  misc_RNA (1)...(19): siRNA sense strand
cugaaggagaagaagauca

SEQ ID NO: 2549931 - RNA, 19 nt, Homo sapiens
  misc_RNA (1)...(19): siRNA sense strand
cugagaagcagaaggagga

SEQ ID NO: 2549932 - RNA, 19 nt, Homo sapiens
  misc_RNA (1)...(19): siRNA sense strand
uggcagagaagaugcucaa

SEQ ID NO: 2549933 - RNA, 19 nt, Homo sapiens
  misc_RNA (1)...(19): siRNA sense strand
uggaacgggacuuggacaa

SEQ ID NO: 2549934 - RNA, 19 nt, Homo sapiens
  misc_RNA (1)...(19): siRNA sense strand
uggacaaggcggauagcau

SEQ ID NO: 2549935 - RNA, 19 nt, Homo sapiens
  misc_RNA (1)...(19): siRNA sense strand
augagaaggaggaggagga

SEQ ID NO: 2549936 - RNA, 19 nt, Homo sapiens
  misc_RNA (1)...(19): siRNA sense strand
acgagaaggaacagcugaa

SEQ ID NO: 2549937 - RNA, 19 nt, Homo sapiens
  misc_RNA (1)...(19): siRNA sense strand
cugaggagcgcgugcagaa

SEQ ID NO: 2549938 - RNA, 19 nt, Homo sapiens
  misc_RNA (1)...(19): siRNA sense strand
uggaggacaccaaggagaa

SEQ ID NO: 2549939 - RNA, 19 nt, Homo sapiens
  misc_RNA (1)...(19): siRNA sense strand
gcaucuaccuggaggacac

SEQ ID NO: 2549940 - RNA, 19 nt, Homo sapiens
  misc_RNA (1)...(19): siRNA sense strand
ccaugaagaaggagcugau

SEQ ID NO: 2549941 - RNA, 19 nt, Homo sapiens
  misc_RNA (1)...(19): siRNA sense strand
cggaggacaugacggccaa

SEQ ID NO: 2549942 - RNA, 19 nt, Homo sapiens
  misc_RNA (1)...(19): siRNA sense strand
cagccaaggaggccgacaa

SEQ ID NO: 2549943 - RNA, 19 nt, Homo sapiens
  misc_RNA (1)...(19): siRNA sense strand
agaacagguccaagggcau

SEQ ID NO: 2549944 - RNA, 19 nt, Homo sapiens
  misc_RNA (1)...(19): siRNA sense strand
aggcggagaucgcgcucaa

SEQ ID NO: 2549945 - RNA, 19 nt, Homo sapiens
  misc_RNA (1)...(19): siRNA sense strand
acgccaaggccuacaguga

SEQ ID NO: 2549946 - RNA, 19 nt, Homo sapiens
  misc_RNA (1)...(19): siRNA sense strand
gaagagacacagaucgaca

SEQ ID NO: 2549947 - RNA, 19 nt, Homo sapiens
  misc_RNA (1)...(19): siRNA sense strand
gcgacgacaccaagggcuu

SEQ ID NO: 2549948 - RNA, 19 nt, Homo sapiens
  misc_RNA (1)...(19): siRNA sense strand
ucuacaaugcccugaagaa

SEQ ID NO: 2549949 - RNA, 19 nt, Homo sapiens
  misc_RNA (1)...(19): siRNA sense strand
gcgacgacaccaagggcuu

SEQ ID NO: 2549950 - RNA, 19 nt, Homo sapiens
  misc_RNA (1)...(19): siRNA sense strand
agaaggaacagcugaacga

SEQ ID NO: 2549951 - RNA, 19 nt, Homo sapiens
  misc_RNA (1)...(19): siRNA sense strand
aggccgaggcugagaagca

SEQ ID NO: 2549952 - RNA, 19 nt, Homo sapiens
  misc_RNA (1)...(19): siRNA sense strand
agaucgcgcucaaggagaa

SEQ ID NO: 2549953 - RNA, 19 nt, Homo sapiens
  misc_RNA (1)...(19): siRNA sense strand
agaaggagcuugcgcagga

SEQ ID NO: 2549954 - RNA, 19 nt, Homo sapiens
  misc_RNA (1)...(19): siRNA sense strand
ccgagaaggucuuggcccu

SEQ ID NO: 2549955 - RNA, 19 nt, Homo sapiens
  misc_RNA (1)...(19): siRNA sense strand
ucaacgaggcugugaagga

SEQ ID NO: 2549956 - RNA, 19 nt, Homo sapiens
  misc_RNA (1)...(19): siRNA sense strand
uugagaagacagagaucau

SEQ ID NO: 2549957 - RNA, 19 nt, Homo sapiens
  misc_RNA (1)...(19): siRNA sense strand
ccgccaagaaggagagcua

SEQ ID NO: 2549958 - RNA, 19 nt, Homo sapiens
  misc_RNA (1)...(19): siRNA sense strand
aggugaagcuggugaacau

SEQ ID NO: 2549959 - RNA, 19 nt, Homo sapiens
  misc_RNA (1)...(19): siRNA sense strand
agaagaagcgggagcggaa

SEQ ID NO: 2549960 - RNA, 19 nt, Homo sapiens
  misc_RNA (1)...(19): siRNA sense strand
ccacaaagacccugcccaa

SEQ ID NO: 2549961 - RNA, 19 nt, Homo sapiens
  misc_RNA (1)...(19): siRNA sense strand
cggagauggagaagcauaa

SEQ ID NO: 2549962 - RNA, 19 nt, Homo sapiens
  misc_RNA (1)...(19): siRNA sense strand
gagaagaugcucaaggaga

SEQ ID NO: 2549963 - RNA, 19 nt, Homo sapiens
  misc_RNA (1)...(19): siRNA sense strand
uggccuggguggaggagaa

SEQ ID NO: 2549964 - RNA, 19 nt, Homo sapiens
  misc_RNA (1)...(19): siRNA sense strand
aggagaaggaggcggagaa

SEQ ID NO: 2549965 - RNA, 19 nt, Homo sapiens
  misc_RNA (1)...(19): siRNA sense strand
agaaggaggcggagaacga

SEQ ID NO: 2549966 - RNA, 19 nt, Homo sapiens
  misc_RNA (1)...(19): siRNA sense strand
cggaauacuucacggcaga

SEQ ID NO: 2549967 - RNA, 19 nt, Homo sapiens
  misc_RNA (1)...(19): siRNA sense strand
ggaucacaguggagaagau

SEQ ID NO: 2549968 - RNA, 19 nt, Homo sapiens
  misc_RNA (1)...(19): siRNA sense strand
agauggaggagcugagcaa

SEQ ID NO: 2549969 - RNA, 19 nt, Homo sapiens
  misc_RNA (1)...(19): siRNA sense strand
gggcauuugaagagacaca

SEQ ID NO: 2549970 - RNA, 19 nt, Homo sapiens
  misc_RNA (1)...(19): siRNA sense strand
gcgagaaggucgaggagug

SEQ ID NO: 2549971 - RNA, 19 nt, Homo sapiens
  misc_RNA (1)...(19): siRNA sense strand
aggaggaggcugagaagau

SEQ ID NO: 2549972 - RNA, 19 nt, Homo sapiens
  misc_RNA (1)...(19): siRNA sense strand
aggcggagauccaggccaa

SEQ ID NO: 2549973 - RNA, 19 nt, Homo sapiens
  misc_RNA (1)...(19): siRNA sense strand
ucggcaaguuccagggcaa

SEQ ID NO: 2549974 - RNA, 19 nt, Homo sapiens
  misc_RNA (1)...(19): siRNA sense strand
uggaugaggcugugcggaa

SEQ ID NO: 2549975 - RNA, 19 nt, Homo sapiens
  misc_RNA (1)...(19): siRNA sense strand
gcggagauggagaagcaua

SEQ ID NO: 2549976 - RNA, 19 nt, Homo sapiens
  misc_RNA (1)...(19): siRNA sense strand
uggaggagcaggagcagaa

SEQ ID NO: 2549977 - RNA, 19 nt, Homo sapiens
  misc_RNA (1)...(19): siRNA sense strand
ccaagaagcccaaggucca

SEQ ID NO: 2549978 - RNA, 19 nt, Homo sapiens
  misc_RNA (1)...(19): siRNA sense strand
agaagaaccugcuggacga

SEQ ID NO: 2549979 - RNA, 19 nt, Homo sapiens
  misc_RNA (1)...(19): siRNA sense strand
cuacaaugcccugaagaaa

SEQ ID NO: 2549980 - RNA, 19 nt, Homo sapiens
  misc_RNA (1)...(19): siRNA sense strand
ugaaggagaagaagaucaa

SEQ ID NO: 2549981 - RNA, 19 nt, Homo sapiens
  misc_RNA (1)...(19): siRNA sense strand
cugaacaagagcuggagaa

SEQ ID NO: 2549982 - RNA, 19 nt, Homo sapiens
  misc_RNA (1)...(19): siRNA sense strand
uggaggaggcugugcguau

SEQ ID NO: 2549983 - RNA, 19 nt, Homo sapiens
  misc_RNA (1)...(19): siRNA sense strand
gagcugaaggagaagaaga

SEQ ID NO: 2549984 - RNA, 19 nt, Homo sapiens
  misc_RNA (1)...(19): siRNA sense strand
gugccagagguuugcgaaa

SEQ ID NO: 2549985 - RNA, 19 nt, Homo sapiens
  misc_RNA (1)...(19): siRNA sense strand
gggccuuggcagagaagau

SEQ ID NO: 2549986 - RNA, 19 nt, Homo sapiens
  misc_RNA (1)...(19): siRNA sense strand
gcaaggucaccguggagaa

SEQ ID NO: 2549987 - RNA, 19 nt, Homo sapiens
  misc_RNA (1)...(19): siRNA sense strand
aggcaaaggcacaggcgga

SEQ ID NO: 2549988 - RNA, 19 nt, Homo sapiens
  misc_RNA (1)...(19): siRNA sense strand
aggaggaggaggugggcuu

SEQ ID NO: 2549989 - RNA, 19 nt, Homo sapiens
  misc_RNA (1)...(19): siRNA sense strand
aggacgagagccagcguaa

SEQ ID NO: 2549990 - RNA, 19 nt, Homo sapiens
  misc_RNA (1)...(19): siRNA sense strand
agaaggagcaggagcuaca

SEQ ID NO: 2549991 - RNA, 19 nt, Homo sapiens
  misc_RNA (1)...(19): siRNA sense strand
acgcggagauggagaagca

SEQ ID NO: 2549992 - RNA, 19 nt, Homo sapiens
  misc_RNA (1)...(19): siRNA sense strand
ggcaggagcuguugcguca

SEQ ID NO: 2549993 - RNA, 19 nt, Homo sapiens
  misc_RNA (1)...(19): siRNA sense strand
acacggagacgcuggagaa

SEQ ID NO: 2549994 - RNA, 19 nt, Homo sapiens
  misc_RNA (1)...(19): siRNA sense strand
agaccgaccaccagaagaa

SEQ ID NO: 2549995 - RNA, 19 nt, Homo sapiens
  misc_RNA (1)...(19): siRNA sense strand
aggaggagcugcuggcuga

SEQ ID NO: 2549996 - RNA, 19 nt, Homo sapiens
  misc_RNA (1)...(19): siRNA sense strand
agaagaagaucaaggagcu

SEQ ID NO: 2549997 - RNA, 19 nt, Homo sapiens
  misc_RNA (1)...(19): siRNA sense strand
auggagaagcauaagaaau

SEQ ID NO: 2549998 - RNA, 19 nt, Homo sapiens
  misc_RNA (1)...(19): siRNA sense strand
gaggagacaagaagggcau

SEQ ID NO: 2549999 - RNA, 19 nt, Homo sapiens
  misc_RNA (1)...(19): siRNA sense strand
ugucaguguacgaggccua

SEQ ID NO: 2550000 - RNA, 19 nt, Homo sapiens
  misc_RNA (1)...(19): siRNA sense strand
uggaggagaucgagcgcca

SEQ ID NO: 2550001 - RNA, 19 nt, Homo sapiens
  misc_RNA (1)...(19): siRNA sense strand
agaccaaccuggagaaccu

SEQ ID NO: 2550002 - RNA, 19 nt, Homo sapiens
  misc_RNA (1)...(19): siRNA sense strand
ugaaugagaaggaggagga

SEQ ID NO: 2550003 - RNA, 19 nt, Homo sapiens
  misc_RNA (1)...(19): siRNA sense strand
cugaaggagaagaagauca

SEQ ID NO: 2550004 - RNA, 19 nt, Homo sapiens
  misc_RNA (1)...(19): siRNA sense strand
cugagaagcagaaggagga

SEQ ID NO: 2550005 - RNA, 19 nt, Homo sapiens
  misc_RNA (1)...(19): siRNA sense strand
uggcagagaagaugcucaa

SEQ ID NO: 2550006 - RNA, 19 nt, Homo sapiens
  misc_RNA (1)...(19): siRNA sense strand
uggaacgggacuuggacaa

SEQ ID NO: 2550007 - RNA, 19 nt, Homo sapiens
  misc_RNA (1)...(19): siRNA sense strand
uggacaaggcggauagcau

SEQ ID NO: 2550008 - RNA, 19 nt, Homo sapiens
  misc_RNA (1)...(19): siRNA sense strand
augagaaggaggaggagga

SEQ ID NO: 2550009 - RNA, 19 nt, Homo sapiens
  misc_RNA (1)...(19): siRNA sense strand
acgagaaggaacagcugaa

SEQ ID NO: 2550010 - RNA, 19 nt, Homo sapiens
  misc_RNA (1)...(19): siRNA sense strand
cugaggagcgcgugcagaa

SEQ ID NO: 2550011 - RNA, 19 nt, Homo sapiens
  misc_RNA (1)...(19): siRNA sense strand
uggaggacaccaaggagaa

SEQ ID NO: 2550012 - RNA, 19 nt, Homo sapiens
  misc_RNA (1)...(19): siRNA sense strand
gcaucuaccuggaggacac

SEQ ID NO: 2550013 - RNA, 19 nt, Homo sapiens
  misc_RNA (1)...(19): siRNA sense strand
ccaugaagaaggagcugau

SEQ ID NO: 2550014 - RNA, 19 nt, Homo sapiens
  misc_RNA (1)...(19): siRNA sense strand
cggaggacaugacggccaa

SEQ ID NO: 2550015 - RNA, 19 nt, Homo sapiens
  misc_RNA (1)...(19): siRNA sense strand
cagccaaggaggccgacaa

SEQ ID NO: 2550016 - RNA, 19 nt, Homo sapiens
  misc_RNA (1)...(19): siRNA sense strand
agaacagguccaagggcau

SEQ ID NO: 2550017 - RNA, 19 nt, Homo sapiens
  misc_RNA (1)...(19): siRNA sense strand
aggcggagaucgcgcucaa

SEQ ID NO: 2550018 - RNA, 19 nt, Homo sapiens
  misc_RNA (1)...(19): siRNA sense strand
acgccaaggccuacaguga

SEQ ID NO: 2550019 - RNA, 19 nt, Homo sapiens
  misc_RNA (1)...(19): siRNA sense strand
gaagagacacagaucgaca

SEQ ID NO: 2550020 - RNA, 19 nt, Homo sapiens
  misc_RNA (1)...(19): siRNA sense strand
gcgacgacaccaagggcuu

SEQ ID NO: 2550021 - RNA, 19 nt, Homo sapiens
  misc_RNA (1)...(19): siRNA sense strand
ucuacaaugcccugaagaa

SEQ ID NO: 2550022 - RNA, 19 nt, Homo sapiens
  misc_RNA (1)...(19): siRNA sense strand
gcgacgacaccaagggcuu

SEQ ID NO: 2550023 - RNA, 19 nt, Homo sapiens
  misc_RNA (1)...(19): siRNA sense strand
agaaggaacagcugaacga

SEQ ID NO: 2550024 - RNA, 19 nt, Homo sapiens
  misc_RNA (1)...(19): siRNA sense strand
aggccgaggcugagaagca

SEQ ID NO: 2550025 - RNA, 19 nt, Homo sapiens
  misc_RNA (1)...(19): siRNA sense strand
agaucgcgcucaaggagaa

SEQ ID NO: 2550026 - RNA, 19 nt, Homo sapiens
  misc_RNA (1)...(19): siRNA sense strand
agaaggagcuugcgcagga

SEQ ID NO: 2550027 - RNA, 19 nt, Homo sapiens
  misc_RNA (1)...(19): siRNA sense strand
ccgagaaggucuuggcccu

SEQ ID NO: 2550028 - RNA, 19 nt, Homo sapiens
  misc_RNA (1)...(19): siRNA sense strand
ucaacgaggcugugaagga

SEQ ID NO: 2550029 - RNA, 19 nt, Homo sapiens
  misc_RNA (1)...(19): siRNA sense strand
uugagaagacagagaucau

SEQ ID NO: 2550030 - RNA, 19 nt, Homo sapiens
  misc_RNA (1)...(19): siRNA sense strand
ccgccaagaaggagagcua

SEQ ID NO: 2550031 - RNA, 19 nt, Homo sapiens
  misc_RNA (1)...(19): siRNA sense strand
aggugaagcuggugaacau

SEQ ID NO: 2550032 - RNA, 19 nt, Homo sapiens
  misc_RNA (1)...(19): siRNA sense strand
agaagaagcgggagcggaa

SEQ ID NO: 2550033 - RNA, 19 nt, Homo sapiens
  misc_RNA (1)...(19): siRNA sense strand
ccacaaagacccugcccaa

SEQ ID NO: 2550034 - RNA, 19 nt, Homo sapiens
  misc_RNA (1)...(19): siRNA sense strand
cggagauggagaagcauaa

SEQ ID NO: 2550035 - RNA, 19 nt, Homo sapiens
  misc_RNA (1)...(19): siRNA sense strand
gagaagaugcucaaggaga

SEQ ID NO: 2550036 - RNA, 19 nt, Homo sapiens
  misc_RNA (1)...(19): siRNA sense strand
uggccuggguggaggagaa

SEQ ID NO: 2550037 - RNA, 19 nt, Homo sapiens
  misc_RNA (1)...(19): siRNA sense strand
aggagaaggaggcggagaa

SEQ ID NO: 2550038 - RNA, 19 nt, Homo sapiens
  misc_RNA (1)...(19): siRNA sense strand
agaaggaggcggagaacga

SEQ ID NO: 2550039 - RNA, 19 nt, Homo sapiens
  misc_RNA (1)...(19): siRNA sense strand
cggaauacuucacggcaga

SEQ ID NO: 2550040 - RNA, 19 nt, Homo sapiens
  misc_RNA (1)...(19): siRNA sense strand
ggaucacaguggagaagau

SEQ ID NO: 2550041 - RNA, 19 nt, Homo sapiens
  misc_RNA (1)...(19): siRNA sense strand
agauggaggagcugagcaa

SEQ ID NO: 2550042 - RNA, 19 nt, Homo sapiens
  misc_RNA (1)...(19): siRNA sense strand
gggcauuugaagagacaca

SEQ ID NO: 2550043 - RNA, 19 nt, Homo sapiens
  misc_RNA (1)...(19): siRNA sense strand
gcgagaaggucgaggagug

SEQ ID NO: 2550044 - RNA, 19 nt, Homo sapiens
  misc_RNA (1)...(19): siRNA sense strand
aggaggaggcugagaagau

SEQ ID NO: 2550045 - RNA, 19 nt, Homo sapiens
  misc_RNA (1)...(19): siRNA sense strand
aggcggagauccaggccaa

SEQ ID NO: 2550046 - RNA, 19 nt, Homo sapiens
  misc_RNA (1)...(19): siRNA sense strand
ucggcaaguuccagggcaa

SEQ ID NO: 2550047 - RNA, 19 nt, Homo sapiens
  misc_RNA (1)...(19): siRNA sense strand
uggaugaggcugugcggaa

SEQ ID NO: 2550048 - RNA, 19 nt, Homo sapiens
  misc_RNA (1)...(19): siRNA sense strand
gcggagauggagaagcaua

SEQ ID NO: 2550049 - RNA, 19 nt, Homo sapiens
  misc_RNA (1)...(19): siRNA sense strand
uggaggagcaggagcagaa

SEQ ID NO: 2550050 - RNA, 19 nt, Homo sapiens
  misc_RNA (1)...(19): siRNA sense strand
ccaagaagcccaaggucca

SEQ ID NO: 2550051 - RNA, 19 nt, Homo sapiens
  misc_RNA (1)...(19): siRNA sense strand
agaagaaccugcuggacga

SEQ ID NO: 2550052 - RNA, 19 nt, Homo sapiens
  misc_RNA (1)...(19): siRNA sense strand
cuacaaugcccugaagaaa

SEQ ID NO: 2550053 - RNA, 19 nt, Homo sapiens
  misc_RNA (1)...(19): siRNA sense strand
ugaaggagaagaagaucaa

SEQ ID NO: 2550054 - RNA, 19 nt, Homo sapiens
  misc_RNA (1)...(19): siRNA sense strand
cugaacaagagcuggagaa

SEQ ID NO: 2550055 - RNA, 19 nt, Homo sapiens
  misc_RNA (1)...(19): siRNA sense strand
uggaggaggcugugcguau

SEQ ID NO: 2550056 - RNA, 19 nt, Homo sapiens
  misc_RNA (1)...(19): siRNA sense strand
gagcugaaggagaagaaga

SEQ ID NO: 2550057 - RNA, 19 nt, Homo sapiens
  misc_RNA (1)...(19): siRNA sense strand
gugccagagguuugcgaaa

SEQ ID NO: 2550058 - RNA, 19 nt, Homo sapiens
  misc_RNA (1)...(19): siRNA sense strand
gggccuuggcagagaagau

SEQ ID NO: 2550059 - RNA, 19 nt, Homo sapiens
  misc_RNA (1)...(19): siRNA sense strand
gcaaggucaccguggagaa

SEQ ID NO: 2550060 - RNA, 19 nt, Homo sapiens
  misc_RNA (1)...(19): siRNA sense strand
aggcaaaggcacaggcgga

SEQ ID NO: 2550061 - RNA, 19 nt, Homo sapiens
  misc_RNA (1)...(19): siRNA sense strand
aggaggaggaggugggcuu

SEQ ID NO: 2550062 - RNA, 19 nt, Homo sapiens
  misc_RNA (1)...(19): siRNA sense strand
aggacgagagccagcguaa

SEQ ID NO: 2550063 - RNA, 19 nt, Homo sapiens
  misc_RNA (1)...(19): siRNA sense strand
agaaggagcaggagcuaca

SEQ ID NO: 2550064 - RNA, 19 nt, Homo sapiens
  misc_RNA (1)...(19): siRNA sense strand
acgcggagauggagaagca

SEQ ID NO: 2550065 - RNA, 19 nt, Homo sapiens
  misc_RNA (1)...(19): siRNA sense strand
ggcaggagcuguugcguca

SEQ ID NO: 2550066 - RNA, 19 nt, Homo sapiens
  misc_RNA (1)...(19): siRNA sense strand
acacggagacgcuggagaa

SEQ ID NO: 2550067 - RNA, 19 nt, Homo sapiens
  misc_RNA (1)...(19): siRNA sense strand
agaccgaccaccagaagaa

SEQ ID NO: 2550068 - RNA, 19 nt, Homo sapiens
  misc_RNA (1)...(19): siRNA sense strand
aggaggagcugcuggcuga

SEQ ID NO: 2550069 - RNA, 19 nt, Homo sapiens
  misc_RNA (1)...(19): siRNA sense strand
agaagaagaucaaggagcu

SEQ ID NO: 2550070 - RNA, 19 nt, Homo sapiens
  misc_RNA (1)...(19): siRNA sense strand
auggagaagcauaagaaau

SEQ ID NO: 2550071 - RNA, 19 nt, Homo sapiens
  misc_RNA (1)...(19): siRNA sense strand
gaggagacaagaagggcau

SEQ ID NO: 2550072 - RNA, 19 nt, Homo sapiens
  misc_RNA (1)...(19): siRNA sense strand
ugucaguguacgaggccua

SEQ ID NO: 2550073 - RNA, 19 nt, Homo sapiens
  misc_RNA (1)...(19): siRNA sense strand
uggaggagaucgagcgcca

SEQ ID NO: 2550074 - RNA, 19 nt, Homo sapiens
  misc_RNA (1)...(19): siRNA sense strand
agaccaaccuggagaaccu

SEQ ID NO: 2550075 - RNA, 19 nt, Homo sapiens
  misc_RNA (1)...(19): siRNA sense strand
ugaaugagaaggaggagga

SEQ ID NO: 2550076 - RNA, 19 nt, Homo sapiens
  misc_RNA (1)...(19): siRNA sense strand
cugaaggagaagaagauca

SEQ ID NO: 2550077 - RNA, 19 nt, Homo sapiens
  misc_RNA (1)...(19): siRNA sense strand
cugagaagcagaaggagga

SEQ ID NO: 2550078 - RNA, 19 nt, Homo sapiens
  misc_RNA (1)...(19): siRNA sense strand
uggcagagaagaugcucaa

SEQ ID NO: 2550079 - RNA, 19 nt, Homo sapiens
  misc_RNA (1)...(19): siRNA sense strand
uggaacgggacuuggacaa

SEQ ID NO: 2550080 - RNA, 19 nt, Homo sapiens
  misc_RNA (1)...(19): siRNA sense strand
uggacaaggcggauagcau

SEQ ID NO: 2550081 - RNA, 19 nt, Homo sapiens
  misc_RNA (1)...(19): siRNA sense strand
augagaaggaggaggagga

SEQ ID NO: 2550082 - RNA, 19 nt, Homo sapiens
  misc_RNA (1)...(19): siRNA sense strand
acgagaaggaacagcugaa

SEQ ID NO: 2550083 - RNA, 19 nt, Homo sapiens
  misc_RNA (1)...(19): siRNA sense strand
cugaggagcgcgugcagaa

SEQ ID NO: 2550084 - RNA, 19 nt, Homo sapiens
  misc_RNA (1)...(19): siRNA sense strand
uggaggacaccaaggagaa

SEQ ID NO: 2550085 - RNA, 19 nt, Homo sapiens
  misc_RNA (1)...(19): siRNA sense strand
gcaucuaccuggaggacac

SEQ ID NO: 2550086 - RNA, 19 nt, Homo sapiens
  misc_RNA (1)...(19): siRNA sense strand
ccaugaagaaggagcugau

SEQ ID NO: 2550087 - RNA, 19 nt, Homo sapiens
  misc_RNA (1)...(19): siRNA sense strand
cggaggacaugacggccaa

SEQ ID NO: 2550088 - RNA, 19 nt, Homo sapiens
  misc_RNA (1)...(19): siRNA sense strand
cagccaaggaggccgacaa

SEQ ID NO: 2550089 - RNA, 19 nt, Homo sapiens
  misc_RNA (1)...(19): siRNA sense strand
agaacagguccaagggcau

SEQ ID NO: 2550090 - RNA, 19 nt, Homo sapiens
  misc_RNA (1)...(19): siRNA sense strand
aggcggagaucgcgcucaa

SEQ ID NO: 2550091 - RNA, 19 nt, Homo sapiens
  misc_RNA (1)...(19): siRNA sense strand
acgccaaggccuacaguga

SEQ ID NO: 2550092 - RNA, 19 nt, Homo sapiens
  misc_RNA (1)...(19): siRNA sense strand
gaagagacacagaucgaca

SEQ ID NO: 2550093 - RNA, 19 nt, Homo sapiens
  misc_RNA (1)...(19): siRNA sense strand
gcgacgacaccaagggcuu

SEQ ID NO: 2550094 - RNA, 19 nt, Homo sapiens
  misc_RNA (1)...(19): siRNA sense strand
ucuacaaugcccugaagaa

SEQ ID NO: 2550095 - RNA, 19 nt, Homo sapiens
  misc_RNA (1)...(19): siRNA sense strand
gcgacgacaccaagggcuu

SEQ ID NO: 2550096 - RNA, 19 nt, Homo sapiens
  misc_RNA (1)...(19): siRNA sense strand
agaaggaacagcugaacga

SEQ ID NO: 2550097 - RNA, 19 nt, Homo sapiens
  misc_RNA (1)...(19): siRNA sense strand
aggccgaggcugagaagca

SEQ ID NO: 2550098 - RNA, 19 nt, Homo sapiens
  misc_RNA (1)...(19): siRNA sense strand
agaucgcgcucaaggagaa

SEQ ID NO: 2550099 - RNA, 19 nt, Homo sapiens
  misc_RNA (1)...(19): siRNA sense strand
agaaggagcuugcgcagga

SEQ ID NO: 2550100 - RNA, 19 nt, Homo sapiens
  misc_RNA (1)...(19): siRNA sense strand
ccgagaaggucuuggcccu

SEQ ID NO: 2550101 - RNA, 19 nt, Homo sapiens
  misc_RNA (1)...(19): siRNA sense strand
ucaacgaggcugugaagga

SEQ ID NO: 2550102 - RNA, 19 nt, Homo sapiens
  misc_RNA (1)...(19): siRNA sense strand
uugagaagacagagaucau

SEQ ID NO: 2550103 - RNA, 19 nt, Homo sapiens
  misc_RNA (1)...(19): siRNA sense strand
ccgccaagaaggagagcua

SEQ ID NO: 2550104 - RNA, 19 nt, Homo sapiens
  misc_RNA (1)...(19): siRNA sense strand
aggugaagcuggugaacau

SEQ ID NO: 2550105 - RNA, 19 nt, Homo sapiens
  misc_RNA (1)...(19): siRNA sense strand
agaagaagcgggagcggaa

SEQ ID NO: 2550106 - RNA, 19 nt, Homo sapiens
  misc_RNA (1)...(19): siRNA sense strand
ccacaaagacccugcccaa

SEQ ID NO: 2550107 - RNA, 19 nt, Homo sapiens
  misc_RNA (1)...(19): siRNA sense strand
cggagauggagaagcauaa

SEQ ID NO: 2550108 - RNA, 19 nt, Homo sapiens
  misc_RNA (1)...(19): siRNA sense strand
gagaagaugcucaaggaga

SEQ ID NO: 2550109 - RNA, 19 nt, Homo sapiens
  misc_RNA (1)...(19): siRNA sense strand
uggccuggguggaggagaa

SEQ ID NO: 2550110 - RNA, 19 nt, Homo sapiens
  misc_RNA (1)...(19): siRNA sense strand
aggagaaggaggcggagaa

SEQ ID NO: 2550111 - RNA, 19 nt, Homo sapiens
  misc_RNA (1)...(19): siRNA sense strand
agaaggaggcggagaacga

SEQ ID NO: 2550112 - RNA, 19 nt, Homo sapiens
  misc_RNA (1)...(19): siRNA sense strand
cggaauacuucacggcaga

SEQ ID NO: 2550113 - RNA, 19 nt, Homo sapiens
  misc_RNA (1)...(19): siRNA sense strand
ggaucacaguggagaagau

SEQ ID NO: 2550114 - RNA, 19 nt, Homo sapiens
  misc_RNA (1)...(19): siRNA sense strand
agauggaggagcugagcaa

SEQ ID NO: 2550115 - RNA, 19 nt, Homo sapiens
  misc_RNA (1)...(19): siRNA sense strand
gggcauuugaagagacaca

SEQ ID NO: 2550116 - RNA, 19 nt, Homo sapiens
  misc_RNA (1)...(19): siRNA sense strand
gcgagaaggucgaggagug

SEQ ID NO: 2550117 - RNA, 19 nt, Homo sapiens
  misc_RNA (1)...(19): siRNA sense strand
aggaggaggcugagaagau

SEQ ID NO: 2550118 - RNA, 19 nt, Homo sapiens
  misc_RNA (1)...(19): siRNA sense strand
aggcggagauccaggccaa

SEQ ID NO: 2550119 - RNA, 19 nt, Homo sapiens
  misc_RNA (1)...(19): siRNA sense strand
ucggcaaguuccagggcaa

SEQ ID NO: 2550120 - RNA, 19 nt, Homo sapiens
  misc_RNA (1)...(19): siRNA sense strand
uggaugaggcugugcggaa

SEQ ID NO: 2550121 - RNA, 19 nt, Homo sapiens
  misc_RNA (1)...(19): siRNA sense strand
gcggagauggagaagcaua

SEQ ID NO: 2550122 - RNA, 19 nt, Homo sapiens
  misc_RNA (1)...(19): siRNA sense strand
uggaggagcaggagcagaa

SEQ ID NO: 2550123 - RNA, 19 nt, Homo sapiens
  misc_RNA (1)...(19): siRNA sense strand
ccaagaagcccaaggucca

SEQ ID NO: 2550124 - RNA, 19 nt, Homo sapiens
  misc_RNA (1)...(19): siRNA sense strand
agaagaaccugcuggacga

SEQ ID NO: 2550125 - RNA, 19 nt, Homo sapiens
  misc_RNA (1)...(19): siRNA sense strand
cuacaaugcccugaagaaa

SEQ ID NO: 2550126 - RNA, 19 nt, Homo sapiens
  misc_RNA (1)...(19): siRNA sense strand
ugaaggagaagaagaucaa

SEQ ID NO: 2550127 - RNA, 19 nt, Homo sapiens
  misc_RNA (1)...(19): siRNA sense strand
cugaacaagagcuggagaa

SEQ ID NO: 2550128 - RNA, 19 nt, Homo sapiens
  misc_RNA (1)...(19): siRNA sense strand
uggaggaggcugugcguau

SEQ ID NO: 2550129 - RNA, 19 nt, Homo sapiens
  misc_RNA (1)...(19): siRNA sense strand
gagcugaaggagaagaaga

SEQ ID NO: 2550130 - RNA, 19 nt, Homo sapiens
  misc_RNA (1)...(19): siRNA sense strand
gugccagagguuugcgaaa

SEQ ID NO: 2550131 - RNA, 19 nt, Homo sapiens
  misc_RNA (1)...(19): siRNA sense strand
gggccuuggcagagaagau

SEQ ID NO: 2550132 - RNA, 19 nt, Homo sapiens
  misc_RNA (1)...(19): siRNA sense strand
gcaaggucaccguggagaa

SEQ ID NO: 2550133 - RNA, 19 nt, Homo sapiens
  misc_RNA (1)...(19): siRNA sense strand
aggcaaaggcacaggcgga

SEQ ID NO: 2550134 - RNA, 19 nt, Homo sapiens
  misc_RNA (1)...(19): siRNA sense strand
aggaggaggaggugggcuu

SEQ ID NO: 2550135 - RNA, 19 nt, Homo sapiens
  misc_RNA (1)...(19): siRNA sense strand
aggacgagagccagcguaa

SEQ ID NO: 2550136 - RNA, 19 nt, Homo sapiens
  misc_RNA (1)...(19): siRNA sense strand
agaaggagcaggagcuaca

SEQ ID NO: 2550137 - RNA, 19 nt, Homo sapiens
  misc_RNA (1)...(19): siRNA sense strand
acgcggagauggagaagca

SEQ ID NO: 2550138 - RNA, 19 nt, Homo sapiens
  misc_RNA (1)...(19): siRNA sense strand
ggcaggagcuguugcguca

SEQ ID NO: 2550139 - RNA, 19 nt, Homo sapiens
  misc_RNA (1)...(19): siRNA sense strand
acacggagacgcuggagaa

SEQ ID NO: 2550140 - RNA, 19 nt, Homo sapiens
  misc_RNA (1)...(19): siRNA sense strand
agaccgaccaccagaagaa

SEQ ID NO: 2550141 - RNA, 19 nt, Homo sapiens
  misc_RNA (1)...(19): siRNA sense strand
aggaggagcugcuggcuga

SEQ ID NO: 2550142 - RNA, 19 nt, Homo sapiens
  misc_RNA (1)...(19): siRNA sense strand
agaagaagaucaaggagcu

SEQ ID NO: 2550143 - RNA, 19 nt, Homo sapiens
  misc_RNA (1)...(19): siRNA sense strand
auggagaagcauaagaaau

SEQ ID NO: 2550144 - RNA, 19 nt, Homo sapiens
  misc_RNA (1)...(19): siRNA sense strand
gaggagacaagaagggcau

SEQ ID NO: 2550145 - RNA, 19 nt, Homo sapiens
  misc_RNA (1)...(19): siRNA sense strand
ugucaguguacgaggccua

SEQ ID NO: 2550146 - RNA, 19 nt, Homo sapiens
  misc_RNA (1)...(19): siRNA sense strand
uggaggagaucgagcgcca

SEQ ID NO: 2550147 - RNA, 19 nt, Homo sapiens
  misc_RNA (1)...(19): siRNA sense strand
agaccaaccuggagaaccu

SEQ ID NO: 2550148 - RNA, 19 nt, Homo sapiens
  misc_RNA (1)...(19): siRNA sense strand
ugaaugagaaggaggagga

SEQ ID NO: 2550149 - RNA, 19 nt, Homo sapiens
  misc_RNA (1)...(19): siRNA sense strand
cugaaggagaagaagauca

SEQ ID NO: 2550150 - RNA, 19 nt, Homo sapiens
  misc_RNA (1)...(19): siRNA sense strand
cugagaagcagaaggagga

SEQ ID NO: 2550151 - RNA, 19 nt, Homo sapiens
  misc_RNA (1)...(19): siRNA sense strand
uggcagagaagaugcucaa

SEQ ID NO: 2550152 - RNA, 19 nt, Homo sapiens
  misc_RNA (1)...(19): siRNA sense strand
uggaacgggacuuggacaa

SEQ ID NO: 2550153 - RNA, 19 nt, Homo sapiens
  misc_RNA (1)...(19): siRNA sense strand
uggacaaggcggauagcau

SEQ ID NO: 2550154 - RNA, 19 nt, Homo sapiens
  misc_RNA (1)...(19): siRNA sense strand
augagaaggaggaggagga

SEQ ID NO: 2550155 - RNA, 19 nt, Homo sapiens
  misc_RNA (1)...(19): siRNA sense strand
acgagaaggaacagcugaa

SEQ ID NO: 2550156 - RNA, 19 nt, Homo sapiens
  misc_RNA (1)...(19): siRNA sense strand
cugaggagcgcgugcagaa

SEQ ID NO: 2550157 - RNA, 19 nt, Homo sapiens
  misc_RNA (1)...(19): siRNA sense strand
uggaggacaccaaggagaa

SEQ ID NO: 2550158 - RNA, 19 nt, Homo sapiens
  misc_RNA (1)...(19): siRNA sense strand
gcaucuaccuggaggacac

SEQ ID NO: 2550159 - RNA, 19 nt, Homo sapiens
  misc_RNA (1)...(19): siRNA sense strand
ccaugaagaaggagcugau

SEQ ID NO: 2550160 - RNA, 19 nt, Homo sapiens
  misc_RNA (1)...(19): siRNA sense strand
cggaggacaugacggccaa

SEQ ID NO: 2550161 - RNA, 19 nt, Homo sapiens
  misc_RNA (1)...(19): siRNA sense strand
cagccaaggaggccgacaa

SEQ ID NO: 2550162 - RNA, 19 nt, Homo sapiens
  misc_RNA (1)...(19): siRNA sense strand
agaacagguccaagggcau

SEQ ID NO: 2550163 - RNA, 19 nt, Homo sapiens
  misc_RNA (1)...(19): siRNA sense strand
aggcggagaucgcgcucaa

SEQ ID NO: 2550164 - RNA, 19 nt, Homo sapiens
  misc_RNA (1)...(19): siRNA sense strand
acgccaaggccuacaguga

SEQ ID NO: 2550165 - RNA, 19 nt, Homo sapiens
  misc_RNA (1)...(19): siRNA sense strand
gaagagacacagaucgaca

SEQ ID NO: 2550166 - RNA, 19 nt, Homo sapiens
  misc_RNA (1)...(19): siRNA sense strand
gcgacgacaccaagggcuu

SEQ ID NO: 2550167 - RNA, 19 nt, Homo sapiens
  misc_RNA (1)...(19): siRNA sense strand
ucuacaaugcccugaagaa

SEQ ID NO: 2550168 - RNA, 19 nt, Homo sapiens
  misc_RNA (1)...(19): siRNA sense strand
gcgacgacaccaagggcuu

SEQ ID NO: 2550169 - RNA, 19 nt, Homo sapiens
  misc_RNA (1)...(19): siRNA sense strand
agaaggaacagcugaacga

SEQ ID NO: 2550170 - RNA, 19 nt, Homo sapiens
  misc_RNA (1)...(19): siRNA sense strand
aggccgaggcugagaagca

SEQ ID NO: 2550171 - RNA, 19 nt, Homo sapiens
  misc_RNA (1)...(19): siRNA sense strand
agaucgcgcucaaggagaa

SEQ ID NO: 2550172 - RNA, 19 nt, Homo sapiens
  misc_RNA (1)...(19): siRNA sense strand
agaaggagcuugcgcagga

SEQ ID NO: 2550173 - RNA, 19 nt, Homo sapiens
  misc_RNA (1)...(19): siRNA sense strand
ccgagaaggucuuggcccu

SEQ ID NO: 2550174 - RNA, 19 nt, Homo sapiens
  misc_RNA (1)...(19): siRNA sense strand
ucaacgaggcugugaagga

SEQ ID NO: 2550175 - RNA, 19 nt, Homo sapiens
  misc_RNA (1)...(19): siRNA sense strand
uugagaagacagagaucau

SEQ ID NO: 2550176 - RNA, 19 nt, Homo sapiens
  misc_RNA (1)...(19): siRNA sense strand
ggacagagcuaccgaggca

SEQ ID NO: 2550177 - RNA, 19 nt, Homo sapiens
  misc_RNA (1)...(19): siRNA sense strand
agauaugacuacugcgaca

SEQ ID NO: 2550178 - RNA, 19 nt, Homo sapiens
  misc_RNA (1)...(19): siRNA sense strand
cgaagaagacuguauguuu

SEQ ID NO: 2550179 - RNA, 19 nt, Homo sapiens
  misc_RNA (1)...(19): siRNA sense strand
agcaggaaguauagaagaa

SEQ ID NO: 2550180 - RNA, 19 nt, Homo sapiens
  misc_RNA (1)...(19): siRNA sense strand
caauaagccuggugucuau

SEQ ID NO: 2550181 - RNA, 19 nt, Homo sapiens
  misc_RNA (1)...(19): siRNA sense strand
ccgcaauccugacggaaaa

SEQ ID NO: 2550182 - RNA, 19 nt, Homo sapiens
  misc_RNA (1)...(19): siRNA sense strand
gggaaaggauaccgaggca

SEQ ID NO: 2550183 - RNA, 19 nt, Homo sapiens
  misc_RNA (1)...(19): siRNA sense strand
gcugggagcaggaaguaua

SEQ ID NO: 2550184 - RNA, 19 nt, Homo sapiens
  misc_RNA (1)...(19): siRNA sense strand
gggagaaacccaagguacu

SEQ ID NO: 2550185 - RNA, 19 nt, Homo sapiens
  misc_RNA (1)...(19): siRNA sense strand
gagaaaacuaugacggcaa

SEQ ID NO: 2550186 - RNA, 19 nt, Homo sapiens
  misc_RNA (1)...(19): siRNA sense strand
agagcaacaaugugugaua

SEQ ID NO: 2550187 - RNA, 19 nt, Homo sapiens
  misc_RNA (1)...(19): siRNA sense strand
gaggagaacuacugcagga

SEQ ID NO: 2550188 - RNA, 19 nt, Homo sapiens
  misc_RNA (1)...(19): siRNA sense strand
cauuaggaugagagaugua

SEQ ID NO: 2550189 - RNA, 19 nt, Homo sapiens
  misc_RNA (1)...(19): siRNA sense strand
cagaaaagagauaugacua

SEQ ID NO: 2550190 - RNA, 19 nt, Homo sapiens
  misc_RNA (1)...(19): siRNA sense strand
gaauucaccugcagggcau

SEQ ID NO: 2550191 - RNA, 19 nt, Homo sapiens
  misc_RNA (1)...(19): siRNA sense strand
auaucacaguaaagagcaa

SEQ ID NO: 2550192 - RNA, 19 nt, Homo sapiens
  misc_RNA (1)...(19): siRNA sense strand
gaaauguccuggaaggguu

SEQ ID NO: 2550193 - RNA, 19 nt, Homo sapiens
  misc_RNA (1)...(19): siRNA sense strand
uagaagaaugugcagcaaa

SEQ ID NO: 2550194 - RNA, 19 nt, Homo sapiens
  misc_RNA (1)...(19): siRNA sense strand
agggacuggaggagaacua

SEQ ID NO: 2550195 - RNA, 19 nt, Homo sapiens
  misc_RNA (1)...(19): siRNA sense strand
cagcaaaaugugaggagga

SEQ ID NO: 2550196 - RNA, 19 nt, Homo sapiens
  misc_RNA (1)...(19): siRNA sense strand
gagcaacaaugugugauaa

SEQ ID NO: 2550197 - RNA, 19 nt, Homo sapiens
  misc_RNA (1)...(19): siRNA sense strand
gccgcaauccugacggaaa

SEQ ID NO: 2550198 - RNA, 19 nt, Homo sapiens
  misc_RNA (1)...(19): siRNA sense strand
cuuccaaauuuccaaacaa

SEQ ID NO: 2550199 - RNA, 19 nt, Homo sapiens
  misc_RNA (1)...(19): siRNA sense strand
gggagugaugagaaauaau

SEQ ID NO: 2550200 - RNA, 19 nt, Homo sapiens
  misc_RNA (1)...(19): siRNA sense strand
acaaugaacuacugcagga

SEQ ID NO: 2550201 - RNA, 19 nt, Homo sapiens
  misc_RNA (1)...(19): siRNA sense strand
aagauauugccuugcuaaa

SEQ ID NO: 2550202 - RNA, 19 nt, Homo sapiens
  misc_RNA (1)...(19): siRNA sense strand
guaaagagcaacaaugugu

SEQ ID NO: 2550203 - RNA, 19 nt, Homo sapiens
  misc_RNA (1)...(19): siRNA sense strand
cggugggaguacuguaaga

SEQ ID NO: 2550204 - RNA, 19 nt, Homo sapiens
  misc_RNA (1)...(19): siRNA sense strand
agacuguauguuugggaau

SEQ ID NO: 2550205 - RNA, 19 nt, Homo sapiens
  misc_RNA (1)...(19): siRNA sense strand
uuacuuggauugagggagu

SEQ ID NO: 2550206 - RNA, 19 nt, Homo sapiens
  misc_RNA (1)...(19): siRNA sense strand
ucugaagggaacaggugaa

SEQ ID NO: 2550207 - RNA, 19 nt, Homo sapiens
  misc_RNA (1)...(19): siRNA sense strand
gugcacaccaagaagugaa

SEQ ID NO: 2550208 - RNA, 19 nt, Homo sapiens
  misc_RNA (1)...(19): siRNA sense strand
caguaaagagcaacaaugu

SEQ ID NO: 2550209 - RNA, 19 nt, Homo sapiens
  misc_RNA (1)...(19): siRNA sense strand
gggagcaggaaguauagaa

SEQ ID NO: 2550210 - RNA, 19 nt, Homo sapiens
  misc_RNA (1)...(19): siRNA sense strand
aggaaguauagaagaaugu

SEQ ID NO: 2550211 - RNA, 19 nt, Homo sapiens
  misc_RNA (1)...(19): siRNA sense strand
gagcaggaaguauagaaga

SEQ ID NO: 2550212 - RNA, 19 nt, Homo sapiens
  misc_RNA (1)...(19): siRNA sense strand
gaagaaauguccuggaagg

SEQ ID NO: 2550213 - RNA, 19 nt, Homo sapiens
  misc_RNA (1)...(19): siRNA sense strand
ggugaaaacuaucgcggga

SEQ ID NO: 2550214 - RNA, 19 nt, Homo sapiens
  misc_RNA (1)...(19): siRNA sense strand
ccaauaagccuggugucua

SEQ ID NO: 2550215 - RNA, 19 nt, Homo sapiens
  misc_RNA (1)...(19): siRNA sense strand
ggaaaggauaccgaggcaa

SEQ ID NO: 2550216 - RNA, 19 nt, Homo sapiens
  misc_RNA (1)...(19): siRNA sense strand
uugagaauaaagugugcaa

SEQ ID NO: 2550217 - RNA, 19 nt, Homo sapiens
  misc_RNA (1)...(19): siRNA sense strand
gugcuauacuacugaucca

SEQ ID NO: 2550218 - RNA, 19 nt, Homo sapiens
  misc_RNA (1)...(19): siRNA sense strand
uauguuugggaaugggaaa

SEQ ID NO: 2550219 - RNA, 19 nt, Homo sapiens
  misc_RNA (1)...(19): siRNA sense strand
cugaagggaacaggugaaa

SEQ ID NO: 2550220 - RNA, 19 nt, Homo sapiens
  misc_RNA (1)...(19): siRNA sense strand
ugaaaacuaucgcgggaau

SEQ ID NO: 2550221 - RNA, 19 nt, Homo sapiens
  misc_RNA (1)...(19): siRNA sense strand
ugucagucuuggucaucua

SEQ ID NO: 2550222 - RNA, 19 nt, Homo sapiens
  misc_RNA (1)...(19): siRNA sense strand
ccguaacccugauggugau

SEQ ID NO: 2550223 - RNA, 19 nt, Homo sapiens
  misc_RNA (1)...(19): siRNA sense strand
ugaaaucaggucaaggaga

SEQ ID NO: 2550224 - RNA, 19 nt, Homo sapiens
  misc_RNA (1)...(19): siRNA sense strand
aguuaaagugguagcagaa

SEQ ID NO: 2550225 - RNA, 19 nt, Homo sapiens
  misc_RNA (1)...(19): siRNA sense strand
cgucagagguucuccgcau

SEQ ID NO: 2550226 - RNA, 19 nt, Homo sapiens
  misc_RNA (1)...(19): siRNA sense strand
gauuaaaggaauugaagcu

SEQ ID NO: 2550227 - RNA, 19 nt, Homo sapiens
  misc_RNA (1)...(19): siRNA sense strand
ccucaguguaugaugggaa

SEQ ID NO: 2550228 - RNA, 19 nt, Homo sapiens
  misc_RNA (1)...(19): siRNA sense strand
aaguuaaagugguagcaga

SEQ ID NO: 2550229 - RNA, 19 nt, Homo sapiens
  misc_RNA (1)...(19): siRNA sense strand
acauauuggcucaugaaau

SEQ ID NO: 2550230 - RNA, 19 nt, Homo sapiens
  misc_RNA (1)...(19): siRNA sense strand
gggcacgggaauuaagaau

SEQ ID NO: 2550231 - RNA, 19 nt, Homo sapiens
  misc_RNA (1)...(19): siRNA sense strand
aaaccaagggcacgggaau

SEQ ID NO: 2550232 - RNA, 19 nt, Homo sapiens
  misc_RNA (1)...(19): siRNA sense strand
gcgagaggcuucuggcacu

SEQ ID NO: 2550233 - RNA, 19 nt, Homo sapiens
  misc_RNA (1)...(19): siRNA sense strand
ucugagaagccuacaguga

SEQ ID NO: 2550234 - RNA, 19 nt, Homo sapiens
  misc_RNA (1)...(19): siRNA sense strand
aggaaguucuguagccuca

SEQ ID NO: 2550235 - RNA, 19 nt, Homo sapiens
  misc_RNA (1)...(19): siRNA sense strand
gaacaauccucccucguca

SEQ ID NO: 2550236 - RNA, 19 nt, Homo sapiens
  misc_RNA (1)...(19): siRNA sense strand
gcuucuuccaagugugaau

SEQ ID NO: 2550237 - RNA, 19 nt, Homo sapiens
  misc_RNA (1)...(19): siRNA sense strand
aagugguagcagaaggauu

SEQ ID NO: 2550238 - RNA, 19 nt, Homo sapiens
  misc_RNA (1)...(19): siRNA sense strand
ugacuacaguuuaugccaa

SEQ ID NO: 2550239 - RNA, 19 nt, Homo sapiens
  misc_RNA (1)...(19): siRNA sense strand
gcucugaagauauugacau

SEQ ID NO: 2550240 - RNA, 19 nt, Homo sapiens
  misc_RNA (1)...(19): siRNA sense strand
cuacaguccaaaugaaguu

SEQ ID NO: 2550241 - RNA, 19 nt, Homo sapiens
  misc_RNA (1)...(19): siRNA sense strand
agaaggaaguggugcgugu

SEQ ID NO: 2550242 - RNA, 19 nt, Homo sapiens
  misc_RNA (1)...(19): siRNA sense strand
gugauuacuugcagggagu

SEQ ID NO: 2550243 - RNA, 19 nt, Homo sapiens
  misc_RNA (1)...(19): siRNA sense strand
gaagaaucaaguugggcuu

SEQ ID NO: 2550244 - RNA, 19 nt, Homo sapiens
  misc_RNA (1)...(19): siRNA sense strand
ccucugaugaguuggaaca

SEQ ID NO: 2550245 - RNA, 19 nt, Homo sapiens
  misc_RNA (1)...(19): siRNA sense strand
aggugaacgggcagaggaa

SEQ ID NO: 2550246 - RNA, 19 nt, Homo sapiens
  misc_RNA (1)...(19): siRNA sense strand
gugaacgggcagaggaagu

SEQ ID NO: 2550247 - RNA, 19 nt, Homo sapiens
  misc_RNA (1)...(19): siRNA sense strand
gguggugauuccugggcau

SEQ ID NO: 2550248 - RNA, 19 nt, Homo sapiens
  misc_RNA (1)...(19): siRNA sense strand
guggagagcagguggcugu

SEQ ID NO: 2550249 - RNA, 19 nt, Homo sapiens
  misc_RNA (1)...(19): siRNA sense strand
caaagaaagaagugagaau

SEQ ID NO: 2550250 - RNA, 19 nt, Homo sapiens
  misc_RNA (1)...(19): siRNA sense strand
ggaaaauaccauagcaaaa

SEQ ID NO: 2550251 - RNA, 19 nt, Homo sapiens
  misc_RNA (1)...(19): siRNA sense strand
ccaggaaagaugaaagaaa

SEQ ID NO: 2550252 - RNA, 19 nt, Homo sapiens
  misc_RNA (1)...(19): siRNA sense strand
ggcaaugugcagagacaaa

SEQ ID NO: 2550253 - RNA, 19 nt, Homo sapiens
  misc_RNA (1)...(19): siRNA sense strand
gguuaauaagugaagacaa

SEQ ID NO: 2550254 - RNA, 19 nt, Homo sapiens
  misc_RNA (1)...(19): siRNA sense strand
ugaaauuggaaguagcaaa

SEQ ID NO: 2550255 - RNA, 19 nt, Homo sapiens
  misc_RNA (1)...(19): siRNA sense strand
cuguaagaucagagaaaca

SEQ ID NO: 2550256 - RNA, 19 nt, Homo sapiens
  misc_RNA (1)...(19): siRNA sense strand
agacaaagaaacuguucaa

SEQ ID NO: 2550257 - RNA, 19 nt, Homo sapiens
  misc_RNA (1)...(19): siRNA sense strand
gaggcaaugugcagagaca

SEQ ID NO: 2550258 - RNA, 19 nt, Homo sapiens
  misc_RNA (1)...(19): siRNA sense strand
gcuugaacacaaagaaaga

SEQ ID NO: 2550259 - RNA, 19 nt, Homo sapiens
  misc_RNA (1)...(19): siRNA sense strand
ggaacaaaacucuggacua

SEQ ID NO: 2550260 - RNA, 19 nt, Homo sapiens
  misc_RNA (1)...(19): siRNA sense strand
gcucacaagcagaggcuca

SEQ ID NO: 2550261 - RNA, 19 nt, Homo sapiens
  misc_RNA (1)...(19): siRNA sense strand
cuucaguggccaucagaaa

SEQ ID NO: 2550262 - RNA, 19 nt, Homo sapiens
  misc_RNA (1)...(19): siRNA sense strand
gugcagagacaaagaaacu

SEQ ID NO: 2550263 - RNA, 19 nt, Homo sapiens
  misc_RNA (1)...(19): siRNA sense strand
caaaauggaagcagagaau

SEQ ID NO: 2550264 - RNA, 19 nt, Homo sapiens
  misc_RNA (1)...(19): siRNA sense strand
guuuaaaucgacagaauca

SEQ ID NO: 2550265 - RNA, 19 nt, Homo sapiens
  misc_RNA (1)...(19): siRNA sense strand
acuguuacugugagagaaa

SEQ ID NO: 2550266 - RNA, 19 nt, Homo sapiens
  misc_RNA (1)...(19): siRNA sense strand
caaauacugaagagguuaa

SEQ ID NO: 2550267 - RNA, 19 nt, Homo sapiens
  misc_RNA (1)...(19): siRNA sense strand
cuuaagugacaaugaagaa

SEQ ID NO: 2550268 - RNA, 19 nt, Homo sapiens
  misc_RNA (1)...(19): siRNA sense strand
caaacaugcuggccaacaa

SEQ ID NO: 2550269 - RNA, 19 nt, Homo sapiens
  misc_RNA (1)...(19): siRNA sense strand
gaacaaaacucuggacuau

SEQ ID NO: 2550270 - RNA, 19 nt, Homo sapiens
  misc_RNA (1)...(19): siRNA sense strand
cuggaagaucugaaggcaa

SEQ ID NO: 2550271 - RNA, 19 nt, Homo sapiens
  misc_RNA (1)...(19): siRNA sense strand
ccauaaaaguagaagaaag

SEQ ID NO: 2550272 - RNA, 19 nt, Homo sapiens
  misc_RNA (1)...(19): siRNA sense strand
caugaaugaaucagaaaga

SEQ ID NO: 2550273 - RNA, 19 nt, Homo sapiens
  misc_RNA (1)...(19): siRNA sense strand
aggaaagaugaaugagaca

SEQ ID NO: 2550274 - RNA, 19 nt, Homo sapiens
  misc_RNA (1)...(19): siRNA sense strand
gcaucaucauauggagaaa

SEQ ID NO: 2550275 - RNA, 19 nt, Homo sapiens
  misc_RNA (1)...(19): siRNA sense strand
ccacagaggaaaauguuaa

SEQ ID NO: 2550276 - RNA, 19 nt, Homo sapiens
  misc_RNA (1)...(19): siRNA sense strand
gggaaaaggauuuagcaga

SEQ ID NO: 2550277 - RNA, 19 nt, Homo sapiens
  misc_RNA (1)...(19): siRNA sense strand
gguuuauacaacuacgaaa

SEQ ID NO: 2550278 - RNA, 19 nt, Homo sapiens
  misc_RNA (1)...(19): siRNA sense strand
ggaacugaaacaaagggaa

SEQ ID NO: 2550279 - RNA, 19 nt, Homo sapiens
  misc_RNA (1)...(19): siRNA sense strand
ccaaagaaagcguccguga

SEQ ID NO: 2550280 - RNA, 19 nt, Homo sapiens
  misc_RNA (1)...(19): siRNA sense strand
uccuguaagaucagagaaa

SEQ ID NO: 2550281 - RNA, 19 nt, Homo sapiens
  misc_RNA (1)...(19): siRNA sense strand
caaaagaagcaauugacaa

SEQ ID NO: 2550282 - RNA, 19 nt, Homo sapiens
  misc_RNA (1)...(19): siRNA sense strand
guuuugaguuguuaggaaa

SEQ ID NO: 2550283 - RNA, 19 nt, Homo sapiens
  misc_RNA (1)...(19): siRNA sense strand
cuuaacaaacacagaucua

SEQ ID NO: 2550284 - RNA, 19 nt, Homo sapiens
  misc_RNA (1)...(19): siRNA sense strand
cugaaaaugcugggaaaua

SEQ ID NO: 2550285 - RNA, 19 nt, Homo sapiens
  misc_RNA (1)...(19): siRNA sense strand
acuauaagcaccaggaguu

SEQ ID NO: 2550286 - RNA, 19 nt, Homo sapiens
  misc_RNA (1)...(19): siRNA sense strand
gcaagcuaccacagaggaa

SEQ ID NO: 2550287 - RNA, 19 nt, Homo sapiens
  misc_RNA (1)...(19): siRNA sense strand
cugcuugaacacaaagaaa

SEQ ID NO: 2550288 - RNA, 19 nt, Homo sapiens
  misc_RNA (1)...(19): siRNA sense strand
cacugaaaaugcugggaaa

SEQ ID NO: 2550289 - RNA, 19 nt, Homo sapiens
  misc_RNA (1)...(19): siRNA sense strand
uagcaaaagcucuggaaga

SEQ ID NO: 2550290 - RNA, 19 nt, Homo sapiens
  misc_RNA (1)...(19): siRNA sense strand
cagcaguccuuauguucua

SEQ ID NO: 2550291 - RNA, 19 nt, Homo sapiens
  misc_RNA (1)...(19): siRNA sense strand
gaggaaaauguuaagcaua

SEQ ID NO: 2550292 - RNA, 19 nt, Homo sapiens
  misc_RNA (1)...(19): siRNA sense strand
gcaaaauggaagcagagaa

SEQ ID NO: 2550293 - RNA, 19 nt, Homo sapiens
  misc_RNA (1)...(19): siRNA sense strand
ggacuaugcugagaaggaa

SEQ ID NO: 2550294 - RNA, 19 nt, Homo sapiens
  misc_RNA (1)...(19): siRNA sense strand
gaugaaagaaaacaggaaa

SEQ ID NO: 2550295 - RNA, 19 nt, Homo sapiens
  misc_RNA (1)...(19): siRNA sense strand
gcaccaggaguuugacaau

SEQ ID NO: 2550296 - RNA, 19 nt, Homo sapiens
  misc_RNA (1)...(19): siRNA sense strand
acuagagaguguuguuauu

SEQ ID NO: 2550297 - RNA, 19 nt, Homo sapiens
  misc_RNA (1)...(19): siRNA sense strand
uggaagcagagaauaguua

SEQ ID NO: 2550298 - RNA, 19 nt, Homo sapiens
  misc_RNA (1)...(19): siRNA sense strand
ggaacucagaacaaacaaa

SEQ ID NO: 2550299 - RNA, 19 nt, Homo sapiens
  misc_RNA (1)...(19): siRNA sense strand
acuagaaaaccaugacaaa

SEQ ID NO: 2550300 - RNA, 19 nt, Homo sapiens
  misc_RNA (1)...(19): siRNA sense strand
ucgaaaacguagacaacau

SEQ ID NO: 2550301 - RNA, 19 nt, Homo sapiens
  misc_RNA (1)...(19): siRNA sense strand
gaaucauuuaccagaagaa

SEQ ID NO: 2550302 - RNA, 19 nt, Homo sapiens
  misc_RNA (1)...(19): siRNA sense strand
aaugaaaccacaagaaguu

SEQ ID NO: 2550303 - RNA, 19 nt, Homo sapiens
  misc_RNA (1)...(19): siRNA sense strand
gacuaugcugagaaggaaa

SEQ ID NO: 2550304 - RNA, 19 nt, Homo sapiens
  misc_RNA (1)...(19): siRNA sense strand
caacuguuacugugagaga

SEQ ID NO: 2550305 - RNA, 19 nt, Homo sapiens
  misc_RNA (1)...(19): siRNA sense strand
acugaagagguuaacauaa

SEQ ID NO: 2550306 - RNA, 19 nt, Homo sapiens
  misc_RNA (1)...(19): siRNA sense strand
ccucuggauagguuaauaa

SEQ ID NO: 2550307 - RNA, 19 nt, Homo sapiens
  misc_RNA (1)...(19): siRNA sense strand
ccuaauauugaaaggaacu

SEQ ID NO: 2550308 - RNA, 19 nt, Homo sapiens
  misc_RNA (1)...(19): siRNA sense strand
gccaacaagguuaaauuua

SEQ ID NO: 2550309 - RNA, 19 nt, Homo sapiens
  misc_RNA (1)...(19): siRNA sense strand
ggcucaaggaacugaaaca

SEQ ID NO: 2550310 - RNA, 19 nt, Homo sapiens
  misc_RNA (1)...(19): siRNA sense strand
cucaaggaacugaaacaaa

SEQ ID NO: 2550311 - RNA, 19 nt, Homo sapiens
  misc_RNA (1)...(19): siRNA sense strand
guucaaacucaagagauaa

SEQ ID NO: 2550312 - RNA, 19 nt, Homo sapiens
  misc_RNA (1)...(19): siRNA sense strand
cagcaagaacgggaacaaa

SEQ ID NO: 2550313 - RNA, 19 nt, Homo sapiens
  misc_RNA (1)...(19): siRNA sense strand
cagcagaagcaggaagaca

SEQ ID NO: 2550314 - RNA, 19 nt, Homo sapiens
  misc_RNA (1)...(19): siRNA sense strand
ggauagguuaauaagugaa

SEQ ID NO: 2550315 - RNA, 19 nt, Homo sapiens
  misc_RNA (1)...(19): siRNA sense strand
uuacaaugaaggaggaaau

SEQ ID NO: 2550316 - RNA, 19 nt, Homo sapiens
  misc_RNA (1)...(19): siRNA sense strand
uggaggugguggagguaau

SEQ ID NO: 2550317 - RNA, 19 nt, Homo sapiens
  misc_RNA (1)...(19): siRNA sense strand
gggcuauggugguggugga

SEQ ID NO: 2550318 - RNA, 19 nt, Homo sapiens
  misc_RNA (1)...(19): siRNA sense strand
cuuugaaacuacagaugau

SEQ ID NO: 2550319 - RNA, 19 nt, Homo sapiens
  misc_RNA (1)...(19): siRNA sense strand
gggcaguuuugguggaaga

SEQ ID NO: 2550320 - RNA, 19 nt, Homo sapiens
  misc_RNA (1)...(19): siRNA sense strand
ccacacuauuaaugggcau

SEQ ID NO: 2550321 - RNA, 19 nt, Homo sapiens
  misc_RNA (1)...(19): siRNA sense strand
acagagaggucguggaggu

SEQ ID NO: 2550322 - RNA, 19 nt, Homo sapiens
  misc_RNA (1)...(19): siRNA sense strand
aggugaugguggauauaau

SEQ ID NO: 2550323 - RNA, 19 nt, Homo sapiens
  misc_RNA (1)...(19): siRNA sense strand
ugguggaagaggaggcuau

SEQ ID NO: 2550324 - RNA, 19 nt, Homo sapiens
  misc_RNA (1)...(19): siRNA sense strand
uggauaugguggaggugga

SEQ ID NO: 2550325 - RNA, 19 nt, Homo sapiens
  misc_RNA (1)...(19): siRNA sense strand
ccaucuaacagugaagaaa

SEQ ID NO: 2550326 - RNA, 19 nt, Homo sapiens
  misc_RNA (1)...(19): siRNA sense strand
acacaagguugaugggcgu

SEQ ID NO: 2550327 - RNA, 19 nt, Homo sapiens
  misc_RNA (1)...(19): siRNA sense strand
agacaggcagaguggaaaa

SEQ ID NO: 2550328 - RNA, 19 nt, Homo sapiens
  misc_RNA (1)...(19): siRNA sense strand
uguaaagccuggugcccau

SEQ ID NO: 2550329 - RNA, 19 nt, Homo sapiens
  misc_RNA (1)...(19): siRNA sense strand
caucuaacagugaagaaaa

SEQ ID NO: 2550330 - RNA, 19 nt, Homo sapiens
  misc_RNA (1)...(19): siRNA sense strand
ugauaguuuacgagaacau

SEQ ID NO: 2550331 - RNA, 19 nt, Homo sapiens
  misc_RNA (1)...(19): siRNA sense strand
cagagguaguuauggagga

SEQ ID NO: 2550332 - RNA, 19 nt, Homo sapiens
  misc_RNA (1)...(19): siRNA sense strand
guuacaaugaaggaggaaa

SEQ ID NO: 2550333 - RNA, 19 nt, Homo sapiens
  misc_RNA (1)...(19): siRNA sense strand
gagaggucguggaggugga

SEQ ID NO: 2550334 - RNA, 19 nt, Homo sapiens
  misc_RNA (1)...(19): siRNA sense strand
aaacuuugguggaagagga

SEQ ID NO: 2550335 - RNA, 19 nt, Homo sapiens
  misc_RNA (1)...(19): siRNA sense strand
cuauggugguggugggaac

SEQ ID NO: 2550336 - RNA, 19 nt, Homo sapiens
  misc_RNA (1)...(19): siRNA sense strand
uuauaguggacaacagcaa

SEQ ID NO: 2550337 - RNA, 19 nt, Homo sapiens
  misc_RNA (1)...(19): siRNA sense strand
uggaggaggugauggugga

SEQ ID NO: 2550338 - RNA, 19 nt, Homo sapiens
  misc_RNA (1)...(19): siRNA sense strand
gaacuuuggagguggugga

SEQ ID NO: 2550339 - RNA, 19 nt, Homo sapiens
  misc_RNA (1)...(19): siRNA sense strand
uggcggugguccugguuau

SEQ ID NO: 2550340 - RNA, 19 nt, Homo sapiens
  misc_RNA (1)...(19): siRNA sense strand
uguuggugguauuaaagaa

SEQ ID NO: 2550341 - RNA, 19 nt, Homo sapiens
  misc_RNA (1)...(19): siRNA sense strand
gguggauaugguagcagaa

SEQ ID NO: 2550342 - RNA, 19 nt, Homo sapiens
  misc_RNA (1)...(19): siRNA sense strand
aggcuauggugguggaggu

SEQ ID NO: 2550343 - RNA, 19 nt, Homo sapiens
  misc_RNA (1)...(19): siRNA sense strand
agaaagaagugguggagga

SEQ ID NO: 2550344 - RNA, 19 nt, Homo sapiens
  misc_RNA (1)...(19): siRNA sense strand
ggaggaagaugaaggggaa

SEQ ID NO: 2550345 - RNA, 19 nt, Homo sapiens
  misc_RNA (1)...(19): siRNA sense strand
gggaagaagaagaugagga

SEQ ID NO: 2550346 - RNA, 19 nt, Homo sapiens
  misc_RNA (1)...(19): siRNA sense strand
aagaagugguggaggagga

SEQ ID NO: 2550347 - RNA, 19 nt, Homo sapiens
  misc_RNA (1)...(19): siRNA sense strand
gaaagaaagaaguggugga

SEQ ID NO: 2550348 - RNA, 19 nt, Homo sapiens
  misc_RNA (1)...(19): siRNA sense strand
ugguggaggaggaggagaa

SEQ ID NO: 2550349 - RNA, 19 nt, Homo sapiens
  misc_RNA (1)...(19): siRNA sense strand
cugaaggagaagaaggaga

SEQ ID NO: 2550350 - RNA, 19 nt, Homo sapiens
  misc_RNA (1)...(19): siRNA sense strand
aggaagaagaagaagagga

SEQ ID NO: 2550351 - RNA, 19 nt, Homo sapiens
  misc_RNA (1)...(19): siRNA sense strand
cugccgaagaggaggauga

SEQ ID NO: 2550352 - RNA, 19 nt, Homo sapiens
  misc_RNA (1)...(19): siRNA sense strand
aggauggagaggaggaaga

SEQ ID NO: 2550353 - RNA, 19 nt, Homo sapiens
  misc_RNA (1)...(19): siRNA sense strand
agaugaggaagaagaagaa

SEQ ID NO: 2550354 - RNA, 19 nt, Homo sapiens
  misc_RNA (1)...(19): siRNA sense strand
cugaggaggaagaagaaga

SEQ ID NO: 2550355 - RNA, 19 nt, Homo sapiens
  misc_RNA (1)...(19): siRNA sense strand
gccaaggaccugaaggaga

SEQ ID NO: 2550356 - RNA, 19 nt, Homo sapiens
  misc_RNA (1)...(19): siRNA sense strand
agaagaaggagaaggugga

SEQ ID NO: 2550357 - RNA, 19 nt, Homo sapiens
  misc_RNA (1)...(19): siRNA sense strand
agaaggagaagguggagga

SEQ ID NO: 2550358 - RNA, 19 nt, Homo sapiens
  misc_RNA (1)...(19): siRNA sense strand
cggaaagagcgaaagaaag

SEQ ID NO: 2550359 - RNA, 19 nt, Homo sapiens
  misc_RNA (1)...(19): siRNA sense strand
agaugaaggggaagaagaa

SEQ ID NO: 2550360 - RNA, 19 nt, Homo sapiens
  misc_RNA (1)...(19): siRNA sense strand
auggagaggaggaagauga

SEQ ID NO: 2550361 - RNA, 19 nt, Homo sapiens
  misc_RNA (1)...(19): siRNA sense strand
augaggaagaagaagaaga

SEQ ID NO: 2550362 - RNA, 19 nt, Homo sapiens
  misc_RNA (1)...(19): siRNA sense strand
aggagaagaaggagaaggu

SEQ ID NO: 2550363 - RNA, 19 nt, Homo sapiens
  misc_RNA (1)...(19): siRNA sense strand
gcugaagagagcugccgaa

SEQ ID NO: 2550364 - RNA, 19 nt, Homo sapiens
  misc_RNA (1)...(19): siRNA sense strand
caagccggaaagagcgaaa

SEQ ID NO: 2550365 - RNA, 19 nt, Homo sapiens
  misc_RNA (1)...(19): siRNA sense strand
ccgaggauggagaggagga

SEQ ID NO: 2550366 - RNA, 19 nt, Homo sapiens
  misc_RNA (1)...(19): siRNA sense strand
uggagaggaggaagaugaa

SEQ ID NO: 2550367 - RNA, 19 nt, Homo sapiens
  misc_RNA (1)...(19): siRNA sense strand
agaggaggaugaagcggau

SEQ ID NO: 2550368 - RNA, 19 nt, Homo sapiens
  misc_RNA (1)...(19): siRNA sense strand
gcuaaggaguuuggagaca

SEQ ID NO: 2550369 - RNA, 19 nt, Homo sapiens
  misc_RNA (1)...(19): siRNA sense strand
uggaauaccacaagcauga

SEQ ID NO: 2550370 - RNA, 19 nt, Homo sapiens
  misc_RNA (1)...(19): siRNA sense strand
ccgaguucuacgagaggaa

SEQ ID NO: 2550371 - RNA, 19 nt, Homo sapiens
  misc_RNA (1)...(19): siRNA sense strand
ccaagaagcaccugcagau

SEQ ID NO: 2550372 - RNA, 19 nt, Homo sapiens
  misc_RNA (1)...(19): siRNA sense strand
ccgccgaguacuacaagaa

SEQ ID NO: 2550373 - RNA, 19 nt, Homo sapiens
  misc_RNA (1)...(19): siRNA sense strand
agaggagggccuacagcaa

SEQ ID NO: 2550374 - RNA, 19 nt, Homo sapiens
  misc_RNA (1)...(19): siRNA sense strand
ggccauugcuaaggaguuu

SEQ ID NO: 2550375 - RNA, 19 nt, Homo sapiens
  misc_RNA (1)...(19): siRNA sense strand
cuaaggaguuuggagacaa

SEQ ID NO: 2550376 - RNA, 19 nt, Homo sapiens
  misc_RNA (1)...(19): siRNA sense strand
cgugcuggagccugggaaa

SEQ ID NO: 2550377 - RNA, 19 nt, Homo sapiens
  misc_RNA (1)...(19): siRNA sense strand
ccgaggaccugaagacacu

SEQ ID NO: 2550378 - RNA, 19 nt, Homo sapiens
  misc_RNA (1)...(19): siRNA sense strand
aggcuaagcgcauggacga

SEQ ID NO: 2550379 - RNA, 19 nt, Homo sapiens
  misc_RNA (1)...(19): siRNA sense strand
auucagagggugcaggcua

SEQ ID NO: 2550380 - RNA, 19 nt, Homo sapiens
  misc_RNA (1)...(19): siRNA sense strand
aagaggacgcagaggcuga

SEQ ID NO: 2550381 - RNA, 19 nt, Homo sapiens
  misc_RNA (1)...(19): siRNA sense strand
uggugaaggagcugggcga

SEQ ID NO: 2550382 - RNA, 19 nt, Homo sapiens
  misc_RNA (1)...(19): siRNA sense strand
ucacagaggccacgaccuu

SEQ ID NO: 2550383 - RNA, 19 nt, Homo sapiens
  misc_RNA (1)...(19): siRNA sense strand
gcaagcaacuguccuggaa

SEQ ID NO: 2550384 - RNA, 19 nt, Homo sapiens
  misc_RNA (1)...(19): siRNA sense strand
gcccaagagcagggagaca

SEQ ID NO: 2550385 - RNA, 19 nt, Homo sapiens
  misc_RNA (1)...(19): siRNA sense strand
gccgaguacuacaagaaga

SEQ ID NO: 2550386 - RNA, 19 nt, Homo sapiens
  misc_RNA (1)...(19): siRNA sense strand
ugaccaaguuccagagcag

SEQ ID NO: 2550387 - RNA, 19 nt, Homo sapiens
  misc_RNA (1)...(19): siRNA sense strand
gggugcaggcuaagcgcau

SEQ ID NO: 2550388 - RNA, 19 nt, Homo sapiens
  misc_RNA (1)...(19): siRNA sense strand
caauuaggacugaaggaga

SEQ ID NO: 2550389 - RNA, 19 nt, Homo sapiens
  misc_RNA (1)...(19): siRNA sense strand
acacuaggucacuggcaaa

SEQ ID NO: 2550390 - RNA, 19 nt, Homo sapiens
  misc_RNA (1)...(19): siRNA sense strand
gcaaagagccugaugagac

SEQ ID NO: 2550391 - RNA, 19 nt, Homo sapiens
  misc_RNA (1)...(19): siRNA sense strand
gggaauuaggccagcggga

SEQ ID NO: 2550392 - RNA, 19 nt, Homo sapiens
  misc_RNA (1)...(19): siRNA sense strand
ugaaggagaugccgagcca

SEQ ID NO: 2550393 - RNA, 19 nt, Homo sapiens
  misc_RNA (1)...(19): siRNA sense strand
gcacagaaccuaacagcug

SEQ ID NO: 2550394 - RNA, 19 nt, Homo sapiens
  misc_RNA (1)...(19): siRNA sense strand
ugucuguagcuguggugaa

SEQ ID NO: 2550395 - RNA, 19 nt, Homo sapiens
  misc_RNA (1)...(19): siRNA sense strand
gucacuucguggaggucua

SEQ ID NO: 2550396 - RNA, 19 nt, Homo sapiens
  misc_RNA (1)...(19): siRNA sense strand
gucuagagauguugccuca

SEQ ID NO: 2550397 - RNA, 19 nt, Homo sapiens
  misc_RNA (1)...(19): siRNA sense strand
ggcuaaaggaaauggacaa

SEQ ID NO: 2550398 - RNA, 19 nt, Homo sapiens
  misc_RNA (1)...(19): siRNA sense strand
gggcuaaaggaaauggaca

SEQ ID NO: 2550399 - RNA, 19 nt, Homo sapiens
  misc_RNA (1)...(19): siRNA sense strand
ggaaauggacaaugcagga

SEQ ID NO: 2550400 - RNA, 19 nt, Homo sapiens
  misc_RNA (1)...(19): siRNA sense strand
aggaggauguguaucgcaa

SEQ ID NO: 2550401 - RNA, 19 nt, Homo sapiens
  misc_RNA (1)...(19): siRNA sense strand
ggaagacccugauggagga

SEQ ID NO: 2550402 - RNA, 19 nt, Homo sapiens
  misc_RNA (1)...(19): siRNA sense strand
cuguagauucggagugguu

SEQ ID NO: 2550403 - RNA, 19 nt, Homo sapiens
  misc_RNA (1)...(19): siRNA sense strand
uggcaugggaugggagaca

SEQ ID NO: 2550404 - RNA, 19 nt, Homo sapiens
  misc_RNA (1)...(19): siRNA sense strand
ucuucuuggcagauauaaa

SEQ ID NO: 2550405 - RNA, 19 nt, Homo sapiens
  misc_RNA (1)...(19): siRNA sense strand
cagcuaguguuucuggcua

SEQ ID NO: 2550406 - RNA, 19 nt, Homo sapiens
  misc_RNA (1)...(19): siRNA sense strand
ccuaagaagcugugucaau

SEQ ID NO: 2550407 - RNA, 19 nt, Homo sapiens
  misc_RNA (1)...(19): siRNA sense strand
cuaaagaagcugugaugga

SEQ ID NO: 2550408 - RNA, 19 nt, Homo sapiens
  misc_RNA (1)...(19): siRNA sense strand
aagaaaccaaacaggguaa

SEQ ID NO: 2550409 - RNA, 19 nt, Homo sapiens
  misc_RNA (1)...(19): siRNA sense strand
gcaucgaagaacugugcaa

SEQ ID NO: 2550410 - RNA, 19 nt, Homo sapiens
  misc_RNA (1)...(19): siRNA sense strand
aagcaaaaguggccacaua

SEQ ID NO: 2550411 - RNA, 19 nt, Homo sapiens
  misc_RNA (1)...(19): siRNA sense strand
cgaagaacugugcaauaaa

SEQ ID NO: 2550412 - RNA, 19 nt, Homo sapiens
  misc_RNA (1)...(19): siRNA sense strand
cuucuggaauaaaggaaau

SEQ ID NO: 2550413 - RNA, 19 nt, Homo sapiens
  misc_RNA (1)...(19): siRNA sense strand
uaggaagcgucgugcaaau

SEQ ID NO: 2550414 - RNA, 19 nt, Homo sapiens
  misc_RNA (1)...(19): siRNA sense strand
caugcaaugaagauggaua

SEQ ID NO: 2550415 - RNA, 19 nt, Homo sapiens
  misc_RNA (1)...(19): siRNA sense strand
gcuucuggaauaaaggaaa

SEQ ID NO: 2550416 - RNA, 19 nt, Homo sapiens
  misc_RNA (1)...(19): siRNA sense strand
ggauauaaauaaaccugga

SEQ ID NO: 2550417 - RNA, 19 nt, Homo sapiens
  misc_RNA (1)...(19): siRNA sense strand
gaagaaaccaaacagggua

SEQ ID NO: 2550418 - RNA, 19 nt, Homo sapiens
  misc_RNA (1)...(19): siRNA sense strand
gacaaagcaaugaaagcaa

SEQ ID NO: 2550419 - RNA, 19 nt, Homo sapiens
  misc_RNA (1)...(19): siRNA sense strand
gcugcauggaagugaauau

SEQ ID NO: 2550420 - RNA, 19 nt, Homo sapiens
  misc_RNA (1)...(19): siRNA sense strand
augcaaugaagauggauau

SEQ ID NO: 2550421 - RNA, 19 nt, Homo sapiens
  misc_RNA (1)...(19): siRNA sense strand
aaagaagcugugauggaua

SEQ ID NO: 2550422 - RNA, 19 nt, Homo sapiens
  misc_RNA (1)...(19): siRNA sense strand
guuaggaagcgucgugcaa

SEQ ID NO: 2550423 - RNA, 19 nt, Homo sapiens
  misc_RNA (1)...(19): siRNA sense strand
aagagaaugcaucgaagaa

SEQ ID NO: 2550424 - RNA, 19 nt, Homo sapiens
  misc_RNA (1)...(19): siRNA sense strand
ggaagaaaggauucaaacu

SEQ ID NO: 2550425 - RNA, 19 nt, Homo sapiens
  misc_RNA (1)...(19): siRNA sense strand
cagcagauuuucagcagaa

SEQ ID NO: 2550426 - RNA, 19 nt, Homo sapiens
  misc_RNA (1)...(19): siRNA sense strand
auggauugcuggaaaccaa

SEQ ID NO: 2550427 - RNA, 19 nt, Homo sapiens
  misc_RNA (1)...(19): siRNA sense strand
aaauggagguugcagucaa

SEQ ID NO: 2550428 - RNA, 19 nt, Homo sapiens
  misc_RNA (1)...(19): siRNA sense strand
ugauaauacaccuggaagu

SEQ ID NO: 2550429 - RNA, 19 nt, Homo sapiens
  misc_RNA (1)...(19): siRNA sense strand
acuucgugguggaaagauu

SEQ ID NO: 2550430 - RNA, 19 nt, Homo sapiens
  misc_RNA (1)...(19): siRNA sense strand
uuguaaagauguggaugaa

SEQ ID NO: 2550431 - RNA, 19 nt, Homo sapiens
  misc_RNA (1)...(19): siRNA sense strand
augaaugcucugagaacau

SEQ ID NO: 2550432 - RNA, 19 nt, Homo sapiens
  misc_RNA (1)...(19): siRNA sense strand
ggauauaugagcugcaaag

SEQ ID NO: 2550433 - RNA, 19 nt, Homo sapiens
  misc_RNA (1)...(19): siRNA sense strand
auuguaaagauguggauga

SEQ ID NO: 2550434 - RNA, 19 nt, Homo sapiens
  misc_RNA (1)...(19): siRNA sense strand
aggagaaaagugugaauuu

SEQ ID NO: 2550435 - RNA, 19 nt, Homo sapiens
  misc_RNA (1)...(19): siRNA sense strand
ugcaaagaucccucaaaua

SEQ ID NO: 2550436 - RNA, 19 nt, Homo sapiens
  misc_RNA (1)...(19): siRNA sense strand
gugaaugccccgaaggcua

SEQ ID NO: 2550437 - RNA, 19 nt, Homo sapiens
  misc_RNA (1)...(19): siRNA sense strand
uguggaagaauuagaacau

SEQ ID NO: 2550438 - RNA, 19 nt, Homo sapiens
  misc_RNA (1)...(19): siRNA sense strand
uggaagaauuagaacauag

SEQ ID NO: 2550439 - RNA, 19 nt, Homo sapiens
  misc_RNA (1)...(19): siRNA sense strand
uggaaagugaacucauuaa

SEQ ID NO: 2550440 - RNA, 19 nt, Homo sapiens
  misc_RNA (1)...(19): siRNA sense strand
caacaaucucaucuggaau

SEQ ID NO: 2550441 - RNA, 19 nt, Homo sapiens
  misc_RNA (1)...(19): siRNA sense strand
aaauauaaauggagguugc

SEQ ID NO: 2550442 - RNA, 19 nt, Homo sapiens
  misc_RNA (1)...(19): siRNA sense strand
aaaucaaagucuugugaag

SEQ ID NO: 2550443 - RNA, 19 nt, Homo sapiens
  misc_RNA (1)...(19): siRNA sense strand
agauauagaugaaugcucu

SEQ ID NO: 2550444 - RNA, 19 nt, Homo sapiens
  misc_RNA (1)...(19): siRNA sense strand
gaauuugauuuccggacau

SEQ ID NO: 2550445 - RNA, 19 nt, Homo sapiens
  misc_RNA (1)...(19): siRNA sense strand
cucggaaaguggaaaguga

SEQ ID NO: 2550446 - RNA, 19 nt, Homo sapiens
  misc_RNA (1)...(19): siRNA sense strand
ucuuugaagccaagcauuu

SEQ ID NO: 2550447 - RNA, 19 nt, Homo sapiens
  misc_RNA (1)...(19): siRNA sense strand
cuauugugaugggaagaaa

SEQ ID NO: 2550448 - RNA, 19 nt, Homo sapiens
  misc_RNA (1)...(19): siRNA sense strand
ccagguuggcaaggagaaa

SEQ ID NO: 2550449 - RNA, 19 nt, Homo sapiens
  misc_RNA (1)...(19): siRNA sense strand
aauggagguugcagucaaa

SEQ ID NO: 2550450 - RNA, 19 nt, Homo sapiens
  misc_RNA (1)...(19): siRNA sense strand
ggauacaggcccuaagucu

SEQ ID NO: 2550451 - RNA, 19 nt, Homo sapiens
  misc_RNA (1)...(19): siRNA sense strand
ugggaagaaaggauucaaa

SEQ ID NO: 2550452 - RNA, 19 nt, Homo sapiens
  misc_RNA (1)...(19): siRNA sense strand
aucgaagaacugugcaaua

SEQ ID NO: 2550453 - RNA, 19 nt, Homo sapiens
  misc_RNA (1)...(19): siRNA sense strand
ugauucagaaggcgugaua

SEQ ID NO: 2550454 - RNA, 19 nt, Homo sapiens
  misc_RNA (1)...(19): siRNA sense strand
gcuggaauuugaugaagca

SEQ ID NO: 2550455 - RNA, 19 nt, Homo sapiens
  misc_RNA (1)...(19): siRNA sense strand
gugaugggaagaaaggauu

SEQ ID NO: 2550456 - RNA, 19 nt, Homo sapiens
  misc_RNA (1)...(19): siRNA sense strand
gcccaagaucagaagaguu

SEQ ID NO: 2550457 - RNA, 19 nt, Homo sapiens
  misc_RNA (1)...(19): siRNA sense strand
gggcacugguguuaugcuu

SEQ ID NO: 2550458 - RNA, 19 nt, Homo sapiens
  misc_RNA (1)...(19): siRNA sense strand
gugcaaauucuuuacuuga

SEQ ID NO: 2550459 - RNA, 19 nt, Homo sapiens
  misc_RNA (1)...(19): siRNA sense strand
aaacaggguaaucuugaaa

SEQ ID NO: 2550460 - RNA, 19 nt, Homo sapiens
  misc_RNA (1)...(19): siRNA sense strand
gagaaaagugugaauuuga

SEQ ID NO: 2550461 - RNA, 19 nt, Homo sapiens
  misc_RNA (1)...(19): siRNA sense strand
agguacaagcugagaucaa

SEQ ID NO: 2550462 - RNA, 19 nt, Homo sapiens
  misc_RNA (1)...(19): siRNA sense strand
ugauuuacaccgugggcua

SEQ ID NO: 2550463 - RNA, 19 nt, Homo sapiens
  misc_RNA (1)...(19): siRNA sense strand
cuacaggaagagugggaga

SEQ ID NO: 2550464 - RNA, 19 nt, Homo sapiens
  misc_RNA (1)...(19): siRNA sense strand
gcacuggacuucaagcgaa

SEQ ID NO: 2550465 - RNA, 19 nt, Homo sapiens
  misc_RNA (1)...(19): siRNA sense strand
aggaagagugggagacagu

SEQ ID NO: 2550466 - RNA, 19 nt, Homo sapiens
  misc_RNA (1)...(19): siRNA sense strand
gugucaaauuucucaccaa

SEQ ID NO: 2550467 - RNA, 19 nt, Homo sapiens
  misc_RNA (1)...(19): siRNA sense strand
caggugaggugguggcugu

SEQ ID NO: 2550468 - RNA, 19 nt, Homo sapiens
  misc_RNA (1)...(19): siRNA sense strand
ccaagcugcgggagaccaa

SEQ ID NO: 2550469 - RNA, 19 nt, Homo sapiens
  misc_RNA (1)...(19): siRNA sense strand
cugagucugaggaggacaa

SEQ ID NO: 2550470 - RNA, 19 nt, Homo sapiens
  misc_RNA (1)...(19): siRNA sense strand
caccauaggaugugagcau

SEQ ID NO: 2550471 - RNA, 19 nt, Homo sapiens
  misc_RNA (1)...(19): siRNA sense strand
ccauaggaugugagcauau

SEQ ID NO: 2550472 - RNA, 19 nt, Homo sapiens
  misc_RNA (1)...(19): siRNA sense strand
guccagaaguugaaagcca

SEQ ID NO: 2550473 - RNA, 19 nt, Homo sapiens
  misc_RNA (1)...(19): siRNA sense strand
ucgagaugucagaaguaaa

SEQ ID NO: 2550474 - RNA, 19 nt, Homo sapiens
  misc_RNA (1)...(19): siRNA sense strand
gagugcaaacagagugcua

SEQ ID NO: 2550475 - RNA, 19 nt, Homo sapiens
  misc_RNA (1)...(19): siRNA sense strand
uggcaggugguuagaagaa

SEQ ID NO: 2550476 - RNA, 19 nt, Homo sapiens
  misc_RNA (1)...(19): siRNA sense strand
agucaagcagugugugaau

SEQ ID NO: 2550477 - RNA, 19 nt, Homo sapiens
  misc_RNA (1)...(19): siRNA sense strand
gaauacaugaauagggaac

SEQ ID NO: 2550478 - RNA, 19 nt, Homo sapiens
  misc_RNA (1)...(19): siRNA sense strand
agaauaagccaguuggaug

SEQ ID NO: 2550479 - RNA, 19 nt, Homo sapiens
  misc_RNA (1)...(19): siRNA sense strand
uaaacaaggcccuggagca

SEQ ID NO: 2550480 - RNA, 19 nt, Homo sapiens
  misc_RNA (1)...(19): siRNA sense strand
ccuaauagugacaauacau

SEQ ID NO: 2550481 - RNA, 19 nt, Homo sapiens
  misc_RNA (1)...(19): siRNA sense strand
uuuagcaucauuugggaaa

SEQ ID NO: 2550482 - RNA, 19 nt, Homo sapiens
  misc_RNA (1)...(19): siRNA sense strand
ccagaaaagagaaugcgaa

SEQ ID NO: 2550483 - RNA, 19 nt, Homo sapiens
  misc_RNA (1)...(19): siRNA sense strand
uugaauacaugaauaggga

SEQ ID NO: 2550484 - RNA, 19 nt, Homo sapiens
  misc_RNA (1)...(19): siRNA sense strand
gugcagagcuacauggaac

SEQ ID NO: 2550485 - RNA, 19 nt, Homo sapiens
  misc_RNA (1)...(19): siRNA sense strand
cuggagcacugcagggaga

SEQ ID NO: 2550486 - RNA, 19 nt, Homo sapiens
  misc_RNA (1)...(19): siRNA sense strand
acauggaacacuacugcaa

SEQ ID NO: 2550487 - RNA, 19 nt, Homo sapiens
  misc_RNA (1)...(19): siRNA sense strand
uccuagacuuaaugaaaga

SEQ ID NO: 2550488 - RNA, 19 nt, Homo sapiens
  misc_RNA (1)...(19): siRNA sense strand
guugaaaagcauaaggaaa

SEQ ID NO: 2550489 - RNA, 19 nt, Homo sapiens
  misc_RNA (1)...(19): siRNA sense strand
acagcaugcaagaaggaaa

SEQ ID NO: 2550490 - RNA, 19 nt, Homo sapiens
  misc_RNA (1)...(19): siRNA sense strand
agaagaacuaaaugcgcaa

SEQ ID NO: 2550491 - RNA, 19 nt, Homo sapiens
  misc_RNA (1)...(19): siRNA sense strand
cagcaugcaagaaggaaaa

SEQ ID NO: 2550492 - RNA, 19 nt, Homo sapiens
  misc_RNA (1)...(19): siRNA sense strand
guuacaaaggaaaugcaaa

SEQ ID NO: 2550493 - RNA, 19 nt, Homo sapiens
  misc_RNA (1)...(19): siRNA sense strand
aagauugaaaugugggaca

SEQ ID NO: 2550494 - RNA, 19 nt, Homo sapiens
  misc_RNA (1)...(19): siRNA sense strand
cuggagaccuggacgcaga

SEQ ID NO: 2550495 - RNA, 19 nt, Homo sapiens
  misc_RNA (1)...(19): siRNA sense strand
aggagacagaagauugaaa

SEQ ID NO: 2550496 - RNA, 19 nt, Homo sapiens
  misc_RNA (1)...(19): siRNA sense strand
aacggaaaucggacagaaa

SEQ ID NO: 2550497 - RNA, 19 nt, Homo sapiens
  misc_RNA (1)...(19): siRNA sense strand
caaagaagccccaggagga

SEQ ID NO: 2550498 - RNA, 19 nt, Homo sapiens
  misc_RNA (1)...(19): siRNA sense strand
acugaaaaugcaagaagaa

SEQ ID NO: 2550499 - RNA, 19 nt, Homo sapiens
  misc_RNA (1)...(19): siRNA sense strand
aagaagaacuaaaugcgca

SEQ ID NO: 2550500 - RNA, 19 nt, Homo sapiens
  misc_RNA (1)...(19): siRNA sense strand
ggaagacaguccugggccu

SEQ ID NO: 2550501 - RNA, 19 nt, Homo sapiens
  misc_RNA (1)...(19): siRNA sense strand
guugaaaagcauaaggaaa

SEQ ID NO: 2550502 - RNA, 19 nt, Homo sapiens
  misc_RNA (1)...(19): siRNA sense strand
acagcaugcaagaaggaaa

SEQ ID NO: 2550503 - RNA, 19 nt, Homo sapiens
  misc_RNA (1)...(19): siRNA sense strand
agaagaacuaaaugcgcaa

SEQ ID NO: 2550504 - RNA, 19 nt, Homo sapiens
  misc_RNA (1)...(19): siRNA sense strand
cagcaugcaagaaggaaaa

SEQ ID NO: 2550505 - RNA, 19 nt, Homo sapiens
  misc_RNA (1)...(19): siRNA sense strand
guuacaaaggaaaugcaaa

SEQ ID NO: 2550506 - RNA, 19 nt, Homo sapiens
  misc_RNA (1)...(19): siRNA sense strand
aagauugaaaugugggaca

SEQ ID NO: 2550507 - RNA, 19 nt, Homo sapiens
  misc_RNA (1)...(19): siRNA sense strand
cuggagaccuggacgcaga

SEQ ID NO: 2550508 - RNA, 19 nt, Homo sapiens
  misc_RNA (1)...(19): siRNA sense strand
aggagacagaagauugaaa

SEQ ID NO: 2550509 - RNA, 19 nt, Homo sapiens
  misc_RNA (1)...(19): siRNA sense strand
aacggaaaucggacagaaa

SEQ ID NO: 2550510 - RNA, 19 nt, Homo sapiens
  misc_RNA (1)...(19): siRNA sense strand
caaagaagccccaggagga

SEQ ID NO: 2550511 - RNA, 19 nt, Homo sapiens
  misc_RNA (1)...(19): siRNA sense strand
acugaaaaugcaagaagaa

SEQ ID NO: 2550512 - RNA, 19 nt, Homo sapiens
  misc_RNA (1)...(19): siRNA sense strand
aagaagaacuaaaugcgca

SEQ ID NO: 2550513 - RNA, 19 nt, Homo sapiens
  misc_RNA (1)...(19): siRNA sense strand
ggaagacaguccugggccu

SEQ ID NO: 2550514 - RNA, 19 nt, Homo sapiens
  misc_RNA (1)...(19): siRNA sense strand
uggcuauaguccuggaaau

SEQ ID NO: 2550515 - RNA, 19 nt, Homo sapiens
  misc_RNA (1)...(19): siRNA sense strand
cugcaaagccagggacaga

SEQ ID NO: 2550516 - RNA, 19 nt, Homo sapiens
  misc_RNA (1)...(19): siRNA sense strand
ugagaaaggggcaugaaaa

SEQ ID NO: 2550517 - RNA, 19 nt, Homo sapiens
  misc_RNA (1)...(19): siRNA sense strand
gacaaacagugcagggcca

SEQ ID NO: 2550518 - RNA, 19 nt, Homo sapiens
  misc_RNA (1)...(19): siRNA sense strand
auuuaaggccucugacauu

SEQ ID NO: 2550519 - RNA, 19 nt, Homo sapiens
  misc_RNA (1)...(19): siRNA sense strand
gcuucagcaguguggguau

SEQ ID NO: 2550520 - RNA, 19 nt, Homo sapiens
  misc_RNA (1)...(19): siRNA sense strand
uuggagcuguccugggaaa

SEQ ID NO: 2550521 - RNA, 19 nt, Homo sapiens
  misc_RNA (1)...(19): siRNA sense strand
gggcacuauuguacaggga

SEQ ID NO: 2550522 - RNA, 19 nt, Homo sapiens
  misc_RNA (1)...(19): siRNA sense strand
aggaauggucucugugcuu

SEQ ID NO: 2550523 - RNA, 19 nt, Homo sapiens
  misc_RNA (1)...(19): siRNA sense strand
gugaaauauuuaaggccuc

SEQ ID NO: 2550524 - RNA, 19 nt, Homo sapiens
  misc_RNA (1)...(19): siRNA sense strand
ggagagaagcagaaaggca

SEQ ID NO: 2550525 - RNA, 19 nt, Homo sapiens
  misc_RNA (1)...(19): siRNA sense strand
caagacagcgacugggcaa

SEQ ID NO: 2550526 - RNA, 19 nt, Homo sapiens
  misc_RNA (1)...(19): siRNA sense strand
ccuccaaguccaagcucaa

SEQ ID NO: 2550527 - RNA, 19 nt, Homo sapiens
  misc_RNA (1)...(19): siRNA sense strand
gcagaaaggcacuucgcca

SEQ ID NO: 2550528 - RNA, 19 nt, Homo sapiens
  misc_RNA (1)...(19): siRNA sense strand
acuucaagcgugugcucaa

SEQ ID NO: 2550529 - RNA, 19 nt, Homo sapiens
  misc_RNA (1)...(19): siRNA sense strand
gcuccuucacccugggcaa

SEQ ID NO: 2550530 - RNA, 19 nt, Homo sapiens
  misc_RNA (1)...(19): siRNA sense strand
agcucaaggucaagaggca

SEQ ID NO: 2550531 - RNA, 19 nt, Homo sapiens
  misc_RNA (1)...(19): siRNA sense strand
gcucaaggucaagaggcaa

SEQ ID NO: 2550532 - RNA, 19 nt, Homo sapiens
  misc_RNA (1)...(19): siRNA sense strand
agaaaugaaagaagggaaa

SEQ ID NO: 2550533 - RNA, 19 nt, Homo sapiens
  misc_RNA (1)...(19): siRNA sense strand
agcaagagguagaagcaaa

SEQ ID NO: 2550534 - RNA, 19 nt, Homo sapiens
  misc_RNA (1)...(19): siRNA sense strand
cagacaaagcagaggauca

SEQ ID NO: 2550535 - RNA, 19 nt, Homo sapiens
  misc_RNA (1)...(19): siRNA sense strand
cggcgaagagagagggaga

SEQ ID NO: 2550536 - RNA, 19 nt, Homo sapiens
  misc_RNA (1)...(19): siRNA sense strand
ccaaucagcuccugggcaa

SEQ ID NO: 2550537 - RNA, 19 nt, Homo sapiens
  misc_RNA (1)...(19): siRNA sense strand
cagaaaugaaagaagggaa

SEQ ID NO: 2550538 - RNA, 19 nt, Homo sapiens
  misc_RNA (1)...(19): siRNA sense strand
agggaaagcauguaaacaa

SEQ ID NO: 2550539 - RNA, 19 nt, Homo sapiens
  misc_RNA (1)...(19): siRNA sense strand
cugaaaauguggaaagcaa

SEQ ID NO: 2550540 - RNA, 19 nt, Homo sapiens
  misc_RNA (1)...(19): siRNA sense strand
caguuuaaccucaggaaau

SEQ ID NO: 2550541 - RNA, 19 nt, Homo sapiens
  misc_RNA (1)...(19): siRNA sense strand
guggaaagcaagaagaaaa

SEQ ID NO: 2550542 - RNA, 19 nt, Homo sapiens
  misc_RNA (1)...(19): siRNA sense strand
ugacaauuccgaagggcaa

SEQ ID NO: 2550543 - RNA, 19 nt, Homo sapiens
  misc_RNA (1)...(19): siRNA sense strand
uguagaaagccuuggagaa

SEQ ID NO: 2550544 - RNA, 19 nt, Homo sapiens
  misc_RNA (1)...(19): siRNA sense strand
acccaaagucauugagaau

SEQ ID NO: 2550545 - RNA, 19 nt, Homo sapiens
  misc_RNA (1)...(19): siRNA sense strand
agucagaaucaucagaaua

SEQ ID NO: 2550546 - RNA, 19 nt, Homo sapiens
  misc_RNA (1)...(19): siRNA sense strand
acaaauacagagagaagau

SEQ ID NO: 2550547 - RNA, 19 nt, Homo sapiens
  misc_RNA (1)...(19): siRNA sense strand
cggaagagcugaugcccga

SEQ ID NO: 2550548 - RNA, 19 nt, Homo sapiens
  misc_RNA (1)...(19): siRNA sense strand
gaaauggaauagaggagca

SEQ ID NO: 2550549 - RNA, 19 nt, Homo sapiens
  misc_RNA (1)...(19): siRNA sense strand
ugaaaauaaucccgguaaa

SEQ ID NO: 2550550 - RNA, 19 nt, Homo sapiens
  misc_RNA (1)...(19): siRNA sense strand
ggauauuaccauucagcuu

SEQ ID NO: 2550551 - RNA, 19 nt, Homo sapiens
  misc_RNA (1)...(19): siRNA sense strand
aagauguggaugaggaaau

SEQ ID NO: 2550552 - RNA, 19 nt, Homo sapiens
  misc_RNA (1)...(19): siRNA sense strand
agaagaaaacugugggaga

SEQ ID NO: 2550553 - RNA, 19 nt, Homo sapiens
  misc_RNA (1)...(19): siRNA sense strand
auaugcaacugguggaaau

SEQ ID NO: 2550554 - RNA, 19 nt, Homo sapiens
  misc_RNA (1)...(19): siRNA sense strand
gcuauauguguuuggagaa

SEQ ID NO: 2550555 - RNA, 19 nt, Homo sapiens
  misc_RNA (1)...(19): siRNA sense strand
cagaaggaggcaauguaua

SEQ ID NO: 2550556 - RNA, 19 nt, Homo sapiens
  misc_RNA (1)...(19): siRNA sense strand
guggaaauaaugaaggaca

SEQ ID NO: 2550557 - RNA, 19 nt, Homo sapiens
  misc_RNA (1)...(19): siRNA sense strand
ccaaguagccuguggugga

SEQ ID NO: 2550558 - RNA, 19 nt, Homo sapiens
  misc_RNA (1)...(19): siRNA sense strand
augaaaacccaaaaggaua

SEQ ID NO: 2550559 - RNA, 19 nt, Homo sapiens
  misc_RNA (1)...(19): siRNA sense strand
ugaaaugaccaaagaagca

SEQ ID NO: 2550560 - RNA, 19 nt, Homo sapiens
  misc_RNA (1)...(19): siRNA sense strand
guuuggagaaccugagaau

SEQ ID NO: 2550561 - RNA, 19 nt, Homo sapiens
  misc_RNA (1)...(19): siRNA sense strand
uguguuuacauuugggaaa

SEQ ID NO: 2550562 - RNA, 19 nt, Homo sapiens
  misc_RNA (1)...(19): siRNA sense strand
aaagaagcagagauagaua

SEQ ID NO: 2550563 - RNA, 19 nt, Homo sapiens
  misc_RNA (1)...(19): siRNA sense strand
uagaggagcaagagguaga

SEQ ID NO: 2550564 - RNA, 19 nt, Homo sapiens
  misc_RNA (1)...(19): siRNA sense strand
ccuagaaaacagugaaaca

SEQ ID NO: 2550565 - RNA, 19 nt, Homo sapiens
  misc_RNA (1)...(19): siRNA sense strand
cgaagggcaaauugguuua

SEQ ID NO: 2550566 - RNA, 19 nt, Homo sapiens
  misc_RNA (1)...(19): siRNA sense strand
gagucagaaucaucagaau

SEQ ID NO: 2550567 - RNA, 19 nt, Homo sapiens
  misc_RNA (1)...(19): siRNA sense strand
acaacaaacaauuggggaa

SEQ ID NO: 2550568 - RNA, 19 nt, Homo sapiens
  misc_RNA (1)...(19): siRNA sense strand
uagagaucccagaggagaa

SEQ ID NO: 2550569 - RNA, 19 nt, Homo sapiens
  misc_RNA (1)...(19): siRNA sense strand
agaagauguggaugaggaa

SEQ ID NO: 2550570 - RNA, 19 nt, Homo sapiens
  misc_RNA (1)...(19): siRNA sense strand
ccauaggagaccagaucau

SEQ ID NO: 2550571 - RNA, 19 nt, Homo sapiens
  misc_RNA (1)...(19): siRNA sense strand
auaaagaugccgaccagaa

SEQ ID NO: 2550572 - RNA, 19 nt, Homo sapiens
  misc_RNA (1)...(19): siRNA sense strand
accaacaaauacagagaga

SEQ ID NO: 2550573 - RNA, 19 nt, Homo sapiens
  misc_RNA (1)...(19): siRNA sense strand
ucaguuaggauuaggauca

SEQ ID NO: 2550574 - RNA, 19 nt, Homo sapiens
  misc_RNA (1)...(19): siRNA sense strand
aggauuaggaucaaaguca

SEQ ID NO: 2550575 - RNA, 19 nt, Homo sapiens
  misc_RNA (1)...(19): siRNA sense strand
gugacaccgaagaaagaaa

SEQ ID NO: 2550576 - RNA, 19 nt, Homo sapiens
  misc_RNA (1)...(19): siRNA sense strand
uggaggaagaaaggagaaa

SEQ ID NO: 2550577 - RNA, 19 nt, Homo sapiens
  misc_RNA (1)...(19): siRNA sense strand
ggaacuaaaacuagaagau

SEQ ID NO: 2550578 - RNA, 19 nt, Homo sapiens
  misc_RNA (1)...(19): siRNA sense strand
ccgaagggcaaauugguuu

SEQ ID NO: 2550579 - RNA, 19 nt, Homo sapiens
  misc_RNA (1)...(19): siRNA sense strand
aggaaggagcagaggauuc

SEQ ID NO: 2550580 - RNA, 19 nt, Homo sapiens
  misc_RNA (1)...(19): siRNA sense strand
agaugaccuuacagacaaa

SEQ ID NO: 2550581 - RNA, 19 nt, Homo sapiens
  misc_RNA (1)...(19): siRNA sense strand
cuacagguuaucacaguaa

SEQ ID NO: 2550582 - RNA, 19 nt, Homo sapiens
  misc_RNA (1)...(19): siRNA sense strand
ccaccaacaaauacagaga

SEQ ID NO: 2550583 - RNA, 19 nt, Homo sapiens
  misc_RNA (1)...(19): siRNA sense strand
gcaguuuaaccucaggaaa

SEQ ID NO: 2550584 - RNA, 19 nt, Homo sapiens
  misc_RNA (1)...(19): siRNA sense strand
aacuagaagauguggauga

SEQ ID NO: 2550585 - RNA, 19 nt, Homo sapiens
  misc_RNA (1)...(19): siRNA sense strand
ugaggaaauuaaugcugaa

SEQ ID NO: 2550586 - RNA, 19 nt, Homo sapiens
  misc_RNA (1)...(19): siRNA sense strand
cagaaggagcagaaagaac

SEQ ID NO: 2550587 - RNA, 19 nt, Homo sapiens
  misc_RNA (1)...(19): siRNA sense strand
gaauauuagggaucaaaca

SEQ ID NO: 2550588 - RNA, 19 nt, Homo sapiens
  misc_RNA (1)...(19): siRNA sense strand
agaaagccuuggagaaacu

SEQ ID NO: 2550589 - RNA, 19 nt, Homo sapiens
  misc_RNA (1)...(19): siRNA sense strand
acgaugauagugaugaaua

SEQ ID NO: 2550590 - RNA, 19 nt, Homo sapiens
  misc_RNA (1)...(19): siRNA sense strand
gcagaggauucaaaaggaa

SEQ ID NO: 2550591 - RNA, 19 nt, Homo sapiens
  misc_RNA (1)...(19): siRNA sense strand
uagaagauguggaugagga

SEQ ID NO: 2550592 - RNA, 19 nt, Homo sapiens
  misc_RNA (1)...(19): siRNA sense strand
agauaaaauccauaggaga

SEQ ID NO: 2550593 - RNA, 19 nt, Homo sapiens
  misc_RNA (1)...(19): siRNA sense strand
auggaauagaggagcaaga

SEQ ID NO: 2550594 - RNA, 19 nt, Homo sapiens
  misc_RNA (1)...(19): siRNA sense strand
ggagcaagagguagaagca

SEQ ID NO: 2550595 - RNA, 19 nt, Homo sapiens
  misc_RNA (1)...(19): siRNA sense strand
ugagaauauuagggaucaa

SEQ ID NO: 2550596 - RNA, 19 nt, Homo sapiens
  misc_RNA (1)...(19): siRNA sense strand
cguaugcggcgaagagaga

SEQ ID NO: 2550597 - RNA, 19 nt, Homo sapiens
  misc_RNA (1)...(19): siRNA sense strand
gcgccaaacuggaggggaa

SEQ ID NO: 2550598 - RNA, 19 nt, Homo sapiens
  misc_RNA (1)...(19): siRNA sense strand
aggagaaagaagaaagaau

SEQ ID NO: 2550599 - RNA, 19 nt, Homo sapiens
  misc_RNA (1)...(19): siRNA sense strand
agacuuuggugaugggcaa

SEQ ID NO: 2550600 - RNA, 19 nt, Homo sapiens
  misc_RNA (1)...(19): siRNA sense strand
ugucaaaaucagaggagaa

SEQ ID NO: 2550601 - RNA, 19 nt, Homo sapiens
  misc_RNA (1)...(19): siRNA sense strand
aaauuaagcuggagccuca

SEQ ID NO: 2550602 - RNA, 19 nt, Homo sapiens
  misc_RNA (1)...(19): siRNA sense strand
ccaucaagacagagccaau

SEQ ID NO: 2550603 - RNA, 19 nt, Homo sapiens
  misc_RNA (1)...(19): siRNA sense strand
aagaaagaauacauggaca

SEQ ID NO: 2550604 - RNA, 19 nt, Homo sapiens
  misc_RNA (1)...(19): siRNA sense strand
aagaaaauucggaggaaga

SEQ ID NO: 2550605 - RNA, 19 nt, Homo sapiens
  misc_RNA (1)...(19): siRNA sense strand
ccucauaaacugcagggau

SEQ ID NO: 2550606 - RNA, 19 nt, Homo sapiens
  misc_RNA (1)...(19): siRNA sense strand
ggaaaugaacacugggguu

SEQ ID NO: 2550607 - RNA, 19 nt, Homo sapiens
  misc_RNA (1)...(19): siRNA sense strand
guugauuccucgugccaga

SEQ ID NO: 2550608 - RNA, 19 nt, Homo sapiens
  misc_RNA (1)...(19): siRNA sense strand
cucauaaacugcagggauc

SEQ ID NO: 2550609 - RNA, 19 nt, Homo sapiens
  misc_RNA (1)...(19): siRNA sense strand
aagaauacauggacagccu

SEQ ID NO: 2550610 - RNA, 19 nt, Homo sapiens
  misc_RNA (1)...(19): siRNA sense strand
gaggagaagaggacccuga

SEQ ID NO: 2550611 - RNA, 19 nt, Homo sapiens
  misc_RNA (1)...(19): siRNA sense strand
gcagcuucuuucaaggcua

SEQ ID NO: 2550612 - RNA, 19 nt, Homo sapiens
  misc_RNA (1)...(19): siRNA sense strand
agaagaaagaauacaugga

SEQ ID NO: 2550613 - RNA, 19 nt, Homo sapiens
  misc_RNA (1)...(19): siRNA sense strand
agaaagaauacauggacag

SEQ ID NO: 2550614 - RNA, 19 nt, Homo sapiens
  misc_RNA (1)...(19): siRNA sense strand
ggggaaugaaacacuaaaa

SEQ ID NO: 2550615 - RNA, 19 nt, Homo sapiens
  misc_RNA (1)...(19): siRNA sense strand
ugaucaaccaggagggaaa

SEQ ID NO: 2550616 - RNA, 19 nt, Homo sapiens
  misc_RNA (1)...(19): siRNA sense strand
aggcuagagaagaaaguua

SEQ ID NO: 2550617 - RNA, 19 nt, Homo sapiens
  misc_RNA (1)...(19): siRNA sense strand
aggaaggaaccgcuggaaa

SEQ ID NO: 2550618 - RNA, 19 nt, Homo sapiens
  misc_RNA (1)...(19): siRNA sense strand
ggaccaucaaagugggaga

SEQ ID NO: 2550619 - RNA, 19 nt, Homo sapiens
  misc_RNA (1)...(19): siRNA sense strand
gcagaggauucuugggaug

SEQ ID NO: 2550620 - RNA, 19 nt, Homo sapiens
  misc_RNA (1)...(19): siRNA sense strand
agaagaaaguuaaagcaac

SEQ ID NO: 2550621 - RNA, 19 nt, Homo sapiens
  misc_RNA (1)...(19): siRNA sense strand
gaagaaaguuaaagcaacc

SEQ ID NO: 2550622 - RNA, 19 nt, Homo sapiens
  misc_RNA (1)...(19): siRNA sense strand
ggugauggcuuguuccaga

SEQ ID NO: 2550623 - RNA, 19 nt, Homo sapiens
  misc_RNA (1)...(19): siRNA sense strand
gcaaccaacuucaggccca

SEQ ID NO: 2550624 - RNA, 19 nt, Homo sapiens
  misc_RNA (1)...(19): siRNA sense strand
caucaaagugggagacccu

SEQ ID NO: 2550625 - RNA, 19 nt, Homo sapiens
  misc_RNA (1)...(19): siRNA sense strand
gagauagagggcagggacu

SEQ ID NO: 2550626 - RNA, 19 nt, Homo sapiens
  misc_RNA (1)...(19): siRNA sense strand
cugaaaagggugauggcuu

SEQ ID NO: 2550627 - RNA, 19 nt, Homo sapiens
  misc_RNA (1)...(19): siRNA sense strand
cuguguaccugcugggcca

SEQ ID NO: 2550628 - RNA, 19 nt, Homo sapiens
  misc_RNA (1)...(19): siRNA sense strand
cugaagaguuaucgccagu

SEQ ID NO: 2550629 - RNA, 19 nt, Homo sapiens
  misc_RNA (1)...(19): siRNA sense strand
gcuucauauugcugacaaa

SEQ ID NO: 2550630 - RNA, 19 nt, Homo sapiens
  misc_RNA (1)...(19): siRNA sense strand
cuaugaagacaauggguuu

SEQ ID NO: 2550631 - RNA, 19 nt, Homo sapiens
  misc_RNA (1)...(19): siRNA sense strand
aggaagauccaauaagcaa

SEQ ID NO: 2550632 - RNA, 19 nt, Homo sapiens
  misc_RNA (1)...(19): siRNA sense strand
agaacugggaagaggugaa

SEQ ID NO: 2550633 - RNA, 19 nt, Homo sapiens
  misc_RNA (1)...(19): siRNA sense strand
ccaccuguuugaugggcaa

SEQ ID NO: 2550634 - RNA, 19 nt, Homo sapiens
  misc_RNA (1)...(19): siRNA sense strand
ugguaauugcuuuggaaaa

SEQ ID NO: 2550635 - RNA, 19 nt, Homo sapiens
  misc_RNA (1)...(19): siRNA sense strand
gagcccaggagcaggacaa

SEQ ID NO: 2550636 - RNA, 19 nt, Homo sapiens
  misc_RNA (1)...(19): siRNA sense strand
agauuaauccagagaccuu

SEQ ID NO: 2550637 - RNA, 19 nt, Homo sapiens
  misc_RNA (1)...(19): siRNA sense strand
uggaagaagaugauggugu

SEQ ID NO: 2550638 - RNA, 19 nt, Homo sapiens
  misc_RNA (1)...(19): siRNA sense strand
gggcaaugacugagaaaag

SEQ ID NO: 2550639 - RNA, 19 nt, Homo sapiens
  misc_RNA (1)...(19): siRNA sense strand
cagacaaggaagauccaau

SEQ ID NO: 2550640 - RNA, 19 nt, Homo sapiens
  misc_RNA (1)...(19): siRNA sense strand
agacaauuaagcagguuga

SEQ ID NO: 2550641 - RNA, 19 nt, Homo sapiens
  misc_RNA (1)...(19): siRNA sense strand
ggguuuggcaagagccuga

SEQ ID NO: 2550642 - RNA, 19 nt, Homo sapiens
  misc_RNA (1)...(19): siRNA sense strand
ccucaaaucaauuaccaga

SEQ ID NO: 2550643 - RNA, 19 nt, Homo sapiens
  misc_RNA (1)...(19): siRNA sense strand
acccagaugccuuggaaga

SEQ ID NO: 2550644 - RNA, 19 nt, Homo sapiens
  misc_RNA (1)...(19): siRNA sense strand
cuuucgaggaguagagguu

SEQ ID NO: 2550645 - RNA, 19 nt, Homo sapiens
  misc_RNA (1)...(19): siRNA sense strand
uugaaacuguggaggaacu

SEQ ID NO: 2550646 - RNA, 19 nt, Homo sapiens
  misc_RNA (1)...(19): siRNA sense strand
ccuaugaagacaauggguu

SEQ ID NO: 2550647 - RNA, 19 nt, Homo sapiens
  misc_RNA (1)...(19): siRNA sense strand
augccaaggacuuaaguga

SEQ ID NO: 2550648 - RNA, 19 nt, Homo sapiens
  misc_RNA (1)...(19): siRNA sense strand
ugacuuuaaagaaggacau

SEQ ID NO: 2550649 - RNA, 19 nt, Homo sapiens
  misc_RNA (1)...(19): siRNA sense strand
acaaagauuaauccagaga

SEQ ID NO: 2550650 - RNA, 19 nt, Homo sapiens
  misc_RNA (1)...(19): siRNA sense strand
acaucaacaccuaugaaga

SEQ ID NO: 2550651 - RNA, 19 nt, Homo sapiens
  misc_RNA (1)...(19): siRNA sense strand
ggucuagagugcagcgagu

SEQ ID NO: 2550652 - RNA, 19 nt, Homo sapiens
  misc_RNA (1)...(19): siRNA sense strand
uggcaaggcuuucacgcaa

SEQ ID NO: 2550653 - RNA, 19 nt, Homo sapiens
  misc_RNA (1)...(19): siRNA sense strand
ggaaaggccuugcagcuga

SEQ ID NO: 2550654 - RNA, 19 nt, Homo sapiens
  misc_RNA (1)...(19): siRNA sense strand
ccgaaaggcagaagagggu

SEQ ID NO: 2550655 - RNA, 19 nt, Homo sapiens
  misc_RNA (1)...(19): siRNA sense strand
acucauaccgaaaggcaga

SEQ ID NO: 2550656 - RNA, 19 nt, Homo sapiens
  misc_RNA (1)...(19): siRNA sense strand
cggauuuccuggagcacca

SEQ ID NO: 2550657 - RNA, 19 nt, Homo sapiens
  misc_RNA (1)...(19): siRNA sense strand
agaccauagcagcgaguca

SEQ ID NO: 2550658 - RNA, 19 nt, Homo sapiens
  misc_RNA (1)...(19): siRNA sense strand
agcagagacuggagagcca

SEQ ID NO: 2550659 - RNA, 19 nt, Homo sapiens
  misc_RNA (1)...(19): siRNA sense strand
acuuugagcuggugggcgu

SEQ ID NO: 2550660 - RNA, 19 nt, Homo sapiens
  misc_RNA (1)...(19): siRNA sense strand
ccuuacagcaggaggugca

SEQ ID NO: 2550661 - RNA, 19 nt, Homo sapiens
  misc_RNA (1)...(19): siRNA sense strand
ggcagaagaggguggggaa

SEQ ID NO: 2550662 - RNA, 19 nt, Homo sapiens
  misc_RNA (1)...(19): siRNA sense strand
gcaaccagcuguauggauc

SEQ ID NO: 2550663 - RNA, 19 nt, Homo sapiens
  misc_RNA (1)...(19): siRNA sense strand
agguagugacugaggugga

SEQ ID NO: 2550664 - RNA, 19 nt, Homo sapiens
  misc_RNA (1)...(19): siRNA sense strand
cggcggauuuccuggagca

SEQ ID NO: 2550665 - RNA, 19 nt, Homo sapiens
  misc_RNA (1)...(19): siRNA sense strand
acgaguguguggauugcaa

SEQ ID NO: 2550666 - RNA, 19 nt, Homo sapiens
  misc_RNA (1)...(19): siRNA sense strand
aggaaucagaggagacagu

SEQ ID NO: 2550667 - RNA, 19 nt, Homo sapiens
  misc_RNA (1)...(19): siRNA sense strand
acgcaagauagaaggcuuu

SEQ ID NO: 2550668 - RNA, 19 nt, Homo sapiens
  misc_RNA (1)...(19): siRNA sense strand
cagucaaggcuuugggugu

SEQ ID NO: 2550669 - RNA, 19 nt, Homo sapiens
  misc_RNA (1)...(19): siRNA sense strand
ggauuuacuacaaggacca

SEQ ID NO: 2550670 - RNA, 19 nt, Homo sapiens
  misc_RNA (1)...(19): siRNA sense strand
caaagugauuucagggauc

SEQ ID NO: 2550671 - RNA, 19 nt, Homo sapiens
  misc_RNA (1)...(19): siRNA sense strand
cugaaggagaucaaaguga

SEQ ID NO: 2550672 - RNA, 19 nt, Homo sapiens
  misc_RNA (1)...(19): siRNA sense strand
cuaccgaggaugaaggcga

SEQ ID NO: 2550673 - RNA, 19 nt, Homo sapiens
  misc_RNA (1)...(19): siRNA sense strand
ggauggagcugcuggagug

SEQ ID NO: 2550674 - RNA, 19 nt, Homo sapiens
  misc_RNA (1)...(19): siRNA sense strand
aaagcaugcaagugcgauu

SEQ ID NO: 2550675 - RNA, 19 nt, Homo sapiens
  misc_RNA (1)...(19): siRNA sense strand
ucaaagugauuucagggau

SEQ ID NO: 2550676 - RNA, 19 nt, Homo sapiens
  misc_RNA (1)...(19): siRNA sense strand
cagcacaggucaaggccaa

SEQ ID NO: 2550677 - RNA, 19 nt, Homo sapiens
  misc_RNA (1)...(19): siRNA sense strand
uggucaaggcuaaggccaa

SEQ ID NO: 2550678 - RNA, 19 nt, Homo sapiens
  misc_RNA (1)...(19): siRNA sense strand
gcggaaaaguucagggaag

SEQ ID NO: 2550679 - RNA, 19 nt, Homo sapiens
  misc_RNA (1)...(19): siRNA sense strand
ccucugaaacugcggaaaa

SEQ ID NO: 2550680 - RNA, 19 nt, Homo sapiens
  misc_RNA (1)...(19): siRNA sense strand
guggugaugucuauggcua

SEQ ID NO: 2550681 - RNA, 19 nt, Homo sapiens
  misc_RNA (1)...(19): siRNA sense strand
ggccagaacuacaaggaag

SEQ ID NO: 2550682 - RNA, 19 nt, Homo sapiens
  misc_RNA (1)...(19): siRNA sense strand
cuguugggcagaagaggaa

SEQ ID NO: 2550683 - RNA, 19 nt, Homo sapiens
  misc_RNA (1)...(19): siRNA sense strand
ccaaaacagcccaggccaa

SEQ ID NO: 2550684 - RNA, 19 nt, Homo sapiens
  misc_RNA (1)...(19): siRNA sense strand
caaagcugcucgugcccaa

SEQ ID NO: 2550685 - RNA, 19 nt, Homo sapiens
  misc_RNA (1)...(19): siRNA sense strand
caagaagagaacacggcuu

SEQ ID NO: 2550686 - RNA, 19 nt, Homo sapiens
  misc_RNA (1)...(19): siRNA sense strand
ccauaaagguagauaggcg

SEQ ID NO: 2550687 - RNA, 19 nt, Homo sapiens
  misc_RNA (1)...(19): siRNA sense strand
cagcgaugccagagagaau

SEQ ID NO: 2550688 - RNA, 19 nt, Homo sapiens
  misc_RNA (1)...(19): siRNA sense strand
cgggacauguggagagccu

SEQ ID NO: 2550689 - RNA, 19 nt, Homo sapiens
  misc_RNA (1)...(19): siRNA sense strand
cagcgaugccagagagaau

SEQ ID NO: 2550690 - RNA, 19 nt, Homo sapiens
  misc_RNA (1)...(19): siRNA sense strand
cgggacauguggagagccu

SEQ ID NO: 2550691 - RNA, 19 nt, Homo sapiens
  misc_RNA (1)...(19): siRNA sense strand
ggaagaaggucaagugcac

SEQ ID NO: 2550692 - RNA, 19 nt, Homo sapiens
  misc_RNA (1)...(19): siRNA sense strand
agacgauggccgugugcaa

SEQ ID NO: 2550693 - RNA, 19 nt, Homo sapiens
  misc_RNA (1)...(19): siRNA sense strand
acaaaauacggcagagaau

SEQ ID NO: 2550694 - RNA, 19 nt, Homo sapiens
  misc_RNA (1)...(19): siRNA sense strand
cggaggagaggaaggccua

SEQ ID NO: 2550695 - RNA, 19 nt, Homo sapiens
  misc_RNA (1)...(19): siRNA sense strand
aguccaaagccaagcccaa

SEQ ID NO: 2550696 - RNA, 19 nt, Homo sapiens
  misc_RNA (1)...(19): siRNA sense strand
ggagagacgugucagacga

SEQ ID NO: 2550697 - RNA, 19 nt, Homo sapiens
  misc_RNA (1)...(19): siRNA sense strand
gggaagaaggucaagugca

SEQ ID NO: 2550698 - RNA, 19 nt, Homo sapiens
  misc_RNA (1)...(19): siRNA sense strand
uggauaagcuucagcgcau

SEQ ID NO: 2550699 - RNA, 19 nt, Homo sapiens
  misc_RNA (1)...(19): siRNA sense strand
aggcauugacagaguggua

SEQ ID NO: 2550700 - RNA, 19 nt, Homo sapiens
  misc_RNA (1)...(19): siRNA sense strand
ucaucaagcugguggccuu

SEQ ID NO: 2550701 - RNA, 19 nt, Homo sapiens
  misc_RNA (1)...(19): siRNA sense strand
gcuucaagaccauggacuu

SEQ ID NO: 2550702 - RNA, 19 nt, Homo sapiens
  misc_RNA (1)...(19): siRNA sense strand
gcaaaauggccaugagacu

SEQ ID NO: 2550703 - RNA, 19 nt, Homo sapiens
  misc_RNA (1)...(19): siRNA sense strand
agggaauugucaagcucaa

SEQ ID NO: 2550704 - RNA, 19 nt, Homo sapiens
  misc_RNA (1)...(19): siRNA sense strand
gaauuuaacuaucgcacca

SEQ ID NO: 2550705 - RNA, 19 nt, Homo sapiens
  misc_RNA (1)...(19): siRNA sense strand
ggggagaaauacugcaaca

SEQ ID NO: 2550706 - RNA, 19 nt, Homo sapiens
  misc_RNA (1)...(19): siRNA sense strand
gugaagaaguaccugcuga

SEQ ID NO: 2550707 - RNA, 19 nt, Homo sapiens
  misc_RNA (1)...(19): siRNA sense strand
ccguaggcuucaagaccau

SEQ ID NO: 2550708 - RNA, 19 nt, Homo sapiens
  misc_RNA (1)...(19): siRNA sense strand
gcauugacagagugguaca

SEQ ID NO: 2550709 - RNA, 19 nt, Homo sapiens
  misc_RNA (1)...(19): siRNA sense strand
agucugacagugaggguga

SEQ ID NO: 2550710 - RNA, 19 nt, Homo sapiens
  misc_RNA (1)...(19): siRNA sense strand
ccaccaacaucuuugcaca

SEQ ID NO: 2550711 - RNA, 19 nt, Homo sapiens
  misc_RNA (1)...(19): siRNA sense strand
gggagaaauacugcaacaa

SEQ ID NO: 2550712 - RNA, 19 nt, Homo sapiens
  misc_RNA (1)...(19): siRNA sense strand
gagacaaccacaauggcuu

SEQ ID NO: 2550713 - RNA, 19 nt, Homo sapiens
  misc_RNA (1)...(19): siRNA sense strand
uggacauaggccaggaaga

SEQ ID NO: 2550714 - RNA, 19 nt, Homo sapiens
  misc_RNA (1)...(19): siRNA sense strand
ccuuauugaugaacggaac

SEQ ID NO: 2550715 - RNA, 19 nt, Homo sapiens
  misc_RNA (1)...(19): siRNA sense strand
cggaacuucaccagugcua

SEQ ID NO: 2550716 - RNA, 19 nt, Homo sapiens
  misc_RNA (1)...(19): siRNA sense strand
ucgggguacucguggauaa

SEQ ID NO: 2550717 - RNA, 19 nt, Homo sapiens
  misc_RNA (1)...(19): siRNA sense strand
cgugaaugguucugagguc

SEQ ID NO: 2550718 - RNA, 19 nt, Homo sapiens
  misc_RNA (1)...(19): siRNA sense strand
ggacaguguucaagacgca

SEQ ID NO: 2550719 - RNA, 19 nt, Homo sapiens
  misc_RNA (1)...(19): siRNA sense strand
ccgagagcgcuaugggaca

SEQ ID NO: 2550720 - RNA, 19 nt, Homo sapiens
  misc_RNA (1)...(19): siRNA sense strand
gggugaugcccucgaccua

SEQ ID NO: 2550721 - RNA, 19 nt, Homo sapiens
  misc_RNA (1)...(19): siRNA sense strand
auguauagcauccgggaca

SEQ ID NO: 2550722 - RNA, 19 nt, Homo sapiens
  misc_RNA (1)...(19): siRNA sense strand
cugagaagcuucacgagga

SEQ ID NO: 2550723 - RNA, 19 nt, Homo sapiens
  misc_RNA (1)...(19): siRNA sense strand
gcuucgauccagagcgcuu

SEQ ID NO: 2550724 - RNA, 19 nt, Homo sapiens
  misc_RNA (1)...(19): siRNA sense strand
agaagcuucacgaggacaa

SEQ ID NO: 2550725 - RNA, 19 nt, Homo sapiens
  misc_RNA (1)...(19): siRNA sense strand
gggaaugggcuaugccucu

SEQ ID NO: 2550726 - RNA, 19 nt, Homo sapiens
  misc_RNA (1)...(19): siRNA sense strand
acaaauaugaagagugcaa

SEQ ID NO: 2550727 - RNA, 19 nt, Homo sapiens
  misc_RNA (1)...(19): siRNA sense strand
ucuagaaaucaacgagaaa

SEQ ID NO: 2550728 - RNA, 19 nt, Homo sapiens
  misc_RNA (1)...(19): siRNA sense strand
cagaagccucaaagagaaa

SEQ ID NO: 2550729 - RNA, 19 nt, Homo sapiens
  misc_RNA (1)...(19): siRNA sense strand
uggccaagcagcagaacaa

SEQ ID NO: 2550730 - RNA, 19 nt, Homo sapiens
  misc_RNA (1)...(19): siRNA sense strand
augaugaggaagaggaaga

SEQ ID NO: 2550731 - RNA, 19 nt, Homo sapiens
  misc_RNA (1)...(19): siRNA sense strand
acgaagaugaggaugaaga

SEQ ID NO: 2550732 - RNA, 19 nt, Homo sapiens
  misc_RNA (1)...(19): siRNA sense strand
aguccugggaugaagguua

SEQ ID NO: 2550733 - RNA, 19 nt, Homo sapiens
  misc_RNA (1)...(19): siRNA sense strand
cagaaaccucaaagagaga

SEQ ID NO: 2550734 - RNA, 19 nt, Homo sapiens
  misc_RNA (1)...(19): siRNA sense strand
gggagaugcagaaggcuga

SEQ ID NO: 2550735 - RNA, 19 nt, Homo sapiens
  misc_RNA (1)...(19): siRNA sense strand
cccaguuggcagagaacaa

SEQ ID NO: 2550736 - RNA, 19 nt, Homo sapiens
  misc_RNA (1)...(19): siRNA sense strand
ucacauuugaggaagacaa

SEQ ID NO: 2550737 - RNA, 19 nt, Homo sapiens
  misc_RNA (1)...(19): siRNA sense strand
ucacauuugaggaagacaa

SEQ ID NO: 2550738 - RNA, 19 nt, Homo sapiens
  misc_RNA (1)...(19): siRNA sense strand
gaaguuacgggaagggaga

SEQ ID NO: 2550739 - RNA, 19 nt, Homo sapiens
  misc_RNA (1)...(19): siRNA sense strand
gaaguuacgggaagggaga

SEQ ID NO: 2550740 - RNA, 19 nt, Homo sapiens
  misc_RNA (1)...(19): siRNA sense strand
aguugagguggcugagaaa

SEQ ID NO: 2550741 - RNA, 19 nt, Homo sapiens
  misc_RNA (1)...(19): siRNA sense strand
cagaaaaugacgaagauga

SEQ ID NO: 2550742 - RNA, 19 nt, Homo sapiens
  misc_RNA (1)...(19): siRNA sense strand
augacgaagaugaggauga

SEQ ID NO: 2550743 - RNA, 19 nt, Homo sapiens
  misc_RNA (1)...(19): siRNA sense strand
gcagaaggcugaagagagc

SEQ ID NO: 2550744 - RNA, 19 nt, Homo sapiens
  misc_RNA (1)...(19): siRNA sense strand
ggaugaagguuauucgacu

SEQ ID NO: 2550745 - RNA, 19 nt, Homo sapiens
  misc_RNA (1)...(19): siRNA sense strand
agucugaagaggaggaagu

SEQ ID NO: 2550746 - RNA, 19 nt, Homo sapiens
  misc_RNA (1)...(19): siRNA sense strand
uggcugagaaagugcagaa

SEQ ID NO: 2550747 - RNA, 19 nt, Homo sapiens
  misc_RNA (1)...(19): siRNA sense strand
acacauuaucccagaaaau

SEQ ID NO: 2550748 - RNA, 19 nt, Homo sapiens
  misc_RNA (1)...(19): siRNA sense strand
ugaugaugaggaagaggaa

SEQ ID NO: 2550749 - RNA, 19 nt, Homo sapiens
  misc_RNA (1)...(19): siRNA sense strand
aguguaaagaccucauaaa

SEQ ID NO: 2550750 - RNA, 19 nt, Homo sapiens
  misc_RNA (1)...(19): siRNA sense strand
guguaaagaccucauaaaa

SEQ ID NO: 2550751 - RNA, 19 nt, Homo sapiens
  misc_RNA (1)...(19): siRNA sense strand
cagagaagaaacagcaguu

SEQ ID NO: 2550752 - RNA, 19 nt, Homo sapiens
  misc_RNA (1)...(19): siRNA sense strand
gcaacaggucccaggcuca

SEQ ID NO: 2550753 - RNA, 19 nt, Homo sapiens
  misc_RNA (1)...(19): siRNA sense strand
aggagaagcuugcagagca

SEQ ID NO: 2550754 - RNA, 19 nt, Homo sapiens
  misc_RNA (1)...(19): siRNA sense strand
gggaggugcagaaggcuga

SEQ ID NO: 2550755 - RNA, 19 nt, Homo sapiens
  misc_RNA (1)...(19): siRNA sense strand
aggagaagcuugcagagca

SEQ ID NO: 2550756 - RNA, 19 nt, Homo sapiens
  misc_RNA (1)...(19): siRNA sense strand
augaggaagaggaagaaaa

SEQ ID NO: 2550757 - RNA, 19 nt, Homo sapiens
  misc_RNA (1)...(19): siRNA sense strand
cgaagaugaggaugaagau

SEQ ID NO: 2550758 - RNA, 19 nt, Homo sapiens
  misc_RNA (1)...(19): siRNA sense strand
agaaggcugaagagagcaa

SEQ ID NO: 2550759 - RNA, 19 nt, Homo sapiens
  misc_RNA (1)...(19): siRNA sense strand
ugcagaaggcugaagaaaa

SEQ ID NO: 2550760 - RNA, 19 nt, Homo sapiens
  misc_RNA (1)...(19): siRNA sense strand
agggagaaguuacgggaag

SEQ ID NO: 2550761 - RNA, 19 nt, Homo sapiens
  misc_RNA (1)...(19): siRNA sense strand
agggagaaguuacgggaag

SEQ ID NO: 2550762 - RNA, 19 nt, Homo sapiens
  misc_RNA (1)...(19): siRNA sense strand
augcagaaggcugaagaaa

SEQ ID NO: 2550763 - RNA, 19 nt, Homo sapiens
  misc_RNA (1)...(19): siRNA sense strand
ggagaagcuugcagagcag

SEQ ID NO: 2550764 - RNA, 19 nt, Homo sapiens
  misc_RNA (1)...(19): siRNA sense strand
gagaaggcagagaugaaca

SEQ ID NO: 2550765 - RNA, 19 nt, Homo sapiens
  misc_RNA (1)...(19): siRNA sense strand
agugcaaagaccucauaaa

SEQ ID NO: 2550766 - RNA, 19 nt, Homo sapiens
  misc_RNA (1)...(19): siRNA sense strand
ggagaagcuugcagagcag

SEQ ID NO: 2550767 - RNA, 19 nt, Homo sapiens
  misc_RNA (1)...(19): siRNA sense strand
gagaaggcagagaugaaca

SEQ ID NO: 2550768 - RNA, 19 nt, Homo sapiens
  misc_RNA (1)...(19): siRNA sense strand
guacacauuaucccagaaa

SEQ ID NO: 2550769 - RNA, 19 nt, Homo sapiens
  misc_RNA (1)...(19): siRNA sense strand
ugagaaaguacuggaauca

SEQ ID NO: 2550770 - RNA, 19 nt, Homo sapiens
  misc_RNA (1)...(19): siRNA sense strand
cagaaaaugauaacgauga

SEQ ID NO: 2550771 - RNA, 19 nt, Homo sapiens
  misc_RNA (1)...(19): siRNA sense strand
gguccagcgagaaggcaga

SEQ ID NO: 2550772 - RNA, 19 nt, Homo sapiens
  misc_RNA (1)...(19): siRNA sense strand
augauaacgaugacgauga

SEQ ID NO: 2550773 - RNA, 19 nt, Homo sapiens
  misc_RNA (1)...(19): siRNA sense strand
ccucaaagagagauguuuu

SEQ ID NO: 2550774 - RNA, 19 nt, Homo sapiens
  misc_RNA (1)...(19): siRNA sense strand
gggaggaugcuguacacau

SEQ ID NO: 2550775 - RNA, 19 nt, Homo sapiens
  misc_RNA (1)...(19): siRNA sense strand
aagaaacagcaguucagaa

SEQ ID NO: 2550776 - RNA, 19 nt, Homo sapiens
  misc_RNA (1)...(19): siRNA sense strand
ggcuuaaugagguggagaa

SEQ ID NO: 2550777 - RNA, 19 nt, Homo sapiens
  misc_RNA (1)...(19): siRNA sense strand
ucagaaaucaugaggucca

SEQ ID NO: 2550778 - RNA, 19 nt, Homo sapiens
  misc_RNA (1)...(19): siRNA sense strand
gagacagacauuugggacu

SEQ ID NO: 2550779 - RNA, 19 nt, Homo sapiens
  misc_RNA (1)...(19): siRNA sense strand
ccauaaaggaagcccacga

SEQ ID NO: 2550780 - RNA, 19 nt, Homo sapiens
  misc_RNA (1)...(19): siRNA sense strand
cgacauagagaccaggcuu

SEQ ID NO: 2550781 - RNA, 19 nt, Homo sapiens
  misc_RNA (1)...(19): siRNA sense strand
aguuauugaccacaguaua

SEQ ID NO: 2550782 - RNA, 19 nt, Homo sapiens
  misc_RNA (1)...(19): siRNA sense strand
gcggcgacgaagaggaguu

SEQ ID NO: 2550783 - RNA, 19 nt, Homo sapiens
  misc_RNA (1)...(19): siRNA sense strand
agacacauggaaugggaaa

SEQ ID NO: 2550784 - RNA, 19 nt, Homo sapiens
  misc_RNA (1)...(19): siRNA sense strand
acgcagacauauuuggcua

SEQ ID NO: 2550785 - RNA, 19 nt, Homo sapiens
  misc_RNA (1)...(19): siRNA sense strand
auauuuggcuaguggaaaa

SEQ ID NO: 2550786 - RNA, 19 nt, Homo sapiens
  misc_RNA (1)...(19): siRNA sense strand
uguucgaggacgagcgcaa

SEQ ID NO: 2550787 - RNA, 19 nt, Homo sapiens
  misc_RNA (1)...(19): siRNA sense strand
gcauuaucagaguggacua

SEQ ID NO: 2550788 - RNA, 19 nt, Homo sapiens
  misc_RNA (1)...(19): siRNA sense strand
aaacaaagaccauucgaca

SEQ ID NO: 2550789 - RNA, 19 nt, Homo sapiens
  misc_RNA (1)...(19): siRNA sense strand
cuguaauggagaagcuauu

SEQ ID NO: 2550790 - RNA, 19 nt, Homo sapiens
  misc_RNA (1)...(19): siRNA sense strand
gcgacguagaagagagcca

SEQ ID NO: 2550791 - RNA, 19 nt, Homo sapiens
  misc_RNA (1)...(19): siRNA sense strand
auucagagguugacccaca

SEQ ID NO: 2550792 - RNA, 19 nt, Homo sapiens
  misc_RNA (1)...(19): siRNA sense strand
acauauuuggcuaguggaa

SEQ ID NO: 2550793 - RNA, 19 nt, Homo sapiens
  misc_RNA (1)...(19): siRNA sense strand
gggaaauauggaagcauuc

SEQ ID NO: 2550794 - RNA, 19 nt, Homo sapiens
  misc_RNA (1)...(19): siRNA sense strand
guguaaagcgggaacucca

SEQ ID NO: 2550795 - RNA, 19 nt, Homo sapiens
  misc_RNA (1)...(19): siRNA sense strand
gcgugaagagccugggucu

SEQ ID NO: 2550796 - RNA, 19 nt, Homo sapiens
  misc_RNA (1)...(19): siRNA sense strand
acguaugauuacugaguuu

SEQ ID NO: 2550797 - RNA, 19 nt, Homo sapiens
  misc_RNA (1)...(19): siRNA sense strand
caagaaggcccuaaggaga

SEQ ID NO: 2550798 - RNA, 19 nt, Homo sapiens
  misc_RNA (1)...(19): siRNA sense strand
ugugagaaauauugcggua

SEQ ID NO: 2550799 - RNA, 19 nt, Homo sapiens
  misc_RNA (1)...(19): siRNA sense strand
gaagagagucaaugagcca

SEQ ID NO: 2550800 - RNA, 19 nt, Homo sapiens
  misc_RNA (1)...(19): siRNA sense strand
aggagaaagccaugaagau

SEQ ID NO: 2550801 - RNA, 19 nt, Homo sapiens
  misc_RNA (1)...(19): siRNA sense strand
ccuuagugguggagcucau

SEQ ID NO: 2550802 - RNA, 19 nt, Homo sapiens
  misc_RNA (1)...(19): siRNA sense strand
acagcaaagaggagcguau

SEQ ID NO: 2550803 - RNA, 19 nt, Homo sapiens
  misc_RNA (1)...(19): siRNA sense strand
ucacgaagugggaggcuau

SEQ ID NO: 2550804 - RNA, 19 nt, Homo sapiens
  misc_RNA (1)...(19): siRNA sense strand
gaccauugaaauagaaaca

SEQ ID NO: 2550805 - RNA, 19 nt, Homo sapiens
  misc_RNA (1)...(19): siRNA sense strand
gggacugauccuaggacuu

SEQ ID NO: 2550806 - RNA, 19 nt, Homo sapiens
  misc_RNA (1)...(19): siRNA sense strand
agagagcaucugagaaaga

SEQ ID NO: 2550807 - RNA, 19 nt, Homo sapiens
  misc_RNA (1)...(19): siRNA sense strand
aagaugaagaugacggaca

SEQ ID NO: 2550808 - RNA, 19 nt, Homo sapiens
  misc_RNA (1)...(19): siRNA sense strand
ucaccaagaucucggcaga

SEQ ID NO: 2550809 - RNA, 19 nt, Homo sapiens
  misc_RNA (1)...(19): siRNA sense strand
cccuucagaaugugagaaa

SEQ ID NO: 2550810 - RNA, 19 nt, Homo sapiens
  misc_RNA (1)...(19): siRNA sense strand
ccauggacaucuacgccaa

SEQ ID NO: 2550811 - RNA, 19 nt, Homo sapiens
  misc_RNA (1)...(19): siRNA sense strand
augcggaagaggagaacau

SEQ ID NO: 2550812 - RNA, 19 nt, Homo sapiens
  misc_RNA (1)...(19): siRNA sense strand
ugccagaguaccugaggaa

SEQ ID NO: 2550813 - RNA, 19 nt, Homo sapiens
  misc_RNA (1)...(19): siRNA sense strand
ugguggagcucaugcccaa

SEQ ID NO: 2550814 - RNA, 19 nt, Homo sapiens
  misc_RNA (1)...(19): siRNA sense strand
cggaagaggagaacaucca

SEQ ID NO: 2550815 - RNA, 19 nt, Homo sapiens
  misc_RNA (1)...(19): siRNA sense strand
ugaccuauuuugugggcua

SEQ ID NO: 2550816 - RNA, 19 nt, Homo sapiens
  misc_RNA (1)...(19): siRNA sense strand
aggaagaggagaaagccau

SEQ ID NO: 2550817 - RNA, 19 nt, Homo sapiens
  misc_RNA (1)...(19): siRNA sense strand
aagaauaugucucacguga

SEQ ID NO: 2550818 - RNA, 19 nt, Homo sapiens
  misc_RNA (1)...(19): siRNA sense strand
gagaagccuuuguggagga

SEQ ID NO: 2550819 - RNA, 19 nt, Homo sapiens
  misc_RNA (1)...(19): siRNA sense strand
gaggaagaggagaaagcca

SEQ ID NO: 2550820 - RNA, 19 nt, Homo sapiens
  misc_RNA (1)...(19): siRNA sense strand
uggaugcggaagaggagaa

SEQ ID NO: 2550821 - RNA, 19 nt, Homo sapiens
  misc_RNA (1)...(19): siRNA sense strand
ugacaaugccagaguaccu

SEQ ID NO: 2550822 - RNA, 19 nt, Homo sapiens
  misc_RNA (1)...(19): siRNA sense strand
gaaaaguacaugaaagcca

SEQ ID NO: 2550823 - RNA, 19 nt, Homo sapiens
  misc_RNA (1)...(19): siRNA sense strand
cgccaagguccgcaagaga

SEQ ID NO: 2550824 - RNA, 19 nt, Homo sapiens
  misc_RNA (1)...(19): siRNA sense strand
gagcagauguggaggcuga

SEQ ID NO: 2550825 - RNA, 19 nt, Homo sapiens
  misc_RNA (1)...(19): siRNA sense strand
ccaaagaagcuucggguga

SEQ ID NO: 2550826 - RNA, 19 nt, Homo sapiens
  misc_RNA (1)...(19): siRNA sense strand
ugacagacgcagaagcuca

SEQ ID NO: 2550827 - RNA, 19 nt, Homo sapiens
  misc_RNA (1)...(19): siRNA sense strand
ucuucaacgcugugaucaa

SEQ ID NO: 2550828 - RNA, 19 nt, Homo sapiens
  misc_RNA (1)...(19): siRNA sense strand
agguggagcuguuggccuu

SEQ ID NO: 2550829 - RNA, 19 nt, Homo sapiens
  misc_RNA (1)...(19): siRNA sense strand
gggcauaacuccagccgag

SEQ ID NO: 2550830 - RNA, 19 nt, Homo sapiens
  misc_RNA (1)...(19): siRNA sense strand
uggcacaacuggacgagga

SEQ ID NO: 2550831 - RNA, 19 nt, Homo sapiens
  misc_RNA (1)...(19): siRNA sense strand
acgaauuccaccaggacuu

SEQ ID NO: 2550832 - RNA, 19 nt, Homo sapiens
  misc_RNA (1)...(19): siRNA sense strand
cacaacuggacgaggaaga

SEQ ID NO: 2550833 - RNA, 19 nt, Homo sapiens
  misc_RNA (1)...(19): siRNA sense strand
cagcugaggugaaggccau

SEQ ID NO: 2550834 - RNA, 19 nt, Homo sapiens
  misc_RNA (1)...(19): siRNA sense strand
ccaucuuaucuguacaaua

SEQ ID NO: 2550835 - RNA, 19 nt, Homo sapiens
  misc_RNA (1)...(19): siRNA sense strand
cuagaaaagcacaagaauu

SEQ ID NO: 2550836 - RNA, 19 nt, Homo sapiens
  misc_RNA (1)...(19): siRNA sense strand
cugcaccaguggaagacaa

SEQ ID NO: 2550837 - RNA, 19 nt, Homo sapiens
  misc_RNA (1)...(19): siRNA sense strand
ggacugcaguacuuggaga

SEQ ID NO: 2550838 - RNA, 19 nt, Homo sapiens
  misc_RNA (1)...(19): siRNA sense strand
ggaaggagaugaugggaag

SEQ ID NO: 2550839 - RNA, 19 nt, Homo sapiens
  misc_RNA (1)...(19): siRNA sense strand
ccgagauguacgaggaaaa

SEQ ID NO: 2550840 - RNA, 19 nt, Homo sapiens
  misc_RNA (1)...(19): siRNA sense strand
gggcuggaguugaggagga

SEQ ID NO: 2550841 - RNA, 19 nt, Homo sapiens
  misc_RNA (1)...(19): siRNA sense strand
gaguugaggaggaaggaga

SEQ ID NO: 2550842 - RNA, 19 nt, Homo sapiens
  misc_RNA (1)...(19): siRNA sense strand
aggaaggagaugaugggaa

SEQ ID NO: 2550843 - RNA, 19 nt, Homo sapiens
  misc_RNA (1)...(19): siRNA sense strand
cugaggagccagaggcaga

SEQ ID NO: 2550844 - RNA, 19 nt, Homo sapiens
  misc_RNA (1)...(19): siRNA sense strand
acuacagacacuacagaaa

SEQ ID NO: 2550845 - RNA, 19 nt, Homo sapiens
  misc_RNA (1)...(19): siRNA sense strand
cugcguaaagcaagggaau

SEQ ID NO: 2550846 - RNA, 19 nt, Homo sapiens
  misc_RNA (1)...(19): siRNA sense strand
cugugaaggcugcggaaga

SEQ ID NO: 2550847 - RNA, 19 nt, Homo sapiens
  misc_RNA (1)...(19): siRNA sense strand
gggagaagggaugggacaa

SEQ ID NO: 2550848 - RNA, 19 nt, Homo sapiens
  misc_RNA (1)...(19): siRNA sense strand
cauaacagcaagaugguga

SEQ ID NO: 2550849 - RNA, 19 nt, Homo sapiens
  misc_RNA (1)...(19): siRNA sense strand
aggaagaaaaggaggacau

SEQ ID NO: 2550850 - RNA, 19 nt, Homo sapiens
  misc_RNA (1)...(19): siRNA sense strand
ugggagaagggaugggaca

SEQ ID NO: 2550851 - RNA, 19 nt, Homo sapiens
  misc_RNA (1)...(19): siRNA sense strand
acagagugguugagugcca

SEQ ID NO: 2550852 - RNA, 19 nt, Homo sapiens
  misc_RNA (1)...(19): siRNA sense strand
caagggaauuggaggcacu

SEQ ID NO: 2550853 - RNA, 19 nt, Homo sapiens
  misc_RNA (1)...(19): siRNA sense strand
cuucggagcgagauggauu

SEQ ID NO: 2550854 - RNA, 19 nt, Homo sapiens
  misc_RNA (1)...(19): siRNA sense strand
gggagauuauccagcgagu

SEQ ID NO: 2550855 - RNA, 19 nt, Homo sapiens
  misc_RNA (1)...(19): siRNA sense strand
aggaggacauggagaccca

SEQ ID NO: 2550856 - RNA, 19 nt, Homo sapiens
  misc_RNA (1)...(19): siRNA sense strand
ccgcgcaaaucuaccgcaa

SEQ ID NO: 2550857 - RNA, 19 nt, Homo sapiens
  misc_RNA (1)...(19): siRNA sense strand
gucagaaagcaguggggaa

SEQ ID NO: 2550858 - RNA, 19 nt, Homo sapiens
  misc_RNA (1)...(19): siRNA sense strand
gggacagcccggaagagau

SEQ ID NO: 2550859 - RNA, 19 nt, Homo sapiens
  misc_RNA (1)...(19): siRNA sense strand
agacccuguugaagagaga

SEQ ID NO: 2550860 - RNA, 19 nt, Homo sapiens
  misc_RNA (1)...(19): siRNA sense strand
gcucagauacagaggacag

SEQ ID NO: 2550861 - RNA, 19 nt, Homo sapiens
  misc_RNA (1)...(19): siRNA sense strand
cagacggauucgggagauu

SEQ ID NO: 2550862 - RNA, 19 nt, Homo sapiens
  misc_RNA (1)...(19): siRNA sense strand
gcccaguguggaugaacua

SEQ ID NO: 2550863 - RNA, 19 nt, Homo sapiens
  misc_RNA (1)...(19): siRNA sense strand
cggaaacugucuagagcug

SEQ ID NO: 2550864 - RNA, 19 nt, Homo sapiens
  misc_RNA (1)...(19): siRNA sense strand
acguggaacuagcggagga

SEQ ID NO: 2550865 - RNA, 19 nt, Homo sapiens
  misc_RNA (1)...(19): siRNA sense strand
gacgguguaucgagggcua

SEQ ID NO: 2550866 - RNA, 19 nt, Homo sapiens
  misc_RNA (1)...(19): siRNA sense strand
ccgaggugaaggagaucau

SEQ ID NO: 2550867 - RNA, 19 nt, Homo sapiens
  misc_RNA (1)...(19): siRNA sense strand
ugguauauaacgaguucau

SEQ ID NO: 2550868 - RNA, 19 nt, Homo sapiens
  misc_RNA (1)...(19): siRNA sense strand
acuucagagagcucagaua

SEQ ID NO: 2550869 - RNA, 19 nt, Homo sapiens
  misc_RNA (1)...(19): siRNA sense strand
ggagaugaugggaaggaac

SEQ ID NO: 2550870 - RNA, 19 nt, Homo sapiens
  misc_RNA (1)...(19): siRNA sense strand
uggaacuagcggaggagga

SEQ ID NO: 2550871 - RNA, 19 nt, Homo sapiens
  misc_RNA (1)...(19): siRNA sense strand
gcacagagaagcaggccaa

SEQ ID NO: 2550872 - RNA, 19 nt, Homo sapiens
  misc_RNA (1)...(19): siRNA sense strand
ccaaggaagaaguggccau

SEQ ID NO: 2550873 - RNA, 19 nt, Homo sapiens
  misc_RNA (1)...(19): siRNA sense strand
cgucggaggccuaucgcua

SEQ ID NO: 2550874 - RNA, 19 nt, Homo sapiens
  misc_RNA (1)...(19): siRNA sense strand
cuguagaagaccucaucaa

SEQ ID NO: 2550875 - RNA, 19 nt, Homo sapiens
  misc_RNA (1)...(19): siRNA sense strand
ccuacgaguaccuggagau

SEQ ID NO: 2550876 - RNA, 19 nt, Homo sapiens
  misc_RNA (1)...(19): siRNA sense strand
gcaugaaggcuguggucug

SEQ ID NO: 2550877 - RNA, 19 nt, Homo sapiens
  misc_RNA (1)...(19): siRNA sense strand
uggacaugaugguggucga

SEQ ID NO: 2550878 - RNA, 19 nt, Homo sapiens
  misc_RNA (1)...(19): siRNA sense strand
ugaggaucgaggagacaaa

SEQ ID NO: 2550879 - RNA, 19 nt, Homo sapiens
  misc_RNA (1)...(19): siRNA sense strand
acuucuggcucuugaucaa

SEQ ID NO: 2550880 - RNA, 19 nt, Homo sapiens
  misc_RNA (1)...(19): siRNA sense strand
ucuaugaagcgauggccaa

SEQ ID NO: 2550881 - RNA, 19 nt, Homo sapiens
  misc_RNA (1)...(19): siRNA sense strand
guaccaaauagauggaaac

SEQ ID NO: 2550882 - RNA, 19 nt, Homo sapiens
  misc_RNA (1)...(19): siRNA sense strand
ccgaauuguagccagguau

SEQ ID NO: 2550883 - RNA, 19 nt, Homo sapiens
  misc_RNA (1)...(19): siRNA sense strand
ugaaucugacccaggcaaa

SEQ ID NO: 2550884 - RNA, 19 nt, Homo sapiens
  misc_RNA (1)...(19): siRNA sense strand
cucuacagggcucgagaaa

SEQ ID NO: 2550885 - RNA, 19 nt, Homo sapiens
  misc_RNA (1)...(19): siRNA sense strand
uggaacaucucuuugccua

SEQ ID NO: 2550886 - RNA, 19 nt, Homo sapiens
  misc_RNA (1)...(19): siRNA sense strand
ccaaugucaaggagaucaa

SEQ ID NO: 2550887 - RNA, 19 nt, Homo sapiens
  misc_RNA (1)...(19): siRNA sense strand
ccuacagacacaugcgcaa

SEQ ID NO: 2550888 - RNA, 19 nt, Homo sapiens
  misc_RNA (1)...(19): siRNA sense strand
aggagagucagcaggacaa

SEQ ID NO: 2550889 - RNA, 19 nt, Homo sapiens
  misc_RNA (1)...(19): siRNA sense strand
ugcagaaggccuugggcau

SEQ ID NO: 2550890 - RNA, 19 nt, Homo sapiens
  misc_RNA (1)...(19): siRNA sense strand
ugaguaaaguggucccaga

SEQ ID NO: 2550891 - RNA, 19 nt, Homo sapiens
  misc_RNA (1)...(19): siRNA sense strand
ggagcagacucuugggaga

SEQ ID NO: 2550892 - RNA, 19 nt, Homo sapiens
  misc_RNA (1)...(19): siRNA sense strand
aaggaaaaucuguggcaaa

SEQ ID NO: 2550893 - RNA, 19 nt, Homo sapiens
  misc_RNA (1)...(19): siRNA sense strand
gcagaagguuauuggcacu

SEQ ID NO: 2550894 - RNA, 19 nt, Homo sapiens
  misc_RNA (1)...(19): siRNA sense strand
ccacauaauuaaagaccag

SEQ ID NO: 2550895 - RNA, 19 nt, Homo sapiens
  misc_RNA (1)...(19): siRNA sense strand
acccagaagcccugagaga

SEQ ID NO: 2550896 - RNA, 19 nt, Homo sapiens
  misc_RNA (1)...(19): siRNA sense strand
uggauguccugaagggaga

SEQ ID NO: 2550897 - RNA, 19 nt, Homo sapiens
  misc_RNA (1)...(19): siRNA sense strand
cagugguaccaaaggaaaa

SEQ ID NO: 2550898 - RNA, 19 nt, Homo sapiens
  misc_RNA (1)...(19): siRNA sense strand
gugcugugcagaagguuau

SEQ ID NO: 2550899 - RNA, 19 nt, Homo sapiens
  misc_RNA (1)...(19): siRNA sense strand
agugagacuuugaaccgua

SEQ ID NO: 2550900 - RNA, 19 nt, Homo sapiens
  misc_RNA (1)...(19): siRNA sense strand
aggaaaaucuguggcaaau

SEQ ID NO: 2550901 - RNA, 19 nt, Homo sapiens
  misc_RNA (1)...(19): siRNA sense strand
cggagaagcugaggccuga

SEQ ID NO: 2550902 - RNA, 19 nt, Homo sapiens
  misc_RNA (1)...(19): siRNA sense strand
auauacacccugaggaaca

SEQ ID NO: 2550903 - RNA, 19 nt, Homo sapiens
  misc_RNA (1)...(19): siRNA sense strand
ugggcagugcugaggauua

SEQ ID NO: 2550904 - RNA, 19 nt, Homo sapiens
  misc_RNA (1)...(19): siRNA sense strand
gaggauuaacucugcaaaa

SEQ ID NO: 2550905 - RNA, 19 nt, Homo sapiens
  misc_RNA (1)...(19): siRNA sense strand
cugucuaccuccagcccaa

SEQ ID NO: 2550906 - RNA, 19 nt, Homo sapiens
  misc_RNA (1)...(19): siRNA sense strand
cugaggaacaaggagguaa

SEQ ID NO: 2550907 - RNA, 19 nt, Homo sapiens
  misc_RNA (1)...(19): siRNA sense strand
ggccugggucauugggcua

SEQ ID NO: 2550908 - RNA, 19 nt, Homo sapiens
  misc_RNA (1)...(19): siRNA sense strand
gggcaguggaggcuggaaa

SEQ ID NO: 2550909 - RNA, 19 nt, Homo sapiens
  misc_RNA (1)...(19): siRNA sense strand
uuguuuauguggaggagaa

SEQ ID NO: 2550910 - RNA, 19 nt, Homo sapiens
  misc_RNA (1)...(19): siRNA sense strand
ccaugcagguggaggcaca

SEQ ID NO: 2550911 - RNA, 19 nt, Homo sapiens
  misc_RNA (1)...(19): siRNA sense strand
acacagacgaguaugagua

SEQ ID NO: 2550912 - RNA, 19 nt, Homo sapiens
  misc_RNA (1)...(19): siRNA sense strand
ccaacaugcgggaggacau

SEQ ID NO: 2550913 - RNA, 19 nt, Homo sapiens
  misc_RNA (1)...(19): siRNA sense strand
ggagaaggccaucggcaca

SEQ ID NO: 2550914 - RNA, 19 nt, Homo sapiens
  misc_RNA (1)...(19): siRNA sense strand
acaucuacuucgacgagaa

SEQ ID NO: 2550915 - RNA, 19 nt, Homo sapiens
  misc_RNA (1)...(19): siRNA sense strand
aggcaaugaaacagugaca

SEQ ID NO: 2550916 - RNA, 19 nt, Homo sapiens
  misc_RNA (1)...(19): siRNA sense strand
ccaagaaggaaguggagcu

SEQ ID NO: 2550917 - RNA, 19 nt, Homo sapiens
  misc_RNA (1)...(19): siRNA sense strand
gcaccauccgagagggcau

SEQ ID NO: 2550918 - RNA, 19 nt, Homo sapiens
  misc_RNA (1)...(19): siRNA sense strand
ugucaaugcagcuggagau

SEQ ID NO: 2550919 - RNA, 19 nt, Homo sapiens
  misc_RNA (1)...(19): siRNA sense strand
ggugauuacucccgaggca

SEQ ID NO: 2550920 - RNA, 19 nt, Homo sapiens
  misc_RNA (1)...(19): siRNA sense strand
aggauuggcggcaggagua

SEQ ID NO: 2550921 - RNA, 19 nt, Homo sapiens
  misc_RNA (1)...(19): siRNA sense strand
cagcggaggauguggccau

SEQ ID NO: 2550922 - RNA, 19 nt, Homo sapiens
  misc_RNA (1)...(19): siRNA sense strand
agccagagccagagccaga

SEQ ID NO: 2550923 - RNA, 19 nt, Homo sapiens
  misc_RNA (1)...(19): siRNA sense strand
gguaccaucuucaaggaga

SEQ ID NO: 2550924 - RNA, 19 nt, Homo sapiens
  misc_RNA (1)...(19): siRNA sense strand
gggcaggaucugauggucu

SEQ ID NO: 2550925 - RNA, 19 nt, Homo sapiens
  misc_RNA (1)...(19): siRNA sense strand
ucuuaaugagucugggaga

SEQ ID NO: 2550926 - RNA, 19 nt, Homo sapiens
  misc_RNA (1)...(19): siRNA sense strand
gugaauagugacaaggugu

SEQ ID NO: 2550927 - RNA, 19 nt, Homo sapiens
  misc_RNA (1)...(19): siRNA sense strand
cuccagagccagagccaga

SEQ ID NO: 2550928 - RNA, 19 nt, Homo sapiens
  misc_RNA (1)...(19): siRNA sense strand
gugacaagguguacuggca

SEQ ID NO: 2550929 - RNA, 19 nt, Homo sapiens
  misc_RNA (1)...(19): siRNA sense strand
ccaucuucaaggagaccaa

SEQ ID NO: 2550930 - RNA, 19 nt, Homo sapiens
  misc_RNA (1)...(19): siRNA sense strand
gagcagcagugguuggcca

SEQ ID NO: 2550931 - RNA, 19 nt, Homo sapiens
  misc_RNA (1)...(19): siRNA sense strand
uggccaggagugugaagua

SEQ ID NO: 2550932 - RNA, 19 nt, Homo sapiens
  misc_RNA (1)...(19): siRNA sense strand
cagacgaguaugaguacga

SEQ ID NO: 2550933 - RNA, 19 nt, Homo sapiens
  misc_RNA (1)...(19): siRNA sense strand
ccguggagacccagucaau

SEQ ID NO: 2550934 - RNA, 19 nt, Homo sapiens
  misc_RNA (1)...(19): siRNA sense strand
gcaccacacagacgaguau

SEQ ID NO: 2550935 - RNA, 19 nt, Homo sapiens
  misc_RNA (1)...(19): siRNA sense strand
gcugaggugaauagugaca

SEQ ID NO: 2550936 - RNA, 19 nt, Homo sapiens
  misc_RNA (1)...(19): siRNA sense strand
gggcaugcuaguagugaac

SEQ ID NO: 2550937 - RNA, 19 nt, Homo sapiens
  misc_RNA (1)...(19): siRNA sense strand
uggugaacucccuggauga

SEQ ID NO: 2550938 - RNA, 19 nt, Homo sapiens
  misc_RNA (1)...(19): siRNA sense strand
gcggaaccauagugggaga

SEQ ID NO: 2550939 - RNA, 19 nt, Homo sapiens
  misc_RNA (1)...(19): siRNA sense strand
ugggagagugagugaguuu

SEQ ID NO: 2550940 - RNA, 19 nt, Homo sapiens
  misc_RNA (1)...(19): siRNA sense strand
ccaaacaggaucauggaca

SEQ ID NO: 2550941 - RNA, 19 nt, Homo sapiens
  misc_RNA (1)...(19): siRNA sense strand
ccauagugggagagugagu

SEQ ID NO: 2550942 - RNA, 19 nt, Homo sapiens
  misc_RNA (1)...(19): siRNA sense strand
gcuaaucuccuuugaggga

SEQ ID NO: 2550943 - RNA, 19 nt, Homo sapiens
  misc_RNA (1)...(19): siRNA sense strand
ugucugagcuggacgccaa

SEQ ID NO: 2550944 - RNA, 19 nt, Homo sapiens
  misc_RNA (1)...(19): siRNA sense strand
gcgcaguucucgcaggaca

SEQ ID NO: 2550945 - RNA, 19 nt, Homo sapiens
  misc_RNA (1)...(19): siRNA sense strand
ccgugaaguucgacccgua

SEQ ID NO: 2550946 - RNA, 19 nt, Homo sapiens
  misc_RNA (1)...(19): siRNA sense strand
gcaggaagcugauugcuga

SEQ ID NO: 2550947 - RNA, 19 nt, Homo sapiens
  misc_RNA (1)...(19): siRNA sense strand
ccaagcaggcagaggccau

SEQ ID NO: 2550948 - RNA, 19 nt, Homo sapiens
  misc_RNA (1)...(19): siRNA sense strand
gcggcuaccgggaagacaa

SEQ ID NO: 2550949 - RNA, 19 nt, Homo sapiens
  misc_RNA (1)...(19): siRNA sense strand
ggaugaggaaauugagaag

SEQ ID NO: 2550950 - RNA, 19 nt, Homo sapiens
  misc_RNA (1)...(19): siRNA sense strand
ucaccaaguucgacccuga

SEQ ID NO: 2550951 - RNA, 19 nt, Homo sapiens
  misc_RNA (1)...(19): siRNA sense strand
uugcuuugcuggagcgcuu

SEQ ID NO: 2550952 - RNA, 19 nt, Homo sapiens
  misc_RNA (1)...(19): siRNA sense strand
ggaaggaggucuacaccac

SEQ ID NO: 2550953 - RNA, 19 nt, Homo sapiens
  misc_RNA (1)...(19): siRNA sense strand
ugucugagcuggacgccaa

SEQ ID NO: 2550954 - RNA, 19 nt, Homo sapiens
  misc_RNA (1)...(19): siRNA sense strand
gcgcaguucucgcaggaca

SEQ ID NO: 2550955 - RNA, 19 nt, Homo sapiens
  misc_RNA (1)...(19): siRNA sense strand
ccgugaaguucgacccgua

SEQ ID NO: 2550956 - RNA, 19 nt, Homo sapiens
  misc_RNA (1)...(19): siRNA sense strand
gcaggaagcugauugcuga

SEQ ID NO: 2550957 - RNA, 19 nt, Homo sapiens
  misc_RNA (1)...(19): siRNA sense strand
ccaagcaggcagaggccau

SEQ ID NO: 2550958 - RNA, 19 nt, Homo sapiens
  misc_RNA (1)...(19): siRNA sense strand
gcggcuaccgggaagacaa

SEQ ID NO: 2550959 - RNA, 19 nt, Homo sapiens
  misc_RNA (1)...(19): siRNA sense strand
ggaugaggaaauugagaag

SEQ ID NO: 2550960 - RNA, 19 nt, Homo sapiens
  misc_RNA (1)...(19): siRNA sense strand
ucaccaaguucgacccuga

SEQ ID NO: 2550961 - RNA, 19 nt, Homo sapiens
  misc_RNA (1)...(19): siRNA sense strand
uugcuuugcuggagcgcuu

SEQ ID NO: 2550962 - RNA, 19 nt, Homo sapiens
  misc_RNA (1)...(19): siRNA sense strand
ggaaggaggucuacaccac

SEQ ID NO: 2550963 - RNA, 19 nt, Homo sapiens
  misc_RNA (1)...(19): siRNA sense strand
ugucugagcuggacgccaa

SEQ ID NO: 2550964 - RNA, 19 nt, Homo sapiens
  misc_RNA (1)...(19): siRNA sense strand
gcgcaguucucgcaggaca

SEQ ID NO: 2550965 - RNA, 19 nt, Homo sapiens
  misc_RNA (1)...(19): siRNA sense strand
ccgugaaguucgacccgua

SEQ ID NO: 2550966 - RNA, 19 nt, Homo sapiens
  misc_RNA (1)...(19): siRNA sense strand
gcaggaagcugauugcuga

SEQ ID NO: 2550967 - RNA, 19 nt, Homo sapiens
  misc_RNA (1)...(19): siRNA sense strand
ccaagcaggcagaggccau

SEQ ID NO: 2550968 - RNA, 19 nt, Homo sapiens
  misc_RNA (1)...(19): siRNA sense strand
gcggcuaccgggaagacaa

SEQ ID NO: 2550969 - RNA, 19 nt, Homo sapiens
  misc_RNA (1)...(19): siRNA sense strand
ggaugaggaaauugagaag

SEQ ID NO: 2550970 - RNA, 19 nt, Homo sapiens
  misc_RNA (1)...(19): siRNA sense strand
ucaccaaguucgacccuga

SEQ ID NO: 2550971 - RNA, 19 nt, Homo sapiens
  misc_RNA (1)...(19): siRNA sense strand
uugcuuugcuggagcgcuu

SEQ ID NO: 2550972 - RNA, 19 nt, Homo sapiens
  misc_RNA (1)...(19): siRNA sense strand
ggaaggaggucuacaccac

SEQ ID NO: 2550973 - RNA, 19 nt, Homo sapiens
  misc_RNA (1)...(19): siRNA sense strand
ccuguaaauaugaaggaaa

SEQ ID NO: 2550974 - RNA, 19 nt, Homo sapiens
  misc_RNA (1)...(19): siRNA sense strand
gaagaaauguaaaggguac

SEQ ID NO: 2550975 - RNA, 19 nt, Homo sapiens
  misc_RNA (1)...(19): siRNA sense strand
gagaagaaauguaaagggu

SEQ ID NO: 2550976 - RNA, 19 nt, Homo sapiens
  misc_RNA (1)...(19): siRNA sense strand
cccaacaguaugacagaaa

SEQ ID NO: 2550977 - RNA, 19 nt, Homo sapiens
  misc_RNA (1)...(19): siRNA sense strand
gcuaugacccagaaaguga

SEQ ID NO: 2550978 - RNA, 19 nt, Homo sapiens
  misc_RNA (1)...(19): siRNA sense strand
agaagaaauguaaagggua

SEQ ID NO: 2550979 - RNA, 19 nt, Homo sapiens
  misc_RNA (1)...(19): siRNA sense strand
caacagauuuggugcugga

SEQ ID NO: 2550980 - RNA, 19 nt, Homo sapiens
  misc_RNA (1)...(19): siRNA sense strand
ccuuacagccugggacaaa

SEQ ID NO: 2550981 - RNA, 19 nt, Homo sapiens
  misc_RNA (1)...(19): siRNA sense strand
uugccuguguugagagaau

SEQ ID NO: 2550982 - RNA, 19 nt, Homo sapiens
  misc_RNA (1)...(19): siRNA sense strand
ccuuccaaacggaggagaa

SEQ ID NO: 2550983 - RNA, 19 nt, Homo sapiens
  misc_RNA (1)...(19): siRNA sense strand
gugaaggcugcaaggguuu

SEQ ID NO: 2550984 - RNA, 19 nt, Homo sapiens
  misc_RNA (1)...(19): siRNA sense strand
caaacggaggagaagaaau

SEQ ID NO: 2550985 - RNA, 19 nt, Homo sapiens
  misc_RNA (1)...(19): siRNA sense strand
gcgcuaugacccagaaagu

SEQ ID NO: 2550986 - RNA, 19 nt, Homo sapiens
  misc_RNA (1)...(19): siRNA sense strand
uccaaacggaggagaagaa

SEQ ID NO: 2550987 - RNA, 19 nt, Homo sapiens
  misc_RNA (1)...(19): siRNA sense strand
agaggagaaccgggagaaa

SEQ ID NO: 2550988 - RNA, 19 nt, Homo sapiens
  misc_RNA (1)...(19): siRNA sense strand
agacauuggacaagcacca

SEQ ID NO: 2550989 - RNA, 19 nt, Homo sapiens
  misc_RNA (1)...(19): siRNA sense strand
ccacagacgaggaauggga

SEQ ID NO: 2550990 - RNA, 19 nt, Homo sapiens
  misc_RNA (1)...(19): siRNA sense strand
gcgaaaucagugccaggaa

SEQ ID NO: 2550991 - RNA, 19 nt, Homo sapiens
  misc_RNA (1)...(19): siRNA sense strand
aggaaugggagcucaucaa

SEQ ID NO: 2550992 - RNA, 19 nt, Homo sapiens
  misc_RNA (1)...(19): siRNA sense strand
gugacaaagccaccgggua

SEQ ID NO: 2550993 - RNA, 19 nt, Homo sapiens
  misc_RNA (1)...(19): siRNA sense strand
caacaguaugacagaaaau

SEQ ID NO: 2550994 - RNA, 19 nt, Homo sapiens
  misc_RNA (1)...(19): siRNA sense strand
agacaaagucacgcgaaau

SEQ ID NO: 2550995 - RNA, 19 nt, Homo sapiens
  misc_RNA (1)...(19): siRNA sense strand
ugugaaggcugcaaggguu

SEQ ID NO: 2550996 - RNA, 19 nt, Homo sapiens
  misc_RNA (1)...(19): siRNA sense strand
agaggaagcugauagagga

SEQ ID NO: 2550997 - RNA, 19 nt, Homo sapiens
  misc_RNA (1)...(19): siRNA sense strand
agaagaaccauucagaaaa

SEQ ID NO: 2550998 - RNA, 19 nt, Homo sapiens
  misc_RNA (1)...(19): siRNA sense strand
gugacagaucugcggauga

SEQ ID NO: 2550999 - RNA, 19 nt, Homo sapiens
  misc_RNA (1)...(19): siRNA sense strand
ccuggaugacacugaagua

SEQ ID NO: 2551000 - RNA, 19 nt, Homo sapiens
  misc_RNA (1)...(19): siRNA sense strand
uguguugagagaauagaaa

SEQ ID NO: 2551001 - RNA, 19 nt, Homo sapiens
  misc_RNA (1)...(19): siRNA sense strand
cagaagguggaaagguuga

SEQ ID NO: 2551002 - RNA, 19 nt, Homo sapiens
  misc_RNA (1)...(19): siRNA sense strand
caucaaaacugucaccgaa

SEQ ID NO: 2551003 - RNA, 19 nt, Homo sapiens
  misc_RNA (1)...(19): siRNA sense strand
ggaagaaagaggaggagga

SEQ ID NO: 2551004 - RNA, 19 nt, Homo sapiens
  misc_RNA (1)...(19): siRNA sense strand
aggcagacugagcgggaaa

SEQ ID NO: 2551005 - RNA, 19 nt, Homo sapiens
  misc_RNA (1)...(19): siRNA sense strand
gaagaucagcugagggaga

SEQ ID NO: 2551006 - RNA, 19 nt, Homo sapiens
  misc_RNA (1)...(19): siRNA sense strand
ggaggaaggugcuggccau

SEQ ID NO: 2551007 - RNA, 19 nt, Homo sapiens
  misc_RNA (1)...(19): siRNA sense strand
uggaagaguacgaggagga

SEQ ID NO: 2551008 - RNA, 19 nt, Homo sapiens
  misc_RNA (1)...(19): siRNA sense strand
aggaggaggagcaggaaga

SEQ ID NO: 2551009 - RNA, 19 nt, Homo sapiens
  misc_RNA (1)...(19): siRNA sense strand
ucuauaacuuggaggcaga

SEQ ID NO: 2551010 - RNA, 19 nt, Homo sapiens
  misc_RNA (1)...(19): siRNA sense strand
agaaagaggaggaggagcu

SEQ ID NO: 2551011 - RNA, 19 nt, Homo sapiens
  misc_RNA (1)...(19): siRNA sense strand
aagcagaggcugagaccga

SEQ ID NO: 2551012 - RNA, 19 nt, Homo sapiens
  misc_RNA (1)...(19): siRNA sense strand
cgggaaaagaagaagaaga

SEQ ID NO: 2551013 - RNA, 19 nt, Homo sapiens
  misc_RNA (1)...(19): siRNA sense strand
aggaggaggcagcggaaga

SEQ ID NO: 2551014 - RNA, 19 nt, Homo sapiens
  misc_RNA (1)...(19): siRNA sense strand
agcagaaauaugagaucaa

SEQ ID NO: 2551015 - RNA, 19 nt, Homo sapiens
  misc_RNA (1)...(19): siRNA sense strand
gggagaaggccaaggagcu

SEQ ID NO: 2551016 - RNA, 19 nt, Homo sapiens
  misc_RNA (1)...(19): siRNA sense strand
acauagaagagguggugga

SEQ ID NO: 2551017 - RNA, 19 nt, Homo sapiens
  misc_RNA (1)...(19): siRNA sense strand
agaccagggcagaagaaga

SEQ ID NO: 2551018 - RNA, 19 nt, Homo sapiens
  misc_RNA (1)...(19): siRNA sense strand
aguacgaggaggaggagca

SEQ ID NO: 2551019 - RNA, 19 nt, Homo sapiens
  misc_RNA (1)...(19): siRNA sense strand
acaggaagaaagaggagga

SEQ ID NO: 2551020 - RNA, 19 nt, Homo sapiens
  misc_RNA (1)...(19): siRNA sense strand
aggaagaagcagcuguuga

SEQ ID NO: 2551021 - RNA, 19 nt, Homo sapiens
  misc_RNA (1)...(19): siRNA sense strand
aagaguacgaggaggagga

SEQ ID NO: 2551022 - RNA, 19 nt, Homo sapiens
  misc_RNA (1)...(19): siRNA sense strand
gaggaggagaacaggagga

SEQ ID NO: 2551023 - RNA, 19 nt, Homo sapiens
  misc_RNA (1)...(19): siRNA sense strand
aggcccagacagagcggaa

SEQ ID NO: 2551024 - RNA, 19 nt, Homo sapiens
  misc_RNA (1)...(19): siRNA sense strand
aggaagcaaaggaggcuga

SEQ ID NO: 2551025 - RNA, 19 nt, Homo sapiens
  misc_RNA (1)...(19): siRNA sense strand
acgaggaggaggagcagga

SEQ ID NO: 2551026 - RNA, 19 nt, Homo sapiens
  misc_RNA (1)...(19): siRNA sense strand
gaggagaacaggaggaagg

SEQ ID NO: 2551027 - RNA, 19 nt, Homo sapiens
  misc_RNA (1)...(19): siRNA sense strand
cagagaaguucgaccugca

SEQ ID NO: 2551028 - RNA, 19 nt, Homo sapiens
  misc_RNA (1)...(19): siRNA sense strand
agguagaaacucagcggaa

SEQ ID NO: 2551029 - RNA, 19 nt, Homo sapiens
  misc_RNA (1)...(19): siRNA sense strand
cggaauggaaucaaggcua

SEQ ID NO: 2551030 - RNA, 19 nt, Homo sapiens
  misc_RNA (1)...(19): siRNA sense strand
uauuauaaguggagagcag

SEQ ID NO: 2551031 - RNA, 19 nt, Homo sapiens
  misc_RNA (1)...(19): siRNA sense strand
ggauucacaugcaugggaa

SEQ ID NO: 2551032 - RNA, 19 nt, Homo sapiens
  misc_RNA (1)...(19): siRNA sense strand
guggcauccauuugauaaa

SEQ ID NO: 2551033 - RNA, 19 nt, Homo sapiens
  misc_RNA (1)...(19): siRNA sense strand
uuauaaguggagagcagaa

SEQ ID NO: 2551034 - RNA, 19 nt, Homo sapiens
  misc_RNA (1)...(19): siRNA sense strand
auugaaaguucguggcauc

SEQ ID NO: 2551035 - RNA, 19 nt, Homo sapiens
  misc_RNA (1)...(19): siRNA sense strand
gcagcauuucugagagcau

SEQ ID NO: 2551036 - RNA, 19 nt, Homo sapiens
  misc_RNA (1)...(19): siRNA sense strand
gcuuauuguacaggaggua

SEQ ID NO: 2551037 - RNA, 19 nt, Homo sapiens
  misc_RNA (1)...(19): siRNA sense strand
guuacaaccuagagagaau

SEQ ID NO: 2551038 - RNA, 19 nt, Homo sapiens
  misc_RNA (1)...(19): siRNA sense strand
agucaaauacugugggaau

SEQ ID NO: 2551039 - RNA, 19 nt, Homo sapiens
  misc_RNA (1)...(19): siRNA sense strand
acgacaaagaacaggaaua

SEQ ID NO: 2551040 - RNA, 19 nt, Homo sapiens
  misc_RNA (1)...(19): siRNA sense strand
gguaauugcacgagagagu

SEQ ID NO: 2551041 - RNA, 19 nt, Homo sapiens
  misc_RNA (1)...(19): siRNA sense strand
ccagaugaccugaggaaga

SEQ ID NO: 2551042 - RNA, 19 nt, Homo sapiens
  misc_RNA (1)...(19): siRNA sense strand
aggaaagggaaguggaaaa

SEQ ID NO: 2551043 - RNA, 19 nt, Homo sapiens
  misc_RNA (1)...(19): siRNA sense strand
cauaagugaagaagacaua

SEQ ID NO: 2551044 - RNA, 19 nt, Homo sapiens
  misc_RNA (1)...(19): siRNA sense strand
cgaccuggacagaaaguaa

SEQ ID NO: 2551045 - RNA, 19 nt, Homo sapiens
  misc_RNA (1)...(19): siRNA sense strand
ugguaauaucagaggaaga

SEQ ID NO: 2551046 - RNA, 19 nt, Homo sapiens
  misc_RNA (1)...(19): siRNA sense strand
cauuggagcaagugaacaa

SEQ ID NO: 2551047 - RNA, 19 nt, Homo sapiens
  misc_RNA (1)...(19): siRNA sense strand
aguauauccaccagagaaa

SEQ ID NO: 2551048 - RNA, 19 nt, Homo sapiens
  misc_RNA (1)...(19): siRNA sense strand
uggagagaguugacuguaa

SEQ ID NO: 2551049 - RNA, 19 nt, Homo sapiens
  misc_RNA (1)...(19): siRNA sense strand
acaagaacaaagagaucaa

SEQ ID NO: 2551050 - RNA, 19 nt, Homo sapiens
  misc_RNA (1)...(19): siRNA sense strand
aggcagauacucauggaua

SEQ ID NO: 2551051 - RNA, 19 nt, Homo sapiens
  misc_RNA (1)...(19): siRNA sense strand
agauggagaauguggcuua

SEQ ID NO: 2551052 - RNA, 19 nt, Homo sapiens
  misc_RNA (1)...(19): siRNA sense strand
gaccugaggaagagacuaa

SEQ ID NO: 2551053 - RNA, 19 nt, Homo sapiens
  misc_RNA (1)...(19): siRNA sense strand
ggaggaaagggaaguggaa

SEQ ID NO: 2551054 - RNA, 19 nt, Homo sapiens
  misc_RNA (1)...(19): siRNA sense strand
agaagaaaacagugaggaa

SEQ ID NO: 2551055 - RNA, 19 nt, Homo sapiens
  misc_RNA (1)...(19): siRNA sense strand
cagcauguagcuaaagaaa

SEQ ID NO: 2551056 - RNA, 19 nt, Homo sapiens
  misc_RNA (1)...(19): siRNA sense strand
cuucaauggucuuucuuaa

SEQ ID NO: 2551057 - RNA, 19 nt, Homo sapiens
  misc_RNA (1)...(19): siRNA sense strand
acgccgagccaaagagaau

SEQ ID NO: 2551058 - RNA, 19 nt, Homo sapiens
  misc_RNA (1)...(19): siRNA sense strand
auauauaacgcgucagcaa

SEQ ID NO: 2551059 - RNA, 19 nt, Homo sapiens
  misc_RNA (1)...(19): siRNA sense strand
cuggaauggacuugaagaa

SEQ ID NO: 2551060 - RNA, 19 nt, Homo sapiens
  misc_RNA (1)...(19): siRNA sense strand
gcauaaaccuagagaccug

SEQ ID NO: 2551061 - RNA, 19 nt, Homo sapiens
  misc_RNA (1)...(19): siRNA sense strand
agaacuuacacaagaacaa

SEQ ID NO: 2551062 - RNA, 19 nt, Homo sapiens
  misc_RNA (1)...(19): siRNA sense strand
gagccaaaguggagaggac

SEQ ID NO: 2551063 - RNA, 19 nt, Homo sapiens
  misc_RNA (1)...(19): siRNA sense strand
gaguuuaucuccaugggaa

SEQ ID NO: 2551064 - RNA, 19 nt, Homo sapiens
  misc_RNA (1)...(19): siRNA sense strand
ggcagauaccggagccaaa

SEQ ID NO: 2551065 - RNA, 19 nt, Homo sapiens
  misc_RNA (1)...(19): siRNA sense strand
ugagaagaaacaagagaca

SEQ ID NO: 2551066 - RNA, 19 nt, Homo sapiens
  misc_RNA (1)...(19): siRNA sense strand
gcugcagaaucaagcuaua

SEQ ID NO: 2551067 - RNA, 19 nt, Homo sapiens
  misc_RNA (1)...(19): siRNA sense strand
uauccaaauuguugcacua

SEQ ID NO: 2551068 - RNA, 19 nt, Homo sapiens
  misc_RNA (1)...(19): siRNA sense strand
acgagagaguagaaugaau

SEQ ID NO: 2551069 - RNA, 19 nt, Homo sapiens
  misc_RNA (1)...(19): siRNA sense strand
acaugaaguuaggcagaua

SEQ ID NO: 2551070 - RNA, 19 nt, Homo sapiens
  misc_RNA (1)...(19): siRNA sense strand
aaagauggacugaaggaau

SEQ ID NO: 2551071 - RNA, 19 nt, Homo sapiens
  misc_RNA (1)...(19): siRNA sense strand
aagaaaacagugaggaaau

SEQ ID NO: 2551072 - RNA, 19 nt, Homo sapiens
  misc_RNA (1)...(19): siRNA sense strand
acuuguggaucgagccaua

SEQ ID NO: 2551073 - RNA, 19 nt, Homo sapiens
  misc_RNA (1)...(19): siRNA sense strand
uaacagacaaguuggucaa

SEQ ID NO: 2551074 - RNA, 19 nt, Homo sapiens
  misc_RNA (1)...(19): siRNA sense strand
ccagaaaggaaugaugaaa

SEQ ID NO: 2551075 - RNA, 19 nt, Homo sapiens
  misc_RNA (1)...(19): siRNA sense strand
ucauaaacacugugccauu

SEQ ID NO: 2551076 - RNA, 19 nt, Homo sapiens
  misc_RNA (1)...(19): siRNA sense strand
ugauaauacaggaguuaca

SEQ ID NO: 2551077 - RNA, 19 nt, Homo sapiens
  misc_RNA (1)...(19): siRNA sense strand
ccuuucaaucugagaagaa

SEQ ID NO: 2551078 - RNA, 19 nt, Homo sapiens
  misc_RNA (1)...(19): siRNA sense strand
cagcaaauacauuggagca

SEQ ID NO: 2551079 - RNA, 19 nt, Homo sapiens
  misc_RNA (1)...(19): siRNA sense strand
caugauaauacaggaguua

SEQ ID NO: 2551080 - RNA, 19 nt, Homo sapiens
  misc_RNA (1)...(19): siRNA sense strand
gggagauacuggagcugca

SEQ ID NO: 2551081 - RNA, 19 nt, Homo sapiens
  misc_RNA (1)...(19): siRNA sense strand
ugucaaggggccagaguua

SEQ ID NO: 2551082 - RNA, 19 nt, Homo sapiens
  misc_RNA (1)...(19): siRNA sense strand
gcuccaugacucaggauuu

SEQ ID NO: 2551083 - RNA, 19 nt, Homo sapiens
  misc_RNA (1)...(19): siRNA sense strand
gugaaaauguggcugaaau

SEQ ID NO: 2551084 - RNA, 19 nt, Homo sapiens
  misc_RNA (1)...(19): siRNA sense strand
agaagaaacaagagacauc

SEQ ID NO: 2551085 - RNA, 19 nt, Homo sapiens
  misc_RNA (1)...(19): siRNA sense strand
acauauggaaagcuaguua

SEQ ID NO: 2551086 - RNA, 19 nt, Homo sapiens
  misc_RNA (1)...(19): siRNA sense strand
cuucuagauccuaugguaa

SEQ ID NO: 2551087 - RNA, 19 nt, Homo sapiens
  misc_RNA (1)...(19): siRNA sense strand
ggguuuguggcuagagauu

SEQ ID NO: 2551088 - RNA, 19 nt, Homo sapiens
  misc_RNA (1)...(19): siRNA sense strand
cgauucagcuggagaugga

SEQ ID NO: 2551089 - RNA, 19 nt, Homo sapiens
  misc_RNA (1)...(19): siRNA sense strand
gcuauuagucagucacauu

SEQ ID NO: 2551090 - RNA, 19 nt, Homo sapiens
  misc_RNA (1)...(19): siRNA sense strand
gacuugaagaauugaacaa

SEQ ID NO: 2551091 - RNA, 19 nt, Homo sapiens
  misc_RNA (1)...(19): siRNA sense strand
caggaacaaagaugugaaa

SEQ ID NO: 2551092 - RNA, 19 nt, Homo sapiens
  misc_RNA (1)...(19): siRNA sense strand
caguauuaucaaaggcaga

SEQ ID NO: 2551093 - RNA, 19 nt, Homo sapiens
  misc_RNA (1)...(19): siRNA sense strand
aaagacacgccgagccaaa

SEQ ID NO: 2551094 - RNA, 19 nt, Homo sapiens
  misc_RNA (1)...(19): siRNA sense strand
ucucagaggcaguguggau

SEQ ID NO: 2551095 - RNA, 19 nt, Homo sapiens
  misc_RNA (1)...(19): siRNA sense strand
acacaagaacaaagagauc

SEQ ID NO: 2551096 - RNA, 19 nt, Homo sapiens
  misc_RNA (1)...(19): siRNA sense strand
gaagaauuuugcugagcua

SEQ ID NO: 2551097 - RNA, 19 nt, Homo sapiens
  misc_RNA (1)...(19): siRNA sense strand
gaggaaagggaaguggaaa

SEQ ID NO: 2551098 - RNA, 19 nt, Homo sapiens
  misc_RNA (1)...(19): siRNA sense strand
cgacuagauaaauguguau

SEQ ID NO: 2551099 - RNA, 19 nt, Homo sapiens
  misc_RNA (1)...(19): siRNA sense strand
guaugaagugcaaggcgaa

SEQ ID NO: 2551100 - RNA, 19 nt, Homo sapiens
  misc_RNA (1)...(19): siRNA sense strand
caccaagagacaagacaau

SEQ ID NO: 2551101 - RNA, 19 nt, Homo sapiens
  misc_RNA (1)...(19): siRNA sense strand
aguucuggguagaugggaa

SEQ ID NO: 2551102 - RNA, 19 nt, Homo sapiens
  misc_RNA (1)...(19): siRNA sense strand
aguaugaagugcaaggcga

SEQ ID NO: 2551103 - RNA, 19 nt, Homo sapiens
  misc_RNA (1)...(19): siRNA sense strand
aggauauaggauacaguuu

SEQ ID NO: 2551104 - RNA, 19 nt, Homo sapiens
  misc_RNA (1)...(19): siRNA sense strand
gucuaaggauauaggauac

SEQ ID NO: 2551105 - RNA, 19 nt, Homo sapiens
  misc_RNA (1)...(19): siRNA sense strand
agagucugaagaagggaua

SEQ ID NO: 2551106 - RNA, 19 nt, Homo sapiens
  misc_RNA (1)...(19): siRNA sense strand
agugggugggucugaaaua

SEQ ID NO: 2551107 - RNA, 19 nt, Homo sapiens
  misc_RNA (1)...(19): siRNA sense strand
ggagaguacaggugccaga

SEQ ID NO: 2551108 - RNA, 19 nt, Homo sapiens
  misc_RNA (1)...(19): siRNA sense strand
ggguguucaaggaggaaga

SEQ ID NO: 2551109 - RNA, 19 nt, Homo sapiens
  misc_RNA (1)...(19): siRNA sense strand
aguacaggugccagacaaa

SEQ ID NO: 2551110 - RNA, 19 nt, Homo sapiens
  misc_RNA (1)...(19): siRNA sense strand
cauauuuacagaauggcaa

SEQ ID NO: 2551111 - RNA, 19 nt, Homo sapiens
  misc_RNA (1)...(19): siRNA sense strand
ucccaaaggcugugguguu

SEQ ID NO: 2551112 - RNA, 19 nt, Homo sapiens
  misc_RNA (1)...(19): siRNA sense strand
uuacagaauggcaaagaca

SEQ ID NO: 2551113 - RNA, 19 nt, Homo sapiens
  misc_RNA (1)...(19): siRNA sense strand
cuugagaaggacaguguga

SEQ ID NO: 2551114 - RNA, 19 nt, Homo sapiens
  misc_RNA (1)...(19): siRNA sense strand
uugccagagugcagagaaa

SEQ ID NO: 2551115 - RNA, 19 nt, Homo sapiens
  misc_RNA (1)...(19): siRNA sense strand
cccuaauccgggagaaaua

SEQ ID NO: 2551116 - RNA, 19 nt, Homo sapiens
  misc_RNA (1)...(19): siRNA sense strand
ugaauaaugaugaaggaga

SEQ ID NO: 2551117 - RNA, 19 nt, Homo sapiens
  misc_RNA (1)...(19): siRNA sense strand
gagaaauacgaaaugguca

SEQ ID NO: 2551118 - RNA, 19 nt, Homo sapiens
  misc_RNA (1)...(19): siRNA sense strand
gaauaaugaugaaggagag

SEQ ID NO: 2551119 - RNA, 19 nt, Homo sapiens
  misc_RNA (1)...(19): siRNA sense strand
agucgguacuguuguggaa

SEQ ID NO: 2551120 - RNA, 19 nt, Homo sapiens
  misc_RNA (1)...(19): siRNA sense strand
acaaaugugaagaaagcuu

SEQ ID NO: 2551121 - RNA, 19 nt, Homo sapiens
  misc_RNA (1)...(19): siRNA sense strand
aguaaauguuccaacuaca

SEQ ID NO: 2551122 - RNA, 19 nt, Homo sapiens
  misc_RNA (1)...(19): siRNA sense strand
acguacaaaugugaagaaa

SEQ ID NO: 2551123 - RNA, 19 nt, Homo sapiens
  misc_RNA (1)...(19): siRNA sense strand
aaauaaaggaaguggaacc

SEQ ID NO: 2551124 - RNA, 19 nt, Homo sapiens
  misc_RNA (1)...(19): siRNA sense strand
cagucaauggucagauauu

SEQ ID NO: 2551125 - RNA, 19 nt, Homo sapiens
  misc_RNA (1)...(19): siRNA sense strand
gguccacagcagucgaauu

SEQ ID NO: 2551126 - RNA, 19 nt, Homo sapiens
  misc_RNA (1)...(19): siRNA sense strand
accugaaugcagaggaaaa

SEQ ID NO: 2551127 - RNA, 19 nt, Homo sapiens
  misc_RNA (1)...(19): siRNA sense strand
ccaacaguucagaaaccua

SEQ ID NO: 2551128 - RNA, 19 nt, Homo sapiens
  misc_RNA (1)...(19): siRNA sense strand
ggagugacccguugccaga

SEQ ID NO: 2551129 - RNA, 19 nt, Homo sapiens
  misc_RNA (1)...(19): siRNA sense strand
cagagaaauuuauugucca

SEQ ID NO: 2551130 - RNA, 19 nt, Homo sapiens
  misc_RNA (1)...(19): siRNA sense strand
ccuugaagaggaccagaaa

SEQ ID NO: 2551131 - RNA, 19 nt, Homo sapiens
  misc_RNA (1)...(19): siRNA sense strand
aguucgugauggagggcuu

SEQ ID NO: 2551132 - RNA, 19 nt, Homo sapiens
  misc_RNA (1)...(19): siRNA sense strand
gggcaggccuucuaccaga

SEQ ID NO: 2551133 - RNA, 19 nt, Homo sapiens
  misc_RNA (1)...(19): siRNA sense strand
cagugauccacaugggcaa

SEQ ID NO: 2551134 - RNA, 19 nt, Homo sapiens
  misc_RNA (1)...(19): siRNA sense strand
gagacugugacgaugacaa

SEQ ID NO: 2551135 - RNA, 19 nt, Homo sapiens
  misc_RNA (1)...(19): siRNA sense strand
ggaaaggagccguggacca

SEQ ID NO: 2551136 - RNA, 19 nt, Homo sapiens
  misc_RNA (1)...(19): siRNA sense strand
cccuagagaaccugggaau

SEQ ID NO: 2551137 - RNA, 19 nt, Homo sapiens
  misc_RNA (1)...(19): siRNA sense strand
ggagaaacccagcagcaga

SEQ ID NO: 2551138 - RNA, 19 nt, Homo sapiens
  misc_RNA (1)...(19): siRNA sense strand
agauugaugacaagggcau

SEQ ID NO: 2551139 - RNA, 19 nt, Homo sapiens
  misc_RNA (1)...(19): siRNA sense strand
uuucagagguggagagagc

SEQ ID NO: 2551140 - RNA, 19 nt, Homo sapiens
  misc_RNA (1)...(19): siRNA sense strand
gaggagaucaucauggaca

SEQ ID NO: 2551141 - RNA, 19 nt, Homo sapiens
  misc_RNA (1)...(19): siRNA sense strand
gaggagaaacccagcagca

SEQ ID NO: 2551142 - RNA, 19 nt, Homo sapiens
  misc_RNA (1)...(19): siRNA sense strand
augacugggugaagacaca

SEQ ID NO: 2551143 - RNA, 19 nt, Homo sapiens
  misc_RNA (1)...(19): siRNA sense strand
gcacaaccccacaggaaca

SEQ ID NO: 2551144 - RNA, 19 nt, Homo sapiens
  misc_RNA (1)...(19): siRNA sense strand
ugaagaucgaggugaacga

SEQ ID NO: 2551145 - RNA, 19 nt, Homo sapiens
  misc_RNA (1)...(19): siRNA sense strand
ccuuuaaagaaguggccaa

SEQ ID NO: 2551146 - RNA, 19 nt, Homo sapiens
  misc_RNA (1)...(19): siRNA sense strand
cggagaauggagagagcuu

SEQ ID NO: 2551147 - RNA, 19 nt, Homo sapiens
  misc_RNA (1)...(19): siRNA sense strand
gagaaugagcagaaggcca

SEQ ID NO: 2551148 - RNA, 19 nt, Homo sapiens
  misc_RNA (1)...(19): siRNA sense strand
cggcggaagaggaaggagu

SEQ ID NO: 2551149 - RNA, 19 nt, Homo sapiens
  misc_RNA (1)...(19): siRNA sense strand
acaaggcagcaguggaaau

SEQ ID NO: 2551150 - RNA, 19 nt, Homo sapiens
  misc_RNA (1)...(19): siRNA sense strand
uggccaacgccgugaagau

SEQ ID NO: 2551151 - RNA, 19 nt, Homo sapiens
  misc_RNA (1)...(19): siRNA sense strand
cgacaauccuguauggcuc

SEQ ID NO: 2551152 - RNA, 19 nt, Homo sapiens
  misc_RNA (1)...(19): siRNA sense strand
gcgacauggagcuggacga

SEQ ID NO: 2551153 - RNA, 19 nt, Homo sapiens
  misc_RNA (1)...(19): siRNA sense strand
cagccaacguggagaucac

SEQ ID NO: 2551154 - RNA, 19 nt, Homo sapiens
  misc_RNA (1)...(19): siRNA sense strand
cuuccaagauguagagcau

SEQ ID NO: 2551155 - RNA, 19 nt, Homo sapiens
  misc_RNA (1)...(19): siRNA sense strand
gcaagaagucauuggcuca

SEQ ID NO: 2551156 - RNA, 19 nt, Homo sapiens
  misc_RNA (1)...(19): siRNA sense strand
acaaauauggcuugcggaa

SEQ ID NO: 2551157 - RNA, 19 nt, Homo sapiens
  misc_RNA (1)...(19): siRNA sense strand
gguugaagucuguacaaau

SEQ ID NO: 2551158 - RNA, 19 nt, Homo sapiens
  misc_RNA (1)...(19): siRNA sense strand
cgacacuggcuguggacau

SEQ ID NO: 2551159 - RNA, 19 nt, Homo sapiens
  misc_RNA (1)...(19): siRNA sense strand
uguacuuuguagugguuua

SEQ ID NO: 2551160 - RNA, 19 nt, Homo sapiens
  misc_RNA (1)...(19): siRNA sense strand
aguuugucauggagggauu

SEQ ID NO: 2551161 - RNA, 19 nt, Homo sapiens
  misc_RNA (1)...(19): siRNA sense strand
cuagacagguaaaccggaa

SEQ ID NO: 2551162 - RNA, 19 nt, Homo sapiens
  misc_RNA (1)...(19): siRNA sense strand
ggaaguucgagaagccaau

SEQ ID NO: 2551163 - RNA, 19 nt, Homo sapiens
  misc_RNA (1)...(19): siRNA sense strand
gccagguacucaagggcau

SEQ ID NO: 2551164 - RNA, 19 nt, Homo sapiens
  misc_RNA (1)...(19): siRNA sense strand
agggauuccugaaccuaaa

SEQ ID NO: 2551165 - RNA, 19 nt, Homo sapiens
  misc_RNA (1)...(19): siRNA sense strand
caguguuucuggagaucau

SEQ ID NO: 2551166 - RNA, 19 nt, Homo sapiens
  misc_RNA (1)...(19): siRNA sense strand
gacugugggcauacgguaa

SEQ ID NO: 2551167 - RNA, 19 nt, Homo sapiens
  misc_RNA (1)...(19): siRNA sense strand
ggaccuagggcauguggca

SEQ ID NO: 2551168 - RNA, 19 nt, Homo sapiens
  misc_RNA (1)...(19): siRNA sense strand
gccaguaaugagugacuuu

SEQ ID NO: 2551169 - RNA, 19 nt, Homo sapiens
  misc_RNA (1)...(19): siRNA sense strand
agaaauggagaguggaaau

SEQ ID NO: 2551170 - RNA, 19 nt, Homo sapiens
  misc_RNA (1)...(19): siRNA sense strand
gauuaagacaguuuggcaa

SEQ ID NO: 2551171 - RNA, 19 nt, Homo sapiens
  misc_RNA (1)...(19): siRNA sense strand
acagaaauggagaguggaa

SEQ ID NO: 2551172 - RNA, 19 nt, Homo sapiens
  misc_RNA (1)...(19): siRNA sense strand
uggaaauugguuuggacaa

SEQ ID NO: 2551173 - RNA, 19 nt, Homo sapiens
  misc_RNA (1)...(19): siRNA sense strand
ugaagguacuuguuggcua

SEQ ID NO: 2551174 - RNA, 19 nt, Homo sapiens
  misc_RNA (1)...(19): siRNA sense strand
ggucaaaagaagauuaaga

SEQ ID NO: 2551175 - RNA, 19 nt, Homo sapiens
  misc_RNA (1)...(19): siRNA sense strand
cauaguauucauaguggaa

SEQ ID NO: 2551176 - RNA, 19 nt, Homo sapiens
  misc_RNA (1)...(19): siRNA sense strand
cagaaauggagaguggaaa

SEQ ID NO: 2551177 - RNA, 19 nt, Homo sapiens
  misc_RNA (1)...(19): siRNA sense strand
gaauuaacacuaaacggua

SEQ ID NO: 2551178 - RNA, 19 nt, Homo sapiens
  misc_RNA (1)...(19): siRNA sense strand
aaggaagaaacaagucaua

SEQ ID NO: 2551179 - RNA, 19 nt, Homo sapiens
  misc_RNA (1)...(19): siRNA sense strand
caguuguaaagcugauaaa

SEQ ID NO: 2551180 - RNA, 19 nt, Homo sapiens
  misc_RNA (1)...(19): siRNA sense strand
cgaaaauguuggaccacuu

SEQ ID NO: 2551181 - RNA, 19 nt, Homo sapiens
  misc_RNA (1)...(19): siRNA sense strand
cagcaaaggccaaccaaac

SEQ ID NO: 2551182 - RNA, 19 nt, Homo sapiens
  misc_RNA (1)...(19): siRNA sense strand
aggaauuucugaaugacuu

SEQ ID NO: 2551183 - RNA, 19 nt, Homo sapiens
  misc_RNA (1)...(19): siRNA sense strand
cugcgaucgcuuuggauau

SEQ ID NO: 2551184 - RNA, 19 nt, Homo sapiens
  misc_RNA (1)...(19): siRNA sense strand
guggaaauauauagagguc

SEQ ID NO: 2551185 - RNA, 19 nt, Homo sapiens
  misc_RNA (1)...(19): siRNA sense strand
aaugagcaguagugugauu

SEQ ID NO: 2551186 - RNA, 19 nt, Homo sapiens
  misc_RNA (1)...(19): siRNA sense strand
agugagaagccacagaaau

SEQ ID NO: 2551187 - RNA, 19 nt, Homo sapiens
  misc_RNA (1)...(19): siRNA sense strand
ucuacagagaacugaaauu

SEQ ID NO: 2551188 - RNA, 19 nt, Homo sapiens
  misc_RNA (1)...(19): siRNA sense strand
gcugaugguuugaggacug

SEQ ID NO: 2551189 - RNA, 19 nt, Homo sapiens
  misc_RNA (1)...(19): siRNA sense strand
agauauacaagaacagguu

SEQ ID NO: 2551190 - RNA, 19 nt, Homo sapiens
  misc_RNA (1)...(19): siRNA sense strand
agucagaccaacugcugua

SEQ ID NO: 2551191 - RNA, 19 nt, Homo sapiens
  misc_RNA (1)...(19): siRNA sense strand
cgucaagcgucuuuucaaa

SEQ ID NO: 2551192 - RNA, 19 nt, Homo sapiens
  misc_RNA (1)...(19): siRNA sense strand
guugaucagcaaaggccaa

SEQ ID NO: 2551193 - RNA, 19 nt, Homo sapiens
  misc_RNA (1)...(19): siRNA sense strand
aagugagaagccacagaaa

SEQ ID NO: 2551194 - RNA, 19 nt, Homo sapiens
  misc_RNA (1)...(19): siRNA sense strand
uagccuggaagaaaggaua

SEQ ID NO: 2551195 - RNA, 19 nt, Homo sapiens
  misc_RNA (1)...(19): siRNA sense strand
ggguaagaugugacaguuc

SEQ ID NO: 2551196 - RNA, 19 nt, Homo sapiens
  misc_RNA (1)...(19): siRNA sense strand
acuaaacgguagccuggaa

SEQ ID NO: 2551197 - RNA, 19 nt, Homo sapiens
  misc_RNA (1)...(19): siRNA sense strand
acggagaucaagagggaua

SEQ ID NO: 2551198 - RNA, 19 nt, Homo sapiens
  misc_RNA (1)...(19): siRNA sense strand
caacggagaucaagaggga

SEQ ID NO: 2551199 - RNA, 19 nt, Homo sapiens
  misc_RNA (1)...(19): siRNA sense strand
cuggaaaggaauaaaucua

SEQ ID NO: 2551200 - RNA, 19 nt, Homo sapiens
  misc_RNA (1)...(19): siRNA sense strand
ugggauucuuguuggacua

SEQ ID NO: 2551201 - RNA, 19 nt, Homo sapiens
  misc_RNA (1)...(19): siRNA sense strand
gugaagaagaacagcucga

SEQ ID NO: 2551202 - RNA, 19 nt, Homo sapiens
  misc_RNA (1)...(19): siRNA sense strand
cuagaaagaagacugggaa

SEQ ID NO: 2551203 - RNA, 19 nt, Homo sapiens
  misc_RNA (1)...(19): siRNA sense strand
agaaagaagacugggaagu

SEQ ID NO: 2551204 - RNA, 19 nt, Homo sapiens
  misc_RNA (1)...(19): siRNA sense strand
augaagaagcacccaggaa

SEQ ID NO: 2551205 - RNA, 19 nt, Homo sapiens
  misc_RNA (1)...(19): siRNA sense strand
aagaagacugggaaguaga

SEQ ID NO: 2551206 - RNA, 19 nt, Homo sapiens
  misc_RNA (1)...(19): siRNA sense strand
ggaaguagaugguuugccu

SEQ ID NO: 2551207 - RNA, 19 nt, Homo sapiens
  misc_RNA (1)...(19): siRNA sense strand
gaagaagaacagcucgaga

SEQ ID NO: 2551208 - RNA, 19 nt, Homo sapiens
  misc_RNA (1)...(19): siRNA sense strand
acucaagggccucugaaga

SEQ ID NO: 2551209 - RNA, 19 nt, Homo sapiens
  misc_RNA (1)...(19): siRNA sense strand
uggaaagaggagagugaca

SEQ ID NO: 2551210 - RNA, 19 nt, Homo sapiens
  misc_RNA (1)...(19): siRNA sense strand
ccaucaaggaagacaugaa

SEQ ID NO: 2551211 - RNA, 19 nt, Homo sapiens
  misc_RNA (1)...(19): siRNA sense strand
guuucaaggucgaagagca

SEQ ID NO: 2551212 - RNA, 19 nt, Homo sapiens
  misc_RNA (1)...(19): siRNA sense strand
uuaaagaugaccagagcau

SEQ ID NO: 2551213 - RNA, 19 nt, Homo sapiens
  misc_RNA (1)...(19): siRNA sense strand
auuggaaagaggagaguga

SEQ ID NO: 2551214 - RNA, 19 nt, Homo sapiens
  misc_RNA (1)...(19): siRNA sense strand
aaaauaaugcagagccaaa

SEQ ID NO: 2551215 - RNA, 19 nt, Homo sapiens
  misc_RNA (1)...(19): siRNA sense strand
cuaaaacagggaagcgaaa

SEQ ID NO: 2551216 - RNA, 19 nt, Homo sapiens
  misc_RNA (1)...(19): siRNA sense strand
acuugaauguccaacgcaa

SEQ ID NO: 2551217 - RNA, 19 nt, Homo sapiens
  misc_RNA (1)...(19): siRNA sense strand
cuugaauguccaacgcaaa

SEQ ID NO: 2551218 - RNA, 19 nt, Homo sapiens
  misc_RNA (1)...(19): siRNA sense strand
uuucaaggucgaagagcau

SEQ ID NO: 2551219 - RNA, 19 nt, Homo sapiens
  misc_RNA (1)...(19): siRNA sense strand
gcuaaaacagggaagcgaa

SEQ ID NO: 2551220 - RNA, 19 nt, Homo sapiens
  misc_RNA (1)...(19): siRNA sense strand
ggaaugaacuauuggcaag

SEQ ID NO: 2551221 - RNA, 19 nt, Homo sapiens
  misc_RNA (1)...(19): siRNA sense strand
ggaucugcauggcguauua

SEQ ID NO: 2551222 - RNA, 19 nt, Homo sapiens
  misc_RNA (1)...(19): siRNA sense strand
aggaaugaacuauuggcaa

SEQ ID NO: 2551223 - RNA, 19 nt, Homo sapiens
  misc_RNA (1)...(19): siRNA sense strand
cgcggaaagcugaaggaga

SEQ ID NO: 2551224 - RNA, 19 nt, Homo sapiens
  misc_RNA (1)...(19): siRNA sense strand
cuucauaaacagauggaau

SEQ ID NO: 2551225 - RNA, 19 nt, Homo sapiens
  misc_RNA (1)...(19): siRNA sense strand
gcagaugagaagacagcau

SEQ ID NO: 2551226 - RNA, 19 nt, Homo sapiens
  misc_RNA (1)...(19): siRNA sense strand
ucauuaacaacgaggcgaa

SEQ ID NO: 2551227 - RNA, 19 nt, Homo sapiens
  misc_RNA (1)...(19): siRNA sense strand
agauggaaucccuggucua

SEQ ID NO: 2551228 - RNA, 19 nt, Homo sapiens
  misc_RNA (1)...(19): siRNA sense strand
auucgaauucagugggaca

SEQ ID NO: 2551229 - RNA, 19 nt, Homo sapiens
  misc_RNA (1)...(19): siRNA sense strand
ucucugugucaguuggaaa

SEQ ID NO: 2551230 - RNA, 19 nt, Homo sapiens
  misc_RNA (1)...(19): siRNA sense strand
uggaaagcuucaaggcucu

SEQ ID NO: 2551231 - RNA, 19 nt, Homo sapiens
  misc_RNA (1)...(19): siRNA sense strand
uggaaaugcucauggaaaa

SEQ ID NO: 2551232 - RNA, 19 nt, Homo sapiens
  misc_RNA (1)...(19): siRNA sense strand
ggaucauuggagagggaaa

SEQ ID NO: 2551233 - RNA, 19 nt, Homo sapiens
  misc_RNA (1)...(19): siRNA sense strand
ccaagaauucagagaccaa

SEQ ID NO: 2551234 - RNA, 19 nt, Homo sapiens
  misc_RNA (1)...(19): siRNA sense strand
uagcaaagcuccugcccaa

SEQ ID NO: 2551235 - RNA, 19 nt, Homo sapiens
  misc_RNA (1)...(19): siRNA sense strand
guggagcagcaaagagaaa

SEQ ID NO: 2551236 - RNA, 19 nt, Homo sapiens
  misc_RNA (1)...(19): siRNA sense strand
accaacaagccaagggaaa

SEQ ID NO: 2551237 - RNA, 19 nt, Homo sapiens
  misc_RNA (1)...(19): siRNA sense strand
aggaagaguuggugcagca

SEQ ID NO: 2551238 - RNA, 19 nt, Homo sapiens
  misc_RNA (1)...(19): siRNA sense strand
ggaaauugagggcaggcua

SEQ ID NO: 2551239 - RNA, 19 nt, Homo sapiens
  misc_RNA (1)...(19): siRNA sense strand
ugauguucauggagaggaa

SEQ ID NO: 2551240 - RNA, 19 nt, Homo sapiens
  misc_RNA (1)...(19): siRNA sense strand
agacaauggagguuuacaa

SEQ ID NO: 2551241 - RNA, 19 nt, Homo sapiens
  misc_RNA (1)...(19): siRNA sense strand
auaccaaagaacagagaca

SEQ ID NO: 2551242 - RNA, 19 nt, Homo sapiens
  misc_RNA (1)...(19): siRNA sense strand
aggcagacgaagucaaauu

SEQ ID NO: 2551243 - RNA, 19 nt, Homo sapiens
  misc_RNA (1)...(19): siRNA sense strand
agcaaagcaucaagaaaga

SEQ ID NO: 2551244 - RNA, 19 nt, Homo sapiens
  misc_RNA (1)...(19): siRNA sense strand
aagcacacuuuguaagcaa

SEQ ID NO: 2551245 - RNA, 19 nt, Homo sapiens
  misc_RNA (1)...(19): siRNA sense strand
auuaagaagccuuggcaca

SEQ ID NO: 2551246 - RNA, 19 nt, Homo sapiens
  misc_RNA (1)...(19): siRNA sense strand
ccuaaggccgacugugaua

SEQ ID NO: 2551247 - RNA, 19 nt, Homo sapiens
  misc_RNA (1)...(19): siRNA sense strand
uguagagaugguaaagaaa

SEQ ID NO: 2551248 - RNA, 19 nt, Homo sapiens
  misc_RNA (1)...(19): siRNA sense strand
gagaggaaauugagggcag

SEQ ID NO: 2551249 - RNA, 19 nt, Homo sapiens
  misc_RNA (1)...(19): siRNA sense strand
uagaaauagcaaagcauca

SEQ ID NO: 2551250 - RNA, 19 nt, Homo sapiens
  misc_RNA (1)...(19): siRNA sense strand
agagaugcugggacggaaa

SEQ ID NO: 2551251 - RNA, 19 nt, Homo sapiens
  misc_RNA (1)...(19): siRNA sense strand
aacaauacagaguaggaaa

SEQ ID NO: 2551252 - RNA, 19 nt, Homo sapiens
  misc_RNA (1)...(19): siRNA sense strand
auacagaguaggaaagguu

SEQ ID NO: 2551253 - RNA, 19 nt, Homo sapiens
  misc_RNA (1)...(19): siRNA sense strand
cuucgagaccacaugaaua

SEQ ID NO: 2551254 - RNA, 19 nt, Homo sapiens
  misc_RNA (1)...(19): siRNA sense strand
ccuagaaauagcaaagcau

SEQ ID NO: 2551255 - RNA, 19 nt, Homo sapiens
  misc_RNA (1)...(19): siRNA sense strand
ccaaagggaaacugccaau

SEQ ID NO: 2551256 - RNA, 19 nt, Homo sapiens
  misc_RNA (1)...(19): siRNA sense strand
accaaaagaugaaggugaa

SEQ ID NO: 2551257 - RNA, 19 nt, Homo sapiens
  misc_RNA (1)...(19): siRNA sense strand
agacgaagucaaauuacaa

SEQ ID NO: 2551258 - RNA, 19 nt, Homo sapiens
  misc_RNA (1)...(19): siRNA sense strand
auagcaaagcaucaagaaa

SEQ ID NO: 2551259 - RNA, 19 nt, Homo sapiens
  misc_RNA (1)...(19): siRNA sense strand
cagaugaaauuuuggcauu

SEQ ID NO: 2551260 - RNA, 19 nt, Homo sapiens
  misc_RNA (1)...(19): siRNA sense strand
caguggagcagcaaagaga

SEQ ID NO: 2551261 - RNA, 19 nt, Homo sapiens
  misc_RNA (1)...(19): siRNA sense strand
ugaaagaagugcauagggu

SEQ ID NO: 2551262 - RNA, 19 nt, Homo sapiens
  misc_RNA (1)...(19): siRNA sense strand
ccuuccaaacugugggcua

SEQ ID NO: 2551263 - RNA, 19 nt, Homo sapiens
  misc_RNA (1)...(19): siRNA sense strand
acacuuuguaagcaagaua

SEQ ID NO: 2551264 - RNA, 19 nt, Homo sapiens
  misc_RNA (1)...(19): siRNA sense strand
aagaugaaggugaaucaaa

SEQ ID NO: 2551265 - RNA, 19 nt, Homo sapiens
  misc_RNA (1)...(19): siRNA sense strand
acggaagguaccagaugaa

SEQ ID NO: 2551266 - RNA, 19 nt, Homo sapiens
  misc_RNA (1)...(19): siRNA sense strand
gaaagaagugcauaggguu

SEQ ID NO: 2551267 - RNA, 19 nt, Homo sapiens
  misc_RNA (1)...(19): siRNA sense strand
gaucuuaaccacaaaacaa

SEQ ID NO: 2551268 - RNA, 19 nt, Homo sapiens
  misc_RNA (1)...(19): siRNA sense strand
ccacaagugucacagcaga

SEQ ID NO: 2551269 - RNA, 19 nt, Homo sapiens
  misc_RNA (1)...(19): siRNA sense strand
agggaucauuggagaggga

SEQ ID NO: 2551270 - RNA, 19 nt, Homo sapiens
  misc_RNA (1)...(19): siRNA sense strand
aguaccaucacuagagcaa

SEQ ID NO: 2551271 - RNA, 19 nt, Homo sapiens
  misc_RNA (1)...(19): siRNA sense strand
gcaaagagaaaaggaagaa

SEQ ID NO: 2551272 - RNA, 19 nt, Homo sapiens
  misc_RNA (1)...(19): siRNA sense strand
gcaucaagaaagaaaccca

SEQ ID NO: 2551273 - RNA, 19 nt, Homo sapiens
  misc_RNA (1)...(19): siRNA sense strand
gcagcaaagagaaaaggaa

SEQ ID NO: 2551274 - RNA, 19 nt, Homo sapiens
  misc_RNA (1)...(19): siRNA sense strand
gaucauuggagagggaaaa

SEQ ID NO: 2551275 - RNA, 19 nt, Homo sapiens
  misc_RNA (1)...(19): siRNA sense strand
gagagagggaagccggaga

SEQ ID NO: 2551276 - RNA, 19 nt, Homo sapiens
  misc_RNA (1)...(19): siRNA sense strand
agaaauagcaaagcaucaa

SEQ ID NO: 2551277 - RNA, 19 nt, Homo sapiens
  misc_RNA (1)...(19): siRNA sense strand
agaaagaaacccauccuga

SEQ ID NO: 2551278 - RNA, 19 nt, Homo sapiens
  misc_RNA (1)...(19): siRNA sense strand
gaaugaagacaauggaggu

SEQ ID NO: 2551279 - RNA, 19 nt, Homo sapiens
  misc_RNA (1)...(19): siRNA sense strand
acugcagccaggagacaua

SEQ ID NO: 2551280 - RNA, 19 nt, Homo sapiens
  misc_RNA (1)...(19): siRNA sense strand
ucaucagaauggcguggaa

SEQ ID NO: 2551281 - RNA, 19 nt, Homo sapiens
  misc_RNA (1)...(19): siRNA sense strand
acccugaacuccuguacaa

SEQ ID NO: 2551282 - RNA, 19 nt, Homo sapiens
  misc_RNA (1)...(19): siRNA sense strand
augcuaacauugcagguuu

SEQ ID NO: 2551283 - RNA, 19 nt, Homo sapiens
  misc_RNA (1)...(19): siRNA sense strand
ggaagaaaacggaagguac

SEQ ID NO: 2551284 - RNA, 19 nt, Homo sapiens
  misc_RNA (1)...(19): siRNA sense strand
agaauugacuauagggcua

SEQ ID NO: 2551285 - RNA, 19 nt, Homo sapiens
  misc_RNA (1)...(19): siRNA sense strand
guuuauuucaagagggcua

SEQ ID NO: 2551286 - RNA, 19 nt, Homo sapiens
  misc_RNA (1)...(19): siRNA sense strand
guuuacaggaagugaagaa

SEQ ID NO: 2551287 - RNA, 19 nt, Homo sapiens
  misc_RNA (1)...(19): siRNA sense strand
ggcuaauacaguugaagaa

SEQ ID NO: 2551288 - RNA, 19 nt, Homo sapiens
  misc_RNA (1)...(19): siRNA sense strand
aguugaagaagaugaagaa

SEQ ID NO: 2551289 - RNA, 19 nt, Homo sapiens
  misc_RNA (1)...(19): siRNA sense strand
guucugaaguagucaauga

SEQ ID NO: 2551290 - RNA, 19 nt, Homo sapiens
  misc_RNA (1)...(19): siRNA sense strand
gugaggagguuauggccau

SEQ ID NO: 2551291 - RNA, 19 nt, Homo sapiens
  misc_RNA (1)...(19): siRNA sense strand
caguugaagaagaugaaga

SEQ ID NO: 2551292 - RNA, 19 nt, Homo sapiens
  misc_RNA (1)...(19): siRNA sense strand
aagaugaagaagaaaccaa

SEQ ID NO: 2551293 - RNA, 19 nt, Homo sapiens
  misc_RNA (1)...(19): siRNA sense strand
gguuauggccauugcacca

SEQ ID NO: 2551294 - RNA, 19 nt, Homo sapiens
  misc_RNA (1)...(19): siRNA sense strand
aaaucuauggagugguuua

SEQ ID NO: 2551295 - RNA, 19 nt, Homo sapiens
  misc_RNA (1)...(19): siRNA sense strand
auggagugguuuacaggaa

SEQ ID NO: 2551296 - RNA, 19 nt, Homo sapiens
  misc_RNA (1)...(19): siRNA sense strand
agugagcauaccaggauaa

SEQ ID NO: 2551297 - RNA, 19 nt, Homo sapiens
  misc_RNA (1)...(19): siRNA sense strand
uacaggaagugaagaauga

SEQ ID NO: 2551298 - RNA, 19 nt, Homo sapiens
  misc_RNA (1)...(19): siRNA sense strand
caauggacauaauagguga

SEQ ID NO: 2551299 - RNA, 19 nt, Homo sapiens
  misc_RNA (1)...(19): siRNA sense strand
acaaaucuauggagugguu

SEQ ID NO: 2551300 - RNA, 19 nt, Homo sapiens
  misc_RNA (1)...(19): siRNA sense strand
acccauuauaucuggcaaa

SEQ ID NO: 2551301 - RNA, 19 nt, Homo sapiens
  misc_RNA (1)...(19): siRNA sense strand
aagaagaugaagaagaaac

SEQ ID NO: 2551302 - RNA, 19 nt, Homo sapiens
  misc_RNA (1)...(19): siRNA sense strand
ccuuauaauugaugccaaa

SEQ ID NO: 2551303 - RNA, 19 nt, Homo sapiens
  misc_RNA (1)...(19): siRNA sense strand
acaugaagaguuugggaaa

SEQ ID NO: 2551304 - RNA, 19 nt, Homo sapiens
  misc_RNA (1)...(19): siRNA sense strand
ucuaaauguuggaagguuu

SEQ ID NO: 2551305 - RNA, 19 nt, Homo sapiens
  misc_RNA (1)...(19): siRNA sense strand
cgaaaugguaagaaugaau

SEQ ID NO: 2551306 - RNA, 19 nt, Homo sapiens
  misc_RNA (1)...(19): siRNA sense strand
caucauucauggauagcaa

SEQ ID NO: 2551307 - RNA, 19 nt, Homo sapiens
  misc_RNA (1)...(19): siRNA sense strand
augcaauagcggaaugaua

SEQ ID NO: 2551308 - RNA, 19 nt, Homo sapiens
  misc_RNA (1)...(19): siRNA sense strand
agacacugacacugagaaa

SEQ ID NO: 2551309 - RNA, 19 nt, Homo sapiens
  misc_RNA (1)...(19): siRNA sense strand
gcaauagcggaaugauaaa

SEQ ID NO: 2551310 - RNA, 19 nt, Homo sapiens
  misc_RNA (1)...(19): siRNA sense strand
agacaugagacaggagaaa

SEQ ID NO: 2551311 - RNA, 19 nt, Homo sapiens
  misc_RNA (1)...(19): siRNA sense strand
gcacaaaaguauagaacag

SEQ ID NO: 2551312 - RNA, 19 nt, Homo sapiens
  misc_RNA (1)...(19): siRNA sense strand
acaugagacaggagaaaga

SEQ ID NO: 2551313 - RNA, 19 nt, Homo sapiens
  misc_RNA (1)...(19): siRNA sense strand
ccaagagcacaguggagaa

SEQ ID NO: 2551314 - RNA, 19 nt, Homo sapiens
  misc_RNA (1)...(19): siRNA sense strand
gacugaaguuaguagaaau

SEQ ID NO: 2551315 - RNA, 19 nt, Homo sapiens
  misc_RNA (1)...(19): siRNA sense strand
gcuacaugaaugaaaggaa

SEQ ID NO: 2551316 - RNA, 19 nt, Homo sapiens
  misc_RNA (1)...(19): siRNA sense strand
gagucuucauguaagguua

SEQ ID NO: 2551317 - RNA, 19 nt, Homo sapiens
  misc_RNA (1)...(19): siRNA sense strand
gauuuaugcaauagcggaa

SEQ ID NO: 2551318 - RNA, 19 nt, Homo sapiens
  misc_RNA (1)...(19): siRNA sense strand
ggucauucagcuucgguaa

SEQ ID NO: 2551319 - RNA, 19 nt, Homo sapiens
  misc_RNA (1)...(19): siRNA sense strand
agagcacaguggagaagaa

SEQ ID NO: 2551320 - RNA, 19 nt, Homo sapiens
  misc_RNA (1)...(19): siRNA sense strand
cagcagaggcacuagccaa

SEQ ID NO: 2551321 - RNA, 19 nt, Homo sapiens
  misc_RNA (1)...(19): siRNA sense strand
cauaauaagaugagaggug

SEQ ID NO: 2551322 - RNA, 19 nt, Homo sapiens
  misc_RNA (1)...(19): siRNA sense strand
augaagaguuugggaaaga

SEQ ID NO: 2551323 - RNA, 19 nt, Homo sapiens
  misc_RNA (1)...(19): siRNA sense strand
gagaaugguaacugugaga

SEQ ID NO: 2551324 - RNA, 19 nt, Homo sapiens
  misc_RNA (1)...(19): siRNA sense strand
ccaugagaauucaagaaga

SEQ ID NO: 2551325 - RNA, 19 nt, Homo sapiens
  misc_RNA (1)...(19): siRNA sense strand
aggagaaagagcacgaauu

SEQ ID NO: 2551326 - RNA, 19 nt, Homo sapiens
  misc_RNA (1)...(19): siRNA sense strand
gguccuauuucuuugggaa

SEQ ID NO: 2551327 - RNA, 19 nt, Homo sapiens
  misc_RNA (1)...(19): siRNA sense strand
gcuaauuuccuguuggaga

SEQ ID NO: 2551328 - RNA, 19 nt, Homo sapiens
  misc_RNA (1)...(19): siRNA sense strand
gaacuaaagauuucagcga

SEQ ID NO: 2551329 - RNA, 19 nt, Homo sapiens
  misc_RNA (1)...(19): siRNA sense strand
aggaaaagcaagaugucua

SEQ ID NO: 2551330 - RNA, 19 nt, Homo sapiens
  misc_RNA (1)...(19): siRNA sense strand
caugauacuaugucacaaa

SEQ ID NO: 2551331 - RNA, 19 nt, Homo sapiens
  misc_RNA (1)...(19): siRNA sense strand
aguuacaguguguuagaaa

SEQ ID NO: 2551332 - RNA, 19 nt, Homo sapiens
  misc_RNA (1)...(19): siRNA sense strand
cacaauagacacagcaaaa

SEQ ID NO: 2551333 - RNA, 19 nt, Homo sapiens
  misc_RNA (1)...(19): siRNA sense strand
ugcaauagcggaaugauaa

SEQ ID NO: 2551334 - RNA, 19 nt, Homo sapiens
  misc_RNA (1)...(19): siRNA sense strand
ggaaauugaaacaggcacu

SEQ ID NO: 2551335 - RNA, 19 nt, Homo sapiens
  misc_RNA (1)...(19): siRNA sense strand
gcauuaaaaggcagaagaa

SEQ ID NO: 2551336 - RNA, 19 nt, Homo sapiens
  misc_RNA (1)...(19): siRNA sense strand
uggacuugucagauaaaua

SEQ ID NO: 2551337 - RNA, 19 nt, Homo sapiens
  misc_RNA (1)...(19): siRNA sense strand
acuaauauguggcugugaa

SEQ ID NO: 2551338 - RNA, 19 nt, Homo sapiens
  misc_RNA (1)...(19): siRNA sense strand
ugugaagaugggacaauua

SEQ ID NO: 2551339 - RNA, 19 nt, Homo sapiens
  misc_RNA (1)...(19): siRNA sense strand
agacuauucaggaguaaau

SEQ ID NO: 2551340 - RNA, 19 nt, Homo sapiens
  misc_RNA (1)...(19): siRNA sense strand
gcggaaugauaaaagacua

SEQ ID NO: 2551341 - RNA, 19 nt, Homo sapiens
  misc_RNA (1)...(19): siRNA sense strand
gcuggaauggacagaagaa

SEQ ID NO: 2551342 - RNA, 19 nt, Homo sapiens
  misc_RNA (1)...(19): siRNA sense strand
cuggaagucaagaggguca

SEQ ID NO: 2551343 - RNA, 19 nt, Homo sapiens
  misc_RNA (1)...(19): siRNA sense strand
ucacaauagacacagcaaa

SEQ ID NO: 2551344 - RNA, 19 nt, Homo sapiens
  misc_RNA (1)...(19): siRNA sense strand
cuagaguuacaguguguua

SEQ ID NO: 2551345 - RNA, 19 nt, Homo sapiens
  misc_RNA (1)...(19): siRNA sense strand
cggcaaacuuccaagacgu

SEQ ID NO: 2551346 - RNA, 19 nt, Homo sapiens
  misc_RNA (1)...(19): siRNA sense strand
gcucaaaguaugggaucuu

SEQ ID NO: 2551347 - RNA, 19 nt, Homo sapiens
  misc_RNA (1)...(19): siRNA sense strand
ucaacagcauucaggaaaa

SEQ ID NO: 2551348 - RNA, 19 nt, Homo sapiens
  misc_RNA (1)...(19): siRNA sense strand
agcaagaugucuaugaaaa

SEQ ID NO: 2551349 - RNA, 19 nt, Homo sapiens
  misc_RNA (1)...(19): siRNA sense strand
uccuucaccuugagggaaa

SEQ ID NO: 2551350 - RNA, 19 nt, Homo sapiens
  misc_RNA (1)...(19): siRNA sense strand
cagccuaagccaucaagaa

SEQ ID NO: 2551351 - RNA, 19 nt, Homo sapiens
  misc_RNA (1)...(19): siRNA sense strand
agccuaagccaucaagaaa

SEQ ID NO: 2551352 - RNA, 19 nt, Homo sapiens
  misc_RNA (1)...(19): siRNA sense strand
cuacaguugcuuacgaaau

SEQ ID NO: 2551353 - RNA, 19 nt, Homo sapiens
  misc_RNA (1)...(19): siRNA sense strand
gggaaagauacccgucaau

SEQ ID NO: 2551354 - RNA, 19 nt, Homo sapiens
  misc_RNA (1)...(19): siRNA sense strand
ucuuuguuguggagaauau

SEQ ID NO: 2551355 - RNA, 19 nt, Homo sapiens
  misc_RNA (1)...(19): siRNA sense strand
ucaguuuauaucugggaaa

SEQ ID NO: 2551356 - RNA, 19 nt, Homo sapiens
  misc_RNA (1)...(19): siRNA sense strand
ggaaaaccuuguugaacuu

SEQ ID NO: 2551357 - RNA, 19 nt, Homo sapiens
  misc_RNA (1)...(19): siRNA sense strand
aagcaagaugucuaugaaa

SEQ ID NO: 2551358 - RNA, 19 nt, Homo sapiens
  misc_RNA (1)...(19): siRNA sense strand
ccuagagagauaccaguaa

SEQ ID NO: 2551359 - RNA, 19 nt, Homo sapiens
  misc_RNA (1)...(19): siRNA sense strand
guuaacaugccuuuagaau

SEQ ID NO: 2551360 - RNA, 19 nt, Homo sapiens
  misc_RNA (1)...(19): siRNA sense strand
acagaugugccuuggaaga

SEQ ID NO: 2551361 - RNA, 19 nt, Homo sapiens
  misc_RNA (1)...(19): siRNA sense strand
uguuagugcugcugaaaau

SEQ ID NO: 2551362 - RNA, 19 nt, Homo sapiens
  misc_RNA (1)...(19): siRNA sense strand
guggagaagaagacacuga

SEQ ID NO: 2551363 - RNA, 19 nt, Homo sapiens
  misc_RNA (1)...(19): siRNA sense strand
ucagauaaauacacagcca

SEQ ID NO: 2551364 - RNA, 19 nt, Homo sapiens
  misc_RNA (1)...(19): siRNA sense strand
gaaugaaaggaaagagccu

SEQ ID NO: 2551365 - RNA, 19 nt, Homo sapiens
  misc_RNA (1)...(19): siRNA sense strand
guuuuggacuugucagaua

SEQ ID NO: 2551366 - RNA, 19 nt, Homo sapiens
  misc_RNA (1)...(19): siRNA sense strand
cgaaauuagaccaaaguug

SEQ ID NO: 2551367 - RNA, 19 nt, Homo sapiens
  misc_RNA (1)...(19): siRNA sense strand
gugaagacaaaauggagua

SEQ ID NO: 2551368 - RNA, 19 nt, Homo sapiens
  misc_RNA (1)...(19): siRNA sense strand
caaggggauuggaaaauaa

SEQ ID NO: 2551369 - RNA, 19 nt, Homo sapiens
  misc_RNA (1)...(19): siRNA sense strand
gaagauggucacaguuaca

SEQ ID NO: 2551370 - RNA, 19 nt, Homo sapiens
  misc_RNA (1)...(19): siRNA sense strand
cggaaugauaaaagacuau

SEQ ID NO: 2551371 - RNA, 19 nt, Homo sapiens
  misc_RNA (1)...(19): siRNA sense strand
uggcggaaguucaacaaca

SEQ ID NO: 2551372 - RNA, 19 nt, Homo sapiens
  misc_RNA (1)...(19): siRNA sense strand
gugagagggucgagcggaa

SEQ ID NO: 2551373 - RNA, 19 nt, Homo sapiens
  misc_RNA (1)...(19): siRNA sense strand
caguggacacaaagucaaa

SEQ ID NO: 2551374 - RNA, 19 nt, Homo sapiens
  misc_RNA (1)...(19): siRNA sense strand
gcgaggugauugcggcuca

SEQ ID NO: 2551375 - RNA, 19 nt, Homo sapiens
  misc_RNA (1)...(19): siRNA sense strand
cugcagagauggugguguc

SEQ ID NO: 2551376 - RNA, 19 nt, Homo sapiens
  misc_RNA (1)...(19): siRNA sense strand
gcaacaaacugcagcccaa

SEQ ID NO: 2551377 - RNA, 19 nt, Homo sapiens
  misc_RNA (1)...(19): siRNA sense strand
gaagaaacgcuuaacccaa

SEQ ID NO: 2551378 - RNA, 19 nt, Homo sapiens
  misc_RNA (1)...(19): siRNA sense strand
aggcauguugagugagcaa

SEQ ID NO: 2551379 - RNA, 19 nt, Homo sapiens
  misc_RNA (1)...(19): siRNA sense strand
ggaaugaugcgguugccua

SEQ ID NO: 2551380 - RNA, 19 nt, Homo sapiens
  misc_RNA (1)...(19): siRNA sense strand
gcuauuugacagaggcuga

SEQ ID NO: 2551381 - RNA, 19 nt, Homo sapiens
  misc_RNA (1)...(19): siRNA sense strand
gaagaaagguggauccuac

SEQ ID NO: 2551382 - RNA, 19 nt, Homo sapiens
  misc_RNA (1)...(19): siRNA sense strand
ugggaaagaccgagugaag

SEQ ID NO: 2551383 - RNA, 19 nt, Homo sapiens
  misc_RNA (1)...(19): siRNA sense strand
acggaagcugagugggaau

SEQ ID NO: 2551384 - RNA, 19 nt, Homo sapiens
  misc_RNA (1)...(19): siRNA sense strand
uauacaacauaguggggaa

SEQ ID NO: 2551385 - RNA, 19 nt, Homo sapiens
  misc_RNA (1)...(19): siRNA sense strand
augccuaugaagucaguaa

SEQ ID NO: 2551386 - RNA, 19 nt, Homo sapiens
  misc_RNA (1)...(19): siRNA sense strand
agcccaaaggccagcauua

SEQ ID NO: 2551387 - RNA, 19 nt, Homo sapiens
  misc_RNA (1)...(19): siRNA sense strand
ggauccuacaugugccaua

SEQ ID NO: 2551388 - RNA, 19 nt, Homo sapiens
  misc_RNA (1)...(19): siRNA sense strand
agauaaagcaggaugggga

SEQ ID NO: 2551389 - RNA, 19 nt, Homo sapiens
  misc_RNA (1)...(19): siRNA sense strand
gauaaagcaggauggggaa

SEQ ID NO: 2551390 - RNA, 19 nt, Homo sapiens
  misc_RNA (1)...(19): siRNA sense strand
cggaagcugagugggaaua

SEQ ID NO: 2551391 - RNA, 19 nt, Homo sapiens
  misc_RNA (1)...(19): siRNA sense strand
augagaaggaggaggaaga

SEQ ID NO: 2551392 - RNA, 19 nt, Homo sapiens
  misc_RNA (1)...(19): siRNA sense strand
guguguaaacaaagaggaa

SEQ ID NO: 2551393 - RNA, 19 nt, Homo sapiens
  misc_RNA (1)...(19): siRNA sense strand
gaaaugagaaggaggagga

SEQ ID NO: 2551394 - RNA, 19 nt, Homo sapiens
  misc_RNA (1)...(19): siRNA sense strand
agaggaaacauuuggaaaa

SEQ ID NO: 2551395 - RNA, 19 nt, Homo sapiens
  misc_RNA (1)...(19): siRNA sense strand
guguaaacaaagaggaaag

SEQ ID NO: 2551396 - RNA, 19 nt, Homo sapiens
  misc_RNA (1)...(19): siRNA sense strand
ggacagaaucagacagccu

SEQ ID NO: 2551397 - RNA, 19 nt, Homo sapiens
  misc_RNA (1)...(19): siRNA sense strand
gagaauacaucgagacagc

SEQ ID NO: 2551398 - RNA, 19 nt, Homo sapiens
  misc_RNA (1)...(19): siRNA sense strand
aagaugagcaggaggagga

SEQ ID NO: 2551399 - RNA, 19 nt, Homo sapiens
  misc_RNA (1)...(19): siRNA sense strand
aggaaaggggcaugaaaau

SEQ ID NO: 2551400 - RNA, 19 nt, Homo sapiens
  misc_RNA (1)...(19): siRNA sense strand
caugaggaaaggacagaau

SEQ ID NO: 2551401 - RNA, 19 nt, Homo sapiens
  misc_RNA (1)...(19): siRNA sense strand
ggaaaauggaaaugagaag

SEQ ID NO: 2551402 - RNA, 19 nt, Homo sapiens
  misc_RNA (1)...(19): siRNA sense strand
aggaggaggaaaauggaaa

SEQ ID NO: 2551403 - RNA, 19 nt, Homo sapiens
  misc_RNA (1)...(19): siRNA sense strand
augaagagucccaggaaac

SEQ ID NO: 2551404 - RNA, 19 nt, Homo sapiens
  misc_RNA (1)...(19): siRNA sense strand
aggaaaggacagaaucaga

SEQ ID NO: 2551405 - RNA, 19 nt, Homo sapiens
  misc_RNA (1)...(19): siRNA sense strand
gagaacggcuucaggugca

SEQ ID NO: 2551406 - RNA, 19 nt, Homo sapiens
  misc_RNA (1)...(19): siRNA sense strand
gcugagaagggaggaggaa

SEQ ID NO: 2551407 - RNA, 19 nt, Homo sapiens
  misc_RNA (1)...(19): siRNA sense strand
augagcaggaggaggaaaa

SEQ ID NO: 2551408 - RNA, 19 nt, Homo sapiens
  misc_RNA (1)...(19): siRNA sense strand
cagaagcaaaggaggagga

SEQ ID NO: 2551409 - RNA, 19 nt, Homo sapiens
  misc_RNA (1)...(19): siRNA sense strand
caaaggaggaggaggggca

SEQ ID NO: 2551410 - RNA, 19 nt, Homo sapiens
  misc_RNA (1)...(19): siRNA sense strand
ucaggaacgaggagagacu

SEQ ID NO: 2551411 - RNA, 19 nt, Homo sapiens
  misc_RNA (1)...(19): siRNA sense strand
agacagaaggagaaaggaa

SEQ ID NO: 2551412 - RNA, 19 nt, Homo sapiens
  misc_RNA (1)...(19): siRNA sense strand
aguaaagacagaaggagaa

SEQ ID NO: 2551413 - RNA, 19 nt, Homo sapiens
  misc_RNA (1)...(19): siRNA sense strand
ggaaaaggcuggagggaac

SEQ ID NO: 2551414 - RNA, 19 nt, Homo sapiens
  misc_RNA (1)...(19): siRNA sense strand
acaaagaaucagagaaagu

SEQ ID NO: 2551415 - RNA, 19 nt, Homo sapiens
  misc_RNA (1)...(19): siRNA sense strand
aaguaaagacagaaggaga

SEQ ID NO: 2551416 - RNA, 19 nt, Homo sapiens
  misc_RNA (1)...(19): siRNA sense strand
agaagaaggaggaaaucaa

SEQ ID NO: 2551417 - RNA, 19 nt, Homo sapiens
  misc_RNA (1)...(19): siRNA sense strand
aggagaaaggaaagaaauu

SEQ ID NO: 2551418 - RNA, 19 nt, Homo sapiens
  misc_RNA (1)...(19): siRNA sense strand
agcaacaaauggaggcaua

SEQ ID NO: 2551419 - RNA, 19 nt, Homo sapiens
  misc_RNA (1)...(19): siRNA sense strand
cuaagaaauaacaggaaga

SEQ ID NO: 2551420 - RNA, 19 nt, Homo sapiens
  misc_RNA (1)...(19): siRNA sense strand
uggaaaucauguuaggcaa

SEQ ID NO: 2551421 - RNA, 19 nt, Homo sapiens
  misc_RNA (1)...(19): siRNA sense strand
ucaaauucaagcagacaaa

SEQ ID NO: 2551422 - RNA, 19 nt, Homo sapiens
  misc_RNA (1)...(19): siRNA sense strand
gagagaaauacaaggaagu

SEQ ID NO: 2551423 - RNA, 19 nt, Homo sapiens
  misc_RNA (1)...(19): siRNA sense strand
guaaagacagaaggagaaa

SEQ ID NO: 2551424 - RNA, 19 nt, Homo sapiens
  misc_RNA (1)...(19): siRNA sense strand
ccaaagugaaagaauggua

SEQ ID NO: 2551425 - RNA, 19 nt, Homo sapiens
  misc_RNA (1)...(19): siRNA sense strand
aaguaugucugaagcaaau

SEQ ID NO: 2551426 - RNA, 19 nt, Homo sapiens
  misc_RNA (1)...(19): siRNA sense strand
aggcagacuuccucaagaa

SEQ ID NO: 2551427 - RNA, 19 nt, Homo sapiens
  misc_RNA (1)...(19): siRNA sense strand
ugcagaagaaggaggaaau

SEQ ID NO: 2551428 - RNA, 19 nt, Homo sapiens
  misc_RNA (1)...(19): siRNA sense strand
aggaagaauugcacaaagu

SEQ ID NO: 2551429 - RNA, 19 nt, Homo sapiens
  misc_RNA (1)...(19): siRNA sense strand
ugacauggaagcuggaaaa

SEQ ID NO: 2551430 - RNA, 19 nt, Homo sapiens
  misc_RNA (1)...(19): siRNA sense strand
uggaauuuauggacccaaa

SEQ ID NO: 2551431 - RNA, 19 nt, Homo sapiens
  misc_RNA (1)...(19): siRNA sense strand
agccaagucaugacagaaa

SEQ ID NO: 2551432 - RNA, 19 nt, Homo sapiens
  misc_RNA (1)...(19): siRNA sense strand
cuguugagaugauguggaa

SEQ ID NO: 2551433 - RNA, 19 nt, Homo sapiens
  misc_RNA (1)...(19): siRNA sense strand
caggcuauuugcagaagaa

SEQ ID NO: 2551434 - RNA, 19 nt, Homo sapiens
  misc_RNA (1)...(19): siRNA sense strand
uuucaaaggagcaaguaau

SEQ ID NO: 2551435 - RNA, 19 nt, Homo sapiens
  misc_RNA (1)...(19): siRNA sense strand
acauugaacuuuagcaacu

SEQ ID NO: 2551436 - RNA, 19 nt, Homo sapiens
  misc_RNA (1)...(19): siRNA sense strand
aaauggaggcauaugaaau

SEQ ID NO: 2551437 - RNA, 19 nt, Homo sapiens
  misc_RNA (1)...(19): siRNA sense strand
agguaagauuggacuugua

SEQ ID NO: 2551438 - RNA, 19 nt, Homo sapiens
  misc_RNA (1)...(19): siRNA sense strand
gagaaauacaaggaaguuu

SEQ ID NO: 2551439 - RNA, 19 nt, Homo sapiens
  misc_RNA (1)...(19): siRNA sense strand
ugguaauaaugcuuccaaa

SEQ ID NO: 2551440 - RNA, 19 nt, Homo sapiens
  misc_RNA (1)...(19): siRNA sense strand
ccauccaagucaagcuaau

SEQ ID NO: 2551441 - RNA, 19 nt, Homo sapiens
  misc_RNA (1)...(19): siRNA sense strand
uauuaagaaggguggaaaa

SEQ ID NO: 2551442 - RNA, 19 nt, Homo sapiens
  misc_RNA (1)...(19): siRNA sense strand
cagacaaagaaucagagaa

SEQ ID NO: 2551443 - RNA, 19 nt, Homo sapiens
  misc_RNA (1)...(19): siRNA sense strand
ucaaggagggucaguacaa

SEQ ID NO: 2551444 - RNA, 19 nt, Homo sapiens
  misc_RNA (1)...(19): siRNA sense strand
uugcagaagaaggaggaaa

SEQ ID NO: 2551445 - RNA, 19 nt, Homo sapiens
  misc_RNA (1)...(19): siRNA sense strand
ccuggaagauuuugaucaa

SEQ ID NO: 2551446 - RNA, 19 nt, Homo sapiens
  misc_RNA (1)...(19): siRNA sense strand
aaaguaugucugaagcaaa

SEQ ID NO: 2551447 - RNA, 19 nt, Homo sapiens
  misc_RNA (1)...(19): siRNA sense strand
gguaaaagcuauuggucag

SEQ ID NO: 2551448 - RNA, 19 nt, Homo sapiens
  misc_RNA (1)...(19): siRNA sense strand
ugacuaaacacuggagaga

SEQ ID NO: 2551449 - RNA, 19 nt, Homo sapiens
  misc_RNA (1)...(19): siRNA sense strand
ggagagaauuaacuggagu

SEQ ID NO: 2551450 - RNA, 19 nt, Homo sapiens
  misc_RNA (1)...(19): siRNA sense strand
gauauuaagaaggguggaa

SEQ ID NO: 2551451 - RNA, 19 nt, Homo sapiens
  misc_RNA (1)...(19): siRNA sense strand
aguuaaaggaagauugcca

SEQ ID NO: 2551452 - RNA, 19 nt, Homo sapiens
  misc_RNA (1)...(19): siRNA sense strand
ccacacagagagaaauaca

SEQ ID NO: 2551453 - RNA, 19 nt, Homo sapiens
  misc_RNA (1)...(19): siRNA sense strand
aauggauugccaagaguua

SEQ ID NO: 2551454 - RNA, 19 nt, Homo sapiens
  misc_RNA (1)...(19): siRNA sense strand
guuacaagaccuucaguca

SEQ ID NO: 2551455 - RNA, 19 nt, Homo sapiens
  misc_RNA (1)...(19): siRNA sense strand
gcuauuugcagaagaagga

SEQ ID NO: 2551456 - RNA, 19 nt, Homo sapiens
  misc_RNA (1)...(19): siRNA sense strand
uggucaguccaaagugaaa

SEQ ID NO: 2551457 - RNA, 19 nt, Homo sapiens
  misc_RNA (1)...(19): siRNA sense strand
ugccacacagagagaaaua

SEQ ID NO: 2551458 - RNA, 19 nt, Homo sapiens
  misc_RNA (1)...(19): siRNA sense strand
agagagaaauacaaggaag

SEQ ID NO: 2551459 - RNA, 19 nt, Homo sapiens
  misc_RNA (1)...(19): siRNA sense strand
gugaugaacuugaugugca

SEQ ID NO: 2551460 - RNA, 19 nt, Homo sapiens
  misc_RNA (1)...(19): siRNA sense strand
ugaugaacuugaugugcau

SEQ ID NO: 2551461 - RNA, 19 nt, Homo sapiens
  misc_RNA (1)...(19): siRNA sense strand
caucaguuacuuaggcaga

SEQ ID NO: 2551462 - RNA, 19 nt, Homo sapiens
  misc_RNA (1)...(19): siRNA sense strand
aaggagaaaggaaagaaau

SEQ ID NO: 2551463 - RNA, 19 nt, Homo sapiens
  misc_RNA (1)...(19): siRNA sense strand
agucagcuuuggacagaau

SEQ ID NO: 2551464 - RNA, 19 nt, Homo sapiens
  misc_RNA (1)...(19): siRNA sense strand
gcaguuggaagcaggugaa

SEQ ID NO: 2551465 - RNA, 19 nt, Homo sapiens
  misc_RNA (1)...(19): siRNA sense strand
cuguauaccuggagugcuc

SEQ ID NO: 2551466 - RNA, 19 nt, Homo sapiens
  misc_RNA (1)...(19): siRNA sense strand
ucuagugguugcugcacaa

SEQ ID NO: 2551467 - RNA, 19 nt, Homo sapiens
  misc_RNA (1)...(19): siRNA sense strand
agauguugcuguugagaug

SEQ ID NO: 2551468 - RNA, 19 nt, Homo sapiens
  misc_RNA (1)...(19): siRNA sense strand
ugcacaagguggugaggaa

SEQ ID NO: 2551469 - RNA, 19 nt, Homo sapiens
  misc_RNA (1)...(19): siRNA sense strand
agaagauggcaguggaaaa

SEQ ID NO: 2551470 - RNA, 19 nt, Homo sapiens
  misc_RNA (1)...(19): siRNA sense strand
guuuaaggcacgaggaguu

SEQ ID NO: 2551471 - RNA, 19 nt, Homo sapiens
  misc_RNA (1)...(19): siRNA sense strand
uggagaagggccuggcaaa

SEQ ID NO: 2551472 - RNA, 19 nt, Homo sapiens
  misc_RNA (1)...(19): siRNA sense strand
acuaagggcaagaucgaaa

SEQ ID NO: 2551473 - RNA, 19 nt, Homo sapiens
  misc_RNA (1)...(19): siRNA sense strand
gcacugaguucgacaggga

SEQ ID NO: 2551474 - RNA, 19 nt, Homo sapiens
  misc_RNA (1)...(19): siRNA sense strand
cguguuacauggaggacau

SEQ ID NO: 2551475 - RNA, 19 nt, Homo sapiens
  misc_RNA (1)...(19): siRNA sense strand
caagcagagauacgagaaa

SEQ ID NO: 2551476 - RNA, 19 nt, Homo sapiens
  misc_RNA (1)...(19): siRNA sense strand
ugagaagacacaaggacau

SEQ ID NO: 2551477 - RNA, 19 nt, Homo sapiens
  misc_RNA (1)...(19): siRNA sense strand
cugccauggagaaguauaa

SEQ ID NO: 2551478 - RNA, 19 nt, Homo sapiens
  misc_RNA (1)...(19): siRNA sense strand
caagagagauccuggugga

SEQ ID NO: 2551479 - RNA, 19 nt, Homo sapiens
  misc_RNA (1)...(19): siRNA sense strand
ggcuagagcaccugaggau

SEQ ID NO: 2551480 - RNA, 19 nt, Homo sapiens
  misc_RNA (1)...(19): siRNA sense strand
acgugcagauggagaguca

SEQ ID NO: 2551481 - RNA, 19 nt, Homo sapiens
  misc_RNA (1)...(19): siRNA sense strand
aggacagcaucguggugaa

SEQ ID NO: 2551482 - RNA, 19 nt, Homo sapiens
  misc_RNA (1)...(19): siRNA sense strand
cuagaauauugcaggaaac

SEQ ID NO: 2551483 - RNA, 19 nt, Homo sapiens
  misc_RNA (1)...(19): siRNA sense strand
cagcaggcacagaaggaga

SEQ ID NO: 2551484 - RNA, 19 nt, Homo sapiens
  misc_RNA (1)...(19): siRNA sense strand
aggacauggacguggacau

SEQ ID NO: 2551485 - RNA, 19 nt, Homo sapiens
  misc_RNA (1)...(19): siRNA sense strand
agauccuaauugugagauu

SEQ ID NO: 2551486 - RNA, 19 nt, Homo sapiens
  misc_RNA (1)...(19): siRNA sense strand
ggaaagcaacuguucgaga

SEQ ID NO: 2551487 - RNA, 19 nt, Homo sapiens
  misc_RNA (1)...(19): siRNA sense strand
gaucagaaguggacggagg

SEQ ID NO: 2551488 - RNA, 19 nt, Homo sapiens
  misc_RNA (1)...(19): siRNA sense strand
auggaggacaugaggaaca

SEQ ID NO: 2551489 - RNA, 19 nt, Homo sapiens
  misc_RNA (1)...(19): siRNA sense strand
aggaaacugugaaggaacu

SEQ ID NO: 2551490 - RNA, 19 nt, Homo sapiens
  misc_RNA (1)...(19): siRNA sense strand
cagcggaagcagaucgaca

SEQ ID NO: 2551491 - RNA, 19 nt, Homo sapiens
  misc_RNA (1)...(19): siRNA sense strand
ucguggacgugcaggccaa

SEQ ID NO: 2551492 - RNA, 19 nt, Homo sapiens
  misc_RNA (1)...(19): siRNA sense strand
ucgccgacuuccuggacua

SEQ ID NO: 2551493 - RNA, 19 nt, Homo sapiens
  misc_RNA (1)...(19): siRNA sense strand
gggagaacaagaaggugga

SEQ ID NO: 2551494 - RNA, 19 nt, Homo sapiens
  misc_RNA (1)...(19): siRNA sense strand
gaaaaugaccagugggaug

SEQ ID NO: 2551495 - RNA, 19 nt, Homo sapiens
  misc_RNA (1)...(19): siRNA sense strand
ugaccaaagccaugagaag

SEQ ID NO: 2551496 - RNA, 19 nt, Homo sapiens
  misc_RNA (1)...(19): siRNA sense strand
acacuaagggcaagaucga

SEQ ID NO: 2551497 - RNA, 19 nt, Homo sapiens
  misc_RNA (1)...(19): siRNA sense strand
cuaaacuggaagagggugu

SEQ ID NO: 2551498 - RNA, 19 nt, Homo sapiens
  misc_RNA (1)...(19): siRNA sense strand
cgacacgugcagauggaga

SEQ ID NO: 2551499 - RNA, 19 nt, Homo sapiens
  misc_RNA (1)...(19): siRNA sense strand
augagaagacacaaggaca

SEQ ID NO: 2551500 - RNA, 19 nt, Homo sapiens
  misc_RNA (1)...(19): siRNA sense strand
ucucaacccaggaaagcaa

SEQ ID NO: 2551501 - RNA, 19 nt, Homo sapiens
  misc_RNA (1)...(19): siRNA sense strand
cgucugaggcugacugcau

SEQ ID NO: 2551502 - RNA, 19 nt, Homo sapiens
  misc_RNA (1)...(19): siRNA sense strand
uggaguaugggcugaagaa

SEQ ID NO: 2551503 - RNA, 19 nt, Homo sapiens
  misc_RNA (1)...(19): siRNA sense strand
ugugcuacauggaggacau

SEQ ID NO: 2551504 - RNA, 19 nt, Homo sapiens
  misc_RNA (1)...(19): siRNA sense strand
acaacaagaucuucgccau

SEQ ID NO: 2551505 - RNA, 19 nt, Homo sapiens
  misc_RNA (1)...(19): siRNA sense strand
gagagauccugguggaccu

SEQ ID NO: 2551506 - RNA, 19 nt, Homo sapiens
  misc_RNA (1)...(19): siRNA sense strand
cauagagcuguuugaauau

SEQ ID NO: 2551507 - RNA, 19 nt, Homo sapiens
  misc_RNA (1)...(19): siRNA sense strand
acaagaagguggaacggcu

SEQ ID NO: 2551508 - RNA, 19 nt, Homo sapiens
  misc_RNA (1)...(19): siRNA sense strand
gugaagggaagaugugcau

SEQ ID NO: 2551509 - RNA, 19 nt, Homo sapiens
  misc_RNA (1)...(19): siRNA sense strand
cagaagauggcaguggaaa

SEQ ID NO: 2551510 - RNA, 19 nt, Homo sapiens
  misc_RNA (1)...(19): siRNA sense strand
cugaagaggggaagcgaca

SEQ ID NO: 2551511 - RNA, 19 nt, Homo sapiens
  misc_RNA (1)...(19): siRNA sense strand
auggagaaguauaaagaag

SEQ ID NO: 2551512 - RNA, 19 nt, Homo sapiens
  misc_RNA (1)...(19): siRNA sense strand
gagcauugacaagggaaca

SEQ ID NO: 2551513 - RNA, 19 nt, Homo sapiens
  misc_RNA (1)...(19): siRNA sense strand
ucagaagauggcaguggaa

SEQ ID NO: 2551514 - RNA, 19 nt, Homo sapiens
  misc_RNA (1)...(19): siRNA sense strand
gcagauuucaugaagacca

SEQ ID NO: 2551515 - RNA, 19 nt, Homo sapiens
  misc_RNA (1)...(19): siRNA sense strand
agaccaaagauuuaaagca

SEQ ID NO: 2551516 - RNA, 19 nt, Homo sapiens
  misc_RNA (1)...(19): siRNA sense strand
caggaaagcaacuguucga

SEQ ID NO: 2551517 - RNA, 19 nt, Homo sapiens
  misc_RNA (1)...(19): siRNA sense strand
ggugaagaucagaagugga

SEQ ID NO: 2551518 - RNA, 19 nt, Homo sapiens
  misc_RNA (1)...(19): siRNA sense strand
agaugauggccgagaugau

SEQ ID NO: 2551519 - RNA, 19 nt, Homo sapiens
  misc_RNA (1)...(19): siRNA sense strand
agaaggaccuacuggagca

SEQ ID NO: 2551520 - RNA, 19 nt, Homo sapiens
  misc_RNA (1)...(19): siRNA sense strand
gagaagaacuggagcaccg

SEQ ID NO: 2551521 - RNA, 19 nt, Homo sapiens
  misc_RNA (1)...(19): siRNA sense strand
gggacguugugaagaccau

SEQ ID NO: 2551522 - RNA, 19 nt, Homo sapiens
  misc_RNA (1)...(19): siRNA sense strand
ucaccgagcagcugggcau

SEQ ID NO: 2551523 - RNA, 19 nt, Homo sapiens
  misc_RNA (1)...(19): siRNA sense strand
ugacccaguugguggcuga

SEQ ID NO: 2551524 - RNA, 19 nt, Homo sapiens
  misc_RNA (1)...(19): siRNA sense strand
ccgaggagaucuaccgcua

SEQ ID NO: 2551525 - RNA, 19 nt, Homo sapiens
  misc_RNA (1)...(19): siRNA sense strand
agucaaauuacgaaagcuu

SEQ ID NO: 2551526 - RNA, 19 nt, Homo sapiens
  misc_RNA (1)...(19): siRNA sense strand
cugaaauuccagaaagcau

SEQ ID NO: 2551527 - RNA, 19 nt, Homo sapiens
  misc_RNA (1)...(19): siRNA sense strand
acuggaacugagagagaau

SEQ ID NO: 2551528 - RNA, 19 nt, Homo sapiens
  misc_RNA (1)...(19): siRNA sense strand
cuguaaagcacugcaggua

SEQ ID NO: 2551529 - RNA, 19 nt, Homo sapiens
  misc_RNA (1)...(19): siRNA sense strand
ccgaggagaucuaccgcua

SEQ ID NO: 2551530 - RNA, 19 nt, Homo sapiens
  misc_RNA (1)...(19): siRNA sense strand
agucaaauuacgaaagcuu

SEQ ID NO: 2551531 - RNA, 19 nt, Homo sapiens
  misc_RNA (1)...(19): siRNA sense strand
cugaaauuccagaaagcau

SEQ ID NO: 2551532 - RNA, 19 nt, Homo sapiens
  misc_RNA (1)...(19): siRNA sense strand
acuggaacugagagagaau

SEQ ID NO: 2551533 - RNA, 19 nt, Homo sapiens
  misc_RNA (1)...(19): siRNA sense strand
cuguaaagcacugcaggua

SEQ ID NO: 2551534 - RNA, 19 nt, Homo sapiens
  misc_RNA (1)...(19): siRNA sense strand
aauuaaagaaggaggcuca

SEQ ID NO: 2551535 - RNA, 19 nt, Homo sapiens
  misc_RNA (1)...(19): siRNA sense strand
gggccaaggugauccguga

SEQ ID NO: 2551536 - RNA, 19 nt, Homo sapiens
  misc_RNA (1)...(19): siRNA sense strand
agaagggaucgguggagaa

SEQ ID NO: 2551537 - RNA, 19 nt, Homo sapiens
  misc_RNA (1)...(19): siRNA sense strand
ucaagaaggccuaucggaa

SEQ ID NO: 2551538 - RNA, 19 nt, Homo sapiens
  misc_RNA (1)...(19): siRNA sense strand
gcaagaauguuguacacca

SEQ ID NO: 2551539 - RNA, 19 nt, Homo sapiens
  misc_RNA (1)...(19): siRNA sense strand
ccuacgaggaggacgaaga

SEQ ID NO: 2551540 - RNA, 19 nt, Homo sapiens
  misc_RNA (1)...(19): siRNA sense strand
gcuagagagagaagaggca

SEQ ID NO: 2551541 - RNA, 19 nt, Homo sapiens
  misc_RNA (1)...(19): siRNA sense strand
aggugauccgugagaagaa

SEQ ID NO: 2551542 - RNA, 19 nt, Homo sapiens
  misc_RNA (1)...(19): siRNA sense strand
ggaagaagggaucggugga

SEQ ID NO: 2551543 - RNA, 19 nt, Homo sapiens
  misc_RNA (1)...(19): siRNA sense strand
ggugguggacggauggcua

SEQ ID NO: 2551544 - RNA, 19 nt, Homo sapiens
  misc_RNA (1)...(19): siRNA sense strand
ccaaagcaggugaggugau

SEQ ID NO: 2551545 - RNA, 19 nt, Homo sapiens
  misc_RNA (1)...(19): siRNA sense strand
aggccuacgaggaggacga

SEQ ID NO: 2551546 - RNA, 19 nt, Homo sapiens
  misc_RNA (1)...(19): siRNA sense strand
ugaccaaggcggagagcag

SEQ ID NO: 2551547 - RNA, 19 nt, Homo sapiens
  misc_RNA (1)...(19): siRNA sense strand
guucuuuggugguggugga

SEQ ID NO: 2551548 - RNA, 19 nt, Homo sapiens
  misc_RNA (1)...(19): siRNA sense strand
gcaucgagugcaagggcca

SEQ ID NO: 2551549 - RNA, 19 nt, Homo sapiens
  misc_RNA (1)...(19): siRNA sense strand
agugcaagggccaggguga

SEQ ID NO: 2551550 - RNA, 19 nt, Homo sapiens
  misc_RNA (1)...(19): siRNA sense strand
gugagaaaugugaaggugu

SEQ ID NO: 2551551 - RNA, 19 nt, Homo sapiens
  misc_RNA (1)...(19): siRNA sense strand
agauacuauuucauggaga

SEQ ID NO: 2551552 - RNA, 19 nt, Homo sapiens
  misc_RNA (1)...(19): siRNA sense strand
ugaagguguuggugggaag

SEQ ID NO: 2551553 - RNA, 19 nt, Homo sapiens
  misc_RNA (1)...(19): siRNA sense strand
cagaaggaucauagugucu

SEQ ID NO: 2551554 - RNA, 19 nt, Homo sapiens
  misc_RNA (1)...(19): siRNA sense strand
aagggauguuuaugaccaa

SEQ ID NO: 2551555 - RNA, 19 nt, Homo sapiens
  misc_RNA (1)...(19): siRNA sense strand
ucauagugucuuucagaga

SEQ ID NO: 2551556 - RNA, 19 nt, Homo sapiens
  misc_RNA (1)...(19): siRNA sense strand
cgggcaugguacagcagau

SEQ ID NO: 2551557 - RNA, 19 nt, Homo sapiens
  misc_RNA (1)...(19): siRNA sense strand
acucccuccucgacagaaa

SEQ ID NO: 2551558 - RNA, 19 nt, Homo sapiens
  misc_RNA (1)...(19): siRNA sense strand
gcucagucuuacagcggua

SEQ ID NO: 2551559 - RNA, 19 nt, Homo sapiens
  misc_RNA (1)...(19): siRNA sense strand
aggaccuacugcagggaua

SEQ ID NO: 2551560 - RNA, 19 nt, Homo sapiens
  misc_RNA (1)...(19): siRNA sense strand
gggcagaacaggaugguag

SEQ ID NO: 2551561 - RNA, 19 nt, Homo sapiens
  misc_RNA (1)...(19): siRNA sense strand
uaugaugacaaguggguau

SEQ ID NO: 2551562 - RNA, 19 nt, Homo sapiens
  misc_RNA (1)...(19): siRNA sense strand
uuaccaauguugcggccaa

SEQ ID NO: 2551563 - RNA, 19 nt, Homo sapiens
  misc_RNA (1)...(19): siRNA sense strand
agguauaucggaacaguga

SEQ ID NO: 2551564 - RNA, 19 nt, Homo sapiens
  misc_RNA (1)...(19): siRNA sense strand
ccaucuugucugugcaaca

SEQ ID NO: 2551565 - RNA, 19 nt, Homo sapiens
  misc_RNA (1)...(19): siRNA sense strand
cggaacagugaaucaguga

SEQ ID NO: 2551566 - RNA, 19 nt, Homo sapiens
  misc_RNA (1)...(19): siRNA sense strand
gcacauggauauuugggaa

SEQ ID NO: 2551567 - RNA, 19 nt, Homo sapiens
  misc_RNA (1)...(19): siRNA sense strand
acuucaggauugagcuaaa

SEQ ID NO: 2551568 - RNA, 19 nt, Homo sapiens
  misc_RNA (1)...(19): siRNA sense strand
ggauauuugggaagggcau

SEQ ID NO: 2551569 - RNA, 19 nt, Homo sapiens
  misc_RNA (1)...(19): siRNA sense strand
uggccuggacagagaagaa

SEQ ID NO: 2551570 - RNA, 19 nt, Homo sapiens
  misc_RNA (1)...(19): siRNA sense strand
cagagaagaaugauggcca

SEQ ID NO: 2551571 - RNA, 19 nt, Homo sapiens
  misc_RNA (1)...(19): siRNA sense strand
agaaacuguggcuguguaa

SEQ ID NO: 2551572 - RNA, 19 nt, Homo sapiens
  misc_RNA (1)...(19): siRNA sense strand
cggugaaagcccugcucau

SEQ ID NO: 2551573 - RNA, 19 nt, Homo sapiens
  misc_RNA (1)...(19): siRNA sense strand
gcacugacacugacagcca

SEQ ID NO: 2551574 - RNA, 19 nt, Homo sapiens
  misc_RNA (1)...(19): siRNA sense strand
uguugaugcuggugguagu

SEQ ID NO: 2551575 - RNA, 19 nt, Homo sapiens
  misc_RNA (1)...(19): siRNA sense strand
ggagaagcaagcaggcgaa

SEQ ID NO: 2551576 - RNA, 19 nt, Homo sapiens
  misc_RNA (1)...(19): siRNA sense strand
ugaagaagacagagacgca

SEQ ID NO: 2551577 - RNA, 19 nt, Homo sapiens
  misc_RNA (1)...(19): siRNA sense strand
ccgauauggcugagaugga

SEQ ID NO: 2551578 - RNA, 19 nt, Homo sapiens
  misc_RNA (1)...(19): siRNA sense strand
aaacgauugaacaggagaa

SEQ ID NO: 2551579 - RNA, 19 nt, Homo sapiens
  misc_RNA (1)...(19): siRNA sense strand
aagucgaaacugaagaaga

SEQ ID NO: 2551580 - RNA, 19 nt, Homo sapiens
  misc_RNA (1)...(19): siRNA sense strand
aggagaagcaagcaggcaa

SEQ ID NO: 2551581 - RNA, 19 nt, Homo sapiens
  misc_RNA (1)...(19): siRNA sense strand
aagucgaaacugaagaaga

SEQ ID NO: 2551582 - RNA, 19 nt, Homo sapiens
  misc_RNA (1)...(19): siRNA sense strand
aaacgauugaacaggagaa

SEQ ID NO: 2551583 - RNA, 19 nt, Homo sapiens
  misc_RNA (1)...(19): siRNA sense strand
ggagaagcaagcaagcgaa

SEQ ID NO: 2551584 - RNA, 19 nt, Homo sapiens
  misc_RNA (1)...(19): siRNA sense strand
aagucgaaacugaagaaga

SEQ ID NO: 2551585 - RNA, 19 nt, Homo sapiens
  misc_RNA (1)...(19): siRNA sense strand
aggagaagcaagcaagcga

SEQ ID NO: 2551586 - RNA, 19 nt, Homo sapiens
  misc_RNA (1)...(19): siRNA sense strand
guggaaagaaagaagacau

SEQ ID NO: 2551587 - RNA, 19 nt, Homo sapiens
  misc_RNA (1)...(19): siRNA sense strand
agacacaggaggagaccau

SEQ ID NO: 2551588 - RNA, 19 nt, Homo sapiens
  misc_RNA (1)...(19): siRNA sense strand
ccauagaagaagcugcaga

SEQ ID NO: 2551589 - RNA, 19 nt, Homo sapiens
  misc_RNA (1)...(19): siRNA sense strand
aguuccaaccauagaagaa

SEQ ID NO: 2551590 - RNA, 19 nt, Homo sapiens
  misc_RNA (1)...(19): siRNA sense strand
auaaaagugugcagaccaa

SEQ ID NO: 2551591 - RNA, 19 nt, Homo sapiens
  misc_RNA (1)...(19): siRNA sense strand
cguugaauaaagaaacaga

SEQ ID NO: 2551592 - RNA, 19 nt, Homo sapiens
  misc_RNA (1)...(19): siRNA sense strand
aagaagcugcagaagaaau

SEQ ID NO: 2551593 - RNA, 19 nt, Homo sapiens
  misc_RNA (1)...(19): siRNA sense strand
auaaaagugugcagaccaa

SEQ ID NO: 2551594 - RNA, 19 nt, Homo sapiens
  misc_RNA (1)...(19): siRNA sense strand
ggugagcaguggagcgaaa

SEQ ID NO: 2551595 - RNA, 19 nt, Homo sapiens
  misc_RNA (1)...(19): siRNA sense strand
gggaaaugcaugucugaau

SEQ ID NO: 2551596 - RNA, 19 nt, Homo sapiens
  misc_RNA (1)...(19): siRNA sense strand
aggaaugguuauuguguuu

SEQ ID NO: 2551597 - RNA, 19 nt, Homo sapiens
  misc_RNA (1)...(19): siRNA sense strand
gggcaaugcugugaggaau

SEQ ID NO: 2551598 - RNA, 19 nt, Homo sapiens
  misc_RNA (1)...(19): siRNA sense strand
guguaagaagccagaggaa

SEQ ID NO: 2551599 - RNA, 19 nt, Homo sapiens
  misc_RNA (1)...(19): siRNA sense strand
cuaccaaguuacugcagaa

SEQ ID NO: 2551600 - RNA, 19 nt, Homo sapiens
  misc_RNA (1)...(19): siRNA sense strand
ugucauaacucaugugcca

SEQ ID NO: 2551601 - RNA, 19 nt, Homo sapiens
  misc_RNA (1)...(19): siRNA sense strand
cuaugaaggccauguguuu

SEQ ID NO: 2551602 - RNA, 19 nt, Homo sapiens
  misc_RNA (1)...(19): siRNA sense strand
gccaaaugucuguguagaa

SEQ ID NO: 2551603 - RNA, 19 nt, Homo sapiens
  misc_RNA (1)...(19): siRNA sense strand
cuguagcgcuugugaccaa

SEQ ID NO: 2551604 - RNA, 19 nt, Homo sapiens
  misc_RNA (1)...(19): siRNA sense strand
uugugugggccuugggaaa

SEQ ID NO: 2551605 - RNA, 19 nt, Homo sapiens
  misc_RNA (1)...(19): siRNA sense strand
ugggcaaugcugugaggaa

SEQ ID NO: 2551606 - RNA, 19 nt, Homo sapiens
  misc_RNA (1)...(19): siRNA sense strand
augauggaguugugcggua

SEQ ID NO: 2551607 - RNA, 19 nt, Homo sapiens
  misc_RNA (1)...(19): siRNA sense strand
aucaaaugcuagugaaguu

SEQ ID NO: 2551608 - RNA, 19 nt, Homo sapiens
  misc_RNA (1)...(19): siRNA sense strand
cuagugaaguuaaacguau

SEQ ID NO: 2551609 - RNA, 19 nt, Homo sapiens
  misc_RNA (1)...(19): siRNA sense strand
agugcugcaugaugggaaa

SEQ ID NO: 2551610 - RNA, 19 nt, Homo sapiens
  misc_RNA (1)...(19): siRNA sense strand
ggaucuugccaucaugaaa

SEQ ID NO: 2551611 - RNA, 19 nt, Homo sapiens
  misc_RNA (1)...(19): siRNA sense strand
uuaugaagaaacuggagaa

SEQ ID NO: 2551612 - RNA, 19 nt, Homo sapiens
  misc_RNA (1)...(19): siRNA sense strand
ggagaauuuaugucaucaa

SEQ ID NO: 2551613 - RNA, 19 nt, Homo sapiens
  misc_RNA (1)...(19): siRNA sense strand
ugugagagcagcuguggaa

SEQ ID NO: 2551614 - RNA, 19 nt, Homo sapiens
  misc_RNA (1)...(19): siRNA sense strand
guucauugccauccagauu

SEQ ID NO: 2551615 - RNA, 19 nt, Homo sapiens
  misc_RNA (1)...(19): siRNA sense strand
guaagaagccagaggaagg

SEQ ID NO: 2551616 - RNA, 19 nt, Homo sapiens
  misc_RNA (1)...(19): siRNA sense strand
uggaaaguguuguccugaa

SEQ ID NO: 2551617 - RNA, 19 nt, Homo sapiens
  misc_RNA (1)...(19): siRNA sense strand
gcugagagauggcggcugu

SEQ ID NO: 2551618 - RNA, 19 nt, Homo sapiens
  misc_RNA (1)...(19): siRNA sense strand
ugagagcagcuguggaaaa

SEQ ID NO: 2551619 - RNA, 19 nt, Homo sapiens
  misc_RNA (1)...(19): siRNA sense strand
aguccgagucccuggaaaa

SEQ ID NO: 2551620 - RNA, 19 nt, Homo sapiens
  misc_RNA (1)...(19): siRNA sense strand
ugagaagggagaagugcuu

SEQ ID NO: 2551621 - RNA, 19 nt, Homo sapiens
  misc_RNA (1)...(19): siRNA sense strand
gcggaaagggucagagcag

SEQ ID NO: 2551622 - RNA, 19 nt, Homo sapiens
  misc_RNA (1)...(19): siRNA sense strand
agaagacagugcugcauga

SEQ ID NO: 2551623 - RNA, 19 nt, Homo sapiens
  misc_RNA (1)...(19): siRNA sense strand
aaagaaaauccaugagcau

SEQ ID NO: 2551624 - RNA, 19 nt, Homo sapiens
  misc_RNA (1)...(19): siRNA sense strand
aaguauacgagcaugguga

SEQ ID NO: 2551625 - RNA, 19 nt, Homo sapiens
  misc_RNA (1)...(19): siRNA sense strand
cuuggagagcacuggcaua

SEQ ID NO: 2551626 - RNA, 19 nt, Homo sapiens
  misc_RNA (1)...(19): siRNA sense strand
ugucuuaccuguacugaga

SEQ ID NO: 2551627 - RNA, 19 nt, Homo sapiens
  misc_RNA (1)...(19): siRNA sense strand
uggcggaauuugcaguauu

SEQ ID NO: 2551628 - RNA, 19 nt, Homo sapiens
  misc_RNA (1)...(19): siRNA sense strand
aggaaggacugcaagugga

SEQ ID NO: 2551629 - RNA, 19 nt, Homo sapiens
  misc_RNA (1)...(19): siRNA sense strand
gagcacuggcauaugugaa

SEQ ID NO: 2551630 - RNA, 19 nt, Homo sapiens
  misc_RNA (1)...(19): siRNA sense strand
ggugagcaguggagcgaaa

SEQ ID NO: 2551631 - RNA, 19 nt, Homo sapiens
  misc_RNA (1)...(19): siRNA sense strand
gggaaaugcaugucugaau

SEQ ID NO: 2551632 - RNA, 19 nt, Homo sapiens
  misc_RNA (1)...(19): siRNA sense strand
aggaaugguuauuguguuu

SEQ ID NO: 2551633 - RNA, 19 nt, Homo sapiens
  misc_RNA (1)...(19): siRNA sense strand
gggcaaugcugugaggaau

SEQ ID NO: 2551634 - RNA, 19 nt, Homo sapiens
  misc_RNA (1)...(19): siRNA sense strand
guguaagaagccagaggaa

SEQ ID NO: 2551635 - RNA, 19 nt, Homo sapiens
  misc_RNA (1)...(19): siRNA sense strand
cuaccaaguuacugcagaa

SEQ ID NO: 2551636 - RNA, 19 nt, Homo sapiens
  misc_RNA (1)...(19): siRNA sense strand
ugucauaacucaugugcca

SEQ ID NO: 2551637 - RNA, 19 nt, Homo sapiens
  misc_RNA (1)...(19): siRNA sense strand
cuaugaaggccauguguuu

SEQ ID NO: 2551638 - RNA, 19 nt, Homo sapiens
  misc_RNA (1)...(19): siRNA sense strand
gccaaaugucuguguagaa

SEQ ID NO: 2551639 - RNA, 19 nt, Homo sapiens
  misc_RNA (1)...(19): siRNA sense strand
cuguagcgcuugugaccaa

SEQ ID NO: 2551640 - RNA, 19 nt, Homo sapiens
  misc_RNA (1)...(19): siRNA sense strand
uugugugggccuugggaaa

SEQ ID NO: 2551641 - RNA, 19 nt, Homo sapiens
  misc_RNA (1)...(19): siRNA sense strand
ugggcaaugcugugaggaa

SEQ ID NO: 2551642 - RNA, 19 nt, Homo sapiens
  misc_RNA (1)...(19): siRNA sense strand
augauggaguugugcggua

SEQ ID NO: 2551643 - RNA, 19 nt, Homo sapiens
  misc_RNA (1)...(19): siRNA sense strand
aucaaaugcuagugaaguu

SEQ ID NO: 2551644 - RNA, 19 nt, Homo sapiens
  misc_RNA (1)...(19): siRNA sense strand
cuagugaaguuaaacguau

SEQ ID NO: 2551645 - RNA, 19 nt, Homo sapiens
  misc_RNA (1)...(19): siRNA sense strand
agugcugcaugaugggaaa

SEQ ID NO: 2551646 - RNA, 19 nt, Homo sapiens
  misc_RNA (1)...(19): siRNA sense strand
ggaucuugccaucaugaaa

SEQ ID NO: 2551647 - RNA, 19 nt, Homo sapiens
  misc_RNA (1)...(19): siRNA sense strand
uuaugaagaaacuggagaa

SEQ ID NO: 2551648 - RNA, 19 nt, Homo sapiens
  misc_RNA (1)...(19): siRNA sense strand
ggagaauuuaugucaucaa

SEQ ID NO: 2551649 - RNA, 19 nt, Homo sapiens
  misc_RNA (1)...(19): siRNA sense strand
ugugagagcagcuguggaa

SEQ ID NO: 2551650 - RNA, 19 nt, Homo sapiens
  misc_RNA (1)...(19): siRNA sense strand
guucauugccauccagauu

SEQ ID NO: 2551651 - RNA, 19 nt, Homo sapiens
  misc_RNA (1)...(19): siRNA sense strand
guaagaagccagaggaagg

SEQ ID NO: 2551652 - RNA, 19 nt, Homo sapiens
  misc_RNA (1)...(19): siRNA sense strand
uggaaaguguuguccugaa

SEQ ID NO: 2551653 - RNA, 19 nt, Homo sapiens
  misc_RNA (1)...(19): siRNA sense strand
gcugagagauggcggcugu

SEQ ID NO: 2551654 - RNA, 19 nt, Homo sapiens
  misc_RNA (1)...(19): siRNA sense strand
ugagagcagcuguggaaaa

SEQ ID NO: 2551655 - RNA, 19 nt, Homo sapiens
  misc_RNA (1)...(19): siRNA sense strand
aguccgagucccuggaaaa

SEQ ID NO: 2551656 - RNA, 19 nt, Homo sapiens
  misc_RNA (1)...(19): siRNA sense strand
ugagaagggagaagugcuu

SEQ ID NO: 2551657 - RNA, 19 nt, Homo sapiens
  misc_RNA (1)...(19): siRNA sense strand
gcggaaagggucagagcag

SEQ ID NO: 2551658 - RNA, 19 nt, Homo sapiens
  misc_RNA (1)...(19): siRNA sense strand
agaagacagugcugcauga

SEQ ID NO: 2551659 - RNA, 19 nt, Homo sapiens
  misc_RNA (1)...(19): siRNA sense strand
aaagaaaauccaugagcau

SEQ ID NO: 2551660 - RNA, 19 nt, Homo sapiens
  misc_RNA (1)...(19): siRNA sense strand
aaguauacgagcaugguga

SEQ ID NO: 2551661 - RNA, 19 nt, Homo sapiens
  misc_RNA (1)...(19): siRNA sense strand
cuuggagagcacuggcaua

SEQ ID NO: 2551662 - RNA, 19 nt, Homo sapiens
  misc_RNA (1)...(19): siRNA sense strand
ugucuuaccuguacugaga

SEQ ID NO: 2551663 - RNA, 19 nt, Homo sapiens
  misc_RNA (1)...(19): siRNA sense strand
uggcggaauuugcaguauu

SEQ ID NO: 2551664 - RNA, 19 nt, Homo sapiens
  misc_RNA (1)...(19): siRNA sense strand
aggaaggacugcaagugga

SEQ ID NO: 2551665 - RNA, 19 nt, Homo sapiens
  misc_RNA (1)...(19): siRNA sense strand
gagcacuggcauaugugaa

SEQ ID NO: 2551666 - RNA, 19 nt, Homo sapiens
  misc_RNA (1)...(19): siRNA sense strand
ggugagcaguggagcgaaa

SEQ ID NO: 2551667 - RNA, 19 nt, Homo sapiens
  misc_RNA (1)...(19): siRNA sense strand
aggaaugguuauuguguuu

SEQ ID NO: 2551668 - RNA, 19 nt, Homo sapiens
  misc_RNA (1)...(19): siRNA sense strand
gggcaaugcugugaggaau

SEQ ID NO: 2551669 - RNA, 19 nt, Homo sapiens
  misc_RNA (1)...(19): siRNA sense strand
cuaccaaguuacugcagaa

SEQ ID NO: 2551670 - RNA, 19 nt, Homo sapiens
  misc_RNA (1)...(19): siRNA sense strand
cuaugaaggccauguguuu

SEQ ID NO: 2551671 - RNA, 19 nt, Homo sapiens
  misc_RNA (1)...(19): siRNA sense strand
gccaaaugucuguguagaa

SEQ ID NO: 2551672 - RNA, 19 nt, Homo sapiens
  misc_RNA (1)...(19): siRNA sense strand
uugugugggccuugggaaa

SEQ ID NO: 2551673 - RNA, 19 nt, Homo sapiens
  misc_RNA (1)...(19): siRNA sense strand
ugggcaaugcugugaggaa

SEQ ID NO: 2551674 - RNA, 19 nt, Homo sapiens
  misc_RNA (1)...(19): siRNA sense strand
augauggaguugugcggua

SEQ ID NO: 2551675 - RNA, 19 nt, Homo sapiens
  misc_RNA (1)...(19): siRNA sense strand
aucaaaugcuagugaaguu

SEQ ID NO: 2551676 - RNA, 19 nt, Homo sapiens
  misc_RNA (1)...(19): siRNA sense strand
cuagugaaguuaaacguau

SEQ ID NO: 2551677 - RNA, 19 nt, Homo sapiens
  misc_RNA (1)...(19): siRNA sense strand
ggaucuugccaucaugaaa

SEQ ID NO: 2551678 - RNA, 19 nt, Homo sapiens
  misc_RNA (1)...(19): siRNA sense strand
uuaugaagaaacuggagaa

SEQ ID NO: 2551679 - RNA, 19 nt, Homo sapiens
  misc_RNA (1)...(19): siRNA sense strand
ggagaauuuaugucaucaa

SEQ ID NO: 2551680 - RNA, 19 nt, Homo sapiens
  misc_RNA (1)...(19): siRNA sense strand
guucauugccauccagauu

SEQ ID NO: 2551681 - RNA, 19 nt, Homo sapiens
  misc_RNA (1)...(19): siRNA sense strand
uggaaaguguuguccugaa

SEQ ID NO: 2551682 - RNA, 19 nt, Homo sapiens
  misc_RNA (1)...(19): siRNA sense strand
aguccgagucccuggaaaa

SEQ ID NO: 2551683 - RNA, 19 nt, Homo sapiens
  misc_RNA (1)...(19): siRNA sense strand
ugagaagggagaagugcuu

SEQ ID NO: 2551684 - RNA, 19 nt, Homo sapiens
  misc_RNA (1)...(19): siRNA sense strand
gcggaaagggucagagcag

SEQ ID NO: 2551685 - RNA, 19 nt, Homo sapiens
  misc_RNA (1)...(19): siRNA sense strand
aaagaaaauccaugagcau

SEQ ID NO: 2551686 - RNA, 19 nt, Homo sapiens
  misc_RNA (1)...(19): siRNA sense strand
aaguauacgagcaugguga

SEQ ID NO: 2551687 - RNA, 19 nt, Homo sapiens
  misc_RNA (1)...(19): siRNA sense strand
uggcggaauuugcaguauu

SEQ ID NO: 2551688 - RNA, 19 nt, Homo sapiens
  misc_RNA (1)...(19): siRNA sense strand
ggugagcaguggagcgaaa

SEQ ID NO: 2551689 - RNA, 19 nt, Homo sapiens
  misc_RNA (1)...(19): siRNA sense strand
gggaaaugcaugucugaau

SEQ ID NO: 2551690 - RNA, 19 nt, Homo sapiens
  misc_RNA (1)...(19): siRNA sense strand
aggaaugguuauuguguuu

SEQ ID NO: 2551691 - RNA, 19 nt, Homo sapiens
  misc_RNA (1)...(19): siRNA sense strand
gggcaaugcugugaggaau

SEQ ID NO: 2551692 - RNA, 19 nt, Homo sapiens
  misc_RNA (1)...(19): siRNA sense strand
guguaagaagccagaggaa

SEQ ID NO: 2551693 - RNA, 19 nt, Homo sapiens
  misc_RNA (1)...(19): siRNA sense strand
cuaccaaguuacugcagaa

SEQ ID NO: 2551694 - RNA, 19 nt, Homo sapiens
  misc_RNA (1)...(19): siRNA sense strand
ugucauaacucaugugcca

SEQ ID NO: 2551695 - RNA, 19 nt, Homo sapiens
  misc_RNA (1)...(19): siRNA sense strand
cuaugaaggccauguguuu

SEQ ID NO: 2551696 - RNA, 19 nt, Homo sapiens
  misc_RNA (1)...(19): siRNA sense strand
gccaaaugucuguguagaa

SEQ ID NO: 2551697 - RNA, 19 nt, Homo sapiens
  misc_RNA (1)...(19): siRNA sense strand
cuguagcgcuugugaccaa

SEQ ID NO: 2551698 - RNA, 19 nt, Homo sapiens
  misc_RNA (1)...(19): siRNA sense strand
uugugugggccuugggaaa

SEQ ID NO: 2551699 - RNA, 19 nt, Homo sapiens
  misc_RNA (1)...(19): siRNA sense strand
ugggcaaugcugugaggaa

SEQ ID NO: 2551700 - RNA, 19 nt, Homo sapiens
  misc_RNA (1)...(19): siRNA sense strand
augauggaguugugcggua

SEQ ID NO: 2551701 - RNA, 19 nt, Homo sapiens
  misc_RNA (1)...(19): siRNA sense strand
aucaaaugcuagugaaguu

SEQ ID NO: 2551702 - RNA, 19 nt, Homo sapiens
  misc_RNA (1)...(19): siRNA sense strand
cuagugaaguuaaacguau

SEQ ID NO: 2551703 - RNA, 19 nt, Homo sapiens
  misc_RNA (1)...(19): siRNA sense strand
agugcugcaugaugggaaa

SEQ ID NO: 2551704 - RNA, 19 nt, Homo sapiens
  misc_RNA (1)...(19): siRNA sense strand
ggaucuugccaucaugaaa

SEQ ID NO: 2551705 - RNA, 19 nt, Homo sapiens
  misc_RNA (1)...(19): siRNA sense strand
uuaugaagaaacuggagaa

SEQ ID NO: 2551706 - RNA, 19 nt, Homo sapiens
  misc_RNA (1)...(19): siRNA sense strand
ggagaauuuaugucaucaa

SEQ ID NO: 2551707 - RNA, 19 nt, Homo sapiens
  misc_RNA (1)...(19): siRNA sense strand
ugugagagcagcuguggaa

SEQ ID NO: 2551708 - RNA, 19 nt, Homo sapiens
  misc_RNA (1)...(19): siRNA sense strand
guucauugccauccagauu

SEQ ID NO: 2551709 - RNA, 19 nt, Homo sapiens
  misc_RNA (1)...(19): siRNA sense strand
guaagaagccagaggaagg

SEQ ID NO: 2551710 - RNA, 19 nt, Homo sapiens
  misc_RNA (1)...(19): siRNA sense strand
uggaaaguguuguccugaa

SEQ ID NO: 2551711 - RNA, 19 nt, Homo sapiens
  misc_RNA (1)...(19): siRNA sense strand
gcugagagauggcggcugu

SEQ ID NO: 2551712 - RNA, 19 nt, Homo sapiens
  misc_RNA (1)...(19): siRNA sense strand
ugagagcagcuguggaaaa

SEQ ID NO: 2551713 - RNA, 19 nt, Homo sapiens
  misc_RNA (1)...(19): siRNA sense strand
aguccgagucccuggaaaa

SEQ ID NO: 2551714 - RNA, 19 nt, Homo sapiens
  misc_RNA (1)...(19): siRNA sense strand
ugagaagggagaagugcuu

SEQ ID NO: 2551715 - RNA, 19 nt, Homo sapiens
  misc_RNA (1)...(19): siRNA sense strand
gcggaaagggucagagcag

SEQ ID NO: 2551716 - RNA, 19 nt, Homo sapiens
  misc_RNA (1)...(19): siRNA sense strand
agaagacagugcugcauga

SEQ ID NO: 2551717 - RNA, 19 nt, Homo sapiens
  misc_RNA (1)...(19): siRNA sense strand
aaagaaaauccaugagcau

SEQ ID NO: 2551718 - RNA, 19 nt, Homo sapiens
  misc_RNA (1)...(19): siRNA sense strand
aaguauacgagcaugguga

SEQ ID NO: 2551719 - RNA, 19 nt, Homo sapiens
  misc_RNA (1)...(19): siRNA sense strand
cuuggagagcacuggcaua

SEQ ID NO: 2551720 - RNA, 19 nt, Homo sapiens
  misc_RNA (1)...(19): siRNA sense strand
ugucuuaccuguacugaga

SEQ ID NO: 2551721 - RNA, 19 nt, Homo sapiens
  misc_RNA (1)...(19): siRNA sense strand
uggcggaauuugcaguauu

SEQ ID NO: 2551722 - RNA, 19 nt, Homo sapiens
  misc_RNA (1)...(19): siRNA sense strand
aggaaggacugcaagugga

SEQ ID NO: 2551723 - RNA, 19 nt, Homo sapiens
  misc_RNA (1)...(19): siRNA sense strand
gagcacuggcauaugugaa

SEQ ID NO: 2551724 - RNA, 19 nt, Homo sapiens
  misc_RNA (1)...(19): siRNA sense strand
ccgcaaaucaggaggacaa

SEQ ID NO: 2551725 - RNA, 19 nt, Homo sapiens
  misc_RNA (1)...(19): siRNA sense strand
gcacaaauacaaaggccaa

SEQ ID NO: 2551726 - RNA, 19 nt, Homo sapiens
  misc_RNA (1)...(19): siRNA sense strand
acuguaaacaugugggaua

SEQ ID NO: 2551727 - RNA, 19 nt, Homo sapiens
  misc_RNA (1)...(19): siRNA sense strand
aagacaacaaugugaguaa

SEQ ID NO: 2551728 - RNA, 19 nt, Homo sapiens
  misc_RNA (1)...(19): siRNA sense strand
ccaagaagacaaauggcaa

SEQ ID NO: 2551729 - RNA, 19 nt, Homo sapiens
  misc_RNA (1)...(19): siRNA sense strand
aggccgaaggcgagauaaa

SEQ ID NO: 2551730 - RNA, 19 nt, Homo sapiens
  misc_RNA (1)...(19): siRNA sense strand
ggaggaaaugcuugggauu

SEQ ID NO: 2551731 - RNA, 19 nt, Homo sapiens
  misc_RNA (1)...(19): siRNA sense strand
acaugugcguccugggaaa

SEQ ID NO: 2551732 - RNA, 19 nt, Homo sapiens
  misc_RNA (1)...(19): siRNA sense strand
agacaaauggacugccaaa

SEQ ID NO: 2551733 - RNA, 19 nt, Homo sapiens
  misc_RNA (1)...(19): siRNA sense strand
ggaucaacagggugggaga

SEQ ID NO: 2551734 - RNA, 19 nt, Homo sapiens
  misc_RNA (1)...(19): siRNA sense strand
agucagugccauaggucaa

SEQ ID NO: 2551735 - RNA, 19 nt, Homo sapiens
  misc_RNA (1)...(19): siRNA sense strand
caauaguggagcagcacaa

SEQ ID NO: 2551736 - RNA, 19 nt, Homo sapiens
  misc_RNA (1)...(19): siRNA sense strand
agaagguggacguggacaa

SEQ ID NO: 2551737 - RNA, 19 nt, Homo sapiens
  misc_RNA (1)...(19): siRNA sense strand
cguacagccugguggugaa

SEQ ID NO: 2551738 - RNA, 19 nt, Homo sapiens
  misc_RNA (1)...(19): siRNA sense strand
caucaaugggaaaggauca

SEQ ID NO: 2551739 - RNA, 19 nt, Homo sapiens
  misc_RNA (1)...(19): siRNA sense strand
uggcaauaguggagcagca

SEQ ID NO: 2551740 - RNA, 19 nt, Homo sapiens
  misc_RNA (1)...(19): siRNA sense strand
caagaagacaaauggcaau

SEQ ID NO: 2551741 - RNA, 19 nt, Homo sapiens
  misc_RNA (1)...(19): siRNA sense strand
ggauaauggcacagcagca

SEQ ID NO: 2551742 - RNA, 19 nt, Homo sapiens
  misc_RNA (1)...(19): siRNA sense strand
gaauaaugcugcuucccaa

SEQ ID NO: 2551743 - RNA, 19 nt, Homo sapiens
  misc_RNA (1)...(19): siRNA sense strand
caaaucugacagugauaaa

SEQ ID NO: 2551744 - RNA, 19 nt, Homo sapiens
  misc_RNA (1)...(19): siRNA sense strand
gcaugaagacgucuggcaa

SEQ ID NO: 2551745 - RNA, 19 nt, Homo sapiens
  misc_RNA (1)...(19): siRNA sense strand
aaggcgagauaaagggauu

SEQ ID NO: 2551746 - RNA, 19 nt, Homo sapiens
  misc_RNA (1)...(19): siRNA sense strand
cccuaggucugaaaggaaa

SEQ ID NO: 2551747 - RNA, 19 nt, Homo sapiens
  misc_RNA (1)...(19): siRNA sense strand
cagugacaucaaugggaaa

SEQ ID NO: 2551748 - RNA, 19 nt, Homo sapiens
  misc_RNA (1)...(19): siRNA sense strand
gguccagguaggaaaguuu

SEQ ID NO: 2551749 - RNA, 19 nt, Homo sapiens
  misc_RNA (1)...(19): siRNA sense strand
gugccaaaucugacaguga

SEQ ID NO: 2551750 - RNA, 19 nt, Homo sapiens
  misc_RNA (1)...(19): siRNA sense strand
aagaagaagugaaucgcuu

SEQ ID NO: 2551751 - RNA, 19 nt, Homo sapiens
  misc_RNA (1)...(19): siRNA sense strand
uaaacaugugggauagaaa

SEQ ID NO: 2551752 - RNA, 19 nt, Homo sapiens
  misc_RNA (1)...(19): siRNA sense strand
uggugaagaagaagugaau

SEQ ID NO: 2551753 - RNA, 19 nt, Homo sapiens
  misc_RNA (1)...(19): siRNA sense strand
aggaaaugcuugggauuca

SEQ ID NO: 2551754 - RNA, 19 nt, Homo sapiens
  misc_RNA (1)...(19): siRNA sense strand
caucaugaacaguacaaau

SEQ ID NO: 2551755 - RNA, 19 nt, Homo sapiens
  misc_RNA (1)...(19): siRNA sense strand
aggaggccuugaagaguaa

SEQ ID NO: 2551756 - RNA, 19 nt, Homo sapiens
  misc_RNA (1)...(19): siRNA sense strand
acagauaccgaguggcaau

SEQ ID NO: 2551757 - RNA, 19 nt, Homo sapiens
  misc_RNA (1)...(19): siRNA sense strand
gggaaaggaucaacagggu

SEQ ID NO: 2551758 - RNA, 19 nt, Homo sapiens
  misc_RNA (1)...(19): siRNA sense strand
gggagauggacaaagauca

SEQ ID NO: 2551759 - RNA, 19 nt, Homo sapiens
  misc_RNA (1)...(19): siRNA sense strand
gauuauagaccaagggcac

SEQ ID NO: 2551760 - RNA, 19 nt, Homo sapiens
  misc_RNA (1)...(19): siRNA sense strand
gcuugguccagguaggaaa

SEQ ID NO: 2551761 - RNA, 19 nt, Homo sapiens
  misc_RNA (1)...(19): siRNA sense strand
ccuuaacacugauggacca

SEQ ID NO: 2551762 - RNA, 19 nt, Homo sapiens
  misc_RNA (1)...(19): siRNA sense strand
aggagcugcuucugugaaa

SEQ ID NO: 2551763 - RNA, 19 nt, Homo sapiens
  misc_RNA (1)...(19): siRNA sense strand
ggacaugaccgguggcuug

SEQ ID NO: 2551764 - RNA, 19 nt, Homo sapiens
  misc_RNA (1)...(19): siRNA sense strand
gccaaaucugacagugaua

SEQ ID NO: 2551765 - RNA, 19 nt, Homo sapiens
  misc_RNA (1)...(19): siRNA sense strand
auauugacccugagaauga

SEQ ID NO: 2551766 - RNA, 19 nt, Homo sapiens
  misc_RNA (1)...(19): siRNA sense strand
acccaagaguucugucuaa

SEQ ID NO: 2551767 - RNA, 19 nt, Homo sapiens
  misc_RNA (1)...(19): siRNA sense strand
uggaaggugcccagaaaca

SEQ ID NO: 2551768 - RNA, 19 nt, Homo sapiens
  misc_RNA (1)...(19): siRNA sense strand
ugggagaguccuaguguca

SEQ ID NO: 2551769 - RNA, 19 nt, Homo sapiens
  misc_RNA (1)...(19): siRNA sense strand
gggcaacagcacaaauaca

SEQ ID NO: 2551770 - RNA, 19 nt, Homo sapiens
  misc_RNA (1)...(19): siRNA sense strand
uugaauucuucuagacaga

SEQ ID NO: 2551771 - RNA, 19 nt, Homo sapiens
  misc_RNA (1)...(19): siRNA sense strand
agacagauaccgaguggca

SEQ ID NO: 2551772 - RNA, 19 nt, Homo sapiens
  misc_RNA (1)...(19): siRNA sense strand
guucgcuggugaagaagaa

SEQ ID NO: 2551773 - RNA, 19 nt, Homo sapiens
  misc_RNA (1)...(19): siRNA sense strand
gggucugguuggaaugaca

SEQ ID NO: 2551774 - RNA, 19 nt, Homo sapiens
  misc_RNA (1)...(19): siRNA sense strand
gccuugaagaguaacaaua

SEQ ID NO: 2551775 - RNA, 19 nt, Homo sapiens
  misc_RNA (1)...(19): siRNA sense strand
cagcauuccaacagugaca

SEQ ID NO: 2551776 - RNA, 19 nt, Homo sapiens
  misc_RNA (1)...(19): siRNA sense strand
ggagggaaggaacgggaga

SEQ ID NO: 2551777 - RNA, 19 nt, Homo sapiens
  misc_RNA (1)...(19): siRNA sense strand
ccgccaaucuccaaagagu

SEQ ID NO: 2551778 - RNA, 19 nt, Homo sapiens
  misc_RNA (1)...(19): siRNA sense strand
ccacaagagagcacagaac

SEQ ID NO: 2551779 - RNA, 19 nt, Homo sapiens
  misc_RNA (1)...(19): siRNA sense strand
aggaaguagugaugguucu

SEQ ID NO: 2551780 - RNA, 19 nt, Homo sapiens
  misc_RNA (1)...(19): siRNA sense strand
caguaauaggucagggucu

SEQ ID NO: 2551781 - RNA, 19 nt, Homo sapiens
  misc_RNA (1)...(19): siRNA sense strand
ugugaaacagacaggaaca

SEQ ID NO: 2551782 - RNA, 19 nt, Homo sapiens
  misc_RNA (1)...(19): siRNA sense strand
ccuugaagaguaacaauau

SEQ ID NO: 2551783 - RNA, 19 nt, Homo sapiens
  misc_RNA (1)...(19): siRNA sense strand
aaaggaaggaaguggagga

SEQ ID NO: 2551784 - RNA, 19 nt, Homo sapiens
  misc_RNA (1)...(19): siRNA sense strand
gugaauggggaauggggaa

SEQ ID NO: 2551785 - RNA, 19 nt, Homo sapiens
  misc_RNA (1)...(19): siRNA sense strand
gugcaaaccagcuucaaaa

SEQ ID NO: 2551786 - RNA, 19 nt, Homo sapiens
  misc_RNA (1)...(19): siRNA sense strand
cuucaaaaucuaugcaaga

SEQ ID NO: 2551787 - RNA, 19 nt, Homo sapiens
  misc_RNA (1)...(19): siRNA sense strand
ugggagugaccgaccauaa

SEQ ID NO: 2551788 - RNA, 19 nt, Homo sapiens
  misc_RNA (1)...(19): siRNA sense strand
acaagagagcacagaacca

SEQ ID NO: 2551789 - RNA, 19 nt, Homo sapiens
  misc_RNA (1)...(19): siRNA sense strand
ggaaauagcaauucugggu

SEQ ID NO: 2551790 - RNA, 19 nt, Homo sapiens
  misc_RNA (1)...(19): siRNA sense strand
caaugaagaaagugagaaa

SEQ ID NO: 2551791 - RNA, 19 nt, Homo sapiens
  misc_RNA (1)...(19): siRNA sense strand
caaggaagaaggagggaaa

SEQ ID NO: 2551792 - RNA, 19 nt, Homo sapiens
  misc_RNA (1)...(19): siRNA sense strand
ccgaaacagaccagagaua

SEQ ID NO: 2551793 - RNA, 19 nt, Homo sapiens
  misc_RNA (1)...(19): siRNA sense strand
acacauugguaaaggaaaa

SEQ ID NO: 2551794 - RNA, 19 nt, Homo sapiens
  misc_RNA (1)...(19): siRNA sense strand
uguaagaagagaagaacua

SEQ ID NO: 2551795 - RNA, 19 nt, Homo sapiens
  misc_RNA (1)...(19): siRNA sense strand
ugaaggaaguaguggaaaa

SEQ ID NO: 2551796 - RNA, 19 nt, Homo sapiens
  misc_RNA (1)...(19): siRNA sense strand
ucaccaaggcugaggacaa

SEQ ID NO: 2551797 - RNA, 19 nt, Homo sapiens
  misc_RNA (1)...(19): siRNA sense strand
ggccagaagaagaggaaga

SEQ ID NO: 2551798 - RNA, 19 nt, Homo sapiens
  misc_RNA (1)...(19): siRNA sense strand
aggaaguagagaagguuaa

SEQ ID NO: 2551799 - RNA, 19 nt, Homo sapiens
  misc_RNA (1)...(19): siRNA sense strand
agaacaagacaaugaagaa

SEQ ID NO: 2551800 - RNA, 19 nt, Homo sapiens
  misc_RNA (1)...(19): siRNA sense strand
ggacagugaaggagcuauu

SEQ ID NO: 2551801 - RNA, 19 nt, Homo sapiens
  misc_RNA (1)...(19): siRNA sense strand
gugcuagagagguaggaaa

SEQ ID NO: 2551802 - RNA, 19 nt, Homo sapiens
  misc_RNA (1)...(19): siRNA sense strand
aggagagccuagugaagaa

SEQ ID NO: 2551803 - RNA, 19 nt, Homo sapiens
  misc_RNA (1)...(19): siRNA sense strand
gugaagagauccagccaca

SEQ ID NO: 2551804 - RNA, 19 nt, Homo sapiens
  misc_RNA (1)...(19): siRNA sense strand
ggaaugaagaugaagcaga

SEQ ID NO: 2551805 - RNA, 19 nt, Homo sapiens
  misc_RNA (1)...(19): siRNA sense strand
cagcugaagaugaagaaau

SEQ ID NO: 2551806 - RNA, 19 nt, Homo sapiens
  misc_RNA (1)...(19): siRNA sense strand
uggaagaacaagacaauga

SEQ ID NO: 2551807 - RNA, 19 nt, Homo sapiens
  misc_RNA (1)...(19): siRNA sense strand
ugaugaugauccagaauau

SEQ ID NO: 2551808 - RNA, 19 nt, Homo sapiens
  misc_RNA (1)...(19): siRNA sense strand
cagaagaggaggagugugu

SEQ ID NO: 2551809 - RNA, 19 nt, Homo sapiens
  misc_RNA (1)...(19): siRNA sense strand
ggucaguggaggugagagu

SEQ ID NO: 2551810 - RNA, 19 nt, Homo sapiens
  misc_RNA (1)...(19): siRNA sense strand
ugaaggaaccucagggaca

SEQ ID NO: 2551811 - RNA, 19 nt, Homo sapiens
  misc_RNA (1)...(19): siRNA sense strand
agggaaaccucaaaugaau

SEQ ID NO: 2551812 - RNA, 19 nt, Homo sapiens
  misc_RNA (1)...(19): siRNA sense strand
aggaaggcuuggagacaga

SEQ ID NO: 2551813 - RNA, 19 nt, Homo sapiens
  misc_RNA (1)...(19): siRNA sense strand
ugccaauguuugagccuaa

SEQ ID NO: 2551814 - RNA, 19 nt, Homo sapiens
  misc_RNA (1)...(19): siRNA sense strand
cuuuaggacugaagcauuu

SEQ ID NO: 2551815 - RNA, 19 nt, Homo sapiens
  misc_RNA (1)...(19): siRNA sense strand
cuggagaaguaacgaaaca

SEQ ID NO: 2551816 - RNA, 19 nt, Homo sapiens
  misc_RNA (1)...(19): siRNA sense strand
uggcucaaagagagggaaa

SEQ ID NO: 2551817 - RNA, 19 nt, Homo sapiens
  misc_RNA (1)...(19): siRNA sense strand
ggaagagacuccagcagca

SEQ ID NO: 2551818 - RNA, 19 nt, Homo sapiens
  misc_RNA (1)...(19): siRNA sense strand
ugaugaagaagaagaugaa

SEQ ID NO: 2551819 - RNA, 19 nt, Homo sapiens
  misc_RNA (1)...(19): siRNA sense strand
cuauagagagagaagaaca

SEQ ID NO: 2551820 - RNA, 19 nt, Homo sapiens
  misc_RNA (1)...(19): siRNA sense strand
uggaacaugcuguggaauu

SEQ ID NO: 2551821 - RNA, 19 nt, Homo sapiens
  misc_RNA (1)...(19): siRNA sense strand
auuaagaaggccaaugaaa

SEQ ID NO: 2551822 - RNA, 19 nt, Homo sapiens
  misc_RNA (1)...(19): siRNA sense strand
cccuguaagaagagaagaa

SEQ ID NO: 2551823 - RNA, 19 nt, Homo sapiens
  misc_RNA (1)...(19): siRNA sense strand
caauggaagaacaagacaa

SEQ ID NO: 2551824 - RNA, 19 nt, Homo sapiens
  misc_RNA (1)...(19): siRNA sense strand
gauagaagaugguggacuc

SEQ ID NO: 2551825 - RNA, 19 nt, Homo sapiens
  misc_RNA (1)...(19): siRNA sense strand
gauaguacuuucauggaga

SEQ ID NO: 2551826 - RNA, 19 nt, Homo sapiens
  misc_RNA (1)...(19): siRNA sense strand
accuauagagagagaagaa

SEQ ID NO: 2551827 - RNA, 19 nt, Homo sapiens
  misc_RNA (1)...(19): siRNA sense strand
agauaaggcccacgugaau

SEQ ID NO: 2551828 - RNA, 19 nt, Homo sapiens
  misc_RNA (1)...(19): siRNA sense strand
cggaugaugaagaagaaga

SEQ ID NO: 2551829 - RNA, 19 nt, Homo sapiens
  misc_RNA (1)...(19): siRNA sense strand
agaugaggagaguggcaua

SEQ ID NO: 2551830 - RNA, 19 nt, Homo sapiens
  misc_RNA (1)...(19): siRNA sense strand
ccuccaaagccgaaacaga

SEQ ID NO: 2551831 - RNA, 19 nt, Homo sapiens
  misc_RNA (1)...(19): siRNA sense strand
gaaacagaccagagauagu

SEQ ID NO: 2551832 - RNA, 19 nt, Homo sapiens
  misc_RNA (1)...(19): siRNA sense strand
aagaggaagaagaggacuu

SEQ ID NO: 2551833 - RNA, 19 nt, Homo sapiens
  misc_RNA (1)...(19): siRNA sense strand
aagaugaggaagaugaaau

SEQ ID NO: 2551834 - RNA, 19 nt, Homo sapiens
  misc_RNA (1)...(19): siRNA sense strand
ggaaaacaacguagaccua

SEQ ID NO: 2551835 - RNA, 19 nt, Homo sapiens
  misc_RNA (1)...(19): siRNA sense strand
ggaugaugaagaagaagau

SEQ ID NO: 2551836 - RNA, 19 nt, Homo sapiens
  misc_RNA (1)...(19): siRNA sense strand
ggauccaagucauggcaga

SEQ ID NO: 2551837 - RNA, 19 nt, Homo sapiens
  misc_RNA (1)...(19): siRNA sense strand
uuaagaaggccaaugaaau

SEQ ID NO: 2551838 - RNA, 19 nt, Homo sapiens
  misc_RNA (1)...(19): siRNA sense strand
caggaaguagagaagguua

SEQ ID NO: 2551839 - RNA, 19 nt, Homo sapiens
  misc_RNA (1)...(19): siRNA sense strand
gauccugaagugaggcuua

SEQ ID NO: 2551840 - RNA, 19 nt, Homo sapiens
  misc_RNA (1)...(19): siRNA sense strand
aagaagaggacuuugauga

SEQ ID NO: 2551841 - RNA, 19 nt, Homo sapiens
  misc_RNA (1)...(19): siRNA sense strand
caacucagaucgaagccua

SEQ ID NO: 2551842 - RNA, 19 nt, Homo sapiens
  misc_RNA (1)...(19): siRNA sense strand
aggaaauugucaagaugga

SEQ ID NO: 2551843 - RNA, 19 nt, Homo sapiens
  misc_RNA (1)...(19): siRNA sense strand
gggaggagucagccaacua

SEQ ID NO: 2551844 - RNA, 19 nt, Homo sapiens
  misc_RNA (1)...(19): siRNA sense strand
aagaagaggaagaagagga

SEQ ID NO: 2551845 - RNA, 19 nt, Homo sapiens
  misc_RNA (1)...(19): siRNA sense strand
ggagaaguuacaugcggua

SEQ ID NO: 2551846 - RNA, 19 nt, Homo sapiens
  misc_RNA (1)...(19): siRNA sense strand
ccuuaauuguuucuggcaa

SEQ ID NO: 2551847 - RNA, 19 nt, Homo sapiens
  misc_RNA (1)...(19): siRNA sense strand
aaacuggaggagagaagaa

SEQ ID NO: 2551848 - RNA, 19 nt, Homo sapiens
  misc_RNA (1)...(19): siRNA sense strand
ccaagaugaggaagaugaa

SEQ ID NO: 2551849 - RNA, 19 nt, Homo sapiens
  misc_RNA (1)...(19): siRNA sense strand
agaaggauugucagagaau

SEQ ID NO: 2551850 - RNA, 19 nt, Homo sapiens
  misc_RNA (1)...(19): siRNA sense strand
gcuucgaaguacagucuuu

SEQ ID NO: 2551851 - RNA, 19 nt, Homo sapiens
  misc_RNA (1)...(19): siRNA sense strand
agaaugggccagaagaaga

SEQ ID NO: 2551852 - RNA, 19 nt, Homo sapiens
  misc_RNA (1)...(19): siRNA sense strand
ccaagaagacagaugugau

SEQ ID NO: 2551853 - RNA, 19 nt, Homo sapiens
  misc_RNA (1)...(19): siRNA sense strand
ccuacagcauaaaggcaau

SEQ ID NO: 2551854 - RNA, 19 nt, Homo sapiens
  misc_RNA (1)...(19): siRNA sense strand
ggaaaucaacccagccaga

SEQ ID NO: 2551855 - RNA, 19 nt, Homo sapiens
  misc_RNA (1)...(19): siRNA sense strand
cagcagucaauguccgaaa

SEQ ID NO: 2551856 - RNA, 19 nt, Homo sapiens
  misc_RNA (1)...(19): siRNA sense strand
ccgaaacaggccagagcuu

SEQ ID NO: 2551857 - RNA, 19 nt, Homo sapiens
  misc_RNA (1)...(19): siRNA sense strand
cagaggaaagagagcuuau

SEQ ID NO: 2551858 - RNA, 19 nt, Homo sapiens
  misc_RNA (1)...(19): siRNA sense strand
acaagcaauacgaggacau

SEQ ID NO: 2551859 - RNA, 19 nt, Homo sapiens
  misc_RNA (1)...(19): siRNA sense strand
cgcagaggaaagagagcuu

SEQ ID NO: 2551860 - RNA, 19 nt, Homo sapiens
  misc_RNA (1)...(19): siRNA sense strand
ucugaagggaggaggaaua

SEQ ID NO: 2551861 - RNA, 19 nt, Homo sapiens
  misc_RNA (1)...(19): siRNA sense strand
caucauugugagagcauua

SEQ ID NO: 2551862 - RNA, 19 nt, Homo sapiens
  misc_RNA (1)...(19): siRNA sense strand
caauuaaacucuuggugga

SEQ ID NO: 2551863 - RNA, 19 nt, Homo sapiens
  misc_RNA (1)...(19): siRNA sense strand
acucaagaugauacagaua

SEQ ID NO: 2551864 - RNA, 19 nt, Homo sapiens
  misc_RNA (1)...(19): siRNA sense strand
cggauaaagaaguugcaau

SEQ ID NO: 2551865 - RNA, 19 nt, Homo sapiens
  misc_RNA (1)...(19): siRNA sense strand
ugauggugcuguugggauu

SEQ ID NO: 2551866 - RNA, 19 nt, Homo sapiens
  misc_RNA (1)...(19): siRNA sense strand
cuuaaguccucgaagguga

SEQ ID NO: 2551867 - RNA, 19 nt, Homo sapiens
  misc_RNA (1)...(19): siRNA sense strand
aguacagcaacaagaaaua

SEQ ID NO: 2551868 - RNA, 19 nt, Homo sapiens
  misc_RNA (1)...(19): siRNA sense strand
ggacaaagauggaaugagg

SEQ ID NO: 2551869 - RNA, 19 nt, Homo sapiens
  misc_RNA (1)...(19): siRNA sense strand
gcagaaggagaaugugcaa

SEQ ID NO: 2551870 - RNA, 19 nt, Homo sapiens
  misc_RNA (1)...(19): siRNA sense strand
agaaggagaaugugcaaaa

SEQ ID NO: 2551871 - RNA, 19 nt, Homo sapiens
  misc_RNA (1)...(19): siRNA sense strand
ccagagaaggagacacaau

SEQ ID NO: 2551872 - RNA, 19 nt, Homo sapiens
  misc_RNA (1)...(19): siRNA sense strand
aauuugacucucaggaaua

SEQ ID NO: 2551873 - RNA, 19 nt, Homo sapiens
  misc_RNA (1)...(19): siRNA sense strand
ggaucaaugcaaauggaga

SEQ ID NO: 2551874 - RNA, 19 nt, Homo sapiens
  misc_RNA (1)...(19): siRNA sense strand
guggauuugaagaugguaa

SEQ ID NO: 2551875 - RNA, 19 nt, Homo sapiens
  misc_RNA (1)...(19): siRNA sense strand
aaagcaaaguacagcaaca

SEQ ID NO: 2551876 - RNA, 19 nt, Homo sapiens
  misc_RNA (1)...(19): siRNA sense strand
guuaauauauccagcagca

SEQ ID NO: 2551877 - RNA, 19 nt, Homo sapiens
  misc_RNA (1)...(19): siRNA sense strand
agaccuagcaacuaagaau

SEQ ID NO: 2551878 - RNA, 19 nt, Homo sapiens
  misc_RNA (1)...(19): siRNA sense strand
uugaaagggcaaacaacaa

SEQ ID NO: 2551879 - RNA, 19 nt, Homo sapiens
  misc_RNA (1)...(19): siRNA sense strand
aagugggaauaaaggacaa

SEQ ID NO: 2551880 - RNA, 19 nt, Homo sapiens
  misc_RNA (1)...(19): siRNA sense strand
caccagagaaggagacaca

SEQ ID NO: 2551881 - RNA, 19 nt, Homo sapiens
  misc_RNA (1)...(19): siRNA sense strand
cagccaauacaauggauuu

SEQ ID NO: 2551882 - RNA, 19 nt, Homo sapiens
  misc_RNA (1)...(19): siRNA sense strand
caguauggcagaacagaca

SEQ ID NO: 2551883 - RNA, 19 nt, Homo sapiens
  misc_RNA (1)...(19): siRNA sense strand
ucguuuagacuguccaaua

SEQ ID NO: 2551884 - RNA, 19 nt, Homo sapiens
  misc_RNA (1)...(19): siRNA sense strand
ggacacagaugaauccuga

SEQ ID NO: 2551885 - RNA, 19 nt, Homo sapiens
  misc_RNA (1)...(19): siRNA sense strand
uaucaauugcagaaggaga

SEQ ID NO: 2551886 - RNA, 19 nt, Homo sapiens
  misc_RNA (1)...(19): siRNA sense strand
ggaacaacaaacuuggaca

SEQ ID NO: 2551887 - RNA, 19 nt, Homo sapiens
  misc_RNA (1)...(19): siRNA sense strand
augucaaguaacuggcaaa

SEQ ID NO: 2551888 - RNA, 19 nt, Homo sapiens
  misc_RNA (1)...(19): siRNA sense strand
acauauaacuugacagagc

SEQ ID NO: 2551889 - RNA, 19 nt, Homo sapiens
  misc_RNA (1)...(19): siRNA sense strand
gcauauuguuucagcuucu

SEQ ID NO: 2551890 - RNA, 19 nt, Homo sapiens
  misc_RNA (1)...(19): siRNA sense strand
acaacauauaggugucuua

SEQ ID NO: 2551891 - RNA, 19 nt, Homo sapiens
  misc_RNA (1)...(19): siRNA sense strand
ggaauauucaaaagggaga

SEQ ID NO: 2551892 - RNA, 19 nt, Homo sapiens
  misc_RNA (1)...(19): siRNA sense strand
gaucaaauauagugcuccu

SEQ ID NO: 2551893 - RNA, 19 nt, Homo sapiens
  misc_RNA (1)...(19): siRNA sense strand
aggagaaugugcaaaacaa

SEQ ID NO: 2551894 - RNA, 19 nt, Homo sapiens
  misc_RNA (1)...(19): siRNA sense strand
acuaugaguugcagaguac

SEQ ID NO: 2551895 - RNA, 19 nt, Homo sapiens
  misc_RNA (1)...(19): siRNA sense strand
acaaagcaaaguacagcaa

SEQ ID NO: 2551896 - RNA, 19 nt, Homo sapiens
  misc_RNA (1)...(19): siRNA sense strand
ccuuauggacccacaaaca

SEQ ID NO: 2551897 - RNA, 19 nt, Homo sapiens
  misc_RNA (1)...(19): siRNA sense strand
aaguacagcaacaagaaau

SEQ ID NO: 2551898 - RNA, 19 nt, Homo sapiens
  misc_RNA (1)...(19): siRNA sense strand
cagcaacaagaaauacaaa

SEQ ID NO: 2551899 - RNA, 19 nt, Homo sapiens
  misc_RNA (1)...(19): siRNA sense strand
ugggaauaaaggacaaaga

SEQ ID NO: 2551900 - RNA, 19 nt, Homo sapiens
  misc_RNA (1)...(19): siRNA sense strand
gggaaaugucaggaaugua

SEQ ID NO: 2551901 - RNA, 19 nt, Homo sapiens
  misc_RNA (1)...(19): siRNA sense strand
uaaaggacaaagauggaau

SEQ ID NO: 2551902 - RNA, 19 nt, Homo sapiens
  misc_RNA (1)...(19): siRNA sense strand
cuagggaaaugucaggaau

SEQ ID NO: 2551903 - RNA, 19 nt, Homo sapiens
  misc_RNA (1)...(19): siRNA sense strand
cuggagaggccauaacauu

SEQ ID NO: 2551904 - RNA, 19 nt, Homo sapiens
  misc_RNA (1)...(19): siRNA sense strand
aauaaaggacaaagaugga

SEQ ID NO: 2551905 - RNA, 19 nt, Homo sapiens
  misc_RNA (1)...(19): siRNA sense strand
aucaauugcagaaggagaa

SEQ ID NO: 2551906 - RNA, 19 nt, Homo sapiens
  misc_RNA (1)...(19): siRNA sense strand
agacacaauagaacugcaa

SEQ ID NO: 2551907 - RNA, 19 nt, Homo sapiens
  misc_RNA (1)...(19): siRNA sense strand
augaguggcgcuugggcaa

SEQ ID NO: 2551908 - RNA, 19 nt, Homo sapiens
  misc_RNA (1)...(19): siRNA sense strand
uugcauaccgguugggcau

SEQ ID NO: 2551909 - RNA, 19 nt, Homo sapiens
  misc_RNA (1)...(19): siRNA sense strand
agagcuaauuaaaccagaa

SEQ ID NO: 2551910 - RNA, 19 nt, Homo sapiens
  misc_RNA (1)...(19): siRNA sense strand
caauaauaaugugggaaac

SEQ ID NO: 2551911 - RNA, 19 nt, Homo sapiens
  misc_RNA (1)...(19): siRNA sense strand
ccguaguggcuccaaagaa

SEQ ID NO: 2551912 - RNA, 19 nt, Homo sapiens
  misc_RNA (1)...(19): siRNA sense strand
uuaaacucuugguggauga

SEQ ID NO: 2551913 - RNA, 19 nt, Homo sapiens
  misc_RNA (1)...(19): siRNA sense strand
agaaugagcaggaaggaga

SEQ ID NO: 2551914 - RNA, 19 nt, Homo sapiens
  misc_RNA (1)...(19): siRNA sense strand
ccagagaggucacagccaa

SEQ ID NO: 2551915 - RNA, 19 nt, Homo sapiens
  misc_RNA (1)...(19): siRNA sense strand
cggcugaacagaaggcuca

SEQ ID NO: 2551916 - RNA, 19 nt, Homo sapiens
  misc_RNA (1)...(19): siRNA sense strand
ggaaggagagccaagccua

SEQ ID NO: 2551917 - RNA, 19 nt, Homo sapiens
  misc_RNA (1)...(19): siRNA sense strand
ggauaaaccacuucagcug

SEQ ID NO: 2551918 - RNA, 19 nt, Homo sapiens
  misc_RNA (1)...(19): siRNA sense strand
ggguuaaauacaaguuaga

SEQ ID NO: 2551919 - RNA, 19 nt, Homo sapiens
  misc_RNA (1)...(19): siRNA sense strand
aauacaaguuagaugacga

SEQ ID NO: 2551920 - RNA, 19 nt, Homo sapiens
  misc_RNA (1)...(19): siRNA sense strand
acaacaaggaguaucccaa

SEQ ID NO: 2551921 - RNA, 19 nt, Homo sapiens
  misc_RNA (1)...(19): siRNA sense strand
agauaaagaaagagcaaga

SEQ ID NO: 2551922 - RNA, 19 nt, Homo sapiens
  misc_RNA (1)...(19): siRNA sense strand
uugcagagaaggaaagaaa

SEQ ID NO: 2551923 - RNA, 19 nt, Homo sapiens
  misc_RNA (1)...(19): siRNA sense strand
uggaaagagaaguuagaau

SEQ ID NO: 2551924 - RNA, 19 nt, Homo sapiens
  misc_RNA (1)...(19): siRNA sense strand
gcagagaaggaaagaaaau

SEQ ID NO: 2551925 - RNA, 19 nt, Homo sapiens
  misc_RNA (1)...(19): siRNA sense strand
ccucuaaaaucgagcaaca

SEQ ID NO: 2551926 - RNA, 19 nt, Homo sapiens
  misc_RNA (1)...(19): siRNA sense strand
cugaaaagaacaaccaaua

SEQ ID NO: 2551927 - RNA, 19 nt, Homo sapiens
  misc_RNA (1)...(19): siRNA sense strand
aguaagaaugaggaagaua

SEQ ID NO: 2551928 - RNA, 19 nt, Homo sapiens
  misc_RNA (1)...(19): siRNA sense strand
guuagaaugagaagauaca

SEQ ID NO: 2551929 - RNA, 19 nt, Homo sapiens
  misc_RNA (1)...(19): siRNA sense strand
uggaaguaagaaugaggaa

SEQ ID NO: 2551930 - RNA, 19 nt, Homo sapiens
  misc_RNA (1)...(19): siRNA sense strand
agauacaggaugacacauu

SEQ ID NO: 2551931 - RNA, 19 nt, Homo sapiens
  misc_RNA (1)...(19): siRNA sense strand
gacucugaaugcaggcaaa

SEQ ID NO: 2551932 - RNA, 19 nt, Homo sapiens
  misc_RNA (1)...(19): siRNA sense strand
acacuugcagagaaggaaa

SEQ ID NO: 2551933 - RNA, 19 nt, Homo sapiens
  misc_RNA (1)...(19): siRNA sense strand
ucagaguggaaguaagaau

SEQ ID NO: 2551934 - RNA, 19 nt, Homo sapiens
  misc_RNA (1)...(19): siRNA sense strand
acguauacaccgucaauga

SEQ ID NO: 2551935 - RNA, 19 nt, Homo sapiens
  misc_RNA (1)...(19): siRNA sense strand
uggcggagagagacugaaa

SEQ ID NO: 2551936 - RNA, 19 nt, Homo sapiens
  misc_RNA (1)...(19): siRNA sense strand
ccaugauguccuuugagaa

SEQ ID NO: 2551937 - RNA, 19 nt, Homo sapiens
  misc_RNA (1)...(19): siRNA sense strand
uggauuggagacugauaua

SEQ ID NO: 2551938 - RNA, 19 nt, Homo sapiens
  misc_RNA (1)...(19): siRNA sense strand
caugauaggcaauacguca

SEQ ID NO: 2551939 - RNA, 19 nt, Homo sapiens
  misc_RNA (1)...(19): siRNA sense strand
ucagaggcagauaaagaaa

SEQ ID NO: 2551940 - RNA, 19 nt, Homo sapiens
  misc_RNA (1)...(19): siRNA sense strand
uuucacuggcggagagaga

SEQ ID NO: 2551941 - RNA, 19 nt, Homo sapiens
  misc_RNA (1)...(19): siRNA sense strand
uugggaaaggauugaacua

SEQ ID NO: 2551942 - RNA, 19 nt, Homo sapiens
  misc_RNA (1)...(19): siRNA sense strand
ggauugaacuauaccugca

SEQ ID NO: 2551943 - RNA, 19 nt, Homo sapiens
  misc_RNA (1)...(19): siRNA sense strand
aaagaaagguggcugguag

SEQ ID NO: 2551944 - RNA, 19 nt, Homo sapiens
  misc_RNA (1)...(19): siRNA sense strand
cuucauugcuguuguuacu

SEQ ID NO: 2551945 - RNA, 19 nt, Homo sapiens
  misc_RNA (1)...(19): siRNA sense strand
agauaucauuucugugcuu

SEQ ID NO: 2551946 - RNA, 19 nt, Homo sapiens
  misc_RNA (1)...(19): siRNA sense strand
gagauaaguggguggccaa

SEQ ID NO: 2551947 - RNA, 19 nt, Homo sapiens
  misc_RNA (1)...(19): siRNA sense strand
gauaauaagaggauggcca

SEQ ID NO: 2551948 - RNA, 19 nt, Homo sapiens
  misc_RNA (1)...(19): siRNA sense strand
augaaaggcucuuggcaga

SEQ ID NO: 2551949 - RNA, 19 nt, Homo sapiens
  misc_RNA (1)...(19): siRNA sense strand
aguggaagacagaggauga

SEQ ID NO: 2551950 - RNA, 19 nt, Homo sapiens
  misc_RNA (1)...(19): siRNA sense strand
acucagaggcucagaaaau

SEQ ID NO: 2551951 - RNA, 19 nt, Homo sapiens
  misc_RNA (1)...(19): siRNA sense strand
agacagaggaugaggcaag

SEQ ID NO: 2551952 - RNA, 19 nt, Homo sapiens
  misc_RNA (1)...(19): siRNA sense strand
acagaaugaagucaggaaa

SEQ ID NO: 2551953 - RNA, 19 nt, Homo sapiens
  misc_RNA (1)...(19): siRNA sense strand
gcuaugagaagguggagca

SEQ ID NO: 2551954 - RNA, 19 nt, Homo sapiens
  misc_RNA (1)...(19): siRNA sense strand
ggagauaaguggguggcca

SEQ ID NO: 2551955 - RNA, 19 nt, Homo sapiens
  misc_RNA (1)...(19): siRNA sense strand
gcucagaaaauuagagaac

SEQ ID NO: 2551956 - RNA, 19 nt, Homo sapiens
  misc_RNA (1)...(19): siRNA sense strand
gggacaggagacccagaaa

SEQ ID NO: 2551957 - RNA, 19 nt, Homo sapiens
  misc_RNA (1)...(19): siRNA sense strand
gaacuauggcaucggagga

SEQ ID NO: 2551958 - RNA, 19 nt, Homo sapiens
  misc_RNA (1)...(19): siRNA sense strand
cagaaugaagucaggaaac

SEQ ID NO: 2551959 - RNA, 19 nt, Homo sapiens
  misc_RNA (1)...(19): siRNA sense strand
acggagaguggaagacaga

SEQ ID NO: 2551960 - RNA, 19 nt, Homo sapiens
  misc_RNA (1)...(19): siRNA sense strand
augaguauggacaggaauu

SEQ ID NO: 2551961 - RNA, 19 nt, Homo sapiens
  misc_RNA (1)...(19): siRNA sense strand
acucaaaacaugaaggaua

SEQ ID NO: 2551962 - RNA, 19 nt, Homo sapiens
  misc_RNA (1)...(19): siRNA sense strand
ggaagagaaugcauggaga

SEQ ID NO: 2551963 - RNA, 19 nt, Homo sapiens
  misc_RNA (1)...(19): siRNA sense strand
aguaggugacucaaggaaa

SEQ ID NO: 2551964 - RNA, 19 nt, Homo sapiens
  misc_RNA (1)...(19): siRNA sense strand
acaaucagugugugggcaa

SEQ ID NO: 2551965 - RNA, 19 nt, Homo sapiens
  misc_RNA (1)...(19): siRNA sense strand
gcauggagauuuaguccca

SEQ ID NO: 2551966 - RNA, 19 nt, Homo sapiens
  misc_RNA (1)...(19): siRNA sense strand
gucacaaagcaguuggcaa

SEQ ID NO: 2551967 - RNA, 19 nt, Homo sapiens
  misc_RNA (1)...(19): siRNA sense strand
gggugauucuggagggccu

SEQ ID NO: 2551968 - RNA, 19 nt, Homo sapiens
  misc_RNA (1)...(19): siRNA sense strand
agccagucaucaaggaaga

SEQ ID NO: 2551969 - RNA, 19 nt, Homo sapiens
  misc_RNA (1)...(19): siRNA sense strand
ugaaguacuacguguccaa

SEQ ID NO: 2551970 - RNA, 19 nt, Homo sapiens
  misc_RNA (1)...(19): siRNA sense strand
auacaaccgaccuggacua

SEQ ID NO: 2551971 - RNA, 19 nt, Homo sapiens
  misc_RNA (1)...(19): siRNA sense strand
guaccaagauacaacggca

SEQ ID NO: 2551972 - RNA, 19 nt, Homo sapiens
  misc_RNA (1)...(19): siRNA sense strand
ucaucaaggaagacaagau

SEQ ID NO: 2551973 - RNA, 19 nt, Homo sapiens
  misc_RNA (1)...(19): siRNA sense strand
aguaguaagcuggggauua

SEQ ID NO: 2551974 - RNA, 19 nt, Homo sapiens
  misc_RNA (1)...(19): siRNA sense strand
gggauaagcagaaggaggu

SEQ ID NO: 2551975 - RNA, 19 nt, Homo sapiens
  misc_RNA (1)...(19): siRNA sense strand
uggcaaacugcgugugcau

SEQ ID NO: 2551976 - RNA, 19 nt, Homo sapiens
  misc_RNA (1)...(19): siRNA sense strand
aggccaagaagcuggugua

SEQ ID NO: 2551977 - RNA, 19 nt, Homo sapiens
  misc_RNA (1)...(19): siRNA sense strand
agaugugggauaagcagaa

SEQ ID NO: 2551978 - RNA, 19 nt, Homo sapiens
  misc_RNA (1)...(19): siRNA sense strand
auucagaaggagcaggauu

SEQ ID NO: 2551979 - RNA, 19 nt, Homo sapiens
  misc_RNA (1)...(19): siRNA sense strand
agagcuucuuugaggccaa

SEQ ID NO: 2551980 - RNA, 19 nt, Homo sapiens
  misc_RNA (1)...(19): siRNA sense strand
gcuucaaggacaagugaga

SEQ ID NO: 2551981 - RNA, 19 nt, Homo sapiens
  misc_RNA (1)...(19): siRNA sense strand
gguuagagacauuugcgaa

SEQ ID NO: 2551982 - RNA, 19 nt, Homo sapiens
  misc_RNA (1)...(19): siRNA sense strand
uucaaggacaagugagaua

SEQ ID NO: 2551983 - RNA, 19 nt, Homo sapiens
  misc_RNA (1)...(19): siRNA sense strand
aagucaaggguuagagaca

SEQ ID NO: 2551984 - RNA, 19 nt, Homo sapiens
  misc_RNA (1)...(19): siRNA sense strand
guacuuuguucaucgggaa

SEQ ID NO: 2551985 - RNA, 19 nt, Homo sapiens
  misc_RNA (1)...(19): siRNA sense strand
gcggcugcuucaaggacaa

SEQ ID NO: 2551986 - RNA, 19 nt, Homo sapiens
  misc_RNA (1)...(19): siRNA sense strand
cagucuuugauuuggauua

SEQ ID NO: 2551987 - RNA, 19 nt, Homo sapiens
  misc_RNA (1)...(19): siRNA sense strand
cgggaaaucuauccaggca

SEQ ID NO: 2551988 - RNA, 19 nt, Homo sapiens
  misc_RNA (1)...(19): siRNA sense strand
aggcaaagauccaagauaa

SEQ ID NO: 2551989 - RNA, 19 nt, Homo sapiens
  misc_RNA (1)...(19): siRNA sense strand
aggcaaagauccaagauaa

SEQ ID NO: 2551990 - RNA, 19 nt, Homo sapiens
  misc_RNA (1)...(19): siRNA sense strand
aggcaaagauccaagauaa

SEQ ID NO: 2551991 - RNA, 19 nt, Homo sapiens
  misc_RNA (1)...(19): siRNA sense strand
aggcaaagauccaagacaa

SEQ ID NO: 2551992 - RNA, 19 nt, Homo sapiens
  misc_RNA (1)...(19): siRNA sense strand
aggcaaagauccaagacaa

SEQ ID NO: 2551993 - RNA, 19 nt, Homo sapiens
  misc_RNA (1)...(19): siRNA sense strand
aggcaaagauccaagacaa

SEQ ID NO: 2551994 - RNA, 19 nt, Homo sapiens
  misc_RNA (1)...(19): siRNA sense strand
aggcaaagauccaagacaa

SEQ ID NO: 2551995 - RNA, 19 nt, Homo sapiens
  misc_RNA (1)...(19): siRNA sense strand
ucgagaaugucaaggcaaa

SEQ ID NO: 2551996 - RNA, 19 nt, Homo sapiens
  misc_RNA (1)...(19): siRNA sense strand
ucgagaaugucaaggcaaa

SEQ ID NO: 2551997 - RNA, 19 nt, Homo sapiens
  misc_RNA (1)...(19): siRNA sense strand
ucgagaaugucaaggcaaa

SEQ ID NO: 2551998 - RNA, 19 nt, Homo sapiens
  misc_RNA (1)...(19): siRNA sense strand
gugaagacccugacuggua

SEQ ID NO: 2551999 - RNA, 19 nt, Homo sapiens
  misc_RNA (1)...(19): siRNA sense strand
gugaagacccugacuggua

SEQ ID NO: 2552000 - RNA, 19 nt, Homo sapiens
  misc_RNA (1)...(19): siRNA sense strand
gugaagacccugacuggua

SEQ ID NO: 2552001 - RNA, 19 nt, Homo sapiens
  misc_RNA (1)...(19): siRNA sense strand
gugaagacccugacuggua

SEQ ID NO: 2552002 - RNA, 19 nt, Homo sapiens
  misc_RNA (1)...(19): siRNA sense strand
gguugaucuuugccggaaa

SEQ ID NO: 2552003 - RNA, 19 nt, Homo sapiens
  misc_RNA (1)...(19): siRNA sense strand
gguugaucuuugccggaaa

SEQ ID NO: 2552004 - RNA, 19 nt, Homo sapiens
  misc_RNA (1)...(19): siRNA sense strand
guugaucuuugcugggaaa

SEQ ID NO: 2552005 - RNA, 19 nt, Homo sapiens
  misc_RNA (1)...(19): siRNA sense strand
guugaucuuugcugggaaa

SEQ ID NO: 2552006 - RNA, 19 nt, Homo sapiens
  misc_RNA (1)...(19): siRNA sense strand
guugaucuuugcugggaaa

SEQ ID NO: 2552007 - RNA, 19 nt, Homo sapiens
  misc_RNA (1)...(19): siRNA sense strand
guugaucuuugcugggaaa

SEQ ID NO: 2552008 - RNA, 19 nt, Homo sapiens
  misc_RNA (1)...(19): siRNA sense strand
gagugacaccauugagaau

SEQ ID NO: 2552009 - RNA, 19 nt, Homo sapiens
  misc_RNA (1)...(19): siRNA sense strand
gagugacaccauugagaau

SEQ ID NO: 2552010 - RNA, 19 nt, Homo sapiens
  misc_RNA (1)...(19): siRNA sense strand
gagugacaccauugagaau

SEQ ID NO: 2552011 - RNA, 19 nt, Homo sapiens
  misc_RNA (1)...(19): siRNA sense strand
gagugacaccauugagaau

SEQ ID NO: 2552012 - RNA, 19 nt, Homo sapiens
  misc_RNA (1)...(19): siRNA sense strand
ccggaaaacagcuggaaga

SEQ ID NO: 2552013 - RNA, 19 nt, Homo sapiens
  misc_RNA (1)...(19): siRNA sense strand
ccggaaaacagcuggaaga

SEQ ID NO: 2552014 - RNA, 19 nt, Homo sapiens
  misc_RNA (1)...(19): siRNA sense strand
ccaagauaaggaaggcauu

SEQ ID NO: 2552015 - RNA, 19 nt, Homo sapiens
  misc_RNA (1)...(19): siRNA sense strand
gaaguggagccgagugaca

SEQ ID NO: 2552016 - RNA, 19 nt, Homo sapiens
  misc_RNA (1)...(19): siRNA sense strand
gaaguggagccgagugaca

SEQ ID NO: 2552017 - RNA, 19 nt, Homo sapiens
  misc_RNA (1)...(19): siRNA sense strand
gaaguggagccgagugaca

SEQ ID NO: 2552018 - RNA, 19 nt, Homo sapiens
  misc_RNA (1)...(19): siRNA sense strand
cugggaaacagcuggaaga

SEQ ID NO: 2552019 - RNA, 19 nt, Homo sapiens
  misc_RNA (1)...(19): siRNA sense strand
cugggaaacagcuggaaga

SEQ ID NO: 2552020 - RNA, 19 nt, Homo sapiens
  misc_RNA (1)...(19): siRNA sense strand
cugggaaacagcuggaaga

SEQ ID NO: 2552021 - RNA, 19 nt, Homo sapiens
  misc_RNA (1)...(19): siRNA sense strand
cugggaaacagcuggaaga

SEQ ID NO: 2552022 - RNA, 19 nt, Homo sapiens
  misc_RNA (1)...(19): siRNA sense strand
ggaugcagaucuucgugaa

SEQ ID NO: 2552023 - RNA, 19 nt, Homo sapiens
  misc_RNA (1)...(19): siRNA sense strand
ggaugcagaucuucgugaa

SEQ ID NO: 2552024 - RNA, 19 nt, Homo sapiens
  misc_RNA (1)...(19): siRNA sense strand
ggaugcagaucuucgugaa

SEQ ID NO: 2552025 - RNA, 19 nt, Homo sapiens
  misc_RNA (1)...(19): siRNA sense strand
ggaugcagaucuucgugaa

SEQ ID NO: 2552026 - RNA, 19 nt, Homo sapiens
  misc_RNA (1)...(19): siRNA sense strand
ggaugcagaucuucgugaa

SEQ ID NO: 2552027 - RNA, 19 nt, Homo sapiens
  misc_RNA (1)...(19): siRNA sense strand
ggaugcagaucuucgugaa

SEQ ID NO: 2552028 - RNA, 19 nt, Homo sapiens
  misc_RNA (1)...(19): siRNA sense strand
ggaaacagcuggaagaugg

SEQ ID NO: 2552029 - RNA, 19 nt, Homo sapiens
  misc_RNA (1)...(19): siRNA sense strand
ggaaacagcuggaagaugg

SEQ ID NO: 2552030 - RNA, 19 nt, Homo sapiens
  misc_RNA (1)...(19): siRNA sense strand
ggaaacagcuggaagaugg

SEQ ID NO: 2552031 - RNA, 19 nt, Homo sapiens
  misc_RNA (1)...(19): siRNA sense strand
ggaaacagcuggaagaugg

SEQ ID NO: 2552032 - RNA, 19 nt, Homo sapiens
  misc_RNA (1)...(19): siRNA sense strand
cuggaaaacagcuggaaga

SEQ ID NO: 2552033 - RNA, 19 nt, Homo sapiens
  misc_RNA (1)...(19): siRNA sense strand
gagguggagccgagugaca

SEQ ID NO: 2552034 - RNA, 19 nt, Homo sapiens
  misc_RNA (1)...(19): siRNA sense strand
ccugaucagcagagguuga

SEQ ID NO: 2552035 - RNA, 19 nt, Homo sapiens
  misc_RNA (1)...(19): siRNA sense strand
ccugaucagcagagguuga

SEQ ID NO: 2552036 - RNA, 19 nt, Homo sapiens
  misc_RNA (1)...(19): siRNA sense strand
gguugaucuuugcugggaa

SEQ ID NO: 2552037 - RNA, 19 nt, Homo sapiens
  misc_RNA (1)...(19): siRNA sense strand
gguugaucuuugcugggaa

SEQ ID NO: 2552038 - RNA, 19 nt, Homo sapiens
  misc_RNA (1)...(19): siRNA sense strand
gguugaucuuugcugggaa

SEQ ID NO: 2552039 - RNA, 19 nt, Homo sapiens
  misc_RNA (1)...(19): siRNA sense strand
gguugaucuuugcugggaa

SEQ ID NO: 2552040 - RNA, 19 nt, Homo sapiens
  misc_RNA (1)...(19): siRNA sense strand
aaggcaaagauccaagaua

SEQ ID NO: 2552041 - RNA, 19 nt, Homo sapiens
  misc_RNA (1)...(19): siRNA sense strand
aaggcaaagauccaagaua

SEQ ID NO: 2552042 - RNA, 19 nt, Homo sapiens
  misc_RNA (1)...(19): siRNA sense strand
aaggcaaagauccaagaua

SEQ ID NO: 2552043 - RNA, 19 nt, Homo sapiens
  misc_RNA (1)...(19): siRNA sense strand
ggcugaucuuugcuggaaa

SEQ ID NO: 2552044 - RNA, 19 nt, Homo sapiens
  misc_RNA (1)...(19): siRNA sense strand
gcugaucuuugcuggaaaa

SEQ ID NO: 2552045 - RNA, 19 nt, Homo sapiens
  misc_RNA (1)...(19): siRNA sense strand
cagugacaccaucgagaau

SEQ ID NO: 2552046 - RNA, 19 nt, Homo sapiens
  misc_RNA (1)...(19): siRNA sense strand
cagugacaccaucgagaau

SEQ ID NO: 2552047 - RNA, 19 nt, Homo sapiens
  misc_RNA (1)...(19): siRNA sense strand
ucgaaguggagccgaguga

SEQ ID NO: 2552048 - RNA, 19 nt, Homo sapiens
  misc_RNA (1)...(19): siRNA sense strand
ucgaaguggagccgaguga

SEQ ID NO: 2552049 - RNA, 19 nt, Homo sapiens
  misc_RNA (1)...(19): siRNA sense strand
ucgaaguggagccgaguga

SEQ ID NO: 2552050 - RNA, 19 nt, Homo sapiens
  misc_RNA (1)...(19): siRNA sense strand
agguauaagccauguagaa

SEQ ID NO: 2552051 - RNA, 19 nt, Homo sapiens
  misc_RNA (1)...(19): siRNA sense strand
gcucaggcuucuaagggaa

SEQ ID NO: 2552052 - RNA, 19 nt, Homo sapiens
  misc_RNA (1)...(19): siRNA sense strand
augaaauuccagaggauau

SEQ ID NO: 2552053 - RNA, 19 nt, Homo sapiens
  misc_RNA (1)...(19): siRNA sense strand
cguuacucuucaagguaua

SEQ ID NO: 2552054 - RNA, 19 nt, Homo sapiens
  misc_RNA (1)...(19): siRNA sense strand
cugaauuaggagaagauuu

SEQ ID NO: 2552055 - RNA, 19 nt, Homo sapiens
  misc_RNA (1)...(19): siRNA sense strand
gccuauugcuguggagaau

SEQ ID NO: 2552056 - RNA, 19 nt, Homo sapiens
  misc_RNA (1)...(19): siRNA sense strand
gugacagagaugaugauuu

SEQ ID NO: 2552057 - RNA, 19 nt, Homo sapiens
  misc_RNA (1)...(19): siRNA sense strand
cugaaagcucccaagagua

SEQ ID NO: 2552058 - RNA, 19 nt, Homo sapiens
  misc_RNA (1)...(19): siRNA sense strand
ccagaggauaucagugaca

SEQ ID NO: 2552059 - RNA, 19 nt, Homo sapiens
  misc_RNA (1)...(19): siRNA sense strand
ucauacuauuggacagaca

SEQ ID NO: 2552060 - RNA, 19 nt, Homo sapiens
  misc_RNA (1)...(19): siRNA sense strand
agauaauggagauugggau

SEQ ID NO: 2552061 - RNA, 19 nt, Homo sapiens
  misc_RNA (1)...(19): siRNA sense strand
guauaagccauguagaacu

SEQ ID NO: 2552062 - RNA, 19 nt, Homo sapiens
  misc_RNA (1)...(19): siRNA sense strand
ugauucaguccuuaguaaa

SEQ ID NO: 2552063 - RNA, 19 nt, Homo sapiens
  misc_RNA (1)...(19): siRNA sense strand
ucacagugcaaguggguca

SEQ ID NO: 2552064 - RNA, 19 nt, Homo sapiens
  misc_RNA (1)...(19): siRNA sense strand
gcaagugggucauggguuc

SEQ ID NO: 2552065 - RNA, 19 nt, Homo sapiens
  misc_RNA (1)...(19): siRNA sense strand
gugcaugcccagaggccuu

SEQ ID NO: 2552066 - RNA, 19 nt, Homo sapiens
  misc_RNA (1)...(19): siRNA sense strand
ccucaggaaccaagucaca

SEQ ID NO: 2552067 - RNA, 19 nt, Homo sapiens
  misc_RNA (1)...(19): siRNA sense strand
agaaacugccaaagcgaaa

SEQ ID NO: 2552068 - RNA, 19 nt, Homo sapiens
  misc_RNA (1)...(19): siRNA sense strand
ccgacacagaggaggauaa

SEQ ID NO: 2552069 - RNA, 19 nt, Homo sapiens
  misc_RNA (1)...(19): siRNA sense strand
aagaaauugugaagggcau

SEQ ID NO: 2552070 - RNA, 19 nt, Homo sapiens
  misc_RNA (1)...(19): siRNA sense strand
aagccaagaagaagagcaa

SEQ ID NO: 2552071 - RNA, 19 nt, Homo sapiens
  misc_RNA (1)...(19): siRNA sense strand
ccaugaggaagaagaacaa

SEQ ID NO: 2552072 - RNA, 19 nt, Homo sapiens
  misc_RNA (1)...(19): siRNA sense strand
cgcccaaagccaagaagaa

SEQ ID NO: 2552073 - RNA, 19 nt, Homo sapiens
  misc_RNA (1)...(19): siRNA sense strand
aggaugacuucgaggagau

SEQ ID NO: 2552074 - RNA, 19 nt, Homo sapiens
  misc_RNA (1)...(19): siRNA sense strand
aguuaaagugccacaacaa

SEQ ID NO: 2552075 - RNA, 19 nt, Homo sapiens
  misc_RNA (1)...(19): siRNA sense strand
uggacaugcuggagaaacu

SEQ ID NO: 2552076 - RNA, 19 nt, Homo sapiens
  misc_RNA (1)...(19): siRNA sense strand
gcuccuucuuugugggaca

SEQ ID NO: 2552077 - RNA, 19 nt, Homo sapiens
  misc_RNA (1)...(19): siRNA sense strand
ugauugacauugagaggga

SEQ ID NO: 2552078 - RNA, 19 nt, Homo sapiens
  misc_RNA (1)...(19): siRNA sense strand
aggcagauugcucaagaaa

SEQ ID NO: 2552079 - RNA, 19 nt, Homo sapiens
  misc_RNA (1)...(19): siRNA sense strand
cggagaaugaagaggucca

SEQ ID NO: 2552080 - RNA, 19 nt, Homo sapiens
  misc_RNA (1)...(19): siRNA sense strand
cggaugaacaggugugcga

SEQ ID NO: 2552081 - RNA, 19 nt, Homo sapiens
  misc_RNA (1)...(19): siRNA sense strand
aggaagaagaacaagcuga

SEQ ID NO: 2552082 - RNA, 19 nt, Homo sapiens
  misc_RNA (1)...(19): siRNA sense strand
aggcaauaaucuggcaaau

SEQ ID NO: 2552083 - RNA, 19 nt, Homo sapiens
  misc_RNA (1)...(19): siRNA sense strand
gcacaggcaugaaacccaa

SEQ ID NO: 2552084 - RNA, 19 nt, Homo sapiens
  misc_RNA (1)...(19): siRNA sense strand
cuuugaacaagaagagaga

SEQ ID NO: 2552085 - RNA, 19 nt, Homo sapiens
  misc_RNA (1)...(19): siRNA sense strand
gcaaaugggcacaggcaug

SEQ ID NO: 2552086 - RNA, 19 nt, Homo sapiens
  misc_RNA (1)...(19): siRNA sense strand
gccaagaagaagagcaaac

SEQ ID NO: 2552087 - RNA, 19 nt, Homo sapiens
  misc_RNA (1)...(19): siRNA sense strand
aggagauccagcaagguua

SEQ ID NO: 2552088 - RNA, 19 nt, Homo sapiens
  misc_RNA (1)...(19): siRNA sense strand
acaacgaggaccagcucaa

SEQ ID NO: 2552089 - RNA, 19 nt, Homo sapiens
  misc_RNA (1)...(19): siRNA sense strand
ggagaaauacggagccaac

SEQ ID NO: 2552090 - RNA, 19 nt, Homo sapiens
  misc_RNA (1)...(19): siRNA sense strand
ggagaaacugccaaagcga

SEQ ID NO: 2552091 - RNA, 19 nt, Homo sapiens
  misc_RNA (1)...(19): siRNA sense strand
ccuucaagcgggaggugau

SEQ ID NO: 2552092 - RNA, 19 nt, Homo sapiens
  misc_RNA (1)...(19): siRNA sense strand
uugugaagggcaugggcua

SEQ ID NO: 2552093 - RNA, 19 nt, Homo sapiens
  misc_RNA (1)...(19): siRNA sense strand
gcaaaguggucaucacgga

SEQ ID NO: 2552094 - RNA, 19 nt, Homo sapiens
  misc_RNA (1)...(19): siRNA sense strand
cccaaagccaagaagaaga

SEQ ID NO: 2552095 - RNA, 19 nt, Homo sapiens
  misc_RNA (1)...(19): siRNA sense strand
ugugcgagacuguggagaa

SEQ ID NO: 2552096 - RNA, 19 nt, Homo sapiens
  misc_RNA (1)...(19): siRNA sense strand
gaugaacaggugugcgaga

SEQ ID NO: 2552097 - RNA, 19 nt, Homo sapiens
  misc_RNA (1)...(19): siRNA sense strand
aggccaacuucucugcaaa

SEQ ID NO: 2552098 - RNA, 19 nt, Homo sapiens
  misc_RNA (1)...(19): siRNA sense strand
ggaaaagaaaucucggaca

SEQ ID NO: 2552099 - RNA, 19 nt, Homo sapiens
  misc_RNA (1)...(19): siRNA sense strand
gcgcugcaucggagcaaau

SEQ ID NO: 2552100 - RNA, 19 nt, Homo sapiens
  misc_RNA (1)...(19): siRNA sense strand
ccuuugagcagcuggagau

SEQ ID NO: 2552101 - RNA, 19 nt, Homo sapiens
  misc_RNA (1)...(19): siRNA sense strand
cccaugaggaagaagaaca

SEQ ID NO: 2552102 - RNA, 19 nt, Homo sapiens
  misc_RNA (1)...(19): siRNA sense strand
ccacaugucaggaggcaac

SEQ ID NO: 2552103 - RNA, 19 nt, Homo sapiens
  misc_RNA (1)...(19): siRNA sense strand
cuucuaugacaacggcaaa

SEQ ID NO: 2552104 - RNA, 19 nt, Homo sapiens
  misc_RNA (1)...(19): siRNA sense strand
ggccgaagagucagaggau

SEQ ID NO: 2552105 - RNA, 19 nt, Homo sapiens
  misc_RNA (1)...(19): siRNA sense strand
cguugugagggaugccaaa

SEQ ID NO: 2552106 - RNA, 19 nt, Homo sapiens
  misc_RNA (1)...(19): siRNA sense strand
gagaaacugccaaagcgaa

SEQ ID NO: 2552107 - RNA, 19 nt, Homo sapiens
  misc_RNA (1)...(19): siRNA sense strand
aaauugaaguggagccaac

SEQ ID NO: 2552108 - RNA, 19 nt, Homo sapiens
  misc_RNA (1)...(19): siRNA sense strand
agccaacgucggagaauga

SEQ ID NO: 2552109 - RNA, 19 nt, Homo sapiens
  misc_RNA (1)...(19): siRNA sense strand
caagaaauugugaagggca

SEQ ID NO: 2552110 - RNA, 19 nt, Homo sapiens
  misc_RNA (1)...(19): siRNA sense strand
agacggggaaggagaacaa

SEQ ID NO: 2552111 - RNA, 19 nt, Homo sapiens
  misc_RNA (1)...(19): siRNA sense strand
ccagauuggcaugggaaaa

SEQ ID NO: 2552112 - RNA, 19 nt, Homo sapiens
  misc_RNA (1)...(19): siRNA sense strand
aggaaauccauuacuucaa

SEQ ID NO: 2552113 - RNA, 19 nt, Homo sapiens
  misc_RNA (1)...(19): siRNA sense strand
ccgcaugggugcagcgaau

SEQ ID NO: 2552114 - RNA, 19 nt, Homo sapiens
  misc_RNA (1)...(19): siRNA sense strand
gauucauacaggagauaaa

SEQ ID NO: 2552115 - RNA, 19 nt, Homo sapiens
  misc_RNA (1)...(19): siRNA sense strand
ccguauggaugcagugaau

SEQ ID NO: 2552116 - RNA, 19 nt, Homo sapiens
  misc_RNA (1)...(19): siRNA sense strand
augcagugaaugugggaaa

SEQ ID NO: 2552117 - RNA, 19 nt, Homo sapiens
  misc_RNA (1)...(19): siRNA sense strand
gcuuaaaagacaucagaua

SEQ ID NO: 2552118 - RNA, 19 nt, Homo sapiens
  misc_RNA (1)...(19): siRNA sense strand
cuuuaagaagucagaguua

SEQ ID NO: 2552119 - RNA, 19 nt, Homo sapiens
  misc_RNA (1)...(19): siRNA sense strand
acacaggagagaagaacua

SEQ ID NO: 2552120 - RNA, 19 nt, Homo sapiens
  misc_RNA (1)...(19): siRNA sense strand
agucagaguuaauaagaca

SEQ ID NO: 2552121 - RNA, 19 nt, Homo sapiens
  misc_RNA (1)...(19): siRNA sense strand
aaaucacacaggagagaaa

SEQ ID NO: 2552122 - RNA, 19 nt, Homo sapiens
  misc_RNA (1)...(19): siRNA sense strand
augugauguuggagaacua

SEQ ID NO: 2552123 - RNA, 19 nt, Homo sapiens
  misc_RNA (1)...(19): siRNA sense strand
gggauaaaauacugugauu

SEQ ID NO: 2552124 - RNA, 19 nt, Homo sapiens
  misc_RNA (1)...(19): siRNA sense strand
uugcagugagugugggaaa

SEQ ID NO: 2552125 - RNA, 19 nt, Homo sapiens
  misc_RNA (1)...(19): siRNA sense strand
aggaaaaccuucagugaga

SEQ ID NO: 2552126 - RNA, 19 nt, Homo sapiens
  misc_RNA (1)...(19): siRNA sense strand
gggaagaaaccuuacggau

SEQ ID NO: 2552127 - RNA, 19 nt, Homo sapiens
  misc_RNA (1)...(19): siRNA sense strand
ggaagaaaccuuacggaug

SEQ ID NO: 2552128 - RNA, 19 nt, Homo sapiens
  misc_RNA (1)...(19): siRNA sense strand
gugcagcgaaugucagaaa

SEQ ID NO: 2552129 - RNA, 19 nt, Homo sapiens
  misc_RNA (1)...(19): siRNA sense strand
auguagugaauguaggaaa

SEQ ID NO: 2552130 - RNA, 19 nt, Homo sapiens
  misc_RNA (1)...(19): siRNA sense strand
ccauguagucacuguggaa

SEQ ID NO: 2552131 - RNA, 19 nt, Homo sapiens
  misc_RNA (1)...(19): siRNA sense strand
aggauguggcuguggauuu

SEQ ID NO: 2552132 - RNA, 19 nt, Homo sapiens
  misc_RNA (1)...(19): siRNA sense strand
aacacauacaggugagaaa

SEQ ID NO: 2552133 - RNA, 19 nt, Homo sapiens
  misc_RNA (1)...(19): siRNA sense strand
agauaucauuugaggaugu

SEQ ID NO: 2552134 - RNA, 19 nt, Homo sapiens
  misc_RNA (1)...(19): siRNA sense strand
ccuuaaaaguauggagaga

SEQ ID NO: 2552135 - RNA, 19 nt, Homo sapiens
  misc_RNA (1)...(19): siRNA sense strand
ggauguggugagugucaaa

SEQ ID NO: 2552136 - RNA, 19 nt, Homo sapiens
  misc_RNA (1)...(19): siRNA sense strand
cccuaugaaugcagugaau

SEQ ID NO: 2552137 - RNA, 19 nt, Homo sapiens
  misc_RNA (1)...(19): siRNA sense strand
cccuaugaaugcagugaau

SEQ ID NO: 2552138 - RNA, 19 nt, Homo sapiens
  misc_RNA (1)...(19): siRNA sense strand
acagauaucauuugaggau

SEQ ID NO: 2552139 - RNA, 19 nt, Homo sapiens
  misc_RNA (1)...(19): siRNA sense strand
aauucauacaggagagaga

SEQ ID NO: 2552140 - RNA, 19 nt, Homo sapiens
  misc_RNA (1)...(19): siRNA sense strand
aggagagagaccauauaaa

SEQ ID NO: 2552141 - RNA, 19 nt, Homo sapiens
  misc_RNA (1)...(19): siRNA sense strand
auguggugaaugugggaaa

SEQ ID NO: 2552142 - RNA, 19 nt, Homo sapiens
  misc_RNA (1)...(19): siRNA sense strand
gaggauucauacaggagau

SEQ ID NO: 2552143 - RNA, 19 nt, Homo sapiens
  misc_RNA (1)...(19): siRNA sense strand
ccuuaugaaugcagugagu

SEQ ID NO: 2552144 - RNA, 19 nt, Homo sapiens
  misc_RNA (1)...(19): siRNA sense strand
cuuugaauguagugaaugu

SEQ ID NO: 2552145 - RNA, 19 nt, Homo sapiens
  misc_RNA (1)...(19): siRNA sense strand
augcagugaauguggaaaa

SEQ ID NO: 2552146 - RNA, 19 nt, Homo sapiens
  misc_RNA (1)...(19): siRNA sense strand
aagcauuuguucagaaagu

SEQ ID NO: 2552147 - RNA, 19 nt, Homo sapiens
  misc_RNA (1)...(19): siRNA sense strand
uggagagaggccauaaaua

SEQ ID NO: 2552148 - RNA, 19 nt, Homo sapiens
  misc_RNA (1)...(19): siRNA sense strand
aggaauggcagcuacuuaa

SEQ ID NO: 2552149 - RNA, 19 nt, Homo sapiens
  misc_RNA (1)...(19): siRNA sense strand
ccagagaacucauacagga

SEQ ID NO: 2552150 - RNA, 19 nt, Homo sapiens
  misc_RNA (1)...(19): siRNA sense strand
agaacucacucaggagaaa

SEQ ID NO: 2552151 - RNA, 19 nt, Homo sapiens
  misc_RNA (1)...(19): siRNA sense strand
gagagaagccguauggaug

SEQ ID NO: 2552152 - RNA, 19 nt, Homo sapiens
  misc_RNA (1)...(19): siRNA sense strand
gagagaaaccauauggaug

SEQ ID NO: 2552153 - RNA, 19 nt, Homo sapiens
  misc_RNA (1)...(19): siRNA sense strand
ggaaaaccuucuuugggaa

SEQ ID NO: 2552154 - RNA, 19 nt, Homo sapiens
  misc_RNA (1)...(19): siRNA sense strand
cuaugaaugcagugaaugu

SEQ ID NO: 2552155 - RNA, 19 nt, Homo sapiens
  misc_RNA (1)...(19): siRNA sense strand
acacaauagagaaacccua

SEQ ID NO: 2552156 - RNA, 19 nt, Homo sapiens
  misc_RNA (1)...(19): siRNA sense strand
uggaagucgcagcugauua

SEQ ID NO: 2552157 - RNA, 19 nt, Homo sapiens
  misc_RNA (1)...(19): siRNA sense strand
acccagaagucaagccuga

SEQ ID NO: 2552158 - RNA, 19 nt, Homo sapiens
  misc_RNA (1)...(19): siRNA sense strand
gcucauuaagcaucaaaga

SEQ ID NO: 2552159 - RNA, 19 nt, Homo sapiens
  misc_RNA (1)...(19): siRNA sense strand
accuauggaugcagcgauu

SEQ ID NO: 2552160 - RNA, 19 nt, Homo sapiens
  misc_RNA (1)...(19): siRNA sense strand
uguuggagaacuauagcaa

SEQ ID NO: 2552161 - RNA, 19 nt, Homo sapiens
  misc_RNA (1)...(19): siRNA sense strand
augcauggaauguggcaga

SEQ ID NO: 2552162 - RNA, 19 nt, Homo sapiens
  misc_RNA (1)...(19): siRNA sense strand
cuaucaaugcagugagugu

SEQ ID NO: 2552163 - RNA, 19 nt, Homo sapiens
  misc_RNA (1)...(19): siRNA sense strand
augcagugaguguggaaaa

SEQ ID NO: 2552164 - RNA, 19 nt, Homo sapiens
  misc_RNA (1)...(19): siRNA sense strand
aauucauacuggagagaag

SEQ ID NO: 2552165 - RNA, 19 nt, Homo sapiens
  misc_RNA (1)...(19): siRNA sense strand
cuacaguugcagugagugu

SEQ ID NO: 2552166 - RNA, 19 nt, Homo sapiens
  misc_RNA (1)...(19): siRNA sense strand
ggggagaagccuuaugaau

SEQ ID NO: 2552167 - RNA, 19 nt, Homo sapiens
  misc_RNA (1)...(19): siRNA sense strand
gcaucaaagaaaucacaca

SEQ ID NO: 2552168 - RNA, 19 nt, Homo sapiens
  misc_RNA (1)...(19): siRNA sense strand
agucacaccuuaugaggca

SEQ ID NO: 2552169 - RNA, 19 nt, Homo sapiens
  misc_RNA (1)...(19): siRNA sense strand
ccgagauaaucaagacaac

SEQ ID NO: 2552170 - RNA, 19 nt, Homo sapiens
  misc_RNA (1)...(19): siRNA sense strand
gauucauacaggagagaag

SEQ ID NO: 2552171 - RNA, 19 nt, Homo sapiens
  misc_RNA (1)...(19): siRNA sense strand
aauucacuuaggagagaaa

SEQ ID NO: 2552172 - RNA, 19 nt, Homo sapiens
  misc_RNA (1)...(19): siRNA sense strand
gauaaauacuauggaugca

SEQ ID NO: 2552173 - RNA, 19 nt, Homo sapiens
  misc_RNA (1)...(19): siRNA sense strand
gcuggaacgagcagaucaa

SEQ ID NO: 2552174 - RNA, 19 nt, Homo sapiens
  misc_RNA (1)...(19): siRNA sense strand
gagcagaucaagaacggga

SEQ ID NO: 2552175 - RNA, 19 nt, Homo sapiens
  misc_RNA (1)...(19): siRNA sense strand
agacgguggagaagagaau

SEQ ID NO: 2552176 - RNA, 19 nt, Homo sapiens
  misc_RNA (1)...(19): siRNA sense strand
caauggagaaagucagcaa

SEQ ID NO: 2552177 - RNA, 19 nt, Homo sapiens
  misc_RNA (1)...(19): siRNA sense strand
ggauuugcucugugaguca

SEQ ID NO: 2552178 - RNA, 19 nt, Homo sapiens
  misc_RNA (1)...(19): siRNA sense strand
aagagaaaauucagcgcua

SEQ ID NO: 2552179 - RNA, 19 nt, Homo sapiens
  misc_RNA (1)...(19): siRNA sense strand
cugaaggauauuacaggaa

SEQ ID NO: 2552180 - RNA, 19 nt, Homo sapiens
  misc_RNA (1)...(19): siRNA sense strand
cuggauaaccugccgggaa

SEQ ID NO: 2552181 - RNA, 19 nt, Homo sapiens
  misc_RNA (1)...(19): siRNA sense strand
gcaacaaagcaggcgacua

SEQ ID NO: 2552182 - RNA, 19 nt, Homo sapiens
  misc_RNA (1)...(19): siRNA sense strand
cagcuuuacaauggagaaa

SEQ ID NO: 2552183 - RNA, 19 nt, Homo sapiens
  misc_RNA (1)...(19): siRNA sense strand
uggcuauucaaguggacaa

SEQ ID NO: 2552184 - RNA, 19 nt, Homo sapiens
  misc_RNA (1)...(19): siRNA sense strand
ugguggaacuggugggaag

SEQ ID NO: 2552185 - RNA, 19 nt, Homo sapiens
  misc_RNA (1)...(19): siRNA sense strand
ggcccaaagccuagagaac

SEQ ID NO: 2552186 - RNA, 19 nt, Homo sapiens
  misc_RNA (1)...(19): siRNA sense strand
uggagaaacuggaggucac

SEQ ID NO: 2552187 - RNA, 19 nt, Homo sapiens
  misc_RNA (1)...(19): siRNA sense strand
aguauaagaaugcgggagu

SEQ ID NO: 2552188 - RNA, 19 nt, Homo sapiens
  misc_RNA (1)...(19): siRNA sense strand
agaaguuccacgugcagaa

SEQ ID NO: 2552189 - RNA, 19 nt, Homo sapiens
  misc_RNA (1)...(19): siRNA sense strand
ucgacagcuuucugaggaa

SEQ ID NO: 2552190 - RNA, 19 nt, Homo sapiens
  misc_RNA (1)...(19): siRNA sense strand
cuagagaacuauacgucca

SEQ ID NO: 2552191 - RNA, 19 nt, Homo sapiens
  misc_RNA (1)...(19): siRNA sense strand
uguccuugcaauucagaaa

SEQ ID NO: 2552192 - RNA, 19 nt, Homo sapiens
  misc_RNA (1)...(19): siRNA sense strand
aaagaaagauguggcccaa

SEQ ID NO: 2552193 - RNA, 19 nt, Homo sapiens
  misc_RNA (1)...(19): siRNA sense strand
gcaucaaggcuguacgugu

SEQ ID NO: 2552194 - RNA, 19 nt, Homo sapiens
  misc_RNA (1)...(19): siRNA sense strand
ccaguggguucaaggagau

SEQ ID NO: 2552195 - RNA, 19 nt, Homo sapiens
  misc_RNA (1)...(19): siRNA sense strand
ucacuauccugguggaacu

SEQ ID NO: 2552196 - RNA, 19 nt, Homo sapiens
  misc_RNA (1)...(19): siRNA sense strand
ugaaaagcuugcuggguca

SEQ ID NO: 2552197 - RNA, 19 nt, Homo sapiens
  misc_RNA (1)...(19): siRNA sense strand
guggagaagagcggaacaa

SEQ ID NO: 2552198 - RNA, 19 nt, Homo sapiens
  misc_RNA (1)...(19): siRNA sense strand
acaucaaagugaagcugga

SEQ ID NO: 2552199 - RNA, 19 nt, Homo sapiens
  misc_RNA (1)...(19): siRNA sense strand
cgucgucaggcaugugaaa

SEQ ID NO: 2552200 - RNA, 19 nt, Homo sapiens
  misc_RNA (1)...(19): siRNA sense strand
cgggagugauugaguugga

SEQ ID NO: 2552201 - RNA, 19 nt, Homo sapiens
  misc_RNA (1)...(19): siRNA sense strand
cggaacaagaaaauagauu

SEQ ID NO: 2552202 - RNA, 19 nt, Homo sapiens
  misc_RNA (1)...(19): siRNA sense strand
cgggccacacugaaggaua

SEQ ID NO: 2552203 - RNA, 19 nt, Homo sapiens
  misc_RNA (1)...(19): siRNA sense strand
cauuaaccuucgacagcuu

SEQ ID NO: 2552204 - RNA, 19 nt, Homo sapiens
  misc_RNA (1)...(19): siRNA sense strand
gguucaaggagaugugugu

SEQ ID NO: 2552205 - RNA, 19 nt, Homo sapiens
  misc_RNA (1)...(19): siRNA sense strand
agaagagcggaacaagaaa

SEQ ID NO: 2552206 - RNA, 19 nt, Homo sapiens
  misc_RNA (1)...(19): siRNA sense strand
cagacgacuggaacgauua

SEQ ID NO: 2552207 - RNA, 19 nt, Homo sapiens
  misc_RNA (1)...(19): siRNA sense strand
uggcgaggcgaguguggaa

SEQ ID NO: 2552208 - RNA, 19 nt, Homo sapiens
  misc_RNA (1)...(19): siRNA sense strand
uuguaggacuggacacaga

SEQ ID NO: 2552209 - RNA, 19 nt, Homo sapiens
  misc_RNA (1)...(19): siRNA sense strand
ucuaugagcugaucggcuu

SEQ ID NO: 2552210 - RNA, 19 nt, Homo sapiens
  misc_RNA (1)...(19): siRNA sense strand
agugacuguuugcuggaua

SEQ ID NO: 2552211 - RNA, 19 nt, Homo sapiens
  misc_RNA (1)...(19): siRNA sense strand
ggauaaccugccgggaaua

SEQ ID NO: 2552212 - RNA, 19 nt, Homo sapiens
  misc_RNA (1)...(19): siRNA sense strand
cugcauaugugcuaggcaa

SEQ ID NO: 2552213 - RNA, 19 nt, Homo sapiens
  misc_RNA (1)...(19): siRNA sense strand
cggaaauggcuguuggacu

SEQ ID NO: 2552214 - RNA, 19 nt, Homo sapiens
  misc_RNA (1)...(19): siRNA sense strand
gaagcaguucagaaggaau

SEQ ID NO: 2552215 - RNA, 19 nt, Homo sapiens
  misc_RNA (1)...(19): siRNA sense strand
gcagaaacgugcaggcaga

SEQ ID NO: 2552216 - RNA, 19 nt, Homo sapiens
  misc_RNA (1)...(19): siRNA sense strand
ccacaauggugcuugggaa

SEQ ID NO: 2552217 - RNA, 19 nt, Homo sapiens
  misc_RNA (1)...(19): siRNA sense strand
cacaauggugcuugggaaa

SEQ ID NO: 2552218 - RNA, 19 nt, Homo sapiens
  misc_RNA (1)...(19): siRNA sense strand
ggaaacuucuggaggccau

SEQ ID NO: 2552219 - RNA, 19 nt, Homo sapiens
  misc_RNA (1)...(19): siRNA sense strand
ccugcagagcggagaggaa

SEQ ID NO: 2552220 - RNA, 19 nt, Homo sapiens
  misc_RNA (1)...(19): siRNA sense strand
agaggaaagcacugggaca

SEQ ID NO: 2552221 - RNA, 19 nt, Homo sapiens
  misc_RNA (1)...(19): siRNA sense strand
cggcggaggaaauggacau

SEQ ID NO: 2552222 - RNA, 19 nt, Homo sapiens
  misc_RNA (1)...(19): siRNA sense strand
caacagugguggcagcaga

SEQ ID NO: 2552223 - RNA, 19 nt, Homo sapiens
  misc_RNA (1)...(19): siRNA sense strand
aggaaagcacugggacaaa

SEQ ID NO: 2552224 - RNA, 19 nt, Homo sapiens
  misc_RNA (1)...(19): siRNA sense strand
gggcaauccuggaggucug

SEQ ID NO: 2552225 - RNA, 19 nt, Homo sapiens
  misc_RNA (1)...(19): siRNA sense strand
cagagaagcaguuggcacu

SEQ ID NO: 2552226 - RNA, 19 nt, Homo sapiens
  misc_RNA (1)...(19): siRNA sense strand
cgagauuggcagacaggca

SEQ ID NO: 2552227 - RNA, 19 nt, Homo sapiens
  misc_RNA (1)...(19): siRNA sense strand
cugcagagcggagaggaaa

SEQ ID NO: 2552228 - RNA, 19 nt, Homo sapiens
  misc_RNA (1)...(19): siRNA sense strand
ugagcgaaggggugggaaa

SEQ ID NO: 2552229 - RNA, 19 nt, Homo sapiens
  misc_RNA (1)...(19): siRNA sense strand
ggccaagggaccagagaag

SEQ ID NO: 2552230 - RNA, 19 nt, Homo sapiens
  misc_RNA (1)...(19): siRNA sense strand
cagaaugaagggugcacga

SEQ ID NO: 2552231 - RNA, 19 nt, Homo sapiens
  misc_RNA (1)...(19): siRNA sense strand
gugugaaaagccagggaau

SEQ ID NO: 2552232 - RNA, 19 nt, Homo sapiens
  misc_RNA (1)...(19): siRNA sense strand
uggcagacaggcagaagau

SEQ ID NO: 2552233 - RNA, 19 nt, Homo sapiens
  misc_RNA (1)...(19): siRNA sense strand
ucagaagaguccaggcaaa

SEQ ID NO: 2552234 - RNA, 19 nt, Homo sapiens
  misc_RNA (1)...(19): siRNA sense strand
caguguagaaguuggcaua

SEQ ID NO: 2552235 - RNA, 19 nt, Homo sapiens
  misc_RNA (1)...(19): siRNA sense strand
gugcagaagauguuuaaau

SEQ ID NO: 2552236 - RNA, 19 nt, Homo sapiens
  misc_RNA (1)...(19): siRNA sense strand
augaaagccaaguggagaa

SEQ ID NO: 2552237 - RNA, 19 nt, Homo sapiens
  misc_RNA (1)...(19): siRNA sense strand
ugucaaaggcuggggaaaa

SEQ ID NO: 2552238 - RNA, 19 nt, Homo sapiens
  misc_RNA (1)...(19): siRNA sense strand
gcauaaguagccaggaaaa

SEQ ID NO: 2552239 - RNA, 19 nt, Homo sapiens
  misc_RNA (1)...(19): siRNA sense strand
acgacagggagaagauuaa

SEQ ID NO: 2552240 - RNA, 19 nt, Homo sapiens
  misc_RNA (1)...(19): siRNA sense strand
augugaaggaagagaauca

SEQ ID NO: 2552241 - RNA, 19 nt, Homo sapiens
  misc_RNA (1)...(19): siRNA sense strand
aggaacucucauuggguaa

SEQ ID NO: 2552242 - RNA, 19 nt, Homo sapiens
  misc_RNA (1)...(19): siRNA sense strand
ggcauaaguagccaggaaa

SEQ ID NO: 2552243 - RNA, 19 nt, Homo sapiens
  misc_RNA (1)...(19): siRNA sense strand
cauugaaacugauggucca

SEQ ID NO: 2552244 - RNA, 19 nt, Homo sapiens
  misc_RNA (1)...(19): siRNA sense strand
caucauuucgccaggauau

SEQ ID NO: 2552245 - RNA, 19 nt, Homo sapiens
  misc_RNA (1)...(19): siRNA sense strand
aaaugaagucugcaaacaa

SEQ ID NO: 2552246 - RNA, 19 nt, Homo sapiens
  misc_RNA (1)...(19): siRNA sense strand
agaugugaaggaagagaau

SEQ ID NO: 2552247 - RNA, 19 nt, Homo sapiens
  misc_RNA (1)...(19): siRNA sense strand
ccgagguuccauugaaauu

SEQ ID NO: 2552248 - RNA, 19 nt, Homo sapiens
  misc_RNA (1)...(19): siRNA sense strand
gaucaaaauuccaguguag

SEQ ID NO: 2552249 - RNA, 19 nt, Homo sapiens
  misc_RNA (1)...(19): siRNA sense strand
gggagaagauuaaagacug

SEQ ID NO: 2552250 - RNA, 19 nt, Homo sapiens
  misc_RNA (1)...(19): siRNA sense strand
ucugugaccucuuggaaaa

SEQ ID NO: 2552251 - RNA, 19 nt, Homo sapiens
  misc_RNA (1)...(19): siRNA sense strand
caacacagcagaacacaga

SEQ ID NO: 2552252 - RNA, 19 nt, Homo sapiens
  misc_RNA (1)...(19): siRNA sense strand
agggagaagauuaaagacu

SEQ ID NO: 2552253 - RNA, 19 nt, Homo sapiens
  misc_RNA (1)...(19): siRNA sense strand
gaagaguccaggcaaacaa

SEQ ID NO: 2552254 - RNA, 19 nt, Homo sapiens
  misc_RNA (1)...(19): siRNA sense strand
gaggaacucucauugggua

SEQ ID NO: 2552255 - RNA, 19 nt, Homo sapiens
  misc_RNA (1)...(19): siRNA sense strand
caccgagguuccauugaaa

SEQ ID NO: 2552256 - RNA, 19 nt, Homo sapiens
  misc_RNA (1)...(19): siRNA sense strand
gcuuuagucuuuccuauua

SEQ ID NO: 2552257 - RNA, 19 nt, Homo sapiens
  misc_RNA (1)...(19): siRNA sense strand
agaaccacuaacagggaau

SEQ ID NO: 2552258 - RNA, 19 nt, Homo sapiens
  misc_RNA (1)...(19): siRNA sense strand
cacgacagggagaagauua

SEQ ID NO: 2552259 - RNA, 19 nt, Homo sapiens
  misc_RNA (1)...(19): siRNA sense strand
aagaugugaaggaagagaa

SEQ ID NO: 2552260 - RNA, 19 nt, Homo sapiens
  misc_RNA (1)...(19): siRNA sense strand
uggcaucagaagagagaaa

SEQ ID NO: 2552261 - RNA, 19 nt, Homo sapiens
  misc_RNA (1)...(19): siRNA sense strand
gcuuaauauuacagaacca

SEQ ID NO: 2552262 - RNA, 19 nt, Homo sapiens
  misc_RNA (1)...(19): siRNA sense strand
agagaaaauuggagcaaga

SEQ ID NO: 2552263 - RNA, 19 nt, Homo sapiens
  misc_RNA (1)...(19): siRNA sense strand
uugcagaugcuuuggaauu

SEQ ID NO: 2552264 - RNA, 19 nt, Homo sapiens
  misc_RNA (1)...(19): siRNA sense strand
gagaaaagcaagaaggaac

SEQ ID NO: 2552265 - RNA, 19 nt, Homo sapiens
  misc_RNA (1)...(19): siRNA sense strand
cgucagaggauacacgaau

SEQ ID NO: 2552266 - RNA, 19 nt, Homo sapiens
  misc_RNA (1)...(19): siRNA sense strand
uggcaucuguagaggcauu

SEQ ID NO: 2552267 - RNA, 19 nt, Homo sapiens
  misc_RNA (1)...(19): siRNA sense strand
gugaagaaguagauggcug

SEQ ID NO: 2552268 - RNA, 19 nt, Homo sapiens
  misc_RNA (1)...(19): siRNA sense strand
ggacauaaacugauaggug

SEQ ID NO: 2552269 - RNA, 19 nt, Homo sapiens
  misc_RNA (1)...(19): siRNA sense strand
uccuggagcaucagagaaa

SEQ ID NO: 2552270 - RNA, 19 nt, Homo sapiens
  misc_RNA (1)...(19): siRNA sense strand
aagcaagaaggaacugaaa

SEQ ID NO: 2552271 - RNA, 19 nt, Homo sapiens
  misc_RNA (1)...(19): siRNA sense strand
aaauauguguucagcgcuu

SEQ ID NO: 2552272 - RNA, 19 nt, Homo sapiens
  misc_RNA (1)...(19): siRNA sense strand
uggaauuugcugaugaaga

SEQ ID NO: 2552273 - RNA, 19 nt, Homo sapiens
  misc_RNA (1)...(19): siRNA sense strand
aaaccauaccgaagaccua

SEQ ID NO: 2552274 - RNA, 19 nt, Homo sapiens
  misc_RNA (1)...(19): siRNA sense strand
uggaaugugaucugggaca

SEQ ID NO: 2552275 - RNA, 19 nt, Homo sapiens
  misc_RNA (1)...(19): siRNA sense strand
gcgugggaucgaagggaca

SEQ ID NO: 2552276 - RNA, 19 nt, Homo sapiens
  misc_RNA (1)...(19): siRNA sense strand
auagagagucacauaacaa

SEQ ID NO: 2552277 - RNA, 19 nt, Homo sapiens
  misc_RNA (1)...(19): siRNA sense strand
acauaaacugauagguguu

SEQ ID NO: 2552278 - RNA, 19 nt, Homo sapiens
  misc_RNA (1)...(19): siRNA sense strand
agcaagaccaagaugagaa

SEQ ID NO: 2552279 - RNA, 19 nt, Homo sapiens
  misc_RNA (1)...(19): siRNA sense strand
ccuuaugucacaacggauu

SEQ ID NO: 2552280 - RNA, 19 nt, Homo sapiens
  misc_RNA (1)...(19): siRNA sense strand
cugaggaggcacauaaaga

SEQ ID NO: 2552281 - RNA, 19 nt, Homo sapiens
  misc_RNA (1)...(19): siRNA sense strand
caggaugacgucagaggau

SEQ ID NO: 2552282 - RNA, 19 nt, Homo sapiens
  misc_RNA (1)...(19): siRNA sense strand
aggcguuggucgaugcaga

SEQ ID NO: 2552283 - RNA, 19 nt, Homo sapiens
  misc_RNA (1)...(19): siRNA sense strand
gacauaaacugauaggugu

SEQ ID NO: 2552284 - RNA, 19 nt, Homo sapiens
  misc_RNA (1)...(19): siRNA sense strand
cuccacagaagaugguaua

SEQ ID NO: 2552285 - RNA, 19 nt, Homo sapiens
  misc_RNA (1)...(19): siRNA sense strand
agucaauguuuccugugaa

SEQ ID NO: 2552286 - RNA, 19 nt, Homo sapiens
  misc_RNA (1)...(19): siRNA sense strand
cauuaugaucuaagggaaa

SEQ ID NO: 2552287 - RNA, 19 nt, Homo sapiens
  misc_RNA (1)...(19): siRNA sense strand
ggauguugguaaugagcaa

SEQ ID NO: 2552288 - RNA, 19 nt, Homo sapiens
  misc_RNA (1)...(19): siRNA sense strand
ggauaaacaugcacagcga

SEQ ID NO: 2552289 - RNA, 19 nt, Homo sapiens
  misc_RNA (1)...(19): siRNA sense strand
cuucaaaccuagaacgaca

SEQ ID NO: 2552290 - RNA, 19 nt, Homo sapiens
  misc_RNA (1)...(19): siRNA sense strand
cugcaaaggaguuuccaaa

SEQ ID NO: 2552291 - RNA, 19 nt, Homo sapiens
  misc_RNA (1)...(19): siRNA sense strand
agauagggugcaagacaaa

SEQ ID NO: 2552292 - RNA, 19 nt, Homo sapiens
  misc_RNA (1)...(19): siRNA sense strand
cuugaagagucauguggaa

SEQ ID NO: 2552293 - RNA, 19 nt, Homo sapiens
  misc_RNA (1)...(19): siRNA sense strand
acagaagguuucagcaaaa

SEQ ID NO: 2552294 - RNA, 19 nt, Homo sapiens
  misc_RNA (1)...(19): siRNA sense strand
acauuaugaucuaagggaa

SEQ ID NO: 2552295 - RNA, 19 nt, Homo sapiens
  misc_RNA (1)...(19): siRNA sense strand
gaauaauaggucagaaacu

SEQ ID NO: 2552296 - RNA, 19 nt, Homo sapiens
  misc_RNA (1)...(19): siRNA sense strand
cagauaggauuguagguca

SEQ ID NO: 2552297 - RNA, 19 nt, Homo sapiens
  misc_RNA (1)...(19): siRNA sense strand
aaggaaaagcuguguuaaa

SEQ ID NO: 2552298 - RNA, 19 nt, Homo sapiens
  misc_RNA (1)...(19): siRNA sense strand
gggagaaaugauugaaacu

SEQ ID NO: 2552299 - RNA, 19 nt, Homo sapiens
  misc_RNA (1)...(19): siRNA sense strand
agaucuaauuugucgucua

SEQ ID NO: 2552300 - RNA, 19 nt, Homo sapiens
  misc_RNA (1)...(19): siRNA sense strand
aauaauuggcagucagaga

SEQ ID NO: 2552301 - RNA, 19 nt, Homo sapiens
  misc_RNA (1)...(19): siRNA sense strand
uugaggaagucaugguauu

SEQ ID NO: 2552302 - RNA, 19 nt, Homo sapiens
  misc_RNA (1)...(19): siRNA sense strand
uuuuagaagaggaaggaaa

SEQ ID NO: 2552303 - RNA, 19 nt, Homo sapiens
  misc_RNA (1)...(19): siRNA sense strand
gcuuuauuagagagaacaa

SEQ ID NO: 2552304 - RNA, 19 nt, Homo sapiens
  misc_RNA (1)...(19): siRNA sense strand
cauuuacacuugauggcua

SEQ ID NO: 2552305 - RNA, 19 nt, Homo sapiens
  misc_RNA (1)...(19): siRNA sense strand
agcaagagaagauggagua

SEQ ID NO: 2552306 - RNA, 19 nt, Homo sapiens
  misc_RNA (1)...(19): siRNA sense strand
gcugccagguugggagaaa

SEQ ID NO: 2552307 - RNA, 19 nt, Homo sapiens
  misc_RNA (1)...(19): siRNA sense strand
cagcaagagaagauggagu

SEQ ID NO: 2552308 - RNA, 19 nt, Homo sapiens
  misc_RNA (1)...(19): siRNA sense strand
acacacugcuguugcaaaa

SEQ ID NO: 2552309 - RNA, 19 nt, Homo sapiens
  misc_RNA (1)...(19): siRNA sense strand
caaaacagcaagagaagau

SEQ ID NO: 2552310 - RNA, 19 nt, Homo sapiens
  misc_RNA (1)...(19): siRNA sense strand
gaaaacaacaguaggcaga

SEQ ID NO: 2552311 - RNA, 19 nt, Homo sapiens
  misc_RNA (1)...(19): siRNA sense strand
acaacaguaggcagaauaa

SEQ ID NO: 2552312 - RNA, 19 nt, Homo sapiens
  misc_RNA (1)...(19): siRNA sense strand
aggcuuuauuagagagaac

SEQ ID NO: 2552313 - RNA, 19 nt, Homo sapiens
  misc_RNA (1)...(19): siRNA sense strand
gugcagucuuaaaugguuu

SEQ ID NO: 2552314 - RNA, 19 nt, Homo sapiens
  misc_RNA (1)...(19): siRNA sense strand
auuggcagucagagagaaa

SEQ ID NO: 2552315 - RNA, 19 nt, Homo sapiens
  misc_RNA (1)...(19): siRNA sense strand
ugaagagucauguggaaca

SEQ ID NO: 2552316 - RNA, 19 nt, Homo sapiens
  misc_RNA (1)...(19): siRNA sense strand
gacaaagugcugaaugcaa

SEQ ID NO: 2552317 - RNA, 19 nt, Homo sapiens
  misc_RNA (1)...(19): siRNA sense strand
agaggagguagcugacaaa

SEQ ID NO: 2552318 - RNA, 19 nt, Homo sapiens
  misc_RNA (1)...(19): siRNA sense strand
acuagguuguugugucaua

SEQ ID NO: 2552319 - RNA, 19 nt, Homo sapiens
  misc_RNA (1)...(19): siRNA sense strand
auuuacacuugauggcuaa

SEQ ID NO: 2552320 - RNA, 19 nt, Homo sapiens
  misc_RNA (1)...(19): siRNA sense strand
caagauguggacucggaaa

SEQ ID NO: 2552321 - RNA, 19 nt, Homo sapiens
  misc_RNA (1)...(19): siRNA sense strand
ugaaacugcuuauggggaa

SEQ ID NO: 2552322 - RNA, 19 nt, Homo sapiens
  misc_RNA (1)...(19): siRNA sense strand
aauaugagugugucugaaa

SEQ ID NO: 2552323 - RNA, 19 nt, Homo sapiens
  misc_RNA (1)...(19): siRNA sense strand
uuuagaagaggaaggaaaa

SEQ ID NO: 2552324 - RNA, 19 nt, Homo sapiens
  misc_RNA (1)...(19): siRNA sense strand
auaaacaugcacagcgauu

SEQ ID NO: 2552325 - RNA, 19 nt, Homo sapiens
  misc_RNA (1)...(19): siRNA sense strand
gcuuucuuacuguggaaua

SEQ ID NO: 2552326 - RNA, 19 nt, Homo sapiens
  misc_RNA (1)...(19): siRNA sense strand
augccaaaaugaugggaau

SEQ ID NO: 2552327 - RNA, 19 nt, Homo sapiens
  misc_RNA (1)...(19): siRNA sense strand
uugagaaacuucagcagga

SEQ ID NO: 2552328 - RNA, 19 nt, Homo sapiens
  misc_RNA (1)...(19): siRNA sense strand
uaaugaagacagauaggau

SEQ ID NO: 2552329 - RNA, 19 nt, Homo sapiens
  misc_RNA (1)...(19): siRNA sense strand
ccuuugcacuugcggaauu

SEQ ID NO: 2552330 - RNA, 19 nt, Homo sapiens
  misc_RNA (1)...(19): siRNA sense strand
auaaagauggacagcuaau

SEQ ID NO: 2552331 - RNA, 19 nt, Homo sapiens
  misc_RNA (1)...(19): siRNA sense strand
ggguucauacaaugcauua

SEQ ID NO: 2552332 - RNA, 19 nt, Homo sapiens
  misc_RNA (1)...(19): siRNA sense strand
guguuaaacuucucugcau

SEQ ID NO: 2552333 - RNA, 19 nt, Homo sapiens
  misc_RNA (1)...(19): siRNA sense strand
aaugaagacagauaggauu

SEQ ID NO: 2552334 - RNA, 19 nt, Homo sapiens
  misc_RNA (1)...(19): siRNA sense strand
aggaagucaugguauucaa

SEQ ID NO: 2552335 - RNA, 19 nt, Homo sapiens
  misc_RNA (1)...(19): siRNA sense strand
uagaaagagcacagauacu

SEQ ID NO: 2552336 - RNA, 19 nt, Homo sapiens
  misc_RNA (1)...(19): siRNA sense strand
gagagaaaauggaugggca

SEQ ID NO: 2552337 - RNA, 19 nt, Homo sapiens
  misc_RNA (1)...(19): siRNA sense strand
agaaacuucagcaggauuu

SEQ ID NO: 2552338 - RNA, 19 nt, Homo sapiens
  misc_RNA (1)...(19): siRNA sense strand
agagagaacaaaacagcaa

SEQ ID NO: 2552339 - RNA, 19 nt, Homo sapiens
  misc_RNA (1)...(19): siRNA sense strand
ccuauaauacuucagggua

SEQ ID NO: 2552340 - RNA, 19 nt, Homo sapiens
  misc_RNA (1)...(19): siRNA sense strand
aaacaacaguaggcagaau

SEQ ID NO: 2552341 - RNA, 19 nt, Homo sapiens
  misc_RNA (1)...(19): siRNA sense strand
ccacagaggaggagaagca

SEQ ID NO: 2552342 - RNA, 19 nt, Homo sapiens
  misc_RNA (1)...(19): siRNA sense strand
ggacagaaguucagggagg

SEQ ID NO: 2552343 - RNA, 19 nt, Homo sapiens
  misc_RNA (1)...(19): siRNA sense strand
gauuuguccucaacggaaa

SEQ ID NO: 2552344 - RNA, 19 nt, Homo sapiens
  misc_RNA (1)...(19): siRNA sense strand
uacaagacguggagagcau

SEQ ID NO: 2552345 - RNA, 19 nt, Homo sapiens
  misc_RNA (1)...(19): siRNA sense strand
gcagaaagaaggagaagag

SEQ ID NO: 2552346 - RNA, 19 nt, Homo sapiens
  misc_RNA (1)...(19): siRNA sense strand
caccagaagcagaagaaca

SEQ ID NO: 2552347 - RNA, 19 nt, Homo sapiens
  misc_RNA (1)...(19): siRNA sense strand
ccauggaggcgcucugaua

SEQ ID NO: 2552348 - RNA, 19 nt, Homo sapiens
  misc_RNA (1)...(19): siRNA sense strand
cagcagaucuucuccguuu

SEQ ID NO: 2552349 - RNA, 19 nt, Homo sapiens
  misc_RNA (1)...(19): siRNA sense strand
ucaagauaccuucgagauu

SEQ ID NO: 2552350 - RNA, 19 nt, Homo sapiens
  misc_RNA (1)...(19): siRNA sense strand
gaaagaaggagaagagcug

SEQ ID NO: 2552351 - RNA, 19 nt, Homo sapiens
  misc_RNA (1)...(19): siRNA sense strand
augaauaccuaggaagcaa

SEQ ID NO: 2552352 - RNA, 19 nt, Homo sapiens
  misc_RNA (1)...(19): siRNA sense strand
gggaggacaugcuggccau

SEQ ID NO: 2552353 - RNA, 19 nt, Homo sapiens
  misc_RNA (1)...(19): siRNA sense strand
ucaaccaggcggaacaaua

SEQ ID NO: 2552354 - RNA, 19 nt, Homo sapiens
  misc_RNA (1)...(19): siRNA sense strand
gggauguggucgugguuac

SEQ ID NO: 2552355 - RNA, 19 nt, Homo sapiens
  misc_RNA (1)...(19): siRNA sense strand
aggccacagaggaggagaa

SEQ ID NO: 2552356 - RNA, 19 nt, Homo sapiens
  misc_RNA (1)...(19): siRNA sense strand
gagaagagcugguccuuag

SEQ ID NO: 2552357 - RNA, 19 nt, Homo sapiens
  misc_RNA (1)...(19): siRNA sense strand
gaggaggagaagcagcuaa

SEQ ID NO: 2552358 - RNA, 19 nt, Homo sapiens
  misc_RNA (1)...(19): siRNA sense strand
cagcuaagccucaccauga

SEQ ID NO: 2552359 - RNA, 19 nt, Homo sapiens
  misc_RNA (1)...(19): siRNA sense strand
acaggaaggcccaggagga

SEQ ID NO: 2552360 - RNA, 19 nt, Homo sapiens
  misc_RNA (1)...(19): siRNA sense strand
ggaauucaugggugacgua

SEQ ID NO: 2552361 - RNA, 19 nt, Homo sapiens
  misc_RNA (1)...(19): siRNA sense strand
gagcaugaacagcagcaga

SEQ ID NO: 2552362 - RNA, 19 nt, Homo sapiens
  misc_RNA (1)...(19): siRNA sense strand
agaaagaaggagaagagcu

SEQ ID NO: 2552363 - RNA, 19 nt, Homo sapiens
  misc_RNA (1)...(19): siRNA sense strand
gagcugguccuuagcaaga

SEQ ID NO: 2552364 - RNA, 19 nt, Homo sapiens
  misc_RNA (1)...(19): siRNA sense strand
cagcacuggagaugagcau

SEQ ID NO: 2552365 - RNA, 19 nt, Homo sapiens
  misc_RNA (1)...(19): siRNA sense strand
ccaaaagccccaaggaacu

SEQ ID NO: 2552366 - RNA, 19 nt, Homo sapiens
  misc_RNA (1)...(19): siRNA sense strand
caaccaggcggaacaauau

SEQ ID NO: 2552367 - RNA, 19 nt, Homo sapiens
  misc_RNA (1)...(19): siRNA sense strand
gcagcagauuuguccucaa

SEQ ID NO: 2552368 - RNA, 19 nt, Homo sapiens
  misc_RNA (1)...(19): siRNA sense strand
agaugagccgggaggacau

SEQ ID NO: 2552369 - RNA, 19 nt, Homo sapiens
  misc_RNA (1)...(19): siRNA sense strand
ccaaagagguccuggguga

SEQ ID NO: 2552370 - RNA, 19 nt, Homo sapiens
  misc_RNA (1)...(19): siRNA sense strand
cggaggaacagaagaaaua

SEQ ID NO: 2552371 - RNA, 19 nt, Homo sapiens
  misc_RNA (1)...(19): siRNA sense strand
cggaauaagcagauggaga

SEQ ID NO: 2552372 - RNA, 19 nt, Homo sapiens
  misc_RNA (1)...(19): siRNA sense strand
ugacagaguuuguggacuu

SEQ ID NO: 2552373 - RNA, 19 nt, Homo sapiens
  misc_RNA (1)...(19): siRNA sense strand
acacaggacuauugggaga

SEQ ID NO: 2552374 - RNA, 19 nt, Homo sapiens
  misc_RNA (1)...(19): siRNA sense strand
gcaugagggugguggugaa

SEQ ID NO: 2552375 - RNA, 19 nt, Homo sapiens
  misc_RNA (1)...(19): siRNA sense strand
ggaauaagcagauggagau

SEQ ID NO: 2552376 - RNA, 19 nt, Homo sapiens
  misc_RNA (1)...(19): siRNA sense strand
gggaagaagugguggacuc

SEQ ID NO: 2552377 - RNA, 19 nt, Homo sapiens
  misc_RNA (1)...(19): siRNA sense strand
agaacaagauccagggcau

SEQ ID NO: 2552378 - RNA, 19 nt, Homo sapiens
  misc_RNA (1)...(19): siRNA sense strand
aggagaaagaggaggaguu

SEQ ID NO: 2552379 - RNA, 19 nt, Homo sapiens
  misc_RNA (1)...(19): siRNA sense strand
ggacccagcccauggcaaa

SEQ ID NO: 2552380 - RNA, 19 nt, Homo sapiens
  misc_RNA (1)...(19): siRNA sense strand
ccgaggaggaccugaagaa

SEQ ID NO: 2552381 - RNA, 19 nt, Homo sapiens
  misc_RNA (1)...(19): siRNA sense strand
gggaguggaucgagaccau

SEQ ID NO: 2552382 - RNA, 19 nt, Homo sapiens
  misc_RNA (1)...(19): siRNA sense strand
ugacggaggaacagaagaa

SEQ ID NO: 2552383 - RNA, 19 nt, Homo sapiens
  misc_RNA (1)...(19): siRNA sense strand
ccacccuggccgaggauaa

SEQ ID NO: 2552384 - RNA, 19 nt, Homo sapiens
  misc_RNA (1)...(19): siRNA sense strand
ccaacaagaucaagcucau

SEQ ID NO: 2552385 - RNA, 19 nt, Homo sapiens
  misc_RNA (1)...(19): siRNA sense strand
ggaauaucuucgacagcau

SEQ ID NO: 2552386 - RNA, 19 nt, Homo sapiens
  misc_RNA (1)...(19): siRNA sense strand
gagcacaacugguucgaga

SEQ ID NO: 2552387 - RNA, 19 nt, Homo sapiens
  misc_RNA (1)...(19): siRNA sense strand
cggcaaugacacaugguau

SEQ ID NO: 2552388 - RNA, 19 nt, Homo sapiens
  misc_RNA (1)...(19): siRNA sense strand
gguuaugagugcaucaaga

SEQ ID NO: 2552389 - RNA, 19 nt, Homo sapiens
  misc_RNA (1)...(19): siRNA sense strand
ccgaggauaaggagaaaga

SEQ ID NO: 2552390 - RNA, 19 nt, Homo sapiens
  misc_RNA (1)...(19): siRNA sense strand
acuauaacgccaugaagaa

SEQ ID NO: 2552391 - RNA, 19 nt, Homo sapiens
  misc_RNA (1)...(19): siRNA sense strand
ccaucauccuggagaacuu

SEQ ID NO: 2552392 - RNA, 19 nt, Homo sapiens
  misc_RNA (1)...(19): siRNA sense strand
aggagcaggcagaggagaa

SEQ ID NO: 2552393 - RNA, 19 nt, Homo sapiens
  misc_RNA (1)...(19): siRNA sense strand
ccauggaagaacuggaaga

SEQ ID NO: 2552394 - RNA, 19 nt, Homo sapiens
  misc_RNA (1)...(19): siRNA sense strand
gcaugcagcuguuuggcaa

SEQ ID NO: 2552395 - RNA, 19 nt, Homo sapiens
  misc_RNA (1)...(19): siRNA sense strand
ggcaagagcuacaaggagu

SEQ ID NO: 2552396 - RNA, 19 nt, Homo sapiens
  misc_RNA (1)...(19): siRNA sense strand
agacagacgaccagagcca

SEQ ID NO: 2552397 - RNA, 19 nt, Homo sapiens
  misc_RNA (1)...(19): siRNA sense strand
ucaucaagaucauuggcaa

SEQ ID NO: 2552398 - RNA, 19 nt, Homo sapiens
  misc_RNA (1)...(19): siRNA sense strand
ggucauggucaucggcaau

SEQ ID NO: 2552399 - RNA, 19 nt, Homo sapiens
  misc_RNA (1)...(19): siRNA sense strand
ggcucaaugucaaggucaa

SEQ ID NO: 2552400 - RNA, 19 nt, Homo sapiens
  misc_RNA (1)...(19): siRNA sense strand
uggccgaggauaaggagaa

SEQ ID NO: 2552401 - RNA, 19 nt, Homo sapiens
  misc_RNA (1)...(19): siRNA sense strand
ggagaaagaggaggaguuu

SEQ ID NO: 2552402 - RNA, 19 nt, Homo sapiens
  misc_RNA (1)...(19): siRNA sense strand
gaucccuacuacagcaaua

SEQ ID NO: 2552403 - RNA, 19 nt, Homo sapiens
  misc_RNA (1)...(19): siRNA sense strand
acaaggagugcgugugcaa

SEQ ID NO: 2552404 - RNA, 19 nt, Homo sapiens
  misc_RNA (1)...(19): siRNA sense strand
ucuccgaggucaacaacaa

SEQ ID NO: 2552405 - RNA, 19 nt, Homo sapiens
  misc_RNA (1)...(19): siRNA sense strand
acaacaagucugagugcga

SEQ ID NO: 2552406 - RNA, 19 nt, Homo sapiens
  misc_RNA (1)...(19): siRNA sense strand
ccgugguggccauggcaua

SEQ ID NO: 2552407 - RNA, 19 nt, Homo sapiens
  misc_RNA (1)...(19): siRNA sense strand
gggaaauggacgcccucaa

SEQ ID NO: 2552408 - RNA, 19 nt, Homo sapiens
  misc_RNA (1)...(19): siRNA sense strand
agaccauggaggagaaguu

SEQ ID NO: 2552409 - RNA, 19 nt, Homo sapiens
  misc_RNA (1)...(19): siRNA sense strand
aggaggaccugaagaagga

SEQ ID NO: 2552410 - RNA, 19 nt, Homo sapiens
  misc_RNA (1)...(19): siRNA sense strand
aagaaauacuauaacgcca

SEQ ID NO: 2552411 - RNA, 19 nt, Homo sapiens
  misc_RNA (1)...(19): siRNA sense strand
uggaagaggcccaccaaaa

SEQ ID NO: 2552412 - RNA, 19 nt, Homo sapiens
  misc_RNA (1)...(19): siRNA sense strand
ucaagaaggagucgggcau

SEQ ID NO: 2552413 - RNA, 19 nt, Homo sapiens
  misc_RNA (1)...(19): siRNA sense strand
aggaggaguuucagcagau

SEQ ID NO: 2552414 - RNA, 19 nt, Homo sapiens
  misc_RNA (1)...(19): siRNA sense strand
ugacggagcacuuugacaa

SEQ ID NO: 2552415 - RNA, 19 nt, Homo sapiens
  misc_RNA (1)...(19): siRNA sense strand
ggaugaggauggcgagaug

SEQ ID NO: 2552416 - RNA, 19 nt, Homo sapiens
  misc_RNA (1)...(19): siRNA sense strand
ggccgaggauaaggagaaa

SEQ ID NO: 2552417 - RNA, 19 nt, Homo sapiens
  misc_RNA (1)...(19): siRNA sense strand
auaagcagauggagauuga

SEQ ID NO: 2552418 - RNA, 19 nt, Homo sapiens
  misc_RNA (1)...(19): siRNA sense strand
gggaacagcagcucgccaa

SEQ ID NO: 2552419 - RNA, 19 nt, Homo sapiens
  misc_RNA (1)...(19): siRNA sense strand
ccaagaauguggaguacac

SEQ ID NO: 2552420 - RNA, 19 nt, Homo sapiens
  misc_RNA (1)...(19): siRNA sense strand
aguuuguggacuugggcaa

SEQ ID NO: 2552421 - RNA, 19 nt, Homo sapiens
  misc_RNA (1)...(19): siRNA sense strand
acaacugguucgagaccuu

SEQ ID NO: 2552422 - RNA, 19 nt, Homo sapiens
  misc_RNA (1)...(19): siRNA sense strand
uggccaacguacagggacu

SEQ ID NO: 2552423 - RNA, 19 nt, Homo sapiens
  misc_RNA (1)...(19): siRNA sense strand
gcuucaagauugucgagca

SEQ ID NO: 2552424 - RNA, 19 nt, Homo sapiens
  misc_RNA (1)...(19): siRNA sense strand
aagaugacuuugagauguu

SEQ ID NO: 2552425 - RNA, 19 nt, Homo sapiens
  misc_RNA (1)...(19): siRNA sense strand
gaggauggcgagaugaaca

SEQ ID NO: 2552426 - RNA, 19 nt, Homo sapiens
  misc_RNA (1)...(19): siRNA sense strand
ucaaccagcagaagaagaa

SEQ ID NO: 2552427 - RNA, 19 nt, Homo sapiens
  misc_RNA (1)...(19): siRNA sense strand
ucuuuaugacggaggaaca

SEQ ID NO: 2552428 - RNA, 19 nt, Homo sapiens
  misc_RNA (1)...(19): siRNA sense strand
gauguauggccacgagaau

SEQ ID NO: 2552429 - RNA, 19 nt, Homo sapiens
  misc_RNA (1)...(19): siRNA sense strand
augggaaaccugaggcaga

SEQ ID NO: 2552430 - RNA, 19 nt, Homo sapiens
  misc_RNA (1)...(19): siRNA sense strand
ucauggagaugcugcucaa

SEQ ID NO: 2552431 - RNA, 19 nt, Homo sapiens
  misc_RNA (1)...(19): siRNA sense strand
acggaggaacagaagaaau

SEQ ID NO: 2552432 - RNA, 19 nt, Homo sapiens
  misc_RNA (1)...(19): siRNA sense strand
guacaagugcgcccacaaa

SEQ ID NO: 2552433 - RNA, 19 nt, Homo sapiens
  misc_RNA (1)...(19): siRNA sense strand
agguggacauccuguacaa

SEQ ID NO: 2552434 - RNA, 19 nt, Homo sapiens
  misc_RNA (1)...(19): siRNA sense strand
ccaucugcaucgugcucaa

SEQ ID NO: 2552435 - RNA, 19 nt, Homo sapiens
  misc_RNA (1)...(19): siRNA sense strand
uguucaacuucgagaccuu

SEQ ID NO: 2552436 - RNA, 19 nt, Homo sapiens
  misc_RNA (1)...(19): siRNA sense strand
auaaggagaaagaggagga

SEQ ID NO: 2552437 - RNA, 19 nt, Homo sapiens
  misc_RNA (1)...(19): siRNA sense strand
uggucauggucaucggcaa

SEQ ID NO: 2552438 - RNA, 19 nt, Homo sapiens
  misc_RNA (1)...(19): siRNA sense strand
aggaggacccugaggagca

SEQ ID NO: 2552439 - RNA, 19 nt, Homo sapiens
  misc_RNA (1)...(19): siRNA sense strand
gccaacaccaugagcaaga

SEQ ID NO: 2552440 - RNA, 19 nt, Homo sapiens
  misc_RNA (1)...(19): siRNA sense strand
aggauaaggagaaagagga

SEQ ID NO: 2552441 - RNA, 19 nt, Homo sapiens
  misc_RNA (1)...(19): siRNA sense strand
aggaggaaaccgacacuuu

SEQ ID NO: 2552442 - RNA, 19 nt, Homo sapiens
  misc_RNA (1)...(19): siRNA sense strand
gugaagaugacuuugagau

SEQ ID NO: 2552443 - RNA, 19 nt, Homo sapiens
  misc_RNA (1)...(19): siRNA sense strand
uugaggagcccgaacggaa

SEQ ID NO: 2552444 - RNA, 19 nt, Homo sapiens
  misc_RNA (1)...(19): siRNA sense strand
ccucagccugguagagcua

SEQ ID NO: 2552445 - RNA, 19 nt, Homo sapiens
  misc_RNA (1)...(19): siRNA sense strand
gaauaagcagauggagauu

SEQ ID NO: 2552446 - RNA, 19 nt, Homo sapiens
  misc_RNA (1)...(19): siRNA sense strand
aggauggcgagaugaacaa

SEQ ID NO: 2552447 - RNA, 19 nt, Homo sapiens
  misc_RNA (1)...(19): siRNA sense strand
gagccugaggauagcaaga

SEQ ID NO: 2552448 - RNA, 19 nt, Homo sapiens
  misc_RNA (1)...(19): siRNA sense strand
aggaacagaagaaauacua

SEQ ID NO: 2552449 - RNA, 19 nt, Homo sapiens
  misc_RNA (1)...(19): siRNA sense strand
ucaacaagggcaaggccau

SEQ ID NO: 2552450 - RNA, 19 nt, Homo sapiens
  misc_RNA (1)...(19): siRNA sense strand
gccaacgacacguggaaca

SEQ ID NO: 2552451 - RNA, 19 nt, Homo sapiens
  misc_RNA (1)...(19): siRNA sense strand
gguacaagugcgcccacaa

SEQ ID NO: 2552452 - RNA, 19 nt, Homo sapiens
  misc_RNA (1)...(19): siRNA sense strand
ccuacggcuuuaaggugua

SEQ ID NO: 2552453 - RNA, 19 nt, Homo sapiens
  misc_RNA (1)...(19): siRNA sense strand
cagcagaagaagaaguuag

SEQ ID NO: 2552454 - RNA, 19 nt, Homo sapiens
  misc_RNA (1)...(19): siRNA sense strand
ccgaggaugagaagaagga

SEQ ID NO: 2552455 - RNA, 19 nt, Homo sapiens
  misc_RNA (1)...(19): siRNA sense strand
uggcuggacuucaguguca

SEQ ID NO: 2552456 - RNA, 19 nt, Homo sapiens
  misc_RNA (1)...(19): siRNA sense strand
ugguaggacugcagcucuu

SEQ ID NO: 2552457 - RNA, 19 nt, Homo sapiens
  misc_RNA (1)...(19): siRNA sense strand
ggauaaggagaaagaggag

SEQ ID NO: 2552458 - RNA, 19 nt, Homo sapiens
  misc_RNA (1)...(19): siRNA sense strand
ugaagaaggacaaucacau

SEQ ID NO: 2552459 - RNA, 19 nt, Homo sapiens
  misc_RNA (1)...(19): siRNA sense strand
ucgacaucuccgaggucaa

SEQ ID NO: 2552460 - RNA, 19 nt, Homo sapiens
  misc_RNA (1)...(19): siRNA sense strand
acaacgugggucugggcua

SEQ ID NO: 2552461 - RNA, 19 nt, Homo sapiens
  misc_RNA (1)...(19): siRNA sense strand
gcaucgaugauauguucaa

SEQ ID NO: 2552462 - RNA, 19 nt, Homo sapiens
  misc_RNA (1)...(19): siRNA sense strand
ucgccaucauccuggagaa

SEQ ID NO: 2552463 - RNA, 19 nt, Homo sapiens
  misc_RNA (1)...(19): siRNA sense strand
agaggaagcacgaggaggu

SEQ ID NO: 2552464 - RNA, 19 nt, Homo sapiens
  misc_RNA (1)...(19): siRNA sense strand
ccaucaaggugcucaucca

SEQ ID NO: 2552465 - RNA, 19 nt, Homo sapiens
  misc_RNA (1)...(19): siRNA sense strand
gaguacaccuucacaggga

SEQ ID NO: 2552466 - RNA, 19 nt, Homo sapiens
  misc_RNA (1)...(19): siRNA sense strand
ugggaaaccugaggcagaa

SEQ ID NO: 2552467 - RNA, 19 nt, Homo sapiens
  misc_RNA (1)...(19): siRNA sense strand
ggcaaagacugcaauggca

SEQ ID NO: 2552468 - RNA, 19 nt, Homo sapiens
  misc_RNA (1)...(19): siRNA sense strand
cagcaggguuggaauaucu

SEQ ID NO: 2552469 - RNA, 19 nt, Homo sapiens
  misc_RNA (1)...(19): siRNA sense strand
uugccaaauucgaggagaa

SEQ ID NO: 2552470 - RNA, 19 nt, Homo sapiens
  misc_RNA (1)...(19): siRNA sense strand
uggccaagcaggagggcau

SEQ ID NO: 2552471 - RNA, 19 nt, Homo sapiens
  misc_RNA (1)...(19): siRNA sense strand
agaagauugucgagggcga

SEQ ID NO: 2552472 - RNA, 19 nt, Homo sapiens
  misc_RNA (1)...(19): siRNA sense strand
ccaaauucgaggagaagca

SEQ ID NO: 2552473 - RNA, 19 nt, Homo sapiens
  misc_RNA (1)...(19): siRNA sense strand
cagcaggagaagcggaaaa

SEQ ID NO: 2552474 - RNA, 19 nt, Homo sapiens
  misc_RNA (1)...(19): siRNA sense strand
ucgauggagccgaggguga

SEQ ID NO: 2552475 - RNA, 19 nt, Homo sapiens
  misc_RNA (1)...(19): siRNA sense strand
agaucgagggccuggagaa

SEQ ID NO: 2552476 - RNA, 19 nt, Homo sapiens
  misc_RNA (1)...(19): siRNA sense strand
agcugaagcaccaggagaa

SEQ ID NO: 2552477 - RNA, 19 nt, Homo sapiens
  misc_RNA (1)...(19): siRNA sense strand
gggugauggacgaugacau

SEQ ID NO: 2552478 - RNA, 19 nt, Homo sapiens
  misc_RNA (1)...(19): siRNA sense strand
uugagaagaucgagggccu

SEQ ID NO: 2552479 - RNA, 19 nt, Homo sapiens
  misc_RNA (1)...(19): siRNA sense strand
uggacgaggaccugccuaa

SEQ ID NO: 2552480 - RNA, 19 nt, Homo sapiens
  misc_RNA (1)...(19): siRNA sense strand
agaugcagcugguggagca

SEQ ID NO: 2552481 - RNA, 19 nt, Homo sapiens
  misc_RNA (1)...(19): siRNA sense strand
agguguugucgcugggcaa

SEQ ID NO: 2552482 - RNA, 19 nt, Homo sapiens
  misc_RNA (1)...(19): siRNA sense strand
uggugaaccuggaggaccu

SEQ ID NO: 2552483 - RNA, 19 nt, Homo sapiens
  misc_RNA (1)...(19): siRNA sense strand
uugacaacaugaugaacau

SEQ ID NO: 2552484 - RNA, 19 nt, Homo sapiens
  misc_RNA (1)...(19): siRNA sense strand
gagcugaagcaccaggaga

SEQ ID NO: 2552485 - RNA, 19 nt, Homo sapiens
  misc_RNA (1)...(19): siRNA sense strand
gaggauuacaagauguuca

SEQ ID NO: 2552486 - RNA, 19 nt, Homo sapiens
  misc_RNA (1)...(19): siRNA sense strand
gcauguacgcugaggacuc

SEQ ID NO: 2552487 - RNA, 19 nt, Homo sapiens
  misc_RNA (1)...(19): siRNA sense strand
ucgacgagcugaagcacca

SEQ ID NO: 2552488 - RNA, 19 nt, Homo sapiens
  misc_RNA (1)...(19): siRNA sense strand
cgugaggccauccaggaaa

SEQ ID NO: 2552489 - RNA, 19 nt, Homo sapiens
  misc_RNA (1)...(19): siRNA sense strand
ugcccaacauugagaagau

SEQ ID NO: 2552490 - RNA, 19 nt, Homo sapiens
  misc_RNA (1)...(19): siRNA sense strand
cggauugacaacaugauga

SEQ ID NO: 2552491 - RNA, 19 nt, Homo sapiens
  misc_RNA (1)...(19): siRNA sense strand
gggucaggcaugugggaca

SEQ ID NO: 2552492 - RNA, 19 nt, Homo sapiens
  misc_RNA (1)...(19): siRNA sense strand
guggagagcaugaggagga

SEQ ID NO: 2552493 - RNA, 19 nt, Homo sapiens
  misc_RNA (1)...(19): siRNA sense strand
agguggaggaggaguacaa

SEQ ID NO: 2552494 - RNA, 19 nt, Homo sapiens
  misc_RNA (1)...(19): siRNA sense strand
uggaaauacugcaccgaga

SEQ ID NO: 2552495 - RNA, 19 nt, Homo sapiens
  misc_RNA (1)...(19): siRNA sense strand
ucaucuacuccaagaacaa

SEQ ID NO: 2552496 - RNA, 19 nt, Homo sapiens
  misc_RNA (1)...(19): siRNA sense strand
cugcagaagcgaaaggagu

SEQ ID NO: 2552497 - RNA, 19 nt, Homo sapiens
  misc_RNA (1)...(19): siRNA sense strand
gccagguggaggaggagua

SEQ ID NO: 2552498 - RNA, 19 nt, Homo sapiens
  misc_RNA (1)...(19): siRNA sense strand
ccucuguccuggauggaga

SEQ ID NO: 2552499 - RNA, 19 nt, Homo sapiens
  misc_RNA (1)...(19): siRNA sense strand
uguacauggagaaggauga

SEQ ID NO: 2552500 - RNA, 19 nt, Homo sapiens
  misc_RNA (1)...(19): siRNA sense strand
gaggauggcucuuuggaac

SEQ ID NO: 2552501 - RNA, 19 nt, Homo sapiens
  misc_RNA (1)...(19): siRNA sense strand
gauaagacaugcaugcagu

SEQ ID NO: 2552502 - RNA, 19 nt, Homo sapiens
  misc_RNA (1)...(19): siRNA sense strand
aggaguacaagcugcggaa

SEQ ID NO: 2552503 - RNA, 19 nt, Homo sapiens
  misc_RNA (1)...(19): siRNA sense strand
aggaguacucugagaucca

SEQ ID NO: 2552504 - RNA, 19 nt, Homo sapiens
  misc_RNA (1)...(19): siRNA sense strand
aucccaauguggagagcau

SEQ ID NO: 2552505 - RNA, 19 nt, Homo sapiens
  misc_RNA (1)...(19): siRNA sense strand
cuuaugaggaaguggugaa

SEQ ID NO: 2552506 - RNA, 19 nt, Homo sapiens
  misc_RNA (1)...(19): siRNA sense strand
agagaagacgccugggaga

SEQ ID NO: 2552507 - RNA, 19 nt, Homo sapiens
  misc_RNA (1)...(19): siRNA sense strand
ccgcaugccugcugcugaa

SEQ ID NO: 2552508 - RNA, 19 nt, Homo sapiens
  misc_RNA (1)...(19): siRNA sense strand
uugaagugugugugugcaa

SEQ ID NO: 2552509 - RNA, 19 nt, Homo sapiens
  misc_RNA (1)...(19): siRNA sense strand
gggagaaaccggaggauuu

SEQ ID NO: 2552510 - RNA, 19 nt, Homo sapiens
  misc_RNA (1)...(19): siRNA sense strand
acauggaagaggagaggaa

SEQ ID NO: 2552511 - RNA, 19 nt, Homo sapiens
  misc_RNA (1)...(19): siRNA sense strand
uggcaaagauggaauuauu

SEQ ID NO: 2552512 - RNA, 19 nt, Homo sapiens
  misc_RNA (1)...(19): siRNA sense strand
acacagugcuccaagggua

SEQ ID NO: 2552513 - RNA, 19 nt, Homo sapiens
  misc_RNA (1)...(19): siRNA sense strand
ugggagaacaacuggcaaa

SEQ ID NO: 2552514 - RNA, 19 nt, Homo sapiens
  misc_RNA (1)...(19): siRNA sense strand
gcacauugaucuuacccaa

SEQ ID NO: 2552515 - RNA, 19 nt, Homo sapiens
  misc_RNA (1)...(19): siRNA sense strand
cuuuauuccuuuugggaua

SEQ ID NO: 2552516 - RNA, 19 nt, Homo sapiens
  misc_RNA (1)...(19): siRNA sense strand
ucaaauaugugaaagcaga

SEQ ID NO: 2552517 - RNA, 19 nt, Homo sapiens
  misc_RNA (1)...(19): siRNA sense strand
ccuccugacuggaagauuu

SEQ ID NO: 2552518 - RNA, 19 nt, Homo sapiens
  misc_RNA (1)...(19): siRNA sense strand
gagaacaacuggcaaagau

SEQ ID NO: 2552519 - RNA, 19 nt, Homo sapiens
  misc_RNA (1)...(19): siRNA sense strand
acauagagacccagccauu

SEQ ID NO: 2552520 - RNA, 19 nt, Homo sapiens
  misc_RNA (1)...(19): siRNA sense strand
auggaagugcagaggcuaa

SEQ ID NO: 2552521 - RNA, 19 nt, Homo sapiens
  misc_RNA (1)...(19): siRNA sense strand
cggaggauuucuacccuaa

SEQ ID NO: 2552522 - RNA, 19 nt, Homo sapiens
  misc_RNA (1)...(19): siRNA sense strand
ccaaggacaacuaauuaaa

SEQ ID NO: 2552523 - RNA, 19 nt, Homo sapiens
  misc_RNA (1)...(19): siRNA sense strand
gguguguaugggagaacaa

SEQ ID NO: 2552524 - RNA, 19 nt, Homo sapiens
  misc_RNA (1)...(19): siRNA sense strand
ccaucgugaccaaggagaa

SEQ ID NO: 2552525 - RNA, 19 nt, Homo sapiens
  misc_RNA (1)...(19): siRNA sense strand
auggaagaggagaggaaaa

SEQ ID NO: 2552526 - RNA, 19 nt, Homo sapiens
  misc_RNA (1)...(19): siRNA sense strand
caacauaugcccuuggcuu

SEQ ID NO: 2552527 - RNA, 19 nt, Homo sapiens
  misc_RNA (1)...(19): siRNA sense strand
gggauagggaagcgggugu

SEQ ID NO: 2552528 - RNA, 19 nt, Homo sapiens
  misc_RNA (1)...(19): siRNA sense strand
ucauaugaccucagagaac

SEQ ID NO: 2552529 - RNA, 19 nt, Homo sapiens
  misc_RNA (1)...(19): siRNA sense strand
gggacugauaccacaacua

SEQ ID NO: 2552530 - RNA, 19 nt, Homo sapiens
  misc_RNA (1)...(19): siRNA sense strand
ugaccaaggacaacuaauu

SEQ ID NO: 2552531 - RNA, 19 nt, Homo sapiens
  misc_RNA (1)...(19): siRNA sense strand
gaccaaggacaacuaauua

SEQ ID NO: 2552532 - RNA, 19 nt, Homo sapiens
  misc_RNA (1)...(19): siRNA sense strand
gacuggaagauuuggucua

SEQ ID NO: 2552533 - RNA, 19 nt, Homo sapiens
  misc_RNA (1)...(19): siRNA sense strand
aggccgaggucuucagcga

SEQ ID NO: 2552534 - RNA, 19 nt, Homo sapiens
  misc_RNA (1)...(19): siRNA sense strand
gaguuucgcauuugcuuua

SEQ ID NO: 2552535 - RNA, 19 nt, Homo sapiens
  misc_RNA (1)...(19): siRNA sense strand
ugaaagcagaaaugcaaaa

SEQ ID NO: 2552536 - RNA, 19 nt, Homo sapiens
  misc_RNA (1)...(19): siRNA sense strand
ucuggaugaccaaggacaa

SEQ ID NO: 2552537 - RNA, 19 nt, Homo sapiens
  misc_RNA (1)...(19): siRNA sense strand
ggaugaccaaggacaacua

SEQ ID NO: 2552538 - RNA, 19 nt, Homo sapiens
  misc_RNA (1)...(19): siRNA sense strand
uagggaagcggguguguau

SEQ ID NO: 2552539 - RNA, 19 nt, Homo sapiens
  misc_RNA (1)...(19): siRNA sense strand
caacuggcaaagauggaau

SEQ ID NO: 2552540 - RNA, 19 nt, Homo sapiens
  misc_RNA (1)...(19): siRNA sense strand
ccugcaucauggagaagaa

SEQ ID NO: 2552541 - RNA, 19 nt, Homo sapiens
  misc_RNA (1)...(19): siRNA sense strand
ccaacguggaggaggaguu

SEQ ID NO: 2552542 - RNA, 19 nt, Homo sapiens
  misc_RNA (1)...(19): siRNA sense strand
ucuacaaccgcaugggcua

SEQ ID NO: 2552543 - RNA, 19 nt, Homo sapiens
  misc_RNA (1)...(19): siRNA sense strand
agaucgggcugguggucau

SEQ ID NO: 2552544 - RNA, 19 nt, Homo sapiens
  misc_RNA (1)...(19): siRNA sense strand
cggcugaaccugcgcuaca

SEQ ID NO: 2552545 - RNA, 19 nt, Homo sapiens
  misc_RNA (1)...(19): siRNA sense strand
cagcgaugguguagagguc

SEQ ID NO: 2552546 - RNA, 19 nt, Homo sapiens
  misc_RNA (1)...(19): siRNA sense strand
uggagcuggccaagggcaa

SEQ ID NO: 2552547 - RNA, 19 nt, Homo sapiens
  misc_RNA (1)...(19): siRNA sense strand
acaaggaggccgugggcaa

SEQ ID NO: 2552548 - RNA, 19 nt, Homo sapiens
  misc_RNA (1)...(19): siRNA sense strand
cggcaggagaccaaggaaa

SEQ ID NO: 2552549 - RNA, 19 nt, Homo sapiens
  misc_RNA (1)...(19): siRNA sense strand
acuuuaaagaggagaacau

SEQ ID NO: 2552550 - RNA, 19 nt, Homo sapiens
  misc_RNA (1)...(19): siRNA sense strand
gcgagaagcuguccgccaa

SEQ ID NO: 2552551 - RNA, 19 nt, Homo sapiens
  misc_RNA (1)...(19): siRNA sense strand
ccacaugauccuagagaac

SEQ ID NO: 2552552 - RNA, 19 nt, Homo sapiens
  misc_RNA (1)...(19): siRNA sense strand
cagaagaagcugcuggaca

SEQ ID NO: 2552553 - RNA, 19 nt, Homo sapiens
  misc_RNA (1)...(19): siRNA sense strand
gagcaaggccgaugggauc

SEQ ID NO: 2552554 - RNA, 19 nt, Homo sapiens
  misc_RNA (1)...(19): siRNA sense strand
uggcagaagugaaggagcu

SEQ ID NO: 2552555 - RNA, 19 nt, Homo sapiens
  misc_RNA (1)...(19): siRNA sense strand
guaacuuuaaagaggagaa

SEQ ID NO: 2552556 - RNA, 19 nt, Homo sapiens
  misc_RNA (1)...(19): siRNA sense strand
aggaauucccagagaagca

SEQ ID NO: 2552557 - RNA, 19 nt, Homo sapiens
  misc_RNA (1)...(19): siRNA sense strand
gccacaaauaugacaggaa

SEQ ID NO: 2552558 - RNA, 19 nt, Homo sapiens
  misc_RNA (1)...(19): siRNA sense strand
agguagacaacgaccacaa

SEQ ID NO: 2552559 - RNA, 19 nt, Homo sapiens
  misc_RNA (1)...(19): siRNA sense strand
ccuguaacuucgagccaca

SEQ ID NO: 2552560 - RNA, 19 nt, Homo sapiens
  misc_RNA (1)...(19): siRNA sense strand
ccacaaauaugacaggaac

SEQ ID NO: 2552561 - RNA, 19 nt, Homo sapiens
  misc_RNA (1)...(19): siRNA sense strand
ggacaagacaugugaccag

SEQ ID NO: 2552562 - RNA, 19 nt, Homo sapiens
  misc_RNA (1)...(19): siRNA sense strand
aggugacggugcagcggaa

SEQ ID NO: 2552563 - RNA, 19 nt, Homo sapiens
  misc_RNA (1)...(19): siRNA sense strand
gcaguaacuuuaaagagga

SEQ ID NO: 2552564 - RNA, 19 nt, Homo sapiens
  misc_RNA (1)...(19): siRNA sense strand
cacaaauaugacaggaaca

SEQ ID NO: 2552565 - RNA, 19 nt, Homo sapiens
  misc_RNA (1)...(19): siRNA sense strand
agagcaaggccgaugggau

SEQ ID NO: 2552566 - RNA, 19 nt, Homo sapiens
  misc_RNA (1)...(19): siRNA sense strand
cuacaaaguaaguggugac

SEQ ID NO: 2552567 - RNA, 19 nt, Homo sapiens
  misc_RNA (1)...(19): siRNA sense strand
uggagugcccuguggaaca

SEQ ID NO: 2552568 - RNA, 19 nt, Homo sapiens
  misc_RNA (1)...(19): siRNA sense strand
gugaggagguggaggaacg

SEQ ID NO: 2552569 - RNA, 19 nt, Homo sapiens
  misc_RNA (1)...(19): siRNA sense strand
aggugcugguuaaggauuu

SEQ ID NO: 2552570 - RNA, 19 nt, Homo sapiens
  misc_RNA (1)...(19): siRNA sense strand
ucaucagcgucuucagcaa

SEQ ID NO: 2552571 - RNA, 19 nt, Homo sapiens
  misc_RNA (1)...(19): siRNA sense strand
ugaaugccaucgaggccua

SEQ ID NO: 2552572 - RNA, 19 nt, Homo sapiens
  misc_RNA (1)...(19): siRNA sense strand
gugcugaauggcauggaau

SEQ ID NO: 2552573 - RNA, 19 nt, Homo sapiens
  misc_RNA (1)...(19): siRNA sense strand
gugcaaaagcugaaggaca

SEQ ID NO: 2552574 - RNA, 19 nt, Homo sapiens
  misc_RNA (1)...(19): siRNA sense strand
agaucaaagcaauuggaga

SEQ ID NO: 2552575 - RNA, 19 nt, Homo sapiens
  misc_RNA (1)...(19): siRNA sense strand
aggcucagcaacaggcuaa

SEQ ID NO: 2552576 - RNA, 19 nt, Homo sapiens
  misc_RNA (1)...(19): siRNA sense strand
uggagagaucaaagcaauu

SEQ ID NO: 2552577 - RNA, 19 nt, Homo sapiens
  misc_RNA (1)...(19): siRNA sense strand
cuagcuuggcugauaacaa

SEQ ID NO: 2552578 - RNA, 19 nt, Homo sapiens
  misc_RNA (1)...(19): siRNA sense strand
acaaggaaucauagaguau

SEQ ID NO: 2552579 - RNA, 19 nt, Homo sapiens
  misc_RNA (1)...(19): siRNA sense strand
cuacaauggcacaaggaau

SEQ ID NO: 2552580 - RNA, 19 nt, Homo sapiens
  misc_RNA (1)...(19): siRNA sense strand
cuucagugcaauugguuaa

SEQ ID NO: 2552581 - RNA, 19 nt, Homo sapiens
  misc_RNA (1)...(19): siRNA sense strand
agaaaaugcaugugaaaga

SEQ ID NO: 2552582 - RNA, 19 nt, Homo sapiens
  misc_RNA (1)...(19): siRNA sense strand
ccaaguacuuucaaggaga

SEQ ID NO: 2552583 - RNA, 19 nt, Homo sapiens
  misc_RNA (1)...(19): siRNA sense strand
aaccaaagaaccuggcaaa

SEQ ID NO: 2552584 - RNA, 19 nt, Homo sapiens
  misc_RNA (1)...(19): siRNA sense strand
caguugaacaccaggaaaa

SEQ ID NO: 2552585 - RNA, 19 nt, Homo sapiens
  misc_RNA (1)...(19): siRNA sense strand
gccaacauucugaaggaaa

SEQ ID NO: 2552586 - RNA, 19 nt, Homo sapiens
  misc_RNA (1)...(19): siRNA sense strand
uuauuguugucuugggaaa

SEQ ID NO: 2552587 - RNA, 19 nt, Homo sapiens
  misc_RNA (1)...(19): siRNA sense strand
ccagaugaccagaaagcau

SEQ ID NO: 2552588 - RNA, 19 nt, Homo sapiens
  misc_RNA (1)...(19): siRNA sense strand
aagaauugccugugagacu

SEQ ID NO: 2552589 - RNA, 19 nt, Homo sapiens
  misc_RNA (1)...(19): siRNA sense strand
gaaccaaagaaccuggcaa

SEQ ID NO: 2552590 - RNA, 19 nt, Homo sapiens
  misc_RNA (1)...(19): siRNA sense strand
aagaaugcaaugcgggcaa

SEQ ID NO: 2552591 - RNA, 19 nt, Homo sapiens
  misc_RNA (1)...(19): siRNA sense strand
ucagaaaaugcaugugaaa

SEQ ID NO: 2552592 - RNA, 19 nt, Homo sapiens
  misc_RNA (1)...(19): siRNA sense strand
gguuaaaagcugguauaua

SEQ ID NO: 2552593 - RNA, 19 nt, Homo sapiens
  misc_RNA (1)...(19): siRNA sense strand
ccuuacaccaauagagguu

SEQ ID NO: 2552594 - RNA, 19 nt, Homo sapiens
  misc_RNA (1)...(19): siRNA sense strand
ugguauauacagagccuga

SEQ ID NO: 2552595 - RNA, 19 nt, Homo sapiens
  misc_RNA (1)...(19): siRNA sense strand
gcuacuggacuuugguuca

SEQ ID NO: 2552596 - RNA, 19 nt, Homo sapiens
  misc_RNA (1)...(19): siRNA sense strand
acaggaaacccaagccaca

SEQ ID NO: 2552597 - RNA, 19 nt, Homo sapiens
  misc_RNA (1)...(19): siRNA sense strand
ggaaauuucuggaacggaa

SEQ ID NO: 2552598 - RNA, 19 nt, Homo sapiens
  misc_RNA (1)...(19): siRNA sense strand
gggugaugucauuggaaaa

SEQ ID NO: 2552599 - RNA, 19 nt, Homo sapiens
  misc_RNA (1)...(19): siRNA sense strand
gcugcagacagaagaggaa

SEQ ID NO: 2552600 - RNA, 19 nt, Homo sapiens
  misc_RNA (1)...(19): siRNA sense strand
auaucuaaguccagagagu

SEQ ID NO: 2552601 - RNA, 19 nt, Homo sapiens
  misc_RNA (1)...(19): siRNA sense strand
acacauaaagacugcccaa

SEQ ID NO: 2552602 - RNA, 19 nt, Homo sapiens
  misc_RNA (1)...(19): siRNA sense strand
gaacagaccugaauccgau

SEQ ID NO: 2552603 - RNA, 19 nt, Homo sapiens
  misc_RNA (1)...(19): siRNA sense strand
ggcgaagggugguagacga

SEQ ID NO: 2552604 - RNA, 19 nt, Homo sapiens
  misc_RNA (1)...(19): siRNA sense strand
aagaggaaggucuggguga

SEQ ID NO: 2552605 - RNA, 19 nt, Homo sapiens
  misc_RNA (1)...(19): siRNA sense strand
aagaacucacccagacaaa

SEQ ID NO: 2552606 - RNA, 19 nt, Homo sapiens
  misc_RNA (1)...(19): siRNA sense strand
aggaagaggagagcagcaa

SEQ ID NO: 2552607 - RNA, 19 nt, Homo sapiens
  misc_RNA (1)...(19): siRNA sense strand
ccuucaauaaagacagaca

SEQ ID NO: 2552608 - RNA, 19 nt, Homo sapiens
  misc_RNA (1)...(19): siRNA sense strand
cuucaauaaagacagacaa

SEQ ID NO: 2552609 - RNA, 19 nt, Homo sapiens
  misc_RNA (1)...(19): siRNA sense strand
uggaaaagaaagcagaaga

SEQ ID NO: 2552610 - RNA, 19 nt, Homo sapiens
  misc_RNA (1)...(19): siRNA sense strand
ggaaauuucuggaacggaa

SEQ ID NO: 2552611 - RNA, 19 nt, Homo sapiens
  misc_RNA (1)...(19): siRNA sense strand
gggugaugucauuggaaaa

SEQ ID NO: 2552612 - RNA, 19 nt, Homo sapiens
  misc_RNA (1)...(19): siRNA sense strand
gcugcagacagaagaggaa

SEQ ID NO: 2552613 - RNA, 19 nt, Homo sapiens
  misc_RNA (1)...(19): siRNA sense strand
auaucuaaguccagagagu

SEQ ID NO: 2552614 - RNA, 19 nt, Homo sapiens
  misc_RNA (1)...(19): siRNA sense strand
acacauaaagacugcccaa

SEQ ID NO: 2552615 - RNA, 19 nt, Homo sapiens
  misc_RNA (1)...(19): siRNA sense strand
gaacagaccugaauccgau

SEQ ID NO: 2552616 - RNA, 19 nt, Homo sapiens
  misc_RNA (1)...(19): siRNA sense strand
ggcgaagggugguagacga

SEQ ID NO: 2552617 - RNA, 19 nt, Homo sapiens
  misc_RNA (1)...(19): siRNA sense strand
aagaggaaggucuggguga

SEQ ID NO: 2552618 - RNA, 19 nt, Homo sapiens
  misc_RNA (1)...(19): siRNA sense strand
aagaacucacccagacaaa

SEQ ID NO: 2552619 - RNA, 19 nt, Homo sapiens
  misc_RNA (1)...(19): siRNA sense strand
aggaagaggagagcagcaa

SEQ ID NO: 2552620 - RNA, 19 nt, Homo sapiens
  misc_RNA (1)...(19): siRNA sense strand
ccuucaauaaagacagaca

SEQ ID NO: 2552621 - RNA, 19 nt, Homo sapiens
  misc_RNA (1)...(19): siRNA sense strand
cuucaauaaagacagacaa

SEQ ID NO: 2552622 - RNA, 19 nt, Homo sapiens
  misc_RNA (1)...(19): siRNA sense strand
uggaaaagaaagcagaaga

SEQ ID NO: 2552623 - RNA, 19 nt, Homo sapiens
  misc_RNA (1)...(19): siRNA sense strand
ggaaauuucuggaacggaa

SEQ ID NO: 2552624 - RNA, 19 nt, Homo sapiens
  misc_RNA (1)...(19): siRNA sense strand
gggugaugucauuggaaaa

SEQ ID NO: 2552625 - RNA, 19 nt, Homo sapiens
  misc_RNA (1)...(19): siRNA sense strand
gcugcagacagaagaggaa

SEQ ID NO: 2552626 - RNA, 19 nt, Homo sapiens
  misc_RNA (1)...(19): siRNA sense strand
auaucuaaguccagagagu

SEQ ID NO: 2552627 - RNA, 19 nt, Homo sapiens
  misc_RNA (1)...(19): siRNA sense strand
acacauaaagacugcccaa

SEQ ID NO: 2552628 - RNA, 19 nt, Homo sapiens
  misc_RNA (1)...(19): siRNA sense strand
gaacagaccugaauccgau

SEQ ID NO: 2552629 - RNA, 19 nt, Homo sapiens
  misc_RNA (1)...(19): siRNA sense strand
ggcgaagggugguagacga

SEQ ID NO: 2552630 - RNA, 19 nt, Homo sapiens
  misc_RNA (1)...(19): siRNA sense strand
aagaggaaggucuggguga

SEQ ID NO: 2552631 - RNA, 19 nt, Homo sapiens
  misc_RNA (1)...(19): siRNA sense strand
aagaacucacccagacaaa

SEQ ID NO: 2552632 - RNA, 19 nt, Homo sapiens
  misc_RNA (1)...(19): siRNA sense strand
ccuucaauaaagacagaca

SEQ ID NO: 2552633 - RNA, 19 nt, Homo sapiens
  misc_RNA (1)...(19): siRNA sense strand
aggaagaggagagcagcaa

SEQ ID NO: 2552634 - RNA, 19 nt, Homo sapiens
  misc_RNA (1)...(19): siRNA sense strand
cuucaauaaagacagacaa

SEQ ID NO: 2552635 - RNA, 19 nt, Homo sapiens
  misc_RNA (1)...(19): siRNA sense strand
uggaaaagaaagcagaaga

SEQ ID NO: 2552636 - RNA, 19 nt, Homo sapiens
  misc_RNA (1)...(19): siRNA sense strand
gggaaaagaacgagggauc

SEQ ID NO: 2552637 - RNA, 19 nt, Homo sapiens
  misc_RNA (1)...(19): siRNA sense strand
cugccauaaagaagaauaa

SEQ ID NO: 2552638 - RNA, 19 nt, Homo sapiens
  misc_RNA (1)...(19): siRNA sense strand
acaagauggcaaagagaca

SEQ ID NO: 2552639 - RNA, 19 nt, Homo sapiens
  misc_RNA (1)...(19): siRNA sense strand
aguucaaggcaguaaauau

SEQ ID NO: 2552640 - RNA, 19 nt, Homo sapiens
  misc_RNA (1)...(19): siRNA sense strand
acaccaaggaagauguauu

SEQ ID NO: 2552641 - RNA, 19 nt, Homo sapiens
  misc_RNA (1)...(19): siRNA sense strand
caacgaagguuuugggaac

SEQ ID NO: 2552642 - RNA, 19 nt, Homo sapiens
  misc_RNA (1)...(19): siRNA sense strand
acggcaaugaagaagauaa

SEQ ID NO: 2552643 - RNA, 19 nt, Homo sapiens
  misc_RNA (1)...(19): siRNA sense strand
gaauagugagaguggggaa

SEQ ID NO: 2552644 - RNA, 19 nt, Homo sapiens
  misc_RNA (1)...(19): siRNA sense strand
gagaagugauggagggugc

SEQ ID NO: 2552645 - RNA, 19 nt, Homo sapiens
  misc_RNA (1)...(19): siRNA sense strand
aagauggcaaagagacaaa

SEQ ID NO: 2552646 - RNA, 19 nt, Homo sapiens
  misc_RNA (1)...(19): siRNA sense strand
cagaauauguaucggggau

SEQ ID NO: 2552647 - RNA, 19 nt, Homo sapiens
  misc_RNA (1)...(19): siRNA sense strand
aagaauaaccccaggaagu

SEQ ID NO: 2552648 - RNA, 19 nt, Homo sapiens
  misc_RNA (1)...(19): siRNA sense strand
auggagagacuguggaguu

SEQ ID NO: 2552649 - RNA, 19 nt, Homo sapiens
  misc_RNA (1)...(19): siRNA sense strand
guuugauguuguugaagga

SEQ ID NO: 2552650 - RNA, 19 nt, Homo sapiens
  misc_RNA (1)...(19): siRNA sense strand
gacaagaaggucaucgcaa

SEQ ID NO: 2552651 - RNA, 19 nt, Homo sapiens
  misc_RNA (1)...(19): siRNA sense strand
cgauccaccagcugagaau

SEQ ID NO: 2552652 - RNA, 19 nt, Homo sapiens
  misc_RNA (1)...(19): siRNA sense strand
uuaccagaauagugagagu

SEQ ID NO: 2552653 - RNA, 19 nt, Homo sapiens
  misc_RNA (1)...(19): siRNA sense strand
cggaagaggccuuggcaca

SEQ ID NO: 2552654 - RNA, 19 nt, Homo sapiens
  misc_RNA (1)...(19): siRNA sense strand
ccaaagagauccugggcag

SEQ ID NO: 2552655 - RNA, 19 nt, Homo sapiens
  misc_RNA (1)...(19): siRNA sense strand
aauuaugagcccaaagaga

SEQ ID NO: 2552656 - RNA, 19 nt, Homo sapiens
  misc_RNA (1)...(19): siRNA sense strand
cgcugaaggagguggacau

SEQ ID NO: 2552657 - RNA, 19 nt, Homo sapiens
  misc_RNA (1)...(19): siRNA sense strand
agguggacauccugcgcaa

SEQ ID NO: 2552658 - RNA, 19 nt, Homo sapiens
  misc_RNA (1)...(19): siRNA sense strand
acgggaaagagguggacau

SEQ ID NO: 2552659 - RNA, 19 nt, Homo sapiens
  misc_RNA (1)...(19): siRNA sense strand
gcuccaugaaugaggacca

SEQ ID NO: 2552660 - RNA, 19 nt, Homo sapiens
  misc_RNA (1)...(19): siRNA sense strand
accugaagcccgagaacau

SEQ ID NO: 2552661 - RNA, 19 nt, Homo sapiens
  misc_RNA (1)...(19): siRNA sense strand
augcugaugcugaggauga

SEQ ID NO: 2552662 - RNA, 19 nt, Homo sapiens
  misc_RNA (1)...(19): siRNA sense strand
gggagaucgucauccgaga

SEQ ID NO: 2552663 - RNA, 19 nt, Homo sapiens
  misc_RNA (1)...(19): siRNA sense strand
ccagaaagaucaugcgagc

SEQ ID NO: 2552664 - RNA, 19 nt, Homo sapiens
  misc_RNA (1)...(19): siRNA sense strand
augacaacaugaacaucaa

SEQ ID NO: 2552665 - RNA, 19 nt, Homo sapiens
  misc_RNA (1)...(19): siRNA sense strand
augagaauuaugagcccaa

SEQ ID NO: 2552666 - RNA, 19 nt, Homo sapiens
  misc_RNA (1)...(19): siRNA sense strand
cgcccgagugggaugauua

SEQ ID NO: 2552667 - RNA, 19 nt, Homo sapiens
  misc_RNA (1)...(19): siRNA sense strand
guacuuuacuuuagggcaa

SEQ ID NO: 2552668 - RNA, 19 nt, Homo sapiens
  misc_RNA (1)...(19): siRNA sense strand
cuacagggaccaugggaca

SEQ ID NO: 2552669 - RNA, 19 nt, Homo sapiens
  misc_RNA (1)...(19): siRNA sense strand
gauaggugauaguugggaa

SEQ ID NO: 2552670 - RNA, 19 nt, Homo sapiens
  misc_RNA (1)...(19): siRNA sense strand
cuauaagaugcgacugcua

SEQ ID NO: 2552671 - RNA, 19 nt, Homo sapiens
  misc_RNA (1)...(19): siRNA sense strand
cuuuaacucugaaggacau

SEQ ID NO: 2552672 - RNA, 19 nt, Homo sapiens
  misc_RNA (1)...(19): siRNA sense strand
ggaaggaguucaugagugc

SEQ ID NO: 2552673 - RNA, 19 nt, Homo sapiens
  misc_RNA (1)...(19): siRNA sense strand
gcugagcauuguagggcca

SEQ ID NO: 2552674 - RNA, 19 nt, Homo sapiens
  misc_RNA (1)...(19): siRNA sense strand
ucugaaggacauaugggaa

SEQ ID NO: 2552675 - RNA, 19 nt, Homo sapiens
  misc_RNA (1)...(19): siRNA sense strand
aaggaguucaugagugcua

SEQ ID NO: 2552676 - RNA, 19 nt, Homo sapiens
  misc_RNA (1)...(19): siRNA sense strand
uagcaagaucacaggcaaa

SEQ ID NO: 2552677 - RNA, 19 nt, Homo sapiens
  misc_RNA (1)...(19): siRNA sense strand
ccagaguccugacgggcaa

SEQ ID NO: 2552678 - RNA, 19 nt, Homo sapiens
  misc_RNA (1)...(19): siRNA sense strand
gggugcaggcgcagaugaa

SEQ ID NO: 2552679 - RNA, 19 nt, Homo sapiens
  misc_RNA (1)...(19): siRNA sense strand
gaugaagagaggaccguga

SEQ ID NO: 2552680 - RNA, 19 nt, Homo sapiens
  misc_RNA (1)...(19): siRNA sense strand
ucaaaguccccgugaacaa

SEQ ID NO: 2552681 - RNA, 19 nt, Homo sapiens
  misc_RNA (1)...(19): siRNA sense strand
aggcgcagaugaaagggaa

SEQ ID NO: 2552682 - RNA, 19 nt, Homo sapiens
  misc_RNA (1)...(19): siRNA sense strand
ccaugaugucggacccuaa

SEQ ID NO: 2552683 - RNA, 19 nt, Homo sapiens
  misc_RNA (1)...(19): siRNA sense strand
agaagaaccucaagagugc

SEQ ID NO: 2552684 - RNA, 19 nt, Homo sapiens
  misc_RNA (1)...(19): siRNA sense strand
ccugaaagugacccagaau

SEQ ID NO: 2552685 - RNA, 19 nt, Homo sapiens
  misc_RNA (1)...(19): siRNA sense strand
acauagaccgagaacugaa

SEQ ID NO: 2552686 - RNA, 19 nt, Homo sapiens
  misc_RNA (1)...(19): siRNA sense strand
augagaaagcagaggaaau

SEQ ID NO: 2552687 - RNA, 19 nt, Homo sapiens
  misc_RNA (1)...(19): siRNA sense strand
augccaaggcugaggaaga

SEQ ID NO: 2552688 - RNA, 19 nt, Homo sapiens
  misc_RNA (1)...(19): siRNA sense strand
cagaggaaaucgaugccaa

SEQ ID NO: 2552689 - RNA, 19 nt, Homo sapiens
  misc_RNA (1)...(19): siRNA sense strand
agauugauaaagaggcaua

SEQ ID NO: 2552690 - RNA, 19 nt, Homo sapiens
  misc_RNA (1)...(19): siRNA sense strand
ccagauugauaaagaggca

SEQ ID NO: 2552691 - RNA, 19 nt, Homo sapiens
  misc_RNA (1)...(19): siRNA sense strand
aagcaaaagaugccagaaa

SEQ ID NO: 2552692 - RNA, 19 nt, Homo sapiens
  misc_RNA (1)...(19): siRNA sense strand
cuggagguguggaggucua

SEQ ID NO: 2552693 - RNA, 19 nt, Homo sapiens
  misc_RNA (1)...(19): siRNA sense strand
aguggcaaucagagaauaa

SEQ ID NO: 2552694 - RNA, 19 nt, Homo sapiens
  misc_RNA (1)...(19): siRNA sense strand
cgacugaagauuauggagu

SEQ ID NO: 2552695 - RNA, 19 nt, Homo sapiens
  misc_RNA (1)...(19): siRNA sense strand
ucauugagcaggaagccaa

SEQ ID NO: 2552696 - RNA, 19 nt, Homo sapiens
  misc_RNA (1)...(19): siRNA sense strand
cagaaauacgaauggccuu

SEQ ID NO: 2552697 - RNA, 19 nt, Homo sapiens
  misc_RNA (1)...(19): siRNA sense strand
cagauagagcagcagaaga

SEQ ID NO: 2552698 - RNA, 19 nt, Homo sapiens
  misc_RNA (1)...(19): siRNA sense strand
acugaagauuauggaguau

SEQ ID NO: 2552699 - RNA, 19 nt, Homo sapiens
  misc_RNA (1)...(19): siRNA sense strand
agaagcagauagagcagca

SEQ ID NO: 2552700 - RNA, 19 nt, Homo sapiens
  misc_RNA (1)...(19): siRNA sense strand
agguccagauugauaaaga

SEQ ID NO: 2552701 - RNA, 19 nt, Homo sapiens
  misc_RNA (1)...(19): siRNA sense strand
gguuauaggcagcggaaga

SEQ ID NO: 2552702 - RNA, 19 nt, Homo sapiens
  misc_RNA (1)...(19): siRNA sense strand
guuuaaagucgcugagcaa

SEQ ID NO: 2552703 - RNA, 19 nt, Homo sapiens
  misc_RNA (1)...(19): siRNA sense strand
aggcugaaauccagggcaa

SEQ ID NO: 2552704 - RNA, 19 nt, Homo sapiens
  misc_RNA (1)...(19): siRNA sense strand
aagcugaccaagaggaaua

SEQ ID NO: 2552705 - RNA, 19 nt, Homo sapiens
  misc_RNA (1)...(19): siRNA sense strand
ucuauaagguggucgggaa

SEQ ID NO: 2552706 - RNA, 19 nt, Homo sapiens
  misc_RNA (1)...(19): siRNA sense strand
ccaacaaguuugaaggacu

SEQ ID NO: 2552707 - RNA, 19 nt, Homo sapiens
  misc_RNA (1)...(19): siRNA sense strand
uggcugagguggaaggaga

SEQ ID NO: 2552708 - RNA, 19 nt, Homo sapiens
  misc_RNA (1)...(19): siRNA sense strand
uggacaagcagaaggguuu

SEQ ID NO: 2552709 - RNA, 19 nt, Homo sapiens
  misc_RNA (1)...(19): siRNA sense strand
aggaugugcuagaagacaa

SEQ ID NO: 2552710 - RNA, 19 nt, Homo sapiens
  misc_RNA (1)...(19): siRNA sense strand
cgggagaugaggcaggaaa

SEQ ID NO: 2552711 - RNA, 19 nt, Homo sapiens
  misc_RNA (1)...(19): siRNA sense strand
guguggacauggagcgauu

SEQ ID NO: 2552712 - RNA, 19 nt, Homo sapiens
  misc_RNA (1)...(19): siRNA sense strand
ccaagaggaauaaggaaca

SEQ ID NO: 2552713 - RNA, 19 nt, Homo sapiens
  misc_RNA (1)...(19): siRNA sense strand
uugaaggacuagaggcaga

SEQ ID NO: 2552714 - RNA, 19 nt, Homo sapiens
  misc_RNA (1)...(19): siRNA sense strand
ggaugugcuagaagacaaa

SEQ ID NO: 2552715 - RNA, 19 nt, Homo sapiens
  misc_RNA (1)...(19): siRNA sense strand
aggccaaagucaaugucaa

SEQ ID NO: 2552716 - RNA, 19 nt, Homo sapiens
  misc_RNA (1)...(19): siRNA sense strand
ugguggagcuucuggaaaa

SEQ ID NO: 2552717 - RNA, 19 nt, Homo sapiens
  misc_RNA (1)...(19): siRNA sense strand
auaugaugguucuggacaa

SEQ ID NO: 2552718 - RNA, 19 nt, Homo sapiens
  misc_RNA (1)...(19): siRNA sense strand
gccaaaguccugaaggcaa

SEQ ID NO: 2552719 - RNA, 19 nt, Homo sapiens
  misc_RNA (1)...(19): siRNA sense strand
cuaauacagcucagagaau

SEQ ID NO: 2552720 - RNA, 19 nt, Homo sapiens
  misc_RNA (1)...(19): siRNA sense strand
aagcaaaccuggaugccau

SEQ ID NO: 2552721 - RNA, 19 nt, Homo sapiens
  misc_RNA (1)...(19): siRNA sense strand
acagagagcagaaggcaca

SEQ ID NO: 2552722 - RNA, 19 nt, Homo sapiens
  misc_RNA (1)...(19): siRNA sense strand
cagccaacacaaaggguga

SEQ ID NO: 2552723 - RNA, 19 nt, Homo sapiens
  misc_RNA (1)...(19): siRNA sense strand
ugcugaagcuccaggaaga

SEQ ID NO: 2552724 - RNA, 19 nt, Homo sapiens
  misc_RNA (1)...(19): siRNA sense strand
guuugaaggacuagaggca

SEQ ID NO: 2552725 - RNA, 19 nt, Homo sapiens
  misc_RNA (1)...(19): siRNA sense strand
agaugaggcaggaaaguuu

SEQ ID NO: 2552726 - RNA, 19 nt, Homo sapiens
  misc_RNA (1)...(19): siRNA sense strand
ucaacaaggccaaagucaa

SEQ ID NO: 2552727 - RNA, 19 nt, Homo sapiens
  misc_RNA (1)...(19): siRNA sense strand
ggaggagagccuucggaau

SEQ ID NO: 2552728 - RNA, 19 nt, Homo sapiens
  misc_RNA (1)...(19): siRNA sense strand
acucagacagagagcagaa

SEQ ID NO: 2552729 - RNA, 19 nt, Homo sapiens
  misc_RNA (1)...(19): siRNA sense strand
aaggaacagcugucagaua

SEQ ID NO: 2552730 - RNA, 19 nt, Homo sapiens
  misc_RNA (1)...(19): siRNA sense strand
ucuagaaguuguugaugau

SEQ ID NO: 2552731 - RNA, 19 nt, Homo sapiens
  misc_RNA (1)...(19): siRNA sense strand
uugugaagauccaggcauu

SEQ ID NO: 2552732 - RNA, 19 nt, Homo sapiens
  misc_RNA (1)...(19): siRNA sense strand
uggugagauucuaccguaa

SEQ ID NO: 2552733 - RNA, 19 nt, Homo sapiens
  misc_RNA (1)...(19): siRNA sense strand
uggccaaacccauggugua

SEQ ID NO: 2552734 - RNA, 19 nt, Homo sapiens
  misc_RNA (1)...(19): siRNA sense strand
aaccaugaugacagagaaa

SEQ ID NO: 2552735 - RNA, 19 nt, Homo sapiens
  misc_RNA (1)...(19): siRNA sense strand
ucaucaagauccaggcuca

SEQ ID NO: 2552736 - RNA, 19 nt, Homo sapiens
  misc_RNA (1)...(19): siRNA sense strand
ccaaugagcucucggugga

SEQ ID NO: 2552737 - RNA, 19 nt, Homo sapiens
  misc_RNA (1)...(19): siRNA sense strand
ucuaugaggagcaggguga

SEQ ID NO: 2552738 - RNA, 19 nt, Homo sapiens
  misc_RNA (1)...(19): siRNA sense strand
ugcaggagauucugggcaa

SEQ ID NO: 2552739 - RNA, 19 nt, Homo sapiens
  misc_RNA (1)...(19): siRNA sense strand
guucauggaggcagugauu

SEQ ID NO: 2552740 - RNA, 19 nt, Homo sapiens
  misc_RNA (1)...(19): siRNA sense strand
cugcucagcuccuggaaaa

SEQ ID NO: 2552741 - RNA, 19 nt, Homo sapiens
  misc_RNA (1)...(19): siRNA sense strand
cucuagaaguuguugauga

SEQ ID NO: 2552742 - RNA, 19 nt, Homo sapiens
  misc_RNA (1)...(19): siRNA sense strand
cugagcggguguugaggaa

SEQ ID NO: 2552743 - RNA, 19 nt, Homo sapiens
  misc_RNA (1)...(19): siRNA sense strand
gguuuaaagucgcugagca

SEQ ID NO: 2552744 - RNA, 19 nt, Homo sapiens
  misc_RNA (1)...(19): siRNA sense strand
ccaaaguccugaaggcaac

SEQ ID NO: 2552745 - RNA, 19 nt, Homo sapiens
  misc_RNA (1)...(19): siRNA sense strand
aguuugaaguaaaugccaa

SEQ ID NO: 2552746 - RNA, 19 nt, Homo sapiens
  misc_RNA (1)...(19): siRNA sense strand
acagagaaagccaggacau

SEQ ID NO: 2552747 - RNA, 19 nt, Homo sapiens
  misc_RNA (1)...(19): siRNA sense strand
cagcacagacacaggcaca

SEQ ID NO: 2552748 - RNA, 19 nt, Homo sapiens
  misc_RNA (1)...(19): siRNA sense strand
acacaaagggugaucagga

SEQ ID NO: 2552749 - RNA, 19 nt, Homo sapiens
  misc_RNA (1)...(19): siRNA sense strand
augcacagacccaggaaga

SEQ ID NO: 2552750 - RNA, 19 nt, Homo sapiens
  misc_RNA (1)...(19): siRNA sense strand
aagccaucaaggagggcaa

SEQ ID NO: 2552751 - RNA, 19 nt, Homo sapiens
  misc_RNA (1)...(19): siRNA sense strand
cuacaggauauuagugcau

SEQ ID NO: 2552752 - RNA, 19 nt, Homo sapiens
  misc_RNA (1)...(19): siRNA sense strand
aaucaaagccagcaagacu

SEQ ID NO: 2552753 - RNA, 19 nt, Homo sapiens
  misc_RNA (1)...(19): siRNA sense strand
gggacacccucaaggagau

SEQ ID NO: 2552754 - RNA, 19 nt, Homo sapiens
  misc_RNA (1)...(19): siRNA sense strand
gggauuggccccucagaua

SEQ ID NO: 2552755 - RNA, 19 nt, Homo sapiens
  misc_RNA (1)...(19): siRNA sense strand
caaagagaaacggcagaaa

SEQ ID NO: 2552756 - RNA, 19 nt, Homo sapiens
  misc_RNA (1)...(19): siRNA sense strand
ggaaccaugaugacagaga

SEQ ID NO: 2552757 - RNA, 19 nt, Homo sapiens
  misc_RNA (1)...(19): siRNA sense strand
cggcugacacugugaagga

SEQ ID NO: 2552758 - RNA, 19 nt, Homo sapiens
  misc_RNA (1)...(19): siRNA sense strand
acucagacaugguggcugu

SEQ ID NO: 2552759 - RNA, 19 nt, Homo sapiens
  misc_RNA (1)...(19): siRNA sense strand
acaugaucuauacgggaaa

SEQ ID NO: 2552760 - RNA, 19 nt, Homo sapiens
  misc_RNA (1)...(19): siRNA sense strand
ggagaagcaagcaggcgaa

SEQ ID NO: 2552761 - RNA, 19 nt, Homo sapiens
  misc_RNA (1)...(19): siRNA sense strand
ugaagaagacagagacgca

SEQ ID NO: 2552762 - RNA, 19 nt, Homo sapiens
  misc_RNA (1)...(19): siRNA sense strand
aagccgaaacugaagaaga

SEQ ID NO: 2552763 - RNA, 19 nt, Homo sapiens
  misc_RNA (1)...(19): siRNA sense strand
aaacgauugaacaggagaa

SEQ ID NO: 2552764 - RNA, 19 nt, Homo sapiens
  misc_RNA (1)...(19): siRNA sense strand
cuguaugggugaaguggau

SEQ ID NO: 2552765 - RNA, 19 nt, Homo sapiens
  misc_RNA (1)...(19): siRNA sense strand
agaagcaagugaagcccaa

SEQ ID NO: 2552766 - RNA, 19 nt, Homo sapiens
  misc_RNA (1)...(19): siRNA sense strand
gggaaacagugcaguggcu

SEQ ID NO: 2552767 - RNA, 19 nt, Homo sapiens
  misc_RNA (1)...(19): siRNA sense strand
gucuagagggccaggacau

SEQ ID NO: 2552768 - RNA, 19 nt, Homo sapiens
  misc_RNA (1)...(19): siRNA sense strand
gagaagaagcaaagggcca

SEQ ID NO: 2552769 - RNA, 19 nt, Homo sapiens
  misc_RNA (1)...(19): siRNA sense strand
aggcagaggcugauggaga

SEQ ID NO: 2552770 - RNA, 19 nt, Homo sapiens
  misc_RNA (1)...(19): siRNA sense strand
aggcagaggcuaaaggaga

SEQ ID NO: 2552771 - RNA, 19 nt, Homo sapiens
  misc_RNA (1)...(19): siRNA sense strand
aggaaggacagaagugcaa

SEQ ID NO: 2552772 - RNA, 19 nt, Homo sapiens
  misc_RNA (1)...(19): siRNA sense strand
acaaagugcucgagacgca

SEQ ID NO: 2552773 - RNA, 19 nt, Homo sapiens
  misc_RNA (1)...(19): siRNA sense strand
ggacagaagugcaacugga

SEQ ID NO: 2552774 - RNA, 19 nt, Homo sapiens
  misc_RNA (1)...(19): siRNA sense strand
agaauggagaggaggccaa

SEQ ID NO: 2552775 - RNA, 19 nt, Homo sapiens
  misc_RNA (1)...(19): siRNA sense strand
cauuaagacaagaaacaca

SEQ ID NO: 2552776 - RNA, 19 nt, Homo sapiens
  misc_RNA (1)...(19): siRNA sense strand
cccauuaagacaagaaaca

SEQ ID NO: 2552777 - RNA, 19 nt, Homo sapiens
  misc_RNA (1)...(19): siRNA sense strand
aggcagaggccagggagaa

SEQ ID NO: 2552778 - RNA, 19 nt, Homo sapiens
  misc_RNA (1)...(19): siRNA sense strand
aagacaagaaacacaggaa

SEQ ID NO: 2552779 - RNA, 19 nt, Homo sapiens
  misc_RNA (1)...(19): siRNA sense strand
gagucuaagaacacccaaa

SEQ ID NO: 2552780 - RNA, 19 nt, Homo sapiens
  misc_RNA (1)...(19): siRNA sense strand
agggccaggcagaggcuaa

SEQ ID NO: 2552781 - RNA, 19 nt, Homo sapiens
  misc_RNA (1)...(19): siRNA sense strand
agagcuaccuaaagggacu

SEQ ID NO: 2552782 - RNA, 19 nt, Homo sapiens
  misc_RNA (1)...(19): siRNA sense strand
cagaagugcaacuggagca

SEQ ID NO: 2552783 - RNA, 19 nt, Homo sapiens
  misc_RNA (1)...(19): siRNA sense strand
ggauggagucacaaggcca

SEQ ID NO: 2552784 - RNA, 19 nt, Homo sapiens
  misc_RNA (1)...(19): siRNA sense strand
ugacgaugacaguguuaau

SEQ ID NO: 2552785 - RNA, 19 nt, Homo sapiens
  misc_RNA (1)...(19): siRNA sense strand
gcacauuguucaaguggag

SEQ ID NO: 2552786 - RNA, 19 nt, Homo sapiens
  misc_RNA (1)...(19): siRNA sense strand
aggcagucccuauuagcua

SEQ ID NO: 2552787 - RNA, 19 nt, Homo sapiens
  misc_RNA (1)...(19): siRNA sense strand
acauuguucaaguggagaa

SEQ ID NO: 2552788 - RNA, 19 nt, Homo sapiens
  misc_RNA (1)...(19): siRNA sense strand
ggacaaagugcucgagacg

SEQ ID NO: 2552789 - RNA, 19 nt, Homo sapiens
  misc_RNA (1)...(19): siRNA sense strand
gugcaaugagugugggaaa

SEQ ID NO: 2552790 - RNA, 19 nt, Homo sapiens
  misc_RNA (1)...(19): siRNA sense strand
gugcagugagugugggaaa

SEQ ID NO: 2552791 - RNA, 19 nt, Homo sapiens
  misc_RNA (1)...(19): siRNA sense strand
gggaaauccuucagccaca

SEQ ID NO: 2552792 - RNA, 19 nt, Homo sapiens
  misc_RNA (1)...(19): siRNA sense strand
uuaccaaacaccagagaau

SEQ ID NO: 2552793 - RNA, 19 nt, Homo sapiens
  misc_RNA (1)...(19): siRNA sense strand
ugaccaaacaccagcgaau

SEQ ID NO: 2552794 - RNA, 19 nt, Homo sapiens
  misc_RNA (1)...(19): siRNA sense strand
augcaacgagugugggaaa

SEQ ID NO: 2552795 - RNA, 19 nt, Homo sapiens
  misc_RNA (1)...(19): siRNA sense strand
gggaaaaccuucagccaca

SEQ ID NO: 2552796 - RNA, 19 nt, Homo sapiens
  misc_RNA (1)...(19): siRNA sense strand
augcagcgaaugugggaaa

SEQ ID NO: 2552797 - RNA, 19 nt, Homo sapiens
  misc_RNA (1)...(19): siRNA sense strand
guguggugagugugggaaa

SEQ ID NO: 2552798 - RNA, 19 nt, Homo sapiens
  misc_RNA (1)...(19): siRNA sense strand
aggaauggguuuggggaaa

SEQ ID NO: 2552799 - RNA, 19 nt, Homo sapiens
  misc_RNA (1)...(19): siRNA sense strand
ccauaugcaugcagggacu

SEQ ID NO: 2552800 - RNA, 19 nt, Homo sapiens
  misc_RNA (1)...(19): siRNA sense strand
cccuaugaaugcagcgaau

SEQ ID NO: 2552801 - RNA, 19 nt, Homo sapiens
  misc_RNA (1)...(19): siRNA sense strand
gaauguaaccaguguggca

SEQ ID NO: 2552802 - RNA, 19 nt, Homo sapiens
  misc_RNA (1)...(19): siRNA sense strand
aggacgugguaguggacuu

SEQ ID NO: 2552803 - RNA, 19 nt, Homo sapiens
  misc_RNA (1)...(19): siRNA sense strand
cagcaugagcggacacaca

SEQ ID NO: 2552804 - RNA, 19 nt, Homo sapiens
  misc_RNA (1)...(19): siRNA sense strand
ggauucacaccaaggaaaa

SEQ ID NO: 2552805 - RNA, 19 nt, Homo sapiens
  misc_RNA (1)...(19): siRNA sense strand
acugagggccacugggaau

SEQ ID NO: 2552806 - RNA, 19 nt, Homo sapiens
  misc_RNA (1)...(19): siRNA sense strand
acacaggagagaagcccua

SEQ ID NO: 2552807 - RNA, 19 nt, Homo sapiens
  misc_RNA (1)...(19): siRNA sense strand
acacaggagagaagcccua

SEQ ID NO: 2552808 - RNA, 19 nt, Homo sapiens
  misc_RNA (1)...(19): siRNA sense strand
gagagaagcccuauggaug

SEQ ID NO: 2552809 - RNA, 19 nt, Homo sapiens
  misc_RNA (1)...(19): siRNA sense strand
aggauucacaccaaggaaa

SEQ ID NO: 2552810 - RNA, 19 nt, Homo sapiens
  misc_RNA (1)...(19): siRNA sense strand
gugaggacacugagggcca

SEQ ID NO: 2552811 - RNA, 19 nt, Homo sapiens
  misc_RNA (1)...(19): siRNA sense strand
ugggaauggaguugugaga

SEQ ID NO: 2552812 - RNA, 19 nt, Homo sapiens
  misc_RNA (1)...(19): siRNA sense strand
gaggaauggguuuggggaa

SEQ ID NO: 2552813 - RNA, 19 nt, Homo sapiens
  misc_RNA (1)...(19): siRNA sense strand
gugccaugaguguggaaaa

SEQ ID NO: 2552814 - RNA, 19 nt, Homo sapiens
  misc_RNA (1)...(19): siRNA sense strand
gcggcaaggcauucaguca

SEQ ID NO: 2552815 - RNA, 19 nt, Homo sapiens
  misc_RNA (1)...(19): siRNA sense strand
cguuugaggacgugguagu

SEQ ID NO: 2552816 - RNA, 19 nt, Homo sapiens
  misc_RNA (1)...(19): siRNA sense strand
cuaugaguguggugagugu

SEQ ID NO: 2552817 - RNA, 19 nt, Homo sapiens
  misc_RNA (1)...(19): siRNA sense strand
uagaaagauuccuguggga

SEQ ID NO: 2552818 - RNA, 19 nt, Homo sapiens
  misc_RNA (1)...(19): siRNA sense strand
gaaagauuccugugggaug

SEQ ID NO: 2552819 - RNA, 19 nt, Homo sapiens
  misc_RNA (1)...(19): siRNA sense strand
auguaaugcuggacaccuu

SEQ ID NO: 2552820 - RNA, 19 nt, Homo sapiens
  misc_RNA (1)...(19): siRNA sense strand
ggggaaaacauaagucuga

SEQ ID NO: 2552821 - RNA, 19 nt, Homo sapiens
  misc_RNA (1)...(19): siRNA sense strand
gugagagucuagagagccu

SEQ ID NO: 2552822 - RNA, 19 nt, Homo sapiens
  misc_RNA (1)...(19): siRNA sense strand
gcuuaaaaggcuuccggaa

SEQ ID NO: 2552823 - RNA, 19 nt, Homo sapiens
  misc_RNA (1)...(19): siRNA sense strand
gugggaaagccuucaguca

SEQ ID NO: 2552824 - RNA, 19 nt, Homo sapiens
  misc_RNA (1)...(19): siRNA sense strand
ucaucgaacaccagaggau

SEQ ID NO: 2552825 - RNA, 19 nt, Homo sapiens
  misc_RNA (1)...(19): siRNA sense strand
aacuagacccaaagucaaa

SEQ ID NO: 2552826 - RNA, 19 nt, Homo sapiens
  misc_RNA (1)...(19): siRNA sense strand
auggggaacacguggaaaa

SEQ ID NO: 2552827 - RNA, 19 nt, Homo sapiens
  misc_RNA (1)...(19): siRNA sense strand
cuaucaguguggugagugu

SEQ ID NO: 2552828 - RNA, 19 nt, Homo sapiens
  misc_RNA (1)...(19): siRNA sense strand
ggcaaggccuucagccaca

SEQ ID NO: 2552829 - RNA, 19 nt, Homo sapiens
  misc_RNA (1)...(19): siRNA sense strand
ggggagaagcccuacgaau

SEQ ID NO: 2552830 - RNA, 19 nt, Homo sapiens
  misc_RNA (1)...(19): siRNA sense strand
ucgaaguaucguaaggaaa

SEQ ID NO: 2552831 - RNA, 19 nt, Homo sapiens
  misc_RNA (1)...(19): siRNA sense strand
ccacacauguugaagccaa

SEQ ID NO: 2552832 - RNA, 19 nt, Homo sapiens
  misc_RNA (1)...(19): siRNA sense strand
auuaaagaacgaagagaga

SEQ ID NO: 2552833 - RNA, 19 nt, Homo sapiens
  misc_RNA (1)...(19): siRNA sense strand
agugaagaggucagagcaa

SEQ ID NO: 2552834 - RNA, 19 nt, Homo sapiens
  misc_RNA (1)...(19): siRNA sense strand
gggcaaaugaggaagcacu

SEQ ID NO: 2552835 - RNA, 19 nt, Homo sapiens
  misc_RNA (1)...(19): siRNA sense strand
uagccaaagaagaaggaga

SEQ ID NO: 2552836 - RNA, 19 nt, Homo sapiens
  misc_RNA (1)...(19): siRNA sense strand
agagaugaacaguguaaaa

SEQ ID NO: 2552837 - RNA, 19 nt, Homo sapiens
  misc_RNA (1)...(19): siRNA sense strand
auggguagccaaagaagaa

SEQ ID NO: 2552838 - RNA, 19 nt, Homo sapiens
  misc_RNA (1)...(19): siRNA sense strand
agcaagaugugaagcccaa

SEQ ID NO: 2552839 - RNA, 19 nt, Homo sapiens
  misc_RNA (1)...(19): siRNA sense strand
gcaacagaauggaguccca

SEQ ID NO: 2552840 - RNA, 19 nt, Homo sapiens
  misc_RNA (1)...(19): siRNA sense strand
agaaauuugcuuaucggua

SEQ ID NO: 2552841 - RNA, 19 nt, Homo sapiens
  misc_RNA (1)...(19): siRNA sense strand
agccaaugcuggaaagacu

SEQ ID NO: 2552842 - RNA, 19 nt, Homo sapiens
  misc_RNA (1)...(19): siRNA sense strand
aagugauagccaagaugaa

SEQ ID NO: 2552843 - RNA, 19 nt, Homo sapiens
  misc_RNA (1)...(19): siRNA sense strand
aggacagaggucagaucaa

SEQ ID NO: 2552844 - RNA, 19 nt, Homo sapiens
  misc_RNA (1)...(19): siRNA sense strand
gccaagaugaaguugaaaa

SEQ ID NO: 2552845 - RNA, 19 nt, Homo sapiens
  misc_RNA (1)...(19): siRNA sense strand
aagaagaaggagaguguuc

SEQ ID NO: 2552846 - RNA, 19 nt, Homo sapiens
  misc_RNA (1)...(19): siRNA sense strand
gauuaaagaacgaagagag

SEQ ID NO: 2552847 - RNA, 19 nt, Homo sapiens
  misc_RNA (1)...(19): siRNA sense strand
ugguuaagaacaauccaaa

SEQ ID NO: 2552848 - RNA, 19 nt, Homo sapiens
  misc_RNA (1)...(19): siRNA sense strand
aaagaaaccugaaaugcca

SEQ ID NO: 2552849 - RNA, 19 nt, Homo sapiens
  misc_RNA (1)...(19): siRNA sense strand
augaggaagcacugcagaa

SEQ ID NO: 2552850 - RNA, 19 nt, Homo sapiens
  misc_RNA (1)...(19): siRNA sense strand
ugaucugauuaaagaacga

SEQ ID NO: 2552851 - RNA, 19 nt, Homo sapiens
  misc_RNA (1)...(19): siRNA sense strand
gccaaauaugcuagagauc

SEQ ID NO: 2552852 - RNA, 19 nt, Homo sapiens
  misc_RNA (1)...(19): siRNA sense strand
ccaaaaucuucuagaaaca

SEQ ID NO: 2552853 - RNA, 19 nt, Homo sapiens
  misc_RNA (1)...(19): siRNA sense strand
gauaauggagaaugggaga

SEQ ID NO: 2552854 - RNA, 19 nt, Homo sapiens
  misc_RNA (1)...(19): siRNA sense strand
gguggauguggaugagaaa

SEQ ID NO: 2552855 - RNA, 19 nt, Homo sapiens
  misc_RNA (1)...(19): siRNA sense strand
ugauauaauucuagaggac

SEQ ID NO: 2552856 - RNA, 19 nt, Homo sapiens
  misc_RNA (1)...(19): siRNA sense strand
auauaauucuagaggacca

SEQ ID NO: 2552857 - RNA, 19 nt, Homo sapiens
  misc_RNA (1)...(19): siRNA sense strand
ggagauugugagugcaaca

SEQ ID NO: 2552858 - RNA, 19 nt, Homo sapiens
  misc_RNA (1)...(19): siRNA sense strand
ccgugagguuguugaagau

SEQ ID NO: 2552859 - RNA, 19 nt, Homo sapiens
  misc_RNA (1)...(19): siRNA sense strand
gguuguugaagauuggaaa

SEQ ID NO: 2552860 - RNA, 19 nt, Homo sapiens
  misc_RNA (1)...(19): siRNA sense strand
gguugaaacaggaauggau

SEQ ID NO: 2552861 - RNA, 19 nt, Homo sapiens
  misc_RNA (1)...(19): siRNA sense strand
ugguggauguggaugagaa

SEQ ID NO: 2552862 - RNA, 19 nt, Homo sapiens
  misc_RNA (1)...(19): siRNA sense strand
aagauguagacaagagaga

SEQ ID NO: 2552863 - RNA, 19 nt, Homo sapiens
  misc_RNA (1)...(19): siRNA sense strand
gguacuucacucagaaaga

SEQ ID NO: 2552864 - RNA, 19 nt, Homo sapiens
  misc_RNA (1)...(19): siRNA sense strand
cagaaagaggaaacugaga

SEQ ID NO: 2552865 - RNA, 19 nt, Homo sapiens
  misc_RNA (1)...(19): siRNA sense strand
cuguggaacaccugaauga

SEQ ID NO: 2552866 - RNA, 19 nt, Homo sapiens
  misc_RNA (1)...(19): siRNA sense strand
ugggagauugugagugcaa

SEQ ID NO: 2552867 - RNA, 19 nt, Homo sapiens
  misc_RNA (1)...(19): siRNA sense strand
uguuggaucucuugggcuu

SEQ ID NO: 2552868 - RNA, 19 nt, Homo sapiens
  misc_RNA (1)...(19): siRNA sense strand
ggaacaccugaaugacaaa

SEQ ID NO: 2552869 - RNA, 19 nt, Homo sapiens
  misc_RNA (1)...(19): siRNA sense strand
gaaauuugguucuuggacu

SEQ ID NO: 2552870 - RNA, 19 nt, Homo sapiens
  misc_RNA (1)...(19): siRNA sense strand
aaaugauguccgugagguu

SEQ ID NO: 2552871 - RNA, 19 nt, Homo sapiens
  misc_RNA (1)...(19): siRNA sense strand
acaggaauggauagaugua

SEQ ID NO: 2552872 - RNA, 19 nt, Homo sapiens
  misc_RNA (1)...(19): siRNA sense strand
aggaccaagauguagacaa

SEQ ID NO: 2552873 - RNA, 19 nt, Homo sapiens
  misc_RNA (1)...(19): siRNA sense strand
ccugaugacuaugguggaa

SEQ ID NO: 2552874 - RNA, 19 nt, Homo sapiens
  misc_RNA (1)...(19): siRNA sense strand
aguuauacguguuccuuca

SEQ ID NO: 2552875 - RNA, 19 nt, Homo sapiens
  misc_RNA (1)...(19): siRNA sense strand
acacugucaauuaugguaa

SEQ ID NO: 2552876 - RNA, 19 nt, Homo sapiens
  misc_RNA (1)...(19): siRNA sense strand
ugguagagcucuuuggcaa

SEQ ID NO: 2552877 - RNA, 19 nt, Homo sapiens
  misc_RNA (1)...(19): siRNA sense strand
caaacgugccauugauaaa

SEQ ID NO: 2552878 - RNA, 19 nt, Homo sapiens
  misc_RNA (1)...(19): siRNA sense strand
acaaguacuucaugcccaa

SEQ ID NO: 2552879 - RNA, 19 nt, Homo sapiens
  misc_RNA (1)...(19): siRNA sense strand
gagaagaccuaguugcugu

SEQ ID NO: 2552880 - RNA, 19 nt, Homo sapiens
  misc_RNA (1)...(19): siRNA sense strand
aaacuuaugugguucgaga

SEQ ID NO: 2552881 - RNA, 19 nt, Homo sapiens
  misc_RNA (1)...(19): siRNA sense strand
caaacuggcgaguggcaga

SEQ ID NO: 2552882 - RNA, 19 nt, Homo sapiens
  misc_RNA (1)...(19): siRNA sense strand
uggaagaagaagaaagaaa

SEQ ID NO: 2552883 - RNA, 19 nt, Homo sapiens
  misc_RNA (1)...(19): siRNA sense strand
caagaacaucagagggaaa

SEQ ID NO: 2552884 - RNA, 19 nt, Homo sapiens
  misc_RNA (1)...(19): siRNA sense strand
gcuugaagaaggagaagaa

SEQ ID NO: 2552885 - RNA, 19 nt, Homo sapiens
  misc_RNA (1)...(19): siRNA sense strand
aagaggaagcacagggaaa

SEQ ID NO: 2552886 - RNA, 19 nt, Homo sapiens
  misc_RNA (1)...(19): siRNA sense strand
aaauugaugaggagagaaa

SEQ ID NO: 2552887 - RNA, 19 nt, Homo sapiens
  misc_RNA (1)...(19): siRNA sense strand
cgucaguuccagaaagaaa

SEQ ID NO: 2552888 - RNA, 19 nt, Homo sapiens
  misc_RNA (1)...(19): siRNA sense strand
gaagaaagaaacaaggcua

SEQ ID NO: 2552889 - RNA, 19 nt, Homo sapiens
  misc_RNA (1)...(19): siRNA sense strand
guucagaaagacaggcaaa

SEQ ID NO: 2552890 - RNA, 19 nt, Homo sapiens
  misc_RNA (1)...(19): siRNA sense strand
acuauagaaugcagugaaa

SEQ ID NO: 2552891 - RNA, 19 nt, Homo sapiens
  misc_RNA (1)...(19): siRNA sense strand
gaauuagagaaacgggaaa

SEQ ID NO: 2552892 - RNA, 19 nt, Homo sapiens
  misc_RNA (1)...(19): siRNA sense strand
ggaaauaacaugaggaagc

SEQ ID NO: 2552893 - RNA, 19 nt, Homo sapiens
  misc_RNA (1)...(19): siRNA sense strand
gggugagguuggagaagau

SEQ ID NO: 2552894 - RNA, 19 nt, Homo sapiens
  misc_RNA (1)...(19): siRNA sense strand
ucgcagagaacuugaggaa

SEQ ID NO: 2552895 - RNA, 19 nt, Homo sapiens
  misc_RNA (1)...(19): siRNA sense strand
cugccuugguugauggaaa

SEQ ID NO: 2552896 - RNA, 19 nt, Homo sapiens
  misc_RNA (1)...(19): siRNA sense strand
gaggaaaagagcagagcaa

SEQ ID NO: 2552897 - RNA, 19 nt, Homo sapiens
  misc_RNA (1)...(19): siRNA sense strand
cacaaagguuagagguuau

SEQ ID NO: 2552898 - RNA, 19 nt, Homo sapiens
  misc_RNA (1)...(19): siRNA sense strand
uggccaaagcugaggaaca

SEQ ID NO: 2552899 - RNA, 19 nt, Homo sapiens
  misc_RNA (1)...(19): siRNA sense strand
gagggaaauugaaggccua

SEQ ID NO: 2552900 - RNA, 19 nt, Homo sapiens
  misc_RNA (1)...(19): siRNA sense strand
ggaaugaagacauaggaga

SEQ ID NO: 2552901 - RNA, 19 nt, Homo sapiens
  misc_RNA (1)...(19): siRNA sense strand
caggaaauaacaugaggaa

SEQ ID NO: 2552902 - RNA, 19 nt, Homo sapiens
  misc_RNA (1)...(19): siRNA sense strand
ccagacaagaugauugaaa

SEQ ID NO: 2552903 - RNA, 19 nt, Homo sapiens
  misc_RNA (1)...(19): siRNA sense strand
ggguugacuuguuggccaa

SEQ ID NO: 2552904 - RNA, 19 nt, Homo sapiens
  misc_RNA (1)...(19): siRNA sense strand
agggaaagaccaagaaguu

SEQ ID NO: 2552905 - RNA, 19 nt, Homo sapiens
  misc_RNA (1)...(19): siRNA sense strand
caucagucuuugcuggaaa

SEQ ID NO: 2552906 - RNA, 19 nt, Homo sapiens
  misc_RNA (1)...(19): siRNA sense strand
gguaauuguuggugggguu

SEQ ID NO: 2552907 - RNA, 19 nt, Homo sapiens
  misc_RNA (1)...(19): siRNA sense strand
cuggaagaaaggaggaaaa

SEQ ID NO: 2552908 - RNA, 19 nt, Homo sapiens
  misc_RNA (1)...(19): siRNA sense strand
uugaagaaggagaagaaau

SEQ ID NO: 2552909 - RNA, 19 nt, Homo sapiens
  misc_RNA (1)...(19): siRNA sense strand
aggaagaugaugaugaaga

SEQ ID NO: 2552910 - RNA, 19 nt, Homo sapiens
  misc_RNA (1)...(19): siRNA sense strand
cugaugauauggauagaau

SEQ ID NO: 2552911 - RNA, 19 nt, Homo sapiens
  misc_RNA (1)...(19): siRNA sense strand
acgcuuggauauugaagaa

SEQ ID NO: 2552912 - RNA, 19 nt, Homo sapiens
  misc_RNA (1)...(19): siRNA sense strand
agaaagaccugauguggga

SEQ ID NO: 2552913 - RNA, 19 nt, Homo sapiens
  misc_RNA (1)...(19): siRNA sense strand
ggauagaauuaugacgcua

SEQ ID NO: 2552914 - RNA, 19 nt, Homo sapiens
  misc_RNA (1)...(19): siRNA sense strand
uugcaaaagcggaggguga

SEQ ID NO: 2552915 - RNA, 19 nt, Homo sapiens
  misc_RNA (1)...(19): siRNA sense strand
gccuaaaggaagcuacaaa

SEQ ID NO: 2552916 - RNA, 19 nt, Homo sapiens
  misc_RNA (1)...(19): siRNA sense strand
gcuuggauauugaagaaaa

SEQ ID NO: 2552917 - RNA, 19 nt, Homo sapiens
  misc_RNA (1)...(19): siRNA sense strand
ggcaaggaucagacacaaa

SEQ ID NO: 2552918 - RNA, 19 nt, Homo sapiens
  misc_RNA (1)...(19): siRNA sense strand
cauggaagaagaagaaaga

SEQ ID NO: 2552919 - RNA, 19 nt, Homo sapiens
  misc_RNA (1)...(19): siRNA sense strand
agaccaagaaguuaaagaa

SEQ ID NO: 2552920 - RNA, 19 nt, Homo sapiens
  misc_RNA (1)...(19): siRNA sense strand
agguuagagguuauagaaa

SEQ ID NO: 2552921 - RNA, 19 nt, Homo sapiens
  misc_RNA (1)...(19): siRNA sense strand
ggaaaagagcagagcaacu

SEQ ID NO: 2552922 - RNA, 19 nt, Homo sapiens
  misc_RNA (1)...(19): siRNA sense strand
gcauauggacaaaccggaa

SEQ ID NO: 2552923 - RNA, 19 nt, Homo sapiens
  misc_RNA (1)...(19): siRNA sense strand
ggacaaaccggaacaggca

SEQ ID NO: 2552924 - RNA, 19 nt, Homo sapiens
  misc_RNA (1)...(19): siRNA sense strand
gcaacuucgcagagaacuu

SEQ ID NO: 2552925 - RNA, 19 nt, Homo sapiens
  misc_RNA (1)...(19): siRNA sense strand
gccagaaagcugcgauaau

SEQ ID NO: 2552926 - RNA, 19 nt, Homo sapiens
  misc_RNA (1)...(19): siRNA sense strand
cagaggaagaugaugauga

SEQ ID NO: 2552927 - RNA, 19 nt, Homo sapiens
  misc_RNA (1)...(19): siRNA sense strand
gaucaauaaaucagagaag

SEQ ID NO: 2552928 - RNA, 19 nt, Homo sapiens
  misc_RNA (1)...(19): siRNA sense strand
gagaaaucaaugugcuaca

SEQ ID NO: 2552929 - RNA, 19 nt, Homo sapiens
  misc_RNA (1)...(19): siRNA sense strand
ccucgggauuaucaggaaa

SEQ ID NO: 2552930 - RNA, 19 nt, Homo sapiens
  misc_RNA (1)...(19): siRNA sense strand
gauugaaaugcaagcaaaa

SEQ ID NO: 2552931 - RNA, 19 nt, Homo sapiens
  misc_RNA (1)...(19): siRNA sense strand
cugaggaacaagagaaacu

SEQ ID NO: 2552932 - RNA, 19 nt, Homo sapiens
  misc_RNA (1)...(19): siRNA sense strand
uugaaggccuacuggagaa

SEQ ID NO: 2552933 - RNA, 19 nt, Homo sapiens
  misc_RNA (1)...(19): siRNA sense strand
aauaacaugaggaagcaaa

SEQ ID NO: 2552934 - RNA, 19 nt, Homo sapiens
  misc_RNA (1)...(19): siRNA sense strand
uaucagugggucagaggaa

SEQ ID NO: 2552935 - RNA, 19 nt, Homo sapiens
  misc_RNA (1)...(19): siRNA sense strand
cuuuauaccucgggauuau

SEQ ID NO: 2552936 - RNA, 19 nt, Homo sapiens
  misc_RNA (1)...(19): siRNA sense strand
agcugaggaacaagagaaa

SEQ ID NO: 2552937 - RNA, 19 nt, Homo sapiens
  misc_RNA (1)...(19): siRNA sense strand
guggaugagaugaggggaa

SEQ ID NO: 2552938 - RNA, 19 nt, Homo sapiens
  misc_RNA (1)...(19): siRNA sense strand
auucuguacuugaaggcua

SEQ ID NO: 2552939 - RNA, 19 nt, Homo sapiens
  misc_RNA (1)...(19): siRNA sense strand
guacauuacgguaugccaa

SEQ ID NO: 2552940 - RNA, 19 nt, Homo sapiens
  misc_RNA (1)...(19): siRNA sense strand
ugaugaagagggugagguu

SEQ ID NO: 2552941 - RNA, 19 nt, Homo sapiens
  misc_RNA (1)...(19): siRNA sense strand
gauggagagaaaaggaaaa

SEQ ID NO: 2552942 - RNA, 19 nt, Homo sapiens
  misc_RNA (1)...(19): siRNA sense strand
cuaacauggaacuggaaga

SEQ ID NO: 2552943 - RNA, 19 nt, Homo sapiens
  misc_RNA (1)...(19): siRNA sense strand
guacaacggugguggcuca

SEQ ID NO: 2552944 - RNA, 19 nt, Homo sapiens
  misc_RNA (1)...(19): siRNA sense strand
agaucaaaguggcccugaa

SEQ ID NO: 2552945 - RNA, 19 nt, Homo sapiens
  misc_RNA (1)...(19): siRNA sense strand
acaaggagaucaagagcag

SEQ ID NO: 2552946 - RNA, 19 nt, Homo sapiens
  misc_RNA (1)...(19): siRNA sense strand
gggcagaccuguuugggga

SEQ ID NO: 2552947 - RNA, 19 nt, Homo sapiens
  misc_RNA (1)...(19): siRNA sense strand
cagaagaggaggaugacaa

SEQ ID NO: 2552948 - RNA, 19 nt, Homo sapiens
  misc_RNA (1)...(19): siRNA sense strand
uggcagaagaggaggauga

SEQ ID NO: 2552949 - RNA, 19 nt, Homo sapiens
  misc_RNA (1)...(19): siRNA sense strand
gggaauuccaagaggagau

SEQ ID NO: 2552950 - RNA, 19 nt, Homo sapiens
  misc_RNA (1)...(19): siRNA sense strand
ucaagaagcucuacgccaa

SEQ ID NO: 2552951 - RNA, 19 nt, Homo sapiens
  misc_RNA (1)...(19): siRNA sense strand
agauugagcaugugaugaa

SEQ ID NO: 2552952 - RNA, 19 nt, Homo sapiens
  misc_RNA (1)...(19): siRNA sense strand
agaagcugcuggaggagaa

SEQ ID NO: 2552953 - RNA, 19 nt, Homo sapiens
  misc_RNA (1)...(19): siRNA sense strand
agcaggagguggaggucaa

SEQ ID NO: 2552954 - RNA, 19 nt, Homo sapiens
  misc_RNA (1)...(19): siRNA sense strand
caacaucugcagugggcua

SEQ ID NO: 2552955 - RNA, 19 nt, Homo sapiens
  misc_RNA (1)...(19): siRNA sense strand
cggugaaggcggagaucca

SEQ ID NO: 2552956 - RNA, 19 nt, Homo sapiens
  misc_RNA (1)...(19): siRNA sense strand
agucagccuuggagaagaa

SEQ ID NO: 2552957 - RNA, 19 nt, Homo sapiens
  misc_RNA (1)...(19): siRNA sense strand
ggagaagaacauggagaau

SEQ ID NO: 2552958 - RNA, 19 nt, Homo sapiens
  misc_RNA (1)...(19): siRNA sense strand
ggagagaggccuaaggaag

SEQ ID NO: 2552959 - RNA, 19 nt, Homo sapiens
  misc_RNA (1)...(19): siRNA sense strand
aagaggaggaugacaacaa

SEQ ID NO: 2552960 - RNA, 19 nt, Homo sapiens
  misc_RNA (1)...(19): siRNA sense strand
aggagaagaugcuggagga

SEQ ID NO: 2552961 - RNA, 19 nt, Homo sapiens
  misc_RNA (1)...(19): siRNA sense strand
ccaacgaacagcagaagau

SEQ ID NO: 2552962 - RNA, 19 nt, Homo sapiens
  misc_RNA (1)...(19): siRNA sense strand
gugaggaggagcaguggaa

SEQ ID NO: 2552963 - RNA, 19 nt, Homo sapiens
  misc_RNA (1)...(19): siRNA sense strand
gggagaugcagcaggagau

SEQ ID NO: 2552964 - RNA, 19 nt, Homo sapiens
  misc_RNA (1)...(19): siRNA sense strand
aggcuagagcugaaagaga

SEQ ID NO: 2552965 - RNA, 19 nt, Homo sapiens
  misc_RNA (1)...(19): siRNA sense strand
gcagcgagaggcagaacaa

SEQ ID NO: 2552966 - RNA, 19 nt, Homo sapiens
  misc_RNA (1)...(19): siRNA sense strand
gaacugaagaggcaggaga

SEQ ID NO: 2552967 - RNA, 19 nt, Homo sapiens
  misc_RNA (1)...(19): siRNA sense strand
cgccggaggagaagaacaa

SEQ ID NO: 2552968 - RNA, 19 nt, Homo sapiens
  misc_RNA (1)...(19): siRNA sense strand
gaggagaagaacaagauca

SEQ ID NO: 2552969 - RNA, 19 nt, Homo sapiens
  misc_RNA (1)...(19): siRNA sense strand
cagaugaagaagcggccaa

SEQ ID NO: 2552970 - RNA, 19 nt, Homo sapiens
  misc_RNA (1)...(19): siRNA sense strand
gccaagaacaucaagaaca

SEQ ID NO: 2552971 - RNA, 19 nt, Homo sapiens
  misc_RNA (1)...(19): siRNA sense strand
agaagaugcuggaggaccu

SEQ ID NO: 2552972 - RNA, 19 nt, Homo sapiens
  misc_RNA (1)...(19): siRNA sense strand
acaaggccauggagagcaa

SEQ ID NO: 2552973 - RNA, 19 nt, Homo sapiens
  misc_RNA (1)...(19): siRNA sense strand
uggaggagaaggagaagau

SEQ ID NO: 2552974 - RNA, 19 nt, Homo sapiens
  misc_RNA (1)...(19): siRNA sense strand
agaagauguuggaacugaa

SEQ ID NO: 2552975 - RNA, 19 nt, Homo sapiens
  misc_RNA (1)...(19): siRNA sense strand
aggagaagaacaagaucau

SEQ ID NO: 2552976 - RNA, 19 nt, Homo sapiens
  misc_RNA (1)...(19): siRNA sense strand
aggcggagauccaggacca

SEQ ID NO: 2552977 - RNA, 19 nt, Homo sapiens
  misc_RNA (1)...(19): siRNA sense strand
acuccgugcuccaggguuu

SEQ ID NO: 2552978 - RNA, 19 nt, Homo sapiens
  misc_RNA (1)...(19): siRNA sense strand
aggagauugccgagcagaa

SEQ ID NO: 2552979 - RNA, 19 nt, Homo sapiens
  misc_RNA (1)...(19): siRNA sense strand
gaggaggagcaguggaagu

SEQ ID NO: 2552980 - RNA, 19 nt, Homo sapiens
  misc_RNA (1)...(19): siRNA sense strand
acaagacccucgugcgcua

SEQ ID NO: 2552981 - RNA, 19 nt, Homo sapiens
  misc_RNA (1)...(19): siRNA sense strand
gggaaugccaagaccauca

SEQ ID NO: 2552982 - RNA, 19 nt, Homo sapiens
  misc_RNA (1)...(19): siRNA sense strand
acaccaacgaacagcagaa

SEQ ID NO: 2552983 - RNA, 19 nt, Homo sapiens
  misc_RNA (1)...(19): siRNA sense strand
cagcagaagauguuggaac

SEQ ID NO: 2552984 - RNA, 19 nt, Homo sapiens
  misc_RNA (1)...(19): siRNA sense strand
uguuggaacugaagaggca

SEQ ID NO: 2552985 - RNA, 19 nt, Homo sapiens
  misc_RNA (1)...(19): siRNA sense strand
gggcaagaggcuagagcug

SEQ ID NO: 2552986 - RNA, 19 nt, Homo sapiens
  misc_RNA (1)...(19): siRNA sense strand
uggaggaggcgcagaacga

SEQ ID NO: 2552987 - RNA, 19 nt, Homo sapiens
  misc_RNA (1)...(19): siRNA sense strand
ggaagagauucgagaccug

SEQ ID NO: 2552988 - RNA, 19 nt, Homo sapiens
  misc_RNA (1)...(19): siRNA sense strand
cgggagaugcagcaggaga

SEQ ID NO: 2552989 - RNA, 19 nt, Homo sapiens
  misc_RNA (1)...(19): siRNA sense strand
accuaaucaucgagaacuu

SEQ ID NO: 2552990 - RNA, 19 nt, Homo sapiens
  misc_RNA (1)...(19): siRNA sense strand
cugcaacaguggcggacca

SEQ ID NO: 2552991 - RNA, 19 nt, Homo sapiens
  misc_RNA (1)...(19): siRNA sense strand
gcagaaacgucgugagcgg

SEQ ID NO: 2552992 - RNA, 19 nt, Homo sapiens
  misc_RNA (1)...(19): siRNA sense strand
caagaaugucaaggagauu

SEQ ID NO: 2552993 - RNA, 19 nt, Homo sapiens
  misc_RNA (1)...(19): siRNA sense strand
agcagaagauguuggaacu

SEQ ID NO: 2552994 - RNA, 19 nt, Homo sapiens
  misc_RNA (1)...(19): siRNA sense strand
aagagcagccgcaggaaga

SEQ ID NO: 2552995 - RNA, 19 nt, Homo sapiens
  misc_RNA (1)...(19): siRNA sense strand
aggaggaugacaacaacaa

SEQ ID NO: 2552996 - RNA, 19 nt, Homo sapiens
  misc_RNA (1)...(19): siRNA sense strand
ccuuugacgccguguauga

SEQ ID NO: 2552997 - RNA, 19 nt, Homo sapiens
  misc_RNA (1)...(19): siRNA sense strand
aaaccaagaaacucaagaa

SEQ ID NO: 2552998 - RNA, 19 nt, Homo sapiens
  misc_RNA (1)...(19): siRNA sense strand
cagccuuggagaagaacau

SEQ ID NO: 2552999 - RNA, 19 nt, Homo sapiens
  misc_RNA (1)...(19): siRNA sense strand
gagaauuaccugcaggaac

SEQ ID NO: 2553000 - RNA, 19 nt, Homo sapiens
  misc_RNA (1)...(19): siRNA sense strand
ccggaggagaagaacaaga

SEQ ID NO: 2553001 - RNA, 19 nt, Homo sapiens
  misc_RNA (1)...(19): siRNA sense strand
aggaugacaacaacaacaa

SEQ ID NO: 2553002 - RNA, 19 nt, Homo sapiens
  misc_RNA (1)...(19): siRNA sense strand
ugagcgaggagaagcagaa

SEQ ID NO: 2553003 - RNA, 19 nt, Homo sapiens
  misc_RNA (1)...(19): siRNA sense strand
cgaaugccuuugagcacau

SEQ ID NO: 2553004 - RNA, 19 nt, Homo sapiens
  misc_RNA (1)...(19): siRNA sense strand
uggagucagccuuggagaa

SEQ ID NO: 2553005 - RNA, 19 nt, Homo sapiens
  misc_RNA (1)...(19): siRNA sense strand
cggaggagaagaacaagau

SEQ ID NO: 2553006 - RNA, 19 nt, Homo sapiens
  misc_RNA (1)...(19): siRNA sense strand
ugaccauggacgugaaacu

SEQ ID NO: 2553007 - RNA, 19 nt, Homo sapiens
  misc_RNA (1)...(19): siRNA sense strand
augaagaagcggccaacau

SEQ ID NO: 2553008 - RNA, 19 nt, Homo sapiens
  misc_RNA (1)...(19): siRNA sense strand
gggagaagaggaagcccaa

SEQ ID NO: 2553009 - RNA, 19 nt, Homo sapiens
  misc_RNA (1)...(19): siRNA sense strand
agaggaagcccaagagcca

SEQ ID NO: 2553010 - RNA, 19 nt, Homo sapiens
  misc_RNA (1)...(19): siRNA sense strand
gagaagaucaagaaggaug

SEQ ID NO: 2553011 - RNA, 19 nt, Homo sapiens
  misc_RNA (1)...(19): siRNA sense strand
agaagaucaagaaggauga

SEQ ID NO: 2553012 - RNA, 19 nt, Homo sapiens
  misc_RNA (1)...(19): siRNA sense strand
acucagauaucauugccaa

SEQ ID NO: 2553013 - RNA, 19 nt, Homo sapiens
  misc_RNA (1)...(19): siRNA sense strand
cgggagaagaggaagccca

SEQ ID NO: 2553014 - RNA, 19 nt, Homo sapiens
  misc_RNA (1)...(19): siRNA sense strand
uuaagaucacgcagaacaa

SEQ ID NO: 2553015 - RNA, 19 nt, Homo sapiens
  misc_RNA (1)...(19): siRNA sense strand
aguuugacaaugagguaca

SEQ ID NO: 2553016 - RNA, 19 nt, Homo sapiens
  misc_RNA (1)...(19): siRNA sense strand
acguauucuucgagggcau

SEQ ID NO: 2553017 - RNA, 19 nt, Homo sapiens
  misc_RNA (1)...(19): siRNA sense strand
ccaaauaaccagaagcuug

SEQ ID NO: 2553018 - RNA, 19 nt, Homo sapiens
  misc_RNA (1)...(19): siRNA sense strand
ccucgguggaaguggucaa

SEQ ID NO: 2553019 - RNA, 19 nt, Homo sapiens
  misc_RNA (1)...(19): siRNA sense strand
acgaauucaagcuguuuaa

SEQ ID NO: 2553020 - RNA, 19 nt, Homo sapiens
  misc_RNA (1)...(19): siRNA sense strand
ggacagaaguuaaucgcau

SEQ ID NO: 2553021 - RNA, 19 nt, Homo sapiens
  misc_RNA (1)...(19): siRNA sense strand
auuaaugagggcaaagaua

SEQ ID NO: 2553022 - RNA, 19 nt, Homo sapiens
  misc_RNA (1)...(19): siRNA sense strand
cagcaaaaggaaugaccaa

SEQ ID NO: 2553023 - RNA, 19 nt, Homo sapiens
  misc_RNA (1)...(19): siRNA sense strand
aagaaaaggugcugcuaga

SEQ ID NO: 2553024 - RNA, 19 nt, Homo sapiens
  misc_RNA (1)...(19): siRNA sense strand
agacagaauuaaagccauc

SEQ ID NO: 2553025 - RNA, 19 nt, Homo sapiens
  misc_RNA (1)...(19): siRNA sense strand
cccaugacauccagagaca

SEQ ID NO: 2553026 - RNA, 19 nt, Homo sapiens
  misc_RNA (1)...(19): siRNA sense strand
uggcagaagacgcugaaga

SEQ ID NO: 2553027 - RNA, 19 nt, Homo sapiens
  misc_RNA (1)...(19): siRNA sense strand
gaggagaaucauugggaug

SEQ ID NO: 2553028 - RNA, 19 nt, Homo sapiens
  misc_RNA (1)...(19): siRNA sense strand
agccaaggaccauggaaga

SEQ ID NO: 2553029 - RNA, 19 nt, Homo sapiens
  misc_RNA (1)...(19): siRNA sense strand
gccaaguauuuccggaaca

SEQ ID NO: 2553030 - RNA, 19 nt, Homo sapiens
  misc_RNA (1)...(19): siRNA sense strand
agaacugaucuaugcacaa

SEQ ID NO: 2553031 - RNA, 19 nt, Homo sapiens
  misc_RNA (1)...(19): siRNA sense strand
acauccagagacagaauua

SEQ ID NO: 2553032 - RNA, 19 nt, Homo sapiens
  misc_RNA (1)...(19): siRNA sense strand
uggugaagaguguugggaa

SEQ ID NO: 2553033 - RNA, 19 nt, Homo sapiens
  misc_RNA (1)...(19): siRNA sense strand
gggaaacccucauuggcca

SEQ ID NO: 2553034 - RNA, 19 nt, Homo sapiens
  misc_RNA (1)...(19): siRNA sense strand
uggaaaggagagaggugga

SEQ ID NO: 2553035 - RNA, 19 nt, Homo sapiens
  misc_RNA (1)...(19): siRNA sense strand
caugacauccagagacaga

SEQ ID NO: 2553036 - RNA, 19 nt, Homo sapiens
  misc_RNA (1)...(19): siRNA sense strand
acaacaugcagcuggccua

SEQ ID NO: 2553037 - RNA, 19 nt, Homo sapiens
  misc_RNA (1)...(19): siRNA sense strand
aggaaugaccaaaagggua

SEQ ID NO: 2553038 - RNA, 19 nt, Homo sapiens
  misc_RNA (1)...(19): siRNA sense strand
ugugauagacucucagaca

SEQ ID NO: 2553039 - RNA, 19 nt, Homo sapiens
  misc_RNA (1)...(19): siRNA sense strand
auccagagacagaauuaaa

SEQ ID NO: 2553040 - RNA, 19 nt, Homo sapiens
  misc_RNA (1)...(19): siRNA sense strand
gagacagaauuaaagccau

SEQ ID NO: 2553041 - RNA, 19 nt, Homo sapiens
  misc_RNA (1)...(19): siRNA sense strand
uggcauucuuuguuacuau

SEQ ID NO: 2553042 - RNA, 19 nt, Homo sapiens
  misc_RNA (1)...(19): siRNA sense strand
gaagaucauuggaggcaag

SEQ ID NO: 2553043 - RNA, 19 nt, Homo sapiens
  misc_RNA (1)...(19): siRNA sense strand
ccauggaagagaaaaggaa

SEQ ID NO: 2553044 - RNA, 19 nt, Homo sapiens
  misc_RNA (1)...(19): siRNA sense strand
uggagaugugaaagugaaa

SEQ ID NO: 2553045 - RNA, 19 nt, Homo sapiens
  misc_RNA (1)...(19): siRNA sense strand
gagcuaguggagaggucua

SEQ ID NO: 2553046 - RNA, 19 nt, Homo sapiens
  misc_RNA (1)...(19): siRNA sense strand
cuccagaaccagaagguga

SEQ ID NO: 2553047 - RNA, 19 nt, Homo sapiens
  misc_RNA (1)...(19): siRNA sense strand
ugaucuuaguagcagacaa

SEQ ID NO: 2553048 - RNA, 19 nt, Homo sapiens
  misc_RNA (1)...(19): siRNA sense strand
gcagggagcuaguggagag

SEQ ID NO: 2553049 - RNA, 19 nt, Homo sapiens
  misc_RNA (1)...(19): siRNA sense strand
caaccauccuugcuggaga

SEQ ID NO: 2553050 - RNA, 19 nt, Homo sapiens
  misc_RNA (1)...(19): siRNA sense strand
ggagagcaggacuggguca

SEQ ID NO: 2553051 - RNA, 19 nt, Homo sapiens
  misc_RNA (1)...(19): siRNA sense strand
ccgaggaggaugagggcau

SEQ ID NO: 2553052 - RNA, 19 nt, Homo sapiens
  misc_RNA (1)...(19): siRNA sense strand
cggcaagaagggagacaca

SEQ ID NO: 2553053 - RNA, 19 nt, Homo sapiens
  misc_RNA (1)...(19): siRNA sense strand
uggaagaguuugaggaggu

SEQ ID NO: 2553054 - RNA, 19 nt, Homo sapiens
  misc_RNA (1)...(19): siRNA sense strand
accacgugcugaagggaaa

SEQ ID NO: 2553055 - RNA, 19 nt, Homo sapiens
  misc_RNA (1)...(19): siRNA sense strand
aggccggagcugaggagaa

SEQ ID NO: 2553056 - RNA, 19 nt, Homo sapiens
  misc_RNA (1)...(19): siRNA sense strand
aagaaguccaagaagaaga

SEQ ID NO: 2553057 - RNA, 19 nt, Homo sapiens
  misc_RNA (1)...(19): siRNA sense strand
caggaguagcagcagcaaa

SEQ ID NO: 2553058 - RNA, 19 nt, Homo sapiens
  misc_RNA (1)...(19): siRNA sense strand
uggguggccuugagggaga

SEQ ID NO: 2553059 - RNA, 19 nt, Homo sapiens
  misc_RNA (1)...(19): siRNA sense strand
gguuaaucgaagucacuga

SEQ ID NO: 2553060 - RNA, 19 nt, Homo sapiens
  misc_RNA (1)...(19): siRNA sense strand
aggaggaagaccugacuga

SEQ ID NO: 2553061 - RNA, 19 nt, Homo sapiens
  misc_RNA (1)...(19): siRNA sense strand
gucagagaccuuugagaca

SEQ ID NO: 2553062 - RNA, 19 nt, Homo sapiens
  misc_RNA (1)...(19): siRNA sense strand
ccuuugagacauuacacaa

SEQ ID NO: 2553063 - RNA, 19 nt, Homo sapiens
  misc_RNA (1)...(19): siRNA sense strand
gguccggcaagaagggaga

SEQ ID NO: 2553064 - RNA, 19 nt, Homo sapiens
  misc_RNA (1)...(19): siRNA sense strand
aggccggagcugaggagaa

SEQ ID NO: 2553065 - RNA, 19 nt, Homo sapiens
  misc_RNA (1)...(19): siRNA sense strand
gggccaaagcugaggaggu

SEQ ID NO: 2553066 - RNA, 19 nt, Homo sapiens
  misc_RNA (1)...(19): siRNA sense strand
uggccaagggucuggagaa

SEQ ID NO: 2553067 - RNA, 19 nt, Homo sapiens
  misc_RNA (1)...(19): siRNA sense strand
uggaaagccuggaggaagg

SEQ ID NO: 2553068 - RNA, 19 nt, Homo sapiens
  misc_RNA (1)...(19): siRNA sense strand
gggccaaagcugaggaggu

SEQ ID NO: 2553069 - RNA, 19 nt, Homo sapiens
  misc_RNA (1)...(19): siRNA sense strand
uggccaagggucuggagaa

SEQ ID NO: 2553070 - RNA, 19 nt, Homo sapiens
  misc_RNA (1)...(19): siRNA sense strand
uggaaagccuggaggaagg

SEQ ID NO: 2553071 - RNA, 19 nt, Homo sapiens
  misc_RNA (1)...(19): siRNA sense strand
gguuggaauuggagcucaa

SEQ ID NO: 2553072 - RNA, 19 nt, Homo sapiens
  misc_RNA (1)...(19): siRNA sense strand
aaagcagauuccaggcaaa

SEQ ID NO: 2553073 - RNA, 19 nt, Homo sapiens
  misc_RNA (1)...(19): siRNA sense strand
cagcagaccuccaaggacu

SEQ ID NO: 2553074 - RNA, 19 nt, Homo sapiens
  misc_RNA (1)...(19): siRNA sense strand
acaucaaucuugugggacu

SEQ ID NO: 2553075 - RNA, 19 nt, Homo sapiens
  misc_RNA (1)...(19): siRNA sense strand
aguggaagaugguggaacu

SEQ ID NO: 2553076 - RNA, 19 nt, Homo sapiens
  misc_RNA (1)...(19): siRNA sense strand
aggaaugagugugguguau

SEQ ID NO: 2553077 - RNA, 19 nt, Homo sapiens
  misc_RNA (1)...(19): siRNA sense strand
uggcaagagcaaugggacu

SEQ ID NO: 2553078 - RNA, 19 nt, Homo sapiens
  misc_RNA (1)...(19): siRNA sense strand
cuuauuugguacuggacau

SEQ ID NO: 2553079 - RNA, 19 nt, Homo sapiens
  misc_RNA (1)...(19): siRNA sense strand
aagcauguuuugagcuaua

SEQ ID NO: 2553080 - RNA, 19 nt, Homo sapiens
  misc_RNA (1)...(19): siRNA sense strand
auacaauguucaaaggacu

SEQ ID NO: 2553081 - RNA, 19 nt, Homo sapiens
  misc_RNA (1)...(19): siRNA sense strand
ucccaggugcagagauaua

SEQ ID NO: 2553082 - RNA, 19 nt, Homo sapiens
  misc_RNA (1)...(19): siRNA sense strand
uugauuacaaccacagaaa

SEQ ID NO: 2553083 - RNA, 19 nt, Homo sapiens
  misc_RNA (1)...(19): siRNA sense strand
uaacauuauuaguggggau

SEQ ID NO: 2553084 - RNA, 19 nt, Homo sapiens
  misc_RNA (1)...(19): siRNA sense strand
cuguauacuggaauuguua

SEQ ID NO: 2553085 - RNA, 19 nt, Homo sapiens
  misc_RNA (1)...(19): siRNA sense strand
ugccuaugaugguggaaga

SEQ ID NO: 2553086 - RNA, 19 nt, Homo sapiens
  misc_RNA (1)...(19): siRNA sense strand
aaggaaugaguguggugua

SEQ ID NO: 2553087 - RNA, 19 nt, Homo sapiens
  misc_RNA (1)...(19): siRNA sense strand
caagaaagugucugcacca

SEQ ID NO: 2553088 - RNA, 19 nt, Homo sapiens
  misc_RNA (1)...(19): siRNA sense strand
gaacauugccauugcaccu

SEQ ID NO: 2553089 - RNA, 19 nt, Homo sapiens
  misc_RNA (1)...(19): siRNA sense strand
agaagcauguuuugagcua

SEQ ID NO: 2553090 - RNA, 19 nt, Homo sapiens
  misc_RNA (1)...(19): siRNA sense strand
cuucagcacuguuggaacu

SEQ ID NO: 2553091 - RNA, 19 nt, Homo sapiens
  misc_RNA (1)...(19): siRNA sense strand
uuuaucaacaggaggaaga

SEQ ID NO: 2553092 - RNA, 19 nt, Homo sapiens
  misc_RNA (1)...(19): siRNA sense strand
ggaccagcaucuacggugu

SEQ ID NO: 2553093 - RNA, 19 nt, Homo sapiens
  misc_RNA (1)...(19): siRNA sense strand
cuacaucaaucuuguggga

SEQ ID NO: 2553094 - RNA, 19 nt, Homo sapiens
  misc_RNA (1)...(19): siRNA sense strand
cuccaguauuaaugccuua

SEQ ID NO: 2553095 - RNA, 19 nt, Homo sapiens
  misc_RNA (1)...(19): siRNA sense strand
gaucagaguggcaagagca

SEQ ID NO: 2553096 - RNA, 19 nt, Homo sapiens
  misc_RNA (1)...(19): siRNA sense strand
gcagaugccucgagccaga

SEQ ID NO: 2553097 - RNA, 19 nt, Homo sapiens
  misc_RNA (1)...(19): siRNA sense strand
ggaacagccaccagcggaa

SEQ ID NO: 2553098 - RNA, 19 nt, Homo sapiens
  misc_RNA (1)...(19): siRNA sense strand
gggaacacucgucggaaca

SEQ ID NO: 2553099 - RNA, 19 nt, Homo sapiens
  misc_RNA (1)...(19): siRNA sense strand
cugagaaaugguuugaaau

SEQ ID NO: 2553100 - RNA, 19 nt, Homo sapiens
  misc_RNA (1)...(19): siRNA sense strand
agaccaaccagcaggagga

SEQ ID NO: 2553101 - RNA, 19 nt, Homo sapiens
  misc_RNA (1)...(19): siRNA sense strand
gggucugaaguuugagaau

SEQ ID NO: 2553102 - RNA, 19 nt, Homo sapiens
  misc_RNA (1)...(19): siRNA sense strand
ucguguuccuggugggaga

SEQ ID NO: 2553103 - RNA, 19 nt, Homo sapiens
  misc_RNA (1)...(19): siRNA sense strand
ugagguuugacgagagcaa

SEQ ID NO: 2553104 - RNA, 19 nt, Homo sapiens
  misc_RNA (1)...(19): siRNA sense strand
gcuucugccuggaggagga

SEQ ID NO: 2553105 - RNA, 19 nt, Homo sapiens
  misc_RNA (1)...(19): siRNA sense strand
acaccaagcuggacgcugu

SEQ ID NO: 2553106 - RNA, 19 nt, Homo sapiens
  misc_RNA (1)...(19): siRNA sense strand
cugagaagguccugcugca

SEQ ID NO: 2553107 - RNA, 19 nt, Homo sapiens
  misc_RNA (1)...(19): siRNA sense strand
uggacaugcucuaccucaa

SEQ ID NO: 2553108 - RNA, 19 nt, Homo sapiens
  misc_RNA (1)...(19): siRNA sense strand
gggucugaaguuugagaau

SEQ ID NO: 2553109 - RNA, 19 nt, Homo sapiens
  misc_RNA (1)...(19): siRNA sense strand
ucguguuccuggugggaga

SEQ ID NO: 2553110 - RNA, 19 nt, Homo sapiens
  misc_RNA (1)...(19): siRNA sense strand
ugagguuugacgagagcaa

SEQ ID NO: 2553111 - RNA, 19 nt, Homo sapiens
  misc_RNA (1)...(19): siRNA sense strand
gcuucugccuggaggagga

SEQ ID NO: 2553112 - RNA, 19 nt, Homo sapiens
  misc_RNA (1)...(19): siRNA sense strand
acaccaagcuggacgcugu

SEQ ID NO: 2553113 - RNA, 19 nt, Homo sapiens
  misc_RNA (1)...(19): siRNA sense strand
cugagaagguccugcugca

SEQ ID NO: 2553114 - RNA, 19 nt, Homo sapiens
  misc_RNA (1)...(19): siRNA sense strand
uggacaugcucuaccucaa

SEQ ID NO: 2553115 - RNA, 19 nt, Homo sapiens
  misc_RNA (1)...(19): siRNA sense strand
agguaagauuucagaggua

SEQ ID NO: 2553116 - RNA, 19 nt, Homo sapiens
  misc_RNA (1)...(19): siRNA sense strand
gggaaaguggaaugagcaa

SEQ ID NO: 2553117 - RNA, 19 nt, Homo sapiens
  misc_RNA (1)...(19): siRNA sense strand
gauuaaagcuggaggagag

SEQ ID NO: 2553118 - RNA, 19 nt, Homo sapiens
  misc_RNA (1)...(19): siRNA sense strand
uggaagaggagcugagcau

SEQ ID NO: 2553119 - RNA, 19 nt, Homo sapiens
  misc_RNA (1)...(19): siRNA sense strand
gguacuggaugcugggaca

SEQ ID NO: 2553120 - RNA, 19 nt, Homo sapiens
  misc_RNA (1)...(19): siRNA sense strand
augagcaauuugacagaaa

SEQ ID NO: 2553121 - RNA, 19 nt, Homo sapiens
  misc_RNA (1)...(19): siRNA sense strand
ggucaaugaggaaggcaca

SEQ ID NO: 2553122 - RNA, 19 nt, Homo sapiens
  misc_RNA (1)...(19): siRNA sense strand
guuuauacaaagacggaga

SEQ ID NO: 2553123 - RNA, 19 nt, Homo sapiens
  misc_RNA (1)...(19): siRNA sense strand
agaaaguacacaaggggaa

SEQ ID NO: 2553124 - RNA, 19 nt, Homo sapiens
  misc_RNA (1)...(19): siRNA sense strand
cuuuaaaaccaacgaggaa

SEQ ID NO: 2553125 - RNA, 19 nt, Homo sapiens
  misc_RNA (1)...(19): siRNA sense strand
cguggaggucaaugaggaa

SEQ ID NO: 2553126 - RNA, 19 nt, Homo sapiens
  misc_RNA (1)...(19): siRNA sense strand
agcacuuacauaugagaaa

SEQ ID NO: 2553127 - RNA, 19 nt, Homo sapiens
  misc_RNA (1)...(19): siRNA sense strand
uuaaaaccaacgaggaaaa

SEQ ID NO: 2553128 - RNA, 19 nt, Homo sapiens
  misc_RNA (1)...(19): siRNA sense strand
gguaugcggaugagguaca

SEQ ID NO: 2553129 - RNA, 19 nt, Homo sapiens
  misc_RNA (1)...(19): siRNA sense strand
gccauuuauuucaagggaa

SEQ ID NO: 2553130 - RNA, 19 nt, Homo sapiens
  misc_RNA (1)...(19): siRNA sense strand
agugcuucguggaggucaa

SEQ ID NO: 2553131 - RNA, 19 nt, Homo sapiens
  misc_RNA (1)...(19): siRNA sense strand
gagcaauuugacagaaagu

SEQ ID NO: 2553132 - RNA, 19 nt, Homo sapiens
  misc_RNA (1)...(19): siRNA sense strand
aauucaaagccuggacaaa

SEQ ID NO: 2553133 - RNA, 19 nt, Homo sapiens
  misc_RNA (1)...(19): siRNA sense strand
cagaugauguuuaaggaag

SEQ ID NO: 2553134 - RNA, 19 nt, Homo sapiens
  misc_RNA (1)...(19): siRNA sense strand
cggaugagguacacaccca

SEQ ID NO: 2553135 - RNA, 19 nt, Homo sapiens
  misc_RNA (1)...(19): siRNA sense strand
agauuaaagcuggaggaga

SEQ ID NO: 2553136 - RNA, 19 nt, Homo sapiens
  misc_RNA (1)...(19): siRNA sense strand
agguaagauuucagaggua

SEQ ID NO: 2553137 - RNA, 19 nt, Homo sapiens
  misc_RNA (1)...(19): siRNA sense strand
gggaaaguggaaugagcaa

SEQ ID NO: 2553138 - RNA, 19 nt, Homo sapiens
  misc_RNA (1)...(19): siRNA sense strand
gauuaaagcuggaggagag

SEQ ID NO: 2553139 - RNA, 19 nt, Homo sapiens
  misc_RNA (1)...(19): siRNA sense strand
uggaagaggagcugagcau

SEQ ID NO: 2553140 - RNA, 19 nt, Homo sapiens
  misc_RNA (1)...(19): siRNA sense strand
gguacuggaugcugggaca

SEQ ID NO: 2553141 - RNA, 19 nt, Homo sapiens
  misc_RNA (1)...(19): siRNA sense strand
augagcaauuugacagaaa

SEQ ID NO: 2553142 - RNA, 19 nt, Homo sapiens
  misc_RNA (1)...(19): siRNA sense strand
ggucaaugaggaaggcaca

SEQ ID NO: 2553143 - RNA, 19 nt, Homo sapiens
  misc_RNA (1)...(19): siRNA sense strand
guuuauacaaagacggaga

SEQ ID NO: 2553144 - RNA, 19 nt, Homo sapiens
  misc_RNA (1)...(19): siRNA sense strand
agaaaguacacaaggggaa

SEQ ID NO: 2553145 - RNA, 19 nt, Homo sapiens
  misc_RNA (1)...(19): siRNA sense strand
cuuuaaaaccaacgaggaa

SEQ ID NO: 2553146 - RNA, 19 nt, Homo sapiens
  misc_RNA (1)...(19): siRNA sense strand
cguggaggucaaugaggaa

SEQ ID NO: 2553147 - RNA, 19 nt, Homo sapiens
  misc_RNA (1)...(19): siRNA sense strand
agcacuuacauaugagaaa

SEQ ID NO: 2553148 - RNA, 19 nt, Homo sapiens
  misc_RNA (1)...(19): siRNA sense strand
uuaaaaccaacgaggaaaa

SEQ ID NO: 2553149 - RNA, 19 nt, Homo sapiens
  misc_RNA (1)...(19): siRNA sense strand
gguaugcggaugagguaca

SEQ ID NO: 2553150 - RNA, 19 nt, Homo sapiens
  misc_RNA (1)...(19): siRNA sense strand
gccauuuauuucaagggaa

SEQ ID NO: 2553151 - RNA, 19 nt, Homo sapiens
  misc_RNA (1)...(19): siRNA sense strand
agugcuucguggaggucaa

SEQ ID NO: 2553152 - RNA, 19 nt, Homo sapiens
  misc_RNA (1)...(19): siRNA sense strand
gagcaauuugacagaaagu

SEQ ID NO: 2553153 - RNA, 19 nt, Homo sapiens
  misc_RNA (1)...(19): siRNA sense strand
aauucaaagccuggacaaa

SEQ ID NO: 2553154 - RNA, 19 nt, Homo sapiens
  misc_RNA (1)...(19): siRNA sense strand
cagaugauguuuaaggaag

SEQ ID NO: 2553155 - RNA, 19 nt, Homo sapiens
  misc_RNA (1)...(19): siRNA sense strand
cggaugagguacacaccca

SEQ ID NO: 2553156 - RNA, 19 nt, Homo sapiens
  misc_RNA (1)...(19): siRNA sense strand
agauuaaagcuggaggaga

SEQ ID NO: 2553157 - RNA, 19 nt, Homo sapiens
  misc_RNA (1)...(19): siRNA sense strand
cggaaggccacuaugagau

SEQ ID NO: 2553158 - RNA, 19 nt, Homo sapiens
  misc_RNA (1)...(19): siRNA sense strand
cggaccagaacuacgacua

SEQ ID NO: 2553159 - RNA, 19 nt, Homo sapiens
  misc_RNA (1)...(19): siRNA sense strand
aggcagaaaaggagacaaa

SEQ ID NO: 2553160 - RNA, 19 nt, Homo sapiens
  misc_RNA (1)...(19): siRNA sense strand
acgcaaagcagguagcaga

SEQ ID NO: 2553161 - RNA, 19 nt, Homo sapiens
  misc_RNA (1)...(19): siRNA sense strand
aaagcagguagcagagaaa

SEQ ID NO: 2553162 - RNA, 19 nt, Homo sapiens
  misc_RNA (1)...(19): siRNA sense strand
ggccuuuguggaagagaaa

SEQ ID NO: 2553163 - RNA, 19 nt, Homo sapiens
  misc_RNA (1)...(19): siRNA sense strand
acaaagaagaggggagaau

SEQ ID NO: 2553164 - RNA, 19 nt, Homo sapiens
  misc_RNA (1)...(19): siRNA sense strand
uggccuuuguggaagagaa

SEQ ID NO: 2553165 - RNA, 19 nt, Homo sapiens
  misc_RNA (1)...(19): siRNA sense strand
agagaaagccccugcccaa

SEQ ID NO: 2553166 - RNA, 19 nt, Homo sapiens
  misc_RNA (1)...(19): siRNA sense strand
uauuauuggguuugcguuu

SEQ ID NO: 2553167 - RNA, 19 nt, Homo sapiens
  misc_RNA (1)...(19): siRNA sense strand
gagcagagccugaaggaga

SEQ ID NO: 2553168 - RNA, 19 nt, Homo sapiens
  misc_RNA (1)...(19): siRNA sense strand
ggauaaaaguaaaggaagu

SEQ ID NO: 2553169 - RNA, 19 nt, Homo sapiens
  misc_RNA (1)...(19): siRNA sense strand
cugucagaggagaggguua

SEQ ID NO: 2553170 - RNA, 19 nt, Homo sapiens
  misc_RNA (1)...(19): siRNA sense strand
ugaagauggcaaaggaaga

SEQ ID NO: 2553171 - RNA, 19 nt, Homo sapiens
  misc_RNA (1)...(19): siRNA sense strand
ccgucaugguugauggaga

SEQ ID NO: 2553172 - RNA, 19 nt, Homo sapiens
  misc_RNA (1)...(19): siRNA sense strand
cggaggugucuguggagua

SEQ ID NO: 2553173 - RNA, 19 nt, Homo sapiens
  misc_RNA (1)...(19): siRNA sense strand
uaucuuaaguccagcgaca

SEQ ID NO: 2553174 - RNA, 19 nt, Homo sapiens
  misc_RNA (1)...(19): siRNA sense strand
gcagaaaaggggaaaucaa

SEQ ID NO: 2553175 - RNA, 19 nt, Homo sapiens
  misc_RNA (1)...(19): siRNA sense strand
ccuuuaaguuucuggggaa

SEQ ID NO: 2553176 - RNA, 19 nt, Homo sapiens
  misc_RNA (1)...(19): siRNA sense strand
acaacugcuauaagggaua

SEQ ID NO: 2553177 - RNA, 19 nt, Homo sapiens
  misc_RNA (1)...(19): siRNA sense strand
acucagacgcagauggaga

SEQ ID NO: 2553178 - RNA, 19 nt, Homo sapiens
  misc_RNA (1)...(19): siRNA sense strand
ggauagcaagagugugcaa

SEQ ID NO: 2553179 - RNA, 19 nt, Homo sapiens
  misc_RNA (1)...(19): siRNA sense strand
ggaaguacaugcagagcac

SEQ ID NO: 2553180 - RNA, 19 nt, Homo sapiens
  misc_RNA (1)...(19): siRNA sense strand
gggaggacucacagaggau

SEQ ID NO: 2553181 - RNA, 19 nt, Homo sapiens
  misc_RNA (1)...(19): siRNA sense strand
cagaaaaggggaaaucaaa

SEQ ID NO: 2553182 - RNA, 19 nt, Homo sapiens
  misc_RNA (1)...(19): siRNA sense strand
aagcaaaaugugcagaaaa

SEQ ID NO: 2553183 - RNA, 19 nt, Homo sapiens
  misc_RNA (1)...(19): siRNA sense strand
ugucagaggagaggguuaa

SEQ ID NO: 2553184 - RNA, 19 nt, Homo sapiens
  misc_RNA (1)...(19): siRNA sense strand
agaaaaggggaaaucaaaa

SEQ ID NO: 2553185 - RNA, 19 nt, Homo sapiens
  misc_RNA (1)...(19): siRNA sense strand
ccggauaaaaguaaaggaa

SEQ ID NO: 2553186 - RNA, 19 nt, Homo sapiens
  misc_RNA (1)...(19): siRNA sense strand
cuacuaauugggaagaaga

SEQ ID NO: 2553187 - RNA, 19 nt, Homo sapiens
  misc_RNA (1)...(19): siRNA sense strand
gggaagaagaagcccaagu

SEQ ID NO: 2553188 - RNA, 19 nt, Homo sapiens
  misc_RNA (1)...(19): siRNA sense strand
cggcuaugagaccgagcaa

SEQ ID NO: 2553189 - RNA, 19 nt, Homo sapiens
  misc_RNA (1)...(19): siRNA sense strand
ccuugaauuugccagacaa

SEQ ID NO: 2553190 - RNA, 19 nt, Homo sapiens
  misc_RNA (1)...(19): siRNA sense strand
uugcugacgugauccgaaa

SEQ ID NO: 2553191 - RNA, 19 nt, Homo sapiens
  misc_RNA (1)...(19): siRNA sense strand
acgucaagugugagcugaa

SEQ ID NO: 2553192 - RNA, 19 nt, Homo sapiens
  misc_RNA (1)...(19): siRNA sense strand
acaccagcuccuugaauuu

SEQ ID NO: 2553193 - RNA, 19 nt, Homo sapiens
  misc_RNA (1)...(19): siRNA sense strand
ucaacuugucagaaggaga

SEQ ID NO: 2553194 - RNA, 19 nt, Homo sapiens
  misc_RNA (1)...(19): siRNA sense strand
ggggaaaucaaaacagaca

SEQ ID NO: 2553195 - RNA, 19 nt, Homo sapiens
  misc_RNA (1)...(19): siRNA sense strand
gggaaguacaugcagagca

SEQ ID NO: 2553196 - RNA, 19 nt, Homo sapiens
  misc_RNA (1)...(19): siRNA sense strand
ccaauagacaacaggccca

SEQ ID NO: 2553197 - RNA, 19 nt, Homo sapiens
  misc_RNA (1)...(19): siRNA sense strand
aggaggaguccgugcagaa

SEQ ID NO: 2553198 - RNA, 19 nt, Homo sapiens
  misc_RNA (1)...(19): siRNA sense strand
ggaggaagacccugagcga

SEQ ID NO: 2553199 - RNA, 19 nt, Homo sapiens
  misc_RNA (1)...(19): siRNA sense strand
ggaagacgcuguuugccaa

SEQ ID NO: 2553200 - RNA, 19 nt, Homo sapiens
  misc_RNA (1)...(19): siRNA sense strand
cagaagaugcgcuggcuga

SEQ ID NO: 2553201 - RNA, 19 nt, Homo sapiens
  misc_RNA (1)...(19): siRNA sense strand
gggagaaugcagacaucau

SEQ ID NO: 2553202 - RNA, 19 nt, Homo sapiens
  misc_RNA (1)...(19): siRNA sense strand
agaaugagaugcugcgagu

SEQ ID NO: 2553203 - RNA, 19 nt, Homo sapiens
  misc_RNA (1)...(19): siRNA sense strand
aggacgugcuggagggugu

SEQ ID NO: 2553204 - RNA, 19 nt, Homo sapiens
  misc_RNA (1)...(19): siRNA sense strand
gggaagacgcuguuugcca

SEQ ID NO: 2553205 - RNA, 19 nt, Homo sapiens
  misc_RNA (1)...(19): siRNA sense strand
guccaagcucaaagaguau

SEQ ID NO: 2553206 - RNA, 19 nt, Homo sapiens
  misc_RNA (1)...(19): siRNA sense strand
ccaaggacaaauggagcaa

SEQ ID NO: 2553207 - RNA, 19 nt, Homo sapiens
  misc_RNA (1)...(19): siRNA sense strand
gggcccaguaucaagacaa

SEQ ID NO: 2553208 - RNA, 19 nt, Homo sapiens
  misc_RNA (1)...(19): siRNA sense strand
ugacagaccgggacaaagu

SEQ ID NO: 2553209 - RNA, 19 nt, Homo sapiens
  misc_RNA (1)...(19): siRNA sense strand
gagauggagcugcggcaca

SEQ ID NO: 2553210 - RNA, 19 nt, Homo sapiens
  misc_RNA (1)...(19): siRNA sense strand
gcaacaaauucaugcuggu

SEQ ID NO: 2553211 - RNA, 19 nt, Homo sapiens
  misc_RNA (1)...(19): siRNA sense strand
uguaagaaguguuggaaaa

SEQ ID NO: 2553212 - RNA, 19 nt, Homo sapiens
  misc_RNA (1)...(19): siRNA sense strand
uggcaaugauacugacaaa

SEQ ID NO: 2553213 - RNA, 19 nt, Homo sapiens
  misc_RNA (1)...(19): siRNA sense strand
ccucagagucuuuaaacaa

SEQ ID NO: 2553214 - RNA, 19 nt, Homo sapiens
  misc_RNA (1)...(19): siRNA sense strand
agaauuaguaguuggagaa

SEQ ID NO: 2553215 - RNA, 19 nt, Homo sapiens
  misc_RNA (1)...(19): siRNA sense strand
gugugcaauugaagaauaa

SEQ ID NO: 2553216 - RNA, 19 nt, Homo sapiens
  misc_RNA (1)...(19): siRNA sense strand
agacacaguaagagaaaga

SEQ ID NO: 2553217 - RNA, 19 nt, Homo sapiens
  misc_RNA (1)...(19): siRNA sense strand
guucaguucccguaagaaa

SEQ ID NO: 2553218 - RNA, 19 nt, Homo sapiens
  misc_RNA (1)...(19): siRNA sense strand
ucauggaagacgauggaaa

SEQ ID NO: 2553219 - RNA, 19 nt, Homo sapiens
  misc_RNA (1)...(19): siRNA sense strand
cuacuggauuauagaggaa

SEQ ID NO: 2553220 - RNA, 19 nt, Homo sapiens
  misc_RNA (1)...(19): siRNA sense strand
agaaagacacaguaagaga

SEQ ID NO: 2553221 - RNA, 19 nt, Homo sapiens
  misc_RNA (1)...(19): siRNA sense strand
cuggauucuugcugggaua

SEQ ID NO: 2553222 - RNA, 19 nt, Homo sapiens
  misc_RNA (1)...(19): siRNA sense strand
gacagaaaccugaaggaau

SEQ ID NO: 2553223 - RNA, 19 nt, Homo sapiens
  misc_RNA (1)...(19): siRNA sense strand
acauaauagugcaugaaga

SEQ ID NO: 2553224 - RNA, 19 nt, Homo sapiens
  misc_RNA (1)...(19): siRNA sense strand
ggauaagcaagaacagaau

SEQ ID NO: 2553225 - RNA, 19 nt, Homo sapiens
  misc_RNA (1)...(19): siRNA sense strand
ggcucaagguauauaacaa

SEQ ID NO: 2553226 - RNA, 19 nt, Homo sapiens
  misc_RNA (1)...(19): siRNA sense strand
uagaauuaguaguuggaga

SEQ ID NO: 2553227 - RNA, 19 nt, Homo sapiens
  misc_RNA (1)...(19): siRNA sense strand
augcagaucccaagaaauu

SEQ ID NO: 2553228 - RNA, 19 nt, Homo sapiens
  misc_RNA (1)...(19): siRNA sense strand
aggauaagcaagaacagaa

SEQ ID NO: 2553229 - RNA, 19 nt, Homo sapiens
  misc_RNA (1)...(19): siRNA sense strand
auacaacagccgugaauau

SEQ ID NO: 2553230 - RNA, 19 nt, Homo sapiens
  misc_RNA (1)...(19): siRNA sense strand
agacaguggcaguggcuuu

SEQ ID NO: 2553231 - RNA, 19 nt, Homo sapiens
  misc_RNA (1)...(19): siRNA sense strand
uggagaaauucaacaguga

SEQ ID NO: 2553232 - RNA, 19 nt, Homo sapiens
  misc_RNA (1)...(19): siRNA sense strand
gauucaagugcauguguua

SEQ ID NO: 2553233 - RNA, 19 nt, Homo sapiens
  misc_RNA (1)...(19): siRNA sense strand
ggacaaaucacucugccaa

SEQ ID NO: 2553234 - RNA, 19 nt, Homo sapiens
  misc_RNA (1)...(19): siRNA sense strand
augaagaaagacacaguaa

SEQ ID NO: 2553235 - RNA, 19 nt, Homo sapiens
  misc_RNA (1)...(19): siRNA sense strand
ggcuauauugguagaagaa

SEQ ID NO: 2553236 - RNA, 19 nt, Homo sapiens
  misc_RNA (1)...(19): siRNA sense strand
ugguagaagaagggacaaa

SEQ ID NO: 2553237 - RNA, 19 nt, Homo sapiens
  misc_RNA (1)...(19): siRNA sense strand
ugcagcaucuggagagaaa

SEQ ID NO: 2553238 - RNA, 19 nt, Homo sapiens
  misc_RNA (1)...(19): siRNA sense strand
gugucugaguugauggauu

SEQ ID NO: 2553239 - RNA, 19 nt, Homo sapiens
  misc_RNA (1)...(19): siRNA sense strand
gggaaaauucaguguauga

SEQ ID NO: 2553240 - RNA, 19 nt, Homo sapiens
  misc_RNA (1)...(19): siRNA sense strand
gcaaguuggaugugaucau

SEQ ID NO: 2553241 - RNA, 19 nt, Homo sapiens
  misc_RNA (1)...(19): siRNA sense strand
aaagacacaguaagagaaa

SEQ ID NO: 2553242 - RNA, 19 nt, Homo sapiens
  misc_RNA (1)...(19): siRNA sense strand
guucaaacagagagcacuu

SEQ ID NO: 2553243 - RNA, 19 nt, Homo sapiens
  misc_RNA (1)...(19): siRNA sense strand
auguaagaaguguuggaaa

SEQ ID NO: 2553244 - RNA, 19 nt, Homo sapiens
  misc_RNA (1)...(19): siRNA sense strand
gggauaacuuccuggguag

SEQ ID NO: 2553245 - RNA, 19 nt, Homo sapiens
  misc_RNA (1)...(19): siRNA sense strand
caaacgugucuguggaaaa

SEQ ID NO: 2553246 - RNA, 19 nt, Homo sapiens
  misc_RNA (1)...(19): siRNA sense strand
acgaggugcauuugguaua

SEQ ID NO: 2553247 - RNA, 19 nt, Homo sapiens
  misc_RNA (1)...(19): siRNA sense strand
ugaccaagccagaagggau

SEQ ID NO: 2553248 - RNA, 19 nt, Homo sapiens
  misc_RNA (1)...(19): siRNA sense strand
cguaaaagcuauucugcau

SEQ ID NO: 2553249 - RNA, 19 nt, Homo sapiens
  misc_RNA (1)...(19): siRNA sense strand
cauggaagacgauggaaaa

SEQ ID NO: 2553250 - RNA, 19 nt, Homo sapiens
  misc_RNA (1)...(19): siRNA sense strand
uggcaguggcuuugagcuu

SEQ ID NO: 2553251 - RNA, 19 nt, Homo sapiens
  misc_RNA (1)...(19): siRNA sense strand
cagcgaugauaaaguugaa

SEQ ID NO: 2553252 - RNA, 19 nt, Homo sapiens
  misc_RNA (1)...(19): siRNA sense strand
ugauaaaguugaaccagga

SEQ ID NO: 2553253 - RNA, 19 nt, Homo sapiens
  misc_RNA (1)...(19): siRNA sense strand
ccaaagugucugaguugau

SEQ ID NO: 2553254 - RNA, 19 nt, Homo sapiens
  misc_RNA (1)...(19): siRNA sense strand
cagugcagaugguggccua

SEQ ID NO: 2553255 - RNA, 19 nt, Homo sapiens
  misc_RNA (1)...(19): siRNA sense strand
aggauuuggaccaggaaaa

SEQ ID NO: 2553256 - RNA, 19 nt, Homo sapiens
  misc_RNA (1)...(19): siRNA sense strand
guuauaguauggaggcuga

SEQ ID NO: 2553257 - RNA, 19 nt, Homo sapiens
  misc_RNA (1)...(19): siRNA sense strand
uggcuauauugguagaaga

SEQ ID NO: 2553258 - RNA, 19 nt, Homo sapiens
  misc_RNA (1)...(19): siRNA sense strand
uuauagaggaagacuggaa

SEQ ID NO: 2553259 - RNA, 19 nt, Homo sapiens
  misc_RNA (1)...(19): siRNA sense strand
ugggauaacuuccugggua

SEQ ID NO: 2553260 - RNA, 19 nt, Homo sapiens
  misc_RNA (1)...(19): siRNA sense strand
uuaugaugcuguugugauu

SEQ ID NO: 2553261 - RNA, 19 nt, Homo sapiens
  misc_RNA (1)...(19): siRNA sense strand
aaucaaugguccugcuuca

SEQ ID NO: 2553262 - RNA, 19 nt, Homo sapiens
  misc_RNA (1)...(19): siRNA sense strand
gagaaagacggcaggugga

SEQ ID NO: 2553263 - RNA, 19 nt, Homo sapiens
  misc_RNA (1)...(19): siRNA sense strand
uaaaguugaaccaggaauu

SEQ ID NO: 2553264 - RNA, 19 nt, Homo sapiens
  misc_RNA (1)...(19): siRNA sense strand
auucaaauguccuacaaga

SEQ ID NO: 2553265 - RNA, 19 nt, Homo sapiens
  misc_RNA (1)...(19): siRNA sense strand
cagcaucuggagagaaaga

SEQ ID NO: 2553266 - RNA, 19 nt, Homo sapiens
  misc_RNA (1)...(19): siRNA sense strand
ccuuguacgaggugcauuu

SEQ ID NO: 2553267 - RNA, 19 nt, Homo sapiens
  misc_RNA (1)...(19): siRNA sense strand
cuugaaaguccuaggucca

SEQ ID NO: 2553268 - RNA, 19 nt, Homo sapiens
  misc_RNA (1)...(19): siRNA sense strand
uaucaugcauauaugggaa

SEQ ID NO: 2553269 - RNA, 19 nt, Homo sapiens
  misc_RNA (1)...(19): siRNA sense strand
ucuaguaacaugacgguga

SEQ ID NO: 2553270 - RNA, 19 nt, Homo sapiens
  misc_RNA (1)...(19): siRNA sense strand
caacaugaaaaguaaggaa

SEQ ID NO: 2553271 - RNA, 19 nt, Homo sapiens
  misc_RNA (1)...(19): siRNA sense strand
ugguugugcuggagguuca

SEQ ID NO: 2553272 - RNA, 19 nt, Homo sapiens
  misc_RNA (1)...(19): siRNA sense strand
gugucaagacucaguucua

SEQ ID NO: 2553273 - RNA, 19 nt, Homo sapiens
  misc_RNA (1)...(19): siRNA sense strand
ccgaugaagccaacaacuu

SEQ ID NO: 2553274 - RNA, 19 nt, Homo sapiens
  misc_RNA (1)...(19): siRNA sense strand
aggacugaaguguggaauu

SEQ ID NO: 2553275 - RNA, 19 nt, Homo sapiens
  misc_RNA (1)...(19): siRNA sense strand
cguguaauacugugcucaa

SEQ ID NO: 2553276 - RNA, 19 nt, Homo sapiens
  misc_RNA (1)...(19): siRNA sense strand
gagcugacuuccaggccaa

SEQ ID NO: 2553277 - RNA, 19 nt, Homo sapiens
  misc_RNA (1)...(19): siRNA sense strand
gaacagcccucuagccgua

SEQ ID NO: 2553278 - RNA, 19 nt, Homo sapiens
  misc_RNA (1)...(19): siRNA sense strand
acaaagugcaggacaucau

SEQ ID NO: 2553279 - RNA, 19 nt, Homo sapiens
  misc_RNA (1)...(19): siRNA sense strand
ggaaacaggugcauggaga

SEQ ID NO: 2553280 - RNA, 19 nt, Homo sapiens
  misc_RNA (1)...(19): siRNA sense strand
aaacaaagauguauggcuu

SEQ ID NO: 2553281 - RNA, 19 nt, Homo sapiens
  misc_RNA (1)...(19): siRNA sense strand
aggaggaaggagauggaua

SEQ ID NO: 2553282 - RNA, 19 nt, Homo sapiens
  misc_RNA (1)...(19): siRNA sense strand
aggugaaacugguuccaaa

SEQ ID NO: 2553283 - RNA, 19 nt, Homo sapiens
  misc_RNA (1)...(19): siRNA sense strand
acaguaaagaggaagaaau

SEQ ID NO: 2553284 - RNA, 19 nt, Homo sapiens
  misc_RNA (1)...(19): siRNA sense strand
gcgauugguuacaugggaa

SEQ ID NO: 2553285 - RNA, 19 nt, Homo sapiens
  misc_RNA (1)...(19): siRNA sense strand
ggguauuguuggugaggcu

SEQ ID NO: 2553286 - RNA, 19 nt, Homo sapiens
  misc_RNA (1)...(19): siRNA sense strand
gguacaguaaagaggaaga

SEQ ID NO: 2553287 - RNA, 19 nt, Homo sapiens
  misc_RNA (1)...(19): siRNA sense strand
uagacaaggaggaaggaga

SEQ ID NO: 2553288 - RNA, 19 nt, Homo sapiens
  misc_RNA (1)...(19): siRNA sense strand
agacaaggaggaaggagau

SEQ ID NO: 2553289 - RNA, 19 nt, Homo sapiens
  misc_RNA (1)...(19): siRNA sense strand
ugaugaaaauggagaagau

SEQ ID NO: 2553290 - RNA, 19 nt, Homo sapiens
  misc_RNA (1)...(19): siRNA sense strand
ucuaaaucuuguugguaca

SEQ ID NO: 2553291 - RNA, 19 nt, Homo sapiens
  misc_RNA (1)...(19): siRNA sense strand
gugaaggaaaggugaaacu

SEQ ID NO: 2553292 - RNA, 19 nt, Homo sapiens
  misc_RNA (1)...(19): siRNA sense strand
gggauaauguguggagcga

SEQ ID NO: 2553293 - RNA, 19 nt, Homo sapiens
  misc_RNA (1)...(19): siRNA sense strand
aagaggaagaaauggauga

SEQ ID NO: 2553294 - RNA, 19 nt, Homo sapiens
  misc_RNA (1)...(19): siRNA sense strand
ugugaaauuugaagaucga

SEQ ID NO: 2553295 - RNA, 19 nt, Homo sapiens
  misc_RNA (1)...(19): siRNA sense strand
ccuucaugauggugaucuu

SEQ ID NO: 2553296 - RNA, 19 nt, Homo sapiens
  misc_RNA (1)...(19): siRNA sense strand
agaaaagagagaugcauuu

SEQ ID NO: 2553297 - RNA, 19 nt, Homo sapiens
  misc_RNA (1)...(19): siRNA sense strand
gaggaaggagauggauaaa

SEQ ID NO: 2553298 - RNA, 19 nt, Homo sapiens
  misc_RNA (1)...(19): siRNA sense strand
ggugaaacugguuccaaau

SEQ ID NO: 2553299 - RNA, 19 nt, Homo sapiens
  misc_RNA (1)...(19): siRNA sense strand
ucgguacaguaaagaggaa

SEQ ID NO: 2553300 - RNA, 19 nt, Homo sapiens
  misc_RNA (1)...(19): siRNA sense strand
ccagccacuuacugugaaa

SEQ ID NO: 2553301 - RNA, 19 nt, Homo sapiens
  misc_RNA (1)...(19): siRNA sense strand
gauaaagaaaagagagaug

SEQ ID NO: 2553302 - RNA, 19 nt, Homo sapiens
  misc_RNA (1)...(19): siRNA sense strand
uggugaggcugaugaaaau

SEQ ID NO: 2553303 - RNA, 19 nt, Homo sapiens
  misc_RNA (1)...(19): siRNA sense strand
cuagugaaggaaaggugaa

SEQ ID NO: 2553304 - RNA, 19 nt, Homo sapiens
  misc_RNA (1)...(19): siRNA sense strand
gagaccuaggagaugaaua

SEQ ID NO: 2553305 - RNA, 19 nt, Homo sapiens
  misc_RNA (1)...(19): siRNA sense strand
gaaacaggugcauggagau

SEQ ID NO: 2553306 - RNA, 19 nt, Homo sapiens
  misc_RNA (1)...(19): siRNA sense strand
ucuauuaugucuauggcuu

SEQ ID NO: 2553307 - RNA, 19 nt, Homo sapiens
  misc_RNA (1)...(19): siRNA sense strand
guacaguaaagaggaagaa

SEQ ID NO: 2553308 - RNA, 19 nt, Homo sapiens
  misc_RNA (1)...(19): siRNA sense strand
acuaaaugcagaagauuac

SEQ ID NO: 2553309 - RNA, 19 nt, Homo sapiens
  misc_RNA (1)...(19): siRNA sense strand
aacaaagauguauggcuua

SEQ ID NO: 2553310 - RNA, 19 nt, Homo sapiens
  misc_RNA (1)...(19): siRNA sense strand
gggacaagaacauggaaga

SEQ ID NO: 2553311 - RNA, 19 nt, Homo sapiens
  misc_RNA (1)...(19): siRNA sense strand
agugaauacugcagaccaa

SEQ ID NO: 2553312 - RNA, 19 nt, Homo sapiens
  misc_RNA (1)...(19): siRNA sense strand
ggacgcagcuacaagggaa

SEQ ID NO: 2553313 - RNA, 19 nt, Homo sapiens
  misc_RNA (1)...(19): siRNA sense strand
cgucauaucuucugggaac

SEQ ID NO: 2553314 - RNA, 19 nt, Homo sapiens
  misc_RNA (1)...(19): siRNA sense strand
gcagagggacaaaggaaaa

SEQ ID NO: 2553315 - RNA, 19 nt, Homo sapiens
  misc_RNA (1)...(19): siRNA sense strand
gguaaaggacgcagcuaca

SEQ ID NO: 2553316 - RNA, 19 nt, Homo sapiens
  misc_RNA (1)...(19): siRNA sense strand
gugcaaggaccuacgagaa

SEQ ID NO: 2553317 - RNA, 19 nt, Homo sapiens
  misc_RNA (1)...(19): siRNA sense strand
ggaugguuaguuugagaua

SEQ ID NO: 2553318 - RNA, 19 nt, Homo sapiens
  misc_RNA (1)...(19): siRNA sense strand
agauuguuaucgugggaau

SEQ ID NO: 2553319 - RNA, 19 nt, Homo sapiens
  misc_RNA (1)...(19): siRNA sense strand
gcgaguuguaaaugggauu

SEQ ID NO: 2553320 - RNA, 19 nt, Homo sapiens
  misc_RNA (1)...(19): siRNA sense strand
ugucaauaccauuuggaau

SEQ ID NO: 2553321 - RNA, 19 nt, Homo sapiens
  misc_RNA (1)...(19): siRNA sense strand
guucaaugugggacaagaa

SEQ ID NO: 2553322 - RNA, 19 nt, Homo sapiens
  misc_RNA (1)...(19): siRNA sense strand
ucugaaugagucugaaaua

SEQ ID NO: 2553323 - RNA, 19 nt, Homo sapiens
  misc_RNA (1)...(19): siRNA sense strand
cccacuuguuugugagcaa

SEQ ID NO: 2553324 - RNA, 19 nt, Homo sapiens
  misc_RNA (1)...(19): siRNA sense strand
ccuaauuauggaugcacaa

SEQ ID NO: 2553325 - RNA, 19 nt, Homo sapiens
  misc_RNA (1)...(19): siRNA sense strand
cgagaaaauuacugccgaa

SEQ ID NO: 2553326 - RNA, 19 nt, Homo sapiens
  misc_RNA (1)...(19): siRNA sense strand
ggagaaggcuacaggggca

SEQ ID NO: 2553327 - RNA, 19 nt, Homo sapiens
  misc_RNA (1)...(19): siRNA sense strand
ugcaaggaccuacgagaaa

SEQ ID NO: 2553328 - RNA, 19 nt, Homo sapiens
  misc_RNA (1)...(19): siRNA sense strand
augguuaguuugagauaca

SEQ ID NO: 2553329 - RNA, 19 nt, Homo sapiens
  misc_RNA (1)...(19): siRNA sense strand
gcaaaauggauacacaaaa

SEQ ID NO: 2553330 - RNA, 19 nt, Homo sapiens
  misc_RNA (1)...(19): siRNA sense strand
augcagagggacaaaggaa

SEQ ID NO: 2553331 - RNA, 19 nt, Homo sapiens
  misc_RNA (1)...(19): siRNA sense strand
gguauauggcccugaagga

SEQ ID NO: 2553332 - RNA, 19 nt, Homo sapiens
  misc_RNA (1)...(19): siRNA sense strand
ccugaaagauaucccgaca

SEQ ID NO: 2553333 - RNA, 19 nt, Homo sapiens
  misc_RNA (1)...(19): siRNA sense strand
gggaaccagaugcaaguaa

SEQ ID NO: 2553334 - RNA, 19 nt, Homo sapiens
  misc_RNA (1)...(19): siRNA sense strand
gaggagaugagaaaugcaa

SEQ ID NO: 2553335 - RNA, 19 nt, Homo sapiens
  misc_RNA (1)...(19): siRNA sense strand
caggaaaacuacugucgaa

SEQ ID NO: 2553336 - RNA, 19 nt, Homo sapiens
  misc_RNA (1)...(19): siRNA sense strand
gaugauaauuauugccgca

SEQ ID NO: 2553337 - RNA, 19 nt, Homo sapiens
  misc_RNA (1)...(19): siRNA sense strand
cugacaauacuaugaauga

SEQ ID NO: 2553338 - RNA, 19 nt, Homo sapiens
  misc_RNA (1)...(19): siRNA sense strand
aaguaagcugaaugagaau

SEQ ID NO: 2553339 - RNA, 19 nt, Homo sapiens
  misc_RNA (1)...(19): siRNA sense strand
ccgaaauccagaugaugau

SEQ ID NO: 2553340 - RNA, 19 nt, Homo sapiens
  misc_RNA (1)...(19): siRNA sense strand
ccacucauuccuugggauu

SEQ ID NO: 2553341 - RNA, 19 nt, Homo sapiens
  misc_RNA (1)...(19): siRNA sense strand
gauaaaggagaguuggguu

SEQ ID NO: 2553342 - RNA, 19 nt, Homo sapiens
  misc_RNA (1)...(19): siRNA sense strand
auccagcacugaagauaaa

SEQ ID NO: 2553343 - RNA, 19 nt, Homo sapiens
  misc_RNA (1)...(19): siRNA sense strand
ccgacaagggcuuugauga

SEQ ID NO: 2553344 - RNA, 19 nt, Homo sapiens
  misc_RNA (1)...(19): siRNA sense strand
ccgaaauccagaugggucu

SEQ ID NO: 2553345 - RNA, 19 nt, Homo sapiens
  misc_RNA (1)...(19): siRNA sense strand
aaugagaauuacugccgaa

SEQ ID NO: 2553346 - RNA, 19 nt, Homo sapiens
  misc_RNA (1)...(19): siRNA sense strand
aaacgaaacaauugcgagu

SEQ ID NO: 2553347 - RNA, 19 nt, Homo sapiens
  misc_RNA (1)...(19): siRNA sense strand
cugaaugagucugaaauau

SEQ ID NO: 2553348 - RNA, 19 nt, Homo sapiens
  misc_RNA (1)...(19): siRNA sense strand
ccugcaauggggagaguua

SEQ ID NO: 2553349 - RNA, 19 nt, Homo sapiens
  misc_RNA (1)...(19): siRNA sense strand
acauaucugcggaggauca

SEQ ID NO: 2553350 - RNA, 19 nt, Homo sapiens
  misc_RNA (1)...(19): siRNA sense strand
cuugaaagauuaugaagcu

SEQ ID NO: 2553351 - RNA, 19 nt, Homo sapiens
  misc_RNA (1)...(19): siRNA sense strand
acggaagaggagaugagaa

SEQ ID NO: 2553352 - RNA, 19 nt, Homo sapiens
  misc_RNA (1)...(19): siRNA sense strand
gacaauacuaugaaugaca

SEQ ID NO: 2553353 - RNA, 19 nt, Homo sapiens
  misc_RNA (1)...(19): siRNA sense strand
ugcagagggacaaaggaaa

SEQ ID NO: 2553354 - RNA, 19 nt, Homo sapiens
  misc_RNA (1)...(19): siRNA sense strand
uggaagacuuacaucguca

SEQ ID NO: 2553355 - RNA, 19 nt, Homo sapiens
  misc_RNA (1)...(19): siRNA sense strand
cugccgaaauccagaugau

SEQ ID NO: 2553356 - RNA, 19 nt, Homo sapiens
  misc_RNA (1)...(19): siRNA sense strand
ccaugauaccacacgaaca

SEQ ID NO: 2553357 - RNA, 19 nt, Homo sapiens
  misc_RNA (1)...(19): siRNA sense strand
aaacugcaucauugguaaa

SEQ ID NO: 2553358 - RNA, 19 nt, Homo sapiens
  misc_RNA (1)...(19): siRNA sense strand
cuacaagggaacaguaucu

SEQ ID NO: 2553359 - RNA, 19 nt, Homo sapiens
  misc_RNA (1)...(19): siRNA sense strand
acuaagaguggcaucaaau

SEQ ID NO: 2553360 - RNA, 19 nt, Homo sapiens
  misc_RNA (1)...(19): siRNA sense strand
ugagaaaugcaaacagguu

SEQ ID NO: 2553361 - RNA, 19 nt, Homo sapiens
  misc_RNA (1)...(19): siRNA sense strand
aaaagaaagcagagagaaa

SEQ ID NO: 2553362 - RNA, 19 nt, Homo sapiens
  misc_RNA (1)...(19): siRNA sense strand
cccuaauaagauaaggaaa

SEQ ID NO: 2553363 - RNA, 19 nt, Homo sapiens
  misc_RNA (1)...(19): siRNA sense strand
uggaaagccaagacagaga

SEQ ID NO: 2553364 - RNA, 19 nt, Homo sapiens
  misc_RNA (1)...(19): siRNA sense strand
agaagaaaacagaugcuaa

SEQ ID NO: 2553365 - RNA, 19 nt, Homo sapiens
  misc_RNA (1)...(19): siRNA sense strand
ggacgaaguaagagccauc

SEQ ID NO: 2553366 - RNA, 19 nt, Homo sapiens
  misc_RNA (1)...(19): siRNA sense strand
aaucugaaggagaagaaaa

SEQ ID NO: 2553367 - RNA, 19 nt, Homo sapiens
  misc_RNA (1)...(19): siRNA sense strand
acgcuugaggacaggcuua

SEQ ID NO: 2553368 - RNA, 19 nt, Homo sapiens
  misc_RNA (1)...(19): siRNA sense strand
aaaagaaagcagagagaaa

SEQ ID NO: 2553369 - RNA, 19 nt, Homo sapiens
  misc_RNA (1)...(19): siRNA sense strand
cccuaauaagauaaggaaa

SEQ ID NO: 2553370 - RNA, 19 nt, Homo sapiens
  misc_RNA (1)...(19): siRNA sense strand
uggaaagccaagacagaga

SEQ ID NO: 2553371 - RNA, 19 nt, Homo sapiens
  misc_RNA (1)...(19): siRNA sense strand
agaagaaaacagaugcuaa

SEQ ID NO: 2553372 - RNA, 19 nt, Homo sapiens
  misc_RNA (1)...(19): siRNA sense strand
ggacgaaguaagagccauc

SEQ ID NO: 2553373 - RNA, 19 nt, Homo sapiens
  misc_RNA (1)...(19): siRNA sense strand
aaucugaaggagaagaaaa

SEQ ID NO: 2553374 - RNA, 19 nt, Homo sapiens
  misc_RNA (1)...(19): siRNA sense strand
acgcuugaggacaggcuua

SEQ ID NO: 2553375 - RNA, 19 nt, Homo sapiens
  misc_RNA (1)...(19): siRNA sense strand
acaacauuggcuagagaaa

SEQ ID NO: 2553376 - RNA, 19 nt, Homo sapiens
  misc_RNA (1)...(19): siRNA sense strand
ccucuauaaacaaggacaa

SEQ ID NO: 2553377 - RNA, 19 nt, Homo sapiens
  misc_RNA (1)...(19): siRNA sense strand
cuauaaacaaggacaacau

SEQ ID NO: 2553378 - RNA, 19 nt, Homo sapiens
  misc_RNA (1)...(19): siRNA sense strand
aggauagaaggaagagaga

SEQ ID NO: 2553379 - RNA, 19 nt, Homo sapiens
  misc_RNA (1)...(19): siRNA sense strand
guuuauucgugcugguuca

SEQ ID NO: 2553380 - RNA, 19 nt, Homo sapiens
  misc_RNA (1)...(19): siRNA sense strand
aggagauaauaaugcgguu

SEQ ID NO: 2553381 - RNA, 19 nt, Homo sapiens
  misc_RNA (1)...(19): siRNA sense strand
uggaagugaaaguccgauu

SEQ ID NO: 2553382 - RNA, 19 nt, Homo sapiens
  misc_RNA (1)...(19): siRNA sense strand
cuugauagggaaagguaaa

SEQ ID NO: 2553383 - RNA, 19 nt, Homo sapiens
  misc_RNA (1)...(19): siRNA sense strand
gguaaaaggaggagaucau

SEQ ID NO: 2553384 - RNA, 19 nt, Homo sapiens
  misc_RNA (1)...(19): siRNA sense strand
gcuccgaaugagugagauu

SEQ ID NO: 2553385 - RNA, 19 nt, Homo sapiens
  misc_RNA (1)...(19): siRNA sense strand
ccagacaagcagcgagauu

SEQ ID NO: 2553386 - RNA, 19 nt, Homo sapiens
  misc_RNA (1)...(19): siRNA sense strand
aagaaauagaggagaugau

SEQ ID NO: 2553387 - RNA, 19 nt, Homo sapiens
  misc_RNA (1)...(19): siRNA sense strand
ccaaagagaauaagcgucu

SEQ ID NO: 2553388 - RNA, 19 nt, Homo sapiens
  misc_RNA (1)...(19): siRNA sense strand
gcuugauagggaaagguaa

SEQ ID NO: 2553389 - RNA, 19 nt, Homo sapiens
  misc_RNA (1)...(19): siRNA sense strand
ccgucguacaggagagauu

SEQ ID NO: 2553390 - RNA, 19 nt, Homo sapiens
  misc_RNA (1)...(19): siRNA sense strand
ggcuacuggugcagaggaa

SEQ ID NO: 2553391 - RNA, 19 nt, Homo sapiens
  misc_RNA (1)...(19): siRNA sense strand
agcagaagcaaguggaaga

SEQ ID NO: 2553392 - RNA, 19 nt, Homo sapiens
  misc_RNA (1)...(19): siRNA sense strand
aguaauugcccaugacaca

SEQ ID NO: 2553393 - RNA, 19 nt, Homo sapiens
  misc_RNA (1)...(19): siRNA sense strand
agaugauccacuagaguuu

SEQ ID NO: 2553394 - RNA, 19 nt, Homo sapiens
  misc_RNA (1)...(19): siRNA sense strand
uuggagagauuguagaaaa

SEQ ID NO: 2553395 - RNA, 19 nt, Homo sapiens
  misc_RNA (1)...(19): siRNA sense strand
ucacagagaccauggagga

SEQ ID NO: 2553396 - RNA, 19 nt, Homo sapiens
  misc_RNA (1)...(19): siRNA sense strand
acauagagcagaagcaagu

SEQ ID NO: 2553397 - RNA, 19 nt, Homo sapiens
  misc_RNA (1)...(19): siRNA sense strand
cauuccagaugaugggauu

SEQ ID NO: 2553398 - RNA, 19 nt, Homo sapiens
  misc_RNA (1)...(19): siRNA sense strand
gaggaauguaugucaucaa

SEQ ID NO: 2553399 - RNA, 19 nt, Homo sapiens
  misc_RNA (1)...(19): siRNA sense strand
gaagaaacacauagagcag

SEQ ID NO: 2553400 - RNA, 19 nt, Homo sapiens
  misc_RNA (1)...(19): siRNA sense strand
cugcaaaggaggcaaagga

SEQ ID NO: 2553401 - RNA, 19 nt, Homo sapiens
  misc_RNA (1)...(19): siRNA sense strand
acucagcuugauagggaaa

SEQ ID NO: 2553402 - RNA, 19 nt, Homo sapiens
  misc_RNA (1)...(19): siRNA sense strand
gcagcgagauugugcgaac

SEQ ID NO: 2553403 - RNA, 19 nt, Homo sapiens
  misc_RNA (1)...(19): siRNA sense strand
cuauaacaucucuaagcaa

SEQ ID NO: 2553404 - RNA, 19 nt, Homo sapiens
  misc_RNA (1)...(19): siRNA sense strand
cagaggaagcacaguuaca

SEQ ID NO: 2553405 - RNA, 19 nt, Homo sapiens
  misc_RNA (1)...(19): siRNA sense strand
ugaguuaucaagugcacaa

SEQ ID NO: 2553406 - RNA, 19 nt, Homo sapiens
  misc_RNA (1)...(19): siRNA sense strand
gggaaagguaaaaggagga

SEQ ID NO: 2553407 - RNA, 19 nt, Homo sapiens
  misc_RNA (1)...(19): siRNA sense strand
cccaaggccaagagaccaa

SEQ ID NO: 2553408 - RNA, 19 nt, Homo sapiens
  misc_RNA (1)...(19): siRNA sense strand
cagauaacaaggagcccau

SEQ ID NO: 2553409 - RNA, 19 nt, Homo sapiens
  misc_RNA (1)...(19): siRNA sense strand
gaccagacaagcagcgaga

SEQ ID NO: 2553410 - RNA, 19 nt, Homo sapiens
  misc_RNA (1)...(19): siRNA sense strand
uugauagaaaggaggcaau

SEQ ID NO: 2553411 - RNA, 19 nt, Homo sapiens
  misc_RNA (1)...(19): siRNA sense strand
agaagaaacacauagagca

SEQ ID NO: 2553412 - RNA, 19 nt, Homo sapiens
  misc_RNA (1)...(19): siRNA sense strand
gcagccggguauugcgaau

SEQ ID NO: 2553413 - RNA, 19 nt, Homo sapiens
  misc_RNA (1)...(19): siRNA sense strand
auaagaugcucucagaaaa

SEQ ID NO: 2553414 - RNA, 19 nt, Homo sapiens
  misc_RNA (1)...(19): siRNA sense strand
acuaagaguaauugcccau

SEQ ID NO: 2553415 - RNA, 19 nt, Homo sapiens
  misc_RNA (1)...(19): siRNA sense strand
cuacaagagcauagccaac

SEQ ID NO: 2553416 - RNA, 19 nt, Homo sapiens
  misc_RNA (1)...(19): siRNA sense strand
gcaaauuacacaugggaga

SEQ ID NO: 2553417 - RNA, 19 nt, Homo sapiens
  misc_RNA (1)...(19): siRNA sense strand
gggaagagcuuuagacagg

SEQ ID NO: 2553418 - RNA, 19 nt, Homo sapiens
  misc_RNA (1)...(19): siRNA sense strand
ggaaagaaaccaaacagca

SEQ ID NO: 2553419 - RNA, 19 nt, Homo sapiens
  misc_RNA (1)...(19): siRNA sense strand
agaggaagcuguaucgaga

SEQ ID NO: 2553420 - RNA, 19 nt, Homo sapiens
  misc_RNA (1)...(19): siRNA sense strand
augugaugcuggagaacuu

SEQ ID NO: 2553421 - RNA, 19 nt, Homo sapiens
  misc_RNA (1)...(19): siRNA sense strand
ggucaagucuuaauaggca

SEQ ID NO: 2553422 - RNA, 19 nt, Homo sapiens
  misc_RNA (1)...(19): siRNA sense strand
aggaauucagucagaguuu

SEQ ID NO: 2553423 - RNA, 19 nt, Homo sapiens
  misc_RNA (1)...(19): siRNA sense strand
gaacaaugugggagaggcu

SEQ ID NO: 2553424 - RNA, 19 nt, Homo sapiens
  misc_RNA (1)...(19): siRNA sense strand
acauuauaauugugaggca

SEQ ID NO: 2553425 - RNA, 19 nt, Homo sapiens
  misc_RNA (1)...(19): siRNA sense strand
acuuacaguucauugcaaa

SEQ ID NO: 2553426 - RNA, 19 nt, Homo sapiens
  misc_RNA (1)...(19): siRNA sense strand
agauccaaccugagaugaa

SEQ ID NO: 2553427 - RNA, 19 nt, Homo sapiens
  misc_RNA (1)...(19): siRNA sense strand
cuucagaaacaucagagaa

SEQ ID NO: 2553428 - RNA, 19 nt, Homo sapiens
  misc_RNA (1)...(19): siRNA sense strand
gcacuggggaauauggaaa

SEQ ID NO: 2553429 - RNA, 19 nt, Homo sapiens
  misc_RNA (1)...(19): siRNA sense strand
auuacacaugggagagaaa

SEQ ID NO: 2553430 - RNA, 19 nt, Homo sapiens
  misc_RNA (1)...(19): siRNA sense strand
cagaaacaucagagaauuc

SEQ ID NO: 2553431 - RNA, 19 nt, Homo sapiens
  misc_RNA (1)...(19): siRNA sense strand
uuguaaagaaugugggaag

SEQ ID NO: 2553432 - RNA, 19 nt, Homo sapiens
  misc_RNA (1)...(19): siRNA sense strand
augugaacaaugugggaga

SEQ ID NO: 2553433 - RNA, 19 nt, Homo sapiens
  misc_RNA (1)...(19): siRNA sense strand
ggagaaaauccauccaaau

SEQ ID NO: 2553434 - RNA, 19 nt, Homo sapiens
  misc_RNA (1)...(19): siRNA sense strand
aguccaccugggagagaaa

SEQ ID NO: 2553435 - RNA, 19 nt, Homo sapiens
  misc_RNA (1)...(19): siRNA sense strand
uucagaaacaucagagaau

SEQ ID NO: 2553436 - RNA, 19 nt, Homo sapiens
  misc_RNA (1)...(19): siRNA sense strand
acaagugugggaagagcua

SEQ ID NO: 2553437 - RNA, 19 nt, Homo sapiens
  misc_RNA (1)...(19): siRNA sense strand
gggagagaaacauuauaau

SEQ ID NO: 2553438 - RNA, 19 nt, Homo sapiens
  misc_RNA (1)...(19): siRNA sense strand
agauauguagugugagcuu

SEQ ID NO: 2553439 - RNA, 19 nt, Homo sapiens
  misc_RNA (1)...(19): siRNA sense strand
cuauaaugcacacaggaca

SEQ ID NO: 2553440 - RNA, 19 nt, Homo sapiens
  misc_RNA (1)...(19): siRNA sense strand
cauuauaauugugaggcau

SEQ ID NO: 2553441 - RNA, 19 nt, Homo sapiens
  misc_RNA (1)...(19): siRNA sense strand
gcaaauacgcucagcagag

SEQ ID NO: 2553442 - RNA, 19 nt, Homo sapiens
  misc_RNA (1)...(19): siRNA sense strand
agagaguccaccugggaga

SEQ ID NO: 2553443 - RNA, 19 nt, Homo sapiens
  misc_RNA (1)...(19): siRNA sense strand
caaccugagaugaagacuu

SEQ ID NO: 2553444 - RNA, 19 nt, Homo sapiens
  misc_RNA (1)...(19): siRNA sense strand
cugugaugaguguggaaaa

SEQ ID NO: 2553445 - RNA, 19 nt, Homo sapiens
  misc_RNA (1)...(19): siRNA sense strand
gugguaaggaauucaguca

SEQ ID NO: 2553446 - RNA, 19 nt, Homo sapiens
  misc_RNA (1)...(19): siRNA sense strand
gaaagaaaccaaacagcac

SEQ ID NO: 2553447 - RNA, 19 nt, Homo sapiens
  misc_RNA (1)...(19): siRNA sense strand
aagaaugugggaagagcuu

SEQ ID NO: 2553448 - RNA, 19 nt, Homo sapiens
  misc_RNA (1)...(19): siRNA sense strand
gacugugggaagagcuuua

SEQ ID NO: 2553449 - RNA, 19 nt, Homo sapiens
  misc_RNA (1)...(19): siRNA sense strand
uggaggauguggaggcaga

SEQ ID NO: 2553450 - RNA, 19 nt, Homo sapiens
  misc_RNA (1)...(19): siRNA sense strand
cuggaagacgagaggguca

SEQ ID NO: 2553451 - RNA, 19 nt, Homo sapiens
  misc_RNA (1)...(19): siRNA sense strand
gguucuacccagaugaaga

SEQ ID NO: 2553452 - RNA, 19 nt, Homo sapiens
  misc_RNA (1)...(19): siRNA sense strand
aagcacuggaccaaagaaa

SEQ ID NO: 2553453 - RNA, 19 nt, Homo sapiens
  misc_RNA (1)...(19): siRNA sense strand
aggugaacccugagaagga

SEQ ID NO: 2553454 - RNA, 19 nt, Homo sapiens
  misc_RNA (1)...(19): siRNA sense strand
ugauggagcugaagcagga

SEQ ID NO: 2553455 - RNA, 19 nt, Homo sapiens
  misc_RNA (1)...(19): siRNA sense strand
guggauggcuggaugcuca

SEQ ID NO: 2553456 - RNA, 19 nt, Homo sapiens
  misc_RNA (1)...(19): siRNA sense strand
gggaagaggugguugccag

SEQ ID NO: 2553457 - RNA, 19 nt, Homo sapiens
  misc_RNA (1)...(19): siRNA sense strand
cggcugugggcgaugacua

SEQ ID NO: 2553458 - RNA, 19 nt, Homo sapiens
  misc_RNA (1)...(19): siRNA sense strand
caucaggaaccucggcgua

SEQ ID NO: 2553459 - RNA, 19 nt, Homo sapiens
  misc_RNA (1)...(19): siRNA sense strand
auguggaggcagagaaacu

SEQ ID NO: 2553460 - RNA, 19 nt, Homo sapiens
  misc_RNA (1)...(19): siRNA sense strand
ccaccugaucuuagaagca

SEQ ID NO: 2553461 - RNA, 19 nt, Homo sapiens
  misc_RNA (1)...(19): siRNA sense strand
acgugcgcuuugagagcaa

SEQ ID NO: 2553462 - RNA, 19 nt, Homo sapiens
  misc_RNA (1)...(19): siRNA sense strand
cagccaggucuuaggcaau

SEQ ID NO: 2553463 - RNA, 19 nt, Homo sapiens
  misc_RNA (1)...(19): siRNA sense strand
augaagaagcacagccaga

SEQ ID NO: 2553464 - RNA, 19 nt, Homo sapiens
  misc_RNA (1)...(19): siRNA sense strand
aggcaaugaaaucaaguuu

SEQ ID NO: 2553465 - RNA, 19 nt, Homo sapiens
  misc_RNA (1)...(19): siRNA sense strand
caggaauaagagagggcaa

SEQ ID NO: 2553466 - RNA, 19 nt, Homo sapiens
  misc_RNA (1)...(19): siRNA sense strand
guaaagaaaugaaugcuga

SEQ ID NO: 2553467 - RNA, 19 nt, Homo sapiens
  misc_RNA (1)...(19): siRNA sense strand
ggagaaaauaagauggaau

SEQ ID NO: 2553468 - RNA, 19 nt, Homo sapiens
  misc_RNA (1)...(19): siRNA sense strand
cguaaaaggccucuauaaa

SEQ ID NO: 2553469 - RNA, 19 nt, Homo sapiens
  misc_RNA (1)...(19): siRNA sense strand
gugaaagcagagacguaaa

SEQ ID NO: 2553470 - RNA, 19 nt, Homo sapiens
  misc_RNA (1)...(19): siRNA sense strand
aggaguacuuacagguuau

SEQ ID NO: 2553471 - RNA, 19 nt, Homo sapiens
  misc_RNA (1)...(19): siRNA sense strand
ccgcaaaauacaugaauca

SEQ ID NO: 2553472 - RNA, 19 nt, Homo sapiens
  misc_RNA (1)...(19): siRNA sense strand
uugugaaagcagagacgua

SEQ ID NO: 2553473 - RNA, 19 nt, Homo sapiens
  misc_RNA (1)...(19): siRNA sense strand
acgcugaauucuaugaaca

SEQ ID NO: 2553474 - RNA, 19 nt, Homo sapiens
  misc_RNA (1)...(19): siRNA sense strand
gcaaguuuguccuggcaca

SEQ ID NO: 2553475 - RNA, 19 nt, Homo sapiens
  misc_RNA (1)...(19): siRNA sense strand
gauuaugagaaaccugaaa

SEQ ID NO: 2553476 - RNA, 19 nt, Homo sapiens
  misc_RNA (1)...(19): siRNA sense strand
acggagaaccagcagaaau

SEQ ID NO: 2553477 - RNA, 19 nt, Homo sapiens
  misc_RNA (1)...(19): siRNA sense strand
gcugguugguggagaccuu

SEQ ID NO: 2553478 - RNA, 19 nt, Homo sapiens
  misc_RNA (1)...(19): siRNA sense strand
cggagaaccagcagaaauc

SEQ ID NO: 2553479 - RNA, 19 nt, Homo sapiens
  misc_RNA (1)...(19): siRNA sense strand
gggcaagugguuggaacaa

SEQ ID NO: 2553480 - RNA, 19 nt, Homo sapiens
  misc_RNA (1)...(19): siRNA sense strand
uggcuaagcuguuugcuga

SEQ ID NO: 2553481 - RNA, 19 nt, Homo sapiens
  misc_RNA (1)...(19): siRNA sense strand
cuggaagggugcagcaagu

SEQ ID NO: 2553482 - RNA, 19 nt, Homo sapiens
  misc_RNA (1)...(19): siRNA sense strand
ggggacaacauguacaaaa

SEQ ID NO: 2553483 - RNA, 19 nt, Homo sapiens
  misc_RNA (1)...(19): siRNA sense strand
gggacagagaggaaaauau

SEQ ID NO: 2553484 - RNA, 19 nt, Homo sapiens
  misc_RNA (1)...(19): siRNA sense strand
acuuacagguuaugcacuu

SEQ ID NO: 2553485 - RNA, 19 nt, Homo sapiens
  misc_RNA (1)...(19): siRNA sense strand
ccugaaaccaagaaggauc

SEQ ID NO: 2553486 - RNA, 19 nt, Homo sapiens
  misc_RNA (1)...(19): siRNA sense strand
ggucccuggagaagaacua

SEQ ID NO: 2553487 - RNA, 19 nt, Homo sapiens
  misc_RNA (1)...(19): siRNA sense strand
ggauaagacacggcuggaa

SEQ ID NO: 2553488 - RNA, 19 nt, Homo sapiens
  misc_RNA (1)...(19): siRNA sense strand
ggaaugaugggcuggacca

SEQ ID NO: 2553489 - RNA, 19 nt, Homo sapiens
  misc_RNA (1)...(19): siRNA sense strand
agggcaagugguuggaaca

SEQ ID NO: 2553490 - RNA, 19 nt, Homo sapiens
  misc_RNA (1)...(19): siRNA sense strand
gguaguggaacuucugcaa

SEQ ID NO: 2553491 - RNA, 19 nt, Homo sapiens
  misc_RNA (1)...(19): siRNA sense strand
gcggcuggaccaaggauga

SEQ ID NO: 2553492 - RNA, 19 nt, Homo sapiens
  misc_RNA (1)...(19): siRNA sense strand
agcaaaagacggagaacca

SEQ ID NO: 2553493 - RNA, 19 nt, Homo sapiens
  misc_RNA (1)...(19): siRNA sense strand
gcaagaaauuuaaacgaga

SEQ ID NO: 2553494 - RNA, 19 nt, Homo sapiens
  misc_RNA (1)...(19): siRNA sense strand
uaaucaagcucgagcccaa

SEQ ID NO: 2553495 - RNA, 19 nt, Homo sapiens
  misc_RNA (1)...(19): siRNA sense strand
ugggaaugacagcaagaaa

SEQ ID NO: 2553496 - RNA, 19 nt, Homo sapiens
  misc_RNA (1)...(19): siRNA sense strand
ggguauaauuucuucacca

SEQ ID NO: 2553497 - RNA, 19 nt, Homo sapiens
  misc_RNA (1)...(19): siRNA sense strand
cuaaugggaaugacagcaa

SEQ ID NO: 2553498 - RNA, 19 nt, Homo sapiens
  misc_RNA (1)...(19): siRNA sense strand
ucaccgaagcagagaucau

SEQ ID NO: 2553499 - RNA, 19 nt, Homo sapiens
  misc_RNA (1)...(19): siRNA sense strand
caguggaugaucugaagaa

SEQ ID NO: 2553500 - RNA, 19 nt, Homo sapiens
  misc_RNA (1)...(19): siRNA sense strand
ucacaaaucucaauccuga

SEQ ID NO: 2553501 - RNA, 19 nt, Homo sapiens
  misc_RNA (1)...(19): siRNA sense strand
ggucagagacuuuauggga

SEQ ID NO: 2553502 - RNA, 19 nt, Homo sapiens
  misc_RNA (1)...(19): siRNA sense strand
gucagagacuuuaugggaa

SEQ ID NO: 2553503 - RNA, 19 nt, Homo sapiens
  misc_RNA (1)...(19): siRNA sense strand
uccucaagcuacaggucua

SEQ ID NO: 2553504 - RNA, 19 nt, Homo sapiens
  misc_RNA (1)...(19): siRNA sense strand
agucuauggugauguacau

SEQ ID NO: 2553505 - RNA, 19 nt, Homo sapiens
  misc_RNA (1)...(19): siRNA sense strand
gaucuguggaagaagcaau

SEQ ID NO: 2553506 - RNA, 19 nt, Homo sapiens
  misc_RNA (1)...(19): siRNA sense strand
ugacaaaagcagagacuuc

SEQ ID NO: 2553507 - RNA, 19 nt, Homo sapiens
  misc_RNA (1)...(19): siRNA sense strand
uucuacagcuaaugggaau

SEQ ID NO: 2553508 - RNA, 19 nt, Homo sapiens
  misc_RNA (1)...(19): siRNA sense strand
uggcaaaguaacuaaucuu

SEQ ID NO: 2553509 - RNA, 19 nt, Homo sapiens
  misc_RNA (1)...(19): siRNA sense strand
aaccaugaccuuggagaaa

SEQ ID NO: 2553510 - RNA, 19 nt, Homo sapiens
  misc_RNA (1)...(19): siRNA sense strand
ccaugaccuuggagaaaau

SEQ ID NO: 2553511 - RNA, 19 nt, Homo sapiens
  misc_RNA (1)...(19): siRNA sense strand
aagaaaaugccuugguuca

SEQ ID NO: 2553512 - RNA, 19 nt, Homo sapiens
  misc_RNA (1)...(19): siRNA sense strand
acuacaaauccuuggagaa

SEQ ID NO: 2553513 - RNA, 19 nt, Homo sapiens
  misc_RNA (1)...(19): siRNA sense strand
agaaagucaaacugagcaa

SEQ ID NO: 2553514 - RNA, 19 nt, Homo sapiens
  misc_RNA (1)...(19): siRNA sense strand
gaacaaggagauuggcuga

SEQ ID NO: 2553515 - RNA, 19 nt, Homo sapiens
  misc_RNA (1)...(19): siRNA sense strand
gcaaauucaugaaggugca

SEQ ID NO: 2553516 - RNA, 19 nt, Homo sapiens
  misc_RNA (1)...(19): siRNA sense strand
cugaagacagagaagagaa

SEQ ID NO: 2553517 - RNA, 19 nt, Homo sapiens
  misc_RNA (1)...(19): siRNA sense strand
gcugauuggaggagaucuu

SEQ ID NO: 2553518 - RNA, 19 nt, Homo sapiens
  misc_RNA (1)...(19): siRNA sense strand
ugaagacagagaagagaau

SEQ ID NO: 2553519 - RNA, 19 nt, Homo sapiens
  misc_RNA (1)...(19): siRNA sense strand
caucaugucagcaggaaca

SEQ ID NO: 2553520 - RNA, 19 nt, Homo sapiens
  misc_RNA (1)...(19): siRNA sense strand
ucgcaacaaugcaaggcaa

SEQ ID NO: 2553521 - RNA, 19 nt, Homo sapiens
  misc_RNA (1)...(19): siRNA sense strand
gugccaaagugcugacgau

SEQ ID NO: 2553522 - RNA, 19 nt, Homo sapiens
  misc_RNA (1)...(19): siRNA sense strand
ggugauggaacaaggagau

SEQ ID NO: 2553523 - RNA, 19 nt, Homo sapiens
  misc_RNA (1)...(19): siRNA sense strand
cgcaacaaugcaaggcaaa

SEQ ID NO: 2553524 - RNA, 19 nt, Homo sapiens
  misc_RNA (1)...(19): siRNA sense strand
aaagucaaacugagcaaua

SEQ ID NO: 2553525 - RNA, 19 nt, Homo sapiens
  misc_RNA (1)...(19): siRNA sense strand
ggauauuguaccuguggau

SEQ ID NO: 2553526 - RNA, 19 nt, Homo sapiens
  misc_RNA (1)...(19): siRNA sense strand
cgucaaggucucaauaaaa

SEQ ID NO: 2553527 - RNA, 19 nt, Homo sapiens
  misc_RNA (1)...(19): siRNA sense strand
cuuuaguccugaagacaga

SEQ ID NO: 2553528 - RNA, 19 nt, Homo sapiens
  misc_RNA (1)...(19): siRNA sense strand
gggaaagacuacugugagc

SEQ ID NO: 2553529 - RNA, 19 nt, Homo sapiens
  misc_RNA (1)...(19): siRNA sense strand
gugaacagagggaugucaa

SEQ ID NO: 2553530 - RNA, 19 nt, Homo sapiens
  misc_RNA (1)...(19): siRNA sense strand
uguggaacuucuacaggaa

SEQ ID NO: 2553531 - RNA, 19 nt, Homo sapiens
  misc_RNA (1)...(19): siRNA sense strand
acucaugaagauaaagaga

SEQ ID NO: 2553532 - RNA, 19 nt, Homo sapiens
  misc_RNA (1)...(19): siRNA sense strand
caucgcagaaguugcuaaa

SEQ ID NO: 2553533 - RNA, 19 nt, Homo sapiens
  misc_RNA (1)...(19): siRNA sense strand
gcuuuaugagagagaggga

SEQ ID NO: 2553534 - RNA, 19 nt, Homo sapiens
  misc_RNA (1)...(19): siRNA sense strand
ugaacagagggaugucaaa

SEQ ID NO: 2553535 - RNA, 19 nt, Homo sapiens
  misc_RNA (1)...(19): siRNA sense strand
agacgacagugguggccau

SEQ ID NO: 2553536 - RNA, 19 nt, Homo sapiens
  misc_RNA (1)...(19): siRNA sense strand
gcgggaaagacuacuguga

SEQ ID NO: 2553537 - RNA, 19 nt, Homo sapiens
  misc_RNA (1)...(19): siRNA sense strand
aagucaaacugagcaauaa

SEQ ID NO: 2553538 - RNA, 19 nt, Homo sapiens
  misc_RNA (1)...(19): siRNA sense strand
uggggaaugcagagagcaa

SEQ ID NO: 2553539 - RNA, 19 nt, Homo sapiens
  misc_RNA (1)...(19): siRNA sense strand
ccagaaacagggaaggauc

SEQ ID NO: 2553540 - RNA, 19 nt, Homo sapiens
  misc_RNA (1)...(19): siRNA sense strand
gcuacacucuggaugguga

SEQ ID NO: 2553541 - RNA, 19 nt, Homo sapiens
  misc_RNA (1)...(19): siRNA sense strand
aagacagagaagagaaugu

SEQ ID NO: 2553542 - RNA, 19 nt, Homo sapiens
  misc_RNA (1)...(19): siRNA sense strand
gcaacaaugcaaggcaaau

SEQ ID NO: 2553543 - RNA, 19 nt, Homo sapiens
  misc_RNA (1)...(19): siRNA sense strand
cgacucaugaagauaaaga

SEQ ID NO: 2553544 - RNA, 19 nt, Homo sapiens
  misc_RNA (1)...(19): siRNA sense strand
ucuuacuccuacugagcua

SEQ ID NO: 2553545 - RNA, 19 nt, Homo sapiens
  misc_RNA (1)...(19): siRNA sense strand
cugcgacucaugaagauaa

SEQ ID NO: 2553546 - RNA, 19 nt, Homo sapiens
  misc_RNA (1)...(19): siRNA sense strand
gaaggaucuuuaugagcca

SEQ ID NO: 2553547 - RNA, 19 nt, Homo sapiens
  misc_RNA (1)...(19): siRNA sense strand
gggcagugcucuaugcuga

SEQ ID NO: 2553548 - RNA, 19 nt, Homo sapiens
  misc_RNA (1)...(19): siRNA sense strand
gcaugggccuggaaggaga

SEQ ID NO: 2553549 - RNA, 19 nt, Homo sapiens
  misc_RNA (1)...(19): siRNA sense strand
agacggugcaggaggguga

SEQ ID NO: 2553550 - RNA, 19 nt, Homo sapiens
  misc_RNA (1)...(19): siRNA sense strand
cgagagucgcuaugagaca

SEQ ID NO: 2553551 - RNA, 19 nt, Homo sapiens
  misc_RNA (1)...(19): siRNA sense strand
auaucaagguggagacagu

SEQ ID NO: 2553552 - RNA, 19 nt, Homo sapiens
  misc_RNA (1)...(19): siRNA sense strand
gggccuggaaggagaacuu

SEQ ID NO: 2553553 - RNA, 19 nt, Homo sapiens
  misc_RNA (1)...(19): siRNA sense strand
ccaccuaccgacugggcua

SEQ ID NO: 2553554 - RNA, 19 nt, Homo sapiens
  misc_RNA (1)...(19): siRNA sense strand
cggacuacggccagcgauu

SEQ ID NO: 2553555 - RNA, 19 nt, Homo sapiens
  misc_RNA (1)...(19): siRNA sense strand
augagacaaauguggauua

SEQ ID NO: 2553556 - RNA, 19 nt, Homo sapiens
  misc_RNA (1)...(19): siRNA sense strand
gggcaguacaaccuggaga

SEQ ID NO: 2553557 - RNA, 19 nt, Homo sapiens
  misc_RNA (1)...(19): siRNA sense strand
gcuauacaguggagaggac

SEQ ID NO: 2553558 - RNA, 19 nt, Homo sapiens
  misc_RNA (1)...(19): siRNA sense strand
ccaaacucaccgugcucaa

SEQ ID NO: 2553559 - RNA, 19 nt, Homo sapiens
  misc_RNA (1)...(19): siRNA sense strand
cguuuaaggaugaugugga

SEQ ID NO: 2553560 - RNA, 19 nt, Homo sapiens
  misc_RNA (1)...(19): siRNA sense strand
gaucacagaugcugagcuc

SEQ ID NO: 2553561 - RNA, 19 nt, Homo sapiens
  misc_RNA (1)...(19): siRNA sense strand
aguucauggugcagagaau

SEQ ID NO: 2553562 - RNA, 19 nt, Homo sapiens
  misc_RNA (1)...(19): siRNA sense strand
ggaauuggccauuuggaga

SEQ ID NO: 2553563 - RNA, 19 nt, Homo sapiens
  misc_RNA (1)...(19): siRNA sense strand
cuguauuaguguagaucga

SEQ ID NO: 2553564 - RNA, 19 nt, Homo sapiens
  misc_RNA (1)...(19): siRNA sense strand
ccagaagccacauggaaaa

SEQ ID NO: 2553565 - RNA, 19 nt, Homo sapiens
  misc_RNA (1)...(19): siRNA sense strand
caaugaaucugcugccuga

SEQ ID NO: 2553566 - RNA, 19 nt, Homo sapiens
  misc_RNA (1)...(19): siRNA sense strand
auccaauuguguugccaua

SEQ ID NO: 2553567 - RNA, 19 nt, Homo sapiens
  misc_RNA (1)...(19): siRNA sense strand
guagaucgauuucuggcaa

SEQ ID NO: 2553568 - RNA, 19 nt, Homo sapiens
  misc_RNA (1)...(19): siRNA sense strand
caguaguggcgcugggugu

SEQ ID NO: 2553569 - RNA, 19 nt, Homo sapiens
  misc_RNA (1)...(19): siRNA sense strand
gugucuacaaugucagcaa

SEQ ID NO: 2553570 - RNA, 19 nt, Homo sapiens
  misc_RNA (1)...(19): siRNA sense strand
caguaguggcgcugggugu

SEQ ID NO: 2553571 - RNA, 19 nt, Homo sapiens
  misc_RNA (1)...(19): siRNA sense strand
gugucuacaaugucagcaa

SEQ ID NO: 2553572 - RNA, 19 nt, Homo sapiens
  misc_RNA (1)...(19): siRNA sense strand
aggaauaauugauggagaa

SEQ ID NO: 2553573 - RNA, 19 nt, Homo sapiens
  misc_RNA (1)...(19): siRNA sense strand
uaucaaagugggagugaaa

SEQ ID NO: 2553574 - RNA, 19 nt, Homo sapiens
  misc_RNA (1)...(19): siRNA sense strand
uggcaaagucacugguuua

SEQ ID NO: 2553575 - RNA, 19 nt, Homo sapiens
  misc_RNA (1)...(19): siRNA sense strand
gauuagauacggaggaaca

SEQ ID NO: 2553576 - RNA, 19 nt, Homo sapiens
  misc_RNA (1)...(19): siRNA sense strand
cugaaguccuagagucaaa

SEQ ID NO: 2553577 - RNA, 19 nt, Homo sapiens
  misc_RNA (1)...(19): siRNA sense strand
ggcaguacgaauaggaaua

SEQ ID NO: 2553578 - RNA, 19 nt, Homo sapiens
  misc_RNA (1)...(19): siRNA sense strand
uggcacuaauaaaggaaua

SEQ ID NO: 2553579 - RNA, 19 nt, Homo sapiens
  misc_RNA (1)...(19): siRNA sense strand
gggugaaauagaagauuau

SEQ ID NO: 2553580 - RNA, 19 nt, Homo sapiens
  misc_RNA (1)...(19): siRNA sense strand
agaaguuggccaagaaauu

SEQ ID NO: 2553581 - RNA, 19 nt, Homo sapiens
  misc_RNA (1)...(19): siRNA sense strand
ccuucaauguuguugcaaa

SEQ ID NO: 2553582 - RNA, 19 nt, Homo sapiens
  misc_RNA (1)...(19): siRNA sense strand
ugacagauauuuugggaau

SEQ ID NO: 2553583 - RNA, 19 nt, Homo sapiens
  misc_RNA (1)...(19): siRNA sense strand
uagaagagaacuugggcau

SEQ ID NO: 2553584 - RNA, 19 nt, Homo sapiens
  misc_RNA (1)...(19): siRNA sense strand
ggcaacaggaaauuagaaa

SEQ ID NO: 2553585 - RNA, 19 nt, Homo sapiens
  misc_RNA (1)...(19): siRNA sense strand
gggcaguacgaauaggaau

SEQ ID NO: 2553586 - RNA, 19 nt, Homo sapiens
  misc_RNA (1)...(19): siRNA sense strand
auuagaauuuggagcagua

SEQ ID NO: 2553587 - RNA, 19 nt, Homo sapiens
  misc_RNA (1)...(19): siRNA sense strand
aggauuagaaguuggccaa

SEQ ID NO: 2553588 - RNA, 19 nt, Homo sapiens
  misc_RNA (1)...(19): siRNA sense strand
caaaguuuccagagaugaa

SEQ ID NO: 2553589 - RNA, 19 nt, Homo sapiens
  misc_RNA (1)...(19): siRNA sense strand
gguuuaaauagaagagaac

SEQ ID NO: 2553590 - RNA, 19 nt, Homo sapiens
  misc_RNA (1)...(19): siRNA sense strand
gcaacaggaaauuagaaau

SEQ ID NO: 2553591 - RNA, 19 nt, Homo sapiens
  misc_RNA (1)...(19): siRNA sense strand
caauguuguugcaaaggaa

SEQ ID NO: 2553592 - RNA, 19 nt, Homo sapiens
  misc_RNA (1)...(19): siRNA sense strand
ccacaaacuaucugagaag

SEQ ID NO: 2553593 - RNA, 19 nt, Homo sapiens
  misc_RNA (1)...(19): siRNA sense strand
uaggaauaauugauggaga

SEQ ID NO: 2553594 - RNA, 19 nt, Homo sapiens
  misc_RNA (1)...(19): siRNA sense strand
ccuucauggaucagcauua

SEQ ID NO: 2553595 - RNA, 19 nt, Homo sapiens
  misc_RNA (1)...(19): siRNA sense strand
ccuuaugcaacuaaugaaa

SEQ ID NO: 2553596 - RNA, 19 nt, Homo sapiens
  misc_RNA (1)...(19): siRNA sense strand
agcaguagaugguguaaau

SEQ ID NO: 2553597 - RNA, 19 nt, Homo sapiens
  misc_RNA (1)...(19): siRNA sense strand
ccuuucaccauaagaguua

SEQ ID NO: 2553598 - RNA, 19 nt, Homo sapiens
  misc_RNA (1)...(19): siRNA sense strand
caacuaaugaaauuggcaa

SEQ ID NO: 2553599 - RNA, 19 nt, Homo sapiens
  misc_RNA (1)...(19): siRNA sense strand
gugaaauauacccaacaaa

SEQ ID NO: 2553600 - RNA, 19 nt, Homo sapiens
  misc_RNA (1)...(19): siRNA sense strand
aaauugugauggaggcuau

SEQ ID NO: 2553601 - RNA, 19 nt, Homo sapiens
  misc_RNA (1)...(19): siRNA sense strand
gagaagagagguugguacu

SEQ ID NO: 2553602 - RNA, 19 nt, Homo sapiens
  misc_RNA (1)...(19): siRNA sense strand
aacaaauaauucagggcau

SEQ ID NO: 2553603 - RNA, 19 nt, Homo sapiens
  misc_RNA (1)...(19): siRNA sense strand
cugagaagggugaaauaga

SEQ ID NO: 2553604 - RNA, 19 nt, Homo sapiens
  misc_RNA (1)...(19): siRNA sense strand
guaguauuguaaugggaga

SEQ ID NO: 2553605 - RNA, 19 nt, Homo sapiens
  misc_RNA (1)...(19): siRNA sense strand
ucaacaagcuucaguggca

SEQ ID NO: 2553606 - RNA, 19 nt, Homo sapiens
  misc_RNA (1)...(19): siRNA sense strand
gagcuguggccguggacuu

SEQ ID NO: 2553607 - RNA, 19 nt, Homo sapiens
  misc_RNA (1)...(19): siRNA sense strand
ggaauaauugauggagaau

SEQ ID NO: 2553608 - RNA, 19 nt, Homo sapiens
  misc_RNA (1)...(19): siRNA sense strand
auacugguguaaugguaaa

SEQ ID NO: 2553609 - RNA, 19 nt, Homo sapiens
  misc_RNA (1)...(19): siRNA sense strand
cagauuacgagcaugacaa

SEQ ID NO: 2553610 - RNA, 19 nt, Homo sapiens
  misc_RNA (1)...(19): siRNA sense strand
caguagaugguguaaauga

SEQ ID NO: 2553611 - RNA, 19 nt, Homo sapiens
  misc_RNA (1)...(19): siRNA sense strand
ccuguuauucccagagauu

SEQ ID NO: 2553612 - RNA, 19 nt, Homo sapiens
  misc_RNA (1)...(19): siRNA sense strand
uguuggaccugguggcuau

SEQ ID NO: 2553613 - RNA, 19 nt, Homo sapiens
  misc_RNA (1)...(19): siRNA sense strand
ccagagaugaagcuguuaa

SEQ ID NO: 2553614 - RNA, 19 nt, Homo sapiens
  misc_RNA (1)...(19): siRNA sense strand
aggagauauuacagaucau

SEQ ID NO: 2553615 - RNA, 19 nt, Homo sapiens
  misc_RNA (1)...(19): siRNA sense strand
cugaaaucugcaaggauga

SEQ ID NO: 2553616 - RNA, 19 nt, Homo sapiens
  misc_RNA (1)...(19): siRNA sense strand
agaauuuggagcaguauau

SEQ ID NO: 2553617 - RNA, 19 nt, Homo sapiens
  misc_RNA (1)...(19): siRNA sense strand
auuagaaguuggccaagaa

SEQ ID NO: 2553618 - RNA, 19 nt, Homo sapiens
  misc_RNA (1)...(19): siRNA sense strand
gguaaaagaaacugguguu

SEQ ID NO: 2553619 - RNA, 19 nt, Homo sapiens
  misc_RNA (1)...(19): siRNA sense strand
uuacagauuacgagcauga

SEQ ID NO: 2553620 - RNA, 19 nt, Homo sapiens
  misc_RNA (1)...(19): siRNA sense strand
guguaaucuguuagcagua

SEQ ID NO: 2553621 - RNA, 19 nt, Homo sapiens
  misc_RNA (1)...(19): siRNA sense strand
aagauuagauacggaggaa

SEQ ID NO: 2553622 - RNA, 19 nt, Homo sapiens
  misc_RNA (1)...(19): siRNA sense strand
ugguauuaagucagaucaa

SEQ ID NO: 2553623 - RNA, 19 nt, Homo sapiens
  misc_RNA (1)...(19): siRNA sense strand
agauacugguguaauggua

SEQ ID NO: 2553624 - RNA, 19 nt, Homo sapiens
  misc_RNA (1)...(19): siRNA sense strand
gauacugguguaaugguaa

SEQ ID NO: 2553625 - RNA, 19 nt, Homo sapiens
  misc_RNA (1)...(19): siRNA sense strand
uugaaugacagaaguagua

SEQ ID NO: 2553626 - RNA, 19 nt, Homo sapiens
  misc_RNA (1)...(19): siRNA sense strand
gcaaggaugaucaggagca

SEQ ID NO: 2553627 - RNA, 19 nt, Homo sapiens
  misc_RNA (1)...(19): siRNA sense strand
augacaaaguuuccagaga

SEQ ID NO: 2553628 - RNA, 19 nt, Homo sapiens
  misc_RNA (1)...(19): siRNA sense strand
cagcuauaaaugggauaaa

SEQ ID NO: 2553629 - RNA, 19 nt, Homo sapiens
  misc_RNA (1)...(19): siRNA sense strand
ccuaaaagucagauuguca

SEQ ID NO: 2553630 - RNA, 19 nt, Homo sapiens
  misc_RNA (1)...(19): siRNA sense strand
agugaaauauacccaacaa

SEQ ID NO: 2553631 - RNA, 19 nt, Homo sapiens
  misc_RNA (1)...(19): siRNA sense strand
gacuuaggcaacaggaaau

SEQ ID NO: 2553632 - RNA, 19 nt, Homo sapiens
  misc_RNA (1)...(19): siRNA sense strand
gaggaacaacuaaaagaaa

SEQ ID NO: 2553633 - RNA, 19 nt, Homo sapiens
  misc_RNA (1)...(19): siRNA sense strand
gugagguagauauguuuaa

SEQ ID NO: 2553634 - RNA, 19 nt, Homo sapiens
  misc_RNA (1)...(19): siRNA sense strand
ggugaaauacuuuggacgu

SEQ ID NO: 2553635 - RNA, 19 nt, Homo sapiens
  misc_RNA (1)...(19): siRNA sense strand
cuaucugagaagagagguu

SEQ ID NO: 2553636 - RNA, 19 nt, Homo sapiens
  misc_RNA (1)...(19): siRNA sense strand
cuucaauguuguugcaaag

SEQ ID NO: 2553637 - RNA, 19 nt, Homo sapiens
  misc_RNA (1)...(19): siRNA sense strand
gaggaaagccuuagggaca

SEQ ID NO: 2553638 - RNA, 19 nt, Homo sapiens
  misc_RNA (1)...(19): siRNA sense strand
gggccaugaccaaggacaa

SEQ ID NO: 2553639 - RNA, 19 nt, Homo sapiens
  misc_RNA (1)...(19): siRNA sense strand
gggacaaaugugagaaagu

SEQ ID NO: 2553640 - RNA, 19 nt, Homo sapiens
  misc_RNA (1)...(19): siRNA sense strand
gcguggagauccuggccaa

SEQ ID NO: 2553641 - RNA, 19 nt, Homo sapiens
  misc_RNA (1)...(19): siRNA sense strand
gaugaggcccagagggaca

SEQ ID NO: 2553642 - RNA, 19 nt, Homo sapiens
  misc_RNA (1)...(19): siRNA sense strand
uggccaacgaccagggcaa

SEQ ID NO: 2553643 - RNA, 19 nt, Homo sapiens
  misc_RNA (1)...(19): siRNA sense strand
gugagagggccaugaccaa

SEQ ID NO: 2553644 - RNA, 19 nt, Homo sapiens
  misc_RNA (1)...(19): siRNA sense strand
ccgaagaggacaggcgcaa

SEQ ID NO: 2553645 - RNA, 19 nt, Homo sapiens
  misc_RNA (1)...(19): siRNA sense strand
uggacaaggcccagauuca

SEQ ID NO: 2553646 - RNA, 19 nt, Homo sapiens
  misc_RNA (1)...(19): siRNA sense strand
acggcaaggagcugaacaa

SEQ ID NO: 2553647 - RNA, 19 nt, Homo sapiens
  misc_RNA (1)...(19): siRNA sense strand
aggaggaguaugagcauca

SEQ ID NO: 2553648 - RNA, 19 nt, Homo sapiens
  misc_RNA (1)...(19): siRNA sense strand
gggcagcaguuguggcacu

SEQ ID NO: 2553649 - RNA, 19 nt, Homo sapiens
  misc_RNA (1)...(19): siRNA sense strand
aggaugaggcccagaggga

SEQ ID NO: 2553650 - RNA, 19 nt, Homo sapiens
  misc_RNA (1)...(19): siRNA sense strand
uugccuggcuggagcacaa

SEQ ID NO: 2553651 - RNA, 19 nt, Homo sapiens
  misc_RNA (1)...(19): siRNA sense strand
ggugaaagccacugcugga

SEQ ID NO: 2553652 - RNA, 19 nt, Homo sapiens
  misc_RNA (1)...(19): siRNA sense strand
gggucuucauccaggugua

SEQ ID NO: 2553653 - RNA, 19 nt, Homo sapiens
  misc_RNA (1)...(19): siRNA sense strand
uugcaagaggaaagccuua

SEQ ID NO: 2553654 - RNA, 19 nt, Homo sapiens
  misc_RNA (1)...(19): siRNA sense strand
ggaaggaccugagcgggaa

SEQ ID NO: 2553655 - RNA, 19 nt, Homo sapiens
  misc_RNA (1)...(19): siRNA sense strand
cugagcaagaugaaggaga

SEQ ID NO: 2553656 - RNA, 19 nt, Homo sapiens
  misc_RNA (1)...(19): siRNA sense strand
gguaaggcuaacaagauca

SEQ ID NO: 2553657 - RNA, 19 nt, Homo sapiens
  misc_RNA (1)...(19): siRNA sense strand
ccaucauugaggagguuga

SEQ ID NO: 2553658 - RNA, 19 nt, Homo sapiens
  misc_RNA (1)...(19): siRNA sense strand
gcaaggaggagguggagag

SEQ ID NO: 2553659 - RNA, 19 nt, Homo sapiens
  misc_RNA (1)...(19): siRNA sense strand
aggcugaggaugaggccca

SEQ ID NO: 2553660 - RNA, 19 nt, Homo sapiens
  misc_RNA (1)...(19): siRNA sense strand
aggacuucuucaacggcaa

SEQ ID NO: 2553661 - RNA, 19 nt, Homo sapiens
  misc_RNA (1)...(19): siRNA sense strand
augaauuugaugaggaaca

SEQ ID NO: 2553662 - RNA, 19 nt, Homo sapiens
  misc_RNA (1)...(19): siRNA sense strand
ucaucugcaucguggacaa

SEQ ID NO: 2553663 - RNA, 19 nt, Homo sapiens
  misc_RNA (1)...(19): siRNA sense strand
cagcuguggccaugggaaa

SEQ ID NO: 2553664 - RNA, 19 nt, Homo sapiens
  misc_RNA (1)...(19): siRNA sense strand
acaccauggaucugggaaa

SEQ ID NO: 2553665 - RNA, 19 nt, Homo sapiens
  misc_RNA (1)...(19): siRNA sense strand
augaaauggcagaagcuaa

SEQ ID NO: 2553666 - RNA, 19 nt, Homo sapiens
  misc_RNA (1)...(19): siRNA sense strand
gugccaaccaaucaggaaa

SEQ ID NO: 2553667 - RNA, 19 nt, Homo sapiens
  misc_RNA (1)...(19): siRNA sense strand
agccagagacacuuggaaa

SEQ ID NO: 2553668 - RNA, 19 nt, Homo sapiens
  misc_RNA (1)...(19): siRNA sense strand
accaugaagcugagaaaga

SEQ ID NO: 2553669 - RNA, 19 nt, Homo sapiens
  misc_RNA (1)...(19): siRNA sense strand
gaugaauacagaaggggaa

SEQ ID NO: 2553670 - RNA, 19 nt, Homo sapiens
  misc_RNA (1)...(19): siRNA sense strand
ggaaaacaccagugggacu

SEQ ID NO: 2553671 - RNA, 19 nt, Homo sapiens
  misc_RNA (1)...(19): siRNA sense strand
guguuuggugggaugaaua

SEQ ID NO: 2553672 - RNA, 19 nt, Homo sapiens
  misc_RNA (1)...(19): siRNA sense strand
agaaagaggauucagcuga

SEQ ID NO: 2553673 - RNA, 19 nt, Homo sapiens
  misc_RNA (1)...(19): siRNA sense strand
aggaaagcaacaugguaca

SEQ ID NO: 2553674 - RNA, 19 nt, Homo sapiens
  misc_RNA (1)...(19): siRNA sense strand
gaaaccaggacguggacca

SEQ ID NO: 2553675 - RNA, 19 nt, Homo sapiens
  misc_RNA (1)...(19): siRNA sense strand
cugagaaagaagauuccaa

SEQ ID NO: 2553676 - RNA, 19 nt, Homo sapiens
  misc_RNA (1)...(19): siRNA sense strand
gaugguggcagcagggaca

SEQ ID NO: 2553677 - RNA, 19 nt, Homo sapiens
  misc_RNA (1)...(19): siRNA sense strand
ccuccacugcauugauaua

SEQ ID NO: 2553678 - RNA, 19 nt, Homo sapiens
  misc_RNA (1)...(19): siRNA sense strand
agaggauucagcugacaaa

SEQ ID NO: 2553679 - RNA, 19 nt, Homo sapiens
  misc_RNA (1)...(19): siRNA sense strand
aggaaaucgaaauugucua

SEQ ID NO: 2553680 - RNA, 19 nt, Homo sapiens
  misc_RNA (1)...(19): siRNA sense strand
cggaagaagagaaaggaaa

SEQ ID NO: 2553681 - RNA, 19 nt, Homo sapiens
  misc_RNA (1)...(19): siRNA sense strand
cggaaaacaaugagugaaa

SEQ ID NO: 2553682 - RNA, 19 nt, Homo sapiens
  misc_RNA (1)...(19): siRNA sense strand
agauuuaggaagagagauu

SEQ ID NO: 2553683 - RNA, 19 nt, Homo sapiens
  misc_RNA (1)...(19): siRNA sense strand
agacagaagcaguagacaa

SEQ ID NO: 2553684 - RNA, 19 nt, Homo sapiens
  misc_RNA (1)...(19): siRNA sense strand
acgccaaagcaaaggauaa

SEQ ID NO: 2553685 - RNA, 19 nt, Homo sapiens
  misc_RNA (1)...(19): siRNA sense strand
aaaucaagacucugggaaa

SEQ ID NO: 2553686 - RNA, 19 nt, Homo sapiens
  misc_RNA (1)...(19): siRNA sense strand
gaggaagagcagaaggcaa

SEQ ID NO: 2553687 - RNA, 19 nt, Homo sapiens
  misc_RNA (1)...(19): siRNA sense strand
aguuauaugaggagaguga

SEQ ID NO: 2553688 - RNA, 19 nt, Homo sapiens
  misc_RNA (1)...(19): siRNA sense strand
acuuuaaacuagagguuga

SEQ ID NO: 2553689 - RNA, 19 nt, Homo sapiens
  misc_RNA (1)...(19): siRNA sense strand
caugaaagccauugaggau

SEQ ID NO: 2553690 - RNA, 19 nt, Homo sapiens
  misc_RNA (1)...(19): siRNA sense strand
aguaaggaucaaagagcua

SEQ ID NO: 2553691 - RNA, 19 nt, Homo sapiens
  misc_RNA (1)...(19): siRNA sense strand
ucaaagagcuagaagccau

SEQ ID NO: 2553692 - RNA, 19 nt, Homo sapiens
  misc_RNA (1)...(19): siRNA sense strand
ccacaaaugcaaaggaaac

SEQ ID NO: 2553693 - RNA, 19 nt, Homo sapiens
  misc_RNA (1)...(19): siRNA sense strand
ccggcagauugaugaguua

SEQ ID NO: 2553694 - RNA, 19 nt, Homo sapiens
  misc_RNA (1)...(19): siRNA sense strand
guaagggagaauauggaaa

SEQ ID NO: 2553695 - RNA, 19 nt, Homo sapiens
  misc_RNA (1)...(19): siRNA sense strand
caacaaaagcaaacaagaa

SEQ ID NO: 2553696 - RNA, 19 nt, Homo sapiens
  misc_RNA (1)...(19): siRNA sense strand
gaauuauggcucuggaaaa

SEQ ID NO: 2553697 - RNA, 19 nt, Homo sapiens
  misc_RNA (1)...(19): siRNA sense strand
ucucaauggaagaagaauu

SEQ ID NO: 2553698 - RNA, 19 nt, Homo sapiens
  misc_RNA (1)...(19): siRNA sense strand
gcguaaccaaggagagaga

SEQ ID NO: 2553699 - RNA, 19 nt, Homo sapiens
  misc_RNA (1)...(19): siRNA sense strand
gcggaagaagagaaaggaa

SEQ ID NO: 2553700 - RNA, 19 nt, Homo sapiens
  misc_RNA (1)...(19): siRNA sense strand
aaacaaauugaaagcggaa

SEQ ID NO: 2553701 - RNA, 19 nt, Homo sapiens
  misc_RNA (1)...(19): siRNA sense strand
augaguuagaagagacaaa

SEQ ID NO: 2553702 - RNA, 19 nt, Homo sapiens
  misc_RNA (1)...(19): siRNA sense strand
cuggagaguuuaaaaguaa

SEQ ID NO: 2553703 - RNA, 19 nt, Homo sapiens
  misc_RNA (1)...(19): siRNA sense strand
ugcuaaugaacgagacaaa

SEQ ID NO: 2553704 - RNA, 19 nt, Homo sapiens
  misc_RNA (1)...(19): siRNA sense strand
acaaauugaaagcggaaga

SEQ ID NO: 2553705 - RNA, 19 nt, Homo sapiens
  misc_RNA (1)...(19): siRNA sense strand
ugugcaaccuggagaucua

SEQ ID NO: 2553706 - RNA, 19 nt, Homo sapiens
  misc_RNA (1)...(19): siRNA sense strand
ccagaguucaggaggaaga

SEQ ID NO: 2553707 - RNA, 19 nt, Homo sapiens
  misc_RNA (1)...(19): siRNA sense strand
auugaaagucggcuagaaa

SEQ ID NO: 2553708 - RNA, 19 nt, Homo sapiens
  misc_RNA (1)...(19): siRNA sense strand
aaucaagacucugggaaau

SEQ ID NO: 2553709 - RNA, 19 nt, Homo sapiens
  misc_RNA (1)...(19): siRNA sense strand
aaucaguaagggagaauau

SEQ ID NO: 2553710 - RNA, 19 nt, Homo sapiens
  misc_RNA (1)...(19): siRNA sense strand
aauugaaagcggaagaaga

SEQ ID NO: 2553711 - RNA, 19 nt, Homo sapiens
  misc_RNA (1)...(19): siRNA sense strand
agaaguuaauugaggaaac

SEQ ID NO: 2553712 - RNA, 19 nt, Homo sapiens
  misc_RNA (1)...(19): siRNA sense strand
gggaaauccacaacagcau

SEQ ID NO: 2553713 - RNA, 19 nt, Homo sapiens
  misc_RNA (1)...(19): siRNA sense strand
cagcauuacaccaagaaaa

SEQ ID NO: 2553714 - RNA, 19 nt, Homo sapiens
  misc_RNA (1)...(19): siRNA sense strand
agaaguggaaagacugaaa

SEQ ID NO: 2553715 - RNA, 19 nt, Homo sapiens
  misc_RNA (1)...(19): siRNA sense strand
aaaccgauguagaagaaaa

SEQ ID NO: 2553716 - RNA, 19 nt, Homo sapiens
  misc_RNA (1)...(19): siRNA sense strand
aguacaaguuagcagaaaa

SEQ ID NO: 2553717 - RNA, 19 nt, Homo sapiens
  misc_RNA (1)...(19): siRNA sense strand
cucaagaaguggaaagacu

SEQ ID NO: 2553718 - RNA, 19 nt, Homo sapiens
  misc_RNA (1)...(19): siRNA sense strand
caugaaaacagaagaugaa

SEQ ID NO: 2553719 - RNA, 19 nt, Homo sapiens
  misc_RNA (1)...(19): siRNA sense strand
ugaaagcggaagaagagaa

SEQ ID NO: 2553720 - RNA, 19 nt, Homo sapiens
  misc_RNA (1)...(19): siRNA sense strand
acaauaagauuaaggagcu

SEQ ID NO: 2553721 - RNA, 19 nt, Homo sapiens
  misc_RNA (1)...(19): siRNA sense strand
aaacuaaacccaaugccaa

SEQ ID NO: 2553722 - RNA, 19 nt, Homo sapiens
  misc_RNA (1)...(19): siRNA sense strand
ugagaaguuaauugaggaa

SEQ ID NO: 2553723 - RNA, 19 nt, Homo sapiens
  misc_RNA (1)...(19): siRNA sense strand
aaacugaagcuaaaggaca

SEQ ID NO: 2553724 - RNA, 19 nt, Homo sapiens
  misc_RNA (1)...(19): siRNA sense strand
cuaaaggacaugaaagcca

SEQ ID NO: 2553725 - RNA, 19 nt, Homo sapiens
  misc_RNA (1)...(19): siRNA sense strand
auaugagacucuagaacga

SEQ ID NO: 2553726 - RNA, 19 nt, Homo sapiens
  misc_RNA (1)...(19): siRNA sense strand
caacaagaaaacaggaaca

SEQ ID NO: 2553727 - RNA, 19 nt, Homo sapiens
  misc_RNA (1)...(19): siRNA sense strand
agaagaagaagcuaaguca

SEQ ID NO: 2553728 - RNA, 19 nt, Homo sapiens
  misc_RNA (1)...(19): siRNA sense strand
ucaccaagaccaagacaca

SEQ ID NO: 2553729 - RNA, 19 nt, Homo sapiens
  misc_RNA (1)...(19): siRNA sense strand
aggagagagaugauuuaaa

SEQ ID NO: 2553730 - RNA, 19 nt, Homo sapiens
  misc_RNA (1)...(19): siRNA sense strand
aggaagagcagaaggcaac

SEQ ID NO: 2553731 - RNA, 19 nt, Homo sapiens
  misc_RNA (1)...(19): siRNA sense strand
agaauuauggcucuggaaa

SEQ ID NO: 2553732 - RNA, 19 nt, Homo sapiens
  misc_RNA (1)...(19): siRNA sense strand
cggaagaagagaaaggaaa

SEQ ID NO: 2553733 - RNA, 19 nt, Homo sapiens
  misc_RNA (1)...(19): siRNA sense strand
cggaaaacaaugagugaaa

SEQ ID NO: 2553734 - RNA, 19 nt, Homo sapiens
  misc_RNA (1)...(19): siRNA sense strand
agauuuaggaagagagauu

SEQ ID NO: 2553735 - RNA, 19 nt, Homo sapiens
  misc_RNA (1)...(19): siRNA sense strand
aaaucaagacucugggaaa

SEQ ID NO: 2553736 - RNA, 19 nt, Homo sapiens
  misc_RNA (1)...(19): siRNA sense strand
gaggaagagcagaaggcaa

SEQ ID NO: 2553737 - RNA, 19 nt, Homo sapiens
  misc_RNA (1)...(19): siRNA sense strand
acuuuaaacuagagguuga

SEQ ID NO: 2553738 - RNA, 19 nt, Homo sapiens
  misc_RNA (1)...(19): siRNA sense strand
caugaaagccauugaggau

SEQ ID NO: 2553739 - RNA, 19 nt, Homo sapiens
  misc_RNA (1)...(19): siRNA sense strand
aguaaggaucaaagagcua

SEQ ID NO: 2553740 - RNA, 19 nt, Homo sapiens
  misc_RNA (1)...(19): siRNA sense strand
ucaaagagcuagaagccau

SEQ ID NO: 2553741 - RNA, 19 nt, Homo sapiens
  misc_RNA (1)...(19): siRNA sense strand
ccacaaaugcaaaggaaac

SEQ ID NO: 2553742 - RNA, 19 nt, Homo sapiens
  misc_RNA (1)...(19): siRNA sense strand
ccggcagauugaugaguua

SEQ ID NO: 2553743 - RNA, 19 nt, Homo sapiens
  misc_RNA (1)...(19): siRNA sense strand
guaagggagaauauggaaa

SEQ ID NO: 2553744 - RNA, 19 nt, Homo sapiens
  misc_RNA (1)...(19): siRNA sense strand
caacaaaagcaaacaagaa

SEQ ID NO: 2553745 - RNA, 19 nt, Homo sapiens
  misc_RNA (1)...(19): siRNA sense strand
gaauuauggcucuggaaaa

SEQ ID NO: 2553746 - RNA, 19 nt, Homo sapiens
  misc_RNA (1)...(19): siRNA sense strand
gcguaaccaaggagagaga

SEQ ID NO: 2553747 - RNA, 19 nt, Homo sapiens
  misc_RNA (1)...(19): siRNA sense strand
gcggaagaagagaaaggaa

SEQ ID NO: 2553748 - RNA, 19 nt, Homo sapiens
  misc_RNA (1)...(19): siRNA sense strand
cuuugauggugguggauga

SEQ ID NO: 2553749 - RNA, 19 nt, Homo sapiens
  misc_RNA (1)...(19): siRNA sense strand
aaacaaauugaaagcggaa

SEQ ID NO: 2553750 - RNA, 19 nt, Homo sapiens
  misc_RNA (1)...(19): siRNA sense strand
augaguuagaagagacaaa

SEQ ID NO: 2553751 - RNA, 19 nt, Homo sapiens
  misc_RNA (1)...(19): siRNA sense strand
cuggagaguuuaaaaguaa

SEQ ID NO: 2553752 - RNA, 19 nt, Homo sapiens
  misc_RNA (1)...(19): siRNA sense strand
ugcuaaugaacgagacaaa

SEQ ID NO: 2553753 - RNA, 19 nt, Homo sapiens
  misc_RNA (1)...(19): siRNA sense strand
acaaauugaaagcggaaga

SEQ ID NO: 2553754 - RNA, 19 nt, Homo sapiens
  misc_RNA (1)...(19): siRNA sense strand
ccagaguucaggaggaaga

SEQ ID NO: 2553755 - RNA, 19 nt, Homo sapiens
  misc_RNA (1)...(19): siRNA sense strand
auugaaagucggcuagaaa

SEQ ID NO: 2553756 - RNA, 19 nt, Homo sapiens
  misc_RNA (1)...(19): siRNA sense strand
aaucaagacucugggaaau

SEQ ID NO: 2553757 - RNA, 19 nt, Homo sapiens
  misc_RNA (1)...(19): siRNA sense strand
aaucaguaagggagaauau

SEQ ID NO: 2553758 - RNA, 19 nt, Homo sapiens
  misc_RNA (1)...(19): siRNA sense strand
aauugaaagcggaagaaga

SEQ ID NO: 2553759 - RNA, 19 nt, Homo sapiens
  misc_RNA (1)...(19): siRNA sense strand
aggaggagaaggagcaaga

SEQ ID NO: 2553760 - RNA, 19 nt, Homo sapiens
  misc_RNA (1)...(19): siRNA sense strand
agaaguuaauugaggaaac

SEQ ID NO: 2553761 - RNA, 19 nt, Homo sapiens
  misc_RNA (1)...(19): siRNA sense strand
aggagaaggagcaagaaaa

SEQ ID NO: 2553762 - RNA, 19 nt, Homo sapiens
  misc_RNA (1)...(19): siRNA sense strand
gggaaauccacaacagcau

SEQ ID NO: 2553763 - RNA, 19 nt, Homo sapiens
  misc_RNA (1)...(19): siRNA sense strand
cagcauuacaccaagaaaa

SEQ ID NO: 2553764 - RNA, 19 nt, Homo sapiens
  misc_RNA (1)...(19): siRNA sense strand
agaaguggaaagacugaaa

SEQ ID NO: 2553765 - RNA, 19 nt, Homo sapiens
  misc_RNA (1)...(19): siRNA sense strand
gaaaaggagaaaaggguca

SEQ ID NO: 2553766 - RNA, 19 nt, Homo sapiens
  misc_RNA (1)...(19): siRNA sense strand
aaaccgauguagaagaaaa

SEQ ID NO: 2553767 - RNA, 19 nt, Homo sapiens
  misc_RNA (1)...(19): siRNA sense strand
aguacaaguuagcagaaaa

SEQ ID NO: 2553768 - RNA, 19 nt, Homo sapiens
  misc_RNA (1)...(19): siRNA sense strand
cucaagaaguggaaagacu

SEQ ID NO: 2553769 - RNA, 19 nt, Homo sapiens
  misc_RNA (1)...(19): siRNA sense strand
caugaaaacagaagaugaa

SEQ ID NO: 2553770 - RNA, 19 nt, Homo sapiens
  misc_RNA (1)...(19): siRNA sense strand
ugaaagcggaagaagagaa

SEQ ID NO: 2553771 - RNA, 19 nt, Homo sapiens
  misc_RNA (1)...(19): siRNA sense strand
acaauaagauuaaggagcu

SEQ ID NO: 2553772 - RNA, 19 nt, Homo sapiens
  misc_RNA (1)...(19): siRNA sense strand
ugagaaguuaauugaggaa

SEQ ID NO: 2553773 - RNA, 19 nt, Homo sapiens
  misc_RNA (1)...(19): siRNA sense strand
aaacugaagcuaaaggaca

SEQ ID NO: 2553774 - RNA, 19 nt, Homo sapiens
  misc_RNA (1)...(19): siRNA sense strand
cuaaaggacaugaaagcca

SEQ ID NO: 2553775 - RNA, 19 nt, Homo sapiens
  misc_RNA (1)...(19): siRNA sense strand
auaugagacucuagaacga

SEQ ID NO: 2553776 - RNA, 19 nt, Homo sapiens
  misc_RNA (1)...(19): siRNA sense strand
caacaagaaaacaggaaca

SEQ ID NO: 2553777 - RNA, 19 nt, Homo sapiens
  misc_RNA (1)...(19): siRNA sense strand
agaagaagaagcuaaguca

SEQ ID NO: 2553778 - RNA, 19 nt, Homo sapiens
  misc_RNA (1)...(19): siRNA sense strand
ucaccaagaccaagacaca

SEQ ID NO: 2553779 - RNA, 19 nt, Homo sapiens
  misc_RNA (1)...(19): siRNA sense strand
aggagagagaugauuuaaa

SEQ ID NO: 2553780 - RNA, 19 nt, Homo sapiens
  misc_RNA (1)...(19): siRNA sense strand
aggaagagcagaaggcaac

SEQ ID NO: 2553781 - RNA, 19 nt, Homo sapiens
  misc_RNA (1)...(19): siRNA sense strand
agaauuauggcucuggaaa

SEQ ID NO: 2553782 - RNA, 19 nt, Homo sapiens
  misc_RNA (1)...(19): siRNA sense strand
ggagcaaaauaaaguaaca

SEQ ID NO: 2553783 - RNA, 19 nt, Homo sapiens
  misc_RNA (1)...(19): siRNA sense strand
ugugauguuuguagaugaa

SEQ ID NO: 2553784 - RNA, 19 nt, Homo sapiens
  misc_RNA (1)...(19): siRNA sense strand
gaagcaauugagaaagauu

SEQ ID NO: 2553785 - RNA, 19 nt, Homo sapiens
  misc_RNA (1)...(19): siRNA sense strand
aggacugggugcagcagaa

SEQ ID NO: 2553786 - RNA, 19 nt, Homo sapiens
  misc_RNA (1)...(19): siRNA sense strand
ccaggaagaucuuugggau

SEQ ID NO: 2553787 - RNA, 19 nt, Homo sapiens
  misc_RNA (1)...(19): siRNA sense strand
gugucaacgagcugaugaa

SEQ ID NO: 2553788 - RNA, 19 nt, Homo sapiens
  misc_RNA (1)...(19): siRNA sense strand
gguucuuggccauccguua

SEQ ID NO: 2553789 - RNA, 19 nt, Homo sapiens
  misc_RNA (1)...(19): siRNA sense strand
cuauagaguuagacgggaa

SEQ ID NO: 2553790 - RNA, 19 nt, Homo sapiens
  misc_RNA (1)...(19): siRNA sense strand
ugaucugaccacaaagaaa

SEQ ID NO: 2553791 - RNA, 19 nt, Homo sapiens
  misc_RNA (1)...(19): siRNA sense strand
acagaaagcuacaucagca

SEQ ID NO: 2553792 - RNA, 19 nt, Homo sapiens
  misc_RNA (1)...(19): siRNA sense strand
gaacagucuuucaugacga

SEQ ID NO: 2553793 - RNA, 19 nt, Homo sapiens
  misc_RNA (1)...(19): siRNA sense strand
acauauacagaaagcuaca

SEQ ID NO: 2553794 - RNA, 19 nt, Homo sapiens
  misc_RNA (1)...(19): siRNA sense strand
cugcaagcaaagaaggaaa

SEQ ID NO: 2553795 - RNA, 19 nt, Homo sapiens
  misc_RNA (1)...(19): siRNA sense strand
ccacggaaaacaaggaaaa

SEQ ID NO: 2553796 - RNA, 19 nt, Homo sapiens
  misc_RNA (1)...(19): siRNA sense strand
cggaaaacaaggaaaagaa

SEQ ID NO: 2553797 - RNA, 19 nt, Homo sapiens
  misc_RNA (1)...(19): siRNA sense strand
acaauaaagccacggaaaa

SEQ ID NO: 2553798 - RNA, 19 nt, Homo sapiens
  misc_RNA (1)...(19): siRNA sense strand
ccuuuagagaaauggcaaa

SEQ ID NO: 2553799 - RNA, 19 nt, Homo sapiens
  misc_RNA (1)...(19): siRNA sense strand
aaggaaaagaagagaauca

SEQ ID NO: 2553800 - RNA, 19 nt, Homo sapiens
  misc_RNA (1)...(19): siRNA sense strand
aauaaagacaacuggacuu

SEQ ID NO: 2553801 - RNA, 19 nt, Homo sapiens
  misc_RNA (1)...(19): siRNA sense strand
aggaaagugaacuaggaau

SEQ ID NO: 2553802 - RNA, 19 nt, Homo sapiens
  misc_RNA (1)...(19): siRNA sense strand
acaaggaaaagaagagaau

SEQ ID NO: 2553803 - RNA, 19 nt, Homo sapiens
  misc_RNA (1)...(19): siRNA sense strand
gaauaaagacaacuggacu

SEQ ID NO: 2553804 - RNA, 19 nt, Homo sapiens
  misc_RNA (1)...(19): siRNA sense strand
gcacaauaaagccacggaa

SEQ ID NO: 2553805 - RNA, 19 nt, Homo sapiens
  misc_RNA (1)...(19): siRNA sense strand
ucacaaagacaaagaaaac

SEQ ID NO: 2553806 - RNA, 19 nt, Homo sapiens
  misc_RNA (1)...(19): siRNA sense strand
cugugaacuucgaagacca

SEQ ID NO: 2553807 - RNA, 19 nt, Homo sapiens
  misc_RNA (1)...(19): siRNA sense strand
ccaucuggauauuggaaac

SEQ ID NO: 2553808 - RNA, 19 nt, Homo sapiens
  misc_RNA (1)...(19): siRNA sense strand
ccacagcaauucugggaag

SEQ ID NO: 2553809 - RNA, 19 nt, Homo sapiens
  misc_RNA (1)...(19): siRNA sense strand
agucagcauuccagccaau

SEQ ID NO: 2553810 - RNA, 19 nt, Homo sapiens
  misc_RNA (1)...(19): siRNA sense strand
cggucaucauuguggguaa

SEQ ID NO: 2553811 - RNA, 19 nt, Homo sapiens
  misc_RNA (1)...(19): siRNA sense strand
ccucgaaggccgaucccaa

SEQ ID NO: 2553812 - RNA, 19 nt, Homo sapiens
  misc_RNA (1)...(19): siRNA sense strand
cagaagaagcgaagagguc

SEQ ID NO: 2553813 - RNA, 19 nt, Homo sapiens
  misc_RNA (1)...(19): siRNA sense strand
acacgaagccagaugccau

SEQ ID NO: 2553814 - RNA, 19 nt, Homo sapiens
  misc_RNA (1)...(19): siRNA sense strand
ccaugagcuccuccagaaa

SEQ ID NO: 2553815 - RNA, 19 nt, Homo sapiens
  misc_RNA (1)...(19): siRNA sense strand
ccauggugauccugagcca

SEQ ID NO: 2553816 - RNA, 19 nt, Homo sapiens
  misc_RNA (1)...(19): siRNA sense strand
gucaaggacuggaugcaga

SEQ ID NO: 2553817 - RNA, 19 nt, Homo sapiens
  misc_RNA (1)...(19): siRNA sense strand
ccuucuacgcccagacaca

SEQ ID NO: 2553818 - RNA, 19 nt, Homo sapiens
  misc_RNA (1)...(19): siRNA sense strand
cggucaucauuguggguaa

SEQ ID NO: 2553819 - RNA, 19 nt, Homo sapiens
  misc_RNA (1)...(19): siRNA sense strand
ccucgaaggccgaucccaa

SEQ ID NO: 2553820 - RNA, 19 nt, Homo sapiens
  misc_RNA (1)...(19): siRNA sense strand
cagaagaagcgaagagguc

SEQ ID NO: 2553821 - RNA, 19 nt, Homo sapiens
  misc_RNA (1)...(19): siRNA sense strand
acacgaagccagaugccau

SEQ ID NO: 2553822 - RNA, 19 nt, Homo sapiens
  misc_RNA (1)...(19): siRNA sense strand
ccauggugauccugagcca

SEQ ID NO: 2553823 - RNA, 19 nt, Homo sapiens
  misc_RNA (1)...(19): siRNA sense strand
gucaaggacuggaugcaga

SEQ ID NO: 2553824 - RNA, 19 nt, Homo sapiens
  misc_RNA (1)...(19): siRNA sense strand
ccuucuacgcccagacaca

SEQ ID NO: 2553825 - RNA, 19 nt, Homo sapiens
  misc_RNA (1)...(19): siRNA sense strand
cggucaucauuguggguaa

SEQ ID NO: 2553826 - RNA, 19 nt, Homo sapiens
  misc_RNA (1)...(19): siRNA sense strand
ccucgaaggccgaucccaa

SEQ ID NO: 2553827 - RNA, 19 nt, Homo sapiens
  misc_RNA (1)...(19): siRNA sense strand
cagaagaagcgaagagguc

SEQ ID NO: 2553828 - RNA, 19 nt, Homo sapiens
  misc_RNA (1)...(19): siRNA sense strand
acacgaagccagaugccau

SEQ ID NO: 2553829 - RNA, 19 nt, Homo sapiens
  misc_RNA (1)...(19): siRNA sense strand
ccauggugauccugagcca

SEQ ID NO: 2553830 - RNA, 19 nt, Homo sapiens
  misc_RNA (1)...(19): siRNA sense strand
gucaaggacuggaugcaga

SEQ ID NO: 2553831 - RNA, 19 nt, Homo sapiens
  misc_RNA (1)...(19): siRNA sense strand
ccuucuacgcccagacaca

SEQ ID NO: 2553832 - RNA, 19 nt, Homo sapiens
  misc_RNA (1)...(19): siRNA sense strand
aggaaaaggaggacagauu

SEQ ID NO: 2553833 - RNA, 19 nt, Homo sapiens
  misc_RNA (1)...(19): siRNA sense strand
aguuguaccuaaaggaaaa

SEQ ID NO: 2553834 - RNA, 19 nt, Homo sapiens
  misc_RNA (1)...(19): siRNA sense strand
gaaagaauguuacugggaa

SEQ ID NO: 2553835 - RNA, 19 nt, Homo sapiens
  misc_RNA (1)...(19): siRNA sense strand
agcaaauggcuuagaaaca

SEQ ID NO: 2553836 - RNA, 19 nt, Homo sapiens
  misc_RNA (1)...(19): siRNA sense strand
ucgaaagaccccuguaaaa

SEQ ID NO: 2553837 - RNA, 19 nt, Homo sapiens
  misc_RNA (1)...(19): siRNA sense strand
ugacaggcuggaagagcaa

SEQ ID NO: 2553838 - RNA, 19 nt, Homo sapiens
  misc_RNA (1)...(19): siRNA sense strand
ggaaagaagaucaagcuac

SEQ ID NO: 2553839 - RNA, 19 nt, Homo sapiens
  misc_RNA (1)...(19): siRNA sense strand
ggaaagaauguuacuggga

SEQ ID NO: 2553840 - RNA, 19 nt, Homo sapiens
  misc_RNA (1)...(19): siRNA sense strand
aggaaagaagaucaagcua

SEQ ID NO: 2553841 - RNA, 19 nt, Homo sapiens
  misc_RNA (1)...(19): siRNA sense strand
gugacaggcuggaagagca

SEQ ID NO: 2553842 - RNA, 19 nt, Homo sapiens
  misc_RNA (1)...(19): siRNA sense strand
acagaggcgcaauggguau

SEQ ID NO: 2553843 - RNA, 19 nt, Homo sapiens
  misc_RNA (1)...(19): siRNA sense strand
agauaucagcaguggagga

SEQ ID NO: 2553844 - RNA, 19 nt, Homo sapiens
  misc_RNA (1)...(19): siRNA sense strand
uugcaagggagcaugguau

SEQ ID NO: 2553845 - RNA, 19 nt, Homo sapiens
  misc_RNA (1)...(19): siRNA sense strand
ucagcaaauggcuuagaaa

SEQ ID NO: 2553846 - RNA, 19 nt, Homo sapiens
  misc_RNA (1)...(19): siRNA sense strand
acauagaugagcaugccaa

SEQ ID NO: 2553847 - RNA, 19 nt, Homo sapiens
  misc_RNA (1)...(19): siRNA sense strand
caguggaggaggcgugaca

SEQ ID NO: 2553848 - RNA, 19 nt, Homo sapiens
  misc_RNA (1)...(19): siRNA sense strand
cgaagaagacguacgaccu

SEQ ID NO: 2553849 - RNA, 19 nt, Homo sapiens
  misc_RNA (1)...(19): siRNA sense strand
ccaacagguacaugagcau

SEQ ID NO: 2553850 - RNA, 19 nt, Homo sapiens
  misc_RNA (1)...(19): siRNA sense strand
gcuacuacuacauggccaa

SEQ ID NO: 2553851 - RNA, 19 nt, Homo sapiens
  misc_RNA (1)...(19): siRNA sense strand
augcagcaguggacggaga

SEQ ID NO: 2553852 - RNA, 19 nt, Homo sapiens
  misc_RNA (1)...(19): siRNA sense strand
gguuuaaucccgaggaaaa

SEQ ID NO: 2553853 - RNA, 19 nt, Homo sapiens
  misc_RNA (1)...(19): siRNA sense strand
aggcaugcuuugagagauc

SEQ ID NO: 2553854 - RNA, 19 nt, Homo sapiens
  misc_RNA (1)...(19): siRNA sense strand
gaggaaaagaaacagaaaa

SEQ ID NO: 2553855 - RNA, 19 nt, Homo sapiens
  misc_RNA (1)...(19): siRNA sense strand
gaaagaaucgacagcguca

SEQ ID NO: 2553856 - RNA, 19 nt, Homo sapiens
  misc_RNA (1)...(19): siRNA sense strand
cagagggaugagaggagaa

SEQ ID NO: 2553857 - RNA, 19 nt, Homo sapiens
  misc_RNA (1)...(19): siRNA sense strand
gaugaaggcgugaaggcau

SEQ ID NO: 2553858 - RNA, 19 nt, Homo sapiens
  misc_RNA (1)...(19): siRNA sense strand
ccguggacacagagaacau

SEQ ID NO: 2553859 - RNA, 19 nt, Homo sapiens
  misc_RNA (1)...(19): siRNA sense strand
ggguuuaaucccgaggaaa

SEQ ID NO: 2553860 - RNA, 19 nt, Homo sapiens
  misc_RNA (1)...(19): siRNA sense strand
agggaugagaggagaaaau

SEQ ID NO: 2553861 - RNA, 19 nt, Homo sapiens
  misc_RNA (1)...(19): siRNA sense strand
cgaggaaaagaaacagaaa

SEQ ID NO: 2553862 - RNA, 19 nt, Homo sapiens
  misc_RNA (1)...(19): siRNA sense strand
uggaaagaaucgacagcgu

SEQ ID NO: 2553863 - RNA, 19 nt, Homo sapiens
  misc_RNA (1)...(19): siRNA sense strand
gagaacauccgcagggugu

SEQ ID NO: 2553864 - RNA, 19 nt, Homo sapiens
  misc_RNA (1)...(19): siRNA sense strand
auucuuugaccaugugaaa

SEQ ID NO: 2553865 - RNA, 19 nt, Homo sapiens
  misc_RNA (1)...(19): siRNA sense strand
uugagagauccaacgaaua

SEQ ID NO: 2553866 - RNA, 19 nt, Homo sapiens
  misc_RNA (1)...(19): siRNA sense strand
acaccaacaggcugagaga

SEQ ID NO: 2553867 - RNA, 19 nt, Homo sapiens
  misc_RNA (1)...(19): siRNA sense strand
uggugauucgagaagauaa

SEQ ID NO: 2553868 - RNA, 19 nt, Homo sapiens
  misc_RNA (1)...(19): siRNA sense strand
ucgucaaacagaugaggau

SEQ ID NO: 2553869 - RNA, 19 nt, Homo sapiens
  misc_RNA (1)...(19): siRNA sense strand
guuaaagaugcuaucguga

SEQ ID NO: 2553870 - RNA, 19 nt, Homo sapiens
  misc_RNA (1)...(19): siRNA sense strand
gugacaauuguuucagcaa

SEQ ID NO: 2553871 - RNA, 19 nt, Homo sapiens
  misc_RNA (1)...(19): siRNA sense strand
ggcuggugagucugggaaa

SEQ ID NO: 2553872 - RNA, 19 nt, Homo sapiens
  misc_RNA (1)...(19): siRNA sense strand
aguucugacaucugggauu

SEQ ID NO: 2553873 - RNA, 19 nt, Homo sapiens
  misc_RNA (1)...(19): siRNA sense strand
acaacauggugauucgaga

SEQ ID NO: 2553874 - RNA, 19 nt, Homo sapiens
  misc_RNA (1)...(19): siRNA sense strand
accaacaggcugagagagu

SEQ ID NO: 2553875 - RNA, 19 nt, Homo sapiens
  misc_RNA (1)...(19): siRNA sense strand
gguuuaaucccgaggaaaa

SEQ ID NO: 2553876 - RNA, 19 nt, Homo sapiens
  misc_RNA (1)...(19): siRNA sense strand
aggcaugcuuugagagauc

SEQ ID NO: 2553877 - RNA, 19 nt, Homo sapiens
  misc_RNA (1)...(19): siRNA sense strand
gaggaaaagaaacagaaaa

SEQ ID NO: 2553878 - RNA, 19 nt, Homo sapiens
  misc_RNA (1)...(19): siRNA sense strand
gaaagaaucgacagcguca

SEQ ID NO: 2553879 - RNA, 19 nt, Homo sapiens
  misc_RNA (1)...(19): siRNA sense strand
cagagggaugagaggagaa

SEQ ID NO: 2553880 - RNA, 19 nt, Homo sapiens
  misc_RNA (1)...(19): siRNA sense strand
gaugaaggcgugaaggcau

SEQ ID NO: 2553881 - RNA, 19 nt, Homo sapiens
  misc_RNA (1)...(19): siRNA sense strand
ccguggacacagagaacau

SEQ ID NO: 2553882 - RNA, 19 nt, Homo sapiens
  misc_RNA (1)...(19): siRNA sense strand
ggguuuaaucccgaggaaa

SEQ ID NO: 2553883 - RNA, 19 nt, Homo sapiens
  misc_RNA (1)...(19): siRNA sense strand
agggaugagaggagaaaau

SEQ ID NO: 2553884 - RNA, 19 nt, Homo sapiens
  misc_RNA (1)...(19): siRNA sense strand
cgaggaaaagaaacagaaa

SEQ ID NO: 2553885 - RNA, 19 nt, Homo sapiens
  misc_RNA (1)...(19): siRNA sense strand
uggaaagaaucgacagcgu

SEQ ID NO: 2553886 - RNA, 19 nt, Homo sapiens
  misc_RNA (1)...(19): siRNA sense strand
gagaacauccgcagggugu

SEQ ID NO: 2553887 - RNA, 19 nt, Homo sapiens
  misc_RNA (1)...(19): siRNA sense strand
auucuuugaccaugugaaa

SEQ ID NO: 2553888 - RNA, 19 nt, Homo sapiens
  misc_RNA (1)...(19): siRNA sense strand
uugagagauccaacgaaua

SEQ ID NO: 2553889 - RNA, 19 nt, Homo sapiens
  misc_RNA (1)...(19): siRNA sense strand
acaccaacaggcugagaga

SEQ ID NO: 2553890 - RNA, 19 nt, Homo sapiens
  misc_RNA (1)...(19): siRNA sense strand
uggugauucgagaagauaa

SEQ ID NO: 2553891 - RNA, 19 nt, Homo sapiens
  misc_RNA (1)...(19): siRNA sense strand
ucgucaaacagaugaggau

SEQ ID NO: 2553892 - RNA, 19 nt, Homo sapiens
  misc_RNA (1)...(19): siRNA sense strand
guuaaagaugcuaucguga

SEQ ID NO: 2553893 - RNA, 19 nt, Homo sapiens
  misc_RNA (1)...(19): siRNA sense strand
gugacaauuguuucagcaa

SEQ ID NO: 2553894 - RNA, 19 nt, Homo sapiens
  misc_RNA (1)...(19): siRNA sense strand
ggcuggugagucugggaaa

SEQ ID NO: 2553895 - RNA, 19 nt, Homo sapiens
  misc_RNA (1)...(19): siRNA sense strand
aguucugacaucugggauu

SEQ ID NO: 2553896 - RNA, 19 nt, Homo sapiens
  misc_RNA (1)...(19): siRNA sense strand
acaacauggugauucgaga

SEQ ID NO: 2553897 - RNA, 19 nt, Homo sapiens
  misc_RNA (1)...(19): siRNA sense strand
accaacaggcugagagagu

SEQ ID NO: 2553898 - RNA, 19 nt, Homo sapiens
  misc_RNA (1)...(19): siRNA sense strand
ggaaaguggcugaggccuu

SEQ ID NO: 2553899 - RNA, 19 nt, Homo sapiens
  misc_RNA (1)...(19): siRNA sense strand
cuguggagccuuaaagaau

SEQ ID NO: 2553900 - RNA, 19 nt, Homo sapiens
  misc_RNA (1)...(19): siRNA sense strand
cgggugaccauguggguau

SEQ ID NO: 2553901 - RNA, 19 nt, Homo sapiens
  misc_RNA (1)...(19): siRNA sense strand
cugaaagagcugaugcaga

SEQ ID NO: 2553902 - RNA, 19 nt, Homo sapiens
  misc_RNA (1)...(19): siRNA sense strand
aggaagacauuggaggcaa

SEQ ID NO: 2553903 - RNA, 19 nt, Homo sapiens
  misc_RNA (1)...(19): siRNA sense strand
uggagaaagaguugcugaa

SEQ ID NO: 2553904 - RNA, 19 nt, Homo sapiens
  misc_RNA (1)...(19): siRNA sense strand
ggguauuugaggaagacau

SEQ ID NO: 2553905 - RNA, 19 nt, Homo sapiens
  misc_RNA (1)...(19): siRNA sense strand
uguggguauuugaggaaga

SEQ ID NO: 2553906 - RNA, 19 nt, Homo sapiens
  misc_RNA (1)...(19): siRNA sense strand
gugaccagcucaagggcca

SEQ ID NO: 2553907 - RNA, 19 nt, Homo sapiens
  misc_RNA (1)...(19): siRNA sense strand
ugaaagagcugaugcagac

SEQ ID NO: 2553908 - RNA, 19 nt, Homo sapiens
  misc_RNA (1)...(19): siRNA sense strand
uguucauggcuguguacaa

SEQ ID NO: 2553909 - RNA, 19 nt, Homo sapiens
  misc_RNA (1)...(19): siRNA sense strand
cuguguacaaggugugcua

SEQ ID NO: 2553910 - RNA, 19 nt, Homo sapiens
  misc_RNA (1)...(19): siRNA sense strand
gggccaacauugccagcga

SEQ ID NO: 2553911 - RNA, 19 nt, Homo sapiens
  misc_RNA (1)...(19): siRNA sense strand
cugcagaggaugcugacau

SEQ ID NO: 2553912 - RNA, 19 nt, Homo sapiens
  misc_RNA (1)...(19): siRNA sense strand
agggccaucugaaggcaaa

SEQ ID NO: 2553913 - RNA, 19 nt, Homo sapiens
  misc_RNA (1)...(19): siRNA sense strand
acagcauccuccagcacaa

SEQ ID NO: 2553914 - RNA, 19 nt, Homo sapiens
  misc_RNA (1)...(19): siRNA sense strand
ccaagaucguggguggcaa

SEQ ID NO: 2553915 - RNA, 19 nt, Homo sapiens
  misc_RNA (1)...(19): siRNA sense strand
ucacaauugcucagggaua

SEQ ID NO: 2553916 - RNA, 19 nt, Homo sapiens
  misc_RNA (1)...(19): siRNA sense strand
uggaaauggaugagaucaa

SEQ ID NO: 2553917 - RNA, 19 nt, Homo sapiens
  misc_RNA (1)...(19): siRNA sense strand
ucaccaagauuguggccua

SEQ ID NO: 2553918 - RNA, 19 nt, Homo sapiens
  misc_RNA (1)...(19): siRNA sense strand
ccuuguaauuggagcuaau

SEQ ID NO: 2553919 - RNA, 19 nt, Homo sapiens
  misc_RNA (1)...(19): siRNA sense strand
ugcaauuguucgaggauuu

SEQ ID NO: 2553920 - RNA, 19 nt, Homo sapiens
  misc_RNA (1)...(19): siRNA sense strand
gaaggaaucuggugaggga

SEQ ID NO: 2553921 - RNA, 19 nt, Homo sapiens
  misc_RNA (1)...(19): siRNA sense strand
guguaaagcgccuguaaaa

SEQ ID NO: 2553922 - RNA, 19 nt, Homo sapiens
  misc_RNA (1)...(19): siRNA sense strand
gcgcuaagcuccauggcca

SEQ ID NO: 2553923 - RNA, 19 nt, Homo sapiens
  misc_RNA (1)...(19): siRNA sense strand
guggaaaacccauggaaau

SEQ ID NO: 2553924 - RNA, 19 nt, Homo sapiens
  misc_RNA (1)...(19): siRNA sense strand
ggauuuagcugcugaggcu

SEQ ID NO: 2553925 - RNA, 19 nt, Homo sapiens
  misc_RNA (1)...(19): siRNA sense strand
agugaugaaagaugguaaa

SEQ ID NO: 2553926 - RNA, 19 nt, Homo sapiens
  misc_RNA (1)...(19): siRNA sense strand
cuucugauuugguggucaa

SEQ ID NO: 2553927 - RNA, 19 nt, Homo sapiens
  misc_RNA (1)...(19): siRNA sense strand
cuuuguugguggauauuua

SEQ ID NO: 2553928 - RNA, 19 nt, Homo sapiens
  misc_RNA (1)...(19): siRNA sense strand
gcugaguacauuauagaau

SEQ ID NO: 2553929 - RNA, 19 nt, Homo sapiens
  misc_RNA (1)...(19): siRNA sense strand
ucucauugccuauggaaaa

SEQ ID NO: 2553930 - RNA, 19 nt, Homo sapiens
  misc_RNA (1)...(19): siRNA sense strand
ugacaugauucgagaagcu

SEQ ID NO: 2553931 - RNA, 19 nt, Homo sapiens
  misc_RNA (1)...(19): siRNA sense strand
aggaauuccauauaagcaa

SEQ ID NO: 2553932 - RNA, 19 nt, Homo sapiens
  misc_RNA (1)...(19): siRNA sense strand
cggccaugcuucuagguga

SEQ ID NO: 2553933 - RNA, 19 nt, Homo sapiens
  misc_RNA (1)...(19): siRNA sense strand
caggcgaaaguuagagaau

SEQ ID NO: 2553934 - RNA, 19 nt, Homo sapiens
  misc_RNA (1)...(19): siRNA sense strand
augagaagcgaguggcauu

SEQ ID NO: 2553935 - RNA, 19 nt, Homo sapiens
  misc_RNA (1)...(19): siRNA sense strand
acaaggaggauaugcaaaa

SEQ ID NO: 2553936 - RNA, 19 nt, Homo sapiens
  misc_RNA (1)...(19): siRNA sense strand
gguguaaagcgccuguaaa

SEQ ID NO: 2553937 - RNA, 19 nt, Homo sapiens
  misc_RNA (1)...(19): siRNA sense strand
gguggaaaacccauggaaa

SEQ ID NO: 2553938 - RNA, 19 nt, Homo sapiens
  misc_RNA (1)...(19): siRNA sense strand
cauggaaauuucuggcaca

SEQ ID NO: 2553939 - RNA, 19 nt, Homo sapiens
  misc_RNA (1)...(19): siRNA sense strand
augacauuguguuggaaau

SEQ ID NO: 2553940 - RNA, 19 nt, Homo sapiens
  misc_RNA (1)...(19): siRNA sense strand
ccuuggagguggacuugaa

SEQ ID NO: 2553941 - RNA, 19 nt, Homo sapiens
  misc_RNA (1)...(19): siRNA sense strand
agcacuuauuccagguaaa

SEQ ID NO: 2553942 - RNA, 19 nt, Homo sapiens
  misc_RNA (1)...(19): siRNA sense strand
ggauacuggguuugggcau

SEQ ID NO: 2553943 - RNA, 19 nt, Homo sapiens
  misc_RNA (1)...(19): siRNA sense strand
ugugauucuuggaggcuau

SEQ ID NO: 2553944 - RNA, 19 nt, Homo sapiens
  misc_RNA (1)...(19): siRNA sense strand
ggucuuuggguguuggcua

SEQ ID NO: 2553945 - RNA, 19 nt, Homo sapiens
  misc_RNA (1)...(19): siRNA sense strand
uagugaugaaagaugguaa

SEQ ID NO: 2553946 - RNA, 19 nt, Homo sapiens
  misc_RNA (1)...(19): siRNA sense strand
gcuaaauaaacuuucccaa

SEQ ID NO: 2553947 - RNA, 19 nt, Homo sapiens
  misc_RNA (1)...(19): siRNA sense strand
uucaacagcugguggaaaa

SEQ ID NO: 2553948 - RNA, 19 nt, Homo sapiens
  misc_RNA (1)...(19): siRNA sense strand
aggaaucuggugagggaca

SEQ ID NO: 2553949 - RNA, 19 nt, Homo sapiens
  misc_RNA (1)...(19): siRNA sense strand
ugagggacaaggaggauau

SEQ ID NO: 2553950 - RNA, 19 nt, Homo sapiens
  misc_RNA (1)...(19): siRNA sense strand
gggacaaggaggauaugca

SEQ ID NO: 2553951 - RNA, 19 nt, Homo sapiens
  misc_RNA (1)...(19): siRNA sense strand
aaaugaaacucuuugcuca

SEQ ID NO: 2553952 - RNA, 19 nt, Homo sapiens
  misc_RNA (1)...(19): siRNA sense strand
aaugaaacucuuugcucaa

SEQ ID NO: 2553953 - RNA, 19 nt, Homo sapiens
  misc_RNA (1)...(19): siRNA sense strand
ccaaacuccugaaggccau

SEQ ID NO: 2553954 - RNA, 19 nt, Homo sapiens
  misc_RNA (1)...(19): siRNA sense strand
gacaaggaggauaugcaaa

SEQ ID NO: 2553955 - RNA, 19 nt, Homo sapiens
  misc_RNA (1)...(19): siRNA sense strand
gcuaugcugcaguggacaa

SEQ ID NO: 2553956 - RNA, 19 nt, Homo sapiens
  misc_RNA (1)...(19): siRNA sense strand
agacaguggcugagcugga

SEQ ID NO: 2553957 - RNA, 19 nt, Homo sapiens
  misc_RNA (1)...(19): siRNA sense strand
cuuacucaaugcaggcuua

SEQ ID NO: 2553958 - RNA, 19 nt, Homo sapiens
  misc_RNA (1)...(19): siRNA sense strand
ggccaugcuucuaggugau

SEQ ID NO: 2553959 - RNA, 19 nt, Homo sapiens
  misc_RNA (1)...(19): siRNA sense strand
cugcugaggcugguggaaa

SEQ ID NO: 2553960 - RNA, 19 nt, Homo sapiens
  misc_RNA (1)...(19): siRNA sense strand
augaaagaugguaaaguga

SEQ ID NO: 2553961 - RNA, 19 nt, Homo sapiens
  misc_RNA (1)...(19): siRNA sense strand
caaccuugacaaugcaauu

SEQ ID NO: 2553962 - RNA, 19 nt, Homo sapiens
  misc_RNA (1)...(19): siRNA sense strand
cuuccaaguucucagauga

SEQ ID NO: 2553963 - RNA, 19 nt, Homo sapiens
  misc_RNA (1)...(19): siRNA sense strand
ggaaucuggugagggacaa

SEQ ID NO: 2553964 - RNA, 19 nt, Homo sapiens
  misc_RNA (1)...(19): siRNA sense strand
ccaucagcccggacaaaga

SEQ ID NO: 2553965 - RNA, 19 nt, Homo sapiens
  misc_RNA (1)...(19): siRNA sense strand
acucagagaaugcuggaca

SEQ ID NO: 2553966 - RNA, 19 nt, Homo sapiens
  misc_RNA (1)...(19): siRNA sense strand
cagaauuacuagcucagau

SEQ ID NO: 2553967 - RNA, 19 nt, Homo sapiens
  misc_RNA (1)...(19): siRNA sense strand
cuacgugugaagaaggauu

SEQ ID NO: 2553968 - RNA, 19 nt, Homo sapiens
  misc_RNA (1)...(19): siRNA sense strand
caguaaaacagaagacagu

SEQ ID NO: 2553969 - RNA, 19 nt, Homo sapiens
  misc_RNA (1)...(19): siRNA sense strand
gaacagcacgucuuggcaa

SEQ ID NO: 2553970 - RNA, 19 nt, Homo sapiens
  misc_RNA (1)...(19): siRNA sense strand
ucuaggugaugccaagaaa

SEQ ID NO: 2553971 - RNA, 19 nt, Homo sapiens
  misc_RNA (1)...(19): siRNA sense strand
ggcgaaaguuagagaaucc

SEQ ID NO: 2553972 - RNA, 19 nt, Homo sapiens
  misc_RNA (1)...(19): siRNA sense strand
ugucauuagaggaacugua

SEQ ID NO: 2553973 - RNA, 19 nt, Homo sapiens
  misc_RNA (1)...(19): siRNA sense strand
gguuauaacauugaacaga

SEQ ID NO: 2553974 - RNA, 19 nt, Homo sapiens
  misc_RNA (1)...(19): siRNA sense strand
uguuggaaauggaugagau

SEQ ID NO: 2553975 - RNA, 19 nt, Homo sapiens
  misc_RNA (1)...(19): siRNA sense strand
ucacaauugcucagggaua

SEQ ID NO: 2553976 - RNA, 19 nt, Homo sapiens
  misc_RNA (1)...(19): siRNA sense strand
uggaaauggaugagaucaa

SEQ ID NO: 2553977 - RNA, 19 nt, Homo sapiens
  misc_RNA (1)...(19): siRNA sense strand
ucaccaagauuguggccua

SEQ ID NO: 2553978 - RNA, 19 nt, Homo sapiens
  misc_RNA (1)...(19): siRNA sense strand
ccuuguaauuggagcuaau

SEQ ID NO: 2553979 - RNA, 19 nt, Homo sapiens
  misc_RNA (1)...(19): siRNA sense strand
ugcaauuguucgaggauuu

SEQ ID NO: 2553980 - RNA, 19 nt, Homo sapiens
  misc_RNA (1)...(19): siRNA sense strand
gaaggaaucuggugaggga

SEQ ID NO: 2553981 - RNA, 19 nt, Homo sapiens
  misc_RNA (1)...(19): siRNA sense strand
guguaaagcgccuguaaaa

SEQ ID NO: 2553982 - RNA, 19 nt, Homo sapiens
  misc_RNA (1)...(19): siRNA sense strand
gcgcuaagcuccauggcca

SEQ ID NO: 2553983 - RNA, 19 nt, Homo sapiens
  misc_RNA (1)...(19): siRNA sense strand
guggaaaacccauggaaau

SEQ ID NO: 2553984 - RNA, 19 nt, Homo sapiens
  misc_RNA (1)...(19): siRNA sense strand
ggauuuagcugcugaggcu

SEQ ID NO: 2553985 - RNA, 19 nt, Homo sapiens
  misc_RNA (1)...(19): siRNA sense strand
agugaugaaagaugguaaa

SEQ ID NO: 2553986 - RNA, 19 nt, Homo sapiens
  misc_RNA (1)...(19): siRNA sense strand
cuucugauuugguggucaa

SEQ ID NO: 2553987 - RNA, 19 nt, Homo sapiens
  misc_RNA (1)...(19): siRNA sense strand
cuuuguugguggauauuua

SEQ ID NO: 2553988 - RNA, 19 nt, Homo sapiens
  misc_RNA (1)...(19): siRNA sense strand
gcugaguacauuauagaau

SEQ ID NO: 2553989 - RNA, 19 nt, Homo sapiens
  misc_RNA (1)...(19): siRNA sense strand
ucucauugccuauggaaaa

SEQ ID NO: 2553990 - RNA, 19 nt, Homo sapiens
  misc_RNA (1)...(19): siRNA sense strand
ugacaugauucgagaagcu

SEQ ID NO: 2553991 - RNA, 19 nt, Homo sapiens
  misc_RNA (1)...(19): siRNA sense strand
aggaauuccauauaagcaa

SEQ ID NO: 2553992 - RNA, 19 nt, Homo sapiens
  misc_RNA (1)...(19): siRNA sense strand
cggccaugcuucuagguga

SEQ ID NO: 2553993 - RNA, 19 nt, Homo sapiens
  misc_RNA (1)...(19): siRNA sense strand
caggcgaaaguuagagaau

SEQ ID NO: 2553994 - RNA, 19 nt, Homo sapiens
  misc_RNA (1)...(19): siRNA sense strand
augagaagcgaguggcauu

SEQ ID NO: 2553995 - RNA, 19 nt, Homo sapiens
  misc_RNA (1)...(19): siRNA sense strand
acaaggaggauaugcaaaa

SEQ ID NO: 2553996 - RNA, 19 nt, Homo sapiens
  misc_RNA (1)...(19): siRNA sense strand
gguguaaagcgccuguaaa

SEQ ID NO: 2553997 - RNA, 19 nt, Homo sapiens
  misc_RNA (1)...(19): siRNA sense strand
gguggaaaacccauggaaa

SEQ ID NO: 2553998 - RNA, 19 nt, Homo sapiens
  misc_RNA (1)...(19): siRNA sense strand
cauggaaauuucuggcaca

SEQ ID NO: 2553999 - RNA, 19 nt, Homo sapiens
  misc_RNA (1)...(19): siRNA sense strand
augacauuguguuggaaau

SEQ ID NO: 2554000 - RNA, 19 nt, Homo sapiens
  misc_RNA (1)...(19): siRNA sense strand
ccuuggagguggacuugaa

SEQ ID NO: 2554001 - RNA, 19 nt, Homo sapiens
  misc_RNA (1)...(19): siRNA sense strand
agcacuuauuccagguaaa

SEQ ID NO: 2554002 - RNA, 19 nt, Homo sapiens
  misc_RNA (1)...(19): siRNA sense strand
ggauacuggguuugggcau

SEQ ID NO: 2554003 - RNA, 19 nt, Homo sapiens
  misc_RNA (1)...(19): siRNA sense strand
ugugauucuuggaggcuau

SEQ ID NO: 2554004 - RNA, 19 nt, Homo sapiens
  misc_RNA (1)...(19): siRNA sense strand
ggucuuuggguguuggcua

SEQ ID NO: 2554005 - RNA, 19 nt, Homo sapiens
  misc_RNA (1)...(19): siRNA sense strand
uagugaugaaagaugguaa

SEQ ID NO: 2554006 - RNA, 19 nt, Homo sapiens
  misc_RNA (1)...(19): siRNA sense strand
gcuaaauaaacuuucccaa

SEQ ID NO: 2554007 - RNA, 19 nt, Homo sapiens
  misc_RNA (1)...(19): siRNA sense strand
uucaacagcugguggaaaa

SEQ ID NO: 2554008 - RNA, 19 nt, Homo sapiens
  misc_RNA (1)...(19): siRNA sense strand
aggaaucuggugagggaca

SEQ ID NO: 2554009 - RNA, 19 nt, Homo sapiens
  misc_RNA (1)...(19): siRNA sense strand
ugagggacaaggaggauau

SEQ ID NO: 2554010 - RNA, 19 nt, Homo sapiens
  misc_RNA (1)...(19): siRNA sense strand
gggacaaggaggauaugca

SEQ ID NO: 2554011 - RNA, 19 nt, Homo sapiens
  misc_RNA (1)...(19): siRNA sense strand
aaaugaaacucuuugcuca

SEQ ID NO: 2554012 - RNA, 19 nt, Homo sapiens
  misc_RNA (1)...(19): siRNA sense strand
aaugaaacucuuugcucaa

SEQ ID NO: 2554013 - RNA, 19 nt, Homo sapiens
  misc_RNA (1)...(19): siRNA sense strand
ccaaacuccugaaggccau

SEQ ID NO: 2554014 - RNA, 19 nt, Homo sapiens
  misc_RNA (1)...(19): siRNA sense strand
gacaaggaggauaugcaaa

SEQ ID NO: 2554015 - RNA, 19 nt, Homo sapiens
  misc_RNA (1)...(19): siRNA sense strand
gcuaugcugcaguggacaa

SEQ ID NO: 2554016 - RNA, 19 nt, Homo sapiens
  misc_RNA (1)...(19): siRNA sense strand
agacaguggcugagcugga

SEQ ID NO: 2554017 - RNA, 19 nt, Homo sapiens
  misc_RNA (1)...(19): siRNA sense strand
cuuacucaaugcaggcuua

SEQ ID NO: 2554018 - RNA, 19 nt, Homo sapiens
  misc_RNA (1)...(19): siRNA sense strand
ggccaugcuucuaggugau

SEQ ID NO: 2554019 - RNA, 19 nt, Homo sapiens
  misc_RNA (1)...(19): siRNA sense strand
cugcugaggcugguggaaa

SEQ ID NO: 2554020 - RNA, 19 nt, Homo sapiens
  misc_RNA (1)...(19): siRNA sense strand
augaaagaugguaaaguga

SEQ ID NO: 2554021 - RNA, 19 nt, Homo sapiens
  misc_RNA (1)...(19): siRNA sense strand
caaccuugacaaugcaauu

SEQ ID NO: 2554022 - RNA, 19 nt, Homo sapiens
  misc_RNA (1)...(19): siRNA sense strand
cuuccaaguucucagauga

SEQ ID NO: 2554023 - RNA, 19 nt, Homo sapiens
  misc_RNA (1)...(19): siRNA sense strand
ggaaucuggugagggacaa

SEQ ID NO: 2554024 - RNA, 19 nt, Homo sapiens
  misc_RNA (1)...(19): siRNA sense strand
ccaucagcccggacaaaga

SEQ ID NO: 2554025 - RNA, 19 nt, Homo sapiens
  misc_RNA (1)...(19): siRNA sense strand
acucagagaaugcuggaca

SEQ ID NO: 2554026 - RNA, 19 nt, Homo sapiens
  misc_RNA (1)...(19): siRNA sense strand
cagaauuacuagcucagau

SEQ ID NO: 2554027 - RNA, 19 nt, Homo sapiens
  misc_RNA (1)...(19): siRNA sense strand
cuacgugugaagaaggauu

SEQ ID NO: 2554028 - RNA, 19 nt, Homo sapiens
  misc_RNA (1)...(19): siRNA sense strand
caguaaaacagaagacagu

SEQ ID NO: 2554029 - RNA, 19 nt, Homo sapiens
  misc_RNA (1)...(19): siRNA sense strand
gaacagcacgucuuggcaa

SEQ ID NO: 2554030 - RNA, 19 nt, Homo sapiens
  misc_RNA (1)...(19): siRNA sense strand
ucuaggugaugccaagaaa

SEQ ID NO: 2554031 - RNA, 19 nt, Homo sapiens
  misc_RNA (1)...(19): siRNA sense strand
ggcgaaaguuagagaaucc

SEQ ID NO: 2554032 - RNA, 19 nt, Homo sapiens
  misc_RNA (1)...(19): siRNA sense strand
ugucauuagaggaacugua

SEQ ID NO: 2554033 - RNA, 19 nt, Homo sapiens
  misc_RNA (1)...(19): siRNA sense strand
gguuauaacauugaacaga

SEQ ID NO: 2554034 - RNA, 19 nt, Homo sapiens
  misc_RNA (1)...(19): siRNA sense strand
uguuggaaauggaugagau

SEQ ID NO: 2554035 - RNA, 19 nt, Homo sapiens
  misc_RNA (1)...(19): siRNA sense strand
ggagaaaggaagauugcca

SEQ ID NO: 2554036 - RNA, 19 nt, Homo sapiens
  misc_RNA (1)...(19): siRNA sense strand
uguacgaaugagagaacua

SEQ ID NO: 2554037 - RNA, 19 nt, Homo sapiens
  misc_RNA (1)...(19): siRNA sense strand
ccacuauguagcuggaaca

SEQ ID NO: 2554038 - RNA, 19 nt, Homo sapiens
  misc_RNA (1)...(19): siRNA sense strand
gcagagagauugcagccuu

SEQ ID NO: 2554039 - RNA, 19 nt, Homo sapiens
  misc_RNA (1)...(19): siRNA sense strand
cuauguagcuggaacagga

SEQ ID NO: 2554040 - RNA, 19 nt, Homo sapiens
  misc_RNA (1)...(19): siRNA sense strand
aggaagauugccagagguu

SEQ ID NO: 2554041 - RNA, 19 nt, Homo sapiens
  misc_RNA (1)...(19): siRNA sense strand
gugcuauagcccagaggga

SEQ ID NO: 2554042 - RNA, 19 nt, Homo sapiens
  misc_RNA (1)...(19): siRNA sense strand
ccugauuguacgaaugaga

SEQ ID NO: 2554043 - RNA, 19 nt, Homo sapiens
  misc_RNA (1)...(19): siRNA sense strand
guuucagccagcagagaga

SEQ ID NO: 2554044 - RNA, 19 nt, Homo sapiens
  misc_RNA (1)...(19): siRNA sense strand
aggaagggaagaucagcua

SEQ ID NO: 2554045 - RNA, 19 nt, Homo sapiens
  misc_RNA (1)...(19): siRNA sense strand
agaaguaccucgaccacga

SEQ ID NO: 2554046 - RNA, 19 nt, Homo sapiens
  misc_RNA (1)...(19): siRNA sense strand
gugcagaaggaagggaaga

SEQ ID NO: 2554047 - RNA, 19 nt, Homo sapiens
  misc_RNA (1)...(19): siRNA sense strand
cggccgaggaguacgacau

SEQ ID NO: 2554048 - RNA, 19 nt, Homo sapiens
  misc_RNA (1)...(19): siRNA sense strand
agaaguaccucgaccacga

SEQ ID NO: 2554049 - RNA, 19 nt, Homo sapiens
  misc_RNA (1)...(19): siRNA sense strand
cggccgaggaguacgacau

SEQ ID NO: 2554050 - RNA, 19 nt, Homo sapiens
  misc_RNA (1)...(19): siRNA sense strand
aagaauaucugaacggagu

SEQ ID NO: 2554051 - RNA, 19 nt, Homo sapiens
  misc_RNA (1)...(19): siRNA sense strand
cuugaugguugguggcaca

SEQ ID NO: 2554052 - RNA, 19 nt, Homo sapiens
  misc_RNA (1)...(19): siRNA sense strand
cuucaagcugccugacaua

SEQ ID NO: 2554053 - RNA, 19 nt, Homo sapiens
  misc_RNA (1)...(19): siRNA sense strand
ccuuaugagaggaggccga

SEQ ID NO: 2554054 - RNA, 19 nt, Homo sapiens
  misc_RNA (1)...(19): siRNA sense strand
cccugauguuauaacgaaa

SEQ ID NO: 2554055 - RNA, 19 nt, Homo sapiens
  misc_RNA (1)...(19): siRNA sense strand
ccacagauccaauacguca

SEQ ID NO: 2554056 - RNA, 19 nt, Homo sapiens
  misc_RNA (1)...(19): siRNA sense strand
gcacaugauucccagagga

SEQ ID NO: 2554057 - RNA, 19 nt, Homo sapiens
  misc_RNA (1)...(19): siRNA sense strand
gagauuucuauuauggcaa

SEQ ID NO: 2554058 - RNA, 19 nt, Homo sapiens
  misc_RNA (1)...(19): siRNA sense strand
augaaaagcaccuuaacaa

SEQ ID NO: 2554059 - RNA, 19 nt, Homo sapiens
  misc_RNA (1)...(19): siRNA sense strand
gaguuauucaugacaucaa

SEQ ID NO: 2554060 - RNA, 19 nt, Homo sapiens
  misc_RNA (1)...(19): siRNA sense strand
acucaauagcacuuaugaa

SEQ ID NO: 2554061 - RNA, 19 nt, Homo sapiens
  misc_RNA (1)...(19): siRNA sense strand
aaacauuacagaaggcgga

SEQ ID NO: 2554062 - RNA, 19 nt, Homo sapiens
  misc_RNA (1)...(19): siRNA sense strand
ggaauaucacugugggccu

SEQ ID NO: 2554063 - RNA, 19 nt, Homo sapiens
  misc_RNA (1)...(19): siRNA sense strand
cguucaaagcauuuaaagu

SEQ ID NO: 2554064 - RNA, 19 nt, Homo sapiens
  misc_RNA (1)...(19): siRNA sense strand
ggaugaagcaggaagagga

SEQ ID NO: 2554065 - RNA, 19 nt, Homo sapiens
  misc_RNA (1)...(19): siRNA sense strand
aggaagaggaggcccacaa

SEQ ID NO: 2554066 - RNA, 19 nt, Homo sapiens
  misc_RNA (1)...(19): siRNA sense strand
cuggaagaugucugcguua

SEQ ID NO: 2554067 - RNA, 19 nt, Homo sapiens
  misc_RNA (1)...(19): siRNA sense strand
agaggaugaagcaggaaga

SEQ ID NO: 2554068 - RNA, 19 nt, Homo sapiens
  misc_RNA (1)...(19): siRNA sense strand
cgacgaaguggguggccua

SEQ ID NO: 2554069 - RNA, 19 nt, Homo sapiens
  misc_RNA (1)...(19): siRNA sense strand
aggugaacccggaguguga

SEQ ID NO: 2554070 - RNA, 19 nt, Homo sapiens
  misc_RNA (1)...(19): siRNA sense strand
acacgaagguggagcaggu

SEQ ID NO: 2554071 - RNA, 19 nt, Homo sapiens
  misc_RNA (1)...(19): siRNA sense strand
cuggcuaccuggacgggaa

SEQ ID NO: 2554072 - RNA, 19 nt, Homo sapiens
  misc_RNA (1)...(19): siRNA sense strand
acaaauacauccagccugu

SEQ ID NO: 2554073 - RNA, 19 nt, Homo sapiens
  misc_RNA (1)...(19): siRNA sense strand
cuguggagcugcuggacca

SEQ ID NO: 2554074 - RNA, 19 nt, Homo sapiens
  misc_RNA (1)...(19): siRNA sense strand
gccuggaggaggagcuauu

SEQ ID NO: 2554075 - RNA, 19 nt, Homo sapiens
  misc_RNA (1)...(19): siRNA sense strand
uggcagaaagagacuucaa

SEQ ID NO: 2554076 - RNA, 19 nt, Homo sapiens
  misc_RNA (1)...(19): siRNA sense strand
gcuucuacccagugcagau

SEQ ID NO: 2554077 - RNA, 19 nt, Homo sapiens
  misc_RNA (1)...(19): siRNA sense strand
ccacaaggaugcuggccac

SEQ ID NO: 2554078 - RNA, 19 nt, Homo sapiens
  misc_RNA (1)...(19): siRNA sense strand
ucuuacaguugguggaaca

SEQ ID NO: 2554079 - RNA, 19 nt, Homo sapiens
  misc_RNA (1)...(19): siRNA sense strand
auaaaguuccagagaaaca

SEQ ID NO: 2554080 - RNA, 19 nt, Homo sapiens
  misc_RNA (1)...(19): siRNA sense strand
cagauugggcagaggacca

SEQ ID NO: 2554081 - RNA, 19 nt, Homo sapiens
  misc_RNA (1)...(19): siRNA sense strand
agccagagaaccagggaau

SEQ ID NO: 2554082 - RNA, 19 nt, Homo sapiens
  misc_RNA (1)...(19): siRNA sense strand
acagacagccagagaacca

SEQ ID NO: 2554083 - RNA, 19 nt, Homo sapiens
  misc_RNA (1)...(19): siRNA sense strand
gggacuagucucaaaacaa

SEQ ID NO: 2554084 - RNA, 19 nt, Homo sapiens
  misc_RNA (1)...(19): siRNA sense strand
gguaugaggugaacagggu

SEQ ID NO: 2554085 - RNA, 19 nt, Homo sapiens
  misc_RNA (1)...(19): siRNA sense strand
gggacaagaauaucaaaau

SEQ ID NO: 2554086 - RNA, 19 nt, Homo sapiens
  misc_RNA (1)...(19): siRNA sense strand
ggaccgaaaggcacggcua

SEQ ID NO: 2554087 - RNA, 19 nt, Homo sapiens
  misc_RNA (1)...(19): siRNA sense strand
gcauaaggcugcugagagg

SEQ ID NO: 2554088 - RNA, 19 nt, Homo sapiens
  misc_RNA (1)...(19): siRNA sense strand
cggcagcccugaauggaga

SEQ ID NO: 2554089 - RNA, 19 nt, Homo sapiens
  misc_RNA (1)...(19): siRNA sense strand
cggcaugaccagucugcau

SEQ ID NO: 2554090 - RNA, 19 nt, Homo sapiens
  misc_RNA (1)...(19): siRNA sense strand
gggagaagacacugcguca

SEQ ID NO: 2554091 - RNA, 19 nt, Homo sapiens
  misc_RNA (1)...(19): siRNA sense strand
ccuucaaccuggcggacau

SEQ ID NO: 2554092 - RNA, 19 nt, Homo sapiens
  misc_RNA (1)...(19): siRNA sense strand
ugggcaaguucgugcugaa

SEQ ID NO: 2554093 - RNA, 19 nt, Homo sapiens
  misc_RNA (1)...(19): siRNA sense strand
ccuuacacaugaagaggca

SEQ ID NO: 2554094 - RNA, 19 nt, Homo sapiens
  misc_RNA (1)...(19): siRNA sense strand
ccagaggagcccaagccaa

SEQ ID NO: 2554095 - RNA, 19 nt, Homo sapiens
  misc_RNA (1)...(19): siRNA sense strand
cgggaagggagaagacacu

SEQ ID NO: 2554096 - RNA, 19 nt, Homo sapiens
  misc_RNA (1)...(19): siRNA sense strand
ccaaagaggggaagacgau

SEQ ID NO: 2554097 - RNA, 19 nt, Homo sapiens
  misc_RNA (1)...(19): siRNA sense strand
uuacacaugaagaggcauu

SEQ ID NO: 2554098 - RNA, 19 nt, Homo sapiens
  misc_RNA (1)...(19): siRNA sense strand
gcagcagaccuuuggccaa

SEQ ID NO: 2554099 - RNA, 19 nt, Homo sapiens
  misc_RNA (1)...(19): siRNA sense strand
cuggaaggaugguggcugu

SEQ ID NO: 2554100 - RNA, 19 nt, Homo sapiens
  misc_RNA (1)...(19): siRNA sense strand
gcagcagaccuuuggccaa

SEQ ID NO: 2554101 - RNA, 19 nt, Homo sapiens
  misc_RNA (1)...(19): siRNA sense strand
cuggaaggaugguggcugu

SEQ ID NO: 2554102 - RNA, 19 nt, Homo sapiens
  misc_RNA (1)...(19): siRNA sense strand
ccgugaauuuacuggguga

SEQ ID NO: 2554103 - RNA, 19 nt, Homo sapiens
  misc_RNA (1)...(19): siRNA sense strand
gaugauacccaguggcuga

SEQ ID NO: 2554104 - RNA, 19 nt, Homo sapiens
  misc_RNA (1)...(19): siRNA sense strand
ugacugaccuucuggccaa

SEQ ID NO: 2554105 - RNA, 19 nt, Homo sapiens
  misc_RNA (1)...(19): siRNA sense strand
gcgaagaaagcuaccguga

SEQ ID NO: 2554106 - RNA, 19 nt, Homo sapiens
  misc_RNA (1)...(19): siRNA sense strand
gggagagguucgaccgguu

SEQ ID NO: 2554107 - RNA, 19 nt, Homo sapiens
  misc_RNA (1)...(19): siRNA sense strand
gguuccugcacgagaagaa

SEQ ID NO: 2554108 - RNA, 19 nt, Homo sapiens
  misc_RNA (1)...(19): siRNA sense strand
acaaagaagaugauaccca

SEQ ID NO: 2554109 - RNA, 19 nt, Homo sapiens
  misc_RNA (1)...(19): siRNA sense strand
gagaagaacugcaugacug

SEQ ID NO: 2554110 - RNA, 19 nt, Homo sapiens
  misc_RNA (1)...(19): siRNA sense strand
ccaacaaagaagaugauac

SEQ ID NO: 2554111 - RNA, 19 nt, Homo sapiens
  misc_RNA (1)...(19): siRNA sense strand
agauggacaguguggucaa

SEQ ID NO: 2554112 - RNA, 19 nt, Homo sapiens
  misc_RNA (1)...(19): siRNA sense strand
cacuaaagaagcgaagaaa

SEQ ID NO: 2554113 - RNA, 19 nt, Homo sapiens
  misc_RNA (1)...(19): siRNA sense strand
uggaagagcgggaacgaga

SEQ ID NO: 2554114 - RNA, 19 nt, Homo sapiens
  misc_RNA (1)...(19): siRNA sense strand
cagcgauuggugugacaaa

SEQ ID NO: 2554115 - RNA, 19 nt, Homo sapiens
  misc_RNA (1)...(19): siRNA sense strand
aggcagaacaguaucaaaa

SEQ ID NO: 2554116 - RNA, 19 nt, Homo sapiens
  misc_RNA (1)...(19): siRNA sense strand
ggguggauggaguggauga

SEQ ID NO: 2554117 - RNA, 19 nt, Homo sapiens
  misc_RNA (1)...(19): siRNA sense strand
gcgaagaggaacaugccau

SEQ ID NO: 2554118 - RNA, 19 nt, Homo sapiens
  misc_RNA (1)...(19): siRNA sense strand
ccucaaacgcaugaagaau

SEQ ID NO: 2554119 - RNA, 19 nt, Homo sapiens
  misc_RNA (1)...(19): siRNA sense strand
cuaaguggguggauggagu

SEQ ID NO: 2554120 - RNA, 19 nt, Homo sapiens
  misc_RNA (1)...(19): siRNA sense strand
agagcgggaacgagagauu

SEQ ID NO: 2554121 - RNA, 19 nt, Homo sapiens
  misc_RNA (1)...(19): siRNA sense strand
cacuaauggaugauggaga

SEQ ID NO: 2554122 - RNA, 19 nt, Homo sapiens
  misc_RNA (1)...(19): siRNA sense strand
augaagaaucgagaggaaa

SEQ ID NO: 2554123 - RNA, 19 nt, Homo sapiens
  misc_RNA (1)...(19): siRNA sense strand
aguuaguucugguggagca

SEQ ID NO: 2554124 - RNA, 19 nt, Homo sapiens
  misc_RNA (1)...(19): siRNA sense strand
cuuucuuguuguugcggaa

SEQ ID NO: 2554125 - RNA, 19 nt, Homo sapiens
  misc_RNA (1)...(19): siRNA sense strand
gaacaguaucaaaagaaga

SEQ ID NO: 2554126 - RNA, 19 nt, Homo sapiens
  misc_RNA (1)...(19): siRNA sense strand
acgugaagcggcugggaaa

SEQ ID NO: 2554127 - RNA, 19 nt, Homo sapiens
  misc_RNA (1)...(19): siRNA sense strand
gcaaggaagucucgggcga

SEQ ID NO: 2554128 - RNA, 19 nt, Homo sapiens
  misc_RNA (1)...(19): siRNA sense strand
ccaugaaggagcugagcga

SEQ ID NO: 2554129 - RNA, 19 nt, Homo sapiens
  misc_RNA (1)...(19): siRNA sense strand
gagaugaagcagcgcgaca

SEQ ID NO: 2554130 - RNA, 19 nt, Homo sapiens
  misc_RNA (1)...(19): siRNA sense strand
acauguucgagcaggguaa

SEQ ID NO: 2554131 - RNA, 19 nt, Homo sapiens
  misc_RNA (1)...(19): siRNA sense strand
ccgugcaguacgaggagaa

SEQ ID NO: 2554132 - RNA, 19 nt, Homo sapiens
  misc_RNA (1)...(19): siRNA sense strand
agcuggagaucaugggcaa

SEQ ID NO: 2554133 - RNA, 19 nt, Homo sapiens
  misc_RNA (1)...(19): siRNA sense strand
gcgccaugcacgacuacaa

SEQ ID NO: 2554134 - RNA, 19 nt, Homo sapiens
  misc_RNA (1)...(19): siRNA sense strand
ugcaguacgaggagaagaa

SEQ ID NO: 2554135 - RNA, 19 nt, Homo sapiens
  misc_RNA (1)...(19): siRNA sense strand
ccgagaacuugcuggccga

SEQ ID NO: 2554136 - RNA, 19 nt, Homo sapiens
  misc_RNA (1)...(19): siRNA sense strand
ugaacgucaucgagcucaa

SEQ ID NO: 2554137 - RNA, 19 nt, Homo sapiens
  misc_RNA (1)...(19): siRNA sense strand
cgagaaaaggauaaagaaa

SEQ ID NO: 2554138 - RNA, 19 nt, Homo sapiens
  misc_RNA (1)...(19): siRNA sense strand
cugaaacaauuguggaaaa

SEQ ID NO: 2554139 - RNA, 19 nt, Homo sapiens
  misc_RNA (1)...(19): siRNA sense strand
ccaaaguaccuaugaccaa

SEQ ID NO: 2554140 - RNA, 19 nt, Homo sapiens
  misc_RNA (1)...(19): siRNA sense strand
ugggaaaugcacagaaauu

SEQ ID NO: 2554141 - RNA, 19 nt, Homo sapiens
  misc_RNA (1)...(19): siRNA sense strand
cggaacaauuacaccuaaa

SEQ ID NO: 2554142 - RNA, 19 nt, Homo sapiens
  misc_RNA (1)...(19): siRNA sense strand
cguccaaguccaaauguaa

SEQ ID NO: 2554143 - RNA, 19 nt, Homo sapiens
  misc_RNA (1)...(19): siRNA sense strand
auguaaagcuugaaggucu

SEQ ID NO: 2554144 - RNA, 19 nt, Homo sapiens
  misc_RNA (1)...(19): siRNA sense strand
ggaaauucacagaagcuau

SEQ ID NO: 2554145 - RNA, 19 nt, Homo sapiens
  misc_RNA (1)...(19): siRNA sense strand
agaaauugccaaaagguaa

SEQ ID NO: 2554146 - RNA, 19 nt, Homo sapiens
  misc_RNA (1)...(19): siRNA sense strand
agugaaagacaauguggaa

SEQ ID NO: 2554147 - RNA, 19 nt, Homo sapiens
  misc_RNA (1)...(19): siRNA sense strand
uggagagaauagagacaga

SEQ ID NO: 2554148 - RNA, 19 nt, Homo sapiens
  misc_RNA (1)...(19): siRNA sense strand
guguaagggcaaacaauau

SEQ ID NO: 2554149 - RNA, 19 nt, Homo sapiens
  misc_RNA (1)...(19): siRNA sense strand
caauguggaagguggaauu

SEQ ID NO: 2554150 - RNA, 19 nt, Homo sapiens
  misc_RNA (1)...(19): siRNA sense strand
gucaaaaggacaugguaua

SEQ ID NO: 2554151 - RNA, 19 nt, Homo sapiens
  misc_RNA (1)...(19): siRNA sense strand
ccuuauuauuccaggucuu

SEQ ID NO: 2554152 - RNA, 19 nt, Homo sapiens
  misc_RNA (1)...(19): siRNA sense strand
cuggagaagaacuggaaaa

SEQ ID NO: 2554153 - RNA, 19 nt, Homo sapiens
  misc_RNA (1)...(19): siRNA sense strand
uuacacuagcccugggaaa

SEQ ID NO: 2554154 - RNA, 19 nt, Homo sapiens
  misc_RNA (1)...(19): siRNA sense strand
uggaaaaccuaaagcccaa

SEQ ID NO: 2554155 - RNA, 19 nt, Homo sapiens
  misc_RNA (1)...(19): siRNA sense strand
cacaauuagcuaagaauga

SEQ ID NO: 2554156 - RNA, 19 nt, Homo sapiens
  misc_RNA (1)...(19): siRNA sense strand
ccaaaagguaaaaggccaa

SEQ ID NO: 2554157 - RNA, 19 nt, Homo sapiens
  misc_RNA (1)...(19): siRNA sense strand
acuaagauuccacgaacaa

SEQ ID NO: 2554158 - RNA, 19 nt, Homo sapiens
  misc_RNA (1)...(19): siRNA sense strand
ccacacagugccagcauau

SEQ ID NO: 2554159 - RNA, 19 nt, Homo sapiens
  misc_RNA (1)...(19): siRNA sense strand
gacuuuagcucaagcccaa

SEQ ID NO: 2554160 - RNA, 19 nt, Homo sapiens
  misc_RNA (1)...(19): siRNA sense strand
guagaaaaucugaaaccaa

SEQ ID NO: 2554161 - RNA, 19 nt, Homo sapiens
  misc_RNA (1)...(19): siRNA sense strand
gacuguuguuggaaguaaa

SEQ ID NO: 2554162 - RNA, 19 nt, Homo sapiens
  misc_RNA (1)...(19): siRNA sense strand
uguaaagcuugaaggucuu

SEQ ID NO: 2554163 - RNA, 19 nt, Homo sapiens
  misc_RNA (1)...(19): siRNA sense strand
gcauaugucccaaggaaac

SEQ ID NO: 2554164 - RNA, 19 nt, Homo sapiens
  misc_RNA (1)...(19): siRNA sense strand
ccaaaguucugcagccuca

SEQ ID NO: 2554165 - RNA, 19 nt, Homo sapiens
  misc_RNA (1)...(19): siRNA sense strand
auaacugacuuuagcucaa

SEQ ID NO: 2554166 - RNA, 19 nt, Homo sapiens
  misc_RNA (1)...(19): siRNA sense strand
cuguggaaguauuacacua

SEQ ID NO: 2554167 - RNA, 19 nt, Homo sapiens
  misc_RNA (1)...(19): siRNA sense strand
gaaauugccaaaagguaaa

SEQ ID NO: 2554168 - RNA, 19 nt, Homo sapiens
  misc_RNA (1)...(19): siRNA sense strand
caaaggaccucaugugcga

SEQ ID NO: 2554169 - RNA, 19 nt, Homo sapiens
  misc_RNA (1)...(19): siRNA sense strand
aguguaagggcaaacaaua

SEQ ID NO: 2554170 - RNA, 19 nt, Homo sapiens
  misc_RNA (1)...(19): siRNA sense strand
ucagauuccuacacagcaa

SEQ ID NO: 2554171 - RNA, 19 nt, Homo sapiens
  misc_RNA (1)...(19): siRNA sense strand
gggauauggcagcaaugua

SEQ ID NO: 2554172 - RNA, 19 nt, Homo sapiens
  misc_RNA (1)...(19): siRNA sense strand
gaauuuggagugaaagaca

SEQ ID NO: 2554173 - RNA, 19 nt, Homo sapiens
  misc_RNA (1)...(19): siRNA sense strand
ccaagaagcacuaaaccca

SEQ ID NO: 2554174 - RNA, 19 nt, Homo sapiens
  misc_RNA (1)...(19): siRNA sense strand
ccaaacacgaguuaugaau

SEQ ID NO: 2554175 - RNA, 19 nt, Homo sapiens
  misc_RNA (1)...(19): siRNA sense strand
ggccaaaccucaaagucca

SEQ ID NO: 2554176 - RNA, 19 nt, Homo sapiens
  misc_RNA (1)...(19): siRNA sense strand
guuuaugaauuuggaguga

SEQ ID NO: 2554177 - RNA, 19 nt, Homo sapiens
  misc_RNA (1)...(19): siRNA sense strand
ucaaaugacaaaucagaca

SEQ ID NO: 2554178 - RNA, 19 nt, Homo sapiens
  misc_RNA (1)...(19): siRNA sense strand
aagauuuacuugagcgacu

SEQ ID NO: 2554179 - RNA, 19 nt, Homo sapiens
  misc_RNA (1)...(19): siRNA sense strand
ugguaugaaugugggacua

SEQ ID NO: 2554180 - RNA, 19 nt, Homo sapiens
  misc_RNA (1)...(19): siRNA sense strand
agaacaaguccauucaaau

SEQ ID NO: 2554181 - RNA, 19 nt, Homo sapiens
  misc_RNA (1)...(19): siRNA sense strand
augaauuuggagugaaaga

SEQ ID NO: 2554182 - RNA, 19 nt, Homo sapiens
  misc_RNA (1)...(19): siRNA sense strand
uggaauuuggaguaagauu

SEQ ID NO: 2554183 - RNA, 19 nt, Homo sapiens
  misc_RNA (1)...(19): siRNA sense strand
agauauaaagcaaccaaca

SEQ ID NO: 2554184 - RNA, 19 nt, Homo sapiens
  misc_RNA (1)...(19): siRNA sense strand
gcucaagcccaacaagaga

SEQ ID NO: 2554185 - RNA, 19 nt, Homo sapiens
  misc_RNA (1)...(19): siRNA sense strand
aagcuauaguugaugcaga

SEQ ID NO: 2554186 - RNA, 19 nt, Homo sapiens
  misc_RNA (1)...(19): siRNA sense strand
augcacagaaauugccaaa

SEQ ID NO: 2554187 - RNA, 19 nt, Homo sapiens
  misc_RNA (1)...(19): siRNA sense strand
aauuuggagugaaagacaa

SEQ ID NO: 2554188 - RNA, 19 nt, Homo sapiens
  misc_RNA (1)...(19): siRNA sense strand
gccaaaagguaaaaggcca

SEQ ID NO: 2554189 - RNA, 19 nt, Homo sapiens
  misc_RNA (1)...(19): siRNA sense strand
cagaagugacacacaccaa

SEQ ID NO: 2554190 - RNA, 19 nt, Homo sapiens
  misc_RNA (1)...(19): siRNA sense strand
gguaaaaggccaaaccuca

SEQ ID NO: 2554191 - RNA, 19 nt, Homo sapiens
  misc_RNA (1)...(19): siRNA sense strand
gaguguaagggcaaacaau

SEQ ID NO: 2554192 - RNA, 19 nt, Homo sapiens
  misc_RNA (1)...(19): siRNA sense strand
agcauaugucccaaggaaa

SEQ ID NO: 2554193 - RNA, 19 nt, Homo sapiens
  misc_RNA (1)...(19): siRNA sense strand
cccaagaaucccacaaaca

SEQ ID NO: 2554194 - RNA, 19 nt, Homo sapiens
  misc_RNA (1)...(19): siRNA sense strand
ggaauuagaaucauggaga

SEQ ID NO: 2554195 - RNA, 19 nt, Homo sapiens
  misc_RNA (1)...(19): siRNA sense strand
gggaaagaaacauggccau

SEQ ID NO: 2554196 - RNA, 19 nt, Homo sapiens
  misc_RNA (1)...(19): siRNA sense strand
gaagaggagucauggcuca

SEQ ID NO: 2554197 - RNA, 19 nt, Homo sapiens
  misc_RNA (1)...(19): siRNA sense strand
cauucaaagaggcaggauu

SEQ ID NO: 2554198 - RNA, 19 nt, Homo sapiens
  misc_RNA (1)...(19): siRNA sense strand
uggcucaauccucgggaaa

SEQ ID NO: 2554199 - RNA, 19 nt, Homo sapiens
  misc_RNA (1)...(19): siRNA sense strand
cgggaaagaaacauggcca

SEQ ID NO: 2554200 - RNA, 19 nt, Homo sapiens
  misc_RNA (1)...(19): siRNA sense strand
ccaugaaggaagagucugu

SEQ ID NO: 2554201 - RNA, 19 nt, Homo sapiens
  misc_RNA (1)...(19): siRNA sense strand
agaugcugcuaaaggaaca

SEQ ID NO: 2554202 - RNA, 19 nt, Homo sapiens
  misc_RNA (1)...(19): siRNA sense strand
aaacauggccauacggagu

SEQ ID NO: 2554203 - RNA, 19 nt, Homo sapiens
  misc_RNA (1)...(19): siRNA sense strand
cagggagcccagaagggaa

SEQ ID NO: 2554204 - RNA, 19 nt, Homo sapiens
  misc_RNA (1)...(19): siRNA sense strand
ggaauuagaaucauggaga

SEQ ID NO: 2554205 - RNA, 19 nt, Homo sapiens
  misc_RNA (1)...(19): siRNA sense strand
gggaaagaaacauggccau

SEQ ID NO: 2554206 - RNA, 19 nt, Homo sapiens
  misc_RNA (1)...(19): siRNA sense strand
gaagaggagucauggcuca

SEQ ID NO: 2554207 - RNA, 19 nt, Homo sapiens
  misc_RNA (1)...(19): siRNA sense strand
cauucaaagaggcaggauu

SEQ ID NO: 2554208 - RNA, 19 nt, Homo sapiens
  misc_RNA (1)...(19): siRNA sense strand
uggcucaauccucgggaaa

SEQ ID NO: 2554209 - RNA, 19 nt, Homo sapiens
  misc_RNA (1)...(19): siRNA sense strand
cgggaaagaaacauggcca

SEQ ID NO: 2554210 - RNA, 19 nt, Homo sapiens
  misc_RNA (1)...(19): siRNA sense strand
ccaugaaggaagagucugu

SEQ ID NO: 2554211 - RNA, 19 nt, Homo sapiens
  misc_RNA (1)...(19): siRNA sense strand
agaugcugcuaaaggaaca

SEQ ID NO: 2554212 - RNA, 19 nt, Homo sapiens
  misc_RNA (1)...(19): siRNA sense strand
aaacauggccauacggagu

SEQ ID NO: 2554213 - RNA, 19 nt, Homo sapiens
  misc_RNA (1)...(19): siRNA sense strand
cagggagcccagaagggaa

SEQ ID NO: 2554214 - RNA, 19 nt, Homo sapiens
  misc_RNA (1)...(19): siRNA sense strand
ggaauuagaaucauggaga

SEQ ID NO: 2554215 - RNA, 19 nt, Homo sapiens
  misc_RNA (1)...(19): siRNA sense strand
gggaaagaaacauggccau

SEQ ID NO: 2554216 - RNA, 19 nt, Homo sapiens
  misc_RNA (1)...(19): siRNA sense strand
gaagaggagucauggcuca

SEQ ID NO: 2554217 - RNA, 19 nt, Homo sapiens
  misc_RNA (1)...(19): siRNA sense strand
cauucaaagaggcaggauu

SEQ ID NO: 2554218 - RNA, 19 nt, Homo sapiens
  misc_RNA (1)...(19): siRNA sense strand
uggcucaauccucgggaaa

SEQ ID NO: 2554219 - RNA, 19 nt, Homo sapiens
  misc_RNA (1)...(19): siRNA sense strand
cgggaaagaaacauggcca

SEQ ID NO: 2554220 - RNA, 19 nt, Homo sapiens
  misc_RNA (1)...(19): siRNA sense strand
ccaugaaggaagagucugu

SEQ ID NO: 2554221 - RNA, 19 nt, Homo sapiens
  misc_RNA (1)...(19): siRNA sense strand
agaugcugcuaaaggaaca

SEQ ID NO: 2554222 - RNA, 19 nt, Homo sapiens
  misc_RNA (1)...(19): siRNA sense strand
aaacauggccauacggagu

SEQ ID NO: 2554223 - RNA, 19 nt, Homo sapiens
  misc_RNA (1)...(19): siRNA sense strand
cagggagcccagaagggaa

SEQ ID NO: 2554224 - RNA, 19 nt, Homo sapiens
  misc_RNA (1)...(19): siRNA sense strand
cagcaaauggagagaggaa

SEQ ID NO: 2554225 - RNA, 19 nt, Homo sapiens
  misc_RNA (1)...(19): siRNA sense strand
ggguuuaauacgauggaaa

SEQ ID NO: 2554226 - RNA, 19 nt, Homo sapiens
  misc_RNA (1)...(19): siRNA sense strand
agugaagacuggaggcaga

SEQ ID NO: 2554227 - RNA, 19 nt, Homo sapiens
  misc_RNA (1)...(19): siRNA sense strand
cugaagcgccagagagcaa

SEQ ID NO: 2554228 - RNA, 19 nt, Homo sapiens
  misc_RNA (1)...(19): siRNA sense strand
ccugaaaagucuugaccua

SEQ ID NO: 2554229 - RNA, 19 nt, Homo sapiens
  misc_RNA (1)...(19): siRNA sense strand
cagaaaacgccuugaaaga

SEQ ID NO: 2554230 - RNA, 19 nt, Homo sapiens
  misc_RNA (1)...(19): siRNA sense strand
gcaaauggagagaggaaac

SEQ ID NO: 2554231 - RNA, 19 nt, Homo sapiens
  misc_RNA (1)...(19): siRNA sense strand
ccaccagagcugagaacuu

SEQ ID NO: 2554232 - RNA, 19 nt, Homo sapiens
  misc_RNA (1)...(19): siRNA sense strand
gcaugaaauccgggaggaa

SEQ ID NO: 2554233 - RNA, 19 nt, Homo sapiens
  misc_RNA (1)...(19): siRNA sense strand
cgauuggagucuaugguau

SEQ ID NO: 2554234 - RNA, 19 nt, Homo sapiens
  misc_RNA (1)...(19): siRNA sense strand
ccuuggaaccagaggacuu

SEQ ID NO: 2554235 - RNA, 19 nt, Homo sapiens
  misc_RNA (1)...(19): siRNA sense strand
aaucgaaugugauggaaaa

SEQ ID NO: 2554236 - RNA, 19 nt, Homo sapiens
  misc_RNA (1)...(19): siRNA sense strand
agauuuaccucuuggcaga

SEQ ID NO: 2554237 - RNA, 19 nt, Homo sapiens
  misc_RNA (1)...(19): siRNA sense strand
gguuuaauacgauggaaaa

SEQ ID NO: 2554238 - RNA, 19 nt, Homo sapiens
  misc_RNA (1)...(19): siRNA sense strand
aggaaauggguguuaggua

SEQ ID NO: 2554239 - RNA, 19 nt, Homo sapiens
  misc_RNA (1)...(19): siRNA sense strand
aaaucgaaugugauggaaa

SEQ ID NO: 2554240 - RNA, 19 nt, Homo sapiens
  misc_RNA (1)...(19): siRNA sense strand
uguaguccgcagagagaua

SEQ ID NO: 2554241 - RNA, 19 nt, Homo sapiens
  misc_RNA (1)...(19): siRNA sense strand
gcagagagauaaaugccau

SEQ ID NO: 2554242 - RNA, 19 nt, Homo sapiens
  misc_RNA (1)...(19): siRNA sense strand
aggaaggagaaucugguaa

SEQ ID NO: 2554243 - RNA, 19 nt, Homo sapiens
  misc_RNA (1)...(19): siRNA sense strand
agaggcugguacugagaaa

SEQ ID NO: 2554244 - RNA, 19 nt, Homo sapiens
  misc_RNA (1)...(19): siRNA sense strand
ugggagaaacacaggugaa

SEQ ID NO: 2554245 - RNA, 19 nt, Homo sapiens
  misc_RNA (1)...(19): siRNA sense strand
agaagagagaagaggucau

SEQ ID NO: 2554246 - RNA, 19 nt, Homo sapiens
  misc_RNA (1)...(19): siRNA sense strand
cuugaaugugggagaaaca

SEQ ID NO: 2554247 - RNA, 19 nt, Homo sapiens
  misc_RNA (1)...(19): siRNA sense strand
cgguauauuucuagcuugu

SEQ ID NO: 2554248 - RNA, 19 nt, Homo sapiens
  misc_RNA (1)...(19): siRNA sense strand
gauuggagucuaugguauu

SEQ ID NO: 2554249 - RNA, 19 nt, Homo sapiens
  misc_RNA (1)...(19): siRNA sense strand
gggagaaacacaggugaau

SEQ ID NO: 2554250 - RNA, 19 nt, Homo sapiens
  misc_RNA (1)...(19): siRNA sense strand
gcaacaacaaagaaguuca

SEQ ID NO: 2554251 - RNA, 19 nt, Homo sapiens
  misc_RNA (1)...(19): siRNA sense strand
gccauuaugaacugugaua

SEQ ID NO: 2554252 - RNA, 19 nt, Homo sapiens
  misc_RNA (1)...(19): siRNA sense strand
gaaucuggaggaaggagaa

SEQ ID NO: 2554253 - RNA, 19 nt, Homo sapiens
  misc_RNA (1)...(19): siRNA sense strand
caauaaucuucaagguaac

SEQ ID NO: 2554254 - RNA, 19 nt, Homo sapiens
  misc_RNA (1)...(19): siRNA sense strand
aggacuugaaugugggaga

SEQ ID NO: 2554255 - RNA, 19 nt, Homo sapiens
  misc_RNA (1)...(19): siRNA sense strand
acuccuaaggcgugugaau

SEQ ID NO: 2554256 - RNA, 19 nt, Homo sapiens
  misc_RNA (1)...(19): siRNA sense strand
aaauacaacauguggaagu

SEQ ID NO: 2554257 - RNA, 19 nt, Homo sapiens
  misc_RNA (1)...(19): siRNA sense strand
gggugauccugcuguguga

SEQ ID NO: 2554258 - RNA, 19 nt, Homo sapiens
  misc_RNA (1)...(19): siRNA sense strand
aggcagaguaagaugcuga

SEQ ID NO: 2554259 - RNA, 19 nt, Homo sapiens
  misc_RNA (1)...(19): siRNA sense strand
aagcacaacuggaaggucu

SEQ ID NO: 2554260 - RNA, 19 nt, Homo sapiens
  misc_RNA (1)...(19): siRNA sense strand
caugaguauucuucggaga

SEQ ID NO: 2554261 - RNA, 19 nt, Homo sapiens
  misc_RNA (1)...(19): siRNA sense strand
gaauugcaggugaggaaga

SEQ ID NO: 2554262 - RNA, 19 nt, Homo sapiens
  misc_RNA (1)...(19): siRNA sense strand
gguauaaaucgaaugugau

SEQ ID NO: 2554263 - RNA, 19 nt, Homo sapiens
  misc_RNA (1)...(19): siRNA sense strand
ccgagcugauugagcaaaa

SEQ ID NO: 2554264 - RNA, 19 nt, Homo sapiens
  misc_RNA (1)...(19): siRNA sense strand
cugaaacagcaaauggaga

SEQ ID NO: 2554265 - RNA, 19 nt, Homo sapiens
  misc_RNA (1)...(19): siRNA sense strand
gugaauauccagcgccuga

SEQ ID NO: 2554266 - RNA, 19 nt, Homo sapiens
  misc_RNA (1)...(19): siRNA sense strand
ugugugaggcccugaagaa

SEQ ID NO: 2554267 - RNA, 19 nt, Homo sapiens
  misc_RNA (1)...(19): siRNA sense strand
aggaaacugcugaaaguca

SEQ ID NO: 2554268 - RNA, 19 nt, Homo sapiens
  misc_RNA (1)...(19): siRNA sense strand
cuuuguaagccaagcccua

SEQ ID NO: 2554269 - RNA, 19 nt, Homo sapiens
  misc_RNA (1)...(19): siRNA sense strand
ucuucaagguaacgggcau

SEQ ID NO: 2554270 - RNA, 19 nt, Homo sapiens
  misc_RNA (1)...(19): siRNA sense strand
uuuaauagccugaaggaug

SEQ ID NO: 2554271 - RNA, 19 nt, Homo sapiens
  misc_RNA (1)...(19): siRNA sense strand
gcagaaauugccugggucu

SEQ ID NO: 2554272 - RNA, 19 nt, Homo sapiens
  misc_RNA (1)...(19): siRNA sense strand
uguugagccacgugaauau

SEQ ID NO: 2554273 - RNA, 19 nt, Homo sapiens
  misc_RNA (1)...(19): siRNA sense strand
gcaagaaugcgauuggagu

SEQ ID NO: 2554274 - RNA, 19 nt, Homo sapiens
  misc_RNA (1)...(19): siRNA sense strand
gagcaaaaguggccuggau

SEQ ID NO: 2554275 - RNA, 19 nt, Homo sapiens
  misc_RNA (1)...(19): siRNA sense strand
auagcgagucccagaggaa

SEQ ID NO: 2554276 - RNA, 19 nt, Homo sapiens
  misc_RNA (1)...(19): siRNA sense strand
guguuugcaacgaaugaua

SEQ ID NO: 2554277 - RNA, 19 nt, Homo sapiens
  misc_RNA (1)...(19): siRNA sense strand
agaguaagaugcugaccca

SEQ ID NO: 2554278 - RNA, 19 nt, Homo sapiens
  misc_RNA (1)...(19): siRNA sense strand
guacugagaaagugugacu

SEQ ID NO: 2554279 - RNA, 19 nt, Homo sapiens
  misc_RNA (1)...(19): siRNA sense strand
ggguguuagguaaagaaga

SEQ ID NO: 2554280 - RNA, 19 nt, Homo sapiens
  misc_RNA (1)...(19): siRNA sense strand
caggugaggaagaccacua

SEQ ID NO: 2554281 - RNA, 19 nt, Homo sapiens
  misc_RNA (1)...(19): siRNA sense strand
uggcaacaacaaagaaguu

SEQ ID NO: 2554282 - RNA, 19 nt, Homo sapiens
  misc_RNA (1)...(19): siRNA sense strand
cgaaugauaagcuggaagu

SEQ ID NO: 2554283 - RNA, 19 nt, Homo sapiens
  misc_RNA (1)...(19): siRNA sense strand
ccauguugaaccaggacuu

SEQ ID NO: 2554284 - RNA, 19 nt, Homo sapiens
  misc_RNA (1)...(19): siRNA sense strand
uguuugagugggccagaaa

SEQ ID NO: 2554285 - RNA, 19 nt, Homo sapiens
  misc_RNA (1)...(19): siRNA sense strand
cagagguggccaaagacaa

SEQ ID NO: 2554286 - RNA, 19 nt, Homo sapiens
  misc_RNA (1)...(19): siRNA sense strand
aguucgaccucuacaccaa

SEQ ID NO: 2554287 - RNA, 19 nt, Homo sapiens
  misc_RNA (1)...(19): siRNA sense strand
aggaggaagaagaggaaau

SEQ ID NO: 2554288 - RNA, 19 nt, Homo sapiens
  misc_RNA (1)...(19): siRNA sense strand
gcuucaaacgagucagaau

SEQ ID NO: 2554289 - RNA, 19 nt, Homo sapiens
  misc_RNA (1)...(19): siRNA sense strand
aucaagagaaggaggaaga

SEQ ID NO: 2554290 - RNA, 19 nt, Homo sapiens
  misc_RNA (1)...(19): siRNA sense strand
aggaagaagaggaaaugga

SEQ ID NO: 2554291 - RNA, 19 nt, Homo sapiens
  misc_RNA (1)...(19): siRNA sense strand
ggaaacaaguggaagaugc

SEQ ID NO: 2554292 - RNA, 19 nt, Homo sapiens
  misc_RNA (1)...(19): siRNA sense strand
gguccauguaugugagagu

SEQ ID NO: 2554293 - RNA, 19 nt, Homo sapiens
  misc_RNA (1)...(19): siRNA sense strand
aagaagaggaaauggaaag

SEQ ID NO: 2554294 - RNA, 19 nt, Homo sapiens
  misc_RNA (1)...(19): siRNA sense strand
ucagaauaaacuucagcaa

SEQ ID NO: 2554295 - RNA, 19 nt, Homo sapiens
  misc_RNA (1)...(19): siRNA sense strand
agaaggaggaagaagagga

SEQ ID NO: 2554296 - RNA, 19 nt, Homo sapiens
  misc_RNA (1)...(19): siRNA sense strand
gggccaaauuugagucccu

SEQ ID NO: 2554297 - RNA, 19 nt, Homo sapiens
  misc_RNA (1)...(19): siRNA sense strand
agaauaaacuucagcaacc

SEQ ID NO: 2554298 - RNA, 19 nt, Homo sapiens
  misc_RNA (1)...(19): siRNA sense strand
aggaggaagaagaggaaau

SEQ ID NO: 2554299 - RNA, 19 nt, Homo sapiens
  misc_RNA (1)...(19): siRNA sense strand
aucaagagaaggaggaaga

SEQ ID NO: 2554300 - RNA, 19 nt, Homo sapiens
  misc_RNA (1)...(19): siRNA sense strand
aggaagaagaggaaaugga

SEQ ID NO: 2554301 - RNA, 19 nt, Homo sapiens
  misc_RNA (1)...(19): siRNA sense strand
ggaaacaaguggaagaugc

SEQ ID NO: 2554302 - RNA, 19 nt, Homo sapiens
  misc_RNA (1)...(19): siRNA sense strand
gguccauguaugugagagu

SEQ ID NO: 2554303 - RNA, 19 nt, Homo sapiens
  misc_RNA (1)...(19): siRNA sense strand
aagaagaggaaauggaaag

SEQ ID NO: 2554304 - RNA, 19 nt, Homo sapiens
  misc_RNA (1)...(19): siRNA sense strand
agaaggaggaagaagagga

SEQ ID NO: 2554305 - RNA, 19 nt, Homo sapiens
  misc_RNA (1)...(19): siRNA sense strand
aggaggaagaagaggaaau

SEQ ID NO: 2554306 - RNA, 19 nt, Homo sapiens
  misc_RNA (1)...(19): siRNA sense strand
gcuucaaacgagucagaau

SEQ ID NO: 2554307 - RNA, 19 nt, Homo sapiens
  misc_RNA (1)...(19): siRNA sense strand
aucaagagaaggaggaaga

SEQ ID NO: 2554308 - RNA, 19 nt, Homo sapiens
  misc_RNA (1)...(19): siRNA sense strand
aggaagaagaggaaaugga

SEQ ID NO: 2554309 - RNA, 19 nt, Homo sapiens
  misc_RNA (1)...(19): siRNA sense strand
ggaaacaaguggaagaugc

SEQ ID NO: 2554310 - RNA, 19 nt, Homo sapiens
  misc_RNA (1)...(19): siRNA sense strand
gguccauguaugugagagu

SEQ ID NO: 2554311 - RNA, 19 nt, Homo sapiens
  misc_RNA (1)...(19): siRNA sense strand
aagaagaggaaauggaaag

SEQ ID NO: 2554312 - RNA, 19 nt, Homo sapiens
  misc_RNA (1)...(19): siRNA sense strand
ucagaauaaacuucagcaa

SEQ ID NO: 2554313 - RNA, 19 nt, Homo sapiens
  misc_RNA (1)...(19): siRNA sense strand
agaaggaggaagaagagga

SEQ ID NO: 2554314 - RNA, 19 nt, Homo sapiens
  misc_RNA (1)...(19): siRNA sense strand
gggccaaauuugagucccu

SEQ ID NO: 2554315 - RNA, 19 nt, Homo sapiens
  misc_RNA (1)...(19): siRNA sense strand
agaauaaacuucagcaacc

SEQ ID NO: 2554316 - RNA, 19 nt, Homo sapiens
  misc_RNA (1)...(19): siRNA sense strand
gagaagaaauccaaggcua

SEQ ID NO: 2554317 - RNA, 19 nt, Homo sapiens
  misc_RNA (1)...(19): siRNA sense strand
cgagaaagcuggagaccga

SEQ ID NO: 2554318 - RNA, 19 nt, Homo sapiens
  misc_RNA (1)...(19): siRNA sense strand
aggaggaguuagagaagaa

SEQ ID NO: 2554319 - RNA, 19 nt, Homo sapiens
  misc_RNA (1)...(19): siRNA sense strand
aggcuaucauugaggaaua

SEQ ID NO: 2554320 - RNA, 19 nt, Homo sapiens
  misc_RNA (1)...(19): siRNA sense strand
ccgagaacgaggcgagaaa

SEQ ID NO: 2554321 - RNA, 19 nt, Homo sapiens
  misc_RNA (1)...(19): siRNA sense strand
ccaaagaggagacggaaaa

SEQ ID NO: 2554322 - RNA, 19 nt, Homo sapiens
  misc_RNA (1)...(19): siRNA sense strand
aagaagaggaagaaggaga

SEQ ID NO: 2554323 - RNA, 19 nt, Homo sapiens
  misc_RNA (1)...(19): siRNA sense strand
ugauaaggaucgaggggaa

SEQ ID NO: 2554324 - RNA, 19 nt, Homo sapiens
  misc_RNA (1)...(19): siRNA sense strand
uggaagaagaagaagaaga

SEQ ID NO: 2554325 - RNA, 19 nt, Homo sapiens
  misc_RNA (1)...(19): siRNA sense strand
gccaaagaggagacggaaa

SEQ ID NO: 2554326 - RNA, 19 nt, Homo sapiens
  misc_RNA (1)...(19): siRNA sense strand
aggaaauggaagaagaaga

SEQ ID NO: 2554327 - RNA, 19 nt, Homo sapiens
  misc_RNA (1)...(19): siRNA sense strand
ggaagaacaucgagagcac

SEQ ID NO: 2554328 - RNA, 19 nt, Homo sapiens
  misc_RNA (1)...(19): siRNA sense strand
uggaauuggcugaggacau

SEQ ID NO: 2554329 - RNA, 19 nt, Homo sapiens
  misc_RNA (1)...(19): siRNA sense strand
aggaggaaauggaagaaga

SEQ ID NO: 2554330 - RNA, 19 nt, Homo sapiens
  misc_RNA (1)...(19): siRNA sense strand
ggaaaauuaaggagcuaaa

SEQ ID NO: 2554331 - RNA, 19 nt, Homo sapiens
  misc_RNA (1)...(19): siRNA sense strand
aggcauaaauuguggccca

SEQ ID NO: 2554332 - RNA, 19 nt, Homo sapiens
  misc_RNA (1)...(19): siRNA sense strand
gcuuaagaaccaugaugaa

SEQ ID NO: 2554333 - RNA, 19 nt, Homo sapiens
  misc_RNA (1)...(19): siRNA sense strand
agaagaaauccaaggcuau

SEQ ID NO: 2554334 - RNA, 19 nt, Homo sapiens
  misc_RNA (1)...(19): siRNA sense strand
agaaggagaagcaggagaa

SEQ ID NO: 2554335 - RNA, 19 nt, Homo sapiens
  misc_RNA (1)...(19): siRNA sense strand
uggaaauucaugagccuaa

SEQ ID NO: 2554336 - RNA, 19 nt, Homo sapiens
  misc_RNA (1)...(19): siRNA sense strand
ggaagaaggagaagcagga

SEQ ID NO: 2554337 - RNA, 19 nt, Homo sapiens
  misc_RNA (1)...(19): siRNA sense strand
ugcagaagccagagggauu

SEQ ID NO: 2554338 - RNA, 19 nt, Homo sapiens
  misc_RNA (1)...(19): siRNA sense strand
aggcugagauggaagaaca

SEQ ID NO: 2554339 - RNA, 19 nt, Homo sapiens
  misc_RNA (1)...(19): siRNA sense strand
cugaacagaagguggagua

SEQ ID NO: 2554340 - RNA, 19 nt, Homo sapiens
  misc_RNA (1)...(19): siRNA sense strand
cagcucaggaggaggaaau

SEQ ID NO: 2554341 - RNA, 19 nt, Homo sapiens
  misc_RNA (1)...(19): siRNA sense strand
agaagaggaagaaggagaa

SEQ ID NO: 2554342 - RNA, 19 nt, Homo sapiens
  misc_RNA (1)...(19): siRNA sense strand
aggagaagcaggagaagca

SEQ ID NO: 2554343 - RNA, 19 nt, Homo sapiens
  misc_RNA (1)...(19): siRNA sense strand
gugcagaggaguagcuuga

SEQ ID NO: 2554344 - RNA, 19 nt, Homo sapiens
  misc_RNA (1)...(19): siRNA sense strand
gugacguggugcuggacaa

SEQ ID NO: 2554345 - RNA, 19 nt, Homo sapiens
  misc_RNA (1)...(19): siRNA sense strand
uguuaaugaccgaagauau

SEQ ID NO: 2554346 - RNA, 19 nt, Homo sapiens
  misc_RNA (1)...(19): siRNA sense strand
acugaacaaagcagagaaa

SEQ ID NO: 2554347 - RNA, 19 nt, Homo sapiens
  misc_RNA (1)...(19): siRNA sense strand
agaaggaggcuguuggaga

SEQ ID NO: 2554348 - RNA, 19 nt, Homo sapiens
  misc_RNA (1)...(19): siRNA sense strand
uggcugaggacauggaaau

SEQ ID NO: 2554349 - RNA, 19 nt, Homo sapiens
  misc_RNA (1)...(19): siRNA sense strand
aggaggaggaaauggaaga

SEQ ID NO: 2554350 - RNA, 19 nt, Homo sapiens
  misc_RNA (1)...(19): siRNA sense strand
acucaaaggaagacaaaau

SEQ ID NO: 2554351 - RNA, 19 nt, Homo sapiens
  misc_RNA (1)...(19): siRNA sense strand
ccacuagacuacaaggcau

SEQ ID NO: 2554352 - RNA, 19 nt, Homo sapiens
  misc_RNA (1)...(19): siRNA sense strand
ugaaggaagagcuggaaga

SEQ ID NO: 2554353 - RNA, 19 nt, Homo sapiens
  misc_RNA (1)...(19): siRNA sense strand
ggagaagcugagagugaga

SEQ ID NO: 2554354 - RNA, 19 nt, Homo sapiens
  misc_RNA (1)...(19): siRNA sense strand
gagaaagccuggaaaccca

SEQ ID NO: 2554355 - RNA, 19 nt, Homo sapiens
  misc_RNA (1)...(19): siRNA sense strand
ugagaaagacaaagaugau

SEQ ID NO: 2554356 - RNA, 19 nt, Homo sapiens
  misc_RNA (1)...(19): siRNA sense strand
agaaaggaggagaggaacu

SEQ ID NO: 2554357 - RNA, 19 nt, Homo sapiens
  misc_RNA (1)...(19): siRNA sense strand
cggcaguaccagaggugga

SEQ ID NO: 2554358 - RNA, 19 nt, Homo sapiens
  misc_RNA (1)...(19): siRNA sense strand
cacagaaagcacagauaau

SEQ ID NO: 2554359 - RNA, 19 nt, Homo sapiens
  misc_RNA (1)...(19): siRNA sense strand
aagaagaagaagaagagga

SEQ ID NO: 2554360 - RNA, 19 nt, Homo sapiens
  misc_RNA (1)...(19): siRNA sense strand
ucgacuggauagaggccaa

SEQ ID NO: 2554361 - RNA, 19 nt, Homo sapiens
  misc_RNA (1)...(19): siRNA sense strand
agaagcugagagugagaaa

SEQ ID NO: 2554362 - RNA, 19 nt, Homo sapiens
  misc_RNA (1)...(19): siRNA sense strand
uggucaaacugcuuaagaa

SEQ ID NO: 2554363 - RNA, 19 nt, Homo sapiens
  misc_RNA (1)...(19): siRNA sense strand
aaauggaagaagaagaaga

SEQ ID NO: 2554364 - RNA, 19 nt, Homo sapiens
  misc_RNA (1)...(19): siRNA sense strand
aauggaagaagaagaagaa

SEQ ID NO: 2554365 - RNA, 19 nt, Homo sapiens
  misc_RNA (1)...(19): siRNA sense strand
ccacaguguuaaugaccga

SEQ ID NO: 2554366 - RNA, 19 nt, Homo sapiens
  misc_RNA (1)...(19): siRNA sense strand
cacuagacuacaaggcaua

SEQ ID NO: 2554367 - RNA, 19 nt, Homo sapiens
  misc_RNA (1)...(19): siRNA sense strand
aagacaaagaugaugauga

SEQ ID NO: 2554368 - RNA, 19 nt, Homo sapiens
  misc_RNA (1)...(19): siRNA sense strand
ggaugaagcugcuacggca

SEQ ID NO: 2554369 - RNA, 19 nt, Homo sapiens
  misc_RNA (1)...(19): siRNA sense strand
ugaacaggcagcuggagaa

SEQ ID NO: 2554370 - RNA, 19 nt, Homo sapiens
  misc_RNA (1)...(19): siRNA sense strand
agaagaagaggaagaagga

SEQ ID NO: 2554371 - RNA, 19 nt, Homo sapiens
  misc_RNA (1)...(19): siRNA sense strand
agauguuaacagaggcaau

SEQ ID NO: 2554372 - RNA, 19 nt, Homo sapiens
  misc_RNA (1)...(19): siRNA sense strand
gcucaccaccauuggcaaa

SEQ ID NO: 2554373 - RNA, 19 nt, Homo sapiens
  misc_RNA (1)...(19): siRNA sense strand
acgaggacguggugaagga

SEQ ID NO: 2554374 - RNA, 19 nt, Homo sapiens
  misc_RNA (1)...(19): siRNA sense strand
agccagaggagcaggccaa

SEQ ID NO: 2554375 - RNA, 19 nt, Homo sapiens
  misc_RNA (1)...(19): siRNA sense strand
cugaggaggaguuagagaa

SEQ ID NO: 2554376 - RNA, 19 nt, Homo sapiens
  misc_RNA (1)...(19): siRNA sense strand
agaggaagaaggagaagca

SEQ ID NO: 2554377 - RNA, 19 nt, Homo sapiens
  misc_RNA (1)...(19): siRNA sense strand
gcagaugagaccugggacu

SEQ ID NO: 2554378 - RNA, 19 nt, Homo sapiens
  misc_RNA (1)...(19): siRNA sense strand
gugccaaagaggagacgga

SEQ ID NO: 2554379 - RNA, 19 nt, Homo sapiens
  misc_RNA (1)...(19): siRNA sense strand
ccgaggagcugaacaggca

SEQ ID NO: 2554380 - RNA, 19 nt, Homo sapiens
  misc_RNA (1)...(19): siRNA sense strand
aggaggagucugaccacaa

SEQ ID NO: 2554381 - RNA, 19 nt, Homo sapiens
  misc_RNA (1)...(19): siRNA sense strand
ggaaggaauuucuaccuga

SEQ ID NO: 2554382 - RNA, 19 nt, Homo sapiens
  misc_RNA (1)...(19): siRNA sense strand
cugaaggagggcagcagua

SEQ ID NO: 2554383 - RNA, 19 nt, Homo sapiens
  misc_RNA (1)...(19): siRNA sense strand
gagaagaaauccaaggcua

SEQ ID NO: 2554384 - RNA, 19 nt, Homo sapiens
  misc_RNA (1)...(19): siRNA sense strand
cgagaaagcuggagaccga

SEQ ID NO: 2554385 - RNA, 19 nt, Homo sapiens
  misc_RNA (1)...(19): siRNA sense strand
aggaggaguuagagaagaa

SEQ ID NO: 2554386 - RNA, 19 nt, Homo sapiens
  misc_RNA (1)...(19): siRNA sense strand
aggcuaucauugaggaaua

SEQ ID NO: 2554387 - RNA, 19 nt, Homo sapiens
  misc_RNA (1)...(19): siRNA sense strand
ccgagaacgaggcgagaaa

SEQ ID NO: 2554388 - RNA, 19 nt, Homo sapiens
  misc_RNA (1)...(19): siRNA sense strand
ccaaagaggagacggaaaa

SEQ ID NO: 2554389 - RNA, 19 nt, Homo sapiens
  misc_RNA (1)...(19): siRNA sense strand
aagaagaggaagaaggaga

SEQ ID NO: 2554390 - RNA, 19 nt, Homo sapiens
  misc_RNA (1)...(19): siRNA sense strand
ugauaaggaucgaggggaa

SEQ ID NO: 2554391 - RNA, 19 nt, Homo sapiens
  misc_RNA (1)...(19): siRNA sense strand
uggaagaagaagaagaaga

SEQ ID NO: 2554392 - RNA, 19 nt, Homo sapiens
  misc_RNA (1)...(19): siRNA sense strand
gccaaagaggagacggaaa

SEQ ID NO: 2554393 - RNA, 19 nt, Homo sapiens
  misc_RNA (1)...(19): siRNA sense strand
aggaaauggaagaagaaga

SEQ ID NO: 2554394 - RNA, 19 nt, Homo sapiens
  misc_RNA (1)...(19): siRNA sense strand
ggaagaacaucgagagcac

SEQ ID NO: 2554395 - RNA, 19 nt, Homo sapiens
  misc_RNA (1)...(19): siRNA sense strand
uggaauuggcugaggacau

SEQ ID NO: 2554396 - RNA, 19 nt, Homo sapiens
  misc_RNA (1)...(19): siRNA sense strand
aggaggaaauggaagaaga

SEQ ID NO: 2554397 - RNA, 19 nt, Homo sapiens
  misc_RNA (1)...(19): siRNA sense strand
ggaaaauuaaggagcuaaa

SEQ ID NO: 2554398 - RNA, 19 nt, Homo sapiens
  misc_RNA (1)...(19): siRNA sense strand
aggcauaaauuguggccca

SEQ ID NO: 2554399 - RNA, 19 nt, Homo sapiens
  misc_RNA (1)...(19): siRNA sense strand
gcuuaagaaccaugaugaa

SEQ ID NO: 2554400 - RNA, 19 nt, Homo sapiens
  misc_RNA (1)...(19): siRNA sense strand
agaagaaauccaaggcuau

SEQ ID NO: 2554401 - RNA, 19 nt, Homo sapiens
  misc_RNA (1)...(19): siRNA sense strand
agaaggagaagcaggagaa

SEQ ID NO: 2554402 - RNA, 19 nt, Homo sapiens
  misc_RNA (1)...(19): siRNA sense strand
uggaaauucaugagccuaa

SEQ ID NO: 2554403 - RNA, 19 nt, Homo sapiens
  misc_RNA (1)...(19): siRNA sense strand
ggaagaaggagaagcagga

SEQ ID NO: 2554404 - RNA, 19 nt, Homo sapiens
  misc_RNA (1)...(19): siRNA sense strand
ugcagaagccagagggauu

SEQ ID NO: 2554405 - RNA, 19 nt, Homo sapiens
  misc_RNA (1)...(19): siRNA sense strand
aggcugagauggaagaaca

SEQ ID NO: 2554406 - RNA, 19 nt, Homo sapiens
  misc_RNA (1)...(19): siRNA sense strand
cugaacagaagguggagua

SEQ ID NO: 2554407 - RNA, 19 nt, Homo sapiens
  misc_RNA (1)...(19): siRNA sense strand
cagcucaggaggaggaaau

SEQ ID NO: 2554408 - RNA, 19 nt, Homo sapiens
  misc_RNA (1)...(19): siRNA sense strand
agaagaggaagaaggagaa

SEQ ID NO: 2554409 - RNA, 19 nt, Homo sapiens
  misc_RNA (1)...(19): siRNA sense strand
aggagaagcaggagaagca

SEQ ID NO: 2554410 - RNA, 19 nt, Homo sapiens
  misc_RNA (1)...(19): siRNA sense strand
gugcagaggaguagcuuga

SEQ ID NO: 2554411 - RNA, 19 nt, Homo sapiens
  misc_RNA (1)...(19): siRNA sense strand
gugacguggugcuggacaa

SEQ ID NO: 2554412 - RNA, 19 nt, Homo sapiens
  misc_RNA (1)...(19): siRNA sense strand
uguuaaugaccgaagauau

SEQ ID NO: 2554413 - RNA, 19 nt, Homo sapiens
  misc_RNA (1)...(19): siRNA sense strand
acugaacaaagcagagaaa

SEQ ID NO: 2554414 - RNA, 19 nt, Homo sapiens
  misc_RNA (1)...(19): siRNA sense strand
agaaggaggcuguuggaga

SEQ ID NO: 2554415 - RNA, 19 nt, Homo sapiens
  misc_RNA (1)...(19): siRNA sense strand
uggcugaggacauggaaau

SEQ ID NO: 2554416 - RNA, 19 nt, Homo sapiens
  misc_RNA (1)...(19): siRNA sense strand
aggaggaggaaauggaaga

SEQ ID NO: 2554417 - RNA, 19 nt, Homo sapiens
  misc_RNA (1)...(19): siRNA sense strand
acucaaaggaagacaaaau

SEQ ID NO: 2554418 - RNA, 19 nt, Homo sapiens
  misc_RNA (1)...(19): siRNA sense strand
ccacuagacuacaaggcau

SEQ ID NO: 2554419 - RNA, 19 nt, Homo sapiens
  misc_RNA (1)...(19): siRNA sense strand
ugaaggaagagcuggaaga

SEQ ID NO: 2554420 - RNA, 19 nt, Homo sapiens
  misc_RNA (1)...(19): siRNA sense strand
ggagaagcugagagugaga

SEQ ID NO: 2554421 - RNA, 19 nt, Homo sapiens
  misc_RNA (1)...(19): siRNA sense strand
gagaaagccuggaaaccca

SEQ ID NO: 2554422 - RNA, 19 nt, Homo sapiens
  misc_RNA (1)...(19): siRNA sense strand
ugagaaagacaaagaugau

SEQ ID NO: 2554423 - RNA, 19 nt, Homo sapiens
  misc_RNA (1)...(19): siRNA sense strand
agaaaggaggagaggaacu

SEQ ID NO: 2554424 - RNA, 19 nt, Homo sapiens
  misc_RNA (1)...(19): siRNA sense strand
cggcaguaccagaggugga

SEQ ID NO: 2554425 - RNA, 19 nt, Homo sapiens
  misc_RNA (1)...(19): siRNA sense strand
cacagaaagcacagauaau

SEQ ID NO: 2554426 - RNA, 19 nt, Homo sapiens
  misc_RNA (1)...(19): siRNA sense strand
aagaagaagaagaagagga

SEQ ID NO: 2554427 - RNA, 19 nt, Homo sapiens
  misc_RNA (1)...(19): siRNA sense strand
ucgacuggauagaggccaa

SEQ ID NO: 2554428 - RNA, 19 nt, Homo sapiens
  misc_RNA (1)...(19): siRNA sense strand
agaagcugagagugagaaa

SEQ ID NO: 2554429 - RNA, 19 nt, Homo sapiens
  misc_RNA (1)...(19): siRNA sense strand
uggucaaacugcuuaagaa

SEQ ID NO: 2554430 - RNA, 19 nt, Homo sapiens
  misc_RNA (1)...(19): siRNA sense strand
aaauggaagaagaagaaga

SEQ ID NO: 2554431 - RNA, 19 nt, Homo sapiens
  misc_RNA (1)...(19): siRNA sense strand
aauggaagaagaagaagaa

SEQ ID NO: 2554432 - RNA, 19 nt, Homo sapiens
  misc_RNA (1)...(19): siRNA sense strand
ccacaguguuaaugaccga

SEQ ID NO: 2554433 - RNA, 19 nt, Homo sapiens
  misc_RNA (1)...(19): siRNA sense strand
aaaccaaggaggaaaggau

SEQ ID NO: 2554434 - RNA, 19 nt, Homo sapiens
  misc_RNA (1)...(19): siRNA sense strand
cacuagacuacaaggcaua

SEQ ID NO: 2554435 - RNA, 19 nt, Homo sapiens
  misc_RNA (1)...(19): siRNA sense strand
aagacaaagaugaugauga

SEQ ID NO: 2554436 - RNA, 19 nt, Homo sapiens
  misc_RNA (1)...(19): siRNA sense strand
ggaugaagcugcuacggca

SEQ ID NO: 2554437 - RNA, 19 nt, Homo sapiens
  misc_RNA (1)...(19): siRNA sense strand
ugaacaggcagcuggagaa

SEQ ID NO: 2554438 - RNA, 19 nt, Homo sapiens
  misc_RNA (1)...(19): siRNA sense strand
agaagaagaggaagaagga

SEQ ID NO: 2554439 - RNA, 19 nt, Homo sapiens
  misc_RNA (1)...(19): siRNA sense strand
agauguuaacagaggcaau

SEQ ID NO: 2554440 - RNA, 19 nt, Homo sapiens
  misc_RNA (1)...(19): siRNA sense strand
gcucaccaccauuggcaaa

SEQ ID NO: 2554441 - RNA, 19 nt, Homo sapiens
  misc_RNA (1)...(19): siRNA sense strand
acgaggacguggugaagga

SEQ ID NO: 2554442 - RNA, 19 nt, Homo sapiens
  misc_RNA (1)...(19): siRNA sense strand
agccagaggagcaggccaa

SEQ ID NO: 2554443 - RNA, 19 nt, Homo sapiens
  misc_RNA (1)...(19): siRNA sense strand
gauccaaaccaaggaggaa

SEQ ID NO: 2554444 - RNA, 19 nt, Homo sapiens
  misc_RNA (1)...(19): siRNA sense strand
cugaggaggaguuagagaa

SEQ ID NO: 2554445 - RNA, 19 nt, Homo sapiens
  misc_RNA (1)...(19): siRNA sense strand
agaggaagaaggagaagca

SEQ ID NO: 2554446 - RNA, 19 nt, Homo sapiens
  misc_RNA (1)...(19): siRNA sense strand
gcagaugagaccugggacu

SEQ ID NO: 2554447 - RNA, 19 nt, Homo sapiens
  misc_RNA (1)...(19): siRNA sense strand
gugccaaagaggagacgga

SEQ ID NO: 2554448 - RNA, 19 nt, Homo sapiens
  misc_RNA (1)...(19): siRNA sense strand
ccgaggagcugaacaggca

SEQ ID NO: 2554449 - RNA, 19 nt, Homo sapiens
  misc_RNA (1)...(19): siRNA sense strand
gagaagaaauccaaggcua

SEQ ID NO: 2554450 - RNA, 19 nt, Homo sapiens
  misc_RNA (1)...(19): siRNA sense strand
cgagaaagcuggagaccga

SEQ ID NO: 2554451 - RNA, 19 nt, Homo sapiens
  misc_RNA (1)...(19): siRNA sense strand
aggaggaguuagagaagaa

SEQ ID NO: 2554452 - RNA, 19 nt, Homo sapiens
  misc_RNA (1)...(19): siRNA sense strand
aggcuaucauugaggaaua

SEQ ID NO: 2554453 - RNA, 19 nt, Homo sapiens
  misc_RNA (1)...(19): siRNA sense strand
ccgagaacgaggcgagaaa

SEQ ID NO: 2554454 - RNA, 19 nt, Homo sapiens
  misc_RNA (1)...(19): siRNA sense strand
ccaaagaggagacggaaaa

SEQ ID NO: 2554455 - RNA, 19 nt, Homo sapiens
  misc_RNA (1)...(19): siRNA sense strand
aagaagaggaagaaggaga

SEQ ID NO: 2554456 - RNA, 19 nt, Homo sapiens
  misc_RNA (1)...(19): siRNA sense strand
ugauaaggaucgaggggaa

SEQ ID NO: 2554457 - RNA, 19 nt, Homo sapiens
  misc_RNA (1)...(19): siRNA sense strand
uggaagaagaagaagaaga

SEQ ID NO: 2554458 - RNA, 19 nt, Homo sapiens
  misc_RNA (1)...(19): siRNA sense strand
gccaaagaggagacggaaa

SEQ ID NO: 2554459 - RNA, 19 nt, Homo sapiens
  misc_RNA (1)...(19): siRNA sense strand
aggaaauggaagaagaaga

SEQ ID NO: 2554460 - RNA, 19 nt, Homo sapiens
  misc_RNA (1)...(19): siRNA sense strand
ggaagaacaucgagagcac

SEQ ID NO: 2554461 - RNA, 19 nt, Homo sapiens
  misc_RNA (1)...(19): siRNA sense strand
uggaauuggcugaggacau

SEQ ID NO: 2554462 - RNA, 19 nt, Homo sapiens
  misc_RNA (1)...(19): siRNA sense strand
aggaggaaauggaagaaga

SEQ ID NO: 2554463 - RNA, 19 nt, Homo sapiens
  misc_RNA (1)...(19): siRNA sense strand
ggaaaauuaaggagcuaaa

SEQ ID NO: 2554464 - RNA, 19 nt, Homo sapiens
  misc_RNA (1)...(19): siRNA sense strand
aggcauaaauuguggccca

SEQ ID NO: 2554465 - RNA, 19 nt, Homo sapiens
  misc_RNA (1)...(19): siRNA sense strand
gcuuaagaaccaugaugaa

SEQ ID NO: 2554466 - RNA, 19 nt, Homo sapiens
  misc_RNA (1)...(19): siRNA sense strand
agaagaaauccaaggcuau

SEQ ID NO: 2554467 - RNA, 19 nt, Homo sapiens
  misc_RNA (1)...(19): siRNA sense strand
agaaggagaagcaggagaa

SEQ ID NO: 2554468 - RNA, 19 nt, Homo sapiens
  misc_RNA (1)...(19): siRNA sense strand
uggaaauucaugagccuaa

SEQ ID NO: 2554469 - RNA, 19 nt, Homo sapiens
  misc_RNA (1)...(19): siRNA sense strand
ggaagaaggagaagcagga

SEQ ID NO: 2554470 - RNA, 19 nt, Homo sapiens
  misc_RNA (1)...(19): siRNA sense strand
ugcagaagccagagggauu

SEQ ID NO: 2554471 - RNA, 19 nt, Homo sapiens
  misc_RNA (1)...(19): siRNA sense strand
aggcugagauggaagaaca

SEQ ID NO: 2554472 - RNA, 19 nt, Homo sapiens
  misc_RNA (1)...(19): siRNA sense strand
cugaacagaagguggagua

SEQ ID NO: 2554473 - RNA, 19 nt, Homo sapiens
  misc_RNA (1)...(19): siRNA sense strand
cagcucaggaggaggaaau

SEQ ID NO: 2554474 - RNA, 19 nt, Homo sapiens
  misc_RNA (1)...(19): siRNA sense strand
agaagaggaagaaggagaa

SEQ ID NO: 2554475 - RNA, 19 nt, Homo sapiens
  misc_RNA (1)...(19): siRNA sense strand
aggagaagcaggagaagca

SEQ ID NO: 2554476 - RNA, 19 nt, Homo sapiens
  misc_RNA (1)...(19): siRNA sense strand
gugcagaggaguagcuuga

SEQ ID NO: 2554477 - RNA, 19 nt, Homo sapiens
  misc_RNA (1)...(19): siRNA sense strand
gugacguggugcuggacaa

SEQ ID NO: 2554478 - RNA, 19 nt, Homo sapiens
  misc_RNA (1)...(19): siRNA sense strand
uguuaaugaccgaagauau

SEQ ID NO: 2554479 - RNA, 19 nt, Homo sapiens
  misc_RNA (1)...(19): siRNA sense strand
acugaacaaagcagagaaa

SEQ ID NO: 2554480 - RNA, 19 nt, Homo sapiens
  misc_RNA (1)...(19): siRNA sense strand
agaaggaggcuguuggaga

SEQ ID NO: 2554481 - RNA, 19 nt, Homo sapiens
  misc_RNA (1)...(19): siRNA sense strand
uggcugaggacauggaaau

SEQ ID NO: 2554482 - RNA, 19 nt, Homo sapiens
  misc_RNA (1)...(19): siRNA sense strand
aggaggaggaaauggaaga

SEQ ID NO: 2554483 - RNA, 19 nt, Homo sapiens
  misc_RNA (1)...(19): siRNA sense strand
acucaaaggaagacaaaau

SEQ ID NO: 2554484 - RNA, 19 nt, Homo sapiens
  misc_RNA (1)...(19): siRNA sense strand
ccacuagacuacaaggcau

SEQ ID NO: 2554485 - RNA, 19 nt, Homo sapiens
  misc_RNA (1)...(19): siRNA sense strand
ugaaggaagagcuggaaga

SEQ ID NO: 2554486 - RNA, 19 nt, Homo sapiens
  misc_RNA (1)...(19): siRNA sense strand
ggagaagcugagagugaga

SEQ ID NO: 2554487 - RNA, 19 nt, Homo sapiens
  misc_RNA (1)...(19): siRNA sense strand
gagaaagccuggaaaccca

SEQ ID NO: 2554488 - RNA, 19 nt, Homo sapiens
  misc_RNA (1)...(19): siRNA sense strand
ugagaaagacaaagaugau

SEQ ID NO: 2554489 - RNA, 19 nt, Homo sapiens
  misc_RNA (1)...(19): siRNA sense strand
agaaaggaggagaggaacu

SEQ ID NO: 2554490 - RNA, 19 nt, Homo sapiens
  misc_RNA (1)...(19): siRNA sense strand
cggcaguaccagaggugga

SEQ ID NO: 2554491 - RNA, 19 nt, Homo sapiens
  misc_RNA (1)...(19): siRNA sense strand
cacagaaagcacagauaau

SEQ ID NO: 2554492 - RNA, 19 nt, Homo sapiens
  misc_RNA (1)...(19): siRNA sense strand
aagaagaagaagaagagga

SEQ ID NO: 2554493 - RNA, 19 nt, Homo sapiens
  misc_RNA (1)...(19): siRNA sense strand
ucgacuggauagaggccaa

SEQ ID NO: 2554494 - RNA, 19 nt, Homo sapiens
  misc_RNA (1)...(19): siRNA sense strand
agaagcugagagugagaaa

SEQ ID NO: 2554495 - RNA, 19 nt, Homo sapiens
  misc_RNA (1)...(19): siRNA sense strand
uggucaaacugcuuaagaa

SEQ ID NO: 2554496 - RNA, 19 nt, Homo sapiens
  misc_RNA (1)...(19): siRNA sense strand
aaauggaagaagaagaaga

SEQ ID NO: 2554497 - RNA, 19 nt, Homo sapiens
  misc_RNA (1)...(19): siRNA sense strand
aauggaagaagaagaagaa

SEQ ID NO: 2554498 - RNA, 19 nt, Homo sapiens
  misc_RNA (1)...(19): siRNA sense strand
ccacaguguuaaugaccga

SEQ ID NO: 2554499 - RNA, 19 nt, Homo sapiens
  misc_RNA (1)...(19): siRNA sense strand
aaaccaaggaggaaaggau

SEQ ID NO: 2554500 - RNA, 19 nt, Homo sapiens
  misc_RNA (1)...(19): siRNA sense strand
cacuagacuacaaggcaua

SEQ ID NO: 2554501 - RNA, 19 nt, Homo sapiens
  misc_RNA (1)...(19): siRNA sense strand
aagacaaagaugaugauga

SEQ ID NO: 2554502 - RNA, 19 nt, Homo sapiens
  misc_RNA (1)...(19): siRNA sense strand
ggaugaagcugcuacggca

SEQ ID NO: 2554503 - RNA, 19 nt, Homo sapiens
  misc_RNA (1)...(19): siRNA sense strand
ugaacaggcagcuggagaa

SEQ ID NO: 2554504 - RNA, 19 nt, Homo sapiens
  misc_RNA (1)...(19): siRNA sense strand
agaagaagaggaagaagga

SEQ ID NO: 2554505 - RNA, 19 nt, Homo sapiens
  misc_RNA (1)...(19): siRNA sense strand
agauguuaacagaggcaau

SEQ ID NO: 2554506 - RNA, 19 nt, Homo sapiens
  misc_RNA (1)...(19): siRNA sense strand
gcucaccaccauuggcaaa

SEQ ID NO: 2554507 - RNA, 19 nt, Homo sapiens
  misc_RNA (1)...(19): siRNA sense strand
acgaggacguggugaagga

SEQ ID NO: 2554508 - RNA, 19 nt, Homo sapiens
  misc_RNA (1)...(19): siRNA sense strand
agccagaggagcaggccaa

SEQ ID NO: 2554509 - RNA, 19 nt, Homo sapiens
  misc_RNA (1)...(19): siRNA sense strand
gauccaaaccaaggaggaa

SEQ ID NO: 2554510 - RNA, 19 nt, Homo sapiens
  misc_RNA (1)...(19): siRNA sense strand
cugaggaggaguuagagaa

SEQ ID NO: 2554511 - RNA, 19 nt, Homo sapiens
  misc_RNA (1)...(19): siRNA sense strand
agaggaagaaggagaagca

SEQ ID NO: 2554512 - RNA, 19 nt, Homo sapiens
  misc_RNA (1)...(19): siRNA sense strand
gcagaugagaccugggacu

SEQ ID NO: 2554513 - RNA, 19 nt, Homo sapiens
  misc_RNA (1)...(19): siRNA sense strand
gugccaaagaggagacgga

SEQ ID NO: 2554514 - RNA, 19 nt, Homo sapiens
  misc_RNA (1)...(19): siRNA sense strand
ccgaggagcugaacaggca

SEQ ID NO: 2554515 - RNA, 19 nt, Homo sapiens
  misc_RNA (1)...(19): siRNA sense strand
gagaagaaauccaaggcua

SEQ ID NO: 2554516 - RNA, 19 nt, Homo sapiens
  misc_RNA (1)...(19): siRNA sense strand
cgagaaagcuggagaccga

SEQ ID NO: 2554517 - RNA, 19 nt, Homo sapiens
  misc_RNA (1)...(19): siRNA sense strand
aggaggaguuagagaagaa

SEQ ID NO: 2554518 - RNA, 19 nt, Homo sapiens
  misc_RNA (1)...(19): siRNA sense strand
aggcuaucauugaggaaua

SEQ ID NO: 2554519 - RNA, 19 nt, Homo sapiens
  misc_RNA (1)...(19): siRNA sense strand
ccgagaacgaggcgagaaa

SEQ ID NO: 2554520 - RNA, 19 nt, Homo sapiens
  misc_RNA (1)...(19): siRNA sense strand
ccaaagaggagacggaaaa

SEQ ID NO: 2554521 - RNA, 19 nt, Homo sapiens
  misc_RNA (1)...(19): siRNA sense strand
aagaagaggaagaaggaga

SEQ ID NO: 2554522 - RNA, 19 nt, Homo sapiens
  misc_RNA (1)...(19): siRNA sense strand
ugauaaggaucgaggggaa

SEQ ID NO: 2554523 - RNA, 19 nt, Homo sapiens
  misc_RNA (1)...(19): siRNA sense strand
uggaagaagaagaagaaga

SEQ ID NO: 2554524 - RNA, 19 nt, Homo sapiens
  misc_RNA (1)...(19): siRNA sense strand
gccaaagaggagacggaaa

SEQ ID NO: 2554525 - RNA, 19 nt, Homo sapiens
  misc_RNA (1)...(19): siRNA sense strand
aggaaauggaagaagaaga

SEQ ID NO: 2554526 - RNA, 19 nt, Homo sapiens
  misc_RNA (1)...(19): siRNA sense strand
ggaagaacaucgagagcac

SEQ ID NO: 2554527 - RNA, 19 nt, Homo sapiens
  misc_RNA (1)...(19): siRNA sense strand
uggaauuggcugaggacau

SEQ ID NO: 2554528 - RNA, 19 nt, Homo sapiens
  misc_RNA (1)...(19): siRNA sense strand
aggaggaaauggaagaaga

SEQ ID NO: 2554529 - RNA, 19 nt, Homo sapiens
  misc_RNA (1)...(19): siRNA sense strand
ggaaaauuaaggagcuaaa

SEQ ID NO: 2554530 - RNA, 19 nt, Homo sapiens
  misc_RNA (1)...(19): siRNA sense strand
aggcauaaauuguggccca

SEQ ID NO: 2554531 - RNA, 19 nt, Homo sapiens
  misc_RNA (1)...(19): siRNA sense strand
gcuuaagaaccaugaugaa

SEQ ID NO: 2554532 - RNA, 19 nt, Homo sapiens
  misc_RNA (1)...(19): siRNA sense strand
agaagaaauccaaggcuau

SEQ ID NO: 2554533 - RNA, 19 nt, Homo sapiens
  misc_RNA (1)...(19): siRNA sense strand
agaaggagaagcaggagaa

SEQ ID NO: 2554534 - RNA, 19 nt, Homo sapiens
  misc_RNA (1)...(19): siRNA sense strand
uggaaauucaugagccuaa

SEQ ID NO: 2554535 - RNA, 19 nt, Homo sapiens
  misc_RNA (1)...(19): siRNA sense strand
ggaagaaggagaagcagga

SEQ ID NO: 2554536 - RNA, 19 nt, Homo sapiens
  misc_RNA (1)...(19): siRNA sense strand
ugcagaagccagagggauu

SEQ ID NO: 2554537 - RNA, 19 nt, Homo sapiens
  misc_RNA (1)...(19): siRNA sense strand
aggcugagauggaagaaca

SEQ ID NO: 2554538 - RNA, 19 nt, Homo sapiens
  misc_RNA (1)...(19): siRNA sense strand
cugaacagaagguggagua

SEQ ID NO: 2554539 - RNA, 19 nt, Homo sapiens
  misc_RNA (1)...(19): siRNA sense strand
cagcucaggaggaggaaau

SEQ ID NO: 2554540 - RNA, 19 nt, Homo sapiens
  misc_RNA (1)...(19): siRNA sense strand
agaagaggaagaaggagaa

SEQ ID NO: 2554541 - RNA, 19 nt, Homo sapiens
  misc_RNA (1)...(19): siRNA sense strand
aggagaagcaggagaagca

SEQ ID NO: 2554542 - RNA, 19 nt, Homo sapiens
  misc_RNA (1)...(19): siRNA sense strand
gugcagaggaguagcuuga

SEQ ID NO: 2554543 - RNA, 19 nt, Homo sapiens
  misc_RNA (1)...(19): siRNA sense strand
gugacguggugcuggacaa

SEQ ID NO: 2554544 - RNA, 19 nt, Homo sapiens
  misc_RNA (1)...(19): siRNA sense strand
uguuaaugaccgaagauau

SEQ ID NO: 2554545 - RNA, 19 nt, Homo sapiens
  misc_RNA (1)...(19): siRNA sense strand
acugaacaaagcagagaaa

SEQ ID NO: 2554546 - RNA, 19 nt, Homo sapiens
  misc_RNA (1)...(19): siRNA sense strand
agaaggaggcuguuggaga

SEQ ID NO: 2554547 - RNA, 19 nt, Homo sapiens
  misc_RNA (1)...(19): siRNA sense strand
uggcugaggacauggaaau

SEQ ID NO: 2554548 - RNA, 19 nt, Homo sapiens
  misc_RNA (1)...(19): siRNA sense strand
aggaggaggaaauggaaga

SEQ ID NO: 2554549 - RNA, 19 nt, Homo sapiens
  misc_RNA (1)...(19): siRNA sense strand
acucaaaggaagacaaaau

SEQ ID NO: 2554550 - RNA, 19 nt, Homo sapiens
  misc_RNA (1)...(19): siRNA sense strand
ccacuagacuacaaggcau

SEQ ID NO: 2554551 - RNA, 19 nt, Homo sapiens
  misc_RNA (1)...(19): siRNA sense strand
ugaaggaagagcuggaaga

SEQ ID NO: 2554552 - RNA, 19 nt, Homo sapiens
  misc_RNA (1)...(19): siRNA sense strand
ggagaagcugagagugaga

SEQ ID NO: 2554553 - RNA, 19 nt, Homo sapiens
  misc_RNA (1)...(19): siRNA sense strand
gagaaagccuggaaaccca

SEQ ID NO: 2554554 - RNA, 19 nt, Homo sapiens
  misc_RNA (1)...(19): siRNA sense strand
ugagaaagacaaagaugau

SEQ ID NO: 2554555 - RNA, 19 nt, Homo sapiens
  misc_RNA (1)...(19): siRNA sense strand
agaaaggaggagaggaacu

SEQ ID NO: 2554556 - RNA, 19 nt, Homo sapiens
  misc_RNA (1)...(19): siRNA sense strand
cggcaguaccagaggugga

SEQ ID NO: 2554557 - RNA, 19 nt, Homo sapiens
  misc_RNA (1)...(19): siRNA sense strand
cacagaaagcacagauaau

SEQ ID NO: 2554558 - RNA, 19 nt, Homo sapiens
  misc_RNA (1)...(19): siRNA sense strand
aagaagaagaagaagagga

SEQ ID NO: 2554559 - RNA, 19 nt, Homo sapiens
  misc_RNA (1)...(19): siRNA sense strand
ucgacuggauagaggccaa

SEQ ID NO: 2554560 - RNA, 19 nt, Homo sapiens
  misc_RNA (1)...(19): siRNA sense strand
agaagcugagagugagaaa

SEQ ID NO: 2554561 - RNA, 19 nt, Homo sapiens
  misc_RNA (1)...(19): siRNA sense strand
uggucaaacugcuuaagaa

SEQ ID NO: 2554562 - RNA, 19 nt, Homo sapiens
  misc_RNA (1)...(19): siRNA sense strand
aaauggaagaagaagaaga

SEQ ID NO: 2554563 - RNA, 19 nt, Homo sapiens
  misc_RNA (1)...(19): siRNA sense strand
aauggaagaagaagaagaa

SEQ ID NO: 2554564 - RNA, 19 nt, Homo sapiens
  misc_RNA (1)...(19): siRNA sense strand
ccacaguguuaaugaccga

SEQ ID NO: 2554565 - RNA, 19 nt, Homo sapiens
  misc_RNA (1)...(19): siRNA sense strand
aaaccaaggaggaaaggau

SEQ ID NO: 2554566 - RNA, 19 nt, Homo sapiens
  misc_RNA (1)...(19): siRNA sense strand
cacuagacuacaaggcaua

SEQ ID NO: 2554567 - RNA, 19 nt, Homo sapiens
  misc_RNA (1)...(19): siRNA sense strand
aagacaaagaugaugauga

SEQ ID NO: 2554568 - RNA, 19 nt, Homo sapiens
  misc_RNA (1)...(19): siRNA sense strand
ggaugaagcugcuacggca

SEQ ID NO: 2554569 - RNA, 19 nt, Homo sapiens
  misc_RNA (1)...(19): siRNA sense strand
ugaacaggcagcuggagaa

SEQ ID NO: 2554570 - RNA, 19 nt, Homo sapiens
  misc_RNA (1)...(19): siRNA sense strand
agaagaagaggaagaagga

SEQ ID NO: 2554571 - RNA, 19 nt, Homo sapiens
  misc_RNA (1)...(19): siRNA sense strand
agauguuaacagaggcaau

SEQ ID NO: 2554572 - RNA, 19 nt, Homo sapiens
  misc_RNA (1)...(19): siRNA sense strand
gcucaccaccauuggcaaa

SEQ ID NO: 2554573 - RNA, 19 nt, Homo sapiens
  misc_RNA (1)...(19): siRNA sense strand
acgaggacguggugaagga

SEQ ID NO: 2554574 - RNA, 19 nt, Homo sapiens
  misc_RNA (1)...(19): siRNA sense strand
agccagaggagcaggccaa

SEQ ID NO: 2554575 - RNA, 19 nt, Homo sapiens
  misc_RNA (1)...(19): siRNA sense strand
gauccaaaccaaggaggaa

SEQ ID NO: 2554576 - RNA, 19 nt, Homo sapiens
  misc_RNA (1)...(19): siRNA sense strand
cugaggaggaguuagagaa

SEQ ID NO: 2554577 - RNA, 19 nt, Homo sapiens
  misc_RNA (1)...(19): siRNA sense strand
agaggaagaaggagaagca

SEQ ID NO: 2554578 - RNA, 19 nt, Homo sapiens
  misc_RNA (1)...(19): siRNA sense strand
gcagaugagaccugggacu

SEQ ID NO: 2554579 - RNA, 19 nt, Homo sapiens
  misc_RNA (1)...(19): siRNA sense strand
gugccaaagaggagacgga

SEQ ID NO: 2554580 - RNA, 19 nt, Homo sapiens
  misc_RNA (1)...(19): siRNA sense strand
ccgaggagcugaacaggca

SEQ ID NO: 2554581 - RNA, 19 nt, Homo sapiens
  misc_RNA (1)...(19): siRNA sense strand
gagaagaaauccaaggcua

SEQ ID NO: 2554582 - RNA, 19 nt, Homo sapiens
  misc_RNA (1)...(19): siRNA sense strand
cgagaaagcuggagaccga

SEQ ID NO: 2554583 - RNA, 19 nt, Homo sapiens
  misc_RNA (1)...(19): siRNA sense strand
aggaggaguuagagaagaa

SEQ ID NO: 2554584 - RNA, 19 nt, Homo sapiens
  misc_RNA (1)...(19): siRNA sense strand
aggcuaucauugaggaaua

SEQ ID NO: 2554585 - RNA, 19 nt, Homo sapiens
  misc_RNA (1)...(19): siRNA sense strand
ccgagaacgaggcgagaaa

SEQ ID NO: 2554586 - RNA, 19 nt, Homo sapiens
  misc_RNA (1)...(19): siRNA sense strand
ccaaagaggagacggaaaa

SEQ ID NO: 2554587 - RNA, 19 nt, Homo sapiens
  misc_RNA (1)...(19): siRNA sense strand
aagaagaggaagaaggaga

SEQ ID NO: 2554588 - RNA, 19 nt, Homo sapiens
  misc_RNA (1)...(19): siRNA sense strand
ugauaaggaucgaggggaa

SEQ ID NO: 2554589 - RNA, 19 nt, Homo sapiens
  misc_RNA (1)...(19): siRNA sense strand
uggaagaagaagaagaaga

SEQ ID NO: 2554590 - RNA, 19 nt, Homo sapiens
  misc_RNA (1)...(19): siRNA sense strand
gccaaagaggagacggaaa

SEQ ID NO: 2554591 - RNA, 19 nt, Homo sapiens
  misc_RNA (1)...(19): siRNA sense strand
aggaaauggaagaagaaga

SEQ ID NO: 2554592 - RNA, 19 nt, Homo sapiens
  misc_RNA (1)...(19): siRNA sense strand
ggaagaacaucgagagcac

SEQ ID NO: 2554593 - RNA, 19 nt, Homo sapiens
  misc_RNA (1)...(19): siRNA sense strand
uggaauuggcugaggacau

SEQ ID NO: 2554594 - RNA, 19 nt, Homo sapiens
  misc_RNA (1)...(19): siRNA sense strand
aggaggaaauggaagaaga

SEQ ID NO: 2554595 - RNA, 19 nt, Homo sapiens
  misc_RNA (1)...(19): siRNA sense strand
ggaaaauuaaggagcuaaa

SEQ ID NO: 2554596 - RNA, 19 nt, Homo sapiens
  misc_RNA (1)...(19): siRNA sense strand
aggcauaaauuguggccca

SEQ ID NO: 2554597 - RNA, 19 nt, Homo sapiens
  misc_RNA (1)...(19): siRNA sense strand
gcuuaagaaccaugaugaa

SEQ ID NO: 2554598 - RNA, 19 nt, Homo sapiens
  misc_RNA (1)...(19): siRNA sense strand
agaagaaauccaaggcuau

SEQ ID NO: 2554599 - RNA, 19 nt, Homo sapiens
  misc_RNA (1)...(19): siRNA sense strand
agaaggagaagcaggagaa

SEQ ID NO: 2554600 - RNA, 19 nt, Homo sapiens
  misc_RNA (1)...(19): siRNA sense strand
uggaaauucaugagccuaa

SEQ ID NO: 2554601 - RNA, 19 nt, Homo sapiens
  misc_RNA (1)...(19): siRNA sense strand
ggaagaaggagaagcagga

SEQ ID NO: 2554602 - RNA, 19 nt, Homo sapiens
  misc_RNA (1)...(19): siRNA sense strand
ugcagaagccagagggauu

SEQ ID NO: 2554603 - RNA, 19 nt, Homo sapiens
  misc_RNA (1)...(19): siRNA sense strand
aggcugagauggaagaaca

SEQ ID NO: 2554604 - RNA, 19 nt, Homo sapiens
  misc_RNA (1)...(19): siRNA sense strand
cugaacagaagguggagua

SEQ ID NO: 2554605 - RNA, 19 nt, Homo sapiens
  misc_RNA (1)...(19): siRNA sense strand
cagcucaggaggaggaaau

SEQ ID NO: 2554606 - RNA, 19 nt, Homo sapiens
  misc_RNA (1)...(19): siRNA sense strand
agaagaggaagaaggagaa

SEQ ID NO: 2554607 - RNA, 19 nt, Homo sapiens
  misc_RNA (1)...(19): siRNA sense strand
aggagaagcaggagaagca

SEQ ID NO: 2554608 - RNA, 19 nt, Homo sapiens
  misc_RNA (1)...(19): siRNA sense strand
gugcagaggaguagcuuga

SEQ ID NO: 2554609 - RNA, 19 nt, Homo sapiens
  misc_RNA (1)...(19): siRNA sense strand
gugacguggugcuggacaa

SEQ ID NO: 2554610 - RNA, 19 nt, Homo sapiens
  misc_RNA (1)...(19): siRNA sense strand
uguuaaugaccgaagauau

SEQ ID NO: 2554611 - RNA, 19 nt, Homo sapiens
  misc_RNA (1)...(19): siRNA sense strand
acugaacaaagcagagaaa

SEQ ID NO: 2554612 - RNA, 19 nt, Homo sapiens
  misc_RNA (1)...(19): siRNA sense strand
agaaggaggcuguuggaga

SEQ ID NO: 2554613 - RNA, 19 nt, Homo sapiens
  misc_RNA (1)...(19): siRNA sense strand
uggcugaggacauggaaau

SEQ ID NO: 2554614 - RNA, 19 nt, Homo sapiens
  misc_RNA (1)...(19): siRNA sense strand
aggaggaggaaauggaaga

SEQ ID NO: 2554615 - RNA, 19 nt, Homo sapiens
  misc_RNA (1)...(19): siRNA sense strand
acucaaaggaagacaaaau

SEQ ID NO: 2554616 - RNA, 19 nt, Homo sapiens
  misc_RNA (1)...(19): siRNA sense strand
ccacuagacuacaaggcau

SEQ ID NO: 2554617 - RNA, 19 nt, Homo sapiens
  misc_RNA (1)...(19): siRNA sense strand
ugaaggaagagcuggaaga

SEQ ID NO: 2554618 - RNA, 19 nt, Homo sapiens
  misc_RNA (1)...(19): siRNA sense strand
ggagaagcugagagugaga

SEQ ID NO: 2554619 - RNA, 19 nt, Homo sapiens
  misc_RNA (1)...(19): siRNA sense strand
gagaaagccuggaaaccca

SEQ ID NO: 2554620 - RNA, 19 nt, Homo sapiens
  misc_RNA (1)...(19): siRNA sense strand
ugagaaagacaaagaugau

SEQ ID NO: 2554621 - RNA, 19 nt, Homo sapiens
  misc_RNA (1)...(19): siRNA sense strand
agaaaggaggagaggaacu

SEQ ID NO: 2554622 - RNA, 19 nt, Homo sapiens
  misc_RNA (1)...(19): siRNA sense strand
cggcaguaccagaggugga

SEQ ID NO: 2554623 - RNA, 19 nt, Homo sapiens
  misc_RNA (1)...(19): siRNA sense strand
cacagaaagcacagauaau

SEQ ID NO: 2554624 - RNA, 19 nt, Homo sapiens
  misc_RNA (1)...(19): siRNA sense strand
aagaagaagaagaagagga

SEQ ID NO: 2554625 - RNA, 19 nt, Homo sapiens
  misc_RNA (1)...(19): siRNA sense strand
ucgacuggauagaggccaa

SEQ ID NO: 2554626 - RNA, 19 nt, Homo sapiens
  misc_RNA (1)...(19): siRNA sense strand
agaagcugagagugagaaa

SEQ ID NO: 2554627 - RNA, 19 nt, Homo sapiens
  misc_RNA (1)...(19): siRNA sense strand
uggucaaacugcuuaagaa

SEQ ID NO: 2554628 - RNA, 19 nt, Homo sapiens
  misc_RNA (1)...(19): siRNA sense strand
aaauggaagaagaagaaga

SEQ ID NO: 2554629 - RNA, 19 nt, Homo sapiens
  misc_RNA (1)...(19): siRNA sense strand
aauggaagaagaagaagaa

SEQ ID NO: 2554630 - RNA, 19 nt, Homo sapiens
  misc_RNA (1)...(19): siRNA sense strand
ccacaguguuaaugaccga

SEQ ID NO: 2554631 - RNA, 19 nt, Homo sapiens
  misc_RNA (1)...(19): siRNA sense strand
aaaccaaggaggaaaggau

SEQ ID NO: 2554632 - RNA, 19 nt, Homo sapiens
  misc_RNA (1)...(19): siRNA sense strand
cacuagacuacaaggcaua

SEQ ID NO: 2554633 - RNA, 19 nt, Homo sapiens
  misc_RNA (1)...(19): siRNA sense strand
aagacaaagaugaugauga

SEQ ID NO: 2554634 - RNA, 19 nt, Homo sapiens
  misc_RNA (1)...(19): siRNA sense strand
ggaugaagcugcuacggca

SEQ ID NO: 2554635 - RNA, 19 nt, Homo sapiens
  misc_RNA (1)...(19): siRNA sense strand
ugaacaggcagcuggagaa

SEQ ID NO: 2554636 - RNA, 19 nt, Homo sapiens
  misc_RNA (1)...(19): siRNA sense strand
agaagaagaggaagaagga

SEQ ID NO: 2554637 - RNA, 19 nt, Homo sapiens
  misc_RNA (1)...(19): siRNA sense strand
agauguuaacagaggcaau

SEQ ID NO: 2554638 - RNA, 19 nt, Homo sapiens
  misc_RNA (1)...(19): siRNA sense strand
gcucaccaccauuggcaaa

SEQ ID NO: 2554639 - RNA, 19 nt, Homo sapiens
  misc_RNA (1)...(19): siRNA sense strand
acgaggacguggugaagga

SEQ ID NO: 2554640 - RNA, 19 nt, Homo sapiens
  misc_RNA (1)...(19): siRNA sense strand
agccagaggagcaggccaa

SEQ ID NO: 2554641 - RNA, 19 nt, Homo sapiens
  misc_RNA (1)...(19): siRNA sense strand
gauccaaaccaaggaggaa

SEQ ID NO: 2554642 - RNA, 19 nt, Homo sapiens
  misc_RNA (1)...(19): siRNA sense strand
cugaggaggaguuagagaa

SEQ ID NO: 2554643 - RNA, 19 nt, Homo sapiens
  misc_RNA (1)...(19): siRNA sense strand
agaggaagaaggagaagca

SEQ ID NO: 2554644 - RNA, 19 nt, Homo sapiens
  misc_RNA (1)...(19): siRNA sense strand
gcagaugagaccugggacu

SEQ ID NO: 2554645 - RNA, 19 nt, Homo sapiens
  misc_RNA (1)...(19): siRNA sense strand
gugccaaagaggagacgga

SEQ ID NO: 2554646 - RNA, 19 nt, Homo sapiens
  misc_RNA (1)...(19): siRNA sense strand
ccgaggagcugaacaggca

SEQ ID NO: 2554647 - RNA, 19 nt, Homo sapiens
  misc_RNA (1)...(19): siRNA sense strand
uuuaauaggaggaggaauu

SEQ ID NO: 2554648 - RNA, 19 nt, Homo sapiens
  misc_RNA (1)...(19): siRNA sense strand
uggaauaaucugcgggcua

SEQ ID NO: 2554649 - RNA, 19 nt, Homo sapiens
  misc_RNA (1)...(19): siRNA sense strand
gguuaaaagcugcugaaaa

SEQ ID NO: 2554650 - RNA, 19 nt, Homo sapiens
  misc_RNA (1)...(19): siRNA sense strand
aggagaggccaaagggcaa

SEQ ID NO: 2554651 - RNA, 19 nt, Homo sapiens
  misc_RNA (1)...(19): siRNA sense strand
cccgaaaacacuagaaaua

SEQ ID NO: 2554652 - RNA, 19 nt, Homo sapiens
  misc_RNA (1)...(19): siRNA sense strand
ccaccaugguccuggcaau

SEQ ID NO: 2554653 - RNA, 19 nt, Homo sapiens
  misc_RNA (1)...(19): siRNA sense strand
gggucggacuagagcccaa

SEQ ID NO: 2554654 - RNA, 19 nt, Homo sapiens
  misc_RNA (1)...(19): siRNA sense strand
ccucacaguuggugcacau

SEQ ID NO: 2554655 - RNA, 19 nt, Homo sapiens
  misc_RNA (1)...(19): siRNA sense strand
ccaguagagggcagcgaaa

SEQ ID NO: 2554656 - RNA, 19 nt, Homo sapiens
  misc_RNA (1)...(19): siRNA sense strand
gauuaugguaggagaagga

SEQ ID NO: 2554657 - RNA, 19 nt, Homo sapiens
  misc_RNA (1)...(19): siRNA sense strand
gaauaagaaugaaagucga

SEQ ID NO: 2554658 - RNA, 19 nt, Homo sapiens
  misc_RNA (1)...(19): siRNA sense strand
ccuacauuguggaagauau

SEQ ID NO: 2554659 - RNA, 19 nt, Homo sapiens
  misc_RNA (1)...(19): siRNA sense strand
cuacauuguggaagauauu

SEQ ID NO: 2554660 - RNA, 19 nt, Homo sapiens
  misc_RNA (1)...(19): siRNA sense strand
gcaaagugaucaaggacag

SEQ ID NO: 2554661 - RNA, 19 nt, Homo sapiens
  misc_RNA (1)...(19): siRNA sense strand
aguagagggcagcgaaauu

SEQ ID NO: 2554662 - RNA, 19 nt, Homo sapiens
  misc_RNA (1)...(19): siRNA sense strand
gcucgggccaagugguuaa

SEQ ID NO: 2554663 - RNA, 19 nt, Homo sapiens
  misc_RNA (1)...(19): siRNA sense strand
aggcucacccagagaacaa

SEQ ID NO: 2554664 - RNA, 19 nt, Homo sapiens
  misc_RNA (1)...(19): siRNA sense strand
cauucuaaucccugaaaga

SEQ ID NO: 2554665 - RNA, 19 nt, Homo sapiens
  misc_RNA (1)...(19): siRNA sense strand
aguggaagaauaagaauga

SEQ ID NO: 2554666 - RNA, 19 nt, Homo sapiens
  misc_RNA (1)...(19): siRNA sense strand
cagcuuugguucuggagau

SEQ ID NO: 2554667 - RNA, 19 nt, Homo sapiens
  misc_RNA (1)...(19): siRNA sense strand
ggguaggggugaauggaga

SEQ ID NO: 2554668 - RNA, 19 nt, Homo sapiens
  misc_RNA (1)...(19): siRNA sense strand
cggauaacucaguauaaga

SEQ ID NO: 2554669 - RNA, 19 nt, Homo sapiens
  misc_RNA (1)...(19): siRNA sense strand
uaugguaggagaaggaauu

SEQ ID NO: 2554670 - RNA, 19 nt, Homo sapiens
  misc_RNA (1)...(19): siRNA sense strand
ccgaaucaugcaagucaua

SEQ ID NO: 2554671 - RNA, 19 nt, Homo sapiens
  misc_RNA (1)...(19): siRNA sense strand
gcuauaaaaccuugacaga

SEQ ID NO: 2554672 - RNA, 19 nt, Homo sapiens
  misc_RNA (1)...(19): siRNA sense strand
gcuuguaugcuguggggaa

SEQ ID NO: 2554673 - RNA, 19 nt, Homo sapiens
  misc_RNA (1)...(19): siRNA sense strand
ccagagaacaacaggccca

SEQ ID NO: 2554674 - RNA, 19 nt, Homo sapiens
  misc_RNA (1)...(19): siRNA sense strand
caaagggcaaagugaucaa

SEQ ID NO: 2554675 - RNA, 19 nt, Homo sapiens
  misc_RNA (1)...(19): siRNA sense strand
ucacccaguggaagaauaa

SEQ ID NO: 2554676 - RNA, 19 nt, Homo sapiens
  misc_RNA (1)...(19): siRNA sense strand
cggcgaaggagaggccaaa

SEQ ID NO: 2554677 - RNA, 19 nt, Homo sapiens
  misc_RNA (1)...(19): siRNA sense strand
cuguguauguuucgaugua

SEQ ID NO: 2554678 - RNA, 19 nt, Homo sapiens
  misc_RNA (1)...(19): siRNA sense strand
ugcuaugaccggagucuua

SEQ ID NO: 2554679 - RNA, 19 nt, Homo sapiens
  misc_RNA (1)...(19): siRNA sense strand
gaaccaacccaggaggcaa

SEQ ID NO: 2554680 - RNA, 19 nt, Homo sapiens
  misc_RNA (1)...(19): siRNA sense strand
cguugguguucauguauuu

SEQ ID NO: 2554681 - RNA, 19 nt, Homo sapiens
  misc_RNA (1)...(19): siRNA sense strand
gggaugucggcgaaggaga

SEQ ID NO: 2554682 - RNA, 19 nt, Homo sapiens
  misc_RNA (1)...(19): siRNA sense strand
aggccaaagggcaaaguga

SEQ ID NO: 2554683 - RNA, 19 nt, Homo sapiens
  misc_RNA (1)...(19): siRNA sense strand
cggagaaagggcaauauca

SEQ ID NO: 2554684 - RNA, 19 nt, Homo sapiens
  misc_RNA (1)...(19): siRNA sense strand
ggcaaagugaucaaggaca

SEQ ID NO: 2554685 - RNA, 19 nt, Homo sapiens
  misc_RNA (1)...(19): siRNA sense strand
cgaaauuggcucagagacg

SEQ ID NO: 2554686 - RNA, 19 nt, Homo sapiens
  misc_RNA (1)...(19): siRNA sense strand
acacgggcuuauaaggauu

SEQ ID NO: 2554687 - RNA, 19 nt, Homo sapiens
  misc_RNA (1)...(19): siRNA sense strand
ccucagacgagcugucaga

SEQ ID NO: 2554688 - RNA, 19 nt, Homo sapiens
  misc_RNA (1)...(19): siRNA sense strand
ggccaaagggcaaagugau

SEQ ID NO: 2554689 - RNA, 19 nt, Homo sapiens
  misc_RNA (1)...(19): siRNA sense strand
gcaaaugcugauguggaaa

SEQ ID NO: 2554690 - RNA, 19 nt, Homo sapiens
  misc_RNA (1)...(19): siRNA sense strand
acauuuaucaucuguggaa

SEQ ID NO: 2554691 - RNA, 19 nt, Homo sapiens
  misc_RNA (1)...(19): siRNA sense strand
gagaguauguuucagcaca

SEQ ID NO: 2554692 - RNA, 19 nt, Homo sapiens
  misc_RNA (1)...(19): siRNA sense strand
uguccaagcagcagggugu

SEQ ID NO: 2554693 - RNA, 19 nt, Homo sapiens
  misc_RNA (1)...(19): siRNA sense strand
ggauuaugcucuacagcuc

SEQ ID NO: 2554694 - RNA, 19 nt, Homo sapiens
  misc_RNA (1)...(19): siRNA sense strand
gaucgcaagagaagcaaca

SEQ ID NO: 2554695 - RNA, 19 nt, Homo sapiens
  misc_RNA (1)...(19): siRNA sense strand
gggcagcgaaauuggcuca

SEQ ID NO: 2554696 - RNA, 19 nt, Homo sapiens
  misc_RNA (1)...(19): siRNA sense strand
cugcggagaaagggcaaua

SEQ ID NO: 2554697 - RNA, 19 nt, Homo sapiens
  misc_RNA (1)...(19): siRNA sense strand
caaaagaguuaaaggcaga

SEQ ID NO: 2554698 - RNA, 19 nt, Homo sapiens
  misc_RNA (1)...(19): siRNA sense strand
guuucuagccaaagccaaa

SEQ ID NO: 2554699 - RNA, 19 nt, Homo sapiens
  misc_RNA (1)...(19): siRNA sense strand
aagaagaauuggaagguuc

SEQ ID NO: 2554700 - RNA, 19 nt, Homo sapiens
  misc_RNA (1)...(19): siRNA sense strand
uggauuugaccaagagauu

SEQ ID NO: 2554701 - RNA, 19 nt, Homo sapiens
  misc_RNA (1)...(19): siRNA sense strand
gcauacuuugaaugagaaa

SEQ ID NO: 2554702 - RNA, 19 nt, Homo sapiens
  misc_RNA (1)...(19): siRNA sense strand
guucagaucucaaggaccu

SEQ ID NO: 2554703 - RNA, 19 nt, Homo sapiens
  misc_RNA (1)...(19): siRNA sense strand
gaguauuuggcuccagaaa

SEQ ID NO: 2554704 - RNA, 19 nt, Homo sapiens
  misc_RNA (1)...(19): siRNA sense strand
augaaauggcagcuggcua

SEQ ID NO: 2554705 - RNA, 19 nt, Homo sapiens
  misc_RNA (1)...(19): siRNA sense strand
auaccaaaguuuagaggcu

SEQ ID NO: 2554706 - RNA, 19 nt, Homo sapiens
  misc_RNA (1)...(19): siRNA sense strand
acgacagauuggauugcua

SEQ ID NO: 2554707 - RNA, 19 nt, Homo sapiens
  misc_RNA (1)...(19): siRNA sense strand
cuuugaugacuaugaagaa

SEQ ID NO: 2554708 - RNA, 19 nt, Homo sapiens
  misc_RNA (1)...(19): siRNA sense strand
gaggaagguugaagcucca

SEQ ID NO: 2554709 - RNA, 19 nt, Homo sapiens
  misc_RNA (1)...(19): siRNA sense strand
aguauuaugccaugaagau

SEQ ID NO: 2554710 - RNA, 19 nt, Homo sapiens
  misc_RNA (1)...(19): siRNA sense strand
aaagaauauuacaggcagu

SEQ ID NO: 2554711 - RNA, 19 nt, Homo sapiens
  misc_RNA (1)...(19): siRNA sense strand
cuacaauaaggcaguggau

SEQ ID NO: 2554712 - RNA, 19 nt, Homo sapiens
  misc_RNA (1)...(19): siRNA sense strand
agaagaauuggaagguuca

SEQ ID NO: 2554713 - RNA, 19 nt, Homo sapiens
  misc_RNA (1)...(19): siRNA sense strand
gaaaagaauauuacaggca

SEQ ID NO: 2554714 - RNA, 19 nt, Homo sapiens
  misc_RNA (1)...(19): siRNA sense strand
acugaagcaaauagagcau

SEQ ID NO: 2554715 - RNA, 19 nt, Homo sapiens
  misc_RNA (1)...(19): siRNA sense strand
caaaagaguuaaaggcaga

SEQ ID NO: 2554716 - RNA, 19 nt, Homo sapiens
  misc_RNA (1)...(19): siRNA sense strand
guuucuagccaaagccaaa

SEQ ID NO: 2554717 - RNA, 19 nt, Homo sapiens
  misc_RNA (1)...(19): siRNA sense strand
aagaagaauuggaagguuc

SEQ ID NO: 2554718 - RNA, 19 nt, Homo sapiens
  misc_RNA (1)...(19): siRNA sense strand
uggauuugaccaagagauu

SEQ ID NO: 2554719 - RNA, 19 nt, Homo sapiens
  misc_RNA (1)...(19): siRNA sense strand
gcauacuuugaaugagaaa

SEQ ID NO: 2554720 - RNA, 19 nt, Homo sapiens
  misc_RNA (1)...(19): siRNA sense strand
guucagaucucaaggaccu

SEQ ID NO: 2554721 - RNA, 19 nt, Homo sapiens
  misc_RNA (1)...(19): siRNA sense strand
gaguauuuggcuccagaaa

SEQ ID NO: 2554722 - RNA, 19 nt, Homo sapiens
  misc_RNA (1)...(19): siRNA sense strand
augaaauggcagcuggcua

SEQ ID NO: 2554723 - RNA, 19 nt, Homo sapiens
  misc_RNA (1)...(19): siRNA sense strand
auaccaaaguuuagaggcu

SEQ ID NO: 2554724 - RNA, 19 nt, Homo sapiens
  misc_RNA (1)...(19): siRNA sense strand
acgacagauuggauugcua

SEQ ID NO: 2554725 - RNA, 19 nt, Homo sapiens
  misc_RNA (1)...(19): siRNA sense strand
cuuugaugacuaugaagaa

SEQ ID NO: 2554726 - RNA, 19 nt, Homo sapiens
  misc_RNA (1)...(19): siRNA sense strand
gaggaagguugaagcucca

SEQ ID NO: 2554727 - RNA, 19 nt, Homo sapiens
  misc_RNA (1)...(19): siRNA sense strand
aguauuaugccaugaagau

SEQ ID NO: 2554728 - RNA, 19 nt, Homo sapiens
  misc_RNA (1)...(19): siRNA sense strand
aaagaauauuacaggcagu

SEQ ID NO: 2554729 - RNA, 19 nt, Homo sapiens
  misc_RNA (1)...(19): siRNA sense strand
cuacaauaaggcaguggau

SEQ ID NO: 2554730 - RNA, 19 nt, Homo sapiens
  misc_RNA (1)...(19): siRNA sense strand
agaagaauuggaagguuca

SEQ ID NO: 2554731 - RNA, 19 nt, Homo sapiens
  misc_RNA (1)...(19): siRNA sense strand
gaaaagaauauuacaggca

SEQ ID NO: 2554732 - RNA, 19 nt, Homo sapiens
  misc_RNA (1)...(19): siRNA sense strand
acugaagcaaauagagcau

SEQ ID NO: 2554733 - RNA, 19 nt, Homo sapiens
  misc_RNA (1)...(19): siRNA sense strand
gaacagaccuuaagaggga

SEQ ID NO: 2554734 - RNA, 19 nt, Homo sapiens
  misc_RNA (1)...(19): siRNA sense strand
ggaaacugcccucaagaaa

SEQ ID NO: 2554735 - RNA, 19 nt, Homo sapiens
  misc_RNA (1)...(19): siRNA sense strand
caaccgagcugguggcuga

SEQ ID NO: 2554736 - RNA, 19 nt, Homo sapiens
  misc_RNA (1)...(19): siRNA sense strand
gcgagaaggaggauggcga

SEQ ID NO: 2554737 - RNA, 19 nt, Homo sapiens
  misc_RNA (1)...(19): siRNA sense strand
cugaagaccuguaugacuu

SEQ ID NO: 2554738 - RNA, 19 nt, Homo sapiens
  misc_RNA (1)...(19): siRNA sense strand
ggacaacccuggugugcca

SEQ ID NO: 2554739 - RNA, 19 nt, Homo sapiens
  misc_RNA (1)...(19): siRNA sense strand
uauauuacuuggagaggau

SEQ ID NO: 2554740 - RNA, 19 nt, Homo sapiens
  misc_RNA (1)...(19): siRNA sense strand
gcaccugccacucggguaa

SEQ ID NO: 2554741 - RNA, 19 nt, Homo sapiens
  misc_RNA (1)...(19): siRNA sense strand
gcccaauacuucaaagcau

SEQ ID NO: 2554742 - RNA, 19 nt, Homo sapiens
  misc_RNA (1)...(19): siRNA sense strand
ggaaguggcuuguggagcu

SEQ ID NO: 2554743 - RNA, 19 nt, Homo sapiens
  misc_RNA (1)...(19): siRNA sense strand
gcgaagagauggagauugg

SEQ ID NO: 2554744 - RNA, 19 nt, Homo sapiens
  misc_RNA (1)...(19): siRNA sense strand
agacaaggccuuccaguuu

SEQ ID NO: 2554745 - RNA, 19 nt, Homo sapiens
  misc_RNA (1)...(19): siRNA sense strand
ggaccaggaugcagucaca

SEQ ID NO: 2554746 - RNA, 19 nt, Homo sapiens
  misc_RNA (1)...(19): siRNA sense strand
uggagaggauugaggaaac

SEQ ID NO: 2554747 - RNA, 19 nt, Homo sapiens
  misc_RNA (1)...(19): siRNA sense strand
gggaugaacugaugaagac

SEQ ID NO: 2554748 - RNA, 19 nt, Homo sapiens
  misc_RNA (1)...(19): siRNA sense strand
cgagaaggaggauggcgaa

SEQ ID NO: 2554749 - RNA, 19 nt, Homo sapiens
  misc_RNA (1)...(19): siRNA sense strand
acuggaagcuucacaaaga

SEQ ID NO: 2554750 - RNA, 19 nt, Homo sapiens
  misc_RNA (1)...(19): siRNA sense strand
gaugaggagauaccagaaa

SEQ ID NO: 2554751 - RNA, 19 nt, Homo sapiens
  misc_RNA (1)...(19): siRNA sense strand
gcguaagagugaagccaag

SEQ ID NO: 2554752 - RNA, 19 nt, Homo sapiens
  misc_RNA (1)...(19): siRNA sense strand
cugcugagcuccugggugu

SEQ ID NO: 2554753 - RNA, 19 nt, Homo sapiens
  misc_RNA (1)...(19): siRNA sense strand
ucacaaagauuccgcagca

SEQ ID NO: 2554754 - RNA, 19 nt, Homo sapiens
  misc_RNA (1)...(19): siRNA sense strand
ccaaguuuauggaggccuu

SEQ ID NO: 2554755 - RNA, 19 nt, Homo sapiens
  misc_RNA (1)...(19): siRNA sense strand
cauaauaggcgaugaggag

SEQ ID NO: 2554756 - RNA, 19 nt, Homo sapiens
  misc_RNA (1)...(19): siRNA sense strand
ccuaaagcguuucaagcga

SEQ ID NO: 2554757 - RNA, 19 nt, Homo sapiens
  misc_RNA (1)...(19): siRNA sense strand
gaugaacugaugaagacaa

SEQ ID NO: 2554758 - RNA, 19 nt, Homo sapiens
  misc_RNA (1)...(19): siRNA sense strand
caagcgagcugcagggaag

SEQ ID NO: 2554759 - RNA, 19 nt, Homo sapiens
  misc_RNA (1)...(19): siRNA sense strand
uaauaggcgaugaggagau

SEQ ID NO: 2554760 - RNA, 19 nt, Homo sapiens
  misc_RNA (1)...(19): siRNA sense strand
gcacuggaagcuucacaaa

SEQ ID NO: 2554761 - RNA, 19 nt, Homo sapiens
  misc_RNA (1)...(19): siRNA sense strand
ggaggauggcgaagagaug

SEQ ID NO: 2554762 - RNA, 19 nt, Homo sapiens
  misc_RNA (1)...(19): siRNA sense strand
ugggaugaacugaugaaga

SEQ ID NO: 2554763 - RNA, 19 nt, Homo sapiens
  misc_RNA (1)...(19): siRNA sense strand
cugaugaagacaaggccuu

SEQ ID NO: 2554764 - RNA, 19 nt, Homo sapiens
  misc_RNA (1)...(19): siRNA sense strand
gggugucacuggagagccu

SEQ ID NO: 2554765 - RNA, 19 nt, Homo sapiens
  misc_RNA (1)...(19): siRNA sense strand
ugagaagcgcccagcccaa

SEQ ID NO: 2554766 - RNA, 19 nt, Homo sapiens
  misc_RNA (1)...(19): siRNA sense strand
ccaacugcaucaagccaga

SEQ ID NO: 2554767 - RNA, 19 nt, Homo sapiens
  misc_RNA (1)...(19): siRNA sense strand
ccaaaagauuacaagacaa

SEQ ID NO: 2554768 - RNA, 19 nt, Homo sapiens
  misc_RNA (1)...(19): siRNA sense strand
agauuguggugcagggaga

SEQ ID NO: 2554769 - RNA, 19 nt, Homo sapiens
  misc_RNA (1)...(19): siRNA sense strand
agcaaagacaaaugugaaa

SEQ ID NO: 2554770 - RNA, 19 nt, Homo sapiens
  misc_RNA (1)...(19): siRNA sense strand
ugggaagcacacugagaaa

SEQ ID NO: 2554771 - RNA, 19 nt, Homo sapiens
  misc_RNA (1)...(19): siRNA sense strand
gcggaagauguaugaggaa

SEQ ID NO: 2554772 - RNA, 19 nt, Homo sapiens
  misc_RNA (1)...(19): siRNA sense strand
gguuaaagguaggaggcga

SEQ ID NO: 2554773 - RNA, 19 nt, Homo sapiens
  misc_RNA (1)...(19): siRNA sense strand
guuaacaaugaaugggcaa

SEQ ID NO: 2554774 - RNA, 19 nt, Homo sapiens
  misc_RNA (1)...(19): siRNA sense strand
cggcauccuauguuagaaa

SEQ ID NO: 2554775 - RNA, 19 nt, Homo sapiens
  misc_RNA (1)...(19): siRNA sense strand
agaagaauccucaugggaa

SEQ ID NO: 2554776 - RNA, 19 nt, Homo sapiens
  misc_RNA (1)...(19): siRNA sense strand
gaagaauccucaugggaag

SEQ ID NO: 2554777 - RNA, 19 nt, Homo sapiens
  misc_RNA (1)...(19): siRNA sense strand
aggucuacacggaggaaga

SEQ ID NO: 2554778 - RNA, 19 nt, Homo sapiens
  misc_RNA (1)...(19): siRNA sense strand
aggagggagcuuuggagaa

SEQ ID NO: 2554779 - RNA, 19 nt, Homo sapiens
  misc_RNA (1)...(19): siRNA sense strand
ggcagaagauuguggugca

SEQ ID NO: 2554780 - RNA, 19 nt, Homo sapiens
  misc_RNA (1)...(19): siRNA sense strand
cugagaaagcggaagaugu

SEQ ID NO: 2554781 - RNA, 19 nt, Homo sapiens
  misc_RNA (1)...(19): siRNA sense strand
gcacacugagaaagcggaa

SEQ ID NO: 2554782 - RNA, 19 nt, Homo sapiens
  misc_RNA (1)...(19): siRNA sense strand
ggucagaaaaugaagaguu

SEQ ID NO: 2554783 - RNA, 19 nt, Homo sapiens
  misc_RNA (1)...(19): siRNA sense strand
cugagagacccauggcauu

SEQ ID NO: 2554784 - RNA, 19 nt, Homo sapiens
  misc_RNA (1)...(19): siRNA sense strand
gugggaacgucuuacggua

SEQ ID NO: 2554785 - RNA, 19 nt, Homo sapiens
  misc_RNA (1)...(19): siRNA sense strand
gcgcugaggucuacacgga

SEQ ID NO: 2554786 - RNA, 19 nt, Homo sapiens
  misc_RNA (1)...(19): siRNA sense strand
acuuugagagguuggagaa

SEQ ID NO: 2554787 - RNA, 19 nt, Homo sapiens
  misc_RNA (1)...(19): siRNA sense strand
ccugagagacccauggcau

SEQ ID NO: 2554788 - RNA, 19 nt, Homo sapiens
  misc_RNA (1)...(19): siRNA sense strand
gcaaggugaugaaggggau

SEQ ID NO: 2554789 - RNA, 19 nt, Homo sapiens
  misc_RNA (1)...(19): siRNA sense strand
cuuuaucgcaggagagacu

SEQ ID NO: 2554790 - RNA, 19 nt, Homo sapiens
  misc_RNA (1)...(19): siRNA sense strand
gaacggaguuugcgggaga

SEQ ID NO: 2554791 - RNA, 19 nt, Homo sapiens
  misc_RNA (1)...(19): siRNA sense strand
gagauaaguucaaggagga

SEQ ID NO: 2554792 - RNA, 19 nt, Homo sapiens
  misc_RNA (1)...(19): siRNA sense strand
ggagaaaguguuugagcca

SEQ ID NO: 2554793 - RNA, 19 nt, Homo sapiens
  misc_RNA (1)...(19): siRNA sense strand
cggacaaggugcugcggau

SEQ ID NO: 2554794 - RNA, 19 nt, Homo sapiens
  misc_RNA (1)...(19): siRNA sense strand
ugacgaggccagaaggcua

SEQ ID NO: 2554795 - RNA, 19 nt, Homo sapiens
  misc_RNA (1)...(19): siRNA sense strand
aguucaaggaggagaaagu

SEQ ID NO: 2554796 - RNA, 19 nt, Homo sapiens
  misc_RNA (1)...(19): siRNA sense strand
uggugaugguggucaggaa

SEQ ID NO: 2554797 - RNA, 19 nt, Homo sapiens
  misc_RNA (1)...(19): siRNA sense strand
ccaauguccuggaggccau

SEQ ID NO: 2554798 - RNA, 19 nt, Homo sapiens
  misc_RNA (1)...(19): siRNA sense strand
aggacuucaaggagaacaa

SEQ ID NO: 2554799 - RNA, 19 nt, Homo sapiens
  misc_RNA (1)...(19): siRNA sense strand
gagaccaggacgagcucaa

SEQ ID NO: 2554800 - RNA, 19 nt, Homo sapiens
  misc_RNA (1)...(19): siRNA sense strand
ggagauaaguucaaggagg

SEQ ID NO: 2554801 - RNA, 19 nt, Homo sapiens
  misc_RNA (1)...(19): siRNA sense strand
auacaaaaccaucgaguca

SEQ ID NO: 2554802 - RNA, 19 nt, Homo sapiens
  misc_RNA (1)...(19): siRNA sense strand
ucaaacaagaauuagccaa

SEQ ID NO: 2554803 - RNA, 19 nt, Homo sapiens
  misc_RNA (1)...(19): siRNA sense strand
auaaguucaaggaggagaa

SEQ ID NO: 2554804 - RNA, 19 nt, Homo sapiens
  misc_RNA (1)...(19): siRNA sense strand
ccaaaggcgagguggugga

SEQ ID NO: 2554805 - RNA, 19 nt, Homo sapiens
  misc_RNA (1)...(19): siRNA sense strand
aaguaugacgaaagcgaca

SEQ ID NO: 2554806 - RNA, 19 nt, Homo sapiens
  misc_RNA (1)...(19): siRNA sense strand
gagaaaguguuugagccaa

SEQ ID NO: 2554807 - RNA, 19 nt, Homo sapiens
  misc_RNA (1)...(19): siRNA sense strand
ugaaguaugacgaaagcga

SEQ ID NO: 2554808 - RNA, 19 nt, Homo sapiens
  misc_RNA (1)...(19): siRNA sense strand
aaacagugcgagaacgaca

SEQ ID NO: 2554809 - RNA, 19 nt, Homo sapiens
  misc_RNA (1)...(19): siRNA sense strand
ucaaggagggcguggagga

SEQ ID NO: 2554810 - RNA, 19 nt, Homo sapiens
  misc_RNA (1)...(19): siRNA sense strand
aguccgugaagaaggaaau

SEQ ID NO: 2554811 - RNA, 19 nt, Homo sapiens
  misc_RNA (1)...(19): siRNA sense strand
aggccaaggcacugggucu

SEQ ID NO: 2554812 - RNA, 19 nt, Homo sapiens
  misc_RNA (1)...(19): siRNA sense strand
gcguggaggaagcagccaa

SEQ ID NO: 2554813 - RNA, 19 nt, Homo sapiens
  misc_RNA (1)...(19): siRNA sense strand
ugaaaggaguccagagaaa

SEQ ID NO: 2554814 - RNA, 19 nt, Homo sapiens
  misc_RNA (1)...(19): siRNA sense strand
cgacaugauggaagagaaa

SEQ ID NO: 2554815 - RNA, 19 nt, Homo sapiens
  misc_RNA (1)...(19): siRNA sense strand
ugaaagugaagaagagaaa

SEQ ID NO: 2554816 - RNA, 19 nt, Homo sapiens
  misc_RNA (1)...(19): siRNA sense strand
caagaagcauacugggaaa

SEQ ID NO: 2554817 - RNA, 19 nt, Homo sapiens
  misc_RNA (1)...(19): siRNA sense strand
ggagaaacaucuucggaga

SEQ ID NO: 2554818 - RNA, 19 nt, Homo sapiens
  misc_RNA (1)...(19): siRNA sense strand
ggaaaagcaccuugaguua

SEQ ID NO: 2554819 - RNA, 19 nt, Homo sapiens
  misc_RNA (1)...(19): siRNA sense strand
gcgagaagcuguacacauu

SEQ ID NO: 2554820 - RNA, 19 nt, Homo sapiens
  misc_RNA (1)...(19): siRNA sense strand
agagaaagacagagacaca

SEQ ID NO: 2554821 - RNA, 19 nt, Homo sapiens
  misc_RNA (1)...(19): siRNA sense strand
gcacuuacagacugagaua

SEQ ID NO: 2554822 - RNA, 19 nt, Homo sapiens
  misc_RNA (1)...(19): siRNA sense strand
accaagaacuacaggaauu

SEQ ID NO: 2554823 - RNA, 19 nt, Homo sapiens
  misc_RNA (1)...(19): siRNA sense strand
ugacacauguggagaaaca

SEQ ID NO: 2554824 - RNA, 19 nt, Homo sapiens
  misc_RNA (1)...(19): siRNA sense strand
ggacauuggcucuggacau

SEQ ID NO: 2554825 - RNA, 19 nt, Homo sapiens
  misc_RNA (1)...(19): siRNA sense strand
ucugagagcugcacaguua

SEQ ID NO: 2554826 - RNA, 19 nt, Homo sapiens
  misc_RNA (1)...(19): siRNA sense strand
ccauggugguacugugaaa

SEQ ID NO: 2554827 - RNA, 19 nt, Homo sapiens
  misc_RNA (1)...(19): siRNA sense strand
auggaaaccuucagcuaaa

SEQ ID NO: 2554828 - RNA, 19 nt, Homo sapiens
  misc_RNA (1)...(19): siRNA sense strand
ccaucaacaacuagguuua

SEQ ID NO: 2554829 - RNA, 19 nt, Homo sapiens
  misc_RNA (1)...(19): siRNA sense strand
cugugaaagaugugaauuu

SEQ ID NO: 2554830 - RNA, 19 nt, Homo sapiens
  misc_RNA (1)...(19): siRNA sense strand
gaagagaaagacagagaca

SEQ ID NO: 2554831 - RNA, 19 nt, Homo sapiens
  misc_RNA (1)...(19): siRNA sense strand
ccgacaugauggaagagaa

SEQ ID NO: 2554832 - RNA, 19 nt, Homo sapiens
  misc_RNA (1)...(19): siRNA sense strand
aaacaucuucggagaguua

SEQ ID NO: 2554833 - RNA, 19 nt, Homo sapiens
  misc_RNA (1)...(19): siRNA sense strand
ggaaagccacaaacagaaa

SEQ ID NO: 2554834 - RNA, 19 nt, Homo sapiens
  misc_RNA (1)...(19): siRNA sense strand
aagaagagaaagacagaga

SEQ ID NO: 2554835 - RNA, 19 nt, Homo sapiens
  misc_RNA (1)...(19): siRNA sense strand
gcaauaagggagucugcaa

SEQ ID NO: 2554836 - RNA, 19 nt, Homo sapiens
  misc_RNA (1)...(19): siRNA sense strand
ccaccaagaacuacaggaa

SEQ ID NO: 2554837 - RNA, 19 nt, Homo sapiens
  misc_RNA (1)...(19): siRNA sense strand
guggauuggaggaagcaaa

SEQ ID NO: 2554838 - RNA, 19 nt, Homo sapiens
  misc_RNA (1)...(19): siRNA sense strand
caacuagguuuacagguua

SEQ ID NO: 2554839 - RNA, 19 nt, Homo sapiens
  misc_RNA (1)...(19): siRNA sense strand
cuacaaagucagaaaguac

SEQ ID NO: 2554840 - RNA, 19 nt, Homo sapiens
  misc_RNA (1)...(19): siRNA sense strand
gaacaauauugguacaagu

SEQ ID NO: 2554841 - RNA, 19 nt, Homo sapiens
  misc_RNA (1)...(19): siRNA sense strand
uaggaaaugagaauggaaa

SEQ ID NO: 2554842 - RNA, 19 nt, Homo sapiens
  misc_RNA (1)...(19): siRNA sense strand
aaagugaagaagagaaaga

SEQ ID NO: 2554843 - RNA, 19 nt, Homo sapiens
  misc_RNA (1)...(19): siRNA sense strand
gggaaugucucauguuaca

SEQ ID NO: 2554844 - RNA, 19 nt, Homo sapiens
  misc_RNA (1)...(19): siRNA sense strand
gggaauccaucaacaacua

SEQ ID NO: 2554845 - RNA, 19 nt, Homo sapiens
  misc_RNA (1)...(19): siRNA sense strand
guacacauugagaagauaa

SEQ ID NO: 2554846 - RNA, 19 nt, Homo sapiens
  misc_RNA (1)...(19): siRNA sense strand
caauaagggagucugcaaa

SEQ ID NO: 2554847 - RNA, 19 nt, Homo sapiens
  misc_RNA (1)...(19): siRNA sense strand
agauaauguugaaaggagu

SEQ ID NO: 2554848 - RNA, 19 nt, Homo sapiens
  misc_RNA (1)...(19): siRNA sense strand
aagcaaagcuguaccacca

SEQ ID NO: 2554849 - RNA, 19 nt, Homo sapiens
  misc_RNA (1)...(19): siRNA sense strand
acaacuagguuuacagguu

SEQ ID NO: 2554850 - RNA, 19 nt, Homo sapiens
  misc_RNA (1)...(19): siRNA sense strand
acagagacacagacagcaa

SEQ ID NO: 2554851 - RNA, 19 nt, Homo sapiens
  misc_RNA (1)...(19): siRNA sense strand
gagaaaguuuugaaaguga

SEQ ID NO: 2554852 - RNA, 19 nt, Homo sapiens
  misc_RNA (1)...(19): siRNA sense strand
ccacagggaucuucugaga

SEQ ID NO: 2554853 - RNA, 19 nt, Homo sapiens
  misc_RNA (1)...(19): siRNA sense strand
cuguacacauugagaagau

SEQ ID NO: 2554854 - RNA, 19 nt, Homo sapiens
  misc_RNA (1)...(19): siRNA sense strand
gagcagcuuaauagagcaa

SEQ ID NO: 2554855 - RNA, 19 nt, Homo sapiens
  misc_RNA (1)...(19): siRNA sense strand
caauggaaaccuucagcua

SEQ ID NO: 2554856 - RNA, 19 nt, Homo sapiens
  misc_RNA (1)...(19): siRNA sense strand
ugaagaagagaaagacaga

SEQ ID NO: 2554857 - RNA, 19 nt, Homo sapiens
  misc_RNA (1)...(19): siRNA sense strand
gaaucaggguuccuugaaa

SEQ ID NO: 2554858 - RNA, 19 nt, Homo sapiens
  misc_RNA (1)...(19): siRNA sense strand
ccauaauccacaagaagca

SEQ ID NO: 2554859 - RNA, 19 nt, Homo sapiens
  misc_RNA (1)...(19): siRNA sense strand
uggcaggauuugggagauu

SEQ ID NO: 2554860 - RNA, 19 nt, Homo sapiens
  misc_RNA (1)...(19): siRNA sense strand
ucuuaagagcccugaauca

SEQ ID NO: 2554861 - RNA, 19 nt, Homo sapiens
  misc_RNA (1)...(19): siRNA sense strand
aagaaaggaaagccacaaa

SEQ ID NO: 2554862 - RNA, 19 nt, Homo sapiens
  misc_RNA (1)...(19): siRNA sense strand
gacaacagauugaauagua

SEQ ID NO: 2554863 - RNA, 19 nt, Homo sapiens
  misc_RNA (1)...(19): siRNA sense strand
caaauggacugguacauga

SEQ ID NO: 2554864 - RNA, 19 nt, Homo sapiens
  misc_RNA (1)...(19): siRNA sense strand
guugaaaggaguccagaga

SEQ ID NO: 2554865 - RNA, 19 nt, Homo sapiens
  misc_RNA (1)...(19): siRNA sense strand
ugguaggacucaaucaaau

SEQ ID NO: 2554866 - RNA, 19 nt, Homo sapiens
  misc_RNA (1)...(19): siRNA sense strand
aagaagauguguugcagca

SEQ ID NO: 2554867 - RNA, 19 nt, Homo sapiens
  misc_RNA (1)...(19): siRNA sense strand
agacagcaauucugaggau

SEQ ID NO: 2554868 - RNA, 19 nt, Homo sapiens
  misc_RNA (1)...(19): siRNA sense strand
cuuacaguucagaggcuaa

SEQ ID NO: 2554869 - RNA, 19 nt, Homo sapiens
  misc_RNA (1)...(19): siRNA sense strand
gcugacaaauacugggagu

SEQ ID NO: 2554870 - RNA, 19 nt, Homo sapiens
  misc_RNA (1)...(19): siRNA sense strand
agaagaaaggaaagccaca

SEQ ID NO: 2554871 - RNA, 19 nt, Homo sapiens
  misc_RNA (1)...(19): siRNA sense strand
aaggaaagccacaaacaga

SEQ ID NO: 2554872 - RNA, 19 nt, Homo sapiens
  misc_RNA (1)...(19): siRNA sense strand
ucuaaugauacguuggauu

SEQ ID NO: 2554873 - RNA, 19 nt, Homo sapiens
  misc_RNA (1)...(19): siRNA sense strand
gaaaggaaagccacaaaca

SEQ ID NO: 2554874 - RNA, 19 nt, Homo sapiens
  misc_RNA (1)...(19): siRNA sense strand
uugaaagugaagaagagaa

SEQ ID NO: 2554875 - RNA, 19 nt, Homo sapiens
  misc_RNA (1)...(19): siRNA sense strand
gcacuggagaaucggaaaa

SEQ ID NO: 2554876 - RNA, 19 nt, Homo sapiens
  misc_RNA (1)...(19): siRNA sense strand
gcacaucagagcaauggaa

SEQ ID NO: 2554877 - RNA, 19 nt, Homo sapiens
  misc_RNA (1)...(19): siRNA sense strand
ccucagacuccauaugcaa

SEQ ID NO: 2554878 - RNA, 19 nt, Homo sapiens
  misc_RNA (1)...(19): siRNA sense strand
aggaaagccacaaacagaa

SEQ ID NO: 2554879 - RNA, 19 nt, Homo sapiens
  misc_RNA (1)...(19): siRNA sense strand
acaugauggaagagaaagu

SEQ ID NO: 2554880 - RNA, 19 nt, Homo sapiens
  misc_RNA (1)...(19): siRNA sense strand
gcugugggaccaauggaaa

SEQ ID NO: 2554881 - RNA, 19 nt, Homo sapiens
  misc_RNA (1)...(19): siRNA sense strand
acaagaagcauacugggaa

SEQ ID NO: 2554882 - RNA, 19 nt, Homo sapiens
  misc_RNA (1)...(19): siRNA sense strand
agaaagacagagacacaga

SEQ ID NO: 2554883 - RNA, 19 nt, Homo sapiens
  misc_RNA (1)...(19): siRNA sense strand
uggaggaagcaaagcugua

SEQ ID NO: 2554884 - RNA, 19 nt, Homo sapiens
  misc_RNA (1)...(19): siRNA sense strand
ugagggaaacacagggaca

SEQ ID NO: 2554885 - RNA, 19 nt, Homo sapiens
  misc_RNA (1)...(19): siRNA sense strand
ucacagagcucagcgagaa

SEQ ID NO: 2554886 - RNA, 19 nt, Homo sapiens
  misc_RNA (1)...(19): siRNA sense strand
gggcuuaccaugcaauauu

SEQ ID NO: 2554887 - RNA, 19 nt, Homo sapiens
  misc_RNA (1)...(19): siRNA sense strand
agugaagaagagaaagaca

SEQ ID NO: 2554888 - RNA, 19 nt, Homo sapiens
  misc_RNA (1)...(19): siRNA sense strand
uggcaaaaccauagggaug

SEQ ID NO: 2554889 - RNA, 19 nt, Homo sapiens
  misc_RNA (1)...(19): siRNA sense strand
ccacaaacagaaaaggaga

SEQ ID NO: 2554890 - RNA, 19 nt, Homo sapiens
  misc_RNA (1)...(19): siRNA sense strand
ggaagagaaaguuuugaaa

SEQ ID NO: 2554891 - RNA, 19 nt, Homo sapiens
  misc_RNA (1)...(19): siRNA sense strand
caaacccgcugauggcaaa

SEQ ID NO: 2554892 - RNA, 19 nt, Homo sapiens
  misc_RNA (1)...(19): siRNA sense strand
gucagaaaguacacagcuu

SEQ ID NO: 2554893 - RNA, 19 nt, Homo sapiens
  misc_RNA (1)...(19): siRNA sense strand
acugacaacagauugaaua

SEQ ID NO: 2554894 - RNA, 19 nt, Homo sapiens
  misc_RNA (1)...(19): siRNA sense strand
ccuuaaacucacccaagua

SEQ ID NO: 2554895 - RNA, 19 nt, Homo sapiens
  misc_RNA (1)...(19): siRNA sense strand
gcagcagauggcaggauuu

SEQ ID NO: 2554896 - RNA, 19 nt, Homo sapiens
  misc_RNA (1)...(19): siRNA sense strand
cuguauauccagcaccuaa

SEQ ID NO: 2554897 - RNA, 19 nt, Homo sapiens
  misc_RNA (1)...(19): siRNA sense strand
aaucaggguuccuugaaaa

SEQ ID NO: 2554898 - RNA, 19 nt, Homo sapiens
  misc_RNA (1)...(19): siRNA sense strand
aagaagaagauguguugca

SEQ ID NO: 2554899 - RNA, 19 nt, Homo sapiens
  misc_RNA (1)...(19): siRNA sense strand
aauaacgagagcagcuuaa

SEQ ID NO: 2554900 - RNA, 19 nt, Homo sapiens
  misc_RNA (1)...(19): siRNA sense strand
gauggcaggauuugggaga

SEQ ID NO: 2554901 - RNA, 19 nt, Homo sapiens
  misc_RNA (1)...(19): siRNA sense strand
ccauggaggccaaucaaca

SEQ ID NO: 2554902 - RNA, 19 nt, Homo sapiens
  misc_RNA (1)...(19): siRNA sense strand
agucacaacaguaacaaaa

SEQ ID NO: 2554903 - RNA, 19 nt, Homo sapiens
  misc_RNA (1)...(19): siRNA sense strand
acagaauggaauuguggau

SEQ ID NO: 2554904 - RNA, 19 nt, Homo sapiens
  misc_RNA (1)...(19): siRNA sense strand
agaauggaauuguggauug

SEQ ID NO: 2554905 - RNA, 19 nt, Homo sapiens
  misc_RNA (1)...(19): siRNA sense strand
cggaaaagcaccuugaguu

SEQ ID NO: 2554906 - RNA, 19 nt, Homo sapiens
  misc_RNA (1)...(19): siRNA sense strand
ugugaacaauauugguaca

SEQ ID NO: 2554907 - RNA, 19 nt, Homo sapiens
  misc_RNA (1)...(19): siRNA sense strand
aguuaacaucccacaacaa

SEQ ID NO: 2554908 - RNA, 19 nt, Homo sapiens
  misc_RNA (1)...(19): siRNA sense strand
cacgaacgcuaaugggaca

SEQ ID NO: 2554909 - RNA, 19 nt, Homo sapiens
  misc_RNA (1)...(19): siRNA sense strand
augcaaauggacugguaca

SEQ ID NO: 2554910 - RNA, 19 nt, Homo sapiens
  misc_RNA (1)...(19): siRNA sense strand
ccaagaacuacaggaauuu

SEQ ID NO: 2554911 - RNA, 19 nt, Homo sapiens
  misc_RNA (1)...(19): siRNA sense strand
gaagaaaggaaagccacaa

SEQ ID NO: 2554912 - RNA, 19 nt, Homo sapiens
  misc_RNA (1)...(19): siRNA sense strand
cuaggaaaugagaauggaa

SEQ ID NO: 2554913 - RNA, 19 nt, Homo sapiens
  misc_RNA (1)...(19): siRNA sense strand
aauuggagcuaguggguca

SEQ ID NO: 2554914 - RNA, 19 nt, Homo sapiens
  misc_RNA (1)...(19): siRNA sense strand
gcuuaagccugcauggaga

SEQ ID NO: 2554915 - RNA, 19 nt, Homo sapiens
  misc_RNA (1)...(19): siRNA sense strand
cuuugauguuucugagcaa

SEQ ID NO: 2554916 - RNA, 19 nt, Homo sapiens
  misc_RNA (1)...(19): siRNA sense strand
cugugggugaggagggaaa

SEQ ID NO: 2554917 - RNA, 19 nt, Homo sapiens
  misc_RNA (1)...(19): siRNA sense strand
ccuacgaacugcaggcugu

SEQ ID NO: 2554918 - RNA, 19 nt, Homo sapiens
  misc_RNA (1)...(19): siRNA sense strand
ccuuugacuucucggacau

SEQ ID NO: 2554919 - RNA, 19 nt, Homo sapiens
  misc_RNA (1)...(19): siRNA sense strand
aaaucuaagucaagcggaa

SEQ ID NO: 2554920 - RNA, 19 nt, Homo sapiens
  misc_RNA (1)...(19): siRNA sense strand
cgaucagagaugaaugaaa

SEQ ID NO: 2554921 - RNA, 19 nt, Homo sapiens
  misc_RNA (1)...(19): siRNA sense strand
cugaagauuauguggauau

SEQ ID NO: 2554922 - RNA, 19 nt, Homo sapiens
  misc_RNA (1)...(19): siRNA sense strand
aaacauuaccaguggcaau

SEQ ID NO: 2554923 - RNA, 19 nt, Homo sapiens
  misc_RNA (1)...(19): siRNA sense strand
auucauggacacaggauaa

SEQ ID NO: 2554924 - RNA, 19 nt, Homo sapiens
  misc_RNA (1)...(19): siRNA sense strand
acaugaauuuggaaggcua

SEQ ID NO: 2554925 - RNA, 19 nt, Homo sapiens
  misc_RNA (1)...(19): siRNA sense strand
agggaauagaguaggagua

SEQ ID NO: 2554926 - RNA, 19 nt, Homo sapiens
  misc_RNA (1)...(19): siRNA sense strand
cggagaagcccucgagcau

SEQ ID NO: 2554927 - RNA, 19 nt, Homo sapiens
  misc_RNA (1)...(19): siRNA sense strand
aauaguaggaccagaagaa

SEQ ID NO: 2554928 - RNA, 19 nt, Homo sapiens
  misc_RNA (1)...(19): siRNA sense strand
ugguagaagaaauggaaca

SEQ ID NO: 2554929 - RNA, 19 nt, Homo sapiens
  misc_RNA (1)...(19): siRNA sense strand
ugccgaaaugcuagagaaa

SEQ ID NO: 2554930 - RNA, 19 nt, Homo sapiens
  misc_RNA (1)...(19): siRNA sense strand
aagcuaagcaugaaaucaa

SEQ ID NO: 2554931 - RNA, 19 nt, Homo sapiens
  misc_RNA (1)...(19): siRNA sense strand
ggagaagaauggagaggug

SEQ ID NO: 2554932 - RNA, 19 nt, Homo sapiens
  misc_RNA (1)...(19): siRNA sense strand
cagagaugaaugaaaggaa

SEQ ID NO: 2554933 - RNA, 19 nt, Homo sapiens
  misc_RNA (1)...(19): siRNA sense strand
gauaaagcuaagcaugaaa

SEQ ID NO: 2554934 - RNA, 19 nt, Homo sapiens
  misc_RNA (1)...(19): siRNA sense strand
cuucaugcauccugggaga

SEQ ID NO: 2554935 - RNA, 19 nt, Homo sapiens
  misc_RNA (1)...(19): siRNA sense strand
gugauaaacuggauccuga

SEQ ID NO: 2554936 - RNA, 19 nt, Homo sapiens
  misc_RNA (1)...(19): siRNA sense strand
cauugaguccugauggaua

SEQ ID NO: 2554937 - RNA, 19 nt, Homo sapiens
  misc_RNA (1)...(19): siRNA sense strand
caaaagaaagugauggauu

SEQ ID NO: 2554938 - RNA, 19 nt, Homo sapiens
  misc_RNA (1)...(19): siRNA sense strand
ugaugaauugguagaagaa

SEQ ID NO: 2554939 - RNA, 19 nt, Homo sapiens
  misc_RNA (1)...(19): siRNA sense strand
guucaagggaauagaguag

SEQ ID NO: 2554940 - RNA, 19 nt, Homo sapiens
  misc_RNA (1)...(19): siRNA sense strand
uagaguaggaguauggaau

SEQ ID NO: 2554941 - RNA, 19 nt, Homo sapiens
  misc_RNA (1)...(19): siRNA sense strand
ggagagguggugauggaau

SEQ ID NO: 2554942 - RNA, 19 nt, Homo sapiens
  misc_RNA (1)...(19): siRNA sense strand
ggaugaaaagugugauuau

SEQ ID NO: 2554943 - RNA, 19 nt, Homo sapiens
  misc_RNA (1)...(19): siRNA sense strand
gggagaagacuuucaggga

SEQ ID NO: 2554944 - RNA, 19 nt, Homo sapiens
  misc_RNA (1)...(19): siRNA sense strand
gggauuugcacuacugaau

SEQ ID NO: 2554945 - RNA, 19 nt, Homo sapiens
  misc_RNA (1)...(19): siRNA sense strand
caggaggauuuauuggcua

SEQ ID NO: 2554946 - RNA, 19 nt, Homo sapiens
  misc_RNA (1)...(19): siRNA sense strand
aggaggauuuauuggcuau

SEQ ID NO: 2554947 - RNA, 19 nt, Homo sapiens
  misc_RNA (1)...(19): siRNA sense strand
uguugugcacauugggaaa

SEQ ID NO: 2554948 - RNA, 19 nt, Homo sapiens
  misc_RNA (1)...(19): siRNA sense strand
gcacauugggaaacgcuau

SEQ ID NO: 2554949 - RNA, 19 nt, Homo sapiens
  misc_RNA (1)...(19): siRNA sense strand
uugauaaagcuaagcauga

SEQ ID NO: 2554950 - RNA, 19 nt, Homo sapiens
  misc_RNA (1)...(19): siRNA sense strand
auggagagguggugaugga

SEQ ID NO: 2554951 - RNA, 19 nt, Homo sapiens
  misc_RNA (1)...(19): siRNA sense strand
cauauuugcugguggucca

SEQ ID NO: 2554952 - RNA, 19 nt, Homo sapiens
  misc_RNA (1)...(19): siRNA sense strand
uggauauuguucaagggaa

SEQ ID NO: 2554953 - RNA, 19 nt, Homo sapiens
  misc_RNA (1)...(19): siRNA sense strand
auaaaagacuagcagacaa

SEQ ID NO: 2554954 - RNA, 19 nt, Homo sapiens
  misc_RNA (1)...(19): siRNA sense strand
ugucaaccguauaguucaa

SEQ ID NO: 2554955 - RNA, 19 nt, Homo sapiens
  misc_RNA (1)...(19): siRNA sense strand
caguggcaauuaauggaaa

SEQ ID NO: 2554956 - RNA, 19 nt, Homo sapiens
  misc_RNA (1)...(19): siRNA sense strand
uaguaggaccagaagaaaa

SEQ ID NO: 2554957 - RNA, 19 nt, Homo sapiens
  misc_RNA (1)...(19): siRNA sense strand
gaaacaugggaauggacuu

SEQ ID NO: 2554958 - RNA, 19 nt, Homo sapiens
  misc_RNA (1)...(19): siRNA sense strand
ccgugauuauucaaagauu

SEQ ID NO: 2554959 - RNA, 19 nt, Homo sapiens
  misc_RNA (1)...(19): siRNA sense strand
gcaaaauuuuccagaccuu

SEQ ID NO: 2554960 - RNA, 19 nt, Homo sapiens
  misc_RNA (1)...(19): siRNA sense strand
gagaagacuuucagggagg

SEQ ID NO: 2554961 - RNA, 19 nt, Homo sapiens
  misc_RNA (1)...(19): siRNA sense strand
gagaugaaugaaaggaacu

SEQ ID NO: 2554962 - RNA, 19 nt, Homo sapiens
  misc_RNA (1)...(19): siRNA sense strand
gguagaagaaauggaacau

SEQ ID NO: 2554963 - RNA, 19 nt, Homo sapiens
  misc_RNA (1)...(19): siRNA sense strand
guucauugcaccaguuaca

SEQ ID NO: 2554964 - RNA, 19 nt, Homo sapiens
  misc_RNA (1)...(19): siRNA sense strand
aagccagaaacaugggaau

SEQ ID NO: 2554965 - RNA, 19 nt, Homo sapiens
  misc_RNA (1)...(19): siRNA sense strand
acaucaugauagccguaua

SEQ ID NO: 2554966 - RNA, 19 nt, Homo sapiens
  misc_RNA (1)...(19): siRNA sense strand
gagcauccccacagauaaa

SEQ ID NO: 2554967 - RNA, 19 nt, Homo sapiens
  misc_RNA (1)...(19): siRNA sense strand
uauuguugacacuggauua

SEQ ID NO: 2554968 - RNA, 19 nt, Homo sapiens
  misc_RNA (1)...(19): siRNA sense strand
cuuaaauggagcuguagau

SEQ ID NO: 2554969 - RNA, 19 nt, Homo sapiens
  misc_RNA (1)...(19): siRNA sense strand
ccauccaaacguaucaaua

SEQ ID NO: 2554970 - RNA, 19 nt, Homo sapiens
  misc_RNA (1)...(19): siRNA sense strand
uugacaaauccaaggacuu

SEQ ID NO: 2554971 - RNA, 19 nt, Homo sapiens
  misc_RNA (1)...(19): siRNA sense strand
cugaaugcuuugaugucau

SEQ ID NO: 2554972 - RNA, 19 nt, Homo sapiens
  misc_RNA (1)...(19): siRNA sense strand
ccaaaaggcaaaccacaaa

SEQ ID NO: 2554973 - RNA, 19 nt, Homo sapiens
  misc_RNA (1)...(19): siRNA sense strand
aguggcaauuaauggaaau

SEQ ID NO: 2554974 - RNA, 19 nt, Homo sapiens
  misc_RNA (1)...(19): siRNA sense strand
aaaucuaagucaagcggaa

SEQ ID NO: 2554975 - RNA, 19 nt, Homo sapiens
  misc_RNA (1)...(19): siRNA sense strand
cgaucagagaugaaugaaa

SEQ ID NO: 2554976 - RNA, 19 nt, Homo sapiens
  misc_RNA (1)...(19): siRNA sense strand
cugaagauuauguggauau

SEQ ID NO: 2554977 - RNA, 19 nt, Homo sapiens
  misc_RNA (1)...(19): siRNA sense strand
aaacauuaccaguggcaau

SEQ ID NO: 2554978 - RNA, 19 nt, Homo sapiens
  misc_RNA (1)...(19): siRNA sense strand
auucauggacacaggauaa

SEQ ID NO: 2554979 - RNA, 19 nt, Homo sapiens
  misc_RNA (1)...(19): siRNA sense strand
acaugaauuuggaaggcua

SEQ ID NO: 2554980 - RNA, 19 nt, Homo sapiens
  misc_RNA (1)...(19): siRNA sense strand
agggaauagaguaggagua

SEQ ID NO: 2554981 - RNA, 19 nt, Homo sapiens
  misc_RNA (1)...(19): siRNA sense strand
cggagaagcccucgagcau

SEQ ID NO: 2554982 - RNA, 19 nt, Homo sapiens
  misc_RNA (1)...(19): siRNA sense strand
aauaguaggaccagaagaa

SEQ ID NO: 2554983 - RNA, 19 nt, Homo sapiens
  misc_RNA (1)...(19): siRNA sense strand
ugguagaagaaauggaaca

SEQ ID NO: 2554984 - RNA, 19 nt, Homo sapiens
  misc_RNA (1)...(19): siRNA sense strand
ugccgaaaugcuagagaaa

SEQ ID NO: 2554985 - RNA, 19 nt, Homo sapiens
  misc_RNA (1)...(19): siRNA sense strand
aagcuaagcaugaaaucaa

SEQ ID NO: 2554986 - RNA, 19 nt, Homo sapiens
  misc_RNA (1)...(19): siRNA sense strand
ggagaagaauggagaggug

SEQ ID NO: 2554987 - RNA, 19 nt, Homo sapiens
  misc_RNA (1)...(19): siRNA sense strand
cagagaugaaugaaaggaa

SEQ ID NO: 2554988 - RNA, 19 nt, Homo sapiens
  misc_RNA (1)...(19): siRNA sense strand
gauaaagcuaagcaugaaa

SEQ ID NO: 2554989 - RNA, 19 nt, Homo sapiens
  misc_RNA (1)...(19): siRNA sense strand
cuucaugcauccugggaga

SEQ ID NO: 2554990 - RNA, 19 nt, Homo sapiens
  misc_RNA (1)...(19): siRNA sense strand
gugauaaacuggauccuga

SEQ ID NO: 2554991 - RNA, 19 nt, Homo sapiens
  misc_RNA (1)...(19): siRNA sense strand
cauugaguccugauggaua

SEQ ID NO: 2554992 - RNA, 19 nt, Homo sapiens
  misc_RNA (1)...(19): siRNA sense strand
caaaagaaagugauggauu

SEQ ID NO: 2554993 - RNA, 19 nt, Homo sapiens
  misc_RNA (1)...(19): siRNA sense strand
ugaugaauugguagaagaa

SEQ ID NO: 2554994 - RNA, 19 nt, Homo sapiens
  misc_RNA (1)...(19): siRNA sense strand
guucaagggaauagaguag

SEQ ID NO: 2554995 - RNA, 19 nt, Homo sapiens
  misc_RNA (1)...(19): siRNA sense strand
uagaguaggaguauggaau

SEQ ID NO: 2554996 - RNA, 19 nt, Homo sapiens
  misc_RNA (1)...(19): siRNA sense strand
ggagagguggugauggaau

SEQ ID NO: 2554997 - RNA, 19 nt, Homo sapiens
  misc_RNA (1)...(19): siRNA sense strand
ggaugaaaagugugauuau

SEQ ID NO: 2554998 - RNA, 19 nt, Homo sapiens
  misc_RNA (1)...(19): siRNA sense strand
gggagaagacuuucaggga

SEQ ID NO: 2554999 - RNA, 19 nt, Homo sapiens
  misc_RNA (1)...(19): siRNA sense strand
gggauuugcacuacugaau

SEQ ID NO: 2555000 - RNA, 19 nt, Homo sapiens
  misc_RNA (1)...(19): siRNA sense strand
caggaggauuuauuggcua

SEQ ID NO: 2555001 - RNA, 19 nt, Homo sapiens
  misc_RNA (1)...(19): siRNA sense strand
aggaggauuuauuggcuau

SEQ ID NO: 2555002 - RNA, 19 nt, Homo sapiens
  misc_RNA (1)...(19): siRNA sense strand
uguugugcacauugggaaa

SEQ ID NO: 2555003 - RNA, 19 nt, Homo sapiens
  misc_RNA (1)...(19): siRNA sense strand
gcacauugggaaacgcuau

SEQ ID NO: 2555004 - RNA, 19 nt, Homo sapiens
  misc_RNA (1)...(19): siRNA sense strand
uugauaaagcuaagcauga

SEQ ID NO: 2555005 - RNA, 19 nt, Homo sapiens
  misc_RNA (1)...(19): siRNA sense strand
auggagagguggugaugga

SEQ ID NO: 2555006 - RNA, 19 nt, Homo sapiens
  misc_RNA (1)...(19): siRNA sense strand
cauauuugcugguggucca

SEQ ID NO: 2555007 - RNA, 19 nt, Homo sapiens
  misc_RNA (1)...(19): siRNA sense strand
uggauauuguucaagggaa

SEQ ID NO: 2555008 - RNA, 19 nt, Homo sapiens
  misc_RNA (1)...(19): siRNA sense strand
auaaaagacuagcagacaa

SEQ ID NO: 2555009 - RNA, 19 nt, Homo sapiens
  misc_RNA (1)...(19): siRNA sense strand
ugucaaccguauaguucaa

SEQ ID NO: 2555010 - RNA, 19 nt, Homo sapiens
  misc_RNA (1)...(19): siRNA sense strand
caguggcaauuaauggaaa

SEQ ID NO: 2555011 - RNA, 19 nt, Homo sapiens
  misc_RNA (1)...(19): siRNA sense strand
uaguaggaccagaagaaaa

SEQ ID NO: 2555012 - RNA, 19 nt, Homo sapiens
  misc_RNA (1)...(19): siRNA sense strand
gaaacaugggaauggacuu

SEQ ID NO: 2555013 - RNA, 19 nt, Homo sapiens
  misc_RNA (1)...(19): siRNA sense strand
ccgugauuauucaaagauu

SEQ ID NO: 2555014 - RNA, 19 nt, Homo sapiens
  misc_RNA (1)...(19): siRNA sense strand
gcaaaauuuuccagaccuu

SEQ ID NO: 2555015 - RNA, 19 nt, Homo sapiens
  misc_RNA (1)...(19): siRNA sense strand
gagaagacuuucagggagg

SEQ ID NO: 2555016 - RNA, 19 nt, Homo sapiens
  misc_RNA (1)...(19): siRNA sense strand
gagaugaaugaaaggaacu

SEQ ID NO: 2555017 - RNA, 19 nt, Homo sapiens
  misc_RNA (1)...(19): siRNA sense strand
gguagaagaaauggaacau

SEQ ID NO: 2555018 - RNA, 19 nt, Homo sapiens
  misc_RNA (1)...(19): siRNA sense strand
guucauugcaccaguuaca

SEQ ID NO: 2555019 - RNA, 19 nt, Homo sapiens
  misc_RNA (1)...(19): siRNA sense strand
aagccagaaacaugggaau

SEQ ID NO: 2555020 - RNA, 19 nt, Homo sapiens
  misc_RNA (1)...(19): siRNA sense strand
acaucaugauagccguaua

SEQ ID NO: 2555021 - RNA, 19 nt, Homo sapiens
  misc_RNA (1)...(19): siRNA sense strand
gagcauccccacagauaaa

SEQ ID NO: 2555022 - RNA, 19 nt, Homo sapiens
  misc_RNA (1)...(19): siRNA sense strand
uauuguugacacuggauua

SEQ ID NO: 2555023 - RNA, 19 nt, Homo sapiens
  misc_RNA (1)...(19): siRNA sense strand
cuuaaauggagcuguagau

SEQ ID NO: 2555024 - RNA, 19 nt, Homo sapiens
  misc_RNA (1)...(19): siRNA sense strand
ccauccaaacguaucaaua

SEQ ID NO: 2555025 - RNA, 19 nt, Homo sapiens
  misc_RNA (1)...(19): siRNA sense strand
uugacaaauccaaggacuu

SEQ ID NO: 2555026 - RNA, 19 nt, Homo sapiens
  misc_RNA (1)...(19): siRNA sense strand
cugaaugcuuugaugucau

SEQ ID NO: 2555027 - RNA, 19 nt, Homo sapiens
  misc_RNA (1)...(19): siRNA sense strand
ccaaaaggcaaaccacaaa

SEQ ID NO: 2555028 - RNA, 19 nt, Homo sapiens
  misc_RNA (1)...(19): siRNA sense strand
aguggcaauuaauggaaau

SEQ ID NO: 2555029 - RNA, 19 nt, Homo sapiens
  misc_RNA (1)...(19): siRNA sense strand
ggggagagcggaagagcaa

SEQ ID NO: 2555030 - RNA, 19 nt, Homo sapiens
  misc_RNA (1)...(19): siRNA sense strand
gcgcagaguuaucgugcca

SEQ ID NO: 2555031 - RNA, 19 nt, Homo sapiens
  misc_RNA (1)...(19): siRNA sense strand
ggugaaagaauauggccuu

SEQ ID NO: 2555032 - RNA, 19 nt, Homo sapiens
  misc_RNA (1)...(19): siRNA sense strand
gcaagaugaccaaggacga

SEQ ID NO: 2555033 - RNA, 19 nt, Homo sapiens
  misc_RNA (1)...(19): siRNA sense strand
gcuacauggaggagaagca

SEQ ID NO: 2555034 - RNA, 19 nt, Homo sapiens
  misc_RNA (1)...(19): siRNA sense strand
guacagaccaugugcggca

SEQ ID NO: 2555035 - RNA, 19 nt, Homo sapiens
  misc_RNA (1)...(19): siRNA sense strand
ggugaauggcucaaggaac

SEQ ID NO: 2555036 - RNA, 19 nt, Homo sapiens
  misc_RNA (1)...(19): siRNA sense strand
uccagaacaucgaugggaa

SEQ ID NO: 2555037 - RNA, 19 nt, Homo sapiens
  misc_RNA (1)...(19): siRNA sense strand
acauggaggagaagcacau

SEQ ID NO: 2555038 - RNA, 19 nt, Homo sapiens
  misc_RNA (1)...(19): siRNA sense strand
acuacuaugacaagaacau

SEQ ID NO: 2555039 - RNA, 19 nt, Homo sapiens
  misc_RNA (1)...(19): siRNA sense strand
ggggagagcggaagagcaa

SEQ ID NO: 2555040 - RNA, 19 nt, Homo sapiens
  misc_RNA (1)...(19): siRNA sense strand
gcgcagaguuaucgugcca

SEQ ID NO: 2555041 - RNA, 19 nt, Homo sapiens
  misc_RNA (1)...(19): siRNA sense strand
ggugaaagaauauggccuu

SEQ ID NO: 2555042 - RNA, 19 nt, Homo sapiens
  misc_RNA (1)...(19): siRNA sense strand
gcaagaugaccaaggacga

SEQ ID NO: 2555043 - RNA, 19 nt, Homo sapiens
  misc_RNA (1)...(19): siRNA sense strand
gcuacauggaggagaagca

SEQ ID NO: 2555044 - RNA, 19 nt, Homo sapiens
  misc_RNA (1)...(19): siRNA sense strand
guacagaccaugugcggca

SEQ ID NO: 2555045 - RNA, 19 nt, Homo sapiens
  misc_RNA (1)...(19): siRNA sense strand
ggugaauggcucaaggaac

SEQ ID NO: 2555046 - RNA, 19 nt, Homo sapiens
  misc_RNA (1)...(19): siRNA sense strand
uccagaacaucgaugggaa

SEQ ID NO: 2555047 - RNA, 19 nt, Homo sapiens
  misc_RNA (1)...(19): siRNA sense strand
acauggaggagaagcacau

SEQ ID NO: 2555048 - RNA, 19 nt, Homo sapiens
  misc_RNA (1)...(19): siRNA sense strand
acuacuaugacaagaacau

SEQ ID NO: 2555049 - RNA, 19 nt, Homo sapiens
  misc_RNA (1)...(19): siRNA sense strand
ccgauaaagaacaggaaaa

SEQ ID NO: 2555050 - RNA, 19 nt, Homo sapiens
  misc_RNA (1)...(19): siRNA sense strand
ugaucugugucgagggcaa

SEQ ID NO: 2555051 - RNA, 19 nt, Homo sapiens
  misc_RNA (1)...(19): siRNA sense strand
aagaagagaugcagggaag

SEQ ID NO: 2555052 - RNA, 19 nt, Homo sapiens
  misc_RNA (1)...(19): siRNA sense strand
acuuguuaccagagguuaa

SEQ ID NO: 2555053 - RNA, 19 nt, Homo sapiens
  misc_RNA (1)...(19): siRNA sense strand
gaugcagggaagaggagaa

SEQ ID NO: 2555054 - RNA, 19 nt, Homo sapiens
  misc_RNA (1)...(19): siRNA sense strand
caauauugcaagugggaag

SEQ ID NO: 2555055 - RNA, 19 nt, Homo sapiens
  misc_RNA (1)...(19): siRNA sense strand
agguuaaagaagagaugca

SEQ ID NO: 2555056 - RNA, 19 nt, Homo sapiens
  misc_RNA (1)...(19): siRNA sense strand
ggaagaugccagaagugga

SEQ ID NO: 2555057 - RNA, 19 nt, Homo sapiens
  misc_RNA (1)...(19): siRNA sense strand
aaagaagagaugcagggaa

SEQ ID NO: 2555058 - RNA, 19 nt, Homo sapiens
  misc_RNA (1)...(19): siRNA sense strand
agggaagaggagaagguca

SEQ ID NO: 2555059 - RNA, 19 nt, Homo sapiens
  misc_RNA (1)...(19): siRNA sense strand
cuguauagaagugggaaga

SEQ ID NO: 2555060 - RNA, 19 nt, Homo sapiens
  misc_RNA (1)...(19): siRNA sense strand
gagaaauguccguggccac

SEQ ID NO: 2555061 - RNA, 19 nt, Homo sapiens
  misc_RNA (1)...(19): siRNA sense strand
aggagauaguggaucggaa

SEQ ID NO: 2555062 - RNA, 19 nt, Homo sapiens
  misc_RNA (1)...(19): siRNA sense strand
agauaguggaucggaaaua

SEQ ID NO: 2555063 - RNA, 19 nt, Homo sapiens
  misc_RNA (1)...(19): siRNA sense strand
agaagaaagaggaggacug

SEQ ID NO: 2555064 - RNA, 19 nt, Homo sapiens
  misc_RNA (1)...(19): siRNA sense strand
ccaagaaggagauagugga

SEQ ID NO: 2555065 - RNA, 19 nt, Homo sapiens
  misc_RNA (1)...(19): siRNA sense strand
aggagauaguggaucggaa

SEQ ID NO: 2555066 - RNA, 19 nt, Homo sapiens
  misc_RNA (1)...(19): siRNA sense strand
agauaguggaucggaaaua

SEQ ID NO: 2555067 - RNA, 19 nt, Homo sapiens
  misc_RNA (1)...(19): siRNA sense strand
agaagaaagaggaggacug

SEQ ID NO: 2555068 - RNA, 19 nt, Homo sapiens
  misc_RNA (1)...(19): siRNA sense strand
ccaagaaggagauagugga

SEQ ID NO: 2555069 - RNA, 19 nt, Homo sapiens
  misc_RNA (1)...(19): siRNA sense strand
aggagauaguggaucggaa

SEQ ID NO: 2555070 - RNA, 19 nt, Homo sapiens
  misc_RNA (1)...(19): siRNA sense strand
agauaguggaucggaaaua

SEQ ID NO: 2555071 - RNA, 19 nt, Homo sapiens
  misc_RNA (1)...(19): siRNA sense strand
agaagaaagaggaggacug

SEQ ID NO: 2555072 - RNA, 19 nt, Homo sapiens
  misc_RNA (1)...(19): siRNA sense strand
ccaagaaggagauagugga

SEQ ID NO: 2555073 - RNA, 19 nt, Homo sapiens
  misc_RNA (1)...(19): siRNA sense strand
ggaagauauugaaaggcaa

SEQ ID NO: 2555074 - RNA, 19 nt, Homo sapiens
  misc_RNA (1)...(19): siRNA sense strand
agagaugagaagaaagaaa

SEQ ID NO: 2555075 - RNA, 19 nt, Homo sapiens
  misc_RNA (1)...(19): siRNA sense strand
gaaccaaaacaaaggaaaa

SEQ ID NO: 2555076 - RNA, 19 nt, Homo sapiens
  misc_RNA (1)...(19): siRNA sense strand
agucaauggagcagagaau

SEQ ID NO: 2555077 - RNA, 19 nt, Homo sapiens
  misc_RNA (1)...(19): siRNA sense strand
aggcagaaauccaggcaga

SEQ ID NO: 2555078 - RNA, 19 nt, Homo sapiens
  misc_RNA (1)...(19): siRNA sense strand
aguuaaugucagagaaaga

SEQ ID NO: 2555079 - RNA, 19 nt, Homo sapiens
  misc_RNA (1)...(19): siRNA sense strand
gggaagauauugaaaggca

SEQ ID NO: 2555080 - RNA, 19 nt, Homo sapiens
  misc_RNA (1)...(19): siRNA sense strand
ccacaaaauuagcgacuau

SEQ ID NO: 2555081 - RNA, 19 nt, Homo sapiens
  misc_RNA (1)...(19): siRNA sense strand
uugcaguguuggagcuaaa

SEQ ID NO: 2555082 - RNA, 19 nt, Homo sapiens
  misc_RNA (1)...(19): siRNA sense strand
acaaauaacgaaagcucua

SEQ ID NO: 2555083 - RNA, 19 nt, Homo sapiens
  misc_RNA (1)...(19): siRNA sense strand
uccaagaaggcaagaguua

SEQ ID NO: 2555084 - RNA, 19 nt, Homo sapiens
  misc_RNA (1)...(19): siRNA sense strand
gaaugaaaguagucaggga

SEQ ID NO: 2555085 - RNA, 19 nt, Homo sapiens
  misc_RNA (1)...(19): siRNA sense strand
ccaaaguagcaguggaagu

SEQ ID NO: 2555086 - RNA, 19 nt, Homo sapiens
  misc_RNA (1)...(19): siRNA sense strand
agaucaaauucuucaggaa

SEQ ID NO: 2555087 - RNA, 19 nt, Homo sapiens
  misc_RNA (1)...(19): siRNA sense strand
gcuggagagaugagaagaa

SEQ ID NO: 2555088 - RNA, 19 nt, Homo sapiens
  misc_RNA (1)...(19): siRNA sense strand
guagaaagccauuugguca

SEQ ID NO: 2555089 - RNA, 19 nt, Homo sapiens
  misc_RNA (1)...(19): siRNA sense strand
augaaaguagucagggaaa

SEQ ID NO: 2555090 - RNA, 19 nt, Homo sapiens
  misc_RNA (1)...(19): siRNA sense strand
gggaaggugcaauggauga

SEQ ID NO: 2555091 - RNA, 19 nt, Homo sapiens
  misc_RNA (1)...(19): siRNA sense strand
uauugaaaggcaaaggaaa

SEQ ID NO: 2555092 - RNA, 19 nt, Homo sapiens
  misc_RNA (1)...(19): siRNA sense strand
uggaacagcauguggugaa

SEQ ID NO: 2555093 - RNA, 19 nt, Homo sapiens
  misc_RNA (1)...(19): siRNA sense strand
ccacacaugagaagaucaa

SEQ ID NO: 2555094 - RNA, 19 nt, Homo sapiens
  misc_RNA (1)...(19): siRNA sense strand
gugcaauggaugagcuuca

SEQ ID NO: 2555095 - RNA, 19 nt, Homo sapiens
  misc_RNA (1)...(19): siRNA sense strand
gaugauuugcucagggcua

SEQ ID NO: 2555096 - RNA, 19 nt, Homo sapiens
  misc_RNA (1)...(19): siRNA sense strand
uagaauacugugaaggcaa

SEQ ID NO: 2555097 - RNA, 19 nt, Homo sapiens
  misc_RNA (1)...(19): siRNA sense strand
gcuuuagugaaguguauaa

SEQ ID NO: 2555098 - RNA, 19 nt, Homo sapiens
  misc_RNA (1)...(19): siRNA sense strand
gcuaugguguagauggaau

SEQ ID NO: 2555099 - RNA, 19 nt, Homo sapiens
  misc_RNA (1)...(19): siRNA sense strand
gagaaagaagcucggucua

SEQ ID NO: 2555100 - RNA, 19 nt, Homo sapiens
  misc_RNA (1)...(19): siRNA sense strand
ugaagauacaucagcuuaa

SEQ ID NO: 2555101 - RNA, 19 nt, Homo sapiens
  misc_RNA (1)...(19): siRNA sense strand
guuuggaaagagucagaaa

SEQ ID NO: 2555102 - RNA, 19 nt, Homo sapiens
  misc_RNA (1)...(19): siRNA sense strand
ugaaaagaguacacaagaa

SEQ ID NO: 2555103 - RNA, 19 nt, Homo sapiens
  misc_RNA (1)...(19): siRNA sense strand
ucaauggagcagagaauga

SEQ ID NO: 2555104 - RNA, 19 nt, Homo sapiens
  misc_RNA (1)...(19): siRNA sense strand
gagaugagaagaaagaaaa

SEQ ID NO: 2555105 - RNA, 19 nt, Homo sapiens
  misc_RNA (1)...(19): siRNA sense strand
acacaugagaagaucaaau

SEQ ID NO: 2555106 - RNA, 19 nt, Homo sapiens
  misc_RNA (1)...(19): siRNA sense strand
ggagaagaaacaaucggaa

SEQ ID NO: 2555107 - RNA, 19 nt, Homo sapiens
  misc_RNA (1)...(19): siRNA sense strand
aaucagagacaccggagaa

SEQ ID NO: 2555108 - RNA, 19 nt, Homo sapiens
  misc_RNA (1)...(19): siRNA sense strand
caagcagagagaagaguau

SEQ ID NO: 2555109 - RNA, 19 nt, Homo sapiens
  misc_RNA (1)...(19): siRNA sense strand
caaacuuagacuaggacau

SEQ ID NO: 2555110 - RNA, 19 nt, Homo sapiens
  misc_RNA (1)...(19): siRNA sense strand
aggaagaggcagaaaucca

SEQ ID NO: 2555111 - RNA, 19 nt, Homo sapiens
  misc_RNA (1)...(19): siRNA sense strand
gcaacaagaaugggugaau

SEQ ID NO: 2555112 - RNA, 19 nt, Homo sapiens
  misc_RNA (1)...(19): siRNA sense strand
guucaaagaucacccaaca

SEQ ID NO: 2555113 - RNA, 19 nt, Homo sapiens
  misc_RNA (1)...(19): siRNA sense strand
uggcuuuagugaaguguau

SEQ ID NO: 2555114 - RNA, 19 nt, Homo sapiens
  misc_RNA (1)...(19): siRNA sense strand
gugaaguguauaaggcuuu

SEQ ID NO: 2555115 - RNA, 19 nt, Homo sapiens
  misc_RNA (1)...(19): siRNA sense strand
ggcaaauagaugaacaaca

SEQ ID NO: 2555116 - RNA, 19 nt, Homo sapiens
  misc_RNA (1)...(19): siRNA sense strand
ugaaaguagucagggaaaa

SEQ ID NO: 2555117 - RNA, 19 nt, Homo sapiens
  misc_RNA (1)...(19): siRNA sense strand
cuaccaauucugaaccaaa

SEQ ID NO: 2555118 - RNA, 19 nt, Homo sapiens
  misc_RNA (1)...(19): siRNA sense strand
ccacaaacaugccugcaga

SEQ ID NO: 2555119 - RNA, 19 nt, Homo sapiens
  misc_RNA (1)...(19): siRNA sense strand
aaaggaaacuucuagccaa

SEQ ID NO: 2555120 - RNA, 19 nt, Homo sapiens
  misc_RNA (1)...(19): siRNA sense strand
ucaugaacaggaagaaauu

SEQ ID NO: 2555121 - RNA, 19 nt, Homo sapiens
  misc_RNA (1)...(19): siRNA sense strand
gcuguuuggcauaucgaaa

SEQ ID NO: 2555122 - RNA, 19 nt, Homo sapiens
  misc_RNA (1)...(19): siRNA sense strand
acggcaaauagaugaacaa

SEQ ID NO: 2555123 - RNA, 19 nt, Homo sapiens
  misc_RNA (1)...(19): siRNA sense strand
agcuaaagccucaacaaau

SEQ ID NO: 2555124 - RNA, 19 nt, Homo sapiens
  misc_RNA (1)...(19): siRNA sense strand
uggcagaauaucaugaaca

SEQ ID NO: 2555125 - RNA, 19 nt, Homo sapiens
  misc_RNA (1)...(19): siRNA sense strand
agaauacugugaaggcaau

SEQ ID NO: 2555126 - RNA, 19 nt, Homo sapiens
  misc_RNA (1)...(19): siRNA sense strand
cagcauguggugaaaucaa

SEQ ID NO: 2555127 - RNA, 19 nt, Homo sapiens
  misc_RNA (1)...(19): siRNA sense strand
cagaauaucaugaacagga

SEQ ID NO: 2555128 - RNA, 19 nt, Homo sapiens
  misc_RNA (1)...(19): siRNA sense strand
caaagaucacccaacauua

SEQ ID NO: 2555129 - RNA, 19 nt, Homo sapiens
  misc_RNA (1)...(19): siRNA sense strand
gcaucaagauuaaacccaa

SEQ ID NO: 2555130 - RNA, 19 nt, Homo sapiens
  misc_RNA (1)...(19): siRNA sense strand
ccucaguaggcaaguuaaa

SEQ ID NO: 2555131 - RNA, 19 nt, Homo sapiens
  misc_RNA (1)...(19): siRNA sense strand
gguauaggaaagagaugau

SEQ ID NO: 2555132 - RNA, 19 nt, Homo sapiens
  misc_RNA (1)...(19): siRNA sense strand
ggaagugguuuauugguca

SEQ ID NO: 2555133 - RNA, 19 nt, Homo sapiens
  misc_RNA (1)...(19): siRNA sense strand
ugauagaaacccugaaaau

SEQ ID NO: 2555134 - RNA, 19 nt, Homo sapiens
  misc_RNA (1)...(19): siRNA sense strand
cgggaugccaaauggguau

SEQ ID NO: 2555135 - RNA, 19 nt, Homo sapiens
  misc_RNA (1)...(19): siRNA sense strand
cgaagaauaaugaagcuca

SEQ ID NO: 2555136 - RNA, 19 nt, Homo sapiens
  misc_RNA (1)...(19): siRNA sense strand
agauuaaacccaacgggau

SEQ ID NO: 2555137 - RNA, 19 nt, Homo sapiens
  misc_RNA (1)...(19): siRNA sense strand
gauuaaacccaacgggaug

SEQ ID NO: 2555138 - RNA, 19 nt, Homo sapiens
  misc_RNA (1)...(19): siRNA sense strand
cuuguaggacucugguuaa

SEQ ID NO: 2555139 - RNA, 19 nt, Homo sapiens
  misc_RNA (1)...(19): siRNA sense strand
gguaucacacuauggccaa

SEQ ID NO: 2555140 - RNA, 19 nt, Homo sapiens
  misc_RNA (1)...(19): siRNA sense strand
aggaaagcaaugagagauu

SEQ ID NO: 2555141 - RNA, 19 nt, Homo sapiens
  misc_RNA (1)...(19): siRNA sense strand
ucauaaucguagaggacau

SEQ ID NO: 2555142 - RNA, 19 nt, Homo sapiens
  misc_RNA (1)...(19): siRNA sense strand
cauugaacauggaaggaga

SEQ ID NO: 2555143 - RNA, 19 nt, Homo sapiens
  misc_RNA (1)...(19): siRNA sense strand
cuggagaugaagaggucaa

SEQ ID NO: 2555144 - RNA, 19 nt, Homo sapiens
  misc_RNA (1)...(19): siRNA sense strand
acuuaaaagaagggagaaa

SEQ ID NO: 2555145 - RNA, 19 nt, Homo sapiens
  misc_RNA (1)...(19): siRNA sense strand
gcucauaaucguagaggac

SEQ ID NO: 2555146 - RNA, 19 nt, Homo sapiens
  misc_RNA (1)...(19): siRNA sense strand
aauaaaggaaaccaggaaa

SEQ ID NO: 2555147 - RNA, 19 nt, Homo sapiens
  misc_RNA (1)...(19): siRNA sense strand
gaacuuaaaagaagggaga

SEQ ID NO: 2555148 - RNA, 19 nt, Homo sapiens
  misc_RNA (1)...(19): siRNA sense strand
aggacauaaugauggugaa

SEQ ID NO: 2555149 - RNA, 19 nt, Homo sapiens
  misc_RNA (1)...(19): siRNA sense strand
aaugagaaguguuggccau

SEQ ID NO: 2555150 - RNA, 19 nt, Homo sapiens
  misc_RNA (1)...(19): siRNA sense strand
gugucaaauaugagaaacu

SEQ ID NO: 2555151 - RNA, 19 nt, Homo sapiens
  misc_RNA (1)...(19): siRNA sense strand
augagaaacuauaugcaga

SEQ ID NO: 2555152 - RNA, 19 nt, Homo sapiens
  misc_RNA (1)...(19): siRNA sense strand
cggucaacuuucaguggau

SEQ ID NO: 2555153 - RNA, 19 nt, Homo sapiens
  misc_RNA (1)...(19): siRNA sense strand
aaguguuggccaugagaau

SEQ ID NO: 2555154 - RNA, 19 nt, Homo sapiens
  misc_RNA (1)...(19): siRNA sense strand
cgagaaaauaugcgacaga

SEQ ID NO: 2555155 - RNA, 19 nt, Homo sapiens
  misc_RNA (1)...(19): siRNA sense strand
ugguagagggagagcucau

SEQ ID NO: 2555156 - RNA, 19 nt, Homo sapiens
  misc_RNA (1)...(19): siRNA sense strand
caggaggaauaaaggaaac

SEQ ID NO: 2555157 - RNA, 19 nt, Homo sapiens
  misc_RNA (1)...(19): siRNA sense strand
agucaaagaacaagaagac

SEQ ID NO: 2555158 - RNA, 19 nt, Homo sapiens
  misc_RNA (1)...(19): siRNA sense strand
uggugucaaauaugagaaa

SEQ ID NO: 2555159 - RNA, 19 nt, Homo sapiens
  misc_RNA (1)...(19): siRNA sense strand
ggaauaaaggaaaccagga

SEQ ID NO: 2555160 - RNA, 19 nt, Homo sapiens
  misc_RNA (1)...(19): siRNA sense strand
aagucaaagaacaagaaga

SEQ ID NO: 2555161 - RNA, 19 nt, Homo sapiens
  misc_RNA (1)...(19): siRNA sense strand
augaagaggucaaccagga

SEQ ID NO: 2555162 - RNA, 19 nt, Homo sapiens
  misc_RNA (1)...(19): siRNA sense strand
guacaaaccaggacgacac

SEQ ID NO: 2555163 - RNA, 19 nt, Homo sapiens
  misc_RNA (1)...(19): siRNA sense strand
uagaaagaaacuucgguca

SEQ ID NO: 2555164 - RNA, 19 nt, Homo sapiens
  misc_RNA (1)...(19): siRNA sense strand
acauggaaggagaucaaau

SEQ ID NO: 2555165 - RNA, 19 nt, Homo sapiens
  misc_RNA (1)...(19): siRNA sense strand
ccgcagcauagaagggaaa

SEQ ID NO: 2555166 - RNA, 19 nt, Homo sapiens
  misc_RNA (1)...(19): siRNA sense strand
ccgaaugggaccaguggaa

SEQ ID NO: 2555167 - RNA, 19 nt, Homo sapiens
  misc_RNA (1)...(19): siRNA sense strand
gaagaaagaaugcggcaga

SEQ ID NO: 2555168 - RNA, 19 nt, Homo sapiens
  misc_RNA (1)...(19): siRNA sense strand
ggggauaguuuacgggcaa

SEQ ID NO: 2555169 - RNA, 19 nt, Homo sapiens
  misc_RNA (1)...(19): siRNA sense strand
gaaacuaacagaagcccaa

SEQ ID NO: 2555170 - RNA, 19 nt, Homo sapiens
  misc_RNA (1)...(19): siRNA sense strand
cccaaagggacaugaggaa

SEQ ID NO: 2555171 - RNA, 19 nt, Homo sapiens
  misc_RNA (1)...(19): siRNA sense strand
agaaagaaugcggcagaaa

SEQ ID NO: 2555172 - RNA, 19 nt, Homo sapiens
  misc_RNA (1)...(19): siRNA sense strand
cgggacaagcaaagcggaa

SEQ ID NO: 2555173 - RNA, 19 nt, Homo sapiens
  misc_RNA (1)...(19): siRNA sense strand
agaagaaacaauacgcauu

SEQ ID NO: 2555174 - RNA, 19 nt, Homo sapiens
  misc_RNA (1)...(19): siRNA sense strand
cuagagaaggcucgagaga

SEQ ID NO: 2555175 - RNA, 19 nt, Homo sapiens
  misc_RNA (1)...(19): siRNA sense strand
acagaagcccaaagggaca

SEQ ID NO: 2555176 - RNA, 19 nt, Homo sapiens
  misc_RNA (1)...(19): siRNA sense strand
gaccaguggaagcgguaua

SEQ ID NO: 2555177 - RNA, 19 nt, Homo sapiens
  misc_RNA (1)...(19): siRNA sense strand
cgguauagcagcaagucuu

SEQ ID NO: 2555178 - RNA, 19 nt, Homo sapiens
  misc_RNA (1)...(19): siRNA sense strand
aagcggagacuaagggaca

SEQ ID NO: 2555179 - RNA, 19 nt, Homo sapiens
  misc_RNA (1)...(19): siRNA sense strand
caggaaauguacaagcuga

SEQ ID NO: 2555180 - RNA, 19 nt, Homo sapiens
  misc_RNA (1)...(19): siRNA sense strand
uuucagaguuacugcaaca

SEQ ID NO: 2555181 - RNA, 19 nt, Homo sapiens
  misc_RNA (1)...(19): siRNA sense strand
gggacauucaagagacaca

SEQ ID NO: 2555182 - RNA, 19 nt, Homo sapiens
  misc_RNA (1)...(19): siRNA sense strand
ggacaagcaaagcggaacu

SEQ ID NO: 2555183 - RNA, 19 nt, Homo sapiens
  misc_RNA (1)...(19): siRNA sense strand
gcauuuacucuuugagacu

SEQ ID NO: 2555184 - RNA, 19 nt, Homo sapiens
  misc_RNA (1)...(19): siRNA sense strand
caaagggacaugaggaacu

SEQ ID NO: 2555185 - RNA, 19 nt, Homo sapiens
  misc_RNA (1)...(19): siRNA sense strand
cagaagaaacaauacgcau

SEQ ID NO: 2555186 - RNA, 19 nt, Homo sapiens
  misc_RNA (1)...(19): siRNA sense strand
gggcaaaccaucugcugga

SEQ ID NO: 2555187 - RNA, 19 nt, Homo sapiens
  misc_RNA (1)...(19): siRNA sense strand
uaacagaagcccaaaggga

SEQ ID NO: 2555188 - RNA, 19 nt, Homo sapiens
  misc_RNA (1)...(19): siRNA sense strand
ggacagaaucgcugaaaac

SEQ ID NO: 2555189 - RNA, 19 nt, Homo sapiens
  misc_RNA (1)...(19): siRNA sense strand
ucgcaagagcacaugaaaa

SEQ ID NO: 2555190 - RNA, 19 nt, Homo sapiens
  misc_RNA (1)...(19): siRNA sense strand
ccuggaaagucgugacaag

SEQ ID NO: 2555191 - RNA, 19 nt, Homo sapiens
  misc_RNA (1)...(19): siRNA sense strand
gggauaguuuacgggcaaa

SEQ ID NO: 2555192 - RNA, 19 nt, Homo sapiens
  misc_RNA (1)...(19): siRNA sense strand
cagccauucucuucgaaau

SEQ ID NO: 2555193 - RNA, 19 nt, Homo sapiens
  misc_RNA (1)...(19): siRNA sense strand
ccuucuuuggauagugaaa

SEQ ID NO: 2555194 - RNA, 19 nt, Homo sapiens
  misc_RNA (1)...(19): siRNA sense strand
guccauugcacguaggaga

SEQ ID NO: 2555195 - RNA, 19 nt, Homo sapiens
  misc_RNA (1)...(19): siRNA sense strand
ccgagcagaucuggaggaa

SEQ ID NO: 2555196 - RNA, 19 nt, Homo sapiens
  misc_RNA (1)...(19): siRNA sense strand
aagaaagaaugcggcagaa

SEQ ID NO: 2555197 - RNA, 19 nt, Homo sapiens
  misc_RNA (1)...(19): siRNA sense strand
ggaccucagaagaaacaau

SEQ ID NO: 2555198 - RNA, 19 nt, Homo sapiens
  misc_RNA (1)...(19): siRNA sense strand
aggaaauguacaagcugau

SEQ ID NO: 2555199 - RNA, 19 nt, Homo sapiens
  misc_RNA (1)...(19): siRNA sense strand
cuagaaagcuccuggugac

SEQ ID NO: 2555200 - RNA, 19 nt, Homo sapiens
  misc_RNA (1)...(19): siRNA sense strand
ccuagaaagcuccugguga

SEQ ID NO: 2555201 - RNA, 19 nt, Homo sapiens
  misc_RNA (1)...(19): siRNA sense strand
gggaccaguggaagcggua

SEQ ID NO: 2555202 - RNA, 19 nt, Homo sapiens
  misc_RNA (1)...(19): siRNA sense strand
ugcugaauuuggugauauu

SEQ ID NO: 2555203 - RNA, 19 nt, Homo sapiens
  misc_RNA (1)...(19): siRNA sense strand
aaagaaugcggcagaaaau

SEQ ID NO: 2555204 - RNA, 19 nt, Homo sapiens
  misc_RNA (1)...(19): siRNA sense strand
gggcaaauccagaucccaa

SEQ ID NO: 2555205 - RNA, 19 nt, Homo sapiens
  misc_RNA (1)...(19): siRNA sense strand
uggaaagggcaaauggaau

SEQ ID NO: 2555206 - RNA, 19 nt, Homo sapiens
  misc_RNA (1)...(19): siRNA sense strand
agguggaggugguggcaga

SEQ ID NO: 2555207 - RNA, 19 nt, Homo sapiens
  misc_RNA (1)...(19): siRNA sense strand
aaauccaggucgaggucaa

SEQ ID NO: 2555208 - RNA, 19 nt, Homo sapiens
  misc_RNA (1)...(19): siRNA sense strand
cauacuggcagcagggcaa

SEQ ID NO: 2555209 - RNA, 19 nt, Homo sapiens
  misc_RNA (1)...(19): siRNA sense strand
agagaauagaugacucaaa

SEQ ID NO: 2555210 - RNA, 19 nt, Homo sapiens
  misc_RNA (1)...(19): siRNA sense strand
gcgaaggagccgaagccau

SEQ ID NO: 2555211 - RNA, 19 nt, Homo sapiens
  misc_RNA (1)...(19): siRNA sense strand
gaauggagcuggaugguag

SEQ ID NO: 2555212 - RNA, 19 nt, Homo sapiens
  misc_RNA (1)...(19): siRNA sense strand
gaggcuauggaaagggcaa

SEQ ID NO: 2555213 - RNA, 19 nt, Homo sapiens
  misc_RNA (1)...(19): siRNA sense strand
gggcaaauggaauggagcu

SEQ ID NO: 2555214 - RNA, 19 nt, Homo sapiens
  misc_RNA (1)...(19): siRNA sense strand
cuucgagggcagagagucu

SEQ ID NO: 2555215 - RNA, 19 nt, Homo sapiens
  misc_RNA (1)...(19): siRNA sense strand
caaauggaauggagcugga

SEQ ID NO: 2555216 - RNA, 19 nt, Homo sapiens
  misc_RNA (1)...(19): siRNA sense strand
auggaaagggcaaauggaa

SEQ ID NO: 2555217 - RNA, 19 nt, Homo sapiens
  misc_RNA (1)...(19): siRNA sense strand
agacauucucauagacguu

SEQ ID NO: 2555218 - RNA, 19 nt, Homo sapiens
  misc_RNA (1)...(19): siRNA sense strand
acucaaaagucaugcguaa

SEQ ID NO: 2555219 - RNA, 19 nt, Homo sapiens
  misc_RNA (1)...(19): siRNA sense strand
gguuaaaagaacugggaau

SEQ ID NO: 2555220 - RNA, 19 nt, Homo sapiens
  misc_RNA (1)...(19): siRNA sense strand
ccugaaauuuacuggguca

SEQ ID NO: 2555221 - RNA, 19 nt, Homo sapiens
  misc_RNA (1)...(19): siRNA sense strand
cuggaaagcuugaugcuga

SEQ ID NO: 2555222 - RNA, 19 nt, Homo sapiens
  misc_RNA (1)...(19): siRNA sense strand
cguaaaugucacaaccaaa

SEQ ID NO: 2555223 - RNA, 19 nt, Homo sapiens
  misc_RNA (1)...(19): siRNA sense strand
ggucacucccauuggaaau

SEQ ID NO: 2555224 - RNA, 19 nt, Homo sapiens
  misc_RNA (1)...(19): siRNA sense strand
cauacagaauagugagugu

SEQ ID NO: 2555225 - RNA, 19 nt, Homo sapiens
  misc_RNA (1)...(19): siRNA sense strand
ggugacagcgagaaagaca

SEQ ID NO: 2555226 - RNA, 19 nt, Homo sapiens
  misc_RNA (1)...(19): siRNA sense strand
uggaaagcuugaugcugaa

SEQ ID NO: 2555227 - RNA, 19 nt, Homo sapiens
  misc_RNA (1)...(19): siRNA sense strand
ugaaauucuuagaccucaa

SEQ ID NO: 2555228 - RNA, 19 nt, Homo sapiens
  misc_RNA (1)...(19): siRNA sense strand
agacaaagaugguucugca

SEQ ID NO: 2555229 - RNA, 19 nt, Homo sapiens
  misc_RNA (1)...(19): siRNA sense strand
ucacaaagcuggaagccac

SEQ ID NO: 2555230 - RNA, 19 nt, Homo sapiens
  misc_RNA (1)...(19): siRNA sense strand
cgagaaagacaaagauggu

SEQ ID NO: 2555231 - RNA, 19 nt, Homo sapiens
  misc_RNA (1)...(19): siRNA sense strand
cggagaaaacccugugauu

SEQ ID NO: 2555232 - RNA, 19 nt, Homo sapiens
  misc_RNA (1)...(19): siRNA sense strand
gaaucaacaauaugggcga

SEQ ID NO: 2555233 - RNA, 19 nt, Homo sapiens
  misc_RNA (1)...(19): siRNA sense strand
gaucaguauccauagcaau

SEQ ID NO: 2555234 - RNA, 19 nt, Homo sapiens
  misc_RNA (1)...(19): siRNA sense strand
uguuauagcagcuugccaa

SEQ ID NO: 2555235 - RNA, 19 nt, Homo sapiens
  misc_RNA (1)...(19): siRNA sense strand
cagucaacuuacagagaag

SEQ ID NO: 2555236 - RNA, 19 nt, Homo sapiens
  misc_RNA (1)...(19): siRNA sense strand
ucccauuggaaauaagaua

SEQ ID NO: 2555237 - RNA, 19 nt, Homo sapiens
  misc_RNA (1)...(19): siRNA sense strand
caucuuaguguccuggaaa

SEQ ID NO: 2555238 - RNA, 19 nt, Homo sapiens
  misc_RNA (1)...(19): siRNA sense strand
agaucaguauccauagcaa

SEQ ID NO: 2555239 - RNA, 19 nt, Homo sapiens
  misc_RNA (1)...(19): siRNA sense strand
cccauuggaaauaagauaa

SEQ ID NO: 2555240 - RNA, 19 nt, Homo sapiens
  misc_RNA (1)...(19): siRNA sense strand
cgcaaauuugagaagcuua

SEQ ID NO: 2555241 - RNA, 19 nt, Homo sapiens
  misc_RNA (1)...(19): siRNA sense strand
gugacagcgagaaagacaa

SEQ ID NO: 2555242 - RNA, 19 nt, Homo sapiens
  misc_RNA (1)...(19): siRNA sense strand
uggauagccuugagagccu

SEQ ID NO: 2555243 - RNA, 19 nt, Homo sapiens
  misc_RNA (1)...(19): siRNA sense strand
gaaauaagauaacugugga

SEQ ID NO: 2555244 - RNA, 19 nt, Homo sapiens
  misc_RNA (1)...(19): siRNA sense strand
agaaagacaaagaugguuc

SEQ ID NO: 2555245 - RNA, 19 nt, Homo sapiens
  misc_RNA (1)...(19): siRNA sense strand
ggaaaugaugacagagaaa

SEQ ID NO: 2555246 - RNA, 19 nt, Homo sapiens
  misc_RNA (1)...(19): siRNA sense strand
acagagaaguguugagcaa

SEQ ID NO: 2555247 - RNA, 19 nt, Homo sapiens
  misc_RNA (1)...(19): siRNA sense strand
gagaagagaacgagaacau

SEQ ID NO: 2555248 - RNA, 19 nt, Homo sapiens
  misc_RNA (1)...(19): siRNA sense strand
aguuaaagacuguggaaga

SEQ ID NO: 2555249 - RNA, 19 nt, Homo sapiens
  misc_RNA (1)...(19): siRNA sense strand
uggaagagaaagagaaaga

SEQ ID NO: 2555250 - RNA, 19 nt, Homo sapiens
  misc_RNA (1)...(19): siRNA sense strand
ucagaaagagagaaagaaa

SEQ ID NO: 2555251 - RNA, 19 nt, Homo sapiens
  misc_RNA (1)...(19): siRNA sense strand
ugaaagaagcugaugaaau

SEQ ID NO: 2555252 - RNA, 19 nt, Homo sapiens
  misc_RNA (1)...(19): siRNA sense strand
ucaaguaguguuagggaaa

SEQ ID NO: 2555253 - RNA, 19 nt, Homo sapiens
  misc_RNA (1)...(19): siRNA sense strand
cuguugaguuggaggcuaa

SEQ ID NO: 2555254 - RNA, 19 nt, Homo sapiens
  misc_RNA (1)...(19): siRNA sense strand
cuaaagaagaggagcugaa

SEQ ID NO: 2555255 - RNA, 19 nt, Homo sapiens
  misc_RNA (1)...(19): siRNA sense strand
agaguaaauuuguggccaa

SEQ ID NO: 2555256 - RNA, 19 nt, Homo sapiens
  misc_RNA (1)...(19): siRNA sense strand
caucaaagauuccuggcaa

SEQ ID NO: 2555257 - RNA, 19 nt, Homo sapiens
  misc_RNA (1)...(19): siRNA sense strand
aaauaagauugcuggaaga

SEQ ID NO: 2555258 - RNA, 19 nt, Homo sapiens
  misc_RNA (1)...(19): siRNA sense strand
cagaaagagagaaagaaau

SEQ ID NO: 2555259 - RNA, 19 nt, Homo sapiens
  misc_RNA (1)...(19): siRNA sense strand
caaaggagaaagagcacua

SEQ ID NO: 2555260 - RNA, 19 nt, Homo sapiens
  misc_RNA (1)...(19): siRNA sense strand
ugaaagaucuguugacuga

SEQ ID NO: 2555261 - RNA, 19 nt, Homo sapiens
  misc_RNA (1)...(19): siRNA sense strand
guuugaagaacuugagauu

SEQ ID NO: 2555262 - RNA, 19 nt, Homo sapiens
  misc_RNA (1)...(19): siRNA sense strand
gaaaagaggaacagaugaa

SEQ ID NO: 2555263 - RNA, 19 nt, Homo sapiens
  misc_RNA (1)...(19): siRNA sense strand
agagaaagaccuagccaau

SEQ ID NO: 2555264 - RNA, 19 nt, Homo sapiens
  misc_RNA (1)...(19): siRNA sense strand
gugaaugguugcauggauu

SEQ ID NO: 2555265 - RNA, 19 nt, Homo sapiens
  misc_RNA (1)...(19): siRNA sense strand
agagaaguguugagcaaga

SEQ ID NO: 2555266 - RNA, 19 nt, Homo sapiens
  misc_RNA (1)...(19): siRNA sense strand
agaaagauggaaagaucaa

SEQ ID NO: 2555267 - RNA, 19 nt, Homo sapiens
  misc_RNA (1)...(19): siRNA sense strand
acauaaagugauugcagaa

SEQ ID NO: 2555268 - RNA, 19 nt, Homo sapiens
  misc_RNA (1)...(19): siRNA sense strand
caguugaacaccagaggaa

SEQ ID NO: 2555269 - RNA, 19 nt, Homo sapiens
  misc_RNA (1)...(19): siRNA sense strand
aagacagaaugaagagcua

SEQ ID NO: 2555270 - RNA, 19 nt, Homo sapiens
  misc_RNA (1)...(19): siRNA sense strand
agagaaagaaagaagcaau

SEQ ID NO: 2555271 - RNA, 19 nt, Homo sapiens
  misc_RNA (1)...(19): siRNA sense strand
ugaugaaguucuugcaaaa

SEQ ID NO: 2555272 - RNA, 19 nt, Homo sapiens
  misc_RNA (1)...(19): siRNA sense strand
gguuauaacaaggaugaaa

SEQ ID NO: 2555273 - RNA, 19 nt, Homo sapiens
  misc_RNA (1)...(19): siRNA sense strand
agagaaagagaaagaccua

SEQ ID NO: 2555274 - RNA, 19 nt, Homo sapiens
  misc_RNA (1)...(19): siRNA sense strand
gggcagaagaagucuaaaa

SEQ ID NO: 2555275 - RNA, 19 nt, Homo sapiens
  misc_RNA (1)...(19): siRNA sense strand
gcuuuaaagaagucaagua

SEQ ID NO: 2555276 - RNA, 19 nt, Homo sapiens
  misc_RNA (1)...(19): siRNA sense strand
ggaaaaugguauacugaga

SEQ ID NO: 2555277 - RNA, 19 nt, Homo sapiens
  misc_RNA (1)...(19): siRNA sense strand
ggaagagaacagcggaaca

SEQ ID NO: 2555278 - RNA, 19 nt, Homo sapiens
  misc_RNA (1)...(19): siRNA sense strand
cuucagaacaagagcuaga

SEQ ID NO: 2555279 - RNA, 19 nt, Homo sapiens
  misc_RNA (1)...(19): siRNA sense strand
caggaaaugaugacagaga

SEQ ID NO: 2555280 - RNA, 19 nt, Homo sapiens
  misc_RNA (1)...(19): siRNA sense strand
gguuaagguucuagagcac

SEQ ID NO: 2555281 - RNA, 19 nt, Homo sapiens
  misc_RNA (1)...(19): siRNA sense strand
uguuacagcuagaguguga

SEQ ID NO: 2555282 - RNA, 19 nt, Homo sapiens
  misc_RNA (1)...(19): siRNA sense strand
uugcagaaacagaaggaau

SEQ ID NO: 2555283 - RNA, 19 nt, Homo sapiens
  misc_RNA (1)...(19): siRNA sense strand
guugaaagaagcugaugaa

SEQ ID NO: 2555284 - RNA, 19 nt, Homo sapiens
  misc_RNA (1)...(19): siRNA sense strand
uguugaaggcacaguuaaa

SEQ ID NO: 2555285 - RNA, 19 nt, Homo sapiens
  misc_RNA (1)...(19): siRNA sense strand
agaaagaagcaaugugguu

SEQ ID NO: 2555286 - RNA, 19 nt, Homo sapiens
  misc_RNA (1)...(19): siRNA sense strand
guucaagacuuaaaagcua

SEQ ID NO: 2555287 - RNA, 19 nt, Homo sapiens
  misc_RNA (1)...(19): siRNA sense strand
gaaugagcugacugagaaa

SEQ ID NO: 2555288 - RNA, 19 nt, Homo sapiens
  misc_RNA (1)...(19): siRNA sense strand
aaagaggaacagaugaaua

SEQ ID NO: 2555289 - RNA, 19 nt, Homo sapiens
  misc_RNA (1)...(19): siRNA sense strand
aggaaguagcacaacauaa

SEQ ID NO: 2555290 - RNA, 19 nt, Homo sapiens
  misc_RNA (1)...(19): siRNA sense strand
caacauaacuugaaagagg

SEQ ID NO: 2555291 - RNA, 19 nt, Homo sapiens
  misc_RNA (1)...(19): siRNA sense strand
gacagaaugaagagcuaaa

SEQ ID NO: 2555292 - RNA, 19 nt, Homo sapiens
  misc_RNA (1)...(19): siRNA sense strand
ggagaauugacuacgcuua

SEQ ID NO: 2555293 - RNA, 19 nt, Homo sapiens
  misc_RNA (1)...(19): siRNA sense strand
caaguaaagaagaggaacu

SEQ ID NO: 2555294 - RNA, 19 nt, Homo sapiens
  misc_RNA (1)...(19): siRNA sense strand
gagcgauuaagaagcgaaa

SEQ ID NO: 2555295 - RNA, 19 nt, Homo sapiens
  misc_RNA (1)...(19): siRNA sense strand
uaaacaagaaaguggauca

SEQ ID NO: 2555296 - RNA, 19 nt, Homo sapiens
  misc_RNA (1)...(19): siRNA sense strand
aggaaaugaugacagagaa

SEQ ID NO: 2555297 - RNA, 19 nt, Homo sapiens
  misc_RNA (1)...(19): siRNA sense strand
aaaugaugacagagaaaga

SEQ ID NO: 2555298 - RNA, 19 nt, Homo sapiens
  misc_RNA (1)...(19): siRNA sense strand
ugagaaaacaggaaagcua

SEQ ID NO: 2555299 - RNA, 19 nt, Homo sapiens
  misc_RNA (1)...(19): siRNA sense strand
caucaaagaaagugacgca

SEQ ID NO: 2555300 - RNA, 19 nt, Homo sapiens
  misc_RNA (1)...(19): siRNA sense strand
uagacuugcuaaaggagaa

SEQ ID NO: 2555301 - RNA, 19 nt, Homo sapiens
  misc_RNA (1)...(19): siRNA sense strand
caggaagagaacagcggaa

SEQ ID NO: 2555302 - RNA, 19 nt, Homo sapiens
  misc_RNA (1)...(19): siRNA sense strand
ggaagaauuacuugaaacu

SEQ ID NO: 2555303 - RNA, 19 nt, Homo sapiens
  misc_RNA (1)...(19): siRNA sense strand
guugaacaccagaggaaga

SEQ ID NO: 2555304 - RNA, 19 nt, Homo sapiens
  misc_RNA (1)...(19): siRNA sense strand
ggcuggaacuucaggguca

SEQ ID NO: 2555305 - RNA, 19 nt, Homo sapiens
  misc_RNA (1)...(19): siRNA sense strand
gaacaaaaugaaagacaga

SEQ ID NO: 2555306 - RNA, 19 nt, Homo sapiens
  misc_RNA (1)...(19): siRNA sense strand
aguagaagggauccagaaa

SEQ ID NO: 2555307 - RNA, 19 nt, Homo sapiens
  misc_RNA (1)...(19): siRNA sense strand
aggaggaggaagaggccua

SEQ ID NO: 2555308 - RNA, 19 nt, Homo sapiens
  misc_RNA (1)...(19): siRNA sense strand
cggacuuggaguagggaca

SEQ ID NO: 2555309 - RNA, 19 nt, Homo sapiens
  misc_RNA (1)...(19): siRNA sense strand
uggagaaggagcuggccaa

SEQ ID NO: 2555310 - RNA, 19 nt, Homo sapiens
  misc_RNA (1)...(19): siRNA sense strand
caagacgacucgagggacu

SEQ ID NO: 2555311 - RNA, 19 nt, Homo sapiens
  misc_RNA (1)...(19): siRNA sense strand
cacgaguaauggugggaga

SEQ ID NO: 2555312 - RNA, 19 nt, Homo sapiens
  misc_RNA (1)...(19): siRNA sense strand
gggacgaccucuaugacca

SEQ ID NO: 2555313 - RNA, 19 nt, Homo sapiens
  misc_RNA (1)...(19): siRNA sense strand
ccgcaguggcuacaggauu

SEQ ID NO: 2555314 - RNA, 19 nt, Homo sapiens
  misc_RNA (1)...(19): siRNA sense strand
acaaugaggccuacgcaga

SEQ ID NO: 2555315 - RNA, 19 nt, Homo sapiens
  misc_RNA (1)...(19): siRNA sense strand
cccacaaggaggaggagga

SEQ ID NO: 2555316 - RNA, 19 nt, Homo sapiens
  misc_RNA (1)...(19): siRNA sense strand
aggaggaggaagaggccua

SEQ ID NO: 2555317 - RNA, 19 nt, Homo sapiens
  misc_RNA (1)...(19): siRNA sense strand
cggacuuggaguagggaca

SEQ ID NO: 2555318 - RNA, 19 nt, Homo sapiens
  misc_RNA (1)...(19): siRNA sense strand
uggagaaggagcuggccaa

SEQ ID NO: 2555319 - RNA, 19 nt, Homo sapiens
  misc_RNA (1)...(19): siRNA sense strand
caagacgacucgagggacu

SEQ ID NO: 2555320 - RNA, 19 nt, Homo sapiens
  misc_RNA (1)...(19): siRNA sense strand
cacgaguaauggugggaga

SEQ ID NO: 2555321 - RNA, 19 nt, Homo sapiens
  misc_RNA (1)...(19): siRNA sense strand
gggacgaccucuaugacca

SEQ ID NO: 2555322 - RNA, 19 nt, Homo sapiens
  misc_RNA (1)...(19): siRNA sense strand
ccgcaguggcuacaggauu

SEQ ID NO: 2555323 - RNA, 19 nt, Homo sapiens
  misc_RNA (1)...(19): siRNA sense strand
acaaugaggccuacgcaga

SEQ ID NO: 2555324 - RNA, 19 nt, Homo sapiens
  misc_RNA (1)...(19): siRNA sense strand
cccacaaggaggaggagga

SEQ ID NO: 2555325 - RNA, 19 nt, Homo sapiens
  misc_RNA (1)...(19): siRNA sense strand
aggaggaggaagaggccua

SEQ ID NO: 2555326 - RNA, 19 nt, Homo sapiens
  misc_RNA (1)...(19): siRNA sense strand
cggacuuggaguagggaca

SEQ ID NO: 2555327 - RNA, 19 nt, Homo sapiens
  misc_RNA (1)...(19): siRNA sense strand
uggagaaggagcuggccaa

SEQ ID NO: 2555328 - RNA, 19 nt, Homo sapiens
  misc_RNA (1)...(19): siRNA sense strand
caagacgacucgagggacu

SEQ ID NO: 2555329 - RNA, 19 nt, Homo sapiens
  misc_RNA (1)...(19): siRNA sense strand
cacgaguaauggugggaga

SEQ ID NO: 2555330 - RNA, 19 nt, Homo sapiens
  misc_RNA (1)...(19): siRNA sense strand
gggacgaccucuaugacca

SEQ ID NO: 2555331 - RNA, 19 nt, Homo sapiens
  misc_RNA (1)...(19): siRNA sense strand
ccgcaguggcuacaggauu

SEQ ID NO: 2555332 - RNA, 19 nt, Homo sapiens
  misc_RNA (1)...(19): siRNA sense strand
acaaugaggccuacgcaga

SEQ ID NO: 2555333 - RNA, 19 nt, Homo sapiens
  misc_RNA (1)...(19): siRNA sense strand
cccacaaggaggaggagga

SEQ ID NO: 2555334 - RNA, 19 nt, Homo sapiens
  misc_RNA (1)...(19): siRNA sense strand
aggaagacaaguuggagaa

SEQ ID NO: 2555335 - RNA, 19 nt, Homo sapiens
  misc_RNA (1)...(19): siRNA sense strand
uguacagggaucagaauaa

SEQ ID NO: 2555336 - RNA, 19 nt, Homo sapiens
  misc_RNA (1)...(19): siRNA sense strand
acauaaaggaagacaaguu

SEQ ID NO: 2555337 - RNA, 19 nt, Homo sapiens
  misc_RNA (1)...(19): siRNA sense strand
gcuauuugaaacaaggaaa

SEQ ID NO: 2555338 - RNA, 19 nt, Homo sapiens
  misc_RNA (1)...(19): siRNA sense strand
cuuugaagaaugagcacaa

SEQ ID NO: 2555339 - RNA, 19 nt, Homo sapiens
  misc_RNA (1)...(19): siRNA sense strand
guaaaagagcucuggaaau

SEQ ID NO: 2555340 - RNA, 19 nt, Homo sapiens
  misc_RNA (1)...(19): siRNA sense strand
aagaaagagaagaaugcaa

SEQ ID NO: 2555341 - RNA, 19 nt, Homo sapiens
  misc_RNA (1)...(19): siRNA sense strand
acaaagaagcagagccguu

SEQ ID NO: 2555342 - RNA, 19 nt, Homo sapiens
  misc_RNA (1)...(19): siRNA sense strand
aagcagaaacacuguacaa

SEQ ID NO: 2555343 - RNA, 19 nt, Homo sapiens
  misc_RNA (1)...(19): siRNA sense strand
gugagaaaacuuugggcaa

SEQ ID NO: 2555344 - RNA, 19 nt, Homo sapiens
  misc_RNA (1)...(19): siRNA sense strand
cugcagaaacguuagaaga

SEQ ID NO: 2555345 - RNA, 19 nt, Homo sapiens
  misc_RNA (1)...(19): siRNA sense strand
ugguguacauaaaggaaga

SEQ ID NO: 2555346 - RNA, 19 nt, Homo sapiens
  misc_RNA (1)...(19): siRNA sense strand
ggcuggaagcuuugaagaa

SEQ ID NO: 2555347 - RNA, 19 nt, Homo sapiens
  misc_RNA (1)...(19): siRNA sense strand
ggaaguacaaagaagcaga

SEQ ID NO: 2555348 - RNA, 19 nt, Homo sapiens
  misc_RNA (1)...(19): siRNA sense strand
gcucuggaaauccgagaaa

SEQ ID NO: 2555349 - RNA, 19 nt, Homo sapiens
  misc_RNA (1)...(19): siRNA sense strand
guucaagcaagcagaaaca

SEQ ID NO: 2555350 - RNA, 19 nt, Homo sapiens
  misc_RNA (1)...(19): siRNA sense strand
agaaacugcagaagaguga

SEQ ID NO: 2555351 - RNA, 19 nt, Homo sapiens
  misc_RNA (1)...(19): siRNA sense strand
gguaaaagagggaaguaca

SEQ ID NO: 2555352 - RNA, 19 nt, Homo sapiens
  misc_RNA (1)...(19): siRNA sense strand
guaaaagagggaaguacaa

SEQ ID NO: 2555353 - RNA, 19 nt, Homo sapiens
  misc_RNA (1)...(19): siRNA sense strand
ccaacguggcuaagacgaa

SEQ ID NO: 2555354 - RNA, 19 nt, Homo sapiens
  misc_RNA (1)...(19): siRNA sense strand
ugcagaaacguuagaagaa

SEQ ID NO: 2555355 - RNA, 19 nt, Homo sapiens
  misc_RNA (1)...(19): siRNA sense strand
cuuggcuauucgugagaaa

SEQ ID NO: 2555356 - RNA, 19 nt, Homo sapiens
  misc_RNA (1)...(19): siRNA sense strand
ugcugaagaaagagaagaa

SEQ ID NO: 2555357 - RNA, 19 nt, Homo sapiens
  misc_RNA (1)...(19): siRNA sense strand
cugcaaaguugauagucca

SEQ ID NO: 2555358 - RNA, 19 nt, Homo sapiens
  misc_RNA (1)...(19): siRNA sense strand
guuugaagaaagaugauga

SEQ ID NO: 2555359 - RNA, 19 nt, Homo sapiens
  misc_RNA (1)...(19): siRNA sense strand
ugaagacgacccagggcaa

SEQ ID NO: 2555360 - RNA, 19 nt, Homo sapiens
  misc_RNA (1)...(19): siRNA sense strand
aagacaaguuggagaagcu

SEQ ID NO: 2555361 - RNA, 19 nt, Homo sapiens
  misc_RNA (1)...(19): siRNA sense strand
gagaagaagcaucuggagu

SEQ ID NO: 2555362 - RNA, 19 nt, Homo sapiens
  misc_RNA (1)...(19): siRNA sense strand
guguacagggaucagaaua

SEQ ID NO: 2555363 - RNA, 19 nt, Homo sapiens
  misc_RNA (1)...(19): siRNA sense strand
gaguauggcggcugguaca

SEQ ID NO: 2555364 - RNA, 19 nt, Homo sapiens
  misc_RNA (1)...(19): siRNA sense strand
aauacaaagaugcagcuaa

SEQ ID NO: 2555365 - RNA, 19 nt, Homo sapiens
  misc_RNA (1)...(19): siRNA sense strand
acaaacagaggguggcaga

SEQ ID NO: 2555366 - RNA, 19 nt, Homo sapiens
  misc_RNA (1)...(19): siRNA sense strand
aggcaaauuugaagcugca

SEQ ID NO: 2555367 - RNA, 19 nt, Homo sapiens
  misc_RNA (1)...(19): siRNA sense strand
uggcucaacuggaggagga

SEQ ID NO: 2555368 - RNA, 19 nt, Homo sapiens
  misc_RNA (1)...(19): siRNA sense strand
cguuagaagaagcugcuau

SEQ ID NO: 2555369 - RNA, 19 nt, Homo sapiens
  misc_RNA (1)...(19): siRNA sense strand
cugaaguguuugaagaaag

SEQ ID NO: 2555370 - RNA, 19 nt, Homo sapiens
  misc_RNA (1)...(19): siRNA sense strand
ugagugaggcacagguuau

SEQ ID NO: 2555371 - RNA, 19 nt, Homo sapiens
  misc_RNA (1)...(19): siRNA sense strand
uguacauaaaggaagacaa

SEQ ID NO: 2555372 - RNA, 19 nt, Homo sapiens
  misc_RNA (1)...(19): siRNA sense strand
uguaaaagagcucuggaaa

SEQ ID NO: 2555373 - RNA, 19 nt, Homo sapiens
  misc_RNA (1)...(19): siRNA sense strand
agaagaaugcaaaggaaag

SEQ ID NO: 2555374 - RNA, 19 nt, Homo sapiens
  misc_RNA (1)...(19): siRNA sense strand
aacuggaggaggagaagaa

SEQ ID NO: 2555375 - RNA, 19 nt, Homo sapiens
  misc_RNA (1)...(19): siRNA sense strand
aaaguaauuugguggagga

SEQ ID NO: 2555376 - RNA, 19 nt, Homo sapiens
  misc_RNA (1)...(19): siRNA sense strand
gcacagguuaugauggcuu

SEQ ID NO: 2555377 - RNA, 19 nt, Homo sapiens
  misc_RNA (1)...(19): siRNA sense strand
ucgagaucuaccagacaaa

SEQ ID NO: 2555378 - RNA, 19 nt, Homo sapiens
  misc_RNA (1)...(19): siRNA sense strand
gaggggaggaagugaguau

SEQ ID NO: 2555379 - RNA, 19 nt, Homo sapiens
  misc_RNA (1)...(19): siRNA sense strand
aaggaagacaaguuggaga

SEQ ID NO: 2555380 - RNA, 19 nt, Homo sapiens
  misc_RNA (1)...(19): siRNA sense strand
ugaagaaagaugaugaaag

SEQ ID NO: 2555381 - RNA, 19 nt, Homo sapiens
  misc_RNA (1)...(19): siRNA sense strand
cuguggaguccgagaagca

SEQ ID NO: 2555382 - RNA, 19 nt, Homo sapiens
  misc_RNA (1)...(19): siRNA sense strand
acugaaguguuugaagaaa

SEQ ID NO: 2555383 - RNA, 19 nt, Homo sapiens
  misc_RNA (1)...(19): siRNA sense strand
uggccaacacgcagcagaa

SEQ ID NO: 2555384 - RNA, 19 nt, Homo sapiens
  misc_RNA (1)...(19): siRNA sense strand
aggaagacaaguuggagaa

SEQ ID NO: 2555385 - RNA, 19 nt, Homo sapiens
  misc_RNA (1)...(19): siRNA sense strand
uguacagggaucagaauaa

SEQ ID NO: 2555386 - RNA, 19 nt, Homo sapiens
  misc_RNA (1)...(19): siRNA sense strand
acauaaaggaagacaaguu

SEQ ID NO: 2555387 - RNA, 19 nt, Homo sapiens
  misc_RNA (1)...(19): siRNA sense strand
gcuauuugaaacaaggaaa

SEQ ID NO: 2555388 - RNA, 19 nt, Homo sapiens
  misc_RNA (1)...(19): siRNA sense strand
cuuugaagaaugagcacaa

SEQ ID NO: 2555389 - RNA, 19 nt, Homo sapiens
  misc_RNA (1)...(19): siRNA sense strand
guaaaagagcucuggaaau

SEQ ID NO: 2555390 - RNA, 19 nt, Homo sapiens
  misc_RNA (1)...(19): siRNA sense strand
aagaaagagaagaaugcaa

SEQ ID NO: 2555391 - RNA, 19 nt, Homo sapiens
  misc_RNA (1)...(19): siRNA sense strand
acaaagaagcagagccguu

SEQ ID NO: 2555392 - RNA, 19 nt, Homo sapiens
  misc_RNA (1)...(19): siRNA sense strand
aagcagaaacacuguacaa

SEQ ID NO: 2555393 - RNA, 19 nt, Homo sapiens
  misc_RNA (1)...(19): siRNA sense strand
gugagaaaacuuugggcaa

SEQ ID NO: 2555394 - RNA, 19 nt, Homo sapiens
  misc_RNA (1)...(19): siRNA sense strand
cugcagaaacguuagaaga

SEQ ID NO: 2555395 - RNA, 19 nt, Homo sapiens
  misc_RNA (1)...(19): siRNA sense strand
ugguguacauaaaggaaga

SEQ ID NO: 2555396 - RNA, 19 nt, Homo sapiens
  misc_RNA (1)...(19): siRNA sense strand
ggcuggaagcuuugaagaa

SEQ ID NO: 2555397 - RNA, 19 nt, Homo sapiens
  misc_RNA (1)...(19): siRNA sense strand
ggaaguacaaagaagcaga

SEQ ID NO: 2555398 - RNA, 19 nt, Homo sapiens
  misc_RNA (1)...(19): siRNA sense strand
gcucuggaaauccgagaaa

SEQ ID NO: 2555399 - RNA, 19 nt, Homo sapiens
  misc_RNA (1)...(19): siRNA sense strand
guucaagcaagcagaaaca

SEQ ID NO: 2555400 - RNA, 19 nt, Homo sapiens
  misc_RNA (1)...(19): siRNA sense strand
agaaacugcagaagaguga

SEQ ID NO: 2555401 - RNA, 19 nt, Homo sapiens
  misc_RNA (1)...(19): siRNA sense strand
gguaaaagagggaaguaca

SEQ ID NO: 2555402 - RNA, 19 nt, Homo sapiens
  misc_RNA (1)...(19): siRNA sense strand
guaaaagagggaaguacaa

SEQ ID NO: 2555403 - RNA, 19 nt, Homo sapiens
  misc_RNA (1)...(19): siRNA sense strand
ccaacguggcuaagacgaa

SEQ ID NO: 2555404 - RNA, 19 nt, Homo sapiens
  misc_RNA (1)...(19): siRNA sense strand
ugcagaaacguuagaagaa

SEQ ID NO: 2555405 - RNA, 19 nt, Homo sapiens
  misc_RNA (1)...(19): siRNA sense strand
cuuggcuauucgugagaaa

SEQ ID NO: 2555406 - RNA, 19 nt, Homo sapiens
  misc_RNA (1)...(19): siRNA sense strand
ugcugaagaaagagaagaa

SEQ ID NO: 2555407 - RNA, 19 nt, Homo sapiens
  misc_RNA (1)...(19): siRNA sense strand
cugcaaaguugauagucca

SEQ ID NO: 2555408 - RNA, 19 nt, Homo sapiens
  misc_RNA (1)...(19): siRNA sense strand
guuugaagaaagaugauga

SEQ ID NO: 2555409 - RNA, 19 nt, Homo sapiens
  misc_RNA (1)...(19): siRNA sense strand
ugaagacgacccagggcaa

SEQ ID NO: 2555410 - RNA, 19 nt, Homo sapiens
  misc_RNA (1)...(19): siRNA sense strand
aagacaaguuggagaagcu

SEQ ID NO: 2555411 - RNA, 19 nt, Homo sapiens
  misc_RNA (1)...(19): siRNA sense strand
gagaagaagcaucuggagu

SEQ ID NO: 2555412 - RNA, 19 nt, Homo sapiens
  misc_RNA (1)...(19): siRNA sense strand
guguacagggaucagaaua

SEQ ID NO: 2555413 - RNA, 19 nt, Homo sapiens
  misc_RNA (1)...(19): siRNA sense strand
gaguauggcggcugguaca

SEQ ID NO: 2555414 - RNA, 19 nt, Homo sapiens
  misc_RNA (1)...(19): siRNA sense strand
aauacaaagaugcagcuaa

SEQ ID NO: 2555415 - RNA, 19 nt, Homo sapiens
  misc_RNA (1)...(19): siRNA sense strand
acaaacagaggguggcaga

SEQ ID NO: 2555416 - RNA, 19 nt, Homo sapiens
  misc_RNA (1)...(19): siRNA sense strand
aggcaaauuugaagcugca

SEQ ID NO: 2555417 - RNA, 19 nt, Homo sapiens
  misc_RNA (1)...(19): siRNA sense strand
uggcucaacuggaggagga

SEQ ID NO: 2555418 - RNA, 19 nt, Homo sapiens
  misc_RNA (1)...(19): siRNA sense strand
cguuagaagaagcugcuau

SEQ ID NO: 2555419 - RNA, 19 nt, Homo sapiens
  misc_RNA (1)...(19): siRNA sense strand
cugaaguguuugaagaaag

SEQ ID NO: 2555420 - RNA, 19 nt, Homo sapiens
  misc_RNA (1)...(19): siRNA sense strand
ugagugaggcacagguuau

SEQ ID NO: 2555421 - RNA, 19 nt, Homo sapiens
  misc_RNA (1)...(19): siRNA sense strand
uguacauaaaggaagacaa

SEQ ID NO: 2555422 - RNA, 19 nt, Homo sapiens
  misc_RNA (1)...(19): siRNA sense strand
uguaaaagagcucuggaaa

SEQ ID NO: 2555423 - RNA, 19 nt, Homo sapiens
  misc_RNA (1)...(19): siRNA sense strand
agaagaaugcaaaggaaag

SEQ ID NO: 2555424 - RNA, 19 nt, Homo sapiens
  misc_RNA (1)...(19): siRNA sense strand
aacuggaggaggagaagaa

SEQ ID NO: 2555425 - RNA, 19 nt, Homo sapiens
  misc_RNA (1)...(19): siRNA sense strand
aaaguaauuugguggagga

SEQ ID NO: 2555426 - RNA, 19 nt, Homo sapiens
  misc_RNA (1)...(19): siRNA sense strand
gcacagguuaugauggcuu

SEQ ID NO: 2555427 - RNA, 19 nt, Homo sapiens
  misc_RNA (1)...(19): siRNA sense strand
ucgagaucuaccagacaaa

SEQ ID NO: 2555428 - RNA, 19 nt, Homo sapiens
  misc_RNA (1)...(19): siRNA sense strand
gaggggaggaagugaguau

SEQ ID NO: 2555429 - RNA, 19 nt, Homo sapiens
  misc_RNA (1)...(19): siRNA sense strand
aaggaagacaaguuggaga

SEQ ID NO: 2555430 - RNA, 19 nt, Homo sapiens
  misc_RNA (1)...(19): siRNA sense strand
ugaagaaagaugaugaaag

SEQ ID NO: 2555431 - RNA, 19 nt, Homo sapiens
  misc_RNA (1)...(19): siRNA sense strand
cuguggaguccgagaagca

SEQ ID NO: 2555432 - RNA, 19 nt, Homo sapiens
  misc_RNA (1)...(19): siRNA sense strand
acugaaguguuugaagaaa

SEQ ID NO: 2555433 - RNA, 19 nt, Homo sapiens
  misc_RNA (1)...(19): siRNA sense strand
uggccaacacgcagcagaa

SEQ ID NO: 2555434 - RNA, 19 nt, Homo sapiens
  misc_RNA (1)...(19): siRNA sense strand
cggaaagcgacguggugaa

SEQ ID NO: 2555435 - RNA, 19 nt, Homo sapiens
  misc_RNA (1)...(19): siRNA sense strand
guacaaggauggaaaggca

SEQ ID NO: 2555436 - RNA, 19 nt, Homo sapiens
  misc_RNA (1)...(19): siRNA sense strand
acaaaggcucuguggacaa

SEQ ID NO: 2555437 - RNA, 19 nt, Homo sapiens
  misc_RNA (1)...(19): siRNA sense strand
ccuacguguucgugagaga

SEQ ID NO: 2555438 - RNA, 19 nt, Homo sapiens
  misc_RNA (1)...(19): siRNA sense strand
ccgugugggcugaguuuaa

SEQ ID NO: 2555439 - RNA, 19 nt, Homo sapiens
  misc_RNA (1)...(19): siRNA sense strand
gguacaaagacgagaggcu

SEQ ID NO: 2555440 - RNA, 19 nt, Homo sapiens
  misc_RNA (1)...(19): siRNA sense strand
gauaagggcagcauggaga

SEQ ID NO: 2555441 - RNA, 19 nt, Homo sapiens
  misc_RNA (1)...(19): siRNA sense strand
uuguggagggaaagaauaa

SEQ ID NO: 2555442 - RNA, 19 nt, Homo sapiens
  misc_RNA (1)...(19): siRNA sense strand
ccgugaaaaugcugaaaga

SEQ ID NO: 2555443 - RNA, 19 nt, Homo sapiens
  misc_RNA (1)...(19): siRNA sense strand
gaguuugagcagauagaga

SEQ ID NO: 2555444 - RNA, 19 nt, Homo sapiens
  misc_RNA (1)...(19): siRNA sense strand
gcuacaaguacgagcaucu

SEQ ID NO: 2555445 - RNA, 19 nt, Homo sapiens
  misc_RNA (1)...(19): siRNA sense strand
gcugaggaccuguggcuga

SEQ ID NO: 2555446 - RNA, 19 nt, Homo sapiens
  misc_RNA (1)...(19): siRNA sense strand
gggagagcaccgaggucau

SEQ ID NO: 2555447 - RNA, 19 nt, Homo sapiens
  misc_RNA (1)...(19): siRNA sense strand
agugguacaaggauggaaa

SEQ ID NO: 2555448 - RNA, 19 nt, Homo sapiens
  misc_RNA (1)...(19): siRNA sense strand
gaugccagccagugggaau

SEQ ID NO: 2555449 - RNA, 19 nt, Homo sapiens
  misc_RNA (1)...(19): siRNA sense strand
caggagacgagcuggugaa

SEQ ID NO: 2555450 - RNA, 19 nt, Homo sapiens
  misc_RNA (1)...(19): siRNA sense strand
aggaagaggaggucugcau

SEQ ID NO: 2555451 - RNA, 19 nt, Homo sapiens
  misc_RNA (1)...(19): siRNA sense strand
uggacggccuggugaguga

SEQ ID NO: 2555452 - RNA, 19 nt, Homo sapiens
  misc_RNA (1)...(19): siRNA sense strand
ggaugaagacauuugagga

SEQ ID NO: 2555453 - RNA, 19 nt, Homo sapiens
  misc_RNA (1)...(19): siRNA sense strand
guggacaaccagacagaca

SEQ ID NO: 2555454 - RNA, 19 nt, Homo sapiens
  misc_RNA (1)...(19): siRNA sense strand
gcagauagagagcaggcau

SEQ ID NO: 2555455 - RNA, 19 nt, Homo sapiens
  misc_RNA (1)...(19): siRNA sense strand
ccugaaagcaucuucgaca

SEQ ID NO: 2555456 - RNA, 19 nt, Homo sapiens
  misc_RNA (1)...(19): siRNA sense strand
agaggcugcuggaggaaaa

SEQ ID NO: 2555457 - RNA, 19 nt, Homo sapiens
  misc_RNA (1)...(19): siRNA sense strand
cuggaggagcaaugcgaau

SEQ ID NO: 2555458 - RNA, 19 nt, Homo sapiens
  misc_RNA (1)...(19): siRNA sense strand
agggaaagaauaagacugu

SEQ ID NO: 2555459 - RNA, 19 nt, Homo sapiens
  misc_RNA (1)...(19): siRNA sense strand
acgagaggcugcuggagga

SEQ ID NO: 2555460 - RNA, 19 nt, Homo sapiens
  misc_RNA (1)...(19): siRNA sense strand
ggauggaguuccuggcuuc

SEQ ID NO: 2555461 - RNA, 19 nt, Homo sapiens
  misc_RNA (1)...(19): siRNA sense strand
gcaucuucgacaaggugua

SEQ ID NO: 2555462 - RNA, 19 nt, Homo sapiens
  misc_RNA (1)...(19): siRNA sense strand
cguaugugugcaaggccaa

SEQ ID NO: 2555463 - RNA, 19 nt, Homo sapiens
  misc_RNA (1)...(19): siRNA sense strand
cguggaaggcuccgaggau

SEQ ID NO: 2555464 - RNA, 19 nt, Homo sapiens
  misc_RNA (1)...(19): siRNA sense strand
guuuguggagggaaagaau

SEQ ID NO: 2555465 - RNA, 19 nt, Homo sapiens
  misc_RNA (1)...(19): siRNA sense strand
gguacaugccaacgacaca

SEQ ID NO: 2555466 - RNA, 19 nt, Homo sapiens
  misc_RNA (1)...(19): siRNA sense strand
aggagcuacuagagggcca

SEQ ID NO: 2555467 - RNA, 19 nt, Homo sapiens
  misc_RNA (1)...(19): siRNA sense strand
agguauuacaacugggugu

SEQ ID NO: 2555468 - RNA, 19 nt, Homo sapiens
  misc_RNA (1)...(19): siRNA sense strand
cuacaaaggcucuguggac

SEQ ID NO: 2555469 - RNA, 19 nt, Homo sapiens
  misc_RNA (1)...(19): siRNA sense strand
ccagacagacagugggaug

SEQ ID NO: 2555470 - RNA, 19 nt, Homo sapiens
  misc_RNA (1)...(19): siRNA sense strand
cggaaagcgacguggugaa

SEQ ID NO: 2555471 - RNA, 19 nt, Homo sapiens
  misc_RNA (1)...(19): siRNA sense strand
guacaaggauggaaaggca

SEQ ID NO: 2555472 - RNA, 19 nt, Homo sapiens
  misc_RNA (1)...(19): siRNA sense strand
acaaaggcucuguggacaa

SEQ ID NO: 2555473 - RNA, 19 nt, Homo sapiens
  misc_RNA (1)...(19): siRNA sense strand
ccuacguguucgugagaga

SEQ ID NO: 2555474 - RNA, 19 nt, Homo sapiens
  misc_RNA (1)...(19): siRNA sense strand
ccgugugggcugaguuuaa

SEQ ID NO: 2555475 - RNA, 19 nt, Homo sapiens
  misc_RNA (1)...(19): siRNA sense strand
gguacaaagacgagaggcu

SEQ ID NO: 2555476 - RNA, 19 nt, Homo sapiens
  misc_RNA (1)...(19): siRNA sense strand
gauaagggcagcauggaga

SEQ ID NO: 2555477 - RNA, 19 nt, Homo sapiens
  misc_RNA (1)...(19): siRNA sense strand
uuguggagggaaagaauaa

SEQ ID NO: 2555478 - RNA, 19 nt, Homo sapiens
  misc_RNA (1)...(19): siRNA sense strand
ccgugaaaaugcugaaaga

SEQ ID NO: 2555479 - RNA, 19 nt, Homo sapiens
  misc_RNA (1)...(19): siRNA sense strand
gaguuugagcagauagaga

SEQ ID NO: 2555480 - RNA, 19 nt, Homo sapiens
  misc_RNA (1)...(19): siRNA sense strand
gcuacaaguacgagcaucu

SEQ ID NO: 2555481 - RNA, 19 nt, Homo sapiens
  misc_RNA (1)...(19): siRNA sense strand
gcugaggaccuguggcuga

SEQ ID NO: 2555482 - RNA, 19 nt, Homo sapiens
  misc_RNA (1)...(19): siRNA sense strand
gggagagcaccgaggucau

SEQ ID NO: 2555483 - RNA, 19 nt, Homo sapiens
  misc_RNA (1)...(19): siRNA sense strand
agugguacaaggauggaaa

SEQ ID NO: 2555484 - RNA, 19 nt, Homo sapiens
  misc_RNA (1)...(19): siRNA sense strand
gaugccagccagugggaau

SEQ ID NO: 2555485 - RNA, 19 nt, Homo sapiens
  misc_RNA (1)...(19): siRNA sense strand
caggagacgagcuggugaa

SEQ ID NO: 2555486 - RNA, 19 nt, Homo sapiens
  misc_RNA (1)...(19): siRNA sense strand
aggaagaggaggucugcau

SEQ ID NO: 2555487 - RNA, 19 nt, Homo sapiens
  misc_RNA (1)...(19): siRNA sense strand
uggacggccuggugaguga

SEQ ID NO: 2555488 - RNA, 19 nt, Homo sapiens
  misc_RNA (1)...(19): siRNA sense strand
ggaugaagacauuugagga

SEQ ID NO: 2555489 - RNA, 19 nt, Homo sapiens
  misc_RNA (1)...(19): siRNA sense strand
guggacaaccagacagaca

SEQ ID NO: 2555490 - RNA, 19 nt, Homo sapiens
  misc_RNA (1)...(19): siRNA sense strand
gcagauagagagcaggcau

SEQ ID NO: 2555491 - RNA, 19 nt, Homo sapiens
  misc_RNA (1)...(19): siRNA sense strand
ccugaaagcaucuucgaca

SEQ ID NO: 2555492 - RNA, 19 nt, Homo sapiens
  misc_RNA (1)...(19): siRNA sense strand
agaggcugcuggaggaaaa

SEQ ID NO: 2555493 - RNA, 19 nt, Homo sapiens
  misc_RNA (1)...(19): siRNA sense strand
cuggaggagcaaugcgaau

SEQ ID NO: 2555494 - RNA, 19 nt, Homo sapiens
  misc_RNA (1)...(19): siRNA sense strand
agggaaagaauaagacugu

SEQ ID NO: 2555495 - RNA, 19 nt, Homo sapiens
  misc_RNA (1)...(19): siRNA sense strand
acgagaggcugcuggagga

SEQ ID NO: 2555496 - RNA, 19 nt, Homo sapiens
  misc_RNA (1)...(19): siRNA sense strand
ggauggaguuccuggcuuc

SEQ ID NO: 2555497 - RNA, 19 nt, Homo sapiens
  misc_RNA (1)...(19): siRNA sense strand
gcaucuucgacaaggugua

SEQ ID NO: 2555498 - RNA, 19 nt, Homo sapiens
  misc_RNA (1)...(19): siRNA sense strand
cguaugugugcaaggccaa

SEQ ID NO: 2555499 - RNA, 19 nt, Homo sapiens
  misc_RNA (1)...(19): siRNA sense strand
cguggaaggcuccgaggau

SEQ ID NO: 2555500 - RNA, 19 nt, Homo sapiens
  misc_RNA (1)...(19): siRNA sense strand
guuuguggagggaaagaau

SEQ ID NO: 2555501 - RNA, 19 nt, Homo sapiens
  misc_RNA (1)...(19): siRNA sense strand
gguacaugccaacgacaca

SEQ ID NO: 2555502 - RNA, 19 nt, Homo sapiens
  misc_RNA (1)...(19): siRNA sense strand
aggagcuacuagagggcca

SEQ ID NO: 2555503 - RNA, 19 nt, Homo sapiens
  misc_RNA (1)...(19): siRNA sense strand
agguauuacaacugggugu

SEQ ID NO: 2555504 - RNA, 19 nt, Homo sapiens
  misc_RNA (1)...(19): siRNA sense strand
cuacaaaggcucuguggac

SEQ ID NO: 2555505 - RNA, 19 nt, Homo sapiens
  misc_RNA (1)...(19): siRNA sense strand
ccagacagacagugggaug

SEQ ID NO: 2555506 - RNA, 19 nt, Homo sapiens
  misc_RNA (1)...(19): siRNA sense strand
ggaaaggaauagaggccaa

SEQ ID NO: 2555507 - RNA, 19 nt, Homo sapiens
  misc_RNA (1)...(19): siRNA sense strand
cagaagaggaagaggagga

SEQ ID NO: 2555508 - RNA, 19 nt, Homo sapiens
  misc_RNA (1)...(19): siRNA sense strand
ucgcaauguccuugugaaa

SEQ ID NO: 2555509 - RNA, 19 nt, Homo sapiens
  misc_RNA (1)...(19): siRNA sense strand
aagaggaagaggaggagua

SEQ ID NO: 2555510 - RNA, 19 nt, Homo sapiens
  misc_RNA (1)...(19): siRNA sense strand
cccugaaguuugugggaga

SEQ ID NO: 2555511 - RNA, 19 nt, Homo sapiens
  misc_RNA (1)...(19): siRNA sense strand
ggguacagcuggaagagga

SEQ ID NO: 2555512 - RNA, 19 nt, Homo sapiens
  misc_RNA (1)...(19): siRNA sense strand
ggaaaagagaaaugagguu

SEQ ID NO: 2555513 - RNA, 19 nt, Homo sapiens
  misc_RNA (1)...(19): siRNA sense strand
uugaagaacaagagaggca

SEQ ID NO: 2555514 - RNA, 19 nt, Homo sapiens
  misc_RNA (1)...(19): siRNA sense strand
gggaugcagaagaggaaga

SEQ ID NO: 2555515 - RNA, 19 nt, Homo sapiens
  misc_RNA (1)...(19): siRNA sense strand
ggacggaacuauguggcaa

SEQ ID NO: 2555516 - RNA, 19 nt, Homo sapiens
  misc_RNA (1)...(19): siRNA sense strand
aagagaggcaggaaaggaa

SEQ ID NO: 2555517 - RNA, 19 nt, Homo sapiens
  misc_RNA (1)...(19): siRNA sense strand
agugaagguggcaggaauu

SEQ ID NO: 2555518 - RNA, 19 nt, Homo sapiens
  misc_RNA (1)...(19): siRNA sense strand
gcagaacacugucagguga

SEQ ID NO: 2555519 - RNA, 19 nt, Homo sapiens
  misc_RNA (1)...(19): siRNA sense strand
uggaagaggaggugcuguu

SEQ ID NO: 2555520 - RNA, 19 nt, Homo sapiens
  misc_RNA (1)...(19): siRNA sense strand
cugccagcacugugauuua

SEQ ID NO: 2555521 - RNA, 19 nt, Homo sapiens
  misc_RNA (1)...(19): siRNA sense strand
uguaacaagaaguuggaga

SEQ ID NO: 2555522 - RNA, 19 nt, Homo sapiens
  misc_RNA (1)...(19): siRNA sense strand
cagacaagcuguaacccuu

SEQ ID NO: 2555523 - RNA, 19 nt, Homo sapiens
  misc_RNA (1)...(19): siRNA sense strand
gugaggagcucuacccaga

SEQ ID NO: 2555524 - RNA, 19 nt, Homo sapiens
  misc_RNA (1)...(19): siRNA sense strand
cugaauuucuagaugacca

SEQ ID NO: 2555525 - RNA, 19 nt, Homo sapiens
  misc_RNA (1)...(19): siRNA sense strand
gguggugaagagagugcaa

SEQ ID NO: 2555526 - RNA, 19 nt, Homo sapiens
  misc_RNA (1)...(19): siRNA sense strand
augcagaagaggaagagga

SEQ ID NO: 2555527 - RNA, 19 nt, Homo sapiens
  misc_RNA (1)...(19): siRNA sense strand
acauaaagggugcagcuga

SEQ ID NO: 2555528 - RNA, 19 nt, Homo sapiens
  misc_RNA (1)...(19): siRNA sense strand
cuuugaugggccugagcaa

SEQ ID NO: 2555529 - RNA, 19 nt, Homo sapiens
  misc_RNA (1)...(19): siRNA sense strand
ggcaggaauucccggguca

SEQ ID NO: 2555530 - RNA, 19 nt, Homo sapiens
  misc_RNA (1)...(19): siRNA sense strand
caucauuaucccaugugaa

SEQ ID NO: 2555531 - RNA, 19 nt, Homo sapiens
  misc_RNA (1)...(19): siRNA sense strand
uaaagaagcaugaggagac

SEQ ID NO: 2555532 - RNA, 19 nt, Homo sapiens
  misc_RNA (1)...(19): siRNA sense strand
agaggguggugaagagagu

SEQ ID NO: 2555533 - RNA, 19 nt, Homo sapiens
  misc_RNA (1)...(19): siRNA sense strand
acucagacagccaggacau

SEQ ID NO: 2555534 - RNA, 19 nt, Homo sapiens
  misc_RNA (1)...(19): siRNA sense strand
agaggaagaggaggaguaa

SEQ ID NO: 2555535 - RNA, 19 nt, Homo sapiens
  misc_RNA (1)...(19): siRNA sense strand
uugaugggccugagcaauu

SEQ ID NO: 2555536 - RNA, 19 nt, Homo sapiens
  misc_RNA (1)...(19): siRNA sense strand
uucucaaacugaaggaaca

SEQ ID NO: 2555537 - RNA, 19 nt, Homo sapiens
  misc_RNA (1)...(19): siRNA sense strand
gugcaaacuuggaugagga

SEQ ID NO: 2555538 - RNA, 19 nt, Homo sapiens
  misc_RNA (1)...(19): siRNA sense strand
agcaagaagaagacauuaa

SEQ ID NO: 2555539 - RNA, 19 nt, Homo sapiens
  misc_RNA (1)...(19): siRNA sense strand
aggugaagcaagaagaaga

SEQ ID NO: 2555540 - RNA, 19 nt, Homo sapiens
  misc_RNA (1)...(19): siRNA sense strand
cuauuacaguggaggugaa

SEQ ID NO: 2555541 - RNA, 19 nt, Homo sapiens
  misc_RNA (1)...(19): siRNA sense strand
aggagaagagggauggauu

SEQ ID NO: 2555542 - RNA, 19 nt, Homo sapiens
  misc_RNA (1)...(19): siRNA sense strand
aagcaauauuucugagcca

SEQ ID NO: 2555543 - RNA, 19 nt, Homo sapiens
  misc_RNA (1)...(19): siRNA sense strand
uguugaaagaggagcauca

SEQ ID NO: 2555544 - RNA, 19 nt, Homo sapiens
  misc_RNA (1)...(19): siRNA sense strand
agagcaaagagaagaacau

SEQ ID NO: 2555545 - RNA, 19 nt, Homo sapiens
  misc_RNA (1)...(19): siRNA sense strand
ccacauacaaagugcaaac

SEQ ID NO: 2555546 - RNA, 19 nt, Homo sapiens
  misc_RNA (1)...(19): siRNA sense strand
augccaaacaggagcuauu

SEQ ID NO: 2555547 - RNA, 19 nt, Homo sapiens
  misc_RNA (1)...(19): siRNA sense strand
guucaggagaagagggaug

SEQ ID NO: 2555548 - RNA, 19 nt, Homo sapiens
  misc_RNA (1)...(19): siRNA sense strand
gcaugaucuaccugaauau

SEQ ID NO: 2555549 - RNA, 19 nt, Homo sapiens
  misc_RNA (1)...(19): siRNA sense strand
agggauggauugaaaagaa

SEQ ID NO: 2555550 - RNA, 19 nt, Homo sapiens
  misc_RNA (1)...(19): siRNA sense strand
agguaauguuggaucacca

SEQ ID NO: 2555551 - RNA, 19 nt, Homo sapiens
  misc_RNA (1)...(19): siRNA sense strand
ccucuguugauaugagaau

SEQ ID NO: 2555552 - RNA, 19 nt, Homo sapiens
  misc_RNA (1)...(19): siRNA sense strand
cugcaaauguugaaagagg

SEQ ID NO: 2555553 - RNA, 19 nt, Homo sapiens
  misc_RNA (1)...(19): siRNA sense strand
gaaagauccuugucgccuu

SEQ ID NO: 2555554 - RNA, 19 nt, Homo sapiens
  misc_RNA (1)...(19): siRNA sense strand
uuuagagcaaagagaagaa

SEQ ID NO: 2555555 - RNA, 19 nt, Homo sapiens
  misc_RNA (1)...(19): siRNA sense strand
aggaaaccuuggugggauu

SEQ ID NO: 2555556 - RNA, 19 nt, Homo sapiens
  misc_RNA (1)...(19): siRNA sense strand
caaagaugucagagauuau

SEQ ID NO: 2555557 - RNA, 19 nt, Homo sapiens
  misc_RNA (1)...(19): siRNA sense strand
acaagguguucaugaggaa

SEQ ID NO: 2555558 - RNA, 19 nt, Homo sapiens
  misc_RNA (1)...(19): siRNA sense strand
acgaaaaucagaagggcaa

SEQ ID NO: 2555559 - RNA, 19 nt, Homo sapiens
  misc_RNA (1)...(19): siRNA sense strand
accagaagccagaggagua

SEQ ID NO: 2555560 - RNA, 19 nt, Homo sapiens
  misc_RNA (1)...(19): siRNA sense strand
gauacgaaggugaaggaga

SEQ ID NO: 2555561 - RNA, 19 nt, Homo sapiens
  misc_RNA (1)...(19): siRNA sense strand
cugaauacacagaguacuu

SEQ ID NO: 2555562 - RNA, 19 nt, Homo sapiens
  misc_RNA (1)...(19): siRNA sense strand
gagcagugucucagaagau

SEQ ID NO: 2555563 - RNA, 19 nt, Homo sapiens
  misc_RNA (1)...(19): siRNA sense strand
gagaaggugacaagaacau

SEQ ID NO: 2555564 - RNA, 19 nt, Homo sapiens
  misc_RNA (1)...(19): siRNA sense strand
gcgaaaucggaaaaggaaa

SEQ ID NO: 2555565 - RNA, 19 nt, Homo sapiens
  misc_RNA (1)...(19): siRNA sense strand
cgaaacacauggugcagga

SEQ ID NO: 2555566 - RNA, 19 nt, Homo sapiens
  misc_RNA (1)...(19): siRNA sense strand
ggggaaaguucuguggaaa

SEQ ID NO: 2555567 - RNA, 19 nt, Homo sapiens
  misc_RNA (1)...(19): siRNA sense strand
gggaaaguucuguggaaag

SEQ ID NO: 2555568 - RNA, 19 nt, Homo sapiens
  misc_RNA (1)...(19): siRNA sense strand
gcuuugaccuggagccuga

SEQ ID NO: 2555569 - RNA, 19 nt, Homo sapiens
  misc_RNA (1)...(19): siRNA sense strand
guauggaagcucugggcau

SEQ ID NO: 2555570 - RNA, 19 nt, Homo sapiens
  misc_RNA (1)...(19): siRNA sense strand
acgggaacuugguggauga

SEQ ID NO: 2555571 - RNA, 19 nt, Homo sapiens
  misc_RNA (1)...(19): siRNA sense strand
aaggagaaggugacaagaa

SEQ ID NO: 2555572 - RNA, 19 nt, Homo sapiens
  misc_RNA (1)...(19): siRNA sense strand
ggagaaggugacaagaaca

SEQ ID NO: 2555573 - RNA, 19 nt, Homo sapiens
  misc_RNA (1)...(19): siRNA sense strand
gugaugacgaccaggccaa

SEQ ID NO: 2555574 - RNA, 19 nt, Homo sapiens
  misc_RNA (1)...(19): siRNA sense strand
cgacagcgcgauagcaaaa

SEQ ID NO: 2555575 - RNA, 19 nt, Homo sapiens
  misc_RNA (1)...(19): siRNA sense strand
uggugagcccugugguuua

SEQ ID NO: 2555576 - RNA, 19 nt, Homo sapiens
  misc_RNA (1)...(19): siRNA sense strand
ggguauggugucuggacuu

SEQ ID NO: 2555577 - RNA, 19 nt, Homo sapiens
  misc_RNA (1)...(19): siRNA sense strand
gagaaaaugaaaauggaca

SEQ ID NO: 2555578 - RNA, 19 nt, Homo sapiens
  misc_RNA (1)...(19): siRNA sense strand
aagccugcaacuugggaaa

SEQ ID NO: 2555579 - RNA, 19 nt, Homo sapiens
  misc_RNA (1)...(19): siRNA sense strand
augggaugucagaaagaaa

SEQ ID NO: 2555580 - RNA, 19 nt, Homo sapiens
  misc_RNA (1)...(19): siRNA sense strand
cgauggagaaaaugaaaau

SEQ ID NO: 2555581 - RNA, 19 nt, Homo sapiens
  misc_RNA (1)...(19): siRNA sense strand
ggcauggaaucaggagaaa

SEQ ID NO: 2555582 - RNA, 19 nt, Homo sapiens
  misc_RNA (1)...(19): siRNA sense strand
cgaagucuuuugagggcaa

SEQ ID NO: 2555583 - RNA, 19 nt, Homo sapiens
  misc_RNA (1)...(19): siRNA sense strand
ccauaaaagaaggaaacaa

SEQ ID NO: 2555584 - RNA, 19 nt, Homo sapiens
  misc_RNA (1)...(19): siRNA sense strand
gguugcaagauaacagauu

SEQ ID NO: 2555585 - RNA, 19 nt, Homo sapiens
  misc_RNA (1)...(19): siRNA sense strand
ccacugggaacaugacaau

SEQ ID NO: 2555586 - RNA, 19 nt, Homo sapiens
  misc_RNA (1)...(19): siRNA sense strand
cagcaagacgggacccauu

SEQ ID NO: 2555587 - RNA, 19 nt, Homo sapiens
  misc_RNA (1)...(19): siRNA sense strand
acagcaaacgcaaggcgaa

SEQ ID NO: 2555588 - RNA, 19 nt, Homo sapiens
  misc_RNA (1)...(19): siRNA sense strand
aacacauggugcaggauuu

SEQ ID NO: 2555589 - RNA, 19 nt, Homo sapiens
  misc_RNA (1)...(19): siRNA sense strand
ccgacagcgcgauagcaaa

SEQ ID NO: 2555590 - RNA, 19 nt, Homo sapiens
  misc_RNA (1)...(19): siRNA sense strand
agaaacuggaugccugaaa

SEQ ID NO: 2555591 - RNA, 19 nt, Homo sapiens
  misc_RNA (1)...(19): siRNA sense strand
cagaaaagcccacggucau

SEQ ID NO: 2555592 - RNA, 19 nt, Homo sapiens
  misc_RNA (1)...(19): siRNA sense strand
gagaagaucgugaggggca

SEQ ID NO: 2555593 - RNA, 19 nt, Homo sapiens
  misc_RNA (1)...(19): siRNA sense strand
gaauggagcugcugggcug

SEQ ID NO: 2555594 - RNA, 19 nt, Homo sapiens
  misc_RNA (1)...(19): siRNA sense strand
acaaucacgugcagcucaa

SEQ ID NO: 2555595 - RNA, 19 nt, Homo sapiens
  misc_RNA (1)...(19): siRNA sense strand
ccaaccaaggggacagaaa

SEQ ID NO: 2555596 - RNA, 19 nt, Homo sapiens
  misc_RNA (1)...(19): siRNA sense strand
cugcaugaccuucugguau

SEQ ID NO: 2555597 - RNA, 19 nt, Homo sapiens
  misc_RNA (1)...(19): siRNA sense strand
ucgauuuggaggacagaga

SEQ ID NO: 2555598 - RNA, 19 nt, Homo sapiens
  misc_RNA (1)...(19): siRNA sense strand
cuacgaaacacauggugca

SEQ ID NO: 2555599 - RNA, 19 nt, Homo sapiens
  misc_RNA (1)...(19): siRNA sense strand
caacgauaaauguggcgau

SEQ ID NO: 2555600 - RNA, 19 nt, Homo sapiens
  misc_RNA (1)...(19): siRNA sense strand
ucaccauaaaagaaggaaa

SEQ ID NO: 2555601 - RNA, 19 nt, Homo sapiens
  misc_RNA (1)...(19): siRNA sense strand
gauuugaaguauacgguug

SEQ ID NO: 2555602 - RNA, 19 nt, Homo sapiens
  misc_RNA (1)...(19): siRNA sense strand
aacgauaaauguggcgaua

SEQ ID NO: 2555603 - RNA, 19 nt, Homo sapiens
  misc_RNA (1)...(19): siRNA sense strand
aggagaaggugacaagaac

SEQ ID NO: 2555604 - RNA, 19 nt, Homo sapiens
  misc_RNA (1)...(19): siRNA sense strand
ccugaacuacccugagaau

SEQ ID NO: 2555605 - RNA, 19 nt, Homo sapiens
  misc_RNA (1)...(19): siRNA sense strand
cgccaggauacgaagguga

SEQ ID NO: 2555606 - RNA, 19 nt, Homo sapiens
  misc_RNA (1)...(19): siRNA sense strand
gcacgugccauguggguaa

SEQ ID NO: 2555607 - RNA, 19 nt, Homo sapiens
  misc_RNA (1)...(19): siRNA sense strand
gcacgugccaugcggguaa

SEQ ID NO: 2555608 - RNA, 19 nt, Homo sapiens
  misc_RNA (1)...(19): siRNA sense strand
gcacgugccaugcggguaa

SEQ ID NO: 2555609 - RNA, 19 nt, Homo sapiens
  misc_RNA (1)...(19): siRNA sense strand
gcggacgaguugugccaaa

SEQ ID NO: 2555610 - RNA, 19 nt, Homo sapiens
  misc_RNA (1)...(19): siRNA sense strand
gugccaaggcugagaugau

SEQ ID NO: 2555611 - RNA, 19 nt, Homo sapiens
  misc_RNA (1)...(19): siRNA sense strand
gggucaaaggucacagcua

SEQ ID NO: 2555612 - RNA, 19 nt, Homo sapiens
  misc_RNA (1)...(19): siRNA sense strand
cagccuuccugcagaacua

SEQ ID NO: 2555613 - RNA, 19 nt, Homo sapiens
  misc_RNA (1)...(19): siRNA sense strand
ccuucagcguggaggccaa

SEQ ID NO: 2555614 - RNA, 19 nt, Homo sapiens
  misc_RNA (1)...(19): siRNA sense strand
gcguggaggccaagaacga

SEQ ID NO: 2555615 - RNA, 19 nt, Homo sapiens
  misc_RNA (1)...(19): siRNA sense strand
agaagaaguaucagaagga

SEQ ID NO: 2555616 - RNA, 19 nt, Homo sapiens
  misc_RNA (1)...(19): siRNA sense strand
agaagaaguaucagaagga

SEQ ID NO: 2555617 - RNA, 19 nt, Homo sapiens
  misc_RNA (1)...(19): siRNA sense strand
guaaagucguggugugcca

SEQ ID NO: 2555618 - RNA, 19 nt, Homo sapiens
  misc_RNA (1)...(19): siRNA sense strand
agaagaaguaucagaagga

SEQ ID NO: 2555619 - RNA, 19 nt, Homo sapiens
  misc_RNA (1)...(19): siRNA sense strand
guaaagucguggugugcca

SEQ ID NO: 2555620 - RNA, 19 nt, Homo sapiens
  misc_RNA (1)...(19): siRNA sense strand
cuggaggagugaagaacuu

SEQ ID NO: 2555621 - RNA, 19 nt, Homo sapiens
  misc_RNA (1)...(19): siRNA sense strand
ccucaagaacacuggcaga

SEQ ID NO: 2555622 - RNA, 19 nt, Homo sapiens
  misc_RNA (1)...(19): siRNA sense strand
gcagccagacugugagcua

SEQ ID NO: 2555623 - RNA, 19 nt, Homo sapiens
  misc_RNA (1)...(19): siRNA sense strand
gccgauacuugccgguaaa

SEQ ID NO: 2555624 - RNA, 19 nt, Homo sapiens
  misc_RNA (1)...(19): siRNA sense strand
uggccaaggcuauaggcua

SEQ ID NO: 2555625 - RNA, 19 nt, Homo sapiens
  misc_RNA (1)...(19): siRNA sense strand
cagagacaguggaagguca

SEQ ID NO: 2555626 - RNA, 19 nt, Homo sapiens
  misc_RNA (1)...(19): siRNA sense strand
cggugaacgguguggacau

SEQ ID NO: 2555627 - RNA, 19 nt, Homo sapiens
  misc_RNA (1)...(19): siRNA sense strand
cagagacaguggaagguca

SEQ ID NO: 2555628 - RNA, 19 nt, Homo sapiens
  misc_RNA (1)...(19): siRNA sense strand
cggugaacgguguggacau

SEQ ID NO: 2555629 - RNA, 19 nt, Homo sapiens
  misc_RNA (1)...(19): siRNA sense strand
cagagacaguggaagguca

SEQ ID NO: 2555630 - RNA, 19 nt, Homo sapiens
  misc_RNA (1)...(19): siRNA sense strand
cggugaacgguguggacau

SEQ ID NO: 2555631 - RNA, 19 nt, Homo sapiens
  misc_RNA (1)...(19): siRNA sense strand
cauaaggaaugaagugacu

SEQ ID NO: 2555632 - RNA, 19 nt, Homo sapiens
  misc_RNA (1)...(19): siRNA sense strand
ccuauguggucaagagugu

SEQ ID NO: 2555633 - RNA, 19 nt, Homo sapiens
  misc_RNA (1)...(19): siRNA sense strand
gugaugugguagaguuuga

SEQ ID NO: 2555634 - RNA, 19 nt, Homo sapiens
  misc_RNA (1)...(19): siRNA sense strand
caacuauaauggugaccca

SEQ ID NO: 2555635 - RNA, 19 nt, Homo sapiens
  misc_RNA (1)...(19): siRNA sense strand
gugggaacuucaauggcaa

SEQ ID NO: 2555636 - RNA, 19 nt, Homo sapiens
  misc_RNA (1)...(19): siRNA sense strand
aaacggaggcugugggcca

SEQ ID NO: 2555637 - RNA, 19 nt, Homo sapiens
  misc_RNA (1)...(19): siRNA sense strand
gcaaugaccaugcugggaa

SEQ ID NO: 2555638 - RNA, 19 nt, Homo sapiens
  misc_RNA (1)...(19): siRNA sense strand
ugguaguggcacagacgaa

SEQ ID NO: 2555639 - RNA, 19 nt, Homo sapiens
  misc_RNA (1)...(19): siRNA sense strand
gcguguaugugcuggcuca

SEQ ID NO: 2555640 - RNA, 19 nt, Homo sapiens
  misc_RNA (1)...(19): siRNA sense strand
cugcaaaucuacaaccaca

SEQ ID NO: 2555641 - RNA, 19 nt, Homo sapiens
  misc_RNA (1)...(19): siRNA sense strand
gcguguaugugcuggcuca

SEQ ID NO: 2555642 - RNA, 19 nt, Homo sapiens
  misc_RNA (1)...(19): siRNA sense strand
cugcaaaucuacaaccaca

SEQ ID NO: 2555643 - RNA, 19 nt, Homo sapiens
  misc_RNA (1)...(19): siRNA sense strand
gcguguaugugcuggcuca

SEQ ID NO: 2555644 - RNA, 19 nt, Homo sapiens
  misc_RNA (1)...(19): siRNA sense strand
cugcaaaucuacaaccaca

SEQ ID NO: 2555645 - RNA, 19 nt, Homo sapiens
  misc_RNA (1)...(19): siRNA sense strand
aggcacugcugguggcuga

SEQ ID NO: 2555646 - RNA, 19 nt, Homo sapiens
  misc_RNA (1)...(19): siRNA sense strand
aggcacugcugguggcuga

SEQ ID NO: 2555647 - RNA, 19 nt, Homo sapiens
  misc_RNA (1)...(19): siRNA sense strand
aggcacugcugguggcuga

SEQ ID NO: 2555648 - RNA, 19 nt, Homo sapiens
  misc_RNA (1)...(19): siRNA sense strand
ggccaaggcuauaggcuac

SEQ ID NO: 2555649 - RNA, 19 nt, Homo sapiens
  misc_RNA (1)...(19): siRNA sense strand
ggcuauaggcuacgcaaca

SEQ ID NO: 2555650 - RNA, 19 nt, Homo sapiens
  misc_RNA (1)...(19): siRNA sense strand
ggguaaugggcgagucagu

SEQ ID NO: 2555651 - RNA, 19 nt, Homo sapiens
  misc_RNA (1)...(19): siRNA sense strand
ggguaaugggcgagucagu

SEQ ID NO: 2555652 - RNA, 19 nt, Homo sapiens
  misc_RNA (1)...(19): siRNA sense strand
ggguaaugggcgagucagu

SEQ ID NO: 2555653 - RNA, 19 nt, Homo sapiens
  misc_RNA (1)...(19): siRNA sense strand
ccucaaagaaggucacagu

SEQ ID NO: 2555654 - RNA, 19 nt, Homo sapiens
  misc_RNA (1)...(19): siRNA sense strand
ggucaaaggucacagcuag

SEQ ID NO: 2555655 - RNA, 19 nt, Homo sapiens
  misc_RNA (1)...(19): siRNA sense strand
aggugaugugguagaguuu

SEQ ID NO: 2555656 - RNA, 19 nt, Homo sapiens
  misc_RNA (1)...(19): siRNA sense strand
uggcacagacgaaggcuau

SEQ ID NO: 2555657 - RNA, 19 nt, Homo sapiens
  misc_RNA (1)...(19): siRNA sense strand
agcaagaaugaguguggaa

SEQ ID NO: 2555658 - RNA, 19 nt, Homo sapiens
  misc_RNA (1)...(19): siRNA sense strand
aggcaggugaugugguaga

SEQ ID NO: 2555659 - RNA, 19 nt, Homo sapiens
  misc_RNA (1)...(19): siRNA sense strand
cugcagagcaagaaugagu

SEQ ID NO: 2555660 - RNA, 19 nt, Homo sapiens
  misc_RNA (1)...(19): siRNA sense strand
gcgugugcgaugagggcuu

SEQ ID NO: 2555661 - RNA, 19 nt, Homo sapiens
  misc_RNA (1)...(19): siRNA sense strand
ucacgguccagguggcaaa

SEQ ID NO: 2555662 - RNA, 19 nt, Homo sapiens
  misc_RNA (1)...(19): siRNA sense strand
uggagaagaaguaucagaa

SEQ ID NO: 2555663 - RNA, 19 nt, Homo sapiens
  misc_RNA (1)...(19): siRNA sense strand
gcagcaacauccaugccua

SEQ ID NO: 2555664 - RNA, 19 nt, Homo sapiens
  misc_RNA (1)...(19): siRNA sense strand
ucacgguccagguggcaaa

SEQ ID NO: 2555665 - RNA, 19 nt, Homo sapiens
  misc_RNA (1)...(19): siRNA sense strand
uggagaagaaguaucagaa

SEQ ID NO: 2555666 - RNA, 19 nt, Homo sapiens
  misc_RNA (1)...(19): siRNA sense strand
gcagcaacauccaugccua

SEQ ID NO: 2555667 - RNA, 19 nt, Homo sapiens
  misc_RNA (1)...(19): siRNA sense strand
ucacgguccagguggcaaa

SEQ ID NO: 2555668 - RNA, 19 nt, Homo sapiens
  misc_RNA (1)...(19): siRNA sense strand
uggagaagaaguaucagaa

SEQ ID NO: 2555669 - RNA, 19 nt, Homo sapiens
  misc_RNA (1)...(19): siRNA sense strand
gcagcaacauccaugccua

SEQ ID NO: 2555670 - RNA, 19 nt, Homo sapiens
  misc_RNA (1)...(19): siRNA sense strand
gcagcugugcucagggcua

SEQ ID NO: 2555671 - RNA, 19 nt, Homo sapiens
  misc_RNA (1)...(19): siRNA sense strand
gcucagggcuacaggcuug

SEQ ID NO: 2555672 - RNA, 19 nt, Homo sapiens
  misc_RNA (1)...(19): siRNA sense strand
agaaagacuucgcugagca

SEQ ID NO: 2555673 - RNA, 19 nt, Homo sapiens
  misc_RNA (1)...(19): siRNA sense strand
gcuacaagcucuuccgaga

SEQ ID NO: 2555674 - RNA, 19 nt, Homo sapiens
  misc_RNA (1)...(19): siRNA sense strand
ggccacagguugaggagga

SEQ ID NO: 2555675 - RNA, 19 nt, Homo sapiens
  misc_RNA (1)...(19): siRNA sense strand
acaugaucgugcuggacaa

SEQ ID NO: 2555676 - RNA, 19 nt, Homo sapiens
  misc_RNA (1)...(19): siRNA sense strand
gggaugagcagcaagcgaa

SEQ ID NO: 2555677 - RNA, 19 nt, Homo sapiens
  misc_RNA (1)...(19): siRNA sense strand
gugugguggagaagaacaa

SEQ ID NO: 2555678 - RNA, 19 nt, Homo sapiens
  misc_RNA (1)...(19): siRNA sense strand
guaccuaaaccgaggcgau

SEQ ID NO: 2555679 - RNA, 19 nt, Homo sapiens
  misc_RNA (1)...(19): siRNA sense strand
auggugugguggagaagaa

SEQ ID NO: 2555680 - RNA, 19 nt, Homo sapiens
  misc_RNA (1)...(19): siRNA sense strand
uggacaaggaccugggcau

SEQ ID NO: 2555681 - RNA, 19 nt, Homo sapiens
  misc_RNA (1)...(19): siRNA sense strand
gaggaaugcugccuggaga

SEQ ID NO: 2555682 - RNA, 19 nt, Homo sapiens
  misc_RNA (1)...(19): siRNA sense strand
ggaugagcagcaagcgaau

SEQ ID NO: 2555683 - RNA, 19 nt, Homo sapiens
  misc_RNA (1)...(19): siRNA sense strand
ucaagaaggagcugggacu

SEQ ID NO: 2555684 - RNA, 19 nt, Homo sapiens
  misc_RNA (1)...(19): siRNA sense strand
ucaagauggacgaggacca

SEQ ID NO: 2555685 - RNA, 19 nt, Homo sapiens
  misc_RNA (1)...(19): siRNA sense strand
uccugaaagaggugaagaa

SEQ ID NO: 2555686 - RNA, 19 nt, Homo sapiens
  misc_RNA (1)...(19): siRNA sense strand
ccaucauguucaaaggcuu

SEQ ID NO: 2555687 - RNA, 19 nt, Homo sapiens
  misc_RNA (1)...(19): siRNA sense strand
gugugcugcaugaaggaua

SEQ ID NO: 2555688 - RNA, 19 nt, Homo sapiens
  misc_RNA (1)...(19): siRNA sense strand
aguacauggcccaggacau

SEQ ID NO: 2555689 - RNA, 19 nt, Homo sapiens
  misc_RNA (1)...(19): siRNA sense strand
gugaagaaccuuguggaga

SEQ ID NO: 2555690 - RNA, 19 nt, Homo sapiens
  misc_RNA (1)...(19): siRNA sense strand
acgagauaguucuguacau

SEQ ID NO: 2555691 - RNA, 19 nt, Homo sapiens
  misc_RNA (1)...(19): siRNA sense strand
gauaauuaccuguuccuga

SEQ ID NO: 2555692 - RNA, 19 nt, Homo sapiens
  misc_RNA (1)...(19): siRNA sense strand
gccugaagcacucggaaca

SEQ ID NO: 2555693 - RNA, 19 nt, Homo sapiens
  misc_RNA (1)...(19): siRNA sense strand
augaaauugaguuuggcua

SEQ ID NO: 2555694 - RNA, 19 nt, Homo sapiens
  misc_RNA (1)...(19): siRNA sense strand
uguucaagauggacgagga

SEQ ID NO: 2555695 - RNA, 19 nt, Homo sapiens
  misc_RNA (1)...(19): siRNA sense strand
guggagaagaacaacccaa

SEQ ID NO: 2555696 - RNA, 19 nt, Homo sapiens
  misc_RNA (1)...(19): siRNA sense strand
gauggaaaccuaaaggacu

SEQ ID NO: 2555697 - RNA, 19 nt, Homo sapiens
  misc_RNA (1)...(19): siRNA sense strand
aaaccaacugugagcugaa

SEQ ID NO: 2555698 - RNA, 19 nt, Homo sapiens
  misc_RNA (1)...(19): siRNA sense strand
cuaaaguacuaaagagcau

SEQ ID NO: 2555699 - RNA, 19 nt, Homo sapiens
  misc_RNA (1)...(19): siRNA sense strand
gaacaaaugaugaugguca

SEQ ID NO: 2555700 - RNA, 19 nt, Homo sapiens
  misc_RNA (1)...(19): siRNA sense strand
ucuuauagcaggagaucaa

SEQ ID NO: 2555701 - RNA, 19 nt, Homo sapiens
  misc_RNA (1)...(19): siRNA sense strand
uggaagaagaaaugaguuu

SEQ ID NO: 2555702 - RNA, 19 nt, Homo sapiens
  misc_RNA (1)...(19): siRNA sense strand
ccugaaagccaaagcaaaa

SEQ ID NO: 2555703 - RNA, 19 nt, Homo sapiens
  misc_RNA (1)...(19): siRNA sense strand
gugcugaaguggaggaacu

SEQ ID NO: 2555704 - RNA, 19 nt, Homo sapiens
  misc_RNA (1)...(19): siRNA sense strand
ucuuauguguggaggagua

SEQ ID NO: 2555705 - RNA, 19 nt, Homo sapiens
  misc_RNA (1)...(19): siRNA sense strand
ggaaacauugugagugcaa

SEQ ID NO: 2555706 - RNA, 19 nt, Homo sapiens
  misc_RNA (1)...(19): siRNA sense strand
ggaguagaaaucagaacaa

SEQ ID NO: 2555707 - RNA, 19 nt, Homo sapiens
  misc_RNA (1)...(19): siRNA sense strand
ccaggaguuucaagauaaa

SEQ ID NO: 2555708 - RNA, 19 nt, Homo sapiens
  misc_RNA (1)...(19): siRNA sense strand
ucgaggaagaagaggauuu

SEQ ID NO: 2555709 - RNA, 19 nt, Homo sapiens
  misc_RNA (1)...(19): siRNA sense strand
cgaagaaguuaaagagcuc

SEQ ID NO: 2555710 - RNA, 19 nt, Homo sapiens
  misc_RNA (1)...(19): siRNA sense strand
gacuaugacaccagugaaa

SEQ ID NO: 2555711 - RNA, 19 nt, Homo sapiens
  misc_RNA (1)...(19): siRNA sense strand
cuuuggagaaggaggaaau

SEQ ID NO: 2555712 - RNA, 19 nt, Homo sapiens
  misc_RNA (1)...(19): siRNA sense strand
gcuccaagcaagaggccau

SEQ ID NO: 2555713 - RNA, 19 nt, Homo sapiens
  misc_RNA (1)...(19): siRNA sense strand
uuugaaagcuucugaacau

SEQ ID NO: 2555714 - RNA, 19 nt, Homo sapiens
  misc_RNA (1)...(19): siRNA sense strand
gugugaaagggaagucaaa

SEQ ID NO: 2555715 - RNA, 19 nt, Homo sapiens
  misc_RNA (1)...(19): siRNA sense strand
gggaggugcaacuggaaau

SEQ ID NO: 2555716 - RNA, 19 nt, Homo sapiens
  misc_RNA (1)...(19): siRNA sense strand
uggugaagaugcagagguu

SEQ ID NO: 2555717 - RNA, 19 nt, Homo sapiens
  misc_RNA (1)...(19): siRNA sense strand
gguuaagggaggaaaggca

SEQ ID NO: 2555718 - RNA, 19 nt, Homo sapiens
  misc_RNA (1)...(19): siRNA sense strand
aaguaagccaacugauaua

SEQ ID NO: 2555719 - RNA, 19 nt, Homo sapiens
  misc_RNA (1)...(19): siRNA sense strand
gcugauauccagaugguga

SEQ ID NO: 2555720 - RNA, 19 nt, Homo sapiens
  misc_RNA (1)...(19): siRNA sense strand
gauguaugucuguuggaaa

SEQ ID NO: 2555721 - RNA, 19 nt, Homo sapiens
  misc_RNA (1)...(19): siRNA sense strand
gauaaaagaaguaagccaa

SEQ ID NO: 2555722 - RNA, 19 nt, Homo sapiens
  misc_RNA (1)...(19): siRNA sense strand
aagauuaagcugugaacga

SEQ ID NO: 2555723 - RNA, 19 nt, Homo sapiens
  misc_RNA (1)...(19): siRNA sense strand
aagggaaagcgaaguuaaa

SEQ ID NO: 2555724 - RNA, 19 nt, Homo sapiens
  misc_RNA (1)...(19): siRNA sense strand
aaacuaggcauaaggaaga

SEQ ID NO: 2555725 - RNA, 19 nt, Homo sapiens
  misc_RNA (1)...(19): siRNA sense strand
cuugauggcuuuaaggaca

SEQ ID NO: 2555726 - RNA, 19 nt, Homo sapiens
  misc_RNA (1)...(19): siRNA sense strand
uugaaugaugacuggaaua

SEQ ID NO: 2555727 - RNA, 19 nt, Homo sapiens
  misc_RNA (1)...(19): siRNA sense strand
cgguuaaaucuuggugaua

SEQ ID NO: 2555728 - RNA, 19 nt, Homo sapiens
  misc_RNA (1)...(19): siRNA sense strand
gaagcugaagagaggcaaa

SEQ ID NO: 2555729 - RNA, 19 nt, Homo sapiens
  misc_RNA (1)...(19): siRNA sense strand
uagaauugaaugcuggaaa

SEQ ID NO: 2555730 - RNA, 19 nt, Homo sapiens
  misc_RNA (1)...(19): siRNA sense strand
guuaaaucuuggugauacu

SEQ ID NO: 2555731 - RNA, 19 nt, Homo sapiens
  misc_RNA (1)...(19): siRNA sense strand
cacaagucaaagaaagaaa

SEQ ID NO: 2555732 - RNA, 19 nt, Homo sapiens
  misc_RNA (1)...(19): siRNA sense strand
gcgguuaaaucuuggugau

SEQ ID NO: 2555733 - RNA, 19 nt, Homo sapiens
  misc_RNA (1)...(19): siRNA sense strand
auguaugucuguuggaaaa

SEQ ID NO: 2555734 - RNA, 19 nt, Homo sapiens
  misc_RNA (1)...(19): siRNA sense strand
aaguaaagcuuuccagagu

SEQ ID NO: 2555735 - RNA, 19 nt, Homo sapiens
  misc_RNA (1)...(19): siRNA sense strand
gaaugugaauggugggaag

SEQ ID NO: 2555736 - RNA, 19 nt, Homo sapiens
  misc_RNA (1)...(19): siRNA sense strand
ggaaacuaggcauaaggaa

SEQ ID NO: 2555737 - RNA, 19 nt, Homo sapiens
  misc_RNA (1)...(19): siRNA sense strand
gaauaaagguacaaauguc

SEQ ID NO: 2555738 - RNA, 19 nt, Homo sapiens
  misc_RNA (1)...(19): siRNA sense strand
ccuaagaaaauucgaguau

SEQ ID NO: 2555739 - RNA, 19 nt, Homo sapiens
  misc_RNA (1)...(19): siRNA sense strand
agaacagacaacugauaau

SEQ ID NO: 2555740 - RNA, 19 nt, Homo sapiens
  misc_RNA (1)...(19): siRNA sense strand
gugaauggugggaagcaau

SEQ ID NO: 2555741 - RNA, 19 nt, Homo sapiens
  misc_RNA (1)...(19): siRNA sense strand
uggagcucuugaagggaaa

SEQ ID NO: 2555742 - RNA, 19 nt, Homo sapiens
  misc_RNA (1)...(19): siRNA sense strand
gucacaagucaaagaaaga

SEQ ID NO: 2555743 - RNA, 19 nt, Homo sapiens
  misc_RNA (1)...(19): siRNA sense strand
gaaacuaggcauaaggaag

SEQ ID NO: 2555744 - RNA, 19 nt, Homo sapiens
  misc_RNA (1)...(19): siRNA sense strand
agccaagucugaagaauca

SEQ ID NO: 2555745 - RNA, 19 nt, Homo sapiens
  misc_RNA (1)...(19): siRNA sense strand
gugaaagggaagucaaagu

SEQ ID NO: 2555746 - RNA, 19 nt, Homo sapiens
  misc_RNA (1)...(19): siRNA sense strand
ucagaagugcggaaaguuu

SEQ ID NO: 2555747 - RNA, 19 nt, Homo sapiens
  misc_RNA (1)...(19): siRNA sense strand
cuaaggaaggugaacauau

SEQ ID NO: 2555748 - RNA, 19 nt, Homo sapiens
  misc_RNA (1)...(19): siRNA sense strand
guaaaggauuccggaucua

SEQ ID NO: 2555749 - RNA, 19 nt, Homo sapiens
  misc_RNA (1)...(19): siRNA sense strand
auuugaaguugaagcugaa

SEQ ID NO: 2555750 - RNA, 19 nt, Homo sapiens
  misc_RNA (1)...(19): siRNA sense strand
cccuggaacaacaaggaaa

SEQ ID NO: 2555751 - RNA, 19 nt, Homo sapiens
  misc_RNA (1)...(19): siRNA sense strand
cggagucaaucccaggaaa

SEQ ID NO: 2555752 - RNA, 19 nt, Homo sapiens
  misc_RNA (1)...(19): siRNA sense strand
ggagucaaucccaggaaaa

SEQ ID NO: 2555753 - RNA, 19 nt, Homo sapiens
  misc_RNA (1)...(19): siRNA sense strand
gcauuucagaagugcggaa

SEQ ID NO: 2555754 - RNA, 19 nt, Homo sapiens
  misc_RNA (1)...(19): siRNA sense strand
acaaauagugugcaggcau

SEQ ID NO: 2555755 - RNA, 19 nt, Homo sapiens
  misc_RNA (1)...(19): siRNA sense strand
cggucaaugugguccguga

SEQ ID NO: 2555756 - RNA, 19 nt, Homo sapiens
  misc_RNA (1)...(19): siRNA sense strand
cuaaaguacuaaagagcau

SEQ ID NO: 2555757 - RNA, 19 nt, Homo sapiens
  misc_RNA (1)...(19): siRNA sense strand
gaacaaaugaugaugguca

SEQ ID NO: 2555758 - RNA, 19 nt, Homo sapiens
  misc_RNA (1)...(19): siRNA sense strand
ucuuauagcaggagaucaa

SEQ ID NO: 2555759 - RNA, 19 nt, Homo sapiens
  misc_RNA (1)...(19): siRNA sense strand
uggaagaagaaaugaguuu

SEQ ID NO: 2555760 - RNA, 19 nt, Homo sapiens
  misc_RNA (1)...(19): siRNA sense strand
ccugaaagccaaagcaaaa

SEQ ID NO: 2555761 - RNA, 19 nt, Homo sapiens
  misc_RNA (1)...(19): siRNA sense strand
gugcugaaguggaggaacu

SEQ ID NO: 2555762 - RNA, 19 nt, Homo sapiens
  misc_RNA (1)...(19): siRNA sense strand
ucuuauguguggaggagua

SEQ ID NO: 2555763 - RNA, 19 nt, Homo sapiens
  misc_RNA (1)...(19): siRNA sense strand
ggaaacauugugagugcaa

SEQ ID NO: 2555764 - RNA, 19 nt, Homo sapiens
  misc_RNA (1)...(19): siRNA sense strand
ggaguagaaaucagaacaa

SEQ ID NO: 2555765 - RNA, 19 nt, Homo sapiens
  misc_RNA (1)...(19): siRNA sense strand
ccaggaguuucaagauaaa

SEQ ID NO: 2555766 - RNA, 19 nt, Homo sapiens
  misc_RNA (1)...(19): siRNA sense strand
cgaagaaguuaaagagcuc

SEQ ID NO: 2555767 - RNA, 19 nt, Homo sapiens
  misc_RNA (1)...(19): siRNA sense strand
gacuaugacaccagugaaa

SEQ ID NO: 2555768 - RNA, 19 nt, Homo sapiens
  misc_RNA (1)...(19): siRNA sense strand
cuuuggagaaggaggaaau

SEQ ID NO: 2555769 - RNA, 19 nt, Homo sapiens
  misc_RNA (1)...(19): siRNA sense strand
gcuccaagcaagaggccau

SEQ ID NO: 2555770 - RNA, 19 nt, Homo sapiens
  misc_RNA (1)...(19): siRNA sense strand
uuugaaagcuucugaacau

SEQ ID NO: 2555771 - RNA, 19 nt, Homo sapiens
  misc_RNA (1)...(19): siRNA sense strand
gggaggugcaacuggaaau

SEQ ID NO: 2555772 - RNA, 19 nt, Homo sapiens
  misc_RNA (1)...(19): siRNA sense strand
uggugaagaugcagagguu

SEQ ID NO: 2555773 - RNA, 19 nt, Homo sapiens
  misc_RNA (1)...(19): siRNA sense strand
gguuaagggaggaaaggca

SEQ ID NO: 2555774 - RNA, 19 nt, Homo sapiens
  misc_RNA (1)...(19): siRNA sense strand
aaguaagccaacugauaua

SEQ ID NO: 2555775 - RNA, 19 nt, Homo sapiens
  misc_RNA (1)...(19): siRNA sense strand
gcugauauccagaugguga

SEQ ID NO: 2555776 - RNA, 19 nt, Homo sapiens
  misc_RNA (1)...(19): siRNA sense strand
gauguaugucuguuggaaa

SEQ ID NO: 2555777 - RNA, 19 nt, Homo sapiens
  misc_RNA (1)...(19): siRNA sense strand
gauaaaagaaguaagccaa

SEQ ID NO: 2555778 - RNA, 19 nt, Homo sapiens
  misc_RNA (1)...(19): siRNA sense strand
aagauuaagcugugaacga

SEQ ID NO: 2555779 - RNA, 19 nt, Homo sapiens
  misc_RNA (1)...(19): siRNA sense strand
aagggaaagcgaaguuaaa

SEQ ID NO: 2555780 - RNA, 19 nt, Homo sapiens
  misc_RNA (1)...(19): siRNA sense strand
aaacuaggcauaaggaaga

SEQ ID NO: 2555781 - RNA, 19 nt, Homo sapiens
  misc_RNA (1)...(19): siRNA sense strand
cgguuaaaucuuggugaua

SEQ ID NO: 2555782 - RNA, 19 nt, Homo sapiens
  misc_RNA (1)...(19): siRNA sense strand
gaagcugaagagaggcaaa

SEQ ID NO: 2555783 - RNA, 19 nt, Homo sapiens
  misc_RNA (1)...(19): siRNA sense strand
uagaauugaaugcuggaaa

SEQ ID NO: 2555784 - RNA, 19 nt, Homo sapiens
  misc_RNA (1)...(19): siRNA sense strand
guuaaaucuuggugauacu

SEQ ID NO: 2555785 - RNA, 19 nt, Homo sapiens
  misc_RNA (1)...(19): siRNA sense strand
cacaagucaaagaaagaaa

SEQ ID NO: 2555786 - RNA, 19 nt, Homo sapiens
  misc_RNA (1)...(19): siRNA sense strand
gcgguuaaaucuuggugau

SEQ ID NO: 2555787 - RNA, 19 nt, Homo sapiens
  misc_RNA (1)...(19): siRNA sense strand
auguaugucuguuggaaaa

SEQ ID NO: 2555788 - RNA, 19 nt, Homo sapiens
  misc_RNA (1)...(19): siRNA sense strand
ggaaacuaggcauaaggaa

SEQ ID NO: 2555789 - RNA, 19 nt, Homo sapiens
  misc_RNA (1)...(19): siRNA sense strand
aaguaaagcuuuccagagu

SEQ ID NO: 2555790 - RNA, 19 nt, Homo sapiens
  misc_RNA (1)...(19): siRNA sense strand
gaaugugaauggugggaag

SEQ ID NO: 2555791 - RNA, 19 nt, Homo sapiens
  misc_RNA (1)...(19): siRNA sense strand
ccuaagaaaauucgaguau

SEQ ID NO: 2555792 - RNA, 19 nt, Homo sapiens
  misc_RNA (1)...(19): siRNA sense strand
agaacagacaacugauaau

SEQ ID NO: 2555793 - RNA, 19 nt, Homo sapiens
  misc_RNA (1)...(19): siRNA sense strand
gugaauggugggaagcaau

SEQ ID NO: 2555794 - RNA, 19 nt, Homo sapiens
  misc_RNA (1)...(19): siRNA sense strand
gaaacuaggcauaaggaag

SEQ ID NO: 2555795 - RNA, 19 nt, Homo sapiens
  misc_RNA (1)...(19): siRNA sense strand
uggagcucuugaagggaaa

SEQ ID NO: 2555796 - RNA, 19 nt, Homo sapiens
  misc_RNA (1)...(19): siRNA sense strand
gucacaagucaaagaaaga

SEQ ID NO: 2555797 - RNA, 19 nt, Homo sapiens
  misc_RNA (1)...(19): siRNA sense strand
ucagaagugcggaaaguuu

SEQ ID NO: 2555798 - RNA, 19 nt, Homo sapiens
  misc_RNA (1)...(19): siRNA sense strand
cuaaggaaggugaacauau

SEQ ID NO: 2555799 - RNA, 19 nt, Homo sapiens
  misc_RNA (1)...(19): siRNA sense strand
guaaaggauuccggaucua

SEQ ID NO: 2555800 - RNA, 19 nt, Homo sapiens
  misc_RNA (1)...(19): siRNA sense strand
auuugaaguugaagcugaa

SEQ ID NO: 2555801 - RNA, 19 nt, Homo sapiens
  misc_RNA (1)...(19): siRNA sense strand
cccuggaacaacaaggaaa

SEQ ID NO: 2555802 - RNA, 19 nt, Homo sapiens
  misc_RNA (1)...(19): siRNA sense strand
gcauuucagaagugcggaa

SEQ ID NO: 2555803 - RNA, 19 nt, Homo sapiens
  misc_RNA (1)...(19): siRNA sense strand
acaaauagugugcaggcau

SEQ ID NO: 2555804 - RNA, 19 nt, Homo sapiens
  misc_RNA (1)...(19): siRNA sense strand
cggucaaugugguccguga

SEQ ID NO: 2555805 - RNA, 19 nt, Homo sapiens
  misc_RNA (1)...(19): siRNA sense strand
uccaggaguuucaagauaa

SEQ ID NO: 2555806 - RNA, 19 nt, Homo sapiens
  misc_RNA (1)...(19): siRNA sense strand
aggaaauggccuuuugaua

SEQ ID NO: 2555807 - RNA, 19 nt, Homo sapiens
  misc_RNA (1)...(19): siRNA sense strand
auauccagauggugaauuu

SEQ ID NO: 2555808 - RNA, 19 nt, Homo sapiens
  misc_RNA (1)...(19): siRNA sense strand
cugaacaguuggugggcgu

SEQ ID NO: 2555809 - RNA, 19 nt, Homo sapiens
  misc_RNA (1)...(19): siRNA sense strand
aggugauguugaugacuau

SEQ ID NO: 2555810 - RNA, 19 nt, Homo sapiens
  misc_RNA (1)...(19): siRNA sense strand
uggaaauaagggagcaguu

SEQ ID NO: 2555811 - RNA, 19 nt, Homo sapiens
  misc_RNA (1)...(19): siRNA sense strand
uugaauguucugagccuaa

SEQ ID NO: 2555812 - RNA, 19 nt, Homo sapiens
  misc_RNA (1)...(19): siRNA sense strand
gaguagaaaucagaacaau

SEQ ID NO: 2555813 - RNA, 19 nt, Homo sapiens
  misc_RNA (1)...(19): siRNA sense strand
acuggaaguuugcguguuu

SEQ ID NO: 2555814 - RNA, 19 nt, Homo sapiens
  misc_RNA (1)...(19): siRNA sense strand
cuacaaauauucaaagccu

SEQ ID NO: 2555815 - RNA, 19 nt, Homo sapiens
  misc_RNA (1)...(19): siRNA sense strand
cauaaacaggcgaaggcuu

SEQ ID NO: 2555816 - RNA, 19 nt, Homo sapiens
  misc_RNA (1)...(19): siRNA sense strand
aguaaaggauuccggaucu

SEQ ID NO: 2555817 - RNA, 19 nt, Homo sapiens
  misc_RNA (1)...(19): siRNA sense strand
acaugaagacagagggcua

SEQ ID NO: 2555818 - RNA, 19 nt, Homo sapiens
  misc_RNA (1)...(19): siRNA sense strand
ggugaaaucuggaggagca

SEQ ID NO: 2555819 - RNA, 19 nt, Homo sapiens
  misc_RNA (1)...(19): siRNA sense strand
gagaaauaauagugagcuc

SEQ ID NO: 2555820 - RNA, 19 nt, Homo sapiens
  misc_RNA (1)...(19): siRNA sense strand
cuacaggaguuuagccaga

SEQ ID NO: 2555821 - RNA, 19 nt, Homo sapiens
  misc_RNA (1)...(19): siRNA sense strand
agagaagccagaagaggaa

SEQ ID NO: 2555822 - RNA, 19 nt, Homo sapiens
  misc_RNA (1)...(19): siRNA sense strand
ggaaacaguuacuugcaga

SEQ ID NO: 2555823 - RNA, 19 nt, Homo sapiens
  misc_RNA (1)...(19): siRNA sense strand
gcugaaagacauccgggaa

SEQ ID NO: 2555824 - RNA, 19 nt, Homo sapiens
  misc_RNA (1)...(19): siRNA sense strand
cagagaagccagaagagga

SEQ ID NO: 2555825 - RNA, 19 nt, Homo sapiens
  misc_RNA (1)...(19): siRNA sense strand
uguggaaaucccagagcua

SEQ ID NO: 2555826 - RNA, 19 nt, Homo sapiens
  misc_RNA (1)...(19): siRNA sense strand
ucaaacugaaggagcuaaa

SEQ ID NO: 2555827 - RNA, 19 nt, Homo sapiens
  misc_RNA (1)...(19): siRNA sense strand
ggaagaucucagaaaugaa

SEQ ID NO: 2555828 - RNA, 19 nt, Homo sapiens
  misc_RNA (1)...(19): siRNA sense strand
ugaacagagaaguggugaa

SEQ ID NO: 2555829 - RNA, 19 nt, Homo sapiens
  misc_RNA (1)...(19): siRNA sense strand
uggaaaucccagagcuaga

SEQ ID NO: 2555830 - RNA, 19 nt, Homo sapiens
  misc_RNA (1)...(19): siRNA sense strand
uagaauuugaacugggaau

SEQ ID NO: 2555831 - RNA, 19 nt, Homo sapiens
  misc_RNA (1)...(19): siRNA sense strand
accagaucaucgaagguaa

SEQ ID NO: 2555832 - RNA, 19 nt, Homo sapiens
  misc_RNA (1)...(19): siRNA sense strand
caguagaacccuugggcac

SEQ ID NO: 2555833 - RNA, 19 nt, Homo sapiens
  misc_RNA (1)...(19): siRNA sense strand
acugaaggagcuaaagcaa

SEQ ID NO: 2555834 - RNA, 19 nt, Homo sapiens
  misc_RNA (1)...(19): siRNA sense strand
cugcgagaacugugggcau

SEQ ID NO: 2555835 - RNA, 19 nt, Homo sapiens
  misc_RNA (1)...(19): siRNA sense strand
agaagauggaccagaucau

SEQ ID NO: 2555836 - RNA, 19 nt, Homo sapiens
  misc_RNA (1)...(19): siRNA sense strand
cagccugcacgaagggcaa

SEQ ID NO: 2555837 - RNA, 19 nt, Homo sapiens
  misc_RNA (1)...(19): siRNA sense strand
gcaugaacuguuacugcaa

SEQ ID NO: 2555838 - RNA, 19 nt, Homo sapiens
  misc_RNA (1)...(19): siRNA sense strand
gggaacaguuuuguggaaa

SEQ ID NO: 2555839 - RNA, 19 nt, Homo sapiens
  misc_RNA (1)...(19): siRNA sense strand
agacuugcaguguggaaau

SEQ ID NO: 2555840 - RNA, 19 nt, Homo sapiens
  misc_RNA (1)...(19): siRNA sense strand
ggacccgacagcaggaaga

SEQ ID NO: 2555841 - RNA, 19 nt, Homo sapiens
  misc_RNA (1)...(19): siRNA sense strand
ggauccaggaccagggagu

SEQ ID NO: 2555842 - RNA, 19 nt, Homo sapiens
  misc_RNA (1)...(19): siRNA sense strand
gggcaaacaaagaugcuac

SEQ ID NO: 2555843 - RNA, 19 nt, Homo sapiens
  misc_RNA (1)...(19): siRNA sense strand
gagguuaucaucauggcua

SEQ ID NO: 2555844 - RNA, 19 nt, Homo sapiens
  misc_RNA (1)...(19): siRNA sense strand
cuggacagacggagagacu

SEQ ID NO: 2555845 - RNA, 19 nt, Homo sapiens
  misc_RNA (1)...(19): siRNA sense strand
aguacaaggauuagaagaa

SEQ ID NO: 2555846 - RNA, 19 nt, Homo sapiens
  misc_RNA (1)...(19): siRNA sense strand
acuacaagcaagugacaua

SEQ ID NO: 2555847 - RNA, 19 nt, Homo sapiens
  misc_RNA (1)...(19): siRNA sense strand
uggccaaguacuagugaaa

SEQ ID NO: 2555848 - RNA, 19 nt, Homo sapiens
  misc_RNA (1)...(19): siRNA sense strand
acaagaggacauuaggaaa

SEQ ID NO: 2555849 - RNA, 19 nt, Homo sapiens
  misc_RNA (1)...(19): siRNA sense strand
caagaggacauuaggaaaa

SEQ ID NO: 2555850 - RNA, 19 nt, Homo sapiens
  misc_RNA (1)...(19): siRNA sense strand
aggcuaguguaaagagauu

SEQ ID NO: 2555851 - RNA, 19 nt, Homo sapiens
  misc_RNA (1)...(19): siRNA sense strand
acauagacgaggugauuau

SEQ ID NO: 2555852 - RNA, 19 nt, Homo sapiens
  misc_RNA (1)...(19): siRNA sense strand
cacaaauaguacaaggauu

SEQ ID NO: 2555853 - RNA, 19 nt, Homo sapiens
  misc_RNA (1)...(19): siRNA sense strand
gcuaguguaaagagauuaa

SEQ ID NO: 2555854 - RNA, 19 nt, Homo sapiens
  misc_RNA (1)...(19): siRNA sense strand
ggaucacaggcuaguguaa

SEQ ID NO: 2555855 - RNA, 19 nt, Homo sapiens
  misc_RNA (1)...(19): siRNA sense strand
uggacaagcuucaggagca

SEQ ID NO: 2555856 - RNA, 19 nt, Homo sapiens
  misc_RNA (1)...(19): siRNA sense strand
gggcaguugaugaacgaau

SEQ ID NO: 2555857 - RNA, 19 nt, Homo sapiens
  misc_RNA (1)...(19): siRNA sense strand
ggacaaaguaagaccgcgu

SEQ ID NO: 2555858 - RNA, 19 nt, Homo sapiens
  misc_RNA (1)...(19): siRNA sense strand
aaugaaagucccaaggaga

SEQ ID NO: 2555859 - RNA, 19 nt, Homo sapiens
  misc_RNA (1)...(19): siRNA sense strand
cugugaagaagauggaaga

SEQ ID NO: 2555860 - RNA, 19 nt, Homo sapiens
  misc_RNA (1)...(19): siRNA sense strand
gcaugagcgacgacgacaa

SEQ ID NO: 2555861 - RNA, 19 nt, Homo sapiens
  misc_RNA (1)...(19): siRNA sense strand
agagcggacacaaggauaa

SEQ ID NO: 2555862 - RNA, 19 nt, Homo sapiens
  misc_RNA (1)...(19): siRNA sense strand
cggcacugcuugcggacuu

SEQ ID NO: 2555863 - RNA, 19 nt, Homo sapiens
  misc_RNA (1)...(19): siRNA sense strand
acaauuacgagaagagguu

SEQ ID NO: 2555864 - RNA, 19 nt, Homo sapiens
  misc_RNA (1)...(19): siRNA sense strand
gugaagaagauggaagaga

SEQ ID NO: 2555865 - RNA, 19 nt, Homo sapiens
  misc_RNA (1)...(19): siRNA sense strand
uggucgaacucaucaacaa

SEQ ID NO: 2555866 - RNA, 19 nt, Homo sapiens
  misc_RNA (1)...(19): siRNA sense strand
cccuagauguugaguacuu

SEQ ID NO: 2555867 - RNA, 19 nt, Homo sapiens
  misc_RNA (1)...(19): siRNA sense strand
acgaguucaugaaggaaga

SEQ ID NO: 2555868 - RNA, 19 nt, Homo sapiens
  misc_RNA (1)...(19): siRNA sense strand
aggacgaguucaugaagga

SEQ ID NO: 2555869 - RNA, 19 nt, Homo sapiens
  misc_RNA (1)...(19): siRNA sense strand
gagagaauugccacagaau

SEQ ID NO: 2555870 - RNA, 19 nt, Homo sapiens
  misc_RNA (1)...(19): siRNA sense strand
ucucauagaacuuggagca

SEQ ID NO: 2555871 - RNA, 19 nt, Homo sapiens
  misc_RNA (1)...(19): siRNA sense strand
aucaagaaaccuuugguaa

SEQ ID NO: 2555872 - RNA, 19 nt, Homo sapiens
  misc_RNA (1)...(19): siRNA sense strand
ggacacaaggauaagcuca

SEQ ID NO: 2555873 - RNA, 19 nt, Homo sapiens
  misc_RNA (1)...(19): siRNA sense strand
agaacuuggagcagccuua

SEQ ID NO: 2555874 - RNA, 19 nt, Homo sapiens
  misc_RNA (1)...(19): siRNA sense strand
cagaacucuuggaaauaau

SEQ ID NO: 2555875 - RNA, 19 nt, Homo sapiens
  misc_RNA (1)...(19): siRNA sense strand
gacacaaggauaagcucaa

SEQ ID NO: 2555876 - RNA, 19 nt, Homo sapiens
  misc_RNA (1)...(19): siRNA sense strand
auguguguauugaggcuua

SEQ ID NO: 2555877 - RNA, 19 nt, Homo sapiens
  misc_RNA (1)...(19): siRNA sense strand
uauacaaguuauucgguca

SEQ ID NO: 2555878 - RNA, 19 nt, Homo sapiens
  misc_RNA (1)...(19): siRNA sense strand
guaaagagauuaagagccc

SEQ ID NO: 2555879 - RNA, 19 nt, Homo sapiens
  misc_RNA (1)...(19): siRNA sense strand
cauacauagacgaggugau

SEQ ID NO: 2555880 - RNA, 19 nt, Homo sapiens
  misc_RNA (1)...(19): siRNA sense strand
augaaagucccaaggagau

SEQ ID NO: 2555881 - RNA, 19 nt, Homo sapiens
  misc_RNA (1)...(19): siRNA sense strand
cuggaagaacugagagaug

SEQ ID NO: 2555882 - RNA, 19 nt, Homo sapiens
  misc_RNA (1)...(19): siRNA sense strand
ucaagaaaccuuugguaac

SEQ ID NO: 2555883 - RNA, 19 nt, Homo sapiens
  misc_RNA (1)...(19): siRNA sense strand
ucaacaaggauuaugcaga

SEQ ID NO: 2555884 - RNA, 19 nt, Homo sapiens
  misc_RNA (1)...(19): siRNA sense strand
ggaaauaaucaagccaaaa

SEQ ID NO: 2555885 - RNA, 19 nt, Homo sapiens
  misc_RNA (1)...(19): siRNA sense strand
auguugaguacuugggaga

SEQ ID NO: 2555886 - RNA, 19 nt, Homo sapiens
  misc_RNA (1)...(19): siRNA sense strand
ggugaauucuguuuggcca

SEQ ID NO: 2555887 - RNA, 19 nt, Homo sapiens
  misc_RNA (1)...(19): siRNA sense strand
ucgacaaggacgaguucau

SEQ ID NO: 2555888 - RNA, 19 nt, Homo sapiens
  misc_RNA (1)...(19): siRNA sense strand
agaagauggaagagagccu

SEQ ID NO: 2555889 - RNA, 19 nt, Homo sapiens
  misc_RNA (1)...(19): siRNA sense strand
aacaagaggacauuaggaa

SEQ ID NO: 2555890 - RNA, 19 nt, Homo sapiens
  misc_RNA (1)...(19): siRNA sense strand
ggaagaugccccagcugaa

SEQ ID NO: 2555891 - RNA, 19 nt, Homo sapiens
  misc_RNA (1)...(19): siRNA sense strand
ggaacggcaguguggauca

SEQ ID NO: 2555892 - RNA, 19 nt, Homo sapiens
  misc_RNA (1)...(19): siRNA sense strand
cagagcggacacaaggaua

SEQ ID NO: 2555893 - RNA, 19 nt, Homo sapiens
  misc_RNA (1)...(19): siRNA sense strand
ggauaagcucaaacaagca

SEQ ID NO: 2555894 - RNA, 19 nt, Homo sapiens
  misc_RNA (1)...(19): siRNA sense strand
uauucggucaguugagaaa

SEQ ID NO: 2555895 - RNA, 19 nt, Homo sapiens
  misc_RNA (1)...(19): siRNA sense strand
aaguacuagugaaaccaua

SEQ ID NO: 2555896 - RNA, 19 nt, Homo sapiens
  misc_RNA (1)...(19): siRNA sense strand
uagugaaaccauacauaga

SEQ ID NO: 2555897 - RNA, 19 nt, Homo sapiens
  misc_RNA (1)...(19): siRNA sense strand
uuagagaaauagcgggauc

SEQ ID NO: 2555898 - RNA, 19 nt, Homo sapiens
  misc_RNA (1)...(19): siRNA sense strand
ugaagaagauggaagagag

SEQ ID NO: 2555899 - RNA, 19 nt, Homo sapiens
  misc_RNA (1)...(19): siRNA sense strand
ggacuacaagcaagugaca

SEQ ID NO: 2555900 - RNA, 19 nt, Homo sapiens
  misc_RNA (1)...(19): siRNA sense strand
auaaagugcuggagcccua

SEQ ID NO: 2555901 - RNA, 19 nt, Homo sapiens
  misc_RNA (1)...(19): siRNA sense strand
gagacgaagcagcgggaga

SEQ ID NO: 2555902 - RNA, 19 nt, Homo sapiens
  misc_RNA (1)...(19): siRNA sense strand
gguucgagcacgugagcau

SEQ ID NO: 2555903 - RNA, 19 nt, Homo sapiens
  misc_RNA (1)...(19): siRNA sense strand
gcgucguggucgagaacuu

SEQ ID NO: 2555904 - RNA, 19 nt, Homo sapiens
  misc_RNA (1)...(19): siRNA sense strand
gcgccaagauccugggugu

SEQ ID NO: 2555905 - RNA, 19 nt, Homo sapiens
  misc_RNA (1)...(19): siRNA sense strand
gcaacauccuggaggccuu

SEQ ID NO: 2555906 - RNA, 19 nt, Homo sapiens
  misc_RNA (1)...(19): siRNA sense strand
ccgacacggacgaggacaa

SEQ ID NO: 2555907 - RNA, 19 nt, Homo sapiens
  misc_RNA (1)...(19): siRNA sense strand
ccaucaacuucgacaacau

SEQ ID NO: 2555908 - RNA, 19 nt, Homo sapiens
  misc_RNA (1)...(19): siRNA sense strand
gggaagauugacagcccua

SEQ ID NO: 2555909 - RNA, 19 nt, Homo sapiens
  misc_RNA (1)...(19): siRNA sense strand
cgcagaaagaagaagauga

SEQ ID NO: 2555910 - RNA, 19 nt, Homo sapiens
  misc_RNA (1)...(19): siRNA sense strand
cagccgagcuugacgacga

SEQ ID NO: 2555911 - RNA, 19 nt, Homo sapiens
  misc_RNA (1)...(19): siRNA sense strand
gcuccuucuucaugaucaa

SEQ ID NO: 2555912 - RNA, 19 nt, Homo sapiens
  misc_RNA (1)...(19): siRNA sense strand
acauauuccgcaaggucaa

SEQ ID NO: 2555913 - RNA, 19 nt, Homo sapiens
  misc_RNA (1)...(19): siRNA sense strand
cggagaugauggugaaggu

SEQ ID NO: 2555914 - RNA, 19 nt, Homo sapiens
  misc_RNA (1)...(19): siRNA sense strand
gcuacgaagagcugcugaa

SEQ ID NO: 2555915 - RNA, 19 nt, Homo sapiens
  misc_RNA (1)...(19): siRNA sense strand
ccgucuacuucgugaccuu

SEQ ID NO: 2555916 - RNA, 19 nt, Homo sapiens
  misc_RNA (1)...(19): siRNA sense strand
auugacagcccuagggaca

SEQ ID NO: 2555917 - RNA, 19 nt, Homo sapiens
  misc_RNA (1)...(19): siRNA sense strand
gcgcgcagaaagaagaaga

SEQ ID NO: 2555918 - RNA, 19 nt, Homo sapiens
  misc_RNA (1)...(19): siRNA sense strand
gccucaagcugguggugga

SEQ ID NO: 2555919 - RNA, 19 nt, Homo sapiens
  misc_RNA (1)...(19): siRNA sense strand
ccacaagcucagagaacuc

SEQ ID NO: 2555920 - RNA, 19 nt, Homo sapiens
  misc_RNA (1)...(19): siRNA sense strand
cucggaaaguggagacuca

SEQ ID NO: 2555921 - RNA, 19 nt, Homo sapiens
  misc_RNA (1)...(19): siRNA sense strand
gcaccgacgacgaagcuga

SEQ ID NO: 2555922 - RNA, 19 nt, Homo sapiens
  misc_RNA (1)...(19): siRNA sense strand
ggacacaacgugagccucu

SEQ ID NO: 2555923 - RNA, 19 nt, Homo sapiens
  misc_RNA (1)...(19): siRNA sense strand
gcucuggagaucagcaaca

SEQ ID NO: 2555924 - RNA, 19 nt, Homo sapiens
  misc_RNA (1)...(19): siRNA sense strand
ugagcaugggcguggagua

SEQ ID NO: 2555925 - RNA, 19 nt, Homo sapiens
  misc_RNA (1)...(19): siRNA sense strand
ucaugaagcaccuggagga

SEQ ID NO: 2555926 - RNA, 19 nt, Homo sapiens
  misc_RNA (1)...(19): siRNA sense strand
uguucgggcagaaguguua

SEQ ID NO: 2555927 - RNA, 19 nt, Homo sapiens
  misc_RNA (1)...(19): siRNA sense strand
acaacaucuucgacggcau

SEQ ID NO: 2555928 - RNA, 19 nt, Homo sapiens
  misc_RNA (1)...(19): siRNA sense strand
ccauggagcacuauaacca

SEQ ID NO: 2555929 - RNA, 19 nt, Homo sapiens
  misc_RNA (1)...(19): siRNA sense strand
cgucgguucuucaaggaca

SEQ ID NO: 2555930 - RNA, 19 nt, Homo sapiens
  misc_RNA (1)...(19): siRNA sense strand
ccaaauacauccugggcaa

SEQ ID NO: 2555931 - RNA, 19 nt, Homo sapiens
  misc_RNA (1)...(19): siRNA sense strand
gagagaugacugagggcua

SEQ ID NO: 2555932 - RNA, 19 nt, Homo sapiens
  misc_RNA (1)...(19): siRNA sense strand
aggaagacgcuguugguaa

SEQ ID NO: 2555933 - RNA, 19 nt, Homo sapiens
  misc_RNA (1)...(19): siRNA sense strand
cagaagaaguggaggcugu

SEQ ID NO: 2555934 - RNA, 19 nt, Homo sapiens
  misc_RNA (1)...(19): siRNA sense strand
aggaagaagaagaggagga

SEQ ID NO: 2555935 - RNA, 19 nt, Homo sapiens
  misc_RNA (1)...(19): siRNA sense strand
aggaggaggaggaggaaga

SEQ ID NO: 2555936 - RNA, 19 nt, Homo sapiens
  misc_RNA (1)...(19): siRNA sense strand
gaagaauaucacagccaaa

SEQ ID NO: 2555937 - RNA, 19 nt, Homo sapiens
  misc_RNA (1)...(19): siRNA sense strand
caggaaaccuucuggcgaa

SEQ ID NO: 2555938 - RNA, 19 nt, Homo sapiens
  misc_RNA (1)...(19): siRNA sense strand
caaaagaagagaaggaaga

SEQ ID NO: 2555939 - RNA, 19 nt, Homo sapiens
  misc_RNA (1)...(19): siRNA sense strand
agagaaggaagaagaagaa

SEQ ID NO: 2555940 - RNA, 19 nt, Homo sapiens
  misc_RNA (1)...(19): siRNA sense strand
aagaagaagaggaggagga

SEQ ID NO: 2555941 - RNA, 19 nt, Homo sapiens
  misc_RNA (1)...(19): siRNA sense strand
aagaagaggaggaggagga

SEQ ID NO: 2555942 - RNA, 19 nt, Homo sapiens
  misc_RNA (1)...(19): siRNA sense strand
gcgacgaggaacaggaaga

SEQ ID NO: 2555943 - RNA, 19 nt, Homo sapiens
  misc_RNA (1)...(19): siRNA sense strand
ucaaaauguuggagcgauu

SEQ ID NO: 2555944 - RNA, 19 nt, Homo sapiens
  misc_RNA (1)...(19): siRNA sense strand
ucgaaaguuugaugagaga

SEQ ID NO: 2555945 - RNA, 19 nt, Homo sapiens
  misc_RNA (1)...(19): siRNA sense strand
agaaggaagaagaagaaga

SEQ ID NO: 2555946 - RNA, 19 nt, Homo sapiens
  misc_RNA (1)...(19): siRNA sense strand
aagagaaggaagaagaaga

SEQ ID NO: 2555947 - RNA, 19 nt, Homo sapiens
  misc_RNA (1)...(19): siRNA sense strand
cagaugauguccuggguca

SEQ ID NO: 2555948 - RNA, 19 nt, Homo sapiens
  misc_RNA (1)...(19): siRNA sense strand
gcuuagagagcgugaagga

SEQ ID NO: 2555949 - RNA, 19 nt, Homo sapiens
  misc_RNA (1)...(19): siRNA sense strand
cagaugaggcugugaggga

SEQ ID NO: 2555950 - RNA, 19 nt, Homo sapiens
  misc_RNA (1)...(19): siRNA sense strand
ggccauuguuucugguaau

SEQ ID NO: 2555951 - RNA, 19 nt, Homo sapiens
  misc_RNA (1)...(19): siRNA sense strand
gggcucagaagcagaacaa

SEQ ID NO: 2555952 - RNA, 19 nt, Homo sapiens
  misc_RNA (1)...(19): siRNA sense strand
guacaagaaacggcagaaa

SEQ ID NO: 2555953 - RNA, 19 nt, Homo sapiens
  misc_RNA (1)...(19): siRNA sense strand
aaacaaaagaagagaagga

SEQ ID NO: 2555954 - RNA, 19 nt, Homo sapiens
  misc_RNA (1)...(19): siRNA sense strand
gcucagaagcagaacaagu

SEQ ID NO: 2555955 - RNA, 19 nt, Homo sapiens
  misc_RNA (1)...(19): siRNA sense strand
aggaacggcaggaggaaga

SEQ ID NO: 2555956 - RNA, 19 nt, Homo sapiens
  misc_RNA (1)...(19): siRNA sense strand
gggagaaagcucagcagca

SEQ ID NO: 2555957 - RNA, 19 nt, Homo sapiens
  misc_RNA (1)...(19): siRNA sense strand
aggaggaagaggaggaguu

SEQ ID NO: 2555958 - RNA, 19 nt, Homo sapiens
  misc_RNA (1)...(19): siRNA sense strand
ccuacaugugcuagagauu

SEQ ID NO: 2555959 - RNA, 19 nt, Homo sapiens
  misc_RNA (1)...(19): siRNA sense strand
agaagagaaggaagaagaa

SEQ ID NO: 2555960 - RNA, 19 nt, Homo sapiens
  misc_RNA (1)...(19): siRNA sense strand
cuacaaagagcuagugacu

SEQ ID NO: 2555961 - RNA, 19 nt, Homo sapiens
  misc_RNA (1)...(19): siRNA sense strand
cagaacaaguccaggguag

SEQ ID NO: 2555962 - RNA, 19 nt, Homo sapiens
  misc_RNA (1)...(19): siRNA sense strand
gcggagucccugaaagauu

SEQ ID NO: 2555963 - RNA, 19 nt, Homo sapiens
  misc_RNA (1)...(19): siRNA sense strand
aggaacaggaagaagauga

SEQ ID NO: 2555964 - RNA, 19 nt, Homo sapiens
  misc_RNA (1)...(19): siRNA sense strand
gggcaggaacagagcacca

SEQ ID NO: 2555965 - RNA, 19 nt, Homo sapiens
  misc_RNA (1)...(19): siRNA sense strand
acgaggaacaggaagaaga

SEQ ID NO: 2555966 - RNA, 19 nt, Homo sapiens
  misc_RNA (1)...(19): siRNA sense strand
aggaggaggaagaggagga

SEQ ID NO: 2555967 - RNA, 19 nt, Homo sapiens
  misc_RNA (1)...(19): siRNA sense strand
aggaagaagaugagggcag

SEQ ID NO: 2555968 - RNA, 19 nt, Homo sapiens
  misc_RNA (1)...(19): siRNA sense strand
uaacuuauuugcaggccua

SEQ ID NO: 2555969 - RNA, 19 nt, Homo sapiens
  misc_RNA (1)...(19): siRNA sense strand
caugaugaacugugaacuu

SEQ ID NO: 2555970 - RNA, 19 nt, Homo sapiens
  misc_RNA (1)...(19): siRNA sense strand
uggauaaacucuuggcucu

SEQ ID NO: 2555971 - RNA, 19 nt, Homo sapiens
  misc_RNA (1)...(19): siRNA sense strand
cugaugaggagcacuguaa

SEQ ID NO: 2555972 - RNA, 19 nt, Homo sapiens
  misc_RNA (1)...(19): siRNA sense strand
aggaagaggaggaguugca

SEQ ID NO: 2555973 - RNA, 19 nt, Homo sapiens
  misc_RNA (1)...(19): siRNA sense strand
agaucuggaagaagaggaa

SEQ ID NO: 2555974 - RNA, 19 nt, Homo sapiens
  misc_RNA (1)...(19): siRNA sense strand
ggagaagaagauugaugau

SEQ ID NO: 2555975 - RNA, 19 nt, Homo sapiens
  misc_RNA (1)...(19): siRNA sense strand
acaguucagauuugggaaa

SEQ ID NO: 2555976 - RNA, 19 nt, Homo sapiens
  misc_RNA (1)...(19): siRNA sense strand
agggagacacuuaccauaa

SEQ ID NO: 2555977 - RNA, 19 nt, Homo sapiens
  misc_RNA (1)...(19): siRNA sense strand
ccaacuacuaugagaugau

SEQ ID NO: 2555978 - RNA, 19 nt, Homo sapiens
  misc_RNA (1)...(19): siRNA sense strand
aagaggaggaggaggagga

SEQ ID NO: 2555979 - RNA, 19 nt, Homo sapiens
  misc_RNA (1)...(19): siRNA sense strand
augaggaagccauggaaaa

SEQ ID NO: 2555980 - RNA, 19 nt, Homo sapiens
  misc_RNA (1)...(19): siRNA sense strand
cagcgaggcaacaggcauu

SEQ ID NO: 2555981 - RNA, 19 nt, Homo sapiens
  misc_RNA (1)...(19): siRNA sense strand
uaaagagcaccgagcacaa

SEQ ID NO: 2555982 - RNA, 19 nt, Homo sapiens
  misc_RNA (1)...(19): siRNA sense strand
agguauugcgccagcgaga

SEQ ID NO: 2555983 - RNA, 19 nt, Homo sapiens
  misc_RNA (1)...(19): siRNA sense strand
gaugaggcugugagggaga

SEQ ID NO: 2555984 - RNA, 19 nt, Homo sapiens
  misc_RNA (1)...(19): siRNA sense strand
gagagauggcagaaaagaa

SEQ ID NO: 2555985 - RNA, 19 nt, Homo sapiens
  misc_RNA (1)...(19): siRNA sense strand
uuggguacuuggagggaga

SEQ ID NO: 2555986 - RNA, 19 nt, Homo sapiens
  misc_RNA (1)...(19): siRNA sense strand
aagacagcgaagaggaaga

SEQ ID NO: 2555987 - RNA, 19 nt, Homo sapiens
  misc_RNA (1)...(19): siRNA sense strand
uggacagcgacgaggaaca

SEQ ID NO: 2555988 - RNA, 19 nt, Homo sapiens
  misc_RNA (1)...(19): siRNA sense strand
aagacaacuugcugauuga

SEQ ID NO: 2555989 - RNA, 19 nt, Homo sapiens
  misc_RNA (1)...(19): siRNA sense strand
agguguggccugaaggaga

SEQ ID NO: 2555990 - RNA, 19 nt, Homo sapiens
  misc_RNA (1)...(19): siRNA sense strand
cagaggaagaagaagagga

SEQ ID NO: 2555991 - RNA, 19 nt, Homo sapiens
  misc_RNA (1)...(19): siRNA sense strand
agauccaguugcugaaaca

SEQ ID NO: 2555992 - RNA, 19 nt, Homo sapiens
  misc_RNA (1)...(19): siRNA sense strand
ccaauaaggacguggaagg

SEQ ID NO: 2555993 - RNA, 19 nt, Homo sapiens
  misc_RNA (1)...(19): siRNA sense strand
ucaccugcuucgggagaaa

SEQ ID NO: 2555994 - RNA, 19 nt, Homo sapiens
  misc_RNA (1)...(19): siRNA sense strand
cagugaaugagauggacuu

SEQ ID NO: 2555995 - RNA, 19 nt, Homo sapiens
  misc_RNA (1)...(19): siRNA sense strand
auuugaggcaugaggauga

SEQ ID NO: 2555996 - RNA, 19 nt, Homo sapiens
  misc_RNA (1)...(19): siRNA sense strand
gaagagauccaguugcuga

SEQ ID NO: 2555997 - RNA, 19 nt, Homo sapiens
  misc_RNA (1)...(19): siRNA sense strand
ugucggagaaagaauuuaa

SEQ ID NO: 2555998 - RNA, 19 nt, Homo sapiens
  misc_RNA (1)...(19): siRNA sense strand
caucagucaaggagaacaa

SEQ ID NO: 2555999 - RNA, 19 nt, Homo sapiens
  misc_RNA (1)...(19): siRNA sense strand
uucacagguuggacagaaa

SEQ ID NO: 2556000 - RNA, 19 nt, Homo sapiens
  misc_RNA (1)...(19): siRNA sense strand
ugaugaaggaggagcacaa

SEQ ID NO: 2556001 - RNA, 19 nt, Homo sapiens
  misc_RNA (1)...(19): siRNA sense strand
acgaauaauaaccuggaaa

SEQ ID NO: 2556002 - RNA, 19 nt, Homo sapiens
  misc_RNA (1)...(19): siRNA sense strand
acuugguagugcagauaaa

SEQ ID NO: 2556003 - RNA, 19 nt, Homo sapiens
  misc_RNA (1)...(19): siRNA sense strand
ggaagauggcugcaggaga

SEQ ID NO: 2556004 - RNA, 19 nt, Homo sapiens
  misc_RNA (1)...(19): siRNA sense strand
ugaacuaacgagaagggaa

SEQ ID NO: 2556005 - RNA, 19 nt, Homo sapiens
  misc_RNA (1)...(19): siRNA sense strand
guuacagccaggagaggaa

SEQ ID NO: 2556006 - RNA, 19 nt, Homo sapiens
  misc_RNA (1)...(19): siRNA sense strand
gcuuaugaacuaacgagaa

SEQ ID NO: 2556007 - RNA, 19 nt, Homo sapiens
  misc_RNA (1)...(19): siRNA sense strand
cgauuuaaauagcgacgau

SEQ ID NO: 2556008 - RNA, 19 nt, Homo sapiens
  misc_RNA (1)...(19): siRNA sense strand
aaggaagaugggugauuua

SEQ ID NO: 2556009 - RNA, 19 nt, Homo sapiens
  misc_RNA (1)...(19): siRNA sense strand
agcaagaugcccaggaauu

SEQ ID NO: 2556010 - RNA, 19 nt, Homo sapiens
  misc_RNA (1)...(19): siRNA sense strand
aagcaaagucugcgggugu

SEQ ID NO: 2556011 - RNA, 19 nt, Homo sapiens
  misc_RNA (1)...(19): siRNA sense strand
gaacuaacgagaagggaag

SEQ ID NO: 2556012 - RNA, 19 nt, Homo sapiens
  misc_RNA (1)...(19): siRNA sense strand
ccgcaggauaccaagcuaa

SEQ ID NO: 2556013 - RNA, 19 nt, Homo sapiens
  misc_RNA (1)...(19): siRNA sense strand
agagagcguauguaggaaa

SEQ ID NO: 2556014 - RNA, 19 nt, Homo sapiens
  misc_RNA (1)...(19): siRNA sense strand
gaauaaugccaaugcaaac

SEQ ID NO: 2556015 - RNA, 19 nt, Homo sapiens
  misc_RNA (1)...(19): siRNA sense strand
gagaagggaagcagaagca

SEQ ID NO: 2556016 - RNA, 19 nt, Homo sapiens
  misc_RNA (1)...(19): siRNA sense strand
agacagugauuuugugauu

SEQ ID NO: 2556017 - RNA, 19 nt, Homo sapiens
  misc_RNA (1)...(19): siRNA sense strand
gagaaugggcuccaggaca

SEQ ID NO: 2556018 - RNA, 19 nt, Homo sapiens
  misc_RNA (1)...(19): siRNA sense strand
aauaugaagaugaagccaa

SEQ ID NO: 2556019 - RNA, 19 nt, Homo sapiens
  misc_RNA (1)...(19): siRNA sense strand
gggaagugauccaggaguc

SEQ ID NO: 2556020 - RNA, 19 nt, Homo sapiens
  misc_RNA (1)...(19): siRNA sense strand
cggcaaccaacaaggauga

SEQ ID NO: 2556021 - RNA, 19 nt, Homo sapiens
  misc_RNA (1)...(19): siRNA sense strand
ugaugaaccaauugauaga

SEQ ID NO: 2556022 - RNA, 19 nt, Homo sapiens
  misc_RNA (1)...(19): siRNA sense strand
guguauacaugcaccugaa

SEQ ID NO: 2556023 - RNA, 19 nt, Homo sapiens
  misc_RNA (1)...(19): siRNA sense strand
accaaauauugaggaguua

SEQ ID NO: 2556024 - RNA, 19 nt, Homo sapiens
  misc_RNA (1)...(19): siRNA sense strand
acagaaagcaggacccaga

SEQ ID NO: 2556025 - RNA, 19 nt, Homo sapiens
  misc_RNA (1)...(19): siRNA sense strand
cuguguacuucacuggaaa

SEQ ID NO: 2556026 - RNA, 19 nt, Homo sapiens
  misc_RNA (1)...(19): siRNA sense strand
ugaagaagacagugauuuu

SEQ ID NO: 2556027 - RNA, 19 nt, Homo sapiens
  misc_RNA (1)...(19): siRNA sense strand
cccagaucacuaugaaaua

SEQ ID NO: 2556028 - RNA, 19 nt, Homo sapiens
  misc_RNA (1)...(19): siRNA sense strand
augaaauagcacuaccaaa

SEQ ID NO: 2556029 - RNA, 19 nt, Homo sapiens
  misc_RNA (1)...(19): siRNA sense strand
augaauugccaguaucuaa

SEQ ID NO: 2556030 - RNA, 19 nt, Homo sapiens
  misc_RNA (1)...(19): siRNA sense strand
cugaagaaccugggcaaca

SEQ ID NO: 2556031 - RNA, 19 nt, Homo sapiens
  misc_RNA (1)...(19): siRNA sense strand
aguuugaagaagacaguga

SEQ ID NO: 2556032 - RNA, 19 nt, Homo sapiens
  misc_RNA (1)...(19): siRNA sense strand
caaaaucuccauacagaaa

SEQ ID NO: 2556033 - RNA, 19 nt, Homo sapiens
  misc_RNA (1)...(19): siRNA sense strand
gaagauggcugcaggagac

SEQ ID NO: 2556034 - RNA, 19 nt, Homo sapiens
  misc_RNA (1)...(19): siRNA sense strand
gucugaagaaccugggcaa

SEQ ID NO: 2556035 - RNA, 19 nt, Homo sapiens
  misc_RNA (1)...(19): siRNA sense strand
ccaacaaggaugaacugau

SEQ ID NO: 2556036 - RNA, 19 nt, Homo sapiens
  misc_RNA (1)...(19): siRNA sense strand
gugcagauaaagaaguuca

SEQ ID NO: 2556037 - RNA, 19 nt, Homo sapiens
  misc_RNA (1)...(19): siRNA sense strand
cccgaaggaccuagaguca

SEQ ID NO: 2556038 - RNA, 19 nt, Homo sapiens
  misc_RNA (1)...(19): siRNA sense strand
aaggaaggaagauggguga

SEQ ID NO: 2556039 - RNA, 19 nt, Homo sapiens
  misc_RNA (1)...(19): siRNA sense strand
gacaucaagcugaggguca

SEQ ID NO: 2556040 - RNA, 19 nt, Homo sapiens
  misc_RNA (1)...(19): siRNA sense strand
ccauggaggcggcaaccaa

SEQ ID NO: 2556041 - RNA, 19 nt, Homo sapiens
  misc_RNA (1)...(19): siRNA sense strand
cugaauacuugguagugca

SEQ ID NO: 2556042 - RNA, 19 nt, Homo sapiens
  misc_RNA (1)...(19): siRNA sense strand
caaggauggaucuggaaca

SEQ ID NO: 2556043 - RNA, 19 nt, Homo sapiens
  misc_RNA (1)...(19): siRNA sense strand
cuggagcauuacagagaca

SEQ ID NO: 2556044 - RNA, 19 nt, Homo sapiens
  misc_RNA (1)...(19): siRNA sense strand
auuacagagacaugggcua

SEQ ID NO: 2556045 - RNA, 19 nt, Homo sapiens
  misc_RNA (1)...(19): siRNA sense strand
ccagaauuccagagagcgu

SEQ ID NO: 2556046 - RNA, 19 nt, Homo sapiens
  misc_RNA (1)...(19): siRNA sense strand
acauuauuucugaggccaa

SEQ ID NO: 2556047 - RNA, 19 nt, Homo sapiens
  misc_RNA (1)...(19): siRNA sense strand
ggcgucugguggagcguua

SEQ ID NO: 2556048 - RNA, 19 nt, Homo sapiens
  misc_RNA (1)...(19): siRNA sense strand
agcacaagccacagcagaa

SEQ ID NO: 2556049 - RNA, 19 nt, Homo sapiens
  misc_RNA (1)...(19): siRNA sense strand
ugguagugcagauaaagaa

SEQ ID NO: 2556050 - RNA, 19 nt, Homo sapiens
  misc_RNA (1)...(19): siRNA sense strand
cgaauaauaaccuggaaag

SEQ ID NO: 2556051 - RNA, 19 nt, Homo sapiens
  misc_RNA (1)...(19): siRNA sense strand
acccugaguuugaagaaga

SEQ ID NO: 2556052 - RNA, 19 nt, Homo sapiens
  misc_RNA (1)...(19): siRNA sense strand
ggcacgaaacugaagccaa

SEQ ID NO: 2556053 - RNA, 19 nt, Homo sapiens
  misc_RNA (1)...(19): siRNA sense strand
ccucuaacaggcagcaaga

SEQ ID NO: 2556054 - RNA, 19 nt, Homo sapiens
  misc_RNA (1)...(19): siRNA sense strand
ccaugaaggugcugcgcaa

SEQ ID NO: 2556055 - RNA, 19 nt, Homo sapiens
  misc_RNA (1)...(19): siRNA sense strand
ggcugaagcucgagggacu

SEQ ID NO: 2556056 - RNA, 19 nt, Homo sapiens
  misc_RNA (1)...(19): siRNA sense strand
cccgaaucuuucagggaua

SEQ ID NO: 2556057 - RNA, 19 nt, Homo sapiens
  misc_RNA (1)...(19): siRNA sense strand
gggcacaagaaguccggaa

SEQ ID NO: 2556058 - RNA, 19 nt, Homo sapiens
  misc_RNA (1)...(19): siRNA sense strand
aggugagcguggagaacuu

SEQ ID NO: 2556059 - RNA, 19 nt, Homo sapiens
  misc_RNA (1)...(19): siRNA sense strand
agaaggugagcguggagaa

SEQ ID NO: 2556060 - RNA, 19 nt, Homo sapiens
  misc_RNA (1)...(19): siRNA sense strand
cuggagggcgagaggaaca

SEQ ID NO: 2556061 - RNA, 19 nt, Homo sapiens
  misc_RNA (1)...(19): siRNA sense strand
cagagcuggaugugggcaa

SEQ ID NO: 2556062 - RNA, 19 nt, Homo sapiens
  misc_RNA (1)...(19): siRNA sense strand
gggcacgaggagaagguga

SEQ ID NO: 2556063 - RNA, 19 nt, Homo sapiens
  misc_RNA (1)...(19): siRNA sense strand
cggacuucgggcugagcaa

SEQ ID NO: 2556064 - RNA, 19 nt, Homo sapiens
  misc_RNA (1)...(19): siRNA sense strand
accucaagccggagaacau

SEQ ID NO: 2556065 - RNA, 19 nt, Homo sapiens
  misc_RNA (1)...(19): siRNA sense strand
ccgaaaucauccguagcaa

SEQ ID NO: 2556066 - RNA, 19 nt, Homo sapiens
  misc_RNA (1)...(19): siRNA sense strand
ccaugagugucuugggaga

SEQ ID NO: 2556067 - RNA, 19 nt, Homo sapiens
  misc_RNA (1)...(19): siRNA sense strand
ugacaauucaagagaacau

SEQ ID NO: 2556068 - RNA, 19 nt, Homo sapiens
  misc_RNA (1)...(19): siRNA sense strand
ucaagaaagcaauggacau

SEQ ID NO: 2556069 - RNA, 19 nt, Homo sapiens
  misc_RNA (1)...(19): siRNA sense strand
ucagcaagugcaugggaaa

SEQ ID NO: 2556070 - RNA, 19 nt, Homo sapiens
  misc_RNA (1)...(19): siRNA sense strand
ggacaauggaagaagcacu

SEQ ID NO: 2556071 - RNA, 19 nt, Homo sapiens
  misc_RNA (1)...(19): siRNA sense strand
gugcaugggaaaauggaaa

SEQ ID NO: 2556072 - RNA, 19 nt, Homo sapiens
  misc_RNA (1)...(19): siRNA sense strand
acaagagauaucugcuaaa

SEQ ID NO: 2556073 - RNA, 19 nt, Homo sapiens
  misc_RNA (1)...(19): siRNA sense strand
cuaaagaagaaaugagccu

SEQ ID NO: 2556074 - RNA, 19 nt, Homo sapiens
  misc_RNA (1)...(19): siRNA sense strand
gggaguuacccgcugggaa

SEQ ID NO: 2556075 - RNA, 19 nt, Homo sapiens
  misc_RNA (1)...(19): siRNA sense strand
gcaagcagcaucauggaga

SEQ ID NO: 2556076 - RNA, 19 nt, Homo sapiens
  misc_RNA (1)...(19): siRNA sense strand
agaccuugguaaacugcaa

SEQ ID NO: 2556077 - RNA, 19 nt, Homo sapiens
  misc_RNA (1)...(19): siRNA sense strand
agaaacuggccaugaggau

SEQ ID NO: 2556078 - RNA, 19 nt, Homo sapiens
  misc_RNA (1)...(19): siRNA sense strand
aguuuguguugguagagaa

SEQ ID NO: 2556079 - RNA, 19 nt, Homo sapiens
  misc_RNA (1)...(19): siRNA sense strand
ucaccaaaccagagcaucu

SEQ ID NO: 2556080 - RNA, 19 nt, Homo sapiens
  misc_RNA (1)...(19): siRNA sense strand
ggauaaagugguucacgca

SEQ ID NO: 2556081 - RNA, 19 nt, Homo sapiens
  misc_RNA (1)...(19): siRNA sense strand
gcacuuugguggaagcaag

SEQ ID NO: 2556082 - RNA, 19 nt, Homo sapiens
  misc_RNA (1)...(19): siRNA sense strand
gggaaaauggaaaggguag

SEQ ID NO: 2556083 - RNA, 19 nt, Homo sapiens
  misc_RNA (1)...(19): siRNA sense strand
gccuagagccugugggaca

SEQ ID NO: 2556084 - RNA, 19 nt, Homo sapiens
  misc_RNA (1)...(19): siRNA sense strand
cggaagaaaaccauggaua

SEQ ID NO: 2556085 - RNA, 19 nt, Homo sapiens
  misc_RNA (1)...(19): siRNA sense strand
cagaggaggacgugagcca

SEQ ID NO: 2556086 - RNA, 19 nt, Homo sapiens
  misc_RNA (1)...(19): siRNA sense strand
aggccaaaauugugcgcaa

SEQ ID NO: 2556087 - RNA, 19 nt, Homo sapiens
  misc_RNA (1)...(19): siRNA sense strand
acacacgggcugagcggaa

SEQ ID NO: 2556088 - RNA, 19 nt, Homo sapiens
  misc_RNA (1)...(19): siRNA sense strand
agguguuccaggugcgaaa

SEQ ID NO: 2556089 - RNA, 19 nt, Homo sapiens
  misc_RNA (1)...(19): siRNA sense strand
gcuuugagcugcugcgugu

SEQ ID NO: 2556090 - RNA, 19 nt, Homo sapiens
  misc_RNA (1)...(19): siRNA sense strand
ucacgcaucuggagcgaga

SEQ ID NO: 2556091 - RNA, 19 nt, Homo sapiens
  misc_RNA (1)...(19): siRNA sense strand
accucaagcccgagaacau

SEQ ID NO: 2556092 - RNA, 19 nt, Homo sapiens
  misc_RNA (1)...(19): siRNA sense strand
gcgcaaugccaaggacaca

SEQ ID NO: 2556093 - RNA, 19 nt, Homo sapiens
  misc_RNA (1)...(19): siRNA sense strand
guugagggcagcuggccua

SEQ ID NO: 2556094 - RNA, 19 nt, Homo sapiens
  misc_RNA (1)...(19): siRNA sense strand
ccguguuugauuuggauuu

SEQ ID NO: 2556095 - RNA, 19 nt, Homo sapiens
  misc_RNA (1)...(19): siRNA sense strand
caacugaggagcuggagga

SEQ ID NO: 2556096 - RNA, 19 nt, Homo sapiens
  misc_RNA (1)...(19): siRNA sense strand
cugaggagcuggaggacug

SEQ ID NO: 2556097 - RNA, 19 nt, Homo sapiens
  misc_RNA (1)...(19): siRNA sense strand
ccgcaggaucugugagaau

SEQ ID NO: 2556098 - RNA, 19 nt, Homo sapiens
  misc_RNA (1)...(19): siRNA sense strand
agagcaugacugugggaaa

SEQ ID NO: 2556099 - RNA, 19 nt, Homo sapiens
  misc_RNA (1)...(19): siRNA sense strand
caguagcguagaagagaaa

SEQ ID NO: 2556100 - RNA, 19 nt, Homo sapiens
  misc_RNA (1)...(19): siRNA sense strand
ccaucaaggcauuuaacaa

SEQ ID NO: 2556101 - RNA, 19 nt, Homo sapiens
  misc_RNA (1)...(19): siRNA sense strand
gggacagaaccgcgaggaa

SEQ ID NO: 2556102 - RNA, 19 nt, Homo sapiens
  misc_RNA (1)...(19): siRNA sense strand
uggaauaccaggaaugcaa

SEQ ID NO: 2556103 - RNA, 19 nt, Homo sapiens
  misc_RNA (1)...(19): siRNA sense strand
ccuagaggaaagaaacaaa

SEQ ID NO: 2556104 - RNA, 19 nt, Homo sapiens
  misc_RNA (1)...(19): siRNA sense strand
ugaaccugaccgagagaaa

SEQ ID NO: 2556105 - RNA, 19 nt, Homo sapiens
  misc_RNA (1)...(19): siRNA sense strand
gcacaagccuggaggagag

SEQ ID NO: 2556106 - RNA, 19 nt, Homo sapiens
  misc_RNA (1)...(19): siRNA sense strand
aggaggaaugucagaacua

SEQ ID NO: 2556107 - RNA, 19 nt, Homo sapiens
  misc_RNA (1)...(19): siRNA sense strand
aggcaaaucaaaggaggaa

SEQ ID NO: 2556108 - RNA, 19 nt, Homo sapiens
  misc_RNA (1)...(19): siRNA sense strand
cgggugugcaagaacgaua

SEQ ID NO: 2556109 - RNA, 19 nt, Homo sapiens
  misc_RNA (1)...(19): siRNA sense strand
cggacuggucugaguguga

SEQ ID NO: 2556110 - RNA, 19 nt, Homo sapiens
  misc_RNA (1)...(19): siRNA sense strand
acaucaacaaacuggacaa

SEQ ID NO: 2556111 - RNA, 19 nt, Homo sapiens
  misc_RNA (1)...(19): siRNA sense strand
agaacuuguuguaggagca

SEQ ID NO: 2556112 - RNA, 19 nt, Homo sapiens
  misc_RNA (1)...(19): siRNA sense strand
acaacgaauugcagaguac

SEQ ID NO: 2556113 - RNA, 19 nt, Homo sapiens
  misc_RNA (1)...(19): siRNA sense strand
acaaauacuucaacccaca

SEQ ID NO: 2556114 - RNA, 19 nt, Homo sapiens
  misc_RNA (1)...(19): siRNA sense strand
uuaccgaagccuaggcauu

SEQ ID NO: 2556115 - RNA, 19 nt, Homo sapiens
  misc_RNA (1)...(19): siRNA sense strand
gcugcaauguggaguacca

SEQ ID NO: 2556116 - RNA, 19 nt, Homo sapiens
  misc_RNA (1)...(19): siRNA sense strand
ccuucaaguaccaagaaaa

SEQ ID NO: 2556117 - RNA, 19 nt, Homo sapiens
  misc_RNA (1)...(19): siRNA sense strand
gcgaggaaagauacugcaa

SEQ ID NO: 2556118 - RNA, 19 nt, Homo sapiens
  misc_RNA (1)...(19): siRNA sense strand
agagaaucgaaaugcggua

SEQ ID NO: 2556119 - RNA, 19 nt, Homo sapiens
  misc_RNA (1)...(19): siRNA sense strand
ggcaagauccaguagcgua

SEQ ID NO: 2556120 - RNA, 19 nt, Homo sapiens
  misc_RNA (1)...(19): siRNA sense strand
gcgcaguacaacuccaaau

SEQ ID NO: 2556121 - RNA, 19 nt, Homo sapiens
  misc_RNA (1)...(19): siRNA sense strand
uggacaaaauguucagcaa

SEQ ID NO: 2556122 - RNA, 19 nt, Homo sapiens
  misc_RNA (1)...(19): siRNA sense strand
gcaguuaacauuugaccca

SEQ ID NO: 2556123 - RNA, 19 nt, Homo sapiens
  misc_RNA (1)...(19): siRNA sense strand
ggaugugguaaugaagaaa

SEQ ID NO: 2556124 - RNA, 19 nt, Homo sapiens
  misc_RNA (1)...(19): siRNA sense strand
gaggaaugucagaacuaca

SEQ ID NO: 2556125 - RNA, 19 nt, Homo sapiens
  misc_RNA (1)...(19): siRNA sense strand
gggaguucagagcgaagaa

SEQ ID NO: 2556126 - RNA, 19 nt, Homo sapiens
  misc_RNA (1)...(19): siRNA sense strand
agaaccgcgaggaaagaua

SEQ ID NO: 2556127 - RNA, 19 nt, Homo sapiens
  misc_RNA (1)...(19): siRNA sense strand
gaguaccagucuugcaaca

SEQ ID NO: 2556128 - RNA, 19 nt, Homo sapiens
  misc_RNA (1)...(19): siRNA sense strand
cggcgaccacuaugagcaa

SEQ ID NO: 2556129 - RNA, 19 nt, Homo sapiens
  misc_RNA (1)...(19): siRNA sense strand
gaggaaagaaacaaauacu

SEQ ID NO: 2556130 - RNA, 19 nt, Homo sapiens
  misc_RNA (1)...(19): siRNA sense strand
gcgaagaaugcugcggauu

SEQ ID NO: 2556131 - RNA, 19 nt, Homo sapiens
  misc_RNA (1)...(19): siRNA sense strand
gguacgacucagugccaga

SEQ ID NO: 2556132 - RNA, 19 nt, Homo sapiens
  misc_RNA (1)...(19): siRNA sense strand
gguaaugaagaaaugcaca

SEQ ID NO: 2556133 - RNA, 19 nt, Homo sapiens
  misc_RNA (1)...(19): siRNA sense strand
uggauuugaucuauggcau

SEQ ID NO: 2556134 - RNA, 19 nt, Homo sapiens
  misc_RNA (1)...(19): siRNA sense strand
ccgccuggcugauccgaau

SEQ ID NO: 2556135 - RNA, 19 nt, Homo sapiens
  misc_RNA (1)...(19): siRNA sense strand
gagaaaaugcaguagagca

SEQ ID NO: 2556136 - RNA, 19 nt, Homo sapiens
  misc_RNA (1)...(19): siRNA sense strand
gauuaucgugcuagggaau

SEQ ID NO: 2556137 - RNA, 19 nt, Homo sapiens
  misc_RNA (1)...(19): siRNA sense strand
gcauauaccucuugugcug

SEQ ID NO: 2556138 - RNA, 19 nt, Homo sapiens
  misc_RNA (1)...(19): siRNA sense strand
ugauuaucgugcuagggaa

SEQ ID NO: 2556139 - RNA, 19 nt, Homo sapiens
  misc_RNA (1)...(19): siRNA sense strand
acacugagccagaaggucu

SEQ ID NO: 2556140 - RNA, 19 nt, Homo sapiens
  misc_RNA (1)...(19): siRNA sense strand
uggcauuugcuguguccua

SEQ ID NO: 2556141 - RNA, 19 nt, Homo sapiens
  misc_RNA (1)...(19): siRNA sense strand
agauuaccacauugagcaa

SEQ ID NO: 2556142 - RNA, 19 nt, Homo sapiens
  misc_RNA (1)...(19): siRNA sense strand
gggaaauaugggagcuaau

SEQ ID NO: 2556143 - RNA, 19 nt, Homo sapiens
  misc_RNA (1)...(19): siRNA sense strand
aggaaagacaacugaagaa

SEQ ID NO: 2556144 - RNA, 19 nt, Homo sapiens
  misc_RNA (1)...(19): siRNA sense strand
aggagaaccuggagcucaa

SEQ ID NO: 2556145 - RNA, 19 nt, Homo sapiens
  misc_RNA (1)...(19): siRNA sense strand
aaguggaauugaugcgaaa

SEQ ID NO: 2556146 - RNA, 19 nt, Homo sapiens
  misc_RNA (1)...(19): siRNA sense strand
gggcagaaauucauggagu

SEQ ID NO: 2556147 - RNA, 19 nt, Homo sapiens
  misc_RNA (1)...(19): siRNA sense strand
guauaaagagacagaucau

SEQ ID NO: 2556148 - RNA, 19 nt, Homo sapiens
  misc_RNA (1)...(19): siRNA sense strand
gaagaaagugauugaggca

SEQ ID NO: 2556149 - RNA, 19 nt, Homo sapiens
  misc_RNA (1)...(19): siRNA sense strand
gcuuagaagagcugaacca

SEQ ID NO: 2556150 - RNA, 19 nt, Homo sapiens
  misc_RNA (1)...(19): siRNA sense strand
ggaguauguggcagaacaa

SEQ ID NO: 2556151 - RNA, 19 nt, Homo sapiens
  misc_RNA (1)...(19): siRNA sense strand
gagagagccaagcaggaaa

SEQ ID NO: 2556152 - RNA, 19 nt, Homo sapiens
  misc_RNA (1)...(19): siRNA sense strand
ugguaaagaagcauaucaa

SEQ ID NO: 2556153 - RNA, 19 nt, Homo sapiens
  misc_RNA (1)...(19): siRNA sense strand
ggauaugaugauugcugaa

SEQ ID NO: 2556154 - RNA, 19 nt, Homo sapiens
  misc_RNA (1)...(19): siRNA sense strand
acaugaagaaagugauuga

SEQ ID NO: 2556155 - RNA, 19 nt, Homo sapiens
  misc_RNA (1)...(19): siRNA sense strand
gggcaaagcacguaagcug

SEQ ID NO: 2556156 - RNA, 19 nt, Homo sapiens
  misc_RNA (1)...(19): siRNA sense strand
ccuaaaucaccuucgggaa

SEQ ID NO: 2556157 - RNA, 19 nt, Homo sapiens
  misc_RNA (1)...(19): siRNA sense strand
cgaguuacauguugagcca

SEQ ID NO: 2556158 - RNA, 19 nt, Homo sapiens
  misc_RNA (1)...(19): siRNA sense strand
aauuagaaguggaucgguu

SEQ ID NO: 2556159 - RNA, 19 nt, Homo sapiens
  misc_RNA (1)...(19): siRNA sense strand
gcugagauugugcgguuaa

SEQ ID NO: 2556160 - RNA, 19 nt, Homo sapiens
  misc_RNA (1)...(19): siRNA sense strand
gaagaagaguugaaggcac

SEQ ID NO: 2556161 - RNA, 19 nt, Homo sapiens
  misc_RNA (1)...(19): siRNA sense strand
aaagaacugaggugguaaa

SEQ ID NO: 2556162 - RNA, 19 nt, Homo sapiens
  misc_RNA (1)...(19): siRNA sense strand
aguuacauguugagccauu

SEQ ID NO: 2556163 - RNA, 19 nt, Homo sapiens
  misc_RNA (1)...(19): siRNA sense strand
guugcaaauaccugaagaa

SEQ ID NO: 2556164 - RNA, 19 nt, Homo sapiens
  misc_RNA (1)...(19): siRNA sense strand
ugcaaauaccugaagaaga

SEQ ID NO: 2556165 - RNA, 19 nt, Homo sapiens
  misc_RNA (1)...(19): siRNA sense strand
ggaagaaaccuggaggcuu

SEQ ID NO: 2556166 - RNA, 19 nt, Homo sapiens
  misc_RNA (1)...(19): siRNA sense strand
ucaaaggcauuuaugguga

SEQ ID NO: 2556167 - RNA, 19 nt, Homo sapiens
  misc_RNA (1)...(19): siRNA sense strand
ggagaaagagagagccaag

SEQ ID NO: 2556168 - RNA, 19 nt, Homo sapiens
  misc_RNA (1)...(19): siRNA sense strand
uggugaaugggcagaaauu

SEQ ID NO: 2556169 - RNA, 19 nt, Homo sapiens
  misc_RNA (1)...(19): siRNA sense strand
gguuggaagaacugaaaau

SEQ ID NO: 2556170 - RNA, 19 nt, Homo sapiens
  misc_RNA (1)...(19): siRNA sense strand
uuacaaaccgaggaggaaa

SEQ ID NO: 2556171 - RNA, 19 nt, Homo sapiens
  misc_RNA (1)...(19): siRNA sense strand
agacagagacagagaugcu

SEQ ID NO: 2556172 - RNA, 19 nt, Homo sapiens
  misc_RNA (1)...(19): siRNA sense strand
acuucaagagcaagaucaa

SEQ ID NO: 2556173 - RNA, 19 nt, Homo sapiens
  misc_RNA (1)...(19): siRNA sense strand
ugaagaagaaagagaagcu

SEQ ID NO: 2556174 - RNA, 19 nt, Homo sapiens
  misc_RNA (1)...(19): siRNA sense strand
gccuaucuuuggagggaca

SEQ ID NO: 2556175 - RNA, 19 nt, Homo sapiens
  misc_RNA (1)...(19): siRNA sense strand
caguauaaagagacagauc

SEQ ID NO: 2556176 - RNA, 19 nt, Homo sapiens
  misc_RNA (1)...(19): siRNA sense strand
gaagugaggugcuggcgga

SEQ ID NO: 2556177 - RNA, 19 nt, Homo sapiens
  misc_RNA (1)...(19): siRNA sense strand
cuucagauccaaaucgauu

SEQ ID NO: 2556178 - RNA, 19 nt, Homo sapiens
  misc_RNA (1)...(19): siRNA sense strand
aggaggaaaucuucuaaaa

SEQ ID NO: 2556179 - RNA, 19 nt, Homo sapiens
  misc_RNA (1)...(19): siRNA sense strand
aggaacauucaaaggcauu

SEQ ID NO: 2556180 - RNA, 19 nt, Homo sapiens
  misc_RNA (1)...(19): siRNA sense strand
gugaagacgaagaugccuu

SEQ ID NO: 2556181 - RNA, 19 nt, Homo sapiens
  misc_RNA (1)...(19): siRNA sense strand
guuugucuuuggagaauau

SEQ ID NO: 2556182 - RNA, 19 nt, Homo sapiens
  misc_RNA (1)...(19): siRNA sense strand
cuuucugugcugaggacua

SEQ ID NO: 2556183 - RNA, 19 nt, Homo sapiens
  misc_RNA (1)...(19): siRNA sense strand
augcugagauugugcgguu

SEQ ID NO: 2556184 - RNA, 19 nt, Homo sapiens
  misc_RNA (1)...(19): siRNA sense strand
uggaguauguggcagaaca

SEQ ID NO: 2556185 - RNA, 19 nt, Homo sapiens
  misc_RNA (1)...(19): siRNA sense strand
aauaguagcauucggccua

SEQ ID NO: 2556186 - RNA, 19 nt, Homo sapiens
  misc_RNA (1)...(19): siRNA sense strand
cugaggugguaaagaagca

SEQ ID NO: 2556187 - RNA, 19 nt, Homo sapiens
  misc_RNA (1)...(19): siRNA sense strand
ucauggaguauguggcaga

SEQ ID NO: 2556188 - RNA, 19 nt, Homo sapiens
  misc_RNA (1)...(19): siRNA sense strand
cauuucaggaagaaggaga

SEQ ID NO: 2556189 - RNA, 19 nt, Homo sapiens
  misc_RNA (1)...(19): siRNA sense strand
guuugucaguauaaagaga

SEQ ID NO: 2556190 - RNA, 19 nt, Homo sapiens
  misc_RNA (1)...(19): siRNA sense strand
caggaacauucaaaggcau

SEQ ID NO: 2556191 - RNA, 19 nt, Homo sapiens
  misc_RNA (1)...(19): siRNA sense strand
aaggaaagacucaucaaaa

SEQ ID NO: 2556192 - RNA, 19 nt, Homo sapiens
  misc_RNA (1)...(19): siRNA sense strand
agagaaaacaggaacugaa

SEQ ID NO: 2556193 - RNA, 19 nt, Homo sapiens
  misc_RNA (1)...(19): siRNA sense strand
cuucuaggcgugaggaguu

SEQ ID NO: 2556194 - RNA, 19 nt, Homo sapiens
  misc_RNA (1)...(19): siRNA sense strand
gggaaauaugggagcuaau

SEQ ID NO: 2556195 - RNA, 19 nt, Homo sapiens
  misc_RNA (1)...(19): siRNA sense strand
aggaaagacaacugaagaa

SEQ ID NO: 2556196 - RNA, 19 nt, Homo sapiens
  misc_RNA (1)...(19): siRNA sense strand
aggagaaccuggagcucaa

SEQ ID NO: 2556197 - RNA, 19 nt, Homo sapiens
  misc_RNA (1)...(19): siRNA sense strand
aaguggaauugaugcgaaa

SEQ ID NO: 2556198 - RNA, 19 nt, Homo sapiens
  misc_RNA (1)...(19): siRNA sense strand
gggcagaaauucauggagu

SEQ ID NO: 2556199 - RNA, 19 nt, Homo sapiens
  misc_RNA (1)...(19): siRNA sense strand
guauaaagagacagaucau

SEQ ID NO: 2556200 - RNA, 19 nt, Homo sapiens
  misc_RNA (1)...(19): siRNA sense strand
gaagaaagugauugaggca

SEQ ID NO: 2556201 - RNA, 19 nt, Homo sapiens
  misc_RNA (1)...(19): siRNA sense strand
gcuuagaagagcugaacca

SEQ ID NO: 2556202 - RNA, 19 nt, Homo sapiens
  misc_RNA (1)...(19): siRNA sense strand
ggaguauguggcagaacaa

SEQ ID NO: 2556203 - RNA, 19 nt, Homo sapiens
  misc_RNA (1)...(19): siRNA sense strand
gagagagccaagcaggaaa

SEQ ID NO: 2556204 - RNA, 19 nt, Homo sapiens
  misc_RNA (1)...(19): siRNA sense strand
ugguaaagaagcauaucaa

SEQ ID NO: 2556205 - RNA, 19 nt, Homo sapiens
  misc_RNA (1)...(19): siRNA sense strand
ggauaugaugauugcugaa

SEQ ID NO: 2556206 - RNA, 19 nt, Homo sapiens
  misc_RNA (1)...(19): siRNA sense strand
acaugaagaaagugauuga

SEQ ID NO: 2556207 - RNA, 19 nt, Homo sapiens
  misc_RNA (1)...(19): siRNA sense strand
gggcaaagcacguaagcug

SEQ ID NO: 2556208 - RNA, 19 nt, Homo sapiens
  misc_RNA (1)...(19): siRNA sense strand
ccuaaaucaccuucgggaa

SEQ ID NO: 2556209 - RNA, 19 nt, Homo sapiens
  misc_RNA (1)...(19): siRNA sense strand
cgaguuacauguugagcca

SEQ ID NO: 2556210 - RNA, 19 nt, Homo sapiens
  misc_RNA (1)...(19): siRNA sense strand
aauuagaaguggaucgguu

SEQ ID NO: 2556211 - RNA, 19 nt, Homo sapiens
  misc_RNA (1)...(19): siRNA sense strand
gcugagauugugcgguuaa

SEQ ID NO: 2556212 - RNA, 19 nt, Homo sapiens
  misc_RNA (1)...(19): siRNA sense strand
gaagaagaguugaaggcac

SEQ ID NO: 2556213 - RNA, 19 nt, Homo sapiens
  misc_RNA (1)...(19): siRNA sense strand
aaagaacugaggugguaaa

SEQ ID NO: 2556214 - RNA, 19 nt, Homo sapiens
  misc_RNA (1)...(19): siRNA sense strand
aguuacauguugagccauu

SEQ ID NO: 2556215 - RNA, 19 nt, Homo sapiens
  misc_RNA (1)...(19): siRNA sense strand
guugcaaauaccugaagaa

SEQ ID NO: 2556216 - RNA, 19 nt, Homo sapiens
  misc_RNA (1)...(19): siRNA sense strand
ugcaaauaccugaagaaga

SEQ ID NO: 2556217 - RNA, 19 nt, Homo sapiens
  misc_RNA (1)...(19): siRNA sense strand
ggaagaaaccuggaggcuu

SEQ ID NO: 2556218 - RNA, 19 nt, Homo sapiens
  misc_RNA (1)...(19): siRNA sense strand
ucaaaggcauuuaugguga

SEQ ID NO: 2556219 - RNA, 19 nt, Homo sapiens
  misc_RNA (1)...(19): siRNA sense strand
ggagaaagagagagccaag

SEQ ID NO: 2556220 - RNA, 19 nt, Homo sapiens
  misc_RNA (1)...(19): siRNA sense strand
uggugaaugggcagaaauu

SEQ ID NO: 2556221 - RNA, 19 nt, Homo sapiens
  misc_RNA (1)...(19): siRNA sense strand
gguuggaagaacugaaaau

SEQ ID NO: 2556222 - RNA, 19 nt, Homo sapiens
  misc_RNA (1)...(19): siRNA sense strand
uuacaaaccgaggaggaaa

SEQ ID NO: 2556223 - RNA, 19 nt, Homo sapiens
  misc_RNA (1)...(19): siRNA sense strand
agacagagacagagaugcu

SEQ ID NO: 2556224 - RNA, 19 nt, Homo sapiens
  misc_RNA (1)...(19): siRNA sense strand
acuucaagagcaagaucaa

SEQ ID NO: 2556225 - RNA, 19 nt, Homo sapiens
  misc_RNA (1)...(19): siRNA sense strand
ugaagaagaaagagaagcu

SEQ ID NO: 2556226 - RNA, 19 nt, Homo sapiens
  misc_RNA (1)...(19): siRNA sense strand
gccuaucuuuggagggaca

SEQ ID NO: 2556227 - RNA, 19 nt, Homo sapiens
  misc_RNA (1)...(19): siRNA sense strand
caguauaaagagacagauc

SEQ ID NO: 2556228 - RNA, 19 nt, Homo sapiens
  misc_RNA (1)...(19): siRNA sense strand
gaagugaggugcuggcgga

SEQ ID NO: 2556229 - RNA, 19 nt, Homo sapiens
  misc_RNA (1)...(19): siRNA sense strand
cuucagauccaaaucgauu

SEQ ID NO: 2556230 - RNA, 19 nt, Homo sapiens
  misc_RNA (1)...(19): siRNA sense strand
aggaggaaaucuucuaaaa

SEQ ID NO: 2556231 - RNA, 19 nt, Homo sapiens
  misc_RNA (1)...(19): siRNA sense strand
aggaacauucaaaggcauu

SEQ ID NO: 2556232 - RNA, 19 nt, Homo sapiens
  misc_RNA (1)...(19): siRNA sense strand
gugaagacgaagaugccuu

SEQ ID NO: 2556233 - RNA, 19 nt, Homo sapiens
  misc_RNA (1)...(19): siRNA sense strand
guuugucuuuggagaauau

SEQ ID NO: 2556234 - RNA, 19 nt, Homo sapiens
  misc_RNA (1)...(19): siRNA sense strand
cuuucugugcugaggacua

SEQ ID NO: 2556235 - RNA, 19 nt, Homo sapiens
  misc_RNA (1)...(19): siRNA sense strand
augcugagauugugcgguu

SEQ ID NO: 2556236 - RNA, 19 nt, Homo sapiens
  misc_RNA (1)...(19): siRNA sense strand
uggaguauguggcagaaca

SEQ ID NO: 2556237 - RNA, 19 nt, Homo sapiens
  misc_RNA (1)...(19): siRNA sense strand
aauaguagcauucggccua

SEQ ID NO: 2556238 - RNA, 19 nt, Homo sapiens
  misc_RNA (1)...(19): siRNA sense strand
cugaggugguaaagaagca

SEQ ID NO: 2556239 - RNA, 19 nt, Homo sapiens
  misc_RNA (1)...(19): siRNA sense strand
ucauggaguauguggcaga

SEQ ID NO: 2556240 - RNA, 19 nt, Homo sapiens
  misc_RNA (1)...(19): siRNA sense strand
cauuucaggaagaaggaga

SEQ ID NO: 2556241 - RNA, 19 nt, Homo sapiens
  misc_RNA (1)...(19): siRNA sense strand
guuugucaguauaaagaga

SEQ ID NO: 2556242 - RNA, 19 nt, Homo sapiens
  misc_RNA (1)...(19): siRNA sense strand
caggaacauucaaaggcau

SEQ ID NO: 2556243 - RNA, 19 nt, Homo sapiens
  misc_RNA (1)...(19): siRNA sense strand
aaggaaagacucaucaaaa

SEQ ID NO: 2556244 - RNA, 19 nt, Homo sapiens
  misc_RNA (1)...(19): siRNA sense strand
agagaaaacaggaacugaa

SEQ ID NO: 2556245 - RNA, 19 nt, Homo sapiens
  misc_RNA (1)...(19): siRNA sense strand
cuucuaggcgugaggaguu

SEQ ID NO: 2556246 - RNA, 19 nt, Homo sapiens
  misc_RNA (1)...(19): siRNA sense strand
gggaaauaugggagcuaau

SEQ ID NO: 2556247 - RNA, 19 nt, Homo sapiens
  misc_RNA (1)...(19): siRNA sense strand
aggaaagacaacugaagaa

SEQ ID NO: 2556248 - RNA, 19 nt, Homo sapiens
  misc_RNA (1)...(19): siRNA sense strand
aggagaaccuggagcucaa

SEQ ID NO: 2556249 - RNA, 19 nt, Homo sapiens
  misc_RNA (1)...(19): siRNA sense strand
aaguggaauugaugcgaaa

SEQ ID NO: 2556250 - RNA, 19 nt, Homo sapiens
  misc_RNA (1)...(19): siRNA sense strand
gggcagaaauucauggagu

SEQ ID NO: 2556251 - RNA, 19 nt, Homo sapiens
  misc_RNA (1)...(19): siRNA sense strand
guauaaagagacagaucau

SEQ ID NO: 2556252 - RNA, 19 nt, Homo sapiens
  misc_RNA (1)...(19): siRNA sense strand
gaagaaagugauugaggca

SEQ ID NO: 2556253 - RNA, 19 nt, Homo sapiens
  misc_RNA (1)...(19): siRNA sense strand
gcuuagaagagcugaacca

SEQ ID NO: 2556254 - RNA, 19 nt, Homo sapiens
  misc_RNA (1)...(19): siRNA sense strand
ggaguauguggcagaacaa

SEQ ID NO: 2556255 - RNA, 19 nt, Homo sapiens
  misc_RNA (1)...(19): siRNA sense strand
gagagagccaagcaggaaa

SEQ ID NO: 2556256 - RNA, 19 nt, Homo sapiens
  misc_RNA (1)...(19): siRNA sense strand
ugguaaagaagcauaucaa

SEQ ID NO: 2556257 - RNA, 19 nt, Homo sapiens
  misc_RNA (1)...(19): siRNA sense strand
ggauaugaugauugcugaa

SEQ ID NO: 2556258 - RNA, 19 nt, Homo sapiens
  misc_RNA (1)...(19): siRNA sense strand
acaugaagaaagugauuga

SEQ ID NO: 2556259 - RNA, 19 nt, Homo sapiens
  misc_RNA (1)...(19): siRNA sense strand
gggcaaagcacguaagcug

SEQ ID NO: 2556260 - RNA, 19 nt, Homo sapiens
  misc_RNA (1)...(19): siRNA sense strand
ccuaaaucaccuucgggaa

SEQ ID NO: 2556261 - RNA, 19 nt, Homo sapiens
  misc_RNA (1)...(19): siRNA sense strand
cgaguuacauguugagcca

SEQ ID NO: 2556262 - RNA, 19 nt, Homo sapiens
  misc_RNA (1)...(19): siRNA sense strand
aauuagaaguggaucgguu

SEQ ID NO: 2556263 - RNA, 19 nt, Homo sapiens
  misc_RNA (1)...(19): siRNA sense strand
gcugagauugugcgguuaa

SEQ ID NO: 2556264 - RNA, 19 nt, Homo sapiens
  misc_RNA (1)...(19): siRNA sense strand
gaagaagaguugaaggcac

SEQ ID NO: 2556265 - RNA, 19 nt, Homo sapiens
  misc_RNA (1)...(19): siRNA sense strand
aaagaacugaggugguaaa

SEQ ID NO: 2556266 - RNA, 19 nt, Homo sapiens
  misc_RNA (1)...(19): siRNA sense strand
aguuacauguugagccauu

SEQ ID NO: 2556267 - RNA, 19 nt, Homo sapiens
  misc_RNA (1)...(19): siRNA sense strand
guugcaaauaccugaagaa

SEQ ID NO: 2556268 - RNA, 19 nt, Homo sapiens
  misc_RNA (1)...(19): siRNA sense strand
ugcaaauaccugaagaaga

SEQ ID NO: 2556269 - RNA, 19 nt, Homo sapiens
  misc_RNA (1)...(19): siRNA sense strand
ggaagaaaccuggaggcuu

SEQ ID NO: 2556270 - RNA, 19 nt, Homo sapiens
  misc_RNA (1)...(19): siRNA sense strand
ucaaaggcauuuaugguga

SEQ ID NO: 2556271 - RNA, 19 nt, Homo sapiens
  misc_RNA (1)...(19): siRNA sense strand
ggagaaagagagagccaag

SEQ ID NO: 2556272 - RNA, 19 nt, Homo sapiens
  misc_RNA (1)...(19): siRNA sense strand
uggugaaugggcagaaauu

SEQ ID NO: 2556273 - RNA, 19 nt, Homo sapiens
  misc_RNA (1)...(19): siRNA sense strand
gguuggaagaacugaaaau

SEQ ID NO: 2556274 - RNA, 19 nt, Homo sapiens
  misc_RNA (1)...(19): siRNA sense strand
uuacaaaccgaggaggaaa

SEQ ID NO: 2556275 - RNA, 19 nt, Homo sapiens
  misc_RNA (1)...(19): siRNA sense strand
agacagagacagagaugcu

SEQ ID NO: 2556276 - RNA, 19 nt, Homo sapiens
  misc_RNA (1)...(19): siRNA sense strand
acuucaagagcaagaucaa

SEQ ID NO: 2556277 - RNA, 19 nt, Homo sapiens
  misc_RNA (1)...(19): siRNA sense strand
ugaagaagaaagagaagcu

SEQ ID NO: 2556278 - RNA, 19 nt, Homo sapiens
  misc_RNA (1)...(19): siRNA sense strand
gccuaucuuuggagggaca

SEQ ID NO: 2556279 - RNA, 19 nt, Homo sapiens
  misc_RNA (1)...(19): siRNA sense strand
caguauaaagagacagauc

SEQ ID NO: 2556280 - RNA, 19 nt, Homo sapiens
  misc_RNA (1)...(19): siRNA sense strand
gaagugaggugcuggcgga

SEQ ID NO: 2556281 - RNA, 19 nt, Homo sapiens
  misc_RNA (1)...(19): siRNA sense strand
cuucagauccaaaucgauu

SEQ ID NO: 2556282 - RNA, 19 nt, Homo sapiens
  misc_RNA (1)...(19): siRNA sense strand
aggaggaaaucuucuaaaa

SEQ ID NO: 2556283 - RNA, 19 nt, Homo sapiens
  misc_RNA (1)...(19): siRNA sense strand
aggaacauucaaaggcauu

SEQ ID NO: 2556284 - RNA, 19 nt, Homo sapiens
  misc_RNA (1)...(19): siRNA sense strand
gugaagacgaagaugccuu

SEQ ID NO: 2556285 - RNA, 19 nt, Homo sapiens
  misc_RNA (1)...(19): siRNA sense strand
guuugucuuuggagaauau

SEQ ID NO: 2556286 - RNA, 19 nt, Homo sapiens
  misc_RNA (1)...(19): siRNA sense strand
cuuucugugcugaggacua

SEQ ID NO: 2556287 - RNA, 19 nt, Homo sapiens
  misc_RNA (1)...(19): siRNA sense strand
augcugagauugugcgguu

SEQ ID NO: 2556288 - RNA, 19 nt, Homo sapiens
  misc_RNA (1)...(19): siRNA sense strand
uggaguauguggcagaaca

SEQ ID NO: 2556289 - RNA, 19 nt, Homo sapiens
  misc_RNA (1)...(19): siRNA sense strand
aauaguagcauucggccua

SEQ ID NO: 2556290 - RNA, 19 nt, Homo sapiens
  misc_RNA (1)...(19): siRNA sense strand
cugaggugguaaagaagca

SEQ ID NO: 2556291 - RNA, 19 nt, Homo sapiens
  misc_RNA (1)...(19): siRNA sense strand
ucauggaguauguggcaga

SEQ ID NO: 2556292 - RNA, 19 nt, Homo sapiens
  misc_RNA (1)...(19): siRNA sense strand
cauuucaggaagaaggaga

SEQ ID NO: 2556293 - RNA, 19 nt, Homo sapiens
  misc_RNA (1)...(19): siRNA sense strand
guuugucaguauaaagaga

SEQ ID NO: 2556294 - RNA, 19 nt, Homo sapiens
  misc_RNA (1)...(19): siRNA sense strand
caggaacauucaaaggcau

SEQ ID NO: 2556295 - RNA, 19 nt, Homo sapiens
  misc_RNA (1)...(19): siRNA sense strand
aaggaaagacucaucaaaa

SEQ ID NO: 2556296 - RNA, 19 nt, Homo sapiens
  misc_RNA (1)...(19): siRNA sense strand
agagaaaacaggaacugaa

SEQ ID NO: 2556297 - RNA, 19 nt, Homo sapiens
  misc_RNA (1)...(19): siRNA sense strand
cuucuaggcgugaggaguu

SEQ ID NO: 2556298 - RNA, 19 nt, Homo sapiens
  misc_RNA (1)...(19): siRNA sense strand
ccuccugggacaugggaaa

SEQ ID NO: 2556299 - RNA, 19 nt, Homo sapiens
  misc_RNA (1)...(19): siRNA sense strand
ccucauuggcaucgggauu

SEQ ID NO: 2556300 - RNA, 19 nt, Homo sapiens
  misc_RNA (1)...(19): siRNA sense strand
gaaauuugcccuuggccau

SEQ ID NO: 2556301 - RNA, 19 nt, Homo sapiens
  misc_RNA (1)...(19): siRNA sense strand
ccuauuacacagugcugaa

SEQ ID NO: 2556302 - RNA, 19 nt, Homo sapiens
  misc_RNA (1)...(19): siRNA sense strand
cuuauauucuagaggccuu

SEQ ID NO: 2556303 - RNA, 19 nt, Homo sapiens
  misc_RNA (1)...(19): siRNA sense strand
cagaaagaaauuugcccuu

SEQ ID NO: 2556304 - RNA, 19 nt, Homo sapiens
  misc_RNA (1)...(19): siRNA sense strand
ggccauuguuuauucggaa

SEQ ID NO: 2556305 - RNA, 19 nt, Homo sapiens
  misc_RNA (1)...(19): siRNA sense strand
gcuugauguagccgaagaa

SEQ ID NO: 2556306 - RNA, 19 nt, Homo sapiens
  misc_RNA (1)...(19): siRNA sense strand
guuggaagcuucuaggcau

SEQ ID NO: 2556307 - RNA, 19 nt, Homo sapiens
  misc_RNA (1)...(19): siRNA sense strand
acauggugagagagagaga

SEQ ID NO: 2556308 - RNA, 19 nt, Homo sapiens
  misc_RNA (1)...(19): siRNA sense strand
uuggaagcuucuaggcauu

SEQ ID NO: 2556309 - RNA, 19 nt, Homo sapiens
  misc_RNA (1)...(19): siRNA sense strand
auggugagagagagagaga

SEQ ID NO: 2556310 - RNA, 19 nt, Homo sapiens
  misc_RNA (1)...(19): siRNA sense strand
gggaaaagaugcaggagca

SEQ ID NO: 2556311 - RNA, 19 nt, Homo sapiens
  misc_RNA (1)...(19): siRNA sense strand
cccagaaggaggugaccaa

SEQ ID NO: 2556312 - RNA, 19 nt, Homo sapiens
  misc_RNA (1)...(19): siRNA sense strand
ccggaagaacuuuggcauu

SEQ ID NO: 2556313 - RNA, 19 nt, Homo sapiens
  misc_RNA (1)...(19): siRNA sense strand
accucaaaguguuggauau

SEQ ID NO: 2556314 - RNA, 19 nt, Homo sapiens
  misc_RNA (1)...(19): siRNA sense strand
acggcaacguggugaacuu

SEQ ID NO: 2556315 - RNA, 19 nt, Homo sapiens
  misc_RNA (1)...(19): siRNA sense strand
gaacuuuggcauuggggaa

SEQ ID NO: 2556316 - RNA, 19 nt, Homo sapiens
  misc_RNA (1)...(19): siRNA sense strand
cagaaaaggccaucagcau

SEQ ID NO: 2556317 - RNA, 19 nt, Homo sapiens
  misc_RNA (1)...(19): siRNA sense strand
ggaaaagaugcaggagcaa

SEQ ID NO: 2556318 - RNA, 19 nt, Homo sapiens
  misc_RNA (1)...(19): siRNA sense strand
cugcacagcucgcaagcca

SEQ ID NO: 2556319 - RNA, 19 nt, Homo sapiens
  misc_RNA (1)...(19): siRNA sense strand
ucuuaaaugcuuagggaau

SEQ ID NO: 2556320 - RNA, 19 nt, Homo sapiens
  misc_RNA (1)...(19): siRNA sense strand
aggacagcccgaaggaaua

SEQ ID NO: 2556321 - RNA, 19 nt, Homo sapiens
  misc_RNA (1)...(19): siRNA sense strand
gugguauggaugaaagaua

SEQ ID NO: 2556322 - RNA, 19 nt, Homo sapiens
  misc_RNA (1)...(19): siRNA sense strand
ggaaacuaugucugcgaaa

SEQ ID NO: 2556323 - RNA, 19 nt, Homo sapiens
  misc_RNA (1)...(19): siRNA sense strand
ggcaaauggaaauaugaaa

SEQ ID NO: 2556324 - RNA, 19 nt, Homo sapiens
  misc_RNA (1)...(19): siRNA sense strand
ucucauuguagaaggcaaa

SEQ ID NO: 2556325 - RNA, 19 nt, Homo sapiens
  misc_RNA (1)...(19): siRNA sense strand
aggugaaugaccaggcaaa

SEQ ID NO: 2556326 - RNA, 19 nt, Homo sapiens
  misc_RNA (1)...(19): siRNA sense strand
caggacagcccgaaggaau

SEQ ID NO: 2556327 - RNA, 19 nt, Homo sapiens
  misc_RNA (1)...(19): siRNA sense strand
caaaacuaauugugggaau

SEQ ID NO: 2556328 - RNA, 19 nt, Homo sapiens
  misc_RNA (1)...(19): siRNA sense strand
gagaaaaggugaaugacca

SEQ ID NO: 2556329 - RNA, 19 nt, Homo sapiens
  misc_RNA (1)...(19): siRNA sense strand
caguaaacuccuugaaugu

SEQ ID NO: 2556330 - RNA, 19 nt, Homo sapiens
  misc_RNA (1)...(19): siRNA sense strand
cagaacacgaugaggcaga

SEQ ID NO: 2556331 - RNA, 19 nt, Homo sapiens
  misc_RNA (1)...(19): siRNA sense strand
aggaauaagaagcucaaau

SEQ ID NO: 2556332 - RNA, 19 nt, Homo sapiens
  misc_RNA (1)...(19): siRNA sense strand
ggacuaaagaaaagagagu

SEQ ID NO: 2556333 - RNA, 19 nt, Homo sapiens
  misc_RNA (1)...(19): siRNA sense strand
ucgaaacagagcagcuaaa

SEQ ID NO: 2556334 - RNA, 19 nt, Homo sapiens
  misc_RNA (1)...(19): siRNA sense strand
cuuaaacccaaguggagaa

SEQ ID NO: 2556335 - RNA, 19 nt, Homo sapiens
  misc_RNA (1)...(19): siRNA sense strand
cauaaaccaaacagaggaa

SEQ ID NO: 2556336 - RNA, 19 nt, Homo sapiens
  misc_RNA (1)...(19): siRNA sense strand
cgagauaagugaugaaaac

SEQ ID NO: 2556337 - RNA, 19 nt, Homo sapiens
  misc_RNA (1)...(19): siRNA sense strand
agacgagauaagugaugaa

SEQ ID NO: 2556338 - RNA, 19 nt, Homo sapiens
  misc_RNA (1)...(19): siRNA sense strand
ggcaauaucacaugguaca

SEQ ID NO: 2556339 - RNA, 19 nt, Homo sapiens
  misc_RNA (1)...(19): siRNA sense strand
accugaaauuguaagcaaa

SEQ ID NO: 2556340 - RNA, 19 nt, Homo sapiens
  misc_RNA (1)...(19): siRNA sense strand
acagauuggugaugcccua

SEQ ID NO: 2556341 - RNA, 19 nt, Homo sapiens
  misc_RNA (1)...(19): siRNA sense strand
aaggcaaaccucaaauaaa

SEQ ID NO: 2556342 - RNA, 19 nt, Homo sapiens
  misc_RNA (1)...(19): siRNA sense strand
caggaaugcaacuguggua

SEQ ID NO: 2556343 - RNA, 19 nt, Homo sapiens
  misc_RNA (1)...(19): siRNA sense strand
cgaaggaauaagaagcuca

SEQ ID NO: 2556344 - RNA, 19 nt, Homo sapiens
  misc_RNA (1)...(19): siRNA sense strand
agugaugaaaacagagaaa

SEQ ID NO: 2556345 - RNA, 19 nt, Homo sapiens
  misc_RNA (1)...(19): siRNA sense strand
acuaaagaaaagagaguca

SEQ ID NO: 2556346 - RNA, 19 nt, Homo sapiens
  misc_RNA (1)...(19): siRNA sense strand
cuugaaugucucugcuaua

SEQ ID NO: 2556347 - RNA, 19 nt, Homo sapiens
  misc_RNA (1)...(19): siRNA sense strand
ugcuaguaacugaggacaa

SEQ ID NO: 2556348 - RNA, 19 nt, Homo sapiens
  misc_RNA (1)...(19): siRNA sense strand
ggacaacguguuugaggca

SEQ ID NO: 2556349 - RNA, 19 nt, Homo sapiens
  misc_RNA (1)...(19): siRNA sense strand
aggcagacgagauaaguga

SEQ ID NO: 2556350 - RNA, 19 nt, Homo sapiens
  misc_RNA (1)...(19): siRNA sense strand
acacuuugucuaucaguaa

SEQ ID NO: 2556351 - RNA, 19 nt, Homo sapiens
  misc_RNA (1)...(19): siRNA sense strand
cuuggaugguauacuguaa

SEQ ID NO: 2556352 - RNA, 19 nt, Homo sapiens
  misc_RNA (1)...(19): siRNA sense strand
guugaaggacuaaagaaaa

SEQ ID NO: 2556353 - RNA, 19 nt, Homo sapiens
  misc_RNA (1)...(19): siRNA sense strand
uggcaguggaagcgucaua

SEQ ID NO: 2556354 - RNA, 19 nt, Homo sapiens
  misc_RNA (1)...(19): siRNA sense strand
caaagaaaagugugcagua

SEQ ID NO: 2556355 - RNA, 19 nt, Homo sapiens
  misc_RNA (1)...(19): siRNA sense strand
acgacgauguaccagaaua

SEQ ID NO: 2556356 - RNA, 19 nt, Homo sapiens
  misc_RNA (1)...(19): siRNA sense strand
aaccugaaauuguaagcaa

SEQ ID NO: 2556357 - RNA, 19 nt, Homo sapiens
  misc_RNA (1)...(19): siRNA sense strand
acaguuauccagauggcaa

SEQ ID NO: 2556358 - RNA, 19 nt, Homo sapiens
  misc_RNA (1)...(19): siRNA sense strand
caauagucaagguguucaa

SEQ ID NO: 2556359 - RNA, 19 nt, Homo sapiens
  misc_RNA (1)...(19): siRNA sense strand
ccaucaaagaaggggauaa

SEQ ID NO: 2556360 - RNA, 19 nt, Homo sapiens
  misc_RNA (1)...(19): siRNA sense strand
ugcuauaaguauuccagaa

SEQ ID NO: 2556361 - RNA, 19 nt, Homo sapiens
  misc_RNA (1)...(19): siRNA sense strand
ucgguaauauggaagaaaa

SEQ ID NO: 2556362 - RNA, 19 nt, Homo sapiens
  misc_RNA (1)...(19): siRNA sense strand
uggcaaauggaaauaugaa

SEQ ID NO: 2556363 - RNA, 19 nt, Homo sapiens
  misc_RNA (1)...(19): siRNA sense strand
acagagaaaaggugaauga

SEQ ID NO: 2556364 - RNA, 19 nt, Homo sapiens
  misc_RNA (1)...(19): siRNA sense strand
guuugaggcaccuacaaua

SEQ ID NO: 2556365 - RNA, 19 nt, Homo sapiens
  misc_RNA (1)...(19): siRNA sense strand
agucaagguguucaagcaa

SEQ ID NO: 2556366 - RNA, 19 nt, Homo sapiens
  misc_RNA (1)...(19): siRNA sense strand
guucaagcaaccaucuaaa

SEQ ID NO: 2556367 - RNA, 19 nt, Homo sapiens
  misc_RNA (1)...(19): siRNA sense strand
ggcagguauuauaguaaaa

SEQ ID NO: 2556368 - RNA, 19 nt, Homo sapiens
  misc_RNA (1)...(19): siRNA sense strand
uguacaugaagaagucaaa

SEQ ID NO: 2556369 - RNA, 19 nt, Homo sapiens
  misc_RNA (1)...(19): siRNA sense strand
gucaaagacugcaucaaaa

SEQ ID NO: 2556370 - RNA, 19 nt, Homo sapiens
  misc_RNA (1)...(19): siRNA sense strand
gcgcaaugcaacaggagac

SEQ ID NO: 2556371 - RNA, 19 nt, Homo sapiens
  misc_RNA (1)...(19): siRNA sense strand
acgaugaggcagacgagau

SEQ ID NO: 2556372 - RNA, 19 nt, Homo sapiens
  misc_RNA (1)...(19): siRNA sense strand
auacaaagacagauugaac

SEQ ID NO: 2556373 - RNA, 19 nt, Homo sapiens
  misc_RNA (1)...(19): siRNA sense strand
uguagaaggcaaaccucaa

SEQ ID NO: 2556374 - RNA, 19 nt, Homo sapiens
  misc_RNA (1)...(19): siRNA sense strand
caugguacaggaauggaaa

SEQ ID NO: 2556375 - RNA, 19 nt, Homo sapiens
  misc_RNA (1)...(19): siRNA sense strand
gcagaaaaccaacuggaga

SEQ ID NO: 2556376 - RNA, 19 nt, Homo sapiens
  misc_RNA (1)...(19): siRNA sense strand
cgacgauguaccagaauac

SEQ ID NO: 2556377 - RNA, 19 nt, Homo sapiens
  misc_RNA (1)...(19): siRNA sense strand
caggaauggaaaagugcua

SEQ ID NO: 2556378 - RNA, 19 nt, Homo sapiens
  misc_RNA (1)...(19): siRNA sense strand
uugaaggagcgguggucau

SEQ ID NO: 2556379 - RNA, 19 nt, Homo sapiens
  misc_RNA (1)...(19): siRNA sense strand
gugauggggcugugggcaa

SEQ ID NO: 2556380 - RNA, 19 nt, Homo sapiens
  misc_RNA (1)...(19): siRNA sense strand
agugcguggugguggguga

SEQ ID NO: 2556381 - RNA, 19 nt, Homo sapiens
  misc_RNA (1)...(19): siRNA sense strand
aaccugaaccugugggaca

SEQ ID NO: 2556382 - RNA, 19 nt, Homo sapiens
  misc_RNA (1)...(19): siRNA sense strand
ccuaugagaacgugcggca

SEQ ID NO: 2556383 - RNA, 19 nt, Homo sapiens
  misc_RNA (1)...(19): siRNA sense strand
aggugaagaccgugagcau

SEQ ID NO: 2556384 - RNA, 19 nt, Homo sapiens
  misc_RNA (1)...(19): siRNA sense strand
aggaaagccaccaagggaa

SEQ ID NO: 2556385 - RNA, 19 nt, Homo sapiens
  misc_RNA (1)...(19): siRNA sense strand
caagauauccugcuggcua

SEQ ID NO: 2556386 - RNA, 19 nt, Homo sapiens
  misc_RNA (1)...(19): siRNA sense strand
ccaagggaauuguggagca

SEQ ID NO: 2556387 - RNA, 19 nt, Homo sapiens
  misc_RNA (1)...(19): siRNA sense strand
ccucaagggcucaaggguu

SEQ ID NO: 2556388 - RNA, 19 nt, Homo sapiens
  misc_RNA (1)...(19): siRNA sense strand
ugaacaucuucgagaccau

SEQ ID NO: 2556389 - RNA, 19 nt, Homo sapiens
  misc_RNA (1)...(19): siRNA sense strand
uggagaaggugaagaccgu

SEQ ID NO: 2556390 - RNA, 19 nt, Homo sapiens
  misc_RNA (1)...(19): siRNA sense strand
ggauguuccugauggccuu

SEQ ID NO: 2556391 - RNA, 19 nt, Homo sapiens
  misc_RNA (1)...(19): siRNA sense strand
gagaaggugaagaccguga

SEQ ID NO: 2556392 - RNA, 19 nt, Homo sapiens
  misc_RNA (1)...(19): siRNA sense strand
cagccggagaagcgaguuu

SEQ ID NO: 2556393 - RNA, 19 nt, Homo sapiens
  misc_RNA (1)...(19): siRNA sense strand
uuuccuaguaagcaagaua

SEQ ID NO: 2556394 - RNA, 19 nt, Homo sapiens
  misc_RNA (1)...(19): siRNA sense strand
cugcagggcccaaggucaa

SEQ ID NO: 2556395 - RNA, 19 nt, Homo sapiens
  misc_RNA (1)...(19): siRNA sense strand
caucgugaucacaggucua

SEQ ID NO: 2556396 - RNA, 19 nt, Homo sapiens
  misc_RNA (1)...(19): siRNA sense strand
ugaaaucagaagagacagu

SEQ ID NO: 2556397 - RNA, 19 nt, Homo sapiens
  misc_RNA (1)...(19): siRNA sense strand
gcccaaggucaacggaaca

SEQ ID NO: 2556398 - RNA, 19 nt, Homo sapiens
  misc_RNA (1)...(19): siRNA sense strand
aggaggugucauacgcaua

SEQ ID NO: 2556399 - RNA, 19 nt, Homo sapiens
  misc_RNA (1)...(19): siRNA sense strand
ccacagacgaugagcgaga

SEQ ID NO: 2556400 - RNA, 19 nt, Homo sapiens
  misc_RNA (1)...(19): siRNA sense strand
guugaggaguggaaggagu

SEQ ID NO: 2556401 - RNA, 19 nt, Homo sapiens
  misc_RNA (1)...(19): siRNA sense strand
agaaagagaagaagagcug

SEQ ID NO: 2556402 - RNA, 19 nt, Homo sapiens
  misc_RNA (1)...(19): siRNA sense strand
gcuauuacgaacagccaga

SEQ ID NO: 2556403 - RNA, 19 nt, Homo sapiens
  misc_RNA (1)...(19): siRNA sense strand
ucauccagaaagagaagaa

SEQ ID NO: 2556404 - RNA, 19 nt, Homo sapiens
  misc_RNA (1)...(19): siRNA sense strand
ccaacguggaggugaaugu

SEQ ID NO: 2556405 - RNA, 19 nt, Homo sapiens
  misc_RNA (1)...(19): siRNA sense strand
cugggaagcgagaugaaga

SEQ ID NO: 2556406 - RNA, 19 nt, Homo sapiens
  misc_RNA (1)...(19): siRNA sense strand
cagaaagagaagaagagcu

SEQ ID NO: 2556407 - RNA, 19 nt, Homo sapiens
  misc_RNA (1)...(19): siRNA sense strand
gugcagaugcuguggguaa

SEQ ID NO: 2556408 - RNA, 19 nt, Homo sapiens
  misc_RNA (1)...(19): siRNA sense strand
agaagaaagaugagaagaa

SEQ ID NO: 2556409 - RNA, 19 nt, Homo sapiens
  misc_RNA (1)...(19): siRNA sense strand
agauggagcuauugagaau

SEQ ID NO: 2556410 - RNA, 19 nt, Homo sapiens
  misc_RNA (1)...(19): siRNA sense strand
cguacaaugaugaagaaua

SEQ ID NO: 2556411 - RNA, 19 nt, Homo sapiens
  misc_RNA (1)...(19): siRNA sense strand
ccacagaugcauuacgaaa

SEQ ID NO: 2556412 - RNA, 19 nt, Homo sapiens
  misc_RNA (1)...(19): siRNA sense strand
cagaagaagcacuguacaa

SEQ ID NO: 2556413 - RNA, 19 nt, Homo sapiens
  misc_RNA (1)...(19): siRNA sense strand
gugcuaauggugaggcaaa

SEQ ID NO: 2556414 - RNA, 19 nt, Homo sapiens
  misc_RNA (1)...(19): siRNA sense strand
cagaagaauacgaaaugaa

SEQ ID NO: 2556415 - RNA, 19 nt, Homo sapiens
  misc_RNA (1)...(19): siRNA sense strand
gagcaagagaggauagaca

SEQ ID NO: 2556416 - RNA, 19 nt, Homo sapiens
  misc_RNA (1)...(19): siRNA sense strand
acuuggagcuggaggugaa

SEQ ID NO: 2556417 - RNA, 19 nt, Homo sapiens
  misc_RNA (1)...(19): siRNA sense strand
cauugauaguggaagaaau

SEQ ID NO: 2556418 - RNA, 19 nt, Homo sapiens
  misc_RNA (1)...(19): siRNA sense strand
aggaagaaggugaagguga

SEQ ID NO: 2556419 - RNA, 19 nt, Homo sapiens
  misc_RNA (1)...(19): siRNA sense strand
auuagaaauugcagccaua

SEQ ID NO: 2556420 - RNA, 19 nt, Homo sapiens
  misc_RNA (1)...(19): siRNA sense strand
agguggagauggugaugaa

SEQ ID NO: 2556421 - RNA, 19 nt, Homo sapiens
  misc_RNA (1)...(19): siRNA sense strand
agaggauguugaagagauu

SEQ ID NO: 2556422 - RNA, 19 nt, Homo sapiens
  misc_RNA (1)...(19): siRNA sense strand
aagaaauaccugaggagga

SEQ ID NO: 2556423 - RNA, 19 nt, Homo sapiens
  misc_RNA (1)...(19): siRNA sense strand
cugcauuacucaagacuca

SEQ ID NO: 2556424 - RNA, 19 nt, Homo sapiens
  misc_RNA (1)...(19): siRNA sense strand
gcaaaaguauucagaccaa

SEQ ID NO: 2556425 - RNA, 19 nt, Homo sapiens
  misc_RNA (1)...(19): siRNA sense strand
agauugagcaagagaggau

SEQ ID NO: 2556426 - RNA, 19 nt, Homo sapiens
  misc_RNA (1)...(19): siRNA sense strand
uggaacugauguagcuaaa

SEQ ID NO: 2556427 - RNA, 19 nt, Homo sapiens
  misc_RNA (1)...(19): siRNA sense strand
gcuaaagaagcauccgaua

SEQ ID NO: 2556428 - RNA, 19 nt, Homo sapiens
  misc_RNA (1)...(19): siRNA sense strand
gagugaagaagguggagau

SEQ ID NO: 2556429 - RNA, 19 nt, Homo sapiens
  misc_RNA (1)...(19): siRNA sense strand
cuugugaaaccaugggaaa

SEQ ID NO: 2556430 - RNA, 19 nt, Homo sapiens
  misc_RNA (1)...(19): siRNA sense strand
ccuagaagguaaagauuuu

SEQ ID NO: 2556431 - RNA, 19 nt, Homo sapiens
  misc_RNA (1)...(19): siRNA sense strand
ccucaaagaagcuggucau

SEQ ID NO: 2556432 - RNA, 19 nt, Homo sapiens
  misc_RNA (1)...(19): siRNA sense strand
aggaauuagcagaggaugu

SEQ ID NO: 2556433 - RNA, 19 nt, Homo sapiens
  misc_RNA (1)...(19): siRNA sense strand
cauuacuguuggagauauu

SEQ ID NO: 2556434 - RNA, 19 nt, Homo sapiens
  misc_RNA (1)...(19): siRNA sense strand
ccagaaccagagugggaua

SEQ ID NO: 2556435 - RNA, 19 nt, Homo sapiens
  misc_RNA (1)...(19): siRNA sense strand
aagaggaagagaagaaaga

SEQ ID NO: 2556436 - RNA, 19 nt, Homo sapiens
  misc_RNA (1)...(19): siRNA sense strand
aggaagagaagaaagauga

SEQ ID NO: 2556437 - RNA, 19 nt, Homo sapiens
  misc_RNA (1)...(19): siRNA sense strand
gagaaucgcaacaaagcaa

SEQ ID NO: 2556438 - RNA, 19 nt, Homo sapiens
  misc_RNA (1)...(19): siRNA sense strand
aauauugccaccagagaaa

SEQ ID NO: 2556439 - RNA, 19 nt, Homo sapiens
  misc_RNA (1)...(19): siRNA sense strand
ugauggagacuuuggaauu

SEQ ID NO: 2556440 - RNA, 19 nt, Homo sapiens
  misc_RNA (1)...(19): siRNA sense strand
ucggaaaccuuaugguaga

SEQ ID NO: 2556441 - RNA, 19 nt, Homo sapiens
  misc_RNA (1)...(19): siRNA sense strand
gauagaagauucagagccu

SEQ ID NO: 2556442 - RNA, 19 nt, Homo sapiens
  misc_RNA (1)...(19): siRNA sense strand
aaugaagguuuaaguggaa

SEQ ID NO: 2556443 - RNA, 19 nt, Homo sapiens
  misc_RNA (1)...(19): siRNA sense strand
ugaaauaccagaagaagca

SEQ ID NO: 2556444 - RNA, 19 nt, Homo sapiens
  misc_RNA (1)...(19): siRNA sense strand
ugauguagcuaaagaagca

SEQ ID NO: 2556445 - RNA, 19 nt, Homo sapiens
  misc_RNA (1)...(19): siRNA sense strand
agugaaauauggugaucuu

SEQ ID NO: 2556446 - RNA, 19 nt, Homo sapiens
  misc_RNA (1)...(19): siRNA sense strand
cuucauuauuggaguuaca

SEQ ID NO: 2556447 - RNA, 19 nt, Homo sapiens
  misc_RNA (1)...(19): siRNA sense strand
cuaaagaagcauccgauau

SEQ ID NO: 2556448 - RNA, 19 nt, Homo sapiens
  misc_RNA (1)...(19): siRNA sense strand
gaaauaaaugcccggaaaa

SEQ ID NO: 2556449 - RNA, 19 nt, Homo sapiens
  misc_RNA (1)...(19): siRNA sense strand
ucgaaggaaucuuuaacaa

SEQ ID NO: 2556450 - RNA, 19 nt, Homo sapiens
  misc_RNA (1)...(19): siRNA sense strand
gaggugaagaggaagagaa

SEQ ID NO: 2556451 - RNA, 19 nt, Homo sapiens
  misc_RNA (1)...(19): siRNA sense strand
aagagaagaaagaugagaa

SEQ ID NO: 2556452 - RNA, 19 nt, Homo sapiens
  misc_RNA (1)...(19): siRNA sense strand
ccagagugggauaaugaaa

SEQ ID NO: 2556453 - RNA, 19 nt, Homo sapiens
  misc_RNA (1)...(19): siRNA sense strand
agcuggaggugaagaggaa

SEQ ID NO: 2556454 - RNA, 19 nt, Homo sapiens
  misc_RNA (1)...(19): siRNA sense strand
ggguauugcuggaacugau

SEQ ID NO: 2556455 - RNA, 19 nt, Homo sapiens
  misc_RNA (1)...(19): siRNA sense strand
aaacaggaacuuugacaau

SEQ ID NO: 2556456 - RNA, 19 nt, Homo sapiens
  misc_RNA (1)...(19): siRNA sense strand
cgaaggaaucuuuaacaau

SEQ ID NO: 2556457 - RNA, 19 nt, Homo sapiens
  misc_RNA (1)...(19): siRNA sense strand
caaugaagguuuaagugga

SEQ ID NO: 2556458 - RNA, 19 nt, Homo sapiens
  misc_RNA (1)...(19): siRNA sense strand
caucagaaggcuugagaac

SEQ ID NO: 2556459 - RNA, 19 nt, Homo sapiens
  misc_RNA (1)...(19): siRNA sense strand
ugucagagggcuggaauua

SEQ ID NO: 2556460 - RNA, 19 nt, Homo sapiens
  misc_RNA (1)...(19): siRNA sense strand
uagcagaggauguugaaga

SEQ ID NO: 2556461 - RNA, 19 nt, Homo sapiens
  misc_RNA (1)...(19): siRNA sense strand
acucuuauuugcuggagaa

SEQ ID NO: 2556462 - RNA, 19 nt, Homo sapiens
  misc_RNA (1)...(19): siRNA sense strand
cagaggauguugaagagau

SEQ ID NO: 2556463 - RNA, 19 nt, Homo sapiens
  misc_RNA (1)...(19): siRNA sense strand
uaaucaugauggagacuuu

SEQ ID NO: 2556464 - RNA, 19 nt, Homo sapiens
  misc_RNA (1)...(19): siRNA sense strand
agggaaggcucuggaagaa

SEQ ID NO: 2556465 - RNA, 19 nt, Homo sapiens
  misc_RNA (1)...(19): siRNA sense strand
ccgugaugauauuguaaaa

SEQ ID NO: 2556466 - RNA, 19 nt, Homo sapiens
  misc_RNA (1)...(19): siRNA sense strand
auggagaugucuauggaau

SEQ ID NO: 2556467 - RNA, 19 nt, Homo sapiens
  misc_RNA (1)...(19): siRNA sense strand
gcauacuuauucaaggcaa

SEQ ID NO: 2556468 - RNA, 19 nt, Homo sapiens
  misc_RNA (1)...(19): siRNA sense strand
uggcccagcacuaaagaaa

SEQ ID NO: 2556469 - RNA, 19 nt, Homo sapiens
  misc_RNA (1)...(19): siRNA sense strand
gaacacaaaaggaagaaau

SEQ ID NO: 2556470 - RNA, 19 nt, Homo sapiens
  misc_RNA (1)...(19): siRNA sense strand
gggcagaggaugaaggaga

SEQ ID NO: 2556471 - RNA, 19 nt, Homo sapiens
  misc_RNA (1)...(19): siRNA sense strand
agaaaaugaugaaggacaa

SEQ ID NO: 2556472 - RNA, 19 nt, Homo sapiens
  misc_RNA (1)...(19): siRNA sense strand
ugacuggagcaaagagaaa

SEQ ID NO: 2556473 - RNA, 19 nt, Homo sapiens
  misc_RNA (1)...(19): siRNA sense strand
aggaagagaagaaagacaa

SEQ ID NO: 2556474 - RNA, 19 nt, Homo sapiens
  misc_RNA (1)...(19): siRNA sense strand
ugacagugguacaggccua

SEQ ID NO: 2556475 - RNA, 19 nt, Homo sapiens
  misc_RNA (1)...(19): siRNA sense strand
agauugagcaggagcgaau

SEQ ID NO: 2556476 - RNA, 19 nt, Homo sapiens
  misc_RNA (1)...(19): siRNA sense strand
ugguaaagaaggugauuga

SEQ ID NO: 2556477 - RNA, 19 nt, Homo sapiens
  misc_RNA (1)...(19): siRNA sense strand
gggacauagcccaggucaa

SEQ ID NO: 2556478 - RNA, 19 nt, Homo sapiens
  misc_RNA (1)...(19): siRNA sense strand
gaggaagagaagaaagaca

SEQ ID NO: 2556479 - RNA, 19 nt, Homo sapiens
  misc_RNA (1)...(19): siRNA sense strand
gccagaugccagaggagaa

SEQ ID NO: 2556480 - RNA, 19 nt, Homo sapiens
  misc_RNA (1)...(19): siRNA sense strand
aggcuguggucaagaucaa

SEQ ID NO: 2556481 - RNA, 19 nt, Homo sapiens
  misc_RNA (1)...(19): siRNA sense strand
aagaggaagagaagaaaga

SEQ ID NO: 2556482 - RNA, 19 nt, Homo sapiens
  misc_RNA (1)...(19): siRNA sense strand
acgaggacguggaggagau

SEQ ID NO: 2556483 - RNA, 19 nt, Homo sapiens
  misc_RNA (1)...(19): siRNA sense strand
aguccgugcugcagggcaa

SEQ ID NO: 2556484 - RNA, 19 nt, Homo sapiens
  misc_RNA (1)...(19): siRNA sense strand
gcaucugcguggugggcau

SEQ ID NO: 2556485 - RNA, 19 nt, Homo sapiens
  misc_RNA (1)...(19): siRNA sense strand
ggcugguggugaagaggaa

SEQ ID NO: 2556486 - RNA, 19 nt, Homo sapiens
  misc_RNA (1)...(19): siRNA sense strand
cucaagaagugcugcaaaa

SEQ ID NO: 2556487 - RNA, 19 nt, Homo sapiens
  misc_RNA (1)...(19): siRNA sense strand
ccugugagaccaugggcaa

SEQ ID NO: 2556488 - RNA, 19 nt, Homo sapiens
  misc_RNA (1)...(19): siRNA sense strand
ccuucaacuccgugcgcaa

SEQ ID NO: 2556489 - RNA, 19 nt, Homo sapiens
  misc_RNA (1)...(19): siRNA sense strand
aggaugaaggagaggcaga

SEQ ID NO: 2556490 - RNA, 19 nt, Homo sapiens
  misc_RNA (1)...(19): siRNA sense strand
agaaaugagucgagccaug

SEQ ID NO: 2556491 - RNA, 19 nt, Homo sapiens
  misc_RNA (1)...(19): siRNA sense strand
ccaucaacaccaagacuau

SEQ ID NO: 2556492 - RNA, 19 nt, Homo sapiens
  misc_RNA (1)...(19): siRNA sense strand
ugaagaacauccugggcca

SEQ ID NO: 2556493 - RNA, 19 nt, Homo sapiens
  misc_RNA (1)...(19): siRNA sense strand
ucacacagaaggaggagau

SEQ ID NO: 2556494 - RNA, 19 nt, Homo sapiens
  misc_RNA (1)...(19): siRNA sense strand
guggugaagaggaagagaa

SEQ ID NO: 2556495 - RNA, 19 nt, Homo sapiens
  misc_RNA (1)...(19): siRNA sense strand
uggaaaagagaaagcaaau

SEQ ID NO: 2556496 - RNA, 19 nt, Homo sapiens
  misc_RNA (1)...(19): siRNA sense strand
agucugaccaggugcgcaa

SEQ ID NO: 2556497 - RNA, 19 nt, Homo sapiens
  misc_RNA (1)...(19): siRNA sense strand
uggccuauucggugaagaa

SEQ ID NO: 2556498 - RNA, 19 nt, Homo sapiens
  misc_RNA (1)...(19): siRNA sense strand
agaagauguuccagaucga

SEQ ID NO: 2556499 - RNA, 19 nt, Homo sapiens
  misc_RNA (1)...(19): siRNA sense strand
ccucagaacauuacaccau

SEQ ID NO: 2556500 - RNA, 19 nt, Homo sapiens
  misc_RNA (1)...(19): siRNA sense strand
cuggaaaagagaaagcaaa

SEQ ID NO: 2556501 - RNA, 19 nt, Homo sapiens
  misc_RNA (1)...(19): siRNA sense strand
gcaaugucuuugacggcau

SEQ ID NO: 2556502 - RNA, 19 nt, Homo sapiens
  misc_RNA (1)...(19): siRNA sense strand
aagaaaaugaugaaggaca

SEQ ID NO: 2556503 - RNA, 19 nt, Homo sapiens
  misc_RNA (1)...(19): siRNA sense strand
guuaaaggcaucaucgaca

SEQ ID NO: 2556504 - RNA, 19 nt, Homo sapiens
  misc_RNA (1)...(19): siRNA sense strand
aaaugaugaaggacaacaa

SEQ ID NO: 2556505 - RNA, 19 nt, Homo sapiens
  misc_RNA (1)...(19): siRNA sense strand
gcacuaucugcguggccua

SEQ ID NO: 2556506 - RNA, 19 nt, Homo sapiens
  misc_RNA (1)...(19): siRNA sense strand
gcaugcacaagaaggagaa

SEQ ID NO: 2556507 - RNA, 19 nt, Homo sapiens
  misc_RNA (1)...(19): siRNA sense strand
acaccuucguggucaacaa

SEQ ID NO: 2556508 - RNA, 19 nt, Homo sapiens
  misc_RNA (1)...(19): siRNA sense strand
gggacaaugagaaugacau

SEQ ID NO: 2556509 - RNA, 19 nt, Homo sapiens
  misc_RNA (1)...(19): siRNA sense strand
cuaugaagguuuagaaaag

SEQ ID NO: 2556510 - RNA, 19 nt, Homo sapiens
  misc_RNA (1)...(19): siRNA sense strand
ggaucaaccugacgaccga

SEQ ID NO: 2556511 - RNA, 19 nt, Homo sapiens
  misc_RNA (1)...(19): siRNA sense strand
ccuucguggucaacaagaa

SEQ ID NO: 2556512 - RNA, 19 nt, Homo sapiens
  misc_RNA (1)...(19): siRNA sense strand
cggacugggacaaugagaa

SEQ ID NO: 2556513 - RNA, 19 nt, Homo sapiens
  misc_RNA (1)...(19): siRNA sense strand
agacccugcugcugaggaa

SEQ ID NO: 2556514 - RNA, 19 nt, Homo sapiens
  misc_RNA (1)...(19): siRNA sense strand
ucaacgaggacguggagga

SEQ ID NO: 2556515 - RNA, 19 nt, Homo sapiens
  misc_RNA (1)...(19): siRNA sense strand
ucgagcaggaacagaaauu

SEQ ID NO: 2556516 - RNA, 19 nt, Homo sapiens
  misc_RNA (1)...(19): siRNA sense strand
ugaucauccuggugcucua

SEQ ID NO: 2556517 - RNA, 19 nt, Homo sapiens
  misc_RNA (1)...(19): siRNA sense strand
ccgucuacgugcaguacuu

SEQ ID NO: 2556518 - RNA, 19 nt, Homo sapiens
  misc_RNA (1)...(19): siRNA sense strand
ccuauucggugaagaaaau

SEQ ID NO: 2556519 - RNA, 19 nt, Homo sapiens
  misc_RNA (1)...(19): siRNA sense strand
aggaggagcucaacgagga

SEQ ID NO: 2556520 - RNA, 19 nt, Homo sapiens
  misc_RNA (1)...(19): siRNA sense strand
agaaggugauugagcccau

SEQ ID NO: 2556521 - RNA, 19 nt, Homo sapiens
  misc_RNA (1)...(19): siRNA sense strand
ucuccaaauucuugcaguu

SEQ ID NO: 2556522 - RNA, 19 nt, Homo sapiens
  misc_RNA (1)...(19): siRNA sense strand
caucgagcaggaacagaaa

SEQ ID NO: 2556523 - RNA, 19 nt, Homo sapiens
  misc_RNA (1)...(19): siRNA sense strand
ccaaauucuugcaguucca

SEQ ID NO: 2556524 - RNA, 19 nt, Homo sapiens
  misc_RNA (1)...(19): siRNA sense strand
cagacaucauccugacaga

SEQ ID NO: 2556525 - RNA, 19 nt, Homo sapiens
  misc_RNA (1)...(19): siRNA sense strand
acaacaaccugguacgcca

SEQ ID NO: 2556526 - RNA, 19 nt, Homo sapiens
  misc_RNA (1)...(19): siRNA sense strand
cggugaagaaaaugaugaa

SEQ ID NO: 2556527 - RNA, 19 nt, Homo sapiens
  misc_RNA (1)...(19): siRNA sense strand
aggagaucccggaggagga

SEQ ID NO: 2556528 - RNA, 19 nt, Homo sapiens
  misc_RNA (1)...(19): siRNA sense strand
cuucaaugacuggagcaaa

SEQ ID NO: 2556529 - RNA, 19 nt, Homo sapiens
  misc_RNA (1)...(19): siRNA sense strand
aaagaaaugagucgagcca

SEQ ID NO: 2556530 - RNA, 19 nt, Homo sapiens
  misc_RNA (1)...(19): siRNA sense strand
gcucuuuguuggcgagaag

SEQ ID NO: 2556531 - RNA, 19 nt, Homo sapiens
  misc_RNA (1)...(19): siRNA sense strand
augaggaagaggagggaaa

SEQ ID NO: 2556532 - RNA, 19 nt, Homo sapiens
  misc_RNA (1)...(19): siRNA sense strand
agucagugcugcagggcaa

SEQ ID NO: 2556533 - RNA, 19 nt, Homo sapiens
  misc_RNA (1)...(19): siRNA sense strand
augaagugcccgaggagaa

SEQ ID NO: 2556534 - RNA, 19 nt, Homo sapiens
  misc_RNA (1)...(19): siRNA sense strand
gcuuagaaggcaaagaauu

SEQ ID NO: 2556535 - RNA, 19 nt, Homo sapiens
  misc_RNA (1)...(19): siRNA sense strand
ugauauugcccaagucaaa

SEQ ID NO: 2556536 - RNA, 19 nt, Homo sapiens
  misc_RNA (1)...(19): siRNA sense strand
ugucuuugcgggugagaaa

SEQ ID NO: 2556537 - RNA, 19 nt, Homo sapiens
  misc_RNA (1)...(19): siRNA sense strand
acgagaaaggcgagguaga

SEQ ID NO: 2556538 - RNA, 19 nt, Homo sapiens
  misc_RNA (1)...(19): siRNA sense strand
gaaucgacaaugaggaaaa

SEQ ID NO: 2556539 - RNA, 19 nt, Homo sapiens
  misc_RNA (1)...(19): siRNA sense strand
gcucauccgcaacgagaaa

SEQ ID NO: 2556540 - RNA, 19 nt, Homo sapiens
  misc_RNA (1)...(19): siRNA sense strand
gcaacaaagcaaagaccca

SEQ ID NO: 2556541 - RNA, 19 nt, Homo sapiens
  misc_RNA (1)...(19): siRNA sense strand
ccuuuaacucagugcgcaa

SEQ ID NO: 2556542 - RNA, 19 nt, Homo sapiens
  misc_RNA (1)...(19): siRNA sense strand
cuucauugggauuggagaa

SEQ ID NO: 2556543 - RNA, 19 nt, Homo sapiens
  misc_RNA (1)...(19): siRNA sense strand
gcaaaggaggcuucagaca

SEQ ID NO: 2556544 - RNA, 19 nt, Homo sapiens
  misc_RNA (1)...(19): siRNA sense strand
gcuucuaaguuugggacua

SEQ ID NO: 2556545 - RNA, 19 nt, Homo sapiens
  misc_RNA (1)...(19): siRNA sense strand
ucaacagccaggagggaau

SEQ ID NO: 2556546 - RNA, 19 nt, Homo sapiens
  misc_RNA (1)...(19): siRNA sense strand
ccaaggaugccgagggacu

SEQ ID NO: 2556547 - RNA, 19 nt, Homo sapiens
  misc_RNA (1)...(19): siRNA sense strand
ggacaaugagaaugagauc

SEQ ID NO: 2556548 - RNA, 19 nt, Homo sapiens
  misc_RNA (1)...(19): siRNA sense strand
ccgcaugacugugguacaa

SEQ ID NO: 2556549 - RNA, 19 nt, Homo sapiens
  misc_RNA (1)...(19): siRNA sense strand
aaggcgagguagagcaaga

SEQ ID NO: 2556550 - RNA, 19 nt, Homo sapiens
  misc_RNA (1)...(19): siRNA sense strand
cauugaaagcugugcagau

SEQ ID NO: 2556551 - RNA, 19 nt, Homo sapiens
  misc_RNA (1)...(19): siRNA sense strand
cccgaaagauccauggaga

SEQ ID NO: 2556552 - RNA, 19 nt, Homo sapiens
  misc_RNA (1)...(19): siRNA sense strand
gugauaaaucgcagaccau

SEQ ID NO: 2556553 - RNA, 19 nt, Homo sapiens
  misc_RNA (1)...(19): siRNA sense strand
cauugggauuggagaacuu

SEQ ID NO: 2556554 - RNA, 19 nt, Homo sapiens
  misc_RNA (1)...(19): siRNA sense strand
uggccuacucugugaagaa

SEQ ID NO: 2556555 - RNA, 19 nt, Homo sapiens
  misc_RNA (1)...(19): siRNA sense strand
ucacagaucugaagcagga

SEQ ID NO: 2556556 - RNA, 19 nt, Homo sapiens
  misc_RNA (1)...(19): siRNA sense strand
ucuuagaauuaguguggga

SEQ ID NO: 2556557 - RNA, 19 nt, Homo sapiens
  misc_RNA (1)...(19): siRNA sense strand
acaaugaggaaaaggacaa

SEQ ID NO: 2556558 - RNA, 19 nt, Homo sapiens
  misc_RNA (1)...(19): siRNA sense strand
auuaucaggcugugcguaa

SEQ ID NO: 2556559 - RNA, 19 nt, Homo sapiens
  misc_RNA (1)...(19): siRNA sense strand
gugaaaggcauaauugaca

SEQ ID NO: 2556560 - RNA, 19 nt, Homo sapiens
  misc_RNA (1)...(19): siRNA sense strand
ccauaugccaauacaaaca

SEQ ID NO: 2556561 - RNA, 19 nt, Homo sapiens
  misc_RNA (1)...(19): siRNA sense strand
acggaguggcccuggaaau

SEQ ID NO: 2556562 - RNA, 19 nt, Homo sapiens
  misc_RNA (1)...(19): siRNA sense strand
cuuuaaugauuggagcaaa

SEQ ID NO: 2556563 - RNA, 19 nt, Homo sapiens
  misc_RNA (1)...(19): siRNA sense strand
ucaagaauaaagacagaga

SEQ ID NO: 2556564 - RNA, 19 nt, Homo sapiens
  misc_RNA (1)...(19): siRNA sense strand
cuugugagaccaugggcaa

SEQ ID NO: 2556565 - RNA, 19 nt, Homo sapiens
  misc_RNA (1)...(19): siRNA sense strand
aaaugaacuguguggucaa

SEQ ID NO: 2556566 - RNA, 19 nt, Homo sapiens
  misc_RNA (1)...(19): siRNA sense strand
aggagggaaucgacaauga

SEQ ID NO: 2556567 - RNA, 19 nt, Homo sapiens
  misc_RNA (1)...(19): siRNA sense strand
cagaucugaagcaggauua

SEQ ID NO: 2556568 - RNA, 19 nt, Homo sapiens
  misc_RNA (1)...(19): siRNA sense strand
cuuagaaggcaaagaauuc

SEQ ID NO: 2556569 - RNA, 19 nt, Homo sapiens
  misc_RNA (1)...(19): siRNA sense strand
gcaaagaauucaaccggcu

SEQ ID NO: 2556570 - RNA, 19 nt, Homo sapiens
  misc_RNA (1)...(19): siRNA sense strand
aagcagugccauucaagaa

SEQ ID NO: 2556571 - RNA, 19 nt, Homo sapiens
  misc_RNA (1)...(19): siRNA sense strand
aagaauaaagacagagaug

SEQ ID NO: 2556572 - RNA, 19 nt, Homo sapiens
  misc_RNA (1)...(19): siRNA sense strand
ccgagggacuggaugagau

SEQ ID NO: 2556573 - RNA, 19 nt, Homo sapiens
  misc_RNA (1)...(19): siRNA sense strand
ccaucuacauccaguacuu

SEQ ID NO: 2556574 - RNA, 19 nt, Homo sapiens
  misc_RNA (1)...(19): siRNA sense strand
aauccugauccaagggaau

SEQ ID NO: 2556575 - RNA, 19 nt, Homo sapiens
  misc_RNA (1)...(19): siRNA sense strand
gaaaaucgcaacaaagcaa

SEQ ID NO: 2556576 - RNA, 19 nt, Homo sapiens
  misc_RNA (1)...(19): siRNA sense strand
uggacaagaucuggccuaa

SEQ ID NO: 2556577 - RNA, 19 nt, Homo sapiens
  misc_RNA (1)...(19): siRNA sense strand
cuccauaugccaauacaaa

SEQ ID NO: 2556578 - RNA, 19 nt, Homo sapiens
  misc_RNA (1)...(19): siRNA sense strand
cgagggacuggaugagauu

SEQ ID NO: 2556579 - RNA, 19 nt, Homo sapiens
  misc_RNA (1)...(19): siRNA sense strand
acaauaaccuaguacggca

SEQ ID NO: 2556580 - RNA, 19 nt, Homo sapiens
  misc_RNA (1)...(19): siRNA sense strand
guaucgcgguggugggcau

SEQ ID NO: 2556581 - RNA, 19 nt, Homo sapiens
  misc_RNA (1)...(19): siRNA sense strand
aggcacagauguagcaaag

SEQ ID NO: 2556582 - RNA, 19 nt, Homo sapiens
  misc_RNA (1)...(19): siRNA sense strand
augcacugacccagauuaa

SEQ ID NO: 2556583 - RNA, 19 nt, Homo sapiens
  misc_RNA (1)...(19): siRNA sense strand
gggacaaugagaaugagau

SEQ ID NO: 2556584 - RNA, 19 nt, Homo sapiens
  misc_RNA (1)...(19): siRNA sense strand
ucagaauggugacagguga

SEQ ID NO: 2556585 - RNA, 19 nt, Homo sapiens
  misc_RNA (1)...(19): siRNA sense strand
gcgagguagagcaagaaaa

SEQ ID NO: 2556586 - RNA, 19 nt, Homo sapiens
  misc_RNA (1)...(19): siRNA sense strand
ccaccaaagaggagaucac

SEQ ID NO: 2556587 - RNA, 19 nt, Homo sapiens
  misc_RNA (1)...(19): siRNA sense strand
ucaaaguggucaaagcguu

SEQ ID NO: 2556588 - RNA, 19 nt, Homo sapiens
  misc_RNA (1)...(19): siRNA sense strand
uggaaggccugucugggaa

SEQ ID NO: 2556589 - RNA, 19 nt, Homo sapiens
  misc_RNA (1)...(19): siRNA sense strand
cugcagaucuggagaaacg

SEQ ID NO: 2556590 - RNA, 19 nt, Homo sapiens
  misc_RNA (1)...(19): siRNA sense strand
ccuuuaaugauuggagcaa

SEQ ID NO: 2556591 - RNA, 19 nt, Homo sapiens
  misc_RNA (1)...(19): siRNA sense strand
cugagauugugguugguga

SEQ ID NO: 2556592 - RNA, 19 nt, Homo sapiens
  misc_RNA (1)...(19): siRNA sense strand
acaaggagucccugaaaau

SEQ ID NO: 2556593 - RNA, 19 nt, Homo sapiens
  misc_RNA (1)...(19): siRNA sense strand
cagcuaauccaaagggagu

SEQ ID NO: 2556594 - RNA, 19 nt, Homo sapiens
  misc_RNA (1)...(19): siRNA sense strand
uaucauugguuaugccaga

SEQ ID NO: 2556595 - RNA, 19 nt, Homo sapiens
  misc_RNA (1)...(19): siRNA sense strand
agugcaaucagcagagaca

SEQ ID NO: 2556596 - RNA, 19 nt, Homo sapiens
  misc_RNA (1)...(19): siRNA sense strand
cuuccuaagucaaggccaa

SEQ ID NO: 2556597 - RNA, 19 nt, Homo sapiens
  misc_RNA (1)...(19): siRNA sense strand
cuaccaaucugaucaauuu

SEQ ID NO: 2556598 - RNA, 19 nt, Homo sapiens
  misc_RNA (1)...(19): siRNA sense strand
uguccaucgcggagaggua

SEQ ID NO: 2556599 - RNA, 19 nt, Homo sapiens
  misc_RNA (1)...(19): siRNA sense strand
gcugaaaauggucgauuaa

SEQ ID NO: 2556600 - RNA, 19 nt, Homo sapiens
  misc_RNA (1)...(19): siRNA sense strand
guauugaaauuggaggcua

SEQ ID NO: 2556601 - RNA, 19 nt, Homo sapiens
  misc_RNA (1)...(19): siRNA sense strand
cugucaagaccaagauuca

SEQ ID NO: 2556602 - RNA, 19 nt, Homo sapiens
  misc_RNA (1)...(19): siRNA sense strand
cgguauugaaggucgcuau

SEQ ID NO: 2556603 - RNA, 19 nt, Homo sapiens
  misc_RNA (1)...(19): siRNA sense strand
gcguuccauuaaagugaaa

SEQ ID NO: 2556604 - RNA, 19 nt, Homo sapiens
  misc_RNA (1)...(19): siRNA sense strand
cgucaaucuuggguggaau

SEQ ID NO: 2556605 - RNA, 19 nt, Homo sapiens
  misc_RNA (1)...(19): siRNA sense strand
aaggccaaguauugaaauu

SEQ ID NO: 2556606 - RNA, 19 nt, Homo sapiens
  misc_RNA (1)...(19): siRNA sense strand
cagaagcugggcagggcua

SEQ ID NO: 2556607 - RNA, 19 nt, Homo sapiens
  misc_RNA (1)...(19): siRNA sense strand
cugcaucaaaacagaauaa

SEQ ID NO: 2556608 - RNA, 19 nt, Homo sapiens
  misc_RNA (1)...(19): siRNA sense strand
ccgucaaucuuggguggaa

SEQ ID NO: 2556609 - RNA, 19 nt, Homo sapiens
  misc_RNA (1)...(19): siRNA sense strand
ggcuaagacugauccguca

SEQ ID NO: 2556610 - RNA, 19 nt, Homo sapiens
  misc_RNA (1)...(19): siRNA sense strand
ucuguaagcccuucggcaa

SEQ ID NO: 2556611 - RNA, 19 nt, Homo sapiens
  misc_RNA (1)...(19): siRNA sense strand
gaagauggugugugggaag

SEQ ID NO: 2556612 - RNA, 19 nt, Homo sapiens
  misc_RNA (1)...(19): siRNA sense strand
cagcagcaggagucagcua

SEQ ID NO: 2556613 - RNA, 19 nt, Homo sapiens
  misc_RNA (1)...(19): siRNA sense strand
aggccaaguaugagaguaa

SEQ ID NO: 2556614 - RNA, 19 nt, Homo sapiens
  misc_RNA (1)...(19): siRNA sense strand
cugcagaggaugagaagaa

SEQ ID NO: 2556615 - RNA, 19 nt, Homo sapiens
  misc_RNA (1)...(19): siRNA sense strand
gcaaggagcucaaggcuga

SEQ ID NO: 2556616 - RNA, 19 nt, Homo sapiens
  misc_RNA (1)...(19): siRNA sense strand
ugguggagcuacagagaau

SEQ ID NO: 2556617 - RNA, 19 nt, Homo sapiens
  misc_RNA (1)...(19): siRNA sense strand
aggaugaguuagugacauu

SEQ ID NO: 2556618 - RNA, 19 nt, Homo sapiens
  misc_RNA (1)...(19): siRNA sense strand
cgcaaagagccaaugaaua

SEQ ID NO: 2556619 - RNA, 19 nt, Homo sapiens
  misc_RNA (1)...(19): siRNA sense strand
ccauuauaagacugagaua

SEQ ID NO: 2556620 - RNA, 19 nt, Homo sapiens
  misc_RNA (1)...(19): siRNA sense strand
gagaagaccaccaaggaga

SEQ ID NO: 2556621 - RNA, 19 nt, Homo sapiens
  misc_RNA (1)...(19): siRNA sense strand
ugguggugcuggaggagaa

SEQ ID NO: 2556622 - RNA, 19 nt, Homo sapiens
  misc_RNA (1)...(19): siRNA sense strand
cagaaauacagaaguugaa

SEQ ID NO: 2556623 - RNA, 19 nt, Homo sapiens
  misc_RNA (1)...(19): siRNA sense strand
acuaugagguggacaucaa

SEQ ID NO: 2556624 - RNA, 19 nt, Homo sapiens
  misc_RNA (1)...(19): siRNA sense strand
ggaaagagcaagaucggca

SEQ ID NO: 2556625 - RNA, 19 nt, Homo sapiens
  misc_RNA (1)...(19): siRNA sense strand
ccgcaaagagccaaugaau

SEQ ID NO: 2556626 - RNA, 19 nt, Homo sapiens
  misc_RNA (1)...(19): siRNA sense strand
cugaauuggaagaagaaaa

SEQ ID NO: 2556627 - RNA, 19 nt, Homo sapiens
  misc_RNA (1)...(19): siRNA sense strand
gcaccaaacgggagcagau

SEQ ID NO: 2556628 - RNA, 19 nt, Homo sapiens
  misc_RNA (1)...(19): siRNA sense strand
augaugaacuggaggcuga

SEQ ID NO: 2556629 - RNA, 19 nt, Homo sapiens
  misc_RNA (1)...(19): siRNA sense strand
aagagauccucaagcuaaa

SEQ ID NO: 2556630 - RNA, 19 nt, Homo sapiens
  misc_RNA (1)...(19): siRNA sense strand
agaaaugaacugaaggcuu

SEQ ID NO: 2556631 - RNA, 19 nt, Homo sapiens
  misc_RNA (1)...(19): siRNA sense strand
cuggauuacuauaggcaga

SEQ ID NO: 2556632 - RNA, 19 nt, Homo sapiens
  misc_RNA (1)...(19): siRNA sense strand
acgaauggcuauccagcaa

SEQ ID NO: 2556633 - RNA, 19 nt, Homo sapiens
  misc_RNA (1)...(19): siRNA sense strand
gugcaggaucugaaggaga

SEQ ID NO: 2556634 - RNA, 19 nt, Homo sapiens
  misc_RNA (1)...(19): siRNA sense strand
ggagagacucgggaggaaa

SEQ ID NO: 2556635 - RNA, 19 nt, Homo sapiens
  misc_RNA (1)...(19): siRNA sense strand
ccggaagguugcugaagau

SEQ ID NO: 2556636 - RNA, 19 nt, Homo sapiens
  misc_RNA (1)...(19): siRNA sense strand
ucacuaauguacaggcaga

SEQ ID NO: 2556637 - RNA, 19 nt, Homo sapiens
  misc_RNA (1)...(19): siRNA sense strand
uggagaaggaguugcaaaa

SEQ ID NO: 2556638 - RNA, 19 nt, Homo sapiens
  misc_RNA (1)...(19): siRNA sense strand
cagcauagccaacgaaaau

SEQ ID NO: 2556639 - RNA, 19 nt, Homo sapiens
  misc_RNA (1)...(19): siRNA sense strand
acuuagaguuugaccauga

SEQ ID NO: 2556640 - RNA, 19 nt, Homo sapiens
  misc_RNA (1)...(19): siRNA sense strand
gcaaacuuggaaagagcaa

SEQ ID NO: 2556641 - RNA, 19 nt, Homo sapiens
  misc_RNA (1)...(19): siRNA sense strand
gcaaauacaggguggcagu

SEQ ID NO: 2556642 - RNA, 19 nt, Homo sapiens
  misc_RNA (1)...(19): siRNA sense strand
ccgcaguggcagccugaaa

SEQ ID NO: 2556643 - RNA, 19 nt, Homo sapiens
  misc_RNA (1)...(19): siRNA sense strand
cgaugaucccagaggacuu

SEQ ID NO: 2556644 - RNA, 19 nt, Homo sapiens
  misc_RNA (1)...(19): siRNA sense strand
gcagaaaacgagaggcuca

SEQ ID NO: 2556645 - RNA, 19 nt, Homo sapiens
  misc_RNA (1)...(19): siRNA sense strand
aaagagagcaaaagaacaa

SEQ ID NO: 2556646 - RNA, 19 nt, Homo sapiens
  misc_RNA (1)...(19): siRNA sense strand
accaaacaaugaugacaaa

SEQ ID NO: 2556647 - RNA, 19 nt, Homo sapiens
  misc_RNA (1)...(19): siRNA sense strand
acugagauagagaggcuaa

SEQ ID NO: 2556648 - RNA, 19 nt, Homo sapiens
  misc_RNA (1)...(19): siRNA sense strand
agacugagauagagaggcu

SEQ ID NO: 2556649 - RNA, 19 nt, Homo sapiens
  misc_RNA (1)...(19): siRNA sense strand
acucaaauuugccgaggau

SEQ ID NO: 2556650 - RNA, 19 nt, Homo sapiens
  misc_RNA (1)...(19): siRNA sense strand
uggagagacucgggaggaa

SEQ ID NO: 2556651 - RNA, 19 nt, Homo sapiens
  misc_RNA (1)...(19): siRNA sense strand
agcaugagauuaagcgauu

SEQ ID NO: 2556652 - RNA, 19 nt, Homo sapiens
  misc_RNA (1)...(19): siRNA sense strand
cagaagagguauugcagac

SEQ ID NO: 2556653 - RNA, 19 nt, Homo sapiens
  misc_RNA (1)...(19): siRNA sense strand
aaaucaagcaucugcagaa

SEQ ID NO: 2556654 - RNA, 19 nt, Homo sapiens
  misc_RNA (1)...(19): siRNA sense strand
gcagaggaugagaagaaga

SEQ ID NO: 2556655 - RNA, 19 nt, Homo sapiens
  misc_RNA (1)...(19): siRNA sense strand
uugugaaacugaauggaga

SEQ ID NO: 2556656 - RNA, 19 nt, Homo sapiens
  misc_RNA (1)...(19): siRNA sense strand
augagaaggccaaguauga

SEQ ID NO: 2556657 - RNA, 19 nt, Homo sapiens
  misc_RNA (1)...(19): siRNA sense strand
ccauaauccgggaccaaau

SEQ ID NO: 2556658 - RNA, 19 nt, Homo sapiens
  misc_RNA (1)...(19): siRNA sense strand
gggcgguguugaaagccaa

SEQ ID NO: 2556659 - RNA, 19 nt, Homo sapiens
  misc_RNA (1)...(19): siRNA sense strand
ccgcagucgugcaggaucu

SEQ ID NO: 2556660 - RNA, 19 nt, Homo sapiens
  misc_RNA (1)...(19): siRNA sense strand
augagaugguggagcuaca

SEQ ID NO: 2556661 - RNA, 19 nt, Homo sapiens
  misc_RNA (1)...(19): siRNA sense strand
gaauauaaguuccgggagg

SEQ ID NO: 2556662 - RNA, 19 nt, Homo sapiens
  misc_RNA (1)...(19): siRNA sense strand
cuuaaggaaaggagagucu

SEQ ID NO: 2556663 - RNA, 19 nt, Homo sapiens
  misc_RNA (1)...(19): siRNA sense strand
gaugagaugcagagacagu

SEQ ID NO: 2556664 - RNA, 19 nt, Homo sapiens
  misc_RNA (1)...(19): siRNA sense strand
agaguaaaauccagaugua

SEQ ID NO: 2556665 - RNA, 19 nt, Homo sapiens
  misc_RNA (1)...(19): siRNA sense strand
cagcaaagaaccaagucca

SEQ ID NO: 2556666 - RNA, 19 nt, Homo sapiens
  misc_RNA (1)...(19): siRNA sense strand
ccgacgcagcaaaggcaaa

SEQ ID NO: 2556667 - RNA, 19 nt, Homo sapiens
  misc_RNA (1)...(19): siRNA sense strand
uagagauccuugaaugcaa

SEQ ID NO: 2556668 - RNA, 19 nt, Homo sapiens
  misc_RNA (1)...(19): siRNA sense strand
acacugaugagaaggccaa

SEQ ID NO: 2556669 - RNA, 19 nt, Homo sapiens
  misc_RNA (1)...(19): siRNA sense strand
aggaagccuuaauggaaga

SEQ ID NO: 2556670 - RNA, 19 nt, Homo sapiens
  misc_RNA (1)...(19): siRNA sense strand
ugagaugcagagacaguua

SEQ ID NO: 2556671 - RNA, 19 nt, Homo sapiens
  misc_RNA (1)...(19): siRNA sense strand
acucagaggaaaagacaau

SEQ ID NO: 2556672 - RNA, 19 nt, Homo sapiens
  misc_RNA (1)...(19): siRNA sense strand
ugcugaagauggagagacu

SEQ ID NO: 2556673 - RNA, 19 nt, Homo sapiens
  misc_RNA (1)...(19): siRNA sense strand
agauagagaggcuaaccaa

SEQ ID NO: 2556674 - RNA, 19 nt, Homo sapiens
  misc_RNA (1)...(19): siRNA sense strand
aaccaaacaaugaugacaa

SEQ ID NO: 2556675 - RNA, 19 nt, Homo sapiens
  misc_RNA (1)...(19): siRNA sense strand
gagaauugccagaacggua

SEQ ID NO: 2556676 - RNA, 19 nt, Homo sapiens
  misc_RNA (1)...(19): siRNA sense strand
ccgaaagagaauugccaga

SEQ ID NO: 2556677 - RNA, 19 nt, Homo sapiens
  misc_RNA (1)...(19): siRNA sense strand
gggacaacucuccaggaau

SEQ ID NO: 2556678 - RNA, 19 nt, Homo sapiens
  misc_RNA (1)...(19): siRNA sense strand
gcccguaagcagauugaau

SEQ ID NO: 2556679 - RNA, 19 nt, Homo sapiens
  misc_RNA (1)...(19): siRNA sense strand
gaaggauggcuguucggaa

SEQ ID NO: 2556680 - RNA, 19 nt, Homo sapiens
  misc_RNA (1)...(19): siRNA sense strand
guuucuaacgauaacacaa

SEQ ID NO: 2556681 - RNA, 19 nt, Homo sapiens
  misc_RNA (1)...(19): siRNA sense strand
gaacaaagccaugcccgua

SEQ ID NO: 2556682 - RNA, 19 nt, Homo sapiens
  misc_RNA (1)...(19): siRNA sense strand
aggacaaggcccucaugaa

SEQ ID NO: 2556683 - RNA, 19 nt, Homo sapiens
  misc_RNA (1)...(19): siRNA sense strand
acauugagaaccugaacau

SEQ ID NO: 2556684 - RNA, 19 nt, Homo sapiens
  misc_RNA (1)...(19): siRNA sense strand
aggacaaggcccucaugaa

SEQ ID NO: 2556685 - RNA, 19 nt, Homo sapiens
  misc_RNA (1)...(19): siRNA sense strand
acauugagaaccugaacau

SEQ ID NO: 2556686 - RNA, 19 nt, Homo sapiens
  misc_RNA (1)...(19): siRNA sense strand
aggacaaggcccucaugaa

SEQ ID NO: 2556687 - RNA, 19 nt, Homo sapiens
  misc_RNA (1)...(19): siRNA sense strand
acauugagaaccugaacau

SEQ ID NO: 2556688 - RNA, 19 nt, Homo sapiens
  misc_RNA (1)...(19): siRNA sense strand
aggacaaggcccucaugaa

SEQ ID NO: 2556689 - RNA, 19 nt, Homo sapiens
  misc_RNA (1)...(19): siRNA sense strand
acauugagaaccugaacau

SEQ ID NO: 2556690 - RNA, 19 nt, Homo sapiens
  misc_RNA (1)...(19): siRNA sense strand
guguguggccuguggcaau

SEQ ID NO: 2556691 - RNA, 19 nt, Homo sapiens
  misc_RNA (1)...(19): siRNA sense strand
gugaagaagaccauggugu

SEQ ID NO: 2556692 - RNA, 19 nt, Homo sapiens
  misc_RNA (1)...(19): siRNA sense strand
cguugucaauggugaggau

SEQ ID NO: 2556693 - RNA, 19 nt, Homo sapiens
  misc_RNA (1)...(19): siRNA sense strand
agguggaacuggugggguu

SEQ ID NO: 2556694 - RNA, 19 nt, Homo sapiens
  misc_RNA (1)...(19): siRNA sense strand
ccaucaaggugcagguuaa

SEQ ID NO: 2556695 - RNA, 19 nt, Homo sapiens
  misc_RNA (1)...(19): siRNA sense strand
auaaauacguagagcagaa

SEQ ID NO: 2556696 - RNA, 19 nt, Homo sapiens
  misc_RNA (1)...(19): siRNA sense strand
agagagaagcuuugguuaa

SEQ ID NO: 2556697 - RNA, 19 nt, Homo sapiens
  misc_RNA (1)...(19): siRNA sense strand
gcauuauguccuacagaaa

SEQ ID NO: 2556698 - RNA, 19 nt, Homo sapiens
  misc_RNA (1)...(19): siRNA sense strand
acaauugccuggaggacaa

SEQ ID NO: 2556699 - RNA, 19 nt, Homo sapiens
  misc_RNA (1)...(19): siRNA sense strand
agaacagacagcagaauua

SEQ ID NO: 2556700 - RNA, 19 nt, Homo sapiens
  misc_RNA (1)...(19): siRNA sense strand
cuucauucauacagacaaa

SEQ ID NO: 2556701 - RNA, 19 nt, Homo sapiens
  misc_RNA (1)...(19): siRNA sense strand
aguccaaagaggagccaaa

SEQ ID NO: 2556702 - RNA, 19 nt, Homo sapiens
  misc_RNA (1)...(19): siRNA sense strand
uaucagaagagcagaggua

SEQ ID NO: 2556703 - RNA, 19 nt, Homo sapiens
  misc_RNA (1)...(19): siRNA sense strand
gauaaauggaauugcucaa

SEQ ID NO: 2556704 - RNA, 19 nt, Homo sapiens
  misc_RNA (1)...(19): siRNA sense strand
ugacaugguagaagaaauu

SEQ ID NO: 2556705 - RNA, 19 nt, Homo sapiens
  misc_RNA (1)...(19): siRNA sense strand
gccaauaaccuaugacaau

SEQ ID NO: 2556706 - RNA, 19 nt, Homo sapiens
  misc_RNA (1)...(19): siRNA sense strand
aggcuuugcuagugggaga

SEQ ID NO: 2556707 - RNA, 19 nt, Homo sapiens
  misc_RNA (1)...(19): siRNA sense strand
ccaguaagcaagccagaaa

SEQ ID NO: 2556708 - RNA, 19 nt, Homo sapiens
  misc_RNA (1)...(19): siRNA sense strand
guuuacaacuauaggacuu

SEQ ID NO: 2556709 - RNA, 19 nt, Homo sapiens
  misc_RNA (1)...(19): siRNA sense strand
ggcaaaugcaggaagaauu

SEQ ID NO: 2556710 - RNA, 19 nt, Homo sapiens
  misc_RNA (1)...(19): siRNA sense strand
ccgcauauuuugaaguuaa

SEQ ID NO: 2556711 - RNA, 19 nt, Homo sapiens
  misc_RNA (1)...(19): siRNA sense strand
gcaaaagaagauagaagaa

SEQ ID NO: 2556712 - RNA, 19 nt, Homo sapiens
  misc_RNA (1)...(19): siRNA sense strand
ucucuaaccaccugggaaa

SEQ ID NO: 2556713 - RNA, 19 nt, Homo sapiens
  misc_RNA (1)...(19): siRNA sense strand
aagcagaaacugaagaaaa

SEQ ID NO: 2556714 - RNA, 19 nt, Homo sapiens
  misc_RNA (1)...(19): siRNA sense strand
uuuaagaguacuuggacaa

SEQ ID NO: 2556715 - RNA, 19 nt, Homo sapiens
  misc_RNA (1)...(19): siRNA sense strand
gcuuauaaaguuagcauca

SEQ ID NO: 2556716 - RNA, 19 nt, Homo sapiens
  misc_RNA (1)...(19): siRNA sense strand
gaauacuggccuagagaca

SEQ ID NO: 2556717 - RNA, 19 nt, Homo sapiens
  misc_RNA (1)...(19): siRNA sense strand
ccagaaauucggaguuauu

SEQ ID NO: 2556718 - RNA, 19 nt, Homo sapiens
  misc_RNA (1)...(19): siRNA sense strand
aagaagggauguugagcau

SEQ ID NO: 2556719 - RNA, 19 nt, Homo sapiens
  misc_RNA (1)...(19): siRNA sense strand
gguagaagaaauugaucau

SEQ ID NO: 2556720 - RNA, 19 nt, Homo sapiens
  misc_RNA (1)...(19): siRNA sense strand
ccaagaagaacgcugcaaa

SEQ ID NO: 2556721 - RNA, 19 nt, Homo sapiens
  misc_RNA (1)...(19): siRNA sense strand
gugcaaaugaagaagacuu

SEQ ID NO: 2556722 - RNA, 19 nt, Homo sapiens
  misc_RNA (1)...(19): siRNA sense strand
gggcaaaugcaggaagaau

SEQ ID NO: 2556723 - RNA, 19 nt, Homo sapiens
  misc_RNA (1)...(19): siRNA sense strand
ugauguaaaccaagagaca

SEQ ID NO: 2556724 - RNA, 19 nt, Homo sapiens
  misc_RNA (1)...(19): siRNA sense strand
agggaagguuaccgagcaa

SEQ ID NO: 2556725 - RNA, 19 nt, Homo sapiens
  misc_RNA (1)...(19): siRNA sense strand
gugcagaggcggagcugau

SEQ ID NO: 2556726 - RNA, 19 nt, Homo sapiens
  misc_RNA (1)...(19): siRNA sense strand
cuuaaaagcccuuguggaa

SEQ ID NO: 2556727 - RNA, 19 nt, Homo sapiens
  misc_RNA (1)...(19): siRNA sense strand
ugggagaacaucugaauau

SEQ ID NO: 2556728 - RNA, 19 nt, Homo sapiens
  misc_RNA (1)...(19): siRNA sense strand
gugaaggagccgcgugcaa

SEQ ID NO: 2556729 - RNA, 19 nt, Homo sapiens
  misc_RNA (1)...(19): siRNA sense strand
gauccaagcaaaaguguaa

SEQ ID NO: 2556730 - RNA, 19 nt, Homo sapiens
  misc_RNA (1)...(19): siRNA sense strand
agaagcugauugugggcaa

SEQ ID NO: 2556731 - RNA, 19 nt, Homo sapiens
  misc_RNA (1)...(19): siRNA sense strand
ucauuuauccucagagaau

SEQ ID NO: 2556732 - RNA, 19 nt, Homo sapiens
  misc_RNA (1)...(19): siRNA sense strand
gguagaaacaacugccuau

SEQ ID NO: 2556733 - RNA, 19 nt, Homo sapiens
  misc_RNA (1)...(19): siRNA sense strand
aggcaacccuucuggauau

SEQ ID NO: 2556734 - RNA, 19 nt, Homo sapiens
  misc_RNA (1)...(19): siRNA sense strand
uggaauugcucaagucaca

SEQ ID NO: 2556735 - RNA, 19 nt, Homo sapiens
  misc_RNA (1)...(19): siRNA sense strand
ggaaucugcacuucggaaa

SEQ ID NO: 2556736 - RNA, 19 nt, Homo sapiens
  misc_RNA (1)...(19): siRNA sense strand
caauaaaauuacaggguac

SEQ ID NO: 2556737 - RNA, 19 nt, Homo sapiens
  misc_RNA (1)...(19): siRNA sense strand
caguagaggugcuucucaa

SEQ ID NO: 2556738 - RNA, 19 nt, Homo sapiens
  misc_RNA (1)...(19): siRNA sense strand
aaucagugcaaaugaagaa

SEQ ID NO: 2556739 - RNA, 19 nt, Homo sapiens
  misc_RNA (1)...(19): siRNA sense strand
acggauuaguuuagggcca

SEQ ID NO: 2556740 - RNA, 19 nt, Homo sapiens
  misc_RNA (1)...(19): siRNA sense strand
cugauacugucaaggcaaa

SEQ ID NO: 2556741 - RNA, 19 nt, Homo sapiens
  misc_RNA (1)...(19): siRNA sense strand
ccagauaaacaguguacca

SEQ ID NO: 2556742 - RNA, 19 nt, Homo sapiens
  misc_RNA (1)...(19): siRNA sense strand
uugacaugguagaagaaau

SEQ ID NO: 2556743 - RNA, 19 nt, Homo sapiens
  misc_RNA (1)...(19): siRNA sense strand
cuuuaagaguacuuggaca

SEQ ID NO: 2556744 - RNA, 19 nt, Homo sapiens
  misc_RNA (1)...(19): siRNA sense strand
uguugaagcccgagagaac

SEQ ID NO: 2556745 - RNA, 19 nt, Homo sapiens
  misc_RNA (1)...(19): siRNA sense strand
agauaugguauguggacga

SEQ ID NO: 2556746 - RNA, 19 nt, Homo sapiens
  misc_RNA (1)...(19): siRNA sense strand
acaggaaaucauuggaaca

SEQ ID NO: 2556747 - RNA, 19 nt, Homo sapiens
  misc_RNA (1)...(19): siRNA sense strand
acuccagaccagucaguaa

SEQ ID NO: 2556748 - RNA, 19 nt, Homo sapiens
  misc_RNA (1)...(19): siRNA sense strand
agccagaaauucggaguua

SEQ ID NO: 2556749 - RNA, 19 nt, Homo sapiens
  misc_RNA (1)...(19): siRNA sense strand
uguggcuaguugagaauua

SEQ ID NO: 2556750 - RNA, 19 nt, Homo sapiens
  misc_RNA (1)...(19): siRNA sense strand
caucaaauggcuaucagaa

SEQ ID NO: 2556751 - RNA, 19 nt, Homo sapiens
  misc_RNA (1)...(19): siRNA sense strand
ugcaaaugaagaagacuua

SEQ ID NO: 2556752 - RNA, 19 nt, Homo sapiens
  misc_RNA (1)...(19): siRNA sense strand
cgacuugaagccagccaaa

SEQ ID NO: 2556753 - RNA, 19 nt, Homo sapiens
  misc_RNA (1)...(19): siRNA sense strand
cgucacaggagaacagaca

SEQ ID NO: 2556754 - RNA, 19 nt, Homo sapiens
  misc_RNA (1)...(19): siRNA sense strand
gagaagacuuaaaagauga

SEQ ID NO: 2556755 - RNA, 19 nt, Homo sapiens
  misc_RNA (1)...(19): siRNA sense strand
gauucaaguuuauggauac

SEQ ID NO: 2556756 - RNA, 19 nt, Homo sapiens
  misc_RNA (1)...(19): siRNA sense strand
cugauaaccauaaggcuuu

SEQ ID NO: 2556757 - RNA, 19 nt, Homo sapiens
  misc_RNA (1)...(19): siRNA sense strand
cgaaagaagaugauggaug

SEQ ID NO: 2556758 - RNA, 19 nt, Homo sapiens
  misc_RNA (1)...(19): siRNA sense strand
guacaaaugcuaugaccga

SEQ ID NO: 2556759 - RNA, 19 nt, Homo sapiens
  misc_RNA (1)...(19): siRNA sense strand
ccguguacuucaaugacaa

SEQ ID NO: 2556760 - RNA, 19 nt, Homo sapiens
  misc_RNA (1)...(19): siRNA sense strand
gugaccaaaaugagggaaa

SEQ ID NO: 2556761 - RNA, 19 nt, Homo sapiens
  misc_RNA (1)...(19): siRNA sense strand
caucagaaaagguuacaaa

SEQ ID NO: 2556762 - RNA, 19 nt, Homo sapiens
  misc_RNA (1)...(19): siRNA sense strand
agaagaugauggaugcaca

SEQ ID NO: 2556763 - RNA, 19 nt, Homo sapiens
  misc_RNA (1)...(19): siRNA sense strand
guucuguacuauuuggcua

SEQ ID NO: 2556764 - RNA, 19 nt, Homo sapiens
  misc_RNA (1)...(19): siRNA sense strand
gaaagaagaugauggaugc

SEQ ID NO: 2556765 - RNA, 19 nt, Homo sapiens
  misc_RNA (1)...(19): siRNA sense strand
agaucaucccuuugaauau

SEQ ID NO: 2556766 - RNA, 19 nt, Homo sapiens
  misc_RNA (1)...(19): siRNA sense strand
acaaaugcuaugaccgaau

SEQ ID NO: 2556767 - RNA, 19 nt, Homo sapiens
  misc_RNA (1)...(19): siRNA sense strand
gguauuaucucuugggcug

SEQ ID NO: 2556768 - RNA, 19 nt, Homo sapiens
  misc_RNA (1)...(19): siRNA sense strand
gggaaacccaugaggcgga

SEQ ID NO: 2556769 - RNA, 19 nt, Homo sapiens
  misc_RNA (1)...(19): siRNA sense strand
ugguugaaguaguacccaa

SEQ ID NO: 2556770 - RNA, 19 nt, Homo sapiens
  misc_RNA (1)...(19): siRNA sense strand
gguugaaguaguacccaau

SEQ ID NO: 2556771 - RNA, 19 nt, Homo sapiens
  misc_RNA (1)...(19): siRNA sense strand
gguuuaaacauccugaaaa

SEQ ID NO: 2556772 - RNA, 19 nt, Homo sapiens
  misc_RNA (1)...(19): siRNA sense strand
ugauggaugcacaguacaa

SEQ ID NO: 2556773 - RNA, 19 nt, Homo sapiens
  misc_RNA (1)...(19): siRNA sense strand
auggagagcucgugcgaag

SEQ ID NO: 2556774 - RNA, 19 nt, Homo sapiens
  misc_RNA (1)...(19): siRNA sense strand
uggcggcacuuguggucaa

SEQ ID NO: 2556775 - RNA, 19 nt, Homo sapiens
  misc_RNA (1)...(19): siRNA sense strand
aaguaguacccaauggaga

SEQ ID NO: 2556776 - RNA, 19 nt, Homo sapiens
  misc_RNA (1)...(19): siRNA sense strand
aggagagugcugagaucau

SEQ ID NO: 2556777 - RNA, 19 nt, Homo sapiens
  misc_RNA (1)...(19): siRNA sense strand
ggguuagaggcgagauuaa

SEQ ID NO: 2556778 - RNA, 19 nt, Homo sapiens
  misc_RNA (1)...(19): siRNA sense strand
agaauauaugcuaggguua

SEQ ID NO: 2556779 - RNA, 19 nt, Homo sapiens
  misc_RNA (1)...(19): siRNA sense strand
cgcaagaagaagaaagaau

SEQ ID NO: 2556780 - RNA, 19 nt, Homo sapiens
  misc_RNA (1)...(19): siRNA sense strand
acuaaaggccagacgguuu

SEQ ID NO: 2556781 - RNA, 19 nt, Homo sapiens
  misc_RNA (1)...(19): siRNA sense strand
ugaugauaguauuggcauu

SEQ ID NO: 2556782 - RNA, 19 nt, Homo sapiens
  misc_RNA (1)...(19): siRNA sense strand
gaagaaagaaaauggaaca

SEQ ID NO: 2556783 - RNA, 19 nt, Homo sapiens
  misc_RNA (1)...(19): siRNA sense strand
ucuaggaacaagacugaaa

SEQ ID NO: 2556784 - RNA, 19 nt, Homo sapiens
  misc_RNA (1)...(19): siRNA sense strand
gagucagacauuugggaca

SEQ ID NO: 2556785 - RNA, 19 nt, Homo sapiens
  misc_RNA (1)...(19): siRNA sense strand
ggacugacuccaaagaaaa

SEQ ID NO: 2556786 - RNA, 19 nt, Homo sapiens
  misc_RNA (1)...(19): siRNA sense strand
uggcaaagcagcaaccaau

SEQ ID NO: 2556787 - RNA, 19 nt, Homo sapiens
  misc_RNA (1)...(19): siRNA sense strand
uacaaaguaccaugagaaa

SEQ ID NO: 2556788 - RNA, 19 nt, Homo sapiens
  misc_RNA (1)...(19): siRNA sense strand
cuuaaagucccuaguccaa

SEQ ID NO: 2556789 - RNA, 19 nt, Homo sapiens
  misc_RNA (1)...(19): siRNA sense strand
cuaaagaggcacaggacac

SEQ ID NO: 2556790 - RNA, 19 nt, Homo sapiens
  misc_RNA (1)...(19): siRNA sense strand
agaugguauuauccagaaa

SEQ ID NO: 2556791 - RNA, 19 nt, Homo sapiens
  misc_RNA (1)...(19): siRNA sense strand
gcucaaauucucagcugau

SEQ ID NO: 2556792 - RNA, 19 nt, Homo sapiens
  misc_RNA (1)...(19): siRNA sense strand
ccgcagaaggggagacaca

SEQ ID NO: 2556793 - RNA, 19 nt, Homo sapiens
  misc_RNA (1)...(19): siRNA sense strand
ugaucaaugggcaggacua

SEQ ID NO: 2556794 - RNA, 19 nt, Homo sapiens
  misc_RNA (1)...(19): siRNA sense strand
aagaauauaugcuaggguu

SEQ ID NO: 2556795 - RNA, 19 nt, Homo sapiens
  misc_RNA (1)...(19): siRNA sense strand
gcuaaagaggcacaggaca

SEQ ID NO: 2556796 - RNA, 19 nt, Homo sapiens
  misc_RNA (1)...(19): siRNA sense strand
cuggaugaagauugggauu

SEQ ID NO: 2556797 - RNA, 19 nt, Homo sapiens
  misc_RNA (1)...(19): siRNA sense strand
gagaaaugucgguucagau

SEQ ID NO: 2556798 - RNA, 19 nt, Homo sapiens
  misc_RNA (1)...(19): siRNA sense strand
acgaagugaugaugcagau

SEQ ID NO: 2556799 - RNA, 19 nt, Homo sapiens
  misc_RNA (1)...(19): siRNA sense strand
ccuacaaaguaccaugaga

SEQ ID NO: 2556800 - RNA, 19 nt, Homo sapiens
  misc_RNA (1)...(19): siRNA sense strand
ucuucaggguguuguggaa

SEQ ID NO: 2556801 - RNA, 19 nt, Homo sapiens
  misc_RNA (1)...(19): siRNA sense strand
acccauaacaagaccacaa

SEQ ID NO: 2556802 - RNA, 19 nt, Homo sapiens
  misc_RNA (1)...(19): siRNA sense strand
gcuuaaagucccuagucca

SEQ ID NO: 2556803 - RNA, 19 nt, Homo sapiens
  misc_RNA (1)...(19): siRNA sense strand
cgagaucagcagaggaauc

SEQ ID NO: 2556804 - RNA, 19 nt, Homo sapiens
  misc_RNA (1)...(19): siRNA sense strand
cacccaagacucaaacaaa

SEQ ID NO: 2556805 - RNA, 19 nt, Homo sapiens
  misc_RNA (1)...(19): siRNA sense strand
aacaagaccacaagaccaa

SEQ ID NO: 2556806 - RNA, 19 nt, Homo sapiens
  misc_RNA (1)...(19): siRNA sense strand
aagugaugaugcagauuga

SEQ ID NO: 2556807 - RNA, 19 nt, Homo sapiens
  misc_RNA (1)...(19): siRNA sense strand
cggagccacugaaggaaga

SEQ ID NO: 2556808 - RNA, 19 nt, Homo sapiens
  misc_RNA (1)...(19): siRNA sense strand
aagcagcaaaugagacgua

SEQ ID NO: 2556809 - RNA, 19 nt, Homo sapiens
  misc_RNA (1)...(19): siRNA sense strand
aguccaaagcgaagaguug

SEQ ID NO: 2556810 - RNA, 19 nt, Homo sapiens
  misc_RNA (1)...(19): siRNA sense strand
cagcagaggaaucaaacca

SEQ ID NO: 2556811 - RNA, 19 nt, Homo sapiens
  misc_RNA (1)...(19): siRNA sense strand
agucagacauuugggacau

SEQ ID NO: 2556812 - RNA, 19 nt, Homo sapiens
  misc_RNA (1)...(19): siRNA sense strand
gguacaacuucaagcaccu

SEQ ID NO: 2556813 - RNA, 19 nt, Homo sapiens
  misc_RNA (1)...(19): siRNA sense strand
uaacaagaccacaagacca

SEQ ID NO: 2556814 - RNA, 19 nt, Homo sapiens
  misc_RNA (1)...(19): siRNA sense strand
acacugaugagcugcaauu

SEQ ID NO: 2556815 - RNA, 19 nt, Homo sapiens
  misc_RNA (1)...(19): siRNA sense strand
gcaacugaagaaagaaaau

SEQ ID NO: 2556816 - RNA, 19 nt, Homo sapiens
  misc_RNA (1)...(19): siRNA sense strand
ccaacauccuggaacgcaa

SEQ ID NO: 2556817 - RNA, 19 nt, Homo sapiens
  misc_RNA (1)...(19): siRNA sense strand
cgaaugagaaggagcggca

SEQ ID NO: 2556818 - RNA, 19 nt, Homo sapiens
  misc_RNA (1)...(19): siRNA sense strand
acagugagcgacagggcaa

SEQ ID NO: 2556819 - RNA, 19 nt, Homo sapiens
  misc_RNA (1)...(19): siRNA sense strand
ucaacacgcugcugggaga

SEQ ID NO: 2556820 - RNA, 19 nt, Homo sapiens
  misc_RNA (1)...(19): siRNA sense strand
gcgaaaagcgaaugagaag

SEQ ID NO: 2556821 - RNA, 19 nt, Homo sapiens
  misc_RNA (1)...(19): siRNA sense strand
aggugaaggggaagaagaa

SEQ ID NO: 2556822 - RNA, 19 nt, Homo sapiens
  misc_RNA (1)...(19): siRNA sense strand
aggaagaccucacagcuga

SEQ ID NO: 2556823 - RNA, 19 nt, Homo sapiens
  misc_RNA (1)...(19): siRNA sense strand
acacucagguggagauucu

SEQ ID NO: 2556824 - RNA, 19 nt, Homo sapiens
  misc_RNA (1)...(19): siRNA sense strand
gugaaggggaagaagaaca

SEQ ID NO: 2556825 - RNA, 19 nt, Homo sapiens
  misc_RNA (1)...(19): siRNA sense strand
cugcucugaaggagggcaa

SEQ ID NO: 2556826 - RNA, 19 nt, Homo sapiens
  misc_RNA (1)...(19): siRNA sense strand
ccuuugagauccagggcau

SEQ ID NO: 2556827 - RNA, 19 nt, Homo sapiens
  misc_RNA (1)...(19): siRNA sense strand
ggcacaaacucaaggcuca

SEQ ID NO: 2556828 - RNA, 19 nt, Homo sapiens
  misc_RNA (1)...(19): siRNA sense strand
guuuagagggccaggacau

SEQ ID NO: 2556829 - RNA, 19 nt, Homo sapiens
  misc_RNA (1)...(19): siRNA sense strand
cugaguuagaggagauauu

SEQ ID NO: 2556830 - RNA, 19 nt, Homo sapiens
  misc_RNA (1)...(19): siRNA sense strand
uugcugaguuagaggagau

SEQ ID NO: 2556831 - RNA, 19 nt, Homo sapiens
  misc_RNA (1)...(19): siRNA sense strand
ccaaagcccguguggguga

SEQ ID NO: 2556832 - RNA, 19 nt, Homo sapiens
  misc_RNA (1)...(19): siRNA sense strand
gugauaaggagguugcuga

SEQ ID NO: 2556833 - RNA, 19 nt, Homo sapiens
  misc_RNA (1)...(19): siRNA sense strand
caauaguaccugggcacaa

SEQ ID NO: 2556834 - RNA, 19 nt, Homo sapiens
  misc_RNA (1)...(19): siRNA sense strand
uggcagcagggcacagaaa

SEQ ID NO: 2556835 - RNA, 19 nt, Homo sapiens
  misc_RNA (1)...(19): siRNA sense strand
aaagacaagugaagccuga

SEQ ID NO: 2556836 - RNA, 19 nt, Homo sapiens
  misc_RNA (1)...(19): siRNA sense strand
gcccaaugcuaacuggaca

SEQ ID NO: 2556837 - RNA, 19 nt, Homo sapiens
  misc_RNA (1)...(19): siRNA sense strand
ccgugugggugauguggau

SEQ ID NO: 2556838 - RNA, 19 nt, Homo sapiens
  misc_RNA (1)...(19): siRNA sense strand
ccuuugaaguacaggugaa

SEQ ID NO: 2556839 - RNA, 19 nt, Homo sapiens
  misc_RNA (1)...(19): siRNA sense strand
ggacagugaaucaggcaca

SEQ ID NO: 2556840 - RNA, 19 nt, Homo sapiens
  misc_RNA (1)...(19): siRNA sense strand
agucaagauuacucgaaau

SEQ ID NO: 2556841 - RNA, 19 nt, Homo sapiens
  misc_RNA (1)...(19): siRNA sense strand
uccuaaugcugaugggaca

SEQ ID NO: 2556842 - RNA, 19 nt, Homo sapiens
  misc_RNA (1)...(19): siRNA sense strand
gcggaaugaacaggagcaa

SEQ ID NO: 2556843 - RNA, 19 nt, Homo sapiens
  misc_RNA (1)...(19): siRNA sense strand
ugauagugcccuuggugau

SEQ ID NO: 2556844 - RNA, 19 nt, Homo sapiens
  misc_RNA (1)...(19): siRNA sense strand
ggaaagaaaugcagggaag

SEQ ID NO: 2556845 - RNA, 19 nt, Homo sapiens
  misc_RNA (1)...(19): siRNA sense strand
ggaccaacagugugggcaa

SEQ ID NO: 2556846 - RNA, 19 nt, Homo sapiens
  misc_RNA (1)...(19): siRNA sense strand
agggaaggacagaggagaa

SEQ ID NO: 2556847 - RNA, 19 nt, Homo sapiens
  misc_RNA (1)...(19): siRNA sense strand
gggaaagaaaugcagggaa

SEQ ID NO: 2556848 - RNA, 19 nt, Homo sapiens
  misc_RNA (1)...(19): siRNA sense strand
gggugcaauuccugggaga

SEQ ID NO: 2556849 - RNA, 19 nt, Homo sapiens
  misc_RNA (1)...(19): siRNA sense strand
ggaagaggacacagagcca

SEQ ID NO: 2556850 - RNA, 19 nt, Homo sapiens
  misc_RNA (1)...(19): siRNA sense strand
gcgaagugaccaaggacca

SEQ ID NO: 2556851 - RNA, 19 nt, Homo sapiens
  misc_RNA (1)...(19): siRNA sense strand
cugaagaagcagaauacau

SEQ ID NO: 2556852 - RNA, 19 nt, Homo sapiens
  misc_RNA (1)...(19): siRNA sense strand
gauucgagaaggagacaca

SEQ ID NO: 2556853 - RNA, 19 nt, Homo sapiens
  misc_RNA (1)...(19): siRNA sense strand
ccggaguacacgacgguau

SEQ ID NO: 2556854 - RNA, 19 nt, Homo sapiens
  misc_RNA (1)...(19): siRNA sense strand
ucgcugaagaagcagaaua

SEQ ID NO: 2556855 - RNA, 19 nt, Homo sapiens
  misc_RNA (1)...(19): siRNA sense strand
agaaaugcagggaaggaca

SEQ ID NO: 2556856 - RNA, 19 nt, Homo sapiens
  misc_RNA (1)...(19): siRNA sense strand
agagcuucuuugugaggaa

SEQ ID NO: 2556857 - RNA, 19 nt, Homo sapiens
  misc_RNA (1)...(19): siRNA sense strand
ccccgaaguuggagaucaa

SEQ ID NO: 2556858 - RNA, 19 nt, Homo sapiens
  misc_RNA (1)...(19): siRNA sense strand
ccucagagaugcagagacc

SEQ ID NO: 2556859 - RNA, 19 nt, Homo sapiens
  misc_RNA (1)...(19): siRNA sense strand
cuaugaaagcacaaaggau

SEQ ID NO: 2556860 - RNA, 19 nt, Homo sapiens
  misc_RNA (1)...(19): siRNA sense strand
gaacauaccacgaacugga

SEQ ID NO: 2556861 - RNA, 19 nt, Homo sapiens
  misc_RNA (1)...(19): siRNA sense strand
cagcauugcacaagcgcca

SEQ ID NO: 2556862 - RNA, 19 nt, Homo sapiens
  misc_RNA (1)...(19): siRNA sense strand
cgggaaggucggaagaagu

SEQ ID NO: 2556863 - RNA, 19 nt, Homo sapiens
  misc_RNA (1)...(19): siRNA sense strand
uguaauaguuggugcucgu

SEQ ID NO: 2556864 - RNA, 19 nt, Homo sapiens
  misc_RNA (1)...(19): siRNA sense strand
cguuggaagaggacacaga

SEQ ID NO: 2556865 - RNA, 19 nt, Homo sapiens
  misc_RNA (1)...(19): siRNA sense strand
caaugauggaagauggcau

SEQ ID NO: 2556866 - RNA, 19 nt, Homo sapiens
  misc_RNA (1)...(19): siRNA sense strand
ggagacaagaauaagaacu

SEQ ID NO: 2556867 - RNA, 19 nt, Homo sapiens
  misc_RNA (1)...(19): siRNA sense strand
acugagaaauggauggaac

SEQ ID NO: 2556868 - RNA, 19 nt, Homo sapiens
  misc_RNA (1)...(19): siRNA sense strand
gacucaaguaaauggguuu

SEQ ID NO: 2556869 - RNA, 19 nt, Homo sapiens
  misc_RNA (1)...(19): siRNA sense strand
ccgagauucacucuggaaa

SEQ ID NO: 2556870 - RNA, 19 nt, Homo sapiens
  misc_RNA (1)...(19): siRNA sense strand
accaagugauggaggggaa

SEQ ID NO: 2556871 - RNA, 19 nt, Homo sapiens
  misc_RNA (1)...(19): siRNA sense strand
gugcaauuccugggagaca

SEQ ID NO: 2556872 - RNA, 19 nt, Homo sapiens
  misc_RNA (1)...(19): siRNA sense strand
gaguauaacaagaacaccu

SEQ ID NO: 2556873 - RNA, 19 nt, Homo sapiens
  misc_RNA (1)...(19): siRNA sense strand
gggaagagugcaacccuga

SEQ ID NO: 2556874 - RNA, 19 nt, Homo sapiens
  misc_RNA (1)...(19): siRNA sense strand
cggugaagguccagcacuc

SEQ ID NO: 2556875 - RNA, 19 nt, Homo sapiens
  misc_RNA (1)...(19): siRNA sense strand
gagaaaguccacaucccaa

SEQ ID NO: 2556876 - RNA, 19 nt, Homo sapiens
  misc_RNA (1)...(19): siRNA sense strand
cagcugaacgugaagcaca

SEQ ID NO: 2556877 - RNA, 19 nt, Homo sapiens
  misc_RNA (1)...(19): siRNA sense strand
uaccacaaugggaaagaaa

SEQ ID NO: 2556878 - RNA, 19 nt, Homo sapiens
  misc_RNA (1)...(19): siRNA sense strand
gcuucuuugugaggaauaa

SEQ ID NO: 2556879 - RNA, 19 nt, Homo sapiens
  misc_RNA (1)...(19): siRNA sense strand
agaacugcacacugaguau

SEQ ID NO: 2556880 - RNA, 19 nt, Homo sapiens
  misc_RNA (1)...(19): siRNA sense strand
aagaaguguuccugcaagu

SEQ ID NO: 2556881 - RNA, 19 nt, Homo sapiens
  misc_RNA (1)...(19): siRNA sense strand
agaaaguccacaucccaaa

SEQ ID NO: 2556882 - RNA, 19 nt, Homo sapiens
  misc_RNA (1)...(19): siRNA sense strand
agacgugaggguccggaaa

SEQ ID NO: 2556883 - RNA, 19 nt, Homo sapiens
  misc_RNA (1)...(19): siRNA sense strand
ugaacaacuccauaggaca

SEQ ID NO: 2556884 - RNA, 19 nt, Homo sapiens
  misc_RNA (1)...(19): siRNA sense strand
cggaagagaugaugcgcga

SEQ ID NO: 2556885 - RNA, 19 nt, Homo sapiens
  misc_RNA (1)...(19): siRNA sense strand
aggagaucccugugagcaa

SEQ ID NO: 2556886 - RNA, 19 nt, Homo sapiens
  misc_RNA (1)...(19): siRNA sense strand
ggaugaaguaccuggagga

SEQ ID NO: 2556887 - RNA, 19 nt, Homo sapiens
  misc_RNA (1)...(19): siRNA sense strand
acaaguuccuggucggcaa

SEQ ID NO: 2556888 - RNA, 19 nt, Homo sapiens
  misc_RNA (1)...(19): siRNA sense strand
ccucagagacgaaucgaca

SEQ ID NO: 2556889 - RNA, 19 nt, Homo sapiens
  misc_RNA (1)...(19): siRNA sense strand
ccagaggagcucaaggaca

SEQ ID NO: 2556890 - RNA, 19 nt, Homo sapiens
  misc_RNA (1)...(19): siRNA sense strand
gcguguaccgcaugcgcaa

SEQ ID NO: 2556891 - RNA, 19 nt, Homo sapiens
  misc_RNA (1)...(19): siRNA sense strand
aggcagacacggaagagau

SEQ ID NO: 2556892 - RNA, 19 nt, Homo sapiens
  misc_RNA (1)...(19): siRNA sense strand
cggagaaggcagacacgga

SEQ ID NO: 2556893 - RNA, 19 nt, Homo sapiens
  misc_RNA (1)...(19): siRNA sense strand
ggagaaggcagacacggaa

SEQ ID NO: 2556894 - RNA, 19 nt, Homo sapiens
  misc_RNA (1)...(19): siRNA sense strand
ccuucaucgagcagggcaa

SEQ ID NO: 2556895 - RNA, 19 nt, Homo sapiens
  misc_RNA (1)...(19): siRNA sense strand
cccucaacucagauggaua

SEQ ID NO: 2556896 - RNA, 19 nt, Homo sapiens
  misc_RNA (1)...(19): siRNA sense strand
aguaccuggaggagaagaa

SEQ ID NO: 2556897 - RNA, 19 nt, Homo sapiens
  misc_RNA (1)...(19): siRNA sense strand
cgccaagaucagcgacuuu

SEQ ID NO: 2556898 - RNA, 19 nt, Homo sapiens
  misc_RNA (1)...(19): siRNA sense strand
aggagauggcucagggaaa

SEQ ID NO: 2556899 - RNA, 19 nt, Homo sapiens
  misc_RNA (1)...(19): siRNA sense strand
gugaagacccacaggagga

SEQ ID NO: 2556900 - RNA, 19 nt, Homo sapiens
  misc_RNA (1)...(19): siRNA sense strand
gaggaaagcagccaggaca

SEQ ID NO: 2556901 - RNA, 19 nt, Homo sapiens
  misc_RNA (1)...(19): siRNA sense strand
gacgccaggaggagggaua

SEQ ID NO: 2556902 - RNA, 19 nt, Homo sapiens
  misc_RNA (1)...(19): siRNA sense strand
aaguacaggaggagacuca

SEQ ID NO: 2556903 - RNA, 19 nt, Homo sapiens
  misc_RNA (1)...(19): siRNA sense strand
ccgaaacaccagaagaacu

SEQ ID NO: 2556904 - RNA, 19 nt, Homo sapiens
  misc_RNA (1)...(19): siRNA sense strand
aucaagaaguacaggagga

SEQ ID NO: 2556905 - RNA, 19 nt, Homo sapiens
  misc_RNA (1)...(19): siRNA sense strand
guucauacuucuuucggau

SEQ ID NO: 2556906 - RNA, 19 nt, Homo sapiens
  misc_RNA (1)...(19): siRNA sense strand
gugacuacggagagaacca

SEQ ID NO: 2556907 - RNA, 19 nt, Homo sapiens
  misc_RNA (1)...(19): siRNA sense strand
acaagagaccagagcagga

SEQ ID NO: 2556908 - RNA, 19 nt, Homo sapiens
  misc_RNA (1)...(19): siRNA sense strand
uuucggauggagagaggaa

SEQ ID NO: 2556909 - RNA, 19 nt, Homo sapiens
  misc_RNA (1)...(19): siRNA sense strand
gugacagacuugacccaca

SEQ ID NO: 2556910 - RNA, 19 nt, Homo sapiens
  misc_RNA (1)...(19): siRNA sense strand
ccgaauacucagaggucag

SEQ ID NO: 2556911 - RNA, 19 nt, Homo sapiens
  misc_RNA (1)...(19): siRNA sense strand
gagacaaccuugaagccua

SEQ ID NO: 2556912 - RNA, 19 nt, Homo sapiens
  misc_RNA (1)...(19): siRNA sense strand
gagaaaggcuggagcugga

SEQ ID NO: 2556913 - RNA, 19 nt, Homo sapiens
  misc_RNA (1)...(19): siRNA sense strand
aggcaucagagaagugaaa

SEQ ID NO: 2556914 - RNA, 19 nt, Homo sapiens
  misc_RNA (1)...(19): siRNA sense strand
ugaaauugacucagggcau

SEQ ID NO: 2556915 - RNA, 19 nt, Homo sapiens
  misc_RNA (1)...(19): siRNA sense strand
acaucaaggcagaaaucaa

SEQ ID NO: 2556916 - RNA, 19 nt, Homo sapiens
  misc_RNA (1)...(19): siRNA sense strand
uugcaagccaccagagcua

SEQ ID NO: 2556917 - RNA, 19 nt, Homo sapiens
  misc_RNA (1)...(19): siRNA sense strand
aaucaaauguucaggcauc

SEQ ID NO: 2556918 - RNA, 19 nt, Homo sapiens
  misc_RNA (1)...(19): siRNA sense strand
cuuucaaccacuagcacua

SEQ ID NO: 2556919 - RNA, 19 nt, Homo sapiens
  misc_RNA (1)...(19): siRNA sense strand
ccuagauuucacugagcaa

SEQ ID NO: 2556920 - RNA, 19 nt, Homo sapiens
  misc_RNA (1)...(19): siRNA sense strand
ccaagaaacuacaacaccu

SEQ ID NO: 2556921 - RNA, 19 nt, Homo sapiens
  misc_RNA (1)...(19): siRNA sense strand
gcggaguuuaagaaggaca

SEQ ID NO: 2556922 - RNA, 19 nt, Homo sapiens
  misc_RNA (1)...(19): siRNA sense strand
ccacuaaugaaguugggaa

SEQ ID NO: 2556923 - RNA, 19 nt, Homo sapiens
  misc_RNA (1)...(19): siRNA sense strand
agagaagauuccagagacu

SEQ ID NO: 2556924 - RNA, 19 nt, Homo sapiens
  misc_RNA (1)...(19): siRNA sense strand
cugccaaaguguaugggau

SEQ ID NO: 2556925 - RNA, 19 nt, Homo sapiens
  misc_RNA (1)...(19): siRNA sense strand
ccauaaaagagcuggaauc

SEQ ID NO: 2556926 - RNA, 19 nt, Homo sapiens
  misc_RNA (1)...(19): siRNA sense strand
agacauguagacugccaaa

SEQ ID NO: 2556927 - RNA, 19 nt, Homo sapiens
  misc_RNA (1)...(19): siRNA sense strand
gaauaaaagaucuggccca

SEQ ID NO: 2556928 - RNA, 19 nt, Homo sapiens
  misc_RNA (1)...(19): siRNA sense strand
acacuagaggccuggguga

SEQ ID NO: 2556929 - RNA, 19 nt, Homo sapiens
  misc_RNA (1)...(19): siRNA sense strand
acaugguggaagagaagau

SEQ ID NO: 2556930 - RNA, 19 nt, Homo sapiens
  misc_RNA (1)...(19): siRNA sense strand
aggacacgcugcuaggcua

SEQ ID NO: 2556931 - RNA, 19 nt, Homo sapiens
  misc_RNA (1)...(19): siRNA sense strand
gcgucaaguacacugaaau

SEQ ID NO: 2556932 - RNA, 19 nt, Homo sapiens
  misc_RNA (1)...(19): siRNA sense strand
ugacuuuaguagugcaaaa

SEQ ID NO: 2556933 - RNA, 19 nt, Homo sapiens
  misc_RNA (1)...(19): siRNA sense strand
cggugguauggaugagaaa

SEQ ID NO: 2556934 - RNA, 19 nt, Homo sapiens
  misc_RNA (1)...(19): siRNA sense strand
uuacuaauauggaggcaca

SEQ ID NO: 2556935 - RNA, 19 nt, Homo sapiens
  misc_RNA (1)...(19): siRNA sense strand
ggauuaaccuccuucguca

SEQ ID NO: 2556936 - RNA, 19 nt, Homo sapiens
  misc_RNA (1)...(19): siRNA sense strand
cagagaaggugaaacgauc

SEQ ID NO: 2556937 - RNA, 19 nt, Homo sapiens
  misc_RNA (1)...(19): siRNA sense strand
aaagaaugcuacuggccuu

SEQ ID NO: 2556938 - RNA, 19 nt, Homo sapiens
  misc_RNA (1)...(19): siRNA sense strand
guauacguaaaguggaaau

SEQ ID NO: 2556939 - RNA, 19 nt, Homo sapiens
  misc_RNA (1)...(19): siRNA sense strand
uguguuuaguacagcgauu

SEQ ID NO: 2556940 - RNA, 19 nt, Homo sapiens
  misc_RNA (1)...(19): siRNA sense strand
ggauaagagugaugcuguc

SEQ ID NO: 2556941 - RNA, 19 nt, Homo sapiens
  misc_RNA (1)...(19): siRNA sense strand
uuuacuuguugcuggacua

SEQ ID NO: 2556942 - RNA, 19 nt, Homo sapiens
  misc_RNA (1)...(19): siRNA sense strand
ugacuuuaguagugcaaaa

SEQ ID NO: 2556943 - RNA, 19 nt, Homo sapiens
  misc_RNA (1)...(19): siRNA sense strand
cggugguauggaugagaaa

SEQ ID NO: 2556944 - RNA, 19 nt, Homo sapiens
  misc_RNA (1)...(19): siRNA sense strand
uuacuaauauggaggcaca

SEQ ID NO: 2556945 - RNA, 19 nt, Homo sapiens
  misc_RNA (1)...(19): siRNA sense strand
ggauuaaccuccuucguca

SEQ ID NO: 2556946 - RNA, 19 nt, Homo sapiens
  misc_RNA (1)...(19): siRNA sense strand
cagagaaggugaaacgauc

SEQ ID NO: 2556947 - RNA, 19 nt, Homo sapiens
  misc_RNA (1)...(19): siRNA sense strand
aaagaaugcuacuggccuu

SEQ ID NO: 2556948 - RNA, 19 nt, Homo sapiens
  misc_RNA (1)...(19): siRNA sense strand
guauacguaaaguggaaau

SEQ ID NO: 2556949 - RNA, 19 nt, Homo sapiens
  misc_RNA (1)...(19): siRNA sense strand
uguguuuaguacagcgauu

SEQ ID NO: 2556950 - RNA, 19 nt, Homo sapiens
  misc_RNA (1)...(19): siRNA sense strand
ggauaagagugaugcuguc

SEQ ID NO: 2556951 - RNA, 19 nt, Homo sapiens
  misc_RNA (1)...(19): siRNA sense strand
uuuacuuguugcuggacua

SEQ ID NO: 2556952 - RNA, 19 nt, Homo sapiens
  misc_RNA (1)...(19): siRNA sense strand
gggaccaaguaaagacacu

SEQ ID NO: 2556953 - RNA, 19 nt, Homo sapiens
  misc_RNA (1)...(19): siRNA sense strand
ggugcaaagaauguggaaa

SEQ ID NO: 2556954 - RNA, 19 nt, Homo sapiens
  misc_RNA (1)...(19): siRNA sense strand
augaaauggaaucgccaaa

SEQ ID NO: 2556955 - RNA, 19 nt, Homo sapiens
  misc_RNA (1)...(19): siRNA sense strand
aaaagagguccuauggaaa

SEQ ID NO: 2556956 - RNA, 19 nt, Homo sapiens
  misc_RNA (1)...(19): siRNA sense strand
ugacagaaaaccagacaga

SEQ ID NO: 2556957 - RNA, 19 nt, Homo sapiens
  misc_RNA (1)...(19): siRNA sense strand
auacaauuguccaggccaa

SEQ ID NO: 2556958 - RNA, 19 nt, Homo sapiens
  misc_RNA (1)...(19): siRNA sense strand
ggaaguggucaaauggcaa

SEQ ID NO: 2556959 - RNA, 19 nt, Homo sapiens
  misc_RNA (1)...(19): siRNA sense strand
ggagaguggacaagaaaau

SEQ ID NO: 2556960 - RNA, 19 nt, Homo sapiens
  misc_RNA (1)...(19): siRNA sense strand
cugaaaaggacaugaacuu

SEQ ID NO: 2556961 - RNA, 19 nt, Homo sapiens
  misc_RNA (1)...(19): siRNA sense strand
gggucugacaaguguguuu

SEQ ID NO: 2556962 - RNA, 19 nt, Homo sapiens
  misc_RNA (1)...(19): siRNA sense strand
cuguaaugaauguggucuu

SEQ ID NO: 2556963 - RNA, 19 nt, Homo sapiens
  misc_RNA (1)...(19): siRNA sense strand
guucaacguuacagggucu

SEQ ID NO: 2556964 - RNA, 19 nt, Homo sapiens
  misc_RNA (1)...(19): siRNA sense strand
gagaagaauuuauacugga

SEQ ID NO: 2556965 - RNA, 19 nt, Homo sapiens
  misc_RNA (1)...(19): siRNA sense strand
ggguuggcuaccagaggaa

SEQ ID NO: 2556966 - RNA, 19 nt, Homo sapiens
  misc_RNA (1)...(19): siRNA sense strand
acgcagguagagaggaaca

SEQ ID NO: 2556967 - RNA, 19 nt, Homo sapiens
  misc_RNA (1)...(19): siRNA sense strand
uggucaaauggcaaagaau

SEQ ID NO: 2556968 - RNA, 19 nt, Homo sapiens
  misc_RNA (1)...(19): siRNA sense strand
cuugaagagaagacggauu

SEQ ID NO: 2556969 - RNA, 19 nt, Homo sapiens
  misc_RNA (1)...(19): siRNA sense strand
ccugaaagcucaccgcaga

SEQ ID NO: 2556970 - RNA, 19 nt, Homo sapiens
  misc_RNA (1)...(19): siRNA sense strand
caacacuccuggaugccaa

SEQ ID NO: 2556971 - RNA, 19 nt, Homo sapiens
  misc_RNA (1)...(19): siRNA sense strand
ucauuggaggagaugguaa

SEQ ID NO: 2556972 - RNA, 19 nt, Homo sapiens
  misc_RNA (1)...(19): siRNA sense strand
gggacuacagcaagaacca

SEQ ID NO: 2556973 - RNA, 19 nt, Homo sapiens
  misc_RNA (1)...(19): siRNA sense strand
cagaagaacuuuuggcuag

SEQ ID NO: 2556974 - RNA, 19 nt, Homo sapiens
  misc_RNA (1)...(19): siRNA sense strand
gcagaauccauacaggaga

SEQ ID NO: 2556975 - RNA, 19 nt, Homo sapiens
  misc_RNA (1)...(19): siRNA sense strand
agacagaagacgaaggaga

SEQ ID NO: 2556976 - RNA, 19 nt, Homo sapiens
  misc_RNA (1)...(19): siRNA sense strand
gggacaaagcagcggucaa

SEQ ID NO: 2556977 - RNA, 19 nt, Homo sapiens
  misc_RNA (1)...(19): siRNA sense strand
agauaacgcagcugggaca

SEQ ID NO: 2556978 - RNA, 19 nt, Homo sapiens
  misc_RNA (1)...(19): siRNA sense strand
auggauaaugcaucagaaa

SEQ ID NO: 2556979 - RNA, 19 nt, Homo sapiens
  misc_RNA (1)...(19): siRNA sense strand
guacauaaaacuuggucau

SEQ ID NO: 2556980 - RNA, 19 nt, Homo sapiens
  misc_RNA (1)...(19): siRNA sense strand
gcagacagacagaagacga

SEQ ID NO: 2556981 - RNA, 19 nt, Homo sapiens
  misc_RNA (1)...(19): siRNA sense strand
gagcaacagaggagggccu

SEQ ID NO: 2556982 - RNA, 19 nt, Homo sapiens
  misc_RNA (1)...(19): siRNA sense strand
ggauaaugcaucagaaaag

SEQ ID NO: 2556983 - RNA, 19 nt, Homo sapiens
  misc_RNA (1)...(19): siRNA sense strand
gggaauucauauuggacug

SEQ ID NO: 2556984 - RNA, 19 nt, Homo sapiens
  misc_RNA (1)...(19): siRNA sense strand
aagcacuacagguggaaca

SEQ ID NO: 2556985 - RNA, 19 nt, Homo sapiens
  misc_RNA (1)...(19): siRNA sense strand
agaacagacugaagcccuu

SEQ ID NO: 2556986 - RNA, 19 nt, Homo sapiens
  misc_RNA (1)...(19): siRNA sense strand
uggagcagaagcugagcaa

SEQ ID NO: 2556987 - RNA, 19 nt, Homo sapiens
  misc_RNA (1)...(19): siRNA sense strand
ggaucaaggaaauggaaaa

SEQ ID NO: 2556988 - RNA, 19 nt, Homo sapiens
  misc_RNA (1)...(19): siRNA sense strand
ugaucaaagaacaggacau

SEQ ID NO: 2556989 - RNA, 19 nt, Homo sapiens
  misc_RNA (1)...(19): siRNA sense strand
ccgaaaucuuguggaucaa

SEQ ID NO: 2556990 - RNA, 19 nt, Homo sapiens
  misc_RNA (1)...(19): siRNA sense strand
cagggaaaucuaaaggaga

SEQ ID NO: 2556991 - RNA, 19 nt, Homo sapiens
  misc_RNA (1)...(19): siRNA sense strand
gaacaucagccauacggaa

SEQ ID NO: 2556992 - RNA, 19 nt, Homo sapiens
  misc_RNA (1)...(19): siRNA sense strand
uagaggaggugcaggccau

SEQ ID NO: 2556993 - RNA, 19 nt, Homo sapiens
  misc_RNA (1)...(19): siRNA sense strand
caguacagguauacccgaa

SEQ ID NO: 2556994 - RNA, 19 nt, Homo sapiens
  misc_RNA (1)...(19): siRNA sense strand
cugaagaugcuacagggaa

SEQ ID NO: 2556995 - RNA, 19 nt, Homo sapiens
  misc_RNA (1)...(19): siRNA sense strand
gaguagagaacaucagcca

SEQ ID NO: 2556996 - RNA, 19 nt, Homo sapiens
  misc_RNA (1)...(19): siRNA sense strand
uggaucaaggaaauggaaa

SEQ ID NO: 2556997 - RNA, 19 nt, Homo sapiens
  misc_RNA (1)...(19): siRNA sense strand
ccauaguaaauuuggaauc

SEQ ID NO: 2556998 - RNA, 19 nt, Homo sapiens
  misc_RNA (1)...(19): siRNA sense strand
gggaaaucuaaaggagaca

SEQ ID NO: 2556999 - RNA, 19 nt, Homo sapiens
  misc_RNA (1)...(19): siRNA sense strand
agggaaaucuaaaggagac

SEQ ID NO: 2557000 - RNA, 19 nt, Homo sapiens
  misc_RNA (1)...(19): siRNA sense strand
aggucaauguagaggaggu

SEQ ID NO: 2557001 - RNA, 19 nt, Homo sapiens
  misc_RNA (1)...(19): siRNA sense strand
aauccaaugagauggucaa

SEQ ID NO: 2557002 - RNA, 19 nt, Homo sapiens
  misc_RNA (1)...(19): siRNA sense strand
augccaugccuuugaucaa

SEQ ID NO: 2557003 - RNA, 19 nt, Homo sapiens
  misc_RNA (1)...(19): siRNA sense strand
ugguuaugguacagauaca

SEQ ID NO: 2557004 - RNA, 19 nt, Homo sapiens
  misc_RNA (1)...(19): siRNA sense strand
gggaaagaguggauggcaa

SEQ ID NO: 2557005 - RNA, 19 nt, Homo sapiens
  misc_RNA (1)...(19): siRNA sense strand
ccuacaagucauaaaguca

SEQ ID NO: 2557006 - RNA, 19 nt, Homo sapiens
  misc_RNA (1)...(19): siRNA sense strand
gggauauguaauaggaacu

SEQ ID NO: 2557007 - RNA, 19 nt, Homo sapiens
  misc_RNA (1)...(19): siRNA sense strand
ggaaagaguggauggcaac

SEQ ID NO: 2557008 - RNA, 19 nt, Homo sapiens
  misc_RNA (1)...(19): siRNA sense strand
agucauaaagucagaucuu

SEQ ID NO: 2557009 - RNA, 19 nt, Homo sapiens
  misc_RNA (1)...(19): siRNA sense strand
cagucuaauugugggauau

SEQ ID NO: 2557010 - RNA, 19 nt, Homo sapiens
  misc_RNA (1)...(19): siRNA sense strand
ccauguauaccaagaaaau

SEQ ID NO: 2557011 - RNA, 19 nt, Homo sapiens
  misc_RNA (1)...(19): siRNA sense strand
ccagaaugucacccagaau

SEQ ID NO: 2557012 - RNA, 19 nt, Homo sapiens
  misc_RNA (1)...(19): siRNA sense strand
ggucgagagacaauauaca

SEQ ID NO: 2557013 - RNA, 19 nt, Homo sapiens
  misc_RNA (1)...(19): siRNA sense strand
agacauaagauaaggcaua

SEQ ID NO: 2557014 - RNA, 19 nt, Homo sapiens
  misc_RNA (1)...(19): siRNA sense strand
aauucauacuggugagaaa

SEQ ID NO: 2557015 - RNA, 19 nt, Homo sapiens
  misc_RNA (1)...(19): siRNA sense strand
auguaaagaauguggcaaa

SEQ ID NO: 2557016 - RNA, 19 nt, Homo sapiens
  misc_RNA (1)...(19): siRNA sense strand
auguaaagaauguggcaaa

SEQ ID NO: 2557017 - RNA, 19 nt, Homo sapiens
  misc_RNA (1)...(19): siRNA sense strand
auguaaagaauguggcaaa

SEQ ID NO: 2557018 - RNA, 19 nt, Homo sapiens
  misc_RNA (1)...(19): siRNA sense strand
auguaaagaauguggcaaa

SEQ ID NO: 2557019 - RNA, 19 nt, Homo sapiens
  misc_RNA (1)...(19): siRNA sense strand
auguaaagaauguggcaaa

SEQ ID NO: 2557020 - RNA, 19 nt, Homo sapiens
  misc_RNA (1)...(19): siRNA sense strand
auguaaagaauguggcaaa

SEQ ID NO: 2557021 - RNA, 19 nt, Homo sapiens
  misc_RNA (1)...(19): siRNA sense strand
ccaauguggaugaguguaa

SEQ ID NO: 2557022 - RNA, 19 nt, Homo sapiens
  misc_RNA (1)...(19): siRNA sense strand
ggaaagaaacauuugcaau

SEQ ID NO: 2557023 - RNA, 19 nt, Homo sapiens
  misc_RNA (1)...(19): siRNA sense strand
ccuuagauaucacaagaaa

SEQ ID NO: 2557024 - RNA, 19 nt, Homo sapiens
  misc_RNA (1)...(19): siRNA sense strand
ugcucauacuggagagaaa

SEQ ID NO: 2557025 - RNA, 19 nt, Homo sapiens
  misc_RNA (1)...(19): siRNA sense strand
aacucaugcuggagagaaa

SEQ ID NO: 2557026 - RNA, 19 nt, Homo sapiens
  misc_RNA (1)...(19): siRNA sense strand
aaggcauacuggaaagaaa

SEQ ID NO: 2557027 - RNA, 19 nt, Homo sapiens
  misc_RNA (1)...(19): siRNA sense strand
augugaagcauguggcaaa

SEQ ID NO: 2557028 - RNA, 19 nt, Homo sapiens
  misc_RNA (1)...(19): siRNA sense strand
augugaagaaugugacaaa

SEQ ID NO: 2557029 - RNA, 19 nt, Homo sapiens
  misc_RNA (1)...(19): siRNA sense strand
agauaaggcauacuggaaa

SEQ ID NO: 2557030 - RNA, 19 nt, Homo sapiens
  misc_RNA (1)...(19): siRNA sense strand
augugaagaauguggcaaa

SEQ ID NO: 2557031 - RNA, 19 nt, Homo sapiens
  misc_RNA (1)...(19): siRNA sense strand
augugaagaauguggcaaa

SEQ ID NO: 2557032 - RNA, 19 nt, Homo sapiens
  misc_RNA (1)...(19): siRNA sense strand
augugaagaauguggcaaa

SEQ ID NO: 2557033 - RNA, 19 nt, Homo sapiens
  misc_RNA (1)...(19): siRNA sense strand
augugaagaauguggcaaa

SEQ ID NO: 2557034 - RNA, 19 nt, Homo sapiens
  misc_RNA (1)...(19): siRNA sense strand
augugaagaauguggcaaa

SEQ ID NO: 2557035 - RNA, 19 nt, Homo sapiens
  misc_RNA (1)...(19): siRNA sense strand
augugaagaauguggcaaa

SEQ ID NO: 2557036 - RNA, 19 nt, Homo sapiens
  misc_RNA (1)...(19): siRNA sense strand
augugaagaauguggcaaa

SEQ ID NO: 2557037 - RNA, 19 nt, Homo sapiens
  misc_RNA (1)...(19): siRNA sense strand
augugaagaauguggcaaa

SEQ ID NO: 2557038 - RNA, 19 nt, Homo sapiens
  misc_RNA (1)...(19): siRNA sense strand
augugaagaauguggcaaa

SEQ ID NO: 2557039 - RNA, 19 nt, Homo sapiens
  misc_RNA (1)...(19): siRNA sense strand
augugaagaauguggcaaa

SEQ ID NO: 2557040 - RNA, 19 nt, Homo sapiens
  misc_RNA (1)...(19): siRNA sense strand
augugaagaauguggcaaa

SEQ ID NO: 2557041 - RNA, 19 nt, Homo sapiens
  misc_RNA (1)...(19): siRNA sense strand
augugaagaauguggcaaa

SEQ ID NO: 2557042 - RNA, 19 nt, Homo sapiens
  misc_RNA (1)...(19): siRNA sense strand
augugaagaauguggcaaa

SEQ ID NO: 2557043 - RNA, 19 nt, Homo sapiens
  misc_RNA (1)...(19): siRNA sense strand
augugaagaauguggcaaa

SEQ ID NO: 2557044 - RNA, 19 nt, Homo sapiens
  misc_RNA (1)...(19): siRNA sense strand
augugauguuagagaacua

SEQ ID NO: 2557045 - RNA, 19 nt, Homo sapiens
  misc_RNA (1)...(19): siRNA sense strand
augugaagaauguggcaaa

SEQ ID NO: 2557046 - RNA, 19 nt, Homo sapiens
  misc_RNA (1)...(19): siRNA sense strand
augugaagaauguggcaaa

SEQ ID NO: 2557047 - RNA, 19 nt, Homo sapiens
  misc_RNA (1)...(19): siRNA sense strand
augugaagaauguggcaaa

SEQ ID NO: 2557048 - RNA, 19 nt, Homo sapiens
  misc_RNA (1)...(19): siRNA sense strand
augugaagaauguggcaaa

SEQ ID NO: 2557049 - RNA, 19 nt, Homo sapiens
  misc_RNA (1)...(19): siRNA sense strand
augugaagaauguggcaaa

SEQ ID NO: 2557050 - RNA, 19 nt, Homo sapiens
  misc_RNA (1)...(19): siRNA sense strand
augugaagaauguggcaaa

SEQ ID NO: 2557051 - RNA, 19 nt, Homo sapiens
  misc_RNA (1)...(19): siRNA sense strand
augugaagaauguggcaaa

SEQ ID NO: 2557052 - RNA, 19 nt, Homo sapiens
  misc_RNA (1)...(19): siRNA sense strand
augugaagaauguggcaaa

SEQ ID NO: 2557053 - RNA, 19 nt, Homo sapiens
  misc_RNA (1)...(19): siRNA sense strand
augugaagaauguggcaaa

SEQ ID NO: 2557054 - RNA, 19 nt, Homo sapiens
  misc_RNA (1)...(19): siRNA sense strand
augugaagaagguggcaaa

SEQ ID NO: 2557055 - RNA, 19 nt, Homo sapiens
  misc_RNA (1)...(19): siRNA sense strand
aggaagaggugaagggaau

SEQ ID NO: 2557056 - RNA, 19 nt, Homo sapiens
  misc_RNA (1)...(19): siRNA sense strand
gcauaaagauugugggacu

SEQ ID NO: 2557057 - RNA, 19 nt, Homo sapiens
  misc_RNA (1)...(19): siRNA sense strand
gcgagaagugugugagcaa

SEQ ID NO: 2557058 - RNA, 19 nt, Homo sapiens
  misc_RNA (1)...(19): siRNA sense strand
cugcagagcaagagaauga

SEQ ID NO: 2557059 - RNA, 19 nt, Homo sapiens
  misc_RNA (1)...(19): siRNA sense strand
ggugguugguacagauaaa

SEQ ID NO: 2557060 - RNA, 19 nt, Homo sapiens
  misc_RNA (1)...(19): siRNA sense strand
cagcaaagaaggaugccaa

SEQ ID NO: 2557061 - RNA, 19 nt, Homo sapiens
  misc_RNA (1)...(19): siRNA sense strand
ucagaaagacagaagaaaa

SEQ ID NO: 2557062 - RNA, 19 nt, Homo sapiens
  misc_RNA (1)...(19): siRNA sense strand
gauugaaagccuagagacu

SEQ ID NO: 2557063 - RNA, 19 nt, Homo sapiens
  misc_RNA (1)...(19): siRNA sense strand
aagaagaugcugagaaguu

SEQ ID NO: 2557064 - RNA, 19 nt, Homo sapiens
  misc_RNA (1)...(19): siRNA sense strand
agauagagacagaguuaca

SEQ ID NO: 2557065 - RNA, 19 nt, Homo sapiens
  misc_RNA (1)...(19): siRNA sense strand
gaucauuuggacagagcaa

SEQ ID NO: 2557066 - RNA, 19 nt, Homo sapiens
  misc_RNA (1)...(19): siRNA sense strand
ggguacaguuaaugcguca

SEQ ID NO: 2557067 - RNA, 19 nt, Homo sapiens
  misc_RNA (1)...(19): siRNA sense strand
agacagaguuacaagcuga

SEQ ID NO: 2557068 - RNA, 19 nt, Homo sapiens
  misc_RNA (1)...(19): siRNA sense strand
gagaagugugugagcaaaa

SEQ ID NO: 2557069 - RNA, 19 nt, Homo sapiens
  misc_RNA (1)...(19): siRNA sense strand
ugaaagaagaugcugagaa

SEQ ID NO: 2557070 - RNA, 19 nt, Homo sapiens
  misc_RNA (1)...(19): siRNA sense strand
cuacaaucccugauggaga

SEQ ID NO: 2557071 - RNA, 19 nt, Homo sapiens
  misc_RNA (1)...(19): siRNA sense strand
cagaauuagaagucaucaa

SEQ ID NO: 2557072 - RNA, 19 nt, Homo sapiens
  misc_RNA (1)...(19): siRNA sense strand
uugaaagccuagagacuga

SEQ ID NO: 2557073 - RNA, 19 nt, Homo sapiens
  misc_RNA (1)...(19): siRNA sense strand
ccaaaauacaggucagcaa

SEQ ID NO: 2557074 - RNA, 19 nt, Homo sapiens
  misc_RNA (1)...(19): siRNA sense strand
gaggaaucagucagugaaa

SEQ ID NO: 2557075 - RNA, 19 nt, Homo sapiens
  misc_RNA (1)...(19): siRNA sense strand
aaucagugcucuuggagau

SEQ ID NO: 2557076 - RNA, 19 nt, Homo sapiens
  misc_RNA (1)...(19): siRNA sense strand
gagacaaagaaguaauaca

SEQ ID NO: 2557077 - RNA, 19 nt, Homo sapiens
  misc_RNA (1)...(19): siRNA sense strand
cuuagagcaaggaaagaaa

SEQ ID NO: 2557078 - RNA, 19 nt, Homo sapiens
  misc_RNA (1)...(19): siRNA sense strand
cgucaagcgcagaugucua

SEQ ID NO: 2557079 - RNA, 19 nt, Homo sapiens
  misc_RNA (1)...(19): siRNA sense strand
auagaaagauccuggcuca

SEQ ID NO: 2557080 - RNA, 19 nt, Homo sapiens
  misc_RNA (1)...(19): siRNA sense strand
gggaugacgaggaauggaa

SEQ ID NO: 2557081 - RNA, 19 nt, Homo sapiens
  misc_RNA (1)...(19): siRNA sense strand
agagaagcaguuagaggaa

SEQ ID NO: 2557082 - RNA, 19 nt, Homo sapiens
  misc_RNA (1)...(19): siRNA sense strand
gcaacagguacaacagcua

SEQ ID NO: 2557083 - RNA, 19 nt, Homo sapiens
  misc_RNA (1)...(19): siRNA sense strand
cuuuggaagaccaggaauu

SEQ ID NO: 2557084 - RNA, 19 nt, Homo sapiens
  misc_RNA (1)...(19): siRNA sense strand
agaagaaacugaaugagca

SEQ ID NO: 2557085 - RNA, 19 nt, Homo sapiens
  misc_RNA (1)...(19): siRNA sense strand
aguccaaacuucugaaacu

SEQ ID NO: 2557086 - RNA, 19 nt, Homo sapiens
  misc_RNA (1)...(19): siRNA sense strand
ccuugaagauagaaagauc

SEQ ID NO: 2557087 - RNA, 19 nt, Homo sapiens
  misc_RNA (1)...(19): siRNA sense strand
gggguuauuccuaggguaa

SEQ ID NO: 2557088 - RNA, 19 nt, Homo sapiens
  misc_RNA (1)...(19): siRNA sense strand
ggauggugauggugaugau

SEQ ID NO: 2557089 - RNA, 19 nt, Homo sapiens
  misc_RNA (1)...(19): siRNA sense strand
ccuaaacuccggaggcgua

SEQ ID NO: 2557090 - RNA, 19 nt, Homo sapiens
  misc_RNA (1)...(19): siRNA sense strand
auagcaagauccugaaaga

SEQ ID NO: 2557091 - RNA, 19 nt, Homo sapiens
  misc_RNA (1)...(19): siRNA sense strand
ccaccauucuggaagccaa

SEQ ID NO: 2557092 - RNA, 19 nt, Homo sapiens
  misc_RNA (1)...(19): siRNA sense strand
ugcaagggcugguguggaa

SEQ ID NO: 2557093 - RNA, 19 nt, Homo sapiens
  misc_RNA (1)...(19): siRNA sense strand
ugguagaggagaaugaaaa

SEQ ID NO: 2557094 - RNA, 19 nt, Homo sapiens
  misc_RNA (1)...(19): siRNA sense strand
aguaccaauaccaggauaa

SEQ ID NO: 2557095 - RNA, 19 nt, Homo sapiens
  misc_RNA (1)...(19): siRNA sense strand
ugcagaaagugaagacaga

SEQ ID NO: 2557096 - RNA, 19 nt, Homo sapiens
  misc_RNA (1)...(19): siRNA sense strand
cagauaaauccuucaccua

SEQ ID NO: 2557097 - RNA, 19 nt, Homo sapiens
  misc_RNA (1)...(19): siRNA sense strand
gaggaauggaagccaacaa

SEQ ID NO: 2557098 - RNA, 19 nt, Homo sapiens
  misc_RNA (1)...(19): siRNA sense strand
gugucaggaugaagaacuu

SEQ ID NO: 2557099 - RNA, 19 nt, Homo sapiens
  misc_RNA (1)...(19): siRNA sense strand
aaggaagaggugaagggaa

SEQ ID NO: 2557100 - RNA, 19 nt, Homo sapiens
  misc_RNA (1)...(19): siRNA sense strand
acuccaaucuagaggaaac

SEQ ID NO: 2557101 - RNA, 19 nt, Homo sapiens
  misc_RNA (1)...(19): siRNA sense strand
cccagauguuggagaggau

SEQ ID NO: 2557102 - RNA, 19 nt, Homo sapiens
  misc_RNA (1)...(19): siRNA sense strand
gcgucaaaugaaagaagau

SEQ ID NO: 2557103 - RNA, 19 nt, Homo sapiens
  misc_RNA (1)...(19): siRNA sense strand
uaaaagaacgagaccguaa

SEQ ID NO: 2557104 - RNA, 19 nt, Homo sapiens
  misc_RNA (1)...(19): siRNA sense strand
gaaagugaagacagaccaa

SEQ ID NO: 2557105 - RNA, 19 nt, Homo sapiens
  misc_RNA (1)...(19): siRNA sense strand
uguggaaccaucagagaau

SEQ ID NO: 2557106 - RNA, 19 nt, Homo sapiens
  misc_RNA (1)...(19): siRNA sense strand
gaucugaagaagaaacuga

SEQ ID NO: 2557107 - RNA, 19 nt, Homo sapiens
  misc_RNA (1)...(19): siRNA sense strand
cuucugaaacuaaaggaau

SEQ ID NO: 2557108 - RNA, 19 nt, Homo sapiens
  misc_RNA (1)...(19): siRNA sense strand
uggucagaauggagcaaca

SEQ ID NO: 2557109 - RNA, 19 nt, Homo sapiens
  misc_RNA (1)...(19): siRNA sense strand
agcaagauccugaaagaga

SEQ ID NO: 2557110 - RNA, 19 nt, Homo sapiens
  misc_RNA (1)...(19): siRNA sense strand
agucccugguagaggagaa

SEQ ID NO: 2557111 - RNA, 19 nt, Homo sapiens
  misc_RNA (1)...(19): siRNA sense strand
ugaagaauuggcuuggaaa

SEQ ID NO: 2557112 - RNA, 19 nt, Homo sapiens
  misc_RNA (1)...(19): siRNA sense strand
ccagugcugcagagggaaa

SEQ ID NO: 2557113 - RNA, 19 nt, Homo sapiens
  misc_RNA (1)...(19): siRNA sense strand
gcaaacauuuacugccaga

SEQ ID NO: 2557114 - RNA, 19 nt, Homo sapiens
  misc_RNA (1)...(19): siRNA sense strand
cugcagagggaaaggaugu

SEQ ID NO: 2557115 - RNA, 19 nt, Homo sapiens
  misc_RNA (1)...(19): siRNA sense strand
cagaaacuauucaagccua

SEQ ID NO: 2557116 - RNA, 19 nt, Homo sapiens
  misc_RNA (1)...(19): siRNA sense strand
aaacaaacgaagagcgcaa

SEQ ID NO: 2557117 - RNA, 19 nt, Homo sapiens
  misc_RNA (1)...(19): siRNA sense strand
cuaaaugagaccagggaau

SEQ ID NO: 2557118 - RNA, 19 nt, Homo sapiens
  misc_RNA (1)...(19): siRNA sense strand
caacagaauucauacgaga

SEQ ID NO: 2557119 - RNA, 19 nt, Homo sapiens
  misc_RNA (1)...(19): siRNA sense strand
ggaugaaggaccaguguga

SEQ ID NO: 2557120 - RNA, 19 nt, Homo sapiens
  misc_RNA (1)...(19): siRNA sense strand
gugcaaagacuccagaauu

SEQ ID NO: 2557121 - RNA, 19 nt, Homo sapiens
  misc_RNA (1)...(19): siRNA sense strand
gaagaaagaggaugcccua

SEQ ID NO: 2557122 - RNA, 19 nt, Homo sapiens
  misc_RNA (1)...(19): siRNA sense strand
gcugagagguugaccagga

SEQ ID NO: 2557123 - RNA, 19 nt, Homo sapiens
  misc_RNA (1)...(19): siRNA sense strand
gagagguugaccaggaaau

SEQ ID NO: 2557124 - RNA, 19 nt, Homo sapiens
  misc_RNA (1)...(19): siRNA sense strand
cggagaaagcgcugcagga

SEQ ID NO: 2557125 - RNA, 19 nt, Homo sapiens
  misc_RNA (1)...(19): siRNA sense strand
ccaagaagaagaaagagga

SEQ ID NO: 2557126 - RNA, 19 nt, Homo sapiens
  misc_RNA (1)...(19): siRNA sense strand
augaaggaccagugugaca

SEQ ID NO: 2557127 - RNA, 19 nt, Homo sapiens
  misc_RNA (1)...(19): siRNA sense strand
aauacaacgagcugcuaaa

SEQ ID NO: 2557128 - RNA, 19 nt, Homo sapiens
  misc_RNA (1)...(19): siRNA sense strand
agaugauacacgaggcuca

SEQ ID NO: 2557129 - RNA, 19 nt, Homo sapiens
  misc_RNA (1)...(19): siRNA sense strand
ggaaauacaacgagcugcu

SEQ ID NO: 2557130 - RNA, 19 nt, Homo sapiens
  misc_RNA (1)...(19): siRNA sense strand
acgaagagcgcaagacacu

SEQ ID NO: 2557131 - RNA, 19 nt, Homo sapiens
  misc_RNA (1)...(19): siRNA sense strand
ggaaauguccaaucaggga

SEQ ID NO: 2557132 - RNA, 19 nt, Homo sapiens
  misc_RNA (1)...(19): siRNA sense strand
ggugaaacagauaaagacu

SEQ ID NO: 2557133 - RNA, 19 nt, Homo sapiens
  misc_RNA (1)...(19): siRNA sense strand
gaauuggaggcaugaugaa

SEQ ID NO: 2557134 - RNA, 19 nt, Homo sapiens
  misc_RNA (1)...(19): siRNA sense strand
gcaucauagacgagcucuu

SEQ ID NO: 2557135 - RNA, 19 nt, Homo sapiens
  misc_RNA (1)...(19): siRNA sense strand
ugugacaagugccgggaga

SEQ ID NO: 2557136 - RNA, 19 nt, Homo sapiens
  misc_RNA (1)...(19): siRNA sense strand
cgucaauaaggaaauucaa

SEQ ID NO: 2557137 - RNA, 19 nt, Homo sapiens
  misc_RNA (1)...(19): siRNA sense strand
ggaugaauggugaccgcau

SEQ ID NO: 2557138 - RNA, 19 nt, Homo sapiens
  misc_RNA (1)...(19): siRNA sense strand
ccuaaaugagaccagggaa

SEQ ID NO: 2557139 - RNA, 19 nt, Homo sapiens
  misc_RNA (1)...(19): siRNA sense strand
gaguguaagcccugccuga

SEQ ID NO: 2557140 - RNA, 19 nt, Homo sapiens
  misc_RNA (1)...(19): siRNA sense strand
cugcaggaauaccgcaaaa

SEQ ID NO: 2557141 - RNA, 19 nt, Homo sapiens
  misc_RNA (1)...(19): siRNA sense strand
aaguacgucaauaaggaaa

SEQ ID NO: 2557142 - RNA, 19 nt, Homo sapiens
  misc_RNA (1)...(19): siRNA sense strand
cgugcaaagacuccagaau

SEQ ID NO: 2557143 - RNA, 19 nt, Homo sapiens
  misc_RNA (1)...(19): siRNA sense strand
cuaaauuuauggagaccgu

SEQ ID NO: 2557144 - RNA, 19 nt, Homo sapiens
  misc_RNA (1)...(19): siRNA sense strand
cugaaacagaccugcauga

SEQ ID NO: 2557145 - RNA, 19 nt, Homo sapiens
  misc_RNA (1)...(19): siRNA sense strand
aaacaaacgaagagcgcaa

SEQ ID NO: 2557146 - RNA, 19 nt, Homo sapiens
  misc_RNA (1)...(19): siRNA sense strand
cuaaaugagaccagggaau

SEQ ID NO: 2557147 - RNA, 19 nt, Homo sapiens
  misc_RNA (1)...(19): siRNA sense strand
caacagaauucauacgaga

SEQ ID NO: 2557148 - RNA, 19 nt, Homo sapiens
  misc_RNA (1)...(19): siRNA sense strand
ggaugaaggaccaguguga

SEQ ID NO: 2557149 - RNA, 19 nt, Homo sapiens
  misc_RNA (1)...(19): siRNA sense strand
gaagaaagaggaugcccua

SEQ ID NO: 2557150 - RNA, 19 nt, Homo sapiens
  misc_RNA (1)...(19): siRNA sense strand
gcugagagguugaccagga

SEQ ID NO: 2557151 - RNA, 19 nt, Homo sapiens
  misc_RNA (1)...(19): siRNA sense strand
gagagguugaccaggaaau

SEQ ID NO: 2557152 - RNA, 19 nt, Homo sapiens
  misc_RNA (1)...(19): siRNA sense strand
cggagaaagcgcugcagga

SEQ ID NO: 2557153 - RNA, 19 nt, Homo sapiens
  misc_RNA (1)...(19): siRNA sense strand
ccaagaagaagaaagagga

SEQ ID NO: 2557154 - RNA, 19 nt, Homo sapiens
  misc_RNA (1)...(19): siRNA sense strand
augaaggaccagugugaca

SEQ ID NO: 2557155 - RNA, 19 nt, Homo sapiens
  misc_RNA (1)...(19): siRNA sense strand
aauacaacgagcugcuaaa

SEQ ID NO: 2557156 - RNA, 19 nt, Homo sapiens
  misc_RNA (1)...(19): siRNA sense strand
agaugauacacgaggcuca

SEQ ID NO: 2557157 - RNA, 19 nt, Homo sapiens
  misc_RNA (1)...(19): siRNA sense strand
ggaaauacaacgagcugcu

SEQ ID NO: 2557158 - RNA, 19 nt, Homo sapiens
  misc_RNA (1)...(19): siRNA sense strand
acgaagagcgcaagacacu

SEQ ID NO: 2557159 - RNA, 19 nt, Homo sapiens
  misc_RNA (1)...(19): siRNA sense strand
ggaaauguccaaucaggga

SEQ ID NO: 2557160 - RNA, 19 nt, Homo sapiens
  misc_RNA (1)...(19): siRNA sense strand
ggugaaacagauaaagacu

SEQ ID NO: 2557161 - RNA, 19 nt, Homo sapiens
  misc_RNA (1)...(19): siRNA sense strand
gcaucauagacgagcucuu

SEQ ID NO: 2557162 - RNA, 19 nt, Homo sapiens
  misc_RNA (1)...(19): siRNA sense strand
ugugacaagugccgggaga

SEQ ID NO: 2557163 - RNA, 19 nt, Homo sapiens
  misc_RNA (1)...(19): siRNA sense strand
cgucaauaaggaaauucaa

SEQ ID NO: 2557164 - RNA, 19 nt, Homo sapiens
  misc_RNA (1)...(19): siRNA sense strand
ggaugaauggugaccgcau

SEQ ID NO: 2557165 - RNA, 19 nt, Homo sapiens
  misc_RNA (1)...(19): siRNA sense strand
ccuaaaugagaccagggaa

SEQ ID NO: 2557166 - RNA, 19 nt, Homo sapiens
  misc_RNA (1)...(19): siRNA sense strand
gaguguaagcccugccuga

SEQ ID NO: 2557167 - RNA, 19 nt, Homo sapiens
  misc_RNA (1)...(19): siRNA sense strand
cugcaggaauaccgcaaaa

SEQ ID NO: 2557168 - RNA, 19 nt, Homo sapiens
  misc_RNA (1)...(19): siRNA sense strand
aaguacgucaauaaggaaa

SEQ ID NO: 2557169 - RNA, 19 nt, Homo sapiens
  misc_RNA (1)...(19): siRNA sense strand
cuaaauuuauggagaccgu

SEQ ID NO: 2557170 - RNA, 19 nt, Homo sapiens
  misc_RNA (1)...(19): siRNA sense strand
cugaaacagaccugcauga

SEQ ID NO: 2557171 - RNA, 19 nt, Homo sapiens
  misc_RNA (1)...(19): siRNA sense strand
gggaugagcuauauggacu

SEQ ID NO: 2557172 - RNA, 19 nt, Homo sapiens
  misc_RNA (1)...(19): siRNA sense strand
gcuuuaagaauguggaacu

SEQ ID NO: 2557173 - RNA, 19 nt, Homo sapiens
  misc_RNA (1)...(19): siRNA sense strand
caagauagcccgagagagc

SEQ ID NO: 2557174 - RNA, 19 nt, Homo sapiens
  misc_RNA (1)...(19): siRNA sense strand
cgagagagccugcugcgua

SEQ ID NO: 2557175 - RNA, 19 nt, Homo sapiens
  misc_RNA (1)...(19): siRNA sense strand
ccuuauggagacacacaaa

SEQ ID NO: 2557176 - RNA, 19 nt, Homo sapiens
  misc_RNA (1)...(19): siRNA sense strand
cauauggggaugagcuaua

SEQ ID NO: 2557177 - RNA, 19 nt, Homo sapiens
  misc_RNA (1)...(19): siRNA sense strand
aggcaucaagguuggcaaa

SEQ ID NO: 2557178 - RNA, 19 nt, Homo sapiens
  misc_RNA (1)...(19): siRNA sense strand
agaccaucgcagagacaga

SEQ ID NO: 2557179 - RNA, 19 nt, Homo sapiens
  misc_RNA (1)...(19): siRNA sense strand
cagaaagaggaguggaauu

SEQ ID NO: 2557180 - RNA, 19 nt, Homo sapiens
  misc_RNA (1)...(19): siRNA sense strand
gcuaugugcuggugggaga

SEQ ID NO: 2557181 - RNA, 19 nt, Homo sapiens
  misc_RNA (1)...(19): siRNA sense strand
ccacaaugacauaguguau

SEQ ID NO: 2557182 - RNA, 19 nt, Homo sapiens
  misc_RNA (1)...(19): siRNA sense strand
cuguaaaucucuaggacga

SEQ ID NO: 2557183 - RNA, 19 nt, Homo sapiens
  misc_RNA (1)...(19): siRNA sense strand
guggauggaaccugggaua

SEQ ID NO: 2557184 - RNA, 19 nt, Homo sapiens
  misc_RNA (1)...(19): siRNA sense strand
ccuucuagucgguguguaa

SEQ ID NO: 2557185 - RNA, 19 nt, Homo sapiens
  misc_RNA (1)...(19): siRNA sense strand
ucucaauggaagacauaua

SEQ ID NO: 2557186 - RNA, 19 nt, Homo sapiens
  misc_RNA (1)...(19): siRNA sense strand
gccagaaagaggaguggaa

SEQ ID NO: 2557187 - RNA, 19 nt, Homo sapiens
  misc_RNA (1)...(19): siRNA sense strand
ggguacaaguuaaguggga

SEQ ID NO: 2557188 - RNA, 19 nt, Homo sapiens
  misc_RNA (1)...(19): siRNA sense strand
cuauaacgacacugugaua

SEQ ID NO: 2557189 - RNA, 19 nt, Homo sapiens
  misc_RNA (1)...(19): siRNA sense strand
ggauuuacuuugaagggca

SEQ ID NO: 2557190 - RNA, 19 nt, Homo sapiens
  misc_RNA (1)...(19): siRNA sense strand
gaaugguagucgcgugauu

SEQ ID NO: 2557191 - RNA, 19 nt, Homo sapiens
  misc_RNA (1)...(19): siRNA sense strand
gggcuggaaccaaggaaaa

SEQ ID NO: 2557192 - RNA, 19 nt, Homo sapiens
  misc_RNA (1)...(19): siRNA sense strand
ccauaguaccaggaggaua

SEQ ID NO: 2557193 - RNA, 19 nt, Homo sapiens
  misc_RNA (1)...(19): siRNA sense strand
uguaauugcuggacaggga

SEQ ID NO: 2557194 - RNA, 19 nt, Homo sapiens
  misc_RNA (1)...(19): siRNA sense strand
gcuaccugcuggugggaga

SEQ ID NO: 2557195 - RNA, 19 nt, Homo sapiens
  misc_RNA (1)...(19): siRNA sense strand
cagaggaaggagugaacuu

SEQ ID NO: 2557196 - RNA, 19 nt, Homo sapiens
  misc_RNA (1)...(19): siRNA sense strand
agguacaguuguucaggua

SEQ ID NO: 2557197 - RNA, 19 nt, Homo sapiens
  misc_RNA (1)...(19): siRNA sense strand
ggcacaauuccuugguuua

SEQ ID NO: 2557198 - RNA, 19 nt, Homo sapiens
  misc_RNA (1)...(19): siRNA sense strand
cuacaaugacacugugaca

SEQ ID NO: 2557199 - RNA, 19 nt, Homo sapiens
  misc_RNA (1)...(19): siRNA sense strand
ggcaaaaggaagauagaca

SEQ ID NO: 2557200 - RNA, 19 nt, Homo sapiens
  misc_RNA (1)...(19): siRNA sense strand
gugucaagaugcugaaaau

SEQ ID NO: 2557201 - RNA, 19 nt, Homo sapiens
  misc_RNA (1)...(19): siRNA sense strand
acacagagcacgcaauuau

SEQ ID NO: 2557202 - RNA, 19 nt, Homo sapiens
  misc_RNA (1)...(19): siRNA sense strand
guacaaguuaagugggagu

SEQ ID NO: 2557203 - RNA, 19 nt, Homo sapiens
  misc_RNA (1)...(19): siRNA sense strand
gcugauaacaccugggauc

SEQ ID NO: 2557204 - RNA, 19 nt, Homo sapiens
  misc_RNA (1)...(19): siRNA sense strand
guuacuugcuuguuggaga

SEQ ID NO: 2557205 - RNA, 19 nt, Homo sapiens
  misc_RNA (1)...(19): siRNA sense strand
cugugacauucaaguguua

SEQ ID NO: 2557206 - RNA, 19 nt, Homo sapiens
  misc_RNA (1)...(19): siRNA sense strand
aagacaaaguggauggaac

SEQ ID NO: 2557207 - RNA, 19 nt, Homo sapiens
  misc_RNA (1)...(19): siRNA sense strand
aaguuaagugggaguguuu

SEQ ID NO: 2557208 - RNA, 19 nt, Homo sapiens
  misc_RNA (1)...(19): siRNA sense strand
ccauauuucuacaaugaca

SEQ ID NO: 2557209 - RNA, 19 nt, Homo sapiens
  misc_RNA (1)...(19): siRNA sense strand
aaacauggguacaagcuca

SEQ ID NO: 2557210 - RNA, 19 nt, Homo sapiens
  misc_RNA (1)...(19): siRNA sense strand
uggaagacauauaggcaac

SEQ ID NO: 2557211 - RNA, 19 nt, Homo sapiens
  misc_RNA (1)...(19): siRNA sense strand
aggcacaauuccuugguuu

SEQ ID NO: 2557212 - RNA, 19 nt, Homo sapiens
  misc_RNA (1)...(19): siRNA sense strand
ccacaauggacaucacaca

SEQ ID NO: 2557213 - RNA, 19 nt, Homo sapiens
  misc_RNA (1)...(19): siRNA sense strand
ggguacaagcucaauaaaa

SEQ ID NO: 2557214 - RNA, 19 nt, Homo sapiens
  misc_RNA (1)...(19): siRNA sense strand
ggagugugaagauggguau

SEQ ID NO: 2557215 - RNA, 19 nt, Homo sapiens
  misc_RNA (1)...(19): siRNA sense strand
gcccauaguaccaggagga

SEQ ID NO: 2557216 - RNA, 19 nt, Homo sapiens
  misc_RNA (1)...(19): siRNA sense strand
gcaccaauuuguuagacca

SEQ ID NO: 2557217 - RNA, 19 nt, Homo sapiens
  misc_RNA (1)...(19): siRNA sense strand
gugacauucaaguguuaua

SEQ ID NO: 2557218 - RNA, 19 nt, Homo sapiens
  misc_RNA (1)...(19): siRNA sense strand
cugaaauaccaguuuguga

SEQ ID NO: 2557219 - RNA, 19 nt, Homo sapiens
  misc_RNA (1)...(19): siRNA sense strand
acacaggcaugauggcaga

SEQ ID NO: 2557220 - RNA, 19 nt, Homo sapiens
  misc_RNA (1)...(19): siRNA sense strand
aggcaacucacuagcaaau

SEQ ID NO: 2557221 - RNA, 19 nt, Homo sapiens
  misc_RNA (1)...(19): siRNA sense strand
caagcaaauccgaugcaau

SEQ ID NO: 2557222 - RNA, 19 nt, Homo sapiens
  misc_RNA (1)...(19): siRNA sense strand
ccauauggaaccacgguca

SEQ ID NO: 2557223 - RNA, 19 nt, Homo sapiens
  misc_RNA (1)...(19): siRNA sense strand
ugaagaggcacgcuguaaa

SEQ ID NO: 2557224 - RNA, 19 nt, Homo sapiens
  misc_RNA (1)...(19): siRNA sense strand
guuaagugggaguguuuau

SEQ ID NO: 2557225 - RNA, 19 nt, Homo sapiens
  misc_RNA (1)...(19): siRNA sense strand
guguuuaucaggaguguca

SEQ ID NO: 2557226 - RNA, 19 nt, Homo sapiens
  misc_RNA (1)...(19): siRNA sense strand
uugaagggcagcaagcaaa

SEQ ID NO: 2557227 - RNA, 19 nt, Homo sapiens
  misc_RNA (1)...(19): siRNA sense strand
uggugaaggguacaaguua

SEQ ID NO: 2557228 - RNA, 19 nt, Homo sapiens
  misc_RNA (1)...(19): siRNA sense strand
acauauaggcaacucacua

SEQ ID NO: 2557229 - RNA, 19 nt, Homo sapiens
  misc_RNA (1)...(19): siRNA sense strand
cgggaguuccuuagaagau

SEQ ID NO: 2557230 - RNA, 19 nt, Homo sapiens
  misc_RNA (1)...(19): siRNA sense strand
ugcaaauggauacaagaua

SEQ ID NO: 2557231 - RNA, 19 nt, Homo sapiens
  misc_RNA (1)...(19): siRNA sense strand
gcauauucccacaaugaca

SEQ ID NO: 2557232 - RNA, 19 nt, Homo sapiens
  misc_RNA (1)...(19): siRNA sense strand
cauaguaccaggaggauac

SEQ ID NO: 2557233 - RNA, 19 nt, Homo sapiens
  misc_RNA (1)...(19): siRNA sense strand
ccgcuuugacccuggaaca

SEQ ID NO: 2557234 - RNA, 19 nt, Homo sapiens
  misc_RNA (1)...(19): siRNA sense strand
uagucagauucguugcaaa

SEQ ID NO: 2557235 - RNA, 19 nt, Homo sapiens
  misc_RNA (1)...(19): siRNA sense strand
cugcauauucccacaauga

SEQ ID NO: 2557236 - RNA, 19 nt, Homo sapiens
  misc_RNA (1)...(19): siRNA sense strand
uaguguauguugacugcaa

SEQ ID NO: 2557237 - RNA, 19 nt, Homo sapiens
  misc_RNA (1)...(19): siRNA sense strand
gguauaugcuggaaggcag

SEQ ID NO: 2557238 - RNA, 19 nt, Homo sapiens
  misc_RNA (1)...(19): siRNA sense strand
aguaccaggaggauacaaa

SEQ ID NO: 2557239 - RNA, 19 nt, Homo sapiens
  misc_RNA (1)...(19): siRNA sense strand
uuucugugaugaaggguau

SEQ ID NO: 2557240 - RNA, 19 nt, Homo sapiens
  misc_RNA (1)...(19): siRNA sense strand
ccaaaaugccaguauguga

SEQ ID NO: 2557241 - RNA, 19 nt, Homo sapiens
  misc_RNA (1)...(19): siRNA sense strand
ccaauuuguuagaccagau

SEQ ID NO: 2557242 - RNA, 19 nt, Homo sapiens
  misc_RNA (1)...(19): siRNA sense strand
ggauaaagauaaaagcaga

SEQ ID NO: 2557243 - RNA, 19 nt, Homo sapiens
  misc_RNA (1)...(19): siRNA sense strand
ggaucaugacagagcuauu

SEQ ID NO: 2557244 - RNA, 19 nt, Homo sapiens
  misc_RNA (1)...(19): siRNA sense strand
ucuggaagauuaugggaga

SEQ ID NO: 2557245 - RNA, 19 nt, Homo sapiens
  misc_RNA (1)...(19): siRNA sense strand
agauauaagugugagguga

SEQ ID NO: 2557246 - RNA, 19 nt, Homo sapiens
  misc_RNA (1)...(19): siRNA sense strand
ggauuuugggauaaagaua

SEQ ID NO: 2557247 - RNA, 19 nt, Homo sapiens
  misc_RNA (1)...(19): siRNA sense strand
cuggaaaauucucggauau

SEQ ID NO: 2557248 - RNA, 19 nt, Homo sapiens
  misc_RNA (1)...(19): siRNA sense strand
gugcaauaucccaucacaa

SEQ ID NO: 2557249 - RNA, 19 nt, Homo sapiens
  misc_RNA (1)...(19): siRNA sense strand
cagugauggcucugugcaa

SEQ ID NO: 2557250 - RNA, 19 nt, Homo sapiens
  misc_RNA (1)...(19): siRNA sense strand
acuuacaaggugugguauu

SEQ ID NO: 2557251 - RNA, 19 nt, Homo sapiens
  misc_RNA (1)...(19): siRNA sense strand
auuaaguggaccaagcuaa

SEQ ID NO: 2557252 - RNA, 19 nt, Homo sapiens
  misc_RNA (1)...(19): siRNA sense strand
gagucaggaacuacggauu

SEQ ID NO: 2557253 - RNA, 19 nt, Homo sapiens
  misc_RNA (1)...(19): siRNA sense strand
acuuguggaagcagagcaa

SEQ ID NO: 2557254 - RNA, 19 nt, Homo sapiens
  misc_RNA (1)...(19): siRNA sense strand
ugauugaaggauuagaaga

SEQ ID NO: 2557255 - RNA, 19 nt, Homo sapiens
  misc_RNA (1)...(19): siRNA sense strand
aaaugagauuggagggaaa

SEQ ID NO: 2557256 - RNA, 19 nt, Homo sapiens
  misc_RNA (1)...(19): siRNA sense strand
cuuccaaacaccagagaaa

SEQ ID NO: 2557257 - RNA, 19 nt, Homo sapiens
  misc_RNA (1)...(19): siRNA sense strand
gauucacaccggagagaaa

SEQ ID NO: 2557258 - RNA, 19 nt, Homo sapiens
  misc_RNA (1)...(19): siRNA sense strand
aacccauacuggagagaaa

SEQ ID NO: 2557259 - RNA, 19 nt, Homo sapiens
  misc_RNA (1)...(19): siRNA sense strand
aagaauacugagaggauau

SEQ ID NO: 2557260 - RNA, 19 nt, Homo sapiens
  misc_RNA (1)...(19): siRNA sense strand
ccuggaaugugaagagaca

SEQ ID NO: 2557261 - RNA, 19 nt, Homo sapiens
  misc_RNA (1)...(19): siRNA sense strand
gaaaauucacacuggaaaa

SEQ ID NO: 2557262 - RNA, 19 nt, Homo sapiens
  misc_RNA (1)...(19): siRNA sense strand
augugauguuggagaacua

SEQ ID NO: 2557263 - RNA, 19 nt, Homo sapiens
  misc_RNA (1)...(19): siRNA sense strand
acugagaggauauggaaau

SEQ ID NO: 2557264 - RNA, 19 nt, Homo sapiens
  misc_RNA (1)...(19): siRNA sense strand
augucaagaauguggcaaa

SEQ ID NO: 2557265 - RNA, 19 nt, Homo sapiens
  misc_RNA (1)...(19): siRNA sense strand
ccuuacaagugucaagaau

SEQ ID NO: 2557266 - RNA, 19 nt, Homo sapiens
  misc_RNA (1)...(19): siRNA sense strand
uuaaggaaagacugggaaa

SEQ ID NO: 2557267 - RNA, 19 nt, Homo sapiens
  misc_RNA (1)...(19): siRNA sense strand
gaaaugagauuggagggaa

SEQ ID NO: 2557268 - RNA, 19 nt, Homo sapiens
  misc_RNA (1)...(19): siRNA sense strand
uguuggagaacuacagaaa

SEQ ID NO: 2557269 - RNA, 19 nt, Homo sapiens
  misc_RNA (1)...(19): siRNA sense strand
gugugaagaauguggcaga

SEQ ID NO: 2557270 - RNA, 19 nt, Homo sapiens
  misc_RNA (1)...(19): siRNA sense strand
uuacugaaccugagaacau

SEQ ID NO: 2557271 - RNA, 19 nt, Homo sapiens
  misc_RNA (1)...(19): siRNA sense strand
ugagcaugguacugaggaa

SEQ ID NO: 2557272 - RNA, 19 nt, Homo sapiens
  misc_RNA (1)...(19): siRNA sense strand
auguggagaauguggcaaa

SEQ ID NO: 2557273 - RNA, 19 nt, Homo sapiens
  misc_RNA (1)...(19): siRNA sense strand
acaccagagaaaugagauu

SEQ ID NO: 2557274 - RNA, 19 nt, Homo sapiens
  misc_RNA (1)...(19): siRNA sense strand
gagcaugguacugaggaaa

SEQ ID NO: 2557275 - RNA, 19 nt, Homo sapiens
  misc_RNA (1)...(19): siRNA sense strand
cagaauuuguacagggaug

SEQ ID NO: 2557276 - RNA, 19 nt, Homo sapiens
  misc_RNA (1)...(19): siRNA sense strand
gcaaauaugaagagugcag

SEQ ID NO: 2557277 - RNA, 19 nt, Homo sapiens
  misc_RNA (1)...(19): siRNA sense strand
gaugaguguaaguugcaaa

SEQ ID NO: 2557278 - RNA, 19 nt, Homo sapiens
  misc_RNA (1)...(19): siRNA sense strand
gugugaaaaguguggcaaa

SEQ ID NO: 2557279 - RNA, 19 nt, Homo sapiens
  misc_RNA (1)...(19): siRNA sense strand
uuggagaacuacagaaacu

SEQ ID NO: 2557280 - RNA, 19 nt, Homo sapiens
  misc_RNA (1)...(19): siRNA sense strand
ggaaaguuuagaugagugu

SEQ ID NO: 2557281 - RNA, 19 nt, Homo sapiens
  misc_RNA (1)...(19): siRNA sense strand
ucaacuacccauagcaaaa

SEQ ID NO: 2557282 - RNA, 19 nt, Homo sapiens
  misc_RNA (1)...(19): siRNA sense strand
augugacgaaugugggaaa

SEQ ID NO: 2557283 - RNA, 19 nt, Homo sapiens
  misc_RNA (1)...(19): siRNA sense strand
gaugugaagaauuuggcaa

SEQ ID NO: 2557284 - RNA, 19 nt, Homo sapiens
  misc_RNA (1)...(19): siRNA sense strand
ccucacuaagcauaagaaa

SEQ ID NO: 2557285 - RNA, 19 nt, Homo sapiens
  misc_RNA (1)...(19): siRNA sense strand
ugucaagaauguggcaaau

SEQ ID NO: 2557286 - RNA, 19 nt, Homo sapiens
  misc_RNA (1)...(19): siRNA sense strand
aaauuguggccuugauaau

SEQ ID NO: 2557287 - RNA, 19 nt, Homo sapiens
  misc_RNA (1)...(19): siRNA sense strand
ucaauguuucuguggacaa

SEQ ID NO: 2557288 - RNA, 19 nt, Homo sapiens
  misc_RNA (1)...(19): siRNA sense strand
auauggaaauuguggccuu

SEQ ID NO: 2557289 - RNA, 19 nt, Homo sapiens
  misc_RNA (1)...(19): siRNA sense strand
cugagaggauauggaaauu

SEQ ID NO: 2557290 - RNA, 19 nt, Homo sapiens
  misc_RNA (1)...(19): siRNA sense strand
aaccaauguucaucaacua

SEQ ID NO: 2557291 - RNA, 19 nt, Homo sapiens
  misc_RNA (1)...(19): siRNA sense strand
cugcaaauaugaagagugc

SEQ ID NO: 2557292 - RNA, 19 nt, Homo sapiens
  misc_RNA (1)...(19): siRNA sense strand
ccuccaaccuuauuguaca

SEQ ID NO: 2557293 - RNA, 19 nt, Homo sapiens
  misc_RNA (1)...(19): siRNA sense strand
aaacccuacaagugugaaa

SEQ ID NO: 2557294 - RNA, 19 nt, Homo sapiens
  misc_RNA (1)...(19): siRNA sense strand
ggauuacaggugugaacca

SEQ ID NO: 2557295 - RNA, 19 nt, Homo sapiens
  misc_RNA (1)...(19): siRNA sense strand
aauuuaugccggaggggaa

SEQ ID NO: 2557296 - RNA, 19 nt, Homo sapiens
  misc_RNA (1)...(19): siRNA sense strand
gugaggaaugugacagcau

SEQ ID NO: 2557297 - RNA, 19 nt, Homo sapiens
  misc_RNA (1)...(19): siRNA sense strand
gaagaaugugggaaggucu

SEQ ID NO: 2557298 - RNA, 19 nt, Homo sapiens
  misc_RNA (1)...(19): siRNA sense strand
cagacauuaccaaacauaa

SEQ ID NO: 2557299 - RNA, 19 nt, Homo sapiens
  misc_RNA (1)...(19): siRNA sense strand
cgaaaagagcccuggaaug

SEQ ID NO: 2557300 - RNA, 19 nt, Homo sapiens
  misc_RNA (1)...(19): siRNA sense strand
cauuacagaugugaagaau

SEQ ID NO: 2557301 - RNA, 19 nt, Homo sapiens
  misc_RNA (1)...(19): siRNA sense strand
augaacaggcagagaaaca

SEQ ID NO: 2557302 - RNA, 19 nt, Homo sapiens
  misc_RNA (1)...(19): siRNA sense strand
auuagaaucaagagaggaa

SEQ ID NO: 2557303 - RNA, 19 nt, Homo sapiens
  misc_RNA (1)...(19): siRNA sense strand
gagccugagaagauggaau

SEQ ID NO: 2557304 - RNA, 19 nt, Homo sapiens
  misc_RNA (1)...(19): siRNA sense strand
agaacuguguuguggcaga

SEQ ID NO: 2557305 - RNA, 19 nt, Homo sapiens
  misc_RNA (1)...(19): siRNA sense strand
ucucaguaagugugcggaa

SEQ ID NO: 2557306 - RNA, 19 nt, Homo sapiens
  misc_RNA (1)...(19): siRNA sense strand
aaucaagagaggaauacau

SEQ ID NO: 2557307 - RNA, 19 nt, Homo sapiens
  misc_RNA (1)...(19): siRNA sense strand
cccagaacgccuucagaau

SEQ ID NO: 2557308 - RNA, 19 nt, Homo sapiens
  misc_RNA (1)...(19): siRNA sense strand
agguuaaacaugaggacca

SEQ ID NO: 2557309 - RNA, 19 nt, Homo sapiens
  misc_RNA (1)...(19): siRNA sense strand
aaauaauggaagucccuaa

SEQ ID NO: 2557310 - RNA, 19 nt, Homo sapiens
  misc_RNA (1)...(19): siRNA sense strand
gaggaaucuauuacagaau

SEQ ID NO: 2557311 - RNA, 19 nt, Homo sapiens
  misc_RNA (1)...(19): siRNA sense strand
agcagaaaguugagaaggu

SEQ ID NO: 2557312 - RNA, 19 nt, Homo sapiens
  misc_RNA (1)...(19): siRNA sense strand
agaucuacccugugacuca

SEQ ID NO: 2557313 - RNA, 19 nt, Homo sapiens
  misc_RNA (1)...(19): siRNA sense strand
auggaagucccuaaagcua

SEQ ID NO: 2557314 - RNA, 19 nt, Homo sapiens
  misc_RNA (1)...(19): siRNA sense strand
cagaagaacuguaugggua

SEQ ID NO: 2557315 - RNA, 19 nt, Homo sapiens
  misc_RNA (1)...(19): siRNA sense strand
agauaaaacgagagguuaa

SEQ ID NO: 2557316 - RNA, 19 nt, Homo sapiens
  misc_RNA (1)...(19): siRNA sense strand
ccaaagaggccauggagca

SEQ ID NO: 2557317 - RNA, 19 nt, Homo sapiens
  misc_RNA (1)...(19): siRNA sense strand
gugaaguauuugaggccau

SEQ ID NO: 2557318 - RNA, 19 nt, Homo sapiens
  misc_RNA (1)...(19): siRNA sense strand
gggucuacgccgaggugaa

SEQ ID NO: 2557319 - RNA, 19 nt, Homo sapiens
  misc_RNA (1)...(19): siRNA sense strand
caacagagacugacugcca

SEQ ID NO: 2557320 - RNA, 19 nt, Homo sapiens
  misc_RNA (1)...(19): siRNA sense strand
ucaacgauauccugggaca

SEQ ID NO: 2557321 - RNA, 19 nt, Homo sapiens
  misc_RNA (1)...(19): siRNA sense strand
uccugaagccagugaagaa

SEQ ID NO: 2557322 - RNA, 19 nt, Homo sapiens
  misc_RNA (1)...(19): siRNA sense strand
acauagaccuagauccaca

SEQ ID NO: 2557323 - RNA, 19 nt, Homo sapiens
  misc_RNA (1)...(19): siRNA sense strand
ccuucgugguggaacaaau

SEQ ID NO: 2557324 - RNA, 19 nt, Homo sapiens
  misc_RNA (1)...(19): siRNA sense strand
ucaccaacaaugagagagu

SEQ ID NO: 2557325 - RNA, 19 nt, Homo sapiens
  misc_RNA (1)...(19): siRNA sense strand
ggagaaccuucguggugga

SEQ ID NO: 2557326 - RNA, 19 nt, Homo sapiens
  misc_RNA (1)...(19): siRNA sense strand
caugaucuuucgaagggaa

SEQ ID NO: 2557327 - RNA, 19 nt, Homo sapiens
  misc_RNA (1)...(19): siRNA sense strand
ccuagaucuucuggacaaa

SEQ ID NO: 2557328 - RNA, 19 nt, Homo sapiens
  misc_RNA (1)...(19): siRNA sense strand
acuucuacccuguggugaa

SEQ ID NO: 2557329 - RNA, 19 nt, Homo sapiens
  misc_RNA (1)...(19): siRNA sense strand
aaaacuuggucggggaaaa

SEQ ID NO: 2557330 - RNA, 19 nt, Homo sapiens
  misc_RNA (1)...(19): siRNA sense strand
caacgauauccugggacaa

SEQ ID NO: 2557331 - RNA, 19 nt, Homo sapiens
  misc_RNA (1)...(19): siRNA sense strand
acagagacugacugccaaa

SEQ ID NO: 2557332 - RNA, 19 nt, Homo sapiens
  misc_RNA (1)...(19): siRNA sense strand
ggguggaggaggaggagaa

SEQ ID NO: 2557333 - RNA, 19 nt, Homo sapiens
  misc_RNA (1)...(19): siRNA sense strand
ugaacaagacuuagggaau

SEQ ID NO: 2557334 - RNA, 19 nt, Homo sapiens
  misc_RNA (1)...(19): siRNA sense strand
ugaacaagcaacugagaau

SEQ ID NO: 2557335 - RNA, 19 nt, Homo sapiens
  misc_RNA (1)...(19): siRNA sense strand
cuguagaagauguucgaaa

SEQ ID NO: 2557336 - RNA, 19 nt, Homo sapiens
  misc_RNA (1)...(19): siRNA sense strand
caccaaaaccacagaguaa

SEQ ID NO: 2557337 - RNA, 19 nt, Homo sapiens
  misc_RNA (1)...(19): siRNA sense strand
agaaacaggaugagacaca

SEQ ID NO: 2557338 - RNA, 19 nt, Homo sapiens
  misc_RNA (1)...(19): siRNA sense strand
agcugaaaguuguggaaga

SEQ ID NO: 2557339 - RNA, 19 nt, Homo sapiens
  misc_RNA (1)...(19): siRNA sense strand
agguaaaggaccacucaaa

SEQ ID NO: 2557340 - RNA, 19 nt, Homo sapiens
  misc_RNA (1)...(19): siRNA sense strand
agccauuggugaagagaga

SEQ ID NO: 2557341 - RNA, 19 nt, Homo sapiens
  misc_RNA (1)...(19): siRNA sense strand
agagagagaaacaggauga

SEQ ID NO: 2557342 - RNA, 19 nt, Homo sapiens
  misc_RNA (1)...(19): siRNA sense strand
gaggaggagaacuggcaua

SEQ ID NO: 2557343 - RNA, 19 nt, Homo sapiens
  misc_RNA (1)...(19): siRNA sense strand
agaauggaaaugagaaaga

SEQ ID NO: 2557344 - RNA, 19 nt, Homo sapiens
  misc_RNA (1)...(19): siRNA sense strand
acuuugagacagaggauuu

SEQ ID NO: 2557345 - RNA, 19 nt, Homo sapiens
  misc_RNA (1)...(19): siRNA sense strand
gcagcaaggucaaggccga

SEQ ID NO: 2557346 - RNA, 19 nt, Homo sapiens
  misc_RNA (1)...(19): siRNA sense strand
uggugaagagagagaaaca

SEQ ID NO: 2557347 - RNA, 19 nt, Homo sapiens
  misc_RNA (1)...(19): siRNA sense strand
agagaaacaggaugagaca

SEQ ID NO: 2557348 - RNA, 19 nt, Homo sapiens
  misc_RNA (1)...(19): siRNA sense strand
aggaugagacacagaccaa

SEQ ID NO: 2557349 - RNA, 19 nt, Homo sapiens
  misc_RNA (1)...(19): siRNA sense strand
ccuaaaaccugaaguggau

SEQ ID NO: 2557350 - RNA, 19 nt, Homo sapiens
  misc_RNA (1)...(19): siRNA sense strand
acuuagggaaucaguauaa

SEQ ID NO: 2557351 - RNA, 19 nt, Homo sapiens
  misc_RNA (1)...(19): siRNA sense strand
ccauuggugaagagagaga

SEQ ID NO: 2557352 - RNA, 19 nt, Homo sapiens
  misc_RNA (1)...(19): siRNA sense strand
gcgaauuguggcagagugu

SEQ ID NO: 2557353 - RNA, 19 nt, Homo sapiens
  misc_RNA (1)...(19): siRNA sense strand
acguaaagaaagaagugau

SEQ ID NO: 2557354 - RNA, 19 nt, Homo sapiens
  misc_RNA (1)...(19): siRNA sense strand
gauaaaaugaccaagaaga

SEQ ID NO: 2557355 - RNA, 19 nt, Homo sapiens
  misc_RNA (1)...(19): siRNA sense strand
cugaaguggauaagcugaa

SEQ ID NO: 2557356 - RNA, 19 nt, Homo sapiens
  misc_RNA (1)...(19): siRNA sense strand
gcaaagcugucauggacca

SEQ ID NO: 2557357 - RNA, 19 nt, Homo sapiens
  misc_RNA (1)...(19): siRNA sense strand
caaauaaugaagaaggugu

SEQ ID NO: 2557358 - RNA, 19 nt, Homo sapiens
  misc_RNA (1)...(19): siRNA sense strand
caagaaaauugcugaggca

SEQ ID NO: 2557359 - RNA, 19 nt, Homo sapiens
  misc_RNA (1)...(19): siRNA sense strand
uggaaaugagaaagaaguu

SEQ ID NO: 2557360 - RNA, 19 nt, Homo sapiens
  misc_RNA (1)...(19): siRNA sense strand
ucuaauaagaagagagguc

SEQ ID NO: 2557361 - RNA, 19 nt, Homo sapiens
  misc_RNA (1)...(19): siRNA sense strand
ccuauaaggccaacaggga

SEQ ID NO: 2557362 - RNA, 19 nt, Homo sapiens
  misc_RNA (1)...(19): siRNA sense strand
gagaaugaguuuaucgaug

SEQ ID NO: 2557363 - RNA, 19 nt, Homo sapiens
  misc_RNA (1)...(19): siRNA sense strand
aggccgaggugcagaaucu

SEQ ID NO: 2557364 - RNA, 19 nt, Homo sapiens
  misc_RNA (1)...(19): siRNA sense strand
uggaugagaaugaguuuau

SEQ ID NO: 2557365 - RNA, 19 nt, Homo sapiens
  misc_RNA (1)...(19): siRNA sense strand
gugcagacagugaaggcau

SEQ ID NO: 2557366 - RNA, 19 nt, Homo sapiens
  misc_RNA (1)...(19): siRNA sense strand
agacuuagggaaucaguau

SEQ ID NO: 2557367 - RNA, 19 nt, Homo sapiens
  misc_RNA (1)...(19): siRNA sense strand
uaaagaaagaagugaugca

SEQ ID NO: 2557368 - RNA, 19 nt, Homo sapiens
  misc_RNA (1)...(19): siRNA sense strand
ugauugaagcugcaaagaa

SEQ ID NO: 2557369 - RNA, 19 nt, Homo sapiens
  misc_RNA (1)...(19): siRNA sense strand
aguagaagcagccguggaa

SEQ ID NO: 2557370 - RNA, 19 nt, Homo sapiens
  misc_RNA (1)...(19): siRNA sense strand
auuggugaagagagagaaa

SEQ ID NO: 2557371 - RNA, 19 nt, Homo sapiens
  misc_RNA (1)...(19): siRNA sense strand
gaaugcuggcaaugaacaa

SEQ ID NO: 2557372 - RNA, 19 nt, Homo sapiens
  misc_RNA (1)...(19): siRNA sense strand
augaacaagacuuagggaa

SEQ ID NO: 2557373 - RNA, 19 nt, Homo sapiens
  misc_RNA (1)...(19): siRNA sense strand
agaugaaggcaccagagaa

SEQ ID NO: 2557374 - RNA, 19 nt, Homo sapiens
  misc_RNA (1)...(19): siRNA sense strand
gaaucaguauaaagcccua

SEQ ID NO: 2557375 - RNA, 19 nt, Homo sapiens
  misc_RNA (1)...(19): siRNA sense strand
aggucaaggccgaggugca

SEQ ID NO: 2557376 - RNA, 19 nt, Homo sapiens
  misc_RNA (1)...(19): siRNA sense strand
gaggagcgcuuuaggccuu

SEQ ID NO: 2557377 - RNA, 19 nt, Homo sapiens
  misc_RNA (1)...(19): siRNA sense strand
cguaaagaaagaagugaug

SEQ ID NO: 2557378 - RNA, 19 nt, Homo sapiens
  misc_RNA (1)...(19): siRNA sense strand
cuggaggagcgucuggaaa

SEQ ID NO: 2557379 - RNA, 19 nt, Homo sapiens
  misc_RNA (1)...(19): siRNA sense strand
accaaaagucacaggguau

SEQ ID NO: 2557380 - RNA, 19 nt, Homo sapiens
  misc_RNA (1)...(19): siRNA sense strand
uuucggaguacaugggcaa

SEQ ID NO: 2557381 - RNA, 19 nt, Homo sapiens
  misc_RNA (1)...(19): siRNA sense strand
cugcaaagaauggaaauga

SEQ ID NO: 2557382 - RNA, 19 nt, Homo sapiens
  misc_RNA (1)...(19): siRNA sense strand
cgacaguggcaaugacauc

SEQ ID NO: 2557383 - RNA, 19 nt, Homo sapiens
  misc_RNA (1)...(19): siRNA sense strand
gguaaaggaccacucaaaa

SEQ ID NO: 2557384 - RNA, 19 nt, Homo sapiens
  misc_RNA (1)...(19): siRNA sense strand
aaugcuggacguaaagaaa

SEQ ID NO: 2557385 - RNA, 19 nt, Homo sapiens
  misc_RNA (1)...(19): siRNA sense strand
accaagaagaccagggacu

SEQ ID NO: 2557386 - RNA, 19 nt, Homo sapiens
  misc_RNA (1)...(19): siRNA sense strand
ccaagaagaccagggacuu

SEQ ID NO: 2557387 - RNA, 19 nt, Homo sapiens
  misc_RNA (1)...(19): siRNA sense strand
acaucauugugcuggccaa

SEQ ID NO: 2557388 - RNA, 19 nt, Homo sapiens
  misc_RNA (1)...(19): siRNA sense strand
ccaaauaccaaaagucaca

SEQ ID NO: 2557389 - RNA, 19 nt, Homo sapiens
  misc_RNA (1)...(19): siRNA sense strand
agaccaaguacaacgccaa

SEQ ID NO: 2557390 - RNA, 19 nt, Homo sapiens
  misc_RNA (1)...(19): siRNA sense strand
uguccaaugccgaaugcaa

SEQ ID NO: 2557391 - RNA, 19 nt, Homo sapiens
  misc_RNA (1)...(19): siRNA sense strand
ggggcaagaccaaguacaa

SEQ ID NO: 2557392 - RNA, 19 nt, Homo sapiens
  misc_RNA (1)...(19): siRNA sense strand
caucaaacgcagagcccuu

SEQ ID NO: 2557393 - RNA, 19 nt, Homo sapiens
  misc_RNA (1)...(19): siRNA sense strand
augcaaaggcagacccaaa

SEQ ID NO: 2557394 - RNA, 19 nt, Homo sapiens
  misc_RNA (1)...(19): siRNA sense strand
caccauucacugugggaaa

SEQ ID NO: 2557395 - RNA, 19 nt, Homo sapiens
  misc_RNA (1)...(19): siRNA sense strand
gaggacaacuggagggauc

SEQ ID NO: 2557396 - RNA, 19 nt, Homo sapiens
  misc_RNA (1)...(19): siRNA sense strand
gcaguaaaccgaugggcga

SEQ ID NO: 2557397 - RNA, 19 nt, Homo sapiens
  misc_RNA (1)...(19): siRNA sense strand
aggaggaggaggaggagga

SEQ ID NO: 2557398 - RNA, 19 nt, Homo sapiens
  misc_RNA (1)...(19): siRNA sense strand
cgaagaggguggagguggu

SEQ ID NO: 2557399 - RNA, 19 nt, Homo sapiens
  misc_RNA (1)...(19): siRNA sense strand
ugacugauuuugaggggaa

SEQ ID NO: 2557400 - RNA, 19 nt, Homo sapiens
  misc_RNA (1)...(19): siRNA sense strand
acucauucgccauggagaa

SEQ ID NO: 2557401 - RNA, 19 nt, Homo sapiens
  misc_RNA (1)...(19): siRNA sense strand
gaacagaaacggaggucag

SEQ ID NO: 2557402 - RNA, 19 nt, Homo sapiens
  misc_RNA (1)...(19): siRNA sense strand
acaccgaggaggaggagga

SEQ ID NO: 2557403 - RNA, 19 nt, Homo sapiens
  misc_RNA (1)...(19): siRNA sense strand
acgagagaguuguggcagu

SEQ ID NO: 2557404 - RNA, 19 nt, Homo sapiens
  misc_RNA (1)...(19): siRNA sense strand
gugugggauuugcaguaaa

SEQ ID NO: 2557405 - RNA, 19 nt, Homo sapiens
  misc_RNA (1)...(19): siRNA sense strand
cagcccaggaggaugcaaa

SEQ ID NO: 2557406 - RNA, 19 nt, Homo sapiens
  misc_RNA (1)...(19): siRNA sense strand
aggaggaugcaaaggcaga

SEQ ID NO: 2557407 - RNA, 19 nt, Homo sapiens
  misc_RNA (1)...(19): siRNA sense strand
ccagcggaucugagcaauu

SEQ ID NO: 2557408 - RNA, 19 nt, Homo sapiens
  misc_RNA (1)...(19): siRNA sense strand
ucaaacagcucaagaggug

SEQ ID NO: 2557409 - RNA, 19 nt, Homo sapiens
  misc_RNA (1)...(19): siRNA sense strand
ucgugaaggaguacgugaa

SEQ ID NO: 2557410 - RNA, 19 nt, Homo sapiens
  misc_RNA (1)...(19): siRNA sense strand
gugggaaaugcuaugagaa

SEQ ID NO: 2557411 - RNA, 19 nt, Homo sapiens
  misc_RNA (1)...(19): siRNA sense strand
cccuagaacaucuugguau

SEQ ID NO: 2557412 - RNA, 19 nt, Homo sapiens
  misc_RNA (1)...(19): siRNA sense strand
acugaaagguucuggagga

SEQ ID NO: 2557413 - RNA, 19 nt, Homo sapiens
  misc_RNA (1)...(19): siRNA sense strand
gaaagguucuggaggagga

SEQ ID NO: 2557414 - RNA, 19 nt, Homo sapiens
  misc_RNA (1)...(19): siRNA sense strand
acagaaacagauucgacaa

SEQ ID NO: 2557415 - RNA, 19 nt, Homo sapiens
  misc_RNA (1)...(19): siRNA sense strand
gagccuuggaagaaagcuu

SEQ ID NO: 2557416 - RNA, 19 nt, Homo sapiens
  misc_RNA (1)...(19): siRNA sense strand
gccuacugauggagcaaga

SEQ ID NO: 2557417 - RNA, 19 nt, Homo sapiens
  misc_RNA (1)...(19): siRNA sense strand
aggaggagucccaggagga

SEQ ID NO: 2557418 - RNA, 19 nt, Homo sapiens
  misc_RNA (1)...(19): siRNA sense strand
gcagaggcauggagccagu

SEQ ID NO: 2557419 - RNA, 19 nt, Homo sapiens
  misc_RNA (1)...(19): siRNA sense strand
guauagaggccgaagacca

SEQ ID NO: 2557420 - RNA, 19 nt, Homo sapiens
  misc_RNA (1)...(19): siRNA sense strand
cugcagcucaucagggaaa

SEQ ID NO: 2557421 - RNA, 19 nt, Homo sapiens
  misc_RNA (1)...(19): siRNA sense strand
agagaguugaguugguaua

SEQ ID NO: 2557422 - RNA, 19 nt, Homo sapiens
  misc_RNA (1)...(19): siRNA sense strand
ucaaaaucggcgugcaaaa

SEQ ID NO: 2557423 - RNA, 19 nt, Homo sapiens
  misc_RNA (1)...(19): siRNA sense strand
ccuuuucaauugagagaau

SEQ ID NO: 2557424 - RNA, 19 nt, Homo sapiens
  misc_RNA (1)...(19): siRNA sense strand
aucuagaggaagacagaau

SEQ ID NO: 2557425 - RNA, 19 nt, Homo sapiens
  misc_RNA (1)...(19): siRNA sense strand
cggaguacucggagaucaa

SEQ ID NO: 2557426 - RNA, 19 nt, Homo sapiens
  misc_RNA (1)...(19): siRNA sense strand
gaagcaagcagcugggaga

SEQ ID NO: 2557427 - RNA, 19 nt, Homo sapiens
  misc_RNA (1)...(19): siRNA sense strand
gagugaagccagagaccca

SEQ ID NO: 2557428 - RNA, 19 nt, Homo sapiens
  misc_RNA (1)...(19): siRNA sense strand
gagaugaagucgagggagc

SEQ ID NO: 2557429 - RNA, 19 nt, Homo sapiens
  misc_RNA (1)...(19): siRNA sense strand
acagaagagugaagccaga

SEQ ID NO: 2557430 - RNA, 19 nt, Homo sapiens
  misc_RNA (1)...(19): siRNA sense strand
cccuagagauccugcaaaa

SEQ ID NO: 2557431 - RNA, 19 nt, Homo sapiens
  misc_RNA (1)...(19): siRNA sense strand
aggagaagccaguguacga

SEQ ID NO: 2557432 - RNA, 19 nt, Homo sapiens
  misc_RNA (1)...(19): siRNA sense strand
agaaaauggaugaugaaga

SEQ ID NO: 2557433 - RNA, 19 nt, Homo sapiens
  misc_RNA (1)...(19): siRNA sense strand
agagaggaagggauguaaa

SEQ ID NO: 2557434 - RNA, 19 nt, Homo sapiens
  misc_RNA (1)...(19): siRNA sense strand
cgagggagccuaaggacca

SEQ ID NO: 2557435 - RNA, 19 nt, Homo sapiens
  misc_RNA (1)...(19): siRNA sense strand
ggaagaagcccuggccaga

SEQ ID NO: 2557436 - RNA, 19 nt, Homo sapiens
  misc_RNA (1)...(19): siRNA sense strand
aagaagaacugcucccuga

SEQ ID NO: 2557437 - RNA, 19 nt, Homo sapiens
  misc_RNA (1)...(19): siRNA sense strand
gaugaaacgccaaggagcu

SEQ ID NO: 2557438 - RNA, 19 nt, Homo sapiens
  misc_RNA (1)...(19): siRNA sense strand
gcucaggugaccacggaga

SEQ ID NO: 2557439 - RNA, 19 nt, Homo sapiens
  misc_RNA (1)...(19): siRNA sense strand
caggaacggcauagcccua

SEQ ID NO: 2557440 - RNA, 19 nt, Homo sapiens
  misc_RNA (1)...(19): siRNA sense strand
ucgaguaaggucugcagaa

SEQ ID NO: 2557441 - RNA, 19 nt, Homo sapiens
  misc_RNA (1)...(19): siRNA sense strand
cauacuacgcugagguugu

SEQ ID NO: 2557442 - RNA, 19 nt, Homo sapiens
  misc_RNA (1)...(19): siRNA sense strand
agagaaaauggaugaugaa

SEQ ID NO: 2557443 - RNA, 19 nt, Homo sapiens
  misc_RNA (1)...(19): siRNA sense strand
ggaucaacauagauggcaa

SEQ ID NO: 2557444 - RNA, 19 nt, Homo sapiens
  misc_RNA (1)...(19): siRNA sense strand
aggagaaagcagaggagau

SEQ ID NO: 2557445 - RNA, 19 nt, Homo sapiens
  misc_RNA (1)...(19): siRNA sense strand
gaacaggagagucggguga

SEQ ID NO: 2557446 - RNA, 19 nt, Homo sapiens
  misc_RNA (1)...(19): siRNA sense strand
guccaaagucaaggagaaa

SEQ ID NO: 2557447 - RNA, 19 nt, Homo sapiens
  misc_RNA (1)...(19): siRNA sense strand
ccugggagggauugugaaa

SEQ ID NO: 2557448 - RNA, 19 nt, Homo sapiens
  misc_RNA (1)...(19): siRNA sense strand
ccacagaaaaggaggucau

SEQ ID NO: 2557449 - RNA, 19 nt, Homo sapiens
  misc_RNA (1)...(19): siRNA sense strand
cagccaacacuguggacau

SEQ ID NO: 2557450 - RNA, 19 nt, Homo sapiens
  misc_RNA (1)...(19): siRNA sense strand
ggccaaagcuauugacccu

SEQ ID NO: 2557451 - RNA, 19 nt, Homo sapiens
  misc_RNA (1)...(19): siRNA sense strand
auaaggacaugcaggccaa

SEQ ID NO: 2557452 - RNA, 19 nt, Homo sapiens
  misc_RNA (1)...(19): siRNA sense strand
caggaaacaaccaagaaaa

SEQ ID NO: 2557453 - RNA, 19 nt, Homo sapiens
  misc_RNA (1)...(19): siRNA sense strand
agaaagaauucaguggaga

SEQ ID NO: 2557454 - RNA, 19 nt, Homo sapiens
  misc_RNA (1)...(19): siRNA sense strand
gagacagcuggaagaggaa

SEQ ID NO: 2557455 - RNA, 19 nt, Homo sapiens
  misc_RNA (1)...(19): siRNA sense strand
aauccaagagaguagcaaa

SEQ ID NO: 2557456 - RNA, 19 nt, Homo sapiens
  misc_RNA (1)...(19): siRNA sense strand
ugagacagcuggaagagga

SEQ ID NO: 2557457 - RNA, 19 nt, Homo sapiens
  misc_RNA (1)...(19): siRNA sense strand
ggaggaugcuggaacagga

SEQ ID NO: 2557458 - RNA, 19 nt, Homo sapiens
  misc_RNA (1)...(19): siRNA sense strand
agccaaggcccgagaagca

SEQ ID NO: 2557459 - RNA, 19 nt, Homo sapiens
  misc_RNA (1)...(19): siRNA sense strand
cugggaagccugcgaggau

SEQ ID NO: 2557460 - RNA, 19 nt, Homo sapiens
  misc_RNA (1)...(19): siRNA sense strand
ucuccgaucuauaaggaca

SEQ ID NO: 2557461 - RNA, 19 nt, Homo sapiens
  misc_RNA (1)...(19): siRNA sense strand
uggaaaucauugaaggaau

SEQ ID NO: 2557462 - RNA, 19 nt, Homo sapiens
  misc_RNA (1)...(19): siRNA sense strand
ugaauaaugaagagcacaa

SEQ ID NO: 2557463 - RNA, 19 nt, Homo sapiens
  misc_RNA (1)...(19): siRNA sense strand
ggugaugagggaaggcaua

SEQ ID NO: 2557464 - RNA, 19 nt, Homo sapiens
  misc_RNA (1)...(19): siRNA sense strand
cagcaaagaccuuacgaga

SEQ ID NO: 2557465 - RNA, 19 nt, Homo sapiens
  misc_RNA (1)...(19): siRNA sense strand
auacaauaguacuggcauu

SEQ ID NO: 2557466 - RNA, 19 nt, Homo sapiens
  misc_RNA (1)...(19): siRNA sense strand
uugcaaauaaggagccaua

SEQ ID NO: 2557467 - RNA, 19 nt, Homo sapiens
  misc_RNA (1)...(19): siRNA sense strand
guguagaagaggacgugaa

SEQ ID NO: 2557468 - RNA, 19 nt, Homo sapiens
  misc_RNA (1)...(19): siRNA sense strand
augcaguugugaagagaau

SEQ ID NO: 2557469 - RNA, 19 nt, Homo sapiens
  misc_RNA (1)...(19): siRNA sense strand
ccuuuaagauguggagcaa

SEQ ID NO: 2557470 - RNA, 19 nt, Homo sapiens
  misc_RNA (1)...(19): siRNA sense strand
aguacauggagaagggcaa

SEQ ID NO: 2557471 - RNA, 19 nt, Homo sapiens
  misc_RNA (1)...(19): siRNA sense strand
ccuucaagccggucaaauu

SEQ ID NO: 2557472 - RNA, 19 nt, Homo sapiens
  misc_RNA (1)...(19): siRNA sense strand
agaccaacuaucuaggaaa

SEQ ID NO: 2557473 - RNA, 19 nt, Homo sapiens
  misc_RNA (1)...(19): siRNA sense strand
caguugauaaugugcauaa

SEQ ID NO: 2557474 - RNA, 19 nt, Homo sapiens
  misc_RNA (1)...(19): siRNA sense strand
gggcgucaucauagaggaa

SEQ ID NO: 2557475 - RNA, 19 nt, Homo sapiens
  misc_RNA (1)...(19): siRNA sense strand
uucagaauacagagggaaa

SEQ ID NO: 2557476 - RNA, 19 nt, Homo sapiens
  misc_RNA (1)...(19): siRNA sense strand
ucauagaggaagggaagua

SEQ ID NO: 2557477 - RNA, 19 nt, Homo sapiens
  misc_RNA (1)...(19): siRNA sense strand
ugauggaguacauggagaa

SEQ ID NO: 2557478 - RNA, 19 nt, Homo sapiens
  misc_RNA (1)...(19): siRNA sense strand
caucauagaggaagggaag

SEQ ID NO: 2557479 - RNA, 19 nt, Homo sapiens
  misc_RNA (1)...(19): siRNA sense strand
agcccagccugcagaguaa

SEQ ID NO: 2557480 - RNA, 19 nt, Homo sapiens
  misc_RNA (1)...(19): siRNA sense strand
aagaaaguguagaagagga

SEQ ID NO: 2557481 - RNA, 19 nt, Homo sapiens
  misc_RNA (1)...(19): siRNA sense strand
gcacccacaagaagagaau

SEQ ID NO: 2557482 - RNA, 19 nt, Homo sapiens
  misc_RNA (1)...(19): siRNA sense strand
cugggaaagcacuggaaaa

SEQ ID NO: 2557483 - RNA, 19 nt, Homo sapiens
  misc_RNA (1)...(19): siRNA sense strand
cugaaagccgagaugagua

SEQ ID NO: 2557484 - RNA, 19 nt, Homo sapiens
  misc_RNA (1)...(19): siRNA sense strand
ggaaggauaauuuuggaaa

SEQ ID NO: 2557485 - RNA, 19 nt, Homo sapiens
  misc_RNA (1)...(19): siRNA sense strand
accacuagucugacggaua

SEQ ID NO: 2557486 - RNA, 19 nt, Homo sapiens
  misc_RNA (1)...(19): siRNA sense strand
augaacagacugagacaca

SEQ ID NO: 2557487 - RNA, 19 nt, Homo sapiens
  misc_RNA (1)...(19): siRNA sense strand
gugauggaguacauggaga

SEQ ID NO: 2557488 - RNA, 19 nt, Homo sapiens
  misc_RNA (1)...(19): siRNA sense strand
ggucaaauucagccacaga

SEQ ID NO: 2557489 - RNA, 19 nt, Homo sapiens
  misc_RNA (1)...(19): siRNA sense strand
aggccaauuccaagucaua

SEQ ID NO: 2557490 - RNA, 19 nt, Homo sapiens
  misc_RNA (1)...(19): siRNA sense strand
agcaaagaccuuacgagaa

SEQ ID NO: 2557491 - RNA, 19 nt, Homo sapiens
  misc_RNA (1)...(19): siRNA sense strand
ggaaguacucccuggugau

SEQ ID NO: 2557492 - RNA, 19 nt, Homo sapiens
  misc_RNA (1)...(19): siRNA sense strand
gugagcagcaguugauaau

SEQ ID NO: 2557493 - RNA, 19 nt, Homo sapiens
  misc_RNA (1)...(19): siRNA sense strand
ugugcuacuuacauggaaa

SEQ ID NO: 2557494 - RNA, 19 nt, Homo sapiens
  misc_RNA (1)...(19): siRNA sense strand
uuuaagauguggagcaaac

SEQ ID NO: 2557495 - RNA, 19 nt, Homo sapiens
  misc_RNA (1)...(19): siRNA sense strand
ucaucauagaggaagggaa

SEQ ID NO: 2557496 - RNA, 19 nt, Homo sapiens
  misc_RNA (1)...(19): siRNA sense strand
ggaaaaggcgugauacaca

SEQ ID NO: 2557497 - RNA, 19 nt, Homo sapiens
  misc_RNA (1)...(19): siRNA sense strand
cugaaugacgucaacgcaa

SEQ ID NO: 2557498 - RNA, 19 nt, Homo sapiens
  misc_RNA (1)...(19): siRNA sense strand
auaaggagccauaugaaaa

SEQ ID NO: 2557499 - RNA, 19 nt, Homo sapiens
  misc_RNA (1)...(19): siRNA sense strand
gccuacaauuauauggaga

SEQ ID NO: 2557500 - RNA, 19 nt, Homo sapiens
  misc_RNA (1)...(19): siRNA sense strand
gagggaaggcauaaaggga

SEQ ID NO: 2557501 - RNA, 19 nt, Homo sapiens
  misc_RNA (1)...(19): siRNA sense strand
acaaggaccugaagccuga

SEQ ID NO: 2557502 - RNA, 19 nt, Homo sapiens
  misc_RNA (1)...(19): siRNA sense strand
aagaaaagguuuaccagau

SEQ ID NO: 2557503 - RNA, 19 nt, Homo sapiens
  misc_RNA (1)...(19): siRNA sense strand
gaggcgaagaugaugaaca

SEQ ID NO: 2557504 - RNA, 19 nt, Homo sapiens
  misc_RNA (1)...(19): siRNA sense strand
cagcggaggcuuugggaag

SEQ ID NO: 2557505 - RNA, 19 nt, Homo sapiens
  misc_RNA (1)...(19): siRNA sense strand
cacaaugagcugagggaag

SEQ ID NO: 2557506 - RNA, 19 nt, Homo sapiens
  misc_RNA (1)...(19): siRNA sense strand
acccacaagaagagaauga

SEQ ID NO: 2557507 - RNA, 19 nt, Homo sapiens
  misc_RNA (1)...(19): siRNA sense strand
uggaggaggcgaagaugau

SEQ ID NO: 2557508 - RNA, 19 nt, Homo sapiens
  misc_RNA (1)...(19): siRNA sense strand
acgugaagaguuuaaagaa

SEQ ID NO: 2557509 - RNA, 19 nt, Homo sapiens
  misc_RNA (1)...(19): siRNA sense strand
gcauggacaggcagacgaa

SEQ ID NO: 2557510 - RNA, 19 nt, Homo sapiens
  misc_RNA (1)...(19): siRNA sense strand
uggugaagcuccugggcgu

SEQ ID NO: 2557511 - RNA, 19 nt, Homo sapiens
  misc_RNA (1)...(19): siRNA sense strand
cgagaugaguacuccgcuu

SEQ ID NO: 2557512 - RNA, 19 nt, Homo sapiens
  misc_RNA (1)...(19): siRNA sense strand
aagaugaaauccagugacu

SEQ ID NO: 2557513 - RNA, 19 nt, Homo sapiens
  misc_RNA (1)...(19): siRNA sense strand
ucccagugccugagaccaa

SEQ ID NO: 2557514 - RNA, 19 nt, Homo sapiens
  misc_RNA (1)...(19): siRNA sense strand
gcacaaugagcugagggaa

SEQ ID NO: 2557515 - RNA, 19 nt, Homo sapiens
  misc_RNA (1)...(19): siRNA sense strand
gggaaaaggccuaggauua

SEQ ID NO: 2557516 - RNA, 19 nt, Homo sapiens
  misc_RNA (1)...(19): siRNA sense strand
caguauaguuggaggauau

SEQ ID NO: 2557517 - RNA, 19 nt, Homo sapiens
  misc_RNA (1)...(19): siRNA sense strand
gagaagagggagaggguga

SEQ ID NO: 2557518 - RNA, 19 nt, Homo sapiens
  misc_RNA (1)...(19): siRNA sense strand
aggaaugagcagugagcaa

SEQ ID NO: 2557519 - RNA, 19 nt, Homo sapiens
  misc_RNA (1)...(19): siRNA sense strand
caguagagguauugcgaca

SEQ ID NO: 2557520 - RNA, 19 nt, Homo sapiens
  misc_RNA (1)...(19): siRNA sense strand
ggcaaaggauuaugggaau

SEQ ID NO: 2557521 - RNA, 19 nt, Homo sapiens
  misc_RNA (1)...(19): siRNA sense strand
caacaaucuggaagaguaa

SEQ ID NO: 2557522 - RNA, 19 nt, Homo sapiens
  misc_RNA (1)...(19): siRNA sense strand
cgucagggacugugagaau

SEQ ID NO: 2557523 - RNA, 19 nt, Homo sapiens
  misc_RNA (1)...(19): siRNA sense strand
ucguagagguggauggaau

SEQ ID NO: 2557524 - RNA, 19 nt, Homo sapiens
  misc_RNA (1)...(19): siRNA sense strand
agaaauagaagaugcacaa

SEQ ID NO: 2557525 - RNA, 19 nt, Homo sapiens
  misc_RNA (1)...(19): siRNA sense strand
uggaagaagucaucagaau

SEQ ID NO: 2557526 - RNA, 19 nt, Homo sapiens
  misc_RNA (1)...(19): siRNA sense strand
cuugaaaccuggagauaga

SEQ ID NO: 2557527 - RNA, 19 nt, Homo sapiens
  misc_RNA (1)...(19): siRNA sense strand
caucugaaauacagggauu

SEQ ID NO: 2557528 - RNA, 19 nt, Homo sapiens
  misc_RNA (1)...(19): siRNA sense strand
agaccaaauuauagcagua

SEQ ID NO: 2557529 - RNA, 19 nt, Homo sapiens
  misc_RNA (1)...(19): siRNA sense strand
cagaauuaccagagcgaga

SEQ ID NO: 2557530 - RNA, 19 nt, Homo sapiens
  misc_RNA (1)...(19): siRNA sense strand
gugaagaaagugagacauu

SEQ ID NO: 2557531 - RNA, 19 nt, Homo sapiens
  misc_RNA (1)...(19): siRNA sense strand
cgaaacaaccaucgagauu

SEQ ID NO: 2557532 - RNA, 19 nt, Homo sapiens
  misc_RNA (1)...(19): siRNA sense strand
acacuaaugaggagaggaa

SEQ ID NO: 2557533 - RNA, 19 nt, Homo sapiens
  misc_RNA (1)...(19): siRNA sense strand
uggcaaaggauuaugggaa

SEQ ID NO: 2557534 - RNA, 19 nt, Homo sapiens
  misc_RNA (1)...(19): siRNA sense strand
gaguaauggcacuggauau

SEQ ID NO: 2557535 - RNA, 19 nt, Homo sapiens
  misc_RNA (1)...(19): siRNA sense strand
cugcagaacauuuggaaga

SEQ ID NO: 2557536 - RNA, 19 nt, Homo sapiens
  misc_RNA (1)...(19): siRNA sense strand
caauguggaaauagaguua

SEQ ID NO: 2557537 - RNA, 19 nt, Homo sapiens
  misc_RNA (1)...(19): siRNA sense strand
acaaaauggcaaaggauua

SEQ ID NO: 2557538 - RNA, 19 nt, Homo sapiens
  misc_RNA (1)...(19): siRNA sense strand
cugcagaaagccaaagaua

SEQ ID NO: 2557539 - RNA, 19 nt, Homo sapiens
  misc_RNA (1)...(19): siRNA sense strand
ugcaaaugcuauugaacaa

SEQ ID NO: 2557540 - RNA, 19 nt, Homo sapiens
  misc_RNA (1)...(19): siRNA sense strand
gcauauagcaauuggaauc

SEQ ID NO: 2557541 - RNA, 19 nt, Homo sapiens
  misc_RNA (1)...(19): siRNA sense strand
guuggaagccauugacaaa

SEQ ID NO: 2557542 - RNA, 19 nt, Homo sapiens
  misc_RNA (1)...(19): siRNA sense strand
ucuuagaggugaauggaau

SEQ ID NO: 2557543 - RNA, 19 nt, Homo sapiens
  misc_RNA (1)...(19): siRNA sense strand
gcagaaagccaaagauacu

SEQ ID NO: 2557544 - RNA, 19 nt, Homo sapiens
  misc_RNA (1)...(19): siRNA sense strand
caacugaagaagaagggua

SEQ ID NO: 2557545 - RNA, 19 nt, Homo sapiens
  misc_RNA (1)...(19): siRNA sense strand
aaauggagcugcaggaaaa

SEQ ID NO: 2557546 - RNA, 19 nt, Homo sapiens
  misc_RNA (1)...(19): siRNA sense strand
uguccaaggauuaggaauu

SEQ ID NO: 2557547 - RNA, 19 nt, Homo sapiens
  misc_RNA (1)...(19): siRNA sense strand
uggcuacauuggagauaaa

SEQ ID NO: 2557548 - RNA, 19 nt, Homo sapiens
  misc_RNA (1)...(19): siRNA sense strand
cagcauuguugguggacga

SEQ ID NO: 2557549 - RNA, 19 nt, Homo sapiens
  misc_RNA (1)...(19): siRNA sense strand
acacagaucuagcaggaau

SEQ ID NO: 2557550 - RNA, 19 nt, Homo sapiens
  misc_RNA (1)...(19): siRNA sense strand
acagcaaagaugacaguaa

SEQ ID NO: 2557551 - RNA, 19 nt, Homo sapiens
  misc_RNA (1)...(19): siRNA sense strand
cgaaauacaagcagaucau

SEQ ID NO: 2557552 - RNA, 19 nt, Homo sapiens
  misc_RNA (1)...(19): siRNA sense strand
ucuaaagauuggugacaca

SEQ ID NO: 2557553 - RNA, 19 nt, Homo sapiens
  misc_RNA (1)...(19): siRNA sense strand
gagcaaaggacuugguuuu

SEQ ID NO: 2557554 - RNA, 19 nt, Homo sapiens
  misc_RNA (1)...(19): siRNA sense strand
gauuaagaacagucgaaau

SEQ ID NO: 2557555 - RNA, 19 nt, Homo sapiens
  misc_RNA (1)...(19): siRNA sense strand
aggugaagaaagugagaca

SEQ ID NO: 2557556 - RNA, 19 nt, Homo sapiens
  misc_RNA (1)...(19): siRNA sense strand
auaaagaugcagugaauca

SEQ ID NO: 2557557 - RNA, 19 nt, Homo sapiens
  misc_RNA (1)...(19): siRNA sense strand
ggaaguuggaagaaucaaa

SEQ ID NO: 2557558 - RNA, 19 nt, Homo sapiens
  misc_RNA (1)...(19): siRNA sense strand
gcaacuggugugauaguaa

SEQ ID NO: 2557559 - RNA, 19 nt, Homo sapiens
  misc_RNA (1)...(19): siRNA sense strand
gagcaaguuuagugagaac

SEQ ID NO: 2557560 - RNA, 19 nt, Homo sapiens
  misc_RNA (1)...(19): siRNA sense strand
auaaacagaccaaggaaau

SEQ ID NO: 2557561 - RNA, 19 nt, Homo sapiens
  misc_RNA (1)...(19): siRNA sense strand
cauacaaagaggaggaagu

SEQ ID NO: 2557562 - RNA, 19 nt, Homo sapiens
  misc_RNA (1)...(19): siRNA sense strand
gcucuugaucagacaauua

SEQ ID NO: 2557563 - RNA, 19 nt, Homo sapiens
  misc_RNA (1)...(19): siRNA sense strand
cuucaggaaucuuuguaaa

SEQ ID NO: 2557564 - RNA, 19 nt, Homo sapiens
  misc_RNA (1)...(19): siRNA sense strand
aguuauaucaagugcagaa

SEQ ID NO: 2557565 - RNA, 19 nt, Homo sapiens
  misc_RNA (1)...(19): siRNA sense strand
gagucuaccaucaguguaa

SEQ ID NO: 2557566 - RNA, 19 nt, Homo sapiens
  misc_RNA (1)...(19): siRNA sense strand
ucucauuggcccugacaua

SEQ ID NO: 2557567 - RNA, 19 nt, Homo sapiens
  misc_RNA (1)...(19): siRNA sense strand
gagaaaggucauagugguu

SEQ ID NO: 2557568 - RNA, 19 nt, Homo sapiens
  misc_RNA (1)...(19): siRNA sense strand
caaauggagcugcaggaaa

SEQ ID NO: 2557569 - RNA, 19 nt, Homo sapiens
  misc_RNA (1)...(19): siRNA sense strand
uguagcaaaugaagacaaa

SEQ ID NO: 2557570 - RNA, 19 nt, Homo sapiens
  misc_RNA (1)...(19): siRNA sense strand
cuuaugugauauugagcua

SEQ ID NO: 2557571 - RNA, 19 nt, Homo sapiens
  misc_RNA (1)...(19): siRNA sense strand
cagcaagcacugugauuau

SEQ ID NO: 2557572 - RNA, 19 nt, Homo sapiens
  misc_RNA (1)...(19): siRNA sense strand
ucagcaagcaguagaggua

SEQ ID NO: 2557573 - RNA, 19 nt, Homo sapiens
  misc_RNA (1)...(19): siRNA sense strand
gggacaacaaucuggaaga

SEQ ID NO: 2557574 - RNA, 19 nt, Homo sapiens
  misc_RNA (1)...(19): siRNA sense strand
agaaggagcagcauguaaa

SEQ ID NO: 2557575 - RNA, 19 nt, Homo sapiens
  misc_RNA (1)...(19): siRNA sense strand
auggaauugacuugagaaa

SEQ ID NO: 2557576 - RNA, 19 nt, Homo sapiens
  misc_RNA (1)...(19): siRNA sense strand
gggauuaagaacagucgaa

SEQ ID NO: 2557577 - RNA, 19 nt, Homo sapiens
  misc_RNA (1)...(19): siRNA sense strand
ccucaauguaagucuauua

SEQ ID NO: 2557578 - RNA, 19 nt, Homo sapiens
  misc_RNA (1)...(19): siRNA sense strand
uauaaacagaccaaggaaa

SEQ ID NO: 2557579 - RNA, 19 nt, Homo sapiens
  misc_RNA (1)...(19): siRNA sense strand
agucagagucagagccaga

SEQ ID NO: 2557580 - RNA, 19 nt, Homo sapiens
  misc_RNA (1)...(19): siRNA sense strand
cgaaauggguagugaucac

SEQ ID NO: 2557581 - RNA, 19 nt, Homo sapiens
  misc_RNA (1)...(19): siRNA sense strand
gaguaguaguuuaggaaaa

SEQ ID NO: 2557582 - RNA, 19 nt, Homo sapiens
  misc_RNA (1)...(19): siRNA sense strand
accuaagaccaaagggaaa

SEQ ID NO: 2557583 - RNA, 19 nt, Homo sapiens
  misc_RNA (1)...(19): siRNA sense strand
aaagagaaaaggaggcaaa

SEQ ID NO: 2557584 - RNA, 19 nt, Homo sapiens
  misc_RNA (1)...(19): siRNA sense strand
ccaaagggaaagaugccaa

SEQ ID NO: 2557585 - RNA, 19 nt, Homo sapiens
  misc_RNA (1)...(19): siRNA sense strand
aguuggaucuagaagagaa

SEQ ID NO: 2557586 - RNA, 19 nt, Homo sapiens
  misc_RNA (1)...(19): siRNA sense strand
aaucaugaguauugagaac

SEQ ID NO: 2557587 - RNA, 19 nt, Homo sapiens
  misc_RNA (1)...(19): siRNA sense strand
gcuuagcauucgagagaac

SEQ ID NO: 2557588 - RNA, 19 nt, Homo sapiens
  misc_RNA (1)...(19): siRNA sense strand
ugauuaaagagcucaacaa

SEQ ID NO: 2557589 - RNA, 19 nt, Homo sapiens
  misc_RNA (1)...(19): siRNA sense strand
guauaacuacuguggaaaa

SEQ ID NO: 2557590 - RNA, 19 nt, Homo sapiens
  misc_RNA (1)...(19): siRNA sense strand
gccaaaugaaauugcauau

SEQ ID NO: 2557591 - RNA, 19 nt, Homo sapiens
  misc_RNA (1)...(19): siRNA sense strand
agcugaauaugaaggacaa

SEQ ID NO: 2557592 - RNA, 19 nt, Homo sapiens
  misc_RNA (1)...(19): siRNA sense strand
uggagaaccuagaagaacu

SEQ ID NO: 2557593 - RNA, 19 nt, Homo sapiens
  misc_RNA (1)...(19): siRNA sense strand
gaagagaauucaaugcguu

SEQ ID NO: 2557594 - RNA, 19 nt, Homo sapiens
  misc_RNA (1)...(19): siRNA sense strand
cucuggagguuuugggaaa

SEQ ID NO: 2557595 - RNA, 19 nt, Homo sapiens
  misc_RNA (1)...(19): siRNA sense strand
acacaaucgaaucaacaaa

SEQ ID NO: 2557596 - RNA, 19 nt, Homo sapiens
  misc_RNA (1)...(19): siRNA sense strand
ccaaaguaccaucagccaa

SEQ ID NO: 2557597 - RNA, 19 nt, Homo sapiens
  misc_RNA (1)...(19): siRNA sense strand
ggcauaauaaacugagaga

SEQ ID NO: 2557598 - RNA, 19 nt, Homo sapiens
  misc_RNA (1)...(19): siRNA sense strand
gaaccuaagaccaaaggga

SEQ ID NO: 2557599 - RNA, 19 nt, Homo sapiens
  misc_RNA (1)...(19): siRNA sense strand
aagcugaauaugaaggaca

SEQ ID NO: 2557600 - RNA, 19 nt, Homo sapiens
  misc_RNA (1)...(19): siRNA sense strand
guaccaucagccaaggaaa

SEQ ID NO: 2557601 - RNA, 19 nt, Homo sapiens
  misc_RNA (1)...(19): siRNA sense strand
cuacuuuaccagagagucu

SEQ ID NO: 2557602 - RNA, 19 nt, Homo sapiens
  misc_RNA (1)...(19): siRNA sense strand
cuuggaaaccuuaggaagu

SEQ ID NO: 2557603 - RNA, 19 nt, Homo sapiens
  misc_RNA (1)...(19): siRNA sense strand
uggaucuagaagagaacaa

SEQ ID NO: 2557604 - RNA, 19 nt, Homo sapiens
  misc_RNA (1)...(19): siRNA sense strand
ucagccaaggaaagagaaa

SEQ ID NO: 2557605 - RNA, 19 nt, Homo sapiens
  misc_RNA (1)...(19): siRNA sense strand
ugggaaagagagcaaagaa

SEQ ID NO: 2557606 - RNA, 19 nt, Homo sapiens
  misc_RNA (1)...(19): siRNA sense strand
aguuaagagaguuggaucu

SEQ ID NO: 2557607 - RNA, 19 nt, Homo sapiens
  misc_RNA (1)...(19): siRNA sense strand
acuggagaaccuagaagaa

SEQ ID NO: 2557608 - RNA, 19 nt, Homo sapiens
  misc_RNA (1)...(19): siRNA sense strand
ccagcaaugcagaggugau

SEQ ID NO: 2557609 - RNA, 19 nt, Homo sapiens
  misc_RNA (1)...(19): siRNA sense strand
gcauaauaaacugagagaa

SEQ ID NO: 2557610 - RNA, 19 nt, Homo sapiens
  misc_RNA (1)...(19): siRNA sense strand
cguauaacuacuguggaaa

SEQ ID NO: 2557611 - RNA, 19 nt, Homo sapiens
  misc_RNA (1)...(19): siRNA sense strand
gaucuagaagagaacaaau

SEQ ID NO: 2557612 - RNA, 19 nt, Homo sapiens
  misc_RNA (1)...(19): siRNA sense strand
guggaaaaggacaucaaaa

SEQ ID NO: 2557613 - RNA, 19 nt, Homo sapiens
  misc_RNA (1)...(19): siRNA sense strand
ugaauaugaaggacaauca

SEQ ID NO: 2557614 - RNA, 19 nt, Homo sapiens
  misc_RNA (1)...(19): siRNA sense strand
ucacaaagaucccugagga

SEQ ID NO: 2557615 - RNA, 19 nt, Homo sapiens
  misc_RNA (1)...(19): siRNA sense strand
gcucaacaaaugccgggaa

SEQ ID NO: 2557616 - RNA, 19 nt, Homo sapiens
  misc_RNA (1)...(19): siRNA sense strand
auucaaugcguuuggacuu

SEQ ID NO: 2557617 - RNA, 19 nt, Homo sapiens
  misc_RNA (1)...(19): siRNA sense strand
cugcuagaccucccagaua

SEQ ID NO: 2557618 - RNA, 19 nt, Homo sapiens
  misc_RNA (1)...(19): siRNA sense strand
caguaugguagaauugaau

SEQ ID NO: 2557619 - RNA, 19 nt, Homo sapiens
  misc_RNA (1)...(19): siRNA sense strand
aagagaauucaaugcguuu

SEQ ID NO: 2557620 - RNA, 19 nt, Homo sapiens
  misc_RNA (1)...(19): siRNA sense strand
ucccagauacuauaggaaa

SEQ ID NO: 2557621 - RNA, 19 nt, Homo sapiens
  misc_RNA (1)...(19): siRNA sense strand
gggaaagaugccaaagaug

SEQ ID NO: 2557622 - RNA, 19 nt, Homo sapiens
  misc_RNA (1)...(19): siRNA sense strand
cgcuuuaaucguauaacua

SEQ ID NO: 2557623 - RNA, 19 nt, Homo sapiens
  misc_RNA (1)...(19): siRNA sense strand
cccagauacuauaggaaac

SEQ ID NO: 2557624 - RNA, 19 nt, Homo sapiens
  misc_RNA (1)...(19): siRNA sense strand
acauggaacacaaucgaau

SEQ ID NO: 2557625 - RNA, 19 nt, Homo sapiens
  misc_RNA (1)...(19): siRNA sense strand
cagaaauuagucuugacaa

SEQ ID NO: 2557626 - RNA, 19 nt, Homo sapiens
  misc_RNA (1)...(19): siRNA sense strand
cagcaaugcagaggugauu

SEQ ID NO: 2557627 - RNA, 19 nt, Homo sapiens
  misc_RNA (1)...(19): siRNA sense strand
cccucaacauggaacacaa

SEQ ID NO: 2557628 - RNA, 19 nt, Homo sapiens
  misc_RNA (1)...(19): siRNA sense strand
cugacaugaugcugagaaa

SEQ ID NO: 2557629 - RNA, 19 nt, Homo sapiens
  misc_RNA (1)...(19): siRNA sense strand
ugaaauugucccagaggaa

SEQ ID NO: 2557630 - RNA, 19 nt, Homo sapiens
  misc_RNA (1)...(19): siRNA sense strand
augaaauggcaaagaagua

SEQ ID NO: 2557631 - RNA, 19 nt, Homo sapiens
  misc_RNA (1)...(19): siRNA sense strand
ugacaaauuucgugaccca

SEQ ID NO: 2557632 - RNA, 19 nt, Homo sapiens
  misc_RNA (1)...(19): siRNA sense strand
aaguucuaguugugggaaa

SEQ ID NO: 2557633 - RNA, 19 nt, Homo sapiens
  misc_RNA (1)...(19): siRNA sense strand
acauagcaagaaagagaaa

SEQ ID NO: 2557634 - RNA, 19 nt, Homo sapiens
  misc_RNA (1)...(19): siRNA sense strand
gcacucaaaauaagagaaa

SEQ ID NO: 2557635 - RNA, 19 nt, Homo sapiens
  misc_RNA (1)...(19): siRNA sense strand
uuggagaagcguagucaaa

SEQ ID NO: 2557636 - RNA, 19 nt, Homo sapiens
  misc_RNA (1)...(19): siRNA sense strand
cuguaggcaaguagacaua

SEQ ID NO: 2557637 - RNA, 19 nt, Homo sapiens
  misc_RNA (1)...(19): siRNA sense strand
uggugaugcugaaggcaau

SEQ ID NO: 2557638 - RNA, 19 nt, Homo sapiens
  misc_RNA (1)...(19): siRNA sense strand
ggaacuucugauugacaaa

SEQ ID NO: 2557639 - RNA, 19 nt, Homo sapiens
  misc_RNA (1)...(19): siRNA sense strand
aaguaaaucagaaugggaa

SEQ ID NO: 2557640 - RNA, 19 nt, Homo sapiens
  misc_RNA (1)...(19): siRNA sense strand
cugagaaaugcgugugaga

SEQ ID NO: 2557641 - RNA, 19 nt, Homo sapiens
  misc_RNA (1)...(19): siRNA sense strand
ugcuaaaugaaauggcaaa

SEQ ID NO: 2557642 - RNA, 19 nt, Homo sapiens
  misc_RNA (1)...(19): siRNA sense strand
gggaugugguaaaggugga

SEQ ID NO: 2557643 - RNA, 19 nt, Homo sapiens
  misc_RNA (1)...(19): siRNA sense strand
aggaaguugguuuggagaa

SEQ ID NO: 2557644 - RNA, 19 nt, Homo sapiens
  misc_RNA (1)...(19): siRNA sense strand
ggcaaaagcgucagugaau

SEQ ID NO: 2557645 - RNA, 19 nt, Homo sapiens
  misc_RNA (1)...(19): siRNA sense strand
ugcaaaagcagaagaauau

SEQ ID NO: 2557646 - RNA, 19 nt, Homo sapiens
  misc_RNA (1)...(19): siRNA sense strand
cuucagaaacagaaucauu

SEQ ID NO: 2557647 - RNA, 19 nt, Homo sapiens
  misc_RNA (1)...(19): siRNA sense strand
acuaugaacaugcagcaaa

SEQ ID NO: 2557648 - RNA, 19 nt, Homo sapiens
  misc_RNA (1)...(19): siRNA sense strand
guggugaugcugaaggcaa

SEQ ID NO: 2557649 - RNA, 19 nt, Homo sapiens
  misc_RNA (1)...(19): siRNA sense strand
ggauguuccaaaagauaaa

SEQ ID NO: 2557650 - RNA, 19 nt, Homo sapiens
  misc_RNA (1)...(19): siRNA sense strand
ucgucgugauagugaauau

SEQ ID NO: 2557651 - RNA, 19 nt, Homo sapiens
  misc_RNA (1)...(19): siRNA sense strand
cuuggaagguguuguggau

SEQ ID NO: 2557652 - RNA, 19 nt, Homo sapiens
  misc_RNA (1)...(19): siRNA sense strand
ggaagaaggacacagcuca

SEQ ID NO: 2557653 - RNA, 19 nt, Homo sapiens
  misc_RNA (1)...(19): siRNA sense strand
cgguaugaggacaugaaaa

SEQ ID NO: 2557654 - RNA, 19 nt, Homo sapiens
  misc_RNA (1)...(19): siRNA sense strand
agauuguggugaugcugaa

SEQ ID NO: 2557655 - RNA, 19 nt, Homo sapiens
  misc_RNA (1)...(19): siRNA sense strand
auggcaaagaaguacaaua

SEQ ID NO: 2557656 - RNA, 19 nt, Homo sapiens
  misc_RNA (1)...(19): siRNA sense strand
cuuugggaaccuuaaguaa

SEQ ID NO: 2557657 - RNA, 19 nt, Homo sapiens
  misc_RNA (1)...(19): siRNA sense strand
augggaagcuacaaguauu

SEQ ID NO: 2557658 - RNA, 19 nt, Homo sapiens
  misc_RNA (1)...(19): siRNA sense strand
gcaagaaagagaaaagagu

SEQ ID NO: 2557659 - RNA, 19 nt, Homo sapiens
  misc_RNA (1)...(19): siRNA sense strand
agagaaaagaguuugaaga

SEQ ID NO: 2557660 - RNA, 19 nt, Homo sapiens
  misc_RNA (1)...(19): siRNA sense strand
agagaaaacuugauccuga

SEQ ID NO: 2557661 - RNA, 19 nt, Homo sapiens
  misc_RNA (1)...(19): siRNA sense strand
gcucaaaggaacuucugau

SEQ ID NO: 2557662 - RNA, 19 nt, Homo sapiens
  misc_RNA (1)...(19): siRNA sense strand
cacaacagcuucugggacu

SEQ ID NO: 2557663 - RNA, 19 nt, Homo sapiens
  misc_RNA (1)...(19): siRNA sense strand
gguggaugacuaugaacau

SEQ ID NO: 2557664 - RNA, 19 nt, Homo sapiens
  misc_RNA (1)...(19): siRNA sense strand
cuccauccaagaagagaaa

SEQ ID NO: 2557665 - RNA, 19 nt, Homo sapiens
  misc_RNA (1)...(19): siRNA sense strand
ccugcaaaugagaguucua

SEQ ID NO: 2557666 - RNA, 19 nt, Homo sapiens
  misc_RNA (1)...(19): siRNA sense strand
gaggauguuccaaaagaua

SEQ ID NO: 2557667 - RNA, 19 nt, Homo sapiens
  misc_RNA (1)...(19): siRNA sense strand
ggaaaagguacgacagaag

SEQ ID NO: 2557668 - RNA, 19 nt, Homo sapiens
  misc_RNA (1)...(19): siRNA sense strand
aggcaaguagacauagcaa

SEQ ID NO: 2557669 - RNA, 19 nt, Homo sapiens
  misc_RNA (1)...(19): siRNA sense strand
auacaaaguaagcuggaaa

SEQ ID NO: 2557670 - RNA, 19 nt, Homo sapiens
  misc_RNA (1)...(19): siRNA sense strand
gagacagagaacagacaaa

SEQ ID NO: 2557671 - RNA, 19 nt, Homo sapiens
  misc_RNA (1)...(19): siRNA sense strand
gaggauggaaagaaggaau

SEQ ID NO: 2557672 - RNA, 19 nt, Homo sapiens
  misc_RNA (1)...(19): siRNA sense strand
agguguaacucaaguaaca

SEQ ID NO: 2557673 - RNA, 19 nt, Homo sapiens
  misc_RNA (1)...(19): siRNA sense strand
ccuaaagagccuaaagguu

SEQ ID NO: 2557674 - RNA, 19 nt, Homo sapiens
  misc_RNA (1)...(19): siRNA sense strand
ggacauggugagugcccua

SEQ ID NO: 2557675 - RNA, 19 nt, Homo sapiens
  misc_RNA (1)...(19): siRNA sense strand
cugccauggcuguguguaa

SEQ ID NO: 2557676 - RNA, 19 nt, Homo sapiens
  misc_RNA (1)...(19): siRNA sense strand
gagaaaauggauuggagua

SEQ ID NO: 2557677 - RNA, 19 nt, Homo sapiens
  misc_RNA (1)...(19): siRNA sense strand
aagacgaagaugaggauga

SEQ ID NO: 2557678 - RNA, 19 nt, Homo sapiens
  misc_RNA (1)...(19): siRNA sense strand
ugacaaaagagcugaaaca

SEQ ID NO: 2557679 - RNA, 19 nt, Homo sapiens
  misc_RNA (1)...(19): siRNA sense strand
ccuguauguuggagguuau

SEQ ID NO: 2557680 - RNA, 19 nt, Homo sapiens
  misc_RNA (1)...(19): siRNA sense strand
cacaaaucaaggugacaaa

SEQ ID NO: 2557681 - RNA, 19 nt, Homo sapiens
  misc_RNA (1)...(19): siRNA sense strand
cucaaggacagaagcgaaa

SEQ ID NO: 2557682 - RNA, 19 nt, Homo sapiens
  misc_RNA (1)...(19): siRNA sense strand
uggcaaaaggagaaaagaa

SEQ ID NO: 2557683 - RNA, 19 nt, Homo sapiens
  misc_RNA (1)...(19): siRNA sense strand
caaauuaccuaaagagccu

SEQ ID NO: 2557684 - RNA, 19 nt, Homo sapiens
  misc_RNA (1)...(19): siRNA sense strand
ggugauuauuugaaggaac

SEQ ID NO: 2557685 - RNA, 19 nt, Homo sapiens
  misc_RNA (1)...(19): siRNA sense strand
augaggaugaggauggaaa

SEQ ID NO: 2557686 - RNA, 19 nt, Homo sapiens
  misc_RNA (1)...(19): siRNA sense strand
caaaguuaggagagguaca

SEQ ID NO: 2557687 - RNA, 19 nt, Homo sapiens
  misc_RNA (1)...(19): siRNA sense strand
aaccagaaugggaggagaa

SEQ ID NO: 2557688 - RNA, 19 nt, Homo sapiens
  misc_RNA (1)...(19): siRNA sense strand
gaccgaaaugacauagaaa

SEQ ID NO: 2557689 - RNA, 19 nt, Homo sapiens
  misc_RNA (1)...(19): siRNA sense strand
caguguauagaacgagaaa

SEQ ID NO: 2557690 - RNA, 19 nt, Homo sapiens
  misc_RNA (1)...(19): siRNA sense strand
cguuggagauugugauuuu

SEQ ID NO: 2557691 - RNA, 19 nt, Homo sapiens
  misc_RNA (1)...(19): siRNA sense strand
caggaaucuacaaggguga

SEQ ID NO: 2557692 - RNA, 19 nt, Homo sapiens
  misc_RNA (1)...(19): siRNA sense strand
accaaaguuaggagaggua

SEQ ID NO: 2557693 - RNA, 19 nt, Homo sapiens
  misc_RNA (1)...(19): siRNA sense strand
gagaacaacagcugggucu

SEQ ID NO: 2557694 - RNA, 19 nt, Homo sapiens
  misc_RNA (1)...(19): siRNA sense strand
ucucaaggacagaagcgaa

SEQ ID NO: 2557695 - RNA, 19 nt, Homo sapiens
  misc_RNA (1)...(19): siRNA sense strand
ugacauagaggaagcacca

SEQ ID NO: 2557696 - RNA, 19 nt, Homo sapiens
  misc_RNA (1)...(19): siRNA sense strand
cgaagaugaggaugaggau

SEQ ID NO: 2557697 - RNA, 19 nt, Homo sapiens
  misc_RNA (1)...(19): siRNA sense strand
augaugaagacgaagauga

SEQ ID NO: 2557698 - RNA, 19 nt, Homo sapiens
  misc_RNA (1)...(19): siRNA sense strand
cugagaauacugagaccuu

SEQ ID NO: 2557699 - RNA, 19 nt, Homo sapiens
  misc_RNA (1)...(19): siRNA sense strand
gaccaagauaugauaguca

SEQ ID NO: 2557700 - RNA, 19 nt, Homo sapiens
  misc_RNA (1)...(19): siRNA sense strand
uggucgaugugaugauauu

SEQ ID NO: 2557701 - RNA, 19 nt, Homo sapiens
  misc_RNA (1)...(19): siRNA sense strand
aggaugaugaagacgaaga

SEQ ID NO: 2557702 - RNA, 19 nt, Homo sapiens
  misc_RNA (1)...(19): siRNA sense strand
agguacagcagaaguguca

SEQ ID NO: 2557703 - RNA, 19 nt, Homo sapiens
  misc_RNA (1)...(19): siRNA sense strand
cgacagauguacugcagcu

SEQ ID NO: 2557704 - RNA, 19 nt, Homo sapiens
  misc_RNA (1)...(19): siRNA sense strand
cuggaaagcagaugguacu

SEQ ID NO: 2557705 - RNA, 19 nt, Homo sapiens
  misc_RNA (1)...(19): siRNA sense strand
gauugauggcacaaaugaa

SEQ ID NO: 2557706 - RNA, 19 nt, Homo sapiens
  misc_RNA (1)...(19): siRNA sense strand
caggaaccauuuagcguca

SEQ ID NO: 2557707 - RNA, 19 nt, Homo sapiens
  misc_RNA (1)...(19): siRNA sense strand
ggaaucagaacccggguca

SEQ ID NO: 2557708 - RNA, 19 nt, Homo sapiens
  misc_RNA (1)...(19): siRNA sense strand
ggagaaaagaacgguuaaa

SEQ ID NO: 2557709 - RNA, 19 nt, Homo sapiens
  misc_RNA (1)...(19): siRNA sense strand
uguuacuguuaaaggugua

SEQ ID NO: 2557710 - RNA, 19 nt, Homo sapiens
  misc_RNA (1)...(19): siRNA sense strand
uuggauggcgagaugauua

SEQ ID NO: 2557711 - RNA, 19 nt, Homo sapiens
  misc_RNA (1)...(19): siRNA sense strand
uguugguggaccugacaaa

SEQ ID NO: 2557712 - RNA, 19 nt, Homo sapiens
  misc_RNA (1)...(19): siRNA sense strand
gacaaauacuucaagguuc

SEQ ID NO: 2557713 - RNA, 19 nt, Homo sapiens
  misc_RNA (1)...(19): siRNA sense strand
cagaguaaauggacaggcu

SEQ ID NO: 2557714 - RNA, 19 nt, Homo sapiens
  misc_RNA (1)...(19): siRNA sense strand
cgucugugugagcgguuua

SEQ ID NO: 2557715 - RNA, 19 nt, Homo sapiens
  misc_RNA (1)...(19): siRNA sense strand
uuuuagaccugaagccaua

SEQ ID NO: 2557716 - RNA, 19 nt, Homo sapiens
  misc_RNA (1)...(19): siRNA sense strand
uugccaaagaagugagcca

SEQ ID NO: 2557717 - RNA, 19 nt, Homo sapiens
  misc_RNA (1)...(19): siRNA sense strand
cgguuuaaugaaagaaauc

SEQ ID NO: 2557718 - RNA, 19 nt, Homo sapiens
  misc_RNA (1)...(19): siRNA sense strand
aagaaauccgccugaacuu

SEQ ID NO: 2557719 - RNA, 19 nt, Homo sapiens
  misc_RNA (1)...(19): siRNA sense strand
ggaugaugaagacgaagau

SEQ ID NO: 2557720 - RNA, 19 nt, Homo sapiens
  misc_RNA (1)...(19): siRNA sense strand
acgaagaugaggaugagga

SEQ ID NO: 2557721 - RNA, 19 nt, Homo sapiens
  misc_RNA (1)...(19): siRNA sense strand
auucacagcccguuggaga

SEQ ID NO: 2557722 - RNA, 19 nt, Homo sapiens
  misc_RNA (1)...(19): siRNA sense strand
aagaaagcuacuugaagga

SEQ ID NO: 2557723 - RNA, 19 nt, Homo sapiens
  misc_RNA (1)...(19): siRNA sense strand
ccaaggagucgcacgccaa

SEQ ID NO: 2557724 - RNA, 19 nt, Homo sapiens
  misc_RNA (1)...(19): siRNA sense strand
ugagaagcugcguggaaga

SEQ ID NO: 2557725 - RNA, 19 nt, Homo sapiens
  misc_RNA (1)...(19): siRNA sense strand
agaacagacuccagcagca

SEQ ID NO: 2557726 - RNA, 19 nt, Homo sapiens
  misc_RNA (1)...(19): siRNA sense strand
ggagacagaaagaaggcaa

SEQ ID NO: 2557727 - RNA, 19 nt, Homo sapiens
  misc_RNA (1)...(19): siRNA sense strand
caggaagcauagauggaga

SEQ ID NO: 2557728 - RNA, 19 nt, Homo sapiens
  misc_RNA (1)...(19): siRNA sense strand
ccugaguugcagaggaaga

SEQ ID NO: 2557729 - RNA, 19 nt, Homo sapiens
  misc_RNA (1)...(19): siRNA sense strand
cggcagugacgcugacaga

SEQ ID NO: 2557730 - RNA, 19 nt, Homo sapiens
  misc_RNA (1)...(19): siRNA sense strand
uuguaaagccugaggaccu

SEQ ID NO: 2557731 - RNA, 19 nt, Homo sapiens
  misc_RNA (1)...(19): siRNA sense strand
cugaggaccuggacggcau

SEQ ID NO: 2557732 - RNA, 19 nt, Homo sapiens
  misc_RNA (1)...(19): siRNA sense strand
ccacaaucuggaaggacca

SEQ ID NO: 2557733 - RNA, 19 nt, Homo sapiens
  misc_RNA (1)...(19): siRNA sense strand
cuggagaggaugaaaggca

SEQ ID NO: 2557734 - RNA, 19 nt, Homo sapiens
  misc_RNA (1)...(19): siRNA sense strand
uggagaggaugaaaggcau

SEQ ID NO: 2557735 - RNA, 19 nt, Homo sapiens
  misc_RNA (1)...(19): siRNA sense strand
ugaaauucgacaagccaga

SEQ ID NO: 2557736 - RNA, 19 nt, Homo sapiens
  misc_RNA (1)...(19): siRNA sense strand
cguucugggccuaagucua

SEQ ID NO: 2557737 - RNA, 19 nt, Homo sapiens
  misc_RNA (1)...(19): siRNA sense strand
auagauggagacagaaaga

SEQ ID NO: 2557738 - RNA, 19 nt, Homo sapiens
  misc_RNA (1)...(19): siRNA sense strand
gagcauuaccagugggacc

SEQ ID NO: 2557739 - RNA, 19 nt, Homo sapiens
  misc_RNA (1)...(19): siRNA sense strand
ccauaguuacagagggcua

SEQ ID NO: 2557740 - RNA, 19 nt, Homo sapiens
  misc_RNA (1)...(19): siRNA sense strand
cagcaguugcagagaguau

SEQ ID NO: 2557741 - RNA, 19 nt, Homo sapiens
  misc_RNA (1)...(19): siRNA sense strand
aagcaauuucagagagcua

SEQ ID NO: 2557742 - RNA, 19 nt, Homo sapiens
  misc_RNA (1)...(19): siRNA sense strand
gcgacaauucccugaguau

SEQ ID NO: 2557743 - RNA, 19 nt, Homo sapiens
  misc_RNA (1)...(19): siRNA sense strand
aagagaacuuacaaagcaa

SEQ ID NO: 2557744 - RNA, 19 nt, Homo sapiens
  misc_RNA (1)...(19): siRNA sense strand
cagcuaugacucuggcaaa

SEQ ID NO: 2557745 - RNA, 19 nt, Homo sapiens
  misc_RNA (1)...(19): siRNA sense strand
gcagagagcuuuaauggca

SEQ ID NO: 2557746 - RNA, 19 nt, Homo sapiens
  misc_RNA (1)...(19): siRNA sense strand
ggaacacacagcagggaga

SEQ ID NO: 2557747 - RNA, 19 nt, Homo sapiens
  misc_RNA (1)...(19): siRNA sense strand
aaaucaaugccgugagaca

SEQ ID NO: 2557748 - RNA, 19 nt, Homo sapiens
  misc_RNA (1)...(19): siRNA sense strand
uggagaacaaauucggaaa

SEQ ID NO: 2557749 - RNA, 19 nt, Homo sapiens
  misc_RNA (1)...(19): siRNA sense strand
ucggaaacacgcuggacaa

SEQ ID NO: 2557750 - RNA, 19 nt, Homo sapiens
  misc_RNA (1)...(19): siRNA sense strand
cugcagaugaacuggaaaa

SEQ ID NO: 2557751 - RNA, 19 nt, Homo sapiens
  misc_RNA (1)...(19): siRNA sense strand
ucuaagcagcccaaagaaa

SEQ ID NO: 2557752 - RNA, 19 nt, Homo sapiens
  misc_RNA (1)...(19): siRNA sense strand
cuccaacagugauggcaaa

SEQ ID NO: 2557753 - RNA, 19 nt, Homo sapiens
  misc_RNA (1)...(19): siRNA sense strand
agaaaguuaaugagacaga

SEQ ID NO: 2557754 - RNA, 19 nt, Homo sapiens
  misc_RNA (1)...(19): siRNA sense strand
ggccaaauggagaacaaau

SEQ ID NO: 2557755 - RNA, 19 nt, Homo sapiens
  misc_RNA (1)...(19): siRNA sense strand
ggagcaagaugaacagcca

SEQ ID NO: 2557756 - RNA, 19 nt, Homo sapiens
  misc_RNA (1)...(19): siRNA sense strand
cagagagcuuuaauggcaa

SEQ ID NO: 2557757 - RNA, 19 nt, Homo sapiens
  misc_RNA (1)...(19): siRNA sense strand
acagaauagaugaucacaa

SEQ ID NO: 2557758 - RNA, 19 nt, Homo sapiens
  misc_RNA (1)...(19): siRNA sense strand
ugugagagugagaguagaa

SEQ ID NO: 2557759 - RNA, 19 nt, Homo sapiens
  misc_RNA (1)...(19): siRNA sense strand
ggaauacagaauagaugau

SEQ ID NO: 2557760 - RNA, 19 nt, Homo sapiens
  misc_RNA (1)...(19): siRNA sense strand
cuuuaauggcaaugagacu

SEQ ID NO: 2557761 - RNA, 19 nt, Homo sapiens
  misc_RNA (1)...(19): siRNA sense strand
uggagagacagcaggauga

SEQ ID NO: 2557762 - RNA, 19 nt, Homo sapiens
  misc_RNA (1)...(19): siRNA sense strand
ggggccaaauggagaacaa

SEQ ID NO: 2557763 - RNA, 19 nt, Homo sapiens
  misc_RNA (1)...(19): siRNA sense strand
cggaaacacgcuggacaaa

SEQ ID NO: 2557764 - RNA, 19 nt, Homo sapiens
  misc_RNA (1)...(19): siRNA sense strand
guugcaggauaucgagaau

SEQ ID NO: 2557765 - RNA, 19 nt, Homo sapiens
  misc_RNA (1)...(19): siRNA sense strand
aaaugagaguguagaccga

SEQ ID NO: 2557766 - RNA, 19 nt, Homo sapiens
  misc_RNA (1)...(19): siRNA sense strand
augaaaacuuggaccgaau

SEQ ID NO: 2557767 - RNA, 19 nt, Homo sapiens
  misc_RNA (1)...(19): siRNA sense strand
ggacaaaagagaacuuaca

SEQ ID NO: 2557768 - RNA, 19 nt, Homo sapiens
  misc_RNA (1)...(19): siRNA sense strand
acagcuuguugcaggauau

SEQ ID NO: 2557769 - RNA, 19 nt, Homo sapiens
  misc_RNA (1)...(19): siRNA sense strand
cuugaagaaagaaugcaaa

SEQ ID NO: 2557770 - RNA, 19 nt, Homo sapiens
  misc_RNA (1)...(19): siRNA sense strand
gcagagaguaucuuggcuu

SEQ ID NO: 2557771 - RNA, 19 nt, Homo sapiens
  misc_RNA (1)...(19): siRNA sense strand
aggacgugcuguacaucaa

SEQ ID NO: 2557772 - RNA, 19 nt, Homo sapiens
  misc_RNA (1)...(19): siRNA sense strand
ugacaaacaguguaaacca

SEQ ID NO: 2557773 - RNA, 19 nt, Homo sapiens
  misc_RNA (1)...(19): siRNA sense strand
augaauuugacaugaguga

SEQ ID NO: 2557774 - RNA, 19 nt, Homo sapiens
  misc_RNA (1)...(19): siRNA sense strand
guaucaagagcgugccaga

SEQ ID NO: 2557775 - RNA, 19 nt, Homo sapiens
  misc_RNA (1)...(19): siRNA sense strand
ugcuguacaucaauggaaa

SEQ ID NO: 2557776 - RNA, 19 nt, Homo sapiens
  misc_RNA (1)...(19): siRNA sense strand
gaguguagaccgaggagcu

SEQ ID NO: 2557777 - RNA, 19 nt, Homo sapiens
  misc_RNA (1)...(19): siRNA sense strand
aagaugaccacgaggacca

SEQ ID NO: 2557778 - RNA, 19 nt, Homo sapiens
  misc_RNA (1)...(19): siRNA sense strand
gacgauucggagaaaguua

SEQ ID NO: 2557779 - RNA, 19 nt, Homo sapiens
  misc_RNA (1)...(19): siRNA sense strand
aucaagagcgugccagaaa

SEQ ID NO: 2557780 - RNA, 19 nt, Homo sapiens
  misc_RNA (1)...(19): siRNA sense strand
cggagaaaguuaaugagac

SEQ ID NO: 2557781 - RNA, 19 nt, Homo sapiens
  misc_RNA (1)...(19): siRNA sense strand
uggaacgagaggcgagaga

SEQ ID NO: 2557782 - RNA, 19 nt, Homo sapiens
  misc_RNA (1)...(19): siRNA sense strand
acgagaggcgagagaaaau

SEQ ID NO: 2557783 - RNA, 19 nt, Homo sapiens
  misc_RNA (1)...(19): siRNA sense strand
cuaagcagcccaaagaaaa

SEQ ID NO: 2557784 - RNA, 19 nt, Homo sapiens
  misc_RNA (1)...(19): siRNA sense strand
cagcaagaugaggaugaaa

SEQ ID NO: 2557785 - RNA, 19 nt, Homo sapiens
  misc_RNA (1)...(19): siRNA sense strand
ggaaagagaucuccagcga

SEQ ID NO: 2557786 - RNA, 19 nt, Homo sapiens
  misc_RNA (1)...(19): siRNA sense strand
uggacagccuagugaacaa

SEQ ID NO: 2557787 - RNA, 19 nt, Homo sapiens
  misc_RNA (1)...(19): siRNA sense strand
ugauaaagcagaugggacu

SEQ ID NO: 2557788 - RNA, 19 nt, Homo sapiens
  misc_RNA (1)...(19): siRNA sense strand
agaagaaaucaaaugggaa

SEQ ID NO: 2557789 - RNA, 19 nt, Homo sapiens
  misc_RNA (1)...(19): siRNA sense strand
gagaagaaaucaaauggga

SEQ ID NO: 2557790 - RNA, 19 nt, Homo sapiens
  misc_RNA (1)...(19): siRNA sense strand
caggaaacuuugccggcua

SEQ ID NO: 2557791 - RNA, 19 nt, Homo sapiens
  misc_RNA (1)...(19): siRNA sense strand
auuuaagcagcaagagaua

SEQ ID NO: 2557792 - RNA, 19 nt, Homo sapiens
  misc_RNA (1)...(19): siRNA sense strand
ugggaaacugucugugaua

SEQ ID NO: 2557793 - RNA, 19 nt, Homo sapiens
  misc_RNA (1)...(19): siRNA sense strand
gaagaaaucaaaugggaag

SEQ ID NO: 2557794 - RNA, 19 nt, Homo sapiens
  misc_RNA (1)...(19): siRNA sense strand
ggucacaaucggauguaca

SEQ ID NO: 2557795 - RNA, 19 nt, Homo sapiens
  misc_RNA (1)...(19): siRNA sense strand
acaucaaggaccugcauuu

SEQ ID NO: 2557796 - RNA, 19 nt, Homo sapiens
  misc_RNA (1)...(19): siRNA sense strand
uuuggaaggguuugauaaa

SEQ ID NO: 2557797 - RNA, 19 nt, Homo sapiens
  misc_RNA (1)...(19): siRNA sense strand
acauuuaagcagcaagaga

SEQ ID NO: 2557798 - RNA, 19 nt, Homo sapiens
  misc_RNA (1)...(19): siRNA sense strand
cugauuagucggaacucaa

SEQ ID NO: 2557799 - RNA, 19 nt, Homo sapiens
  misc_RNA (1)...(19): siRNA sense strand
cuuuggaaggguuugauaa

SEQ ID NO: 2557800 - RNA, 19 nt, Homo sapiens
  misc_RNA (1)...(19): siRNA sense strand
aaagagaucuccagcgacu

SEQ ID NO: 2557801 - RNA, 19 nt, Homo sapiens
  misc_RNA (1)...(19): siRNA sense strand
uuugaugaguggaugaaaa

SEQ ID NO: 2557802 - RNA, 19 nt, Homo sapiens
  misc_RNA (1)...(19): siRNA sense strand
gagcuguggccaagaaaau

SEQ ID NO: 2557803 - RNA, 19 nt, Homo sapiens
  misc_RNA (1)...(19): siRNA sense strand
ucuuaguagucaugggaac

SEQ ID NO: 2557804 - RNA, 19 nt, Homo sapiens
  misc_RNA (1)...(19): siRNA sense strand
gaguggaugaaaagauuua

SEQ ID NO: 2557805 - RNA, 19 nt, Homo sapiens
  misc_RNA (1)...(19): siRNA sense strand
acacauuuaagcagcaaga

SEQ ID NO: 2557806 - RNA, 19 nt, Homo sapiens
  misc_RNA (1)...(19): siRNA sense strand
cauuuguugugucuggaaa

SEQ ID NO: 2557807 - RNA, 19 nt, Homo sapiens
  misc_RNA (1)...(19): siRNA sense strand
ccuuaaaagacauacgaga

SEQ ID NO: 2557808 - RNA, 19 nt, Homo sapiens
  misc_RNA (1)...(19): siRNA sense strand
cggcuauaauuguggagac

SEQ ID NO: 2557809 - RNA, 19 nt, Homo sapiens
  misc_RNA (1)...(19): siRNA sense strand
agaaaucaaaugggaagaa

SEQ ID NO: 2557810 - RNA, 19 nt, Homo sapiens
  misc_RNA (1)...(19): siRNA sense strand
ggcuauaauuguggagacu

SEQ ID NO: 2557811 - RNA, 19 nt, Homo sapiens
  misc_RNA (1)...(19): siRNA sense strand
gagaagagcuggacgagca

SEQ ID NO: 2557812 - RNA, 19 nt, Homo sapiens
  misc_RNA (1)...(19): siRNA sense strand
gggaccugcaggagagaaa

SEQ ID NO: 2557813 - RNA, 19 nt, Homo sapiens
  misc_RNA (1)...(19): siRNA sense strand
gagagauacucgcaggcaa

SEQ ID NO: 2557814 - RNA, 19 nt, Homo sapiens
  misc_RNA (1)...(19): siRNA sense strand
cgaccaaugagcugcggaa

SEQ ID NO: 2557815 - RNA, 19 nt, Homo sapiens
  misc_RNA (1)...(19): siRNA sense strand
aggaaaugaaggaccauau

SEQ ID NO: 2557816 - RNA, 19 nt, Homo sapiens
  misc_RNA (1)...(19): siRNA sense strand
agagaaagguguucgugga

SEQ ID NO: 2557817 - RNA, 19 nt, Homo sapiens
  misc_RNA (1)...(19): siRNA sense strand
aggcaguccaggaaaugaa

SEQ ID NO: 2557818 - RNA, 19 nt, Homo sapiens
  misc_RNA (1)...(19): siRNA sense strand
ucgguauaguggaagccaa

SEQ ID NO: 2557819 - RNA, 19 nt, Homo sapiens
  misc_RNA (1)...(19): siRNA sense strand
uggaugaacaggaucaaca

SEQ ID NO: 2557820 - RNA, 19 nt, Homo sapiens
  misc_RNA (1)...(19): siRNA sense strand
uggucgaguaucucagaaa

SEQ ID NO: 2557821 - RNA, 19 nt, Homo sapiens
  misc_RNA (1)...(19): siRNA sense strand
ugaaggaucacaugcgaga

SEQ ID NO: 2557822 - RNA, 19 nt, Homo sapiens
  misc_RNA (1)...(19): siRNA sense strand
cggccgaguucuacgccaa

SEQ ID NO: 2557823 - RNA, 19 nt, Homo sapiens
  misc_RNA (1)...(19): siRNA sense strand
cgguggagaacaugagcau

SEQ ID NO: 2557824 - RNA, 19 nt, Homo sapiens
  misc_RNA (1)...(19): siRNA sense strand
ucuccaaccaccagagcau

SEQ ID NO: 2557825 - RNA, 19 nt, Homo sapiens
  misc_RNA (1)...(19): siRNA sense strand
gaggaaaccuugucgggaa

SEQ ID NO: 2557826 - RNA, 19 nt, Homo sapiens
  misc_RNA (1)...(19): siRNA sense strand
cugaaaauguggaagggaa

SEQ ID NO: 2557827 - RNA, 19 nt, Homo sapiens
  misc_RNA (1)...(19): siRNA sense strand
cugauaaaccggagaagga

SEQ ID NO: 2557828 - RNA, 19 nt, Homo sapiens
  misc_RNA (1)...(19): siRNA sense strand
cggagaaggaccagcugaa

SEQ ID NO: 2557829 - RNA, 19 nt, Homo sapiens
  misc_RNA (1)...(19): siRNA sense strand
ccagaaaaggacaagaaaa

SEQ ID NO: 2557830 - RNA, 19 nt, Homo sapiens
  misc_RNA (1)...(19): siRNA sense strand
gugaagaauugcagcgaac

SEQ ID NO: 2557831 - RNA, 19 nt, Homo sapiens
  misc_RNA (1)...(19): siRNA sense strand
acaaauuacagcugugauu

SEQ ID NO: 2557832 - RNA, 19 nt, Homo sapiens
  misc_RNA (1)...(19): siRNA sense strand
ccaagugaguucaagccaa

SEQ ID NO: 2557833 - RNA, 19 nt, Homo sapiens
  misc_RNA (1)...(19): siRNA sense strand
cgaccugauugcugguauu

SEQ ID NO: 2557834 - RNA, 19 nt, Homo sapiens
  misc_RNA (1)...(19): siRNA sense strand
ucacggaggaggaggacau

SEQ ID NO: 2557835 - RNA, 19 nt, Homo sapiens
  misc_RNA (1)...(19): siRNA sense strand
ucgaagaaggaguguucaa

SEQ ID NO: 2557836 - RNA, 19 nt, Homo sapiens
  misc_RNA (1)...(19): siRNA sense strand
ggacagugacaaugaugau

SEQ ID NO: 2557837 - RNA, 19 nt, Homo sapiens
  misc_RNA (1)...(19): siRNA sense strand
caguaaugaucuuggcacu

SEQ ID NO: 2557838 - RNA, 19 nt, Homo sapiens
  misc_RNA (1)...(19): siRNA sense strand
agggaagucuggacaguga

SEQ ID NO: 2557839 - RNA, 19 nt, Homo sapiens
  misc_RNA (1)...(19): siRNA sense strand
ggacaucauggaacagcaa

SEQ ID NO: 2557840 - RNA, 19 nt, Homo sapiens
  misc_RNA (1)...(19): siRNA sense strand
caacauuccuugaacgcca

SEQ ID NO: 2557841 - RNA, 19 nt, Homo sapiens
  misc_RNA (1)...(19): siRNA sense strand
caucaaaccaagaaaucca

SEQ ID NO: 2557842 - RNA, 19 nt, Homo sapiens
  misc_RNA (1)...(19): siRNA sense strand
agggcguguuggagaguuu

SEQ ID NO: 2557843 - RNA, 19 nt, Homo sapiens
  misc_RNA (1)...(19): siRNA sense strand
cugaggacauguauggaga

SEQ ID NO: 2557844 - RNA, 19 nt, Homo sapiens
  misc_RNA (1)...(19): siRNA sense strand
cggcaucaaaccaagaaau

SEQ ID NO: 2557845 - RNA, 19 nt, Homo sapiens
  misc_RNA (1)...(19): siRNA sense strand
cuuucaagaagaugaucaa

SEQ ID NO: 2557846 - RNA, 19 nt, Homo sapiens
  misc_RNA (1)...(19): siRNA sense strand
guucaaaauacggaggaaa

SEQ ID NO: 2557847 - RNA, 19 nt, Homo sapiens
  misc_RNA (1)...(19): siRNA sense strand
aggaaagaacauaaacuca

SEQ ID NO: 2557848 - RNA, 19 nt, Homo sapiens
  misc_RNA (1)...(19): siRNA sense strand
gggaaugggauccagcaau

SEQ ID NO: 2557849 - RNA, 19 nt, Homo sapiens
  misc_RNA (1)...(19): siRNA sense strand
cauaaagaggaaagcgcca

SEQ ID NO: 2557850 - RNA, 19 nt, Homo sapiens
  misc_RNA (1)...(19): siRNA sense strand
ucagaaaaggcauggacua

SEQ ID NO: 2557851 - RNA, 19 nt, Homo sapiens
  misc_RNA (1)...(19): siRNA sense strand
ucaagaaaggagcagggua

SEQ ID NO: 2557852 - RNA, 19 nt, Homo sapiens
  misc_RNA (1)...(19): siRNA sense strand
aaaagaaggaggaugagaa

SEQ ID NO: 2557853 - RNA, 19 nt, Homo sapiens
  misc_RNA (1)...(19): siRNA sense strand
cagagaaagaucaccaaca

SEQ ID NO: 2557854 - RNA, 19 nt, Homo sapiens
  misc_RNA (1)...(19): siRNA sense strand
agugcaaguaggauguuua

SEQ ID NO: 2557855 - RNA, 19 nt, Homo sapiens
  misc_RNA (1)...(19): siRNA sense strand
cggcuuuguuggucacuau

SEQ ID NO: 2557856 - RNA, 19 nt, Homo sapiens
  misc_RNA (1)...(19): siRNA sense strand
gugagggaacaaagaguca

SEQ ID NO: 2557857 - RNA, 19 nt, Homo sapiens
  misc_RNA (1)...(19): siRNA sense strand
cugcagaacgcauccgauu

SEQ ID NO: 2557858 - RNA, 19 nt, Homo sapiens
  misc_RNA (1)...(19): siRNA sense strand
ggaacaggguggggaaaga

SEQ ID NO: 2557859 - RNA, 19 nt, Homo sapiens
  misc_RNA (1)...(19): siRNA sense strand
gaagauggagacagagacu

SEQ ID NO: 2557860 - RNA, 19 nt, Homo sapiens
  misc_RNA (1)...(19): siRNA sense strand
uggagaacaaccaaaguuu

SEQ ID NO: 2557861 - RNA, 19 nt, Homo sapiens
  misc_RNA (1)...(19): siRNA sense strand
acuuguagcugucagaaaa

SEQ ID NO: 2557862 - RNA, 19 nt, Homo sapiens
  misc_RNA (1)...(19): siRNA sense strand
aagaaggaguguucaaaau

SEQ ID NO: 2557863 - RNA, 19 nt, Homo sapiens
  misc_RNA (1)...(19): siRNA sense strand
uguaaacaggaaagaacau

SEQ ID NO: 2557864 - RNA, 19 nt, Homo sapiens
  misc_RNA (1)...(19): siRNA sense strand
uggaagggaagcccaguaa

SEQ ID NO: 2557865 - RNA, 19 nt, Homo sapiens
  misc_RNA (1)...(19): siRNA sense strand
uugaagauggagacagaga

SEQ ID NO: 2557866 - RNA, 19 nt, Homo sapiens
  misc_RNA (1)...(19): siRNA sense strand
uuauuugagcugaggacau

SEQ ID NO: 2557867 - RNA, 19 nt, Homo sapiens
  misc_RNA (1)...(19): siRNA sense strand
acauggggauugugaagaa

SEQ ID NO: 2557868 - RNA, 19 nt, Homo sapiens
  misc_RNA (1)...(19): siRNA sense strand
cagccaauguuuaaccaca

SEQ ID NO: 2557869 - RNA, 19 nt, Homo sapiens
  misc_RNA (1)...(19): siRNA sense strand
cacaguugguggagaugau

SEQ ID NO: 2557870 - RNA, 19 nt, Homo sapiens
  misc_RNA (1)...(19): siRNA sense strand
cggaagcaccggcaucaaa

SEQ ID NO: 2557871 - RNA, 19 nt, Homo sapiens
  misc_RNA (1)...(19): siRNA sense strand
cagccaugacccauaggaa

SEQ ID NO: 2557872 - RNA, 19 nt, Homo sapiens
  misc_RNA (1)...(19): siRNA sense strand
ugauggaggucacggagga

SEQ ID NO: 2557873 - RNA, 19 nt, Homo sapiens
  misc_RNA (1)...(19): siRNA sense strand
ccagcuucuugguucaaua

SEQ ID NO: 2557874 - RNA, 19 nt, Homo sapiens
  misc_RNA (1)...(19): siRNA sense strand
ugacagagaaagaucacca

SEQ ID NO: 2557875 - RNA, 19 nt, Homo sapiens
  misc_RNA (1)...(19): siRNA sense strand
ugaugaguuccuagaugaa

SEQ ID NO: 2557876 - RNA, 19 nt, Homo sapiens
  misc_RNA (1)...(19): siRNA sense strand
cacuuguagcugucagaaa

SEQ ID NO: 2557877 - RNA, 19 nt, Homo sapiens
  misc_RNA (1)...(19): siRNA sense strand
aggcagaauuggagcuuaa

SEQ ID NO: 2557878 - RNA, 19 nt, Homo sapiens
  misc_RNA (1)...(19): siRNA sense strand
gguagaagcagaugggcaa

SEQ ID NO: 2557879 - RNA, 19 nt, Homo sapiens
  misc_RNA (1)...(19): siRNA sense strand
uggaagaagccaaggacaa

SEQ ID NO: 2557880 - RNA, 19 nt, Homo sapiens
  misc_RNA (1)...(19): siRNA sense strand
aagaggagucugaggauaa

SEQ ID NO: 2557881 - RNA, 19 nt, Homo sapiens
  misc_RNA (1)...(19): siRNA sense strand
acaaaugagccauaagaaa

SEQ ID NO: 2557882 - RNA, 19 nt, Homo sapiens
  misc_RNA (1)...(19): siRNA sense strand
guauaagcgacucgagaaa

SEQ ID NO: 2557883 - RNA, 19 nt, Homo sapiens
  misc_RNA (1)...(19): siRNA sense strand
guguggauguggagaggaa

SEQ ID NO: 2557884 - RNA, 19 nt, Homo sapiens
  misc_RNA (1)...(19): siRNA sense strand
cggagagcauuguggaaau

SEQ ID NO: 2557885 - RNA, 19 nt, Homo sapiens
  misc_RNA (1)...(19): siRNA sense strand
caucaaguuuauuggagaa

SEQ ID NO: 2557886 - RNA, 19 nt, Homo sapiens
  misc_RNA (1)...(19): siRNA sense strand
aaauagagguagaagcaga

SEQ ID NO: 2557887 - RNA, 19 nt, Homo sapiens
  misc_RNA (1)...(19): siRNA sense strand
gguaagaagcaguaugaca

SEQ ID NO: 2557888 - RNA, 19 nt, Homo sapiens
  misc_RNA (1)...(19): siRNA sense strand
gcuaaagaaccaugaugaa

SEQ ID NO: 2557889 - RNA, 19 nt, Homo sapiens
  misc_RNA (1)...(19): siRNA sense strand
agaagaacaagaagagcaa

SEQ ID NO: 2557890 - RNA, 19 nt, Homo sapiens
  misc_RNA (1)...(19): siRNA sense strand
auaaauggaguuagcgaaa

SEQ ID NO: 2557891 - RNA, 19 nt, Homo sapiens
  misc_RNA (1)...(19): siRNA sense strand
gaggaggacgagagcauaa

SEQ ID NO: 2557892 - RNA, 19 nt, Homo sapiens
  misc_RNA (1)...(19): siRNA sense strand
gagaagaagcagaaagaac

SEQ ID NO: 2557893 - RNA, 19 nt, Homo sapiens
  misc_RNA (1)...(19): siRNA sense strand
guaccaaagacauggaaga

SEQ ID NO: 2557894 - RNA, 19 nt, Homo sapiens
  misc_RNA (1)...(19): siRNA sense strand
aggcuaaucuagacgaaau

SEQ ID NO: 2557895 - RNA, 19 nt, Homo sapiens
  misc_RNA (1)...(19): siRNA sense strand
ggaaguaugggcagggaga

SEQ ID NO: 2557896 - RNA, 19 nt, Homo sapiens
  misc_RNA (1)...(19): siRNA sense strand
ggaaauaguaaaacaggaa

SEQ ID NO: 2557897 - RNA, 19 nt, Homo sapiens
  misc_RNA (1)...(19): siRNA sense strand
aagugaaagcuguggaaga

SEQ ID NO: 2557898 - RNA, 19 nt, Homo sapiens
  misc_RNA (1)...(19): siRNA sense strand
aggagaagauguacauaau

SEQ ID NO: 2557899 - RNA, 19 nt, Homo sapiens
  misc_RNA (1)...(19): siRNA sense strand
agaaagaacaagaaggcca

SEQ ID NO: 2557900 - RNA, 19 nt, Homo sapiens
  misc_RNA (1)...(19): siRNA sense strand
agugaaagcuguggaagaa

SEQ ID NO: 2557901 - RNA, 19 nt, Homo sapiens
  misc_RNA (1)...(19): siRNA sense strand
agauaaagcagaugaugau

SEQ ID NO: 2557902 - RNA, 19 nt, Homo sapiens
  misc_RNA (1)...(19): siRNA sense strand
gagaagaagcugagccagu

SEQ ID NO: 2557903 - RNA, 19 nt, Homo sapiens
  misc_RNA (1)...(19): siRNA sense strand
cuacugauacugaagguaa

SEQ ID NO: 2557904 - RNA, 19 nt, Homo sapiens
  misc_RNA (1)...(19): siRNA sense strand
ugacaaaguacuugaaucu

SEQ ID NO: 2557905 - RNA, 19 nt, Homo sapiens
  misc_RNA (1)...(19): siRNA sense strand
ucaagauguuauagaccua

SEQ ID NO: 2557906 - RNA, 19 nt, Homo sapiens
  misc_RNA (1)...(19): siRNA sense strand
agacauaacagaggagauu

SEQ ID NO: 2557907 - RNA, 19 nt, Homo sapiens
  misc_RNA (1)...(19): siRNA sense strand
gagagaagaaagaacaaga

SEQ ID NO: 2557908 - RNA, 19 nt, Homo sapiens
  misc_RNA (1)...(19): siRNA sense strand
agaacaaaauagagguaga

SEQ ID NO: 2557909 - RNA, 19 nt, Homo sapiens
  misc_RNA (1)...(19): siRNA sense strand
uggagaaaauugugaaaga

SEQ ID NO: 2557910 - RNA, 19 nt, Homo sapiens
  misc_RNA (1)...(19): siRNA sense strand
uugacuggguagaggcuaa

SEQ ID NO: 2557911 - RNA, 19 nt, Homo sapiens
  misc_RNA (1)...(19): siRNA sense strand
ggucuugcuaucugaaaua

SEQ ID NO: 2557912 - RNA, 19 nt, Homo sapiens
  misc_RNA (1)...(19): siRNA sense strand
agcaagaggagaagccaaa

SEQ ID NO: 2557913 - RNA, 19 nt, Homo sapiens
  misc_RNA (1)...(19): siRNA sense strand
agaagagaacccagaaaga

SEQ ID NO: 2557914 - RNA, 19 nt, Homo sapiens
  misc_RNA (1)...(19): siRNA sense strand
cgaaauaaaacaagggagu

SEQ ID NO: 2557915 - RNA, 19 nt, Homo sapiens
  misc_RNA (1)...(19): siRNA sense strand
aaggagaagauguacauaa

SEQ ID NO: 2557916 - RNA, 19 nt, Homo sapiens
  misc_RNA (1)...(19): siRNA sense strand
accagaagcaagaggagaa

SEQ ID NO: 2557917 - RNA, 19 nt, Homo sapiens
  misc_RNA (1)...(19): siRNA sense strand
acguaauggugcugagagu

SEQ ID NO: 2557918 - RNA, 19 nt, Homo sapiens
  misc_RNA (1)...(19): siRNA sense strand
cugcaguguaccaggcuaa

SEQ ID NO: 2557919 - RNA, 19 nt, Homo sapiens
  misc_RNA (1)...(19): siRNA sense strand
aauucaggcuccacagaua

SEQ ID NO: 2557920 - RNA, 19 nt, Homo sapiens
  misc_RNA (1)...(19): siRNA sense strand
aagagauguuagaggcaga

SEQ ID NO: 2557921 - RNA, 19 nt, Homo sapiens
  misc_RNA (1)...(19): siRNA sense strand
aagauaaagcagaugauga

SEQ ID NO: 2557922 - RNA, 19 nt, Homo sapiens
  misc_RNA (1)...(19): siRNA sense strand
ggcuaaaauagaagaacaa

SEQ ID NO: 2557923 - RNA, 19 nt, Homo sapiens
  misc_RNA (1)...(19): siRNA sense strand
ggagcaaaggcaagugaga

SEQ ID NO: 2557924 - RNA, 19 nt, Homo sapiens
  misc_RNA (1)...(19): siRNA sense strand
uagaggaggacgagagcau

SEQ ID NO: 2557925 - RNA, 19 nt, Homo sapiens
  misc_RNA (1)...(19): siRNA sense strand
ugggcaaacagaagagauu

SEQ ID NO: 2557926 - RNA, 19 nt, Homo sapiens
  misc_RNA (1)...(19): siRNA sense strand
aagcugagccaguacguaa

SEQ ID NO: 2557927 - RNA, 19 nt, Homo sapiens
  misc_RNA (1)...(19): siRNA sense strand
gaaaaugccuggaagccaa

SEQ ID NO: 2557928 - RNA, 19 nt, Homo sapiens
  misc_RNA (1)...(19): siRNA sense strand
gaucaagggccuaaaacua

SEQ ID NO: 2557929 - RNA, 19 nt, Homo sapiens
  misc_RNA (1)...(19): siRNA sense strand
ccuuagagcuuuaaugacu

SEQ ID NO: 2557930 - RNA, 19 nt, Homo sapiens
  misc_RNA (1)...(19): siRNA sense strand
gauccaaaccagggaggua

SEQ ID NO: 2557931 - RNA, 19 nt, Homo sapiens
  misc_RNA (1)...(19): siRNA sense strand
cagcagugguggagcaaag

SEQ ID NO: 2557932 - RNA, 19 nt, Homo sapiens
  misc_RNA (1)...(19): siRNA sense strand
aaacaagggagucagcaaa

SEQ ID NO: 2557933 - RNA, 19 nt, Homo sapiens
  misc_RNA (1)...(19): siRNA sense strand
cuggagaggaagucgaaau

SEQ ID NO: 2557934 - RNA, 19 nt, Homo sapiens
  misc_RNA (1)...(19): siRNA sense strand
guaccuagacucagauaca

SEQ ID NO: 2557935 - RNA, 19 nt, Homo sapiens
  misc_RNA (1)...(19): siRNA sense strand
agacauggaagaaaccaaa

SEQ ID NO: 2557936 - RNA, 19 nt, Homo sapiens
  misc_RNA (1)...(19): siRNA sense strand
gcagaaagaacuugaggcu

SEQ ID NO: 2557937 - RNA, 19 nt, Homo sapiens
  misc_RNA (1)...(19): siRNA sense strand
ccuccagccaagagagaga

SEQ ID NO: 2557938 - RNA, 19 nt, Homo sapiens
  misc_RNA (1)...(19): siRNA sense strand
ugaaaguacccauggcaga

SEQ ID NO: 2557939 - RNA, 19 nt, Homo sapiens
  misc_RNA (1)...(19): siRNA sense strand
ggagcuuuccauugacaaa

SEQ ID NO: 2557940 - RNA, 19 nt, Homo sapiens
  misc_RNA (1)...(19): siRNA sense strand
ccaaagaagagaacccaga

SEQ ID NO: 2557941 - RNA, 19 nt, Homo sapiens
  misc_RNA (1)...(19): siRNA sense strand
agaaagaacuugaggcugc

SEQ ID NO: 2557942 - RNA, 19 nt, Homo sapiens
  misc_RNA (1)...(19): siRNA sense strand
acaucaaguuuauuggaga

SEQ ID NO: 2557943 - RNA, 19 nt, Homo sapiens
  misc_RNA (1)...(19): siRNA sense strand
ucacaaagaggcuaaaaua

SEQ ID NO: 2557944 - RNA, 19 nt, Homo sapiens
  misc_RNA (1)...(19): siRNA sense strand
gcauuguggaaauaguaaa

SEQ ID NO: 2557945 - RNA, 19 nt, Homo sapiens
  misc_RNA (1)...(19): siRNA sense strand
uugagaagaagcagaaaga

SEQ ID NO: 2557946 - RNA, 19 nt, Homo sapiens
  misc_RNA (1)...(19): siRNA sense strand
cugccgaagagcuguauaa

SEQ ID NO: 2557947 - RNA, 19 nt, Homo sapiens
  misc_RNA (1)...(19): siRNA sense strand
aucugaaacuacugcaaua

SEQ ID NO: 2557948 - RNA, 19 nt, Homo sapiens
  misc_RNA (1)...(19): siRNA sense strand
ggccaagaacagucgggua

SEQ ID NO: 2557949 - RNA, 19 nt, Homo sapiens
  misc_RNA (1)...(19): siRNA sense strand
uuggaagagucaaggguca

SEQ ID NO: 2557950 - RNA, 19 nt, Homo sapiens
  misc_RNA (1)...(19): siRNA sense strand
aguauaaccgcgaaggaga

SEQ ID NO: 2557951 - RNA, 19 nt, Homo sapiens
  misc_RNA (1)...(19): siRNA sense strand
agguguuggugaauguuaa

SEQ ID NO: 2557952 - RNA, 19 nt, Homo sapiens
  misc_RNA (1)...(19): siRNA sense strand
ccaugagaguggagagcuc

SEQ ID NO: 2557953 - RNA, 19 nt, Homo sapiens
  misc_RNA (1)...(19): siRNA sense strand
ccugauggcaagagcuaca

SEQ ID NO: 2557954 - RNA, 19 nt, Homo sapiens
  misc_RNA (1)...(19): siRNA sense strand
uggugaauguuaaggagca

SEQ ID NO: 2557955 - RNA, 19 nt, Homo sapiens
  misc_RNA (1)...(19): siRNA sense strand
ucagaagacuuuccggaca

SEQ ID NO: 2557956 - RNA, 19 nt, Homo sapiens
  misc_RNA (1)...(19): siRNA sense strand
aaguaaaaccagagguaaa

SEQ ID NO: 2557957 - RNA, 19 nt, Homo sapiens
  misc_RNA (1)...(19): siRNA sense strand
ugguuaugauggaggauau

SEQ ID NO: 2557958 - RNA, 19 nt, Homo sapiens
  misc_RNA (1)...(19): siRNA sense strand
uggaagacccagugcggaa

SEQ ID NO: 2557959 - RNA, 19 nt, Homo sapiens
  misc_RNA (1)...(19): siRNA sense strand
agaaaaggcaagaagaaau

SEQ ID NO: 2557960 - RNA, 19 nt, Homo sapiens
  misc_RNA (1)...(19): siRNA sense strand
cagaagaacaauuagcaga

SEQ ID NO: 2557961 - RNA, 19 nt, Homo sapiens
  misc_RNA (1)...(19): siRNA sense strand
agugcuaacaccagaagaa

SEQ ID NO: 2557962 - RNA, 19 nt, Homo sapiens
  misc_RNA (1)...(19): siRNA sense strand
agaaguaaaaccagaggua

SEQ ID NO: 2557963 - RNA, 19 nt, Homo sapiens
  misc_RNA (1)...(19): siRNA sense strand
ccucgaauuagcaaaggaa

SEQ ID NO: 2557964 - RNA, 19 nt, Homo sapiens
  misc_RNA (1)...(19): siRNA sense strand
aggauauguacaagacuau

SEQ ID NO: 2557965 - RNA, 19 nt, Homo sapiens
  misc_RNA (1)...(19): siRNA sense strand
aagaaaaggcaagaagaaa

SEQ ID NO: 2557966 - RNA, 19 nt, Homo sapiens
  misc_RNA (1)...(19): siRNA sense strand
cgucaaggauaacugggau

SEQ ID NO: 2557967 - RNA, 19 nt, Homo sapiens
  misc_RNA (1)...(19): siRNA sense strand
ucgaauuagcaaaggaaac

SEQ ID NO: 2557968 - RNA, 19 nt, Homo sapiens
  misc_RNA (1)...(19): siRNA sense strand
cuaaagaaauuacaggaag

SEQ ID NO: 2557969 - RNA, 19 nt, Homo sapiens
  misc_RNA (1)...(19): siRNA sense strand
agaagaacccgaagaaccu

SEQ ID NO: 2557970 - RNA, 19 nt, Homo sapiens
  misc_RNA (1)...(19): siRNA sense strand
uggaagucuuaguucgaga

SEQ ID NO: 2557971 - RNA, 19 nt, Homo sapiens
  misc_RNA (1)...(19): siRNA sense strand
ggacaagaccacuggccaa

SEQ ID NO: 2557972 - RNA, 19 nt, Homo sapiens
  misc_RNA (1)...(19): siRNA sense strand
ugaacaaacucaagggcca

SEQ ID NO: 2557973 - RNA, 19 nt, Homo sapiens
  misc_RNA (1)...(19): siRNA sense strand
aggagaagcugccgggaga

SEQ ID NO: 2557974 - RNA, 19 nt, Homo sapiens
  misc_RNA (1)...(19): siRNA sense strand
agauagaugaggauggcaa

SEQ ID NO: 2557975 - RNA, 19 nt, Homo sapiens
  misc_RNA (1)...(19): siRNA sense strand
aggaggaagaacuggaaga

SEQ ID NO: 2557976 - RNA, 19 nt, Homo sapiens
  misc_RNA (1)...(19): siRNA sense strand
aggaggucaucaacggaaa

SEQ ID NO: 2557977 - RNA, 19 nt, Homo sapiens
  misc_RNA (1)...(19): siRNA sense strand
aguacaagauagaugagga

SEQ ID NO: 2557978 - RNA, 19 nt, Homo sapiens
  misc_RNA (1)...(19): siRNA sense strand
acgcagaacaagacaggga

SEQ ID NO: 2557979 - RNA, 19 nt, Homo sapiens
  misc_RNA (1)...(19): siRNA sense strand
cuacuggcgagaaggagaa

SEQ ID NO: 2557980 - RNA, 19 nt, Homo sapiens
  misc_RNA (1)...(19): siRNA sense strand
gcccagagccagagcuacu

SEQ ID NO: 2557981 - RNA, 19 nt, Homo sapiens
  misc_RNA (1)...(19): siRNA sense strand
ccagcaaagaggaccugaa

SEQ ID NO: 2557982 - RNA, 19 nt, Homo sapiens
  misc_RNA (1)...(19): siRNA sense strand
ucaucaacggaaacauaaa

SEQ ID NO: 2557983 - RNA, 19 nt, Homo sapiens
  misc_RNA (1)...(19): siRNA sense strand
agggaaaggcaaaggcaaa

SEQ ID NO: 2557984 - RNA, 19 nt, Homo sapiens
  misc_RNA (1)...(19): siRNA sense strand
agaagaaggacaaggaacu

SEQ ID NO: 2557985 - RNA, 19 nt, Homo sapiens
  misc_RNA (1)...(19): siRNA sense strand
uggacagaguggaugaaau

SEQ ID NO: 2557986 - RNA, 19 nt, Homo sapiens
  misc_RNA (1)...(19): siRNA sense strand
gggucugguuguagaagau

SEQ ID NO: 2557987 - RNA, 19 nt, Homo sapiens
  misc_RNA (1)...(19): siRNA sense strand
ccuugugguauuaaagaua

SEQ ID NO: 2557988 - RNA, 19 nt, Homo sapiens
  misc_RNA (1)...(19): siRNA sense strand
aacacauacaugaggaaua

SEQ ID NO: 2557989 - RNA, 19 nt, Homo sapiens
  misc_RNA (1)...(19): siRNA sense strand
uuaucaagaagaaggacaa

SEQ ID NO: 2557990 - RNA, 19 nt, Homo sapiens
  misc_RNA (1)...(19): siRNA sense strand
acacagaggaugaugcuga

SEQ ID NO: 2557991 - RNA, 19 nt, Homo sapiens
  misc_RNA (1)...(19): siRNA sense strand
ccagcaugccauugaagaa

SEQ ID NO: 2557992 - RNA, 19 nt, Homo sapiens
  misc_RNA (1)...(19): siRNA sense strand
gagaauaugcagcgccaga

SEQ ID NO: 2557993 - RNA, 19 nt, Homo sapiens
  misc_RNA (1)...(19): siRNA sense strand
ccgugaagcaagugcagau

SEQ ID NO: 2557994 - RNA, 19 nt, Homo sapiens
  misc_RNA (1)...(19): siRNA sense strand
cagggaaaggcaaaggcaa

SEQ ID NO: 2557995 - RNA, 19 nt, Homo sapiens
  misc_RNA (1)...(19): siRNA sense strand
gcugauggacagaguggau

SEQ ID NO: 2557996 - RNA, 19 nt, Homo sapiens
  misc_RNA (1)...(19): siRNA sense strand
gcgcagcagggaaaggcaa

SEQ ID NO: 2557997 - RNA, 19 nt, Homo sapiens
  misc_RNA (1)...(19): siRNA sense strand
cuacaguugcugauggaca

SEQ ID NO: 2557998 - RNA, 19 nt, Homo sapiens
  misc_RNA (1)...(19): siRNA sense strand
aggagaauaugcagcgcca

SEQ ID NO: 2557999 - RNA, 19 nt, Homo sapiens
  misc_RNA (1)...(19): siRNA sense strand
cacuaaaggcauacagacu

SEQ ID NO: 2558000 - RNA, 19 nt, Homo sapiens
  misc_RNA (1)...(19): siRNA sense strand
aguacauguuugaagaagu

SEQ ID NO: 2558001 - RNA, 19 nt, Homo sapiens
  misc_RNA (1)...(19): siRNA sense strand
gcagcaaucauuuggggaa

SEQ ID NO: 2558002 - RNA, 19 nt, Homo sapiens
  misc_RNA (1)...(19): siRNA sense strand
augaaaugagccaagauau

SEQ ID NO: 2558003 - RNA, 19 nt, Homo sapiens
  misc_RNA (1)...(19): siRNA sense strand
acugauggaaguuuguaaa

SEQ ID NO: 2558004 - RNA, 19 nt, Homo sapiens
  misc_RNA (1)...(19): siRNA sense strand
acaacacauacaugaggaa

SEQ ID NO: 2558005 - RNA, 19 nt, Homo sapiens
  misc_RNA (1)...(19): siRNA sense strand
agacaauugaggagagaaa

SEQ ID NO: 2558006 - RNA, 19 nt, Homo sapiens
  misc_RNA (1)...(19): siRNA sense strand
ugaaaauggcagaggaaaa

SEQ ID NO: 2558007 - RNA, 19 nt, Homo sapiens
  misc_RNA (1)...(19): siRNA sense strand
gaauauucagcgugagaaa

SEQ ID NO: 2558008 - RNA, 19 nt, Homo sapiens
  misc_RNA (1)...(19): siRNA sense strand
ggauggagagagaaagaaa

SEQ ID NO: 2558009 - RNA, 19 nt, Homo sapiens
  misc_RNA (1)...(19): siRNA sense strand
agaaagaagaauuggaaca

SEQ ID NO: 2558010 - RNA, 19 nt, Homo sapiens
  misc_RNA (1)...(19): siRNA sense strand
cagaagaacaaaugcuaaa

SEQ ID NO: 2558011 - RNA, 19 nt, Homo sapiens
  misc_RNA (1)...(19): siRNA sense strand
cgugaaugggacagagaaa

SEQ ID NO: 2558012 - RNA, 19 nt, Homo sapiens
  misc_RNA (1)...(19): siRNA sense strand
ucauauacugcaagagaaa

SEQ ID NO: 2558013 - RNA, 19 nt, Homo sapiens
  misc_RNA (1)...(19): siRNA sense strand
agaaagggacagagagaga

SEQ ID NO: 2558014 - RNA, 19 nt, Homo sapiens
  misc_RNA (1)...(19): siRNA sense strand
cggcgugaucuaagagaaa

SEQ ID NO: 2558015 - RNA, 19 nt, Homo sapiens
  misc_RNA (1)...(19): siRNA sense strand
ggugaagaaauuagaagaa

SEQ ID NO: 2558016 - RNA, 19 nt, Homo sapiens
  misc_RNA (1)...(19): siRNA sense strand
gagcaaaacgcgaggaaga

SEQ ID NO: 2558017 - RNA, 19 nt, Homo sapiens
  misc_RNA (1)...(19): siRNA sense strand
gcguagagaggaagagaga

SEQ ID NO: 2558018 - RNA, 19 nt, Homo sapiens
  misc_RNA (1)...(19): siRNA sense strand
agaagaaguggaaaggaaa

SEQ ID NO: 2558019 - RNA, 19 nt, Homo sapiens
  misc_RNA (1)...(19): siRNA sense strand
agaaagggacagagauaau

SEQ ID NO: 2558020 - RNA, 19 nt, Homo sapiens
  misc_RNA (1)...(19): siRNA sense strand
agagaaagggacagagaga

SEQ ID NO: 2558021 - RNA, 19 nt, Homo sapiens
  misc_RNA (1)...(19): siRNA sense strand
ggaagagcuacgagaguau

SEQ ID NO: 2558022 - RNA, 19 nt, Homo sapiens
  misc_RNA (1)...(19): siRNA sense strand
ggaugaagguggcuggaga
